United States Patent Application Publication US 2005/0244851 A1 - sequence listing, part 71

SEQ ID NO: 2761832 - DNA, 25 bp, Homo sapien
gactctatctgttgtgagttgatgg

SEQ ID NO: 2761833 - DNA, 25 bp, Homo sapien
tctgttgtgagttgatggtcgctcc

SEQ ID NO: 2761834 - DNA, 25 bp, Homo sapien
gttgatggtcgctccctttgccctc

SEQ ID NO: 2761835 - DNA, 25 bp, Homo sapien
tacatagactctatctgttgtgagt

SEQ ID NO: 2761836 - DNA, 25 bp, Homo sapien
gaagtattcatagccccagatctgt

SEQ ID NO: 2761837 - DNA, 25 bp, Homo sapien
catgaagtattcatagccccagatc

SEQ ID NO: 2761838 - DNA, 25 bp, Homo sapien
ccttctcccatgaagtattcatagc

SEQ ID NO: 2761839 - DNA, 25 bp, Homo sapien
tcccatgaagtattcatagccccag

SEQ ID NO: 2761840 - DNA, 25 bp, Homo sapien
ctatttatgagaagtccacttacca

SEQ ID NO: 2761841 - DNA, 25 bp, Homo sapien
tatttatgagaagtccacttaccat

SEQ ID NO: 2761842 - DNA, 25 bp, Homo sapien
cagctgctgtggtctttcgaaaagc

SEQ ID NO: 2761843 - DNA, 25 bp, Homo sapien
tatgattaccttgtcaattactaca

SEQ ID NO: 2761844 - DNA, 25 bp, Homo sapien
gtcaattactacaattgcaatgcaa

SEQ ID NO: 2761845 - DNA, 25 bp, Homo sapien
cagcccactatgattaccttgtcaa

SEQ ID NO: 2761846 - DNA, 25 bp, Homo sapien
aaacgctctcacagcccactatgat

SEQ ID NO: 2761847 - DNA, 25 bp, Homo sapien
ggttttaatagtggcagtgtcccca

SEQ ID NO: 2761848 - DNA, 25 bp, Homo sapien
gactcctgaggaggcataatagtgt

SEQ ID NO: 2761849 - DNA, 25 bp, Homo sapien
tctccacgtgttgagggatccctct

SEQ ID NO: 2761850 - DNA, 25 bp, Homo sapien
caatgtgttagtgagggagttccca

SEQ ID NO: 2761851 - DNA, 25 bp, Homo sapien
ggagccttgagtgttcaaccctact

SEQ ID NO: 2761852 - DNA, 25 bp, Homo sapien
gctgtgccaagcaaaatcatgaggg

SEQ ID NO: 2761853 - DNA, 25 bp, Homo sapien
tgcagattgggctgtgccaagcaaa

SEQ ID NO: 2761854 - DNA, 25 bp, Homo sapien
tcatgagggcatggtcccctggagc

SEQ ID NO: 2761855 - DNA, 25 bp, Homo sapien
ttcatgactcctcttcataatcgtc

SEQ ID NO: 2761856 - DNA, 25 bp, Homo sapien
cacttttcagtctctagcgtcgtct

SEQ ID NO: 2761857 - DNA, 25 bp, Homo sapien
ttcataatcgtcctcagtcttctgt

SEQ ID NO: 2761858 - DNA, 25 bp, Homo sapien
ctagcgtcgtctaaatctaatgtga

SEQ ID NO: 2761859 - DNA, 25 bp, Homo sapien
cttcatgtgatgagatgactttgtg

SEQ ID NO: 2761860 - DNA, 25 bp, Homo sapien
tttcaacctttcttattgatctgtc

SEQ ID NO: 2761861 - DNA, 25 bp, Homo sapien
catgtgatgagatgactttgtgtat

SEQ ID NO: 2761862 - DNA, 25 bp, Homo sapien
gtattttcaacctttcttattgatc

SEQ ID NO: 2761863 - DNA, 25 bp, Homo sapien
ctataaggccaacaatgcatcaaac

SEQ ID NO: 2761864 - DNA, 25 bp, Homo sapien
ccaaataaggtgaacatctggatct

SEQ ID NO: 2761865 - DNA, 25 bp, Homo sapien
tggatctcctgaagcaaatggcgag

SEQ ID NO: 2761866 - DNA, 25 bp, Homo sapien
tggtacacatccaaataaggtgaac

SEQ ID NO: 2761867 - DNA, 25 bp, Homo sapien
aaatggcgagttgcgtgcttggccc

SEQ ID NO: 2761868 - DNA, 25 bp, Homo sapien
ggatatgctcttactctctgaaaac

SEQ ID NO: 2761869 - DNA, 25 bp, Homo sapien
taagttacagctttgtaggtcacct

SEQ ID NO: 2761870 - DNA, 25 bp, Homo sapien
tataagagtcttacagtggagagga

SEQ ID NO: 2761871 - DNA, 25 bp, Homo sapien
tttgcagcagatttatataagagtc

SEQ ID NO: 2761872 - DNA, 25 bp, Homo sapien
tccctcttcaccatagtatgctgga

SEQ ID NO: 2761873 - DNA, 25 bp, Homo sapien
tcttcaccatagtatgctggatgtg

SEQ ID NO: 2761874 - DNA, 25 bp, Homo sapien
gatgtgtggggcagatacattttct

SEQ ID NO: 2761875 - DNA, 25 bp, Homo sapien
ttcaccatagtatgctggatgtgtg

SEQ ID NO: 2761876 - DNA, 25 bp, Homo sapien
gtaggaggagccccaggtgtccaag

SEQ ID NO: 2761877 - DNA, 25 bp, Homo sapien
ggtaggaggagccccaggtgtccaa

SEQ ID NO: 2761878 - DNA, 25 bp, Homo sapien
aggaggagccccaggtgtccaagtg

SEQ ID NO: 2761879 - DNA, 25 bp, Homo sapien
taggaggagccccaggtgtccaagt

SEQ ID NO: 2761880 - DNA, 25 bp, Homo sapien
cttggagcaccttatcagaattgaa

SEQ ID NO: 2761881 - DNA, 25 bp, Homo sapien
tcttggagcaccttatcagaattga

SEQ ID NO: 2761882 - DNA, 25 bp, Homo sapien
ggagcaccttatcagaattgaaaat

SEQ ID NO: 2761883 - DNA, 25 bp, Homo sapien
tttcttggagcaccttatcagaatt

SEQ ID NO: 2761884 - DNA, 25 bp, Homo sapien
caactgacccaagcataatggtgaa

SEQ ID NO: 2761885 - DNA, 25 bp, Homo sapien
ctgacccaagcataatggtgaaggg

SEQ ID NO: 2761886 - DNA, 25 bp, Homo sapien
tcttctttgtgccactcggaaatca

SEQ ID NO: 2761887 - DNA, 25 bp, Homo sapien
ctttgtgccactcggaaatcaactg

SEQ ID NO: 2761888 - DNA, 25 bp, Homo sapien
gctaaataagtagcagtgttcactg

SEQ ID NO: 2761889 - DNA, 25 bp, Homo sapien
tagcagtgttcactgacagctttct

SEQ ID NO: 2761890 - DNA, 25 bp, Homo sapien
ttggttggataacatgctctgcctc

SEQ ID NO: 2761891 - DNA, 25 bp, Homo sapien
cctttaaaggcaattgtgctaaata

SEQ ID NO: 2761892 - DNA, 25 bp, Homo sapien
gcagatatagcgaattaactttcct

SEQ ID NO: 2761893 - DNA, 25 bp, Homo sapien
atttttctctaatggtcacattcag

SEQ ID NO: 2761894 - DNA, 25 bp, Homo sapien
gtttctgcagatatagcgaattaac

SEQ ID NO: 2761895 - DNA, 25 bp, Homo sapien
caatttttctctaatggtcacattc

SEQ ID NO: 2761896 - DNA, 25 bp, Homo sapien
ctttgagtccgtcttctgacttgaa

SEQ ID NO: 2761897 - DNA, 25 bp, Homo sapien
agttacttcccactgagcactcttt

SEQ ID NO: 2761898 - DNA, 25 bp, Homo sapien
tctggggaggtacagttacttccca

SEQ ID NO: 2761899 - DNA, 25 bp, Homo sapien
agttcgtaagttcatcagctctggg

SEQ ID NO: 2761900 - DNA, 25 bp, Homo sapien
ctgtggatccaggtaatctttgtct

SEQ ID NO: 2761901 - DNA, 25 bp, Homo sapien
atctttgtctgcaaaactcaagttg

SEQ ID NO: 2761902 - DNA, 25 bp, Homo sapien
tttgtctgcaaaactcaagttgagc

SEQ ID NO: 2761903 - DNA, 25 bp, Homo sapien
ctttgtctgcaaaactcaagttgag

SEQ ID NO: 2761904 - DNA, 25 bp, Homo sapien
tttctttctcagtgaaatttgtttc

SEQ ID NO: 2761905 - DNA, 25 bp, Homo sapien
acaaacttaatgttttctttctcag

SEQ ID NO: 2761906 - DNA, 25 bp, Homo sapien
tctttctcagtgaaatttgtttcct

SEQ ID NO: 2761907 - DNA, 25 bp, Homo sapien
atgttttctttctcagtgaaatttg

SEQ ID NO: 2761908 - DNA, 25 bp, Homo sapien
ccatgggtagtggtggtttatattc

SEQ ID NO: 2761909 - DNA, 25 bp, Homo sapien
gatcttcaagtattctccggccttg

SEQ ID NO: 2761910 - DNA, 25 bp, Homo sapien
tgaattcagcatataccatgggtag

SEQ ID NO: 2761911 - DNA, 25 bp, Homo sapien
ttttccattggatcaggaatacaac

SEQ ID NO: 2761912 - DNA, 25 bp, Homo sapien
taaacccacccagttgtcagattgc

SEQ ID NO: 2761913 - DNA, 25 bp, Homo sapien
aaagaatcaggcaaaccacagtagc

SEQ ID NO: 2761914 - DNA, 25 bp, Homo sapien
gccatcccatggtgaatattctgac

SEQ ID NO: 2761915 - DNA, 25 bp, Homo sapien
ccacagtagcattcagatgtaggcg

SEQ ID NO: 2761916 - DNA, 25 bp, Homo sapien
ggactgtggaaattccacttgcaat

SEQ ID NO: 2761917 - DNA, 25 bp, Homo sapien
aaagctgtcaatctgttctctatct

SEQ ID NO: 2761918 - DNA, 25 bp, Homo sapien
tttctgatattggatagtaacctct

SEQ ID NO: 2761919 - DNA, 25 bp, Homo sapien
ggatagtaacctcttcgttccatat

SEQ ID NO: 2761920 - DNA, 25 bp, Homo sapien
ctggcgggcgttgaactggtcgagc

SEQ ID NO: 2761921 - DNA, 25 bp, Homo sapien
aactggtcgagcactgacttgttct

SEQ ID NO: 2761922 - DNA, 25 bp, Homo sapien
ggtcttcctgcagtcatacttgtca

SEQ ID NO: 2761923 - DNA, 25 bp, Homo sapien
ggcgttgaactggtcgagcactgac

SEQ ID NO: 2761924 - DNA, 25 bp, Homo sapien
ccaaccatcttcataacaagatttg

SEQ ID NO: 2761925 - DNA, 25 bp, Homo sapien
catcttcataacaagatttgtttac

SEQ ID NO: 2761926 - DNA, 25 bp, Homo sapien
ccatcttcataacaagatttgttta

SEQ ID NO: 2761927 - DNA, 25 bp, Homo sapien
aaccatcttcataacaagatttgtt

SEQ ID NO: 2761928 - DNA, 25 bp, Homo sapien
agtcttggattttctgcaagagctt

SEQ ID NO: 2761929 - DNA, 25 bp, Homo sapien
gcaagagcttcattaatttcggtta

SEQ ID NO: 2761930 - DNA, 25 bp, Homo sapien
aagtcttggattttctgcaagagct

SEQ ID NO: 2761931 - DNA, 25 bp, Homo sapien
agagcttcattaatttcggttactt

SEQ ID NO: 2761932 - DNA, 25 bp, Homo sapien
tttgaaggtttgatgagtcttattg

SEQ ID NO: 2761933 - DNA, 25 bp, Homo sapien
tgttttgaaggtttgatgagtctta

SEQ ID NO: 2761934 - DNA, 25 bp, Homo sapien
atgttttgaaggtttgatgagtctt

SEQ ID NO: 2761935 - DNA, 25 bp, Homo sapien
ttgaaggtttgatgagtcttattgc

SEQ ID NO: 2761936 - DNA, 25 bp, Homo sapien
gaagaaagcttggttgagtcatcag

SEQ ID NO: 2761937 - DNA, 25 bp, Homo sapien
gccagaagaaagcttggttgagtca

SEQ ID NO: 2761938 - DNA, 25 bp, Homo sapien
gttgccagaagaaagcttggttgag

SEQ ID NO: 2761939 - DNA, 25 bp, Homo sapien
gaaagcttggttgagtcatcaggaa

SEQ ID NO: 2761940 - DNA, 25 bp, Homo sapien
ctgaatttgtgaaatcgaatatatg

SEQ ID NO: 2761941 - DNA, 25 bp, Homo sapien
aaaagccattgatactgaatttgtg

SEQ ID NO: 2761942 - DNA, 25 bp, Homo sapien
aattgccagtagtaaaagccattga

SEQ ID NO: 2761943 - DNA, 25 bp, Homo sapien
tatcatgatatccatgaccaattgc

SEQ ID NO: 2761944 - DNA, 25 bp, Homo sapien
gatgttgattggctgtagttacagc

SEQ ID NO: 2761945 - DNA, 25 bp, Homo sapien
gctgtagttacagcctgagtatccg

SEQ ID NO: 2761946 - DNA, 25 bp, Homo sapien
gattggctgtagttacagcctgagt

SEQ ID NO: 2761947 - DNA, 25 bp, Homo sapien
tacagcctgagtatccgggcttttg

SEQ ID NO: 2761948 - DNA, 25 bp, Homo sapien
ccacgcgttttgtaacaatgctcag

SEQ ID NO: 2761949 - DNA, 25 bp, Homo sapien
taggtttggagacctgatagggcca

SEQ ID NO: 2761950 - DNA, 25 bp, Homo sapien
gatttgttgcataggtttggagacc

SEQ ID NO: 2761951 - DNA, 25 bp, Homo sapien
caatgctcagatttgttgcataggt

SEQ ID NO: 2761952 - DNA, 25 bp, Homo sapien
taacatatagccaggtgggaagtcc

SEQ ID NO: 2761953 - DNA, 25 bp, Homo sapien
caccatctggagtgctgttcattcc

SEQ ID NO: 2761954 - DNA, 25 bp, Homo sapien
caaatccaattgtctgtaagtagca

SEQ ID NO: 2761955 - DNA, 25 bp, Homo sapien
gacagcctgggtaagtttatacatc

SEQ ID NO: 2761956 - DNA, 25 bp, Homo sapien
tgtttgtaaaaccgcttatgattta

SEQ ID NO: 2761957 - DNA, 25 bp, Homo sapien
tcactgataaataccaccacagagg

SEQ ID NO: 2761958 - DNA, 25 bp, Homo sapien
ggcttcagtaccaaggacaaggtct

SEQ ID NO: 2761959 - DNA, 25 bp, Homo sapien
ccatcaaaaaggcagtgggaccaag

SEQ ID NO: 2761960 - DNA, 25 bp, Homo sapien
tacctccatgaagtagtgatacact

SEQ ID NO: 2761961 - DNA, 25 bp, Homo sapien
ttccccaaccagtccacaagaatga

SEQ ID NO: 2761962 - DNA, 25 bp, Homo sapien
ccaaccagtccacaagaatgaccct

SEQ ID NO: 2761963 - DNA, 25 bp, Homo sapien
cttccccaaccagtccacaagaatg

SEQ ID NO: 2761964 - DNA, 25 bp, Homo sapien
accagtccacaagaatgaccctcat

SEQ ID NO: 2761965 - DNA, 25 bp, Homo sapien
gttgaaaaatggatcactaaggtcc

SEQ ID NO: 2761966 - DNA, 25 bp, Homo sapien
tccttggtatatattgagttgaaaa

SEQ ID NO: 2761967 - DNA, 25 bp, Homo sapien
gaagcacattcgcatgcactgaacg

SEQ ID NO: 2761968 - DNA, 25 bp, Homo sapien
ttgtcaatatcttccagtggagtca

SEQ ID NO: 2761969 - DNA, 25 bp, Homo sapien
cagaactccaagtagtgcacctggt

SEQ ID NO: 2761970 - DNA, 25 bp, Homo sapien
aaatattcctagtggacagaactcc

SEQ ID NO: 2761971 - DNA, 25 bp, Homo sapien
gcagcactacagctccattgtagga

SEQ ID NO: 2761972 - DNA, 25 bp, Homo sapien
cattgtaggacatccctaaaggaca

SEQ ID NO: 2761973 - DNA, 25 bp, Homo sapien
tagaaatcaagggttggaagtggaa

SEQ ID NO: 2761974 - DNA, 25 bp, Homo sapien
ggagacataacaacgattccattaa

SEQ ID NO: 2761975 - DNA, 25 bp, Homo sapien
cctttaagtcaagagactaagaatc

SEQ ID NO: 2761976 - DNA, 25 bp, Homo sapien
agtcaagagactaagaatcccagca

SEQ ID NO: 2761977 - DNA, 25 bp, Homo sapien
caactgtgtcctctgctaaacacat

SEQ ID NO: 2761978 - DNA, 25 bp, Homo sapien
tgaacaatgaacaactgtgtcctct

SEQ ID NO: 2761979 - DNA, 25 bp, Homo sapien
ccctctaagaggacatcaaaggcct

SEQ ID NO: 2761980 - DNA, 25 bp, Homo sapien
ggcctgcttcccaaaacttgtttca

SEQ ID NO: 2761981 - DNA, 25 bp, Homo sapien
cacatgccgttcagctttaagtttt

SEQ ID NO: 2761982 - DNA, 25 bp, Homo sapien
catggtttcacagcagaaccgaaag

SEQ ID NO: 2761983 - DNA, 25 bp, Homo sapien
cagcagaaccgaaagtcagttcaca

SEQ ID NO: 2761984 - DNA, 25 bp, Homo sapien
atacacatgccgttcagctttaagt

SEQ ID NO: 2761985 - DNA, 25 bp, Homo sapien
atacagtgagttccattgactcttg

SEQ ID NO: 2761986 - DNA, 25 bp, Homo sapien
cagtgagttccattgactcttgtct

SEQ ID NO: 2761987 - DNA, 25 bp, Homo sapien
tacagtgagttccattgactcttgt

SEQ ID NO: 2761988 - DNA, 25 bp, Homo sapien
gtgagttccattgactcttgtcttc

SEQ ID NO: 2761989 - DNA, 25 bp, Homo sapien
ggtccatctggctcctgaatgcatt

SEQ ID NO: 2761990 - DNA, 25 bp, Homo sapien
tccttacaaagactaccatagggca

SEQ ID NO: 2761991 - DNA, 25 bp, Homo sapien
tcaatcagagatctacagcttgtag

SEQ ID NO: 2761992 - DNA, 25 bp, Homo sapien
ccatagggcagtcatttcacagatc

SEQ ID NO: 2761993 - DNA, 25 bp, Homo sapien
taaatatggcagtaatagtcattcc

SEQ ID NO: 2761994 - DNA, 25 bp, Homo sapien
cttccgagattgttaggcaaagagg

SEQ ID NO: 2761995 - DNA, 25 bp, Homo sapien
gaagagaatgcaggccactcaatct

SEQ ID NO: 2761996 - DNA, 25 bp, Homo sapien
tattaatttacaaagcggttgcaca

SEQ ID NO: 2761997 - DNA, 25 bp, Homo sapien
tacgttgccagcgaatcatatggag

SEQ ID NO: 2761998 - DNA, 25 bp, Homo sapien
tagtttcaggcattacatcccgtct

SEQ ID NO: 2761999 - DNA, 25 bp, Homo sapien
tgtaggtcacaatgttgtcccggac

SEQ ID NO: 2762000 - DNA, 25 bp, Homo sapien
ttccaaagaactgagcgaatctgct

SEQ ID NO: 2762001 - DNA, 25 bp, Homo sapien
agagctcccgtgctcaggccggctg

SEQ ID NO: 2762002 - DNA, 25 bp, Homo sapien
gtttccttgattatcgcaggcacac

SEQ ID NO: 2762003 - DNA, 25 bp, Homo sapien
ggacacagagtagaatcgcaacgag

SEQ ID NO: 2762004 - DNA, 25 bp, Homo sapien
gcttctgcggtgcaggattgcatgt

SEQ ID NO: 2762005 - DNA, 25 bp, Homo sapien
gtaggtgctcattttgttgcgactg

SEQ ID NO: 2762006 - DNA, 25 bp, Homo sapien
cagtgctgctttgaattggataatc

SEQ ID NO: 2762007 - DNA, 25 bp, Homo sapien
ccatctttccgagtcatgattcctg

SEQ ID NO: 2762008 - DNA, 25 bp, Homo sapien
gattaaaatcggcaataagtaggtg

SEQ ID NO: 2762009 - DNA, 25 bp, Homo sapien
tgagagtaaattctggcactggttc

SEQ ID NO: 2762010 - DNA, 25 bp, Homo sapien
aatttgtgacctcggggagggtcat

SEQ ID NO: 2762011 - DNA, 25 bp, Homo sapien
tattatctacaatggtgaaattcgg

SEQ ID NO: 2762012 - DNA, 25 bp, Homo sapien
gggagggtcatccttatccatgaca

SEQ ID NO: 2762013 - DNA, 25 bp, Homo sapien
atatctagaattctgatgaagacag

SEQ ID NO: 2762014 - DNA, 25 bp, Homo sapien
ataatacatggcaaattccggagca

SEQ ID NO: 2762015 - DNA, 25 bp, Homo sapien
caaattccggagcatggtcatttat

SEQ ID NO: 2762016 - DNA, 25 bp, Homo sapien
ggtcatttatatctagaattctgat

SEQ ID NO: 2762017 - DNA, 25 bp, Homo sapien
tgattcccggtcaagggctttcaaa

SEQ ID NO: 2762018 - DNA, 25 bp, Homo sapien
gttatgccaaggagatgattcccgg

SEQ ID NO: 2762019 - DNA, 25 bp, Homo sapien
agtgaataccaaaaatacggtccat

SEQ ID NO: 2762020 - DNA, 25 bp, Homo sapien
ggctgtaacagtgatgttatgccaa

SEQ ID NO: 2762021 - DNA, 25 bp, Homo sapien
tgaaaggtcccaggtgtaagaatcg

SEQ ID NO: 2762022 - DNA, 25 bp, Homo sapien
cagggtgagtgttacttgcatccac

SEQ ID NO: 2762023 - DNA, 25 bp, Homo sapien
catctggatcgtatgctgtaacctg

SEQ ID NO: 2762024 - DNA, 25 bp, Homo sapien
tgtaacctgtccaatgatactgccc

SEQ ID NO: 2762025 - DNA, 25 bp, Homo sapien
gagttccaagaggtacagactcagg

SEQ ID NO: 2762026 - DNA, 25 bp, Homo sapien
tccttgtcagtgatgacatcgaaca

SEQ ID NO: 2762027 - DNA, 25 bp, Homo sapien
agcaatgctatactccatttctgca

SEQ ID NO: 2762028 - DNA, 25 bp, Homo sapien
tttcccccacgtcagggtcattggc

SEQ ID NO: 2762029 - DNA, 25 bp, Homo sapien
catgtctttggcctgtataacaacc

SEQ ID NO: 2762030 - DNA, 25 bp, Homo sapien
taacaacctggtactgctctctatt

SEQ ID NO: 2762031 - DNA, 25 bp, Homo sapien
tggcctgtataacaacctggtactg

SEQ ID NO: 2762032 - DNA, 25 bp, Homo sapien
aaatcgaggagggttgttgttgaca

SEQ ID NO: 2762033 - DNA, 25 bp, Homo sapien
tggctgtccttgcaatatgctatag

SEQ ID NO: 2762034 - DNA, 25 bp, Homo sapien
ctgggtccactgaaaaatatggctg

SEQ ID NO: 2762035 - DNA, 25 bp, Homo sapien
tatgctatagaccactttggcacta

SEQ ID NO: 2762036 - DNA, 25 bp, Homo sapien
ccatagttggcgtcatctgcatctg

SEQ ID NO: 2762037 - DNA, 25 bp, Homo sapien
cttggcacgaagaatgtacagagat

SEQ ID NO: 2762038 - DNA, 25 bp, Homo sapien
tataacaaatagactgccagcccca

SEQ ID NO: 2762039 - DNA, 25 bp, Homo sapien
tctttgcagcatgaatgtctcctgt

SEQ ID NO: 2762040 - DNA, 25 bp, Homo sapien
ttttctgtctatagccttggcacga

SEQ ID NO: 2762041 - DNA, 25 bp, Homo sapien
ctttagagaggtagaaaagaagagt

SEQ ID NO: 2762042 - DNA, 25 bp, Homo sapien
ttttcctctaactaagtatttgtca

SEQ ID NO: 2762043 - DNA, 25 bp, Homo sapien
tagatatcacgactaatcccatgaa

SEQ ID NO: 2762044 - DNA, 25 bp, Homo sapien
tcaatgaaatcgacaatgagagatc

SEQ ID NO: 2762045 - DNA, 25 bp, Homo sapien
taaaatggataaaactctagccagg

SEQ ID NO: 2762046 - DNA, 25 bp, Homo sapien
gagagaagacacattactactatta

SEQ ID NO: 2762047 - DNA, 25 bp, Homo sapien
ttgcatgactaatatccaatggcta

SEQ ID NO: 2762048 - DNA, 25 bp, Homo sapien
ctgaaccaattgcatgactaatatc

SEQ ID NO: 2762049 - DNA, 25 bp, Homo sapien
caattgcatgactaatatccaatgg

SEQ ID NO: 2762050 - DNA, 25 bp, Homo sapien
gaaccaattgcatgactaatatcca

SEQ ID NO: 2762051 - DNA, 25 bp, Homo sapien
gaatatcccagattccttcctgatt

SEQ ID NO: 2762052 - DNA, 25 bp, Homo sapien
aatatcccagattccttcctgattc

SEQ ID NO: 2762053 - DNA, 25 bp, Homo sapien
agtaaggtggcccttattaccagat

SEQ ID NO: 2762054 - DNA, 25 bp, Homo sapien
gggcgattgatatagctgctgagtt

SEQ ID NO: 2762055 - DNA, 25 bp, Homo sapien
tattaccagatttgtgggcgattga

SEQ ID NO: 2762056 - DNA, 25 bp, Homo sapien
atttgtgggcgattgatatagctgc

SEQ ID NO: 2762057 - DNA, 25 bp, Homo sapien
ttttttccctgatatcaatgttcat

SEQ ID NO: 2762058 - DNA, 25 bp, Homo sapien
cttgtcttattgaaaattgtcatca

SEQ ID NO: 2762059 - DNA, 25 bp, Homo sapien
gatatcaatgttcattaattctgtt

SEQ ID NO: 2762060 - DNA, 25 bp, Homo sapien
tcatcaaagatcttagatgttcatt

SEQ ID NO: 2762061 - DNA, 25 bp, Homo sapien
tggtgaatacgacaggccttttctt

SEQ ID NO: 2762062 - DNA, 25 bp, Homo sapien
tcaatggatcctggaagactaggtt

SEQ ID NO: 2762063 - DNA, 25 bp, Homo sapien
tcctggtccgtggtgaatacgacag

SEQ ID NO: 2762064 - DNA, 25 bp, Homo sapien
taggttgaggtctacccagggagac

SEQ ID NO: 2762065 - DNA, 25 bp, Homo sapien
cttgcctacatattgtgtgtcagta

SEQ ID NO: 2762066 - DNA, 25 bp, Homo sapien
ttgcctacatattgtgtgtcagtac

SEQ ID NO: 2762067 - DNA, 25 bp, Homo sapien
ctgtgtactcttccaataagaagaa

SEQ ID NO: 2762068 - DNA, 25 bp, Homo sapien
ctcttccaataagaagaactgattc

SEQ ID NO: 2762069 - DNA, 25 bp, Homo sapien
ggtgcgacgtagcattttaccgtca

SEQ ID NO: 2762070 - DNA, 25 bp, Homo sapien
attccacatccagccacgcttggtg

SEQ ID NO: 2762071 - DNA, 25 bp, Homo sapien
tggtgtcaactgtatggaacatata

SEQ ID NO: 2762072 - DNA, 25 bp, Homo sapien
tcaactgtatggaacatataggtcc

SEQ ID NO: 2762073 - DNA, 25 bp, Homo sapien
ctgtatggaacatataggtccagat

SEQ ID NO: 2762074 - DNA, 25 bp, Homo sapien
ggatggtgtcaactgtatggaacat

SEQ ID NO: 2762075 - DNA, 25 bp, Homo sapien
ttcagtgggttgtcaaattcaatgt

SEQ ID NO: 2762076 - DNA, 25 bp, Homo sapien
acttcagtgggttgtcaaattcaat

SEQ ID NO: 2762077 - DNA, 25 bp, Homo sapien
tatctgcaacttcagtgggttgtca

SEQ ID NO: 2762078 - DNA, 25 bp, Homo sapien
tctgcaacttcagtgggttgtcaaa

SEQ ID NO: 2762079 - DNA, 25 bp, Homo sapien
tgtgtcttgcaatacttagcaccat

SEQ ID NO: 2762080 - DNA, 25 bp, Homo sapien
aggattgtgtcttgcaatacttagc

SEQ ID NO: 2762081 - DNA, 25 bp, Homo sapien
gattgtgtcttgcaatacttagcac

SEQ ID NO: 2762082 - DNA, 25 bp, Homo sapien
ttaggattgtgtcttgcaatactta

SEQ ID NO: 2762083 - DNA, 25 bp, Homo sapien
caaatctgccatgccttgcttgatg

SEQ ID NO: 2762084 - DNA, 25 bp, Homo sapien
tcccaggcttcagtacagtgagaaa

SEQ ID NO: 2762085 - DNA, 25 bp, Homo sapien
tgcttgatgttagacttcccaggct

SEQ ID NO: 2762086 - DNA, 25 bp, Homo sapien
ccagaagtgggttgctactataaca

SEQ ID NO: 2762087 - DNA, 25 bp, Homo sapien
tataaagtagaaaagaccttggcta

SEQ ID NO: 2762088 - DNA, 25 bp, Homo sapien
gagcccagatcagactgctccattg

SEQ ID NO: 2762089 - DNA, 25 bp, Homo sapien
tctaagtaacatggaacagaacgtt

SEQ ID NO: 2762090 - DNA, 25 bp, Homo sapien
cagaatgtagaatttgggagcagtg

SEQ ID NO: 2762091 - DNA, 25 bp, Homo sapien
aaagttattgacatgcagtcagcac

SEQ ID NO: 2762092 - DNA, 25 bp, Homo sapien
taattactactttgagcctcggatc

SEQ ID NO: 2762093 - DNA, 25 bp, Homo sapien
gcctcggatcatgtatgacattgac

SEQ ID NO: 2762094 - DNA, 25 bp, Homo sapien
tgtataaacttcacaacacgattgg

SEQ ID NO: 2762095 - DNA, 25 bp, Homo sapien
tgtctcccctgttatacagcttccg

SEQ ID NO: 2762096 - DNA, 25 bp, Homo sapien
caatcatatgctcgtgtttcatcga

SEQ ID NO: 2762097 - DNA, 25 bp, Homo sapien
tatgctcttcagaattgtaaagtcg

SEQ ID NO: 2762098 - DNA, 25 bp, Homo sapien
tatataaagtatgtcgactgcagca

SEQ ID NO: 2762099 - DNA, 25 bp, Homo sapien
tggaactgagtttagccctactccg

SEQ ID NO: 2762100 - DNA, 25 bp, Homo sapien
tttagccctactccgcactgacagt

SEQ ID NO: 2762101 - DNA, 25 bp, Homo sapien
gcactgacagttccgttgttgcttc

SEQ ID NO: 2762102 - DNA, 25 bp, Homo sapien
cttgcttaacaatggaactgagttt

SEQ ID NO: 2762103 - DNA, 25 bp, Homo sapien
gatattgccgctgatggcgctgcag

SEQ ID NO: 2762104 - DNA, 25 bp, Homo sapien
ggagtaaggacttctttgggcacaa

SEQ ID NO: 2762105 - DNA, 25 bp, Homo sapien
ttctgattaataagagacgtccctc

SEQ ID NO: 2762106 - DNA, 25 bp, Homo sapien
ggcacaatgatttgcaagcgaatga

SEQ ID NO: 2762107 - DNA, 25 bp, Homo sapien
tatttcaataagacaggtagccaca

SEQ ID NO: 2762108 - DNA, 25 bp, Homo sapien
accacatcggagttgcctggaccag

SEQ ID NO: 2762109 - DNA, 25 bp, Homo sapien
ggagaagtcttagggccaggtcact

SEQ ID NO: 2762110 - DNA, 25 bp, Homo sapien
aggtagccacagacacagttgaatc

SEQ ID NO: 2762111 - DNA, 25 bp, Homo sapien
ctgctcgggccttccaagtcaattg

SEQ ID NO: 2762112 - DNA, 25 bp, Homo sapien
gctcgggccttccaagtcaattgcc

SEQ ID NO: 2762113 - DNA, 25 bp, Homo sapien
gggccttccaagtcaattgcctcat

SEQ ID NO: 2762114 - DNA, 25 bp, Homo sapien
tcgggccttccaagtcaattgcctc

SEQ ID NO: 2762115 - DNA, 25 bp, Homo sapien
gcttggtttccttaacagcttgttc

SEQ ID NO: 2762116 - DNA, 25 bp, Homo sapien
attcttcagaccctggcctgatccc

SEQ ID NO: 2762117 - DNA, 25 bp, Homo sapien
tcattcttcagaccctggcctgatc

SEQ ID NO: 2762118 - DNA, 25 bp, Homo sapien
gttcattcttcagaccctggcctga

SEQ ID NO: 2762119 - DNA, 25 bp, Homo sapien
gcaggaactttaattgtctccacaa

SEQ ID NO: 2762120 - DNA, 25 bp, Homo sapien
acaatttcaaggagcatttcaatga

SEQ ID NO: 2762121 - DNA, 25 bp, Homo sapien
ggagcatttcaatgattttgcttac

SEQ ID NO: 2762122 - DNA, 25 bp, Homo sapien
cttacaaatgtaagcaggaacttta

SEQ ID NO: 2762123 - DNA, 25 bp, Homo sapien
gaccttctagccctctagcaaggac

SEQ ID NO: 2762124 - DNA, 25 bp, Homo sapien
tccactcagttgcaaagctaaatgc

SEQ ID NO: 2762125 - DNA, 25 bp, Homo sapien
tacgtctgtgttaaaagacttacaa

SEQ ID NO: 2762126 - DNA, 25 bp, Homo sapien
agtgaaagcgtttctatgcagggac

SEQ ID NO: 2762127 - DNA, 25 bp, Homo sapien
ccctttttgcaccaggttcattctt

SEQ ID NO: 2762128 - DNA, 25 bp, Homo sapien
ccaggttcattcttagtgaatgcac

SEQ ID NO: 2762129 - DNA, 25 bp, Homo sapien
acaacaagaatgccctttgcccttt

SEQ ID NO: 2762130 - DNA, 25 bp, Homo sapien
tagtgaatgcactgccggatgggct

SEQ ID NO: 2762131 - DNA, 25 bp, Homo sapien
aactccttttgatagagataaccag

SEQ ID NO: 2762132 - DNA, 25 bp, Homo sapien
cagttgaagtcatgtgtgtactctg

SEQ ID NO: 2762133 - DNA, 25 bp, Homo sapien
ctctgtatcaattgtgtaaactcct

SEQ ID NO: 2762134 - DNA, 25 bp, Homo sapien
aattgttgtttcttattctcatgca

SEQ ID NO: 2762135 - DNA, 25 bp, Homo sapien
acccaccaattccggacacaatagg

SEQ ID NO: 2762136 - DNA, 25 bp, Homo sapien
gaagtcagtgagaccaagaacccac

SEQ ID NO: 2762137 - DNA, 25 bp, Homo sapien
caccaattccggacacaatagggta

SEQ ID NO: 2762138 - DNA, 25 bp, Homo sapien
cgtgagggtgcgcggcttcgttctt

SEQ ID NO: 2762139 - DNA, 25 bp, Homo sapien
gcacccacaaagatgcagttcaaag

SEQ ID NO: 2762140 - DNA, 25 bp, Homo sapien
cttgcacccacaaagatgcagttca

SEQ ID NO: 2762141 - DNA, 25 bp, Homo sapien
ttatcttgcacccacaaagatgcag

SEQ ID NO: 2762142 - DNA, 25 bp, Homo sapien
tatcttgcacccacaaagatgcagt

SEQ ID NO: 2762143 - DNA, 25 bp, Homo sapien
tctatttgctttaaccagtgaatct

SEQ ID NO: 2762144 - DNA, 25 bp, Homo sapien
tcatcagggatttccttgatcacaa

SEQ ID NO: 2762145 - DNA, 25 bp, Homo sapien
ggttccaagcatatcatcagggatt

SEQ ID NO: 2762146 - DNA, 25 bp, Homo sapien
ctagtacttcaaggttccaagcata

SEQ ID NO: 2762147 - DNA, 25 bp, Homo sapien
tctgcccttactgatggagtttgtg

SEQ ID NO: 2762148 - DNA, 25 bp, Homo sapien
tggcccatccaagttcagccccaga

SEQ ID NO: 2762149 - DNA, 25 bp, Homo sapien
aaggctgtcactaagacagcccctg

SEQ ID NO: 2762150 - DNA, 25 bp, Homo sapien
ttgtgttaaggtctgtggccagcac

SEQ ID NO: 2762151 - DNA, 25 bp, Homo sapien
actttggtgttcatcggcagttctt

SEQ ID NO: 2762152 - DNA, 25 bp, Homo sapien
ctttggtgttcatcggcagttcttt

SEQ ID NO: 2762153 - DNA, 25 bp, Homo sapien
tttggtgttcatcggcagttctttg

SEQ ID NO: 2762154 - DNA, 25 bp, Homo sapien
taagagaacagagctccacttggga

SEQ ID NO: 2762155 - DNA, 25 bp, Homo sapien
gggagttgtactgctctggtgcaca

SEQ ID NO: 2762156 - DNA, 25 bp, Homo sapien
ctcagttaaacaaccatagtgcacc

SEQ ID NO: 2762157 - DNA, 25 bp, Homo sapien
ttggccagtgcactgtaagagaaca

SEQ ID NO: 2762158 - DNA, 25 bp, Homo sapien
tggatttcagtagccagttcattca

SEQ ID NO: 2762159 - DNA, 25 bp, Homo sapien
gctgttggctcatggatttcagtag

SEQ ID NO: 2762160 - DNA, 25 bp, Homo sapien
ttaaccaggaatttagctgttggct

SEQ ID NO: 2762161 - DNA, 25 bp, Homo sapien
tgatagcttctatttcagtttttgt

SEQ ID NO: 2762162 - DNA, 25 bp, Homo sapien
taaggaagactatcagggaaggatc

SEQ ID NO: 2762163 - DNA, 25 bp, Homo sapien
aaacagttttaaggaagactatcag

SEQ ID NO: 2762164 - DNA, 25 bp, Homo sapien
aagactatcagggaaggatctccag

SEQ ID NO: 2762165 - DNA, 25 bp, Homo sapien
tctccagtgtcaggggaagaatctc

SEQ ID NO: 2762166 - DNA, 25 bp, Homo sapien
cagtgcccacaccaatagaaattga

SEQ ID NO: 2762167 - DNA, 25 bp, Homo sapien
gcacactacacagacctatgagaat

SEQ ID NO: 2762168 - DNA, 25 bp, Homo sapien
cacactacacagacctatgagaatc

SEQ ID NO: 2762169 - DNA, 25 bp, Homo sapien
ttattggtttgtagccttacattcc

SEQ ID NO: 2762170 - DNA, 25 bp, Homo sapien
ttggtttgtagccttacattcctgt

SEQ ID NO: 2762171 - DNA, 25 bp, Homo sapien
ttgtagccttacattcctgtgcaag

SEQ ID NO: 2762172 - DNA, 25 bp, Homo sapien
gtagccttacattcctgtgcaagaa

SEQ ID NO: 2762173 - DNA, 25 bp, Homo sapien
tgacttaatagttttgctgtattcc

SEQ ID NO: 2762174 - DNA, 25 bp, Homo sapien
gacttaatagttttgctgtattcca

SEQ ID NO: 2762175 - DNA, 25 bp, Homo sapien
atctttctaaaatagttaaagcagg

SEQ ID NO: 2762176 - DNA, 25 bp, Homo sapien
ttctaaaatagttaaagcagggata

SEQ ID NO: 2762177 - DNA, 25 bp, Homo sapien
tctaaaatagttaaagcagggatac

SEQ ID NO: 2762178 - DNA, 25 bp, Homo sapien
catcacactgtgtgcgtccaaatgg

SEQ ID NO: 2762179 - DNA, 25 bp, Homo sapien
cactgtgtgcgtccaaatggcaggt

SEQ ID NO: 2762180 - DNA, 25 bp, Homo sapien
tgtgtgcgtccaaatggcaggtctt

SEQ ID NO: 2762181 - DNA, 25 bp, Homo sapien
cacactgtgtgcgtccaaatggcag

SEQ ID NO: 2762182 - DNA, 25 bp, Homo sapien
aagtggtttccttagcaactgaaga

SEQ ID NO: 2762183 - DNA, 25 bp, Homo sapien
aagtccaggttatcagcctttctga

SEQ ID NO: 2762184 - DNA, 25 bp, Homo sapien
gaagaaccgtagaatctctcggaac

SEQ ID NO: 2762185 - DNA, 25 bp, Homo sapien
gtcatgtttatatcagtcccaacct

SEQ ID NO: 2762186 - DNA, 25 bp, Homo sapien
tttggaaatccagctagagcaatgg

SEQ ID NO: 2762187 - DNA, 25 bp, Homo sapien
tgagcagccagagataatggtaagg

SEQ ID NO: 2762188 - DNA, 25 bp, Homo sapien
tcaaaggaccaaagagtctgcatgc

SEQ ID NO: 2762189 - DNA, 25 bp, Homo sapien
ccatccctgaagtattcctcatgta

SEQ ID NO: 2762190 - DNA, 25 bp, Homo sapien
tgacaaagggtaaggaatgtaacca

SEQ ID NO: 2762191 - DNA, 25 bp, Homo sapien
tctgcgtcttagcttgtatatttcc

SEQ ID NO: 2762192 - DNA, 25 bp, Homo sapien
taaatctctgcgtcttagcttgtat

SEQ ID NO: 2762193 - DNA, 25 bp, Homo sapien
cacaatcatcgcattttaaatctct

SEQ ID NO: 2762194 - DNA, 25 bp, Homo sapien
tacatttcacaatcatcgcatttta

SEQ ID NO: 2762195 - DNA, 25 bp, Homo sapien
aacactgggtttcagttgagtcttc

SEQ ID NO: 2762196 - DNA, 25 bp, Homo sapien
aagaggagatgccctgataaacact

SEQ ID NO: 2762197 - DNA, 25 bp, Homo sapien
cagttgagtcttctaaaatggtata

SEQ ID NO: 2762198 - DNA, 25 bp, Homo sapien
gaaagttgggtgaaggcaaagagga

SEQ ID NO: 2762199 - DNA, 25 bp, Homo sapien
actgaagcttaaagcagtgcttgtc

SEQ ID NO: 2762200 - DNA, 25 bp, Homo sapien
aactgaagcttaaagcagtgcttgt

SEQ ID NO: 2762201 - DNA, 25 bp, Homo sapien
gcagtgcttgtcacaaattcaaaat

SEQ ID NO: 2762202 - DNA, 25 bp, Homo sapien
ccaacagtaatatcttgaatgtgta

SEQ ID NO: 2762203 - DNA, 25 bp, Homo sapien
taatccaacagtaatatcttgaatg

SEQ ID NO: 2762204 - DNA, 25 bp, Homo sapien
ttaacgagttgataccattccattt

SEQ ID NO: 2762205 - DNA, 25 bp, Homo sapien
gagttgataccattccatttctaca

SEQ ID NO: 2762206 - DNA, 25 bp, Homo sapien
catcttccatggaaaatccgatacg

SEQ ID NO: 2762207 - DNA, 25 bp, Homo sapien
tccgatacgctgttgatccgacaag

SEQ ID NO: 2762208 - DNA, 25 bp, Homo sapien
tgatccgacaagttacacatcccgt

SEQ ID NO: 2762209 - DNA, 25 bp, Homo sapien
caagttacacatcccgtcttatgca

SEQ ID NO: 2762210 - DNA, 25 bp, Homo sapien
ggaatggtacttcatagcatgtaaa

SEQ ID NO: 2762211 - DNA, 25 bp, Homo sapien
ggtgctagggcaaatggaaactcat

SEQ ID NO: 2762212 - DNA, 25 bp, Homo sapien
tagatataatatgaaactgcaagca

SEQ ID NO: 2762213 - DNA, 25 bp, Homo sapien
tgcaacaatgaagccaagaaaattc

SEQ ID NO: 2762214 - DNA, 25 bp, Homo sapien
aaattttggccggtcaacttgatgt

SEQ ID NO: 2762215 - DNA, 25 bp, Homo sapien
caggaaattttggccggtcaacttg

SEQ ID NO: 2762216 - DNA, 25 bp, Homo sapien
tggccggtcaacttgatgtccagag

SEQ ID NO: 2762217 - DNA, 25 bp, Homo sapien
cttgatgtccagagatgttctgctc

SEQ ID NO: 2762218 - DNA, 25 bp, Homo sapien
cctgacccaatcctgatgggctgta

SEQ ID NO: 2762219 - DNA, 25 bp, Homo sapien
tggactttctggacgtgtattgctg

SEQ ID NO: 2762220 - DNA, 25 bp, Homo sapien
ttctcctgactaatgtggactttct

SEQ ID NO: 2762221 - DNA, 25 bp, Homo sapien
tatatcacccttgggaacagcaaga

SEQ ID NO: 2762222 - DNA, 25 bp, Homo sapien
taattgtctgtattacatgtgttta

SEQ ID NO: 2762223 - DNA, 25 bp, Homo sapien
aattgtctgtattacatgtgtttag

SEQ ID NO: 2762224 - DNA, 25 bp, Homo sapien
ctaattgtctgtattacatgtgttt

SEQ ID NO: 2762225 - DNA, 25 bp, Homo sapien
tttgctagagtaatgattgctgcca

SEQ ID NO: 2762226 - DNA, 25 bp, Homo sapien
ttgctagagtaatgattgctgccat

SEQ ID NO: 2762227 - DNA, 25 bp, Homo sapien
caaagaccctggaccgcctcttctt

SEQ ID NO: 2762228 - DNA, 25 bp, Homo sapien
tcaaagaccctggaccgcctcttct

SEQ ID NO: 2762229 - DNA, 25 bp, Homo sapien
ttcaaagaccctggaccgcctcttc

SEQ ID NO: 2762230 - DNA, 25 bp, Homo sapien
ttagctcggtatactgtgcttccca

SEQ ID NO: 2762231 - DNA, 25 bp, Homo sapien
gatcttagtctttttagctcggtat

SEQ ID NO: 2762232 - DNA, 25 bp, Homo sapien
gcattgagggggtgatcttagtctt

SEQ ID NO: 2762233 - DNA, 25 bp, Homo sapien
gtctttttagctcggtatactgtgc

SEQ ID NO: 2762234 - DNA, 25 bp, Homo sapien
gcctgagttaatgagggatgttctc

SEQ ID NO: 2762235 - DNA, 25 bp, Homo sapien
taagtaaaatttcggctgagtgctt

SEQ ID NO: 2762236 - DNA, 25 bp, Homo sapien
gcatgtaaattagaattgattattc

SEQ ID NO: 2762237 - DNA, 25 bp, Homo sapien
tattctttccgataagtgagtggaa

SEQ ID NO: 2762238 - DNA, 25 bp, Homo sapien
gtaactcagatgattcagtgttagg

SEQ ID NO: 2762239 - DNA, 25 bp, Homo sapien
gattcagtgttaggataccttctct

SEQ ID NO: 2762240 - DNA, 25 bp, Homo sapien
tcggcacagtagtaagtaactcaga

SEQ ID NO: 2762241 - DNA, 25 bp, Homo sapien
tgaaatatggcgatttcggcacagt

SEQ ID NO: 2762242 - DNA, 25 bp, Homo sapien
aagcgactagctttcacatataccc

SEQ ID NO: 2762243 - DNA, 25 bp, Homo sapien
atatacccctatgatctgattcttg

SEQ ID NO: 2762244 - DNA, 25 bp, Homo sapien
tcaatggtttgatagaagtctttcc

SEQ ID NO: 2762245 - DNA, 25 bp, Homo sapien
gaagtctttccaaccaagcgactag

SEQ ID NO: 2762246 - DNA, 25 bp, Homo sapien
tggaccataaatccacacgagttgt

SEQ ID NO: 2762247 - DNA, 25 bp, Homo sapien
gacgaagtatgggtacccctgcttc

SEQ ID NO: 2762248 - DNA, 25 bp, Homo sapien
tttttgttgccaccaatagggaaga

SEQ ID NO: 2762249 - DNA, 25 bp, Homo sapien
agggcacagacgaagtatgggtacc

SEQ ID NO: 2762250 - DNA, 25 bp, Homo sapien
cctgcaatacagcaaaacttgtctg

SEQ ID NO: 2762251 - DNA, 25 bp, Homo sapien
gcagcagtgcctgcaatacagcaaa

SEQ ID NO: 2762252 - DNA, 25 bp, Homo sapien
gcagtgcctgcaatacagcaaaact

SEQ ID NO: 2762253 - DNA, 25 bp, Homo sapien
cttgaagagcaggtaactcccccag

SEQ ID NO: 2762254 - DNA, 25 bp, Homo sapien
catcatcttcagtaatcacctttgt

SEQ ID NO: 2762255 - DNA, 25 bp, Homo sapien
ctacagaatttagtattccatcatc

SEQ ID NO: 2762256 - DNA, 25 bp, Homo sapien
tagttttgaatgctagtagcttctt

SEQ ID NO: 2762257 - DNA, 25 bp, Homo sapien
tctctcctacagaatttagtattcc

SEQ ID NO: 2762258 - DNA, 25 bp, Homo sapien
tttcagcagccgaatgagttcctta

SEQ ID NO: 2762259 - DNA, 25 bp, Homo sapien
cagccgaatgagttccttaaaactt

SEQ ID NO: 2762260 - DNA, 25 bp, Homo sapien
tcagttttgttgctgtgggagcatc

SEQ ID NO: 2762261 - DNA, 25 bp, Homo sapien
cagcagccgaatgagttccttaaaa

SEQ ID NO: 2762262 - DNA, 25 bp, Homo sapien
tgctaatctgagtgttcattacaga

SEQ ID NO: 2762263 - DNA, 25 bp, Homo sapien
gggaagcattacatgacagctgtct

SEQ ID NO: 2762264 - DNA, 25 bp, Homo sapien
aactacttgggaagcattacatgac

SEQ ID NO: 2762265 - DNA, 25 bp, Homo sapien
gctgtcttcttaatatcctcacaga

SEQ ID NO: 2762266 - DNA, 25 bp, Homo sapien
ttttcatggcaataatttcaagaag

SEQ ID NO: 2762267 - DNA, 25 bp, Homo sapien
gatgactttgaataactgtgtttcc

SEQ ID NO: 2762268 - DNA, 25 bp, Homo sapien
aatttcaagaagagacttgtaaagg

SEQ ID NO: 2762269 - DNA, 25 bp, Homo sapien
tgtgtttccactcactaatgttggt

SEQ ID NO: 2762270 - DNA, 25 bp, Homo sapien
gagaaatcataatgaagctgctttc

SEQ ID NO: 2762271 - DNA, 25 bp, Homo sapien
gaaggagaaatcataatgaagctgc

SEQ ID NO: 2762272 - DNA, 25 bp, Homo sapien
tgaaggagaaatcataatgaagctg

SEQ ID NO: 2762273 - DNA, 25 bp, Homo sapien
cagggaatagctgactatgtcctag

SEQ ID NO: 2762274 - DNA, 25 bp, Homo sapien
tcaaggtcacctagacctgagagct

SEQ ID NO: 2762275 - DNA, 25 bp, Homo sapien
ttggcttctgtgaagtctcaaggtc

SEQ ID NO: 2762276 - DNA, 25 bp, Homo sapien
taccatgtatgacccttcaagcctc

SEQ ID NO: 2762277 - DNA, 25 bp, Homo sapien
ttagtaaccaccagacggtagccat

SEQ ID NO: 2762278 - DNA, 25 bp, Homo sapien
ctgtgatttttgcattagagaataa

SEQ ID NO: 2762279 - DNA, 25 bp, Homo sapien
tgtgatttttgcattagagaataac

SEQ ID NO: 2762280 - DNA, 25 bp, Homo sapien
tatgagagtgaactattactttaat

SEQ ID NO: 2762281 - DNA, 25 bp, Homo sapien
tgtaaaccactgcttttatgagagt

SEQ ID NO: 2762282 - DNA, 25 bp, Homo sapien
ctcaatccacaggggagaaagactt

SEQ ID NO: 2762283 - DNA, 25 bp, Homo sapien
caatccacaggggagaaagacttcc

SEQ ID NO: 2762284 - DNA, 25 bp, Homo sapien
tccacaggggagaaagacttccatc

SEQ ID NO: 2762285 - DNA, 25 bp, Homo sapien
cacaggggagaaagacttccatcaa

SEQ ID NO: 2762286 - DNA, 25 bp, Homo sapien
agcagttaataaggcagtcaataag

SEQ ID NO: 2762287 - DNA, 25 bp, Homo sapien
tgggagtaatataagggattttgca

SEQ ID NO: 2762288 - DNA, 25 bp, Homo sapien
taagatcaagattaattctgggaat

SEQ ID NO: 2762289 - DNA, 25 bp, Homo sapien
gtgtactcctttgtataattataac

SEQ ID NO: 2762290 - DNA, 25 bp, Homo sapien
tcctgtcctcatgtgttctccatgt

SEQ ID NO: 2762291 - DNA, 25 bp, Homo sapien
aactccacattggtttgacttctca

SEQ ID NO: 2762292 - DNA, 25 bp, Homo sapien
caactccacattggtttgacttctc

SEQ ID NO: 2762293 - DNA, 25 bp, Homo sapien
tcacagccgtagggccacagttccc

SEQ ID NO: 2762294 - DNA, 25 bp, Homo sapien
cacagccgtagggccacagttccct

SEQ ID NO: 2762295 - DNA, 25 bp, Homo sapien
caacatggggcatatgctcctcatc

SEQ ID NO: 2762296 - DNA, 25 bp, Homo sapien
tgcaacatggggcatatgctcctca

SEQ ID NO: 2762297 - DNA, 25 bp, Homo sapien
ctggtcgtcgttgagtactccattc

SEQ ID NO: 2762298 - DNA, 25 bp, Homo sapien
cctccactccactcctggtcgtcgt

SEQ ID NO: 2762299 - DNA, 25 bp, Homo sapien
ctctcagaggagtcccttgtcttcc

SEQ ID NO: 2762300 - DNA, 25 bp, Homo sapien
tctcagaggagtcccttgtcttcca

SEQ ID NO: 2762301 - DNA, 25 bp, Homo sapien
gaatctgcattagggtcagcttgtg

SEQ ID NO: 2762302 - DNA, 25 bp, Homo sapien
ccaggaatctgcattagggtcagct

SEQ ID NO: 2762303 - DNA, 25 bp, Homo sapien
tcagttgagggtaaaatccagttcc

SEQ ID NO: 2762304 - DNA, 25 bp, Homo sapien
cagttgagggtaaaatccagttcca

SEQ ID NO: 2762305 - DNA, 25 bp, Homo sapien
atccactggtggctcgatctttcca

SEQ ID NO: 2762306 - DNA, 25 bp, Homo sapien
ttgaagattagcgttgtaactatcc

SEQ ID NO: 2762307 - DNA, 25 bp, Homo sapien
tggtggctcgatctttccagaaagt

SEQ ID NO: 2762308 - DNA, 25 bp, Homo sapien
agcgttgtaactatccactggtggc

SEQ ID NO: 2762309 - DNA, 25 bp, Homo sapien
gtttttgtggttcaaatagagcttg

SEQ ID NO: 2762310 - DNA, 25 bp, Homo sapien
accagctttaactgataagtcctca

SEQ ID NO: 2762311 - DNA, 25 bp, Homo sapien
caaagcactgatgtgccaacatgaa

SEQ ID NO: 2762312 - DNA, 25 bp, Homo sapien
ctgataagtcctcaatgaaggtagg

SEQ ID NO: 2762313 - DNA, 25 bp, Homo sapien
gaatgaggcctcaagttgaacttag

SEQ ID NO: 2762314 - DNA, 25 bp, Homo sapien
gaacttagtgtagagacaaatctca

SEQ ID NO: 2762315 - DNA, 25 bp, Homo sapien
caaatctcacaatgaagttttctcc

SEQ ID NO: 2762316 - DNA, 25 bp, Homo sapien
ttggcagccaaattcagaaaacttg

SEQ ID NO: 2762317 - DNA, 25 bp, Homo sapien
tcgtgatttaaaggattcctttctg

SEQ ID NO: 2762318 - DNA, 25 bp, Homo sapien
cgtgatttaaaggattcctttctgt

SEQ ID NO: 2762319 - DNA, 25 bp, Homo sapien
ctgtgtgagtaatatgtggacacac

SEQ ID NO: 2762320 - DNA, 25 bp, Homo sapien
tggactggatgctgacgttgctaca

SEQ ID NO: 2762321 - DNA, 25 bp, Homo sapien
aattcaccagatctgggcccctagg

SEQ ID NO: 2762322 - DNA, 25 bp, Homo sapien
tgcttaggagggcacaacagtggcc

SEQ ID NO: 2762323 - DNA, 25 bp, Homo sapien
tggacccgagtttagcccagttgga

SEQ ID NO: 2762324 - DNA, 25 bp, Homo sapien
gttactgcaggtggtcccagaagca

SEQ ID NO: 2762325 - DNA, 25 bp, Homo sapien
ccttcataccaattaaatagcactt

SEQ ID NO: 2762326 - DNA, 25 bp, Homo sapien
gcacttatgcctttatatggtaccc

SEQ ID NO: 2762327 - DNA, 25 bp, Homo sapien
tatggtacccaaagctgttattaga

SEQ ID NO: 2762328 - DNA, 25 bp, Homo sapien
agcacttggctagttctcgcttgtt

SEQ ID NO: 2762329 - DNA, 25 bp, Homo sapien
gcacttggctagttctcgcttgttc

SEQ ID NO: 2762330 - DNA, 25 bp, Homo sapien
ttgttcgtcagatggaatgatgaga

SEQ ID NO: 2762331 - DNA, 25 bp, Homo sapien
ggtgagttagacttcaagtatcttg

SEQ ID NO: 2762332 - DNA, 25 bp, Homo sapien
cttggtgagttagacttcaagtatc

SEQ ID NO: 2762333 - DNA, 25 bp, Homo sapien
ttggtgagttagacttcaagtatct

SEQ ID NO: 2762334 - DNA, 25 bp, Homo sapien
cctcttggtgagttagacttcaagt

SEQ ID NO: 2762335 - DNA, 25 bp, Homo sapien
tcttcttctagcaatgtacttgaaa

SEQ ID NO: 2762336 - DNA, 25 bp, Homo sapien
gctttgaagcgaatttcttcttcta

SEQ ID NO: 2762337 - DNA, 25 bp, Homo sapien
tacttgaaactactgacaactttct

SEQ ID NO: 2762338 - DNA, 25 bp, Homo sapien
ttggaatgtaaaggacaagatgtac

SEQ ID NO: 2762339 - DNA, 25 bp, Homo sapien
ttcgaattcagctaacttccatggg

SEQ ID NO: 2762340 - DNA, 25 bp, Homo sapien
ccccggtagtcttactgatatgatg

SEQ ID NO: 2762341 - DNA, 25 bp, Homo sapien
cacctgagtcttgagaagaactgcc

SEQ ID NO: 2762342 - DNA, 25 bp, Homo sapien
gatatgatgactctgattggtagct

SEQ ID NO: 2762343 - DNA, 25 bp, Homo sapien
cttgccatacgttttagttaacgtg

SEQ ID NO: 2762344 - DNA, 25 bp, Homo sapien
tttactgtcactgggatcttgccat

SEQ ID NO: 2762345 - DNA, 25 bp, Homo sapien
ggatcttgccatacgttttagttaa

SEQ ID NO: 2762346 - DNA, 25 bp, Homo sapien
tgtcactgggatcttgccatacgtt

SEQ ID NO: 2762347 - DNA, 25 bp, Homo sapien
atctgtccctatttcataagatagc

SEQ ID NO: 2762348 - DNA, 25 bp, Homo sapien
cctatttcataagatagcttgaaca

SEQ ID NO: 2762349 - DNA, 25 bp, Homo sapien
cgtgggtccctttaattcatctgtc

SEQ ID NO: 2762350 - DNA, 25 bp, Homo sapien
tccgtgggtccctttaattcatctg

SEQ ID NO: 2762351 - DNA, 25 bp, Homo sapien
cattccggatgcctgagcttttgca

SEQ ID NO: 2762352 - DNA, 25 bp, Homo sapien
gccagattcagtattacacattccg

SEQ ID NO: 2762353 - DNA, 25 bp, Homo sapien
cttcttttagaggaattgaccattt

SEQ ID NO: 2762354 - DNA, 25 bp, Homo sapien
cattaaaggatgccagattcagtat

SEQ ID NO: 2762355 - DNA, 25 bp, Homo sapien
aattcctctggttgttgattgctag

SEQ ID NO: 2762356 - DNA, 25 bp, Homo sapien
tccacttggtctgttgcaggttaag

SEQ ID NO: 2762357 - DNA, 25 bp, Homo sapien
cttggtgttccactgttgggtgcaa

SEQ ID NO: 2762358 - DNA, 25 bp, Homo sapien
tgtctaagaatagcgactccagctc

SEQ ID NO: 2762359 - DNA, 25 bp, Homo sapien
tgttccagtgattgtttgcttggcg

SEQ ID NO: 2762360 - DNA, 25 bp, Homo sapien
caattttgtgaggttaattgcaatg

SEQ ID NO: 2762361 - DNA, 25 bp, Homo sapien
cagtgattgtttgcttggcgcaagt

SEQ ID NO: 2762362 - DNA, 25 bp, Homo sapien
actgtaataaatgttccagtgattg

SEQ ID NO: 2762363 - DNA, 25 bp, Homo sapien
gaatgggtgccggtgctgtaagcag

SEQ ID NO: 2762364 - DNA, 25 bp, Homo sapien
aaagttaggtggctagtggctgaag

SEQ ID NO: 2762365 - DNA, 25 bp, Homo sapien
actgtagtggtgtttctacaatggc

SEQ ID NO: 2762366 - DNA, 25 bp, Homo sapien
gaaaatcgctgtttgaatggaatga

SEQ ID NO: 2762367 - DNA, 25 bp, Homo sapien
ctgtttggcagaatctccactgcct

SEQ ID NO: 2762368 - DNA, 25 bp, Homo sapien
ttactgtttggcagaatctccactg

SEQ ID NO: 2762369 - DNA, 25 bp, Homo sapien
tactgtttggcagaatctccactgc

SEQ ID NO: 2762370 - DNA, 25 bp, Homo sapien
actgtttggcagaatctccactgcc

SEQ ID NO: 2762371 - DNA, 25 bp, Homo sapien
tatagaagcctgtgactagaaatct

SEQ ID NO: 2762372 - DNA, 25 bp, Homo sapien
agaagcctgtgactagaaatctttg

SEQ ID NO: 2762373 - DNA, 25 bp, Homo sapien
tagaagcctgtgactagaaatcttt

SEQ ID NO: 2762374 - DNA, 25 bp, Homo sapien
gaagcctgtgactagaaatctttgt

SEQ ID NO: 2762375 - DNA, 25 bp, Homo sapien
tattaagaagctagttacataagtc

SEQ ID NO: 2762376 - DNA, 25 bp, Homo sapien
gcttacacaatgtggttcaccttga

SEQ ID NO: 2762377 - DNA, 25 bp, Homo sapien
ggttgatgacagtcactcccaaaca

SEQ ID NO: 2762378 - DNA, 25 bp, Homo sapien
aactaggcaagttgggcttacacaa

SEQ ID NO: 2762379 - DNA, 25 bp, Homo sapien
ctctttccacaccattgagcaaagc

SEQ ID NO: 2762380 - DNA, 25 bp, Homo sapien
tttccacaccattgagcaaagctgt

SEQ ID NO: 2762381 - DNA, 25 bp, Homo sapien
tggattgaggcaccttggaagtcca

SEQ ID NO: 2762382 - DNA, 25 bp, Homo sapien
tatggattgaggcaccttggaagtc

SEQ ID NO: 2762383 - DNA, 25 bp, Homo sapien
ctttgttgtctctccatatatttca

SEQ ID NO: 2762384 - DNA, 25 bp, Homo sapien
catatatttcagtgttaatcctcat

SEQ ID NO: 2762385 - DNA, 25 bp, Homo sapien
tctccatatatttcagtgttaatcc

SEQ ID NO: 2762386 - DNA, 25 bp, Homo sapien
ttgttgtctctccatatatttcagt

SEQ ID NO: 2762387 - DNA, 25 bp, Homo sapien
aagccccattttccgtggcttatag

SEQ ID NO: 2762388 - DNA, 25 bp, Homo sapien
agcttttccactgaatacctttggg

SEQ ID NO: 2762389 - DNA, 25 bp, Homo sapien
tggcactttgaatttaagccccatt

SEQ ID NO: 2762390 - DNA, 25 bp, Homo sapien
gggctaaacttcatcattctggttc

SEQ ID NO: 2762391 - DNA, 25 bp, Homo sapien
agtgactggtctctgtacattgccc

SEQ ID NO: 2762392 - DNA, 25 bp, Homo sapien
cggtaggacataggaaaagaacaca

SEQ ID NO: 2762393 - DNA, 25 bp, Homo sapien
cgcctcattctctcaaagtgcaagg

SEQ ID NO: 2762394 - DNA, 25 bp, Homo sapien
gatgtactgctgctatcaaaaagct

SEQ ID NO: 2762395 - DNA, 25 bp, Homo sapien
gcatatttgtttctcatttgtcttg

SEQ ID NO: 2762396 - DNA, 25 bp, Homo sapien
ctatagatgttggcatatttgtttc

SEQ ID NO: 2762397 - DNA, 25 bp, Homo sapien
tagatgttggcatatttgtttctca

SEQ ID NO: 2762398 - DNA, 25 bp, Homo sapien
ggcatatttgtttctcatttgtctt

SEQ ID NO: 2762399 - DNA, 25 bp, Homo sapien
catttctatcatgttcaaaattcca

SEQ ID NO: 2762400 - DNA, 25 bp, Homo sapien
accatttctatcatgttcaaaattc

SEQ ID NO: 2762401 - DNA, 25 bp, Homo sapien
ccatttctatcatgttcaaaattcc

SEQ ID NO: 2762402 - DNA, 25 bp, Homo sapien
aaccacatcagataattcagcacag

SEQ ID NO: 2762403 - DNA, 25 bp, Homo sapien
cttggtgagttgtattacaggctgc

SEQ ID NO: 2762404 - DNA, 25 bp, Homo sapien
cacaccacttggtgagttgtattac

SEQ ID NO: 2762405 - DNA, 25 bp, Homo sapien
ggatcacaccacttggtgagttgta

SEQ ID NO: 2762406 - DNA, 25 bp, Homo sapien
tcactgtcttggaatatgtaatgag

SEQ ID NO: 2762407 - DNA, 25 bp, Homo sapien
tatgccaggaccaggttttaggagg

SEQ ID NO: 2762408 - DNA, 25 bp, Homo sapien
ataaaacagcttagaaggttatgcc

SEQ ID NO: 2762409 - DNA, 25 bp, Homo sapien
ttttaggaggacatgcagtatgtga

SEQ ID NO: 2762410 - DNA, 25 bp, Homo sapien
agaaggttatgccaggaccaggttt

SEQ ID NO: 2762411 - DNA, 25 bp, Homo sapien
gtagcatgatgaggaaagtacaggt

SEQ ID NO: 2762412 - DNA, 25 bp, Homo sapien
gtacaggtagtgaaaaaaggcttgc

SEQ ID NO: 2762413 - DNA, 25 bp, Homo sapien
agagagaatgtagcatgatgaggaa

SEQ ID NO: 2762414 - DNA, 25 bp, Homo sapien
tttgccaggggacatatgcaaagaa

SEQ ID NO: 2762415 - DNA, 25 bp, Homo sapien
acccgaatcccaaggtcaacctgtg

SEQ ID NO: 2762416 - DNA, 25 bp, Homo sapien
tcctctccaacctgtaatgtcaact

SEQ ID NO: 2762417 - DNA, 25 bp, Homo sapien
taggagagatatatacccgaatccc

SEQ ID NO: 2762418 - DNA, 25 bp, Homo sapien
tgtgttgccaggaccaggatttgcc

SEQ ID NO: 2762419 - DNA, 25 bp, Homo sapien
attcccactgatttatcatccttca

SEQ ID NO: 2762420 - DNA, 25 bp, Homo sapien
ttcccactgatttatcatccttcac

SEQ ID NO: 2762421 - DNA, 25 bp, Homo sapien
cattcccactgatttatcatccttc

SEQ ID NO: 2762422 - DNA, 25 bp, Homo sapien
gcaactttatagctcagttctccaa

SEQ ID NO: 2762423 - DNA, 25 bp, Homo sapien
ttatacagtcattaagagtcaggta

SEQ ID NO: 2762424 - DNA, 25 bp, Homo sapien
tcaggtaatcttctaataacatgac

SEQ ID NO: 2762425 - DNA, 25 bp, Homo sapien
atttattggcaactttatagctcag

SEQ ID NO: 2762426 - DNA, 25 bp, Homo sapien
cccatggcagagcatactcatgatc

SEQ ID NO: 2762427 - DNA, 25 bp, Homo sapien
cagagcatactcatgatcttgacgt

SEQ ID NO: 2762428 - DNA, 25 bp, Homo sapien
catgatcttgacgtttttgctgatg

SEQ ID NO: 2762429 - DNA, 25 bp, Homo sapien
tggtggccaatacactgctggttta

SEQ ID NO: 2762430 - DNA, 25 bp, Homo sapien
gacgctgtgtttcccggatgccgga

SEQ ID NO: 2762431 - DNA, 25 bp, Homo sapien
gaccaggaagtgtggcacctgcgca

SEQ ID NO: 2762432 - DNA, 25 bp, Homo sapien
aatcaaaatggtgctcgtgaggaca

SEQ ID NO: 2762433 - DNA, 25 bp, Homo sapien
tgttcatacactctgcctgcggaaa

SEQ ID NO: 2762434 - DNA, 25 bp, Homo sapien
gagagggccaaactcactttcatac

SEQ ID NO: 2762435 - DNA, 25 bp, Homo sapien
gatagccttcaaatcattgcacgtg

SEQ ID NO: 2762436 - DNA, 25 bp, Homo sapien
taacagtcctacatcttaacaccag

SEQ ID NO: 2762437 - DNA, 25 bp, Homo sapien
gacttggaagtctaagagtgtggca

SEQ ID NO: 2762438 - DNA, 25 bp, Homo sapien
tggccaacataactcttaaaggtcc

SEQ ID NO: 2762439 - DNA, 25 bp, Homo sapien
gccaacataactcttaaaggtccta

SEQ ID NO: 2762440 - DNA, 25 bp, Homo sapien
aatctgaactcttttaagccccgtg

SEQ ID NO: 2762441 - DNA, 25 bp, Homo sapien
tgcagccagatctgaatggttccct

SEQ ID NO: 2762442 - DNA, 25 bp, Homo sapien
tagtgcatgcagaaagtgcagccag

SEQ ID NO: 2762443 - DNA, 25 bp, Homo sapien
taaggccagccatctctgataccct

SEQ ID NO: 2762444 - DNA, 25 bp, Homo sapien
cactttgcttgagccagcgtgggag

SEQ ID NO: 2762445 - DNA, 25 bp, Homo sapien
gctgtgaaagtaccactggcaggac

SEQ ID NO: 2762446 - DNA, 25 bp, Homo sapien
taaagacgccctaacgtgaaggatg

SEQ ID NO: 2762447 - DNA, 25 bp, Homo sapien
gaaatgctgccccatggtgagaaaa

SEQ ID NO: 2762448 - DNA, 25 bp, Homo sapien
ttctccgcctggtgccgcccgtggg

SEQ ID NO: 2762449 - DNA, 25 bp, Homo sapien
tgcaggccgcggttgctgctcaggt

SEQ ID NO: 2762450 - DNA, 25 bp, Homo sapien
cttccaccggctcccgatgctccgg

SEQ ID NO: 2762451 - DNA, 25 bp, Homo sapien
cccagtgcaggccgcggttgctgct

SEQ ID NO: 2762452 - DNA, 25 bp, Homo sapien
tgcgccgcccatccggccagagggt

SEQ ID NO: 2762453 - DNA, 25 bp, Homo sapien
tgcgcgcctcctacaccccgggcca

SEQ ID NO: 2762454 - DNA, 25 bp, Homo sapien
gcgcgcctcctacaccccgggccaa

SEQ ID NO: 2762455 - DNA, 25 bp, Homo sapien
tcctgggccctgagtgcgccgccca

SEQ ID NO: 2762456 - DNA, 25 bp, Homo sapien
cgcaggttctcgttcctcatggcgc

SEQ ID NO: 2762457 - DNA, 25 bp, Homo sapien
tgaggctgagcgcaggttctcgttc

SEQ ID NO: 2762458 - DNA, 25 bp, Homo sapien
gctgagcgcaggttctcgttcctca

SEQ ID NO: 2762459 - DNA, 25 bp, Homo sapien
gagcgcaggttctcgttcctcatgg

SEQ ID NO: 2762460 - DNA, 25 bp, Homo sapien
aacgccaccgttgtcctatgtgaaa

SEQ ID NO: 2762461 - DNA, 25 bp, Homo sapien
ggtctttagaaagaaccatatccat

SEQ ID NO: 2762462 - DNA, 25 bp, Homo sapien
tcagtaggagtgtatcttcagatgc

SEQ ID NO: 2762463 - DNA, 25 bp, Homo sapien
tcttcatatggataagcgtgctggt

SEQ ID NO: 2762464 - DNA, 25 bp, Homo sapien
ggaaagaatgttcatcgtagcccta

SEQ ID NO: 2762465 - DNA, 25 bp, Homo sapien
caaatagatcttggccgttgaccta

SEQ ID NO: 2762466 - DNA, 25 bp, Homo sapien
tcccttgggcgcagactgagtcaat

SEQ ID NO: 2762467 - DNA, 25 bp, Homo sapien
ggataatactctgtctctcttgaag

SEQ ID NO: 2762468 - DNA, 25 bp, Homo sapien
tccaaaagcgtcctgaaaatctcca

SEQ ID NO: 2762469 - DNA, 25 bp, Homo sapien
cagagtctgagacacataggattca

SEQ ID NO: 2762470 - DNA, 25 bp, Homo sapien
cataggacatcgtaagcattcagag

SEQ ID NO: 2762471 - DNA, 25 bp, Homo sapien
taccactgggtgcttccaaatatgg

SEQ ID NO: 2762472 - DNA, 25 bp, Homo sapien
tggccttttatttaatgtagtataa

SEQ ID NO: 2762473 - DNA, 25 bp, Homo sapien
ttgattagcaccagagaaccagaga

SEQ ID NO: 2762474 - DNA, 25 bp, Homo sapien
tcttgattagcaccagagaaccaga

SEQ ID NO: 2762475 - DNA, 25 bp, Homo sapien
ccttttatttaatgtagtataacat

SEQ ID NO: 2762476 - DNA, 25 bp, Homo sapien
ctttatccgtgggagcagttgggaa

SEQ ID NO: 2762477 - DNA, 25 bp, Homo sapien
ctggtccccaaagaagggtgtgatt

SEQ ID NO: 2762478 - DNA, 25 bp, Homo sapien
ggaatcgtacctgctctgcatggaa

SEQ ID NO: 2762479 - DNA, 25 bp, Homo sapien
catagcatgctattcaaggtcacac

SEQ ID NO: 2762480 - DNA, 25 bp, Homo sapien
ctaaagaccacctccgacttgtggt

SEQ ID NO: 2762481 - DNA, 25 bp, Homo sapien
taaagaccacctccgacttgtggtc

SEQ ID NO: 2762482 - DNA, 25 bp, Homo sapien
ttttctcatgtagcagactctgtgc

SEQ ID NO: 2762483 - DNA, 25 bp, Homo sapien
ggaagagttatgggaaacagagaca

SEQ ID NO: 2762484 - DNA, 25 bp, Homo sapien
tctgtgctttctgatttgagggaag

SEQ ID NO: 2762485 - DNA, 25 bp, Homo sapien
tgcacaagatggctctccacacttt

SEQ ID NO: 2762486 - DNA, 25 bp, Homo sapien
gcgtttttgtagagcataaacttct

SEQ ID NO: 2762487 - DNA, 25 bp, Homo sapien
ccatcattgttcaattgcacgacaa

SEQ ID NO: 2762488 - DNA, 25 bp, Homo sapien
gcaagagcattctggagataactac

SEQ ID NO: 2762489 - DNA, 25 bp, Homo sapien
tgcacgacaacttcatgatgggatc

SEQ ID NO: 2762490 - DNA, 25 bp, Homo sapien
tatttgcacagtgtacttttgtttc

SEQ ID NO: 2762491 - DNA, 25 bp, Homo sapien
gacagctatcttggcgtctccagtg

SEQ ID NO: 2762492 - DNA, 25 bp, Homo sapien
agctatcttggcgtctccagtggcc

SEQ ID NO: 2762493 - DNA, 25 bp, Homo sapien
ttcctttatttcagtcagttgcttt

SEQ ID NO: 2762494 - DNA, 25 bp, Homo sapien
gtgtcattaacactcatccccttgc

SEQ ID NO: 2762495 - DNA, 25 bp, Homo sapien
ttgcgttccacttgacactgacctc

SEQ ID NO: 2762496 - DNA, 25 bp, Homo sapien
gccttttgcgttccacttgacactg

SEQ ID NO: 2762497 - DNA, 25 bp, Homo sapien
cccttgccttttgcgttccacttga

SEQ ID NO: 2762498 - DNA, 25 bp, Homo sapien
tgatatttgtaaggccgagcatggt

SEQ ID NO: 2762499 - DNA, 25 bp, Homo sapien
gaagaatgagaactgagtgaagaag

SEQ ID NO: 2762500 - DNA, 25 bp, Homo sapien
tgggtccctcccactatgtgtgagg

SEQ ID NO: 2762501 - DNA, 25 bp, Homo sapien
caggtttgttggtggacgcttgtaa

SEQ ID NO: 2762502 - DNA, 25 bp, Homo sapien
gcacacgatgagtgcacccactgac

SEQ ID NO: 2762503 - DNA, 25 bp, Homo sapien
tgcgacattgtttaagctggtcgga

SEQ ID NO: 2762504 - DNA, 25 bp, Homo sapien
ggtgcgacattgtttaagctggtcg

SEQ ID NO: 2762505 - DNA, 25 bp, Homo sapien
gctcgcacacgatgagtgcacccac

SEQ ID NO: 2762506 - DNA, 25 bp, Homo sapien
tcttccaaatactccattaaggcag

SEQ ID NO: 2762507 - DNA, 25 bp, Homo sapien
ctgcagatagacataaagtttaggt

SEQ ID NO: 2762508 - DNA, 25 bp, Homo sapien
gcatagatttagcaagagacttgcc

SEQ ID NO: 2762509 - DNA, 25 bp, Homo sapien
taggtttaaacctagatctagctgc

SEQ ID NO: 2762510 - DNA, 25 bp, Homo sapien
gaaagttcatatgcacagcaattgc

SEQ ID NO: 2762511 - DNA, 25 bp, Homo sapien
gcaggaacgatatgggatcggaaca

SEQ ID NO: 2762512 - DNA, 25 bp, Homo sapien
catatgcacagcaattgcatccctc

SEQ ID NO: 2762513 - DNA, 25 bp, Homo sapien
tgggatcggaacagtggagttaaat

SEQ ID NO: 2762514 - DNA, 25 bp, Homo sapien
tagatctttcctccggtccaaaatc

SEQ ID NO: 2762515 - DNA, 25 bp, Homo sapien
gaattgtagatctttcctccggtcc

SEQ ID NO: 2762516 - DNA, 25 bp, Homo sapien
tgtagatctttcctccggtccaaaa

SEQ ID NO: 2762517 - DNA, 25 bp, Homo sapien
agcagaattgtagatctttcctccg

SEQ ID NO: 2762518 - DNA, 25 bp, Homo sapien
caacattatgcttcacaggatattt

SEQ ID NO: 2762519 - DNA, 25 bp, Homo sapien
tccaacattatgcttcacaggatat

SEQ ID NO: 2762520 - DNA, 25 bp, Homo sapien
cattatgcttcacaggatatttcat

SEQ ID NO: 2762521 - DNA, 25 bp, Homo sapien
ttccaacattatgcttcacaggata

SEQ ID NO: 2762522 - DNA, 25 bp, Homo sapien
tccgtgtcattatgacaacaatcac

SEQ ID NO: 2762523 - DNA, 25 bp, Homo sapien
tccttattaagctgatgaaattcca

SEQ ID NO: 2762524 - DNA, 25 bp, Homo sapien
caacaatcacttaggcaagcttttc

SEQ ID NO: 2762525 - DNA, 25 bp, Homo sapien
gcttttccactggttagtgcatgtt

SEQ ID NO: 2762526 - DNA, 25 bp, Homo sapien
ttaattatcacatgctcgacactgg

SEQ ID NO: 2762527 - DNA, 25 bp, Homo sapien
tggagtaaagacatatctggacaac

SEQ ID NO: 2762528 - DNA, 25 bp, Homo sapien
catttccggacatggagtaaagaca

SEQ ID NO: 2762529 - DNA, 25 bp, Homo sapien
cactggtaaacatttccggacatgg

SEQ ID NO: 2762530 - DNA, 25 bp, Homo sapien
aagcagtttagagtaaccctgctta

SEQ ID NO: 2762531 - DNA, 25 bp, Homo sapien
agcagtttagagtaaccctgcttat

SEQ ID NO: 2762532 - DNA, 25 bp, Homo sapien
caagcagtttagagtaaccctgctt

SEQ ID NO: 2762533 - DNA, 25 bp, Homo sapien
tcaagacaaagcttgcaacattaat

SEQ ID NO: 2762534 - DNA, 25 bp, Homo sapien
agataatcagtagaagagattaagg

SEQ ID NO: 2762535 - DNA, 25 bp, Homo sapien
tcaacagaattgataacacttcttc

SEQ ID NO: 2762536 - DNA, 25 bp, Homo sapien
gattaaggggtccatcaacagaatt

SEQ ID NO: 2762537 - DNA, 25 bp, Homo sapien
ttcatccttgccattttcatgttgc

SEQ ID NO: 2762538 - DNA, 25 bp, Homo sapien
gtcttcatccttgccattttcatgt

SEQ ID NO: 2762539 - DNA, 25 bp, Homo sapien
aggtcttcatccttgccattttcat

SEQ ID NO: 2762540 - DNA, 25 bp, Homo sapien
atccttgccattttcatgttgcata

SEQ ID NO: 2762541 - DNA, 25 bp, Homo sapien
tatggtcacactaattgcaagtaca

SEQ ID NO: 2762542 - DNA, 25 bp, Homo sapien
taatacaagtactgtaacacaggca

SEQ ID NO: 2762543 - DNA, 25 bp, Homo sapien
tagtgtacaactttatagccaagga

SEQ ID NO: 2762544 - DNA, 25 bp, Homo sapien
taatttatcgcttttaactgccagc

SEQ ID NO: 2762545 - DNA, 25 bp, Homo sapien
tatgacaagaatcaatagagccctt

SEQ ID NO: 2762546 - DNA, 25 bp, Homo sapien
tgtaacagatttcttaggcaccaca

SEQ ID NO: 2762547 - DNA, 25 bp, Homo sapien
cagtctgtttggaggtttgaatgca

SEQ ID NO: 2762548 - DNA, 25 bp, Homo sapien
ttttctctaagcacactgtgggcct

SEQ ID NO: 2762549 - DNA, 25 bp, Homo sapien
gtatacatcaggagttctgttccag

SEQ ID NO: 2762550 - DNA, 25 bp, Homo sapien
gccttcattaggcttcatctctgcc

SEQ ID NO: 2762551 - DNA, 25 bp, Homo sapien
cattggtcagctctgggttagagcc

SEQ ID NO: 2762552 - DNA, 25 bp, Homo sapien
atacatcaggagttctgttccagca

SEQ ID NO: 2762553 - DNA, 25 bp, Homo sapien
taatgattctactgggatatttctc

SEQ ID NO: 2762554 - DNA, 25 bp, Homo sapien
gactcagactatttgaggctggttt

SEQ ID NO: 2762555 - DNA, 25 bp, Homo sapien
cacatgtcaggcagtggcaggcctt

SEQ ID NO: 2762556 - DNA, 25 bp, Homo sapien
gggtgacccagtgatatcacagact

SEQ ID NO: 2762557 - DNA, 25 bp, Homo sapien
ttattctcaactggcttggcacttg

SEQ ID NO: 2762558 - DNA, 25 bp, Homo sapien
ttggcacttgctctttttgacaaat

SEQ ID NO: 2762559 - DNA, 25 bp, Homo sapien
tattctcaactggcttggcacttgc

SEQ ID NO: 2762560 - DNA, 25 bp, Homo sapien
acagcaattgactgtgacttatttg

SEQ ID NO: 2762561 - DNA, 25 bp, Homo sapien
agtctcaagtagtctatagcaatgc

SEQ ID NO: 2762562 - DNA, 25 bp, Homo sapien
atcccccctgatgttctcatgacag

SEQ ID NO: 2762563 - DNA, 25 bp, Homo sapien
aatgaactaatacagcaattgactg

SEQ ID NO: 2762564 - DNA, 25 bp, Homo sapien
cttaatgatgtaaagagtccagagc

SEQ ID NO: 2762565 - DNA, 25 bp, Homo sapien
gagtccagagctaaatgaagaatca

SEQ ID NO: 2762566 - DNA, 25 bp, Homo sapien
catgaagcaggatcagatgccatcc

SEQ ID NO: 2762567 - DNA, 25 bp, Homo sapien
gaagaatcacatgaagcaggatcag

SEQ ID NO: 2762568 - DNA, 25 bp, Homo sapien
cttgaccaaattttattcaggctcc

SEQ ID NO: 2762569 - DNA, 25 bp, Homo sapien
taggatcatctgtatacttgcttgt

SEQ ID NO: 2762570 - DNA, 25 bp, Homo sapien
gctaaatcagttcggtaagaacctc

SEQ ID NO: 2762571 - DNA, 25 bp, Homo sapien
ggctcctgaaccttgtaggatcatc

SEQ ID NO: 2762572 - DNA, 25 bp, Homo sapien
gttggatgggtattcagatgatcct

SEQ ID NO: 2762573 - DNA, 25 bp, Homo sapien
cttgtattgcattggtagaatataa

SEQ ID NO: 2762574 - DNA, 25 bp, Homo sapien
gggtattcagatgatcctccaaatc

SEQ ID NO: 2762575 - DNA, 25 bp, Homo sapien
gctgtcttgagaaatacatgaatca

SEQ ID NO: 2762576 - DNA, 25 bp, Homo sapien
ctgcttcttcaagaatactgatggc

SEQ ID NO: 2762577 - DNA, 25 bp, Homo sapien
aaagccttcacccataggacagttc

SEQ ID NO: 2762578 - DNA, 25 bp, Homo sapien
tcttcaagaatactgatggcttcaa

SEQ ID NO: 2762579 - DNA, 25 bp, Homo sapien
ggacagttcaagatatgctgcttct

SEQ ID NO: 2762580 - DNA, 25 bp, Homo sapien
ttgctagacaaaagtgagctacgga

SEQ ID NO: 2762581 - DNA, 25 bp, Homo sapien
ctagacaaaagtgagctacggatca

SEQ ID NO: 2762582 - DNA, 25 bp, Homo sapien
gtgcacctaccccaacacactctct

SEQ ID NO: 2762583 - DNA, 25 bp, Homo sapien
tgttgctagacaaaagtgagctacg

SEQ ID NO: 2762584 - DNA, 25 bp, Homo sapien
tactgagcaacctgaattgtgggga

SEQ ID NO: 2762585 - DNA, 25 bp, Homo sapien
gttttctgcatacaatgacagatca

SEQ ID NO: 2762586 - DNA, 25 bp, Homo sapien
tgtggggataagtctgccactgttt

SEQ ID NO: 2762587 - DNA, 25 bp, Homo sapien
gccactgttttctgcatacaatgac

SEQ ID NO: 2762588 - DNA, 25 bp, Homo sapien
ggtgcaaacaggcttgaaatgccta

SEQ ID NO: 2762589 - DNA, 25 bp, Homo sapien
tccttaattacttgaactctcccca

SEQ ID NO: 2762590 - DNA, 25 bp, Homo sapien
ttgaaatgcctaacatgtgggtaga

SEQ ID NO: 2762591 - DNA, 25 bp, Homo sapien
gggtagaccgatcacaatccttaat

SEQ ID NO: 2762592 - DNA, 25 bp, Homo sapien
taaaagggtatcctctctgtctagg

SEQ ID NO: 2762593 - DNA, 25 bp, Homo sapien
catccaatttatggctcttaacgct

SEQ ID NO: 2762594 - DNA, 25 bp, Homo sapien
tctgtctaggatccatatccatcca

SEQ ID NO: 2762595 - DNA, 25 bp, Homo sapien
tgattgccagatttagtgtaaaagg

SEQ ID NO: 2762596 - DNA, 25 bp, Homo sapien
taaggcgtgatctgtcagcagggtc

SEQ ID NO: 2762597 - DNA, 25 bp, Homo sapien
gtagatgacaacatacgctaatttg

SEQ ID NO: 2762598 - DNA, 25 bp, Homo sapien
caaattcgtacctcttcagagatag

SEQ ID NO: 2762599 - DNA, 25 bp, Homo sapien
tgctccttaaacacataaggcgtga

SEQ ID NO: 2762600 - DNA, 25 bp, Homo sapien
ctgcattaggtaatacggttttctg

SEQ ID NO: 2762601 - DNA, 25 bp, Homo sapien
ctttggtggtcaatcctaattccat

SEQ ID NO: 2762602 - DNA, 25 bp, Homo sapien
caaaacgatcagaagtcttggtgac

SEQ ID NO: 2762603 - DNA, 25 bp, Homo sapien
taattccattaatactatacttggc

SEQ ID NO: 2762604 - DNA, 25 bp, Homo sapien
ttaaatgcaacacggatgacaccat

SEQ ID NO: 2762605 - DNA, 25 bp, Homo sapien
taagaagctgattgcgtcccaaact

SEQ ID NO: 2762606 - DNA, 25 bp, Homo sapien
cagccacgatgaccaagattgtttg

SEQ ID NO: 2762607 - DNA, 25 bp, Homo sapien
acaggtacaaggtgattccagctcc

SEQ ID NO: 2762608 - DNA, 25 bp, Homo sapien
tttaacaatcacatgtccttggggg

SEQ ID NO: 2762609 - DNA, 25 bp, Homo sapien
agtacactatttttaacaatcacat

SEQ ID NO: 2762610 - DNA, 25 bp, Homo sapien
ctgaacaagtacactatttttaaca

SEQ ID NO: 2762611 - DNA, 25 bp, Homo sapien
atttttaacaatcacatgtccttgg

SEQ ID NO: 2762612 - DNA, 25 bp, Homo sapien
tgccaacagcttcactcctatttac

SEQ ID NO: 2762613 - DNA, 25 bp, Homo sapien
cactcctatttactccccaactcct

SEQ ID NO: 2762614 - DNA, 25 bp, Homo sapien
tcctccatccccctactgaaaacat

SEQ ID NO: 2762615 - DNA, 25 bp, Homo sapien
attgtctcttttcacagccccagct

SEQ ID NO: 2762616 - DNA, 25 bp, Homo sapien
catgtagcctaggtaaacttcttga

SEQ ID NO: 2762617 - DNA, 25 bp, Homo sapien
gcctaggtaaacttcttgaatctcc

SEQ ID NO: 2762618 - DNA, 25 bp, Homo sapien
agatgtgcttatctggtacaccaag

SEQ ID NO: 2762619 - DNA, 25 bp, Homo sapien
gaatctgttgagagatgtgcttatc

SEQ ID NO: 2762620 - DNA, 25 bp, Homo sapien
gttattctcaggtacaccaagagaa

SEQ ID NO: 2762621 - DNA, 25 bp, Homo sapien
tattctcaggtacaccaagagaaat

SEQ ID NO: 2762622 - DNA, 25 bp, Homo sapien
ttctcaggtacaccaagagaaatac

SEQ ID NO: 2762623 - DNA, 25 bp, Homo sapien
ttagttattctcaggtacaccaaga

SEQ ID NO: 2762624 - DNA, 25 bp, Homo sapien
atagaggagacagcatatgattagc

SEQ ID NO: 2762625 - DNA, 25 bp, Homo sapien
tagaggagacagcatatgattagcc

SEQ ID NO: 2762626 - DNA, 25 bp, Homo sapien
ttgtttatatgcacaattcttgtgc

SEQ ID NO: 2762627 - DNA, 25 bp, Homo sapien
cacagggcaatttgtttatatgcac

SEQ ID NO: 2762628 - DNA, 25 bp, Homo sapien
ttagttctggatggccagtgggccc

SEQ ID NO: 2762629 - DNA, 25 bp, Homo sapien
ccctcccagtagttgacacagggca

SEQ ID NO: 2762630 - DNA, 25 bp, Homo sapien
caatgagcctaaaacagagaatgat

SEQ ID NO: 2762631 - DNA, 25 bp, Homo sapien
aacagaacaaaggagttctcaatga

SEQ ID NO: 2762632 - DNA, 25 bp, Homo sapien
gattggccacgtgtcatttgatgca

SEQ ID NO: 2762633 - DNA, 25 bp, Homo sapien
tttgatgcatatgcttaaacagaac

SEQ ID NO: 2762634 - DNA, 25 bp, Homo sapien
agtccagcacaggtagcaaggactc

SEQ ID NO: 2762635 - DNA, 25 bp, Homo sapien
tccagcacaggtagcaaggactctt

SEQ ID NO: 2762636 - DNA, 25 bp, Homo sapien
aaagtccagcacaggtagcaaggac

SEQ ID NO: 2762637 - DNA, 25 bp, Homo sapien
gaaaagtccagcacaggtagcaagg

SEQ ID NO: 2762638 - DNA, 25 bp, Homo sapien
ctcaggtgttccaaagtgactggcc

SEQ ID NO: 2762639 - DNA, 25 bp, Homo sapien
tggccactggggcaataagtgtttc

SEQ ID NO: 2762640 - DNA, 25 bp, Homo sapien
gatatgttctagctttgacagcaaa

SEQ ID NO: 2762641 - DNA, 25 bp, Homo sapien
tgatatgttctagctttgacagcaa

SEQ ID NO: 2762642 - DNA, 25 bp, Homo sapien
ctccatccaataatgtttaagcaca

SEQ ID NO: 2762643 - DNA, 25 bp, Homo sapien
tttccaactgttgatcggacaatgc

SEQ ID NO: 2762644 - DNA, 25 bp, Homo sapien
gaactgactgagcaatttccaactg

SEQ ID NO: 2762645 - DNA, 25 bp, Homo sapien
cttcaagagaactgactgagcaatt

SEQ ID NO: 2762646 - DNA, 25 bp, Homo sapien
taaataagagcaggtaaggtgaaag

SEQ ID NO: 2762647 - DNA, 25 bp, Homo sapien
ggtaaggtgaaagactttcagagaa

SEQ ID NO: 2762648 - DNA, 25 bp, Homo sapien
attaattaaataagagcaggtaagg

SEQ ID NO: 2762649 - DNA, 25 bp, Homo sapien
aaagactttcagagaatggttaagc

SEQ ID NO: 2762650 - DNA, 25 bp, Homo sapien
cctcggtttctgtactggccaggcc

SEQ ID NO: 2762651 - DNA, 25 bp, Homo sapien
ctctagaataagcaggtgaattaag

SEQ ID NO: 2762652 - DNA, 25 bp, Homo sapien
taacctgttccgacagcagctgggt

SEQ ID NO: 2762653 - DNA, 25 bp, Homo sapien
ttaagagtaatgataacctgttccg

SEQ ID NO: 2762654 - DNA, 25 bp, Homo sapien
ggccctatctccatatcctgctcaa

SEQ ID NO: 2762655 - DNA, 25 bp, Homo sapien
tatctccatatcctgctcaagcctt

SEQ ID NO: 2762656 - DNA, 25 bp, Homo sapien
ggatatcaaattgctgaatgccttc

SEQ ID NO: 2762657 - DNA, 25 bp, Homo sapien
gacccaagtttattgcctggcccta

SEQ ID NO: 2762658 - DNA, 25 bp, Homo sapien
ccagattcacagcaattgcagatag

SEQ ID NO: 2762659 - DNA, 25 bp, Homo sapien
tgtcaaccagattcacagcaattgc

SEQ ID NO: 2762660 - DNA, 25 bp, Homo sapien
cacagcaattgcagataggatatct

SEQ ID NO: 2762661 - DNA, 25 bp, Homo sapien
gggagtgtcaaccagattcacagca

SEQ ID NO: 2762662 - DNA, 25 bp, Homo sapien
gattttatatgacagagctgtgaga

SEQ ID NO: 2762663 - DNA, 25 bp, Homo sapien
agagctgtgagatgtgtgatggtaa

SEQ ID NO: 2762664 - DNA, 25 bp, Homo sapien
tgtgatggtaaatcagaattgtatg

SEQ ID NO: 2762665 - DNA, 25 bp, Homo sapien
aaatcttgattttatatgacagagc

SEQ ID NO: 2762666 - DNA, 25 bp, Homo sapien
ggatgaaattagactatcactgtat

SEQ ID NO: 2762667 - DNA, 25 bp, Homo sapien
tattgattgaatgacagaaggatga

SEQ ID NO: 2762668 - DNA, 25 bp, Homo sapien
tgtcaaactataacccttctgcata

SEQ ID NO: 2762669 - DNA, 25 bp, Homo sapien
catggctctgggtaaatattttttg

SEQ ID NO: 2762670 - DNA, 25 bp, Homo sapien
aaacttacagccaaacataatgggc

SEQ ID NO: 2762671 - DNA, 25 bp, Homo sapien
tccagggtgtgtgtaagtccctcac

SEQ ID NO: 2762672 - DNA, 25 bp, Homo sapien
tgacaaccagaataaggaaccatgg

SEQ ID NO: 2762673 - DNA, 25 bp, Homo sapien
tgaataagtgatgcaccaacaccgt

SEQ ID NO: 2762674 - DNA, 25 bp, Homo sapien
caacgacttcgtcatcatgaaaaag

SEQ ID NO: 2762675 - DNA, 25 bp, Homo sapien
ttcgagcctgtaagttggagtactt

SEQ ID NO: 2762676 - DNA, 25 bp, Homo sapien
atgagttcaacgacttcgtcatcat

SEQ ID NO: 2762677 - DNA, 25 bp, Homo sapien
gagttcaacgacttcgtcatcatga

SEQ ID NO: 2762678 - DNA, 25 bp, Homo sapien
ctgctacaagttgtgcagttaggtc

SEQ ID NO: 2762679 - DNA, 25 bp, Homo sapien
tgtgcagttaggtccctctcttcca

SEQ ID NO: 2762680 - DNA, 25 bp, Homo sapien
tacaagttgtgcagttaggtccctc

SEQ ID NO: 2762681 - DNA, 25 bp, Homo sapien
caagttgtgcagttaggtccctctc

SEQ ID NO: 2762682 - DNA, 25 bp, Homo sapien
ttataagatttgcagttgcgcgcaa

SEQ ID NO: 2762683 - DNA, 25 bp, Homo sapien
taagatttgcagttgcgcgcaacaa

SEQ ID NO: 2762684 - DNA, 25 bp, Homo sapien
tataagatttgcagttgcgcgcaac

SEQ ID NO: 2762685 - DNA, 25 bp, Homo sapien
agatttgcagttgcgcgcaacaaag

SEQ ID NO: 2762686 - DNA, 25 bp, Homo sapien
cttcttcgtccccggagtcctcatc

SEQ ID NO: 2762687 - DNA, 25 bp, Homo sapien
caggtggttgtatcagaatagtact

SEQ ID NO: 2762688 - DNA, 25 bp, Homo sapien
gttgtatcagaatagtacttgcttc

SEQ ID NO: 2762689 - DNA, 25 bp, Homo sapien
tcagaatagtacttgcttctatgct

SEQ ID NO: 2762690 - DNA, 25 bp, Homo sapien
ggaacatcaaaatcaggccagaagc

SEQ ID NO: 2762691 - DNA, 25 bp, Homo sapien
cttgagccattcttaagcagactgg

SEQ ID NO: 2762692 - DNA, 25 bp, Homo sapien
gaattctaagagcacagggttacct

SEQ ID NO: 2762693 - DNA, 25 bp, Homo sapien
tgtttacagcgactagaaagagaac

SEQ ID NO: 2762694 - DNA, 25 bp, Homo sapien
ctgttgtattcacaggtttgaccat

SEQ ID NO: 2762695 - DNA, 25 bp, Homo sapien
cctctgagctgtcaagggttgctgt

SEQ ID NO: 2762696 - DNA, 25 bp, Homo sapien
ctgtcaagggttgctgtctcagctt

SEQ ID NO: 2762697 - DNA, 25 bp, Homo sapien
catttgtatccaagatgttcctctg

SEQ ID NO: 2762698 - DNA, 25 bp, Homo sapien
tgattttcagctcaaggtcttctat

SEQ ID NO: 2762699 - DNA, 25 bp, Homo sapien
cagacagtctagctcagttgcgcag

SEQ ID NO: 2762700 - DNA, 25 bp, Homo sapien
tcagacagtctagctcagttgcgca

SEQ ID NO: 2762701 - DNA, 25 bp, Homo sapien
ttcagacagtctagctcagttgcgc

SEQ ID NO: 2762702 - DNA, 25 bp, Homo sapien
tttcagacagtctagctcagttgcg

SEQ ID NO: 2762703 - DNA, 25 bp, Homo sapien
ctgtggatgataaaagccttagaac

SEQ ID NO: 2762704 - DNA, 25 bp, Homo sapien
aggagtacttatcagaatcctgtcc

SEQ ID NO: 2762705 - DNA, 25 bp, Homo sapien
ataactgtggatgataaaagcctta

SEQ ID NO: 2762706 - DNA, 25 bp, Homo sapien
tattcaggagtacttatcagaatcc

SEQ ID NO: 2762707 - DNA, 25 bp, Homo sapien
tcctcctgaggggaagagttggtct

SEQ ID NO: 2762708 - DNA, 25 bp, Homo sapien
tttcatcctcctcctgaggggaaga

SEQ ID NO: 2762709 - DNA, 25 bp, Homo sapien
tcataaaagtcttccttctcctcag

SEQ ID NO: 2762710 - DNA, 25 bp, Homo sapien
ctgaggggaagagttggtcttgctg

SEQ ID NO: 2762711 - DNA, 25 bp, Homo sapien
ttcagatgagactccatctcttgat

SEQ ID NO: 2762712 - DNA, 25 bp, Homo sapien
ggagccttcagatgagactccatct

SEQ ID NO: 2762713 - DNA, 25 bp, Homo sapien
gccttcagatgagactccatctctt

SEQ ID NO: 2762714 - DNA, 25 bp, Homo sapien
ctgtggagccttcagatgagactcc

SEQ ID NO: 2762715 - DNA, 25 bp, Homo sapien
tggaagtactcctcctaagcctgtg

SEQ ID NO: 2762716 - DNA, 25 bp, Homo sapien
tcattggcggtagcctggaagtact

SEQ ID NO: 2762717 - DNA, 25 bp, Homo sapien
tggcggtagcctggaagtactcctc

SEQ ID NO: 2762718 - DNA, 25 bp, Homo sapien
gagctttgaagggtcattggcggta

SEQ ID NO: 2762719 - DNA, 25 bp, Homo sapien
aaattctaaataaatccatttccat

SEQ ID NO: 2762720 - DNA, 25 bp, Homo sapien
aattctaaataaatccatttccata

SEQ ID NO: 2762721 - DNA, 25 bp, Homo sapien
attctaaataaatccatttccatag

SEQ ID NO: 2762722 - DNA, 25 bp, Homo sapien
agaagaaaattctaaataaatccat

SEQ ID NO: 2762723 - DNA, 25 bp, Homo sapien
ctttttctaatatctggttcttccg

SEQ ID NO: 2762724 - DNA, 25 bp, Homo sapien
gcagaatagggagtggttcagtctt

SEQ ID NO: 2762725 - DNA, 25 bp, Homo sapien
cagagtccgaggattttcagtggca

SEQ ID NO: 2762726 - DNA, 25 bp, Homo sapien
ctggttcttccgaggtcagatttga

SEQ ID NO: 2762727 - DNA, 25 bp, Homo sapien
caagtcttattccggtattttattg

SEQ ID NO: 2762728 - DNA, 25 bp, Homo sapien
ttaagacgagaataacttggtagtg

SEQ ID NO: 2762729 - DNA, 25 bp, Homo sapien
tgtcctttattaagacgagaataac

SEQ ID NO: 2762730 - DNA, 25 bp, Homo sapien
taacttggtagtggcttcacactta

SEQ ID NO: 2762731 - DNA, 25 bp, Homo sapien
tagcaccttgcatcccaaaatttca

SEQ ID NO: 2762732 - DNA, 25 bp, Homo sapien
acactgtgtttagattactcgttac

SEQ ID NO: 2762733 - DNA, 25 bp, Homo sapien
tctctggtgtatatgtggagtaaca

SEQ ID NO: 2762734 - DNA, 25 bp, Homo sapien
gcatggtcccttcataaaggtggca

SEQ ID NO: 2762735 - DNA, 25 bp, Homo sapien
gaatttgacgatgaggccagggata

SEQ ID NO: 2762736 - DNA, 25 bp, Homo sapien
cctgtgaatttgacgatgaggccag

SEQ ID NO: 2762737 - DNA, 25 bp, Homo sapien
caatgacacctgtgaatttgacgat

SEQ ID NO: 2762738 - DNA, 25 bp, Homo sapien
cagcctcaatgacacctgtgaattt

SEQ ID NO: 2762739 - DNA, 25 bp, Homo sapien
tttgagaaaattggtgaaataattc

SEQ ID NO: 2762740 - DNA, 25 bp, Homo sapien
agaaaattggtgaaataattcaaca

SEQ ID NO: 2762741 - DNA, 25 bp, Homo sapien
tgagaaaattggtgaaataattcaa

SEQ ID NO: 2762742 - DNA, 25 bp, Homo sapien
tgaaataattcaacattcactccct

SEQ ID NO: 2762743 - DNA, 25 bp, Homo sapien
agtttaaagtattgtggcactagca

SEQ ID NO: 2762744 - DNA, 25 bp, Homo sapien
tcatcaggaagtaggaaaacattgt

SEQ ID NO: 2762745 - DNA, 25 bp, Homo sapien
tatacttccacatgaattgaaggca

SEQ ID NO: 2762746 - DNA, 25 bp, Homo sapien
tgtaagaactgttaagccaggtatg

SEQ ID NO: 2762747 - DNA, 25 bp, Homo sapien
ccacggatgggtgtgtagaggcccc

SEQ ID NO: 2762748 - DNA, 25 bp, Homo sapien
ggccccctctggattcaaaatagta

SEQ ID NO: 2762749 - DNA, 25 bp, Homo sapien
ttccacggatgggtgtgtagaggcc

SEQ ID NO: 2762750 - DNA, 25 bp, Homo sapien
tgtagaggccccctctggattcaaa

SEQ ID NO: 2762751 - DNA, 25 bp, Homo sapien
tactgatgatagtactttaaaaacg

SEQ ID NO: 2762752 - DNA, 25 bp, Homo sapien
tgatgatagtactttaaaaacgtgt

SEQ ID NO: 2762753 - DNA, 25 bp, Homo sapien
acgtgtttagaaccaaatagcccat

SEQ ID NO: 2762754 - DNA, 25 bp, Homo sapien
ctgatgatagtactttaaaaacgtg

SEQ ID NO: 2762755 - DNA, 25 bp, Homo sapien
tggttgaacttccacttatgaatga

SEQ ID NO: 2762756 - DNA, 25 bp, Homo sapien
ggttgaacttccacttatgaatgag

SEQ ID NO: 2762757 - DNA, 25 bp, Homo sapien
ccaagcctgccaccccccgataggc

SEQ ID NO: 2762758 - DNA, 25 bp, Homo sapien
tcatggttgaacttccacttatgaa

SEQ ID NO: 2762759 - DNA, 25 bp, Homo sapien
aacgctttccgaagtgtccgtgtct

SEQ ID NO: 2762760 - DNA, 25 bp, Homo sapien
ctgtccgcagaacgctttccgaagt

SEQ ID NO: 2762761 - DNA, 25 bp, Homo sapien
gcagaacgctttccgaagtgtccgt

SEQ ID NO: 2762762 - DNA, 25 bp, Homo sapien
tccgcagaacgctttccgaagtgtc

SEQ ID NO: 2762763 - DNA, 25 bp, Homo sapien
cataataagaaaactgtctgggtac

SEQ ID NO: 2762764 - DNA, 25 bp, Homo sapien
cttaagatccataataagaaaactg

SEQ ID NO: 2762765 - DNA, 25 bp, Homo sapien
taagaaaactgtctgggtacttctg

SEQ ID NO: 2762766 - DNA, 25 bp, Homo sapien
tctgggtacttctgatggggattca

SEQ ID NO: 2762767 - DNA, 25 bp, Homo sapien
taagatcccatgtaggcacatcctg

SEQ ID NO: 2762768 - DNA, 25 bp, Homo sapien
tgctcatgctcaacatcctctgcca

SEQ ID NO: 2762769 - DNA, 25 bp, Homo sapien
tttctcagtagccacaatgtgcaat

SEQ ID NO: 2762770 - DNA, 25 bp, Homo sapien
tgcaatgtgtaggaaatgtgcccca

SEQ ID NO: 2762771 - DNA, 25 bp, Homo sapien
acagtaagagcctctccaagagatg

SEQ ID NO: 2762772 - DNA, 25 bp, Homo sapien
ttgctccgtagcacttcaagatatt

SEQ ID NO: 2762773 - DNA, 25 bp, Homo sapien
agtaagagcctctccaagagatgaa

SEQ ID NO: 2762774 - DNA, 25 bp, Homo sapien
aacaattgctccgtagcacttcaag

SEQ ID NO: 2762775 - DNA, 25 bp, Homo sapien
gccttacatatatcgtttcctttaa

SEQ ID NO: 2762776 - DNA, 25 bp, Homo sapien
tgcattaaagtactcatctgctaat

SEQ ID NO: 2762777 - DNA, 25 bp, Homo sapien
tccatattgtcatagtgcctctttg

SEQ ID NO: 2762778 - DNA, 25 bp, Homo sapien
tgtcatagtgcctctttgtaggaat

SEQ ID NO: 2762779 - DNA, 25 bp, Homo sapien
ctgtgggtgaatataggacccacat

SEQ ID NO: 2762780 - DNA, 25 bp, Homo sapien
tgtgggtgaatataggacccacata

SEQ ID NO: 2762781 - DNA, 25 bp, Homo sapien
gttgttgcttgtgtcgtcattgcag

SEQ ID NO: 2762782 - DNA, 25 bp, Homo sapien
gagaggacagatcccatagaggcag

SEQ ID NO: 2762783 - DNA, 25 bp, Homo sapien
taaaggctgggtgacaaatcacaaa

SEQ ID NO: 2762784 - DNA, 25 bp, Homo sapien
gcttgtgtcgtcattgcagtttggg

SEQ ID NO: 2762785 - DNA, 25 bp, Homo sapien
ggtagttaagttgtggtaaatgtga

SEQ ID NO: 2762786 - DNA, 25 bp, Homo sapien
tcaaccaataatgagtgtttcaaaa

SEQ ID NO: 2762787 - DNA, 25 bp, Homo sapien
gtttcaaaataagcagtagacttat

SEQ ID NO: 2762788 - DNA, 25 bp, Homo sapien
cttataacgttcagagggatggtag

SEQ ID NO: 2762789 - DNA, 25 bp, Homo sapien
aacactgccacacaattaaactgag

SEQ ID NO: 2762790 - DNA, 25 bp, Homo sapien
cactgccacacaattaaactgagaa

SEQ ID NO: 2762791 - DNA, 25 bp, Homo sapien
gccacacaattaaactgagaacctt

SEQ ID NO: 2762792 - DNA, 25 bp, Homo sapien
tccaacactgccacacaattaaact

SEQ ID NO: 2762793 - DNA, 25 bp, Homo sapien
ctctttgttctaactgccaatgact

SEQ ID NO: 2762794 - DNA, 25 bp, Homo sapien
ctttgttctaactgccaatgacttt

SEQ ID NO: 2762795 - DNA, 25 bp, Homo sapien
tctttgttctaactgccaatgactt

SEQ ID NO: 2762796 - DNA, 25 bp, Homo sapien
ccgtagacccaacaccatgattagt

SEQ ID NO: 2762797 - DNA, 25 bp, Homo sapien
tcctttgtggtcaccgtagacccaa

SEQ ID NO: 2762798 - DNA, 25 bp, Homo sapien
gcagagcctccttctactgtgcctt

SEQ ID NO: 2762799 - DNA, 25 bp, Homo sapien
tagtgatgacaaaccagattatgac

SEQ ID NO: 2762800 - DNA, 25 bp, Homo sapien
ctggattacatcaaagcgctgatta

SEQ ID NO: 2762801 - DNA, 25 bp, Homo sapien
gctggattacatcaaagcgctgatt

SEQ ID NO: 2762802 - DNA, 25 bp, Homo sapien
ggattacatcaaagcgctgattaga

SEQ ID NO: 2762803 - DNA, 25 bp, Homo sapien
ctgctggattacatcaaagcgctga

SEQ ID NO: 2762804 - DNA, 25 bp, Homo sapien
gaaatcccaaggtaccctctgtcaa

SEQ ID NO: 2762805 - DNA, 25 bp, Homo sapien
gagcagactgagacacaagctgatg

SEQ ID NO: 2762806 - DNA, 25 bp, Homo sapien
tgctcacatcccagttgagcagact

SEQ ID NO: 2762807 - DNA, 25 bp, Homo sapien
agcagcttgaataatctgccctctt

SEQ ID NO: 2762808 - DNA, 25 bp, Homo sapien
ctgtggcagggatattggcaatgca

SEQ ID NO: 2762809 - DNA, 25 bp, Homo sapien
ggcagggatattggcaatgcagccc

SEQ ID NO: 2762810 - DNA, 25 bp, Homo sapien
gaaatctcagcatcaaagtcccact

SEQ ID NO: 2762811 - DNA, 25 bp, Homo sapien
aagaaatctcagcatcaaagtccca

SEQ ID NO: 2762812 - DNA, 25 bp, Homo sapien
gaaagcagtggcttacctcctactg

SEQ ID NO: 2762813 - DNA, 25 bp, Homo sapien
catgatggcttgctcctgaagtctc

SEQ ID NO: 2762814 - DNA, 25 bp, Homo sapien
cacagcacctatgttccccaagaga

SEQ ID NO: 2762815 - DNA, 25 bp, Homo sapien
catgagttagagaccgtcttgggca

SEQ ID NO: 2762816 - DNA, 25 bp, Homo sapien
cgtgattgattatagagattgtgtc

SEQ ID NO: 2762817 - DNA, 25 bp, Homo sapien
gatggtggtcgtgattgattataga

SEQ ID NO: 2762818 - DNA, 25 bp, Homo sapien
tgtcacaatctgcattaaggttgag

SEQ ID NO: 2762819 - DNA, 25 bp, Homo sapien
aaggttgagtttgggctttgacaca

SEQ ID NO: 2762820 - DNA, 25 bp, Homo sapien
aaatggagtcctccttgaagctgct

SEQ ID NO: 2762821 - DNA, 25 bp, Homo sapien
tttgctttgtctcatctcccaaaga

SEQ ID NO: 2762822 - DNA, 25 bp, Homo sapien
aatgaaaattccctgggaaatggag

SEQ ID NO: 2762823 - DNA, 25 bp, Homo sapien
tgggaaatggagtcctccttgaagc

SEQ ID NO: 2762824 - DNA, 25 bp, Homo sapien
acagctcattgctgactttcatggc

SEQ ID NO: 2762825 - DNA, 25 bp, Homo sapien
cagctcattgctgactttcatggca

SEQ ID NO: 2762826 - DNA, 25 bp, Homo sapien
gacagctcattgctgactttcatgg

SEQ ID NO: 2762827 - DNA, 25 bp, Homo sapien
tcttttacaccaattgtcaaaatat

SEQ ID NO: 2762828 - DNA, 25 bp, Homo sapien
cttcttttacaccaattgtcaaaat

SEQ ID NO: 2762829 - DNA, 25 bp, Homo sapien
ttttacaccaattgtcaaaatatcc

SEQ ID NO: 2762830 - DNA, 25 bp, Homo sapien
tacaccaattgtcaaaatatccagg

SEQ ID NO: 2762831 - DNA, 25 bp, Homo sapien
cattctgattccgatttgcagggct

SEQ ID NO: 2762832 - DNA, 25 bp, Homo sapien
tctgattccgatttgcagggctaca

SEQ ID NO: 2762833 - DNA, 25 bp, Homo sapien
tcctgaatactaactgaggacccca

SEQ ID NO: 2762834 - DNA, 25 bp, Homo sapien
gtttcctgaatactaactgaggacc

SEQ ID NO: 2762835 - DNA, 25 bp, Homo sapien
tcatttagatcacagctgaaaaagt

SEQ ID NO: 2762836 - DNA, 25 bp, Homo sapien
ttgtgctcaccatcagatatctgca

SEQ ID NO: 2762837 - DNA, 25 bp, Homo sapien
gatatctgcaaacactggtccctaa

SEQ ID NO: 2762838 - DNA, 25 bp, Homo sapien
tctgagtggaactgcatatgcaaga

SEQ ID NO: 2762839 - DNA, 25 bp, Homo sapien
ctggaatgcccaagttatgtgtaag

SEQ ID NO: 2762840 - DNA, 25 bp, Homo sapien
ctcctggctctacatattcttggaa

SEQ ID NO: 2762841 - DNA, 25 bp, Homo sapien
taagtgtatccgcacccagaggtaa

SEQ ID NO: 2762842 - DNA, 25 bp, Homo sapien
gcacccagaggtaaaactacactgt

SEQ ID NO: 2762843 - DNA, 25 bp, Homo sapien
acagggagcttggagcacgagcggc

SEQ ID NO: 2762844 - DNA, 25 bp, Homo sapien
ctaatcaccagcagtagcatgttct

SEQ ID NO: 2762845 - DNA, 25 bp, Homo sapien
aggaccaaaggttctgcccatcctc

SEQ ID NO: 2762846 - DNA, 25 bp, Homo sapien
gatgcaggaccaaaggttctgccca

SEQ ID NO: 2762847 - DNA, 25 bp, Homo sapien
aaggttctgcccatcctcgacatct

SEQ ID NO: 2762848 - DNA, 25 bp, Homo sapien
gaccaaaggttctgcccatcctcga

SEQ ID NO: 2762849 - DNA, 25 bp, Homo sapien
ttcttctccaaggataaatctcatc

SEQ ID NO: 2762850 - DNA, 25 bp, Homo sapien
aatgttcaaaaagcatggtatttgt

SEQ ID NO: 2762851 - DNA, 25 bp, Homo sapien
cttctccaaggataaatctcatcag

SEQ ID NO: 2762852 - DNA, 25 bp, Homo sapien
tcatgtgagacggttacgaaaatgt

SEQ ID NO: 2762853 - DNA, 25 bp, Homo sapien
tgagggcggcagagagacataagac

SEQ ID NO: 2762854 - DNA, 25 bp, Homo sapien
gcagagagacataagacaggtgaaa

SEQ ID NO: 2762855 - DNA, 25 bp, Homo sapien
ctgagggcggcagagagacataaga

SEQ ID NO: 2762856 - DNA, 25 bp, Homo sapien
gagagacataagacaggtgaaaaga

SEQ ID NO: 2762857 - DNA, 25 bp, Homo sapien
ttctgtaaaaattctgaagtttcca

SEQ ID NO: 2762858 - DNA, 25 bp, Homo sapien
ttttgtccttctgtaaaaattctga

SEQ ID NO: 2762859 - DNA, 25 bp, Homo sapien
tctgtaaaaattctgaagtttccac

SEQ ID NO: 2762860 - DNA, 25 bp, Homo sapien
tgtccttctgtaaaaattctgaagt

SEQ ID NO: 2762861 - DNA, 25 bp, Homo sapien
aggcggtgttttttgacagtgcttc

SEQ ID NO: 2762862 - DNA, 25 bp, Homo sapien
ttgacagtgcttccctaataactac

SEQ ID NO: 2762863 - DNA, 25 bp, Homo sapien
ggcggtgttttttgacagtgcttcc

SEQ ID NO: 2762864 - DNA, 25 bp, Homo sapien
tatttctggccttaaactcacttaa

SEQ ID NO: 2762865 - DNA, 25 bp, Homo sapien
caaggaattcagttcagtgaaacag

SEQ ID NO: 2762866 - DNA, 25 bp, Homo sapien
taattgcaaggaattcagttcagtg

SEQ ID NO: 2762867 - DNA, 25 bp, Homo sapien
aaacatcgtattttattgctagccc

SEQ ID NO: 2762868 - DNA, 25 bp, Homo sapien
ggatccatcattgaacacctcttca

SEQ ID NO: 2762869 - DNA, 25 bp, Homo sapien
ataagcttgccttgtttaatattca

SEQ ID NO: 2762870 - DNA, 25 bp, Homo sapien
caaaaccaaatataagcttgccttg

SEQ ID NO: 2762871 - DNA, 25 bp, Homo sapien
ccttttttcggatccatcattgaac

SEQ ID NO: 2762872 - DNA, 25 bp, Homo sapien
taatttttgccatctgtgcacactt

SEQ ID NO: 2762873 - DNA, 25 bp, Homo sapien
tttgccatctgtgcacacttttatc

SEQ ID NO: 2762874 - DNA, 25 bp, Homo sapien
gccatctgtgcacacttttatctca

SEQ ID NO: 2762875 - DNA, 25 bp, Homo sapien
tttttgccatctgtgcacactttta

SEQ ID NO: 2762876 - DNA, 25 bp, Homo sapien
tacagtaataggctgttttttcttg

SEQ ID NO: 2762877 - DNA, 25 bp, Homo sapien
acagtaataggctgttttttcttgc

SEQ ID NO: 2762878 - DNA, 25 bp, Homo sapien
cagtaataggctgttttttcttgca

SEQ ID NO: 2762879 - DNA, 25 bp, Homo sapien
cttcctctgagaccattgctggagc

SEQ ID NO: 2762880 - DNA, 25 bp, Homo sapien
ctacttcctctgagaccattgctgg

SEQ ID NO: 2762881 - DNA, 25 bp, Homo sapien
ttgctggagcaatttcatcgaggtc

SEQ ID NO: 2762882 - DNA, 25 bp, Homo sapien
tcgaggtctacagccactaccacta

SEQ ID NO: 2762883 - DNA, 25 bp, Homo sapien
cagatgatgcatccagctcattcat

SEQ ID NO: 2762884 - DNA, 25 bp, Homo sapien
aaagccttttagcaaactggtggat

SEQ ID NO: 2762885 - DNA, 25 bp, Homo sapien
ttttagcaaactggtggatgcctgt

SEQ ID NO: 2762886 - DNA, 25 bp, Homo sapien
gctgccatcctcagatgatgcatcc

SEQ ID NO: 2762887 - DNA, 25 bp, Homo sapien
tgtaaaaacaaccatcgctcctagg

SEQ ID NO: 2762888 - DNA, 25 bp, Homo sapien
tactttgcccctttgtatgccatgt

SEQ ID NO: 2762889 - DNA, 25 bp, Homo sapien
tctttgtcagacagctcataggtct

SEQ ID NO: 2762890 - DNA, 25 bp, Homo sapien
gggttctcttttagctcatttggca

SEQ ID NO: 2762891 - DNA, 25 bp, Homo sapien
ttcttccattgatttgcaggctatt

SEQ ID NO: 2762892 - DNA, 25 bp, Homo sapien
gattccaaagtatctgactatgagg

SEQ ID NO: 2762893 - DNA, 25 bp, Homo sapien
tcagtgccttcggaggactggccga

SEQ ID NO: 2762894 - DNA, 25 bp, Homo sapien
gaggactggccgacgattccaaagt

SEQ ID NO: 2762895 - DNA, 25 bp, Homo sapien
agctgctcaatacctgaactttcaa

SEQ ID NO: 2762896 - DNA, 25 bp, Homo sapien
gagctgctcaatacctgaactttca

SEQ ID NO: 2762897 - DNA, 25 bp, Homo sapien
gctgctcaatacctgaactttcaaa

SEQ ID NO: 2762898 - DNA, 25 bp, Homo sapien
gaatgactacaaactcctctctagg

SEQ ID NO: 2762899 - DNA, 25 bp, Homo sapien
aatttttgcatctggccatttggcc

SEQ ID NO: 2762900 - DNA, 25 bp, Homo sapien
cttaaaagaatagccctacagtggg

SEQ ID NO: 2762901 - DNA, 25 bp, Homo sapien
tttgggcaccatccgattttgactg

SEQ ID NO: 2762902 - DNA, 25 bp, Homo sapien
cacgtggttaggaatcttggtatgc

SEQ ID NO: 2762903 - DNA, 25 bp, Homo sapien
tgataacccagcttgaacacagcct

SEQ ID NO: 2762904 - DNA, 25 bp, Homo sapien
agtatttcttaatgcagcctgcctg

SEQ ID NO: 2762905 - DNA, 25 bp, Homo sapien
caaactaatgtgctcgaagggaagg

SEQ ID NO: 2762906 - DNA, 25 bp, Homo sapien
gttaaaacctacatgccacaatggt

SEQ ID NO: 2762907 - DNA, 25 bp, Homo sapien
ttgttaaaacctacatgccacaatg

SEQ ID NO: 2762908 - DNA, 25 bp, Homo sapien
tgttaaaacctacatgccacaatgg

SEQ ID NO: 2762909 - DNA, 25 bp, Homo sapien
ttattgatcaactggatgaaaggag

SEQ ID NO: 2762910 - DNA, 25 bp, Homo sapien
cagttctatggcattgcccttcatt

SEQ ID NO: 2762911 - DNA, 25 bp, Homo sapien
ttgatcaactggatgaaaggagcaa

SEQ ID NO: 2762912 - DNA, 25 bp, Homo sapien
cttctattaaaacccaagcacacag

SEQ ID NO: 2762913 - DNA, 25 bp, Homo sapien
tacgttccacgtgcagacaagaaga

SEQ ID NO: 2762914 - DNA, 25 bp, Homo sapien
cactgcttttgatgcatttcagaga

SEQ ID NO: 2762915 - DNA, 25 bp, Homo sapien
ggtcatatgtcaattttaagtccag

SEQ ID NO: 2762916 - DNA, 25 bp, Homo sapien
tactttcgttccacagtgatccaag

SEQ ID NO: 2762917 - DNA, 25 bp, Homo sapien
gtgatgatcatgtgataaagcttcc

SEQ ID NO: 2762918 - DNA, 25 bp, Homo sapien
cagtgatgatcatgtgataaagctt

SEQ ID NO: 2762919 - DNA, 25 bp, Homo sapien
tacagtgatgatcatgtgataaagc

SEQ ID NO: 2762920 - DNA, 25 bp, Homo sapien
acagtgatgatcatgtgataaagct

SEQ ID NO: 2762921 - DNA, 25 bp, Homo sapien
aacagcatggattctcggtgatgtc

SEQ ID NO: 2762922 - DNA, 25 bp, Homo sapien
cagacacggaagtcatgaccacaaa

SEQ ID NO: 2762923 - DNA, 25 bp, Homo sapien
tgcgaatcaacaaagggtagtccgg

SEQ ID NO: 2762924 - DNA, 25 bp, Homo sapien
gggaattaacctcacacaaacagat

SEQ ID NO: 2762925 - DNA, 25 bp, Homo sapien
ggcaaggcttctgtctctagcctga

SEQ ID NO: 2762926 - DNA, 25 bp, Homo sapien
gcctgatgacccctagtttcatcaa

SEQ ID NO: 2762927 - DNA, 25 bp, Homo sapien
gtctctagcctgatgacccctagtt

SEQ ID NO: 2762928 - DNA, 25 bp, Homo sapien
cagagacaaactgagtctggcaagg

SEQ ID NO: 2762929 - DNA, 25 bp, Homo sapien
gaggagaaggatgaaattgctgact

SEQ ID NO: 2762930 - DNA, 25 bp, Homo sapien
ggagaaggatgaaattgctgacttc

SEQ ID NO: 2762931 - DNA, 25 bp, Homo sapien
tctttgttggtcttgttatgatttg

SEQ ID NO: 2762932 - DNA, 25 bp, Homo sapien
cttggttttccatgctctttgttgg

SEQ ID NO: 2762933 - DNA, 25 bp, Homo sapien
tgtcatgctcatgagacggcagatt

SEQ ID NO: 2762934 - DNA, 25 bp, Homo sapien
tcaaactgaaggatcataactactt

SEQ ID NO: 2762935 - DNA, 25 bp, Homo sapien
gagacggcagattcactcccttgtt

SEQ ID NO: 2762936 - DNA, 25 bp, Homo sapien
actgaaggatcataactacttctta

SEQ ID NO: 2762937 - DNA, 25 bp, Homo sapien
gatacccaacagactttgttctgaa

SEQ ID NO: 2762938 - DNA, 25 bp, Homo sapien
cagcatattttatcctatggcccat

SEQ ID NO: 2762939 - DNA, 25 bp, Homo sapien
cccgaagaacagcatattttatcct

SEQ ID NO: 2762940 - DNA, 25 bp, Homo sapien
ccacaataacccgaagaacagcata

SEQ ID NO: 2762941 - DNA, 25 bp, Homo sapien
gccttcatcacagaacctgtcgttt

SEQ ID NO: 2762942 - DNA, 25 bp, Homo sapien
cttcatcacagaacctgtcgtttct

SEQ ID NO: 2762943 - DNA, 25 bp, Homo sapien
tccatttgcatagagccttcatcac

SEQ ID NO: 2762944 - DNA, 25 bp, Homo sapien
ttccatttgcatagagccttcatca

SEQ ID NO: 2762945 - DNA, 25 bp, Homo sapien
cactttgctaggactcatttcttcc

SEQ ID NO: 2762946 - DNA, 25 bp, Homo sapien
caacacactttgctaggactcattt

SEQ ID NO: 2762947 - DNA, 25 bp, Homo sapien
tctgcttccaacacactttgctagg

SEQ ID NO: 2762948 - DNA, 25 bp, Homo sapien
gcttccaacacactttgctaggact

SEQ ID NO: 2762949 - DNA, 25 bp, Homo sapien
ccgtcacccaagtatgtttgcaaac

SEQ ID NO: 2762950 - DNA, 25 bp, Homo sapien
cgtcacccaagtatgtttgcaaact

SEQ ID NO: 2762951 - DNA, 25 bp, Homo sapien
cccgtcacccaagtatgtttgcaaa

SEQ ID NO: 2762952 - DNA, 25 bp, Homo sapien
tcacccaagtatgtttgcaaactat

SEQ ID NO: 2762953 - DNA, 25 bp, Homo sapien
gttcccaagaatacaaacattgctt

SEQ ID NO: 2762954 - DNA, 25 bp, Homo sapien
caaacattgcttaagggactaagag

SEQ ID NO: 2762955 - DNA, 25 bp, Homo sapien
cattgcttaagggactaagaggttt

SEQ ID NO: 2762956 - DNA, 25 bp, Homo sapien
gaatacaaacattgcttaagggact

SEQ ID NO: 2762957 - DNA, 25 bp, Homo sapien
taagctggtaatgtcctgaccacca

SEQ ID NO: 2762958 - DNA, 25 bp, Homo sapien
ctgtgtgatgtattagacttctgta

SEQ ID NO: 2762959 - DNA, 25 bp, Homo sapien
tagacttctgtaagctggtaatgtc

SEQ ID NO: 2762960 - DNA, 25 bp, Homo sapien
gaccaccacctgcactgtcaattaa

SEQ ID NO: 2762961 - DNA, 25 bp, Homo sapien
cattaaatgagctgactgactcact

SEQ ID NO: 2762962 - DNA, 25 bp, Homo sapien
tttcaatggattcaaattatgggcc

SEQ ID NO: 2762963 - DNA, 25 bp, Homo sapien
cactcattcttgctattaataaaga

SEQ ID NO: 2762964 - DNA, 25 bp, Homo sapien
ttatgggccagatcattaaatgagc

SEQ ID NO: 2762965 - DNA, 25 bp, Homo sapien
ggtaataacgacaataggtagttca

SEQ ID NO: 2762966 - DNA, 25 bp, Homo sapien
gtttcttcattagcagtggtaataa

SEQ ID NO: 2762967 - DNA, 25 bp, Homo sapien
cccacagtaatcagaaagaggcatt

SEQ ID NO: 2762968 - DNA, 25 bp, Homo sapien
attgctcgccttctcctatggtttc

SEQ ID NO: 2762969 - DNA, 25 bp, Homo sapien
caagagccagattaagggaaatttt

SEQ ID NO: 2762970 - DNA, 25 bp, Homo sapien
gcaagtccctcctatcaagagccag

SEQ ID NO: 2762971 - DNA, 25 bp, Homo sapien
gacaacctggcatagtgcgggcttt

SEQ ID NO: 2762972 - DNA, 25 bp, Homo sapien
tccatgaagtgattaaaatgcagcc

SEQ ID NO: 2762973 - DNA, 25 bp, Homo sapien
tactgtggttttaaggcttaggtgc

SEQ ID NO: 2762974 - DNA, 25 bp, Homo sapien
gacaaacttgtcaaaagcctccagg

SEQ ID NO: 2762975 - DNA, 25 bp, Homo sapien
ggactttgtcagttatgtcagaaac

SEQ ID NO: 2762976 - DNA, 25 bp, Homo sapien
gcccattcattaggttgacaaactt

SEQ ID NO: 2762977 - DNA, 25 bp, Homo sapien
aattgtatccacatcaacatctgag

SEQ ID NO: 2762978 - DNA, 25 bp, Homo sapien
cagctatcatgtcatgtagttttat

SEQ ID NO: 2762979 - DNA, 25 bp, Homo sapien
ttagtcaacactgccatgtccaatg

SEQ ID NO: 2762980 - DNA, 25 bp, Homo sapien
ccaatggtaaataagtttgctaagg

SEQ ID NO: 2762981 - DNA, 25 bp, Homo sapien
tgtcatgtagttttatgctgagtgc

SEQ ID NO: 2762982 - DNA, 25 bp, Homo sapien
caaatgcaagccctttttgttagag

SEQ ID NO: 2762983 - DNA, 25 bp, Homo sapien
taccactccccggaccaatcaaatg

SEQ ID NO: 2762984 - DNA, 25 bp, Homo sapien
gtgaggtctcgtgagaaacgcatgc

SEQ ID NO: 2762985 - DNA, 25 bp, Homo sapien
ggtctcgtgagaaacgcatgctctc

SEQ ID NO: 2762986 - DNA, 25 bp, Homo sapien
aatttagggaagtcgcccaaatgca

SEQ ID NO: 2762987 - DNA, 25 bp, Homo sapien
aaggaatcacacttcagcagaaggc

SEQ ID NO: 2762988 - DNA, 25 bp, Homo sapien
atagaccagcggtgcacctcatacc

SEQ ID NO: 2762989 - DNA, 25 bp, Homo sapien
gatgcatttggaattacaaaagtta

SEQ ID NO: 2762990 - DNA, 25 bp, Homo sapien
ttcccctgaacaaggcagggattca

SEQ ID NO: 2762991 - DNA, 25 bp, Homo sapien
tcccctgaacaaggcagggattcac

SEQ ID NO: 2762992 - DNA, 25 bp, Homo sapien
ccctgaacaaggcagggattcacca

SEQ ID NO: 2762993 - DNA, 25 bp, Homo sapien
cctgaacaaggcagggattcaccat

SEQ ID NO: 2762994 - DNA, 25 bp, Homo sapien
tttctatgttgaagctgccacatac

SEQ ID NO: 2762995 - DNA, 25 bp, Homo sapien
ttctatgttgaagctgccacatacc

SEQ ID NO: 2762996 - DNA, 25 bp, Homo sapien
tttttctatgttgaagctgccacat

SEQ ID NO: 2762997 - DNA, 25 bp, Homo sapien
ttttctatgttgaagctgccacata

SEQ ID NO: 2762998 - DNA, 25 bp, Homo sapien
tttagaggatcacaggaaaactgag

SEQ ID NO: 2762999 - DNA, 25 bp, Homo sapien
gtgtttagaggatcacaggaaaact

SEQ ID NO: 2763000 - DNA, 25 bp, Homo sapien
tccacagaggcaacatcaagtgcaa

SEQ ID NO: 2763001 - DNA, 25 bp, Homo sapien
tgagaatagcaagccatgacaaagt

SEQ ID NO: 2763002 - DNA, 25 bp, Homo sapien
actgaattgggccatcctgcggtaa

SEQ ID NO: 2763003 - DNA, 25 bp, Homo sapien
ctgcataatatgatgttgggactga

SEQ ID NO: 2763004 - DNA, 25 bp, Homo sapien
cagggaattgtaactcatctgcata

SEQ ID NO: 2763005 - DNA, 25 bp, Homo sapien
acaactgtgctaaattagactcaac

SEQ ID NO: 2763006 - DNA, 25 bp, Homo sapien
gatttgcctcactgaaatatttgcc

SEQ ID NO: 2763007 - DNA, 25 bp, Homo sapien
tgcctcactgaaatatttgccttta

SEQ ID NO: 2763008 - DNA, 25 bp, Homo sapien
tggatttgcctcactgaaatatttg

SEQ ID NO: 2763009 - DNA, 25 bp, Homo sapien
ctttggatttgcctcactgaaatat

SEQ ID NO: 2763010 - DNA, 25 bp, Homo sapien
cttcttctgaactttgacggttctt

SEQ ID NO: 2763011 - DNA, 25 bp, Homo sapien
tggagatgcatcagtaagctttagc

SEQ ID NO: 2763012 - DNA, 25 bp, Homo sapien
tgcatcagtaagctttagcataacc

SEQ ID NO: 2763013 - DNA, 25 bp, Homo sapien
gatgcatcagtaagctttagcataa

SEQ ID NO: 2763014 - DNA, 25 bp, Homo sapien
gagatgcatcagtaagctttagcat

SEQ ID NO: 2763015 - DNA, 25 bp, Homo sapien
ccatgctggactgtcagtgtatcta

SEQ ID NO: 2763016 - DNA, 25 bp, Homo sapien
aggtcacttaaggatccgatcaaat

SEQ ID NO: 2763017 - DNA, 25 bp, Homo sapien
tacaaaatgttttcggacttgagct

SEQ ID NO: 2763018 - DNA, 25 bp, Homo sapien
gggtgtaatgagtaattaactggaa

SEQ ID NO: 2763019 - DNA, 25 bp, Homo sapien
tgggccctgcaggtaaatttttgat

SEQ ID NO: 2763020 - DNA, 25 bp, Homo sapien
taaatttatatcctgggccctgcag

SEQ ID NO: 2763021 - DNA, 25 bp, Homo sapien
ctaaatttatatcctgggccctgca

SEQ ID NO: 2763022 - DNA, 25 bp, Homo sapien
gcaggtaaatttttgatggcatctg

SEQ ID NO: 2763023 - DNA, 25 bp, Homo sapien
ctatagtttcatgaggtatgacctt

SEQ ID NO: 2763024 - DNA, 25 bp, Homo sapien
tctatagtttcatgaggtatgacct

SEQ ID NO: 2763025 - DNA, 25 bp, Homo sapien
tgtttctatagtttcatgaggtatg

SEQ ID NO: 2763026 - DNA, 25 bp, Homo sapien
tttctatagtttcatgaggtatgac

SEQ ID NO: 2763027 - DNA, 25 bp, Homo sapien
caccagaagggcaagcacatgtgca

SEQ ID NO: 2763028 - DNA, 25 bp, Homo sapien
catgcatgcggagccctttcctcat

SEQ ID NO: 2763029 - DNA, 25 bp, Homo sapien
cacttggataaggagaacgaggatt

SEQ ID NO: 2763030 - DNA, 25 bp, Homo sapien
tgtgcataggtaagaaaaagcatac

SEQ ID NO: 2763031 - DNA, 25 bp, Homo sapien
aatacatccgcaagctgaaggcagg

SEQ ID NO: 2763032 - DNA, 25 bp, Homo sapien
atacatccgcaagctgaaggcaggc

SEQ ID NO: 2763033 - DNA, 25 bp, Homo sapien
tacatccgcaagctgaaggcaggca

SEQ ID NO: 2763034 - DNA, 25 bp, Homo sapien
gagttcacaacacaggataagggga

SEQ ID NO: 2763035 - DNA, 25 bp, Homo sapien
gaaagtctaattccactagtaaagc

SEQ ID NO: 2763036 - DNA, 25 bp, Homo sapien
aacaaacactgattcatgtgcagag

SEQ ID NO: 2763037 - DNA, 25 bp, Homo sapien
gggcaccgacgtaaacacactgaaa

SEQ ID NO: 2763038 - DNA, 25 bp, Homo sapien
ccactaagttcatattcagactcca

SEQ ID NO: 2763039 - DNA, 25 bp, Homo sapien
gcagccactaagttcatattcagac

SEQ ID NO: 2763040 - DNA, 25 bp, Homo sapien
tggagttgcagccactaagttcata

SEQ ID NO: 2763041 - DNA, 25 bp, Homo sapien
gttgcagccactaagttcatattca

SEQ ID NO: 2763042 - DNA, 25 bp, Homo sapien
agtgggatgaggtaagggaagtagg

SEQ ID NO: 2763043 - DNA, 25 bp, Homo sapien
cttttacattaattggattttccat

SEQ ID NO: 2763044 - DNA, 25 bp, Homo sapien
agggctttcacttttacattaattg

SEQ ID NO: 2763045 - DNA, 25 bp, Homo sapien
gaagtgggatgaggtaagggaagta

SEQ ID NO: 2763046 - DNA, 25 bp, Homo sapien
tgggccaggacacatcgtatcgatg

SEQ ID NO: 2763047 - DNA, 25 bp, Homo sapien
ttgagggaaactgacttaagaggct

SEQ ID NO: 2763048 - DNA, 25 bp, Homo sapien
gctggtagataatcctgttcagagc

SEQ ID NO: 2763049 - DNA, 25 bp, Homo sapien
tcccaaggcagactgatgagcagaa

SEQ ID NO: 2763050 - DNA, 25 bp, Homo sapien
acattctattagaccagtggtaagg

SEQ ID NO: 2763051 - DNA, 25 bp, Homo sapien
tattagaccagtggtaaggctgaac

SEQ ID NO: 2763052 - DNA, 25 bp, Homo sapien
tatagagcacattctattagaccag

SEQ ID NO: 2763053 - DNA, 25 bp, Homo sapien
ccagtggtaaggctgaacttcatca

SEQ ID NO: 2763054 - DNA, 25 bp, Homo sapien
cattagaggctgttattgctataaa

SEQ ID NO: 2763055 - DNA, 25 bp, Homo sapien
gcaggatgataaaatcgaagatttt

SEQ ID NO: 2763056 - DNA, 25 bp, Homo sapien
caatataagtaatttgggagtacaa

SEQ ID NO: 2763057 - DNA, 25 bp, Homo sapien
catttgaatcagtgtcacatggaca

SEQ ID NO: 2763058 - DNA, 25 bp, Homo sapien
ggatgttatctggaatggcagcaaa

SEQ ID NO: 2763059 - DNA, 25 bp, Homo sapien
atgttatctggaatggcagcaaaaa

SEQ ID NO: 2763060 - DNA, 25 bp, Homo sapien
gaggatgttatctggaatggcagca

SEQ ID NO: 2763061 - DNA, 25 bp, Homo sapien
cgaggatgttatctggaatggcagc

SEQ ID NO: 2763062 - DNA, 25 bp, Homo sapien
catttgctgcatcctccgcattgct

SEQ ID NO: 2763063 - DNA, 25 bp, Homo sapien
tcctccgcattgctccctagatctg

SEQ ID NO: 2763064 - DNA, 25 bp, Homo sapien
gcatcagatctgcttaatgtcactc

SEQ ID NO: 2763065 - DNA, 25 bp, Homo sapien
cagggctactgccacaatgttagca

SEQ ID NO: 2763066 - DNA, 25 bp, Homo sapien
catattgggcagtctacaagaaacg

SEQ ID NO: 2763067 - DNA, 25 bp, Homo sapien
tgtaaatggaccacagtaaacatat

SEQ ID NO: 2763068 - DNA, 25 bp, Homo sapien
aacgctggagatgaacaatttagcc

SEQ ID NO: 2763069 - DNA, 25 bp, Homo sapien
tacaagaaacgctggagatgaacaa

SEQ ID NO: 2763070 - DNA, 25 bp, Homo sapien
cctggtatttgtgcttcgtgaacta

SEQ ID NO: 2763071 - DNA, 25 bp, Homo sapien
tcaaggcattgatgttttgcttccc

SEQ ID NO: 2763072 - DNA, 25 bp, Homo sapien
tccctgggatgtaagaccacctggt

SEQ ID NO: 2763073 - DNA, 25 bp, Homo sapien
tgtataataccaacagcccagtgag

SEQ ID NO: 2763074 - DNA, 25 bp, Homo sapien
tagctagaaggaccatatgcacaag

SEQ ID NO: 2763075 - DNA, 25 bp, Homo sapien
cacaagaaactgcttgcagtgaaca

SEQ ID NO: 2763076 - DNA, 25 bp, Homo sapien
cagtgaacatgacatatgtcatacc

SEQ ID NO: 2763077 - DNA, 25 bp, Homo sapien
gatgggctcctctagctagaaggac

SEQ ID NO: 2763078 - DNA, 25 bp, Homo sapien
gcttccctagatcacgaatatctgg

SEQ ID NO: 2763079 - DNA, 25 bp, Homo sapien
ctggttttgggtaaattggtctgct

SEQ ID NO: 2763080 - DNA, 25 bp, Homo sapien
tgatcatttattggactggttttgg

SEQ ID NO: 2763081 - DNA, 25 bp, Homo sapien
aatatctggtaatgaggaaggtgga

SEQ ID NO: 2763082 - DNA, 25 bp, Homo sapien
ttttcctagtttcaaatgttatatc

SEQ ID NO: 2763083 - DNA, 25 bp, Homo sapien
cttttcctagtttcaaatgttatat

SEQ ID NO: 2763084 - DNA, 25 bp, Homo sapien
tgttatatcatttactgaaagttga

SEQ ID NO: 2763085 - DNA, 25 bp, Homo sapien
tatcatttactgaaagttgagggac

SEQ ID NO: 2763086 - DNA, 25 bp, Homo sapien
ttttctcggaaaatatcagccccga

SEQ ID NO: 2763087 - DNA, 25 bp, Homo sapien
tccccactgggttgatcatcacttt

SEQ ID NO: 2763088 - DNA, 25 bp, Homo sapien
ctttccctgttgtctatggaaacat

SEQ ID NO: 2763089 - DNA, 25 bp, Homo sapien
tcagccccgaccttaaatgtatcag

SEQ ID NO: 2763090 - DNA, 25 bp, Homo sapien
acattttcaagatgcgaacaattgt

SEQ ID NO: 2763091 - DNA, 25 bp, Homo sapien
attttcaagatgcgaacaattgtca

SEQ ID NO: 2763092 - DNA, 25 bp, Homo sapien
gtacattttcaagatgcgaacaatt

SEQ ID NO: 2763093 - DNA, 25 bp, Homo sapien
ttttcaagatgcgaacaattgtcat

SEQ ID NO: 2763094 - DNA, 25 bp, Homo sapien
aggtttgtgcaaggcaatcgtctgc

SEQ ID NO: 2763095 - DNA, 25 bp, Homo sapien
acttccaatggcaccagaaaggttt

SEQ ID NO: 2763096 - DNA, 25 bp, Homo sapien
taatactcagggtcattcttgggct

SEQ ID NO: 2763097 - DNA, 25 bp, Homo sapien
gcccacaacagcagggtgactgtct

SEQ ID NO: 2763098 - DNA, 25 bp, Homo sapien
caacattaagcatgttaataaccag

SEQ ID NO: 2763099 - DNA, 25 bp, Homo sapien
tcaggtccctggagttcacgcagac

SEQ ID NO: 2763100 - DNA, 25 bp, Homo sapien
gcaagtcgtttgaccaagccggcct

SEQ ID NO: 2763101 - DNA, 25 bp, Homo sapien
taaccagaacactcctgcaagtcgt

SEQ ID NO: 2763102 - DNA, 25 bp, Homo sapien
caaaaaggtttccaagtgcgatggt

SEQ ID NO: 2763103 - DNA, 25 bp, Homo sapien
gaccacggtgttgagtcccgcatca

SEQ ID NO: 2763104 - DNA, 25 bp, Homo sapien
tgaaatgtgtgcagtcgaccacggt

SEQ ID NO: 2763105 - DNA, 25 bp, Homo sapien
gaagttctgcactgaaccaaaaagg

SEQ ID NO: 2763106 - DNA, 25 bp, Homo sapien
ttcttttcttctctctcttgctttt

SEQ ID NO: 2763107 - DNA, 25 bp, Homo sapien
ctctcttgcttttcttttcttataa

SEQ ID NO: 2763108 - DNA, 25 bp, Homo sapien
gccaccatgacagtgtcatggtttc

SEQ ID NO: 2763109 - DNA, 25 bp, Homo sapien
ctgccaccatgacagtgtcatggtt

SEQ ID NO: 2763110 - DNA, 25 bp, Homo sapien
tgcaaaccaagattcacaccaacat

SEQ ID NO: 2763111 - DNA, 25 bp, Homo sapien
ccactgatcagaacacagtttgcta

SEQ ID NO: 2763112 - DNA, 25 bp, Homo sapien
acaccaacatccagaccccactgat

SEQ ID NO: 2763113 - DNA, 25 bp, Homo sapien
gctgttgtgaaatctgagacttgtc

SEQ ID NO: 2763114 - DNA, 25 bp, Homo sapien
tgcttggcccaagcaaatagagccc

SEQ ID NO: 2763115 - DNA, 25 bp, Homo sapien
tctaaagcatgcttggcccaagcaa

SEQ ID NO: 2763116 - DNA, 25 bp, Homo sapien
caagcaaatagagccctgattcatt

SEQ ID NO: 2763117 - DNA, 25 bp, Homo sapien
ttggcccaagcaaatagagccctga

SEQ ID NO: 2763118 - DNA, 25 bp, Homo sapien
taaaaaggaagtggccaagcggtgc

SEQ ID NO: 2763119 - DNA, 25 bp, Homo sapien
gcatatcatgccatggccttgggaa

SEQ ID NO: 2763120 - DNA, 25 bp, Homo sapien
catcagcaggatcaaataacagaac

SEQ ID NO: 2763121 - DNA, 25 bp, Homo sapien
tcatatcaaagtaagccagacagtt

SEQ ID NO: 2763122 - DNA, 25 bp, Homo sapien
gggcctgaaatctcctccagtaaag

SEQ ID NO: 2763123 - DNA, 25 bp, Homo sapien
agatgagctgaaggctcacgtctct

SEQ ID NO: 2763124 - DNA, 25 bp, Homo sapien
tgagctgaaggctcacgtctcttca

SEQ ID NO: 2763125 - DNA, 25 bp, Homo sapien
aaggctcacgtctcttcatgcctgg

SEQ ID NO: 2763126 - DNA, 25 bp, Homo sapien
cagacattagctgaagctccgtata

SEQ ID NO: 2763127 - DNA, 25 bp, Homo sapien
tataattggatctgttctgcacccc

SEQ ID NO: 2763128 - DNA, 25 bp, Homo sapien
aagttttcttgatgcagagccctga

SEQ ID NO: 2763129 - DNA, 25 bp, Homo sapien
tgcaccccttgcatataagttttct

SEQ ID NO: 2763130 - DNA, 25 bp, Homo sapien
cttcctttgcgtcctcaagatttct

SEQ ID NO: 2763131 - DNA, 25 bp, Homo sapien
ttcttcctttgcgtcctcaagattt

SEQ ID NO: 2763132 - DNA, 25 bp, Homo sapien
ctttcttcctttgcgtcctcaagat

SEQ ID NO: 2763133 - DNA, 25 bp, Homo sapien
tcttcctttgcgtcctcaagatttc

SEQ ID NO: 2763134 - DNA, 25 bp, Homo sapien
tctggatcaaatgtctgagcataag

SEQ ID NO: 2763135 - DNA, 25 bp, Homo sapien
tattactacttgaagaagacaggac

SEQ ID NO: 2763136 - DNA, 25 bp, Homo sapien
cataaggaggcgaggtttggaaagt

SEQ ID NO: 2763137 - DNA, 25 bp, Homo sapien
tggtaacgttattactacttgaaga

SEQ ID NO: 2763138 - DNA, 25 bp, Homo sapien
atcagcaactgcaggtaaggcccca

SEQ ID NO: 2763139 - DNA, 25 bp, Homo sapien
atccatcagcaactgcaggtaaggc

SEQ ID NO: 2763140 - DNA, 25 bp, Homo sapien
cggccagtctcaatcattccatggg

SEQ ID NO: 2763141 - DNA, 25 bp, Homo sapien
acacattaatacctcttgatgtctc

SEQ ID NO: 2763142 - DNA, 25 bp, Homo sapien
tgaaatgttagtctttgccttgtta

SEQ ID NO: 2763143 - DNA, 25 bp, Homo sapien
gaaatgttagtctttgccttgttat

SEQ ID NO: 2763144 - DNA, 25 bp, Homo sapien
ctgaaatgttagtctttgccttgtt

SEQ ID NO: 2763145 - DNA, 25 bp, Homo sapien
catgggattctttcctgccttatca

SEQ ID NO: 2763146 - DNA, 25 bp, Homo sapien
cctcttctattgcatataatctctc

SEQ ID NO: 2763147 - DNA, 25 bp, Homo sapien
tattgcatataatctctcacctcca

SEQ ID NO: 2763148 - DNA, 25 bp, Homo sapien
ccacataaagccatgggattctttc

SEQ ID NO: 2763149 - DNA, 25 bp, Homo sapien
tatacctgtacatataatctgtggg

SEQ ID NO: 2763150 - DNA, 25 bp, Homo sapien
gacgaatggactatgaatctaaagc

SEQ ID NO: 2763151 - DNA, 25 bp, Homo sapien
cactgccttggacatgttatgtaac

SEQ ID NO: 2763152 - DNA, 25 bp, Homo sapien
tacttcatacgtgtttaaagagctc

SEQ ID NO: 2763153 - DNA, 25 bp, Homo sapien
cctggtaagaccgatccgccgtggg

SEQ ID NO: 2763154 - DNA, 25 bp, Homo sapien
gaagcgggccgccgcagaagaaccc

SEQ ID NO: 2763155 - DNA, 25 bp, Homo sapien
gctgccgctgctcaggaccgacgcc

SEQ ID NO: 2763156 - DNA, 25 bp, Homo sapien
gccgcagaagaacccgctgcctttc

SEQ ID NO: 2763157 - DNA, 25 bp, Homo sapien
ctacgccggcagaggctgccagggg

SEQ ID NO: 2763158 - DNA, 25 bp, Homo sapien
tacgccggcagaggctgccagggga

SEQ ID NO: 2763159 - DNA, 25 bp, Homo sapien
cgccggcagaggctgccaggggagc

SEQ ID NO: 2763160 - DNA, 25 bp, Homo sapien
gccggcagaggctgccaggggagct

SEQ ID NO: 2763161 - DNA, 25 bp, Homo sapien
ctggtcaattaccaaagggcgctgg

SEQ ID NO: 2763162 - DNA, 25 bp, Homo sapien
gcatcataagggtctgcgtggtgac

SEQ ID NO: 2763163 - DNA, 25 bp, Homo sapien
tggtgactgcttgggctgagttaca

SEQ ID NO: 2763164 - DNA, 25 bp, Homo sapien
catttgcaaagttggctggtcaatt

SEQ ID NO: 2763165 - DNA, 25 bp, Homo sapien
gaaaatggagcacactgtccaggga

SEQ ID NO: 2763166 - DNA, 25 bp, Homo sapien
aagccttccccggactgattggaga

SEQ ID NO: 2763167 - DNA, 25 bp, Homo sapien
tatggaaggcgcagttcgctcgtgc

SEQ ID NO: 2763168 - DNA, 25 bp, Homo sapien
actgttagcttgcacgttccgggca

SEQ ID NO: 2763169 - DNA, 25 bp, Homo sapien
tgaaggtgctgttaacaaacagttg

SEQ ID NO: 2763170 - DNA, 25 bp, Homo sapien
gggaatctctgtttgagccaagcac

SEQ ID NO: 2763171 - DNA, 25 bp, Homo sapien
ttagaagtaaaagtgtgactctctc

SEQ ID NO: 2763172 - DNA, 25 bp, Homo sapien
caaacagttgtgatgtcttagaagt

SEQ ID NO: 2763173 - DNA, 25 bp, Homo sapien
tgcctgctcagccataacttttgca

SEQ ID NO: 2763174 - DNA, 25 bp, Homo sapien
ttgcattcatagcaaatgctattac

SEQ ID NO: 2763175 - DNA, 25 bp, Homo sapien
agttaatgtacccaagaggaggtgg

SEQ ID NO: 2763176 - DNA, 25 bp, Homo sapien
agatacaaaaagtgcctgctcagcc

SEQ ID NO: 2763177 - DNA, 25 bp, Homo sapien
ttcctaagaatgatattcagccaag

SEQ ID NO: 2763178 - DNA, 25 bp, Homo sapien
tatttgattccctgcacagcaaaag

SEQ ID NO: 2763179 - DNA, 25 bp, Homo sapien
aagcccacctgatacaaacataaga

SEQ ID NO: 2763180 - DNA, 25 bp, Homo sapien
gattgacaagtgttcctaagaatga

SEQ ID NO: 2763181 - DNA, 25 bp, Homo sapien
caggcaggcgttttattaaggttgg

SEQ ID NO: 2763182 - DNA, 25 bp, Homo sapien
ttcctccaggcaggcgttttattaa

SEQ ID NO: 2763183 - DNA, 25 bp, Homo sapien
ctccaggcaggcgttttattaaggt

SEQ ID NO: 2763184 - DNA, 25 bp, Homo sapien
ccaggcaggcgttttattaaggttg

SEQ ID NO: 2763185 - DNA, 25 bp, Homo sapien
aatgtttcttgagtttctacaggta

SEQ ID NO: 2763186 - DNA, 25 bp, Homo sapien
tttctacaggtagtctaataccaga

SEQ ID NO: 2763187 - DNA, 25 bp, Homo sapien
gtttcttgagtttctacaggtagtc

SEQ ID NO: 2763188 - DNA, 25 bp, Homo sapien
tgagtttctacaggtagtctaatac

SEQ ID NO: 2763189 - DNA, 25 bp, Homo sapien
taaattcaactgattatgtagtcca

SEQ ID NO: 2763190 - DNA, 25 bp, Homo sapien
aatttcattcctcaagtggccgtca

SEQ ID NO: 2763191 - DNA, 25 bp, Homo sapien
ttgtaaccttgaacatggctgtacc

SEQ ID NO: 2763192 - DNA, 25 bp, Homo sapien
tggctgtaccaaaaagactgaatta

SEQ ID NO: 2763193 - DNA, 25 bp, Homo sapien
tggtggttgcacaatcagatctgtg

SEQ ID NO: 2763194 - DNA, 25 bp, Homo sapien
taggcccatatgctcaggatcagaa

SEQ ID NO: 2763195 - DNA, 25 bp, Homo sapien
catttcatattagcataggcccata

SEQ ID NO: 2763196 - DNA, 25 bp, Homo sapien
caaaggatgactgctctctgcagaa

SEQ ID NO: 2763197 - DNA, 25 bp, Homo sapien
gctcatctggcagcgcagagtgaaa

SEQ ID NO: 2763198 - DNA, 25 bp, Homo sapien
ttatcctccatgctcatctggcagc

SEQ ID NO: 2763199 - DNA, 25 bp, Homo sapien
gattcattccgattatcctccatgc

SEQ ID NO: 2763200 - DNA, 25 bp, Homo sapien
ctaggattcattccgattatcctcc

SEQ ID NO: 2763201 - DNA, 25 bp, Homo sapien
tgagtccctgggggacaaatccaag

SEQ ID NO: 2763202 - DNA, 25 bp, Homo sapien
tctgagtccctgggggacaaatcca

SEQ ID NO: 2763203 - DNA, 25 bp, Homo sapien
ctgagtccctgggggacaaatccaa

SEQ ID NO: 2763204 - DNA, 25 bp, Homo sapien
gctgtaaacaatagggctgcctcga

SEQ ID NO: 2763205 - DNA, 25 bp, Homo sapien
aatgcctgggacctaggaaagcagc

SEQ ID NO: 2763206 - DNA, 25 bp, Homo sapien
ggtgaccgagccaggagcattctgc

SEQ ID NO: 2763207 - DNA, 25 bp, Homo sapien
tatttcccatggaccagatgtgggc

SEQ ID NO: 2763208 - DNA, 25 bp, Homo sapien
ccactctggccaggaaagctttctt

SEQ ID NO: 2763209 - DNA, 25 bp, Homo sapien
actatccactctggccaggaaagct

SEQ ID NO: 2763210 - DNA, 25 bp, Homo sapien
tatccactctggccaggaaagcttt

SEQ ID NO: 2763211 - DNA, 25 bp, Homo sapien
tccactctggccaggaaagctttct

SEQ ID NO: 2763212 - DNA, 25 bp, Homo sapien
cctgtggcagtagcgggcaccacca

SEQ ID NO: 2763213 - DNA, 25 bp, Homo sapien
ctggacatccctgtggcagtagcgg

SEQ ID NO: 2763214 - DNA, 25 bp, Homo sapien
atccctgtggcagtagcgggcacca

SEQ ID NO: 2763215 - DNA, 25 bp, Homo sapien
acatccctgtggcagtagcgggcac

SEQ ID NO: 2763216 - DNA, 25 bp, Homo sapien
caccgtaagaatcctgttttttgca

SEQ ID NO: 2763217 - DNA, 25 bp, Homo sapien
cagaaatcaaccgtttcccacagtt

SEQ ID NO: 2763218 - DNA, 25 bp, Homo sapien
cgtatgaccgttctgcaccgtaaga

SEQ ID NO: 2763219 - DNA, 25 bp, Homo sapien
cagttctcaaagttgcgctgcttcc

SEQ ID NO: 2763220 - DNA, 25 bp, Homo sapien
tctgccttttaaacagctgacacct

SEQ ID NO: 2763221 - DNA, 25 bp, Homo sapien
ctctaaaacggccttcaggagtctg

SEQ ID NO: 2763222 - DNA, 25 bp, Homo sapien
gtctgccttttaaacagctgacacc

SEQ ID NO: 2763223 - DNA, 25 bp, Homo sapien
aacggccttcaggagtctgcctttt

SEQ ID NO: 2763224 - DNA, 25 bp, Homo sapien
gatcgtcagtcattccacccctgta

SEQ ID NO: 2763225 - DNA, 25 bp, Homo sapien
tatgacaagtatactgttgcctggc

SEQ ID NO: 2763226 - DNA, 25 bp, Homo sapien
tccagtatggctaattgtcgcagta

SEQ ID NO: 2763227 - DNA, 25 bp, Homo sapien
cattcgtacctaattgatcgtcagt

SEQ ID NO: 2763228 - DNA, 25 bp, Homo sapien
taaattgaaacggatgccacccttg

SEQ ID NO: 2763229 - DNA, 25 bp, Homo sapien
aatgtaaaactgacctgctcggaag

SEQ ID NO: 2763230 - DNA, 25 bp, Homo sapien
acttagccgaggagccactgggtta

SEQ ID NO: 2763231 - DNA, 25 bp, Homo sapien
taatctgacaaacgaggcatggacc

SEQ ID NO: 2763232 - DNA, 25 bp, Homo sapien
tcctcagtatcgttcatgtctttgg

SEQ ID NO: 2763233 - DNA, 25 bp, Homo sapien
agtatcgttcatgtctttggcaaca

SEQ ID NO: 2763234 - DNA, 25 bp, Homo sapien
tgtcgttttcctcagtatcgttcat

SEQ ID NO: 2763235 - DNA, 25 bp, Homo sapien
gcgggaatgctcactcttgtcgttt

SEQ ID NO: 2763236 - DNA, 25 bp, Homo sapien
caatgctcagttcccatcaacattt

SEQ ID NO: 2763237 - DNA, 25 bp, Homo sapien
gatgaaagcaagcaatgctcagttc

SEQ ID NO: 2763238 - DNA, 25 bp, Homo sapien
ctgatgaaagcaagcaatgctcagt

SEQ ID NO: 2763239 - DNA, 25 bp, Homo sapien
agcaatgctcagttcccatcaacat

SEQ ID NO: 2763240 - DNA, 25 bp, Homo sapien
gggattctcataaccccacagttta

SEQ ID NO: 2763241 - DNA, 25 bp, Homo sapien
ggcaaatacgcactccttgaaatgg

SEQ ID NO: 2763242 - DNA, 25 bp, Homo sapien
gtggccgggccttttgttgcagtca

SEQ ID NO: 2763243 - DNA, 25 bp, Homo sapien
tattaccttttagctcagtgtggcc

SEQ ID NO: 2763244 - DNA, 25 bp, Homo sapien
caacatttgcaaagaccgttctggt

SEQ ID NO: 2763245 - DNA, 25 bp, Homo sapien
accatgaagtaagtatctctttgca

SEQ ID NO: 2763246 - DNA, 25 bp, Homo sapien
ggtcttgtgattgccaaaagtttgg

SEQ ID NO: 2763247 - DNA, 25 bp, Homo sapien
taaatctgaaccatgaagtaagtat

SEQ ID NO: 2763248 - DNA, 25 bp, Homo sapien
ccagaaagcactcagccaaatgact

SEQ ID NO: 2763249 - DNA, 25 bp, Homo sapien
cagagacccgtttgacaatgagcat

SEQ ID NO: 2763250 - DNA, 25 bp, Homo sapien
aattcttctgggaacgggccagaga

SEQ ID NO: 2763251 - DNA, 25 bp, Homo sapien
gcagttctattagacaacccacaaa

SEQ ID NO: 2763252 - DNA, 25 bp, Homo sapien
tcttttgccttgaaaagtgatgttc

SEQ ID NO: 2763253 - DNA, 25 bp, Homo sapien
ggcaacactgagataatgggaaggt

SEQ ID NO: 2763254 - DNA, 25 bp, Homo sapien
caggaacggcgaaccatccctttct

SEQ ID NO: 2763255 - DNA, 25 bp, Homo sapien
ccagtccgtgccctccattaaggat

SEQ ID NO: 2763256 - DNA, 25 bp, Homo sapien
gcaagggctgctgaagacaaagagt

SEQ ID NO: 2763257 - DNA, 25 bp, Homo sapien
cagttgggcagcattggcaagggct

SEQ ID NO: 2763258 - DNA, 25 bp, Homo sapien
gacaaagagtgtggctgagagaaat

SEQ ID NO: 2763259 - DNA, 25 bp, Homo sapien
tgagagaaatggagacggccccatg

SEQ ID NO: 2763260 - DNA, 25 bp, Homo sapien
cagtgcccattcactgctgagttcc

SEQ ID NO: 2763261 - DNA, 25 bp, Homo sapien
agtgcccattcactgctgagttcct

SEQ ID NO: 2763262 - DNA, 25 bp, Homo sapien
agcagtgcccattcactgctgagtt

SEQ ID NO: 2763263 - DNA, 25 bp, Homo sapien
gcagtgcccattcactgctgagttc

SEQ ID NO: 2763264 - DNA, 25 bp, Homo sapien
atatagtattgggaggtttttgact

SEQ ID NO: 2763265 - DNA, 25 bp, Homo sapien
catgttagccttttactgcagggcc

SEQ ID NO: 2763266 - DNA, 25 bp, Homo sapien
ccttttactgcagggcccacttaga

SEQ ID NO: 2763267 - DNA, 25 bp, Homo sapien
cagaaaattgaatatagtattggga

SEQ ID NO: 2763268 - DNA, 25 bp, Homo sapien
tctcccattagccaattaattgtta

SEQ ID NO: 2763269 - DNA, 25 bp, Homo sapien
actaaccccagggtgagagcacttg

SEQ ID NO: 2763270 - DNA, 25 bp, Homo sapien
cctggcttagaatcatgatttctct

SEQ ID NO: 2763271 - DNA, 25 bp, Homo sapien
tacaaaacactcactgcttagagag

SEQ ID NO: 2763272 - DNA, 25 bp, Homo sapien
gtcaattgaaagtctagggtcacaa

SEQ ID NO: 2763273 - DNA, 25 bp, Homo sapien
acttgtcaattgaaagtctagggtc

SEQ ID NO: 2763274 - DNA, 25 bp, Homo sapien
tttacttgtcaattgaaagtctagg

SEQ ID NO: 2763275 - DNA, 25 bp, Homo sapien
tgaaagtctagggtcacaatctggg

SEQ ID NO: 2763276 - DNA, 25 bp, Homo sapien
gaagtaatgcacattcaccaaagtc

SEQ ID NO: 2763277 - DNA, 25 bp, Homo sapien
gtaatgcacattcaccaaagtcaag

SEQ ID NO: 2763278 - DNA, 25 bp, Homo sapien
aagtaatgcacattcaccaaagtca

SEQ ID NO: 2763279 - DNA, 25 bp, Homo sapien
agtaatgcacattcaccaaagtcaa

SEQ ID NO: 2763280 - DNA, 25 bp, Homo sapien
acagttactgagcaagtaaatactc

SEQ ID NO: 2763281 - DNA, 25 bp, Homo sapien
ggaaaactaggctaggtctcaatag

SEQ ID NO: 2763282 - DNA, 25 bp, Homo sapien
taggtctcaatagacaacagtcaca

SEQ ID NO: 2763283 - DNA, 25 bp, Homo sapien
gttactgagcaagtaaatactccac

SEQ ID NO: 2763284 - DNA, 25 bp, Homo sapien
gtcttcagtctcatctggctctctc

SEQ ID NO: 2763285 - DNA, 25 bp, Homo sapien
cgatgaaccgcttctgatgggccat

SEQ ID NO: 2763286 - DNA, 25 bp, Homo sapien
acttccgttcgatgaaccgcttctg

SEQ ID NO: 2763287 - DNA, 25 bp, Homo sapien
gtctgtacttccgttcgatgaaccg

SEQ ID NO: 2763288 - DNA, 25 bp, Homo sapien
cttttaactcttgtctgtacttccg

SEQ ID NO: 2763289 - DNA, 25 bp, Homo sapien
ttatctgcagctttaggcatccact

SEQ ID NO: 2763290 - DNA, 25 bp, Homo sapien
tatagtataccatccttacaccagg

SEQ ID NO: 2763291 - DNA, 25 bp, Homo sapien
tacaccaggttgaagaagggacagg

SEQ ID NO: 2763292 - DNA, 25 bp, Homo sapien
gatggaatctcgctggagcgcagtc

SEQ ID NO: 2763293 - DNA, 25 bp, Homo sapien
ttagcttcccgcattttgctgtctc

SEQ ID NO: 2763294 - DNA, 25 bp, Homo sapien
tcacttttagcttcccgcattttgc

SEQ ID NO: 2763295 - DNA, 25 bp, Homo sapien
tgcccctgaacaggaaactttgctg

SEQ ID NO: 2763296 - DNA, 25 bp, Homo sapien
tctctcccatgcctgaggattctgg

SEQ ID NO: 2763297 - DNA, 25 bp, Homo sapien
cactgtcatgttgcgcccacaggtt

SEQ ID NO: 2763298 - DNA, 25 bp, Homo sapien
gaattgcactgtcatgttgcgccca

SEQ ID NO: 2763299 - DNA, 25 bp, Homo sapien
tgcactgtcatgttgcgcccacagg

SEQ ID NO: 2763300 - DNA, 25 bp, Homo sapien
gaagcataatagaattgcactgtca

SEQ ID NO: 2763301 - DNA, 25 bp, Homo sapien
tccattgctgctcccatttccgctt

SEQ ID NO: 2763302 - DNA, 25 bp, Homo sapien
tttcaagcgcatccattgctgctcc

SEQ ID NO: 2763303 - DNA, 25 bp, Homo sapien
ccattgctgctcccatttccgcttg

SEQ ID NO: 2763304 - DNA, 25 bp, Homo sapien
atttttcaagcgcatccattgctgc

SEQ ID NO: 2763305 - DNA, 25 bp, Homo sapien
taaatcgaatgtctaacagagctgg

SEQ ID NO: 2763306 - DNA, 25 bp, Homo sapien
aggtatggctacaaatctttcaggc

SEQ ID NO: 2763307 - DNA, 25 bp, Homo sapien
gcgtttccatacagctcaggtgagt

SEQ ID NO: 2763308 - DNA, 25 bp, Homo sapien
tcacctaaagatgctagcgtttcca

SEQ ID NO: 2763309 - DNA, 25 bp, Homo sapien
tcattcaaagcaattccaggtattc

SEQ ID NO: 2763310 - DNA, 25 bp, Homo sapien
tccagggctcggctttgagacaatt

SEQ ID NO: 2763311 - DNA, 25 bp, Homo sapien
caatggtattcccatggtccagggc

SEQ ID NO: 2763312 - DNA, 25 bp, Homo sapien
gttttctcaagatagctaaagcccc

SEQ ID NO: 2763313 - DNA, 25 bp, Homo sapien
cagccacagtgtaggttcgggcatg

SEQ ID NO: 2763314 - DNA, 25 bp, Homo sapien
aaacagccacagtgtaggttcgggc

SEQ ID NO: 2763315 - DNA, 25 bp, Homo sapien
atgggatgggcccactgtctgcaga

SEQ ID NO: 2763316 - DNA, 25 bp, Homo sapien
ttcgggcatgggatgggcccactgt

SEQ ID NO: 2763317 - DNA, 25 bp, Homo sapien
tgctaatccgacaaatatcgagagc

SEQ ID NO: 2763318 - DNA, 25 bp, Homo sapien
tcaaaaggctaacagtgaagtgtaa

SEQ ID NO: 2763319 - DNA, 25 bp, Homo sapien
gaaaaccatgtacttagtgcctaga

SEQ ID NO: 2763320 - DNA, 25 bp, Homo sapien
aaagaatttctaagtgtgcatattc

SEQ ID NO: 2763321 - DNA, 25 bp, Homo sapien
cattgagataatggagtgggaccca

SEQ ID NO: 2763322 - DNA, 25 bp, Homo sapien
agtacatgatggcttttgacacaca

SEQ ID NO: 2763323 - DNA, 25 bp, Homo sapien
gtgggacccacttattacagctaag

SEQ ID NO: 2763324 - DNA, 25 bp, Homo sapien
caaagtcacactaacagccaagaag

SEQ ID NO: 2763325 - DNA, 25 bp, Homo sapien
cctaagtgtcaagcaacactgctga

SEQ ID NO: 2763326 - DNA, 25 bp, Homo sapien
tcctaagtgtcaagcaacactgctg

SEQ ID NO: 2763327 - DNA, 25 bp, Homo sapien
gtcctaagtgtcaagcaacactgct

SEQ ID NO: 2763328 - DNA, 25 bp, Homo sapien
acactgctgaagctgggatttgggg

SEQ ID NO: 2763329 - DNA, 25 bp, Homo sapien
gaaagtatgaacatattccaaatcc

SEQ ID NO: 2763330 - DNA, 25 bp, Homo sapien
ccttatcaatgtacagcgctgcaat

SEQ ID NO: 2763331 - DNA, 25 bp, Homo sapien
tatcaatgtacagcgctgcaataaa

SEQ ID NO: 2763332 - DNA, 25 bp, Homo sapien
tccaaatccttatcaatgtacagcg

SEQ ID NO: 2763333 - DNA, 25 bp, Homo sapien
agaaagagtaagagacctagacctt

SEQ ID NO: 2763334 - DNA, 25 bp, Homo sapien
aatagtttcaacttccaggccctct

SEQ ID NO: 2763335 - DNA, 25 bp, Homo sapien
tcactgccatctatcagaaagagta

SEQ ID NO: 2763336 - DNA, 25 bp, Homo sapien
taagagacctagacctttaagcaaa

SEQ ID NO: 2763337 - DNA, 25 bp, Homo sapien
tggttatggcgtactcctgcatgcc

SEQ ID NO: 2763338 - DNA, 25 bp, Homo sapien
cgaagcgccacaggcctcttggtct

SEQ ID NO: 2763339 - DNA, 25 bp, Homo sapien
caaaaggtccgccaaggtcttggtg

SEQ ID NO: 2763340 - DNA, 25 bp, Homo sapien
ggtcttgtcgttggttatggcgtac

SEQ ID NO: 2763341 - DNA, 25 bp, Homo sapien
gctcctccgctaccttggcctgagt

SEQ ID NO: 2763342 - DNA, 25 bp, Homo sapien
tattcaccaaagagcttcgcaacaa

SEQ ID NO: 2763343 - DNA, 25 bp, Homo sapien
cagctcctccgctaccttggcctga

SEQ ID NO: 2763344 - DNA, 25 bp, Homo sapien
ctattattcaccaaagagcttcgca

SEQ ID NO: 2763345 - DNA, 25 bp, Homo sapien
ggaatggcggtacattgagaacaca

SEQ ID NO: 2763346 - DNA, 25 bp, Homo sapien
gaatggcggtacattgagaacacat

SEQ ID NO: 2763347 - DNA, 25 bp, Homo sapien
tcaaccatcacccagatgacagtga

SEQ ID NO: 2763348 - DNA, 25 bp, Homo sapien
gacagtgatatgctccatgcccatt

SEQ ID NO: 2763349 - DNA, 25 bp, Homo sapien
tcactgacagggacaccaaaataag

SEQ ID NO: 2763350 - DNA, 25 bp, Homo sapien
ttggacccaactagcctgagaggct

SEQ ID NO: 2763351 - DNA, 25 bp, Homo sapien
tacatataacaaattctcggtctat

SEQ ID NO: 2763352 - DNA, 25 bp, Homo sapien
ccctgatctctaagatttgggagag

SEQ ID NO: 2763353 - DNA, 25 bp, Homo sapien
gagtaatgcatctacaactacaact

SEQ ID NO: 2763354 - DNA, 25 bp, Homo sapien
aaatggaacataatcatccctgatc

SEQ ID NO: 2763355 - DNA, 25 bp, Homo sapien
tgagttgtgctggtattccactccc

SEQ ID NO: 2763356 - DNA, 25 bp, Homo sapien
aacaggaagcagctgtgagttgtgc

SEQ ID NO: 2763357 - DNA, 25 bp, Homo sapien
tggtattccactccctgctgttcca

SEQ ID NO: 2763358 - DNA, 25 bp, Homo sapien
tgaaaacagggacgaggaacaggaa

SEQ ID NO: 2763359 - DNA, 25 bp, Homo sapien
caatgcctcgtgttagagatagcaa

SEQ ID NO: 2763360 - DNA, 25 bp, Homo sapien
tagcaccaagttacctgggttcaaa

SEQ ID NO: 2763361 - DNA, 25 bp, Homo sapien
gcacccaattgagcagaagacagtt

SEQ ID NO: 2763362 - DNA, 25 bp, Homo sapien
tgtagtacctagctctcacgattgt

SEQ ID NO: 2763363 - DNA, 25 bp, Homo sapien
gtcacctaggaattccattctctga

SEQ ID NO: 2763364 - DNA, 25 bp, Homo sapien
gagtcacctaggaattccattctct

SEQ ID NO: 2763365 - DNA, 25 bp, Homo sapien
agttgcattatggagtcacctagga

SEQ ID NO: 2763366 - DNA, 25 bp, Homo sapien
ctgtggctaccagttgcattatgga

SEQ ID NO: 2763367 - DNA, 25 bp, Homo sapien
gcctggcaacatgaagaaaccccat

SEQ ID NO: 2763368 - DNA, 25 bp, Homo sapien
accagcctggcaacatgaagaaacc

SEQ ID NO: 2763369 - DNA, 25 bp, Homo sapien
agaccagcctggcaacatgaagaaa

SEQ ID NO: 2763370 - DNA, 25 bp, Homo sapien
cagcctggcaacatgaagaaacccc

SEQ ID NO: 2763371 - DNA, 25 bp, Homo sapien
cacagttctcaatgtgaatgccctt

SEQ ID NO: 2763372 - DNA, 25 bp, Homo sapien
actcagtaagtttttgtagaactgg

SEQ ID NO: 2763373 - DNA, 25 bp, Homo sapien
catgagtaaaaattactccaattgc

SEQ ID NO: 2763374 - DNA, 25 bp, Homo sapien
gaagtttcaataagttgtcgatcag

SEQ ID NO: 2763375 - DNA, 25 bp, Homo sapien
taattgagccagacttcgcgcaggt

SEQ ID NO: 2763376 - DNA, 25 bp, Homo sapien
aattgagccagacttcgcgcaggtc

SEQ ID NO: 2763377 - DNA, 25 bp, Homo sapien
ataattgagccagacttcgcgcagg

SEQ ID NO: 2763378 - DNA, 25 bp, Homo sapien
ttaagatggagtggaaaacgcccca

SEQ ID NO: 2763379 - DNA, 25 bp, Homo sapien
gagatcatgcttttacagtgggtca

SEQ ID NO: 2763380 - DNA, 25 bp, Homo sapien
aacgccccatgtcgtcttcataaga

SEQ ID NO: 2763381 - DNA, 25 bp, Homo sapien
gactgaatttacttcccgaccttga

SEQ ID NO: 2763382 - DNA, 25 bp, Homo sapien
cctttgaaatctcggtagtgcaaat

SEQ ID NO: 2763383 - DNA, 25 bp, Homo sapien
ttagtaccacttgtaacacacaggg

SEQ ID NO: 2763384 - DNA, 25 bp, Homo sapien
catttaaacatcaaactttctttgg

SEQ ID NO: 2763385 - DNA, 25 bp, Homo sapien
aaaggacttctcttaaccaattcag

SEQ ID NO: 2763386 - DNA, 25 bp, Homo sapien
cctcctttcaccctaagtggacatt

SEQ ID NO: 2763387 - DNA, 25 bp, Homo sapien
catttatcaaacttcgggcccttgc

SEQ ID NO: 2763388 - DNA, 25 bp, Homo sapien
ccttgcctgacctattcattaccat

SEQ ID NO: 2763389 - DNA, 25 bp, Homo sapien
tcttacaactttctctcaatgcttt

SEQ ID NO: 2763390 - DNA, 25 bp, Homo sapien
tgtattaaacgctgcacatgccagc

SEQ ID NO: 2763391 - DNA, 25 bp, Homo sapien
gcattgcactaggtactggaaacac

SEQ ID NO: 2763392 - DNA, 25 bp, Homo sapien
taagctcactaagtagacaactggg

SEQ ID NO: 2763393 - DNA, 25 bp, Homo sapien
tgaaatgacccacaaaaggtgaagg

SEQ ID NO: 2763394 - DNA, 25 bp, Homo sapien
tatcacttcaactaagcctgcatgg

SEQ ID NO: 2763395 - DNA, 25 bp, Homo sapien
ccttgtgtaaaggtccatggaactt

SEQ ID NO: 2763396 - DNA, 25 bp, Homo sapien
ggtgtattgaaatgtcccatctatg

SEQ ID NO: 2763397 - DNA, 25 bp, Homo sapien
gaaagacaggttcaggccaaagaaa

SEQ ID NO: 2763398 - DNA, 25 bp, Homo sapien
cggatcattaaagagcaagcgtcca

SEQ ID NO: 2763399 - DNA, 25 bp, Homo sapien
cattaaagagcaagcgtccaaataa

SEQ ID NO: 2763400 - DNA, 25 bp, Homo sapien
aagagcaagcgtccaaataactgct

SEQ ID NO: 2763401 - DNA, 25 bp, Homo sapien
caggcttccctccaagtaaacagct

SEQ ID NO: 2763402 - DNA, 25 bp, Homo sapien
gctctccagactgtttagacatgca

SEQ ID NO: 2763403 - DNA, 25 bp, Homo sapien
tctccagactgtttagacatgcaag

SEQ ID NO: 2763404 - DNA, 25 bp, Homo sapien
agacatgcaagaaagtagacttctt

SEQ ID NO: 2763405 - DNA, 25 bp, Homo sapien
ctccagactgtttagacatgcaaga

SEQ ID NO: 2763406 - DNA, 25 bp, Homo sapien
cagcataaatcgatccagttcaagt

SEQ ID NO: 2763407 - DNA, 25 bp, Homo sapien
gattctctacaaaggtcaggcccgt

SEQ ID NO: 2763408 - DNA, 25 bp, Homo sapien
ccattgcatgtcgaaggtccgattc

SEQ ID NO: 2763409 - DNA, 25 bp, Homo sapien
tcaggcccgtgagcatacagcataa

SEQ ID NO: 2763410 - DNA, 25 bp, Homo sapien
tgtgccaagggctaatgtcatttcc

SEQ ID NO: 2763411 - DNA, 25 bp, Homo sapien
tcacaagaacatgggtagcatcaat

SEQ ID NO: 2763412 - DNA, 25 bp, Homo sapien
aaccagtcataaagctaggatgggc

SEQ ID NO: 2763413 - DNA, 25 bp, Homo sapien
caaaagttttgccagtggatcctca

SEQ ID NO: 2763414 - DNA, 25 bp, Homo sapien
tgttctcaagttacctcactgtgga

SEQ ID NO: 2763415 - DNA, 25 bp, Homo sapien
cagacgtaactacaaatgctgcaga

SEQ ID NO: 2763416 - DNA, 25 bp, Homo sapien
tcattagctgctggtgaaactcaca

SEQ ID NO: 2763417 - DNA, 25 bp, Homo sapien
aattatgcatggaccgcagaagagc

SEQ ID NO: 2763418 - DNA, 25 bp, Homo sapien
cagtccgataggttgctaatcctcc

SEQ ID NO: 2763419 - DNA, 25 bp, Homo sapien
gataggttgctaatcctccttcttc

SEQ ID NO: 2763420 - DNA, 25 bp, Homo sapien
gaacaatggcagtccgataggttgc

SEQ ID NO: 2763421 - DNA, 25 bp, Homo sapien
ggttgctaatcctccttcttccaga

SEQ ID NO: 2763422 - DNA, 25 bp, Homo sapien
ctaggaaacaaatagtacaaatgga

SEQ ID NO: 2763423 - DNA, 25 bp, Homo sapien
taggaaacaaatagtacaaatggac

SEQ ID NO: 2763424 - DNA, 25 bp, Homo sapien
aggaaacaaatagtacaaatggacg

SEQ ID NO: 2763425 - DNA, 25 bp, Homo sapien
attccaaccgttcattgtggttaat

SEQ ID NO: 2763426 - DNA, 25 bp, Homo sapien
gaattccaaccgttcattgtggtta

SEQ ID NO: 2763427 - DNA, 25 bp, Homo sapien
ttccaaccgttcattgtggttaatc

SEQ ID NO: 2763428 - DNA, 25 bp, Homo sapien
ctgtcgagtctcaacccatctggct

SEQ ID NO: 2763429 - DNA, 25 bp, Homo sapien
gcctgtcgagtctcaacccatctgg

SEQ ID NO: 2763430 - DNA, 25 bp, Homo sapien
ctgcctgtcgagtctcaacccatct

SEQ ID NO: 2763431 - DNA, 25 bp, Homo sapien
gtcgagtctcaacccatctggcttt

SEQ ID NO: 2763432 - DNA, 25 bp, Homo sapien
tttcaaggcgatttcaaggccatct

SEQ ID NO: 2763433 - DNA, 25 bp, Homo sapien
tcagttagaattgggtcctatcccc

SEQ ID NO: 2763434 - DNA, 25 bp, Homo sapien
cagtgtcaatatgatggcacaagtg

SEQ ID NO: 2763435 - DNA, 25 bp, Homo sapien
ggctatgtgagtctaaacccatctg

SEQ ID NO: 2763436 - DNA, 25 bp, Homo sapien
catccccgagggtgtgattaagggc

SEQ ID NO: 2763437 - DNA, 25 bp, Homo sapien
tacaatgtagcagggtaaaataaaa

SEQ ID NO: 2763438 - DNA, 25 bp, Homo sapien
catcatagtgaggtatatgggcata

SEQ ID NO: 2763439 - DNA, 25 bp, Homo sapien
tagactctcacagaacatcatagtg

SEQ ID NO: 2763440 - DNA, 25 bp, Homo sapien
gtcatcttggccaaggcgtgacatg

SEQ ID NO: 2763441 - DNA, 25 bp, Homo sapien
ctcgagggagttgggtcatcttggc

SEQ ID NO: 2763442 - DNA, 25 bp, Homo sapien
cttggccaaggcgtgacatgatatt

SEQ ID NO: 2763443 - DNA, 25 bp, Homo sapien
caaggcgtgacatgatatttatcaa

SEQ ID NO: 2763444 - DNA, 25 bp, Homo sapien
tgccgaattccacagttagataatg

SEQ ID NO: 2763445 - DNA, 25 bp, Homo sapien
tctgtctccgtatttgggctgccga

SEQ ID NO: 2763446 - DNA, 25 bp, Homo sapien
taatgaattcctggcatgatcagga

SEQ ID NO: 2763447 - DNA, 25 bp, Homo sapien
tcttccgcatgtgcatgtgatgaac

SEQ ID NO: 2763448 - DNA, 25 bp, Homo sapien
cattaggcattggtggtagcggata

SEQ ID NO: 2763449 - DNA, 25 bp, Homo sapien
tcctatcaacttgtccaaatgcatt

SEQ ID NO: 2763450 - DNA, 25 bp, Homo sapien
gatatgatgggtcagaacaggtagc

SEQ ID NO: 2763451 - DNA, 25 bp, Homo sapien
gcaacagacaacgatcttggaaagt

SEQ ID NO: 2763452 - DNA, 25 bp, Homo sapien
taacattgattagtacaaccatcag

SEQ ID NO: 2763453 - DNA, 25 bp, Homo sapien
ctgaccgttaaaacaaaggccacag

SEQ ID NO: 2763454 - DNA, 25 bp, Homo sapien
caaactgtgaggaacatgcagaaac

SEQ ID NO: 2763455 - DNA, 25 bp, Homo sapien
gagtacctgtacctgaccatattgt

SEQ ID NO: 2763456 - DNA, 25 bp, Homo sapien
aagaaaaggatacaagcaacagaga

SEQ ID NO: 2763457 - DNA, 25 bp, Homo sapien
gaaaaggatacaagcaacagagata

SEQ ID NO: 2763458 - DNA, 25 bp, Homo sapien
gagccactgcgtgcgtagccaggtc

SEQ ID NO: 2763459 - DNA, 25 bp, Homo sapien
gcgtagccaggtcaagccattttta

SEQ ID NO: 2763460 - DNA, 25 bp, Homo sapien
actctacaggacacataatccaatt

SEQ ID NO: 2763461 - DNA, 25 bp, Homo sapien
ggaactctacaggacacataatcca

SEQ ID NO: 2763462 - DNA, 25 bp, Homo sapien
aggaactctacaggacacataatcc

SEQ ID NO: 2763463 - DNA, 25 bp, Homo sapien
gaactctacaggacacataatccaa

SEQ ID NO: 2763464 - DNA, 25 bp, Homo sapien
gaactcataggcaacaatttacatg

SEQ ID NO: 2763465 - DNA, 25 bp, Homo sapien
catggcttctaaacagatggcagtt

SEQ ID NO: 2763466 - DNA, 25 bp, Homo sapien
cacctttgcaggagtttaatcggga

SEQ ID NO: 2763467 - DNA, 25 bp, Homo sapien
acttctcaggtagcttgctggctca

SEQ ID NO: 2763468 - DNA, 25 bp, Homo sapien
tactcctccagctgcttctcaacta

SEQ ID NO: 2763469 - DNA, 25 bp, Homo sapien
ttactcctccagctgcttctcaact

SEQ ID NO: 2763470 - DNA, 25 bp, Homo sapien
actcctccagctgcttctcaactag

SEQ ID NO: 2763471 - DNA, 25 bp, Homo sapien
gaacattctcaattaagaaaccctc

SEQ ID NO: 2763472 - DNA, 25 bp, Homo sapien
ggaagaaaagtatgggcataactgt

SEQ ID NO: 2763473 - DNA, 25 bp, Homo sapien
aactgtgtcctcagaagtctcccca

SEQ ID NO: 2763474 - DNA, 25 bp, Homo sapien
gatattccatttagtctcaaggtag

SEQ ID NO: 2763475 - DNA, 25 bp, Homo sapien
ttagctccaccgttacttctcgtct

SEQ ID NO: 2763476 - DNA, 25 bp, Homo sapien
ctgacagacatcagaacggatgcca

SEQ ID NO: 2763477 - DNA, 25 bp, Homo sapien
catcagaacggatgccagttttcca

SEQ ID NO: 2763478 - DNA, 25 bp, Homo sapien
ttggctacttagctccaccgttact

SEQ ID NO: 2763479 - DNA, 25 bp, Homo sapien
gtattcttctgccgtattttttgga

SEQ ID NO: 2763480 - DNA, 25 bp, Homo sapien
attcttctgccgtattttttggagg

SEQ ID NO: 2763481 - DNA, 25 bp, Homo sapien
cttctgccgtattttttggagggct

SEQ ID NO: 2763482 - DNA, 25 bp, Homo sapien
tattcttctgccgtattttttggag

SEQ ID NO: 2763483 - DNA, 25 bp, Homo sapien
tcatcgttaatcaccaaggaatgga

SEQ ID NO: 2763484 - DNA, 25 bp, Homo sapien
gaagcacatcatcgttaatcaccaa

SEQ ID NO: 2763485 - DNA, 25 bp, Homo sapien
gcacatcatcgttaatcaccaagga

SEQ ID NO: 2763486 - DNA, 25 bp, Homo sapien
ctgaagcacatcatcgttaatcacc

SEQ ID NO: 2763487 - DNA, 25 bp, Homo sapien
gtttgactttgggactatttgctag

SEQ ID NO: 2763488 - DNA, 25 bp, Homo sapien
actatttgctaggaggtggcgaagt

SEQ ID NO: 2763489 - DNA, 25 bp, Homo sapien
aggaggtggcgaagtttcacataac

SEQ ID NO: 2763490 - DNA, 25 bp, Homo sapien
gtttcacataactcttccacagttt

SEQ ID NO: 2763491 - DNA, 25 bp, Homo sapien
ccagttattttaagaggcctcttca

SEQ ID NO: 2763492 - DNA, 25 bp, Homo sapien
gaggaggtaaacctaaaatgcaaca

SEQ ID NO: 2763493 - DNA, 25 bp, Homo sapien
taagaggcctcttcaaatcatacat

SEQ ID NO: 2763494 - DNA, 25 bp, Homo sapien
gccatcattctaaggaaggctatga

SEQ ID NO: 2763495 - DNA, 25 bp, Homo sapien
caaacagtcccgaagaatctaatgg

SEQ ID NO: 2763496 - DNA, 25 bp, Homo sapien
tcctaagagtcagaagtcacggctc

SEQ ID NO: 2763497 - DNA, 25 bp, Homo sapien
tatgtgctactttcctctagagggc

SEQ ID NO: 2763498 - DNA, 25 bp, Homo sapien
taaattcggcagtgctaggaaccaa

SEQ ID NO: 2763499 - DNA, 25 bp, Homo sapien
ggttgaactgttcacgatccagttg

SEQ ID NO: 2763500 - DNA, 25 bp, Homo sapien
tcccaaagtggacgataatcggaaa

SEQ ID NO: 2763501 - DNA, 25 bp, Homo sapien
ccagttgatcgatacggacagagct

SEQ ID NO: 2763502 - DNA, 25 bp, Homo sapien
tgtgcagggcgtatcccaaagtgga

SEQ ID NO: 2763503 - DNA, 25 bp, Homo sapien
cgtcccagggttggtaacaatcatg

SEQ ID NO: 2763504 - DNA, 25 bp, Homo sapien
accttaacaagtacaggagaatctg

SEQ ID NO: 2763505 - DNA, 25 bp, Homo sapien
gctttgctgcaccttaacaagtaca

SEQ ID NO: 2763506 - DNA, 25 bp, Homo sapien
tggtgcatggacagcacttcctttc

SEQ ID NO: 2763507 - DNA, 25 bp, Homo sapien
ctgccatgatgaacagagctaaaga

SEQ ID NO: 2763508 - DNA, 25 bp, Homo sapien
gctaaagagcctgtgctaatatcat

SEQ ID NO: 2763509 - DNA, 25 bp, Homo sapien
gatgaacagagctaaagagcctgtg

SEQ ID NO: 2763510 - DNA, 25 bp, Homo sapien
ccatgatgaacagagctaaagagcc

SEQ ID NO: 2763511 - DNA, 25 bp, Homo sapien
gacatgtacgtgttgtttagtgagc

SEQ ID NO: 2763512 - DNA, 25 bp, Homo sapien
ccataccaggtggaattctggctgt

SEQ ID NO: 2763513 - DNA, 25 bp, Homo sapien
gcccgtttttctattggcaatgtca

SEQ ID NO: 2763514 - DNA, 25 bp, Homo sapien
tagcatatgtacgttcaccaaagac

SEQ ID NO: 2763515 - DNA, 25 bp, Homo sapien
cagggtaaacatcagagcacaggac

SEQ ID NO: 2763516 - DNA, 25 bp, Homo sapien
gacattaactcggagatgatggcca

SEQ ID NO: 2763517 - DNA, 25 bp, Homo sapien
tactgagtggcccatatatagaaga

SEQ ID NO: 2763518 - DNA, 25 bp, Homo sapien
gctaagacagctagaactgacaggg

SEQ ID NO: 2763519 - DNA, 25 bp, Homo sapien
gtcactgacaagccagaagatttac

SEQ ID NO: 2763520 - DNA, 25 bp, Homo sapien
ggtcactgacaagccagaagattta

SEQ ID NO: 2763521 - DNA, 25 bp, Homo sapien
tggcatgaaatgaaatcttgggcag

SEQ ID NO: 2763522 - DNA, 25 bp, Homo sapien
caaaacgtggcatgaaatgaaatct

SEQ ID NO: 2763523 - DNA, 25 bp, Homo sapien
tcttacaaaacgtggcatgaaatga

SEQ ID NO: 2763524 - DNA, 25 bp, Homo sapien
gaagaaatcttacaaaacgtggcat

SEQ ID NO: 2763525 - DNA, 25 bp, Homo sapien
atatctctgaataggaacagtgaaa

SEQ ID NO: 2763526 - DNA, 25 bp, Homo sapien
aaaagagttcaagccctttcacaca

SEQ ID NO: 2763527 - DNA, 25 bp, Homo sapien
attccagtcatataattccaaaata

SEQ ID NO: 2763528 - DNA, 25 bp, Homo sapien
tccaaaatatctctgaataggaaca

SEQ ID NO: 2763529 - DNA, 25 bp, Homo sapien
gaatctaattactttacacagtgga

SEQ ID NO: 2763530 - DNA, 25 bp, Homo sapien
catctcttcaatgaaatgaatcgtg

SEQ ID NO: 2763531 - DNA, 25 bp, Homo sapien
tgaatctaattactttacacagtgg

SEQ ID NO: 2763532 - DNA, 25 bp, Homo sapien
gaatcgtgtagtctatgttgaatct

SEQ ID NO: 2763533 - DNA, 25 bp, Homo sapien
atgaaccaaatgagaaggcttcacc

SEQ ID NO: 2763534 - DNA, 25 bp, Homo sapien
ccatgaaccaaatgagaaggcttca

SEQ ID NO: 2763535 - DNA, 25 bp, Homo sapien
catgaaccaaatgagaaggcttcac

SEQ ID NO: 2763536 - DNA, 25 bp, Homo sapien
tgaaccaaatgagaaggcttcacct

SEQ ID NO: 2763537 - DNA, 25 bp, Homo sapien
aactaaattctgtgtatttataagc

SEQ ID NO: 2763538 - DNA, 25 bp, Homo sapien
ctaaattctgtgtatttataagccc

SEQ ID NO: 2763539 - DNA, 25 bp, Homo sapien
ctaactaaattctgtgtatttataa

SEQ ID NO: 2763540 - DNA, 25 bp, Homo sapien
taaattctgtgtatttataagccct

SEQ ID NO: 2763541 - DNA, 25 bp, Homo sapien
gtactgggtcaagtacactgccaca

SEQ ID NO: 2763542 - DNA, 25 bp, Homo sapien
ccaactgcaatatgaagtaagaaag

SEQ ID NO: 2763543 - DNA, 25 bp, Homo sapien
ctacaacagcatctgtactgggtca

SEQ ID NO: 2763544 - DNA, 25 bp, Homo sapien
tcactctacatccaactgcaatatg

SEQ ID NO: 2763545 - DNA, 25 bp, Homo sapien
aatgtttcttaggaggcagatgaca

SEQ ID NO: 2763546 - DNA, 25 bp, Homo sapien
gcagatgacaggaaatgttttgact

SEQ ID NO: 2763547 - DNA, 25 bp, Homo sapien
ctcatttacaatacagagggatgca

SEQ ID NO: 2763548 - DNA, 25 bp, Homo sapien
gagggatgcagaggaaatgtttctt

SEQ ID NO: 2763549 - DNA, 25 bp, Homo sapien
ccttcaaagatatactcgtgatcat

SEQ ID NO: 2763550 - DNA, 25 bp, Homo sapien
gatcatcgtattctataacagttgg

SEQ ID NO: 2763551 - DNA, 25 bp, Homo sapien
gcatgtgcaaacatagaaaatcctt

SEQ ID NO: 2763552 - DNA, 25 bp, Homo sapien
gggcatgtgcaaacatagaaaatcc

SEQ ID NO: 2763553 - DNA, 25 bp, Homo sapien
gactgtgatccggtagtggaaaagt

SEQ ID NO: 2763554 - DNA, 25 bp, Homo sapien
gatccggtagtggaaaagtctgcca

SEQ ID NO: 2763555 - DNA, 25 bp, Homo sapien
aagtctgccagcattgttggtcata

SEQ ID NO: 2763556 - DNA, 25 bp, Homo sapien
tgttggtcataggacgacagggctt

SEQ ID NO: 2763557 - DNA, 25 bp, Homo sapien
ctagattcacatctaacaaaacagg

SEQ ID NO: 2763558 - DNA, 25 bp, Homo sapien
tacaagtaaagcaagagtactttta

SEQ ID NO: 2763559 - DNA, 25 bp, Homo sapien
tgccatacctagaccaataaaaaag

SEQ ID NO: 2763560 - DNA, 25 bp, Homo sapien
ggaaagaacagtattggctttgcca

SEQ ID NO: 2763561 - DNA, 25 bp, Homo sapien
tgggagtcccctttattgcagctgc

SEQ ID NO: 2763562 - DNA, 25 bp, Homo sapien
gaaggaactcatgaggcttgccgga

SEQ ID NO: 2763563 - DNA, 25 bp, Homo sapien
ccagtagaagtagctctgcccttgt

SEQ ID NO: 2763564 - DNA, 25 bp, Homo sapien
ggtgagcaggccacgtcagttgtaa

SEQ ID NO: 2763565 - DNA, 25 bp, Homo sapien
gggtaaacctatttgcagacttcca

SEQ ID NO: 2763566 - DNA, 25 bp, Homo sapien
ttgaggaagctctaaatttctggcc

SEQ ID NO: 2763567 - DNA, 25 bp, Homo sapien
gactggtaatgcctgtagtgcaacc

SEQ ID NO: 2763568 - DNA, 25 bp, Homo sapien
tagtgcaaccaatggtaaccccgtg

SEQ ID NO: 2763569 - DNA, 25 bp, Homo sapien
cgtcttgcctttgcgctgcatttgc

SEQ ID NO: 2763570 - DNA, 25 bp, Homo sapien
tgcctaattcctgtgcgtcttgcct

SEQ ID NO: 2763571 - DNA, 25 bp, Homo sapien
gcctttgcgctgcatttgcagagtg

SEQ ID NO: 2763572 - DNA, 25 bp, Homo sapien
tctccaggataaatgctgtgcctaa

SEQ ID NO: 2763573 - DNA, 25 bp, Homo sapien
gctctgagaggctgtcacggttaga

SEQ ID NO: 2763574 - DNA, 25 bp, Homo sapien
gttagaagattaaacggatgttcca

SEQ ID NO: 2763575 - DNA, 25 bp, Homo sapien
tgatgcctccgaaaatgcgtgggtt

SEQ ID NO: 2763576 - DNA, 25 bp, Homo sapien
tgtcatgagcgctgaagctctgaga

SEQ ID NO: 2763577 - DNA, 25 bp, Homo sapien
gtttccctatttcttatctcaagaa

SEQ ID NO: 2763578 - DNA, 25 bp, Homo sapien
ctgataaagggaaaccgtgtgacaa

SEQ ID NO: 2763579 - DNA, 25 bp, Homo sapien
cagaaaatatcaatgtcagcacact

SEQ ID NO: 2763580 - DNA, 25 bp, Homo sapien
tctaccaattcccaggacacttttg

SEQ ID NO: 2763581 - DNA, 25 bp, Homo sapien
gggtccgtgtgctcaatgaatatct

SEQ ID NO: 2763582 - DNA, 25 bp, Homo sapien
tctggaacggatgagtgctaagcac

SEQ ID NO: 2763583 - DNA, 25 bp, Homo sapien
ggctccataggcaagcaattcttca

SEQ ID NO: 2763584 - DNA, 25 bp, Homo sapien
gatgataaagagcaccgggtccgtg

SEQ ID NO: 2763585 - DNA, 25 bp, Homo sapien
aagttcatcatgaagtcggtcaggg

SEQ ID NO: 2763586 - DNA, 25 bp, Homo sapien
cagggtgggcctttttgcgtttgat

SEQ ID NO: 2763587 - DNA, 25 bp, Homo sapien
tggcctggatcgttgtaccaaagtt

SEQ ID NO: 2763588 - DNA, 25 bp, Homo sapien
tctgcaataacgtcaaaaacttcag

SEQ ID NO: 2763589 - DNA, 25 bp, Homo sapien
cacccggctgacaaactggtttttg

SEQ ID NO: 2763590 - DNA, 25 bp, Homo sapien
accgcacccggctgacaaactggtt

SEQ ID NO: 2763591 - DNA, 25 bp, Homo sapien
gctgacaaactggtttttgtggagg

SEQ ID NO: 2763592 - DNA, 25 bp, Homo sapien
ggctgacaaactggtttttgtggag

SEQ ID NO: 2763593 - DNA, 25 bp, Homo sapien
ctcaaatttgtcatataagtcacga

SEQ ID NO: 2763594 - DNA, 25 bp, Homo sapien
catcgagcttcgtctttggaggttc

SEQ ID NO: 2763595 - DNA, 25 bp, Homo sapien
ctaaatcttcatcgagcttcgtctt

SEQ ID NO: 2763596 - DNA, 25 bp, Homo sapien
gaagcctactcgttccaaccactgt

SEQ ID NO: 2763597 - DNA, 25 bp, Homo sapien
tctgcatcctgcgtgtgaggatgcg

SEQ ID NO: 2763598 - DNA, 25 bp, Homo sapien
ccatcactgagccactcagtgaaca

SEQ ID NO: 2763599 - DNA, 25 bp, Homo sapien
actgagccactcagtgaacaccagc

SEQ ID NO: 2763600 - DNA, 25 bp, Homo sapien
gatgcgggtgtgtaaggacctgagg

SEQ ID NO: 2763601 - DNA, 25 bp, Homo sapien
tagtagttttctgaatgagtgcatc

SEQ ID NO: 2763602 - DNA, 25 bp, Homo sapien
tctggttgtcactccaacggtcttt

SEQ ID NO: 2763603 - DNA, 25 bp, Homo sapien
tgtcaggcatggtctcctcgggctc

SEQ ID NO: 2763604 - DNA, 25 bp, Homo sapien
tgagtgcatcgaatccacacaggct

SEQ ID NO: 2763605 - DNA, 25 bp, Homo sapien
taataatctccccaggtaattctgg

SEQ ID NO: 2763606 - DNA, 25 bp, Homo sapien
tccagcaggttcaggaacaaccgat

SEQ ID NO: 2763607 - DNA, 25 bp, Homo sapien
taattctggtgtgcatccagcaggt

SEQ ID NO: 2763608 - DNA, 25 bp, Homo sapien
gcaggttcaggaacaaccgataaac

SEQ ID NO: 2763609 - DNA, 25 bp, Homo sapien
tcaggcccagttctaagtgtttgac

SEQ ID NO: 2763610 - DNA, 25 bp, Homo sapien
tatttggcacttacttcaggcccag

SEQ ID NO: 2763611 - DNA, 25 bp, Homo sapien
cgaagacactgataactttgcccag

SEQ ID NO: 2763612 - DNA, 25 bp, Homo sapien
gagctaataactgaccccgaatctg

SEQ ID NO: 2763613 - DNA, 25 bp, Homo sapien
tctcttatactcttttttgtaggac

SEQ ID NO: 2763614 - DNA, 25 bp, Homo sapien
ggttgtctcgatgcctgtgtctctc

SEQ ID NO: 2763615 - DNA, 25 bp, Homo sapien
ttccagagatggtgatcttcggttg

SEQ ID NO: 2763616 - DNA, 25 bp, Homo sapien
gatcttcggttgtctcgatgcctgt

SEQ ID NO: 2763617 - DNA, 25 bp, Homo sapien
tttgagaacctgatgtaagtttcct

SEQ ID NO: 2763618 - DNA, 25 bp, Homo sapien
ccttctttgagaacctgatgtaagt

SEQ ID NO: 2763619 - DNA, 25 bp, Homo sapien
cctccttctttgagaacctgatgta

SEQ ID NO: 2763620 - DNA, 25 bp, Homo sapien
tctttgagaacctgatgtaagtttc

SEQ ID NO: 2763621 - DNA, 25 bp, Homo sapien
taaagaactacacacaagcggttta

SEQ ID NO: 2763622 - DNA, 25 bp, Homo sapien
tgggcctctgcagttcattaaagaa

SEQ ID NO: 2763623 - DNA, 25 bp, Homo sapien
ggttgtcataaatggagaatgaccg

SEQ ID NO: 2763624 - DNA, 25 bp, Homo sapien
tacataaatcaagatgccctactgg

SEQ ID NO: 2763625 - DNA, 25 bp, Homo sapien
catgactgtgatctcggtgcctgtg

SEQ ID NO: 2763626 - DNA, 25 bp, Homo sapien
cataatcagatctgtaccggctgtc

SEQ ID NO: 2763627 - DNA, 25 bp, Homo sapien
tactgataattaacctgctgcggca

SEQ ID NO: 2763628 - DNA, 25 bp, Homo sapien
cactgggcaggaaagaactagggtt

SEQ ID NO: 2763629 - DNA, 25 bp, Homo sapien
gagggccttgcgctgacggaggcat

SEQ ID NO: 2763630 - DNA, 25 bp, Homo sapien
ttattaggacaaggcattggtggtg

SEQ ID NO: 2763631 - DNA, 25 bp, Homo sapien
ggaaaggcggcctgattgggcaggg

SEQ ID NO: 2763632 - DNA, 25 bp, Homo sapien
caaagtctggtcgtggagggagaaa

SEQ ID NO: 2763633 - DNA, 25 bp, Homo sapien
tgaagcagcctcagattttggggcc

SEQ ID NO: 2763634 - DNA, 25 bp, Homo sapien
ttcatattgatattgcacaggaggc

SEQ ID NO: 2763635 - DNA, 25 bp, Homo sapien
gggcctaaaggatggtgctgagggt

SEQ ID NO: 2763636 - DNA, 25 bp, Homo sapien
tattgatattgcacaggaggctgct

SEQ ID NO: 2763637 - DNA, 25 bp, Homo sapien
gatgttccgcctggatatgtcacat

SEQ ID NO: 2763638 - DNA, 25 bp, Homo sapien
gcctggatatgtcacatcttccaca

SEQ ID NO: 2763639 - DNA, 25 bp, Homo sapien
gatatgtcacatcttccacagagaa

SEQ ID NO: 2763640 - DNA, 25 bp, Homo sapien
gtcacatcttccacagagaatataa

SEQ ID NO: 2763641 - DNA, 25 bp, Homo sapien
ccactagattatcagctccttgatg

SEQ ID NO: 2763642 - DNA, 25 bp, Homo sapien
tagtgaagtatgcacacgtctaact

SEQ ID NO: 2763643 - DNA, 25 bp, Homo sapien
tgcacacgtctaactcttccactag

SEQ ID NO: 2763644 - DNA, 25 bp, Homo sapien
gatgatatgggttgattcacagtca

SEQ ID NO: 2763645 - DNA, 25 bp, Homo sapien
cggttgcggtttggaaacagagaca

SEQ ID NO: 2763646 - DNA, 25 bp, Homo sapien
tccgtctgtctcttctcggttgcgg

SEQ ID NO: 2763647 - DNA, 25 bp, Homo sapien
tctcttctcggttgcggtttggaaa

SEQ ID NO: 2763648 - DNA, 25 bp, Homo sapien
tcttttctccgtctgtctcttctcg

SEQ ID NO: 2763649 - DNA, 25 bp, Homo sapien
agatcgccgtcagagcaaagccagg

SEQ ID NO: 2763650 - DNA, 25 bp, Homo sapien
tctcgggccgcgagatcgccgtcag

SEQ ID NO: 2763651 - DNA, 25 bp, Homo sapien
gcaaagccaggctactaccgcaggt

SEQ ID NO: 2763652 - DNA, 25 bp, Homo sapien
ggctactaccgcaggtaccaagaca

SEQ ID NO: 2763653 - DNA, 25 bp, Homo sapien
cagcattgttggtatcaaggtggtc

SEQ ID NO: 2763654 - DNA, 25 bp, Homo sapien
agatgtaagtcactaccccagccag

SEQ ID NO: 2763655 - DNA, 25 bp, Homo sapien
tgaaagtatcataggaagtctacct

SEQ ID NO: 2763656 - DNA, 25 bp, Homo sapien
caaggaatttggcattgtggccctg

SEQ ID NO: 2763657 - DNA, 25 bp, Homo sapien
taagtgccactttattgccaagtct

SEQ ID NO: 2763658 - DNA, 25 bp, Homo sapien
gattttctcaattggccagtcttct

SEQ ID NO: 2763659 - DNA, 25 bp, Homo sapien
cctgagtcactcttaatcatgaaac

SEQ ID NO: 2763660 - DNA, 25 bp, Homo sapien
caataatatagtgcctaagtgccac

SEQ ID NO: 2763661 - DNA, 25 bp, Homo sapien
tttcctatagttggccatgcgcggt

SEQ ID NO: 2763662 - DNA, 25 bp, Homo sapien
acttaataagttgtgtatttcctag

SEQ ID NO: 2763663 - DNA, 25 bp, Homo sapien
taagtccagcctttcataataacct

SEQ ID NO: 2763664 - DNA, 25 bp, Homo sapien
gacttaagtgtaagcgtagacttta

SEQ ID NO: 2763665 - DNA, 25 bp, Homo sapien
aacatttaagatgtacgacatgatg

SEQ ID NO: 2763666 - DNA, 25 bp, Homo sapien
taactgtagtcctctaggcttgctc

SEQ ID NO: 2763667 - DNA, 25 bp, Homo sapien
catatccacttctcacatagttgcc

SEQ ID NO: 2763668 - DNA, 25 bp, Homo sapien
cttagtaaaatcctgagtgaactgc

SEQ ID NO: 2763669 - DNA, 25 bp, Homo sapien
tatactctcgtgcaattacaagggt

SEQ ID NO: 2763670 - DNA, 25 bp, Homo sapien
tgtttggaagttgctacccctggac

SEQ ID NO: 2763671 - DNA, 25 bp, Homo sapien
tgcatgcttgcagataaaactcaga

SEQ ID NO: 2763672 - DNA, 25 bp, Homo sapien
ggacttacgaattgccttcatagaa

SEQ ID NO: 2763673 - DNA, 25 bp, Homo sapien
tgctaatcttcgctgtcatcccaat

SEQ ID NO: 2763674 - DNA, 25 bp, Homo sapien
ccatgctaatcttcgctgtcatccc

SEQ ID NO: 2763675 - DNA, 25 bp, Homo sapien
gctaatcttcgctgtcatcccaatt

SEQ ID NO: 2763676 - DNA, 25 bp, Homo sapien
gccatgctaatcttcgctgtcatcc

SEQ ID NO: 2763677 - DNA, 25 bp, Homo sapien
cctttgatgcctgtcatatgtagaa

SEQ ID NO: 2763678 - DNA, 25 bp, Homo sapien
caaaaggagaatatcggtatatgaa

SEQ ID NO: 2763679 - DNA, 25 bp, Homo sapien
ttcatgccttaaggtgactcctaat

SEQ ID NO: 2763680 - DNA, 25 bp, Homo sapien
ttgaaatagaaaacgttaagccatc

SEQ ID NO: 2763681 - DNA, 25 bp, Homo sapien
ctgcacatagactgaaaccagctga

SEQ ID NO: 2763682 - DNA, 25 bp, Homo sapien
atcatcctggattgaaatggccctt

SEQ ID NO: 2763683 - DNA, 25 bp, Homo sapien
tcatcctggattgaaatggccctta

SEQ ID NO: 2763684 - DNA, 25 bp, Homo sapien
ccttaaacctcctgcacatagactg

SEQ ID NO: 2763685 - DNA, 25 bp, Homo sapien
ggaactcttcagtggattctatggg

SEQ ID NO: 2763686 - DNA, 25 bp, Homo sapien
tctagcacgagtcattgtttttcct

SEQ ID NO: 2763687 - DNA, 25 bp, Homo sapien
aatgattggcttgagcattctagca

SEQ ID NO: 2763688 - DNA, 25 bp, Homo sapien
gattctatgggcatggaaagccttt

SEQ ID NO: 2763689 - DNA, 25 bp, Homo sapien
cagctccgactttgccactgccagc

SEQ ID NO: 2763690 - DNA, 25 bp, Homo sapien
cagtgggtagggttcggagaggagg

SEQ ID NO: 2763691 - DNA, 25 bp, Homo sapien
tatcatcaaggatgatttatctggg

SEQ ID NO: 2763692 - DNA, 25 bp, Homo sapien
tggtccttttagagggaagtagcca

SEQ ID NO: 2763693 - DNA, 25 bp, Homo sapien
ttcccagttgagcatccgacttttg

SEQ ID NO: 2763694 - DNA, 25 bp, Homo sapien
gttaatttcccagttgagcatccga

SEQ ID NO: 2763695 - DNA, 25 bp, Homo sapien
ggctgaacttcgatgcacaggcata

SEQ ID NO: 2763696 - DNA, 25 bp, Homo sapien
cagagtcgagtgtgttctttgttaa

SEQ ID NO: 2763697 - DNA, 25 bp, Homo sapien
cattgtcccggtaggaagcagagga

SEQ ID NO: 2763698 - DNA, 25 bp, Homo sapien
cacattgtcccggtaggaagcagag

SEQ ID NO: 2763699 - DNA, 25 bp, Homo sapien
attttaacttttgcctctgacacat

SEQ ID NO: 2763700 - DNA, 25 bp, Homo sapien
ctctgacacattgtcccggtaggaa

SEQ ID NO: 2763701 - DNA, 25 bp, Homo sapien
caattttcttttgcggtatttggct

SEQ ID NO: 2763702 - DNA, 25 bp, Homo sapien
ttcttttgcggtatttggctccgtg

SEQ ID NO: 2763703 - DNA, 25 bp, Homo sapien
gtatttggctccgtgtgatacccat

SEQ ID NO: 2763704 - DNA, 25 bp, Homo sapien
tgagatcatgagaaatctgggctat

SEQ ID NO: 2763705 - DNA, 25 bp, Homo sapien
aataacccactttggagtctagtat

SEQ ID NO: 2763706 - DNA, 25 bp, Homo sapien
aaagcgacaggaagtcagtgttcct

SEQ ID NO: 2763707 - DNA, 25 bp, Homo sapien
agtgttccttcagggtgcataagga

SEQ ID NO: 2763708 - DNA, 25 bp, Homo sapien
tcgggccctctcagtacccaaataa

SEQ ID NO: 2763709 - DNA, 25 bp, Homo sapien
ctacgttggaagcagcagccgctga

SEQ ID NO: 2763710 - DNA, 25 bp, Homo sapien
acagtcagttctggtgggggacgtc

SEQ ID NO: 2763711 - DNA, 25 bp, Homo sapien
ctgagagccttgtggtgctacttct

SEQ ID NO: 2763712 - DNA, 25 bp, Homo sapien
gagagctggcacctgagagccttgt

SEQ ID NO: 2763713 - DNA, 25 bp, Homo sapien
gtgtctgtggaatgcctaaacttac

SEQ ID NO: 2763714 - DNA, 25 bp, Homo sapien
gcacacagtttgtagaattttgtca

SEQ ID NO: 2763715 - DNA, 25 bp, Homo sapien
agcacacagtttgtagaattttgtc

SEQ ID NO: 2763716 - DNA, 25 bp, Homo sapien
aagcacacagtttgtagaattttgt

SEQ ID NO: 2763717 - DNA, 25 bp, Homo sapien
ttttgtcaaatcttcgaacaccaca

SEQ ID NO: 2763718 - DNA, 25 bp, Homo sapien
catgaaatgattgagaagtcttgtc

SEQ ID NO: 2763719 - DNA, 25 bp, Homo sapien
tttatatttataatgcctcgcattc

SEQ ID NO: 2763720 - DNA, 25 bp, Homo sapien
taatgcctcgcattcatgaaatgat

SEQ ID NO: 2763721 - DNA, 25 bp, Homo sapien
atgattgagaagtcttgtcaagtcc

SEQ ID NO: 2763722 - DNA, 25 bp, Homo sapien
agccagaaacaggcttgttgtggct

SEQ ID NO: 2763723 - DNA, 25 bp, Homo sapien
gccagaaacaggcttgttgtggctc

SEQ ID NO: 2763724 - DNA, 25 bp, Homo sapien
cagccagaaacaggcttgttgtggc

SEQ ID NO: 2763725 - DNA, 25 bp, Homo sapien
tcaggacgtgcgagcttaattattc

SEQ ID NO: 2763726 - DNA, 25 bp, Homo sapien
tctggaaatgatgccggcttgtcct

SEQ ID NO: 2763727 - DNA, 25 bp, Homo sapien
gccagccttctcgtcaggacgtgcg

SEQ ID NO: 2763728 - DNA, 25 bp, Homo sapien
gagcttaattattccactgccctct

SEQ ID NO: 2763729 - DNA, 25 bp, Homo sapien
gcttgtgcttccctatacggccttg

SEQ ID NO: 2763730 - DNA, 25 bp, Homo sapien
caggccctgctggatttgtagatgc

SEQ ID NO: 2763731 - DNA, 25 bp, Homo sapien
tcctgttgtgggtgcacggaacctc

SEQ ID NO: 2763732 - DNA, 25 bp, Homo sapien
gcaacggccgcagatctagcttgtg

SEQ ID NO: 2763733 - DNA, 25 bp, Homo sapien
ccagcattgtcaggcccttggacca

SEQ ID NO: 2763734 - DNA, 25 bp, Homo sapien
cttcttgtacatgcagggcaggcca

SEQ ID NO: 2763735 - DNA, 25 bp, Homo sapien
cattcctaggccagctgagggacgt

SEQ ID NO: 2763736 - DNA, 25 bp, Homo sapien
gcagctcatgatccagtgatcgcat

SEQ ID NO: 2763737 - DNA, 25 bp, Homo sapien
gaccaccatgagggccggcgttcct

SEQ ID NO: 2763738 - DNA, 25 bp, Homo sapien
accaccatgagggccggcgttcctg

SEQ ID NO: 2763739 - DNA, 25 bp, Homo sapien
agaccaccatgagggccggcgttcc

SEQ ID NO: 2763740 - DNA, 25 bp, Homo sapien
gagatgcttcacgagatgctgaagc

SEQ ID NO: 2763741 - DNA, 25 bp, Homo sapien
ggagatgcttcacgagatgctgaag

SEQ ID NO: 2763742 - DNA, 25 bp, Homo sapien
tctgcttgttcatctgaaggttcca

SEQ ID NO: 2763743 - DNA, 25 bp, Homo sapien
agcctccttgaatcccaggccacag

SEQ ID NO: 2763744 - DNA, 25 bp, Homo sapien
agttctgagtttccactgccagaga

SEQ ID NO: 2763745 - DNA, 25 bp, Homo sapien
tgcagcctccttgaatcccaggcca

SEQ ID NO: 2763746 - DNA, 25 bp, Homo sapien
acagagttctgagtttccactgcca

SEQ ID NO: 2763747 - DNA, 25 bp, Homo sapien
agacgtctctgaaagtgggctccca

SEQ ID NO: 2763748 - DNA, 25 bp, Homo sapien
cagtgctggagccacttgccgtctg

SEQ ID NO: 2763749 - DNA, 25 bp, Homo sapien
cacttgccgtctgacacctgagtct

SEQ ID NO: 2763750 - DNA, 25 bp, Homo sapien
cttcccagtccctctgtccgtagga

SEQ ID NO: 2763751 - DNA, 25 bp, Homo sapien
ggttttctctcacattcggaaacca

SEQ ID NO: 2763752 - DNA, 25 bp, Homo sapien
tgcatctgggaacgcaactctggtt

SEQ ID NO: 2763753 - DNA, 25 bp, Homo sapien
catggggcgaccagtccccgaggca

SEQ ID NO: 2763754 - DNA, 25 bp, Homo sapien
tttgatgccacacatttgcatctgg

SEQ ID NO: 2763755 - DNA, 25 bp, Homo sapien
gttgtcctctgtgccacgcagagcc

SEQ ID NO: 2763756 - DNA, 25 bp, Homo sapien
agagtgggacgtccccattccgttg

SEQ ID NO: 2763757 - DNA, 25 bp, Homo sapien
cctagaggcctggttagagtgggac

SEQ ID NO: 2763758 - DNA, 25 bp, Homo sapien
ctgtgccacgcagagcctgagcact

SEQ ID NO: 2763759 - DNA, 25 bp, Homo sapien
gcaagcagaaaataagctgggtctt

SEQ ID NO: 2763760 - DNA, 25 bp, Homo sapien
agcaagcagaaaataagctgggtct

SEQ ID NO: 2763761 - DNA, 25 bp, Homo sapien
cagcaagcagaaaataagctgggtc

SEQ ID NO: 2763762 - DNA, 25 bp, Homo sapien
aagcagaaaataagctgggtcttgt

SEQ ID NO: 2763763 - DNA, 25 bp, Homo sapien
ccttttcatatcttgagccagactt

SEQ ID NO: 2763764 - DNA, 25 bp, Homo sapien
tccttttcatatcttgagccagact

SEQ ID NO: 2763765 - DNA, 25 bp, Homo sapien
tgaatctctcattgccggaatggct

SEQ ID NO: 2763766 - DNA, 25 bp, Homo sapien
tctaggactatacaatctcttctca

SEQ ID NO: 2763767 - DNA, 25 bp, Homo sapien
aaagatccactttggtgtttgaatc

SEQ ID NO: 2763768 - DNA, 25 bp, Homo sapien
tctcacagggccgttcctccagctg

SEQ ID NO: 2763769 - DNA, 25 bp, Homo sapien
ctgccgcatgcgtaacagatgatga

SEQ ID NO: 2763770 - DNA, 25 bp, Homo sapien
aaataggcagtcttggatactcctg

SEQ ID NO: 2763771 - DNA, 25 bp, Homo sapien
gccgcatgcgtaacagatgatgaaa

SEQ ID NO: 2763772 - DNA, 25 bp, Homo sapien
tgatgaaataggcagtcttggatac

SEQ ID NO: 2763773 - DNA, 25 bp, Homo sapien
ttttgcctagtgtgtttatttggga

SEQ ID NO: 2763774 - DNA, 25 bp, Homo sapien
ggcacttcgtgctgtcactgggtca

SEQ ID NO: 2763775 - DNA, 25 bp, Homo sapien
gctgcctcctattctcctggtagtt

SEQ ID NO: 2763776 - DNA, 25 bp, Homo sapien
ctggtagttggatctcgatgctttt

SEQ ID NO: 2763777 - DNA, 25 bp, Homo sapien
ccgtgtattgttgcttggttgtgct

SEQ ID NO: 2763778 - DNA, 25 bp, Homo sapien
tctgggtggccagccgtgtattgtt

SEQ ID NO: 2763779 - DNA, 25 bp, Homo sapien
tcagctttaacctcagactttctca

SEQ ID NO: 2763780 - DNA, 25 bp, Homo sapien
caactgcccagtctgataacggaaa

SEQ ID NO: 2763781 - DNA, 25 bp, Homo sapien
gaggctctttgaaaacaatcaagtg

SEQ ID NO: 2763782 - DNA, 25 bp, Homo sapien
ggctctttgaaaacaatcaagtgca

SEQ ID NO: 2763783 - DNA, 25 bp, Homo sapien
gctctttgaaaacaatcaagtgcat

SEQ ID NO: 2763784 - DNA, 25 bp, Homo sapien
cagaggctctttgaaaacaatcaag

SEQ ID NO: 2763785 - DNA, 25 bp, Homo sapien
caacatgctcattagagtcgtccat

SEQ ID NO: 2763786 - DNA, 25 bp, Homo sapien
cccctgtagccatgggccgtcggag

SEQ ID NO: 2763787 - DNA, 25 bp, Homo sapien
acagggatgagagatcagatgcccc

SEQ ID NO: 2763788 - DNA, 25 bp, Homo sapien
tgggtctccccacggctcattaggg

SEQ ID NO: 2763789 - DNA, 25 bp, Homo sapien
ggtctgaggctgaattttcgaggct

SEQ ID NO: 2763790 - DNA, 25 bp, Homo sapien
tggccgccttgtgtaggtttcccag

SEQ ID NO: 2763791 - DNA, 25 bp, Homo sapien
agcagcaacccgtggccgactgatg

SEQ ID NO: 2763792 - DNA, 25 bp, Homo sapien
tggacaaaccgcagatgctcagaac

SEQ ID NO: 2763793 - DNA, 25 bp, Homo sapien
aaagcgcagagaaggatgttgatgt

SEQ ID NO: 2763794 - DNA, 25 bp, Homo sapien
agctgcctttgcttcgacccctgtt

SEQ ID NO: 2763795 - DNA, 25 bp, Homo sapien
gagctgcctttgcttcgacccctgt

SEQ ID NO: 2763796 - DNA, 25 bp, Homo sapien
tgagctgcctttgcttcgacccctg

SEQ ID NO: 2763797 - DNA, 25 bp, Homo sapien
ttgggcttggaagtcggcaatggcc

SEQ ID NO: 2763798 - DNA, 25 bp, Homo sapien
cggcaatggccattttaaccggcat

SEQ ID NO: 2763799 - DNA, 25 bp, Homo sapien
ggcttggaagtcggcaatggccatt

SEQ ID NO: 2763800 - DNA, 25 bp, Homo sapien
cttggaagtcggcaatggccatttt

SEQ ID NO: 2763801 - DNA, 25 bp, Homo sapien
actgctggaaagagtgccgatggca

SEQ ID NO: 2763802 - DNA, 25 bp, Homo sapien
gtgactgctggaaagagtgccgatg

SEQ ID NO: 2763803 - DNA, 25 bp, Homo sapien
ttggaagtcgtgcccagtgactgct

SEQ ID NO: 2763804 - DNA, 25 bp, Homo sapien
cttggaagtcgtgcccagtgactgc

SEQ ID NO: 2763805 - DNA, 25 bp, Homo sapien
ggagatggaatgagggttgggcagc

SEQ ID NO: 2763806 - DNA, 25 bp, Homo sapien
aggtgcctccatgaagggcgcccca

SEQ ID NO: 2763807 - DNA, 25 bp, Homo sapien
gaggtgcctccatgaagggcgcccc

SEQ ID NO: 2763808 - DNA, 25 bp, Homo sapien
catgcgttccctggctacactgtgt

SEQ ID NO: 2763809 - DNA, 25 bp, Homo sapien
cacatgcgttccctggctacactgt

SEQ ID NO: 2763810 - DNA, 25 bp, Homo sapien
tgttcctggtcctgcttggctgtgt

SEQ ID NO: 2763811 - DNA, 25 bp, Homo sapien
gcgttccctggctacactgtgttcc

SEQ ID NO: 2763812 - DNA, 25 bp, Homo sapien
ggggacaatgtctgtttccatcacc

SEQ ID NO: 2763813 - DNA, 25 bp, Homo sapien
gaggctgagaaccaatagcgctcca

SEQ ID NO: 2763814 - DNA, 25 bp, Homo sapien
ccaacttcgctgtggtaatactggg

SEQ ID NO: 2763815 - DNA, 25 bp, Homo sapien
tcacatgtaggaatagggacaggca

SEQ ID NO: 2763816 - DNA, 25 bp, Homo sapien
caacacttagattctctggcagcct

SEQ ID NO: 2763817 - DNA, 25 bp, Homo sapien
cttcttttccgaaagatgaaaagca

SEQ ID NO: 2763818 - DNA, 25 bp, Homo sapien
ttcttttccgaaagatgaaaagcat

SEQ ID NO: 2763819 - DNA, 25 bp, Homo sapien
agccctttgagtttgagggagagag

SEQ ID NO: 2763820 - DNA, 25 bp, Homo sapien
tcaggcaacgtggacccagagcaca

SEQ ID NO: 2763821 - DNA, 25 bp, Homo sapien
ctggcggatgcaagaaccgggtccc

SEQ ID NO: 2763822 - DNA, 25 bp, Homo sapien
ccaatattgagcgagtggcgtggca

SEQ ID NO: 2763823 - DNA, 25 bp, Homo sapien
tcactccacagggaagacaaagaat

SEQ ID NO: 2763824 - DNA, 25 bp, Homo sapien
cacctttgagttccgggagtgtgag

SEQ ID NO: 2763825 - DNA, 25 bp, Homo sapien
gttcatgctctagaatggtggttgc

SEQ ID NO: 2763826 - DNA, 25 bp, Homo sapien
aaatggttcatgctctagaatggtg

SEQ ID NO: 2763827 - DNA, 25 bp, Homo sapien
agtcaccagaaaatggttcatgctc

SEQ ID NO: 2763828 - DNA, 25 bp, Homo sapien
ccagaaaatggttcatgctctagaa

SEQ ID NO: 2763829 - DNA, 25 bp, Homo sapien
acagatgcactggcacctcttgctg

SEQ ID NO: 2763830 - DNA, 25 bp, Homo sapien
cagatgcactggcacctcttgctga

SEQ ID NO: 2763831 - DNA, 25 bp, Homo sapien
ttttcatccttgggcaagggccatg

SEQ ID NO: 2763832 - DNA, 25 bp, Homo sapien
ttccaattttagtatatgtgctgct

SEQ ID NO: 2763833 - DNA, 25 bp, Homo sapien
caattttagtatatgtgctgcttaa

SEQ ID NO: 2763834 - DNA, 25 bp, Homo sapien
ctaatcttctctgtatcgttccaat

SEQ ID NO: 2763835 - DNA, 25 bp, Homo sapien
aatggttcgttttttcagagacata

SEQ ID NO: 2763836 - DNA, 25 bp, Homo sapien
gcctcctgaatggttcgttttttca

SEQ ID NO: 2763837 - DNA, 25 bp, Homo sapien
tatcacatataggtcttaggaagca

SEQ ID NO: 2763838 - DNA, 25 bp, Homo sapien
gatcttattaatcagcctcctgaat

SEQ ID NO: 2763839 - DNA, 25 bp, Homo sapien
gaagaccaattctcctggataatga

SEQ ID NO: 2763840 - DNA, 25 bp, Homo sapien
tgttgatggggaagtgcacatacac

SEQ ID NO: 2763841 - DNA, 25 bp, Homo sapien
taatgatgttgatggggaagtgcac

SEQ ID NO: 2763842 - DNA, 25 bp, Homo sapien
attctcctggataatgatgttgatg

SEQ ID NO: 2763843 - DNA, 25 bp, Homo sapien
gcatccctttagagtaatattgaca

SEQ ID NO: 2763844 - DNA, 25 bp, Homo sapien
tgcatccctttagagtaatattgac

SEQ ID NO: 2763845 - DNA, 25 bp, Homo sapien
aaatagtctgaacggtggccagctc

SEQ ID NO: 2763846 - DNA, 25 bp, Homo sapien
tgaacggtggccagctcctttctgt

SEQ ID NO: 2763847 - DNA, 25 bp, Homo sapien
ctggaatgttgacagtctgattgct

SEQ ID NO: 2763848 - DNA, 25 bp, Homo sapien
tgttgacagtctgattgctgagaat

SEQ ID NO: 2763849 - DNA, 25 bp, Homo sapien
ggaatgttgacagtctgattgctga

SEQ ID NO: 2763850 - DNA, 25 bp, Homo sapien
gaatgttgacagtctgattgctgag

SEQ ID NO: 2763851 - DNA, 25 bp, Homo sapien
gctggacttgtttccccaagatctc

SEQ ID NO: 2763852 - DNA, 25 bp, Homo sapien
ggctggcagtttccagcaccagttc

SEQ ID NO: 2763853 - DNA, 25 bp, Homo sapien
accagttcccacagtgcctagctgg

SEQ ID NO: 2763854 - DNA, 25 bp, Homo sapien
ccaggggctggcagtttccagcacc

SEQ ID NO: 2763855 - DNA, 25 bp, Homo sapien
tcctcataagtgtcctttgcaaaca

SEQ ID NO: 2763856 - DNA, 25 bp, Homo sapien
gtcctcataagtgtcctttgcaaac

SEQ ID NO: 2763857 - DNA, 25 bp, Homo sapien
gaactagcctatttgggacatccat

SEQ ID NO: 2763858 - DNA, 25 bp, Homo sapien
ccagacttgcagacacccttgatca

SEQ ID NO: 2763859 - DNA, 25 bp, Homo sapien
tcttgagagtcttttgggagaagcc

SEQ ID NO: 2763860 - DNA, 25 bp, Homo sapien
caaggcttctcaggctaattcagag

SEQ ID NO: 2763861 - DNA, 25 bp, Homo sapien
gggaacacattggtgtctttaagga

SEQ ID NO: 2763862 - DNA, 25 bp, Homo sapien
cacattggtgtctttaaggaggttt

SEQ ID NO: 2763863 - DNA, 25 bp, Homo sapien
atgagcaggcctgaccaacccactg

SEQ ID NO: 2763864 - DNA, 25 bp, Homo sapien
tggccaaggccttggggaacacatt

SEQ ID NO: 2763865 - DNA, 25 bp, Homo sapien
gtctgtgcctggttgattaataaga

SEQ ID NO: 2763866 - DNA, 25 bp, Homo sapien
tgtgcctggttgattaataagaaag

SEQ ID NO: 2763867 - DNA, 25 bp, Homo sapien
acagtcggtagccactgtctgtgcc

SEQ ID NO: 2763868 - DNA, 25 bp, Homo sapien
ttagcacagtcggtagccactgtct

SEQ ID NO: 2763869 - DNA, 25 bp, Homo sapien
tggttgagaggccaggttagccacc

SEQ ID NO: 2763870 - DNA, 25 bp, Homo sapien
ggctggacatttataggccattttc

SEQ ID NO: 2763871 - DNA, 25 bp, Homo sapien
cagaatttgatgcaatggctggaca

SEQ ID NO: 2763872 - DNA, 25 bp, Homo sapien
tgagggatgcctcagaggagaaagt

SEQ ID NO: 2763873 - DNA, 25 bp, Homo sapien
agctgaccgccaattccaggtttga

SEQ ID NO: 2763874 - DNA, 25 bp, Homo sapien
ctaataacccttttagtgaagagct

SEQ ID NO: 2763875 - DNA, 25 bp, Homo sapien
actgctagctgaccgccaattccag

SEQ ID NO: 2763876 - DNA, 25 bp, Homo sapien
tgctctcctccactgctagctgacc

SEQ ID NO: 2763877 - DNA, 25 bp, Homo sapien
aaagagatttgggtgcctgttctgc

SEQ ID NO: 2763878 - DNA, 25 bp, Homo sapien
cctgccatccctgcattgttgttaa

SEQ ID NO: 2763879 - DNA, 25 bp, Homo sapien
tctgcgtacaggttgccctctcctg

SEQ ID NO: 2763880 - DNA, 25 bp, Homo sapien
tgcctgttctgcgtacaggttgccc

SEQ ID NO: 2763881 - DNA, 25 bp, Homo sapien
ttctttctttttctgatcattttcc

SEQ ID NO: 2763882 - DNA, 25 bp, Homo sapien
ctttctgataggcttctttcttttt

SEQ ID NO: 2763883 - DNA, 25 bp, Homo sapien
ctttctttttctgatcattttcctc

SEQ ID NO: 2763884 - DNA, 25 bp, Homo sapien
ttctttttctgatcattttcctcac

SEQ ID NO: 2763885 - DNA, 25 bp, Homo sapien
tcccgttttgccatggtgacacctg

SEQ ID NO: 2763886 - DNA, 25 bp, Homo sapien
catggtgacacctgtggggcgttcc

SEQ ID NO: 2763887 - DNA, 25 bp, Homo sapien
ccatggtgacacctgtggggcgttc

SEQ ID NO: 2763888 - DNA, 25 bp, Homo sapien
ttgccatggtgacacctgtggggcg

SEQ ID NO: 2763889 - DNA, 25 bp, Homo sapien
tggaggatggcggttccactcatta

SEQ ID NO: 2763890 - DNA, 25 bp, Homo sapien
ggatggcggttccactcattatatt

SEQ ID NO: 2763891 - DNA, 25 bp, Homo sapien
ggcggttccactcattatatttttg

SEQ ID NO: 2763892 - DNA, 25 bp, Homo sapien
tactggaggatggcggttccactca

SEQ ID NO: 2763893 - DNA, 25 bp, Homo sapien
caagcagggtagagttcgggtcttt

SEQ ID NO: 2763894 - DNA, 25 bp, Homo sapien
taaagaagtacttgcatctgaacac

SEQ ID NO: 2763895 - DNA, 25 bp, Homo sapien
tcagagtgagacacgtcacaggtat

SEQ ID NO: 2763896 - DNA, 25 bp, Homo sapien
tgaacacatattcactccagaagtg

SEQ ID NO: 2763897 - DNA, 25 bp, Homo sapien
ttacagcagagaagtgccattcctg

SEQ ID NO: 2763898 - DNA, 25 bp, Homo sapien
tttctgtaggaatctgacaaaattt

SEQ ID NO: 2763899 - DNA, 25 bp, Homo sapien
gattatcaattgtccgttgttctgt

SEQ ID NO: 2763900 - DNA, 25 bp, Homo sapien
tctgttggaacaatagggctgattt

SEQ ID NO: 2763901 - DNA, 25 bp, Homo sapien
cagaaccctgagctgagtgccttaa

SEQ ID NO: 2763902 - DNA, 25 bp, Homo sapien
gatgctgtcagtgcgtctggcaacc

SEQ ID NO: 2763903 - DNA, 25 bp, Homo sapien
ggcatccacttggataattccgatg

SEQ ID NO: 2763904 - DNA, 25 bp, Homo sapien
gcaccgtatcaaccagaaccctgag

SEQ ID NO: 2763905 - DNA, 25 bp, Homo sapien
tcagggatttggtgcagaaagcttt

SEQ ID NO: 2763906 - DNA, 25 bp, Homo sapien
tccttagaggcgcagtaccactggt

SEQ ID NO: 2763907 - DNA, 25 bp, Homo sapien
taccactggtgtgcgttgtttggtg

SEQ ID NO: 2763908 - DNA, 25 bp, Homo sapien
tgtctgtaagctctggactggctgt

SEQ ID NO: 2763909 - DNA, 25 bp, Homo sapien
tgtaccagctttccgtagtcctggg

SEQ ID NO: 2763910 - DNA, 25 bp, Homo sapien
cttggctgaatctgttaatggattt

SEQ ID NO: 2763911 - DNA, 25 bp, Homo sapien
atggatttgctgactgttatcctta

SEQ ID NO: 2763912 - DNA, 25 bp, Homo sapien
ccagggaggtgtaggtagcgctgtg

SEQ ID NO: 2763913 - DNA, 25 bp, Homo sapien
aaggccctgccgagaggcaatgagc

SEQ ID NO: 2763914 - DNA, 25 bp, Homo sapien
tgcttgggtcctgttgttgagcatc

SEQ ID NO: 2763915 - DNA, 25 bp, Homo sapien
tgcccgaggctaggttttcttaaga

SEQ ID NO: 2763916 - DNA, 25 bp, Homo sapien
ggacttcgggcctggaacaaggatc

SEQ ID NO: 2763917 - DNA, 25 bp, Homo sapien
gctgcttgtgtttcaaattcgccta

SEQ ID NO: 2763918 - DNA, 25 bp, Homo sapien
caagtgagtctacttttaccagagg

SEQ ID NO: 2763919 - DNA, 25 bp, Homo sapien
gaattctgggcgcaattacatcgaa

SEQ ID NO: 2763920 - DNA, 25 bp, Homo sapien
tgaatattattggaaaggtacagat

SEQ ID NO: 2763921 - DNA, 25 bp, Homo sapien
tctgcatagagccagtacaaaacct

SEQ ID NO: 2763922 - DNA, 25 bp, Homo sapien
ttttgcaagactgtgacgttgcacg

SEQ ID NO: 2763923 - DNA, 25 bp, Homo sapien
ttgccctggctcgagtgtcactttt

SEQ ID NO: 2763924 - DNA, 25 bp, Homo sapien
gactgtgacgttgcacgtgttcagc

SEQ ID NO: 2763925 - DNA, 25 bp, Homo sapien
cggccatcgccatggtgaagctgag

SEQ ID NO: 2763926 - DNA, 25 bp, Homo sapien
ggccagtttgccatccacttgggct

SEQ ID NO: 2763927 - DNA, 25 bp, Homo sapien
cacttgggctttatccctcttgtga

SEQ ID NO: 2763928 - DNA, 25 bp, Homo sapien
ttcccgatgcggtggttgctgtaag

SEQ ID NO: 2763929 - DNA, 25 bp, Homo sapien
cagatcctggaatgtctgaaccaac

SEQ ID NO: 2763930 - DNA, 25 bp, Homo sapien
ttaagaggggtgcagatcctggaat

SEQ ID NO: 2763931 - DNA, 25 bp, Homo sapien
gatcctggaatgtctgaaccaactg

SEQ ID NO: 2763932 - DNA, 25 bp, Homo sapien
tggaatgtctgaaccaactgttctg

SEQ ID NO: 2763933 - DNA, 25 bp, Homo sapien
tgcacctccacactcggtggcgtta

SEQ ID NO: 2763934 - DNA, 25 bp, Homo sapien
tccacactcggtggcgttaagatgc

SEQ ID NO: 2763935 - DNA, 25 bp, Homo sapien
gtggcgttaagatgcaccacactca

SEQ ID NO: 2763936 - DNA, 25 bp, Homo sapien
cactcggtggcgttaagatgcacca

SEQ ID NO: 2763937 - DNA, 25 bp, Homo sapien
gcttgttctccctgctgtgcggtgc

SEQ ID NO: 2763938 - DNA, 25 bp, Homo sapien
tcttagtggaattgcgatgggcctt

SEQ ID NO: 2763939 - DNA, 25 bp, Homo sapien
tccaagtagcataggcagcagtctg

SEQ ID NO: 2763940 - DNA, 25 bp, Homo sapien
ccagaatgcctgttccgcaagcctg

SEQ ID NO: 2763941 - DNA, 25 bp, Homo sapien
tgtccatgatggggagaagcttgga

SEQ ID NO: 2763942 - DNA, 25 bp, Homo sapien
tttgtccatgatggggagaagcttg

SEQ ID NO: 2763943 - DNA, 25 bp, Homo sapien
cttttgtccatgatggggagaagct

SEQ ID NO: 2763944 - DNA, 25 bp, Homo sapien
gtccatgatggggagaagcttggaa

SEQ ID NO: 2763945 - DNA, 25 bp, Homo sapien
atgtcaagagtaagaaaccagcttt

SEQ ID NO: 2763946 - DNA, 25 bp, Homo sapien
ggctttcctgaagacgcacttcttc

SEQ ID NO: 2763947 - DNA, 25 bp, Homo sapien
ccaatgtcaagagtaagaaaccagc

SEQ ID NO: 2763948 - DNA, 25 bp, Homo sapien
tcttctgaaaaatcgctcctgattc

SEQ ID NO: 2763949 - DNA, 25 bp, Homo sapien
acttaggagtatgctgggctctgaa

SEQ ID NO: 2763950 - DNA, 25 bp, Homo sapien
gaacttaggagtatgctgggctctg

SEQ ID NO: 2763951 - DNA, 25 bp, Homo sapien
aacttaggagtatgctgggctctga

SEQ ID NO: 2763952 - DNA, 25 bp, Homo sapien
ttaggagtatgctgggctctgaaag

SEQ ID NO: 2763953 - DNA, 25 bp, Homo sapien
ttgcaatgaaataagtaccagaaac

SEQ ID NO: 2763954 - DNA, 25 bp, Homo sapien
tgaaataagtaccagaaacaaactg

SEQ ID NO: 2763955 - DNA, 25 bp, Homo sapien
tgcaatgaaataagtaccagaaaca

SEQ ID NO: 2763956 - DNA, 25 bp, Homo sapien
caatgaaataagtaccagaaacaaa

SEQ ID NO: 2763957 - DNA, 25 bp, Homo sapien
gctcagcgtcgtggagttttgaatc

SEQ ID NO: 2763958 - DNA, 25 bp, Homo sapien
ccttgcttgggagcctcgtagaagc

SEQ ID NO: 2763959 - DNA, 25 bp, Homo sapien
gagcctcgtagaagctgtgacccat

SEQ ID NO: 2763960 - DNA, 25 bp, Homo sapien
gctgtgctcagcgtcgtggagtttt

SEQ ID NO: 2763961 - DNA, 25 bp, Homo sapien
gacaggagggaggaacgaagaagct

SEQ ID NO: 2763962 - DNA, 25 bp, Homo sapien
gttgctgtagctatggaagtagatg

SEQ ID NO: 2763963 - DNA, 25 bp, Homo sapien
tagatgggataatccaggtgacagg

SEQ ID NO: 2763964 - DNA, 25 bp, Homo sapien
gagggaggaacgaagaagctggtac

SEQ ID NO: 2763965 - DNA, 25 bp, Homo sapien
gatggaagagctgatctgcagatac

SEQ ID NO: 2763966 - DNA, 25 bp, Homo sapien
tcctccctggcagtctgtagaatga

SEQ ID NO: 2763967 - DNA, 25 bp, Homo sapien
ccctggcagtctgtagaatgaagca

SEQ ID NO: 2763968 - DNA, 25 bp, Homo sapien
tggtccgtggccaagtgtgcgtcct

SEQ ID NO: 2763969 - DNA, 25 bp, Homo sapien
gattttcaggcttgactgtggctcc

SEQ ID NO: 2763970 - DNA, 25 bp, Homo sapien
tctgctcggcttctaagtcaaggga

SEQ ID NO: 2763971 - DNA, 25 bp, Homo sapien
tcatatttcagagccaacgaggtgc

SEQ ID NO: 2763972 - DNA, 25 bp, Homo sapien
ggatccagagtgaagcccgaatgca

SEQ ID NO: 2763973 - DNA, 25 bp, Homo sapien
aaaactctggtaattcacacaagtc

SEQ ID NO: 2763974 - DNA, 25 bp, Homo sapien
tggctagacttccacaatctgagag

SEQ ID NO: 2763975 - DNA, 25 bp, Homo sapien
tcacacaagtcattcacttctttct

SEQ ID NO: 2763976 - DNA, 25 bp, Homo sapien
aactctggtaattcacacaagtcat

SEQ ID NO: 2763977 - DNA, 25 bp, Homo sapien
ccaaattccaccttcgccatgagtt

SEQ ID NO: 2763978 - DNA, 25 bp, Homo sapien
aggagccccatctttgagttgccaa

SEQ ID NO: 2763979 - DNA, 25 bp, Homo sapien
gacgactgcccatgggatagaggct

SEQ ID NO: 2763980 - DNA, 25 bp, Homo sapien
gcaacactttgacttcagttcccag

SEQ ID NO: 2763981 - DNA, 25 bp, Homo sapien
gcccatccaaactttgtgtgatgaa

SEQ ID NO: 2763982 - DNA, 25 bp, Homo sapien
ggacaacttggcgtttgaggatgtt

SEQ ID NO: 2763983 - DNA, 25 bp, Homo sapien
tgaggatgttattggggtcccactg

SEQ ID NO: 2763984 - DNA, 25 bp, Homo sapien
ccactggcccatccaaactttgtgt

SEQ ID NO: 2763985 - DNA, 25 bp, Homo sapien
gccccaggcttttgctgcgtgagca

SEQ ID NO: 2763986 - DNA, 25 bp, Homo sapien
gaaggcgttgtcctgggttcatcag

SEQ ID NO: 2763987 - DNA, 25 bp, Homo sapien
tggttgttgacacttttgcttggga

SEQ ID NO: 2763988 - DNA, 25 bp, Homo sapien
gcagcattgcatgtagccccaggct

SEQ ID NO: 2763989 - DNA, 25 bp, Homo sapien
cagtgcattaggtaaggaatgcagg

SEQ ID NO: 2763990 - DNA, 25 bp, Homo sapien
tctgttgggagatagagacacgtgt

SEQ ID NO: 2763991 - DNA, 25 bp, Homo sapien
gagactttaccctctgggacctgta

SEQ ID NO: 2763992 - DNA, 25 bp, Homo sapien
cagaggacatctggtcagggtcaca

SEQ ID NO: 2763993 - DNA, 25 bp, Homo sapien
cagctggtgaattccacaaggaggg

SEQ ID NO: 2763994 - DNA, 25 bp, Homo sapien
tcttccagaggtaccaagggacacc

SEQ ID NO: 2763995 - DNA, 25 bp, Homo sapien
gaggtaggcgttgagaccactgtcc

SEQ ID NO: 2763996 - DNA, 25 bp, Homo sapien
aaaccccgggattctctctgtcagc

SEQ ID NO: 2763997 - DNA, 25 bp, Homo sapien
cttgagttctcgttgcagcccaggg

SEQ ID NO: 2763998 - DNA, 25 bp, Homo sapien
ctctcttgagttctcgttgcagccc

SEQ ID NO: 2763999 - DNA, 25 bp, Homo sapien
ctcttgagttctcgttgcagcccag

SEQ ID NO: 2764000 - DNA, 25 bp, Homo sapien
agccctctcttgagttctcgttgca

SEQ ID NO: 2764001 - DNA, 25 bp, Homo sapien
tcagtggggtctggcttcagtgaca

SEQ ID NO: 2764002 - DNA, 25 bp, Homo sapien
agtgacagggctcgccgtctgccac

SEQ ID NO: 2764003 - DNA, 25 bp, Homo sapien
taaagactgccagtttggtctcaga

SEQ ID NO: 2764004 - DNA, 25 bp, Homo sapien
tttgcataattgtcagtcatctcag

SEQ ID NO: 2764005 - DNA, 25 bp, Homo sapien
gattcttcgttggtggaactgccag

SEQ ID NO: 2764006 - DNA, 25 bp, Homo sapien
agagcaaagcaggaccttccgattc

SEQ ID NO: 2764007 - DNA, 25 bp, Homo sapien
ctgatatgggtgtttgattcttcgt

SEQ ID NO: 2764008 - DNA, 25 bp, Homo sapien
tccgattctgtgagtctgatatggg

SEQ ID NO: 2764009 - DNA, 25 bp, Homo sapien
ccagcatgcagtgtgccctatgttg

SEQ ID NO: 2764010 - DNA, 25 bp, Homo sapien
tgcccctgggtcaagaacagtctgc

SEQ ID NO: 2764011 - DNA, 25 bp, Homo sapien
gagccatacatcctacctgcctggg

SEQ ID NO: 2764012 - DNA, 25 bp, Homo sapien
ggcccttaattcagatcgtagtgac

SEQ ID NO: 2764013 - DNA, 25 bp, Homo sapien
tacctctcgtcgtaagctttggtcg

SEQ ID NO: 2764014 - DNA, 25 bp, Homo sapien
cctgcatacctctcgtcgtaagctt

SEQ ID NO: 2764015 - DNA, 25 bp, Homo sapien
tctcgtcgtaagctttggtcgcctt

SEQ ID NO: 2764016 - DNA, 25 bp, Homo sapien
gtaagctttggtcgccttccactgt

SEQ ID NO: 2764017 - DNA, 25 bp, Homo sapien
ggcttgcacatcattgttctcattg

SEQ ID NO: 2764018 - DNA, 25 bp, Homo sapien
gaaactgcctcattctcggcaccaa

SEQ ID NO: 2764019 - DNA, 25 bp, Homo sapien
accagttcctgttatatagaccaga

SEQ ID NO: 2764020 - DNA, 25 bp, Homo sapien
attgttctcattgccttcccagaca

SEQ ID NO: 2764021 - DNA, 25 bp, Homo sapien
tgctgtacctagtcccattgagagg

SEQ ID NO: 2764022 - DNA, 25 bp, Homo sapien
tttaagattactcaagcagcgtggc

SEQ ID NO: 2764023 - DNA, 25 bp, Homo sapien
cattgagaggtaaccagagcctgtg

SEQ ID NO: 2764024 - DNA, 25 bp, Homo sapien
catgtacagtggtcctcaaatagga

SEQ ID NO: 2764025 - DNA, 25 bp, Homo sapien
ggcattcattgccatatgactgtat

SEQ ID NO: 2764026 - DNA, 25 bp, Homo sapien
aattttaggtaatcagatgaaacat

SEQ ID NO: 2764027 - DNA, 25 bp, Homo sapien
aaatttgtcttgattgcaaatcaat

SEQ ID NO: 2764028 - DNA, 25 bp, Homo sapien
tcattgccatatgactgtatcagct

SEQ ID NO: 2764029 - DNA, 25 bp, Homo sapien
aaaataacataatatagactaggta

SEQ ID NO: 2764030 - DNA, 25 bp, Homo sapien
ataacataatatagactaggtattg

SEQ ID NO: 2764031 - DNA, 25 bp, Homo sapien
catcacttaagattaatgtccctta

SEQ ID NO: 2764032 - DNA, 25 bp, Homo sapien
gctatattcatatgtagttgataca

SEQ ID NO: 2764033 - DNA, 25 bp, Homo sapien
gccattttgccatatgcgaatatac

SEQ ID NO: 2764034 - DNA, 25 bp, Homo sapien
ttttaattctcaatagcacctgcca

SEQ ID NO: 2764035 - DNA, 25 bp, Homo sapien
gtctggccctaaatgaacatctttt

SEQ ID NO: 2764036 - DNA, 25 bp, Homo sapien
cgaatatactagacaagtgcttctg

SEQ ID NO: 2764037 - DNA, 25 bp, Homo sapien
ccacgcccggtctgagaatgattta

SEQ ID NO: 2764038 - DNA, 25 bp, Homo sapien
tccctccagccagggcgattcagat

SEQ ID NO: 2764039 - DNA, 25 bp, Homo sapien
tgccaggcatcaacagacggactat

SEQ ID NO: 2764040 - DNA, 25 bp, Homo sapien
tgttagctgcttagcctgggtacca

SEQ ID NO: 2764041 - DNA, 25 bp, Homo sapien
ggttggcattgttctagagtatctt

SEQ ID NO: 2764042 - DNA, 25 bp, Homo sapien
cattcggagctatcaatgagtttgc

SEQ ID NO: 2764043 - DNA, 25 bp, Homo sapien
tataaaaatcgttgcagattcaggt

SEQ ID NO: 2764044 - DNA, 25 bp, Homo sapien
ctttaagacataggacagttcatgc

SEQ ID NO: 2764045 - DNA, 25 bp, Homo sapien
ttagtagagacggcgattcactatg

SEQ ID NO: 2764046 - DNA, 25 bp, Homo sapien
ccacgctcggccaatttttgtgttt

SEQ ID NO: 2764047 - DNA, 25 bp, Homo sapien
accacgctcggccaatttttgtgtt

SEQ ID NO: 2764048 - DNA, 25 bp, Homo sapien
ccatcaatccgtgtgtgagcataca

SEQ ID NO: 2764049 - DNA, 25 bp, Homo sapien
cacccggcgtaggaggcctcatttt

SEQ ID NO: 2764050 - DNA, 25 bp, Homo sapien
cacattacctcctagaagctggaca

SEQ ID NO: 2764051 - DNA, 25 bp, Homo sapien
gcatacatatggttgaaggtgccca

SEQ ID NO: 2764052 - DNA, 25 bp, Homo sapien
cacagagctgacatgtataggccat

SEQ ID NO: 2764053 - DNA, 25 bp, Homo sapien
caaaagccttcaggaccatccagag

SEQ ID NO: 2764054 - DNA, 25 bp, Homo sapien
caaattccaatcagcgggttcagag

SEQ ID NO: 2764055 - DNA, 25 bp, Homo sapien
gagccaaaatcaatcacggtaagtg

SEQ ID NO: 2764056 - DNA, 25 bp, Homo sapien
tcctttactacagatacgcagttag

SEQ ID NO: 2764057 - DNA, 25 bp, Homo sapien
ttaccggaaatcgtaagtggatctg

SEQ ID NO: 2764058 - DNA, 25 bp, Homo sapien
tctcaggaagggactatgaaccgag

SEQ ID NO: 2764059 - DNA, 25 bp, Homo sapien
gatacgcagttagttactatctccc

SEQ ID NO: 2764060 - DNA, 25 bp, Homo sapien
ttttattcgagagggcaaagcagag

SEQ ID NO: 2764061 - DNA, 25 bp, Homo sapien
ttgcagccttagtcaaccaagaaga

SEQ ID NO: 2764062 - DNA, 25 bp, Homo sapien
gttccgtccatattcagagcctcag

SEQ ID NO: 2764063 - DNA, 25 bp, Homo sapien
tctgcagtgcgagctgtttaatgcc

SEQ ID NO: 2764064 - DNA, 25 bp, Homo sapien
acacagagccggcatcaccatggaa

SEQ ID NO: 2764065 - DNA, 25 bp, Homo sapien
agccggcatcaccatggaaacacat

SEQ ID NO: 2764066 - DNA, 25 bp, Homo sapien
ccggcatcaccatggaaacacattt

SEQ ID NO: 2764067 - DNA, 25 bp, Homo sapien
ggcatcaccatggaaacacatttcc

SEQ ID NO: 2764068 - DNA, 25 bp, Homo sapien
ttttcatcttggtgcacgctgcggc

SEQ ID NO: 2764069 - DNA, 25 bp, Homo sapien
tgtgttgaagtgctgaagacctcgg

SEQ ID NO: 2764070 - DNA, 25 bp, Homo sapien
gaagtgtggctgtacacgatgctct

SEQ ID NO: 2764071 - DNA, 25 bp, Homo sapien
tgccaagtcttggtaccagaggatg

SEQ ID NO: 2764072 - DNA, 25 bp, Homo sapien
ttcgggaccccacactagaagaagc

SEQ ID NO: 2764073 - DNA, 25 bp, Homo sapien
gcaagaatatgacgtcctggacaac

SEQ ID NO: 2764074 - DNA, 25 bp, Homo sapien
tgcatacaacaatcagagtggcggc

SEQ ID NO: 2764075 - DNA, 25 bp, Homo sapien
caaaaaagcgtgtgagcctgcgaac

SEQ ID NO: 2764076 - DNA, 25 bp, Homo sapien
atcacgtagaatctgtgggagccct

SEQ ID NO: 2764077 - DNA, 25 bp, Homo sapien
catcacgtagaatctgtgggagccc

SEQ ID NO: 2764078 - DNA, 25 bp, Homo sapien
tgagcttgttttcttgcaaccaggc

SEQ ID NO: 2764079 - DNA, 25 bp, Homo sapien
gttttcttgcaaccaggcatcccat

SEQ ID NO: 2764080 - DNA, 25 bp, Homo sapien
tgaggacccctgtcctagaagactt

SEQ ID NO: 2764081 - DNA, 25 bp, Homo sapien
ggttgaggacccctgtcctagaaga

SEQ ID NO: 2764082 - DNA, 25 bp, Homo sapien
tgtcctagaagactttcctctactt

SEQ ID NO: 2764083 - DNA, 25 bp, Homo sapien
ctttcctctacttcatctcattcag

SEQ ID NO: 2764084 - DNA, 25 bp, Homo sapien
aatgtagttacaagccaggtcgtct

SEQ ID NO: 2764085 - DNA, 25 bp, Homo sapien
tgagccctgacaacatgagtggaga

SEQ ID NO: 2764086 - DNA, 25 bp, Homo sapien
cagtggcacaaaccaacccgttgag

SEQ ID NO: 2764087 - DNA, 25 bp, Homo sapien
tacagaagactgtcgtgactcacgc

SEQ ID NO: 2764088 - DNA, 25 bp, Homo sapien
caagtaaaccgtagttgcaagaata

SEQ ID NO: 2764089 - DNA, 25 bp, Homo sapien
cattcacaataagctatgagggtaa

SEQ ID NO: 2764090 - DNA, 25 bp, Homo sapien
catcagaggtacaaaggcaatagaa

SEQ ID NO: 2764091 - DNA, 25 bp, Homo sapien
tcaaattagccacccttttccaggc

SEQ ID NO: 2764092 - DNA, 25 bp, Homo sapien
gaaagacttgaacagcttcagggta

SEQ ID NO: 2764093 - DNA, 25 bp, Homo sapien
tcttatgaagactgtaattgggaga

SEQ ID NO: 2764094 - DNA, 25 bp, Homo sapien
tgtaattgggagaaagacttgaaca

SEQ ID NO: 2764095 - DNA, 25 bp, Homo sapien
gacttgaacagcttcagggtatagc

SEQ ID NO: 2764096 - DNA, 25 bp, Homo sapien
actgggaaaacaactgcatcatagg

SEQ ID NO: 2764097 - DNA, 25 bp, Homo sapien
ctgggaaaacaactgcatcataggc

SEQ ID NO: 2764098 - DNA, 25 bp, Homo sapien
tgggaaaacaactgcatcataggct

SEQ ID NO: 2764099 - DNA, 25 bp, Homo sapien
tgacacagctggcggctcacaaagc

SEQ ID NO: 2764100 - DNA, 25 bp, Homo sapien
gacacagctggcggctcacaaagcc

SEQ ID NO: 2764101 - DNA, 25 bp, Homo sapien
gcaactgacacagctggcggctcac

SEQ ID NO: 2764102 - DNA, 25 bp, Homo sapien
gatagtatacatattagggaatccc

SEQ ID NO: 2764103 - DNA, 25 bp, Homo sapien
tagagttatacaccatctagtactt

SEQ ID NO: 2764104 - DNA, 25 bp, Homo sapien
ttttgcaatgaatgttaacaacaac

SEQ ID NO: 2764105 - DNA, 25 bp, Homo sapien
ccttaaaattcaactctagagttat

SEQ ID NO: 2764106 - DNA, 25 bp, Homo sapien
ctaaacacctgaaagccccactatt

SEQ ID NO: 2764107 - DNA, 25 bp, Homo sapien
gccccactattaacatggactatgg

SEQ ID NO: 2764108 - DNA, 25 bp, Homo sapien
acctgaaagccccactattaacatg

SEQ ID NO: 2764109 - DNA, 25 bp, Homo sapien
gaaagccccactattaacatggact

SEQ ID NO: 2764110 - DNA, 25 bp, Homo sapien
gctgaggtcatccaaaagctgtgcg

SEQ ID NO: 2764111 - DNA, 25 bp, Homo sapien
tggcacagctcaaaaaatcccagga

SEQ ID NO: 2764112 - DNA, 25 bp, Homo sapien
tctccttcagcgacaagaggtcgat

SEQ ID NO: 2764113 - DNA, 25 bp, Homo sapien
aacaggtaacagtgaggatggcaac

SEQ ID NO: 2764114 - DNA, 25 bp, Homo sapien
tcatactgctcgtccagaagaggag

SEQ ID NO: 2764115 - DNA, 25 bp, Homo sapien
tcagggtctaagtcgagaagctgcc

SEQ ID NO: 2764116 - DNA, 25 bp, Homo sapien
gacgtccgaggcatgagccaggtaa

SEQ ID NO: 2764117 - DNA, 25 bp, Homo sapien
gaagctgccgcactctcttggtagc

SEQ ID NO: 2764118 - DNA, 25 bp, Homo sapien
aagagtattatcttcgcattctata

SEQ ID NO: 2764119 - DNA, 25 bp, Homo sapien
atgggagctctaagagtattatctt

SEQ ID NO: 2764120 - DNA, 25 bp, Homo sapien
gtattatcttcgcattctatatctg

SEQ ID NO: 2764121 - DNA, 25 bp, Homo sapien
ttatcttcgcattctatatctgttc

SEQ ID NO: 2764122 - DNA, 25 bp, Homo sapien
tccagttctggaccgtttctggagg

SEQ ID NO: 2764123 - DNA, 25 bp, Homo sapien
cagttctggaccgtttctggaggct

SEQ ID NO: 2764124 - DNA, 25 bp, Homo sapien
gttctggaccgtttctggaggctga

SEQ ID NO: 2764125 - DNA, 25 bp, Homo sapien
caatccagttctggaccgtttctgg

SEQ ID NO: 2764126 - DNA, 25 bp, Homo sapien
tacaggctgaacgtccctaatccga

SEQ ID NO: 2764127 - DNA, 25 bp, Homo sapien
cactgactcatcaccgaaccttgga

SEQ ID NO: 2764128 - DNA, 25 bp, Homo sapien
agaaaagcaagctactggccgggca

SEQ ID NO: 2764129 - DNA, 25 bp, Homo sapien
ccctggacgaaagagtgagactatc

SEQ ID NO: 2764130 - DNA, 25 bp, Homo sapien
gaaggtattacatccataaaacaaa

SEQ ID NO: 2764131 - DNA, 25 bp, Homo sapien
ttcaaaagaggtgtgataccctcag

SEQ ID NO: 2764132 - DNA, 25 bp, Homo sapien
ccaacacagaagagatcaaaaagag

SEQ ID NO: 2764133 - DNA, 25 bp, Homo sapien
taaacagacaatcacggataacgtg

SEQ ID NO: 2764134 - DNA, 25 bp, Homo sapien
ggataacagaagatcccaaatgctt

SEQ ID NO: 2764135 - DNA, 25 bp, Homo sapien
tcgtacaatttcagaaaaccaacaa

SEQ ID NO: 2764136 - DNA, 25 bp, Homo sapien
tacacatttctagactgaaaaaatt

SEQ ID NO: 2764137 - DNA, 25 bp, Homo sapien
ttaaaatgacccacattaaggcata

SEQ ID NO: 2764138 - DNA, 25 bp, Homo sapien
gacttttacgtctcattccacaagc

SEQ ID NO: 2764139 - DNA, 25 bp, Homo sapien
caagcctctagttgtaaccttcctc

SEQ ID NO: 2764140 - DNA, 25 bp, Homo sapien
taattcaattaacatacagccacgt

SEQ ID NO: 2764141 - DNA, 25 bp, Homo sapien
tccagatgatatacagtcattccaa

SEQ ID NO: 2764142 - DNA, 25 bp, Homo sapien
aaaaaacagaaatattatcagccaa

SEQ ID NO: 2764143 - DNA, 25 bp, Homo sapien
aaaacagaaatattatcagccaaag

SEQ ID NO: 2764144 - DNA, 25 bp, Homo sapien
acagaaatattatcagccaaagtca

SEQ ID NO: 2764145 - DNA, 25 bp, Homo sapien
cagaaatattatcagccaaagtcat

SEQ ID NO: 2764146 - DNA, 25 bp, Homo sapien
gtggacaagttaagaagctcaggca

SEQ ID NO: 2764147 - DNA, 25 bp, Homo sapien
ggcaaagacaacctagccaagttag

SEQ ID NO: 2764148 - DNA, 25 bp, Homo sapien
tattgctgtttaggataaaaccaca

SEQ ID NO: 2764149 - DNA, 25 bp, Homo sapien
gcttcacagagaattagaataccat

SEQ ID NO: 2764150 - DNA, 25 bp, Homo sapien
gctataggcctaaaattctcaataa

SEQ ID NO: 2764151 - DNA, 25 bp, Homo sapien
cacatgcgcccacaaacaaatggat

SEQ ID NO: 2764152 - DNA, 25 bp, Homo sapien
acatgcgcccacaaacaaatggatg

SEQ ID NO: 2764153 - DNA, 25 bp, Homo sapien
atggctataggcctaaaattctcaa

SEQ ID NO: 2764154 - DNA, 25 bp, Homo sapien
cagttctgtaccacagcttctggga

SEQ ID NO: 2764155 - DNA, 25 bp, Homo sapien
gataccctcctgctaaaatccatgt

SEQ ID NO: 2764156 - DNA, 25 bp, Homo sapien
taggcatcatcgctgaaagacacat

SEQ ID NO: 2764157 - DNA, 25 bp, Homo sapien
cagaattggattcacatgggaaagt

SEQ ID NO: 2764158 - DNA, 25 bp, Homo sapien
tagttagaaaatactgtgcacaaaa

SEQ ID NO: 2764159 - DNA, 25 bp, Homo sapien
aaactttcctgaccttgaagcattt

SEQ ID NO: 2764160 - DNA, 25 bp, Homo sapien
tgttcacatcctttgacacaattct

SEQ ID NO: 2764161 - DNA, 25 bp, Homo sapien
tacgtatgtatatcataggtttgta

SEQ ID NO: 2764162 - DNA, 25 bp, Homo sapien
cagaccgcacaaacacctggcgatt

SEQ ID NO: 2764163 - DNA, 25 bp, Homo sapien
tgtgaagtagtaaagaactgtgctc

SEQ ID NO: 2764164 - DNA, 25 bp, Homo sapien
ggcgattcaaatcaactccagctct

SEQ ID NO: 2764165 - DNA, 25 bp, Homo sapien
tagtggcagtaatttgacagaggca

SEQ ID NO: 2764166 - DNA, 25 bp, Homo sapien
ggcaaaccagtttgcaaccgctaaa

SEQ ID NO: 2764167 - DNA, 25 bp, Homo sapien
gcttagcccttatcaactgttgcca

SEQ ID NO: 2764168 - DNA, 25 bp, Homo sapien
tgttgccatgtaaaatgtgggcctg

SEQ ID NO: 2764169 - DNA, 25 bp, Homo sapien
tcaagagggcagaaacgtccgtttc

SEQ ID NO: 2764170 - DNA, 25 bp, Homo sapien
attgcacttacgcactctaaccggg

SEQ ID NO: 2764171 - DNA, 25 bp, Homo sapien
tttaaaatacatgagaccttaacag

SEQ ID NO: 2764172 - DNA, 25 bp, Homo sapien
tacgcactctaaccgggtgacaaag

SEQ ID NO: 2764173 - DNA, 25 bp, Homo sapien
taaaatacatgagaccttaacagca

SEQ ID NO: 2764174 - DNA, 25 bp, Homo sapien
tggtctcagccatgataaaaccctg

SEQ ID NO: 2764175 - DNA, 25 bp, Homo sapien
ggccccagagagtccctatgccctt

SEQ ID NO: 2764176 - DNA, 25 bp, Homo sapien
gtggtctcagccatgataaaaccct

SEQ ID NO: 2764177 - DNA, 25 bp, Homo sapien
tcgctaactccctgcctcaggtaat

SEQ ID NO: 2764178 - DNA, 25 bp, Homo sapien
tggtcgctaactccctgcctcaggt

SEQ ID NO: 2764179 - DNA, 25 bp, Homo sapien
ctggtcgctaactccctgcctcagg

SEQ ID NO: 2764180 - DNA, 25 bp, Homo sapien
gtcgctaactccctgcctcaggtaa

SEQ ID NO: 2764181 - DNA, 25 bp, Homo sapien
tagtgaccttgggaaccttattcca

SEQ ID NO: 2764182 - DNA, 25 bp, Homo sapien
agatcctgtatatctcatacctgtg

SEQ ID NO: 2764183 - DNA, 25 bp, Homo sapien
tgtattacagttcttgtctacaagc

SEQ ID NO: 2764184 - DNA, 25 bp, Homo sapien
ggtggacatcaccacacgtatagaa

SEQ ID NO: 2764185 - DNA, 25 bp, Homo sapien
taatacaaaataaagcgaagacctg

SEQ ID NO: 2764186 - DNA, 25 bp, Homo sapien
cacacggaaaactctcaaaaactat

SEQ ID NO: 2764187 - DNA, 25 bp, Homo sapien
caaaatgttcactcaggaatatgtt

SEQ ID NO: 2764188 - DNA, 25 bp, Homo sapien
aaatgttcactcaggaatatgtttt

SEQ ID NO: 2764189 - DNA, 25 bp, Homo sapien
aatgttcactcaggaatatgtttta

SEQ ID NO: 2764190 - DNA, 25 bp, Homo sapien
gaaaccaagatatggcaaatgcccc

SEQ ID NO: 2764191 - DNA, 25 bp, Homo sapien
tcacagccagaggaacatcaacttt

SEQ ID NO: 2764192 - DNA, 25 bp, Homo sapien
gaaaggtccataaacggtccatata

SEQ ID NO: 2764193 - DNA, 25 bp, Homo sapien
caaggaactgcacatacagcctgct

SEQ ID NO: 2764194 - DNA, 25 bp, Homo sapien
ttcttaaaatcaggcctgggcgcgg

SEQ ID NO: 2764195 - DNA, 25 bp, Homo sapien
tcttaaaatcaggcctgggcgcggt

SEQ ID NO: 2764196 - DNA, 25 bp, Homo sapien
gctcacctggcgcccgggccccgcg

SEQ ID NO: 2764197 - DNA, 25 bp, Homo sapien
tggcgcccgggccccgcgccgccgc

SEQ ID NO: 2764198 - DNA, 25 bp, Homo sapien
ccccgcccagcccgccgcgcccgca

SEQ ID NO: 2764199 - DNA, 25 bp, Homo sapien
cccgcccagcccgccgcgcccgcac

SEQ ID NO: 2764200 - DNA, 25 bp, Homo sapien
tcagccgcgtttccttggagtcgcc

SEQ ID NO: 2764201 - DNA, 25 bp, Homo sapien
gtcagccgcgtttccttggagtcgc

SEQ ID NO: 2764202 - DNA, 25 bp, Homo sapien
cccgccgcccgctccttgtcggcgg

SEQ ID NO: 2764203 - DNA, 25 bp, Homo sapien
cgccgcccgccgcccgctccttgtc

SEQ ID NO: 2764204 - DNA, 25 bp, Homo sapien
ccgcccgccgcccgctccttgtcgg

SEQ ID NO: 2764205 - DNA, 25 bp, Homo sapien
gcccgccgcccgctccttgtcggcg

SEQ ID NO: 2764206 - DNA, 25 bp, Homo sapien
cgggaggcctcggtgcgccgctgca

SEQ ID NO: 2764207 - DNA, 25 bp, Homo sapien
gggaggcctcggtgcgccgctgcac

SEQ ID NO: 2764208 - DNA, 25 bp, Homo sapien
gcgggaggcctcggtgcgccgctgc

SEQ ID NO: 2764209 - DNA, 25 bp, Homo sapien
caggccggagctgcgctgggtcagc

SEQ ID NO: 2764210 - DNA, 25 bp, Homo sapien
agctgcgctgggtcagcgaggtcat

SEQ ID NO: 2764211 - DNA, 25 bp, Homo sapien
gccggagctgcgctgggtcagcgag

SEQ ID NO: 2764212 - DNA, 25 bp, Homo sapien
cggagctgcgctgggtcagcgaggt

SEQ ID NO: 2764213 - DNA, 25 bp, Homo sapien
cgggccgagagggtcgcaggaccga

SEQ ID NO: 2764214 - DNA, 25 bp, Homo sapien
cgagagggtcgcaggaccgaccggg

SEQ ID NO: 2764215 - DNA, 25 bp, Homo sapien
ccgagagggtcgcaggaccgaccgg

SEQ ID NO: 2764216 - DNA, 25 bp, Homo sapien
ggccgagagggtcgcaggaccgacc

SEQ ID NO: 2764217 - DNA, 25 bp, Homo sapien
aaacaccccgagctccaaggcggag

SEQ ID NO: 2764218 - DNA, 25 bp, Homo sapien
gggcgacgtccgtcggcagcagggc

SEQ ID NO: 2764219 - DNA, 25 bp, Homo sapien
acaggtcagggcgaagcgggctggc

SEQ ID NO: 2764220 - DNA, 25 bp, Homo sapien
gcggcggcgcctttccaatatggcg

SEQ ID NO: 2764221 - DNA, 25 bp, Homo sapien
tagaggaatacccaaaaaggcgagc

SEQ ID NO: 2764222 - DNA, 25 bp, Homo sapien
tgcctagaacacactgagcccttat

SEQ ID NO: 2764223 - DNA, 25 bp, Homo sapien
tggaattcacgcgtctaagctgctc

SEQ ID NO: 2764224 - DNA, 25 bp, Homo sapien
ttgcagctgcgggacaacttctctc

SEQ ID NO: 2764225 - DNA, 25 bp, Homo sapien
cagtgagatacaagtataaactttc

SEQ ID NO: 2764226 - DNA, 25 bp, Homo sapien
aactttcattgtgcatccagaaaat

SEQ ID NO: 2764227 - DNA, 25 bp, Homo sapien
cacaagtatacaggtttagctcaac

SEQ ID NO: 2764228 - DNA, 25 bp, Homo sapien
taatttctgcaatcagatatgatgc

SEQ ID NO: 2764229 - DNA, 25 bp, Homo sapien
tattgcaagcctaacactgacctcg

SEQ ID NO: 2764230 - DNA, 25 bp, Homo sapien
taaggcaatcaagacggaacatgtg

SEQ ID NO: 2764231 - DNA, 25 bp, Homo sapien
tttatgcgatttgacagggttccac

SEQ ID NO: 2764232 - DNA, 25 bp, Homo sapien
tagagtgtaaagcatcacaccgggc

SEQ ID NO: 2764233 - DNA, 25 bp, Homo sapien
gatccccgcagcgtaaccaagaggt

SEQ ID NO: 2764234 - DNA, 25 bp, Homo sapien
taaaagaatgtgaggaactcggctc

SEQ ID NO: 2764235 - DNA, 25 bp, Homo sapien
gcagatccaagaaggtgaccaggca

SEQ ID NO: 2764236 - DNA, 25 bp, Homo sapien
taatacttaggcatcagaaaacggc

SEQ ID NO: 2764237 - DNA, 25 bp, Homo sapien
gcccaggtttattctaacggagtgc

SEQ ID NO: 2764238 - DNA, 25 bp, Homo sapien
tattctaacggagtgccgggctaag

SEQ ID NO: 2764239 - DNA, 25 bp, Homo sapien
gggctaaggacccagccagcatgag

SEQ ID NO: 2764240 - DNA, 25 bp, Homo sapien
tgtagcgtgacacaaatccagggat

SEQ ID NO: 2764241 - DNA, 25 bp, Homo sapien
ctcgaaagttgtcttggagctcatc

SEQ ID NO: 2764242 - DNA, 25 bp, Homo sapien
cgggcccctcgatatgcggtaacaa

SEQ ID NO: 2764243 - DNA, 25 bp, Homo sapien
tagtcagtggacttgctatgccagc

SEQ ID NO: 2764244 - DNA, 25 bp, Homo sapien
tctggaatccaacgtaggtagcgct

SEQ ID NO: 2764245 - DNA, 25 bp, Homo sapien
gtggcaaagaaagttgtcgttgatg

SEQ ID NO: 2764246 - DNA, 25 bp, Homo sapien
taagtggcaaagaaagttgtcgttg

SEQ ID NO: 2764247 - DNA, 25 bp, Homo sapien
tgtgtaagtggcaaagaaagttgtc

SEQ ID NO: 2764248 - DNA, 25 bp, Homo sapien
agattgtgtaagtggcaaagaaagt

SEQ ID NO: 2764249 - DNA, 25 bp, Homo sapien
tattgccatggtgcacactgtacca

SEQ ID NO: 2764250 - DNA, 25 bp, Homo sapien
cattaacacgctgtgacatccagag

SEQ ID NO: 2764251 - DNA, 25 bp, Homo sapien
cataacaaaaagagcataaccctgc

SEQ ID NO: 2764252 - DNA, 25 bp, Homo sapien
catcagtgttgccatgtgaatgcac

SEQ ID NO: 2764253 - DNA, 25 bp, Homo sapien
taggttcctcccgtaacacaacaga

SEQ ID NO: 2764254 - DNA, 25 bp, Homo sapien
ctggtgccaatccagctctcatgag

SEQ ID NO: 2764255 - DNA, 25 bp, Homo sapien
agctctcatgagaatgtgcatgcag

SEQ ID NO: 2764256 - DNA, 25 bp, Homo sapien
gctgtctctgaggtcccctgccact

SEQ ID NO: 2764257 - DNA, 25 bp, Homo sapien
ttgtcctcgctgtctctgaggtccc

SEQ ID NO: 2764258 - DNA, 25 bp, Homo sapien
catcactgctctctcctttgtggac

SEQ ID NO: 2764259 - DNA, 25 bp, Homo sapien
gctctctcctttgtggactctgtgg

SEQ ID NO: 2764260 - DNA, 25 bp, Homo sapien
tgtggactctgtgggggagaaattc

SEQ ID NO: 2764261 - DNA, 25 bp, Homo sapien
cctttgtggactctgtgggggagaa

SEQ ID NO: 2764262 - DNA, 25 bp, Homo sapien
gctggcagacagaatccgtaagtac

SEQ ID NO: 2764263 - DNA, 25 bp, Homo sapien
tcaactctgcagactgcttcgaggg

SEQ ID NO: 2764264 - DNA, 25 bp, Homo sapien
agtgacatctggcaaatggccctgt

SEQ ID NO: 2764265 - DNA, 25 bp, Homo sapien
gaccatcacaagtctcaactctgca

SEQ ID NO: 2764266 - DNA, 25 bp, Homo sapien
tgctttgtgtatcctggccttctct

SEQ ID NO: 2764267 - DNA, 25 bp, Homo sapien
gaagcgcattcctttccgttggcct

SEQ ID NO: 2764268 - DNA, 25 bp, Homo sapien
cacacggtgagcagattcaaaggct

SEQ ID NO: 2764269 - DNA, 25 bp, Homo sapien
tgggttcaaactgcaccgaccaatc

SEQ ID NO: 2764270 - DNA, 25 bp, Homo sapien
aggcaaacacatacttctggacaca

SEQ ID NO: 2764271 - DNA, 25 bp, Homo sapien
ggcaaacacatacttctggacacag

SEQ ID NO: 2764272 - DNA, 25 bp, Homo sapien
aatatggaacgtctcatgagtttgc

SEQ ID NO: 2764273 - DNA, 25 bp, Homo sapien
aaatatggaacgtctcatgagtttg

SEQ ID NO: 2764274 - DNA, 25 bp, Homo sapien
tgacaaaacagtcaggtaagtctct

SEQ ID NO: 2764275 - DNA, 25 bp, Homo sapien
tgtgaattcaaatgccgggggatgc

SEQ ID NO: 2764276 - DNA, 25 bp, Homo sapien
aaataggtatatacaggctatctga

SEQ ID NO: 2764277 - DNA, 25 bp, Homo sapien
aacagtcaggtaagtctctgtgaat

SEQ ID NO: 2764278 - DNA, 25 bp, Homo sapien
ctaggaaaagcaggaacacaggaac

SEQ ID NO: 2764279 - DNA, 25 bp, Homo sapien
tctgtgtcaagctgttctgtaccac

SEQ ID NO: 2764280 - DNA, 25 bp, Homo sapien
gtgtgcccacagcattctgtgtcaa

SEQ ID NO: 2764281 - DNA, 25 bp, Homo sapien
gctgttctgtaccacagacagacat

SEQ ID NO: 2764282 - DNA, 25 bp, Homo sapien
atcaggagccatggctctgtgtgcc

SEQ ID NO: 2764283 - DNA, 25 bp, Homo sapien
ggttgcagcgatccaagaaacagtg

SEQ ID NO: 2764284 - DNA, 25 bp, Homo sapien
gaggctctggaaaccaattctggtt

SEQ ID NO: 2764285 - DNA, 25 bp, Homo sapien
tctttgtcgttctggcggagatggt

SEQ ID NO: 2764286 - DNA, 25 bp, Homo sapien
ggcggagatggttgcagcgatccaa

SEQ ID NO: 2764287 - DNA, 25 bp, Homo sapien
cagtgggggtccatcatcagttgca

SEQ ID NO: 2764288 - DNA, 25 bp, Homo sapien
gtccatcatcagttgcaccagagag

SEQ ID NO: 2764289 - DNA, 25 bp, Homo sapien
tgagacagcagaggtcggatgcatt

SEQ ID NO: 2764290 - DNA, 25 bp, Homo sapien
cagcagaggtcggatgcattctcct

SEQ ID NO: 2764291 - DNA, 25 bp, Homo sapien
tgtaactagggaggtgctcatattg

SEQ ID NO: 2764292 - DNA, 25 bp, Homo sapien
aacttaagaatgaattgtaggccgg

SEQ ID NO: 2764293 - DNA, 25 bp, Homo sapien
aaaggaatgaattgtaactagggag

SEQ ID NO: 2764294 - DNA, 25 bp, Homo sapien
atattgtgataactctttcatcctg

SEQ ID NO: 2764295 - DNA, 25 bp, Homo sapien
atgttttgtgcttccatacattctg

SEQ ID NO: 2764296 - DNA, 25 bp, Homo sapien
tacattctgtaatctctattgcttt

SEQ ID NO: 2764297 - DNA, 25 bp, Homo sapien
ccatacattctgtaatctctattgc

SEQ ID NO: 2764298 - DNA, 25 bp, Homo sapien
cattctgtaatctctattgcttttt

SEQ ID NO: 2764299 - DNA, 25 bp, Homo sapien
taaggtgacctgctgaatgtatcag

SEQ ID NO: 2764300 - DNA, 25 bp, Homo sapien
aactcacgcctgagtctgctggtga

SEQ ID NO: 2764301 - DNA, 25 bp, Homo sapien
gttattccctttgcgactgttgccg

SEQ ID NO: 2764302 - DNA, 25 bp, Homo sapien
ttagatactgggatatattcctgcc

SEQ ID NO: 2764303 - DNA, 25 bp, Homo sapien
ccagctgctactttccaacagagaa

SEQ ID NO: 2764304 - DNA, 25 bp, Homo sapien
actgggcaaatggtatgctgaggaa

SEQ ID NO: 2764305 - DNA, 25 bp, Homo sapien
aggagggtggccgtgtgatcactgc

SEQ ID NO: 2764306 - DNA, 25 bp, Homo sapien
cactgggcaaatggtatgctgagga

SEQ ID NO: 2764307 - DNA, 25 bp, Homo sapien
actgccacaataaggaggcggggag

SEQ ID NO: 2764308 - DNA, 25 bp, Homo sapien
gcttgacaggtcttccgttttaaca

SEQ ID NO: 2764309 - DNA, 25 bp, Homo sapien
tttagagtatgcagtctggatttcc

SEQ ID NO: 2764310 - DNA, 25 bp, Homo sapien
aatttcatagggtggcctgtggatg

SEQ ID NO: 2764311 - DNA, 25 bp, Homo sapien
caggaagttgcttgacaggtcttcc

SEQ ID NO: 2764312 - DNA, 25 bp, Homo sapien
ctaagaagctcttttggatttgtaa

SEQ ID NO: 2764313 - DNA, 25 bp, Homo sapien
ttggatttgtaaaatgccgtcatcc

SEQ ID NO: 2764314 - DNA, 25 bp, Homo sapien
taaaatgccgtcatcctgttctttg

SEQ ID NO: 2764315 - DNA, 25 bp, Homo sapien
ccatctaagaagctcttttggattt

SEQ ID NO: 2764316 - DNA, 25 bp, Homo sapien
caagtgcagcttattacatgtcagg

SEQ ID NO: 2764317 - DNA, 25 bp, Homo sapien
gctggtaacccagatgatgacaaca

SEQ ID NO: 2764318 - DNA, 25 bp, Homo sapien
gatagtagctatcattcaagtgcag

SEQ ID NO: 2764319 - DNA, 25 bp, Homo sapien
ttcccaagttgtacaaaagtagctg

SEQ ID NO: 2764320 - DNA, 25 bp, Homo sapien
ctttcagggttcccagatgcactta

SEQ ID NO: 2764321 - DNA, 25 bp, Homo sapien
tttcagggttcccagatgcacttac

SEQ ID NO: 2764322 - DNA, 25 bp, Homo sapien
atgaccctgaaagcgctgcacattc

SEQ ID NO: 2764323 - DNA, 25 bp, Homo sapien
ccctgaaagcgctgcacattctctt

SEQ ID NO: 2764324 - DNA, 25 bp, Homo sapien
tgccatgaccctgaaagcgctgcac

SEQ ID NO: 2764325 - DNA, 25 bp, Homo sapien
ggggtggggacaacaaagtatgctg

SEQ ID NO: 2764326 - DNA, 25 bp, Homo sapien
ccgactgatgaagtggagttaatta

SEQ ID NO: 2764327 - DNA, 25 bp, Homo sapien
ggtaagatccgactgatgaagtgga

SEQ ID NO: 2764328 - DNA, 25 bp, Homo sapien
gatccgactgatgaagtggagttaa

SEQ ID NO: 2764329 - DNA, 25 bp, Homo sapien
ctggggtaagatccgactgatgaag

SEQ ID NO: 2764330 - DNA, 25 bp, Homo sapien
ccatgaagggccttgagagtgcttg

SEQ ID NO: 2764331 - DNA, 25 bp, Homo sapien
tcaaaccatgaagggccttgagagt

SEQ ID NO: 2764332 - DNA, 25 bp, Homo sapien
tgcagtcaaaccatgaagggccttg

SEQ ID NO: 2764333 - DNA, 25 bp, Homo sapien
cttgagagtgcttgttgagggctct

SEQ ID NO: 2764334 - DNA, 25 bp, Homo sapien
agttcccaacaccagtccttaagtg

SEQ ID NO: 2764335 - DNA, 25 bp, Homo sapien
ttcatgttgcctttggtccgttcca

SEQ ID NO: 2764336 - DNA, 25 bp, Homo sapien
tgcctttggtccgttccagttccca

SEQ ID NO: 2764337 - DNA, 25 bp, Homo sapien
tatagccttcgttgacactcactgc

SEQ ID NO: 2764338 - DNA, 25 bp, Homo sapien
acggtatggttcttgggatcagtga

SEQ ID NO: 2764339 - DNA, 25 bp, Homo sapien
tacggtatggttcttgggatcagtg

SEQ ID NO: 2764340 - DNA, 25 bp, Homo sapien
tgttttgtgcagcagtcgcatagga

SEQ ID NO: 2764341 - DNA, 25 bp, Homo sapien
cctgggtatgatgaattatgccact

SEQ ID NO: 2764342 - DNA, 25 bp, Homo sapien
gcagcagtcgcataggaaaacagaa

SEQ ID NO: 2764343 - DNA, 25 bp, Homo sapien
ttaagcagtttaggagcctgggtat

SEQ ID NO: 2764344 - DNA, 25 bp, Homo sapien
gtctttgcagtggatgatgagcttc

SEQ ID NO: 2764345 - DNA, 25 bp, Homo sapien
gagcttctcagggtatttcttcagt

SEQ ID NO: 2764346 - DNA, 25 bp, Homo sapien
cttcagttgtccaaagagagttttc

SEQ ID NO: 2764347 - DNA, 25 bp, Homo sapien
tttgtgtacctcagacaaaactgga

SEQ ID NO: 2764348 - DNA, 25 bp, Homo sapien
ctccataaatctgatcaacacagtg

SEQ ID NO: 2764349 - DNA, 25 bp, Homo sapien
ctataaccttattcttaaattgagt

SEQ ID NO: 2764350 - DNA, 25 bp, Homo sapien
catcacccaagaaggcaatcttgaa

SEQ ID NO: 2764351 - DNA, 25 bp, Homo sapien
aggcaatcttgaagtctgtgcagac

SEQ ID NO: 2764352 - DNA, 25 bp, Homo sapien
ttatccaatgcagattcatcatcac

SEQ ID NO: 2764353 - DNA, 25 bp, Homo sapien
tcattatccaatgcagattcatcat

SEQ ID NO: 2764354 - DNA, 25 bp, Homo sapien
ggacatacttcagtactgtgctggc

SEQ ID NO: 2764355 - DNA, 25 bp, Homo sapien
aatcttcctggacatacttcagtac

SEQ ID NO: 2764356 - DNA, 25 bp, Homo sapien
tcctggacatacttcagtactgtgc

SEQ ID NO: 2764357 - DNA, 25 bp, Homo sapien
tcttcctggacatacttcagtactg

SEQ ID NO: 2764358 - DNA, 25 bp, Homo sapien
gtcctccttagagttctcagggaac

SEQ ID NO: 2764359 - DNA, 25 bp, Homo sapien
gagttctcagggaacatacgatatg

SEQ ID NO: 2764360 - DNA, 25 bp, Homo sapien
ccttagagttctcagggaacatacg

SEQ ID NO: 2764361 - DNA, 25 bp, Homo sapien
tcagggaacatacgatatgcaaaca

SEQ ID NO: 2764362 - DNA, 25 bp, Homo sapien
atacaatacaacacagggctttaga

SEQ ID NO: 2764363 - DNA, 25 bp, Homo sapien
ttacataaggacaaacatacaatac

SEQ ID NO: 2764364 - DNA, 25 bp, Homo sapien
caatacaacacagggctttagaact

SEQ ID NO: 2764365 - DNA, 25 bp, Homo sapien
ctatttacataaggacaaacataca

SEQ ID NO: 2764366 - DNA, 25 bp, Homo sapien
agacagaaagtatccctccttgcag

SEQ ID NO: 2764367 - DNA, 25 bp, Homo sapien
gattagggaataggtcagtattctc

SEQ ID NO: 2764368 - DNA, 25 bp, Homo sapien
cctccttgcagtcaaaaagatgagg

SEQ ID NO: 2764369 - DNA, 25 bp, Homo sapien
cacccagccgacgtgagaagctgca

SEQ ID NO: 2764370 - DNA, 25 bp, Homo sapien
ctcacgggggcaggcaaaagagaag

SEQ ID NO: 2764371 - DNA, 25 bp, Homo sapien
agaggagctcacgggggcaggcaaa

SEQ ID NO: 2764372 - DNA, 25 bp, Homo sapien
aggagctcacgggggcaggcaaaag

SEQ ID NO: 2764373 - DNA, 25 bp, Homo sapien
agctcacgggggcaggcaaaagaga

SEQ ID NO: 2764374 - DNA, 25 bp, Homo sapien
caagtgaagagttacttccttctct

SEQ ID NO: 2764375 - DNA, 25 bp, Homo sapien
agtgaagagttacttccttctctgt

SEQ ID NO: 2764376 - DNA, 25 bp, Homo sapien
aagtgaagagttacttccttctctg

SEQ ID NO: 2764377 - DNA, 25 bp, Homo sapien
gtgcacatcatctcaaatgtgtgat

SEQ ID NO: 2764378 - DNA, 25 bp, Homo sapien
agagtgcacatcatctcaaatgtgt

SEQ ID NO: 2764379 - DNA, 25 bp, Homo sapien
gagtgcacatcatctcaaatgtgtg

SEQ ID NO: 2764380 - DNA, 25 bp, Homo sapien
gcacatcatctcaaatgtgtgatga

SEQ ID NO: 2764381 - DNA, 25 bp, Homo sapien
cttgcctcaaaaataagtttaattg

SEQ ID NO: 2764382 - DNA, 25 bp, Homo sapien
tttctttgaatttgattttcacaag

SEQ ID NO: 2764383 - DNA, 25 bp, Homo sapien
tttgaatttgattttcacaagttac

SEQ ID NO: 2764384 - DNA, 25 bp, Homo sapien
attggagtttttctttgaatttgat

SEQ ID NO: 2764385 - DNA, 25 bp, Homo sapien
cacccgtatctggatgtgctgagtc

SEQ ID NO: 2764386 - DNA, 25 bp, Homo sapien
ccaacaaggtacgagagcacccgta

SEQ ID NO: 2764387 - DNA, 25 bp, Homo sapien
gaaattcccctatgtgcatcctact

SEQ ID NO: 2764388 - DNA, 25 bp, Homo sapien
cggaacggagagtattcactggcaa

SEQ ID NO: 2764389 - DNA, 25 bp, Homo sapien
cctgaaaccaggtaaaagcgagcaa

SEQ ID NO: 2764390 - DNA, 25 bp, Homo sapien
cgaatgagagttatagagaggccaa

SEQ ID NO: 2764391 - DNA, 25 bp, Homo sapien
cacaaagtgaccagggaaagcctcg

SEQ ID NO: 2764392 - DNA, 25 bp, Homo sapien
taaaagcgagcaacacaaagtgacc

SEQ ID NO: 2764393 - DNA, 25 bp, Homo sapien
gctgtgaaacacgaggtaacattcc

SEQ ID NO: 2764394 - DNA, 25 bp, Homo sapien
gcagctgtgaaacacgaggtaacat

SEQ ID NO: 2764395 - DNA, 25 bp, Homo sapien
ctgtgaaacacgaggtaacattcct

SEQ ID NO: 2764396 - DNA, 25 bp, Homo sapien
gtgaaacacgaggtaacattcctca

SEQ ID NO: 2764397 - DNA, 25 bp, Homo sapien
acaagggtttatctgacgagggttg

SEQ ID NO: 2764398 - DNA, 25 bp, Homo sapien
gacgagggttgtactctcaaccaca

SEQ ID NO: 2764399 - DNA, 25 bp, Homo sapien
gttgtactctcaaccacaatccaac

SEQ ID NO: 2764400 - DNA, 25 bp, Homo sapien
aatccaacctgcctcccctggccga

SEQ ID NO: 2764401 - DNA, 25 bp, Homo sapien
agaaggcttggctccctccgagcag

SEQ ID NO: 2764402 - DNA, 25 bp, Homo sapien
tactctgacaacaaaccaagagaac

SEQ ID NO: 2764403 - DNA, 25 bp, Homo sapien
gcttctgaaagcatgacaggaggca

SEQ ID NO: 2764404 - DNA, 25 bp, Homo sapien
tactttcggcagttacaagcaacaa

SEQ ID NO: 2764405 - DNA, 25 bp, Homo sapien
ttgggggccttggtgccgccgccac

SEQ ID NO: 2764406 - DNA, 25 bp, Homo sapien
gcttgggggccttggtgccgccgcc

SEQ ID NO: 2764407 - DNA, 25 bp, Homo sapien
cgccgccaccgccgactactccttt

SEQ ID NO: 2764408 - DNA, 25 bp, Homo sapien
caccgccgactactcctttccccag

SEQ ID NO: 2764409 - DNA, 25 bp, Homo sapien
ccctgggaagcagcgacgcgcggac

SEQ ID NO: 2764410 - DNA, 25 bp, Homo sapien
cgccctgggaagcagcgacgcgcgg

SEQ ID NO: 2764411 - DNA, 25 bp, Homo sapien
gggaagcagcgacgcgcggacgcag

SEQ ID NO: 2764412 - DNA, 25 bp, Homo sapien
ctgggaagcagcgacgcgcggacgc

SEQ ID NO: 2764413 - DNA, 25 bp, Homo sapien
ctccagctggggcagcagcggcggc

SEQ ID NO: 2764414 - DNA, 25 bp, Homo sapien
cagctggggcagcagcggcggccac

SEQ ID NO: 2764415 - DNA, 25 bp, Homo sapien
ccagctggggcagcagcggcggcca

SEQ ID NO: 2764416 - DNA, 25 bp, Homo sapien
tccagctggggcagcagcggcggcc

SEQ ID NO: 2764417 - DNA, 25 bp, Homo sapien
gcgaccgccgcgatgccgcccgcat

SEQ ID NO: 2764418 - DNA, 25 bp, Homo sapien
agcactagcggctggggctccgccc

SEQ ID NO: 2764419 - DNA, 25 bp, Homo sapien
cagcactagcggctggggctccgcc

SEQ ID NO: 2764420 - DNA, 25 bp, Homo sapien
gcccatccccaaggccgcgaccgcc

SEQ ID NO: 2764421 - DNA, 25 bp, Homo sapien
gctcgccccgcccaggcccgtgggc

SEQ ID NO: 2764422 - DNA, 25 bp, Homo sapien
accgctcgccccgcccaggcccgtg

SEQ ID NO: 2764423 - DNA, 25 bp, Homo sapien
tgacaccgctcgccccgcccaggcc

SEQ ID NO: 2764424 - DNA, 25 bp, Homo sapien
ctgacaccgctcgccccgcccaggc

SEQ ID NO: 2764425 - DNA, 25 bp, Homo sapien
gtcaatccaggccttatgagccagt

SEQ ID NO: 2764426 - DNA, 25 bp, Homo sapien
aattgaaggctctaggagtgcgcag

SEQ ID NO: 2764427 - DNA, 25 bp, Homo sapien
ccatgtccttgaaccggtgtgctca

SEQ ID NO: 2764428 - DNA, 25 bp, Homo sapien
gagggtgctaactcaggcctgccat

SEQ ID NO: 2764429 - DNA, 25 bp, Homo sapien
tcacactagagacaaatgccacaag

SEQ ID NO: 2764430 - DNA, 25 bp, Homo sapien
cataagcaggtaagatggccacacc

SEQ ID NO: 2764431 - DNA, 25 bp, Homo sapien
tgagcactcgaatggcaggataact

SEQ ID NO: 2764432 - DNA, 25 bp, Homo sapien
ggccttgctatgtcaaaaagtcaac

SEQ ID NO: 2764433 - DNA, 25 bp, Homo sapien
gacaatgcactagttaataaaagac

SEQ ID NO: 2764434 - DNA, 25 bp, Homo sapien
cagtgaagatttaataagacaatgc

SEQ ID NO: 2764435 - DNA, 25 bp, Homo sapien
tgttttccccctagtcggagcacat

SEQ ID NO: 2764436 - DNA, 25 bp, Homo sapien
ggaagctagggcaaccagaaaataa

SEQ ID NO: 2764437 - DNA, 25 bp, Homo sapien
tttttcccctcagcttcaaatccat

SEQ ID NO: 2764438 - DNA, 25 bp, Homo sapien
tcccctcagcttcaaatccatcaac

SEQ ID NO: 2764439 - DNA, 25 bp, Homo sapien
ccctcagcttcaaatccatcaactc

SEQ ID NO: 2764440 - DNA, 25 bp, Homo sapien
tttcccctcagcttcaaatccatca

SEQ ID NO: 2764441 - DNA, 25 bp, Homo sapien
ctgttgttgtggatgttaaaacgtt

SEQ ID NO: 2764442 - DNA, 25 bp, Homo sapien
gaactttgtgtatctggcggaatgc

SEQ ID NO: 2764443 - DNA, 25 bp, Homo sapien
ccatcaactatcattagtgtcagtg

SEQ ID NO: 2764444 - DNA, 25 bp, Homo sapien
aagactggatacccctgccctaaag

SEQ ID NO: 2764445 - DNA, 25 bp, Homo sapien
gccctaaagcttaaagatatgctaa

SEQ ID NO: 2764446 - DNA, 25 bp, Homo sapien
aatgagtctaagttgctccctaaca

SEQ ID NO: 2764447 - DNA, 25 bp, Homo sapien
cagagttggtagtcaaatccaggga

SEQ ID NO: 2764448 - DNA, 25 bp, Homo sapien
aataatgaccataaacaccacagca

SEQ ID NO: 2764449 - DNA, 25 bp, Homo sapien
gggaagctgtaccaatcttaggttg

SEQ ID NO: 2764450 - DNA, 25 bp, Homo sapien
tttctggaatcaacaaagggaagct

SEQ ID NO: 2764451 - DNA, 25 bp, Homo sapien
cactggatgtgatgtcttcacgctg

SEQ ID NO: 2764452 - DNA, 25 bp, Homo sapien
gcactggatgtgatgtcttcacgct

SEQ ID NO: 2764453 - DNA, 25 bp, Homo sapien
tgcactggatgtgatgtcttcacgc

SEQ ID NO: 2764454 - DNA, 25 bp, Homo sapien
ctgagggctagaagcactgctgatt

SEQ ID NO: 2764455 - DNA, 25 bp, Homo sapien
tgagggctagaagcactgctgattg

SEQ ID NO: 2764456 - DNA, 25 bp, Homo sapien
gcttgagcctgggatcgtttactgg

SEQ ID NO: 2764457 - DNA, 25 bp, Homo sapien
aaaacccaatgcagggagtggtgtt

SEQ ID NO: 2764458 - DNA, 25 bp, Homo sapien
taacagcttaccaaaggaattactc

SEQ ID NO: 2764459 - DNA, 25 bp, Homo sapien
cattcaaaattaaggaataggccgg

SEQ ID NO: 2764460 - DNA, 25 bp, Homo sapien
taagatgcgaaaagacttgagaccc

SEQ ID NO: 2764461 - DNA, 25 bp, Homo sapien
taagggacaagcttcagtcatctag

SEQ ID NO: 2764462 - DNA, 25 bp, Homo sapien
tacgtaactttcgataaatgcctca

SEQ ID NO: 2764463 - DNA, 25 bp, Homo sapien
gcctagtacaagtagccagaatttt

SEQ ID NO: 2764464 - DNA, 25 bp, Homo sapien
gtgtgattataactgactgtagcag

SEQ ID NO: 2764465 - DNA, 25 bp, Homo sapien
gtgattataactgactgtagcaggc

SEQ ID NO: 2764466 - DNA, 25 bp, Homo sapien
tgattataactgactgtagcaggct

SEQ ID NO: 2764467 - DNA, 25 bp, Homo sapien
tagcacactgcagccgagcttgaac

SEQ ID NO: 2764468 - DNA, 25 bp, Homo sapien
tgctgaaatactcatcataggacac

SEQ ID NO: 2764469 - DNA, 25 bp, Homo sapien
tactcatcataggacactgtctaga

SEQ ID NO: 2764470 - DNA, 25 bp, Homo sapien
tttttgctgaaatactcatcatagg

SEQ ID NO: 2764471 - DNA, 25 bp, Homo sapien
gaaatactcatcataggacactgtc

SEQ ID NO: 2764472 - DNA, 25 bp, Homo sapien
gggtcttgctatacaaataaggctg

SEQ ID NO: 2764473 - DNA, 25 bp, Homo sapien
acaacagagatagcttcaaggacac

SEQ ID NO: 2764474 - DNA, 25 bp, Homo sapien
tacaacagagatagcttcaaggaca

SEQ ID NO: 2764475 - DNA, 25 bp, Homo sapien
caacagagatagcttcaaggacacc

SEQ ID NO: 2764476 - DNA, 25 bp, Homo sapien
ttataggcgtctgccaccaagcctg

SEQ ID NO: 2764477 - DNA, 25 bp, Homo sapien
attataggcgtctgccaccaagcct

SEQ ID NO: 2764478 - DNA, 25 bp, Homo sapien
cgcatgcctgtagtgtgtagtgagc

SEQ ID NO: 2764479 - DNA, 25 bp, Homo sapien
gctgagatagccgtactgtactaca

SEQ ID NO: 2764480 - DNA, 25 bp, Homo sapien
atgcctgtagtgtgtagtgagctga

SEQ ID NO: 2764481 - DNA, 25 bp, Homo sapien
agatagccgtactgtactacagctg

SEQ ID NO: 2764482 - DNA, 25 bp, Homo sapien
tggaaaatcagaccaagttggaact

SEQ ID NO: 2764483 - DNA, 25 bp, Homo sapien
tgcgtatgataatcacacaggactg

SEQ ID NO: 2764484 - DNA, 25 bp, Homo sapien
caggactgcagaccattagctctag

SEQ ID NO: 2764485 - DNA, 25 bp, Homo sapien
cgctgacagaggtctcgaagaatgc

SEQ ID NO: 2764486 - DNA, 25 bp, Homo sapien
taaaattggattcaatgagctgcca

SEQ ID NO: 2764487 - DNA, 25 bp, Homo sapien
gcaaagttaatctgcagccttatgg

SEQ ID NO: 2764488 - DNA, 25 bp, Homo sapien
gatcccctgtgaaccttgacctgtg

SEQ ID NO: 2764489 - DNA, 25 bp, Homo sapien
taaaataccaccgttcaatggaagc

SEQ ID NO: 2764490 - DNA, 25 bp, Homo sapien
gaaccacttagcgtggcgtagagca

SEQ ID NO: 2764491 - DNA, 25 bp, Homo sapien
ttttgcctgtccaagacgtccggtg

SEQ ID NO: 2764492 - DNA, 25 bp, Homo sapien
gccagagcgtcaaggcatttttgcc

SEQ ID NO: 2764493 - DNA, 25 bp, Homo sapien
gtctttcaccatacccgaggttaca

SEQ ID NO: 2764494 - DNA, 25 bp, Homo sapien
ggtgtttgaccaggtgagcaagaca

SEQ ID NO: 2764495 - DNA, 25 bp, Homo sapien
aatgggtgtttgaccaggtgagcaa

SEQ ID NO: 2764496 - DNA, 25 bp, Homo sapien
tgaggaatgggtgtttgaccaggtg

SEQ ID NO: 2764497 - DNA, 25 bp, Homo sapien
tttgaccaggtgagcaagacacttc

SEQ ID NO: 2764498 - DNA, 25 bp, Homo sapien
caatatgaggaacaaaaggttaact

SEQ ID NO: 2764499 - DNA, 25 bp, Homo sapien
tatatccacggagttattttcaata

SEQ ID NO: 2764500 - DNA, 25 bp, Homo sapien
cttaaggtagcatcagtgtcacatg

SEQ ID NO: 2764501 - DNA, 25 bp, Homo sapien
gagcttgttggcactttaatatatc

SEQ ID NO: 2764502 - DNA, 25 bp, Homo sapien
gcccggcccaaaacaggcatttcta

SEQ ID NO: 2764503 - DNA, 25 bp, Homo sapien
tatcagagagtatgaaatgcccttt

SEQ ID NO: 2764504 - DNA, 25 bp, Homo sapien
aagatgctgatcctgtgacgataga

SEQ ID NO: 2764505 - DNA, 25 bp, Homo sapien
gaaacaataggcaagcagaacagcg

SEQ ID NO: 2764506 - DNA, 25 bp, Homo sapien
gctgcagttctggtcaagttactca

SEQ ID NO: 2764507 - DNA, 25 bp, Homo sapien
gggacacaagagacagctaactatg

SEQ ID NO: 2764508 - DNA, 25 bp, Homo sapien
tcctcgagtaatcagatggacacag

SEQ ID NO: 2764509 - DNA, 25 bp, Homo sapien
taagaccaactattgaacctagaaa

SEQ ID NO: 2764510 - DNA, 25 bp, Homo sapien
atagaaagtagaaagtttaatggct

SEQ ID NO: 2764511 - DNA, 25 bp, Homo sapien
cagtgtgatagtgacttgcattttg

SEQ ID NO: 2764512 - DNA, 25 bp, Homo sapien
tcttctcgaataattggagatgtca

SEQ ID NO: 2764513 - DNA, 25 bp, Homo sapien
gggttccacacatgaattcaaaatt

SEQ ID NO: 2764514 - DNA, 25 bp, Homo sapien
ttattgccgcttcagatacagcaca

SEQ ID NO: 2764515 - DNA, 25 bp, Homo sapien
ttaaaccgaagcacagtcagtcccg

SEQ ID NO: 2764516 - DNA, 25 bp, Homo sapien
gctggcttaggtttaaaccgaagca

SEQ ID NO: 2764517 - DNA, 25 bp, Homo sapien
ctgaaccagacaaggggtaaaaatg

SEQ ID NO: 2764518 - DNA, 25 bp, Homo sapien
agtcagtcccgccaaaaacttctga

SEQ ID NO: 2764519 - DNA, 25 bp, Homo sapien
ttttgccaatactcccactcgcaaa

SEQ ID NO: 2764520 - DNA, 25 bp, Homo sapien
gagcacagcaaaacaaggttgacat

SEQ ID NO: 2764521 - DNA, 25 bp, Homo sapien
ggtaggttttctgcaatacggctta

SEQ ID NO: 2764522 - DNA, 25 bp, Homo sapien
ggttgacatttctatctcctcggag

SEQ ID NO: 2764523 - DNA, 25 bp, Homo sapien
aattttctgaactgcctgtaactcc

SEQ ID NO: 2764524 - DNA, 25 bp, Homo sapien
tgtcattacataacggtcatcagat

SEQ ID NO: 2764525 - DNA, 25 bp, Homo sapien
catcagatgagtcaggacgacgtaa

SEQ ID NO: 2764526 - DNA, 25 bp, Homo sapien
ctcttcagttggataaatggtggca

SEQ ID NO: 2764527 - DNA, 25 bp, Homo sapien
tggtcggactcccagaaggcctaat

SEQ ID NO: 2764528 - DNA, 25 bp, Homo sapien
ataacctccatctggcattcggcgg

SEQ ID NO: 2764529 - DNA, 25 bp, Homo sapien
tcggcggcgatcatcccaatgatgt

SEQ ID NO: 2764530 - DNA, 25 bp, Homo sapien
ggaggcatgcctggtcggactccca

SEQ ID NO: 2764531 - DNA, 25 bp, Homo sapien
taaggttttactaatgtcatctgtt

SEQ ID NO: 2764532 - DNA, 25 bp, Homo sapien
gactaccattacagaaactaccaat

SEQ ID NO: 2764533 - DNA, 25 bp, Homo sapien
catataagaaagaagtgcgcttcct

SEQ ID NO: 2764534 - DNA, 25 bp, Homo sapien
ctcaggttgggaataagcagtgctt

SEQ ID NO: 2764535 - DNA, 25 bp, Homo sapien
tttgagggtgatgaactgttctaaa

SEQ ID NO: 2764536 - DNA, 25 bp, Homo sapien
gatactaggtatgtgggacacatgg

SEQ ID NO: 2764537 - DNA, 25 bp, Homo sapien
ggaattattgttaatgggtacgtga

SEQ ID NO: 2764538 - DNA, 25 bp, Homo sapien
tattgttaatgggtacgtgatttct

SEQ ID NO: 2764539 - DNA, 25 bp, Homo sapien
gctttacttctacttgcaaatctgg

SEQ ID NO: 2764540 - DNA, 25 bp, Homo sapien
ttcttctcgtcttcgccagtactcc

SEQ ID NO: 2764541 - DNA, 25 bp, Homo sapien
gtcttcgccagtactcctccttctg

SEQ ID NO: 2764542 - DNA, 25 bp, Homo sapien
gaatctttcttgctcgaatactagg

SEQ ID NO: 2764543 - DNA, 25 bp, Homo sapien
aagtctgtgtcttcgcccttttaag

SEQ ID NO: 2764544 - DNA, 25 bp, Homo sapien
gcactcgcataatttacaatggaac

SEQ ID NO: 2764545 - DNA, 25 bp, Homo sapien
gcatctccttagcattgggatcatt

SEQ ID NO: 2764546 - DNA, 25 bp, Homo sapien
cccttttaagtgcatctccttagca

SEQ ID NO: 2764547 - DNA, 25 bp, Homo sapien
taaaggtatgtaacaccaccacgac

SEQ ID NO: 2764548 - DNA, 25 bp, Homo sapien
aaggtatgtaacaccaccacgaccg

SEQ ID NO: 2764549 - DNA, 25 bp, Homo sapien
gatgcaggtgtgactggttctgaca

SEQ ID NO: 2764550 - DNA, 25 bp, Homo sapien
tgcaggtgtgactggttctgacact

SEQ ID NO: 2764551 - DNA, 25 bp, Homo sapien
ggaatctgcacagcagaagtgacag

SEQ ID NO: 2764552 - DNA, 25 bp, Homo sapien
caggaatctgcacagcagaagtgac

SEQ ID NO: 2764553 - DNA, 25 bp, Homo sapien
gagacgagtttcctgtagtcgtaag

SEQ ID NO: 2764554 - DNA, 25 bp, Homo sapien
gctgatactttagtgttagatgtgc

SEQ ID NO: 2764555 - DNA, 25 bp, Homo sapien
gacgagtttcctgtagtcgtaagac

SEQ ID NO: 2764556 - DNA, 25 bp, Homo sapien
tgatactttagtgttagatgtgcta

SEQ ID NO: 2764557 - DNA, 25 bp, Homo sapien
ccttcattgaagacgttgcaactga

SEQ ID NO: 2764558 - DNA, 25 bp, Homo sapien
agtcggctttgaagcagatacagct

SEQ ID NO: 2764559 - DNA, 25 bp, Homo sapien
tgcaatgcttgaaggagaggcagtc

SEQ ID NO: 2764560 - DNA, 25 bp, Homo sapien
tacagctgttgaagaagtagcttgg

SEQ ID NO: 2764561 - DNA, 25 bp, Homo sapien
tgatgcttagcaccacgaatgtggg

SEQ ID NO: 2764562 - DNA, 25 bp, Homo sapien
cgaatgtgggcagcatacgcatctg

SEQ ID NO: 2764563 - DNA, 25 bp, Homo sapien
gctcctgtacaagacacatcgcaga

SEQ ID NO: 2764564 - DNA, 25 bp, Homo sapien
gagctcacaacgtagctgattttga

SEQ ID NO: 2764565 - DNA, 25 bp, Homo sapien
gtttagcaaccagaaacaatacaat

SEQ ID NO: 2764566 - DNA, 25 bp, Homo sapien
ccccttatgagattacagaaataac

SEQ ID NO: 2764567 - DNA, 25 bp, Homo sapien
taaaggctttggcaagtaagttaca

SEQ ID NO: 2764568 - DNA, 25 bp, Homo sapien
ttacccaagtcgcaattaatttgac

SEQ ID NO: 2764569 - DNA, 25 bp, Homo sapien
taaacctcttttagtaggctcagga

SEQ ID NO: 2764570 - DNA, 25 bp, Homo sapien
taataaccactgaagactcaaggta

SEQ ID NO: 2764571 - DNA, 25 bp, Homo sapien
gaaaattctcatgccacaatacaag

SEQ ID NO: 2764572 - DNA, 25 bp, Homo sapien
tgcactggctaaaagctaacaggaa

SEQ ID NO: 2764573 - DNA, 25 bp, Homo sapien
caatagtgaatctgtggtggtttgg

SEQ ID NO: 2764574 - DNA, 25 bp, Homo sapien
cagcacagctgatcttacaaacatc

SEQ ID NO: 2764575 - DNA, 25 bp, Homo sapien
tgtccaggcagctgttgcagcagca

SEQ ID NO: 2764576 - DNA, 25 bp, Homo sapien
ctgtccaggcagctgttgcagcagc

SEQ ID NO: 2764577 - DNA, 25 bp, Homo sapien
ctgctgctgcctgcttctgttgctg

SEQ ID NO: 2764578 - DNA, 25 bp, Homo sapien
gcagcagctgctgctgctgcctgct

SEQ ID NO: 2764579 - DNA, 25 bp, Homo sapien
gaagatgcagctgaatacactgctg

SEQ ID NO: 2764580 - DNA, 25 bp, Homo sapien
ctgctgttgatagtaggaagatgca

SEQ ID NO: 2764581 - DNA, 25 bp, Homo sapien
tgttgatagtaggaagatgcagctg

SEQ ID NO: 2764582 - DNA, 25 bp, Homo sapien
tagtaggaagatgcagctgaataca

SEQ ID NO: 2764583 - DNA, 25 bp, Homo sapien
tttaaacacagtttatcagtcttac

SEQ ID NO: 2764584 - DNA, 25 bp, Homo sapien
ctactggctgtacggtggaggatac

SEQ ID NO: 2764585 - DNA, 25 bp, Homo sapien
cactctgagtataggatggcaccac

SEQ ID NO: 2764586 - DNA, 25 bp, Homo sapien
tatactgagttgcaccttggctgta

SEQ ID NO: 2764587 - DNA, 25 bp, Homo sapien
cacttgtcgagtttgctgggcttga

SEQ ID NO: 2764588 - DNA, 25 bp, Homo sapien
caccccaagaactgcccacttttca

SEQ ID NO: 2764589 - DNA, 25 bp, Homo sapien
tatacaggtttctttgcaaacgaaa

SEQ ID NO: 2764590 - DNA, 25 bp, Homo sapien
taaatatacaggtttctttgcaaac

SEQ ID NO: 2764591 - DNA, 25 bp, Homo sapien
ggtttctttgcaaacgaaatgcttc

SEQ ID NO: 2764592 - DNA, 25 bp, Homo sapien
gtctgatagtaagtttcagcaacag

SEQ ID NO: 2764593 - DNA, 25 bp, Homo sapien
ctgtctgatagtaagtttcagcaac

SEQ ID NO: 2764594 - DNA, 25 bp, Homo sapien
tgtctgatagtaagtttcagcaaca

SEQ ID NO: 2764595 - DNA, 25 bp, Homo sapien
gagctgtggaccttacatatgagta

SEQ ID NO: 2764596 - DNA, 25 bp, Homo sapien
tattgcttactatcataagctacag

SEQ ID NO: 2764597 - DNA, 25 bp, Homo sapien
caggagctgtggaccttacatatga

SEQ ID NO: 2764598 - DNA, 25 bp, Homo sapien
gttgttggtagtattgcttactatc

SEQ ID NO: 2764599 - DNA, 25 bp, Homo sapien
gcctgatggacagtgtagctagcaa

SEQ ID NO: 2764600 - DNA, 25 bp, Homo sapien
tgagcagctactggagcctgatgga

SEQ ID NO: 2764601 - DNA, 25 bp, Homo sapien
gcagcagtaactgtgtgagcagcta

SEQ ID NO: 2764602 - DNA, 25 bp, Homo sapien
caggcctggcaactgcaactgtggc

SEQ ID NO: 2764603 - DNA, 25 bp, Homo sapien
gaataggctacacccgaagctggct

SEQ ID NO: 2764604 - DNA, 25 bp, Homo sapien
atgagaataggctacacccgaagct

SEQ ID NO: 2764605 - DNA, 25 bp, Homo sapien
gagaataggctacacccgaagctgg

SEQ ID NO: 2764606 - DNA, 25 bp, Homo sapien
aggctacacccgaagctggctgctg

SEQ ID NO: 2764607 - DNA, 25 bp, Homo sapien
tagtcacacgtttcagatcatagat

SEQ ID NO: 2764608 - DNA, 25 bp, Homo sapien
gatcatagattgtatcacataacag

SEQ ID NO: 2764609 - DNA, 25 bp, Homo sapien
actgaccaaattaggaactttagtg

SEQ ID NO: 2764610 - DNA, 25 bp, Homo sapien
tacattatatagtcacacgtttcag

SEQ ID NO: 2764611 - DNA, 25 bp, Homo sapien
tacattttccagcttacagggagca

SEQ ID NO: 2764612 - DNA, 25 bp, Homo sapien
ggacacctggagaaattcagtctag

SEQ ID NO: 2764613 - DNA, 25 bp, Homo sapien
tacagggtggcagatttcagtccaa

SEQ ID NO: 2764614 - DNA, 25 bp, Homo sapien
taaggtagaaactactgaccagctg

SEQ ID NO: 2764615 - DNA, 25 bp, Homo sapien
gccctgccgcttgatttcttcttaa

SEQ ID NO: 2764616 - DNA, 25 bp, Homo sapien
aactcactagaatggtgtagaccac

SEQ ID NO: 2764617 - DNA, 25 bp, Homo sapien
cagcttatcctacaattcctaccaa

SEQ ID NO: 2764618 - DNA, 25 bp, Homo sapien
tcttgtaatctttaactcaccagga

SEQ ID NO: 2764619 - DNA, 25 bp, Homo sapien
tgtgggtgaaacattacagacttct

SEQ ID NO: 2764620 - DNA, 25 bp, Homo sapien
gtagctccaagtgatcagattctag

SEQ ID NO: 2764621 - DNA, 25 bp, Homo sapien
gacctctggagctcttaagtatcta

SEQ ID NO: 2764622 - DNA, 25 bp, Homo sapien
tactttaagcccatgtgacctctgg

SEQ ID NO: 2764623 - DNA, 25 bp, Homo sapien
tctactgaatgcttgatatatgcca

SEQ ID NO: 2764624 - DNA, 25 bp, Homo sapien
tgctgttcacgctagtctcaaaatc

SEQ ID NO: 2764625 - DNA, 25 bp, Homo sapien
tcaccagccacctactgaataatgg

SEQ ID NO: 2764626 - DNA, 25 bp, Homo sapien
gtgcctggccccatagttgtattct

SEQ ID NO: 2764627 - DNA, 25 bp, Homo sapien
gaatgaaagaacacgaagtctacct

SEQ ID NO: 2764628 - DNA, 25 bp, Homo sapien
tacacaggtacactcggtttatgac

SEQ ID NO: 2764629 - DNA, 25 bp, Homo sapien
caggtaataggaggagccagattca

SEQ ID NO: 2764630 - DNA, 25 bp, Homo sapien
cctcatgccccagaagtgtaaactc

SEQ ID NO: 2764631 - DNA, 25 bp, Homo sapien
tttgcctgatcatagatccagaaaa

SEQ ID NO: 2764632 - DNA, 25 bp, Homo sapien
cctgatcatagatccagaaaacttg

SEQ ID NO: 2764633 - DNA, 25 bp, Homo sapien
cttctttctctattagtaatgagga

SEQ ID NO: 2764634 - DNA, 25 bp, Homo sapien
agtaatgaggactccaaatgtttta

SEQ ID NO: 2764635 - DNA, 25 bp, Homo sapien
tatccatgcagtgtacatcctaagg

SEQ ID NO: 2764636 - DNA, 25 bp, Homo sapien
ggatattctggctcaccctactcta

SEQ ID NO: 2764637 - DNA, 25 bp, Homo sapien
ggtctctgattcaacaatggaagga

SEQ ID NO: 2764638 - DNA, 25 bp, Homo sapien
tcatcagtgtaatagcaacaatcct

SEQ ID NO: 2764639 - DNA, 25 bp, Homo sapien
taggaacggaagtccctaagacatc

SEQ ID NO: 2764640 - DNA, 25 bp, Homo sapien
caagctactgttaccctacccgagt

SEQ ID NO: 2764641 - DNA, 25 bp, Homo sapien
tcaaaatcattagatgagatgcctt

SEQ ID NO: 2764642 - DNA, 25 bp, Homo sapien
agttatctcatcctttaggaacgga

SEQ ID NO: 2764643 - DNA, 25 bp, Homo sapien
gaacttctctatctttgacaatgaa

SEQ ID NO: 2764644 - DNA, 25 bp, Homo sapien
tgccacgaattctcctcaaaaactg

SEQ ID NO: 2764645 - DNA, 25 bp, Homo sapien
ggtactctactcttaacaggttatc

SEQ ID NO: 2764646 - DNA, 25 bp, Homo sapien
cataatagttctctccgcaagattt

SEQ ID NO: 2764647 - DNA, 25 bp, Homo sapien
caccctcaaattaacatgctatcag

SEQ ID NO: 2764648 - DNA, 25 bp, Homo sapien
gtgcaccctcaaattaacatgctat

SEQ ID NO: 2764649 - DNA, 25 bp, Homo sapien
tgcaccctcaaattaacatgctatc

SEQ ID NO: 2764650 - DNA, 25 bp, Homo sapien
gcaccctcaaattaacatgctatca

SEQ ID NO: 2764651 - DNA, 25 bp, Homo sapien
gccgccccgctgtgggtgaatccaa

SEQ ID NO: 2764652 - DNA, 25 bp, Homo sapien
tgccggtcgccattttggcatcttc

SEQ ID NO: 2764653 - DNA, 25 bp, Homo sapien
aagtagttgccggtcgccattttgg

SEQ ID NO: 2764654 - DNA, 25 bp, Homo sapien
ggtgaatccaaagtagttgccggtc

SEQ ID NO: 2764655 - DNA, 25 bp, Homo sapien
aagaaactacagggcatatgggaat

SEQ ID NO: 2764656 - DNA, 25 bp, Homo sapien
cataggtgaaagaaactacagggca

SEQ ID NO: 2764657 - DNA, 25 bp, Homo sapien
aaactacagggcatatgggaatcat

SEQ ID NO: 2764658 - DNA, 25 bp, Homo sapien
aggtgaaagaaactacagggcatat

SEQ ID NO: 2764659 - DNA, 25 bp, Homo sapien
tgaactctgaactctcacccgctgc

SEQ ID NO: 2764660 - DNA, 25 bp, Homo sapien
tgctgctgaactctgaactctcacc

SEQ ID NO: 2764661 - DNA, 25 bp, Homo sapien
gctgaactctgaactctcacccgct

SEQ ID NO: 2764662 - DNA, 25 bp, Homo sapien
actctgaactctcacccgctgcctc

SEQ ID NO: 2764663 - DNA, 25 bp, Homo sapien
tccccaacctctgaagtgcggaggg

SEQ ID NO: 2764664 - DNA, 25 bp, Homo sapien
tggactaaaagcacaccctaaacat

SEQ ID NO: 2764665 - DNA, 25 bp, Homo sapien
ttttcattggaattcgagctgggca

SEQ ID NO: 2764666 - DNA, 25 bp, Homo sapien
gagagagtgacgtctgttcgccttt

SEQ ID NO: 2764667 - DNA, 25 bp, Homo sapien
ggcgtatatcggtcacccagcaggg

SEQ ID NO: 2764668 - DNA, 25 bp, Homo sapien
actccctgagccatccggcgtatat

SEQ ID NO: 2764669 - DNA, 25 bp, Homo sapien
gtgtcaggcagtgttgtaggtgctg

SEQ ID NO: 2764670 - DNA, 25 bp, Homo sapien
cttgctataccctttcctcgacctg

SEQ ID NO: 2764671 - DNA, 25 bp, Homo sapien
tcttcttctaccaggaggggcatgg

SEQ ID NO: 2764672 - DNA, 25 bp, Homo sapien
tcatcctctgtatgaggcagagccc

SEQ ID NO: 2764673 - DNA, 25 bp, Homo sapien
tccttggtgccaccaattccactaa

SEQ ID NO: 2764674 - DNA, 25 bp, Homo sapien
ccactaagtggcacccaaccttgag

SEQ ID NO: 2764675 - DNA, 25 bp, Homo sapien
accattgcctaatgaacgaatgcca

SEQ ID NO: 2764676 - DNA, 25 bp, Homo sapien
tgccaatcattgtcacttcaattct

SEQ ID NO: 2764677 - DNA, 25 bp, Homo sapien
gaacgaatgccaatcattgtcactt

SEQ ID NO: 2764678 - DNA, 25 bp, Homo sapien
cttcagggtgagaaagcaggacctg

SEQ ID NO: 2764679 - DNA, 25 bp, Homo sapien
gtagccctgaggagcgtctcaaatg

SEQ ID NO: 2764680 - DNA, 25 bp, Homo sapien
ttctctcctgggtcggtaggggata

SEQ ID NO: 2764681 - DNA, 25 bp, Homo sapien
tctctcctgggtcggtaggggatat

SEQ ID NO: 2764682 - DNA, 25 bp, Homo sapien
aatgtagccctgaggagcgtctcaa

SEQ ID NO: 2764683 - DNA, 25 bp, Homo sapien
cagcagcaacagaggggagctgtac

SEQ ID NO: 2764684 - DNA, 25 bp, Homo sapien
cactccagcagcaacagaggggagc

SEQ ID NO: 2764685 - DNA, 25 bp, Homo sapien
tccagcagcaacagaggggagctgt

SEQ ID NO: 2764686 - DNA, 25 bp, Homo sapien
tcactccagcagcaacagaggggag

SEQ ID NO: 2764687 - DNA, 25 bp, Homo sapien
gagggtggaaacttgggcagcaaga

SEQ ID NO: 2764688 - DNA, 25 bp, Homo sapien
ccagagaaacgggacatgtcacagg

SEQ ID NO: 2764689 - DNA, 25 bp, Homo sapien
tgactccagagaaacgggacatgtc

SEQ ID NO: 2764690 - DNA, 25 bp, Homo sapien
gagtcacagttaatgcctggtgagg

SEQ ID NO: 2764691 - DNA, 25 bp, Homo sapien
gtgacgtggagctgcacggtaagca

SEQ ID NO: 2764692 - DNA, 25 bp, Homo sapien
ggagtgacgtggagctgcacggtaa

SEQ ID NO: 2764693 - DNA, 25 bp, Homo sapien
agtgacgtggagctgcacggtaagc

SEQ ID NO: 2764694 - DNA, 25 bp, Homo sapien
tggagtgacgtggagctgcacggta

SEQ ID NO: 2764695 - DNA, 25 bp, Homo sapien
ggcccatcacggctgtttggaggca

SEQ ID NO: 2764696 - DNA, 25 bp, Homo sapien
tgaaaaattgagagtagtaatccag

SEQ ID NO: 2764697 - DNA, 25 bp, Homo sapien
gagtagtaatccagtctcccacggg

SEQ ID NO: 2764698 - DNA, 25 bp, Homo sapien
catcacggctgtttggaggcacaca

SEQ ID NO: 2764699 - DNA, 25 bp, Homo sapien
cctgccgtcttccacgatgtttgct

SEQ ID NO: 2764700 - DNA, 25 bp, Homo sapien
taatttgcttgattggtgacttaag

SEQ ID NO: 2764701 - DNA, 25 bp, Homo sapien
tccacgatgtttgcttggagatcat

SEQ ID NO: 2764702 - DNA, 25 bp, Homo sapien
tctatgagaagaggactaatttgct

SEQ ID NO: 2764703 - DNA, 25 bp, Homo sapien
gatgcacccttaaactatgttttcc

SEQ ID NO: 2764704 - DNA, 25 bp, Homo sapien
gtaaaatattggcaagtccttctag

SEQ ID NO: 2764705 - DNA, 25 bp, Homo sapien
cctgtggcccaacaggtaagtctgt

SEQ ID NO: 2764706 - DNA, 25 bp, Homo sapien
tcagcttgttaacaacactgtcagc

SEQ ID NO: 2764707 - DNA, 25 bp, Homo sapien
tttcttattcctccattgattccag

SEQ ID NO: 2764708 - DNA, 25 bp, Homo sapien
ttcttattcctccattgattccaga

SEQ ID NO: 2764709 - DNA, 25 bp, Homo sapien
gcgcatggatttcggtcagagaagt

SEQ ID NO: 2764710 - DNA, 25 bp, Homo sapien
tggatttcggtcagagaagtgactt

SEQ ID NO: 2764711 - DNA, 25 bp, Homo sapien
tccaccacgagagggcgcatggatt

SEQ ID NO: 2764712 - DNA, 25 bp, Homo sapien
ctccaccacgagagggcgcatggat

SEQ ID NO: 2764713 - DNA, 25 bp, Homo sapien
aggcctctgaaacccttagctgttg

SEQ ID NO: 2764714 - DNA, 25 bp, Homo sapien
cactttcttccctgggtcgggcaca

SEQ ID NO: 2764715 - DNA, 25 bp, Homo sapien
tggccgcttgacgtagactctctga

SEQ ID NO: 2764716 - DNA, 25 bp, Homo sapien
tgttgacacctcctttgcgttctcc

SEQ ID NO: 2764717 - DNA, 25 bp, Homo sapien
cagagggctatcagtctgaggctga

SEQ ID NO: 2764718 - DNA, 25 bp, Homo sapien
gaagtatcccaactgattcagaggg

SEQ ID NO: 2764719 - DNA, 25 bp, Homo sapien
ctgagtaggatggagtatcaggaaa

SEQ ID NO: 2764720 - DNA, 25 bp, Homo sapien
gctcttcagtgagaactattcccgt

SEQ ID NO: 2764721 - DNA, 25 bp, Homo sapien
tccagatgacaagtggcctgagtag

SEQ ID NO: 2764722 - DNA, 25 bp, Homo sapien
ctgctgccacgattggaactggcat

SEQ ID NO: 2764723 - DNA, 25 bp, Homo sapien
tgtcactgctgccacgattggaact

SEQ ID NO: 2764724 - DNA, 25 bp, Homo sapien
tgctaagctgctccagatgacaagt

SEQ ID NO: 2764725 - DNA, 25 bp, Homo sapien
gatcttgcccaagaggactgcctga

SEQ ID NO: 2764726 - DNA, 25 bp, Homo sapien
ccatgctaaggttgccaagggtgat

SEQ ID NO: 2764727 - DNA, 25 bp, Homo sapien
cagcccatcggagtaaccaggagag

SEQ ID NO: 2764728 - DNA, 25 bp, Homo sapien
gcctgagagtacgatgggacacaac

SEQ ID NO: 2764729 - DNA, 25 bp, Homo sapien
ctttactatcaatgtgagcaaggac

SEQ ID NO: 2764730 - DNA, 25 bp, Homo sapien
tacggcatcattgagtgagactggt

SEQ ID NO: 2764731 - DNA, 25 bp, Homo sapien
ccgattgtcatgagaatgatattta

SEQ ID NO: 2764732 - DNA, 25 bp, Homo sapien
tgagactggtgtttcaagattcccc

SEQ ID NO: 2764733 - DNA, 25 bp, Homo sapien
ctttcagtgtcttcccggagaacta

SEQ ID NO: 2764734 - DNA, 25 bp, Homo sapien
tcagcgtaactcacaggagaaataa

SEQ ID NO: 2764735 - DNA, 25 bp, Homo sapien
tgtcttcccggagaactaatacttc

SEQ ID NO: 2764736 - DNA, 25 bp, Homo sapien
ttgggaatccccaagaattactgtg

SEQ ID NO: 2764737 - DNA, 25 bp, Homo sapien
agtcccgcaggagattccacaggca

SEQ ID NO: 2764738 - DNA, 25 bp, Homo sapien
gattccacaggcacgagtgactcca

SEQ ID NO: 2764739 - DNA, 25 bp, Homo sapien
gcccttgttttctagcagccacaga

SEQ ID NO: 2764740 - DNA, 25 bp, Homo sapien
gcacgagtgactccaaagagccctt

SEQ ID NO: 2764741 - DNA, 25 bp, Homo sapien
agttggcatcccaccatacagcggt

SEQ ID NO: 2764742 - DNA, 25 bp, Homo sapien
gaagtcagctgctctagaatcaaca

SEQ ID NO: 2764743 - DNA, 25 bp, Homo sapien
cggtggcgtcatacgttcatacata

SEQ ID NO: 2764744 - DNA, 25 bp, Homo sapien
tagaatcaacagactcctctccagt

SEQ ID NO: 2764745 - DNA, 25 bp, Homo sapien
tgaatcattggtgggaataaaggcc

SEQ ID NO: 2764746 - DNA, 25 bp, Homo sapien
tttcagcctcgtcactgccttcggg

SEQ ID NO: 2764747 - DNA, 25 bp, Homo sapien
cctgtgaatggttctgacaatgtgc

SEQ ID NO: 2764748 - DNA, 25 bp, Homo sapien
gcctgccagtgaattgtggttccac

SEQ ID NO: 2764749 - DNA, 25 bp, Homo sapien
gctccccacattagtgctccaatat

SEQ ID NO: 2764750 - DNA, 25 bp, Homo sapien
tttgaactaccagcaaaggccagca

SEQ ID NO: 2764751 - DNA, 25 bp, Homo sapien
tggcctaggcctacttgagatctag

SEQ ID NO: 2764752 - DNA, 25 bp, Homo sapien
tgagatctaggcaaccattctgact

SEQ ID NO: 2764753 - DNA, 25 bp, Homo sapien
ccaccttgttgtgagcatccatgga

SEQ ID NO: 2764754 - DNA, 25 bp, Homo sapien
tgaaacacttgaagctgcaccaacg

SEQ ID NO: 2764755 - DNA, 25 bp, Homo sapien
ttggtgtcagaggtagttaaaggcc

SEQ ID NO: 2764756 - DNA, 25 bp, Homo sapien
tgtgactaccatggacaccagatgc

SEQ ID NO: 2764757 - DNA, 25 bp, Homo sapien
aggctctccaaactttaagaggagc

SEQ ID NO: 2764758 - DNA, 25 bp, Homo sapien
gaggctctccaaactttaagaggag

SEQ ID NO: 2764759 - DNA, 25 bp, Homo sapien
ctgtggctacgagagcactgtgctg

SEQ ID NO: 2764760 - DNA, 25 bp, Homo sapien
tatctttgaaacagtcaacttctct

SEQ ID NO: 2764761 - DNA, 25 bp, Homo sapien
caacttctcttttacacctgctgtg

SEQ ID NO: 2764762 - DNA, 25 bp, Homo sapien
cttttacacctgctgtggctacgag

SEQ ID NO: 2764763 - DNA, 25 bp, Homo sapien
tatttcagcagaatctaatgtggta

SEQ ID NO: 2764764 - DNA, 25 bp, Homo sapien
tcagcagaatctaatgtggtagatg

SEQ ID NO: 2764765 - DNA, 25 bp, Homo sapien
cagaatctaatgtggtagatgtctc

SEQ ID NO: 2764766 - DNA, 25 bp, Homo sapien
catatttcagcagaatctaatgtgg

SEQ ID NO: 2764767 - DNA, 25 bp, Homo sapien
gatatacttctgcaagagtttccat

SEQ ID NO: 2764768 - DNA, 25 bp, Homo sapien
ggacttagtcagatatacttctgca

SEQ ID NO: 2764769 - DNA, 25 bp, Homo sapien
gttggatgctatgtcccggatggac

SEQ ID NO: 2764770 - DNA, 25 bp, Homo sapien
tatgtcccggatggacttagtcaga

SEQ ID NO: 2764771 - DNA, 25 bp, Homo sapien
tctcaagggtcagatgtaatcttcc

SEQ ID NO: 2764772 - DNA, 25 bp, Homo sapien
cggttctctgtcagtcgcgagcgaa

SEQ ID NO: 2764773 - DNA, 25 bp, Homo sapien
caagagggtgttcgactgctagagc

SEQ ID NO: 2764774 - DNA, 25 bp, Homo sapien
tcacccatttaggaagagacgcggt

SEQ ID NO: 2764775 - DNA, 25 bp, Homo sapien
caaaagacaggtgagacttcgagag

SEQ ID NO: 2764776 - DNA, 25 bp, Homo sapien
ggtgagacttcgagagccctgtcat

SEQ ID NO: 2764777 - DNA, 25 bp, Homo sapien
gacaggtgagacttcgagagccctg

SEQ ID NO: 2764778 - DNA, 25 bp, Homo sapien
gagacttcgagagccctgtcatctt

SEQ ID NO: 2764779 - DNA, 25 bp, Homo sapien
aatgaggtacgttagtgttcgcgat

SEQ ID NO: 2764780 - DNA, 25 bp, Homo sapien
tgaggtacgttagtgttcgcgattt

SEQ ID NO: 2764781 - DNA, 25 bp, Homo sapien
gttagtgttcgcgattttaaaggca

SEQ ID NO: 2764782 - DNA, 25 bp, Homo sapien
tagtgttcgcgattttaaaggcaaa

SEQ ID NO: 2764783 - DNA, 25 bp, Homo sapien
catggcttgtgtgaaaactgagcag

SEQ ID NO: 2764784 - DNA, 25 bp, Homo sapien
taagagttggtactgtttaaggcca

SEQ ID NO: 2764785 - DNA, 25 bp, Homo sapien
tcttccaatcaaatgtctaggcttg

SEQ ID NO: 2764786 - DNA, 25 bp, Homo sapien
gacttagatgagatgtctgacttgc

SEQ ID NO: 2764787 - DNA, 25 bp, Homo sapien
gcactattttgctaccaagtttgat

SEQ ID NO: 2764788 - DNA, 25 bp, Homo sapien
cattttgtagttacttgtcaaggac

SEQ ID NO: 2764789 - DNA, 25 bp, Homo sapien
tacctgctattaaggtctgccatat

SEQ ID NO: 2764790 - DNA, 25 bp, Homo sapien
tgccaggccacatagttatcaattt

SEQ ID NO: 2764791 - DNA, 25 bp, Homo sapien
cagtattaagtgttcctcacaggag

SEQ ID NO: 2764792 - DNA, 25 bp, Homo sapien
gctactcaagatgctgtgacgatca

SEQ ID NO: 2764793 - DNA, 25 bp, Homo sapien
tatattctgacttggctattgaggg

SEQ ID NO: 2764794 - DNA, 25 bp, Homo sapien
aacagactctatgtgtatcagggct

SEQ ID NO: 2764795 - DNA, 25 bp, Homo sapien
cgtgcccggccttgcccgttctatt

SEQ ID NO: 2764796 - DNA, 25 bp, Homo sapien
gcccttggccatagacgggtctgca

SEQ ID NO: 2764797 - DNA, 25 bp, Homo sapien
ggatgatgtcgaccttggccgtaga

SEQ ID NO: 2764798 - DNA, 25 bp, Homo sapien
gctgtctgccccagtggtgcaaaag

SEQ ID NO: 2764799 - DNA, 25 bp, Homo sapien
tcttgatgtcaaccttggccatagg

SEQ ID NO: 2764800 - DNA, 25 bp, Homo sapien
ttcattttccatacacccgcagtcc

SEQ ID NO: 2764801 - DNA, 25 bp, Homo sapien
cttcattttccatacacccgcagtc

SEQ ID NO: 2764802 - DNA, 25 bp, Homo sapien
cagtgtgatcacttgatccaaaggg

SEQ ID NO: 2764803 - DNA, 25 bp, Homo sapien
ggccagcacagtgtgatcacttgat

SEQ ID NO: 2764804 - DNA, 25 bp, Homo sapien
atcacttgatccaaagggagaggca

SEQ ID NO: 2764805 - DNA, 25 bp, Homo sapien
gctcagggcgggtaacagacctggg

SEQ ID NO: 2764806 - DNA, 25 bp, Homo sapien
agcctacctgctccccctcttctca

SEQ ID NO: 2764807 - DNA, 25 bp, Homo sapien
tacctgctccccctcttctcagtcc

SEQ ID NO: 2764808 - DNA, 25 bp, Homo sapien
ctgctccccctcttctcagtcccat

SEQ ID NO: 2764809 - DNA, 25 bp, Homo sapien
cagcctacctgctccccctcttctc

SEQ ID NO: 2764810 - DNA, 25 bp, Homo sapien
aggttgtgtccaaaatcttagctcg

SEQ ID NO: 2764811 - DNA, 25 bp, Homo sapien
tgtgtccaaaatcttagctcggaag

SEQ ID NO: 2764812 - DNA, 25 bp, Homo sapien
gtccaaaatcttagctcggaagatg

SEQ ID NO: 2764813 - DNA, 25 bp, Homo sapien
ccaaaatcttagctcggaagatgga

SEQ ID NO: 2764814 - DNA, 25 bp, Homo sapien
tacattcaaggtggctgttaggcca

SEQ ID NO: 2764815 - DNA, 25 bp, Homo sapien
ccatacgtggctctgagaaggatta

SEQ ID NO: 2764816 - DNA, 25 bp, Homo sapien
tggttacagccccaattggacaggc

SEQ ID NO: 2764817 - DNA, 25 bp, Homo sapien
tgggtccgtgtgtctcttcaagtgg

SEQ ID NO: 2764818 - DNA, 25 bp, Homo sapien
aacgctgttcttgttgggctctgca

SEQ ID NO: 2764819 - DNA, 25 bp, Homo sapien
cactttccggcagggatatcctctg

SEQ ID NO: 2764820 - DNA, 25 bp, Homo sapien
gggctttgacgcacctcactggcct

SEQ ID NO: 2764821 - DNA, 25 bp, Homo sapien
agggctctttcgtctcctggtgaag

SEQ ID NO: 2764822 - DNA, 25 bp, Homo sapien
cgatcacggatgtgttaaagccact

SEQ ID NO: 2764823 - DNA, 25 bp, Homo sapien
gaatgcaatcttggtggaactgtcc

SEQ ID NO: 2764824 - DNA, 25 bp, Homo sapien
taaatcttgctcctccgatcacgga

SEQ ID NO: 2764825 - DNA, 25 bp, Homo sapien
tagttcctgcgacgtcattctctgg

SEQ ID NO: 2764826 - DNA, 25 bp, Homo sapien
tggtggcatcatgattactcatatc

SEQ ID NO: 2764827 - DNA, 25 bp, Homo sapien
gttcaagaacacagaggttatttcc

SEQ ID NO: 2764828 - DNA, 25 bp, Homo sapien
gggtaattcttggtacatggtggca

SEQ ID NO: 2764829 - DNA, 25 bp, Homo sapien
tatcatcactgcaaggtatcaagcc

SEQ ID NO: 2764830 - DNA, 25 bp, Homo sapien
ttggacacccatgaggacactcggt

SEQ ID NO: 2764831 - DNA, 25 bp, Homo sapien
catgtagtgtgactcatggatgaac

SEQ ID NO: 2764832 - DNA, 25 bp, Homo sapien
caaggacaacttggacttcaccaat

SEQ ID NO: 2764833 - DNA, 25 bp, Homo sapien
cttcaccaatgcccagcttcatggg

SEQ ID NO: 2764834 - DNA, 25 bp, Homo sapien
tggatgccagtgagaacaggtcagc

SEQ ID NO: 2764835 - DNA, 25 bp, Homo sapien
ggtcagcagcttgtatgctgactgc

SEQ ID NO: 2764836 - DNA, 25 bp, Homo sapien
tctggatgccagtgagaacaggtca

SEQ ID NO: 2764837 - DNA, 25 bp, Homo sapien
agaacaggtcagcagcttgtatgct

SEQ ID NO: 2764838 - DNA, 25 bp, Homo sapien
tcattgacctgatttccacagcagg

SEQ ID NO: 2764839 - DNA, 25 bp, Homo sapien
gctcattgacctgatttccacagca

SEQ ID NO: 2764840 - DNA, 25 bp, Homo sapien
ggctcattgacctgatttccacagc

SEQ ID NO: 2764841 - DNA, 25 bp, Homo sapien
cattgacctgatttccacagcagga

SEQ ID NO: 2764842 - DNA, 25 bp, Homo sapien
ttagtcacaaggtctttgtccatgc

SEQ ID NO: 2764843 - DNA, 25 bp, Homo sapien
tagtcacaaggtctttgtccatgcc

SEQ ID NO: 2764844 - DNA, 25 bp, Homo sapien
agacctttgtcggagggtagcttgc

SEQ ID NO: 2764845 - DNA, 25 bp, Homo sapien
tgtcggagggtagcttgcaaaattt

SEQ ID NO: 2764846 - DNA, 25 bp, Homo sapien
ccatcatctctaacatcttggattc

SEQ ID NO: 2764847 - DNA, 25 bp, Homo sapien
gattgaatactgcttcttggactcc

SEQ ID NO: 2764848 - DNA, 25 bp, Homo sapien
catcatctctaacatcttggattcc

SEQ ID NO: 2764849 - DNA, 25 bp, Homo sapien
agtccttgttcagccattgccagca

SEQ ID NO: 2764850 - DNA, 25 bp, Homo sapien
ctgtgaggcttctgctggtcttcca

SEQ ID NO: 2764851 - DNA, 25 bp, Homo sapien
tgttcagccattgccagcatctgcc

SEQ ID NO: 2764852 - DNA, 25 bp, Homo sapien
cctgtcattctgtgaggcttctgct

SEQ ID NO: 2764853 - DNA, 25 bp, Homo sapien
catagaacacattcagtggcacctg

SEQ ID NO: 2764854 - DNA, 25 bp, Homo sapien
gggggcatagaacacattcagtggc

SEQ ID NO: 2764855 - DNA, 25 bp, Homo sapien
ctgggggcatagaacacattcagtg

SEQ ID NO: 2764856 - DNA, 25 bp, Homo sapien
gggcatagaacacattcagtggcac

SEQ ID NO: 2764857 - DNA, 25 bp, Homo sapien
gtgatgggcaggcctcggcaaggct

SEQ ID NO: 2764858 - DNA, 25 bp, Homo sapien
gcaggcctcggcaaggctccctcat

SEQ ID NO: 2764859 - DNA, 25 bp, Homo sapien
atgggcaggcctcggcaaggctccc

SEQ ID NO: 2764860 - DNA, 25 bp, Homo sapien
aggtgatgggcaggcctcggcaagg

SEQ ID NO: 2764861 - DNA, 25 bp, Homo sapien
ccatctgcctgtgcacctcccgtgg

SEQ ID NO: 2764862 - DNA, 25 bp, Homo sapien
ctgcctgtgcacctcccgtggccat

SEQ ID NO: 2764863 - DNA, 25 bp, Homo sapien
atctgcctgtgcacctcccgtggcc

SEQ ID NO: 2764864 - DNA, 25 bp, Homo sapien
ggccatctgcctgtgcacctcccgt

SEQ ID NO: 2764865 - DNA, 25 bp, Homo sapien
cagtaggcacagaaggtccagttcc

SEQ ID NO: 2764866 - DNA, 25 bp, Homo sapien
cacattgacggttccagaaagagcg

SEQ ID NO: 2764867 - DNA, 25 bp, Homo sapien
gaaatttgtggacacggacgcctag

SEQ ID NO: 2764868 - DNA, 25 bp, Homo sapien
caagtttctgccgaaagagggcgtc

SEQ ID NO: 2764869 - DNA, 25 bp, Homo sapien
gaaccggcgcgaatcaatgagatca

SEQ ID NO: 2764870 - DNA, 25 bp, Homo sapien
catgtgtggtaacacgctcagccgc

SEQ ID NO: 2764871 - DNA, 25 bp, Homo sapien
tttaaacgcgggctatggatccagg

SEQ ID NO: 2764872 - DNA, 25 bp, Homo sapien
gatcaaatgcgagggagatgcaccg

SEQ ID NO: 2764873 - DNA, 25 bp, Homo sapien
tcgagtatgctctgcgcagcgtgga

SEQ ID NO: 2764874 - DNA, 25 bp, Homo sapien
actgccccaggatgactcgtacttg

SEQ ID NO: 2764875 - DNA, 25 bp, Homo sapien
gatcgaggtgctggtgttactgccc

SEQ ID NO: 2764876 - DNA, 25 bp, Homo sapien
gattcagactgtgggaaccgtgcgc

SEQ ID NO: 2764877 - DNA, 25 bp, Homo sapien
tctgcatcttgggactgagagccag

SEQ ID NO: 2764878 - DNA, 25 bp, Homo sapien
tgaatgttttatgggacaccctggc

SEQ ID NO: 2764879 - DNA, 25 bp, Homo sapien
tggtggccagtcagccagaacttcc

SEQ ID NO: 2764880 - DNA, 25 bp, Homo sapien
cctggactatgatcacttgatcgaa

SEQ ID NO: 2764881 - DNA, 25 bp, Homo sapien
gagggctggcatgcatcgtgataat

SEQ ID NO: 2764882 - DNA, 25 bp, Homo sapien
aacatacacatcttggagggctggc

SEQ ID NO: 2764883 - DNA, 25 bp, Homo sapien
caaggccgctttggcatagcctgaa

SEQ ID NO: 2764884 - DNA, 25 bp, Homo sapien
gataatgcggtttatagcacccagg

SEQ ID NO: 2764885 - DNA, 25 bp, Homo sapien
aatatgactattggcctgaatttga

SEQ ID NO: 2764886 - DNA, 25 bp, Homo sapien
tctacccagatatctctatgtggaa

SEQ ID NO: 2764887 - DNA, 25 bp, Homo sapien
gagctcaagctgtaggaaattagtt

SEQ ID NO: 2764888 - DNA, 25 bp, Homo sapien
tgaacttgcttcttgtataaagatc

SEQ ID NO: 2764889 - DNA, 25 bp, Homo sapien
ggttggaaatacagccttactctct

SEQ ID NO: 2764890 - DNA, 25 bp, Homo sapien
gtgtctcataaacgctactctggat

SEQ ID NO: 2764891 - DNA, 25 bp, Homo sapien
tgcctccaggcctttcatctcatga

SEQ ID NO: 2764892 - DNA, 25 bp, Homo sapien
ccgatgtctacattcaggttctgac

SEQ ID NO: 2764893 - DNA, 25 bp, Homo sapien
taaatatctcttgcaggcatacccc

SEQ ID NO: 2764894 - DNA, 25 bp, Homo sapien
ggtagaaatttgtgagtaggcctcc

SEQ ID NO: 2764895 - DNA, 25 bp, Homo sapien
tcactccaaggatgtgtcagcatct

SEQ ID NO: 2764896 - DNA, 25 bp, Homo sapien
tgcataaactccaacaagcctggct

SEQ ID NO: 2764897 - DNA, 25 bp, Homo sapien
ctggggactgctctttggagttcat

SEQ ID NO: 2764898 - DNA, 25 bp, Homo sapien
tgagatgggtctggggactgctctt

SEQ ID NO: 2764899 - DNA, 25 bp, Homo sapien
ctgccttccaccccctgctttctcc

SEQ ID NO: 2764900 - DNA, 25 bp, Homo sapien
tgctttctcccctggctgagatggg

SEQ ID NO: 2764901 - DNA, 25 bp, Homo sapien
ccaccctgattatcgggaggaggaa

SEQ ID NO: 2764902 - DNA, 25 bp, Homo sapien
aagaagcagtgaaattaaacgtggc

SEQ ID NO: 2764903 - DNA, 25 bp, Homo sapien
gacgccgttggcgttgacgacattg

SEQ ID NO: 2764904 - DNA, 25 bp, Homo sapien
tttaggaagattccgaccaccctga

SEQ ID NO: 2764905 - DNA, 25 bp, Homo sapien
tatgggctgcccaaaagtctgccac

SEQ ID NO: 2764906 - DNA, 25 bp, Homo sapien
tagaaggagcaaccttgcgccaagt

SEQ ID NO: 2764907 - DNA, 25 bp, Homo sapien
gtctacaactcagggtggtctggaa

SEQ ID NO: 2764908 - DNA, 25 bp, Homo sapien
tggtggtaccaacaccttcatggtg

SEQ ID NO: 2764909 - DNA, 25 bp, Homo sapien
tgggtctaatattagtatctgcaaa

SEQ ID NO: 2764910 - DNA, 25 bp, Homo sapien
aataaagagcaattgggcctggtat

SEQ ID NO: 2764911 - DNA, 25 bp, Homo sapien
ttgggcctggtatgaaagagaacaa

SEQ ID NO: 2764912 - DNA, 25 bp, Homo sapien
ttaactgggtctaatattagtatct

SEQ ID NO: 2764913 - DNA, 25 bp, Homo sapien
tccgtcagaaacaccgagtgaacca

SEQ ID NO: 2764914 - DNA, 25 bp, Homo sapien
cattgttttgcacaagatagagcag

SEQ ID NO: 2764915 - DNA, 25 bp, Homo sapien
tgcacgcacccattgccaggtaaaa

SEQ ID NO: 2764916 - DNA, 25 bp, Homo sapien
ttcgaatgatgtccttgacttggcc

SEQ ID NO: 2764917 - DNA, 25 bp, Homo sapien
ctgaggaaaggttgagatgggccat

SEQ ID NO: 2764918 - DNA, 25 bp, Homo sapien
ctcccctggtgttctcattttactc

SEQ ID NO: 2764919 - DNA, 25 bp, Homo sapien
cctggtgttctcattttactccctg

SEQ ID NO: 2764920 - DNA, 25 bp, Homo sapien
gttctcattttactccctggaagag

SEQ ID NO: 2764921 - DNA, 25 bp, Homo sapien
gttctgcgtgcaattttatctttaa

SEQ ID NO: 2764922 - DNA, 25 bp, Homo sapien
tgaacctcagccttagtgatggaga

SEQ ID NO: 2764923 - DNA, 25 bp, Homo sapien
tgaaaaacaactccaagttctagcc

SEQ ID NO: 2764924 - DNA, 25 bp, Homo sapien
gatcattttcgacctccagtgtaga

SEQ ID NO: 2764925 - DNA, 25 bp, Homo sapien
gagagaacattacttaacaccagac

SEQ ID NO: 2764926 - DNA, 25 bp, Homo sapien
ttattgtaggtaaagtcaaagggca

SEQ ID NO: 2764927 - DNA, 25 bp, Homo sapien
gaattttacatgtagctcacggatg

SEQ ID NO: 2764928 - DNA, 25 bp, Homo sapien
gatgtaaccatatttaggagaagag

SEQ ID NO: 2764929 - DNA, 25 bp, Homo sapien
caagggatagaattatgagcttaca

SEQ ID NO: 2764930 - DNA, 25 bp, Homo sapien
ctcaggcctgctgaaaacaactgga

SEQ ID NO: 2764931 - DNA, 25 bp, Homo sapien
ctttgatggagctcttggcccctgc

SEQ ID NO: 2764932 - DNA, 25 bp, Homo sapien
gagttgctgaaagcacataggcttc

SEQ ID NO: 2764933 - DNA, 25 bp, Homo sapien
tcaggcctgctgaaaacaactggaa

SEQ ID NO: 2764934 - DNA, 25 bp, Homo sapien
aagtggtgacaacactgcatcttct

SEQ ID NO: 2764935 - DNA, 25 bp, Homo sapien
taaatgttcgttttgtgatttacta

SEQ ID NO: 2764936 - DNA, 25 bp, Homo sapien
ggattaacccatacaagatatctct

SEQ ID NO: 2764937 - DNA, 25 bp, Homo sapien
gtgatttactaataagtggtgacaa

SEQ ID NO: 2764938 - DNA, 25 bp, Homo sapien
cagttttctcatcccggatacagca

SEQ ID NO: 2764939 - DNA, 25 bp, Homo sapien
aaatacttgcaacatcactgaggga

SEQ ID NO: 2764940 - DNA, 25 bp, Homo sapien
tagataagcagctattagcgctagt

SEQ ID NO: 2764941 - DNA, 25 bp, Homo sapien
cctgaaaagtcacttaaggtctctg

SEQ ID NO: 2764942 - DNA, 25 bp, Homo sapien
gccatttacatgctgcacggggaag

SEQ ID NO: 2764943 - DNA, 25 bp, Homo sapien
ttgttgtctggggttgaatacctgg

SEQ ID NO: 2764944 - DNA, 25 bp, Homo sapien
gaatacctggggtttgttgtctcat

SEQ ID NO: 2764945 - DNA, 25 bp, Homo sapien
cacggggaaggctggtcatcccacc

SEQ ID NO: 2764946 - DNA, 25 bp, Homo sapien
cggccctatacaactgtttgagaag

SEQ ID NO: 2764947 - DNA, 25 bp, Homo sapien
cagctggccggccctatacaactgt

SEQ ID NO: 2764948 - DNA, 25 bp, Homo sapien
tggccggccctatacaactgtttga

SEQ ID NO: 2764949 - DNA, 25 bp, Homo sapien
gccggccctatacaactgtttgaga

SEQ ID NO: 2764950 - DNA, 25 bp, Homo sapien
aaatagatgtattcaacatcatgta

SEQ ID NO: 2764951 - DNA, 25 bp, Homo sapien
tctttggagaagtatggtttgagca

SEQ ID NO: 2764952 - DNA, 25 bp, Homo sapien
atctatataaatgcccaatatttgg

SEQ ID NO: 2764953 - DNA, 25 bp, Homo sapien
taaagtaaggcaagatgcaagctat

SEQ ID NO: 2764954 - DNA, 25 bp, Homo sapien
tcgtagcagcattatgacatcacca

SEQ ID NO: 2764955 - DNA, 25 bp, Homo sapien
caaggtgttattctccaacgagtga

SEQ ID NO: 2764956 - DNA, 25 bp, Homo sapien
caacgagtgactaacagggaaggta

SEQ ID NO: 2764957 - DNA, 25 bp, Homo sapien
tacagtgaatgagcaaattcgtagc

SEQ ID NO: 2764958 - DNA, 25 bp, Homo sapien
taagtcttactgaatgggaatgtgt

SEQ ID NO: 2764959 - DNA, 25 bp, Homo sapien
ttaccatcctgtataagtcttactg

SEQ ID NO: 2764960 - DNA, 25 bp, Homo sapien
tgccatgttaggcttaccatcctgt

SEQ ID NO: 2764961 - DNA, 25 bp, Homo sapien
gaaatattcagacaacctgccatga

SEQ ID NO: 2764962 - DNA, 25 bp, Homo sapien
tatgttcaagaacggcaaagtacct

SEQ ID NO: 2764963 - DNA, 25 bp, Homo sapien
aaatgggtcatggtctcctcagaca

SEQ ID NO: 2764964 - DNA, 25 bp, Homo sapien
cagttctgcaccatgtaatagctac

SEQ ID NO: 2764965 - DNA, 25 bp, Homo sapien
caaagtacctggatgaaactcacaa

SEQ ID NO: 2764966 - DNA, 25 bp, Homo sapien
cccacagcctcaagatgtaagacat

SEQ ID NO: 2764967 - DNA, 25 bp, Homo sapien
gagaaccacatgtgaaggaacagca

SEQ ID NO: 2764968 - DNA, 25 bp, Homo sapien
tatgattcagatctggcagaattcc

SEQ ID NO: 2764969 - DNA, 25 bp, Homo sapien
tgatggttactaccaagcctgtgac

SEQ ID NO: 2764970 - DNA, 25 bp, Homo sapien
tccagacaaggagtgcatccttctt

SEQ ID NO: 2764971 - DNA, 25 bp, Homo sapien
tatgagttacttgccgaaaacctga

SEQ ID NO: 2764972 - DNA, 25 bp, Homo sapien
gaagtattttcccagacatgatctc

SEQ ID NO: 2764973 - DNA, 25 bp, Homo sapien
ccatagaaagggagttgataattta

SEQ ID NO: 2764974 - DNA, 25 bp, Homo sapien
ggtagtccataccagatcctgagct

SEQ ID NO: 2764975 - DNA, 25 bp, Homo sapien
tgtgaggttgccgataaatgaccat

SEQ ID NO: 2764976 - DNA, 25 bp, Homo sapien
gaaaagctttcgtatcaccactgac

SEQ ID NO: 2764977 - DNA, 25 bp, Homo sapien
ctctacagcgatagaaaaatgatgg

SEQ ID NO: 2764978 - DNA, 25 bp, Homo sapien
ggtggacctaacgtaatcacaagcg

SEQ ID NO: 2764979 - DNA, 25 bp, Homo sapien
taatcacaagcgttgttatagaggg

SEQ ID NO: 2764980 - DNA, 25 bp, Homo sapien
caagcgttgttatagagggatgcag

SEQ ID NO: 2764981 - DNA, 25 bp, Homo sapien
cttggattatgaggtggacctaacg

SEQ ID NO: 2764982 - DNA, 25 bp, Homo sapien
acaccagtgcagatggcccatccag

SEQ ID NO: 2764983 - DNA, 25 bp, Homo sapien
tagtgaaaccacttggcaagactgg

SEQ ID NO: 2764984 - DNA, 25 bp, Homo sapien
tggtgctgatattcaagaagattcc

SEQ ID NO: 2764985 - DNA, 25 bp, Homo sapien
gggagcacacaatctcctaaatgac

SEQ ID NO: 2764986 - DNA, 25 bp, Homo sapien
gatctgagaggagccacaatacaca

SEQ ID NO: 2764987 - DNA, 25 bp, Homo sapien
tgaaatccacccagaattggcagcc

SEQ ID NO: 2764988 - DNA, 25 bp, Homo sapien
tcaaggaagttatcacactgggcca

SEQ ID NO: 2764989 - DNA, 25 bp, Homo sapien
tgggcccaggaagagcactatctga

SEQ ID NO: 2764990 - DNA, 25 bp, Homo sapien
gctgcacttggatgtagcacctttg

SEQ ID NO: 2764991 - DNA, 25 bp, Homo sapien
tgacttgatggcaccagtggcctct

SEQ ID NO: 2764992 - DNA, 25 bp, Homo sapien
ccaccagcggccagtgtctccttgt

SEQ ID NO: 2764993 - DNA, 25 bp, Homo sapien
ccccacatgcattgagggccaccat

SEQ ID NO: 2764994 - DNA, 25 bp, Homo sapien
agaaaagcaagcaagaggacccaga

SEQ ID NO: 2764995 - DNA, 25 bp, Homo sapien
acccagaagcccctatcacagctgt

SEQ ID NO: 2764996 - DNA, 25 bp, Homo sapien
caatcaaaccccctaggagctagga

SEQ ID NO: 2764997 - DNA, 25 bp, Homo sapien
acacccttgccgctcacaatcaaac

SEQ ID NO: 2764998 - DNA, 25 bp, Homo sapien
taggggttccaccagtacagcagag

SEQ ID NO: 2764999 - DNA, 25 bp, Homo sapien
agtacagcagagaactgtgaggcac

SEQ ID NO: 2765000 - DNA, 25 bp, Homo sapien
gcaggctcattggtaggggttccac

SEQ ID NO: 2765001 - DNA, 25 bp, Homo sapien
caggcaggctcattggtaggggttc

SEQ ID NO: 2765002 - DNA, 25 bp, Homo sapien
gcctcgcccacagttaacttgatga

SEQ ID NO: 2765003 - DNA, 25 bp, Homo sapien
cgcccacagttaacttgatgaattt

SEQ ID NO: 2765004 - DNA, 25 bp, Homo sapien
ctcgcccacagttaacttgatgaat

SEQ ID NO: 2765005 - DNA, 25 bp, Homo sapien
ctgcctcgcccacagttaacttgat

SEQ ID NO: 2765006 - DNA, 25 bp, Homo sapien
ttttatgcaactggcaatgcggcaa

SEQ ID NO: 2765007 - DNA, 25 bp, Homo sapien
tattagggtgaaactagcctcacag

SEQ ID NO: 2765008 - DNA, 25 bp, Homo sapien
ttaacaccaggattaccacagagac

SEQ ID NO: 2765009 - DNA, 25 bp, Homo sapien
taatcttatggtaccgcatcatgta

SEQ ID NO: 2765010 - DNA, 25 bp, Homo sapien
cctggttagaggttgatcaatatta

SEQ ID NO: 2765011 - DNA, 25 bp, Homo sapien
tctctacatatgtcctattttcaat

SEQ ID NO: 2765012 - DNA, 25 bp, Homo sapien
tatgctctagtgtttaacttttttc

SEQ ID NO: 2765013 - DNA, 25 bp, Homo sapien
tcttcccacaaactatgattagttg

SEQ ID NO: 2765014 - DNA, 25 bp, Homo sapien
aaagccctaccacaagaagcggaag

SEQ ID NO: 2765015 - DNA, 25 bp, Homo sapien
gaagtatgagttggagcgcccagct

SEQ ID NO: 2765016 - DNA, 25 bp, Homo sapien
taacaagaaataccgtgccctgagg

SEQ ID NO: 2765017 - DNA, 25 bp, Homo sapien
ggtaagatgtcccactacgtgctgc

SEQ ID NO: 2765018 - DNA, 25 bp, Homo sapien
cacagttgctctattgctgtcttac

SEQ ID NO: 2765019 - DNA, 25 bp, Homo sapien
tagtagatgtttaccatatacccca

SEQ ID NO: 2765020 - DNA, 25 bp, Homo sapien
tgtgcctcaaagttcaccattccag

SEQ ID NO: 2765021 - DNA, 25 bp, Homo sapien
tactatatgcacatacaggtcttca

SEQ ID NO: 2765022 - DNA, 25 bp, Homo sapien
ggctgttactacaccgcccttgtat

SEQ ID NO: 2765023 - DNA, 25 bp, Homo sapien
cttcataaaaggatctcattggctg

SEQ ID NO: 2765024 - DNA, 25 bp, Homo sapien
ggcgtttggccatactgaataatga

SEQ ID NO: 2765025 - DNA, 25 bp, Homo sapien
catttgctgacccaacatggcgttt

SEQ ID NO: 2765026 - DNA, 25 bp, Homo sapien
cagcttgaattcttgtatgcgggcc

SEQ ID NO: 2765027 - DNA, 25 bp, Homo sapien
tatgcgggccagattccaagagaca

SEQ ID NO: 2765028 - DNA, 25 bp, Homo sapien
tgaattccagtgaatccgattggga

SEQ ID NO: 2765029 - DNA, 25 bp, Homo sapien
gatcccagaagactacatggcagct

SEQ ID NO: 2765030 - DNA, 25 bp, Homo sapien
gaaacacacggattgaaatataagg

SEQ ID NO: 2765031 - DNA, 25 bp, Homo sapien
tcaaaggctagtaggaaagatgttt

SEQ ID NO: 2765032 - DNA, 25 bp, Homo sapien
gatggcgttattttgataaaaccca

SEQ ID NO: 2765033 - DNA, 25 bp, Homo sapien
cccaactctagcttgatgagatgtc

SEQ ID NO: 2765034 - DNA, 25 bp, Homo sapien
ccggcccataaccgtctgtcctgtt

SEQ ID NO: 2765035 - DNA, 25 bp, Homo sapien
cccataaccgtctgtcctgttttct

SEQ ID NO: 2765036 - DNA, 25 bp, Homo sapien
cggcccataaccgtctgtcctgttt

SEQ ID NO: 2765037 - DNA, 25 bp, Homo sapien
gcccataaccgtctgtcctgttttc

SEQ ID NO: 2765038 - DNA, 25 bp, Homo sapien
gcacaggagtagtaacattcaatca

SEQ ID NO: 2765039 - DNA, 25 bp, Homo sapien
cacaggagtagtaacattcaatcat

SEQ ID NO: 2765040 - DNA, 25 bp, Homo sapien
atggcatcaggcaaagcaagagctt

SEQ ID NO: 2765041 - DNA, 25 bp, Homo sapien
gcatcaggcaaagcaagagcttgtg

SEQ ID NO: 2765042 - DNA, 25 bp, Homo sapien
ttaaattggattatgaggaagtctt

SEQ ID NO: 2765043 - DNA, 25 bp, Homo sapien
taaattggattatgaggaagtcttc

SEQ ID NO: 2765044 - DNA, 25 bp, Homo sapien
acaacatcgagcgtattcagggtgg

SEQ ID NO: 2765045 - DNA, 25 bp, Homo sapien
aatgagacaacatcgagcgtattca

SEQ ID NO: 2765046 - DNA, 25 bp, Homo sapien
caaaatgagacaacatcgagcgtat

SEQ ID NO: 2765047 - DNA, 25 bp, Homo sapien
tgagacaacatcgagcgtattcagg

SEQ ID NO: 2765048 - DNA, 25 bp, Homo sapien
cctgagagcacaccaacagacaaca

SEQ ID NO: 2765049 - DNA, 25 bp, Homo sapien
gttcttgtatcgtttccaccctgag

SEQ ID NO: 2765050 - DNA, 25 bp, Homo sapien
cccaagtgacgactgggcaaagttt

SEQ ID NO: 2765051 - DNA, 25 bp, Homo sapien
ctgtaagtgtaacgttcttgtatcg

SEQ ID NO: 2765052 - DNA, 25 bp, Homo sapien
tccggtagctcatcaagagtcttca

SEQ ID NO: 2765053 - DNA, 25 bp, Homo sapien
taagagcattgagaaaccatcctcc

SEQ ID NO: 2765054 - DNA, 25 bp, Homo sapien
aaaccctcatcttgagaaactttat

SEQ ID NO: 2765055 - DNA, 25 bp, Homo sapien
ttctccagacttaacagaaagcata

SEQ ID NO: 2765056 - DNA, 25 bp, Homo sapien
tagagactcataaggaccttgaggc

SEQ ID NO: 2765057 - DNA, 25 bp, Homo sapien
aagaaacttgctcagtctgctggca

SEQ ID NO: 2765058 - DNA, 25 bp, Homo sapien
tctgtcttagtctttgaagctagaa

SEQ ID NO: 2765059 - DNA, 25 bp, Homo sapien
ctagtctggaaacaggataagaaac

SEQ ID NO: 2765060 - DNA, 25 bp, Homo sapien
gaagctagaagttgcaaatttggca

SEQ ID NO: 2765061 - DNA, 25 bp, Homo sapien
aatagccaatgaataggtcaaaggc

SEQ ID NO: 2765062 - DNA, 25 bp, Homo sapien
gatctataggatcctgtctctctca

SEQ ID NO: 2765063 - DNA, 25 bp, Homo sapien
aaagcctcaccagacagcatcagtg

SEQ ID NO: 2765064 - DNA, 25 bp, Homo sapien
tccttccaaccgcaagagaggtaaa

SEQ ID NO: 2765065 - DNA, 25 bp, Homo sapien
cacacagactgctttgcatgagtcg

SEQ ID NO: 2765066 - DNA, 25 bp, Homo sapien
tatagcatcccccaggtgaaatctt

SEQ ID NO: 2765067 - DNA, 25 bp, Homo sapien
gcatgagtcgaaccatgagtggtca

SEQ ID NO: 2765068 - DNA, 25 bp, Homo sapien
tggtcaggatggacttatagcatcc

SEQ ID NO: 2765069 - DNA, 25 bp, Homo sapien
gcttcgcgttccaactccctggaaa

SEQ ID NO: 2765070 - DNA, 25 bp, Homo sapien
caacttgcggtcacgaatccaatca

SEQ ID NO: 2765071 - DNA, 25 bp, Homo sapien
tctgttgtcccaagccaacttgcgg

SEQ ID NO: 2765072 - DNA, 25 bp, Homo sapien
gaacatctttgacgaatcttcgcca

SEQ ID NO: 2765073 - DNA, 25 bp, Homo sapien
cagagaagttaacctctgggcttcc

SEQ ID NO: 2765074 - DNA, 25 bp, Homo sapien
gggcttcccatatgttctagctctt

SEQ ID NO: 2765075 - DNA, 25 bp, Homo sapien
gattagtccagctacttcatcatcc

SEQ ID NO: 2765076 - DNA, 25 bp, Homo sapien
tccacagggagagctcttcttggga

SEQ ID NO: 2765077 - DNA, 25 bp, Homo sapien
taagcacctatagtacacagaacag

SEQ ID NO: 2765078 - DNA, 25 bp, Homo sapien
caatgcttttgatatccgggtaagg

SEQ ID NO: 2765079 - DNA, 25 bp, Homo sapien
gggtaaggccacatatcaaagtcca

SEQ ID NO: 2765080 - DNA, 25 bp, Homo sapien
tcagtgggtagaggtcaaggatcct

SEQ ID NO: 2765081 - DNA, 25 bp, Homo sapien
cagcagtccattggtacaggccaca

SEQ ID NO: 2765082 - DNA, 25 bp, Homo sapien
gaaatctgtaaccacatgtaggcca

SEQ ID NO: 2765083 - DNA, 25 bp, Homo sapien
tggaagcaactggaggccaatggcc

SEQ ID NO: 2765084 - DNA, 25 bp, Homo sapien
aaagtgtgtgcctccaacacaaggg

SEQ ID NO: 2765085 - DNA, 25 bp, Homo sapien
aaaatgtctcaacgaatctcctggg

SEQ ID NO: 2765086 - DNA, 25 bp, Homo sapien
tgtagcagtacgtgaagccccacat

SEQ ID NO: 2765087 - DNA, 25 bp, Homo sapien
cacatagggtgtactcttaggccag

SEQ ID NO: 2765088 - DNA, 25 bp, Homo sapien
tgatcagaaccatgactatgcccct

SEQ ID NO: 2765089 - DNA, 25 bp, Homo sapien
aatgggaacacctggacactggaag

SEQ ID NO: 2765090 - DNA, 25 bp, Homo sapien
aacaatgggaacacctggacactgg

SEQ ID NO: 2765091 - DNA, 25 bp, Homo sapien
caatgggaacacctggacactggaa

SEQ ID NO: 2765092 - DNA, 25 bp, Homo sapien
tgaacaatgggaacacctggacact

SEQ ID NO: 2765093 - DNA, 25 bp, Homo sapien
gctgtgcgataggtttacatcttcc

SEQ ID NO: 2765094 - DNA, 25 bp, Homo sapien
taactcctggaatatcaagcactac

SEQ ID NO: 2765095 - DNA, 25 bp, Homo sapien
cgtgaagttttcaatcaaggagata

SEQ ID NO: 2765096 - DNA, 25 bp, Homo sapien
ccagctgttcaggagactgtggcga

SEQ ID NO: 2765097 - DNA, 25 bp, Homo sapien
tggaaagtataaccctgaaggcgga

SEQ ID NO: 2765098 - DNA, 25 bp, Homo sapien
ggtcgattcaccactacagacaggg

SEQ ID NO: 2765099 - DNA, 25 bp, Homo sapien
ttgcgggcgctatggaaatgctcct

SEQ ID NO: 2765100 - DNA, 25 bp, Homo sapien
ggatacaatcccagcgacacaggtt

SEQ ID NO: 2765101 - DNA, 25 bp, Homo sapien
catgtcgcacatggatcctgtgcta

SEQ ID NO: 2765102 - DNA, 25 bp, Homo sapien
cagcttctcatagagctgggagaac

SEQ ID NO: 2765103 - DNA, 25 bp, Homo sapien
tatctctgttactgctgaatgtcct

SEQ ID NO: 2765104 - DNA, 25 bp, Homo sapien
caaagattaacctacttgttgccca

SEQ ID NO: 2765105 - DNA, 25 bp, Homo sapien
ttgcacccctgactacctgacattc

SEQ ID NO: 2765106 - DNA, 25 bp, Homo sapien
cacccctgactacctgacattccag

SEQ ID NO: 2765107 - DNA, 25 bp, Homo sapien
ctgactacctgacattccagctatg

SEQ ID NO: 2765108 - DNA, 25 bp, Homo sapien
gccttgcacccctgactacctgaca

SEQ ID NO: 2765109 - DNA, 25 bp, Homo sapien
tcaggagtggcactgattgaaatat

SEQ ID NO: 2765110 - DNA, 25 bp, Homo sapien
gaccatattctgagctcaagaacac

SEQ ID NO: 2765111 - DNA, 25 bp, Homo sapien
tttgattcaggagtggcactgattg

SEQ ID NO: 2765112 - DNA, 25 bp, Homo sapien
attgaaatatgggacatcatgacca

SEQ ID NO: 2765113 - DNA, 25 bp, Homo sapien
tacccaggaccaagaactatatttc

SEQ ID NO: 2765114 - DNA, 25 bp, Homo sapien
aatatcttgtacttaactacccaca

SEQ ID NO: 2765115 - DNA, 25 bp, Homo sapien
tggcctcataaatcatccctaatag

SEQ ID NO: 2765116 - DNA, 25 bp, Homo sapien
aaaagtagaagtctgtggcctcata

SEQ ID NO: 2765117 - DNA, 25 bp, Homo sapien
caggtacttcagtatggtaggtaaa

SEQ ID NO: 2765118 - DNA, 25 bp, Homo sapien
gttaatagtatagcagaccaatgtc

SEQ ID NO: 2765119 - DNA, 25 bp, Homo sapien
gaacttgagcatggagatgcatacc

SEQ ID NO: 2765120 - DNA, 25 bp, Homo sapien
gttctgccatagtgaaaattccata

SEQ ID NO: 2765121 - DNA, 25 bp, Homo sapien
tctgaataggtcaacctgcaggcgt

SEQ ID NO: 2765122 - DNA, 25 bp, Homo sapien
ggcactgttaatatccgcacaagag

SEQ ID NO: 2765123 - DNA, 25 bp, Homo sapien
tacagcagctcaaagagttccgcag

SEQ ID NO: 2765124 - DNA, 25 bp, Homo sapien
catttctgaaactatcgagcggcta

SEQ ID NO: 2765125 - DNA, 25 bp, Homo sapien
cctccttgttagaatgatattttaa

SEQ ID NO: 2765126 - DNA, 25 bp, Homo sapien
taaatggtgattgaaaggacagcac

SEQ ID NO: 2765127 - DNA, 25 bp, Homo sapien
caaattccctattttctcataaggg

SEQ ID NO: 2765128 - DNA, 25 bp, Homo sapien
tcttatgtggataaatactaattcc

SEQ ID NO: 2765129 - DNA, 25 bp, Homo sapien
tcattgtctccccagccattgcaag

SEQ ID NO: 2765130 - DNA, 25 bp, Homo sapien
aatgctgcattagtgcggtgtaggc

SEQ ID NO: 2765131 - DNA, 25 bp, Homo sapien
cacttacatgctcccctgtgggctg

SEQ ID NO: 2765132 - DNA, 25 bp, Homo sapien
tccttaaggtgttatgctccctggg

SEQ ID NO: 2765133 - DNA, 25 bp, Homo sapien
tctgggcattcaattcccggtaatc

SEQ ID NO: 2765134 - DNA, 25 bp, Homo sapien
ctgggcattcaattcccggtaatcc

SEQ ID NO: 2765135 - DNA, 25 bp, Homo sapien
taacactgtcgtactgatgtggaaa

SEQ ID NO: 2765136 - DNA, 25 bp, Homo sapien
ttctgggcattcaattcccggtaat

SEQ ID NO: 2765137 - DNA, 25 bp, Homo sapien
aggtcccaggatgggcaggagcaca

SEQ ID NO: 2765138 - DNA, 25 bp, Homo sapien
ccaggatgggcaggagcacaccaac

SEQ ID NO: 2765139 - DNA, 25 bp, Homo sapien
caggtcccaggatgggcaggagcac

SEQ ID NO: 2765140 - DNA, 25 bp, Homo sapien
ggatgggcaggagcacaccaaccac

SEQ ID NO: 2765141 - DNA, 25 bp, Homo sapien
tccctgagcatgacctgtgtgttct

SEQ ID NO: 2765142 - DNA, 25 bp, Homo sapien
ccctgagcatgacctgtgtgttctt

SEQ ID NO: 2765143 - DNA, 25 bp, Homo sapien
ctgagcatgacctgtgtgttcttac

SEQ ID NO: 2765144 - DNA, 25 bp, Homo sapien
gtccctgagcatgacctgtgtgttc

SEQ ID NO: 2765145 - DNA, 25 bp, Homo sapien
ttcctcctccttcaagacatctttt

SEQ ID NO: 2765146 - DNA, 25 bp, Homo sapien
ctcccctactccagctcttttatgt

SEQ ID NO: 2765147 - DNA, 25 bp, Homo sapien
actccagctcttttatgtttgctgc

SEQ ID NO: 2765148 - DNA, 25 bp, Homo sapien
ccctactccagctcttttatgtttg

SEQ ID NO: 2765149 - DNA, 25 bp, Homo sapien
tgaagacagtcaccagggtacagct

SEQ ID NO: 2765150 - DNA, 25 bp, Homo sapien
ctcccatgttgttagggttgagcag

SEQ ID NO: 2765151 - DNA, 25 bp, Homo sapien
catatggaattgagtagcttggcca

SEQ ID NO: 2765152 - DNA, 25 bp, Homo sapien
gcttgtgaccaaggcaatgatgatg

SEQ ID NO: 2765153 - DNA, 25 bp, Homo sapien
gaagaggttcgagaaaagaaggcaa

SEQ ID NO: 2765154 - DNA, 25 bp, Homo sapien
tggaagaggttcgagaaaagaaggc

SEQ ID NO: 2765155 - DNA, 25 bp, Homo sapien
ctggaagaggttcgagaaaagaagg

SEQ ID NO: 2765156 - DNA, 25 bp, Homo sapien
ggaagaggttcgagaaaagaaggca

SEQ ID NO: 2765157 - DNA, 25 bp, Homo sapien
ggtgatcttaggaaataaaagcaag

SEQ ID NO: 2765158 - DNA, 25 bp, Homo sapien
gcaaatctggcagtgtgttatagag

SEQ ID NO: 2765159 - DNA, 25 bp, Homo sapien
tctggcagtgtgttatagagcttgc

SEQ ID NO: 2765160 - DNA, 25 bp, Homo sapien
gaggtgatcttaggaaataaaagca

SEQ ID NO: 2765161 - DNA, 25 bp, Homo sapien
catacaaagcatgcagaatcctccc

SEQ ID NO: 2765162 - DNA, 25 bp, Homo sapien
ggcccagtggtcttaactcctttgc

SEQ ID NO: 2765163 - DNA, 25 bp, Homo sapien
tcagagctgtgcataggtgagggtg

SEQ ID NO: 2765164 - DNA, 25 bp, Homo sapien
atcctcccagattggtgcatctgaa

SEQ ID NO: 2765165 - DNA, 25 bp, Homo sapien
taggttagagccgtggttctccaag

SEQ ID NO: 2765166 - DNA, 25 bp, Homo sapien
cagagggcagatagatgcatggcat

SEQ ID NO: 2765167 - DNA, 25 bp, Homo sapien
tgtgacatgggcaccagaggtgtct

SEQ ID NO: 2765168 - DNA, 25 bp, Homo sapien
taaatgggccttcgggaatgtgaca

SEQ ID NO: 2765169 - DNA, 25 bp, Homo sapien
catgagactcctattaactgaggtt

SEQ ID NO: 2765170 - DNA, 25 bp, Homo sapien
tgaaagtttgatggccatgagactc

SEQ ID NO: 2765171 - DNA, 25 bp, Homo sapien
cagatctccagctacttgccatggg

SEQ ID NO: 2765172 - DNA, 25 bp, Homo sapien
tactgaagccgatattttgatctgg

SEQ ID NO: 2765173 - DNA, 25 bp, Homo sapien
gtgactcatctgatgatgtactggt

SEQ ID NO: 2765174 - DNA, 25 bp, Homo sapien
caaaggaggcactgaaacgatttcc

SEQ ID NO: 2765175 - DNA, 25 bp, Homo sapien
cacacagagggaggttatgattaca

SEQ ID NO: 2765176 - DNA, 25 bp, Homo sapien
gaataagcagtacagacaacaggag

SEQ ID NO: 2765177 - DNA, 25 bp, Homo sapien
tgggctgggccgtgtatgtcataca

SEQ ID NO: 2765178 - DNA, 25 bp, Homo sapien
tgatgacacgtatttgaccctatgc

SEQ ID NO: 2765179 - DNA, 25 bp, Homo sapien
gaaagactacactacacttcaggga

SEQ ID NO: 2765180 - DNA, 25 bp, Homo sapien
gcaacagatgataccaacaggacag

SEQ ID NO: 2765181 - DNA, 25 bp, Homo sapien
catcactgagtgatcgccaaggcaa

SEQ ID NO: 2765182 - DNA, 25 bp, Homo sapien
gtttgcactatgttcttgtacttag

SEQ ID NO: 2765183 - DNA, 25 bp, Homo sapien
tgaggagtagatcccctttacctta

SEQ ID NO: 2765184 - DNA, 25 bp, Homo sapien
gtacactgaggagtagatccccttt

SEQ ID NO: 2765185 - DNA, 25 bp, Homo sapien
gcactatgttcttgtacttagtaca

SEQ ID NO: 2765186 - DNA, 25 bp, Homo sapien
tttggagcaaccgttgccttctttg

SEQ ID NO: 2765187 - DNA, 25 bp, Homo sapien
tgacttttggagcaaccgttgcctt

SEQ ID NO: 2765188 - DNA, 25 bp, Homo sapien
ggagcaaccgttgccttctttgcct

SEQ ID NO: 2765189 - DNA, 25 bp, Homo sapien
cttttgacttttggagcaaccgttg

SEQ ID NO: 2765190 - DNA, 25 bp, Homo sapien
gtgggcacagaacatttcttcatgg

SEQ ID NO: 2765191 - DNA, 25 bp, Homo sapien
ggtgggcacagaacatttcttcatg

SEQ ID NO: 2765192 - DNA, 25 bp, Homo sapien
tcctctaactagctctgggaaagtg

SEQ ID NO: 2765193 - DNA, 25 bp, Homo sapien
cacacatttgtacgggtggttctca

SEQ ID NO: 2765194 - DNA, 25 bp, Homo sapien
tacgggtggttctcagatggcactg

SEQ ID NO: 2765195 - DNA, 25 bp, Homo sapien
catacatgagtcagggaacgagagt

SEQ ID NO: 2765196 - DNA, 25 bp, Homo sapien
aaagccgccccagtttcttagccag

SEQ ID NO: 2765197 - DNA, 25 bp, Homo sapien
tgtgcactgctgatcggaacaaggc

SEQ ID NO: 2765198 - DNA, 25 bp, Homo sapien
tgcactgctgatcggaacaaggcaa

SEQ ID NO: 2765199 - DNA, 25 bp, Homo sapien
tccaagcatcacaaagccgccccag

SEQ ID NO: 2765200 - DNA, 25 bp, Homo sapien
ggtggggcggctctttgccccacaa

SEQ ID NO: 2765201 - DNA, 25 bp, Homo sapien
ctgtgtctgtgagtgctctagggtt

SEQ ID NO: 2765202 - DNA, 25 bp, Homo sapien
acaatctcgtcgctgtgtctgtgag

SEQ ID NO: 2765203 - DNA, 25 bp, Homo sapien
tttgccccacaatctcgtcgctgtg

SEQ ID NO: 2765204 - DNA, 25 bp, Homo sapien
ccctctgagggcacacattggacag

SEQ ID NO: 2765205 - DNA, 25 bp, Homo sapien
ctggaggtctgggtttgtgatcaca

SEQ ID NO: 2765206 - DNA, 25 bp, Homo sapien
gatcacatagacattggtcttggtc

SEQ ID NO: 2765207 - DNA, 25 bp, Homo sapien
gcacacattggacagtcctcttctg

SEQ ID NO: 2765208 - DNA, 25 bp, Homo sapien
acagcacaggtgctcattgcaagac

SEQ ID NO: 2765209 - DNA, 25 bp, Homo sapien
caggtcccagttcccagtggcccag

SEQ ID NO: 2765210 - DNA, 25 bp, Homo sapien
gacagcacaggtgctcattgcaaga

SEQ ID NO: 2765211 - DNA, 25 bp, Homo sapien
aggtcccagttcccagtggcccagt

SEQ ID NO: 2765212 - DNA, 25 bp, Homo sapien
ttaggtaaaagtcaggtggagacat

SEQ ID NO: 2765213 - DNA, 25 bp, Homo sapien
aagattaggtaaaagtcaggtggag

SEQ ID NO: 2765214 - DNA, 25 bp, Homo sapien
gattaggtaaaagtcaggtggagac

SEQ ID NO: 2765215 - DNA, 25 bp, Homo sapien
caagattaggtaaaagtcaggtgga

SEQ ID NO: 2765216 - DNA, 25 bp, Homo sapien
cagggctccgggttacagctcatgc

SEQ ID NO: 2765217 - DNA, 25 bp, Homo sapien
tgaatctcgcgtatcttgaagcccc

SEQ ID NO: 2765218 - DNA, 25 bp, Homo sapien
atggcctcaggttccggtggtcccg

SEQ ID NO: 2765219 - DNA, 25 bp, Homo sapien
ggtggtcccggctgtccacgcactg

SEQ ID NO: 2765220 - DNA, 25 bp, Homo sapien
ggatggccgcacagtcagaatccat

SEQ ID NO: 2765221 - DNA, 25 bp, Homo sapien
gcacagggacggaggtggcatcttt

SEQ ID NO: 2765222 - DNA, 25 bp, Homo sapien
tcaggtctctggatggccgcacagt

SEQ ID NO: 2765223 - DNA, 25 bp, Homo sapien
ctttttgcagggtcaggtctctgga

SEQ ID NO: 2765224 - DNA, 25 bp, Homo sapien
tgactcattacggagagaggcaatc

SEQ ID NO: 2765225 - DNA, 25 bp, Homo sapien
gggacagtgaggaactcaaaactca

SEQ ID NO: 2765226 - DNA, 25 bp, Homo sapien
tatcaatggtgattctacgggctct

SEQ ID NO: 2765227 - DNA, 25 bp, Homo sapien
tacgggctctaagttgtggtgattg

SEQ ID NO: 2765228 - DNA, 25 bp, Homo sapien
tgcgggaagatgacaagccagaacc

SEQ ID NO: 2765229 - DNA, 25 bp, Homo sapien
cagtttccgacgatccagtgtgcag

SEQ ID NO: 2765230 - DNA, 25 bp, Homo sapien
cattactgtgctgaagggtggccac

SEQ ID NO: 2765231 - DNA, 25 bp, Homo sapien
tagaagggcattgctggaggccaca

SEQ ID NO: 2765232 - DNA, 25 bp, Homo sapien
agctgaaggagtgtcgaactgtgtt

SEQ ID NO: 2765233 - DNA, 25 bp, Homo sapien
gtcgaactgtgtttggacccaacca

SEQ ID NO: 2765234 - DNA, 25 bp, Homo sapien
aaggagtgtcgaactgtgtttggac

SEQ ID NO: 2765235 - DNA, 25 bp, Homo sapien
actgtgtttggacccaaccagtgaa

SEQ ID NO: 2765236 - DNA, 25 bp, Homo sapien
gggtgaaaaggctcacaattggcac

SEQ ID NO: 2765237 - DNA, 25 bp, Homo sapien
tgggtgaaaaggctcacaattggca

SEQ ID NO: 2765238 - DNA, 25 bp, Homo sapien
gtgggtgaaaaggctcacaattggc

SEQ ID NO: 2765239 - DNA, 25 bp, Homo sapien
tggtgggtgaaaaggctcacaattg

SEQ ID NO: 2765240 - DNA, 25 bp, Homo sapien
gggcaaaaccaggataagattcttg

SEQ ID NO: 2765241 - DNA, 25 bp, Homo sapien
ctggtctctgtttacaatagagttc

SEQ ID NO: 2765242 - DNA, 25 bp, Homo sapien
caaaaccaggataagattcttggta

SEQ ID NO: 2765243 - DNA, 25 bp, Homo sapien
ggtctctgtttacaatagagttccc

SEQ ID NO: 2765244 - DNA, 25 bp, Homo sapien
tgagattggaggtgagagtcaggta

SEQ ID NO: 2765245 - DNA, 25 bp, Homo sapien
gagattggaggtgagagtcaggtat

SEQ ID NO: 2765246 - DNA, 25 bp, Homo sapien
ctgagattggaggtgagagtcaggt

SEQ ID NO: 2765247 - DNA, 25 bp, Homo sapien
ggagagcctgctcgtcagagaccat

SEQ ID NO: 2765248 - DNA, 25 bp, Homo sapien
gaccatggtctggatgcacagcacg

SEQ ID NO: 2765249 - DNA, 25 bp, Homo sapien
gggcccgcatgtcgccgagcatgct

SEQ ID NO: 2765250 - DNA, 25 bp, Homo sapien
ggaaaggagggtcttgggcttcagc

SEQ ID NO: 2765251 - DNA, 25 bp, Homo sapien
cagtctcaacgatcttattcctttc

SEQ ID NO: 2765252 - DNA, 25 bp, Homo sapien
cctttcatttcgatcagaaggtctc

SEQ ID NO: 2765253 - DNA, 25 bp, Homo sapien
gctctgtgtacccattgtctccata

SEQ ID NO: 2765254 - DNA, 25 bp, Homo sapien
tgggcttttcccagtctcaacgatc

SEQ ID NO: 2765255 - DNA, 25 bp, Homo sapien
ggtggacaagccttttcatggcact

SEQ ID NO: 2765256 - DNA, 25 bp, Homo sapien
tcccattgggctgtgtttctgggtc

SEQ ID NO: 2765257 - DNA, 25 bp, Homo sapien
tgtctcccattgggctgtgtttctg

SEQ ID NO: 2765258 - DNA, 25 bp, Homo sapien
ctgggtggacaagccttttcatggc

SEQ ID NO: 2765259 - DNA, 25 bp, Homo sapien
cccgcggcccttctttatgcaatgg

SEQ ID NO: 2765260 - DNA, 25 bp, Homo sapien
caatgggcagtttggcggcggatac

SEQ ID NO: 2765261 - DNA, 25 bp, Homo sapien
tgcaatgggcagtttggcggcggat

SEQ ID NO: 2765262 - DNA, 25 bp, Homo sapien
ggcccttctttatgcaatgggcagt

SEQ ID NO: 2765263 - DNA, 25 bp, Homo sapien
aactgtggaaagtcggctggctctc

SEQ ID NO: 2765264 - DNA, 25 bp, Homo sapien
aagtaaaagcaaatgccgctgaggg

SEQ ID NO: 2765265 - DNA, 25 bp, Homo sapien
tcactggtgttctctgagagtgccc

SEQ ID NO: 2765266 - DNA, 25 bp, Homo sapien
taaattcccctaaagtcagagcgtc

SEQ ID NO: 2765267 - DNA, 25 bp, Homo sapien
caatcatgacaaatcctggtcctga

SEQ ID NO: 2765268 - DNA, 25 bp, Homo sapien
ggctctgcagtgtggtcaagtaaaa

SEQ ID NO: 2765269 - DNA, 25 bp, Homo sapien
caatgtcaccatgagacaacagttc

SEQ ID NO: 2765270 - DNA, 25 bp, Homo sapien
gctggctccatcactttatccggta

SEQ ID NO: 2765271 - DNA, 25 bp, Homo sapien
aaatcatgatatattcacggaacgg

SEQ ID NO: 2765272 - DNA, 25 bp, Homo sapien
tcacggaacggaatagtacacaacc

SEQ ID NO: 2765273 - DNA, 25 bp, Homo sapien
gctgcaaaatagtagcatgtataaa

SEQ ID NO: 2765274 - DNA, 25 bp, Homo sapien
taatcataaggcattcattacagaa

SEQ ID NO: 2765275 - DNA, 25 bp, Homo sapien
catagtgagagcagctgtttctcac

SEQ ID NO: 2765276 - DNA, 25 bp, Homo sapien
tcatagtgagagcagctgtttctca

SEQ ID NO: 2765277 - DNA, 25 bp, Homo sapien
tgctgctcaacatcattgtcaaggc

SEQ ID NO: 2765278 - DNA, 25 bp, Homo sapien
catacttgatgccagggttagtcac

SEQ ID NO: 2765279 - DNA, 25 bp, Homo sapien
tctttctggattgtgtactcatact

SEQ ID NO: 2765280 - DNA, 25 bp, Homo sapien
cagtggccgtactgccagaagtaca

SEQ ID NO: 2765281 - DNA, 25 bp, Homo sapien
tggatccacacagactcattggtgg

SEQ ID NO: 2765282 - DNA, 25 bp, Homo sapien
ggataataaaccctccattcaggta

SEQ ID NO: 2765283 - DNA, 25 bp, Homo sapien
tgatggccaggaagtttccagctcc

SEQ ID NO: 2765284 - DNA, 25 bp, Homo sapien
agtccctgccagcttatagttcccg

SEQ ID NO: 2765285 - DNA, 25 bp, Homo sapien
ttttggaatgagcccaatgtcaaca

SEQ ID NO: 2765286 - DNA, 25 bp, Homo sapien
ccttttggaatgagcccaatgtcaa

SEQ ID NO: 2765287 - DNA, 25 bp, Homo sapien
tccttttggaatgagcccaatgtca

SEQ ID NO: 2765288 - DNA, 25 bp, Homo sapien
cttttggaatgagcccaatgtcaac

SEQ ID NO: 2765289 - DNA, 25 bp, Homo sapien
aaagtgcctcaatttcttcatcttc

SEQ ID NO: 2765290 - DNA, 25 bp, Homo sapien
agtgcctcaatttcttcatcttcct

SEQ ID NO: 2765291 - DNA, 25 bp, Homo sapien
tgaaagtgcctcaatttcttcatct

SEQ ID NO: 2765292 - DNA, 25 bp, Homo sapien
ctgaaagtgcctcaatttcttcatc

SEQ ID NO: 2765293 - DNA, 25 bp, Homo sapien
cctgaggactatccatagcccaaag

SEQ ID NO: 2765294 - DNA, 25 bp, Homo sapien
tcatgccctgaggactatccatagc

SEQ ID NO: 2765295 - DNA, 25 bp, Homo sapien
tcttcatgccctgaggactatccat

SEQ ID NO: 2765296 - DNA, 25 bp, Homo sapien
gtgaactcttcatgccctgaggact

SEQ ID NO: 2765297 - DNA, 25 bp, Homo sapien
ctttggtcccctgccacttcgatta

SEQ ID NO: 2765298 - DNA, 25 bp, Homo sapien
ttggtcccctgccacttcgattatt

SEQ ID NO: 2765299 - DNA, 25 bp, Homo sapien
ggtcccctgccacttcgattattta

SEQ ID NO: 2765300 - DNA, 25 bp, Homo sapien
tcccctgccacttcgattatttatt

SEQ ID NO: 2765301 - DNA, 25 bp, Homo sapien
gtctggcaggaagagccatctccca

SEQ ID NO: 2765302 - DNA, 25 bp, Homo sapien
tctggcaggaagagccatctcccag

SEQ ID NO: 2765303 - DNA, 25 bp, Homo sapien
ctggcaggaagagccatctcccagg

SEQ ID NO: 2765304 - DNA, 25 bp, Homo sapien
cgcagcgatcctcggtggcattgga

SEQ ID NO: 2765305 - DNA, 25 bp, Homo sapien
cattggaatcgatctcatagtcaca

SEQ ID NO: 2765306 - DNA, 25 bp, Homo sapien
gaatcgatctcatagtcacagccaa

SEQ ID NO: 2765307 - DNA, 25 bp, Homo sapien
tcctcggtggcattggaatcgatct

SEQ ID NO: 2765308 - DNA, 25 bp, Homo sapien
ccatctatgggtcggcagtagagct

SEQ ID NO: 2765309 - DNA, 25 bp, Homo sapien
gcaaggggtaccatcaatgacagca

SEQ ID NO: 2765310 - DNA, 25 bp, Homo sapien
ggtcggcagtagagctcacaaggat

SEQ ID NO: 2765311 - DNA, 25 bp, Homo sapien
cagaaaactggccatctatgggtcg

SEQ ID NO: 2765312 - DNA, 25 bp, Homo sapien
cgaaatgttggtgcctctgagcgac

SEQ ID NO: 2765313 - DNA, 25 bp, Homo sapien
ggaaaccagtggtagagttcattct

SEQ ID NO: 2765314 - DNA, 25 bp, Homo sapien
cattcttgtagggaacagtgtcaaa

SEQ ID NO: 2765315 - DNA, 25 bp, Homo sapien
tggacgttgcacaagcgatagcgtt

SEQ ID NO: 2765316 - DNA, 25 bp, Homo sapien
cagccccacaggtcctggaacagtg

SEQ ID NO: 2765317 - DNA, 25 bp, Homo sapien
tgatgcacttgcctgccatacacca

SEQ ID NO: 2765318 - DNA, 25 bp, Homo sapien
tgcagagcctctctgcgctctggac

SEQ ID NO: 2765319 - DNA, 25 bp, Homo sapien
ctgtgatgcacttgcctgccataca

SEQ ID NO: 2765320 - DNA, 25 bp, Homo sapien
tcacggagcaccacagtgtctggca

SEQ ID NO: 2765321 - DNA, 25 bp, Homo sapien
ccttcacggagcaccacagtgtctg

SEQ ID NO: 2765322 - DNA, 25 bp, Homo sapien
atctgcagcagcgtccagcttagag

SEQ ID NO: 2765323 - DNA, 25 bp, Homo sapien
tagagcgacaaaagcccttcacgga

SEQ ID NO: 2765324 - DNA, 25 bp, Homo sapien
taggtatgtcatcaagacagaaccc

SEQ ID NO: 2765325 - DNA, 25 bp, Homo sapien
cattgggtccatattgtagctggca

SEQ ID NO: 2765326 - DNA, 25 bp, Homo sapien
ggtgaacatcatagatcactccggg

SEQ ID NO: 2765327 - DNA, 25 bp, Homo sapien
cttcaagcctttctttttaggtatg

SEQ ID NO: 2765328 - DNA, 25 bp, Homo sapien
catgatgtacggatgtctgcccaca

SEQ ID NO: 2765329 - DNA, 25 bp, Homo sapien
tttcccatcatgctggatgccgaag

SEQ ID NO: 2765330 - DNA, 25 bp, Homo sapien
tgcacttggaccatgtcagcggagt

SEQ ID NO: 2765331 - DNA, 25 bp, Homo sapien
tgatgtactcctcgctgcacttgga

SEQ ID NO: 2765332 - DNA, 25 bp, Homo sapien
caactgcggtgaggctgacacattc

SEQ ID NO: 2765333 - DNA, 25 bp, Homo sapien
gcaattgtgaaagccagagggagtc

SEQ ID NO: 2765334 - DNA, 25 bp, Homo sapien
tgacacattcctgaaaggtgagaca

SEQ ID NO: 2765335 - DNA, 25 bp, Homo sapien
tgtcctagctcatgggcaattgtga

SEQ ID NO: 2765336 - DNA, 25 bp, Homo sapien
ctccctgctttactgcccctgggtt

SEQ ID NO: 2765337 - DNA, 25 bp, Homo sapien
cctccctgctttactgcccctgggt

SEQ ID NO: 2765338 - DNA, 25 bp, Homo sapien
gagaaggacagccacgtcgtgatga

SEQ ID NO: 2765339 - DNA, 25 bp, Homo sapien
cacgtcgtgatgaacaggattgagg

SEQ ID NO: 2765340 - DNA, 25 bp, Homo sapien
gaggtcactcttgggattgatactc

SEQ ID NO: 2765341 - DNA, 25 bp, Homo sapien
gattgatactcttctgccacttgca

SEQ ID NO: 2765342 - DNA, 25 bp, Homo sapien
cttccagatgttgcattccaaatgc

SEQ ID NO: 2765343 - DNA, 25 bp, Homo sapien
caaatgctgcctccaatgttttcat

SEQ ID NO: 2765344 - DNA, 25 bp, Homo sapien
attccaaatgctgcctccaatgttt

SEQ ID NO: 2765345 - DNA, 25 bp, Homo sapien
ggagaaagcagagtcatcttccaga

SEQ ID NO: 2765346 - DNA, 25 bp, Homo sapien
gcatagtcacctaggatgggattca

SEQ ID NO: 2765347 - DNA, 25 bp, Homo sapien
gactcaacactaaaccactctcagt

SEQ ID NO: 2765348 - DNA, 25 bp, Homo sapien
tgaaagaacaatacagacccacaca

SEQ ID NO: 2765349 - DNA, 25 bp, Homo sapien
gctcctccactggatggcatagtca

SEQ ID NO: 2765350 - DNA, 25 bp, Homo sapien
tttctggtaccctctttcttgtcta

SEQ ID NO: 2765351 - DNA, 25 bp, Homo sapien
aaggtaggaagtgcgaggacatata

SEQ ID NO: 2765352 - DNA, 25 bp, Homo sapien
aagtgcgaggacatatagcagaaga

SEQ ID NO: 2765353 - DNA, 25 bp, Homo sapien
tgtctaccaagaactcccctgaaaa

SEQ ID NO: 2765354 - DNA, 25 bp, Homo sapien
gccaatgcttgggttatggaacaac

SEQ ID NO: 2765355 - DNA, 25 bp, Homo sapien
aatgagccgaaccacaacaatgtga

SEQ ID NO: 2765356 - DNA, 25 bp, Homo sapien
tcttcttcgagtagaatgagccgaa

SEQ ID NO: 2765357 - DNA, 25 bp, Homo sapien
acaatgtgaattgcattgccaatgc

SEQ ID NO: 2765358 - DNA, 25 bp, Homo sapien
caatcatctttgtgtcggccaccac

SEQ ID NO: 2765359 - DNA, 25 bp, Homo sapien
tctctccttgctgatggaacgccga

SEQ ID NO: 2765360 - DNA, 25 bp, Homo sapien
tggtgaggatgtaggactccacatt

SEQ ID NO: 2765361 - DNA, 25 bp, Homo sapien
gatgtaggactccacattctcactc

SEQ ID NO: 2765362 - DNA, 25 bp, Homo sapien
gccacacagagaacctggagtagtg

SEQ ID NO: 2765363 - DNA, 25 bp, Homo sapien
caggcatggatcacgccttgacgaa

SEQ ID NO: 2765364 - DNA, 25 bp, Homo sapien
cgccttgacgaagccacacagagaa

SEQ ID NO: 2765365 - DNA, 25 bp, Homo sapien
acggcagccaggcatggatcacgcc

SEQ ID NO: 2765366 - DNA, 25 bp, Homo sapien
ccagatcctcttcttggcaggtcat

SEQ ID NO: 2765367 - DNA, 25 bp, Homo sapien
tgcacccagatcctcttcttggcag

SEQ ID NO: 2765368 - DNA, 25 bp, Homo sapien
ttgcacccagatcctcttcttggca

SEQ ID NO: 2765369 - DNA, 25 bp, Homo sapien
cacccagatcctcttcttggcaggt

SEQ ID NO: 2765370 - DNA, 25 bp, Homo sapien
tgcaggtgtgtgcatccattagcaa

SEQ ID NO: 2765371 - DNA, 25 bp, Homo sapien
agagtcaaacaccagtgcaggtgtg

SEQ ID NO: 2765372 - DNA, 25 bp, Homo sapien
gcatccattagcaacaagggctgag

SEQ ID NO: 2765373 - DNA, 25 bp, Homo sapien
tgtgtgcatccattagcaacaaggg

SEQ ID NO: 2765374 - DNA, 25 bp, Homo sapien
ctctcctggaggcgcaaggcagttg

SEQ ID NO: 2765375 - DNA, 25 bp, Homo sapien
tcctggaggcgcaaggcagttgcca

SEQ ID NO: 2765376 - DNA, 25 bp, Homo sapien
aggcgcaaggcagttgccacctgcc

SEQ ID NO: 2765377 - DNA, 25 bp, Homo sapien
ctggaggcgcaaggcagttgccacc

SEQ ID NO: 2765378 - DNA, 25 bp, Homo sapien
ttttctgccatagatgacccagtat

SEQ ID NO: 2765379 - DNA, 25 bp, Homo sapien
tcatctgattgatctgaccagtgtt

SEQ ID NO: 2765380 - DNA, 25 bp, Homo sapien
ccatagatgacccagtatctgttct

SEQ ID NO: 2765381 - DNA, 25 bp, Homo sapien
ttgatctgaccagtgttaattcttc

SEQ ID NO: 2765382 - DNA, 25 bp, Homo sapien
tacagaggagataagagacttgagt

SEQ ID NO: 2765383 - DNA, 25 bp, Homo sapien
aatgtacactttctggcaagagaat

SEQ ID NO: 2765384 - DNA, 25 bp, Homo sapien
aaaagaatgtacactttctggcaag

SEQ ID NO: 2765385 - DNA, 25 bp, Homo sapien
gtaagaataggtcatgttttaataa

SEQ ID NO: 2765386 - DNA, 25 bp, Homo sapien
caacccaggaggacatgtgagtcac

SEQ ID NO: 2765387 - DNA, 25 bp, Homo sapien
atgtgcgggtggtaccctccctcaa

SEQ ID NO: 2765388 - DNA, 25 bp, Homo sapien
tccctcaaccagtggatgcttcttc

SEQ ID NO: 2765389 - DNA, 25 bp, Homo sapien
tgcctcctgtaaacgatgtgcgggt

SEQ ID NO: 2765390 - DNA, 25 bp, Homo sapien
acaggttggctccttggtttctgga

SEQ ID NO: 2765391 - DNA, 25 bp, Homo sapien
ggagtcacagatccatttgtgacct

SEQ ID NO: 2765392 - DNA, 25 bp, Homo sapien
gcttatgagtatctctgaaactcct

SEQ ID NO: 2765393 - DNA, 25 bp, Homo sapien
tcagagtctgctgttcgatctcata

SEQ ID NO: 2765394 - DNA, 25 bp, Homo sapien
aaattatatagcttatgagtatctc

SEQ ID NO: 2765395 - DNA, 25 bp, Homo sapien
ccagagatctgctgacatgcaagta

SEQ ID NO: 2765396 - DNA, 25 bp, Homo sapien
gacatgcaagtaggctgctggtccc

SEQ ID NO: 2765397 - DNA, 25 bp, Homo sapien
tctgctgacatgcaagtaggctgct

SEQ ID NO: 2765398 - DNA, 25 bp, Homo sapien
ccaggatctcgtgtgtttgtcacag

SEQ ID NO: 2765399 - DNA, 25 bp, Homo sapien
tcactggagcggcacttccatgggt

SEQ ID NO: 2765400 - DNA, 25 bp, Homo sapien
cactgtgtttcggaggccactgaga

SEQ ID NO: 2765401 - DNA, 25 bp, Homo sapien
tagtgttcacacaactcaagaggca

SEQ ID NO: 2765402 - DNA, 25 bp, Homo sapien
ttaggcggcgaagccaagattgaac

SEQ ID NO: 2765403 - DNA, 25 bp, Homo sapien
tcttggcctgagtaattggttctta

SEQ ID NO: 2765404 - DNA, 25 bp, Homo sapien
catggccgaggcttctaatcaagcc

SEQ ID NO: 2765405 - DNA, 25 bp, Homo sapien
gaagccatggccgaggcttctaatc

SEQ ID NO: 2765406 - DNA, 25 bp, Homo sapien
ggttcttagggcatctcttgggcag

SEQ ID NO: 2765407 - DNA, 25 bp, Homo sapien
gctcccacagattcacaaactattg

SEQ ID NO: 2765408 - DNA, 25 bp, Homo sapien
tcccacagattcacaaactattgtt

SEQ ID NO: 2765409 - DNA, 25 bp, Homo sapien
cccacagattcacaaactattgttc

SEQ ID NO: 2765410 - DNA, 25 bp, Homo sapien
tgctcccacagattcacaaactatt

SEQ ID NO: 2765411 - DNA, 25 bp, Homo sapien
catccttcaccggaaggacataaag

SEQ ID NO: 2765412 - DNA, 25 bp, Homo sapien
gaaggacataaagcctttccgaggc

SEQ ID NO: 2765413 - DNA, 25 bp, Homo sapien
tcaaaccagaaaccatccttcaccg

SEQ ID NO: 2765414 - DNA, 25 bp, Homo sapien
cataaagcctttccgaggctgggaa

SEQ ID NO: 2765415 - DNA, 25 bp, Homo sapien
gcatttccagcgaggagagactact

SEQ ID NO: 2765416 - DNA, 25 bp, Homo sapien
tttcagctgatactggaactgcctc

SEQ ID NO: 2765417 - DNA, 25 bp, Homo sapien
cactgtaagactctgcaagggctct

SEQ ID NO: 2765418 - DNA, 25 bp, Homo sapien
gaactgaacattgagagtccagcac

SEQ ID NO: 2765419 - DNA, 25 bp, Homo sapien
tcattccaaaggttccaaagagacc

SEQ ID NO: 2765420 - DNA, 25 bp, Homo sapien
tgatctcaagggctttgaagaggaa

SEQ ID NO: 2765421 - DNA, 25 bp, Homo sapien
tatgtgctggatcctggttgcttcc

SEQ ID NO: 2765422 - DNA, 25 bp, Homo sapien
ttcccagaacagtctgatctcaagg

SEQ ID NO: 2765423 - DNA, 25 bp, Homo sapien
caaaaggtggcacctccactactgg

SEQ ID NO: 2765424 - DNA, 25 bp, Homo sapien
ctacaaaaggtggcacctccactac

SEQ ID NO: 2765425 - DNA, 25 bp, Homo sapien
aaaaggtggcacctccactactggg

SEQ ID NO: 2765426 - DNA, 25 bp, Homo sapien
cacctccactactgggggtgtggcc

SEQ ID NO: 2765427 - DNA, 25 bp, Homo sapien
catgcgcacacattcacctttgttc

SEQ ID NO: 2765428 - DNA, 25 bp, Homo sapien
gcagttactaaagcacatgcgcaca

SEQ ID NO: 2765429 - DNA, 25 bp, Homo sapien
tccacctgtagaccacttggcagtt

SEQ ID NO: 2765430 - DNA, 25 bp, Homo sapien
gaccacttggcagttactaaagcac

SEQ ID NO: 2765431 - DNA, 25 bp, Homo sapien
gcactctcccgcaagttctggtcag

SEQ ID NO: 2765432 - DNA, 25 bp, Homo sapien
tatccacagcaactcagggaagtgg

SEQ ID NO: 2765433 - DNA, 25 bp, Homo sapien
caggaggcttctcgccgctttcaaa

SEQ ID NO: 2765434 - DNA, 25 bp, Homo sapien
aagtctgttcccaggcgaagggcga

SEQ ID NO: 2765435 - DNA, 25 bp, Homo sapien
tcttccggtcctgcaggagaagtcc

SEQ ID NO: 2765436 - DNA, 25 bp, Homo sapien
atttggggtgtctcttccggtcctg

SEQ ID NO: 2765437 - DNA, 25 bp, Homo sapien
tccggtcctgcaggagaagtccgct

SEQ ID NO: 2765438 - DNA, 25 bp, Homo sapien
tggggtgtctcttccggtcctgcag

SEQ ID NO: 2765439 - DNA, 25 bp, Homo sapien
aaacatgttactgaggccacaacct

SEQ ID NO: 2765440 - DNA, 25 bp, Homo sapien
aaggagtctcggctttggtccagtg

SEQ ID NO: 2765441 - DNA, 25 bp, Homo sapien
ttgaagtttctcctgacgacggctg

SEQ ID NO: 2765442 - DNA, 25 bp, Homo sapien
tggtgttgggcagaaagaagtaact

SEQ ID NO: 2765443 - DNA, 25 bp, Homo sapien
tcgtgatcttggactctacgcacta

SEQ ID NO: 2765444 - DNA, 25 bp, Homo sapien
aaaatataagtcttggccctgctcg

SEQ ID NO: 2765445 - DNA, 25 bp, Homo sapien
gatgacgtgtcatggcaggaaaagt

SEQ ID NO: 2765446 - DNA, 25 bp, Homo sapien
caggaaaagtactggccttggagcc

SEQ ID NO: 2765447 - DNA, 25 bp, Homo sapien
agctgtgctcctccccaagctggcg

SEQ ID NO: 2765448 - DNA, 25 bp, Homo sapien
atgagctgtgctcctccccaagctg

SEQ ID NO: 2765449 - DNA, 25 bp, Homo sapien
tgtgctcctccccaagctggcgttc

SEQ ID NO: 2765450 - DNA, 25 bp, Homo sapien
tcatgagctgtgctcctccccaagc

SEQ ID NO: 2765451 - DNA, 25 bp, Homo sapien
tttgagaactaatagcaggtgcgtt

SEQ ID NO: 2765452 - DNA, 25 bp, Homo sapien
cgttgtaggttccaactgaagagtc

SEQ ID NO: 2765453 - DNA, 25 bp, Homo sapien
ggttccaactgaagagtcctgcttc

SEQ ID NO: 2765454 - DNA, 25 bp, Homo sapien
aatagcaggtgcgttgtaggttcca

SEQ ID NO: 2765455 - DNA, 25 bp, Homo sapien
tgctgcataaggaactattgaggaa

SEQ ID NO: 2765456 - DNA, 25 bp, Homo sapien
tccagagtgctgcataaggaactat

SEQ ID NO: 2765457 - DNA, 25 bp, Homo sapien
aggaactattgaggaaacgcaaggg

SEQ ID NO: 2765458 - DNA, 25 bp, Homo sapien
ttacttaatatccagagtgctgcat

SEQ ID NO: 2765459 - DNA, 25 bp, Homo sapien
tcctgaacagttcagttctaaagcc

SEQ ID NO: 2765460 - DNA, 25 bp, Homo sapien
ctttcccttcctgaacagttcagtt

SEQ ID NO: 2765461 - DNA, 25 bp, Homo sapien
cccttcctgaacagttcagttctaa

SEQ ID NO: 2765462 - DNA, 25 bp, Homo sapien
tcccttcctgaacagttcagttcta

SEQ ID NO: 2765463 - DNA, 25 bp, Homo sapien
tgtagggttggaacgagaggagagc

SEQ ID NO: 2765464 - DNA, 25 bp, Homo sapien
ttaagtaggacagataaaagtatgc

SEQ ID NO: 2765465 - DNA, 25 bp, Homo sapien
ggactagcagaaggccatagcctga

SEQ ID NO: 2765466 - DNA, 25 bp, Homo sapien
agaggagagctgaggtggactagca

SEQ ID NO: 2765467 - DNA, 25 bp, Homo sapien
catatcgtctgtacggagcagatct

SEQ ID NO: 2765468 - DNA, 25 bp, Homo sapien
ccacgagcgtctaatggtccgtcac

SEQ ID NO: 2765469 - DNA, 25 bp, Homo sapien
cgtctgtacggagcagatctcacca

SEQ ID NO: 2765470 - DNA, 25 bp, Homo sapien
agactgtgacccacccttaccacga

SEQ ID NO: 2765471 - DNA, 25 bp, Homo sapien
agacacaatgactcagcagaaagtt

SEQ ID NO: 2765472 - DNA, 25 bp, Homo sapien
ttcagacacaatgactcagcagaaa

SEQ ID NO: 2765473 - DNA, 25 bp, Homo sapien
cctctgggtttcagacacaatgact

SEQ ID NO: 2765474 - DNA, 25 bp, Homo sapien
tgggtttcagacacaatgactcagc

SEQ ID NO: 2765475 - DNA, 25 bp, Homo sapien
ctggaaagcccaacaggctctcgac

SEQ ID NO: 2765476 - DNA, 25 bp, Homo sapien
gcctctctcattgcagcagcctttt

SEQ ID NO: 2765477 - DNA, 25 bp, Homo sapien
aacaggctctcgacaccataggcct

SEQ ID NO: 2765478 - DNA, 25 bp, Homo sapien
gacaccataggcctctctcattgca

SEQ ID NO: 2765479 - DNA, 25 bp, Homo sapien
cattcctgaggataaattcagaatc

SEQ ID NO: 2765480 - DNA, 25 bp, Homo sapien
ctaacaacaaattcacttggaacca

SEQ ID NO: 2765481 - DNA, 25 bp, Homo sapien
ccactgcgatactcattcctgagga

SEQ ID NO: 2765482 - DNA, 25 bp, Homo sapien
caatttggtagtgctcctggcaaca

SEQ ID NO: 2765483 - DNA, 25 bp, Homo sapien
aatgcttccagggttgtctcacagg

SEQ ID NO: 2765484 - DNA, 25 bp, Homo sapien
cgagatgtgatgtgagtccagagca

SEQ ID NO: 2765485 - DNA, 25 bp, Homo sapien
gccatagaggaccaggtgccataat

SEQ ID NO: 2765486 - DNA, 25 bp, Homo sapien
ccaggattgcaaaggcgagatgtga

SEQ ID NO: 2765487 - DNA, 25 bp, Homo sapien
tcctctggaaaacttaaactgctgg

SEQ ID NO: 2765488 - DNA, 25 bp, Homo sapien
cataaccactttcgagactctggga

SEQ ID NO: 2765489 - DNA, 25 bp, Homo sapien
gtattctagcaaagccaaactccag

SEQ ID NO: 2765490 - DNA, 25 bp, Homo sapien
tttgcttagcaaaccagccctggca

SEQ ID NO: 2765491 - DNA, 25 bp, Homo sapien
tctcgccaaccactttggaggccag

SEQ ID NO: 2765492 - DNA, 25 bp, Homo sapien
caactcccatatgtcagtgcatctg

SEQ ID NO: 2765493 - DNA, 25 bp, Homo sapien
tgaaccctcagtgcccttactcttt

SEQ ID NO: 2765494 - DNA, 25 bp, Homo sapien
tgaacctgttggtagtaggtctacc

SEQ ID NO: 2765495 - DNA, 25 bp, Homo sapien
cctgctgctcgtgatgggatagtgc

SEQ ID NO: 2765496 - DNA, 25 bp, Homo sapien
cctgctgtagaaccgtgccactgag

SEQ ID NO: 2765497 - DNA, 25 bp, Homo sapien
gaagccatcatcttaacatgggaga

SEQ ID NO: 2765498 - DNA, 25 bp, Homo sapien
caccacgtggtattctggcaggccc

SEQ ID NO: 2765499 - DNA, 25 bp, Homo sapien
ggagaactcatcatatgcacgctga

SEQ ID NO: 2765500 - DNA, 25 bp, Homo sapien
gatatcaggtgttttaccagagaca

SEQ ID NO: 2765501 - DNA, 25 bp, Homo sapien
gaagtttagagatcctttccatcac

SEQ ID NO: 2765502 - DNA, 25 bp, Homo sapien
taagatgggaattaatccgtgaggg

SEQ ID NO: 2765503 - DNA, 25 bp, Homo sapien
caattacagcataagagtgttccat

SEQ ID NO: 2765504 - DNA, 25 bp, Homo sapien
gcattggctcaaaacataaaaactg

SEQ ID NO: 2765505 - DNA, 25 bp, Homo sapien
taatatgataaggagatatgtcagg

SEQ ID NO: 2765506 - DNA, 25 bp, Homo sapien
caagactggaacccttgatccttcc

SEQ ID NO: 2765507 - DNA, 25 bp, Homo sapien
gataaggagatatgtcaggatctga

SEQ ID NO: 2765508 - DNA, 25 bp, Homo sapien
tgtatcggtccaatattagtatatg

SEQ ID NO: 2765509 - DNA, 25 bp, Homo sapien
tatcggtccaatattagtatatgtg

SEQ ID NO: 2765510 - DNA, 25 bp, Homo sapien
cggtccaatattagtatatgtgctt

SEQ ID NO: 2765511 - DNA, 25 bp, Homo sapien
tcggtccaatattagtatatgtgct

SEQ ID NO: 2765512 - DNA, 25 bp, Homo sapien
ggactcatcaccttaagcactgaat

SEQ ID NO: 2765513 - DNA, 25 bp, Homo sapien
caccttaagcactgaattctgagaa

SEQ ID NO: 2765514 - DNA, 25 bp, Homo sapien
gaatgaaggactcatcaccttaagc

SEQ ID NO: 2765515 - DNA, 25 bp, Homo sapien
tataagaatgaaggactcatcacct

SEQ ID NO: 2765516 - DNA, 25 bp, Homo sapien
cttgcctcctgtccgggaagcgaac

SEQ ID NO: 2765517 - DNA, 25 bp, Homo sapien
gaggctgtctcccatagcaaagcgc

SEQ ID NO: 2765518 - DNA, 25 bp, Homo sapien
cacggaaaggtttgcaagccagctc

SEQ ID NO: 2765519 - DNA, 25 bp, Homo sapien
agcaaagcgccccaaagttaaggag

SEQ ID NO: 2765520 - DNA, 25 bp, Homo sapien
agctgacagtgtccgctttcggcgg

SEQ ID NO: 2765521 - DNA, 25 bp, Homo sapien
tgcccgcgatctccctgtgcttttt

SEQ ID NO: 2765522 - DNA, 25 bp, Homo sapien
tccagaaataaagcgctcgcctgtg

SEQ ID NO: 2765523 - DNA, 25 bp, Homo sapien
agaaggcagcgactgcaaagctgcc

SEQ ID NO: 2765524 - DNA, 25 bp, Homo sapien
cctcccgcatgccccgcggcctcgc

SEQ ID NO: 2765525 - DNA, 25 bp, Homo sapien
ccgcctcccgcatgccccgcggcct

SEQ ID NO: 2765526 - DNA, 25 bp, Homo sapien
ctccgcctcccgcatgccccgcggc

SEQ ID NO: 2765527 - DNA, 25 bp, Homo sapien
tcccgcatgccccgcggcctcgcag

SEQ ID NO: 2765528 - DNA, 25 bp, Homo sapien
gatcaaagggttgtactgatttagc

SEQ ID NO: 2765529 - DNA, 25 bp, Homo sapien
tgcaccaagtctcttcggaggcctc

SEQ ID NO: 2765530 - DNA, 25 bp, Homo sapien
tgaaatctgcaccaagtctcttcgg

SEQ ID NO: 2765531 - DNA, 25 bp, Homo sapien
caagtctcttcggaggcctccaaga

SEQ ID NO: 2765532 - DNA, 25 bp, Homo sapien
gaagtgggacaagaagcctagatct

SEQ ID NO: 2765533 - DNA, 25 bp, Homo sapien
caacttgttccatagggatggccca

SEQ ID NO: 2765534 - DNA, 25 bp, Homo sapien
ttctgcaagtctgcctaggtggtca

SEQ ID NO: 2765535 - DNA, 25 bp, Homo sapien
tccaattgccttaaccgaagagtag

SEQ ID NO: 2765536 - DNA, 25 bp, Homo sapien
tttctatttcagtctctgttatctg

SEQ ID NO: 2765537 - DNA, 25 bp, Homo sapien
ctatttcagtctctgttatctgcat

SEQ ID NO: 2765538 - DNA, 25 bp, Homo sapien
tctatttcagtctctgttatctgca

SEQ ID NO: 2765539 - DNA, 25 bp, Homo sapien
tattttctatttcagtctctgttat

SEQ ID NO: 2765540 - DNA, 25 bp, Homo sapien
tatttgaccatgattgtgatgcccc

SEQ ID NO: 2765541 - DNA, 25 bp, Homo sapien
tgtgttagcattccagcagcagtct

SEQ ID NO: 2765542 - DNA, 25 bp, Homo sapien
tgaccttgcgcaccgcttagacaga

SEQ ID NO: 2765543 - DNA, 25 bp, Homo sapien
ttttggttccacaacacaggcttag

SEQ ID NO: 2765544 - DNA, 25 bp, Homo sapien
aactgccaatgtgccaaggtccggg

SEQ ID NO: 2765545 - DNA, 25 bp, Homo sapien
caggactaaaccattccactgtggg

SEQ ID NO: 2765546 - DNA, 25 bp, Homo sapien
tcaggctatggagcaggcccctgag

SEQ ID NO: 2765547 - DNA, 25 bp, Homo sapien
ccttctttagcacggtggtgatgga

SEQ ID NO: 2765548 - DNA, 25 bp, Homo sapien
tgaatgagagacagtttcttgatgc

SEQ ID NO: 2765549 - DNA, 25 bp, Homo sapien
gacagtttcttgatgctgattttcc

SEQ ID NO: 2765550 - DNA, 25 bp, Homo sapien
aatgagagacagtttcttgatgctg

SEQ ID NO: 2765551 - DNA, 25 bp, Homo sapien
cctgccactgtgaatgagagacagt

SEQ ID NO: 2765552 - DNA, 25 bp, Homo sapien
tctactacccacctggcgtcgtggt

SEQ ID NO: 2765553 - DNA, 25 bp, Homo sapien
tacccacctggcgtcgtggtctaca

SEQ ID NO: 2765554 - DNA, 25 bp, Homo sapien
cacctggcgtcgtggtctacagcgg

SEQ ID NO: 2765555 - DNA, 25 bp, Homo sapien
tactacccacctggcgtcgtggtct

SEQ ID NO: 2765556 - DNA, 25 bp, Homo sapien
tctggagaggagatgcttcgaaatc

SEQ ID NO: 2765557 - DNA, 25 bp, Homo sapien
taggccgaggaccttctctggagag

SEQ ID NO: 2765558 - DNA, 25 bp, Homo sapien
actcttcccacgctgagtagtgtgg

SEQ ID NO: 2765559 - DNA, 25 bp, Homo sapien
ggcaaagggatagagacgagcccca

SEQ ID NO: 2765560 - DNA, 25 bp, Homo sapien
gggctgccccaggaatctagagctg

SEQ ID NO: 2765561 - DNA, 25 bp, Homo sapien
tcttggcaaacgagactgcagcagc

SEQ ID NO: 2765562 - DNA, 25 bp, Homo sapien
attatcattccggactgggccagcg

SEQ ID NO: 2765563 - DNA, 25 bp, Homo sapien
gggataacacctgtcaccagcttgg

SEQ ID NO: 2765564 - DNA, 25 bp, Homo sapien
gaaaagttgatcctgctgggaggtc

SEQ ID NO: 2765565 - DNA, 25 bp, Homo sapien
taaaaggacagacagcggtgagcac

SEQ ID NO: 2765566 - DNA, 25 bp, Homo sapien
tgagcacaagcaagataagacaggg

SEQ ID NO: 2765567 - DNA, 25 bp, Homo sapien
tgatgtacacgaaccagacacgttt

SEQ ID NO: 2765568 - DNA, 25 bp, Homo sapien
catagaggcatagtccaggcaaacg

SEQ ID NO: 2765569 - DNA, 25 bp, Homo sapien
gagaaaaactgcttagcttggagaa

SEQ ID NO: 2765570 - DNA, 25 bp, Homo sapien
aatccagaggacgaaacaagggtgc

SEQ ID NO: 2765571 - DNA, 25 bp, Homo sapien
caagggtgcagactagagagaaata

SEQ ID NO: 2765572 - DNA, 25 bp, Homo sapien
gagcgacaaagcaacagcctatcag

SEQ ID NO: 2765573 - DNA, 25 bp, Homo sapien
ctgtgatcaccacgacgacaacggt

SEQ ID NO: 2765574 - DNA, 25 bp, Homo sapien
gatctgagccagctgcaccatgcat

SEQ ID NO: 2765575 - DNA, 25 bp, Homo sapien
gctgtgttgaccagaaagcccaggc

SEQ ID NO: 2765576 - DNA, 25 bp, Homo sapien
catgctgagctggattaaacttgga

SEQ ID NO: 2765577 - DNA, 25 bp, Homo sapien
tgagcatgcctgtaccagatcatgg

SEQ ID NO: 2765578 - DNA, 25 bp, Homo sapien
cataggcgcttgttcactagttgcg

SEQ ID NO: 2765579 - DNA, 25 bp, Homo sapien
caaggtttaaatggcacaggtcccg

SEQ ID NO: 2765580 - DNA, 25 bp, Homo sapien
tcttcctcgcggtggtactcagtaa

SEQ ID NO: 2765581 - DNA, 25 bp, Homo sapien
ctcagtaatgaggttaaagggcaca

SEQ ID NO: 2765582 - DNA, 25 bp, Homo sapien
caggaccagggtggagtagacattc

SEQ ID NO: 2765583 - DNA, 25 bp, Homo sapien
tggacattacaccaaacaggctgca

SEQ ID NO: 2765584 - DNA, 25 bp, Homo sapien
aaagaagaatctggcactgtttagc

SEQ ID NO: 2765585 - DNA, 25 bp, Homo sapien
gagaaattacagctggcagtgcctc

SEQ ID NO: 2765586 - DNA, 25 bp, Homo sapien
cccttatctgtgggttgaaaacagc

SEQ ID NO: 2765587 - DNA, 25 bp, Homo sapien
tgaagattcacctttttagacatcc

SEQ ID NO: 2765588 - DNA, 25 bp, Homo sapien
aatatcaaatccaagttgtgctaga

SEQ ID NO: 2765589 - DNA, 25 bp, Homo sapien
tgtgctagaccagaaacttttagaa

SEQ ID NO: 2765590 - DNA, 25 bp, Homo sapien
cttttagaagacatccttaggagag

SEQ ID NO: 2765591 - DNA, 25 bp, Homo sapien
cctgacgtccatagatttattaaga

SEQ ID NO: 2765592 - DNA, 25 bp, Homo sapien
gttgatgcacaagccccaacatcca

SEQ ID NO: 2765593 - DNA, 25 bp, Homo sapien
agtgaggaaaacacggagttgatgc

SEQ ID NO: 2765594 - DNA, 25 bp, Homo sapien
ctttcgtagatgagaaactctgtgg

SEQ ID NO: 2765595 - DNA, 25 bp, Homo sapien
caacctcgactcctctttcgtagat

SEQ ID NO: 2765596 - DNA, 25 bp, Homo sapien
ctatagggatccccgcggtacacaa

SEQ ID NO: 2765597 - DNA, 25 bp, Homo sapien
tatagggatccccgcggtacacaat

SEQ ID NO: 2765598 - DNA, 25 bp, Homo sapien
ggcatgttcaccagtgctctcagca

SEQ ID NO: 2765599 - DNA, 25 bp, Homo sapien
tagcggtagtgaggaggcatgttca

SEQ ID NO: 2765600 - DNA, 25 bp, Homo sapien
ggctgtccatccaatgaggtggctg

SEQ ID NO: 2765601 - DNA, 25 bp, Homo sapien
ctctcagcagtgactttaatgtcat

SEQ ID NO: 2765602 - DNA, 25 bp, Homo sapien
taaaacatgaaacagaggtgtgatc

SEQ ID NO: 2765603 - DNA, 25 bp, Homo sapien
aacatgaaacagaggtgtgatcttc

SEQ ID NO: 2765604 - DNA, 25 bp, Homo sapien
aataaaacatgaaacagaggtgtga

SEQ ID NO: 2765605 - DNA, 25 bp, Homo sapien
acatgaaacagaggtgtgatcttca

SEQ ID NO: 2765606 - DNA, 25 bp, Homo sapien
ttaagcacgagtggctgcttggcag

SEQ ID NO: 2765607 - DNA, 25 bp, Homo sapien
aggaggtattctgttaagcacgagt

SEQ ID NO: 2765608 - DNA, 25 bp, Homo sapien
ttggcagtttcaggcccagaatgag

SEQ ID NO: 2765609 - DNA, 25 bp, Homo sapien
gcttggcagtttcaggcccagaatg

SEQ ID NO: 2765610 - DNA, 25 bp, Homo sapien
tagcccaagaaacaacagcctggtt

SEQ ID NO: 2765611 - DNA, 25 bp, Homo sapien
catcagtcttgcagtatctagccca

SEQ ID NO: 2765612 - DNA, 25 bp, Homo sapien
ggttttcatgcctccaactaaatgg

SEQ ID NO: 2765613 - DNA, 25 bp, Homo sapien
caaaactgagaaagcgaatctggtc

SEQ ID NO: 2765614 - DNA, 25 bp, Homo sapien
ttaaagggagcaactgacgacatgg

SEQ ID NO: 2765615 - DNA, 25 bp, Homo sapien
gcagacttcctttgcttaactggag

SEQ ID NO: 2765616 - DNA, 25 bp, Homo sapien
ttcacaaacataccctcaaaaggag

SEQ ID NO: 2765617 - DNA, 25 bp, Homo sapien
gacctcccagggcacacatttggaa

SEQ ID NO: 2765618 - DNA, 25 bp, Homo sapien
catgaaactcttctcgtcaaacaga

SEQ ID NO: 2765619 - DNA, 25 bp, Homo sapien
ctcttctcgtcaaacagacaaaaca

SEQ ID NO: 2765620 - DNA, 25 bp, Homo sapien
tcagttagaccccatgaaactcttc

SEQ ID NO: 2765621 - DNA, 25 bp, Homo sapien
gatttgggaattcagttagacccca

SEQ ID NO: 2765622 - DNA, 25 bp, Homo sapien
tttaactttctcgatagaaccatac

SEQ ID NO: 2765623 - DNA, 25 bp, Homo sapien
tactcgtacattccatctgatgaca

SEQ ID NO: 2765624 - DNA, 25 bp, Homo sapien
gccagctctggatttacgtaaccat

SEQ ID NO: 2765625 - DNA, 25 bp, Homo sapien
tgatgacaatggagggtcctgaggg

SEQ ID NO: 2765626 - DNA, 25 bp, Homo sapien
agaacatgacctggaattctgtacc

SEQ ID NO: 2765627 - DNA, 25 bp, Homo sapien
cacaaagtgagcaccaatgcagaga

SEQ ID NO: 2765628 - DNA, 25 bp, Homo sapien
cagatgggcccagtctatagcaccc

SEQ ID NO: 2765629 - DNA, 25 bp, Homo sapien
ctatagcacccaaaaggtaacccag

SEQ ID NO: 2765630 - DNA, 25 bp, Homo sapien
aagccagagcattcggaggacatct

SEQ ID NO: 2765631 - DNA, 25 bp, Homo sapien
tggaatcaatcaccaggctattggg

SEQ ID NO: 2765632 - DNA, 25 bp, Homo sapien
cataagccagagcattcggaggaca

SEQ ID NO: 2765633 - DNA, 25 bp, Homo sapien
ggctattgggcaagccataagccag

SEQ ID NO: 2765634 - DNA, 25 bp, Homo sapien
ctctaatcctggcatccctttctct

SEQ ID NO: 2765635 - DNA, 25 bp, Homo sapien
tcccttaggcggcgatggtcttgct

SEQ ID NO: 2765636 - DNA, 25 bp, Homo sapien
gtaaatcccttaggcggcgatggtc

SEQ ID NO: 2765637 - DNA, 25 bp, Homo sapien
atattggtaaatcccttaggcggcg

SEQ ID NO: 2765638 - DNA, 25 bp, Homo sapien
tggtaaatcccttaggcggcgatgg

SEQ ID NO: 2765639 - DNA, 25 bp, Homo sapien
tgaccaaatctaagccagctccggc

SEQ ID NO: 2765640 - DNA, 25 bp, Homo sapien
tgcagtgaccaaatctaagccagct

SEQ ID NO: 2765641 - DNA, 25 bp, Homo sapien
ctgctgcagtgaccaaatctaagcc

SEQ ID NO: 2765642 - DNA, 25 bp, Homo sapien
cagtgaccaaatctaagccagctcc

SEQ ID NO: 2765643 - DNA, 25 bp, Homo sapien
gaagacagaaacagctggggttcag

SEQ ID NO: 2765644 - DNA, 25 bp, Homo sapien
taaactgagggaagacagaaacagc

SEQ ID NO: 2765645 - DNA, 25 bp, Homo sapien
aacagctggggttcagggcttacaa

SEQ ID NO: 2765646 - DNA, 25 bp, Homo sapien
actgagggaagacagaaacagctgg

SEQ ID NO: 2765647 - DNA, 25 bp, Homo sapien
tcttggcacacaagctattgctggc

SEQ ID NO: 2765648 - DNA, 25 bp, Homo sapien
cccagttattccaacttgtaggaat

SEQ ID NO: 2765649 - DNA, 25 bp, Homo sapien
tgtggaccaccataaacaggaaaaa

SEQ ID NO: 2765650 - DNA, 25 bp, Homo sapien
tgtaggaataatacctccaaaaggc

SEQ ID NO: 2765651 - DNA, 25 bp, Homo sapien
ttgtttgatgaaacaaaaccactca

SEQ ID NO: 2765652 - DNA, 25 bp, Homo sapien
tttgtttgatgaaacaaaaccactc

SEQ ID NO: 2765653 - DNA, 25 bp, Homo sapien
tgtttgatgaaacaaaaccactcat

SEQ ID NO: 2765654 - DNA, 25 bp, Homo sapien
tcaaaggttttgtttgatgaaacaa

SEQ ID NO: 2765655 - DNA, 25 bp, Homo sapien
gaaggagagactttctggaatattc

SEQ ID NO: 2765656 - DNA, 25 bp, Homo sapien
aggagagactttctggaatattccc

SEQ ID NO: 2765657 - DNA, 25 bp, Homo sapien
ctgaaggagagactttctggaatat

SEQ ID NO: 2765658 - DNA, 25 bp, Homo sapien
gagctgaaggagagactttctggaa

SEQ ID NO: 2765659 - DNA, 25 bp, Homo sapien
tcaaagagaacgacacctatcatgg

SEQ ID NO: 2765660 - DNA, 25 bp, Homo sapien
ccttgtcctgatgggagcagacatc

SEQ ID NO: 2765661 - DNA, 25 bp, Homo sapien
tgaagtcggcagcaaaatcaaagag

SEQ ID NO: 2765662 - DNA, 25 bp, Homo sapien
tgatgggcccatcaatgaagtcggc

SEQ ID NO: 2765663 - DNA, 25 bp, Homo sapien
tctaggaaaggtcaaacacatgaac

SEQ ID NO: 2765664 - DNA, 25 bp, Homo sapien
aatctgggccaaatttgtcaaaggg

SEQ ID NO: 2765665 - DNA, 25 bp, Homo sapien
tcctcctgcagaggtacacactaag

SEQ ID NO: 2765666 - DNA, 25 bp, Homo sapien
tgtaacctaggagagatcaattcta

SEQ ID NO: 2765667 - DNA, 25 bp, Homo sapien
gaggaaccacacaatgctgtacagg

SEQ ID NO: 2765668 - DNA, 25 bp, Homo sapien
tttaggcggctccacagagtcaaag

SEQ ID NO: 2765669 - DNA, 25 bp, Homo sapien
cgagcatcatgactcccagggtgag

SEQ ID NO: 2765670 - DNA, 25 bp, Homo sapien
tagccccattgaggtacagagccat

SEQ ID NO: 2765671 - DNA, 25 bp, Homo sapien
ggccagcctgcccactgttgctacc

SEQ ID NO: 2765672 - DNA, 25 bp, Homo sapien
gatttatagatgtggcggccagcct

SEQ ID NO: 2765673 - DNA, 25 bp, Homo sapien
ctagggatttatagatgtggcggcc

SEQ ID NO: 2765674 - DNA, 25 bp, Homo sapien
cagcctgcccactgttgctacccat

SEQ ID NO: 2765675 - DNA, 25 bp, Homo sapien
cgtggtcctagggtctgtgtttcaa

SEQ ID NO: 2765676 - DNA, 25 bp, Homo sapien
gaggaaccttcctgcgagcccacca

SEQ ID NO: 2765677 - DNA, 25 bp, Homo sapien
accacctcctgcgtggtcctagggt

SEQ ID NO: 2765678 - DNA, 25 bp, Homo sapien
tttcaaactggatttgacgtggagc

SEQ ID NO: 2765679 - DNA, 25 bp, Homo sapien
tggccgagcaaccaacagagatggt

SEQ ID NO: 2765680 - DNA, 25 bp, Homo sapien
ccgagcaaccaacagagatggtcag

SEQ ID NO: 2765681 - DNA, 25 bp, Homo sapien
gccgagcaaccaacagagatggtca

SEQ ID NO: 2765682 - DNA, 25 bp, Homo sapien
ctggccgagcaaccaacagagatgg

SEQ ID NO: 2765683 - DNA, 25 bp, Homo sapien
cattagctgtgtcagatcgccctga

SEQ ID NO: 2765684 - DNA, 25 bp, Homo sapien
tcctcaagagcggagaacaggtctg

SEQ ID NO: 2765685 - DNA, 25 bp, Homo sapien
catgatcacacacatggccgtgagg

SEQ ID NO: 2765686 - DNA, 25 bp, Homo sapien
taatgggagacactggtaggaagac

SEQ ID NO: 2765687 - DNA, 25 bp, Homo sapien
gtggtgcaatcctaattcactgtgg

SEQ ID NO: 2765688 - DNA, 25 bp, Homo sapien
tggtgcaatcctaattcactgtggc

SEQ ID NO: 2765689 - DNA, 25 bp, Homo sapien
gccccacccttgagtagataggact

SEQ ID NO: 2765690 - DNA, 25 bp, Homo sapien
tcctgccccacccttgagtagatag

SEQ ID NO: 2765691 - DNA, 25 bp, Homo sapien
gaagttgagtccagggaagctccag

SEQ ID NO: 2765692 - DNA, 25 bp, Homo sapien
tatttcgtagaaacggaggtccagc

SEQ ID NO: 2765693 - DNA, 25 bp, Homo sapien
cacccagggcattagagtgacctca

SEQ ID NO: 2765694 - DNA, 25 bp, Homo sapien
catgcctgggctggaaaacataacc

SEQ ID NO: 2765695 - DNA, 25 bp, Homo sapien
ctgtgtgttgggtataagatccaga

SEQ ID NO: 2765696 - DNA, 25 bp, Homo sapien
ttgctgtgtgttgggtataagatcc

SEQ ID NO: 2765697 - DNA, 25 bp, Homo sapien
tataagatccagaacttgctaccag

SEQ ID NO: 2765698 - DNA, 25 bp, Homo sapien
gttgggtataagatccagaacttgc

SEQ ID NO: 2765699 - DNA, 25 bp, Homo sapien
caaattcacttgagccgtgggcctg

SEQ ID NO: 2765700 - DNA, 25 bp, Homo sapien
ggactctacgtagtgagccaacaca

SEQ ID NO: 2765701 - DNA, 25 bp, Homo sapien
tgaaggcattctgattcaatacagg

SEQ ID NO: 2765702 - DNA, 25 bp, Homo sapien
gaaacaggccccgagttactggata

SEQ ID NO: 2765703 - DNA, 25 bp, Homo sapien
cctcaaaagtcagaaccggagtcac

SEQ ID NO: 2765704 - DNA, 25 bp, Homo sapien
tcactggtgataaacgagccccgtt

SEQ ID NO: 2765705 - DNA, 25 bp, Homo sapien
gccccgttccttgttgtgatcatga

SEQ ID NO: 2765706 - DNA, 25 bp, Homo sapien
gataaatctcttcgcggctgaatcc

SEQ ID NO: 2765707 - DNA, 25 bp, Homo sapien
ttaagtatatagtaagcagtcaaaa

SEQ ID NO: 2765708 - DNA, 25 bp, Homo sapien
gatggcaattgtaaacactatttta

SEQ ID NO: 2765709 - DNA, 25 bp, Homo sapien
tggcaattgtaaacactattttatt

SEQ ID NO: 2765710 - DNA, 25 bp, Homo sapien
aggatggcaattgtaaacactattt

SEQ ID NO: 2765711 - DNA, 25 bp, Homo sapien
cagcattagcgactaattcattagc

SEQ ID NO: 2765712 - DNA, 25 bp, Homo sapien
tcaccagcattagcgactaattcat

SEQ ID NO: 2765713 - DNA, 25 bp, Homo sapien
gctgtcaccagcattagcgactaat

SEQ ID NO: 2765714 - DNA, 25 bp, Homo sapien
tgtcaccagcattagcgactaattc

SEQ ID NO: 2765715 - DNA, 25 bp, Homo sapien
ggaaactgaagcatcccccagcagc

SEQ ID NO: 2765716 - DNA, 25 bp, Homo sapien
tgaaggaaactgaagcatcccccag

SEQ ID NO: 2765717 - DNA, 25 bp, Homo sapien
atttagttttctgtgaaggaaactg

SEQ ID NO: 2765718 - DNA, 25 bp, Homo sapien
aaggaaactgaagcatcccccagca

SEQ ID NO: 2765719 - DNA, 25 bp, Homo sapien
attgcttcacactgacgagggtttg

SEQ ID NO: 2765720 - DNA, 25 bp, Homo sapien
tccaacggttactgccacacaaaac

SEQ ID NO: 2765721 - DNA, 25 bp, Homo sapien
aaaatggccattgccgcctccaacg

SEQ ID NO: 2765722 - DNA, 25 bp, Homo sapien
gtttgccttgcctggcacgatactg

SEQ ID NO: 2765723 - DNA, 25 bp, Homo sapien
tattttcagcaagatcagttctccc

SEQ ID NO: 2765724 - DNA, 25 bp, Homo sapien
ctgttgtattttcagcaagatcagt

SEQ ID NO: 2765725 - DNA, 25 bp, Homo sapien
tgtattttcagcaagatcagttctc

SEQ ID NO: 2765726 - DNA, 25 bp, Homo sapien
tttcagcaagatcagttctcccaga

SEQ ID NO: 2765727 - DNA, 25 bp, Homo sapien
gaaataggagctggtagaatattga

SEQ ID NO: 2765728 - DNA, 25 bp, Homo sapien
ctggtagaatattgaatggaaagca

SEQ ID NO: 2765729 - DNA, 25 bp, Homo sapien
aatggaaagcaacccatgtgagatc

SEQ ID NO: 2765730 - DNA, 25 bp, Homo sapien
tattgaatggaaagcaacccatgtg

SEQ ID NO: 2765731 - DNA, 25 bp, Homo sapien
gctccaacagccatgaattccccat

SEQ ID NO: 2765732 - DNA, 25 bp, Homo sapien
cccatctgctgtcctgtaagtcgta

SEQ ID NO: 2765733 - DNA, 25 bp, Homo sapien
gaactggggttctattgctccaaca

SEQ ID NO: 2765734 - DNA, 25 bp, Homo sapien
ttgatcagcagctcgtagaactggg

SEQ ID NO: 2765735 - DNA, 25 bp, Homo sapien
gttctgtcctcgaggtgcttcccac

SEQ ID NO: 2765736 - DNA, 25 bp, Homo sapien
ctcgaggtgcttcccacagactcaa

SEQ ID NO: 2765737 - DNA, 25 bp, Homo sapien
tctgtcctcgaggtgcttcccacag

SEQ ID NO: 2765738 - DNA, 25 bp, Homo sapien
gtcctcgaggtgcttcccacagact

SEQ ID NO: 2765739 - DNA, 25 bp, Homo sapien
aagaacttaaatatgctgttccttc

SEQ ID NO: 2765740 - DNA, 25 bp, Homo sapien
aaagaacttaaatatgctgttcctt

SEQ ID NO: 2765741 - DNA, 25 bp, Homo sapien
gaaaagaacttaaatatgctgttcc

SEQ ID NO: 2765742 - DNA, 25 bp, Homo sapien
agaaaagaacttaaatatgctgttc

SEQ ID NO: 2765743 - DNA, 25 bp, Homo sapien
gacctgacccttgccagtgcgtgtg

SEQ ID NO: 2765744 - DNA, 25 bp, Homo sapien
aaagtcagccaggagattcagcggg

SEQ ID NO: 2765745 - DNA, 25 bp, Homo sapien
aaagagccattataatgcccagtgc

SEQ ID NO: 2765746 - DNA, 25 bp, Homo sapien
tgcgtgtgcggtcaaaaagagccat

SEQ ID NO: 2765747 - DNA, 25 bp, Homo sapien
tcattaaaaacaaatttaatgtctc

SEQ ID NO: 2765748 - DNA, 25 bp, Homo sapien
ctacatcattaaaaacaaatttaat

SEQ ID NO: 2765749 - DNA, 25 bp, Homo sapien
cattaaaaacaaatttaatgtctct

SEQ ID NO: 2765750 - DNA, 25 bp, Homo sapien
catcattaaaaacaaatttaatgtc

SEQ ID NO: 2765751 - DNA, 25 bp, Homo sapien
gctaaccggcagaagcttcctgact

SEQ ID NO: 2765752 - DNA, 25 bp, Homo sapien
tcagcctggcataaataagccttgg

SEQ ID NO: 2765753 - DNA, 25 bp, Homo sapien
taagccttggattttcccgctgcag

SEQ ID NO: 2765754 - DNA, 25 bp, Homo sapien
tagttgatatcgtggccagctaacc

SEQ ID NO: 2765755 - DNA, 25 bp, Homo sapien
caccagtgtcaaggcagttgcagca

SEQ ID NO: 2765756 - DNA, 25 bp, Homo sapien
aaatagtccgagtgggctaaggagc

SEQ ID NO: 2765757 - DNA, 25 bp, Homo sapien
tacaagtttgagattcaggcattca

SEQ ID NO: 2765758 - DNA, 25 bp, Homo sapien
gaatccactggagtgataccagccc

SEQ ID NO: 2765759 - DNA, 25 bp, Homo sapien
agccaggaccatagcacagaacggg

SEQ ID NO: 2765760 - DNA, 25 bp, Homo sapien
ttcaggtccagcactagcgagcgct

SEQ ID NO: 2765761 - DNA, 25 bp, Homo sapien
tccacgaccgagatgccctgcagtg

SEQ ID NO: 2765762 - DNA, 25 bp, Homo sapien
gccggacagctccacgaccgagatg

SEQ ID NO: 2765763 - DNA, 25 bp, Homo sapien
aggaaactgagcagcccttagcccc

SEQ ID NO: 2765764 - DNA, 25 bp, Homo sapien
ggcgcttcccagtgccccgctgaag

SEQ ID NO: 2765765 - DNA, 25 bp, Homo sapien
gcgcttcccagtgccccgctgaagg

SEQ ID NO: 2765766 - DNA, 25 bp, Homo sapien
actgagcagcccttagccccagccc

SEQ ID NO: 2765767 - DNA, 25 bp, Homo sapien
tactcgaggagctggactgaagaat

SEQ ID NO: 2765768 - DNA, 25 bp, Homo sapien
gaatctttggcctttgtcactctca

SEQ ID NO: 2765769 - DNA, 25 bp, Homo sapien
gctggagggcaatctaaggttaact

SEQ ID NO: 2765770 - DNA, 25 bp, Homo sapien
taagatggcccaattgatcccctcc

SEQ ID NO: 2765771 - DNA, 25 bp, Homo sapien
tgtttagtccaacccattagagcaa

SEQ ID NO: 2765772 - DNA, 25 bp, Homo sapien
tattacatccctgaagcaagcagaa

SEQ ID NO: 2765773 - DNA, 25 bp, Homo sapien
cacacctgggacttgttgcctacaa

SEQ ID NO: 2765774 - DNA, 25 bp, Homo sapien
agtcatatgaccctgctgtgtgccc

SEQ ID NO: 2765775 - DNA, 25 bp, Homo sapien
tttccatatattgctcattacattt

SEQ ID NO: 2765776 - DNA, 25 bp, Homo sapien
tatttccatatattgctcattacat

SEQ ID NO: 2765777 - DNA, 25 bp, Homo sapien
ttccatatattgctcattacatttt

SEQ ID NO: 2765778 - DNA, 25 bp, Homo sapien
tacctgtagcgtgaacaacattgca

SEQ ID NO: 2765779 - DNA, 25 bp, Homo sapien
gctaataaggcagctagtgcccctg

SEQ ID NO: 2765780 - DNA, 25 bp, Homo sapien
agctacaagtcttccccaaagtgga

SEQ ID NO: 2765781 - DNA, 25 bp, Homo sapien
aaggctaagctgaacacggagggca

SEQ ID NO: 2765782 - DNA, 25 bp, Homo sapien
tagtttcaaagagcaggaatcctgc

SEQ ID NO: 2765783 - DNA, 25 bp, Homo sapien
cagcacagcatgattgctggatgta

SEQ ID NO: 2765784 - DNA, 25 bp, Homo sapien
tcccctttggctagcttcagcacag

SEQ ID NO: 2765785 - DNA, 25 bp, Homo sapien
tggtccccatggagagcgccattgc

SEQ ID NO: 2765786 - DNA, 25 bp, Homo sapien
ggtacacatacacttcctcaacatc

SEQ ID NO: 2765787 - DNA, 25 bp, Homo sapien
gccattgtgcataaggtacacatac

SEQ ID NO: 2765788 - DNA, 25 bp, Homo sapien
catgctgaagactgtgttgccattg

SEQ ID NO: 2765789 - DNA, 25 bp, Homo sapien
tcatcatgctgaaggtgaagaaata

SEQ ID NO: 2765790 - DNA, 25 bp, Homo sapien
tgttatacattgaggacctggagat

SEQ ID NO: 2765791 - DNA, 25 bp, Homo sapien
acatgttatacattgaggacctgga

SEQ ID NO: 2765792 - DNA, 25 bp, Homo sapien
catgttatacattgaggacctggag

SEQ ID NO: 2765793 - DNA, 25 bp, Homo sapien
ttatacattgaggacctggagatac

SEQ ID NO: 2765794 - DNA, 25 bp, Homo sapien
attctttgtagtatggtgtctctcc

SEQ ID NO: 2765795 - DNA, 25 bp, Homo sapien
tttgcaggaatgtccctatatctac

SEQ ID NO: 2765796 - DNA, 25 bp, Homo sapien
gaatgtccctatatctactcccctt

SEQ ID NO: 2765797 - DNA, 25 bp, Homo sapien
gccaactgccttcacatgtctttta

SEQ ID NO: 2765798 - DNA, 25 bp, Homo sapien
tgtgtatcccgaataagacttaaaa

SEQ ID NO: 2765799 - DNA, 25 bp, Homo sapien
ctgtgtatcccgaataagacttaaa

SEQ ID NO: 2765800 - DNA, 25 bp, Homo sapien
ctttaagggaaggagcctacctcat

SEQ ID NO: 2765801 - DNA, 25 bp, Homo sapien
cagaactcgtgttaccaaggtgcag

SEQ ID NO: 2765802 - DNA, 25 bp, Homo sapien
tcctgggcataggttagcgatcatc

SEQ ID NO: 2765803 - DNA, 25 bp, Homo sapien
tgtggttgaacaacgatgctccatg

SEQ ID NO: 2765804 - DNA, 25 bp, Homo sapien
tgtgaaaatctgacagggccactgc

SEQ ID NO: 2765805 - DNA, 25 bp, Homo sapien
gaacgtctggcccaagagagctcta

SEQ ID NO: 2765806 - DNA, 25 bp, Homo sapien
aaataaatatccacgttctgcaacg

SEQ ID NO: 2765807 - DNA, 25 bp, Homo sapien
tctgcaacgctaggagactggaaga

SEQ ID NO: 2765808 - DNA, 25 bp, Homo sapien
caaatctaccagtcatgacatcaaa

SEQ ID NO: 2765809 - DNA, 25 bp, Homo sapien
tgttggtctcaacactgctgaagat

SEQ ID NO: 2765810 - DNA, 25 bp, Homo sapien
atgttggtctcaacactgctgaaga

SEQ ID NO: 2765811 - DNA, 25 bp, Homo sapien
cagtcatgacatcaaagaagtttcc

SEQ ID NO: 2765812 - DNA, 25 bp, Homo sapien
gtttgttaaacattatacataacag

SEQ ID NO: 2765813 - DNA, 25 bp, Homo sapien
gttaaacattatacataacagcaag

SEQ ID NO: 2765814 - DNA, 25 bp, Homo sapien
ttggtcaataaataggcaatttatc

SEQ ID NO: 2765815 - DNA, 25 bp, Homo sapien
aagtttttatgcagattagtttgtt

SEQ ID NO: 2765816 - DNA, 25 bp, Homo sapien
tgctgatctaaatgtgcatctgtat

SEQ ID NO: 2765817 - DNA, 25 bp, Homo sapien
attaatagcaggtctttcttggtag

SEQ ID NO: 2765818 - DNA, 25 bp, Homo sapien
ccatggtgcctagcctattaatttc

SEQ ID NO: 2765819 - DNA, 25 bp, Homo sapien
tgtgtgggcaattcagaaaaatatc

SEQ ID NO: 2765820 - DNA, 25 bp, Homo sapien
tgctcacggtggcaaccaagaggct

SEQ ID NO: 2765821 - DNA, 25 bp, Homo sapien
taatggtcaacacccatttctggga

SEQ ID NO: 2765822 - DNA, 25 bp, Homo sapien
caaagatatgagattaaggtccacc

SEQ ID NO: 2765823 - DNA, 25 bp, Homo sapien
tcaaatttctatatcccctaagtgg

SEQ ID NO: 2765824 - DNA, 25 bp, Homo sapien
gaagcgctcgaacatcctgattcct

SEQ ID NO: 2765825 - DNA, 25 bp, Homo sapien
tcctgtgatgtagatgaacaaactg

SEQ ID NO: 2765826 - DNA, 25 bp, Homo sapien
ccaggagatgtaccgaggatggttt

SEQ ID NO: 2765827 - DNA, 25 bp, Homo sapien
gggccttatgcaaacatcctgtgat

SEQ ID NO: 2765828 - DNA, 25 bp, Homo sapien
ctgaagttctggtggaatccccggg

SEQ ID NO: 2765829 - DNA, 25 bp, Homo sapien
ggtcacctttgtcgcccttctcacc

SEQ ID NO: 2765830 - DNA, 25 bp, Homo sapien
acctttgtcgcccttctcacctttg

SEQ ID NO: 2765831 - DNA, 25 bp, Homo sapien
caggtcacctttgtcgcccttctca

SEQ ID NO: 2765832 - DNA, 25 bp, Homo sapien
tttgtcgcccttctcacctttggct

SEQ ID NO: 2765833 - DNA, 25 bp, Homo sapien
ccagtggctccattgttgccattgt

SEQ ID NO: 2765834 - DNA, 25 bp, Homo sapien
cttcatgaccagtggctccattgtt

SEQ ID NO: 2765835 - DNA, 25 bp, Homo sapien
tgaccagtggctccattgttgccat

SEQ ID NO: 2765836 - DNA, 25 bp, Homo sapien
catgaccagtggctccattgttgcc

SEQ ID NO: 2765837 - DNA, 25 bp, Homo sapien
tggtagcctcgaaagctgtagtctc

SEQ ID NO: 2765838 - DNA, 25 bp, Homo sapien
gccttggtagcctcgaaagctgtag

SEQ ID NO: 2765839 - DNA, 25 bp, Homo sapien
ggccttggtagcctcgaaagctgta

SEQ ID NO: 2765840 - DNA, 25 bp, Homo sapien
cttggtagcctcgaaagctgtagtc

SEQ ID NO: 2765841 - DNA, 25 bp, Homo sapien
tgcagtctgggggtagtcctccggt

SEQ ID NO: 2765842 - DNA, 25 bp, Homo sapien
cagggagtagctaaggtcagttgat

SEQ ID NO: 2765843 - DNA, 25 bp, Homo sapien
gccccagatgtagctaaattgagta

SEQ ID NO: 2765844 - DNA, 25 bp, Homo sapien
gagtagatggtcctcaaattacaag

SEQ ID NO: 2765845 - DNA, 25 bp, Homo sapien
gtttttcaaacagccatagcacact

SEQ ID NO: 2765846 - DNA, 25 bp, Homo sapien
cactgtcatggccaggaaagatacc

SEQ ID NO: 2765847 - DNA, 25 bp, Homo sapien
gaaggaaatcaagtcccagcatagc

SEQ ID NO: 2765848 - DNA, 25 bp, Homo sapien
catctgttggccaagaaggatacca

SEQ ID NO: 2765849 - DNA, 25 bp, Homo sapien
caggctgaacagagaggcttaacaa

SEQ ID NO: 2765850 - DNA, 25 bp, Homo sapien
tctgggctaggtcatctacctcggg

SEQ ID NO: 2765851 - DNA, 25 bp, Homo sapien
gttttaggatggctccgctctctca

SEQ ID NO: 2765852 - DNA, 25 bp, Homo sapien
agccgctacggccagtctgctggtg

SEQ ID NO: 2765853 - DNA, 25 bp, Homo sapien
tattatccacagtcccagttttagg

SEQ ID NO: 2765854 - DNA, 25 bp, Homo sapien
ccagcagttgccaatagatgagctg

SEQ ID NO: 2765855 - DNA, 25 bp, Homo sapien
ttgtgtgcacagttcccagttggcg

SEQ ID NO: 2765856 - DNA, 25 bp, Homo sapien
ttcccacaccacaagcaagaacgat

SEQ ID NO: 2765857 - DNA, 25 bp, Homo sapien
taaataaggctgtaggcatgccaga

SEQ ID NO: 2765858 - DNA, 25 bp, Homo sapien
ctgcagcggcggagtggttttatac

SEQ ID NO: 2765859 - DNA, 25 bp, Homo sapien
gaaaaatctacccttgtgcttgcca

SEQ ID NO: 2765860 - DNA, 25 bp, Homo sapien
ttccggataccagtggcagaaggca

SEQ ID NO: 2765861 - DNA, 25 bp, Homo sapien
tctgaaatagcagtgggaacccatt

SEQ ID NO: 2765862 - DNA, 25 bp, Homo sapien
gttggttgcctacaaaacactgagc

SEQ ID NO: 2765863 - DNA, 25 bp, Homo sapien
caggaccgtaaatagcatgggtggc

SEQ ID NO: 2765864 - DNA, 25 bp, Homo sapien
aatagcatgggtggcaagcgtctga

SEQ ID NO: 2765865 - DNA, 25 bp, Homo sapien
ctggagagacccaggaccgtaaata

SEQ ID NO: 2765866 - DNA, 25 bp, Homo sapien
gagaagctcagcctgctgatgaaga

SEQ ID NO: 2765867 - DNA, 25 bp, Homo sapien
gatgttatcatacctcacttgtcct

SEQ ID NO: 2765868 - DNA, 25 bp, Homo sapien
tccctatgacatataagttctggct

SEQ ID NO: 2765869 - DNA, 25 bp, Homo sapien
taagagcacatacttactgtaaatc

SEQ ID NO: 2765870 - DNA, 25 bp, Homo sapien
gaatcacatataccccttccctatg

SEQ ID NO: 2765871 - DNA, 25 bp, Homo sapien
tgagaaggcagggtacttcctctac

SEQ ID NO: 2765872 - DNA, 25 bp, Homo sapien
ggttagttaaacactgcctgagctc

SEQ ID NO: 2765873 - DNA, 25 bp, Homo sapien
tatacagcctgttctgcaactcaca

SEQ ID NO: 2765874 - DNA, 25 bp, Homo sapien
taaggcaattgtaagggagctgaag

SEQ ID NO: 2765875 - DNA, 25 bp, Homo sapien
tatggactgtcccactcgatagaca

SEQ ID NO: 2765876 - DNA, 25 bp, Homo sapien
tcccctatgatctcagagcactaaa

SEQ ID NO: 2765877 - DNA, 25 bp, Homo sapien
ctagatcatctataccataacgaga

SEQ ID NO: 2765878 - DNA, 25 bp, Homo sapien
catattgactttagctgcagacaca

SEQ ID NO: 2765879 - DNA, 25 bp, Homo sapien
tccttataaaaccttgagtgtgcct

SEQ ID NO: 2765880 - DNA, 25 bp, Homo sapien
gaattcagctccagatactacaggg

SEQ ID NO: 2765881 - DNA, 25 bp, Homo sapien
ctattattacagctcagggattgga

SEQ ID NO: 2765882 - DNA, 25 bp, Homo sapien
aattggctgggacaaattatgcctc

SEQ ID NO: 2765883 - DNA, 25 bp, Homo sapien
atctgtccatgttttttatcatctc

SEQ ID NO: 2765884 - DNA, 25 bp, Homo sapien
cctccttttcctttttgattatcat

SEQ ID NO: 2765885 - DNA, 25 bp, Homo sapien
tgccatatgtagaccaaaaagcacg

SEQ ID NO: 2765886 - DNA, 25 bp, Homo sapien
tcatcacatgttgtcttaggcagaa

SEQ ID NO: 2765887 - DNA, 25 bp, Homo sapien
ggaccaggcttcgaaaaatgcagga

SEQ ID NO: 2765888 - DNA, 25 bp, Homo sapien
tcaaaaagttacaaggtgctcacag

SEQ ID NO: 2765889 - DNA, 25 bp, Homo sapien
aaatgtaatagccttcagcccagac

SEQ ID NO: 2765890 - DNA, 25 bp, Homo sapien
cctactcaagggactcaaggtcaag

SEQ ID NO: 2765891 - DNA, 25 bp, Homo sapien
ttctctaggagtgggtcaggtcaca

SEQ ID NO: 2765892 - DNA, 25 bp, Homo sapien
gagaggacaccctttacagcatatg

SEQ ID NO: 2765893 - DNA, 25 bp, Homo sapien
tcctcatgctagctggtacttctca

SEQ ID NO: 2765894 - DNA, 25 bp, Homo sapien
tacttgtgaatgtcagaaatagcca

SEQ ID NO: 2765895 - DNA, 25 bp, Homo sapien
ctttgtgctatgaactgccagatgc

SEQ ID NO: 2765896 - DNA, 25 bp, Homo sapien
ccagatgctggaaataacttgtgta

SEQ ID NO: 2765897 - DNA, 25 bp, Homo sapien
gtctgtgatgtgaattggtgggacc

SEQ ID NO: 2765898 - DNA, 25 bp, Homo sapien
gccctggttgatgtctgtgatgtga

SEQ ID NO: 2765899 - DNA, 25 bp, Homo sapien
gtgccctggttgatgtctgtgatgt

SEQ ID NO: 2765900 - DNA, 25 bp, Homo sapien
tctgtgatgtgaattggtgggaccc

SEQ ID NO: 2765901 - DNA, 25 bp, Homo sapien
tgttttttttctgtgcagaagctct

SEQ ID NO: 2765902 - DNA, 25 bp, Homo sapien
ttgttttttttctgtgcagaagctc

SEQ ID NO: 2765903 - DNA, 25 bp, Homo sapien
ggtgttttagtcattaagtatttgc

SEQ ID NO: 2765904 - DNA, 25 bp, Homo sapien
tagtcattaagtatttgcccatgcc

SEQ ID NO: 2765905 - DNA, 25 bp, Homo sapien
cagttttgtgcatattgttatccag

SEQ ID NO: 2765906 - DNA, 25 bp, Homo sapien
ttattgacaggcttgccaaagacca

SEQ ID NO: 2765907 - DNA, 25 bp, Homo sapien
ccaaagaccagaagattgtagatgt

SEQ ID NO: 2765908 - DNA, 25 bp, Homo sapien
ctataaggtataagaaggagtccag

SEQ ID NO: 2765909 - DNA, 25 bp, Homo sapien
aacactgcatgttcccactaataag

SEQ ID NO: 2765910 - DNA, 25 bp, Homo sapien
atttgttcaatcattgtggaagata

SEQ ID NO: 2765911 - DNA, 25 bp, Homo sapien
taaaaaagattgagttcatatcctt

SEQ ID NO: 2765912 - DNA, 25 bp, Homo sapien
acaccagggcctgtcaggggttagg

SEQ ID NO: 2765913 - DNA, 25 bp, Homo sapien
cagttatgacggagctgcatatgtc

SEQ ID NO: 2765914 - DNA, 25 bp, Homo sapien
tccagacaaaggagtcagttatgac

SEQ ID NO: 2765915 - DNA, 25 bp, Homo sapien
ctgggaatacaagtactacatgcac

SEQ ID NO: 2765916 - DNA, 25 bp, Homo sapien
gatgacttgcgtgagccacctgtgt

SEQ ID NO: 2765917 - DNA, 25 bp, Homo sapien
taactctattaaagacaccaggtcc

SEQ ID NO: 2765918 - DNA, 25 bp, Homo sapien
cagaactagacttgttggttttcac

SEQ ID NO: 2765919 - DNA, 25 bp, Homo sapien
tattttggaaattgctactgcagcc

SEQ ID NO: 2765920 - DNA, 25 bp, Homo sapien
catttattatctaggtgtagcagcc

SEQ ID NO: 2765921 - DNA, 25 bp, Homo sapien
ttcttgatgcgaattttttttttgc

SEQ ID NO: 2765922 - DNA, 25 bp, Homo sapien
atcagggtcattcttgatgcgaatt

SEQ ID NO: 2765923 - DNA, 25 bp, Homo sapien
gggtcattcttgatgcgaatttttt

SEQ ID NO: 2765924 - DNA, 25 bp, Homo sapien
cagggtcattcttgatgcgaatttt

SEQ ID NO: 2765925 - DNA, 25 bp, Homo sapien
tcctggcctctagtgtgtcctcatg

SEQ ID NO: 2765926 - DNA, 25 bp, Homo sapien
aatttgcctttcaacgatgtcttat

SEQ ID NO: 2765927 - DNA, 25 bp, Homo sapien
tgtcctcatgtgtgttctttagatg

SEQ ID NO: 2765928 - DNA, 25 bp, Homo sapien
aaaaacaggtagtctggacgcggtg

SEQ ID NO: 2765929 - DNA, 25 bp, Homo sapien
ttgtaagcatgacaagactcaagct

SEQ ID NO: 2765930 - DNA, 25 bp, Homo sapien
tattcttctgatgtcgagccctttt

SEQ ID NO: 2765931 - DNA, 25 bp, Homo sapien
tggcaggtatattcctataggcttc

SEQ ID NO: 2765932 - DNA, 25 bp, Homo sapien
tggagctccgaatatttaactttct

SEQ ID NO: 2765933 - DNA, 25 bp, Homo sapien
taatgtgggtaaatcaaagtagcct

SEQ ID NO: 2765934 - DNA, 25 bp, Homo sapien
gcataatttaaagacataggccaca

SEQ ID NO: 2765935 - DNA, 25 bp, Homo sapien
tgtaggttccaagttataggcgatc

SEQ ID NO: 2765936 - DNA, 25 bp, Homo sapien
caatactcagttgctagatcttggc

SEQ ID NO: 2765937 - DNA, 25 bp, Homo sapien
tcttcaccttgtttctttattcttg

SEQ ID NO: 2765938 - DNA, 25 bp, Homo sapien
tcaccttgtttctttattcttgaat

SEQ ID NO: 2765939 - DNA, 25 bp, Homo sapien
ccaattcttcaccttgtttctttat

SEQ ID NO: 2765940 - DNA, 25 bp, Homo sapien
cactgaccaattcttcaccttgttt

SEQ ID NO: 2765941 - DNA, 25 bp, Homo sapien
ctgaggagctgccaacacacaccaa

SEQ ID NO: 2765942 - DNA, 25 bp, Homo sapien
aacaactttcctggcagggtgcagt

SEQ ID NO: 2765943 - DNA, 25 bp, Homo sapien
tatgtacatgactgtaggcctagct

SEQ ID NO: 2765944 - DNA, 25 bp, Homo sapien
tttatatcccatactgaaagatctg

SEQ ID NO: 2765945 - DNA, 25 bp, Homo sapien
ccagatgtattaggctgttgttgca

SEQ ID NO: 2765946 - DNA, 25 bp, Homo sapien
agatggctagatccctggaaagctg

SEQ ID NO: 2765947 - DNA, 25 bp, Homo sapien
gaggaggcactactcacctgtaaac

SEQ ID NO: 2765948 - DNA, 25 bp, Homo sapien
gggtgaggtcacatatccaaattat

SEQ ID NO: 2765949 - DNA, 25 bp, Homo sapien
cacgccctgacctggcagtttctaa

SEQ ID NO: 2765950 - DNA, 25 bp, Homo sapien
gcaacttgaccatgtggttaaaaaa

SEQ ID NO: 2765951 - DNA, 25 bp, Homo sapien
tctaaaagtgtacagtcacatgcat

SEQ ID NO: 2765952 - DNA, 25 bp, Homo sapien
ccctgacctggcagtttctaaaagt

SEQ ID NO: 2765953 - DNA, 25 bp, Homo sapien
ggaattagtgtctatatttcagaaa

SEQ ID NO: 2765954 - DNA, 25 bp, Homo sapien
ggcaattttcaaacgtgatgtgatt

SEQ ID NO: 2765955 - DNA, 25 bp, Homo sapien
aacatacaaaccttgcctatatgga

SEQ ID NO: 2765956 - DNA, 25 bp, Homo sapien
taccaggtggtcatttatgcataaa

SEQ ID NO: 2765957 - DNA, 25 bp, Homo sapien
gcagtgtagtcctaaagaaaaccta

SEQ ID NO: 2765958 - DNA, 25 bp, Homo sapien
cagtactgagggcattacaatccac

SEQ ID NO: 2765959 - DNA, 25 bp, Homo sapien
taggtaggcgaaggacagaacacct

SEQ ID NO: 2765960 - DNA, 25 bp, Homo sapien
gtatagagttcattaggtagcccct

SEQ ID NO: 2765961 - DNA, 25 bp, Homo sapien
caacccttgcaagcctcagatgaat

SEQ ID NO: 2765962 - DNA, 25 bp, Homo sapien
ggtagggcactgtccaacccttgca

SEQ ID NO: 2765963 - DNA, 25 bp, Homo sapien
gcctcagatgaatatggctctcgca

SEQ ID NO: 2765964 - DNA, 25 bp, Homo sapien
tatggctctcgcattaagttcacca

SEQ ID NO: 2765965 - DNA, 25 bp, Homo sapien
tcagagccgaactttatgaaataca

SEQ ID NO: 2765966 - DNA, 25 bp, Homo sapien
taatacactaacaggccacttagag

SEQ ID NO: 2765967 - DNA, 25 bp, Homo sapien
gaaatacagtttatgtagccaaacc

SEQ ID NO: 2765968 - DNA, 25 bp, Homo sapien
cactggatagtgaaaggtagtctga

SEQ ID NO: 2765969 - DNA, 25 bp, Homo sapien
ccttttctttgcagctgaaatttca

SEQ ID NO: 2765970 - DNA, 25 bp, Homo sapien
tttctttgcagctgaaatttcaatg

SEQ ID NO: 2765971 - DNA, 25 bp, Homo sapien
tacccttttctttgcagctgaaatt

SEQ ID NO: 2765972 - DNA, 25 bp, Homo sapien
ctacccttttctttgcagctgaaat

SEQ ID NO: 2765973 - DNA, 25 bp, Homo sapien
tgaaagcctaaaatgtaggagttcc

SEQ ID NO: 2765974 - DNA, 25 bp, Homo sapien
ttgaaagcctaaaatgtaggagttc

SEQ ID NO: 2765975 - DNA, 25 bp, Homo sapien
cacacacgaaaagcctgtaaccttt

SEQ ID NO: 2765976 - DNA, 25 bp, Homo sapien
acacacacacgaaaagcctgtaacc

SEQ ID NO: 2765977 - DNA, 25 bp, Homo sapien
gctaattgaattacacttctgatga

SEQ ID NO: 2765978 - DNA, 25 bp, Homo sapien
aaatgacatagtgagagttatgatc

SEQ ID NO: 2765979 - DNA, 25 bp, Homo sapien
cacgttgtaagcattctttccaagc

SEQ ID NO: 2765980 - DNA, 25 bp, Homo sapien
ccactactgatacttgctaattgaa

SEQ ID NO: 2765981 - DNA, 25 bp, Homo sapien
tttggcaggccaatggagagttatc

SEQ ID NO: 2765982 - DNA, 25 bp, Homo sapien
cactatgctttgtcattggctgaca

SEQ ID NO: 2765983 - DNA, 25 bp, Homo sapien
cagtcaactgtgatagtcactaggg

SEQ ID NO: 2765984 - DNA, 25 bp, Homo sapien
tagtgatggatacaaagatgaaccc

SEQ ID NO: 2765985 - DNA, 25 bp, Homo sapien
ttattatgaagaccatcgggccacc

SEQ ID NO: 2765986 - DNA, 25 bp, Homo sapien
ccatcgggccacctagttactatat

SEQ ID NO: 2765987 - DNA, 25 bp, Homo sapien
tgatggtggcatcctcataaatgaa

SEQ ID NO: 2765988 - DNA, 25 bp, Homo sapien
agttactatataccagttgctatgg

SEQ ID NO: 2765989 - DNA, 25 bp, Homo sapien
ttttctcacttattgacagaattac

SEQ ID NO: 2765990 - DNA, 25 bp, Homo sapien
attttctcacttattgacagaatta

SEQ ID NO: 2765991 - DNA, 25 bp, Homo sapien
tattttctcacttattgacagaatt

SEQ ID NO: 2765992 - DNA, 25 bp, Homo sapien
caaagtgtcagtagagtcagcatgg

SEQ ID NO: 2765993 - DNA, 25 bp, Homo sapien
gaaatgcttggtggctcttagttga

SEQ ID NO: 2765994 - DNA, 25 bp, Homo sapien
tcaaaatagtctacatgggaaatgc

SEQ ID NO: 2765995 - DNA, 25 bp, Homo sapien
gaaggatcttacagtgacagacatc

SEQ ID NO: 2765996 - DNA, 25 bp, Homo sapien
ccacacctagctaatctgtttagtt

SEQ ID NO: 2765997 - DNA, 25 bp, Homo sapien
agatgggggtcctcctatgctgaac

SEQ ID NO: 2765998 - DNA, 25 bp, Homo sapien
atgggggtcctcctatgctgaacag

SEQ ID NO: 2765999 - DNA, 25 bp, Homo sapien
gggtcctcctatgctgaacaggctg

SEQ ID NO: 2766000 - DNA, 25 bp, Homo sapien
cagccttttaccctcctctggaatg

SEQ ID NO: 2766001 - DNA, 25 bp, Homo sapien
cttttaccctcctctggaatgatga

SEQ ID NO: 2766002 - DNA, 25 bp, Homo sapien
gaatgatgagtgtatcccaaaagta

SEQ ID NO: 2766003 - DNA, 25 bp, Homo sapien
ccataatgaggtccagtgtttcctt

SEQ ID NO: 2766004 - DNA, 25 bp, Homo sapien
caatattcttacagccaaaatgtcc

SEQ ID NO: 2766005 - DNA, 25 bp, Homo sapien
tccaatattcttacagccaaaatgt

SEQ ID NO: 2766006 - DNA, 25 bp, Homo sapien
tcttacagccaaaatgtccagaatg

SEQ ID NO: 2766007 - DNA, 25 bp, Homo sapien
tattcttacagccaaaatgtccaga

SEQ ID NO: 2766008 - DNA, 25 bp, Homo sapien
ggtacattatcccatgcgctaaact

SEQ ID NO: 2766009 - DNA, 25 bp, Homo sapien
acgggtacattatcccatgcgctaa

SEQ ID NO: 2766010 - DNA, 25 bp, Homo sapien
tacattatcccatgcgctaaactgc

SEQ ID NO: 2766011 - DNA, 25 bp, Homo sapien
cgggtacattatcccatgcgctaaa

SEQ ID NO: 2766012 - DNA, 25 bp, Homo sapien
ctgcgtttttgattgagacccagat

SEQ ID NO: 2766013 - DNA, 25 bp, Homo sapien
attttctgcgtttttgattgagacc

SEQ ID NO: 2766014 - DNA, 25 bp, Homo sapien
agcagacttttctggtactcttcac

SEQ ID NO: 2766015 - DNA, 25 bp, Homo sapien
gagacccagatggtactgctctagc

SEQ ID NO: 2766016 - DNA, 25 bp, Homo sapien
caaaggcagggagaaatggggtggg

SEQ ID NO: 2766017 - DNA, 25 bp, Homo sapien
ggcaaaggcagggagaaatggggtg

SEQ ID NO: 2766018 - DNA, 25 bp, Homo sapien
gcaaaggcagggagaaatggggtgg

SEQ ID NO: 2766019 - DNA, 25 bp, Homo sapien
caggcaaaggcagggagaaatgggg

SEQ ID NO: 2766020 - DNA, 25 bp, Homo sapien
cccttgtctgctgcgtaggtggagt

SEQ ID NO: 2766021 - DNA, 25 bp, Homo sapien
ccccttgtctgctgcgtaggtggag

SEQ ID NO: 2766022 - DNA, 25 bp, Homo sapien
gaatccaattcccccagaggcgtag

SEQ ID NO: 2766023 - DNA, 25 bp, Homo sapien
caattcccccagaggcgtagccacc

SEQ ID NO: 2766024 - DNA, 25 bp, Homo sapien
ctgaatccaattcccccagaggcgt

SEQ ID NO: 2766025 - DNA, 25 bp, Homo sapien
tccaattcccccagaggcgtagcca

SEQ ID NO: 2766026 - DNA, 25 bp, Homo sapien
aaatggcctttatgctgagtcaagt

SEQ ID NO: 2766027 - DNA, 25 bp, Homo sapien
tggtggcaggaattgggcactctat

SEQ ID NO: 2766028 - DNA, 25 bp, Homo sapien
gaaatgttgcgaatggaaatgacaa

SEQ ID NO: 2766029 - DNA, 25 bp, Homo sapien
gacaacagacacatccccgattgga

SEQ ID NO: 2766030 - DNA, 25 bp, Homo sapien
cagccgcacctatgacagccaaagc

SEQ ID NO: 2766031 - DNA, 25 bp, Homo sapien
gcacctatgacagccaaagcgccag

SEQ ID NO: 2766032 - DNA, 25 bp, Homo sapien
ccgcacctatgacagccaaagcgcc

SEQ ID NO: 2766033 - DNA, 25 bp, Homo sapien
actggctctcggtgacgggcacagt

SEQ ID NO: 2766034 - DNA, 25 bp, Homo sapien
acggccaccagaggttggcacccag

SEQ ID NO: 2766035 - DNA, 25 bp, Homo sapien
tgttcgtgcatcaggtacggccacc

SEQ ID NO: 2766036 - DNA, 25 bp, Homo sapien
tcaggtacggccaccagaggttggc

SEQ ID NO: 2766037 - DNA, 25 bp, Homo sapien
tacaggtaggcggggtgttcgtgca

SEQ ID NO: 2766038 - DNA, 25 bp, Homo sapien
ggttgtccacgactttgttgtctga

SEQ ID NO: 2766039 - DNA, 25 bp, Homo sapien
ccacgactttgttgtctgatttcaa

SEQ ID NO: 2766040 - DNA, 25 bp, Homo sapien
gttgtccacgactttgttgtctgat

SEQ ID NO: 2766041 - DNA, 25 bp, Homo sapien
tgtccacgactttgttgtctgattt

SEQ ID NO: 2766042 - DNA, 25 bp, Homo sapien
ggaggcaagagagaccagggcttag

SEQ ID NO: 2766043 - DNA, 25 bp, Homo sapien
gagagaccagggcttagggagggac

SEQ ID NO: 2766044 - DNA, 25 bp, Homo sapien
caagagagaccagggcttagggagg

SEQ ID NO: 2766045 - DNA, 25 bp, Homo sapien
ggcaagagagaccagggcttaggga

SEQ ID NO: 2766046 - DNA, 25 bp, Homo sapien
cagaataggagaaaactgttgcaac

SEQ ID NO: 2766047 - DNA, 25 bp, Homo sapien
ctaatcacctttctatatggatgac

SEQ ID NO: 2766048 - DNA, 25 bp, Homo sapien
gcccaatatcgctgatcattagaga

SEQ ID NO: 2766049 - DNA, 25 bp, Homo sapien
gactacataagtctgagaataccaa

SEQ ID NO: 2766050 - DNA, 25 bp, Homo sapien
tcagtgtagttacggtctagaaagt

SEQ ID NO: 2766051 - DNA, 25 bp, Homo sapien
cactagggttcaacatagagcagtc

SEQ ID NO: 2766052 - DNA, 25 bp, Homo sapien
tctacagcacctaaaaagattacag

SEQ ID NO: 2766053 - DNA, 25 bp, Homo sapien
catgagattgtgatccttaggaggg

SEQ ID NO: 2766054 - DNA, 25 bp, Homo sapien
acagccaatggcactacagcactca

SEQ ID NO: 2766055 - DNA, 25 bp, Homo sapien
ttcctctgtaagacacatcacagac

SEQ ID NO: 2766056 - DNA, 25 bp, Homo sapien
tgtgaatgctaagcagcacttcagc

SEQ ID NO: 2766057 - DNA, 25 bp, Homo sapien
gcactcacgcctgaatggagtttat

SEQ ID NO: 2766058 - DNA, 25 bp, Homo sapien
tccaagcctttcaggttctaggtgg

SEQ ID NO: 2766059 - DNA, 25 bp, Homo sapien
gtttgtcctctatgcaacctagcaa

SEQ ID NO: 2766060 - DNA, 25 bp, Homo sapien
tctgatcctgtctaagatctgaagc

SEQ ID NO: 2766061 - DNA, 25 bp, Homo sapien
gaattaacgttcatgaacctccgcc

SEQ ID NO: 2766062 - DNA, 25 bp, Homo sapien
tcgggtcacacacggtgtgaaaagg

SEQ ID NO: 2766063 - DNA, 25 bp, Homo sapien
tctaaagcacccactatggatgcac

SEQ ID NO: 2766064 - DNA, 25 bp, Homo sapien
ctaggccccgtagacgcaagattcc

SEQ ID NO: 2766065 - DNA, 25 bp, Homo sapien
cgtagacgcaagattcccctgctgc

SEQ ID NO: 2766066 - DNA, 25 bp, Homo sapien
agcattctggctccgttaactatta

SEQ ID NO: 2766067 - DNA, 25 bp, Homo sapien
cattctggctccgttaactattact

SEQ ID NO: 2766068 - DNA, 25 bp, Homo sapien
caagcattctggctccgttaactat

SEQ ID NO: 2766069 - DNA, 25 bp, Homo sapien
aagcattctggctccgttaactatt

SEQ ID NO: 2766070 - DNA, 25 bp, Homo sapien
tataggctcgagaacaacaggatgc

SEQ ID NO: 2766071 - DNA, 25 bp, Homo sapien
caccctagctatgggcacatgtcag

SEQ ID NO: 2766072 - DNA, 25 bp, Homo sapien
caggatgctttggtcctgtatcagc

SEQ ID NO: 2766073 - DNA, 25 bp, Homo sapien
ccaaaacacagtgtaggaggccaca

SEQ ID NO: 2766074 - DNA, 25 bp, Homo sapien
aatatctactgtttaagctacctaa

SEQ ID NO: 2766075 - DNA, 25 bp, Homo sapien
taagataccatcctataagctacag

SEQ ID NO: 2766076 - DNA, 25 bp, Homo sapien
caatagaactttatatgacgaggaa

SEQ ID NO: 2766077 - DNA, 25 bp, Homo sapien
tttacggtattctgttttagcagct

SEQ ID NO: 2766078 - DNA, 25 bp, Homo sapien
ggaatatccttccaaaacatgctga

SEQ ID NO: 2766079 - DNA, 25 bp, Homo sapien
gggaatatccttccaaaacatgctg

SEQ ID NO: 2766080 - DNA, 25 bp, Homo sapien
ttcaacaacacggtctcaaccaggg

SEQ ID NO: 2766081 - DNA, 25 bp, Homo sapien
gattttcactaccagggaccatttg

SEQ ID NO: 2766082 - DNA, 25 bp, Homo sapien
tattcacatccggtaagtttagggc

SEQ ID NO: 2766083 - DNA, 25 bp, Homo sapien
cctataatacgaggctagagcccac

SEQ ID NO: 2766084 - DNA, 25 bp, Homo sapien
caattaatcagacttcactgtccat

SEQ ID NO: 2766085 - DNA, 25 bp, Homo sapien
tatatctctagtaacaaggaaacca

SEQ ID NO: 2766086 - DNA, 25 bp, Homo sapien
ctaaagttggtaaagttcacagaga

SEQ ID NO: 2766087 - DNA, 25 bp, Homo sapien
agttcacagagatcgtcaaacttgc

SEQ ID NO: 2766088 - DNA, 25 bp, Homo sapien
actgcatcctccaccccgccaggtt

SEQ ID NO: 2766089 - DNA, 25 bp, Homo sapien
actgttgctgcccaggctgtagcgc

SEQ ID NO: 2766090 - DNA, 25 bp, Homo sapien
cgccaggttcaagtgattctcctgc

SEQ ID NO: 2766091 - DNA, 25 bp, Homo sapien
cgcagtggtgggatctcggttcact

SEQ ID NO: 2766092 - DNA, 25 bp, Homo sapien
ccatattatcgatcagggacctgtg

SEQ ID NO: 2766093 - DNA, 25 bp, Homo sapien
gaatatctttgggtgaagctgcaga

SEQ ID NO: 2766094 - DNA, 25 bp, Homo sapien
tgagcacacaggaacattaacatgg

SEQ ID NO: 2766095 - DNA, 25 bp, Homo sapien
gaaagggaccctagcacgttgctgt

SEQ ID NO: 2766096 - DNA, 25 bp, Homo sapien
catttataaactgagggatgaagac

SEQ ID NO: 2766097 - DNA, 25 bp, Homo sapien
tataaactgagggatgaagacgacc

SEQ ID NO: 2766098 - DNA, 25 bp, Homo sapien
tttataaactgagggatgaagacga

SEQ ID NO: 2766099 - DNA, 25 bp, Homo sapien
atttataaactgagggatgaagacg

SEQ ID NO: 2766100 - DNA, 25 bp, Homo sapien
ctaaaatttctttccgaatgtagat

SEQ ID NO: 2766101 - DNA, 25 bp, Homo sapien
taaaatttctttccgaatgtagatg

SEQ ID NO: 2766102 - DNA, 25 bp, Homo sapien
tcaagtgtattttacttccctgatt

SEQ ID NO: 2766103 - DNA, 25 bp, Homo sapien
tacttccctgatttctggctctgtg

SEQ ID NO: 2766104 - DNA, 25 bp, Homo sapien
ggctctgtgtctcttactagctgtt

SEQ ID NO: 2766105 - DNA, 25 bp, Homo sapien
tcttactagctgttcctttgatgct

SEQ ID NO: 2766106 - DNA, 25 bp, Homo sapien
tgctgccttcctatatgagacatga

SEQ ID NO: 2766107 - DNA, 25 bp, Homo sapien
tgcagtcccttttataattgctgcc

SEQ ID NO: 2766108 - DNA, 25 bp, Homo sapien
tcccttttataattgctgccttcct

SEQ ID NO: 2766109 - DNA, 25 bp, Homo sapien
agtcccttttataattgctgccttc

SEQ ID NO: 2766110 - DNA, 25 bp, Homo sapien
aggtctctccggcatttcccgaatg

SEQ ID NO: 2766111 - DNA, 25 bp, Homo sapien
gagatcgaggtctctccggcatttc

SEQ ID NO: 2766112 - DNA, 25 bp, Homo sapien
ggcatttcccgaatgcaatggaatt

SEQ ID NO: 2766113 - DNA, 25 bp, Homo sapien
tctccggcatttcccgaatgcaatg

SEQ ID NO: 2766114 - DNA, 25 bp, Homo sapien
tgctgaccaaaattgtaatccgtga

SEQ ID NO: 2766115 - DNA, 25 bp, Homo sapien
ggttaggttctttcagcccgacatc

SEQ ID NO: 2766116 - DNA, 25 bp, Homo sapien
cagagtacttcccatgacactgtct

SEQ ID NO: 2766117 - DNA, 25 bp, Homo sapien
tgtgctgcagactaagcctcctcgg

SEQ ID NO: 2766118 - DNA, 25 bp, Homo sapien
tattttatgccgactacagagctgt

SEQ ID NO: 2766119 - DNA, 25 bp, Homo sapien
tgccgactacagagctgtccaattc

SEQ ID NO: 2766120 - DNA, 25 bp, Homo sapien
gctgtccaattccactctctttttt

SEQ ID NO: 2766121 - DNA, 25 bp, Homo sapien
ttttcccatatattttatgccgact

SEQ ID NO: 2766122 - DNA, 25 bp, Homo sapien
tctttttgtcactgttggtctccat

SEQ ID NO: 2766123 - DNA, 25 bp, Homo sapien
ttctttttgtcactgttggtctcca

SEQ ID NO: 2766124 - DNA, 25 bp, Homo sapien
taatttctttttgtcactgttggtc

SEQ ID NO: 2766125 - DNA, 25 bp, Homo sapien
atttctttttgtcactgttggtctc

SEQ ID NO: 2766126 - DNA, 25 bp, Homo sapien
taatcatagacaatgttcacagtat

SEQ ID NO: 2766127 - DNA, 25 bp, Homo sapien
ataaggatatagtgacgggtcattt

SEQ ID NO: 2766128 - DNA, 25 bp, Homo sapien
caatgttcacagtataaggatatag

SEQ ID NO: 2766129 - DNA, 25 bp, Homo sapien
catagacaatgttcacagtataagg

SEQ ID NO: 2766130 - DNA, 25 bp, Homo sapien
gacaacagtagttttctggccaggg

SEQ ID NO: 2766131 - DNA, 25 bp, Homo sapien
cagtagttttctggccagggtcatg

SEQ ID NO: 2766132 - DNA, 25 bp, Homo sapien
caacagtagttttctggccagggtc

SEQ ID NO: 2766133 - DNA, 25 bp, Homo sapien
agtgacaacagtagttttctggcca

SEQ ID NO: 2766134 - DNA, 25 bp, Homo sapien
aatgacggaaaacattgcagctgct

SEQ ID NO: 2766135 - DNA, 25 bp, Homo sapien
tcttcccttcctgaatgacggaaaa

SEQ ID NO: 2766136 - DNA, 25 bp, Homo sapien
tcctgaatgacggaaaacattgcag

SEQ ID NO: 2766137 - DNA, 25 bp, Homo sapien
gactcttcccactatccagggctaa

SEQ ID NO: 2766138 - DNA, 25 bp, Homo sapien
ggtagtacgacagcgccctctcttg

SEQ ID NO: 2766139 - DNA, 25 bp, Homo sapien
gatttggaggtagtacgacagcgcc

SEQ ID NO: 2766140 - DNA, 25 bp, Homo sapien
tggaggtagtacgacagcgccctct

SEQ ID NO: 2766141 - DNA, 25 bp, Homo sapien
caggatttggaggtagtacgacagc

SEQ ID NO: 2766142 - DNA, 25 bp, Homo sapien
ccagacgtggcgctgtgaaacagag

SEQ ID NO: 2766143 - DNA, 25 bp, Homo sapien
ctgcgctggagcaagtgtgcgtgct

SEQ ID NO: 2766144 - DNA, 25 bp, Homo sapien
gcgctgtgaaacagagcccctctga

SEQ ID NO: 2766145 - DNA, 25 bp, Homo sapien
gacgtggcgctgtgaaacagagccc

SEQ ID NO: 2766146 - DNA, 25 bp, Homo sapien
ggatcaaaatgcgaccctgacgggc

SEQ ID NO: 2766147 - DNA, 25 bp, Homo sapien
gggatcaaaatgcgaccctgacggg

SEQ ID NO: 2766148 - DNA, 25 bp, Homo sapien
gtggggatcaaaatgcgaccctgac

SEQ ID NO: 2766149 - DNA, 25 bp, Homo sapien
accctgacgggccaggcaaccaaag

SEQ ID NO: 2766150 - DNA, 25 bp, Homo sapien
ttgtcctaataatgtctggtgaggg

SEQ ID NO: 2766151 - DNA, 25 bp, Homo sapien
cagggttaggcacagacacgaaggt

SEQ ID NO: 2766152 - DNA, 25 bp, Homo sapien
gatgggaagaaacaccttcgaagct

SEQ ID NO: 2766153 - DNA, 25 bp, Homo sapien
gctctttgcgagttaggtttggctg

SEQ ID NO: 2766154 - DNA, 25 bp, Homo sapien
caatggagacacttgcctcagtcac

SEQ ID NO: 2766155 - DNA, 25 bp, Homo sapien
actgtcagagaggagataggccata

SEQ ID NO: 2766156 - DNA, 25 bp, Homo sapien
gataaggagcatctgaacatcaaga

SEQ ID NO: 2766157 - DNA, 25 bp, Homo sapien
ttaataagaccgatatggacaggag

SEQ ID NO: 2766158 - DNA, 25 bp, Homo sapien
acgatgagtcagtagttttgtattc

SEQ ID NO: 2766159 - DNA, 25 bp, Homo sapien
cgtggctatacgatgagtcagtagt

SEQ ID NO: 2766160 - DNA, 25 bp, Homo sapien
ttgtattcataatcattgtccttta

SEQ ID NO: 2766161 - DNA, 25 bp, Homo sapien
gctgtaaactctttcgtggctatac

SEQ ID NO: 2766162 - DNA, 25 bp, Homo sapien
agaggaattaaacatctccaacctg

SEQ ID NO: 2766163 - DNA, 25 bp, Homo sapien
tgagatgtctcatagaatcaaaaga

SEQ ID NO: 2766164 - DNA, 25 bp, Homo sapien
gtcctgccattcacgtaactcattg

SEQ ID NO: 2766165 - DNA, 25 bp, Homo sapien
gagtcagcgtcctcctactgcagtc

SEQ ID NO: 2766166 - DNA, 25 bp, Homo sapien
agcttgatatcttcaccctcctgtc

SEQ ID NO: 2766167 - DNA, 25 bp, Homo sapien
ctgtcctctacctcgggctcagcct

SEQ ID NO: 2766168 - DNA, 25 bp, Homo sapien
cctcacagttttggtcattgctgtc

SEQ ID NO: 2766169 - DNA, 25 bp, Homo sapien
cagctctgaagcttgatatcttcac

SEQ ID NO: 2766170 - DNA, 25 bp, Homo sapien
taagtgctcgagagagatgtgacac

SEQ ID NO: 2766171 - DNA, 25 bp, Homo sapien
aggcttagcccatgtgtcccggaaa

SEQ ID NO: 2766172 - DNA, 25 bp, Homo sapien
gactgaatccagaggtaaagctttg

SEQ ID NO: 2766173 - DNA, 25 bp, Homo sapien
taaagctttgagaatctgcggccct

SEQ ID NO: 2766174 - DNA, 25 bp, Homo sapien
aaaataccctccaacccatttgctg

SEQ ID NO: 2766175 - DNA, 25 bp, Homo sapien
gagtgctggtgaccttagttctgca

SEQ ID NO: 2766176 - DNA, 25 bp, Homo sapien
gagcttgtccagagcgcttacaggg

SEQ ID NO: 2766177 - DNA, 25 bp, Homo sapien
tgctgctccatataaacaatagagc

SEQ ID NO: 2766178 - DNA, 25 bp, Homo sapien
gtggaacctgatggagcatcaaaat

SEQ ID NO: 2766179 - DNA, 25 bp, Homo sapien
ccagaggagattattacggttaact

SEQ ID NO: 2766180 - DNA, 25 bp, Homo sapien
gcttgagccagaggagattattacg

SEQ ID NO: 2766181 - DNA, 25 bp, Homo sapien
aaaagagtggaacctgatggagcat

SEQ ID NO: 2766182 - DNA, 25 bp, Homo sapien
gaagagctcggagtgaccgctcatc

SEQ ID NO: 2766183 - DNA, 25 bp, Homo sapien
tacatgggatttgcctgaaagtggg

SEQ ID NO: 2766184 - DNA, 25 bp, Homo sapien
atgctgctgccaaggaccgagaggt

SEQ ID NO: 2766185 - DNA, 25 bp, Homo sapien
gtgttgctacccaaggcctaccacg

SEQ ID NO: 2766186 - DNA, 25 bp, Homo sapien
gtgttgcacagagccccttctggac

SEQ ID NO: 2766187 - DNA, 25 bp, Homo sapien
cccttctggacaggcatgatttggg

SEQ ID NO: 2766188 - DNA, 25 bp, Homo sapien
caatcccggaaactgtgttgcacag

SEQ ID NO: 2766189 - DNA, 25 bp, Homo sapien
gcatgatttgggtcagtgaacccat

SEQ ID NO: 2766190 - DNA, 25 bp, Homo sapien
gagccaatagggtcaatgcaccgtc

SEQ ID NO: 2766191 - DNA, 25 bp, Homo sapien
cctctggttaccagagccaataggg

SEQ ID NO: 2766192 - DNA, 25 bp, Homo sapien
ccaatagggtcaatgcaccgtctag

SEQ ID NO: 2766193 - DNA, 25 bp, Homo sapien
ttaccagagccaatagggtcaatgc

SEQ ID NO: 2766194 - DNA, 25 bp, Homo sapien
gtgacagcagtaattaaggcatgta

SEQ ID NO: 2766195 - DNA, 25 bp, Homo sapien
gcatcttcttgcatgggtcacccca

SEQ ID NO: 2766196 - DNA, 25 bp, Homo sapien
cagggtttgattcccaggccaactg

SEQ ID NO: 2766197 - DNA, 25 bp, Homo sapien
taaggcatgtacttggtgataggca

SEQ ID NO: 2766198 - DNA, 25 bp, Homo sapien
gaaacagccacatatagcaccctca

SEQ ID NO: 2766199 - DNA, 25 bp, Homo sapien
tgaaacagccacatatagcaccctc

SEQ ID NO: 2766200 - DNA, 25 bp, Homo sapien
aaacagccacatatagcaccctcac

SEQ ID NO: 2766201 - DNA, 25 bp, Homo sapien
ccgggtaacgagcaggagcattaca

SEQ ID NO: 2766202 - DNA, 25 bp, Homo sapien
ggagcattacaaccattccatgtcc

SEQ ID NO: 2766203 - DNA, 25 bp, Homo sapien
ccatgtcccccacggggtcatggga

SEQ ID NO: 2766204 - DNA, 25 bp, Homo sapien
tcccccacggggtcatgggagtagc

SEQ ID NO: 2766205 - DNA, 25 bp, Homo sapien
catgtgtgccatgggctcctcttcc

SEQ ID NO: 2766206 - DNA, 25 bp, Homo sapien
gtagctccctctcatgtgtgccatg

SEQ ID NO: 2766207 - DNA, 25 bp, Homo sapien
tagtgtagctccctctcatgtgtgc

SEQ ID NO: 2766208 - DNA, 25 bp, Homo sapien
catgttagtgtagctccctctcatg

SEQ ID NO: 2766209 - DNA, 25 bp, Homo sapien
agaaaacgatgatgaatcagacctg

SEQ ID NO: 2766210 - DNA, 25 bp, Homo sapien
gttcctccactgtagtgaacagaaa

SEQ ID NO: 2766211 - DNA, 25 bp, Homo sapien
ctccactgtagtgaacagaaaggcc

SEQ ID NO: 2766212 - DNA, 25 bp, Homo sapien
gaactagaaaacgatgatgaatcag

SEQ ID NO: 2766213 - DNA, 25 bp, Homo sapien
gttgtccagagggaccagcattcca

SEQ ID NO: 2766214 - DNA, 25 bp, Homo sapien
cccgattatagaggtagacactgtc

SEQ ID NO: 2766215 - DNA, 25 bp, Homo sapien
cagagatgatgcaggacccgattat

SEQ ID NO: 2766216 - DNA, 25 bp, Homo sapien
tgtggtcaacttctgtctgggatgg

SEQ ID NO: 2766217 - DNA, 25 bp, Homo sapien
tcatagttgcttattgtcaatttcc

SEQ ID NO: 2766218 - DNA, 25 bp, Homo sapien
cagagtcagattttgtcatagttgc

SEQ ID NO: 2766219 - DNA, 25 bp, Homo sapien
ctggccagtgctcactactccaggc

SEQ ID NO: 2766220 - DNA, 25 bp, Homo sapien
ggctacctccacaaatcagtctggc

SEQ ID NO: 2766221 - DNA, 25 bp, Homo sapien
ggttcctctttgagtatcatgcaat

SEQ ID NO: 2766222 - DNA, 25 bp, Homo sapien
tttacttcacgtgcctgttgtttct

SEQ ID NO: 2766223 - DNA, 25 bp, Homo sapien
tatacacaattttacttcacgtgcc

SEQ ID NO: 2766224 - DNA, 25 bp, Homo sapien
cctctttgagtatcatgcaatccca

SEQ ID NO: 2766225 - DNA, 25 bp, Homo sapien
gatcacctgacaaggcaagcaagtg

SEQ ID NO: 2766226 - DNA, 25 bp, Homo sapien
tctggtgggcagagatatcacactt

SEQ ID NO: 2766227 - DNA, 25 bp, Homo sapien
gaagatggtcccaacattcactgga

SEQ ID NO: 2766228 - DNA, 25 bp, Homo sapien
gctgtgtacacttcatgaagatggt

SEQ ID NO: 2766229 - DNA, 25 bp, Homo sapien
ggtgtagaagcccactcttgaggcc

SEQ ID NO: 2766230 - DNA, 25 bp, Homo sapien
ttgggggtgtagaagcccactcttg

SEQ ID NO: 2766231 - DNA, 25 bp, Homo sapien
tgaatgctgcccagtagctgacaac

SEQ ID NO: 2766232 - DNA, 25 bp, Homo sapien
gcccagtagctgacaactgcttggg

SEQ ID NO: 2766233 - DNA, 25 bp, Homo sapien
cctctggttggccaaaagtgacctg

SEQ ID NO: 2766234 - DNA, 25 bp, Homo sapien
acaagtggaagtcgcatggcctctc

SEQ ID NO: 2766235 - DNA, 25 bp, Homo sapien
gagagcgtcctcttaagacacacag

SEQ ID NO: 2766236 - DNA, 25 bp, Homo sapien
tttggtggcaagtttcccaggctca

SEQ ID NO: 2766237 - DNA, 25 bp, Homo sapien
tttcaaaggtccactctggtcaggc

SEQ ID NO: 2766238 - DNA, 25 bp, Homo sapien
gggtcctaagtgctctcatagcagt

SEQ ID NO: 2766239 - DNA, 25 bp, Homo sapien
caaggctgatgtcgcttgggtccta

SEQ ID NO: 2766240 - DNA, 25 bp, Homo sapien
tctttctggttttacgacttgggca

SEQ ID NO: 2766241 - DNA, 25 bp, Homo sapien
tggtagattatctccctccaacctt

SEQ ID NO: 2766242 - DNA, 25 bp, Homo sapien
aaatcatgctgcctctaactagacc

SEQ ID NO: 2766243 - DNA, 25 bp, Homo sapien
gacccagaagtacagtcagctcctg

SEQ ID NO: 2766244 - DNA, 25 bp, Homo sapien
ggctacttcattactatggtcttac

SEQ ID NO: 2766245 - DNA, 25 bp, Homo sapien
gtggtattcaatgtatccaatgaac

SEQ ID NO: 2766246 - DNA, 25 bp, Homo sapien
gttctcatcaaagggtggtattcaa

SEQ ID NO: 2766247 - DNA, 25 bp, Homo sapien
tcaaagggtggtattcaatgtatcc

SEQ ID NO: 2766248 - DNA, 25 bp, Homo sapien
cctttcacctgggcctagttctcat

SEQ ID NO: 2766249 - DNA, 25 bp, Homo sapien
aagccacgaacagccgggacgcgcg

SEQ ID NO: 2766250 - DNA, 25 bp, Homo sapien
gactaaaagcaagccacgaacagcc

SEQ ID NO: 2766251 - DNA, 25 bp, Homo sapien
gatccctggagactaaaagcaagcc

SEQ ID NO: 2766252 - DNA, 25 bp, Homo sapien
cccacgatccctggagactaaaagc

SEQ ID NO: 2766253 - DNA, 25 bp, Homo sapien
cactggatccaggtcggcgggggcc

SEQ ID NO: 2766254 - DNA, 25 bp, Homo sapien
ctggatccaggtcggcgggggccgg

SEQ ID NO: 2766255 - DNA, 25 bp, Homo sapien
cccgccggcctagcccgggagctcg

SEQ ID NO: 2766256 - DNA, 25 bp, Homo sapien
ccactggatccaggtcggcgggggc

SEQ ID NO: 2766257 - DNA, 25 bp, Homo sapien
gtgtccccgcctttgtgtctggagc

SEQ ID NO: 2766258 - DNA, 25 bp, Homo sapien
agggactgcggcgcaggaagccgag

SEQ ID NO: 2766259 - DNA, 25 bp, Homo sapien
gtgagtgcgcggcacggagttggga

SEQ ID NO: 2766260 - DNA, 25 bp, Homo sapien
cacggagttgggaggctcccggcgc

SEQ ID NO: 2766261 - DNA, 25 bp, Homo sapien
tcgggagtaaggaggacgtggagcc

SEQ ID NO: 2766262 - DNA, 25 bp, Homo sapien
tctgcggtttgcagggttgacatcc

SEQ ID NO: 2766263 - DNA, 25 bp, Homo sapien
ttgagtttcgcatcccccttttgtg

SEQ ID NO: 2766264 - DNA, 25 bp, Homo sapien
aaccaccttcgctgccttcttgggc

SEQ ID NO: 2766265 - DNA, 25 bp, Homo sapien
gaatgtggaagatgcataaccagta

SEQ ID NO: 2766266 - DNA, 25 bp, Homo sapien
aatgtggaagatgcataaccagtag

SEQ ID NO: 2766267 - DNA, 25 bp, Homo sapien
ttccaatgcgatgaatgtggaagat

SEQ ID NO: 2766268 - DNA, 25 bp, Homo sapien
tgataacctggtttccaatgcgatg

SEQ ID NO: 2766269 - DNA, 25 bp, Homo sapien
ggagttgggtctgttctgtcttcag

SEQ ID NO: 2766270 - DNA, 25 bp, Homo sapien
gagttgggtctgttctgtcttcagc

SEQ ID NO: 2766271 - DNA, 25 bp, Homo sapien
aggagttgggtctgttctgtcttca

SEQ ID NO: 2766272 - DNA, 25 bp, Homo sapien
cagcctgatgtggctgtcttgatgg

SEQ ID NO: 2766273 - DNA, 25 bp, Homo sapien
ctgatgtggctgtcttgatggggac

SEQ ID NO: 2766274 - DNA, 25 bp, Homo sapien
agcctgatgtggctgtcttgatggg

SEQ ID NO: 2766275 - DNA, 25 bp, Homo sapien
gccccccagcctgatgtggctgtct

SEQ ID NO: 2766276 - DNA, 25 bp, Homo sapien
gccgtagtcattgtcaggtttccca

SEQ ID NO: 2766277 - DNA, 25 bp, Homo sapien
ttctctgccataggcactttgctgc

SEQ ID NO: 2766278 - DNA, 25 bp, Homo sapien
tcctcgaataaggtcagggctggcc

SEQ ID NO: 2766279 - DNA, 25 bp, Homo sapien
tttagccaggttagatatggtcgca

SEQ ID NO: 2766280 - DNA, 25 bp, Homo sapien
gaaaaactcatgtctgccgctaact

SEQ ID NO: 2766281 - DNA, 25 bp, Homo sapien
ttttttgaggaaaaactcatgtctg

SEQ ID NO: 2766282 - DNA, 25 bp, Homo sapien
gaggaaaaactcatgtctgccgcta

SEQ ID NO: 2766283 - DNA, 25 bp, Homo sapien
ttgaggaaaaactcatgtctgccgc

SEQ ID NO: 2766284 - DNA, 25 bp, Homo sapien
aatggaaatagcccagaagactcac

SEQ ID NO: 2766285 - DNA, 25 bp, Homo sapien
agaagactcacacttgaattgccag

SEQ ID NO: 2766286 - DNA, 25 bp, Homo sapien
cagaatggaaatagcccagaagact

SEQ ID NO: 2766287 - DNA, 25 bp, Homo sapien
aagactcacacttgaattgccagca

SEQ ID NO: 2766288 - DNA, 25 bp, Homo sapien
ggggagtagctattaccagaatgac

SEQ ID NO: 2766289 - DNA, 25 bp, Homo sapien
catttccacctctaggggagtagct

SEQ ID NO: 2766290 - DNA, 25 bp, Homo sapien
agagtctctgaatagccctgatgag

SEQ ID NO: 2766291 - DNA, 25 bp, Homo sapien
ccctgatgaggagacatttccacct

SEQ ID NO: 2766292 - DNA, 25 bp, Homo sapien
catactcgaattaggctgttgtgca

SEQ ID NO: 2766293 - DNA, 25 bp, Homo sapien
cataggttgtagctcagcctgggct

SEQ ID NO: 2766294 - DNA, 25 bp, Homo sapien
caaggaaggcgagtccgtttactca

SEQ ID NO: 2766295 - DNA, 25 bp, Homo sapien
tagtgtggccttgctaacctgatag

SEQ ID NO: 2766296 - DNA, 25 bp, Homo sapien
gagtatgcggtgactcacagtctgg

SEQ ID NO: 2766297 - DNA, 25 bp, Homo sapien
ctaaacatgaagagcttgaaagcga

SEQ ID NO: 2766298 - DNA, 25 bp, Homo sapien
aagagcttgaaagcgaagttcagga

SEQ ID NO: 2766299 - DNA, 25 bp, Homo sapien
aagttcaggaagagtgacgtgagta

SEQ ID NO: 2766300 - DNA, 25 bp, Homo sapien
ccagggactcgtactcatttgttat

SEQ ID NO: 2766301 - DNA, 25 bp, Homo sapien
gaattccagggactcgtactcattt

SEQ ID NO: 2766302 - DNA, 25 bp, Homo sapien
ccgaattccagggactcgtactcat

SEQ ID NO: 2766303 - DNA, 25 bp, Homo sapien
ttccagggactcgtactcatttgtt

SEQ ID NO: 2766304 - DNA, 25 bp, Homo sapien
atgcagcctacatatctcccgtggc

SEQ ID NO: 2766305 - DNA, 25 bp, Homo sapien
ctagctgttggccagagtgaaagtc

SEQ ID NO: 2766306 - DNA, 25 bp, Homo sapien
tcctggtcatccgacttccgagaaa

SEQ ID NO: 2766307 - DNA, 25 bp, Homo sapien
tcatagagtgcaaagagacttcgac

SEQ ID NO: 2766308 - DNA, 25 bp, Homo sapien
aggaggaaattggtataatggagcc

SEQ ID NO: 2766309 - DNA, 25 bp, Homo sapien
ggaaattggtataatggagcccaac

SEQ ID NO: 2766310 - DNA, 25 bp, Homo sapien
aaattggtataatggagcccaacaa

SEQ ID NO: 2766311 - DNA, 25 bp, Homo sapien
gaggaaattggtataatggagccca

SEQ ID NO: 2766312 - DNA, 25 bp, Homo sapien
tctctgtctacgtggagctccactg

SEQ ID NO: 2766313 - DNA, 25 bp, Homo sapien
agtaaaacatctctgtctacgtgga

SEQ ID NO: 2766314 - DNA, 25 bp, Homo sapien
tctgctcttccagtggtgccagtaa

SEQ ID NO: 2766315 - DNA, 25 bp, Homo sapien
ctccactgtgggctaaatgggtcat

SEQ ID NO: 2766316 - DNA, 25 bp, Homo sapien
tctttcacctagagcatctggaccc

SEQ ID NO: 2766317 - DNA, 25 bp, Homo sapien
tcacctagagcatctggacccttct

SEQ ID NO: 2766318 - DNA, 25 bp, Homo sapien
agagcatctggacccttctctaaag

SEQ ID NO: 2766319 - DNA, 25 bp, Homo sapien
aaatctctctttcacctagagcatc

SEQ ID NO: 2766320 - DNA, 25 bp, Homo sapien
cagctccgtgactcgggctctgcct

SEQ ID NO: 2766321 - DNA, 25 bp, Homo sapien
gaagcttctgggcttgtatacagcc

SEQ ID NO: 2766322 - DNA, 25 bp, Homo sapien
tacagcctgcggtatatctcatctg

SEQ ID NO: 2766323 - DNA, 25 bp, Homo sapien
tgggtttggccatgaaagtatattg

SEQ ID NO: 2766324 - DNA, 25 bp, Homo sapien
tctctggataagtatggtggcagct

SEQ ID NO: 2766325 - DNA, 25 bp, Homo sapien
agtctcccatgatagatcaagccaa

SEQ ID NO: 2766326 - DNA, 25 bp, Homo sapien
tccccaatcccatagtcattgcagg

SEQ ID NO: 2766327 - DNA, 25 bp, Homo sapien
tgcaggtactctctcactgccactt

SEQ ID NO: 2766328 - DNA, 25 bp, Homo sapien
cctacccgatgcctccagtgaaaaa

SEQ ID NO: 2766329 - DNA, 25 bp, Homo sapien
tgacttcttgtgacatggtgggtct

SEQ ID NO: 2766330 - DNA, 25 bp, Homo sapien
tgggctttcataggactgagtccac

SEQ ID NO: 2766331 - DNA, 25 bp, Homo sapien
gagtccacagcactagtctagcacg

SEQ ID NO: 2766332 - DNA, 25 bp, Homo sapien
ccccatgagactgtgctttgacttc

SEQ ID NO: 2766333 - DNA, 25 bp, Homo sapien
cctctgcagattagatgccaataga

SEQ ID NO: 2766334 - DNA, 25 bp, Homo sapien
tccttcttccctagtccatgataaa

SEQ ID NO: 2766335 - DNA, 25 bp, Homo sapien
cacacctagcccactactgatattt

SEQ ID NO: 2766336 - DNA, 25 bp, Homo sapien
ggacctgtcttgtgcattgtagaga

SEQ ID NO: 2766337 - DNA, 25 bp, Homo sapien
gactcaggagaagaactagaaggct

SEQ ID NO: 2766338 - DNA, 25 bp, Homo sapien
caatgatagatccttcccagcgaga

SEQ ID NO: 2766339 - DNA, 25 bp, Homo sapien
tcatgagaggtatcctgagggcaca

SEQ ID NO: 2766340 - DNA, 25 bp, Homo sapien
aaatatcagctatcggactttccag

SEQ ID NO: 2766341 - DNA, 25 bp, Homo sapien
tctgcatgcaaaagtgcccttcatc

SEQ ID NO: 2766342 - DNA, 25 bp, Homo sapien
gcaaaagtgcccttcatcccgggat

SEQ ID NO: 2766343 - DNA, 25 bp, Homo sapien
ctataggatggcaactgagagaagg

SEQ ID NO: 2766344 - DNA, 25 bp, Homo sapien
gggaaacctgcccaaattttgcagc

SEQ ID NO: 2766345 - DNA, 25 bp, Homo sapien
cactgagttctggagtcttaatggt

SEQ ID NO: 2766346 - DNA, 25 bp, Homo sapien
taatggtgggctttctctaatgctg

SEQ ID NO: 2766347 - DNA, 25 bp, Homo sapien
ggatgttatcccttcttctagtgac

SEQ ID NO: 2766348 - DNA, 25 bp, Homo sapien
catgctgatcatggtttgtgctccc

SEQ ID NO: 2766349 - DNA, 25 bp, Homo sapien
tccttccagattgtcccaatacatt

SEQ ID NO: 2766350 - DNA, 25 bp, Homo sapien
ttaagaagcatagttcttggtggcc

SEQ ID NO: 2766351 - DNA, 25 bp, Homo sapien
tcaagttcctactcctatcagaaag

SEQ ID NO: 2766352 - DNA, 25 bp, Homo sapien
tacatttttacatgcctgagatcac

SEQ ID NO: 2766353 - DNA, 25 bp, Homo sapien
atcgttttattttggcctgaaggag

SEQ ID NO: 2766354 - DNA, 25 bp, Homo sapien
catcgttttattttggcctgaagga

SEQ ID NO: 2766355 - DNA, 25 bp, Homo sapien
tcatcgttttattttggcctgaagg

SEQ ID NO: 2766356 - DNA, 25 bp, Homo sapien
ctgatatttttagccatgattccag

SEQ ID NO: 2766357 - DNA, 25 bp, Homo sapien
gcaaagagaacacgggaacaaaaga

SEQ ID NO: 2766358 - DNA, 25 bp, Homo sapien
ttattactgagatgcagtcaccttc

SEQ ID NO: 2766359 - DNA, 25 bp, Homo sapien
tattactgagatgcagtcaccttca

SEQ ID NO: 2766360 - DNA, 25 bp, Homo sapien
tttattactgagatgcagtcacctt

SEQ ID NO: 2766361 - DNA, 25 bp, Homo sapien
ttactgagatgcagtcaccttcaat

SEQ ID NO: 2766362 - DNA, 25 bp, Homo sapien
cacctcttgtctcagtagcccaggc

SEQ ID NO: 2766363 - DNA, 25 bp, Homo sapien
gatggtggttaaaacctcagctgtg

SEQ ID NO: 2766364 - DNA, 25 bp, Homo sapien
actctagccagttcttcacctcttg

SEQ ID NO: 2766365 - DNA, 25 bp, Homo sapien
tctttgcactctagccagttcttca

SEQ ID NO: 2766366 - DNA, 25 bp, Homo sapien
tacttctgaatcattggttcacaac

SEQ ID NO: 2766367 - DNA, 25 bp, Homo sapien
gaatcggtattttttgctgaaccac

SEQ ID NO: 2766368 - DNA, 25 bp, Homo sapien
tcgactccactatcgggaaaggaat

SEQ ID NO: 2766369 - DNA, 25 bp, Homo sapien
ttccccaagatcaataacttcgact

SEQ ID NO: 2766370 - DNA, 25 bp, Homo sapien
taagcagtcttcttacccaattaag

SEQ ID NO: 2766371 - DNA, 25 bp, Homo sapien
tgctccaaatacaaagtgctaaagt

SEQ ID NO: 2766372 - DNA, 25 bp, Homo sapien
taagtgaaggtttctatcttgcaac

SEQ ID NO: 2766373 - DNA, 25 bp, Homo sapien
tattaattccaatcaaagagacaga

SEQ ID NO: 2766374 - DNA, 25 bp, Homo sapien
tcttaagtcccagaggccaaaagag

SEQ ID NO: 2766375 - DNA, 25 bp, Homo sapien
aaatgagatgtcgaaggaagtcacc

SEQ ID NO: 2766376 - DNA, 25 bp, Homo sapien
tactcaacaagctcatccaaaaggc

SEQ ID NO: 2766377 - DNA, 25 bp, Homo sapien
gaagtcaccaaattgaaggaggcct

SEQ ID NO: 2766378 - DNA, 25 bp, Homo sapien
ttacatttaatgtagctgtatttgc

SEQ ID NO: 2766379 - DNA, 25 bp, Homo sapien
acatttgatatatttccttgcagta

SEQ ID NO: 2766380 - DNA, 25 bp, Homo sapien
gctgtatttgcataagtatatgtac

SEQ ID NO: 2766381 - DNA, 25 bp, Homo sapien
aatgtagctgtatttgcataagtat

SEQ ID NO: 2766382 - DNA, 25 bp, Homo sapien
tcagaaatacacaagccagtaaggc

SEQ ID NO: 2766383 - DNA, 25 bp, Homo sapien
gcttccagtgctagcataaagtgga

SEQ ID NO: 2766384 - DNA, 25 bp, Homo sapien
ggccacaacaattttagaagcttcc

SEQ ID NO: 2766385 - DNA, 25 bp, Homo sapien
tccctaagatgattgacaagtattc

SEQ ID NO: 2766386 - DNA, 25 bp, Homo sapien
tatctgtgaagctcaggaaatccaa

SEQ ID NO: 2766387 - DNA, 25 bp, Homo sapien
tatgtatgccagacctaatatgagc

SEQ ID NO: 2766388 - DNA, 25 bp, Homo sapien
tttcaacaagggacagtaaactgtg

SEQ ID NO: 2766389 - DNA, 25 bp, Homo sapien
ggtagccatgcttgagactttttaa

SEQ ID NO: 2766390 - DNA, 25 bp, Homo sapien
tcttgtttccggatgcatatttatt

SEQ ID NO: 2766391 - DNA, 25 bp, Homo sapien
cgagtactctggttaaatattgaaa

SEQ ID NO: 2766392 - DNA, 25 bp, Homo sapien
gcctgacgaggtgtagccttttatc

SEQ ID NO: 2766393 - DNA, 25 bp, Homo sapien
ggaccttttgtcacagcacttcaga

SEQ ID NO: 2766394 - DNA, 25 bp, Homo sapien
aaatggaggccgaattagagcgttg

SEQ ID NO: 2766395 - DNA, 25 bp, Homo sapien
gatgcaggcaacatgcttccggtca

SEQ ID NO: 2766396 - DNA, 25 bp, Homo sapien
cttccggtcagagctaatgaaatgg

SEQ ID NO: 2766397 - DNA, 25 bp, Homo sapien
cgttggctttaggaatgggaattca

SEQ ID NO: 2766398 - DNA, 25 bp, Homo sapien
tcaccgtataggcaagaaaattggg

SEQ ID NO: 2766399 - DNA, 25 bp, Homo sapien
gcccaggctacagagtcaaaaccag

SEQ ID NO: 2766400 - DNA, 25 bp, Homo sapien
tcagaaagcaagtggtacaaaaact

SEQ ID NO: 2766401 - DNA, 25 bp, Homo sapien
aaattgggacccactggccgtgact

SEQ ID NO: 2766402 - DNA, 25 bp, Homo sapien
tcttggcagtcttggatcaatggca

SEQ ID NO: 2766403 - DNA, 25 bp, Homo sapien
caacatagcgttgcaagagctggcg

SEQ ID NO: 2766404 - DNA, 25 bp, Homo sapien
caacgaaagggtaagatatggctgc

SEQ ID NO: 2766405 - DNA, 25 bp, Homo sapien
caaaattgtgactatggagctcgaa

SEQ ID NO: 2766406 - DNA, 25 bp, Homo sapien
ctgtgcccgggctgcttatacgttt

SEQ ID NO: 2766407 - DNA, 25 bp, Homo sapien
tgtgcccgggctgcttatacgtttt

SEQ ID NO: 2766408 - DNA, 25 bp, Homo sapien
caaaaccttcggctgggtgctgtag

SEQ ID NO: 2766409 - DNA, 25 bp, Homo sapien
atacaaaaccttcggctgggtgctg

SEQ ID NO: 2766410 - DNA, 25 bp, Homo sapien
aaaccttcggctgggtgctgtagct

SEQ ID NO: 2766411 - DNA, 25 bp, Homo sapien
aatatacaaaaccttcggctgggtg

SEQ ID NO: 2766412 - DNA, 25 bp, Homo sapien
tactatccctagcagagatgcagcc

SEQ ID NO: 2766413 - DNA, 25 bp, Homo sapien
gaagtaggcccgaggctgattccca

SEQ ID NO: 2766414 - DNA, 25 bp, Homo sapien
tccagtaatagagaatgagcctgtc

SEQ ID NO: 2766415 - DNA, 25 bp, Homo sapien
cactgttgcacgaagcaaacggaga

SEQ ID NO: 2766416 - DNA, 25 bp, Homo sapien
agcccaggaggtcgaggctgcagtg

SEQ ID NO: 2766417 - DNA, 25 bp, Homo sapien
ctctgggaggcagaggaaggcagac

SEQ ID NO: 2766418 - DNA, 25 bp, Homo sapien
ctgggaggcagaggaaggcagactg

SEQ ID NO: 2766419 - DNA, 25 bp, Homo sapien
gaggcagaggaaggcagactgcttg

SEQ ID NO: 2766420 - DNA, 25 bp, Homo sapien
gtcccatggtattatatgaggttta

SEQ ID NO: 2766421 - DNA, 25 bp, Homo sapien
gattccgttaagtttacattgtctg

SEQ ID NO: 2766422 - DNA, 25 bp, Homo sapien
gggactgaaatgaggggcatccaca

SEQ ID NO: 2766423 - DNA, 25 bp, Homo sapien
acagaaagaatcctgggactgaaat

SEQ ID NO: 2766424 - DNA, 25 bp, Homo sapien
tctgagcaagtgtatatctagcgaa

SEQ ID NO: 2766425 - DNA, 25 bp, Homo sapien
catagcgttttgagtggatattcac

SEQ ID NO: 2766426 - DNA, 25 bp, Homo sapien
ggatattcacaacatctgcgcgcac

SEQ ID NO: 2766427 - DNA, 25 bp, Homo sapien
tagtcatagcctgtttgaggtcacc

SEQ ID NO: 2766428 - DNA, 25 bp, Homo sapien
tcccaggatgctttagggttggcac

SEQ ID NO: 2766429 - DNA, 25 bp, Homo sapien
gcttattaactggtcacttggccta

SEQ ID NO: 2766430 - DNA, 25 bp, Homo sapien
gtcccacattgcagacctggctgaa

SEQ ID NO: 2766431 - DNA, 25 bp, Homo sapien
gcagttgccgactaactcccaggat

SEQ ID NO: 2766432 - DNA, 25 bp, Homo sapien
tttagccctttctggagatggggct

SEQ ID NO: 2766433 - DNA, 25 bp, Homo sapien
gatggggctgctgttcttccccaga

SEQ ID NO: 2766434 - DNA, 25 bp, Homo sapien
ttagccctttctggagatggggctg

SEQ ID NO: 2766435 - DNA, 25 bp, Homo sapien
ggctgctgttcttccccagaatatt

SEQ ID NO: 2766436 - DNA, 25 bp, Homo sapien
caagcactgacatttttgaggtgga

SEQ ID NO: 2766437 - DNA, 25 bp, Homo sapien
tggtgtacctgttcctgcatttgga

SEQ ID NO: 2766438 - DNA, 25 bp, Homo sapien
cagtgtaaggttgccattgtctgag

SEQ ID NO: 2766439 - DNA, 25 bp, Homo sapien
taagttggcacctatgttggtcccc

SEQ ID NO: 2766440 - DNA, 25 bp, Homo sapien
caattattagctcgatgtggtggca

SEQ ID NO: 2766441 - DNA, 25 bp, Homo sapien
tactgtcctaacgtagtcagccacg

SEQ ID NO: 2766442 - DNA, 25 bp, Homo sapien
cattttggaatcaagtgtcaggcac

SEQ ID NO: 2766443 - DNA, 25 bp, Homo sapien
cattaaaggtccacttaaggcaggc

SEQ ID NO: 2766444 - DNA, 25 bp, Homo sapien
agattttatttcaggtggggataag

SEQ ID NO: 2766445 - DNA, 25 bp, Homo sapien
caggacccaatagattttatttcag

SEQ ID NO: 2766446 - DNA, 25 bp, Homo sapien
tatttcaggtggggataagggacaa

SEQ ID NO: 2766447 - DNA, 25 bp, Homo sapien
caatagattttatttcaggtgggga

SEQ ID NO: 2766448 - DNA, 25 bp, Homo sapien
ggtggaagcactacatcatcgaatg

SEQ ID NO: 2766449 - DNA, 25 bp, Homo sapien
tttgtagtggcaccaaagtgtcgcc

SEQ ID NO: 2766450 - DNA, 25 bp, Homo sapien
ccatatgcctgggaagcagtgcctg

SEQ ID NO: 2766451 - DNA, 25 bp, Homo sapien
taccccactgttgagagtgccacat

SEQ ID NO: 2766452 - DNA, 25 bp, Homo sapien
ggccaatagtgactgtccatggagg

SEQ ID NO: 2766453 - DNA, 25 bp, Homo sapien
actagcatcagtgggtaagggccag

SEQ ID NO: 2766454 - DNA, 25 bp, Homo sapien
ctcaaaaggccaatagtgactgtcc

SEQ ID NO: 2766455 - DNA, 25 bp, Homo sapien
cactcagctgttgtcacctggtaca

SEQ ID NO: 2766456 - DNA, 25 bp, Homo sapien
tgcgggcacaacactttgagaacca

SEQ ID NO: 2766457 - DNA, 25 bp, Homo sapien
ccattctgatgttggtgcgggcaca

SEQ ID NO: 2766458 - DNA, 25 bp, Homo sapien
tcagacttgtttggtgatgcctcaa

SEQ ID NO: 2766459 - DNA, 25 bp, Homo sapien
taaaagatcatttcaggtagctgca

SEQ ID NO: 2766460 - DNA, 25 bp, Homo sapien
catgccctctacaaaatggatttac

SEQ ID NO: 2766461 - DNA, 25 bp, Homo sapien
catttatttacatgccctctacaaa

SEQ ID NO: 2766462 - DNA, 25 bp, Homo sapien
gtaactattagggtacatgaccttg

SEQ ID NO: 2766463 - DNA, 25 bp, Homo sapien
catagtaactattagggtacatgac

SEQ ID NO: 2766464 - DNA, 25 bp, Homo sapien
cataaatatcagtgaattgtcatac

SEQ ID NO: 2766465 - DNA, 25 bp, Homo sapien
agaacttcatctatcataaatgtac

SEQ ID NO: 2766466 - DNA, 25 bp, Homo sapien
cacataaatatcagtgaattgtcat

SEQ ID NO: 2766467 - DNA, 25 bp, Homo sapien
cttcatctatcataaatgtacacat

SEQ ID NO: 2766468 - DNA, 25 bp, Homo sapien
aagcctctgttatctgtccgaatag

SEQ ID NO: 2766469 - DNA, 25 bp, Homo sapien
gattcaggaacttcttcatcagggc

SEQ ID NO: 2766470 - DNA, 25 bp, Homo sapien
atactgtaatgaaaggaagcctctg

SEQ ID NO: 2766471 - DNA, 25 bp, Homo sapien
gggcagcagtaatattccacaaaac

SEQ ID NO: 2766472 - DNA, 25 bp, Homo sapien
cttacaagataggactaatgccttt

SEQ ID NO: 2766473 - DNA, 25 bp, Homo sapien
atcagaatctttgggatagtcaagg

SEQ ID NO: 2766474 - DNA, 25 bp, Homo sapien
gatagtcaaggtgggaacttcctgc

SEQ ID NO: 2766475 - DNA, 25 bp, Homo sapien
tgggtctgattacaatgaaatgctt

SEQ ID NO: 2766476 - DNA, 25 bp, Homo sapien
gttgacttgggtctgattacaatga

SEQ ID NO: 2766477 - DNA, 25 bp, Homo sapien
tatgagcatggcgataagatccagg

SEQ ID NO: 2766478 - DNA, 25 bp, Homo sapien
ccagtctaaatggatctcctgagca

SEQ ID NO: 2766479 - DNA, 25 bp, Homo sapien
aagtctactgcaacccttaggtctg

SEQ ID NO: 2766480 - DNA, 25 bp, Homo sapien
taacaggcgagagaattgaggactc

SEQ ID NO: 2766481 - DNA, 25 bp, Homo sapien
tcagaaaatgcttcacggagcccct

SEQ ID NO: 2766482 - DNA, 25 bp, Homo sapien
cagaaaatgcttcacggagcccctc

SEQ ID NO: 2766483 - DNA, 25 bp, Homo sapien
cttccaggaacagcatcaaagggta

SEQ ID NO: 2766484 - DNA, 25 bp, Homo sapien
gtcatacttggccttagctttatag

SEQ ID NO: 2766485 - DNA, 25 bp, Homo sapien
gggatgacatcttccctgatgacag

SEQ ID NO: 2766486 - DNA, 25 bp, Homo sapien
ggttcagcttctcctcgaaatgata

SEQ ID NO: 2766487 - DNA, 25 bp, Homo sapien
ccgcccaatttctcacatatatgta

SEQ ID NO: 2766488 - DNA, 25 bp, Homo sapien
gaacccatgactgtggccactgaaa

SEQ ID NO: 2766489 - DNA, 25 bp, Homo sapien
tggcattagctttctgaaccaatgt

SEQ ID NO: 2766490 - DNA, 25 bp, Homo sapien
ctaactagcggagtaattctggaca

SEQ ID NO: 2766491 - DNA, 25 bp, Homo sapien
caaagtattcttttggccagttcga

SEQ ID NO: 2766492 - DNA, 25 bp, Homo sapien
tcttcctgaactttaaactcctgaa

SEQ ID NO: 2766493 - DNA, 25 bp, Homo sapien
attaattcgaaaagtaacagactct

SEQ ID NO: 2766494 - DNA, 25 bp, Homo sapien
ggacttgatccaaaaatagataaac

SEQ ID NO: 2766495 - DNA, 25 bp, Homo sapien
tggcataggacttgatccaaaaata

SEQ ID NO: 2766496 - DNA, 25 bp, Homo sapien
ttgatacgggggtctcactatgatt

SEQ ID NO: 2766497 - DNA, 25 bp, Homo sapien
gatacgggggtctcactatgattac

SEQ ID NO: 2766498 - DNA, 25 bp, Homo sapien
tattgatacgggggtctcactatga

SEQ ID NO: 2766499 - DNA, 25 bp, Homo sapien
ttttattgatacgggggtctcacta

SEQ ID NO: 2766500 - DNA, 25 bp, Homo sapien
gcgatcttcgtgcttcagcctcggt

SEQ ID NO: 2766501 - DNA, 25 bp, Homo sapien
tcgtgcttcagcctcggtctcctga

SEQ ID NO: 2766502 - DNA, 25 bp, Homo sapien
gatcttcgtgcttcagcctcggtct

SEQ ID NO: 2766503 - DNA, 25 bp, Homo sapien
cttcgtgcttcagcctcggtctcct

SEQ ID NO: 2766504 - DNA, 25 bp, Homo sapien
cacgtggcatgttctcggaaatgaa

SEQ ID NO: 2766505 - DNA, 25 bp, Homo sapien
cgtggcatgttctcggaaatgaata

SEQ ID NO: 2766506 - DNA, 25 bp, Homo sapien
tggcatgttctcggaaatgaatagc

SEQ ID NO: 2766507 - DNA, 25 bp, Homo sapien
ttagttgcgaaacacgtggcatgtt

SEQ ID NO: 2766508 - DNA, 25 bp, Homo sapien
ggatctgttgggtcagaaggggcat

SEQ ID NO: 2766509 - DNA, 25 bp, Homo sapien
ctgatcatcctcgtcttggatctgt

SEQ ID NO: 2766510 - DNA, 25 bp, Homo sapien
tggatctgttgggtcagaaggggca

SEQ ID NO: 2766511 - DNA, 25 bp, Homo sapien
atcatcctcgtcttggatctgttgg

SEQ ID NO: 2766512 - DNA, 25 bp, Homo sapien
tccactgcgcattcggccccgaggg

SEQ ID NO: 2766513 - DNA, 25 bp, Homo sapien
aacttctcggcggatcgccaaacac

SEQ ID NO: 2766514 - DNA, 25 bp, Homo sapien
tgctcctggggccaacaacttctcg

SEQ ID NO: 2766515 - DNA, 25 bp, Homo sapien
cgtccactgcgcattcggccccgag

SEQ ID NO: 2766516 - DNA, 25 bp, Homo sapien
tagacagtaaaactcccatcagtgc

SEQ ID NO: 2766517 - DNA, 25 bp, Homo sapien
tcgtctccgtaagaggacaataacg

SEQ ID NO: 2766518 - DNA, 25 bp, Homo sapien
tggaggaaaattatctaagctacgg

SEQ ID NO: 2766519 - DNA, 25 bp, Homo sapien
ctgggaggctgaacacggctgacca

SEQ ID NO: 2766520 - DNA, 25 bp, Homo sapien
tccctgaagaggagcgaggcggctc

SEQ ID NO: 2766521 - DNA, 25 bp, Homo sapien
agtcccgccactcttcagaccggcc

SEQ ID NO: 2766522 - DNA, 25 bp, Homo sapien
tgccgcgccaccgagaccggaagga

SEQ ID NO: 2766523 - DNA, 25 bp, Homo sapien
ctcggccaccgtcaccacagagctg

SEQ ID NO: 2766524 - DNA, 25 bp, Homo sapien
cttaatttcagagtagcccgggtgt

SEQ ID NO: 2766525 - DNA, 25 bp, Homo sapien
tgataagtaaatgaccccgtgtggt

SEQ ID NO: 2766526 - DNA, 25 bp, Homo sapien
tagagccgccgaaccatagagatcg

SEQ ID NO: 2766527 - DNA, 25 bp, Homo sapien
tgcccttgggactgtgactctgact

SEQ ID NO: 2766528 - DNA, 25 bp, Homo sapien
gtgttggagaccagcctgggcaaca

SEQ ID NO: 2766529 - DNA, 25 bp, Homo sapien
tttgggaggccaagccacttgagcc

SEQ ID NO: 2766530 - DNA, 25 bp, Homo sapien
tgggcaacatagggagactcccatc

SEQ ID NO: 2766531 - DNA, 25 bp, Homo sapien
gggaggccaagccacttgagcccag

SEQ ID NO: 2766532 - DNA, 25 bp, Homo sapien
tgcagtgagccgtgagcacttcagc

SEQ ID NO: 2766533 - DNA, 25 bp, Homo sapien
gagcccaggaacttgaaactgcagt

SEQ ID NO: 2766534 - DNA, 25 bp, Homo sapien
agcccaggaacttgaaactgcagtg

SEQ ID NO: 2766535 - DNA, 25 bp, Homo sapien
gtgagccgtgagcacttcagcctgg

SEQ ID NO: 2766536 - DNA, 25 bp, Homo sapien
agtgctaaggactgccacatgttgc

SEQ ID NO: 2766537 - DNA, 25 bp, Homo sapien
tttacaggcaagaacagtatggccg

SEQ ID NO: 2766538 - DNA, 25 bp, Homo sapien
taagttggagtcagagcctatttct

SEQ ID NO: 2766539 - DNA, 25 bp, Homo sapien
atggacctgggatagaattcaaagc

SEQ ID NO: 2766540 - DNA, 25 bp, Homo sapien
aggcttttcacccaatcccttagtg

SEQ ID NO: 2766541 - DNA, 25 bp, Homo sapien
tcatccagccataagttgttaggtt

SEQ ID NO: 2766542 - DNA, 25 bp, Homo sapien
tgctcagacaattcacctacctcgg

SEQ ID NO: 2766543 - DNA, 25 bp, Homo sapien
tcccttagtgattttatagaaccaa

SEQ ID NO: 2766544 - DNA, 25 bp, Homo sapien
tatatcttaagtgagctctacctac

SEQ ID NO: 2766545 - DNA, 25 bp, Homo sapien
ggatatacagggtttgcatacacaa

SEQ ID NO: 2766546 - DNA, 25 bp, Homo sapien
gatccatgagatacttgggttccta

SEQ ID NO: 2766547 - DNA, 25 bp, Homo sapien
gatacagagtatggatttcctaata

SEQ ID NO: 2766548 - DNA, 25 bp, Homo sapien
gtaaagtaggagtagactggtagaa

SEQ ID NO: 2766549 - DNA, 25 bp, Homo sapien
ttgtgttgctaaaaatgtagcacac

SEQ ID NO: 2766550 - DNA, 25 bp, Homo sapien
gcattcaacacttcaagagcatcgg

SEQ ID NO: 2766551 - DNA, 25 bp, Homo sapien
taatgtagcctgttctcttgggttg

SEQ ID NO: 2766552 - DNA, 25 bp, Homo sapien
taccaactaactgagactgtgtaga

SEQ ID NO: 2766553 - DNA, 25 bp, Homo sapien
ttggtcagtggcgtgtgaagtaacc

SEQ ID NO: 2766554 - DNA, 25 bp, Homo sapien
taacctgatgaagcttagcgtgggt

SEQ ID NO: 2766555 - DNA, 25 bp, Homo sapien
ggtacgccaaccctgtgcaatagat

SEQ ID NO: 2766556 - DNA, 25 bp, Homo sapien
aggagacctctcctgagaaggtgaa

SEQ ID NO: 2766557 - DNA, 25 bp, Homo sapien
ccaaaagcctgaacagatgagatga

SEQ ID NO: 2766558 - DNA, 25 bp, Homo sapien
taggtgtgctgagacagacattgcc

SEQ ID NO: 2766559 - DNA, 25 bp, Homo sapien
cagggcagcttggtctcaaggagaa

SEQ ID NO: 2766560 - DNA, 25 bp, Homo sapien
tgaaagtaattttggctggtcgcgg

SEQ ID NO: 2766561 - DNA, 25 bp, Homo sapien
tcctccctaggcacagtgacagctg

SEQ ID NO: 2766562 - DNA, 25 bp, Homo sapien
tgacagctgtaaagtatgacggaac

SEQ ID NO: 2766563 - DNA, 25 bp, Homo sapien
gaacagtcgtgtacattgatcagta

SEQ ID NO: 2766564 - DNA, 25 bp, Homo sapien
ggcatactcattaagcacactggca

SEQ ID NO: 2766565 - DNA, 25 bp, Homo sapien
cactggcagaggctatggtctctca

SEQ ID NO: 2766566 - DNA, 25 bp, Homo sapien
ttcagataagtgcaaggccacccag

SEQ ID NO: 2766567 - DNA, 25 bp, Homo sapien
tgagcaacgtttgggacatgtcctt

SEQ ID NO: 2766568 - DNA, 25 bp, Homo sapien
gcgagggcatgtgggcatttaactc

SEQ ID NO: 2766569 - DNA, 25 bp, Homo sapien
gattgtctacgtctgcactggagag

SEQ ID NO: 2766570 - DNA, 25 bp, Homo sapien
catgtgtacagttagctaagtgaga

SEQ ID NO: 2766571 - DNA, 25 bp, Homo sapien
tacgtttctgaagccactgctgttt

SEQ ID NO: 2766572 - DNA, 25 bp, Homo sapien
tagagggccccacatcagtgatgtc

SEQ ID NO: 2766573 - DNA, 25 bp, Homo sapien
gagactggccagtccccttgttaca

SEQ ID NO: 2766574 - DNA, 25 bp, Homo sapien
gatgtggttagctccctgtaccagc

SEQ ID NO: 2766575 - DNA, 25 bp, Homo sapien
tgtaccagcgagtgtacagtcagag

SEQ ID NO: 2766576 - DNA, 25 bp, Homo sapien
cccatagcggtatatgcttccaaga

SEQ ID NO: 2766577 - DNA, 25 bp, Homo sapien
gatatactcctacaacagcagaaag

SEQ ID NO: 2766578 - DNA, 25 bp, Homo sapien
aacttaaagatgaggcgtttctctg

SEQ ID NO: 2766579 - DNA, 25 bp, Homo sapien
gacccatagccataagatgtttata

SEQ ID NO: 2766580 - DNA, 25 bp, Homo sapien
tcttgtgtctttctctaactccaat

SEQ ID NO: 2766581 - DNA, 25 bp, Homo sapien
tagcacctggcatttacgaatttca

SEQ ID NO: 2766582 - DNA, 25 bp, Homo sapien
catcacagggtgaaaaacaatgtaa

SEQ ID NO: 2766583 - DNA, 25 bp, Homo sapien
tataatttcgttcaaaatggaatcc

SEQ ID NO: 2766584 - DNA, 25 bp, Homo sapien
ttagggtgcttggtgaacagtgatc

SEQ ID NO: 2766585 - DNA, 25 bp, Homo sapien
acttgctttagggagatgatcctcc

SEQ ID NO: 2766586 - DNA, 25 bp, Homo sapien
aaacagatgagctctcagtgtgtgc

SEQ ID NO: 2766587 - DNA, 25 bp, Homo sapien
tggcattaagaaacccacacgtaaa

SEQ ID NO: 2766588 - DNA, 25 bp, Homo sapien
actctgggtacctcacccatattag

SEQ ID NO: 2766589 - DNA, 25 bp, Homo sapien
ggaagaaatattctgcatacatgaa

SEQ ID NO: 2766590 - DNA, 25 bp, Homo sapien
tctctatattaatccttccctctgc

SEQ ID NO: 2766591 - DNA, 25 bp, Homo sapien
cacccatattagtggaaccgtacaa

SEQ ID NO: 2766592 - DNA, 25 bp, Homo sapien
taccaatactatgtgttagaaagac

SEQ ID NO: 2766593 - DNA, 25 bp, Homo sapien
taagagtttatcctaatctttgctc

SEQ ID NO: 2766594 - DNA, 25 bp, Homo sapien
ttatatataatacgggaagggtcca

SEQ ID NO: 2766595 - DNA, 25 bp, Homo sapien
tttcgcatgtagatatcattttacc

SEQ ID NO: 2766596 - DNA, 25 bp, Homo sapien
tcaattgtgcatctagacagcatgc

SEQ ID NO: 2766597 - DNA, 25 bp, Homo sapien
gagttgattctgagttcacagattc

SEQ ID NO: 2766598 - DNA, 25 bp, Homo sapien
tctccccatgataccctagaagagt

SEQ ID NO: 2766599 - DNA, 25 bp, Homo sapien
cagtggcaaagtagaaggaggcatc

SEQ ID NO: 2766600 - DNA, 25 bp, Homo sapien
tagcaatcagtgatgcctgcaagtt

SEQ ID NO: 2766601 - DNA, 25 bp, Homo sapien
tcaagtagcaatcagtgatgcctgc

SEQ ID NO: 2766602 - DNA, 25 bp, Homo sapien
agtagcaatcagtgatgcctgcaag

SEQ ID NO: 2766603 - DNA, 25 bp, Homo sapien
gcaatcagtgatgcctgcaagttgc

SEQ ID NO: 2766604 - DNA, 25 bp, Homo sapien
aatttttagtcctgcaagctctgtt

SEQ ID NO: 2766605 - DNA, 25 bp, Homo sapien
gttcatggtgagtgccctaaacagg

SEQ ID NO: 2766606 - DNA, 25 bp, Homo sapien
cttggacaagcactgccattctaaa

SEQ ID NO: 2766607 - DNA, 25 bp, Homo sapien
gcaagctctgttcatggtgagtgcc

SEQ ID NO: 2766608 - DNA, 25 bp, Homo sapien
taccgattgtgtctcagttggaaat

SEQ ID NO: 2766609 - DNA, 25 bp, Homo sapien
gacttcactcgttttaagttcagtg

SEQ ID NO: 2766610 - DNA, 25 bp, Homo sapien
cagcagtcttcaacaccacttctga

SEQ ID NO: 2766611 - DNA, 25 bp, Homo sapien
gagcgttcagctttaattaaccaga

SEQ ID NO: 2766612 - DNA, 25 bp, Homo sapien
taagtcctcccatagtttagagata

SEQ ID NO: 2766613 - DNA, 25 bp, Homo sapien
catacaagttggagtgttacaatac

SEQ ID NO: 2766614 - DNA, 25 bp, Homo sapien
ttttgagattagcttgaatttccag

SEQ ID NO: 2766615 - DNA, 25 bp, Homo sapien
aaaagttacaccgacatacaagttg

SEQ ID NO: 2766616 - DNA, 25 bp, Homo sapien
tattctaatcacatgattgactgtc

SEQ ID NO: 2766617 - DNA, 25 bp, Homo sapien
cattatcttcactttagacagtctt

SEQ ID NO: 2766618 - DNA, 25 bp, Homo sapien
ttcactttagacagtcttaacaaga

SEQ ID NO: 2766619 - DNA, 25 bp, Homo sapien
aatatgttccttgtgtgaaaaaagt

SEQ ID NO: 2766620 - DNA, 25 bp, Homo sapien
tgggctccttgccttatgtaagctg

SEQ ID NO: 2766621 - DNA, 25 bp, Homo sapien
tccttgccttatgtaagctggctcg

SEQ ID NO: 2766622 - DNA, 25 bp, Homo sapien
atgtaagctggctcgcatcccactg

SEQ ID NO: 2766623 - DNA, 25 bp, Homo sapien
tgccttatgtaagctggctcgcatc

SEQ ID NO: 2766624 - DNA, 25 bp, Homo sapien
tgaaagaaatgaacggccatatgca

SEQ ID NO: 2766625 - DNA, 25 bp, Homo sapien
aaagaaatgaacggccatatgcatt

SEQ ID NO: 2766626 - DNA, 25 bp, Homo sapien
ccctgcccacgactccaaatggaaa

SEQ ID NO: 2766627 - DNA, 25 bp, Homo sapien
agtgaaagaaatgaacggccatatg

SEQ ID NO: 2766628 - DNA, 25 bp, Homo sapien
catattttactaaattcataaattg

SEQ ID NO: 2766629 - DNA, 25 bp, Homo sapien
ataaattgtgttttcagtgttcttc

SEQ ID NO: 2766630 - DNA, 25 bp, Homo sapien
aattgtgttttcagtgttcttccct

SEQ ID NO: 2766631 - DNA, 25 bp, Homo sapien
tactaaattcataaattgtgttttc

SEQ ID NO: 2766632 - DNA, 25 bp, Homo sapien
taggaagggcaaatagtttatactc

SEQ ID NO: 2766633 - DNA, 25 bp, Homo sapien
cagaacatttctagagtatttgctc

SEQ ID NO: 2766634 - DNA, 25 bp, Homo sapien
tgcaaagcacttttacatccacggg

SEQ ID NO: 2766635 - DNA, 25 bp, Homo sapien
agtttctatttctctaggtcattgg

SEQ ID NO: 2766636 - DNA, 25 bp, Homo sapien
tcttcagagccctctacttccaaca

SEQ ID NO: 2766637 - DNA, 25 bp, Homo sapien
gagccctctacttccaacattcctt

SEQ ID NO: 2766638 - DNA, 25 bp, Homo sapien
cagagccctctacttccaacattcc

SEQ ID NO: 2766639 - DNA, 25 bp, Homo sapien
ttcagagccctctacttccaacatt

SEQ ID NO: 2766640 - DNA, 25 bp, Homo sapien
gtatgcttttgaccgtaacagtgaa

SEQ ID NO: 2766641 - DNA, 25 bp, Homo sapien
tgcttttgaccgtaacagtgaaaaa

SEQ ID NO: 2766642 - DNA, 25 bp, Homo sapien
tcagtatgcttttgaccgtaacagt

SEQ ID NO: 2766643 - DNA, 25 bp, Homo sapien
ttctcagtatgcttttgaccgtaac

SEQ ID NO: 2766644 - DNA, 25 bp, Homo sapien
tgtcctcatgactacaagccggctg

SEQ ID NO: 2766645 - DNA, 25 bp, Homo sapien
tggtgccaggaatctcgtcatgaac

SEQ ID NO: 2766646 - DNA, 25 bp, Homo sapien
aacatatggtgttctcagcgcaaca

SEQ ID NO: 2766647 - DNA, 25 bp, Homo sapien
caaatatggttggtaggcagtcaac

SEQ ID NO: 2766648 - DNA, 25 bp, Homo sapien
gacttgtggttttatttatttctga

SEQ ID NO: 2766649 - DNA, 25 bp, Homo sapien
agacttgtggttttatttatttctg

SEQ ID NO: 2766650 - DNA, 25 bp, Homo sapien
cttgtggttttatttatttctgaca

SEQ ID NO: 2766651 - DNA, 25 bp, Homo sapien
gtggttttatttatttctgacaatg

SEQ ID NO: 2766652 - DNA, 25 bp, Homo sapien
tccatgtgttgggttaaggcagaac

SEQ ID NO: 2766653 - DNA, 25 bp, Homo sapien
cagaacgaaatacttctactgcaaa

SEQ ID NO: 2766654 - DNA, 25 bp, Homo sapien
atgcacattgagggcgcaatgcgaa

SEQ ID NO: 2766655 - DNA, 25 bp, Homo sapien
acattgagggcgcaatgcgaaatgt

SEQ ID NO: 2766656 - DNA, 25 bp, Homo sapien
gatctgatttacttcttcacgggga

SEQ ID NO: 2766657 - DNA, 25 bp, Homo sapien
gaggagtcccatgtgcttgcagtcc

SEQ ID NO: 2766658 - DNA, 25 bp, Homo sapien
ttcacggggaagaggccgacagctt

SEQ ID NO: 2766659 - DNA, 25 bp, Homo sapien
tgctgcctctgccaacgaggagtcc

SEQ ID NO: 2766660 - DNA, 25 bp, Homo sapien
tgagctttccctgggcagcgcagtg

SEQ ID NO: 2766661 - DNA, 25 bp, Homo sapien
agcctgtgtcagatccccagccatt

SEQ ID NO: 2766662 - DNA, 25 bp, Homo sapien
gcatcctccagggttaggaaaggta

SEQ ID NO: 2766663 - DNA, 25 bp, Homo sapien
ggctcagaagttgtacaaaggcacc

SEQ ID NO: 2766664 - DNA, 25 bp, Homo sapien
acattgggctgacttgcatcctttc

SEQ ID NO: 2766665 - DNA, 25 bp, Homo sapien
tgcatcctttctgtgcgtcccctgt

SEQ ID NO: 2766666 - DNA, 25 bp, Homo sapien
ttgcatcctttctgtgcgtcccctg

SEQ ID NO: 2766667 - DNA, 25 bp, Homo sapien
cagacattgggctgacttgcatcct

SEQ ID NO: 2766668 - DNA, 25 bp, Homo sapien
ccaccaaccccagatccaactcttt

SEQ ID NO: 2766669 - DNA, 25 bp, Homo sapien
tcagtctgggctttgccatccactt

SEQ ID NO: 2766670 - DNA, 25 bp, Homo sapien
aatcctccatttcttgtaaggtgtc

SEQ ID NO: 2766671 - DNA, 25 bp, Homo sapien
ccccaatcctccatttcttgtaagg

SEQ ID NO: 2766672 - DNA, 25 bp, Homo sapien
tttcctcctatatctcctgctggct

SEQ ID NO: 2766673 - DNA, 25 bp, Homo sapien
aatgaagtttagctgatgtttcctc

SEQ ID NO: 2766674 - DNA, 25 bp, Homo sapien
gaagtttagctgatgtttcctccta

SEQ ID NO: 2766675 - DNA, 25 bp, Homo sapien
tgctgaaatcttgctgtttgtgtct

SEQ ID NO: 2766676 - DNA, 25 bp, Homo sapien
aaattcatcccgcagcttagcaaac

SEQ ID NO: 2766677 - DNA, 25 bp, Homo sapien
tcatgagacctttgcctcggacgtc

SEQ ID NO: 2766678 - DNA, 25 bp, Homo sapien
tcggacgtctccaacaatttcaaat

SEQ ID NO: 2766679 - DNA, 25 bp, Homo sapien
tgtaggtcccaacttcttgactgtt

SEQ ID NO: 2766680 - DNA, 25 bp, Homo sapien
aaatacacaagagaaggccaacatg

SEQ ID NO: 2766681 - DNA, 25 bp, Homo sapien
gggtgaacagctgaattaccttgct

SEQ ID NO: 2766682 - DNA, 25 bp, Homo sapien
aaatgagtgaggttaatgtggccgc

SEQ ID NO: 2766683 - DNA, 25 bp, Homo sapien
tgctgtaagcacgtagaactcagtg

SEQ ID NO: 2766684 - DNA, 25 bp, Homo sapien
ccctccaaaggtgttgaagtgctgc

SEQ ID NO: 2766685 - DNA, 25 bp, Homo sapien
gctgcaggcatttcgccaaagattt

SEQ ID NO: 2766686 - DNA, 25 bp, Homo sapien
atggcacaggccatggggttccctc

SEQ ID NO: 2766687 - DNA, 25 bp, Homo sapien
tgaagtgctgcaggcatttcgccaa

SEQ ID NO: 2766688 - DNA, 25 bp, Homo sapien
tggttatgactgctgccatgggaaa

SEQ ID NO: 2766689 - DNA, 25 bp, Homo sapien
tgccatgggaaagccattcccaatc

SEQ ID NO: 2766690 - DNA, 25 bp, Homo sapien
ctgccatgggaaagccattcccaat

SEQ ID NO: 2766691 - DNA, 25 bp, Homo sapien
ctggagtggttatgactgctgccat

SEQ ID NO: 2766692 - DNA, 25 bp, Homo sapien
gacaatgtcaggcaggacatcgtgg

SEQ ID NO: 2766693 - DNA, 25 bp, Homo sapien
gcaggacatcgtgggtttggaagcc

SEQ ID NO: 2766694 - DNA, 25 bp, Homo sapien
agtgagagcccaaccttccaaatcc

SEQ ID NO: 2766695 - DNA, 25 bp, Homo sapien
atgtcaggcaggacatcgtgggttt

SEQ ID NO: 2766696 - DNA, 25 bp, Homo sapien
ggaacctctgctaactcatccgtca

SEQ ID NO: 2766697 - DNA, 25 bp, Homo sapien
cctgtagtatcatggacaaagcgct

SEQ ID NO: 2766698 - DNA, 25 bp, Homo sapien
caacaatatgtcacaggctccatga

SEQ ID NO: 2766699 - DNA, 25 bp, Homo sapien
caaagcgcttaatttgtgcctgagc

SEQ ID NO: 2766700 - DNA, 25 bp, Homo sapien
ttcatctgcaatgcacacgcctccc

SEQ ID NO: 2766701 - DNA, 25 bp, Homo sapien
cccttgctcgcaccagctcaaaggc

SEQ ID NO: 2766702 - DNA, 25 bp, Homo sapien
ctttgggtactggacaactccattc

SEQ ID NO: 2766703 - DNA, 25 bp, Homo sapien
cctttgggtactggacaactccatt

SEQ ID NO: 2766704 - DNA, 25 bp, Homo sapien
gagttcggtagtttcatctgtctgg

SEQ ID NO: 2766705 - DNA, 25 bp, Homo sapien
ggtcatttgaaagtcagcgtcttct

SEQ ID NO: 2766706 - DNA, 25 bp, Homo sapien
gacaatgcggatgttattaagcagc

SEQ ID NO: 2766707 - DNA, 25 bp, Homo sapien
gaccagaccaagaagacctataata

SEQ ID NO: 2766708 - DNA, 25 bp, Homo sapien
gaattgctcaatatactgatcttta

SEQ ID NO: 2766709 - DNA, 25 bp, Homo sapien
gctcagcgtatctttgaattgctca

SEQ ID NO: 2766710 - DNA, 25 bp, Homo sapien
aatatactgatctttagcttggcag

SEQ ID NO: 2766711 - DNA, 25 bp, Homo sapien
taggttctgcgaaaaatccagcaat

SEQ ID NO: 2766712 - DNA, 25 bp, Homo sapien
gaaaagcagtaaagtgtccttgttg

SEQ ID NO: 2766713 - DNA, 25 bp, Homo sapien
tgctgataaacccacatgctgagtt

SEQ ID NO: 2766714 - DNA, 25 bp, Homo sapien
tttggctgcatcttactgctgataa

SEQ ID NO: 2766715 - DNA, 25 bp, Homo sapien
cacagtgtcctatccctttcgcata

SEQ ID NO: 2766716 - DNA, 25 bp, Homo sapien
tcaacatggaagctcaaggttacca

SEQ ID NO: 2766717 - DNA, 25 bp, Homo sapien
ggctgggccctggacttcgtcatct

SEQ ID NO: 2766718 - DNA, 25 bp, Homo sapien
tctagttgacccatggatgaagatg

SEQ ID NO: 2766719 - DNA, 25 bp, Homo sapien
ggctgcagtgccgtaatgatctatt

SEQ ID NO: 2766720 - DNA, 25 bp, Homo sapien
catcccagtgcttgcttagaggcat

SEQ ID NO: 2766721 - DNA, 25 bp, Homo sapien
catgatcagtacgaggtttggaaca

SEQ ID NO: 2766722 - DNA, 25 bp, Homo sapien
tagattagactcacaaaatggcccc

SEQ ID NO: 2766723 - DNA, 25 bp, Homo sapien
catggattacacttgaaactcaggg

SEQ ID NO: 2766724 - DNA, 25 bp, Homo sapien
aaaaatctctaccatggttggtgcc

SEQ ID NO: 2766725 - DNA, 25 bp, Homo sapien
tattcgtgtcccttccaacttccaa

SEQ ID NO: 2766726 - DNA, 25 bp, Homo sapien
ggtctgcctttattcgtgtcccttc

SEQ ID NO: 2766727 - DNA, 25 bp, Homo sapien
aaattcaattgttccctcagggatg

SEQ ID NO: 2766728 - DNA, 25 bp, Homo sapien
caattgttccctcagggatgggtct

SEQ ID NO: 2766729 - DNA, 25 bp, Homo sapien
ttgcactggagaatctcgacagtgg

SEQ ID NO: 2766730 - DNA, 25 bp, Homo sapien
tcctgattgtttgcactggagaatc

SEQ ID NO: 2766731 - DNA, 25 bp, Homo sapien
agggccacgaaaaacatctggacac

SEQ ID NO: 2766732 - DNA, 25 bp, Homo sapien
gccacgaaaaacatctggacacatt

SEQ ID NO: 2766733 - DNA, 25 bp, Homo sapien
cacatacccagcagtctttaaagaa

SEQ ID NO: 2766734 - DNA, 25 bp, Homo sapien
caattaggtcaaattgagcccctga

SEQ ID NO: 2766735 - DNA, 25 bp, Homo sapien
ctaatggtgtcctcaagtggtctcc

SEQ ID NO: 2766736 - DNA, 25 bp, Homo sapien
taattattactcagactcggaaggc

SEQ ID NO: 2766737 - DNA, 25 bp, Homo sapien
agggagttccatcttgtaggtccct

SEQ ID NO: 2766738 - DNA, 25 bp, Homo sapien
cgtttgtcaagccaagtgtgtaagg

SEQ ID NO: 2766739 - DNA, 25 bp, Homo sapien
tgtaggtccctacgtttgtcaagcc

SEQ ID NO: 2766740 - DNA, 25 bp, Homo sapien
gagttccatcttgtaggtccctacg

SEQ ID NO: 2766741 - DNA, 25 bp, Homo sapien
tttgagtgcgccctggccatcagca

SEQ ID NO: 2766742 - DNA, 25 bp, Homo sapien
gtctatgttgtttgagtgcgccctg

SEQ ID NO: 2766743 - DNA, 25 bp, Homo sapien
tatgttgtttgagtgcgccctggcc

SEQ ID NO: 2766744 - DNA, 25 bp, Homo sapien
tgttgtttgagtgcgccctggccat

SEQ ID NO: 2766745 - DNA, 25 bp, Homo sapien
gcatattcatgcattggagggtgga

SEQ ID NO: 2766746 - DNA, 25 bp, Homo sapien
caggcggccgagctgcttttgtgcc

SEQ ID NO: 2766747 - DNA, 25 bp, Homo sapien
gctcaggaagaagtgcggcaagctt

SEQ ID NO: 2766748 - DNA, 25 bp, Homo sapien
tggaagaagacggtgcttgtatgcc

SEQ ID NO: 2766749 - DNA, 25 bp, Homo sapien
gtggcaatggccaacactgacagta

SEQ ID NO: 2766750 - DNA, 25 bp, Homo sapien
gccaacactgacagtaacaatcccg

SEQ ID NO: 2766751 - DNA, 25 bp, Homo sapien
ctgacagtaacaatcccggaaaaga

SEQ ID NO: 2766752 - DNA, 25 bp, Homo sapien
ggcaatggccaacactgacagtaac

SEQ ID NO: 2766753 - DNA, 25 bp, Homo sapien
gggtttctggaaatatgccgtcacc

SEQ ID NO: 2766754 - DNA, 25 bp, Homo sapien
aatatgccgtcaccacaggagaaag

SEQ ID NO: 2766755 - DNA, 25 bp, Homo sapien
ccaggacacggttgtagccaaggga

SEQ ID NO: 2766756 - DNA, 25 bp, Homo sapien
ccttgtggatttccaggacacggtt

SEQ ID NO: 2766757 - DNA, 25 bp, Homo sapien
tctgggctttgtatgaagactgagc

SEQ ID NO: 2766758 - DNA, 25 bp, Homo sapien
ttggttactgatgtccgggaagtac

SEQ ID NO: 2766759 - DNA, 25 bp, Homo sapien
ctgggctttgtatgaagactgagct

SEQ ID NO: 2766760 - DNA, 25 bp, Homo sapien
ccagagtggtcgttttctcttcaca

SEQ ID NO: 2766761 - DNA, 25 bp, Homo sapien
gacagtgtctggtcggtagagaaat

SEQ ID NO: 2766762 - DNA, 25 bp, Homo sapien
gcttggagactccagagtggtcgtt

SEQ ID NO: 2766763 - DNA, 25 bp, Homo sapien
tctcttcacacatggggccgcagtc

SEQ ID NO: 2766764 - DNA, 25 bp, Homo sapien
ggtatcatccgctccggacatgatc

SEQ ID NO: 2766765 - DNA, 25 bp, Homo sapien
tggaggtcccctctgtcccatgcgt

SEQ ID NO: 2766766 - DNA, 25 bp, Homo sapien
tgtggaggtcccctctgtcccatgc

SEQ ID NO: 2766767 - DNA, 25 bp, Homo sapien
cattgctgttcggtatcatccgctc

SEQ ID NO: 2766768 - DNA, 25 bp, Homo sapien
tcgctgatcctctactgacccacgt

SEQ ID NO: 2766769 - DNA, 25 bp, Homo sapien
cctctcgctgatcctctactgaccc

SEQ ID NO: 2766770 - DNA, 25 bp, Homo sapien
ctctcgctgatcctctactgaccca

SEQ ID NO: 2766771 - DNA, 25 bp, Homo sapien
tgatcctctactgacccacgtcccc

SEQ ID NO: 2766772 - DNA, 25 bp, Homo sapien
aagggtctcagcaaatgtctccaga

SEQ ID NO: 2766773 - DNA, 25 bp, Homo sapien
gaagtgaccaggcacaagggtctca

SEQ ID NO: 2766774 - DNA, 25 bp, Homo sapien
ccaggcacaagggtctcagcaaatg

SEQ ID NO: 2766775 - DNA, 25 bp, Homo sapien
aaggatcctgggagcggaagtgacc

SEQ ID NO: 2766776 - DNA, 25 bp, Homo sapien
cccatggaagcagattggaggccgg

SEQ ID NO: 2766777 - DNA, 25 bp, Homo sapien
taactgctcactatcctgctggact

SEQ ID NO: 2766778 - DNA, 25 bp, Homo sapien
gaggccgggctctaactgctcacta

SEQ ID NO: 2766779 - DNA, 25 bp, Homo sapien
tagtaacagtgccttcaagggggag

SEQ ID NO: 2766780 - DNA, 25 bp, Homo sapien
tccaaatgcccataggaggtgaagg

SEQ ID NO: 2766781 - DNA, 25 bp, Homo sapien
tccaaccaggttgcgaagagtacat

SEQ ID NO: 2766782 - DNA, 25 bp, Homo sapien
tcacgtgctgcaggagtaatccaag

SEQ ID NO: 2766783 - DNA, 25 bp, Homo sapien
tcttgggtcaccctgtaagggagac

SEQ ID NO: 2766784 - DNA, 25 bp, Homo sapien
gttgcctttgtgaacaccgcaagtc

SEQ ID NO: 2766785 - DNA, 25 bp, Homo sapien
ctactggactgtggtcaatgttgcc

SEQ ID NO: 2766786 - DNA, 25 bp, Homo sapien
tttttcttggtctgtaagatttgag

SEQ ID NO: 2766787 - DNA, 25 bp, Homo sapien
caccgcaagtcttccttgacttgag

SEQ ID NO: 2766788 - DNA, 25 bp, Homo sapien
taccatgttcaagattaggaggcac

SEQ ID NO: 2766789 - DNA, 25 bp, Homo sapien
taaaacagtggagcaccaggacagg

SEQ ID NO: 2766790 - DNA, 25 bp, Homo sapien
ggaaatactacactgatggcaaggg

SEQ ID NO: 2766791 - DNA, 25 bp, Homo sapien
ggagacccgataggctcatctgaaa

SEQ ID NO: 2766792 - DNA, 25 bp, Homo sapien
tgtatctcaaaaacccaatgccgaa

SEQ ID NO: 2766793 - DNA, 25 bp, Homo sapien
tagctgggaaggatatgtaataact

SEQ ID NO: 2766794 - DNA, 25 bp, Homo sapien
aaccacagcagttgtatgcataaag

SEQ ID NO: 2766795 - DNA, 25 bp, Homo sapien
gcagctggagctatttgtatctcaa

SEQ ID NO: 2766796 - DNA, 25 bp, Homo sapien
tattcaccaatcaacatccatgcgg

SEQ ID NO: 2766797 - DNA, 25 bp, Homo sapien
gcaaacgtcatttaagcttaccctg

SEQ ID NO: 2766798 - DNA, 25 bp, Homo sapien
cgtaaaagtatctgtgcttcaagtc

SEQ ID NO: 2766799 - DNA, 25 bp, Homo sapien
catgcggtgttttatttgacccaca

SEQ ID NO: 2766800 - DNA, 25 bp, Homo sapien
ggcagttggcttcaatataagcaca

SEQ ID NO: 2766801 - DNA, 25 bp, Homo sapien
ttcacaattctggaacacggacatg

SEQ ID NO: 2766802 - DNA, 25 bp, Homo sapien
tctgcatagtttcgagggactttca

SEQ ID NO: 2766803 - DNA, 25 bp, Homo sapien
cttgcaatcataggaagggtggaca

SEQ ID NO: 2766804 - DNA, 25 bp, Homo sapien
taaacagctgttagaaatcgtcgcc

SEQ ID NO: 2766805 - DNA, 25 bp, Homo sapien
gatgagtcatggatgcgccctttaa

SEQ ID NO: 2766806 - DNA, 25 bp, Homo sapien
cacagggtggcaggtttatccccaa

SEQ ID NO: 2766807 - DNA, 25 bp, Homo sapien
gaaagccagagtttccccagagcta

SEQ ID NO: 2766808 - DNA, 25 bp, Homo sapien
tcagcaatgtgtcagtaaggtatag

SEQ ID NO: 2766809 - DNA, 25 bp, Homo sapien
tcatttgccccttgtgtaagaacat

SEQ ID NO: 2766810 - DNA, 25 bp, Homo sapien
tgtcccatgccaaatcatgaaagcc

SEQ ID NO: 2766811 - DNA, 25 bp, Homo sapien
tatgtacagtaaggcagtaattcca

SEQ ID NO: 2766812 - DNA, 25 bp, Homo sapien
taaccaatcattccattagtcaagc

SEQ ID NO: 2766813 - DNA, 25 bp, Homo sapien
tggagaaagaggcaagtggttaaaa

SEQ ID NO: 2766814 - DNA, 25 bp, Homo sapien
tcttgagcatttcacgtactctgta

SEQ ID NO: 2766815 - DNA, 25 bp, Homo sapien
ggagctttagtagtgtcagtctgac

SEQ ID NO: 2766816 - DNA, 25 bp, Homo sapien
caaagcaagccacgtttttagcatg

SEQ ID NO: 2766817 - DNA, 25 bp, Homo sapien
gatgttgttatccatgaccccggac

SEQ ID NO: 2766818 - DNA, 25 bp, Homo sapien
ggatctggcaccaacaccaggatgt

SEQ ID NO: 2766819 - DNA, 25 bp, Homo sapien
tgtgtaaaacatgcgggatccaggt

SEQ ID NO: 2766820 - DNA, 25 bp, Homo sapien
tcttgggcttgccgctgttctctct

SEQ ID NO: 2766821 - DNA, 25 bp, Homo sapien
atccaagggtttagcggagccaaag

SEQ ID NO: 2766822 - DNA, 25 bp, Homo sapien
taatgcaccatctttgttgaccttg

SEQ ID NO: 2766823 - DNA, 25 bp, Homo sapien
cacataatccaagggtttagcggag

SEQ ID NO: 2766824 - DNA, 25 bp, Homo sapien
tagcaatgataatgcaccatctttg

SEQ ID NO: 2766825 - DNA, 25 bp, Homo sapien
gcttcattcaacagagtggccggtg

SEQ ID NO: 2766826 - DNA, 25 bp, Homo sapien
caggtgtgggttgtttcaggattct

SEQ ID NO: 2766827 - DNA, 25 bp, Homo sapien
tgacctcaggatcatagaatgtgga

SEQ ID NO: 2766828 - DNA, 25 bp, Homo sapien
gggcgtatcctggtcagtctcagaa

SEQ ID NO: 2766829 - DNA, 25 bp, Homo sapien
gtgtcaggatccaggtatgtgggtt

SEQ ID NO: 2766830 - DNA, 25 bp, Homo sapien
agtgtcaggatccaggtatgtgggt

SEQ ID NO: 2766831 - DNA, 25 bp, Homo sapien
aagtgggaggaaagtcttggcatcc

SEQ ID NO: 2766832 - DNA, 25 bp, Homo sapien
tcagtagttcttcagacttgccctt

SEQ ID NO: 2766833 - DNA, 25 bp, Homo sapien
gcaagtcctcatagtcagaagtggg

SEQ ID NO: 2766834 - DNA, 25 bp, Homo sapien
aatggactgacattagatgctggtc

SEQ ID NO: 2766835 - DNA, 25 bp, Homo sapien
cagatgagcatcaaatccttttatt

SEQ ID NO: 2766836 - DNA, 25 bp, Homo sapien
tccaacagatgagcatcaaatcctt

SEQ ID NO: 2766837 - DNA, 25 bp, Homo sapien
caacagatgagcatcaaatcctttt

SEQ ID NO: 2766838 - DNA, 25 bp, Homo sapien
ctccaacagatgagcatcaaatcct

SEQ ID NO: 2766839 - DNA, 25 bp, Homo sapien
tggcggaaagatgcaggtcaccatg

SEQ ID NO: 2766840 - DNA, 25 bp, Homo sapien
ctggcggaaagatgcaggtcaccat

SEQ ID NO: 2766841 - DNA, 25 bp, Homo sapien
tgcccagacaataatcaaacagatg

SEQ ID NO: 2766842 - DNA, 25 bp, Homo sapien
cacggttgtatcattcatggtgaag

SEQ ID NO: 2766843 - DNA, 25 bp, Homo sapien
acagagatccacacggttgtatcat

SEQ ID NO: 2766844 - DNA, 25 bp, Homo sapien
gccactgcccagacaataatcaaac

SEQ ID NO: 2766845 - DNA, 25 bp, Homo sapien
cactaggtatctgaatgaaggtcgc

SEQ ID NO: 2766846 - DNA, 25 bp, Homo sapien
taggtatctgaatgaaggtcgctgg

SEQ ID NO: 2766847 - DNA, 25 bp, Homo sapien
tctgaatgaaggtcgctggactcca

SEQ ID NO: 2766848 - DNA, 25 bp, Homo sapien
tatctgaatgaaggtcgctggactc

SEQ ID NO: 2766849 - DNA, 25 bp, Homo sapien
tggtttgcagcgaacctggacaagg

SEQ ID NO: 2766850 - DNA, 25 bp, Homo sapien
gcgaacctggacaaggtatttctgt

SEQ ID NO: 2766851 - DNA, 25 bp, Homo sapien
catggtctggtttgcagcgaacctg

SEQ ID NO: 2766852 - DNA, 25 bp, Homo sapien
cagtatccatggtctggtttgcagc

SEQ ID NO: 2766853 - DNA, 25 bp, Homo sapien
tgagaatcttaaactctgtttgctg

SEQ ID NO: 2766854 - DNA, 25 bp, Homo sapien
gctgagaatcttaaactctgtttgc

SEQ ID NO: 2766855 - DNA, 25 bp, Homo sapien
ctgagaatcttaaactctgtttgct

SEQ ID NO: 2766856 - DNA, 25 bp, Homo sapien
ggctgagaatcttaaactctgtttg

SEQ ID NO: 2766857 - DNA, 25 bp, Homo sapien
tcgggttttaatcgaatttcataca

SEQ ID NO: 2766858 - DNA, 25 bp, Homo sapien
accaaccagtttttaagtcaatcag

SEQ ID NO: 2766859 - DNA, 25 bp, Homo sapien
caggagcgtgaaccaaccagttttt

SEQ ID NO: 2766860 - DNA, 25 bp, Homo sapien
cactcagctgctttctcgggtttta

SEQ ID NO: 2766861 - DNA, 25 bp, Homo sapien
ccacagccagctccaaaggagggtc

SEQ ID NO: 2766862 - DNA, 25 bp, Homo sapien
taatccacaggtagggttttctgtc

SEQ ID NO: 2766863 - DNA, 25 bp, Homo sapien
gtcttctggctgttttacttccaca

SEQ ID NO: 2766864 - DNA, 25 bp, Homo sapien
agctccaaaggagggtctggctgaa

SEQ ID NO: 2766865 - DNA, 25 bp, Homo sapien
agaaatacagcaaatgccagtagca

SEQ ID NO: 2766866 - DNA, 25 bp, Homo sapien
ctgcagaaatacagcaaatgccagt

SEQ ID NO: 2766867 - DNA, 25 bp, Homo sapien
aatacagcaaatgccagtagcactc

SEQ ID NO: 2766868 - DNA, 25 bp, Homo sapien
tgcagaaatacagcaaatgccagta

SEQ ID NO: 2766869 - DNA, 25 bp, Homo sapien
agcaggcatcggagggccccttcat

SEQ ID NO: 2766870 - DNA, 25 bp, Homo sapien
aggcatcggagggccccttcatagg

SEQ ID NO: 2766871 - DNA, 25 bp, Homo sapien
caaatatgacatcaaaaaggtggtg

SEQ ID NO: 2766872 - DNA, 25 bp, Homo sapien
ctgccaaatatgacatcaaaaaggt

SEQ ID NO: 2766873 - DNA, 25 bp, Homo sapien
tgtgaatggcccctcagcgcaactg

SEQ ID NO: 2766874 - DNA, 25 bp, Homo sapien
catgccagcactccataaagaagac

SEQ ID NO: 2766875 - DNA, 25 bp, Homo sapien
ctcagcgcaactgaggtacaacaac

SEQ ID NO: 2766876 - DNA, 25 bp, Homo sapien
atgtccacagtccatgccagcactc

SEQ ID NO: 2766877 - DNA, 25 bp, Homo sapien
ggggctctccagaacattgtccctg

SEQ ID NO: 2766878 - DNA, 25 bp, Homo sapien
gctctccagaacattgtccctgctt

SEQ ID NO: 2766879 - DNA, 25 bp, Homo sapien
gggctctccagaacattgtccctgc

SEQ ID NO: 2766880 - DNA, 25 bp, Homo sapien
catggggctctccagaacattgtcc

SEQ ID NO: 2766881 - DNA, 25 bp, Homo sapien
ttttctaaaaagcaggtcaggtcca

SEQ ID NO: 2766882 - DNA, 25 bp, Homo sapien
tcatatttggcaagtttttctaaaa

SEQ ID NO: 2766883 - DNA, 25 bp, Homo sapien
gcaagtttttctaaaaagcaggtca

SEQ ID NO: 2766884 - DNA, 25 bp, Homo sapien
tcatcatatttggcaagtttttcta

SEQ ID NO: 2766885 - DNA, 25 bp, Homo sapien
gagagcttcccgttcagcttggaga

SEQ ID NO: 2766886 - DNA, 25 bp, Homo sapien
cagagagcttcccgttcagcttgga

SEQ ID NO: 2766887 - DNA, 25 bp, Homo sapien
gagcttcccgttcagcttggagatg

SEQ ID NO: 2766888 - DNA, 25 bp, Homo sapien
gcttcccgttcagcttggagatgac

SEQ ID NO: 2766889 - DNA, 25 bp, Homo sapien
cacaaggatcccaagtgccagcctt

SEQ ID NO: 2766890 - DNA, 25 bp, Homo sapien
ctgagtgtgactattggctaataca

SEQ ID NO: 2766891 - DNA, 25 bp, Homo sapien
gacaagcatatcgtgagttttctca

SEQ ID NO: 2766892 - DNA, 25 bp, Homo sapien
tgccagccttagtgtcatgaatgac

SEQ ID NO: 2766893 - DNA, 25 bp, Homo sapien
gtaagtcacgtccacataaagttca

SEQ ID NO: 2766894 - DNA, 25 bp, Homo sapien
ctccacatggaggtgtactgcttgc

SEQ ID NO: 2766895 - DNA, 25 bp, Homo sapien
tactgcttgccaaagtggcaggagt

SEQ ID NO: 2766896 - DNA, 25 bp, Homo sapien
agttcatccgagaaactgcttccca

SEQ ID NO: 2766897 - DNA, 25 bp, Homo sapien
accactggcctttgggtatcagaaa

SEQ ID NO: 2766898 - DNA, 25 bp, Homo sapien
taaacactcgagctttcaatggccc

SEQ ID NO: 2766899 - DNA, 25 bp, Homo sapien
tcttcatagatcaataccactggcc

SEQ ID NO: 2766900 - DNA, 25 bp, Homo sapien
cagaaattccaagcgcaaaacccag

SEQ ID NO: 2766901 - DNA, 25 bp, Homo sapien
ccttccctgtggtaagtcagtgaat

SEQ ID NO: 2766902 - DNA, 25 bp, Homo sapien
gtgaataattggtaggaagtcctcc

SEQ ID NO: 2766903 - DNA, 25 bp, Homo sapien
taattggtaggaagtcctccatctg

SEQ ID NO: 2766904 - DNA, 25 bp, Homo sapien
gtaagtcagtgaataattggtagga

SEQ ID NO: 2766905 - DNA, 25 bp, Homo sapien
gaacgacatttaaagatctcaggtt

SEQ ID NO: 2766906 - DNA, 25 bp, Homo sapien
gacatttaaagatctcaggttttcc

SEQ ID NO: 2766907 - DNA, 25 bp, Homo sapien
ttccttattgggagaacgacattta

SEQ ID NO: 2766908 - DNA, 25 bp, Homo sapien
ttgggagaacgacatttaaagatct

SEQ ID NO: 2766909 - DNA, 25 bp, Homo sapien
gcagagtgaaaacggttgcagatgc

SEQ ID NO: 2766910 - DNA, 25 bp, Homo sapien
tgaaaacggttgcagatgccacatt

SEQ ID NO: 2766911 - DNA, 25 bp, Homo sapien
agtagcagagtgaaaacggttgcag

SEQ ID NO: 2766912 - DNA, 25 bp, Homo sapien
aacggttgcagatgccacattttcc

SEQ ID NO: 2766913 - DNA, 25 bp, Homo sapien
cttctcttgctgcaggaaatgtatc

SEQ ID NO: 2766914 - DNA, 25 bp, Homo sapien
tcttgctgcaggaaatgtatcagaa

SEQ ID NO: 2766915 - DNA, 25 bp, Homo sapien
tgctgcaggaaatgtatcagaagtt

SEQ ID NO: 2766916 - DNA, 25 bp, Homo sapien
tctcttgctgcaggaaatgtatcag

SEQ ID NO: 2766917 - DNA, 25 bp, Homo sapien
gagaaggtagcaggtaacttttgtg

SEQ ID NO: 2766918 - DNA, 25 bp, Homo sapien
actttattctgggtatttgcaactg

SEQ ID NO: 2766919 - DNA, 25 bp, Homo sapien
cttttgtgaaatggcagtctggtca

SEQ ID NO: 2766920 - DNA, 25 bp, Homo sapien
atttgcaactgattgttgctccttg

SEQ ID NO: 2766921 - DNA, 25 bp, Homo sapien
tgcaaatatgccttcccaccacact

SEQ ID NO: 2766922 - DNA, 25 bp, Homo sapien
aaatatgccttcccaccacactgtg

SEQ ID NO: 2766923 - DNA, 25 bp, Homo sapien
catatgcaaatatgccttcccacca

SEQ ID NO: 2766924 - DNA, 25 bp, Homo sapien
aatatgccttcccaccacactgtgg

SEQ ID NO: 2766925 - DNA, 25 bp, Homo sapien
aagtctcttccacgtaggccaacag

SEQ ID NO: 2766926 - DNA, 25 bp, Homo sapien
tgttgcttggcatcaatgctgatcc

SEQ ID NO: 2766927 - DNA, 25 bp, Homo sapien
tatgaacgccaagaaaagtcccttc

SEQ ID NO: 2766928 - DNA, 25 bp, Homo sapien
cttgtgcttttgagaaactagagcc

SEQ ID NO: 2766929 - DNA, 25 bp, Homo sapien
gaaaatcggggccacactcccatgg

SEQ ID NO: 2766930 - DNA, 25 bp, Homo sapien
catggaaaatcggggccacactccc

SEQ ID NO: 2766931 - DNA, 25 bp, Homo sapien
tacatggaaaatcggggccacactc

SEQ ID NO: 2766932 - DNA, 25 bp, Homo sapien
ctacatggaaaatcggggccacact

SEQ ID NO: 2766933 - DNA, 25 bp, Homo sapien
tgccttgttctacctgggttagatg

SEQ ID NO: 2766934 - DNA, 25 bp, Homo sapien
cttgttctacctgggttagatggcc

SEQ ID NO: 2766935 - DNA, 25 bp, Homo sapien
ctgccttgttctacctgggttagat

SEQ ID NO: 2766936 - DNA, 25 bp, Homo sapien
ccttgttctacctgggttagatggc

SEQ ID NO: 2766937 - DNA, 25 bp, Homo sapien
cagaactttccatagtgaattactt

SEQ ID NO: 2766938 - DNA, 25 bp, Homo sapien
tataaaacgtttatcacctggcagt

SEQ ID NO: 2766939 - DNA, 25 bp, Homo sapien
tcaggtgaacgtaattagaagtagt

SEQ ID NO: 2766940 - DNA, 25 bp, Homo sapien
tcttgagcaggtttccatcttgtac

SEQ ID NO: 2766941 - DNA, 25 bp, Homo sapien
aagatcatcaagaggagcgcatgtg

SEQ ID NO: 2766942 - DNA, 25 bp, Homo sapien
cctgaagactctgcactctgtgaag

SEQ ID NO: 2766943 - DNA, 25 bp, Homo sapien
caagaggagcgcatgtgctgtgcat

SEQ ID NO: 2766944 - DNA, 25 bp, Homo sapien
tctgcactctgtgaagatcatcaag

SEQ ID NO: 2766945 - DNA, 25 bp, Homo sapien
taataacacagaacaccgatgcttc

SEQ ID NO: 2766946 - DNA, 25 bp, Homo sapien
catcttttatcccaaggaggcttgt

SEQ ID NO: 2766947 - DNA, 25 bp, Homo sapien
accttgggccactcaggaatacctg

SEQ ID NO: 2766948 - DNA, 25 bp, Homo sapien
aacgagagctgacttagaccttggg

SEQ ID NO: 2766949 - DNA, 25 bp, Homo sapien
tcttcaatagcagtaggtattcctg

SEQ ID NO: 2766950 - DNA, 25 bp, Homo sapien
cccccaatccaaaggcaggtctgat

SEQ ID NO: 2766951 - DNA, 25 bp, Homo sapien
atgctcccccaatccaaaggcaggt

SEQ ID NO: 2766952 - DNA, 25 bp, Homo sapien
aaccggggagagctcttcaatagca

SEQ ID NO: 2766953 - DNA, 25 bp, Homo sapien
ggttcatgtggaaagcatcctcagt

SEQ ID NO: 2766954 - DNA, 25 bp, Homo sapien
cttcagggttcatgtggaaagcatc

SEQ ID NO: 2766955 - DNA, 25 bp, Homo sapien
catgtggaaagcatcctcagtgttc

SEQ ID NO: 2766956 - DNA, 25 bp, Homo sapien
aaagcatcctcagtgttcgcctcca

SEQ ID NO: 2766957 - DNA, 25 bp, Homo sapien
cacatgtcattacacctggcgaagt

SEQ ID NO: 2766958 - DNA, 25 bp, Homo sapien
cagagtagcagacaaaataatgctt

SEQ ID NO: 2766959 - DNA, 25 bp, Homo sapien
gggcttcgatatatatgaacagcaa

SEQ ID NO: 2766960 - DNA, 25 bp, Homo sapien
ggcaaataatctaaccagagtagca

SEQ ID NO: 2766961 - DNA, 25 bp, Homo sapien
ggtctgttggatccagagcctctga

SEQ ID NO: 2766962 - DNA, 25 bp, Homo sapien
cagagcctctgacacagatgtctgg

SEQ ID NO: 2766963 - DNA, 25 bp, Homo sapien
caatcaagagcctggaagtctttac

SEQ ID NO: 2766964 - DNA, 25 bp, Homo sapien
tcagaggctaccatgtgacaagggc

SEQ ID NO: 2766965 - DNA, 25 bp, Homo sapien
cagcttcaagtagggttctacccac

SEQ ID NO: 2766966 - DNA, 25 bp, Homo sapien
gcttcaagtagggttctacccacag

SEQ ID NO: 2766967 - DNA, 25 bp, Homo sapien
ttcaagtagggttctacccacagtg

SEQ ID NO: 2766968 - DNA, 25 bp, Homo sapien
caagtagggttctacccacagtggg

SEQ ID NO: 2766969 - DNA, 25 bp, Homo sapien
ttatcattcagtccgaaaaagaaaa

SEQ ID NO: 2766970 - DNA, 25 bp, Homo sapien
ctgtcctagggaaatcagctaagga

SEQ ID NO: 2766971 - DNA, 25 bp, Homo sapien
aatacttctttatcattcagtccga

SEQ ID NO: 2766972 - DNA, 25 bp, Homo sapien
agggcacaagacacaaaccagatct

SEQ ID NO: 2766973 - DNA, 25 bp, Homo sapien
cctctccactcagcgtgtacgcgtt

SEQ ID NO: 2766974 - DNA, 25 bp, Homo sapien
tcctgtcctgcttctcgacttcccc

SEQ ID NO: 2766975 - DNA, 25 bp, Homo sapien
ccactcagcgtgtacgcgttggctt

SEQ ID NO: 2766976 - DNA, 25 bp, Homo sapien
cactgtcttgtcctcgcggcctctc

SEQ ID NO: 2766977 - DNA, 25 bp, Homo sapien
gcctgttctgtcctgattatgtcca

SEQ ID NO: 2766978 - DNA, 25 bp, Homo sapien
tctgttttgtgtctgcacttcggcc

SEQ ID NO: 2766979 - DNA, 25 bp, Homo sapien
tgcacttcggcctgttctgtcctga

SEQ ID NO: 2766980 - DNA, 25 bp, Homo sapien
tctgtcctgattatgtccactgctt

SEQ ID NO: 2766981 - DNA, 25 bp, Homo sapien
taacgtgttaaaatattcacgaggc

SEQ ID NO: 2766982 - DNA, 25 bp, Homo sapien
cgtgttaaaatattcacgaggctga

SEQ ID NO: 2766983 - DNA, 25 bp, Homo sapien
gaaggacacatgcattttagtggga

SEQ ID NO: 2766984 - DNA, 25 bp, Homo sapien
gtgggaatcaaccaggaggaaacat

SEQ ID NO: 2766985 - DNA, 25 bp, Homo sapien
tgcatctcaattcaagatttgcatg

SEQ ID NO: 2766986 - DNA, 25 bp, Homo sapien
ggtagcccattatcagttctcctaa

SEQ ID NO: 2766987 - DNA, 25 bp, Homo sapien
tttttcttggtagcccattatcagt

SEQ ID NO: 2766988 - DNA, 25 bp, Homo sapien
ggaaattggatattgcatgtatgta

SEQ ID NO: 2766989 - DNA, 25 bp, Homo sapien
taagtcctactctcagtaaaacatg

SEQ ID NO: 2766990 - DNA, 25 bp, Homo sapien
tatttaaggcaccagttttgcattc

SEQ ID NO: 2766991 - DNA, 25 bp, Homo sapien
gctcatccgtttactcactgttgtt

SEQ ID NO: 2766992 - DNA, 25 bp, Homo sapien
caatgggccttagaataatatgagt

SEQ ID NO: 2766993 - DNA, 25 bp, Homo sapien
aaatgcaccctttgaaggtccttgt

SEQ ID NO: 2766994 - DNA, 25 bp, Homo sapien
tggtatgccatacattagaggactc

SEQ ID NO: 2766995 - DNA, 25 bp, Homo sapien
tacattagaggactctttgaacttg

SEQ ID NO: 2766996 - DNA, 25 bp, Homo sapien
ggtccttgttgtggtatgccataca

SEQ ID NO: 2766997 - DNA, 25 bp, Homo sapien
tcacagcaacaatccaggcaaaatg

SEQ ID NO: 2766998 - DNA, 25 bp, Homo sapien
caggcatgggacttggtatccgtaa

SEQ ID NO: 2766999 - DNA, 25 bp, Homo sapien
gaagtggataaaggcctctgcactg

SEQ ID NO: 2767000 - DNA, 25 bp, Homo sapien
ttaacaggtgcaagctggcaggcat

SEQ ID NO: 2767001 - DNA, 25 bp, Homo sapien
catcccctcgaagtcagtgaaaagc

SEQ ID NO: 2767002 - DNA, 25 bp, Homo sapien
tcatcccctcgaagtcagtgaaaag

SEQ ID NO: 2767003 - DNA, 25 bp, Homo sapien
tgagttttatgtctgtcccacattc

SEQ ID NO: 2767004 - DNA, 25 bp, Homo sapien
tttcagaacttccttttgcttactc

SEQ ID NO: 2767005 - DNA, 25 bp, Homo sapien
gcatagtgcacagctttgagtttta

SEQ ID NO: 2767006 - DNA, 25 bp, Homo sapien
ttttatgtctgtcccacattctttc

SEQ ID NO: 2767007 - DNA, 25 bp, Homo sapien
cattctataatgcagataacctgag

SEQ ID NO: 2767008 - DNA, 25 bp, Homo sapien
gcatgagtttcctgtgtgctgctta

SEQ ID NO: 2767009 - DNA, 25 bp, Homo sapien
ctccaaattcatctacagcatgagt

SEQ ID NO: 2767010 - DNA, 25 bp, Homo sapien
tagcattctataatgcagataacct

SEQ ID NO: 2767011 - DNA, 25 bp, Homo sapien
tgagcataggtgatggtcaaactgt

SEQ ID NO: 2767012 - DNA, 25 bp, Homo sapien
cagttgaggaccatcatctcagtaa

SEQ ID NO: 2767013 - DNA, 25 bp, Homo sapien
ttatttgcagttgaggaccatcatc

SEQ ID NO: 2767014 - DNA, 25 bp, Homo sapien
tgtttagcaactgggctgttttggg

SEQ ID NO: 2767015 - DNA, 25 bp, Homo sapien
gcttggggcagtggaatttgccaac

SEQ ID NO: 2767016 - DNA, 25 bp, Homo sapien
cattttaatggggtccaggacacta

SEQ ID NO: 2767017 - DNA, 25 bp, Homo sapien
tatttggataaattgaaggtatggg

SEQ ID NO: 2767018 - DNA, 25 bp, Homo sapien
gatttaggaagaaggctaagccagc

SEQ ID NO: 2767019 - DNA, 25 bp, Homo sapien
tcaaagcaggtcttcaggaccccgc

SEQ ID NO: 2767020 - DNA, 25 bp, Homo sapien
ggtatagggtccattcatgccctgc

SEQ ID NO: 2767021 - DNA, 25 bp, Homo sapien
ctattttgggtatagggtccattca

SEQ ID NO: 2767022 - DNA, 25 bp, Homo sapien
ctggcagaatcatttagcagctcaa

SEQ ID NO: 2767023 - DNA, 25 bp, Homo sapien
caatgaaaccctcccacttgcccca

SEQ ID NO: 2767024 - DNA, 25 bp, Homo sapien
ttttcaatgaaaccctcccacttgc

SEQ ID NO: 2767025 - DNA, 25 bp, Homo sapien
ttcaatgaaaccctcccacttgccc

SEQ ID NO: 2767026 - DNA, 25 bp, Homo sapien
tgaaaccctcccacttgccccacac

SEQ ID NO: 2767027 - DNA, 25 bp, Homo sapien
accttattcctatgacctgtctggg

SEQ ID NO: 2767028 - DNA, 25 bp, Homo sapien
tgactttacccttgtgaactctttc

SEQ ID NO: 2767029 - DNA, 25 bp, Homo sapien
tgttgtatgaccagaaccttattcc

SEQ ID NO: 2767030 - DNA, 25 bp, Homo sapien
gctccttgcctcctgttgtatgacc

SEQ ID NO: 2767031 - DNA, 25 bp, Homo sapien
tagggactgaagatagacatatggc

SEQ ID NO: 2767032 - DNA, 25 bp, Homo sapien
aatttgtctgcgtgtagagaactgc

SEQ ID NO: 2767033 - DNA, 25 bp, Homo sapien
tatactgagtatcggcagtttgctc

SEQ ID NO: 2767034 - DNA, 25 bp, Homo sapien
tgcgactcagttgcaaactaggcct

SEQ ID NO: 2767035 - DNA, 25 bp, Homo sapien
taatagatgcgacatgggccctgct

SEQ ID NO: 2767036 - DNA, 25 bp, Homo sapien
taaggagccctatccctcacagaat

SEQ ID NO: 2767037 - DNA, 25 bp, Homo sapien
gatatatttgccacgcgaagccttg

SEQ ID NO: 2767038 - DNA, 25 bp, Homo sapien
tactgattgctagctacaggccacg

SEQ ID NO: 2767039 - DNA, 25 bp, Homo sapien
tctatgtgcctgtgcttctaagtag

SEQ ID NO: 2767040 - DNA, 25 bp, Homo sapien
ggctctatgtgcctgtgcttctaag

SEQ ID NO: 2767041 - DNA, 25 bp, Homo sapien
ttctaagtagaagtcgtctgggttg

SEQ ID NO: 2767042 - DNA, 25 bp, Homo sapien
gtagaagtcgtctgggttgctttcc

SEQ ID NO: 2767043 - DNA, 25 bp, Homo sapien
ccatgcttctgaggtgagtcggtca

SEQ ID NO: 2767044 - DNA, 25 bp, Homo sapien
ccttggcagctcaatttaactttgg

SEQ ID NO: 2767045 - DNA, 25 bp, Homo sapien
tgtgtcagcaaccttttttgtcagg

SEQ ID NO: 2767046 - DNA, 25 bp, Homo sapien
gtcggtcagcggcaaagtcagcccc

SEQ ID NO: 2767047 - DNA, 25 bp, Homo sapien
gccaaatagcagatgccccaagaaa

SEQ ID NO: 2767048 - DNA, 25 bp, Homo sapien
gaccagtcccttccatgtagcacaa

SEQ ID NO: 2767049 - DNA, 25 bp, Homo sapien
cagttacatggaactcgctgggcca

SEQ ID NO: 2767050 - DNA, 25 bp, Homo sapien
tcttgtgagacacagatgctgtatc

SEQ ID NO: 2767051 - DNA, 25 bp, Homo sapien
ctactgctattgttgcacagatgtt

SEQ ID NO: 2767052 - DNA, 25 bp, Homo sapien
ctgctattgttgcacagatgttctc

SEQ ID NO: 2767053 - DNA, 25 bp, Homo sapien
cagatgttctctccgaacatctgga

SEQ ID NO: 2767054 - DNA, 25 bp, Homo sapien
gctattgttgcacagatgttctctc

SEQ ID NO: 2767055 - DNA, 25 bp, Homo sapien
ctgtcgcctttgggcagctggacac

SEQ ID NO: 2767056 - DNA, 25 bp, Homo sapien
gcctttgggcagctggacacctcac

SEQ ID NO: 2767057 - DNA, 25 bp, Homo sapien
gtcgcctttgggcagctggacacct

SEQ ID NO: 2767058 - DNA, 25 bp, Homo sapien
tcgcctttgggcagctggacacctc

SEQ ID NO: 2767059 - DNA, 25 bp, Homo sapien
ttattaggtgtcttagaggcaagtg

SEQ ID NO: 2767060 - DNA, 25 bp, Homo sapien
ttaggtgtcttagaggcaagtgccg

SEQ ID NO: 2767061 - DNA, 25 bp, Homo sapien
tgccggaggtaaatcctcctctgca

SEQ ID NO: 2767062 - DNA, 25 bp, Homo sapien
aggcaagtgccggaggtaaatcctc

SEQ ID NO: 2767063 - DNA, 25 bp, Homo sapien
cctacaggcctaagtttgggtggag

SEQ ID NO: 2767064 - DNA, 25 bp, Homo sapien
tgacccaattaactggtagcatccc

SEQ ID NO: 2767065 - DNA, 25 bp, Homo sapien
attgctcagatctgggagtgacccc

SEQ ID NO: 2767066 - DNA, 25 bp, Homo sapien
cccgattggtgcttaggtgaatgac

SEQ ID NO: 2767067 - DNA, 25 bp, Homo sapien
tgcccatcctggttagagggaaaac

SEQ ID NO: 2767068 - DNA, 25 bp, Homo sapien
tcagtatagtcgctgactgcagcag

SEQ ID NO: 2767069 - DNA, 25 bp, Homo sapien
gggcagctccgttctacttcagcca

SEQ ID NO: 2767070 - DNA, 25 bp, Homo sapien
gagaggtaagactggcaagcccaag

SEQ ID NO: 2767071 - DNA, 25 bp, Homo sapien
attcctttgttaatagagtatctgt

SEQ ID NO: 2767072 - DNA, 25 bp, Homo sapien
cctgaaaataccagtgcaaattcct

SEQ ID NO: 2767073 - DNA, 25 bp, Homo sapien
ctggaaaaacgttcaagtggcaatt

SEQ ID NO: 2767074 - DNA, 25 bp, Homo sapien
aagtggcaattacttgatgtgtccc

SEQ ID NO: 2767075 - DNA, 25 bp, Homo sapien
ccccattggccttgttcttagacag

SEQ ID NO: 2767076 - DNA, 25 bp, Homo sapien
tgggtaaatcttgttcccataggac

SEQ ID NO: 2767077 - DNA, 25 bp, Homo sapien
aatagggacgtgttgcaaagtgagc

SEQ ID NO: 2767078 - DNA, 25 bp, Homo sapien
caggttgtaaatccctgaagacttc

SEQ ID NO: 2767079 - DNA, 25 bp, Homo sapien
tatgacggaatgttatacaagctta

SEQ ID NO: 2767080 - DNA, 25 bp, Homo sapien
caaaatcagtacatccatatgacgg

SEQ ID NO: 2767081 - DNA, 25 bp, Homo sapien
tgttgagagtcaaatagaaatctta

SEQ ID NO: 2767082 - DNA, 25 bp, Homo sapien
taattatacctagtagtcaaagaaa

SEQ ID NO: 2767083 - DNA, 25 bp, Homo sapien
tccaaatttatgagtaccccagcct

SEQ ID NO: 2767084 - DNA, 25 bp, Homo sapien
ccagggtctgagagggtgttacaca

SEQ ID NO: 2767085 - DNA, 25 bp, Homo sapien
tcggtgtatcagacttggctggacc

SEQ ID NO: 2767086 - DNA, 25 bp, Homo sapien
tggtaaagcctacccaatgacagtc

SEQ ID NO: 2767087 - DNA, 25 bp, Homo sapien
gaaatcagaacagccgtaaagtgtg

SEQ ID NO: 2767088 - DNA, 25 bp, Homo sapien
caaggccaaacttcactagactgag

SEQ ID NO: 2767089 - DNA, 25 bp, Homo sapien
taggagcagtggaatagcaaccaga

SEQ ID NO: 2767090 - DNA, 25 bp, Homo sapien
gactgcctatgggtcattgacactc

SEQ ID NO: 2767091 - DNA, 25 bp, Homo sapien
ctgaaaattctaggggtaaggactg

SEQ ID NO: 2767092 - DNA, 25 bp, Homo sapien
attctaggggtaaggactgtcgcct

SEQ ID NO: 2767093 - DNA, 25 bp, Homo sapien
aggagagtcattaaaaagggttgtg

SEQ ID NO: 2767094 - DNA, 25 bp, Homo sapien
aaggactgtcgccttaggagagtca

SEQ ID NO: 2767095 - DNA, 25 bp, Homo sapien
aaggctgtggattactcccacagtc

SEQ ID NO: 2767096 - DNA, 25 bp, Homo sapien
agcagcgtggctgactccagacccc

SEQ ID NO: 2767097 - DNA, 25 bp, Homo sapien
ccaaccagcagcaaggagttggctg

SEQ ID NO: 2767098 - DNA, 25 bp, Homo sapien
ctgtggattactcccacagtcagcc

SEQ ID NO: 2767099 - DNA, 25 bp, Homo sapien
tttgacaaaggcgaatgcgagccga

SEQ ID NO: 2767100 - DNA, 25 bp, Homo sapien
atcaacgccgaaactcatgctcaag

SEQ ID NO: 2767101 - DNA, 25 bp, Homo sapien
tctgagaatcccacaatcaacgccg

SEQ ID NO: 2767102 - DNA, 25 bp, Homo sapien
gagagtctcgagtccggctttcatc

SEQ ID NO: 2767103 - DNA, 25 bp, Homo sapien
tcctgcacgaggacatgaagctcca

SEQ ID NO: 2767104 - DNA, 25 bp, Homo sapien
gggagcaaagtctgccacatcagtc

SEQ ID NO: 2767105 - DNA, 25 bp, Homo sapien
acatcagtcgatgagtacttcctgc

SEQ ID NO: 2767106 - DNA, 25 bp, Homo sapien
gacatgaagctccattgtgtggaaa

SEQ ID NO: 2767107 - DNA, 25 bp, Homo sapien
gaagaagctcaactcggtgcacttg

SEQ ID NO: 2767108 - DNA, 25 bp, Homo sapien
gagctggaatcctgcgaagacctga

SEQ ID NO: 2767109 - DNA, 25 bp, Homo sapien
cggttttgcatgattagggccacat

SEQ ID NO: 2767110 - DNA, 25 bp, Homo sapien
ttcagcatgcaaaacgtccagagcc

SEQ ID NO: 2767111 - DNA, 25 bp, Homo sapien
ctgttgtgtagcacacaggcactgt

SEQ ID NO: 2767112 - DNA, 25 bp, Homo sapien
agactggtcgttgcgtggctaatcc

SEQ ID NO: 2767113 - DNA, 25 bp, Homo sapien
gctaatccatacctcactggtaaga

SEQ ID NO: 2767114 - DNA, 25 bp, Homo sapien
gttgtgtagcacacaggcactgtca

SEQ ID NO: 2767115 - DNA, 25 bp, Homo sapien
agtgagttaccttgccccagctttc

SEQ ID NO: 2767116 - DNA, 25 bp, Homo sapien
cagtgagttaccttgccccagcttt

SEQ ID NO: 2767117 - DNA, 25 bp, Homo sapien
gtcagtgagttaccttgccccagct

SEQ ID NO: 2767118 - DNA, 25 bp, Homo sapien
tgtcagtgagttaccttgccccagc

SEQ ID NO: 2767119 - DNA, 25 bp, Homo sapien
gtcctggactccatatccgtttact

SEQ ID NO: 2767120 - DNA, 25 bp, Homo sapien
gagtcctggactccatatccgttta

SEQ ID NO: 2767121 - DNA, 25 bp, Homo sapien
ctgagtcctggactccatatccgtt

SEQ ID NO: 2767122 - DNA, 25 bp, Homo sapien
tggactccatatccgtttacttcct

SEQ ID NO: 2767123 - DNA, 25 bp, Homo sapien
ttcttgatcttcagactccatggta

SEQ ID NO: 2767124 - DNA, 25 bp, Homo sapien
caaatgggtttataatacatctgct

SEQ ID NO: 2767125 - DNA, 25 bp, Homo sapien
taaagctttgcctgatcactccaac

SEQ ID NO: 2767126 - DNA, 25 bp, Homo sapien
ctgtgcttgcttctgtcatgtagca

SEQ ID NO: 2767127 - DNA, 25 bp, Homo sapien
aatgtgatatggaggaaaaaagcac

SEQ ID NO: 2767128 - DNA, 25 bp, Homo sapien
ctgacaccaacgagccatgggtttg

SEQ ID NO: 2767129 - DNA, 25 bp, Homo sapien
tctgcactcaagataatgtgatatg

SEQ ID NO: 2767130 - DNA, 25 bp, Homo sapien
ttgtctggactgacaccaacgagcc

SEQ ID NO: 2767131 - DNA, 25 bp, Homo sapien
cacatgcagaacattctgtagacct

SEQ ID NO: 2767132 - DNA, 25 bp, Homo sapien
tctaagtgatgtccaagtgctggaa

SEQ ID NO: 2767133 - DNA, 25 bp, Homo sapien
tactgttgctgacaagccaatcatc

SEQ ID NO: 2767134 - DNA, 25 bp, Homo sapien
catgcagaacattctgtagacctga

SEQ ID NO: 2767135 - DNA, 25 bp, Homo sapien
tgctccattcagaccgaaaggcaca

SEQ ID NO: 2767136 - DNA, 25 bp, Homo sapien
ctttgcgctgtccacggagatccat

SEQ ID NO: 2767137 - DNA, 25 bp, Homo sapien
gaaaggcacacaacgtctctcattg

SEQ ID NO: 2767138 - DNA, 25 bp, Homo sapien
tatatggtatggaggacctttgcgc

SEQ ID NO: 2767139 - DNA, 25 bp, Homo sapien
tggcaattagaatctctctgtgcat

SEQ ID NO: 2767140 - DNA, 25 bp, Homo sapien
ttggcaattagaatctctctgtgca

SEQ ID NO: 2767141 - DNA, 25 bp, Homo sapien
tttggcaattagaatctctctgtgc

SEQ ID NO: 2767142 - DNA, 25 bp, Homo sapien
gctctctgaacctttagggaatggc

SEQ ID NO: 2767143 - DNA, 25 bp, Homo sapien
tctgaacctttagggaatggcaggg

SEQ ID NO: 2767144 - DNA, 25 bp, Homo sapien
gggtgtagggtgcttcagagtaggt

SEQ ID NO: 2767145 - DNA, 25 bp, Homo sapien
cttcagagtaggtgaccgcatagca

SEQ ID NO: 2767146 - DNA, 25 bp, Homo sapien
gatatagttttggaacaagactgca

SEQ ID NO: 2767147 - DNA, 25 bp, Homo sapien
cctcaaagatgtgggctcatcagac

SEQ ID NO: 2767148 - DNA, 25 bp, Homo sapien
ccagaactgggtgtttgcatgaacc

SEQ ID NO: 2767149 - DNA, 25 bp, Homo sapien
gccaatatgaaaagtgtctctgttt

SEQ ID NO: 2767150 - DNA, 25 bp, Homo sapien
gtaagacataggcttcttatttcct

SEQ ID NO: 2767151 - DNA, 25 bp, Homo sapien
gcaggaggcaccatagcctggagga

SEQ ID NO: 2767152 - DNA, 25 bp, Homo sapien
ggaggccttggaccaagctgttgta

SEQ ID NO: 2767153 - DNA, 25 bp, Homo sapien
tccttgaggggatcttggtgcacct

SEQ ID NO: 2767154 - DNA, 25 bp, Homo sapien
gagatcagagatctacatgtgctca

SEQ ID NO: 2767155 - DNA, 25 bp, Homo sapien
tttttcagggcagagttcagaggcc

SEQ ID NO: 2767156 - DNA, 25 bp, Homo sapien
tctacatgtgctcatcctcagggtg

SEQ ID NO: 2767157 - DNA, 25 bp, Homo sapien
ctttctgtctcaacatgacagattt

SEQ ID NO: 2767158 - DNA, 25 bp, Homo sapien
ctcttgtagacctgacatactaggg

SEQ ID NO: 2767159 - DNA, 25 bp, Homo sapien
ctgagtggaggtctccctgccacat

SEQ ID NO: 2767160 - DNA, 25 bp, Homo sapien
ggcaagctgctttttccagagtttc

SEQ ID NO: 2767161 - DNA, 25 bp, Homo sapien
gccacataggacactccatccaatg

SEQ ID NO: 2767162 - DNA, 25 bp, Homo sapien
gagccacgtaggacacccttaggaa

SEQ ID NO: 2767163 - DNA, 25 bp, Homo sapien
caaggtcagagccacgtaggacacc

SEQ ID NO: 2767164 - DNA, 25 bp, Homo sapien
cgtaggacacccttaggaaatagtg

SEQ ID NO: 2767165 - DNA, 25 bp, Homo sapien
gacacccttaggaaatagtggacca

SEQ ID NO: 2767166 - DNA, 25 bp, Homo sapien
tccctgctgggccattaactttttc

SEQ ID NO: 2767167 - DNA, 25 bp, Homo sapien
tgcacttctccatcatggcactcac

SEQ ID NO: 2767168 - DNA, 25 bp, Homo sapien
gcacttctccatcatggcactcacc

SEQ ID NO: 2767169 - DNA, 25 bp, Homo sapien
ccctgctgggccattaactttttca

SEQ ID NO: 2767170 - DNA, 25 bp, Homo sapien
tccagtcggtgcaccattgtgtccc

SEQ ID NO: 2767171 - DNA, 25 bp, Homo sapien
agtcggtgcaccattgtgtcccaaa

SEQ ID NO: 2767172 - DNA, 25 bp, Homo sapien
agtctcaaccatccagtcggtgcac

SEQ ID NO: 2767173 - DNA, 25 bp, Homo sapien
accatccagtcggtgcaccattgtg

SEQ ID NO: 2767174 - DNA, 25 bp, Homo sapien
tgccacagtgtgagtaggaatacag

SEQ ID NO: 2767175 - DNA, 25 bp, Homo sapien
gccacagtgtgagtaggaatacagg

SEQ ID NO: 2767176 - DNA, 25 bp, Homo sapien
ccacagtgtgagtaggaatacagga

SEQ ID NO: 2767177 - DNA, 25 bp, Homo sapien
ctggatgtaatgagagcaaggcaca

SEQ ID NO: 2767178 - DNA, 25 bp, Homo sapien
tagtctagacctgagtgtcattgtg

SEQ ID NO: 2767179 - DNA, 25 bp, Homo sapien
tcccagagcagaatgagtaagccac

SEQ ID NO: 2767180 - DNA, 25 bp, Homo sapien
tgataaagagagaagtggtcctcat

SEQ ID NO: 2767181 - DNA, 25 bp, Homo sapien
ccactatcaaacagcaggttccttc

SEQ ID NO: 2767182 - DNA, 25 bp, Homo sapien
agtttgttgcatatgccactcaatt

SEQ ID NO: 2767183 - DNA, 25 bp, Homo sapien
gaatcatctctgtctgactcattgt

SEQ ID NO: 2767184 - DNA, 25 bp, Homo sapien
cctgatctttgaaatctcgtaggaa

SEQ ID NO: 2767185 - DNA, 25 bp, Homo sapien
actgaactcactggtaagaatcgac

SEQ ID NO: 2767186 - DNA, 25 bp, Homo sapien
gacctctatgactctcgattctatg

SEQ ID NO: 2767187 - DNA, 25 bp, Homo sapien
tgactctcgattctatgaattcttc

SEQ ID NO: 2767188 - DNA, 25 bp, Homo sapien
gaatcgacataaggtgacctctatg

SEQ ID NO: 2767189 - DNA, 25 bp, Homo sapien
gccctttgggcagaactagaagctg

SEQ ID NO: 2767190 - DNA, 25 bp, Homo sapien
cctcctgagccctttgggcagaact

SEQ ID NO: 2767191 - DNA, 25 bp, Homo sapien
ctatttttaaggagagcatcattag

SEQ ID NO: 2767192 - DNA, 25 bp, Homo sapien
gaaaagagtacagcttgtggttcct

SEQ ID NO: 2767193 - DNA, 25 bp, Homo sapien
caagacgtaaaatccagaagccagg

SEQ ID NO: 2767194 - DNA, 25 bp, Homo sapien
caagggtcattctcctgttgatagc

SEQ ID NO: 2767195 - DNA, 25 bp, Homo sapien
caatggaagttcgttttctcacagt

SEQ ID NO: 2767196 - DNA, 25 bp, Homo sapien
gctagtgtagggacttaaagccttc

SEQ ID NO: 2767197 - DNA, 25 bp, Homo sapien
gctattgatactccctgctgctgat

SEQ ID NO: 2767198 - DNA, 25 bp, Homo sapien
tgctgctgatcaaacttccggttct

SEQ ID NO: 2767199 - DNA, 25 bp, Homo sapien
agctaggtcttctactggcagctat

SEQ ID NO: 2767200 - DNA, 25 bp, Homo sapien
gattgtttatctctggcatacaagt

SEQ ID NO: 2767201 - DNA, 25 bp, Homo sapien
tgtagtaggacttaagagaagaaag

SEQ ID NO: 2767202 - DNA, 25 bp, Homo sapien
tgatccccccttccatgtagtagga

SEQ ID NO: 2767203 - DNA, 25 bp, Homo sapien
agaaaggcaactgaatatcttgatg

SEQ ID NO: 2767204 - DNA, 25 bp, Homo sapien
ttcataacttcctgccgaaagaata

SEQ ID NO: 2767205 - DNA, 25 bp, Homo sapien
atccacccttgggatatagctccat

SEQ ID NO: 2767206 - DNA, 25 bp, Homo sapien
tatatccacccttgggatatagctc

SEQ ID NO: 2767207 - DNA, 25 bp, Homo sapien
ccaagctatatccacccttgggata

SEQ ID NO: 2767208 - DNA, 25 bp, Homo sapien
catattccaagctatatccaccctt

SEQ ID NO: 2767209 - DNA, 25 bp, Homo sapien
tgcatgtcaggtcctatactaggtc

SEQ ID NO: 2767210 - DNA, 25 bp, Homo sapien
tctattaatgcaagggtagcccata

SEQ ID NO: 2767211 - DNA, 25 bp, Homo sapien
tgctgccattagaacaagagcctca

SEQ ID NO: 2767212 - DNA, 25 bp, Homo sapien
ggatagactgtatgtcaggccacaa

SEQ ID NO: 2767213 - DNA, 25 bp, Homo sapien
agaactaataccaatcttcctcaaa

SEQ ID NO: 2767214 - DNA, 25 bp, Homo sapien
taaagaactaataccaatcttcctc

SEQ ID NO: 2767215 - DNA, 25 bp, Homo sapien
taccaatcttcctcaaactattctt

SEQ ID NO: 2767216 - DNA, 25 bp, Homo sapien
caatcttcctcaaactattctttaa

SEQ ID NO: 2767217 - DNA, 25 bp, Homo sapien
cgtcagcatcctgagctggtgggac

SEQ ID NO: 2767218 - DNA, 25 bp, Homo sapien
ggtcttacccgccagcaggtggcga

SEQ ID NO: 2767219 - DNA, 25 bp, Homo sapien
gccctgcggagactctggttttact

SEQ ID NO: 2767220 - DNA, 25 bp, Homo sapien
accacggccgcctaatttcttacag

SEQ ID NO: 2767221 - DNA, 25 bp, Homo sapien
cggctgaaccatgtcggagatcctg

SEQ ID NO: 2767222 - DNA, 25 bp, Homo sapien
tggttcctggcgagtttctaagccc

SEQ ID NO: 2767223 - DNA, 25 bp, Homo sapien
tcccggaccgtgagtgagtgaccac

SEQ ID NO: 2767224 - DNA, 25 bp, Homo sapien
gagttgaaggtgtcccggaccgtga

SEQ ID NO: 2767225 - DNA, 25 bp, Homo sapien
gcagggcgcgagctgcacaggtggg

SEQ ID NO: 2767226 - DNA, 25 bp, Homo sapien
gcgcactcagggaaggtggcgggca

SEQ ID NO: 2767227 - DNA, 25 bp, Homo sapien
cgcagcgcactcagggaaggtggcg

SEQ ID NO: 2767228 - DNA, 25 bp, Homo sapien
ggcgggcagggcgcgagctgcacag

SEQ ID NO: 2767229 - DNA, 25 bp, Homo sapien
agggcaaggccttgtcacgtcccca

SEQ ID NO: 2767230 - DNA, 25 bp, Homo sapien
cacggtgggcccaacccgcaggcat

SEQ ID NO: 2767231 - DNA, 25 bp, Homo sapien
tctgccgctctcgagttacccttgt

SEQ ID NO: 2767232 - DNA, 25 bp, Homo sapien
tcgagttacccttgtcacggtgggc

SEQ ID NO: 2767233 - DNA, 25 bp, Homo sapien
aggaacatgcttgtcttacccacat

SEQ ID NO: 2767234 - DNA, 25 bp, Homo sapien
ggaacatgcttgtcttacccacatc

SEQ ID NO: 2767235 - DNA, 25 bp, Homo sapien
caggaacatgcttgtcttacccaca

SEQ ID NO: 2767236 - DNA, 25 bp, Homo sapien
acaggaacatgcttgtcttacccac

SEQ ID NO: 2767237 - DNA, 25 bp, Homo sapien
tgcaaggccaggcagtttgaatccc

SEQ ID NO: 2767238 - DNA, 25 bp, Homo sapien
ctcttgcaaggccaggcagtttgaa

SEQ ID NO: 2767239 - DNA, 25 bp, Homo sapien
cttgcaaggccaggcagtttgaatc

SEQ ID NO: 2767240 - DNA, 25 bp, Homo sapien
tcttgcaaggccaggcagtttgaat

SEQ ID NO: 2767241 - DNA, 25 bp, Homo sapien
tacactgaggactcaatgatccaac

SEQ ID NO: 2767242 - DNA, 25 bp, Homo sapien
tcaccatatgctaatccatagatta

SEQ ID NO: 2767243 - DNA, 25 bp, Homo sapien
ccatgagcatgaggaatagttacac

SEQ ID NO: 2767244 - DNA, 25 bp, Homo sapien
cttcaccatatgctaatccatagat

SEQ ID NO: 2767245 - DNA, 25 bp, Homo sapien
tcaaggtggagagtttaatttgcca

SEQ ID NO: 2767246 - DNA, 25 bp, Homo sapien
atacagtttgttctagagtctaaac

SEQ ID NO: 2767247 - DNA, 25 bp, Homo sapien
catgttctagctaccttctttctca

SEQ ID NO: 2767248 - DNA, 25 bp, Homo sapien
gggataccaagagcaccactcatgt

SEQ ID NO: 2767249 - DNA, 25 bp, Homo sapien
ggctgggagacccatagacaattca

SEQ ID NO: 2767250 - DNA, 25 bp, Homo sapien
caacccggagcagggtagacttact

SEQ ID NO: 2767251 - DNA, 25 bp, Homo sapien
caggagagtattacatcaagggaac

SEQ ID NO: 2767252 - DNA, 25 bp, Homo sapien
cccttaggtttgcatgggagctgcg

SEQ ID NO: 2767253 - DNA, 25 bp, Homo sapien
caaagtatgagccagaaccagcaac

SEQ ID NO: 2767254 - DNA, 25 bp, Homo sapien
gcctagttaaacctgttcatagttg

SEQ ID NO: 2767255 - DNA, 25 bp, Homo sapien
caactctgttggagttggagtgatc

SEQ ID NO: 2767256 - DNA, 25 bp, Homo sapien
gaggaaataccctctgactctagga

SEQ ID NO: 2767257 - DNA, 25 bp, Homo sapien
taagcctagtacctgcttgtaatgg

SEQ ID NO: 2767258 - DNA, 25 bp, Homo sapien
caacggaggagcatgtgctagaact

SEQ ID NO: 2767259 - DNA, 25 bp, Homo sapien
tcaggttcctctgtaagcctagtac

SEQ ID NO: 2767260 - DNA, 25 bp, Homo sapien
caactgcatgattatgagacacggg

SEQ ID NO: 2767261 - DNA, 25 bp, Homo sapien
gctgccagtcatttgatccctggga

SEQ ID NO: 2767262 - DNA, 25 bp, Homo sapien
tccgaggctgccagtcatttgatcc

SEQ ID NO: 2767263 - DNA, 25 bp, Homo sapien
tcaattccgaggctgccagtcattt

SEQ ID NO: 2767264 - DNA, 25 bp, Homo sapien
cgaggctgccagtcatttgatccct

SEQ ID NO: 2767265 - DNA, 25 bp, Homo sapien
cagttggcaaaatcagagctacaag

SEQ ID NO: 2767266 - DNA, 25 bp, Homo sapien
acagttggcaaaatcagagctacaa

SEQ ID NO: 2767267 - DNA, 25 bp, Homo sapien
ggttagaagtgagatactgcacaga

SEQ ID NO: 2767268 - DNA, 25 bp, Homo sapien
tacgtgggatgaagttgagccttga

SEQ ID NO: 2767269 - DNA, 25 bp, Homo sapien
tataagtggtagagtaggacaggcc

SEQ ID NO: 2767270 - DNA, 25 bp, Homo sapien
tagagtaggacaggccccaagaata

SEQ ID NO: 2767271 - DNA, 25 bp, Homo sapien
gaccctgcaaccaagatgttccata

SEQ ID NO: 2767272 - DNA, 25 bp, Homo sapien
cctgcaaccaagatgttccatactt

SEQ ID NO: 2767273 - DNA, 25 bp, Homo sapien
ttgtggaccctgcaaccaagatgtt

SEQ ID NO: 2767274 - DNA, 25 bp, Homo sapien
caagatgttccatacttgtttgcca

SEQ ID NO: 2767275 - DNA, 25 bp, Homo sapien
agccagaactgagccaattgtgagt

SEQ ID NO: 2767276 - DNA, 25 bp, Homo sapien
agaaaggaatagatacagccagcca

SEQ ID NO: 2767277 - DNA, 25 bp, Homo sapien
taaccaagaaaggaatagatacagc

SEQ ID NO: 2767278 - DNA, 25 bp, Homo sapien
cagaactgagccaattgtgagttac

SEQ ID NO: 2767279 - DNA, 25 bp, Homo sapien
ttccactgaagtggcatcagcatgt

SEQ ID NO: 2767280 - DNA, 25 bp, Homo sapien
ccactgaagtggcatcagcatgtgc

SEQ ID NO: 2767281 - DNA, 25 bp, Homo sapien
cactgaagtggcatcagcatgtgca

SEQ ID NO: 2767282 - DNA, 25 bp, Homo sapien
actgaagtggcatcagcatgtgcat

SEQ ID NO: 2767283 - DNA, 25 bp, Homo sapien
tccttcaaatgcctcataaacaaac

SEQ ID NO: 2767284 - DNA, 25 bp, Homo sapien
ccttcaaatgcctcataaacaaaca

SEQ ID NO: 2767285 - DNA, 25 bp, Homo sapien
tactgtgtgcaggggcacgggccag

SEQ ID NO: 2767286 - DNA, 25 bp, Homo sapien
tgcttgatccagacttttctcagaa

SEQ ID NO: 2767287 - DNA, 25 bp, Homo sapien
aacccagaatggggttgcttgatcc

SEQ ID NO: 2767288 - DNA, 25 bp, Homo sapien
gggcactgtgtccgacagtggagtg

SEQ ID NO: 2767289 - DNA, 25 bp, Homo sapien
gccagagagggagacactgagctgc

SEQ ID NO: 2767290 - DNA, 25 bp, Homo sapien
gagagggagacactgagctgcaggg

SEQ ID NO: 2767291 - DNA, 25 bp, Homo sapien
ggagacactgagctgcagggacacc

SEQ ID NO: 2767292 - DNA, 25 bp, Homo sapien
tgcagggacaccacactggctcccg

SEQ ID NO: 2767293 - DNA, 25 bp, Homo sapien
aagagtgaaatgttggtactcaaag

SEQ ID NO: 2767294 - DNA, 25 bp, Homo sapien
ggcagaaatgtcgtcagcaaagagt

SEQ ID NO: 2767295 - DNA, 25 bp, Homo sapien
aaatgttggtactcaaagtttccat

SEQ ID NO: 2767296 - DNA, 25 bp, Homo sapien
gaaatgtcgtcagcaaagagtgaaa

SEQ ID NO: 2767297 - DNA, 25 bp, Homo sapien
gaaactgtcgctgaccctggacatg

SEQ ID NO: 2767298 - DNA, 25 bp, Homo sapien
tagaggctgccacaaacttcaggga

SEQ ID NO: 2767299 - DNA, 25 bp, Homo sapien
caatgagtgaactgactgtggctac

SEQ ID NO: 2767300 - DNA, 25 bp, Homo sapien
cctggacatgggtacgtttgacgag

SEQ ID NO: 2767301 - DNA, 25 bp, Homo sapien
cacacgttaagtcagaactgggagc

SEQ ID NO: 2767302 - DNA, 25 bp, Homo sapien
tggtccaacaaacatgactgggtct

SEQ ID NO: 2767303 - DNA, 25 bp, Homo sapien
caagtctcaaataggaggctccaca

SEQ ID NO: 2767304 - DNA, 25 bp, Homo sapien
gacatttttcatcagtgggcaggtg

SEQ ID NO: 2767305 - DNA, 25 bp, Homo sapien
gcagattgttttacctaggagccac

SEQ ID NO: 2767306 - DNA, 25 bp, Homo sapien
ggtgtgagggagcagctacatttac

SEQ ID NO: 2767307 - DNA, 25 bp, Homo sapien
tcaccttctgctatggagttccaag

SEQ ID NO: 2767308 - DNA, 25 bp, Homo sapien
gaggaatatctataacaacaagcag

SEQ ID NO: 2767309 - DNA, 25 bp, Homo sapien
taggcatcggtgtcaatagaagcac

SEQ ID NO: 2767310 - DNA, 25 bp, Homo sapien
catcggtgtcaatagaagcactgac

SEQ ID NO: 2767311 - DNA, 25 bp, Homo sapien
tataatctccaagattttgtcatca

SEQ ID NO: 2767312 - DNA, 25 bp, Homo sapien
aaatgaaataggcatcggtgtcaat

SEQ ID NO: 2767313 - DNA, 25 bp, Homo sapien
aaaggaaacagtcttaggcaaggca

SEQ ID NO: 2767314 - DNA, 25 bp, Homo sapien
ttacagagctcattttatttaagtc

SEQ ID NO: 2767315 - DNA, 25 bp, Homo sapien
ggaaacagtcttaggcaaggcaaac

SEQ ID NO: 2767316 - DNA, 25 bp, Homo sapien
tagaacaaaggaaacagtcttaggc

SEQ ID NO: 2767317 - DNA, 25 bp, Homo sapien
tacgattctggtttttgagctgaca

SEQ ID NO: 2767318 - DNA, 25 bp, Homo sapien
gagtgtgaaatcaaatacgattctg

SEQ ID NO: 2767319 - DNA, 25 bp, Homo sapien
catttagtcatttggagccacatgg

SEQ ID NO: 2767320 - DNA, 25 bp, Homo sapien
ttttttggccccagaaaatgcaata

SEQ ID NO: 2767321 - DNA, 25 bp, Homo sapien
tgatgatgaagtacacatcagtgtc

SEQ ID NO: 2767322 - DNA, 25 bp, Homo sapien
ttccaggcggttctcatcatgatga

SEQ ID NO: 2767323 - DNA, 25 bp, Homo sapien
tgcatagtagttcatgaactcctca

SEQ ID NO: 2767324 - DNA, 25 bp, Homo sapien
catcagtgtcaatggatgcgctcac

SEQ ID NO: 2767325 - DNA, 25 bp, Homo sapien
gcttccggctgctatgggagtccag

SEQ ID NO: 2767326 - DNA, 25 bp, Homo sapien
aaattccgtgactgctgaaactcca

SEQ ID NO: 2767327 - DNA, 25 bp, Homo sapien
ggagtccagtgaggtattagtgcaa

SEQ ID NO: 2767328 - DNA, 25 bp, Homo sapien
ttgcttcacacctccatccaaatgg

SEQ ID NO: 2767329 - DNA, 25 bp, Homo sapien
tcatagggtgaatcaaagttatcca

SEQ ID NO: 2767330 - DNA, 25 bp, Homo sapien
tctaaaagcttgcatgattacctct

SEQ ID NO: 2767331 - DNA, 25 bp, Homo sapien
cgaaggtcttcgattgttataacac

SEQ ID NO: 2767332 - DNA, 25 bp, Homo sapien
gattacctcttttctggctctggac

SEQ ID NO: 2767333 - DNA, 25 bp, Homo sapien
tcattgaagtctattgttccatttc

SEQ ID NO: 2767334 - DNA, 25 bp, Homo sapien
taaaatcaagggttcgattattatc

SEQ ID NO: 2767335 - DNA, 25 bp, Homo sapien
tattatcgtcatccataattctaaa

SEQ ID NO: 2767336 - DNA, 25 bp, Homo sapien
catctttatcaaacctccggaaaag

SEQ ID NO: 2767337 - DNA, 25 bp, Homo sapien
gtcggtggccgtggtgagctttttc

SEQ ID NO: 2767338 - DNA, 25 bp, Homo sapien
ccaagtcctttgatcccagcagagc

SEQ ID NO: 2767339 - DNA, 25 bp, Homo sapien
cactgcagtcggagtctttcaatgg

SEQ ID NO: 2767340 - DNA, 25 bp, Homo sapien
ccaggcactgcagtcggagtctttc

SEQ ID NO: 2767341 - DNA, 25 bp, Homo sapien
tcggtcatggcgcgctgtccctgcc

SEQ ID NO: 2767342 - DNA, 25 bp, Homo sapien
ctcggtcatggcgcgctgtccctgc

SEQ ID NO: 2767343 - DNA, 25 bp, Homo sapien
tctcggtcatggcgcgctgtccctg

SEQ ID NO: 2767344 - DNA, 25 bp, Homo sapien
ctctcggtcatggcgcgctgtccct

SEQ ID NO: 2767345 - DNA, 25 bp, Homo sapien
tggttccctccgtaaggttcagaga

SEQ ID NO: 2767346 - DNA, 25 bp, Homo sapien
gagacagatttaagaggacccttgg

SEQ ID NO: 2767347 - DNA, 25 bp, Homo sapien
gaagagggaactgctctagccctag

SEQ ID NO: 2767348 - DNA, 25 bp, Homo sapien
caatggtcccattaaggctgtctca

SEQ ID NO: 2767349 - DNA, 25 bp, Homo sapien
tcagctcggatgaacttaagagaag

SEQ ID NO: 2767350 - DNA, 25 bp, Homo sapien
agggaaccgaagcaggtttagtcag

SEQ ID NO: 2767351 - DNA, 25 bp, Homo sapien
cgaagcaggtttagtcagctcggat

SEQ ID NO: 2767352 - DNA, 25 bp, Homo sapien
gcaggtttagtcagctcggatgaac

SEQ ID NO: 2767353 - DNA, 25 bp, Homo sapien
atgtgcagtcgcgatggctggacca

SEQ ID NO: 2767354 - DNA, 25 bp, Homo sapien
tggaccagattttgcctggacagtc

SEQ ID NO: 2767355 - DNA, 25 bp, Homo sapien
gcttccccgctggcagggatgtgca

SEQ ID NO: 2767356 - DNA, 25 bp, Homo sapien
tgtagatgacagaggcgagatgtgc

SEQ ID NO: 2767357 - DNA, 25 bp, Homo sapien
gcagccgtctgcagtccaattgttc

SEQ ID NO: 2767358 - DNA, 25 bp, Homo sapien
agtccaattgttccgagcctctgtc

SEQ ID NO: 2767359 - DNA, 25 bp, Homo sapien
acaacagcagccgtctgcagtccaa

SEQ ID NO: 2767360 - DNA, 25 bp, Homo sapien
tctgcagtccaattgttccgagcct

SEQ ID NO: 2767361 - DNA, 25 bp, Homo sapien
taaccttttgccaccagttgcttcg

SEQ ID NO: 2767362 - DNA, 25 bp, Homo sapien
aactatggacgctgtctcctgcatc

SEQ ID NO: 2767363 - DNA, 25 bp, Homo sapien
tgcttcgaactgaaactatggacgc

SEQ ID NO: 2767364 - DNA, 25 bp, Homo sapien
gaactgaaactatggacgctgtctc

SEQ ID NO: 2767365 - DNA, 25 bp, Homo sapien
cactctcttagtattaattggagga

SEQ ID NO: 2767366 - DNA, 25 bp, Homo sapien
ggggccctggtccactctcttagta

SEQ ID NO: 2767367 - DNA, 25 bp, Homo sapien
agtattaattggaggacctgggatc

SEQ ID NO: 2767368 - DNA, 25 bp, Homo sapien
tcagctcactgtcaatctctactct

SEQ ID NO: 2767369 - DNA, 25 bp, Homo sapien
gttttaatgaggaaccctgactgat

SEQ ID NO: 2767370 - DNA, 25 bp, Homo sapien
gcctcaggactggaatatcagttcc

SEQ ID NO: 2767371 - DNA, 25 bp, Homo sapien
tcagttcccacccaagagtttccag

SEQ ID NO: 2767372 - DNA, 25 bp, Homo sapien
taagagtgaacatcacccaaggacc

SEQ ID NO: 2767373 - DNA, 25 bp, Homo sapien
ggcttccaaagacccaattgtccag

SEQ ID NO: 2767374 - DNA, 25 bp, Homo sapien
ccaatttgctgtgacacgcccagga

SEQ ID NO: 2767375 - DNA, 25 bp, Homo sapien
gagcacgtttcctcggtctttaaga

SEQ ID NO: 2767376 - DNA, 25 bp, Homo sapien
gtcgccccagtcagttctccggatt

SEQ ID NO: 2767377 - DNA, 25 bp, Homo sapien
tgagcaacgaaacgtctatccagca

SEQ ID NO: 2767378 - DNA, 25 bp, Homo sapien
gaaacgaatgagcaacgaaacgtct

SEQ ID NO: 2767379 - DNA, 25 bp, Homo sapien
cgaatgagcaacgaaacgtctatcc

SEQ ID NO: 2767380 - DNA, 25 bp, Homo sapien
cttagaagaaacgaatgagcaacga

SEQ ID NO: 2767381 - DNA, 25 bp, Homo sapien
gagaaggaagcccactaggagcaga

SEQ ID NO: 2767382 - DNA, 25 bp, Homo sapien
ccagtgtcgatgctgtcaggatttt

SEQ ID NO: 2767383 - DNA, 25 bp, Homo sapien
gaatcccaaagagaaggaagcccac

SEQ ID NO: 2767384 - DNA, 25 bp, Homo sapien
agagcagaatcccaaagagaaggaa

SEQ ID NO: 2767385 - DNA, 25 bp, Homo sapien
cacactctggtttattccctctgca

SEQ ID NO: 2767386 - DNA, 25 bp, Homo sapien
taaacacatggatccttccacccta

SEQ ID NO: 2767387 - DNA, 25 bp, Homo sapien
ggatcgctaatcttcttaccatgat

SEQ ID NO: 2767388 - DNA, 25 bp, Homo sapien
cactgtttttgcaaggcaatgcaca

SEQ ID NO: 2767389 - DNA, 25 bp, Homo sapien
catgaacaccagctatcagagaggt

SEQ ID NO: 2767390 - DNA, 25 bp, Homo sapien
tatcatctgtgaccaactgcaggct

SEQ ID NO: 2767391 - DNA, 25 bp, Homo sapien
aatgggctaccttcgggctttatca

SEQ ID NO: 2767392 - DNA, 25 bp, Homo sapien
tgatggagcaaccaaccacaacagc

SEQ ID NO: 2767393 - DNA, 25 bp, Homo sapien
gtcgctcccccagtctggaggatgt

SEQ ID NO: 2767394 - DNA, 25 bp, Homo sapien
tagggcttgaggtgcgtcgctcccc

SEQ ID NO: 2767395 - DNA, 25 bp, Homo sapien
aggtactgctcatgccaaggctgct

SEQ ID NO: 2767396 - DNA, 25 bp, Homo sapien
tcaatgaggtactgctcatgccaag

SEQ ID NO: 2767397 - DNA, 25 bp, Homo sapien
tgtcgccatcacagccttaaggtag

SEQ ID NO: 2767398 - DNA, 25 bp, Homo sapien
taaccaagaaggtcactatgccgct

SEQ ID NO: 2767399 - DNA, 25 bp, Homo sapien
gacttaccagagaaaacaggtgggc

SEQ ID NO: 2767400 - DNA, 25 bp, Homo sapien
gaattccactagagggactcccaaa

SEQ ID NO: 2767401 - DNA, 25 bp, Homo sapien
ggctgtgacctgattcaaccggata

SEQ ID NO: 2767402 - DNA, 25 bp, Homo sapien
tactactcggaccatgtttccatgc

SEQ ID NO: 2767403 - DNA, 25 bp, Homo sapien
tagagacaccataatttttggctac

SEQ ID NO: 2767404 - DNA, 25 bp, Homo sapien
aagtgtcagtgtgtcggctgtgacc

SEQ ID NO: 2767405 - DNA, 25 bp, Homo sapien
gacggatggcctccattacgctgtt

SEQ ID NO: 2767406 - DNA, 25 bp, Homo sapien
gctgttctgcccaccatgagtgaca

SEQ ID NO: 2767407 - DNA, 25 bp, Homo sapien
catgagtgacaaaaagacggatgct

SEQ ID NO: 2767408 - DNA, 25 bp, Homo sapien
caccatgacggatggcctccattac

SEQ ID NO: 2767409 - DNA, 25 bp, Homo sapien
ggtgggcaaaggcattgtgcatctt

SEQ ID NO: 2767410 - DNA, 25 bp, Homo sapien
ggcaaaggcattgtgcatcttcttg

SEQ ID NO: 2767411 - DNA, 25 bp, Homo sapien
gggactgatgggtgttcaacatgga

SEQ ID NO: 2767412 - DNA, 25 bp, Homo sapien
catcttcttgaggacttcctgggac

SEQ ID NO: 2767413 - DNA, 25 bp, Homo sapien
taatgttaatcagcagccgcatgcc

SEQ ID NO: 2767414 - DNA, 25 bp, Homo sapien
gaaagcttaagggatactgcagacc

SEQ ID NO: 2767415 - DNA, 25 bp, Homo sapien
gactgactcaaatgactccgtagag

SEQ ID NO: 2767416 - DNA, 25 bp, Homo sapien
cacactgggaatggtgacatagctc

SEQ ID NO: 2767417 - DNA, 25 bp, Homo sapien
gtagcaattaacaagtgtaccctgg

SEQ ID NO: 2767418 - DNA, 25 bp, Homo sapien
tcaagaggcttggtcttagtcctac

SEQ ID NO: 2767419 - DNA, 25 bp, Homo sapien
caggtggcactattttggagaaaac

SEQ ID NO: 2767420 - DNA, 25 bp, Homo sapien
aatatggacgatggccaatcttagc

SEQ ID NO: 2767421 - DNA, 25 bp, Homo sapien
aagatctagatttccctgcaaggta

SEQ ID NO: 2767422 - DNA, 25 bp, Homo sapien
tcttccagtcggataaagtttgccc

SEQ ID NO: 2767423 - DNA, 25 bp, Homo sapien
tcgtcctcacgcctacagaaaatgt

SEQ ID NO: 2767424 - DNA, 25 bp, Homo sapien
tctaggattaggcaagcgagagact

SEQ ID NO: 2767425 - DNA, 25 bp, Homo sapien
gccatctcagtggttcaggatacac

SEQ ID NO: 2767426 - DNA, 25 bp, Homo sapien
caaagccatctcagtggttcaggat

SEQ ID NO: 2767427 - DNA, 25 bp, Homo sapien
aagccatctcagtggttcaggatac

SEQ ID NO: 2767428 - DNA, 25 bp, Homo sapien
tcaaagccatctcagtggttcagga

SEQ ID NO: 2767429 - DNA, 25 bp, Homo sapien
agacctcaattaaatccccatggtt

SEQ ID NO: 2767430 - DNA, 25 bp, Homo sapien
catgcaattgaatcttctactacac

SEQ ID NO: 2767431 - DNA, 25 bp, Homo sapien
acaactgccccaatgcgaagacctg

SEQ ID NO: 2767432 - DNA, 25 bp, Homo sapien
aatctagccagcgtcacccagagaa

SEQ ID NO: 2767433 - DNA, 25 bp, Homo sapien
aaggcctgacactgtacttgccaaa

SEQ ID NO: 2767434 - DNA, 25 bp, Homo sapien
ccactgattctaagaccagggcatg

SEQ ID NO: 2767435 - DNA, 25 bp, Homo sapien
caaggactctatgtgaatcccaaac

SEQ ID NO: 2767436 - DNA, 25 bp, Homo sapien
taattaaagggctcatcccactgat

SEQ ID NO: 2767437 - DNA, 25 bp, Homo sapien
ttccatcaagcctccaatataaaca

SEQ ID NO: 2767438 - DNA, 25 bp, Homo sapien
caaataccagatcatagttctcatt

SEQ ID NO: 2767439 - DNA, 25 bp, Homo sapien
tactggaacataagacaaggggctt

SEQ ID NO: 2767440 - DNA, 25 bp, Homo sapien
caaaatccaaagagccgaatgtggt

SEQ ID NO: 2767441 - DNA, 25 bp, Homo sapien
aataccagatcatagttctcattct

SEQ ID NO: 2767442 - DNA, 25 bp, Homo sapien
cattagctttacaagggcttcagat

SEQ ID NO: 2767443 - DNA, 25 bp, Homo sapien
ttccattagctttacaagggcttca

SEQ ID NO: 2767444 - DNA, 25 bp, Homo sapien
caaataactacattgagtcccaaat

SEQ ID NO: 2767445 - DNA, 25 bp, Homo sapien
actacattgagtcccaaatatttcc

SEQ ID NO: 2767446 - DNA, 25 bp, Homo sapien
aaccacctgataacttggtatgatt

SEQ ID NO: 2767447 - DNA, 25 bp, Homo sapien
gaaaaccacctgataacttggtatg

SEQ ID NO: 2767448 - DNA, 25 bp, Homo sapien
gtgaaaaccacctgataacttggta

SEQ ID NO: 2767449 - DNA, 25 bp, Homo sapien
aaaaccacctgataacttggtatga

SEQ ID NO: 2767450 - DNA, 25 bp, Homo sapien
atgaccatatattactgctgagaaa

SEQ ID NO: 2767451 - DNA, 25 bp, Homo sapien
ttaaagtagtgggtctatagctttc

SEQ ID NO: 2767452 - DNA, 25 bp, Homo sapien
catatattactgctgagaaatcaga

SEQ ID NO: 2767453 - DNA, 25 bp, Homo sapien
ttgtcaaaagctattggaaccacca

SEQ ID NO: 2767454 - DNA, 25 bp, Homo sapien
ctgggatcaaaaactttccactctg

SEQ ID NO: 2767455 - DNA, 25 bp, Homo sapien
acacccggtccaacagtaggtaatg

SEQ ID NO: 2767456 - DNA, 25 bp, Homo sapien
cacccggtccaacagtaggtaatgg

SEQ ID NO: 2767457 - DNA, 25 bp, Homo sapien
gagacacccggtccaacagtaggta

SEQ ID NO: 2767458 - DNA, 25 bp, Homo sapien
tgagacacccggtccaacagtaggt

SEQ ID NO: 2767459 - DNA, 25 bp, Homo sapien
tttctggggcaaagacctggattcc

SEQ ID NO: 2767460 - DNA, 25 bp, Homo sapien
ctttctggggcaaagacctggattc

SEQ ID NO: 2767461 - DNA, 25 bp, Homo sapien
attcagaaacgacaccagctccctc

SEQ ID NO: 2767462 - DNA, 25 bp, Homo sapien
tggaaaatcgcctggataactctga

SEQ ID NO: 2767463 - DNA, 25 bp, Homo sapien
ccacggctagatgggcttctccctc

SEQ ID NO: 2767464 - DNA, 25 bp, Homo sapien
tccgggacgcgcctgtctgggaatt

SEQ ID NO: 2767465 - DNA, 25 bp, Homo sapien
atcgccgttcgctggagccctggca

SEQ ID NO: 2767466 - DNA, 25 bp, Homo sapien
ccagaaagaaggaaggccactagaa

SEQ ID NO: 2767467 - DNA, 25 bp, Homo sapien
cagaaagaaggaaggccactagaag

SEQ ID NO: 2767468 - DNA, 25 bp, Homo sapien
aaagaaggaaggccactagaagcag

SEQ ID NO: 2767469 - DNA, 25 bp, Homo sapien
agaaagaaggaaggccactagaagc

SEQ ID NO: 2767470 - DNA, 25 bp, Homo sapien
taggagacggatcctgccaattctc

SEQ ID NO: 2767471 - DNA, 25 bp, Homo sapien
caaactacctgaagtcagtaggagg

SEQ ID NO: 2767472 - DNA, 25 bp, Homo sapien
tgcgcgcctcagtactccaaaggca

SEQ ID NO: 2767473 - DNA, 25 bp, Homo sapien
tctgcctgcgtaatcacagctgtcc

SEQ ID NO: 2767474 - DNA, 25 bp, Homo sapien
ttctttagtattcctgtaggtccag

SEQ ID NO: 2767475 - DNA, 25 bp, Homo sapien
cttctttagtattcctgtaggtcca

SEQ ID NO: 2767476 - DNA, 25 bp, Homo sapien
tggatatgtggactcatgcctcttt

SEQ ID NO: 2767477 - DNA, 25 bp, Homo sapien
ggatatgtggactcatgcctctttc

SEQ ID NO: 2767478 - DNA, 25 bp, Homo sapien
gatatgtggactcatgcctctttcc

SEQ ID NO: 2767479 - DNA, 25 bp, Homo sapien
gaggagggaaggcattcgtgccagc

SEQ ID NO: 2767480 - DNA, 25 bp, Homo sapien
cctggaggagggaaggcattcgtgc

SEQ ID NO: 2767481 - DNA, 25 bp, Homo sapien
tggaggagggaaggcattcgtgcca

SEQ ID NO: 2767482 - DNA, 25 bp, Homo sapien
tcctggaggagggaaggcattcgtg

SEQ ID NO: 2767483 - DNA, 25 bp, Homo sapien
tgccagaactagtgggaagctccct

SEQ ID NO: 2767484 - DNA, 25 bp, Homo sapien
ggacccaatgtggagacctgtgagc

SEQ ID NO: 2767485 - DNA, 25 bp, Homo sapien
tcagagacagaatcacagcatagcc

SEQ ID NO: 2767486 - DNA, 25 bp, Homo sapien
gaaagaattctgctagcaggcagga

SEQ ID NO: 2767487 - DNA, 25 bp, Homo sapien
acagccatgcccagcagcttcccac

SEQ ID NO: 2767488 - DNA, 25 bp, Homo sapien
agccatgcccagcagcttcccacaa

SEQ ID NO: 2767489 - DNA, 25 bp, Homo sapien
ccatgcccagcagcttcccacaaag

SEQ ID NO: 2767490 - DNA, 25 bp, Homo sapien
cagacagccatgcccagcagcttcc

SEQ ID NO: 2767491 - DNA, 25 bp, Homo sapien
agggctgctgaaagacatagggctt

SEQ ID NO: 2767492 - DNA, 25 bp, Homo sapien
cctgtctggaggacgtggtcaatcc

SEQ ID NO: 2767493 - DNA, 25 bp, Homo sapien
gcagaaacacaaaaacgtcgagcag

SEQ ID NO: 2767494 - DNA, 25 bp, Homo sapien
actggcagccactgccgcggacttg

SEQ ID NO: 2767495 - DNA, 25 bp, Homo sapien
attcgtcattatgaccacaacccca

SEQ ID NO: 2767496 - DNA, 25 bp, Homo sapien
cgtcattatgaccacaaccccaagg

SEQ ID NO: 2767497 - DNA, 25 bp, Homo sapien
tcgtcattatgaccacaaccccaag

SEQ ID NO: 2767498 - DNA, 25 bp, Homo sapien
tcattcgtcattatgaccacaaccc

SEQ ID NO: 2767499 - DNA, 25 bp, Homo sapien
cattatgctattctgcccgccgtgg

SEQ ID NO: 2767500 - DNA, 25 bp, Homo sapien
gcttctactcggaccatgttttcag

SEQ ID NO: 2767501 - DNA, 25 bp, Homo sapien
cgtgggtgacaaacagacggatgct

SEQ ID NO: 2767502 - DNA, 25 bp, Homo sapien
aaagagagggatccccaccatgggc

SEQ ID NO: 2767503 - DNA, 25 bp, Homo sapien
tctgacaggtgttcaccatggagcc

SEQ ID NO: 2767504 - DNA, 25 bp, Homo sapien
tcatctccttgaagatttccggatt

SEQ ID NO: 2767505 - DNA, 25 bp, Homo sapien
cagccaggtggacatctttgggcca

SEQ ID NO: 2767506 - DNA, 25 bp, Homo sapien
cacaattttcacatttgcagccagg

SEQ ID NO: 2767507 - DNA, 25 bp, Homo sapien
gacttctttaaaacagccttgtcat

SEQ ID NO: 2767508 - DNA, 25 bp, Homo sapien
caaggacttctttaaaacagccttg

SEQ ID NO: 2767509 - DNA, 25 bp, Homo sapien
tttaaaacagccttgtcatcatttt

SEQ ID NO: 2767510 - DNA, 25 bp, Homo sapien
taaaacagccttgtcatcattttta

SEQ ID NO: 2767511 - DNA, 25 bp, Homo sapien
ttccatcaagcctccaacataaaca

SEQ ID NO: 2767512 - DNA, 25 bp, Homo sapien
gaagcagaggtcgagcaaaatcaaa

SEQ ID NO: 2767513 - DNA, 25 bp, Homo sapien
aagcagaggtcgagcaaaatcaaag

SEQ ID NO: 2767514 - DNA, 25 bp, Homo sapien
ccatgtgatcagtcagcaaggaacg

SEQ ID NO: 2767515 - DNA, 25 bp, Homo sapien
caaatgtagactgcatgtgctgttg

SEQ ID NO: 2767516 - DNA, 25 bp, Homo sapien
caggaaaggacagtagtcaaaagtt

SEQ ID NO: 2767517 - DNA, 25 bp, Homo sapien
caaagagccgaatgaagtggaaaga

SEQ ID NO: 2767518 - DNA, 25 bp, Homo sapien
cattctttaaggaatccatgatatc

SEQ ID NO: 2767519 - DNA, 25 bp, Homo sapien
ctcattctttaaggaatccatgata

SEQ ID NO: 2767520 - DNA, 25 bp, Homo sapien
tctcattctttaaggaatccatgat

SEQ ID NO: 2767521 - DNA, 25 bp, Homo sapien
ttctttaaggaatccatgatatcct

SEQ ID NO: 2767522 - DNA, 25 bp, Homo sapien
gcactgcaacgccaagtattctaga

SEQ ID NO: 2767523 - DNA, 25 bp, Homo sapien
actgcactgcaacgccaagtattct

SEQ ID NO: 2767524 - DNA, 25 bp, Homo sapien
aaatgactgcactgcaacgccaagt

SEQ ID NO: 2767525 - DNA, 25 bp, Homo sapien
tgactgcactgcaacgccaagtatt

SEQ ID NO: 2767526 - DNA, 25 bp, Homo sapien
cagggactttactggatgatgtggc

SEQ ID NO: 2767527 - DNA, 25 bp, Homo sapien
ggtgaagtgttgcaaggaagtccca

SEQ ID NO: 2767528 - DNA, 25 bp, Homo sapien
tgaaaagttgaggagcctatcccaa

SEQ ID NO: 2767529 - DNA, 25 bp, Homo sapien
gaaaagcactcatgctcatagtgtg

SEQ ID NO: 2767530 - DNA, 25 bp, Homo sapien
gccaactgataacttgatatgattt

SEQ ID NO: 2767531 - DNA, 25 bp, Homo sapien
gcaagccaactgataacttgatatg

SEQ ID NO: 2767532 - DNA, 25 bp, Homo sapien
gatcttcaggtgcaagccaactgat

SEQ ID NO: 2767533 - DNA, 25 bp, Homo sapien
caggtgcaagccaactgataacttg

SEQ ID NO: 2767534 - DNA, 25 bp, Homo sapien
tgagccaagatcatgccactgtact

SEQ ID NO: 2767535 - DNA, 25 bp, Homo sapien
ttgagcccaggagatggaagttgca

SEQ ID NO: 2767536 - DNA, 25 bp, Homo sapien
ctccagcctggccaacagagcgaga

SEQ ID NO: 2767537 - DNA, 25 bp, Homo sapien
ccagcctggccaacagagcgagact

SEQ ID NO: 2767538 - DNA, 25 bp, Homo sapien
tcttgaagaatctgagaaacccggt

SEQ ID NO: 2767539 - DNA, 25 bp, Homo sapien
tcttttgtggttaagcatggtgaca

SEQ ID NO: 2767540 - DNA, 25 bp, Homo sapien
aacccggtccatcagtagataatgg

SEQ ID NO: 2767541 - DNA, 25 bp, Homo sapien
gacattatgaccgtgatcttgaaga

SEQ ID NO: 2767542 - DNA, 25 bp, Homo sapien
tagaagaagcactcgctgcccagcc

SEQ ID NO: 2767543 - DNA, 25 bp, Homo sapien
gaagaagcactcgctgcccagccat

SEQ ID NO: 2767544 - DNA, 25 bp, Homo sapien
gagaaggaagcccactagaagaagc

SEQ ID NO: 2767545 - DNA, 25 bp, Homo sapien
actagaagaagcactcgctgcccag

SEQ ID NO: 2767546 - DNA, 25 bp, Homo sapien
ctcacttctacggaagccgcggatc

SEQ ID NO: 2767547 - DNA, 25 bp, Homo sapien
acttctacggaagccgcggatctca

SEQ ID NO: 2767548 - DNA, 25 bp, Homo sapien
ctgcgcccggctaagggaccctgtg

SEQ ID NO: 2767549 - DNA, 25 bp, Homo sapien
tgtgcacctcagtgcgccaaaggca

SEQ ID NO: 2767550 - DNA, 25 bp, Homo sapien
atagtgcccagagtgagccccagga

SEQ ID NO: 2767551 - DNA, 25 bp, Homo sapien
gggctgcaggaaggcataaggcttg

SEQ ID NO: 2767552 - DNA, 25 bp, Homo sapien
caggaaggcataaggcttgaggtgt

SEQ ID NO: 2767553 - DNA, 25 bp, Homo sapien
agaacacaaagacgtcgagcaggtt

SEQ ID NO: 2767554 - DNA, 25 bp, Homo sapien
agggtttgggagcacctgatgatgc

SEQ ID NO: 2767555 - DNA, 25 bp, Homo sapien
cagggtttgggagcacctgatgatg

SEQ ID NO: 2767556 - DNA, 25 bp, Homo sapien
tcagggtttgggagcacctgatgat

SEQ ID NO: 2767557 - DNA, 25 bp, Homo sapien
gggtttgggagcacctgatgatgct

SEQ ID NO: 2767558 - DNA, 25 bp, Homo sapien
ttccccacccttgctagacaagcca

SEQ ID NO: 2767559 - DNA, 25 bp, Homo sapien
tagacaagccaacagccaaattcag

SEQ ID NO: 2767560 - DNA, 25 bp, Homo sapien
aagaggccaaatctatgaatcactg

SEQ ID NO: 2767561 - DNA, 25 bp, Homo sapien
atggacaaaacctccaaaaagtgtg

SEQ ID NO: 2767562 - DNA, 25 bp, Homo sapien
taaggaacaaagaacgcctgaatct

SEQ ID NO: 2767563 - DNA, 25 bp, Homo sapien
tctacttaaaagaaccttaatctca

SEQ ID NO: 2767564 - DNA, 25 bp, Homo sapien
cgcctgaatctacttaaaagaacct

SEQ ID NO: 2767565 - DNA, 25 bp, Homo sapien
gctaataaattgataaggaacaaag

SEQ ID NO: 2767566 - DNA, 25 bp, Homo sapien
tacggcctgccctactggaggaaat

SEQ ID NO: 2767567 - DNA, 25 bp, Homo sapien
tcgagagatatcgtccaccaggctg

SEQ ID NO: 2767568 - DNA, 25 bp, Homo sapien
taattcatcttcaaactgggtggga

SEQ ID NO: 2767569 - DNA, 25 bp, Homo sapien
taagtacggaagatgcttgccagca

SEQ ID NO: 2767570 - DNA, 25 bp, Homo sapien
catcttggagaagttctatccggtc

SEQ ID NO: 2767571 - DNA, 25 bp, Homo sapien
ttcaagaggatcatcagtgaatgtt

SEQ ID NO: 2767572 - DNA, 25 bp, Homo sapien
tcagattcaagaggatcatcagtga

SEQ ID NO: 2767573 - DNA, 25 bp, Homo sapien
tctatccggtccctttcagtcctgt

SEQ ID NO: 2767574 - DNA, 25 bp, Homo sapien
tctgttcctagtggaatcttctcta

SEQ ID NO: 2767575 - DNA, 25 bp, Homo sapien
tctttggggtcagtatgaatatttc

SEQ ID NO: 2767576 - DNA, 25 bp, Homo sapien
aatatttctgttcctagtggaatct

SEQ ID NO: 2767577 - DNA, 25 bp, Homo sapien
tgtgtccataacgttctttccattc

SEQ ID NO: 2767578 - DNA, 25 bp, Homo sapien
ttcttcgattttcaccttcttcttg

SEQ ID NO: 2767579 - DNA, 25 bp, Homo sapien
tcttcttgcctttgcctttttctct

SEQ ID NO: 2767580 - DNA, 25 bp, Homo sapien
cttcgattttcaccttcttcttgcc

SEQ ID NO: 2767581 - DNA, 25 bp, Homo sapien
tcttcttcgattttcaccttcttct

SEQ ID NO: 2767582 - DNA, 25 bp, Homo sapien
attaactaagtctgatgtcatatca

SEQ ID NO: 2767583 - DNA, 25 bp, Homo sapien
gcagattcaaacaacgggttcccaa

SEQ ID NO: 2767584 - DNA, 25 bp, Homo sapien
ccgagcagattcaaacaacgggttc

SEQ ID NO: 2767585 - DNA, 25 bp, Homo sapien
tggaaaccgagcagattcaaacaac

SEQ ID NO: 2767586 - DNA, 25 bp, Homo sapien
gaaaccgagcagattcaaacaacgg

SEQ ID NO: 2767587 - DNA, 25 bp, Homo sapien
ataagtagcaatgcagagaattacc

SEQ ID NO: 2767588 - DNA, 25 bp, Homo sapien
aataagtagcaatgcagagaattac

SEQ ID NO: 2767589 - DNA, 25 bp, Homo sapien
taccaccaacataggataatatata

SEQ ID NO: 2767590 - DNA, 25 bp, Homo sapien
caccaacataggataatatatatag

SEQ ID NO: 2767591 - DNA, 25 bp, Homo sapien
ctgcaataaaggataaaactttcat

SEQ ID NO: 2767592 - DNA, 25 bp, Homo sapien
aggataaaactttcatggaacccat

SEQ ID NO: 2767593 - DNA, 25 bp, Homo sapien
gataaaactttcatggaacccataa

SEQ ID NO: 2767594 - DNA, 25 bp, Homo sapien
gcaataaaggataaaactttcatgg

SEQ ID NO: 2767595 - DNA, 25 bp, Homo sapien
ggttgagtattcttgtgagagatag

SEQ ID NO: 2767596 - DNA, 25 bp, Homo sapien
ttaagacataaaggaggtgtcaaac

SEQ ID NO: 2767597 - DNA, 25 bp, Homo sapien
gtcaaacccaagaaattaagacata

SEQ ID NO: 2767598 - DNA, 25 bp, Homo sapien
taagcagttggttgagtattcttgt

SEQ ID NO: 2767599 - DNA, 25 bp, Homo sapien
cacgaatcctgaacacagtagaata

SEQ ID NO: 2767600 - DNA, 25 bp, Homo sapien
cagtctggtgatgtgaggccaaata

SEQ ID NO: 2767601 - DNA, 25 bp, Homo sapien
cagatacttaggaagaagatggaaa

SEQ ID NO: 2767602 - DNA, 25 bp, Homo sapien
gaaaagaaggctataagcatcagtc

SEQ ID NO: 2767603 - DNA, 25 bp, Homo sapien
cgcaaagagggataagacaggagta

SEQ ID NO: 2767604 - DNA, 25 bp, Homo sapien
tgaccacacaacaatcacagagaag

SEQ ID NO: 2767605 - DNA, 25 bp, Homo sapien
cagctgtatgaagaccgcaaagagg

SEQ ID NO: 2767606 - DNA, 25 bp, Homo sapien
tcttgtaaaaccatggtcgcaaaag

SEQ ID NO: 2767607 - DNA, 25 bp, Homo sapien
atttactgaatagttagcttctggt

SEQ ID NO: 2767608 - DNA, 25 bp, Homo sapien
tgggactacaggtaggctggagtgc

SEQ ID NO: 2767609 - DNA, 25 bp, Homo sapien
cctgttcaagtgattctcctgcctc

SEQ ID NO: 2767610 - DNA, 25 bp, Homo sapien
gggactacaggtaggctggagtgca

SEQ ID NO: 2767611 - DNA, 25 bp, Homo sapien
ctgggactacaggtaggctggagtg

SEQ ID NO: 2767612 - DNA, 25 bp, Homo sapien
cattgtacttgagttcgacggtgtc

SEQ ID NO: 2767613 - DNA, 25 bp, Homo sapien
tgaacaaactgatgagtagcactag

SEQ ID NO: 2767614 - DNA, 25 bp, Homo sapien
cgacggtgtctctgaactgaataaa

SEQ ID NO: 2767615 - DNA, 25 bp, Homo sapien
ctctggcgattgaaaggtgtgaaca

SEQ ID NO: 2767616 - DNA, 25 bp, Homo sapien
gacttttttcacttggatagatact

SEQ ID NO: 2767617 - DNA, 25 bp, Homo sapien
tcacttggatagatactatgctttt

SEQ ID NO: 2767618 - DNA, 25 bp, Homo sapien
tttcacttggatagatactatgctt

SEQ ID NO: 2767619 - DNA, 25 bp, Homo sapien
ttttttcacttggatagatactatg

SEQ ID NO: 2767620 - DNA, 25 bp, Homo sapien
ttaagtattgtatcaacacattttc

SEQ ID NO: 2767621 - DNA, 25 bp, Homo sapien
tgggtgattatacttgatgctttca

SEQ ID NO: 2767622 - DNA, 25 bp, Homo sapien
ctttttaagtattgtatcaacacat

SEQ ID NO: 2767623 - DNA, 25 bp, Homo sapien
cattttctcaatgggtgattatact

SEQ ID NO: 2767624 - DNA, 25 bp, Homo sapien
caccagttttgcagtctgaagccca

SEQ ID NO: 2767625 - DNA, 25 bp, Homo sapien
tcctgaaggattgcacaacaccagt

SEQ ID NO: 2767626 - DNA, 25 bp, Homo sapien
gacacatcatgaggctgaactgcta

SEQ ID NO: 2767627 - DNA, 25 bp, Homo sapien
tcctggatgagacatcctgaaggat

SEQ ID NO: 2767628 - DNA, 25 bp, Homo sapien
cataccccaacaacaacacaagaag

SEQ ID NO: 2767629 - DNA, 25 bp, Homo sapien
tgcagcagctatcccaattgtctga

SEQ ID NO: 2767630 - DNA, 25 bp, Homo sapien
agtagataacccctttttgctccat

SEQ ID NO: 2767631 - DNA, 25 bp, Homo sapien
tccagtatgatcgaggaatttccac

SEQ ID NO: 2767632 - DNA, 25 bp, Homo sapien
caaataggtgccatagtagattgca

SEQ ID NO: 2767633 - DNA, 25 bp, Homo sapien
taaatgtgggtttacagctacataa

SEQ ID NO: 2767634 - DNA, 25 bp, Homo sapien
cagtgatggaaaaccctcctgatct

SEQ ID NO: 2767635 - DNA, 25 bp, Homo sapien
tgactgcataaaaggtaagagaatc

SEQ ID NO: 2767636 - DNA, 25 bp, Homo sapien
gcatgattccatcaggaatgtaact

SEQ ID NO: 2767637 - DNA, 25 bp, Homo sapien
aaattgtgacgtccaatacactacc

SEQ ID NO: 2767638 - DNA, 25 bp, Homo sapien
taaaaattgtgacgtccaatacact

SEQ ID NO: 2767639 - DNA, 25 bp, Homo sapien
gaatgtaactccatggcttgaaaca

SEQ ID NO: 2767640 - DNA, 25 bp, Homo sapien
gatcataaattctgccatggagcca

SEQ ID NO: 2767641 - DNA, 25 bp, Homo sapien
tattcctaagctagaaggatatccc

SEQ ID NO: 2767642 - DNA, 25 bp, Homo sapien
tcccaagaacttgcaacaatctgta

SEQ ID NO: 2767643 - DNA, 25 bp, Homo sapien
acatagcttctatggagatgcatgc

SEQ ID NO: 2767644 - DNA, 25 bp, Homo sapien
tttctcactaccgtctactgaaggg

SEQ ID NO: 2767645 - DNA, 25 bp, Homo sapien
tctgagataggctgagaggaaaaac

SEQ ID NO: 2767646 - DNA, 25 bp, Homo sapien
gatgtgcaatatgaaaggaatacca

SEQ ID NO: 2767647 - DNA, 25 bp, Homo sapien
tactgaagggctttgtggaccaata

SEQ ID NO: 2767648 - DNA, 25 bp, Homo sapien
gaacagggttagcagttgcgtacaa

SEQ ID NO: 2767649 - DNA, 25 bp, Homo sapien
gcagcatgcttgcaccggttgtata

SEQ ID NO: 2767650 - DNA, 25 bp, Homo sapien
tcaggagggcttgaatttgcagcag

SEQ ID NO: 2767651 - DNA, 25 bp, Homo sapien
tgcgtacaatcctgtaatgttgcta

SEQ ID NO: 2767652 - DNA, 25 bp, Homo sapien
tatctatctaaacttaccttcttgg

SEQ ID NO: 2767653 - DNA, 25 bp, Homo sapien
tgagaatcaaaaggttaccaagtac

SEQ ID NO: 2767654 - DNA, 25 bp, Homo sapien
ctaaagcaacgaatgtatggtttaa

SEQ ID NO: 2767655 - DNA, 25 bp, Homo sapien
aagtacttaaaggacatcagagttt

SEQ ID NO: 2767656 - DNA, 25 bp, Homo sapien
agcaagcagtgttccaataatcaca

SEQ ID NO: 2767657 - DNA, 25 bp, Homo sapien
taaagtctccatatcgatgaagcag

SEQ ID NO: 2767658 - DNA, 25 bp, Homo sapien
gtctatgctgtttcttaaagtctcc

SEQ ID NO: 2767659 - DNA, 25 bp, Homo sapien
cagtatgaagacaataagaaagcag

SEQ ID NO: 2767660 - DNA, 25 bp, Homo sapien
tctgactaaccaaagttattcatgt

SEQ ID NO: 2767661 - DNA, 25 bp, Homo sapien
tgaatatttcactctgactaaccaa

SEQ ID NO: 2767662 - DNA, 25 bp, Homo sapien
tttcactctgactaaccaaagttat

SEQ ID NO: 2767663 - DNA, 25 bp, Homo sapien
accaaagttattcatgtacaggtct

SEQ ID NO: 2767664 - DNA, 25 bp, Homo sapien
tctttcatcaatctctaccctctta

SEQ ID NO: 2767665 - DNA, 25 bp, Homo sapien
atactcctacatgaactatcacata

SEQ ID NO: 2767666 - DNA, 25 bp, Homo sapien
gaactatcacatagaaaaatcacat

SEQ ID NO: 2767667 - DNA, 25 bp, Homo sapien
taccctcttatcctgctatattttc

SEQ ID NO: 2767668 - DNA, 25 bp, Homo sapien
atgaaacaacttataccacaacaaa

SEQ ID NO: 2767669 - DNA, 25 bp, Homo sapien
acattaccaaatactactcaaattt

SEQ ID NO: 2767670 - DNA, 25 bp, Homo sapien
tataccacaacaaagtcaaatctta

SEQ ID NO: 2767671 - DNA, 25 bp, Homo sapien
caacttataccacaacaaagtcaaa

SEQ ID NO: 2767672 - DNA, 25 bp, Homo sapien
gactcaaatacctggctgcaagtga

SEQ ID NO: 2767673 - DNA, 25 bp, Homo sapien
agatttcaggcatgatccacctagc

SEQ ID NO: 2767674 - DNA, 25 bp, Homo sapien
cattcaggctactggcagggtctca

SEQ ID NO: 2767675 - DNA, 25 bp, Homo sapien
cctagccaagccaaaactcagttct

SEQ ID NO: 2767676 - DNA, 25 bp, Homo sapien
taccagattttagtgcccgatgtgt

SEQ ID NO: 2767677 - DNA, 25 bp, Homo sapien
caaataccctttgatggaacttcag

SEQ ID NO: 2767678 - DNA, 25 bp, Homo sapien
ccgatgtgtgggcatatcgtaccct

SEQ ID NO: 2767679 - DNA, 25 bp, Homo sapien
gaatgggtaccaagtgatcagaaca

SEQ ID NO: 2767680 - DNA, 25 bp, Homo sapien
ggaaaatccgtctacagtccagcgg

SEQ ID NO: 2767681 - DNA, 25 bp, Homo sapien
tgcgggctcccgagaaaggaaaatc

SEQ ID NO: 2767682 - DNA, 25 bp, Homo sapien
ccaggttctgggatccacgctcaga

SEQ ID NO: 2767683 - DNA, 25 bp, Homo sapien
agtccagcggctgacatttcccagt

SEQ ID NO: 2767684 - DNA, 25 bp, Homo sapien
gtaataagtataccacagactggct

SEQ ID NO: 2767685 - DNA, 25 bp, Homo sapien
cagactggctatgaaagaccagcag

SEQ ID NO: 2767686 - DNA, 25 bp, Homo sapien
ttcctccaggaaacttgaagtgtaa

SEQ ID NO: 2767687 - DNA, 25 bp, Homo sapien
tgaagtgtaattgggaaggcagacc

SEQ ID NO: 2767688 - DNA, 25 bp, Homo sapien
gattcaaagttggagctggattgct

SEQ ID NO: 2767689 - DNA, 25 bp, Homo sapien
cacccgggtgtgttctgagagtctg

SEQ ID NO: 2767690 - DNA, 25 bp, Homo sapien
ccaagtttcacatgagggattcaaa

SEQ ID NO: 2767691 - DNA, 25 bp, Homo sapien
cccaatgctgttgcaagaacatgtc

SEQ ID NO: 2767692 - DNA, 25 bp, Homo sapien
ggactctgacatcggatgccctcaa

SEQ ID NO: 2767693 - DNA, 25 bp, Homo sapien
gtccagccataagctattttgccaa

SEQ ID NO: 2767694 - DNA, 25 bp, Homo sapien
tgaagtgcctttatctgcttagacc

SEQ ID NO: 2767695 - DNA, 25 bp, Homo sapien
tgccaacatgtcagagtaatctgta

SEQ ID NO: 2767696 - DNA, 25 bp, Homo sapien
atgaagtcaacagggcacagaataa

SEQ ID NO: 2767697 - DNA, 25 bp, Homo sapien
ggtaagcacttcaccctgatttaat

SEQ ID NO: 2767698 - DNA, 25 bp, Homo sapien
gaatgtaaatgcacaaggagtatca

SEQ ID NO: 2767699 - DNA, 25 bp, Homo sapien
tatctgaagagcctacactgaccag

SEQ ID NO: 2767700 - DNA, 25 bp, Homo sapien
tcacatagggttgcgattaaaaggt

SEQ ID NO: 2767701 - DNA, 25 bp, Homo sapien
taacagatctatttggacaatcaga

SEQ ID NO: 2767702 - DNA, 25 bp, Homo sapien
gaatgtctacgcagatactttaaga

SEQ ID NO: 2767703 - DNA, 25 bp, Homo sapien
aaaagccagatcaatctctgggaaa

SEQ ID NO: 2767704 - DNA, 25 bp, Homo sapien
tatgcaacgacaggatcttttggca

SEQ ID NO: 2767705 - DNA, 25 bp, Homo sapien
catgactttgaacaacggcacgaga

SEQ ID NO: 2767706 - DNA, 25 bp, Homo sapien
taagagcactcaattcgactatccg

SEQ ID NO: 2767707 - DNA, 25 bp, Homo sapien
cggcacgagaataccaactgtttga

SEQ ID NO: 2767708 - DNA, 25 bp, Homo sapien
aatcaatagtcataacatcatcgtg

SEQ ID NO: 2767709 - DNA, 25 bp, Homo sapien
catcatcgtgttccgaaattagaaa

SEQ ID NO: 2767710 - DNA, 25 bp, Homo sapien
caaatgatatgtgttcagttctgac

SEQ ID NO: 2767711 - DNA, 25 bp, Homo sapien
ttctgacaatcccacaattaggagg

SEQ ID NO: 2767712 - DNA, 25 bp, Homo sapien
tatcagcactcttggttaccaattg

SEQ ID NO: 2767713 - DNA, 25 bp, Homo sapien
gcccacgggcaagcagtctcaacaa

SEQ ID NO: 2767714 - DNA, 25 bp, Homo sapien
aaaaatgtcactttacgactggtag

SEQ ID NO: 2767715 - DNA, 25 bp, Homo sapien
tcaattctaattggttcagtccatc

SEQ ID NO: 2767716 - DNA, 25 bp, Homo sapien
ggcatcccaacaacgagaacgaaca

SEQ ID NO: 2767717 - DNA, 25 bp, Homo sapien
tcaaaagaagttcctccatccacaa

SEQ ID NO: 2767718 - DNA, 25 bp, Homo sapien
caagaagcacagttcgaagctcatc

SEQ ID NO: 2767719 - DNA, 25 bp, Homo sapien
tcatcatcgaagcaattgcaccatc

SEQ ID NO: 2767720 - DNA, 25 bp, Homo sapien
gactgcttgagaaaactctatttgc

SEQ ID NO: 2767721 - DNA, 25 bp, Homo sapien
tttgaggagaaacaacgctgacgac

SEQ ID NO: 2767722 - DNA, 25 bp, Homo sapien
gttcttccggactgtagagcagtga

SEQ ID NO: 2767723 - DNA, 25 bp, Homo sapien
gctattggttctcgaatactgaaaa

SEQ ID NO: 2767724 - DNA, 25 bp, Homo sapien
gatttcttcataagtattctttctc

SEQ ID NO: 2767725 - DNA, 25 bp, Homo sapien
cagatttcttcataagtattctttc

SEQ ID NO: 2767726 - DNA, 25 bp, Homo sapien
tctttctctaacagcactaattctc

SEQ ID NO: 2767727 - DNA, 25 bp, Homo sapien
agtattctttctctaacagcactaa

SEQ ID NO: 2767728 - DNA, 25 bp, Homo sapien
tttctctaccaattctctgttcaat

SEQ ID NO: 2767729 - DNA, 25 bp, Homo sapien
ctgttcaatggaagactcaaatttc

SEQ ID NO: 2767730 - DNA, 25 bp, Homo sapien
taccaattctctgttcaatggaaga

SEQ ID NO: 2767731 - DNA, 25 bp, Homo sapien
caattctctgttcaatggaagactc

SEQ ID NO: 2767732 - DNA, 25 bp, Homo sapien
agttgcaaccctgttaatattgaat

SEQ ID NO: 2767733 - DNA, 25 bp, Homo sapien
gttgcaaccctgttaatattgaatg

SEQ ID NO: 2767734 - DNA, 25 bp, Homo sapien
ggaccatcatcaactgaaatctcat

SEQ ID NO: 2767735 - DNA, 25 bp, Homo sapien
agtacacaaattgagccctgaactc

SEQ ID NO: 2767736 - DNA, 25 bp, Homo sapien
aggcctttgatcctgttccagtaca

SEQ ID NO: 2767737 - DNA, 25 bp, Homo sapien
ttttcccatggaccatcatcaactg

SEQ ID NO: 2767738 - DNA, 25 bp, Homo sapien
cctttagagtgggtatacttcttct

SEQ ID NO: 2767739 - DNA, 25 bp, Homo sapien
tgctacagcccaagaataagacatt

SEQ ID NO: 2767740 - DNA, 25 bp, Homo sapien
tagagtgggtatacttcttcttaaa

SEQ ID NO: 2767741 - DNA, 25 bp, Homo sapien
ttaaattgtccactgctacagccca

SEQ ID NO: 2767742 - DNA, 25 bp, Homo sapien
ttataaagcaaagctagctctcagc

SEQ ID NO: 2767743 - DNA, 25 bp, Homo sapien
gcatcagaagccaatccattgctgt

SEQ ID NO: 2767744 - DNA, 25 bp, Homo sapien
cataaggtgagacatcaaagaacac

SEQ ID NO: 2767745 - DNA, 25 bp, Homo sapien
gcattcgattgaaaatcccctcaag

SEQ ID NO: 2767746 - DNA, 25 bp, Homo sapien
tagtgctctcactggcagaagttgg

SEQ ID NO: 2767747 - DNA, 25 bp, Homo sapien
ctggatgacagactctccccaatga

SEQ ID NO: 2767748 - DNA, 25 bp, Homo sapien
acagactctccccaatgaagacttc

SEQ ID NO: 2767749 - DNA, 25 bp, Homo sapien
agtgctctcactggcagaagttggg

SEQ ID NO: 2767750 - DNA, 25 bp, Homo sapien
ctattttggatttaagcagcaaatg

SEQ ID NO: 2767751 - DNA, 25 bp, Homo sapien
gaactattttggatttaagcagcaa

SEQ ID NO: 2767752 - DNA, 25 bp, Homo sapien
gagaactattttggatttaagcagc

SEQ ID NO: 2767753 - DNA, 25 bp, Homo sapien
aagagaactattttggatttaagca

SEQ ID NO: 2767754 - DNA, 25 bp, Homo sapien
taaaaaagtgtgttctccagttcca

SEQ ID NO: 2767755 - DNA, 25 bp, Homo sapien
gaggaagagataacatgaacaaccc

SEQ ID NO: 2767756 - DNA, 25 bp, Homo sapien
tgatgagctaaaaaagtgtgttctc

SEQ ID NO: 2767757 - DNA, 25 bp, Homo sapien
gaacaaccctttggagagaccaaca

SEQ ID NO: 2767758 - DNA, 25 bp, Homo sapien
ggtataacctgattctctgcctcca

SEQ ID NO: 2767759 - DNA, 25 bp, Homo sapien
ggtttatgccagtcccttcaaggta

SEQ ID NO: 2767760 - DNA, 25 bp, Homo sapien
gctctattgtgctgattcaagctta

SEQ ID NO: 2767761 - DNA, 25 bp, Homo sapien
tcgtgaaggtccacaggtacagggt

SEQ ID NO: 2767762 - DNA, 25 bp, Homo sapien
ttataacggaaacacctaatgtgct

SEQ ID NO: 2767763 - DNA, 25 bp, Homo sapien
tccaagatactgagctagatatagc

SEQ ID NO: 2767764 - DNA, 25 bp, Homo sapien
taagtcaaactctatcaagaaccca

SEQ ID NO: 2767765 - DNA, 25 bp, Homo sapien
cctatagcttccttatcaatgacag

SEQ ID NO: 2767766 - DNA, 25 bp, Homo sapien
tcaccacgatagaacttctgtaagg

SEQ ID NO: 2767767 - DNA, 25 bp, Homo sapien
tgaactcaccacgatagaacttctg

SEQ ID NO: 2767768 - DNA, 25 bp, Homo sapien
cgaacgggcaggcataaatgaccct

SEQ ID NO: 2767769 - DNA, 25 bp, Homo sapien
gtaaggcttctggaaaggaatgtgt

SEQ ID NO: 2767770 - DNA, 25 bp, Homo sapien
ttaagtctgtccaagactttactcg

SEQ ID NO: 2767771 - DNA, 25 bp, Homo sapien
gatcagtgtttacccctataactgg

SEQ ID NO: 2767772 - DNA, 25 bp, Homo sapien
caagactttactcgctgccagcagc

SEQ ID NO: 2767773 - DNA, 25 bp, Homo sapien
tctggatcagtgtttacccctataa

SEQ ID NO: 2767774 - DNA, 25 bp, Homo sapien
tctttactagacgaacctcaattcc

SEQ ID NO: 2767775 - DNA, 25 bp, Homo sapien
acagtctcttcatcatattctctcc

SEQ ID NO: 2767776 - DNA, 25 bp, Homo sapien
ctcctgcagctatgacagcatctgc

SEQ ID NO: 2767777 - DNA, 25 bp, Homo sapien
tatgacagcatctgcccatcgaaca

SEQ ID NO: 2767778 - DNA, 25 bp, Homo sapien
catttttggtgtgaatatgatgtcg

SEQ ID NO: 2767779 - DNA, 25 bp, Homo sapien
ggtgtgaatatgatgtcgttcaaga

SEQ ID NO: 2767780 - DNA, 25 bp, Homo sapien
gatgtcgttcaagaagtccactgta

SEQ ID NO: 2767781 - DNA, 25 bp, Homo sapien
gaatatgatgtcgttcaagaagtcc

SEQ ID NO: 2767782 - DNA, 25 bp, Homo sapien
acctttgttccacttggatttgctt

SEQ ID NO: 2767783 - DNA, 25 bp, Homo sapien
cttgtagaggcggttagatgacctt

SEQ ID NO: 2767784 - DNA, 25 bp, Homo sapien
gataaactaatacttgtagaggcgg

SEQ ID NO: 2767785 - DNA, 25 bp, Homo sapien
tgcctcagccttgatgactttttaa

SEQ ID NO: 2767786 - DNA, 25 bp, Homo sapien
caaatataatcttatggctcaaaat

SEQ ID NO: 2767787 - DNA, 25 bp, Homo sapien
tcaaatataatcttatggctcaaaa

SEQ ID NO: 2767788 - DNA, 25 bp, Homo sapien
aatataatcttatggctcaaaatca

SEQ ID NO: 2767789 - DNA, 25 bp, Homo sapien
atggctcaaaatcattagtgttaat

SEQ ID NO: 2767790 - DNA, 25 bp, Homo sapien
tataatagattagacagcctgtgcc

SEQ ID NO: 2767791 - DNA, 25 bp, Homo sapien
aatttaatgcctagccaaaagcctc

SEQ ID NO: 2767792 - DNA, 25 bp, Homo sapien
ttgcctacgaatactgggttaagag

SEQ ID NO: 2767793 - DNA, 25 bp, Homo sapien
tagatgttaacttaccaagatatac

SEQ ID NO: 2767794 - DNA, 25 bp, Homo sapien
caagccccaggaaaataagatacat

SEQ ID NO: 2767795 - DNA, 25 bp, Homo sapien
ctggctctcggcaagccccaggaaa

SEQ ID NO: 2767796 - DNA, 25 bp, Homo sapien
tcggcaagccccaggaaaataagat

SEQ ID NO: 2767797 - DNA, 25 bp, Homo sapien
ggcaagccccaggaaaataagatac

SEQ ID NO: 2767798 - DNA, 25 bp, Homo sapien
tgttagggaactttggcttgagatg

SEQ ID NO: 2767799 - DNA, 25 bp, Homo sapien
cgttgactgttagggaactttggct

SEQ ID NO: 2767800 - DNA, 25 bp, Homo sapien
gcgttgactgttagggaactttggc

SEQ ID NO: 2767801 - DNA, 25 bp, Homo sapien
tgactgttagggaactttggcttga

SEQ ID NO: 2767802 - DNA, 25 bp, Homo sapien
cctggtgacaggtgaaaaagagctt

SEQ ID NO: 2767803 - DNA, 25 bp, Homo sapien
ccagtaaaagggttgccgagttgtg

SEQ ID NO: 2767804 - DNA, 25 bp, Homo sapien
aaggaccctgttaatagcaattgca

SEQ ID NO: 2767805 - DNA, 25 bp, Homo sapien
aataagtcactggtcaatcaatggg

SEQ ID NO: 2767806 - DNA, 25 bp, Homo sapien
tcatggtagcaccgggcactctcct

SEQ ID NO: 2767807 - DNA, 25 bp, Homo sapien
tggtagcaccgggcactctcctttt

SEQ ID NO: 2767808 - DNA, 25 bp, Homo sapien
atggtagcaccgggcactctccttt

SEQ ID NO: 2767809 - DNA, 25 bp, Homo sapien
ggtagcaccgggcactctccttttc

SEQ ID NO: 2767810 - DNA, 25 bp, Homo sapien
ctgacatttctccttaataacgtac

SEQ ID NO: 2767811 - DNA, 25 bp, Homo sapien
acacactacccagtataccagcccc

SEQ ID NO: 2767812 - DNA, 25 bp, Homo sapien
acactacccagtataccagcccctt

SEQ ID NO: 2767813 - DNA, 25 bp, Homo sapien
ttcacacactacccagtataccagc

SEQ ID NO: 2767814 - DNA, 25 bp, Homo sapien
tttccttcttagcaccaaagacctg

SEQ ID NO: 2767815 - DNA, 25 bp, Homo sapien
gaccacgttccagcaaggaaaaggc

SEQ ID NO: 2767816 - DNA, 25 bp, Homo sapien
tgcttttaaaacaagctcgtagtgt

SEQ ID NO: 2767817 - DNA, 25 bp, Homo sapien
gtagtgtccaacgaccacgttccag

SEQ ID NO: 2767818 - DNA, 25 bp, Homo sapien
gctgaaggactttccggagtgccct

SEQ ID NO: 2767819 - DNA, 25 bp, Homo sapien
ctgaaggactttccggagtgcccta

SEQ ID NO: 2767820 - DNA, 25 bp, Homo sapien
gactttccggagtgccctaggcctc

SEQ ID NO: 2767821 - DNA, 25 bp, Homo sapien
tccggagtgccctaggcctcgcagt

SEQ ID NO: 2767822 - DNA, 25 bp, Homo sapien
tccgcgtaacggtaccgctgctgct

SEQ ID NO: 2767823 - DNA, 25 bp, Homo sapien
agctccgcgtaacggtaccgctgct

SEQ ID NO: 2767824 - DNA, 25 bp, Homo sapien
cgcgtaacggtaccgctgctgctcg

SEQ ID NO: 2767825 - DNA, 25 bp, Homo sapien
cgagagctccgcgtaacggtaccgc

SEQ ID NO: 2767826 - DNA, 25 bp, Homo sapien
tgcccagcaagaagcctcggtagca

SEQ ID NO: 2767827 - DNA, 25 bp, Homo sapien
cctcggtagcaagtcatcgtgggcc

SEQ ID NO: 2767828 - DNA, 25 bp, Homo sapien
ccacgcgacaacagctgcccagcaa

SEQ ID NO: 2767829 - DNA, 25 bp, Homo sapien
gaagcctcggtagcaagtcatcgtg

SEQ ID NO: 2767830 - DNA, 25 bp, Homo sapien
cttgggctcgggccccttgcctcag

SEQ ID NO: 2767831 - DNA, 25 bp, Homo sapien
ccttgcctcagctccctaccgccgg

SEQ ID NO: 2767832 - DNA, 25 bp, Homo sapien
gccccttgcctcagctccctaccgc

SEQ ID NO: 2767833 - DNA, 25 bp, Homo sapien
ggccccttgcctcagctccctaccg

SEQ ID NO: 2767834 - DNA, 25 bp, Homo sapien
gcagaggttaagtgccaggacgtgc

SEQ ID NO: 2767835 - DNA, 25 bp, Homo sapien
aagaaatggaggccccagctagtgg

SEQ ID NO: 2767836 - DNA, 25 bp, Homo sapien
cttcgcgccggacgggcagaggtta

SEQ ID NO: 2767837 - DNA, 25 bp, Homo sapien
acgtacccaggcgttgacgaaggcg

SEQ ID NO: 2767838 - DNA, 25 bp, Homo sapien
gattgcgtcgccctgaggaatccag

SEQ ID NO: 2767839 - DNA, 25 bp, Homo sapien
tgcataatggctgcttcgccgcccg

SEQ ID NO: 2767840 - DNA, 25 bp, Homo sapien
caggctaactctatcggccaatcag

SEQ ID NO: 2767841 - DNA, 25 bp, Homo sapien
agaattctgttaggcgattgcgtcg

SEQ ID NO: 2767842 - DNA, 25 bp, Homo sapien
tgaagatacaggacaaggaaaaact

SEQ ID NO: 2767843 - DNA, 25 bp, Homo sapien
gaaaatggatgttattgtacaactc

SEQ ID NO: 2767844 - DNA, 25 bp, Homo sapien
gaaagctgaaaagaaggctagatga

SEQ ID NO: 2767845 - DNA, 25 bp, Homo sapien
gaacaaaggacataggaaagctgaa

SEQ ID NO: 2767846 - DNA, 25 bp, Homo sapien
tttcaagcattgagaagataattgc

SEQ ID NO: 2767847 - DNA, 25 bp, Homo sapien
gctgatattctaaccctacatttgg

SEQ ID NO: 2767848 - DNA, 25 bp, Homo sapien
tgcggagaaatctaaagaaaatcat

SEQ ID NO: 2767849 - DNA, 25 bp, Homo sapien
ttttttccattgatatatgcggaga

SEQ ID NO: 2767850 - DNA, 25 bp, Homo sapien
tagcaatttatagtgcaatcacaat

SEQ ID NO: 2767851 - DNA, 25 bp, Homo sapien
tgctgagtgtgttccgcatcagagt

SEQ ID NO: 2767852 - DNA, 25 bp, Homo sapien
tgtcctttctttcgtactaaatctc

SEQ ID NO: 2767853 - DNA, 25 bp, Homo sapien
gtgttccgcatcagagtcactcttc

SEQ ID NO: 2767854 - DNA, 25 bp, Homo sapien
taacaactattggatgctgaccatg

SEQ ID NO: 2767855 - DNA, 25 bp, Homo sapien
tgttcttcgaagcatcacttagtga

SEQ ID NO: 2767856 - DNA, 25 bp, Homo sapien
gaaatagggctataagtactgagac

SEQ ID NO: 2767857 - DNA, 25 bp, Homo sapien
tcaaagtcacttcgaagccatggtg

SEQ ID NO: 2767858 - DNA, 25 bp, Homo sapien
caaccgactgtctgtgagtccaact

SEQ ID NO: 2767859 - DNA, 25 bp, Homo sapien
ccgactgtctgtgagtccaactaga

SEQ ID NO: 2767860 - DNA, 25 bp, Homo sapien
gaacaggcaaccgactgtctgtgag

SEQ ID NO: 2767861 - DNA, 25 bp, Homo sapien
tcatgaacaggcaaccgactgtctg

SEQ ID NO: 2767862 - DNA, 25 bp, Homo sapien
tatcaagccaagtttaccaagtggg

SEQ ID NO: 2767863 - DNA, 25 bp, Homo sapien
tcccctagataaaataggtccttga

SEQ ID NO: 2767864 - DNA, 25 bp, Homo sapien
aggcatcaccatgaagctgacttga

SEQ ID NO: 2767865 - DNA, 25 bp, Homo sapien
tacatctgtataacaaagttgagct

SEQ ID NO: 2767866 - DNA, 25 bp, Homo sapien
gacaggctttcagcttgattgacat

SEQ ID NO: 2767867 - DNA, 25 bp, Homo sapien
cagctttcgcagttcaattgttggg

SEQ ID NO: 2767868 - DNA, 25 bp, Homo sapien
gacgatgatgtattgctgcatacaa

SEQ ID NO: 2767869 - DNA, 25 bp, Homo sapien
gctttgaagtgcaacaagacgatga

SEQ ID NO: 2767870 - DNA, 25 bp, Homo sapien
aaatattttgatgctatagtcttct

SEQ ID NO: 2767871 - DNA, 25 bp, Homo sapien
ttcgtacatttttgtggtttgctct

SEQ ID NO: 2767872 - DNA, 25 bp, Homo sapien
tattcgtacatttttgtggtttgct

SEQ ID NO: 2767873 - DNA, 25 bp, Homo sapien
taaatcagtagctgttattcgtaca

SEQ ID NO: 2767874 - DNA, 25 bp, Homo sapien
gccttagactgccttgattgcgcat

SEQ ID NO: 2767875 - DNA, 25 bp, Homo sapien
agtttgctgttgaggatcagcctta

SEQ ID NO: 2767876 - DNA, 25 bp, Homo sapien
gaggatcagccttagactgccttga

SEQ ID NO: 2767877 - DNA, 25 bp, Homo sapien
tgttgaggatcagccttagactgcc

SEQ ID NO: 2767878 - DNA, 25 bp, Homo sapien
gtgcttgctgtgtcattcagtctca

SEQ ID NO: 2767879 - DNA, 25 bp, Homo sapien
tgttgaatatgaaaagcttgcagtt

SEQ ID NO: 2767880 - DNA, 25 bp, Homo sapien
tctgcccctttcaatccaggattgt

SEQ ID NO: 2767881 - DNA, 25 bp, Homo sapien
tcattcagtctcaacgttcctctgc

SEQ ID NO: 2767882 - DNA, 25 bp, Homo sapien
tgaaaactatacttctgtctgtatt

SEQ ID NO: 2767883 - DNA, 25 bp, Homo sapien
atgaaaactatacttctgtctgtat

SEQ ID NO: 2767884 - DNA, 25 bp, Homo sapien
ctgtttcctcccctgttataacatc

SEQ ID NO: 2767885 - DNA, 25 bp, Homo sapien
ccctgttataacatcaattttctcc

SEQ ID NO: 2767886 - DNA, 25 bp, Homo sapien
cagcaagcattttcgtgatggttgg

SEQ ID NO: 2767887 - DNA, 25 bp, Homo sapien
tttctccagcaagcattttcgtgat

SEQ ID NO: 2767888 - DNA, 25 bp, Homo sapien
ctgattcaattagggaagtattttt

SEQ ID NO: 2767889 - DNA, 25 bp, Homo sapien
agggaagtatttttaatagagtctg

SEQ ID NO: 2767890 - DNA, 25 bp, Homo sapien
tgattcaattagggaagtattttta

SEQ ID NO: 2767891 - DNA, 25 bp, Homo sapien
gaagtatttttaatagagtctgttc

SEQ ID NO: 2767892 - DNA, 25 bp, Homo sapien
cattttcaagttgaggctgggtgag

SEQ ID NO: 2767893 - DNA, 25 bp, Homo sapien
aagttgacaggaaatttcggaatgg

SEQ ID NO: 2767894 - DNA, 25 bp, Homo sapien
ggaaatttcggaatggatttgaatg

SEQ ID NO: 2767895 - DNA, 25 bp, Homo sapien
ggcatatgaatcattttcaagttga

SEQ ID NO: 2767896 - DNA, 25 bp, Homo sapien
aaaaacaaaattggaactgcagctt

SEQ ID NO: 2767897 - DNA, 25 bp, Homo sapien
aaaacaaaattggaactgcagcttt

SEQ ID NO: 2767898 - DNA, 25 bp, Homo sapien
tagacagatgtgctcagggttcggc

SEQ ID NO: 2767899 - DNA, 25 bp, Homo sapien
caatgcacatagaaggcacctgcta

SEQ ID NO: 2767900 - DNA, 25 bp, Homo sapien
tcatgatgagaaactcgaagaccgg

SEQ ID NO: 2767901 - DNA, 25 bp, Homo sapien
gaagcccgctctttgtagacagatg

SEQ ID NO: 2767902 - DNA, 25 bp, Homo sapien
gtagacagctggactgaaattctag

SEQ ID NO: 2767903 - DNA, 25 bp, Homo sapien
attctagcccttgataaattttcac

SEQ ID NO: 2767904 - DNA, 25 bp, Homo sapien
tactgatgttgcacctaaaaagtcc

SEQ ID NO: 2767905 - DNA, 25 bp, Homo sapien
taaaaagtcctggttagtagacagc

SEQ ID NO: 2767906 - DNA, 25 bp, Homo sapien
taccaagggctttatgctatctagc

SEQ ID NO: 2767907 - DNA, 25 bp, Homo sapien
gaggtcagttccgttatcctgggct

SEQ ID NO: 2767908 - DNA, 25 bp, Homo sapien
tgagactacaactctccaatgtcag

SEQ ID NO: 2767909 - DNA, 25 bp, Homo sapien
ttacaactttagagagaccacagat

SEQ ID NO: 2767910 - DNA, 25 bp, Homo sapien
tttcttacttttgcacaacttcgag

SEQ ID NO: 2767911 - DNA, 25 bp, Homo sapien
atagcaggtctaataacatgtttag

SEQ ID NO: 2767912 - DNA, 25 bp, Homo sapien
ggtagctgcaaaatagcaggtctaa

SEQ ID NO: 2767913 - DNA, 25 bp, Homo sapien
caacttcgagcttgaggtagctgca

SEQ ID NO: 2767914 - DNA, 25 bp, Homo sapien
ttaaatgagggactagcgttaatta

SEQ ID NO: 2767915 - DNA, 25 bp, Homo sapien
ctagcgttaattaatccaagtcaaa

SEQ ID NO: 2767916 - DNA, 25 bp, Homo sapien
tgagttccccaacattcacaccctg

SEQ ID NO: 2767917 - DNA, 25 bp, Homo sapien
tagcttttgcccaataactattcat

SEQ ID NO: 2767918 - DNA, 25 bp, Homo sapien
ctttatatcaacactactttgcaca

SEQ ID NO: 2767919 - DNA, 25 bp, Homo sapien
caacactactttgcacaagagctga

SEQ ID NO: 2767920 - DNA, 25 bp, Homo sapien
tatcaacactactttgcacaagagc

SEQ ID NO: 2767921 - DNA, 25 bp, Homo sapien
ttatatcaacactactttgcacaag

SEQ ID NO: 2767922 - DNA, 25 bp, Homo sapien
gatgtcgcaattggcactaacagag

SEQ ID NO: 2767923 - DNA, 25 bp, Homo sapien
cagcagatgtcgcaattggcactaa

SEQ ID NO: 2767924 - DNA, 25 bp, Homo sapien
taacagagtagtaggtagtgccctc

SEQ ID NO: 2767925 - DNA, 25 bp, Homo sapien
caattggcactaacagagtagtagg

SEQ ID NO: 2767926 - DNA, 25 bp, Homo sapien
ggttagtgacggatgaacatctcat

SEQ ID NO: 2767927 - DNA, 25 bp, Homo sapien
gggaggttagtgacggatgaacatc

SEQ ID NO: 2767928 - DNA, 25 bp, Homo sapien
gttgggaggttagtgacggatgaac

SEQ ID NO: 2767929 - DNA, 25 bp, Homo sapien
aggttagtgacggatgaacatctca

SEQ ID NO: 2767930 - DNA, 25 bp, Homo sapien
cacgctttgttggaaaaccattaca

SEQ ID NO: 2767931 - DNA, 25 bp, Homo sapien
taaaagatgaagaccgtacacgctt

SEQ ID NO: 2767932 - DNA, 25 bp, Homo sapien
gaagaccgtacacgctttgttggaa

SEQ ID NO: 2767933 - DNA, 25 bp, Homo sapien
aagtaaaagatgaagaccgtacacg

SEQ ID NO: 2767934 - DNA, 25 bp, Homo sapien
tgctgcttcatacagggtgtcttct

SEQ ID NO: 2767935 - DNA, 25 bp, Homo sapien
ttctgctgcttcatacagggtgtct

SEQ ID NO: 2767936 - DNA, 25 bp, Homo sapien
tctgctgcttcatacagggtgtctt

SEQ ID NO: 2767937 - DNA, 25 bp, Homo sapien
ggttctgctgcttcatacagggtgt

SEQ ID NO: 2767938 - DNA, 25 bp, Homo sapien
atgggttgagcaatgacagattttt

SEQ ID NO: 2767939 - DNA, 25 bp, Homo sapien
atatgggttgagcaatgacagattt

SEQ ID NO: 2767940 - DNA, 25 bp, Homo sapien
tatgggttgagcaatgacagatttt

SEQ ID NO: 2767941 - DNA, 25 bp, Homo sapien
ccacttgaactgtagccctggcagt

SEQ ID NO: 2767942 - DNA, 25 bp, Homo sapien
cacttgaactgtagccctggcagtc

SEQ ID NO: 2767943 - DNA, 25 bp, Homo sapien
tactctgccagtaggatacgttatg

SEQ ID NO: 2767944 - DNA, 25 bp, Homo sapien
tctcgccctaggtgttagatagttc

SEQ ID NO: 2767945 - DNA, 25 bp, Homo sapien
caaaaagagttagtgtctcgcccta

SEQ ID NO: 2767946 - DNA, 25 bp, Homo sapien
tctgtggaattactagtagaggcct

SEQ ID NO: 2767947 - DNA, 25 bp, Homo sapien
gcttcctgatactaagagggcggca

SEQ ID NO: 2767948 - DNA, 25 bp, Homo sapien
tcccctaacttcctaggaggagaga

SEQ ID NO: 2767949 - DNA, 25 bp, Homo sapien
cagaggctcctgtgctcatgaccct

SEQ ID NO: 2767950 - DNA, 25 bp, Homo sapien
taagggatccttacatagttccaag

SEQ ID NO: 2767951 - DNA, 25 bp, Homo sapien
tttacgagacagctgtatgtggcag

SEQ ID NO: 2767952 - DNA, 25 bp, Homo sapien
ggctgttccatgatacccagatatt

SEQ ID NO: 2767953 - DNA, 25 bp, Homo sapien
gaattgaattgtacgacactcagag

SEQ ID NO: 2767954 - DNA, 25 bp, Homo sapien
ggataacaatacctgctcgtgatta

SEQ ID NO: 2767955 - DNA, 25 bp, Homo sapien
gaacttcacataatagcaaggtgca

SEQ ID NO: 2767956 - DNA, 25 bp, Homo sapien
cactagatgatatttcttgcagcaa

SEQ ID NO: 2767957 - DNA, 25 bp, Homo sapien
ccagtctggactgcattagcatgct

SEQ ID NO: 2767958 - DNA, 25 bp, Homo sapien
cattctaggcaaaaagctaagtctg

SEQ ID NO: 2767959 - DNA, 25 bp, Homo sapien
aaatctaaaactgcgtctacagaaa

SEQ ID NO: 2767960 - DNA, 25 bp, Homo sapien
gaaatctaaaactgcgtctacagaa

SEQ ID NO: 2767961 - DNA, 25 bp, Homo sapien
atctaaaactgcgtctacagaaaaa

SEQ ID NO: 2767962 - DNA, 25 bp, Homo sapien
tctaaaactgcgtctacagaaaaat

SEQ ID NO: 2767963 - DNA, 25 bp, Homo sapien
actattatgtcagagcttccccggg

SEQ ID NO: 2767964 - DNA, 25 bp, Homo sapien
ggtactatggtagagaaagctccag

SEQ ID NO: 2767965 - DNA, 25 bp, Homo sapien
gatgtccctggaccataaaaaggaa

SEQ ID NO: 2767966 - DNA, 25 bp, Homo sapien
gagtgcccagcaagtgaaatgtgac

SEQ ID NO: 2767967 - DNA, 25 bp, Homo sapien
tgccttttcttggtatggtagtcat

SEQ ID NO: 2767968 - DNA, 25 bp, Homo sapien
tgctgccttttcttggtatggtagt

SEQ ID NO: 2767969 - DNA, 25 bp, Homo sapien
gcttcagtttacaggtgtgcaaact

SEQ ID NO: 2767970 - DNA, 25 bp, Homo sapien
ctgcagcttcagtttacaggtgtgc

SEQ ID NO: 2767971 - DNA, 25 bp, Homo sapien
agtcacctaaagtggccttcaccag

SEQ ID NO: 2767972 - DNA, 25 bp, Homo sapien
tagcagtatggctgtgactcaagga

SEQ ID NO: 2767973 - DNA, 25 bp, Homo sapien
tctaagcctgatctgagttaccctc

SEQ ID NO: 2767974 - DNA, 25 bp, Homo sapien
gactcaaggatcactagggcacctc

SEQ ID NO: 2767975 - DNA, 25 bp, Homo sapien
tggagtgtgccaagtgacagaaccc

SEQ ID NO: 2767976 - DNA, 25 bp, Homo sapien
aacatagggactggccccagtttct

SEQ ID NO: 2767977 - DNA, 25 bp, Homo sapien
ccagtttctcgtttggagtgtgcca

SEQ ID NO: 2767978 - DNA, 25 bp, Homo sapien
tcaagggtacatctgaacataggga

SEQ ID NO: 2767979 - DNA, 25 bp, Homo sapien
ctggatgaagccgaagtgaatgtca

SEQ ID NO: 2767980 - DNA, 25 bp, Homo sapien
ggtagaccactatcctgagactgga

SEQ ID NO: 2767981 - DNA, 25 bp, Homo sapien
gcaggtggtacccatcgaccagact

SEQ ID NO: 2767982 - DNA, 25 bp, Homo sapien
catccaaggatcactgagccagcag

SEQ ID NO: 2767983 - DNA, 25 bp, Homo sapien
actgcctgcaccagtcagctcattc

SEQ ID NO: 2767984 - DNA, 25 bp, Homo sapien
cccactgcctgcaccagtcagctca

SEQ ID NO: 2767985 - DNA, 25 bp, Homo sapien
tgccccactgcctgcaccagtcagc

SEQ ID NO: 2767986 - DNA, 25 bp, Homo sapien
cactgcctgcaccagtcagctcatt

SEQ ID NO: 2767987 - DNA, 25 bp, Homo sapien
ggctagctattggactcaggtttaa

SEQ ID NO: 2767988 - DNA, 25 bp, Homo sapien
ggacgacaccagtctggctagctat

SEQ ID NO: 2767989 - DNA, 25 bp, Homo sapien
gctaaattctcccaatagaagggat

SEQ ID NO: 2767990 - DNA, 25 bp, Homo sapien
tgtggatcttagcagggacgacacc

SEQ ID NO: 2767991 - DNA, 25 bp, Homo sapien
gtgcttccgattcattggccctgtg

SEQ ID NO: 2767992 - DNA, 25 bp, Homo sapien
ggccccatgaccttccagtgtgcaa

SEQ ID NO: 2767993 - DNA, 25 bp, Homo sapien
gcaagggcattagtgcatctgggta

SEQ ID NO: 2767994 - DNA, 25 bp, Homo sapien
catctgggtagataatcctgtgctt

SEQ ID NO: 2767995 - DNA, 25 bp, Homo sapien
taccagaatctggtccaaagacaaa

SEQ ID NO: 2767996 - DNA, 25 bp, Homo sapien
ggagcggctgggattcaggctaggg

SEQ ID NO: 2767997 - DNA, 25 bp, Homo sapien
ctggtccaaagacaaaaggacacgg

SEQ ID NO: 2767998 - DNA, 25 bp, Homo sapien
agacaaaaggacacggatgagaggg

SEQ ID NO: 2767999 - DNA, 25 bp, Homo sapien
cacctatgtcggtctatagttttgc

SEQ ID NO: 2768000 - DNA, 25 bp, Homo sapien
tggtgttcgtagagcactgtggctt

SEQ ID NO: 2768001 - DNA, 25 bp, Homo sapien
tttgcctgccacacgcaagggtggt

SEQ ID NO: 2768002 - DNA, 25 bp, Homo sapien
ggtctatagttttgcctgccacacg

SEQ ID NO: 2768003 - DNA, 25 bp, Homo sapien
ttttctctaggagcatgccgaccag

SEQ ID NO: 2768004 - DNA, 25 bp, Homo sapien
ccagggtgaagactacagctaaatc

SEQ ID NO: 2768005 - DNA, 25 bp, Homo sapien
ctaaatcacaggtggttgtgggtgt

SEQ ID NO: 2768006 - DNA, 25 bp, Homo sapien
gggccagtttgtctagggctaatat

SEQ ID NO: 2768007 - DNA, 25 bp, Homo sapien
agttctctctgcagaaagcctctgg

SEQ ID NO: 2768008 - DNA, 25 bp, Homo sapien
tcttgtagaaaccataagtgatgcc

SEQ ID NO: 2768009 - DNA, 25 bp, Homo sapien
tctgagagctgttgtgagccctgcc

SEQ ID NO: 2768010 - DNA, 25 bp, Homo sapien
tgatgccttgggaattctgctctga

SEQ ID NO: 2768011 - DNA, 25 bp, Homo sapien
cactcttactactttccgaaaatgt

SEQ ID NO: 2768012 - DNA, 25 bp, Homo sapien
agccaggccaacactcttactactt

SEQ ID NO: 2768013 - DNA, 25 bp, Homo sapien
gatgcagcagtccacttttcagcca

SEQ ID NO: 2768014 - DNA, 25 bp, Homo sapien
gaaaggatatcccatatcccaactt

SEQ ID NO: 2768015 - DNA, 25 bp, Homo sapien
catctgagaccccatgaccattcct

SEQ ID NO: 2768016 - DNA, 25 bp, Homo sapien
tctgagaccccatgaccattccttt

SEQ ID NO: 2768017 - DNA, 25 bp, Homo sapien
cattcatctgagaccccatgaccat

SEQ ID NO: 2768018 - DNA, 25 bp, Homo sapien
tccacattcatctgagaccccatga

SEQ ID NO: 2768019 - DNA, 25 bp, Homo sapien
ccagtttcttagtaatttgggcact

SEQ ID NO: 2768020 - DNA, 25 bp, Homo sapien
tcttagtaatttgggcactacgtgg

SEQ ID NO: 2768021 - DNA, 25 bp, Homo sapien
tgccagtttcttagtaatttgggca

SEQ ID NO: 2768022 - DNA, 25 bp, Homo sapien
taatttgggcactacgtgggtagag

SEQ ID NO: 2768023 - DNA, 25 bp, Homo sapien
gggaaatgagcaggtagtggtgaca

SEQ ID NO: 2768024 - DNA, 25 bp, Homo sapien
tgacagctaagggctgggcactcag

SEQ ID NO: 2768025 - DNA, 25 bp, Homo sapien
agcaggtagtggtgacagctaaggg

SEQ ID NO: 2768026 - DNA, 25 bp, Homo sapien
tagtggtgacagctaagggctgggc

SEQ ID NO: 2768027 - DNA, 25 bp, Homo sapien
ggctataggacagatttgataaggc

SEQ ID NO: 2768028 - DNA, 25 bp, Homo sapien
gatttgataaggctactgatgggac

SEQ ID NO: 2768029 - DNA, 25 bp, Homo sapien
gaaagcaggtgttcgctcaggtctg

SEQ ID NO: 2768030 - DNA, 25 bp, Homo sapien
aaggctactgatgggacagaagctc

SEQ ID NO: 2768031 - DNA, 25 bp, Homo sapien
caaggcggctaactcgaacctgcat

SEQ ID NO: 2768032 - DNA, 25 bp, Homo sapien
tacactcaaggcaaggcggctaact

SEQ ID NO: 2768033 - DNA, 25 bp, Homo sapien
tggacagtgccctacactcaaggca

SEQ ID NO: 2768034 - DNA, 25 bp, Homo sapien
gaggaagtgtggacagtgccctaca

SEQ ID NO: 2768035 - DNA, 25 bp, Homo sapien
tcccagtaggagcatgaatgctgac

SEQ ID NO: 2768036 - DNA, 25 bp, Homo sapien
accacgcccggtctattcaatgcat

SEQ ID NO: 2768037 - DNA, 25 bp, Homo sapien
tcagggaggtaaagagactaaggca

SEQ ID NO: 2768038 - DNA, 25 bp, Homo sapien
tagtacagtatatggctgggtgcga

SEQ ID NO: 2768039 - DNA, 25 bp, Homo sapien
gagcctccatgaatgaacgtaggtt

SEQ ID NO: 2768040 - DNA, 25 bp, Homo sapien
ttcccattcttagtggcacaattac

SEQ ID NO: 2768041 - DNA, 25 bp, Homo sapien
ttagctgtagcagcccctagagtgg

SEQ ID NO: 2768042 - DNA, 25 bp, Homo sapien
gacctttcccaggatagagcctcca

SEQ ID NO: 2768043 - DNA, 25 bp, Homo sapien
cagtcctcttcagtaagcgctagtc

SEQ ID NO: 2768044 - DNA, 25 bp, Homo sapien
tgaactctgaatattcccgggtgtt

SEQ ID NO: 2768045 - DNA, 25 bp, Homo sapien
cggccactacaacgcagcaggattc

SEQ ID NO: 2768046 - DNA, 25 bp, Homo sapien
gcgctagtccttggctgtttggctc

SEQ ID NO: 2768047 - DNA, 25 bp, Homo sapien
tagtgacagacctggcgaatctccc

SEQ ID NO: 2768048 - DNA, 25 bp, Homo sapien
caagggtctggccactagtgacaga

SEQ ID NO: 2768049 - DNA, 25 bp, Homo sapien
tgaaacaactcatatgcgccgctgc

SEQ ID NO: 2768050 - DNA, 25 bp, Homo sapien
caccctggtgctgtagacgtgtaca

SEQ ID NO: 2768051 - DNA, 25 bp, Homo sapien
gatgtagtctcctctcgagtatatt

SEQ ID NO: 2768052 - DNA, 25 bp, Homo sapien
tcactaaggacagaacctctctggg

SEQ ID NO: 2768053 - DNA, 25 bp, Homo sapien
catgatgtagtctcctctcgagtat

SEQ ID NO: 2768054 - DNA, 25 bp, Homo sapien
gggtctgcagactcatcactaagga

SEQ ID NO: 2768055 - DNA, 25 bp, Homo sapien
cacatcatctgtgtcaccggggaga

SEQ ID NO: 2768056 - DNA, 25 bp, Homo sapien
tgtcagggactctggccacatcatc

SEQ ID NO: 2768057 - DNA, 25 bp, Homo sapien
tgaaatgcctctagagaggagggat

SEQ ID NO: 2768058 - DNA, 25 bp, Homo sapien
ttataacttgtttctcctcagggag

SEQ ID NO: 2768059 - DNA, 25 bp, Homo sapien
atgccaccacggttgccattggcaa

SEQ ID NO: 2768060 - DNA, 25 bp, Homo sapien
gtcagtgtggggtttccttccactg

SEQ ID NO: 2768061 - DNA, 25 bp, Homo sapien
cctccatccgctggtcagtgtgggg

SEQ ID NO: 2768062 - DNA, 25 bp, Homo sapien
gaaatgccaccacggttgccattgg

SEQ ID NO: 2768063 - DNA, 25 bp, Homo sapien
taacaacccaaaacttccctgtgca

SEQ ID NO: 2768064 - DNA, 25 bp, Homo sapien
attcatgggtcccaaaataactcac

SEQ ID NO: 2768065 - DNA, 25 bp, Homo sapien
aacccaaaacttccctgtgcacatt

SEQ ID NO: 2768066 - DNA, 25 bp, Homo sapien
cctgtgcacattcatgggtcccaaa

SEQ ID NO: 2768067 - DNA, 25 bp, Homo sapien
aaggaattcccaagaaggaatgcag

SEQ ID NO: 2768068 - DNA, 25 bp, Homo sapien
aaaggaattcccaagaaggaatgca

SEQ ID NO: 2768069 - DNA, 25 bp, Homo sapien
aggaattcccaagaaggaatgcagg

SEQ ID NO: 2768070 - DNA, 25 bp, Homo sapien
ctattgttaatggagccaacagttc

SEQ ID NO: 2768071 - DNA, 25 bp, Homo sapien
gctttttcggcagatgcgtgtcatc

SEQ ID NO: 2768072 - DNA, 25 bp, Homo sapien
gtgatatcactaaaaccctttgatg

SEQ ID NO: 2768073 - DNA, 25 bp, Homo sapien
tttgcacatgcacaagaaatgttgg

SEQ ID NO: 2768074 - DNA, 25 bp, Homo sapien
aggtctgactgcagtgcggtccgct

SEQ ID NO: 2768075 - DNA, 25 bp, Homo sapien
ttcctccgagcgctttcgccaccat

SEQ ID NO: 2768076 - DNA, 25 bp, Homo sapien
gctaggtctgactgcagtgcggtcc

SEQ ID NO: 2768077 - DNA, 25 bp, Homo sapien
cctgctggcattggggctaggtctg

SEQ ID NO: 2768078 - DNA, 25 bp, Homo sapien
tggggctggttactgatgctcacag

SEQ ID NO: 2768079 - DNA, 25 bp, Homo sapien
gggctggttactgatgctcacagtc

SEQ ID NO: 2768080 - DNA, 25 bp, Homo sapien
gctggttactgatgctcacagtcat

SEQ ID NO: 2768081 - DNA, 25 bp, Homo sapien
tcctggggctggttactgatgctca

SEQ ID NO: 2768082 - DNA, 25 bp, Homo sapien
actggagctgaacctaactcctcca

SEQ ID NO: 2768083 - DNA, 25 bp, Homo sapien
cactggagctgaacctaactcctcc

SEQ ID NO: 2768084 - DNA, 25 bp, Homo sapien
ctggagctgaacctaactcctccaa

SEQ ID NO: 2768085 - DNA, 25 bp, Homo sapien
gaaaacctctccctcataaatgaat

SEQ ID NO: 2768086 - DNA, 25 bp, Homo sapien
cataaaacagcgcatctcaaatcct

SEQ ID NO: 2768087 - DNA, 25 bp, Homo sapien
tctaacagtgctgaccaatagaaat

SEQ ID NO: 2768088 - DNA, 25 bp, Homo sapien
ctcaatggttacatgtggctagtga

SEQ ID NO: 2768089 - DNA, 25 bp, Homo sapien
gattgtggcgcgagatctagaaaag

SEQ ID NO: 2768090 - DNA, 25 bp, Homo sapien
caaggttgagcggatctgcttaaaa

SEQ ID NO: 2768091 - DNA, 25 bp, Homo sapien
tggtgtctgtttatgccgggtccgc

SEQ ID NO: 2768092 - DNA, 25 bp, Homo sapien
ccttgttagtcatctcacgtcgtga

SEQ ID NO: 2768093 - DNA, 25 bp, Homo sapien
tggctgcttgcgttggcagcgacac

SEQ ID NO: 2768094 - DNA, 25 bp, Homo sapien
tgcgttggcagcgacacacatccat

SEQ ID NO: 2768095 - DNA, 25 bp, Homo sapien
tgcttgcgttggcagcgacacacat

SEQ ID NO: 2768096 - DNA, 25 bp, Homo sapien
ccacaggcgcacacgctggctgctt

SEQ ID NO: 2768097 - DNA, 25 bp, Homo sapien
gggcactacctcgttttctggaaga

SEQ ID NO: 2768098 - DNA, 25 bp, Homo sapien
gcgaggtctttctgtcaagatcatt

SEQ ID NO: 2768099 - DNA, 25 bp, Homo sapien
gatttggcgtagtaataactcttag

SEQ ID NO: 2768100 - DNA, 25 bp, Homo sapien
gcacttagttttctcgtggttggcc

SEQ ID NO: 2768101 - DNA, 25 bp, Homo sapien
caacacttatcttttcctggtgtac

SEQ ID NO: 2768102 - DNA, 25 bp, Homo sapien
ccaacacttatcttttcctggtgta

SEQ ID NO: 2768103 - DNA, 25 bp, Homo sapien
taaattgagtttgcgctacagcaga

SEQ ID NO: 2768104 - DNA, 25 bp, Homo sapien
tacagttacagacacaaagagctag

SEQ ID NO: 2768105 - DNA, 25 bp, Homo sapien
gagaattcccagagttacccatgga

SEQ ID NO: 2768106 - DNA, 25 bp, Homo sapien
tagctggctgttggtaactttcaag

SEQ ID NO: 2768107 - DNA, 25 bp, Homo sapien
tccaagggtggctttcgtcagcctg

SEQ ID NO: 2768108 - DNA, 25 bp, Homo sapien
ccccaggctctttctgtgcgtaaat

SEQ ID NO: 2768109 - DNA, 25 bp, Homo sapien
caggctttacaggtagatccaaggg

SEQ ID NO: 2768110 - DNA, 25 bp, Homo sapien
tgcaaactactcatccagtggtcag

SEQ ID NO: 2768111 - DNA, 25 bp, Homo sapien
gctgttacaatgaggtagccagaga

SEQ ID NO: 2768112 - DNA, 25 bp, Homo sapien
ttctgcggtcctgggtttctaaatc

SEQ ID NO: 2768113 - DNA, 25 bp, Homo sapien
tgggtttctaaatcttggcaagagg

SEQ ID NO: 2768114 - DNA, 25 bp, Homo sapien
cagtcattcctttgtgctcggctgt

SEQ ID NO: 2768115 - DNA, 25 bp, Homo sapien
cacacgtggcaaatctgtaaggaac

SEQ ID NO: 2768116 - DNA, 25 bp, Homo sapien
gagaaggaacctttgaccagggtga

SEQ ID NO: 2768117 - DNA, 25 bp, Homo sapien
tgaaaacccgtgtgaaaatgcttgt

SEQ ID NO: 2768118 - DNA, 25 bp, Homo sapien
tggacagcccaagatcataggaaac

SEQ ID NO: 2768119 - DNA, 25 bp, Homo sapien
attgtgacataatcattctttacca

SEQ ID NO: 2768120 - DNA, 25 bp, Homo sapien
caaaattgtgacataatcattcttt

SEQ ID NO: 2768121 - DNA, 25 bp, Homo sapien
tgcaaaattgtgacataatcattct

SEQ ID NO: 2768122 - DNA, 25 bp, Homo sapien
tgacataatcattctttaccaacaa

SEQ ID NO: 2768123 - DNA, 25 bp, Homo sapien
tgtaccctggactcagcagtgggca

SEQ ID NO: 2768124 - DNA, 25 bp, Homo sapien
gaacaggcgtctttcattagatgcg

SEQ ID NO: 2768125 - DNA, 25 bp, Homo sapien
ggttccagaacccttagaatcatag

SEQ ID NO: 2768126 - DNA, 25 bp, Homo sapien
aattctaggagggttgagaacaggc

SEQ ID NO: 2768127 - DNA, 25 bp, Homo sapien
aatagcagctgttactttattctct

SEQ ID NO: 2768128 - DNA, 25 bp, Homo sapien
aaaatgccttgatggttgtcttcag

SEQ ID NO: 2768129 - DNA, 25 bp, Homo sapien
aggcctctcatttgatgattgaatc

SEQ ID NO: 2768130 - DNA, 25 bp, Homo sapien
taagggccaatatgcagaggtgagt

SEQ ID NO: 2768131 - DNA, 25 bp, Homo sapien
agctggccctgtgtgatatcaaaaa

SEQ ID NO: 2768132 - DNA, 25 bp, Homo sapien
aaaatgctgatttccagatccttca

SEQ ID NO: 2768133 - DNA, 25 bp, Homo sapien
ttggcttagaccaggatgcaaacaa

SEQ ID NO: 2768134 - DNA, 25 bp, Homo sapien
ggaaaaagtgctgacttgtacagat

SEQ ID NO: 2768135 - DNA, 25 bp, Homo sapien
ccatcaagatcaggaattctattct

SEQ ID NO: 2768136 - DNA, 25 bp, Homo sapien
acagagggatgagtttacttgtttc

SEQ ID NO: 2768137 - DNA, 25 bp, Homo sapien
tcacagagggatgagtttacttgtt

SEQ ID NO: 2768138 - DNA, 25 bp, Homo sapien
agagggatgagtttacttgtttcat

SEQ ID NO: 2768139 - DNA, 25 bp, Homo sapien
tggccagcatctcctgactggggca

SEQ ID NO: 2768140 - DNA, 25 bp, Homo sapien
gtggccagcatctcctgactggggc

SEQ ID NO: 2768141 - DNA, 25 bp, Homo sapien
ggccagcatctcctgactggggcat

SEQ ID NO: 2768142 - DNA, 25 bp, Homo sapien
gggcagcttgccatgtacaccgtga

SEQ ID NO: 2768143 - DNA, 25 bp, Homo sapien
cattcacgcagtcatcgtcttgcca

SEQ ID NO: 2768144 - DNA, 25 bp, Homo sapien
attgttggcttactcattcacgcag

SEQ ID NO: 2768145 - DNA, 25 bp, Homo sapien
tcctctacttcttggtaacacggaa

SEQ ID NO: 2768146 - DNA, 25 bp, Homo sapien
cactgtggaacactaaagagctagg

SEQ ID NO: 2768147 - DNA, 25 bp, Homo sapien
accaggtcctgtgagcaaagtgcag

SEQ ID NO: 2768148 - DNA, 25 bp, Homo sapien
tttctaactaaggacaggatggctg

SEQ ID NO: 2768149 - DNA, 25 bp, Homo sapien
caggttatgcaagtcgccaggcagg

SEQ ID NO: 2768150 - DNA, 25 bp, Homo sapien
aagcagtcgggacgtgtcacgccga

SEQ ID NO: 2768151 - DNA, 25 bp, Homo sapien
aactggagcaacaatggccggctct

SEQ ID NO: 2768152 - DNA, 25 bp, Homo sapien
ccgagggagggctccgaatgaatac

SEQ ID NO: 2768153 - DNA, 25 bp, Homo sapien
ggccaaagcagtcgggacgtgtcac

SEQ ID NO: 2768154 - DNA, 25 bp, Homo sapien
agagcgagggaggtgatgggcagcg

SEQ ID NO: 2768155 - DNA, 25 bp, Homo sapien
gagagcgagggaggtgatgggcagc

SEQ ID NO: 2768156 - DNA, 25 bp, Homo sapien
gggagagcgagggaggtgatgggca

SEQ ID NO: 2768157 - DNA, 25 bp, Homo sapien
aagggagagcgagggaggtgatggg

SEQ ID NO: 2768158 - DNA, 25 bp, Homo sapien
gtaacatcgaattccaagtctgcag

SEQ ID NO: 2768159 - DNA, 25 bp, Homo sapien
acatcgaattccaagtctgcagtgc

SEQ ID NO: 2768160 - DNA, 25 bp, Homo sapien
gggtaacatcgaattccaagtctgc

SEQ ID NO: 2768161 - DNA, 25 bp, Homo sapien
ttgggtaacatcgaattccaagtct

SEQ ID NO: 2768162 - DNA, 25 bp, Homo sapien
gcagctacagacaggtactcagaag

SEQ ID NO: 2768163 - DNA, 25 bp, Homo sapien
gttttgcagctacagacaggtactc

SEQ ID NO: 2768164 - DNA, 25 bp, Homo sapien
cagacaggtactcagaaggtggcat

SEQ ID NO: 2768165 - DNA, 25 bp, Homo sapien
gctacagacaggtactcagaaggtg

SEQ ID NO: 2768166 - DNA, 25 bp, Homo sapien
gaagatggtgtcagatgacaacttt

SEQ ID NO: 2768167 - DNA, 25 bp, Homo sapien
tcagaggatcataagtcctggaagc

SEQ ID NO: 2768168 - DNA, 25 bp, Homo sapien
ttcttttccaactcttagcttcaga

SEQ ID NO: 2768169 - DNA, 25 bp, Homo sapien
tccaactcttagcttcagaggatca

SEQ ID NO: 2768170 - DNA, 25 bp, Homo sapien
cctggaaaccggcatcatgagacac

SEQ ID NO: 2768171 - DNA, 25 bp, Homo sapien
agaggccttttgtcccgcgggctct

SEQ ID NO: 2768172 - DNA, 25 bp, Homo sapien
actgccaggcttcttcacggagggg

SEQ ID NO: 2768173 - DNA, 25 bp, Homo sapien
acgctttgcggaggtcgtcacccct

SEQ ID NO: 2768174 - DNA, 25 bp, Homo sapien
ttttgtgaagggcacaatccgatgt

SEQ ID NO: 2768175 - DNA, 25 bp, Homo sapien
ggcacaatccgatgttctgaggaga

SEQ ID NO: 2768176 - DNA, 25 bp, Homo sapien
gaagggcacaatccgatgttctgag

SEQ ID NO: 2768177 - DNA, 25 bp, Homo sapien
cgtggccgttttgtgaagggcacaa

SEQ ID NO: 2768178 - DNA, 25 bp, Homo sapien
tttctctaggccccgatgacccaga

SEQ ID NO: 2768179 - DNA, 25 bp, Homo sapien
atgacccagagcagcccggaccaga

SEQ ID NO: 2768180 - DNA, 25 bp, Homo sapien
caaagaggagcgcttacagcaaact

SEQ ID NO: 2768181 - DNA, 25 bp, Homo sapien
cagacaacgtgcaaagaggagcgct

SEQ ID NO: 2768182 - DNA, 25 bp, Homo sapien
gaaacaaccaagtagaggaatctct

SEQ ID NO: 2768183 - DNA, 25 bp, Homo sapien
ccctggcacctagctctggaaacaa

SEQ ID NO: 2768184 - DNA, 25 bp, Homo sapien
ttgccaaatgaataagcgtgccctg

SEQ ID NO: 2768185 - DNA, 25 bp, Homo sapien
ccaaatgaataagcgtgccctggca

SEQ ID NO: 2768186 - DNA, 25 bp, Homo sapien
ccgacgactccagcagaattgattc

SEQ ID NO: 2768187 - DNA, 25 bp, Homo sapien
ccaggcaccaaccccgacgactcca

SEQ ID NO: 2768188 - DNA, 25 bp, Homo sapien
ccccgacgactccagcagaattgat

SEQ ID NO: 2768189 - DNA, 25 bp, Homo sapien
ggcaccaaccccgacgactccagca

SEQ ID NO: 2768190 - DNA, 25 bp, Homo sapien
aggtgtttccgattcggacagaaca

SEQ ID NO: 2768191 - DNA, 25 bp, Homo sapien
ggtgtttccgattcggacagaacat

SEQ ID NO: 2768192 - DNA, 25 bp, Homo sapien
gaatcgggcattcacaatgtttatg

SEQ ID NO: 2768193 - DNA, 25 bp, Homo sapien
actttccttgaatcgggcattcaca

SEQ ID NO: 2768194 - DNA, 25 bp, Homo sapien
tcgggcattcacaatgtttatggaa

SEQ ID NO: 2768195 - DNA, 25 bp, Homo sapien
ccttgaatcgggcattcacaatgtt

SEQ ID NO: 2768196 - DNA, 25 bp, Homo sapien
tatgggactgtgttatgaaagagac

SEQ ID NO: 2768197 - DNA, 25 bp, Homo sapien
tattgcttaagtcaggccttgtatc

SEQ ID NO: 2768198 - DNA, 25 bp, Homo sapien
ttctattttgaaggctaactattgc

SEQ ID NO: 2768199 - DNA, 25 bp, Homo sapien
tgaaagagaccatgaaactctacta

SEQ ID NO: 2768200 - DNA, 25 bp, Homo sapien
ctccacaagggagatgacagggatt

SEQ ID NO: 2768201 - DNA, 25 bp, Homo sapien
caaacacaagcttgatgtggagcca

SEQ ID NO: 2768202 - DNA, 25 bp, Homo sapien
tctcatgccggctgtgtgataagtg

SEQ ID NO: 2768203 - DNA, 25 bp, Homo sapien
cccaggatcaccaaggacggctttt

SEQ ID NO: 2768204 - DNA, 25 bp, Homo sapien
taattcaggatcatttctccacctg

SEQ ID NO: 2768205 - DNA, 25 bp, Homo sapien
tacttagaaggatcgcaatgtggtg

SEQ ID NO: 2768206 - DNA, 25 bp, Homo sapien
caaaggagaatccattcattgcccc

SEQ ID NO: 2768207 - DNA, 25 bp, Homo sapien
caatgtggtgacatgtagggcccac

SEQ ID NO: 2768208 - DNA, 25 bp, Homo sapien
aagacctccctcgattgccatagtg

SEQ ID NO: 2768209 - DNA, 25 bp, Homo sapien
gtcagaccgggttcattacacaaat

SEQ ID NO: 2768210 - DNA, 25 bp, Homo sapien
tatctagggtgctctgcacagtgcc

SEQ ID NO: 2768211 - DNA, 25 bp, Homo sapien
gacaagtgtcacaagtttccagcag

SEQ ID NO: 2768212 - DNA, 25 bp, Homo sapien
aaagtctcagaaataccctcatgag

SEQ ID NO: 2768213 - DNA, 25 bp, Homo sapien
tacagcaaggtcacaaaaaaaagtc

SEQ ID NO: 2768214 - DNA, 25 bp, Homo sapien
agtctcagaaataccctcatgagca

SEQ ID NO: 2768215 - DNA, 25 bp, Homo sapien
cagtcatacagcaaggtcacaaaaa

SEQ ID NO: 2768216 - DNA, 25 bp, Homo sapien
gaagatgtagattcctgggtgctcc

SEQ ID NO: 2768217 - DNA, 25 bp, Homo sapien
tcctgggagtcgtgcagtacacaag

SEQ ID NO: 2768218 - DNA, 25 bp, Homo sapien
gatgaccagatcactagcagggcca

SEQ ID NO: 2768219 - DNA, 25 bp, Homo sapien
tatggagtgccctgatagaacttct

SEQ ID NO: 2768220 - DNA, 25 bp, Homo sapien
taagatacctttccacgcttctttc

SEQ ID NO: 2768221 - DNA, 25 bp, Homo sapien
gggataatcaggcccagaggtgccc

SEQ ID NO: 2768222 - DNA, 25 bp, Homo sapien
aagttgggggataatcaggcccaga

SEQ ID NO: 2768223 - DNA, 25 bp, Homo sapien
cagccaaaaggtcatccaaggaagt

SEQ ID NO: 2768224 - DNA, 25 bp, Homo sapien
tgtttccttcacgtcatctctcatg

SEQ ID NO: 2768225 - DNA, 25 bp, Homo sapien
gagactctgttactggattccttga

SEQ ID NO: 2768226 - DNA, 25 bp, Homo sapien
ccaagattattaccagagactctgt

SEQ ID NO: 2768227 - DNA, 25 bp, Homo sapien
tctatgtcccacattagtccaaatg

SEQ ID NO: 2768228 - DNA, 25 bp, Homo sapien
ggaggtcttggcagcatctgacaca

SEQ ID NO: 2768229 - DNA, 25 bp, Homo sapien
caagtctggctcaatatgttcagca

SEQ ID NO: 2768230 - DNA, 25 bp, Homo sapien
gaactgccaagggatttgagtgcct

SEQ ID NO: 2768231 - DNA, 25 bp, Homo sapien
aagtgtggatcagggctcgctgacc

SEQ ID NO: 2768232 - DNA, 25 bp, Homo sapien
ttcctggtaggatgcccatcccata

SEQ ID NO: 2768233 - DNA, 25 bp, Homo sapien
tcctggtaggatgcccatcccataa

SEQ ID NO: 2768234 - DNA, 25 bp, Homo sapien
ggttcctggtaggatgcccatccca

SEQ ID NO: 2768235 - DNA, 25 bp, Homo sapien
gttcctggtaggatgcccatcccat

SEQ ID NO: 2768236 - DNA, 25 bp, Homo sapien
tgtggctaaaatcatacctcgaagg

SEQ ID NO: 2768237 - DNA, 25 bp, Homo sapien
gaaagtgggatattcagccctcaac

SEQ ID NO: 2768238 - DNA, 25 bp, Homo sapien
ggcccatagcacctactcagataag

SEQ ID NO: 2768239 - DNA, 25 bp, Homo sapien
cttagactcctgaacatccaaggga

SEQ ID NO: 2768240 - DNA, 25 bp, Homo sapien
acctgcttcctgttcccggaaggcg

SEQ ID NO: 2768241 - DNA, 25 bp, Homo sapien
cctgttcccggaaggcgatagaagg

SEQ ID NO: 2768242 - DNA, 25 bp, Homo sapien
aaggcgatagaaggcccccagatcc

SEQ ID NO: 2768243 - DNA, 25 bp, Homo sapien
ttcctgttcccggaaggcgatagaa

SEQ ID NO: 2768244 - DNA, 25 bp, Homo sapien
tgtaatatgccacgtagatgctcat

SEQ ID NO: 2768245 - DNA, 25 bp, Homo sapien
taagtcaatcttcttatttacggcc

SEQ ID NO: 2768246 - DNA, 25 bp, Homo sapien
tacggcctccttgtaatatgccacg

SEQ ID NO: 2768247 - DNA, 25 bp, Homo sapien
aatcttcttatttacggcctccttg

SEQ ID NO: 2768248 - DNA, 25 bp, Homo sapien
tagattgcagtttttgagttgattc

SEQ ID NO: 2768249 - DNA, 25 bp, Homo sapien
tttttagattgcagtttttgagttg

SEQ ID NO: 2768250 - DNA, 25 bp, Homo sapien
ttttagattgcagtttttgagttga

SEQ ID NO: 2768251 - DNA, 25 bp, Homo sapien
tttagattgcagtttttgagttgat

SEQ ID NO: 2768252 - DNA, 25 bp, Homo sapien
gcccacgacgctaactggcaaaggg

SEQ ID NO: 2768253 - DNA, 25 bp, Homo sapien
tggttccgcagtcatccaactgtag

SEQ ID NO: 2768254 - DNA, 25 bp, Homo sapien
agccgctgctacaaccgaactgggc

SEQ ID NO: 2768255 - DNA, 25 bp, Homo sapien
caaagggagtgtaacacgagccgct

SEQ ID NO: 2768256 - DNA, 25 bp, Homo sapien
tggagcccgtgctcgaccagctgct

SEQ ID NO: 2768257 - DNA, 25 bp, Homo sapien
cgctggagcccgtgctcgaccagct

SEQ ID NO: 2768258 - DNA, 25 bp, Homo sapien
agcccgtgctcgaccagctgctgtg

SEQ ID NO: 2768259 - DNA, 25 bp, Homo sapien
gagcccgtgctcgaccagctgctgt

SEQ ID NO: 2768260 - DNA, 25 bp, Homo sapien
tcaggtagcaaaacgaagagagtag

SEQ ID NO: 2768261 - DNA, 25 bp, Homo sapien
gagtgtcaggtagcaaaacgaagag

SEQ ID NO: 2768262 - DNA, 25 bp, Homo sapien
gtagcaaaacgaagagagtagtcga

SEQ ID NO: 2768263 - DNA, 25 bp, Homo sapien
tgggagtgtcaggtagcaaaacgaa

SEQ ID NO: 2768264 - DNA, 25 bp, Homo sapien
ctccgactcaggctcagccggcagg

SEQ ID NO: 2768265 - DNA, 25 bp, Homo sapien
tgcgctccgactcaggctcagccgg

SEQ ID NO: 2768266 - DNA, 25 bp, Homo sapien
ggctgcgctccgactcaggctcagc

SEQ ID NO: 2768267 - DNA, 25 bp, Homo sapien
ccgactcaggctcagccggcaggtt

SEQ ID NO: 2768268 - DNA, 25 bp, Homo sapien
gtcccgcacgcacacagtactcagg

SEQ ID NO: 2768269 - DNA, 25 bp, Homo sapien
tcccgcacgcacacagtactcaggg

SEQ ID NO: 2768270 - DNA, 25 bp, Homo sapien
gggcccttgtgggtcccgcacgcac

SEQ ID NO: 2768271 - DNA, 25 bp, Homo sapien
ttgtgggtcccgcacgcacacagta

SEQ ID NO: 2768272 - DNA, 25 bp, Homo sapien
ccaagagaaccagcctctgggcact

SEQ ID NO: 2768273 - DNA, 25 bp, Homo sapien
gggcactggccacatagaagccttc

SEQ ID NO: 2768274 - DNA, 25 bp, Homo sapien
agccttcaacttccaacagagcatc

SEQ ID NO: 2768275 - DNA, 25 bp, Homo sapien
caacttccaacagagcatcagtcat

SEQ ID NO: 2768276 - DNA, 25 bp, Homo sapien
caagtttgtgcagagaggtataacc

SEQ ID NO: 2768277 - DNA, 25 bp, Homo sapien
tctggaggagccctaagagcaatgc

SEQ ID NO: 2768278 - DNA, 25 bp, Homo sapien
cactgtgtcctcatcagttaccttc

SEQ ID NO: 2768279 - DNA, 25 bp, Homo sapien
ggcagcccagtatattgggcaccat

SEQ ID NO: 2768280 - DNA, 25 bp, Homo sapien
tccaagttgcccttaagtgagcatg

SEQ ID NO: 2768281 - DNA, 25 bp, Homo sapien
catgaacccagagttgagtgccctg

SEQ ID NO: 2768282 - DNA, 25 bp, Homo sapien
caggtgatgggctgtcagcttgcac

SEQ ID NO: 2768283 - DNA, 25 bp, Homo sapien
gaatcaacaaggaattacagggctg

SEQ ID NO: 2768284 - DNA, 25 bp, Homo sapien
aatcagtcctgcaccctttagccta

SEQ ID NO: 2768285 - DNA, 25 bp, Homo sapien
ggcaaaaatcagtcctgcacccttt

SEQ ID NO: 2768286 - DNA, 25 bp, Homo sapien
cagtcctgcaccctttagcctattg

SEQ ID NO: 2768287 - DNA, 25 bp, Homo sapien
aaaaatcagtcctgcaccctttagc

SEQ ID NO: 2768288 - DNA, 25 bp, Homo sapien
acccaaacgagagggctctcttggc

SEQ ID NO: 2768289 - DNA, 25 bp, Homo sapien
ctcaacccaaacgagagggctctct

SEQ ID NO: 2768290 - DNA, 25 bp, Homo sapien
caaacgagagggctctcttggccca

SEQ ID NO: 2768291 - DNA, 25 bp, Homo sapien
cactaccctcaacccaaacgagagg

SEQ ID NO: 2768292 - DNA, 25 bp, Homo sapien
gtgactggttgcctgaaactgttat

SEQ ID NO: 2768293 - DNA, 25 bp, Homo sapien
ggaaaagtctgagggtgactggttg

SEQ ID NO: 2768294 - DNA, 25 bp, Homo sapien
gggtgactggttgcctgaaactgtt

SEQ ID NO: 2768295 - DNA, 25 bp, Homo sapien
ctggaaaagtctgagggtgactggt

SEQ ID NO: 2768296 - DNA, 25 bp, Homo sapien
tcagtttatcacactaggacaactt

SEQ ID NO: 2768297 - DNA, 25 bp, Homo sapien
caacttgactttttctgctgggaac

SEQ ID NO: 2768298 - DNA, 25 bp, Homo sapien
ggaaaacagaagaggtagtattgct

SEQ ID NO: 2768299 - DNA, 25 bp, Homo sapien
ttttcagacttcatagtgcagctct

SEQ ID NO: 2768300 - DNA, 25 bp, Homo sapien
caatggaagtatctgaactgctccc

SEQ ID NO: 2768301 - DNA, 25 bp, Homo sapien
cactgttcaagcctgggtagatggt

SEQ ID NO: 2768302 - DNA, 25 bp, Homo sapien
tgaggagcctcaaatggaatcaggg

SEQ ID NO: 2768303 - DNA, 25 bp, Homo sapien
agcatccctctgaaacctgaggcct

SEQ ID NO: 2768304 - DNA, 25 bp, Homo sapien
gggctgcctttatcttcaacatcat

SEQ ID NO: 2768305 - DNA, 25 bp, Homo sapien
tcaacatcatacagcctgtgtgcat

SEQ ID NO: 2768306 - DNA, 25 bp, Homo sapien
tcttcaacatcatacagcctgtgtg

SEQ ID NO: 2768307 - DNA, 25 bp, Homo sapien
cattatattcttggagggctgcctt

SEQ ID NO: 2768308 - DNA, 25 bp, Homo sapien
ctggggaagacgagcaaggcagaag

SEQ ID NO: 2768309 - DNA, 25 bp, Homo sapien
tggggaagacgagcaaggcagaagc

SEQ ID NO: 2768310 - DNA, 25 bp, Homo sapien
gattcagagatttgtgagcagatgg

SEQ ID NO: 2768311 - DNA, 25 bp, Homo sapien
tttgtgagcagatggacagcccttc

SEQ ID NO: 2768312 - DNA, 25 bp, Homo sapien
gagatttgtgagcagatggacagcc

SEQ ID NO: 2768313 - DNA, 25 bp, Homo sapien
tgtgagcagatggacagcccttcat

SEQ ID NO: 2768314 - DNA, 25 bp, Homo sapien
gctttcctgtccgttaatctcctat

SEQ ID NO: 2768315 - DNA, 25 bp, Homo sapien
tgaagcccattagccagaattttgt

SEQ ID NO: 2768316 - DNA, 25 bp, Homo sapien
cttcctggtactctgaactgttcaa

SEQ ID NO: 2768317 - DNA, 25 bp, Homo sapien
gcagtgaatgtagcactccagatgc

SEQ ID NO: 2768318 - DNA, 25 bp, Homo sapien
ttctgcacttcctgatgaagtgagg

SEQ ID NO: 2768319 - DNA, 25 bp, Homo sapien
ggaatgggatgtggtagggcagctt

SEQ ID NO: 2768320 - DNA, 25 bp, Homo sapien
tctgcacttcctgatgaagtgagga

SEQ ID NO: 2768321 - DNA, 25 bp, Homo sapien
tgtcctatgctttcacgagctccag

SEQ ID NO: 2768322 - DNA, 25 bp, Homo sapien
cagggggttgtcctatgctttcacg

SEQ ID NO: 2768323 - DNA, 25 bp, Homo sapien
tatgctttcacgagctccagagcag

SEQ ID NO: 2768324 - DNA, 25 bp, Homo sapien
ctttcacgagctccagagcaggtgg

SEQ ID NO: 2768325 - DNA, 25 bp, Homo sapien
tcctagctctagtggaatttacagt

SEQ ID NO: 2768326 - DNA, 25 bp, Homo sapien
cagcagggagcatgatatcatttaa

SEQ ID NO: 2768327 - DNA, 25 bp, Homo sapien
gagataagtgcccaaaatgaaagga

SEQ ID NO: 2768328 - DNA, 25 bp, Homo sapien
gctgataaaccaaacatagtcctag

SEQ ID NO: 2768329 - DNA, 25 bp, Homo sapien
gatttcaggatccattcatgttgca

SEQ ID NO: 2768330 - DNA, 25 bp, Homo sapien
ttcattacctcggaaagaaactctg

SEQ ID NO: 2768331 - DNA, 25 bp, Homo sapien
ttacttgaaggctagtacttggccc

SEQ ID NO: 2768332 - DNA, 25 bp, Homo sapien
cattcgttgaacaatagcctttggt

SEQ ID NO: 2768333 - DNA, 25 bp, Homo sapien
gcaaattttatcatgatgttatcct

SEQ ID NO: 2768334 - DNA, 25 bp, Homo sapien
aatttccaagttcaccacaccttat

SEQ ID NO: 2768335 - DNA, 25 bp, Homo sapien
tttcaccttgtagcccggtctcaaa

SEQ ID NO: 2768336 - DNA, 25 bp, Homo sapien
gagtgtggggtaatatctgcctccc

SEQ ID NO: 2768337 - DNA, 25 bp, Homo sapien
gcaatgccgagtgttaattgtgcag

SEQ ID NO: 2768338 - DNA, 25 bp, Homo sapien
taaagagccagatttcacaactatg

SEQ ID NO: 2768339 - DNA, 25 bp, Homo sapien
tgtgggtacaaattcctgactaaac

SEQ ID NO: 2768340 - DNA, 25 bp, Homo sapien
tgatcatttctaagctcctagccaa

SEQ ID NO: 2768341 - DNA, 25 bp, Homo sapien
tccagctgcatgactattaaactat

SEQ ID NO: 2768342 - DNA, 25 bp, Homo sapien
cagctgcatgactattaaactataa

SEQ ID NO: 2768343 - DNA, 25 bp, Homo sapien
ctggagatcggagttttattataac

SEQ ID NO: 2768344 - DNA, 25 bp, Homo sapien
tttggctggagatcggagttttatt

SEQ ID NO: 2768345 - DNA, 25 bp, Homo sapien
cactagttcataggcagtcagatct

SEQ ID NO: 2768346 - DNA, 25 bp, Homo sapien
taaaacactggtctggagcagatgc

SEQ ID NO: 2768347 - DNA, 25 bp, Homo sapien
caaggtaacctactcaagaatgctg

SEQ ID NO: 2768348 - DNA, 25 bp, Homo sapien
tcagaagtgcattttttgaggccct

SEQ ID NO: 2768349 - DNA, 25 bp, Homo sapien
tactgggctatcctcaatggacaag

SEQ ID NO: 2768350 - DNA, 25 bp, Homo sapien
caagttaaaaccctcaaaggcagtg

SEQ ID NO: 2768351 - DNA, 25 bp, Homo sapien
gaatacatacgagactatccaggga

SEQ ID NO: 2768352 - DNA, 25 bp, Homo sapien
gacaagtggaggatgtaagtcacct

SEQ ID NO: 2768353 - DNA, 25 bp, Homo sapien
taattgagtagcaaccaaagtagcc

SEQ ID NO: 2768354 - DNA, 25 bp, Homo sapien
taaaatatccacaccaagcctgacc

SEQ ID NO: 2768355 - DNA, 25 bp, Homo sapien
gctaacctaagtgtaagcaaacagc

SEQ ID NO: 2768356 - DNA, 25 bp, Homo sapien
tccagccactaggaaataagatttc

SEQ ID NO: 2768357 - DNA, 25 bp, Homo sapien
tcagtttaaaagtagccgcggaagc

SEQ ID NO: 2768358 - DNA, 25 bp, Homo sapien
cgagtgacacgagcaaaatcctgaa

SEQ ID NO: 2768359 - DNA, 25 bp, Homo sapien
catactacgcatctactgtgtggca

SEQ ID NO: 2768360 - DNA, 25 bp, Homo sapien
tcatttgatgcactgtcctcgggca

SEQ ID NO: 2768361 - DNA, 25 bp, Homo sapien
ttcgcagaaataacacgcagtcggg

SEQ ID NO: 2768362 - DNA, 25 bp, Homo sapien
tcctgaccgttagagaagaacccaa

SEQ ID NO: 2768363 - DNA, 25 bp, Homo sapien
tctcaaaaggcaaggtgtacgatcc

SEQ ID NO: 2768364 - DNA, 25 bp, Homo sapien
taaagctaacgacgacctgggacag

SEQ ID NO: 2768365 - DNA, 25 bp, Homo sapien
tgttccccgcactgaggagacggaa

SEQ ID NO: 2768366 - DNA, 25 bp, Homo sapien
tcttccacaggcgagtctagagttc

SEQ ID NO: 2768367 - DNA, 25 bp, Homo sapien
cccttggattcagacgccgattcgc

SEQ ID NO: 2768368 - DNA, 25 bp, Homo sapien
ggattatagtctctcgccacagcgg

SEQ ID NO: 2768369 - DNA, 25 bp, Homo sapien
ggttctgtagaaacttgaagtctta

SEQ ID NO: 2768370 - DNA, 25 bp, Homo sapien
cagaagtaatcggtcaggtgcaggt

SEQ ID NO: 2768371 - DNA, 25 bp, Homo sapien
gtgcaggttctgtagaaacttgaag

SEQ ID NO: 2768372 - DNA, 25 bp, Homo sapien
gcagagactttcagaagtaatcggt

SEQ ID NO: 2768373 - DNA, 25 bp, Homo sapien
aaaaagaacagtatgggccatgcac

SEQ ID NO: 2768374 - DNA, 25 bp, Homo sapien
gaacgaaataaccaacaacaatata

SEQ ID NO: 2768375 - DNA, 25 bp, Homo sapien
aatataaccccacctacctgaatga

SEQ ID NO: 2768376 - DNA, 25 bp, Homo sapien
ggaaccaggactctatatcctgaat

SEQ ID NO: 2768377 - DNA, 25 bp, Homo sapien
agggtaactgatttgaactacagat

SEQ ID NO: 2768378 - DNA, 25 bp, Homo sapien
tgtggataaccatttcatgactact

SEQ ID NO: 2768379 - DNA, 25 bp, Homo sapien
ccttgtggataaccatttcatgact

SEQ ID NO: 2768380 - DNA, 25 bp, Homo sapien
ttcaagtttatcttgacctaacaag

SEQ ID NO: 2768381 - DNA, 25 bp, Homo sapien
agtaagtctgattgattaacctcat

SEQ ID NO: 2768382 - DNA, 25 bp, Homo sapien
aatcccttagataacaatgctaggc

SEQ ID NO: 2768383 - DNA, 25 bp, Homo sapien
aaaaaacagctaggactctggaatg

SEQ ID NO: 2768384 - DNA, 25 bp, Homo sapien
cactgtatcctcaacaactgctggt

SEQ ID NO: 2768385 - DNA, 25 bp, Homo sapien
cctactggactctaaggtctgtgag

SEQ ID NO: 2768386 - DNA, 25 bp, Homo sapien
tatgctataacacatggtcatttga

SEQ ID NO: 2768387 - DNA, 25 bp, Homo sapien
catgttatgattagttcattgacca

SEQ ID NO: 2768388 - DNA, 25 bp, Homo sapien
tctgtgtttcacagtaagtttactt

SEQ ID NO: 2768389 - DNA, 25 bp, Homo sapien
tactctgggatatatggctactaca

SEQ ID NO: 2768390 - DNA, 25 bp, Homo sapien
aatttattttccctggccaggtgca

SEQ ID NO: 2768391 - DNA, 25 bp, Homo sapien
ggagtggggcggatcacctcaggtc

SEQ ID NO: 2768392 - DNA, 25 bp, Homo sapien
agctctttgggaggcggagtggggc

SEQ ID NO: 2768393 - DNA, 25 bp, Homo sapien
caggtggggtggtgaatgcctgtaa

SEQ ID NO: 2768394 - DNA, 25 bp, Homo sapien
taaaatagtaagtagtaccacatag

SEQ ID NO: 2768395 - DNA, 25 bp, Homo sapien
tagcatgtgaaaaatctgttcttga

SEQ ID NO: 2768396 - DNA, 25 bp, Homo sapien
tggagaggtgccactctctagggac

SEQ ID NO: 2768397 - DNA, 25 bp, Homo sapien
gttcttgaatagcaggcagggaaaa

SEQ ID NO: 2768398 - DNA, 25 bp, Homo sapien
tatattagtctttagcacctagctc

SEQ ID NO: 2768399 - DNA, 25 bp, Homo sapien
ccatatgctctgtctaaagtgttta

SEQ ID NO: 2768400 - DNA, 25 bp, Homo sapien
tgcaggctccaattgacttttctgg

SEQ ID NO: 2768401 - DNA, 25 bp, Homo sapien
ggttacatgtaagtactgcagtatt

SEQ ID NO: 2768402 - DNA, 25 bp, Homo sapien
caacaactagccaggcattatggtg

SEQ ID NO: 2768403 - DNA, 25 bp, Homo sapien
aacaactagccaggcattatggtgt

SEQ ID NO: 2768404 - DNA, 25 bp, Homo sapien
acaactagccaggcattatggtgtg

SEQ ID NO: 2768405 - DNA, 25 bp, Homo sapien
tatatatatgaattgattagtagaa

SEQ ID NO: 2768406 - DNA, 25 bp, Homo sapien
atataattcagattatgggcctggg

SEQ ID NO: 2768407 - DNA, 25 bp, Homo sapien
tggggtcctgtgagccttttaatag

SEQ ID NO: 2768408 - DNA, 25 bp, Homo sapien
tatgaattgattagtagaagacaat

SEQ ID NO: 2768409 - DNA, 25 bp, Homo sapien
ttcatcacccttaggttgcagcatg

SEQ ID NO: 2768410 - DNA, 25 bp, Homo sapien
tgactcctgataacctaaaatttaa

SEQ ID NO: 2768411 - DNA, 25 bp, Homo sapien
tactggatatgactggtttgagcaa

SEQ ID NO: 2768412 - DNA, 25 bp, Homo sapien
catgtttcaggctaaagcataacaa

SEQ ID NO: 2768413 - DNA, 25 bp, Homo sapien
tgttatgttactctggttgctgtca

SEQ ID NO: 2768414 - DNA, 25 bp, Homo sapien
ggcaggaagaatttgcggttcatag

SEQ ID NO: 2768415 - DNA, 25 bp, Homo sapien
aacctagtacattgaagctgtctgc

SEQ ID NO: 2768416 - DNA, 25 bp, Homo sapien
tcagaaaagaccaaactagaatgtg

SEQ ID NO: 2768417 - DNA, 25 bp, Homo sapien
agattcctagactcaaaccttcttc

SEQ ID NO: 2768418 - DNA, 25 bp, Homo sapien
tctcagattcctagactcaaacctt

SEQ ID NO: 2768419 - DNA, 25 bp, Homo sapien
gatgcagtttttgcgtgttgtccag

SEQ ID NO: 2768420 - DNA, 25 bp, Homo sapien
ttagataaaaccaatacgacattta

SEQ ID NO: 2768421 - DNA, 25 bp, Homo sapien
caagaggacccaaataacacttcac

SEQ ID NO: 2768422 - DNA, 25 bp, Homo sapien
gtttagactctgaagagcactctca

SEQ ID NO: 2768423 - DNA, 25 bp, Homo sapien
cattagtagtaattacttgaactta

SEQ ID NO: 2768424 - DNA, 25 bp, Homo sapien
gcactctcataattctagacatatt

SEQ ID NO: 2768425 - DNA, 25 bp, Homo sapien
gaatgacagtagtgacccaggatga

SEQ ID NO: 2768426 - DNA, 25 bp, Homo sapien
tatcagttttgtaacagtagcacac

SEQ ID NO: 2768427 - DNA, 25 bp, Homo sapien
tgaaggcaacattagagtagtctgg

SEQ ID NO: 2768428 - DNA, 25 bp, Homo sapien
aacgtggtcctcagactggctgcta

SEQ ID NO: 2768429 - DNA, 25 bp, Homo sapien
ccaaactactgccatagaaaacatt

SEQ ID NO: 2768430 - DNA, 25 bp, Homo sapien
tagatgatggctaacgtctgtttca

SEQ ID NO: 2768431 - DNA, 25 bp, Homo sapien
tactagcccctaatttagatgatgg

SEQ ID NO: 2768432 - DNA, 25 bp, Homo sapien
taggaatttgacaatcttgcttgaa

SEQ ID NO: 2768433 - DNA, 25 bp, Homo sapien
atatgttaaccccttggcgctggcg

SEQ ID NO: 2768434 - DNA, 25 bp, Homo sapien
caaactggtgccttgggtagacact

SEQ ID NO: 2768435 - DNA, 25 bp, Homo sapien
cagactctacggagttggcagcaca

SEQ ID NO: 2768436 - DNA, 25 bp, Homo sapien
caatggaagtgtgccgggaaatccc

SEQ ID NO: 2768437 - DNA, 25 bp, Homo sapien
tcttcagaactgtggatatggataa

SEQ ID NO: 2768438 - DNA, 25 bp, Homo sapien
taaaactcatcagattacccacttg

SEQ ID NO: 2768439 - DNA, 25 bp, Homo sapien
tacccaccacttttagttgcacaga

SEQ ID NO: 2768440 - DNA, 25 bp, Homo sapien
aaattcatccttgtcactacctgtg

SEQ ID NO: 2768441 - DNA, 25 bp, Homo sapien
actctgttacccaggtgcaatctct

SEQ ID NO: 2768442 - DNA, 25 bp, Homo sapien
ctgttacccaggtgcaatctctgct

SEQ ID NO: 2768443 - DNA, 25 bp, Homo sapien
caagtgattctcatgccttagcctc

SEQ ID NO: 2768444 - DNA, 25 bp, Homo sapien
caccgcaaccttcgcctcccagatt

SEQ ID NO: 2768445 - DNA, 25 bp, Homo sapien
ccagtggcgtgttgttccccctatg

SEQ ID NO: 2768446 - DNA, 25 bp, Homo sapien
tatttgtccagtctatgatggacat

SEQ ID NO: 2768447 - DNA, 25 bp, Homo sapien
tgtaaaccgccgtgcccagcaattt

SEQ ID NO: 2768448 - DNA, 25 bp, Homo sapien
atgggatctccctttgtttgttgcc

SEQ ID NO: 2768449 - DNA, 25 bp, Homo sapien
ggtgccactaggacttctgcccaat

SEQ ID NO: 2768450 - DNA, 25 bp, Homo sapien
tataggcacaagctgggtcattccc

SEQ ID NO: 2768451 - DNA, 25 bp, Homo sapien
tcatcagggtctctacgtcacaagg

SEQ ID NO: 2768452 - DNA, 25 bp, Homo sapien
taccacagaagttgattgcaggccc

SEQ ID NO: 2768453 - DNA, 25 bp, Homo sapien
agtacatggtgattatttgaattgt

SEQ ID NO: 2768454 - DNA, 25 bp, Homo sapien
aagctataatggcttatcattagtt

SEQ ID NO: 2768455 - DNA, 25 bp, Homo sapien
aaatggtataagctataatggctta

SEQ ID NO: 2768456 - DNA, 25 bp, Homo sapien
agcaagacataaagcatagtacatg

SEQ ID NO: 2768457 - DNA, 25 bp, Homo sapien
cagtgtgtttgctccttgtccatcc

SEQ ID NO: 2768458 - DNA, 25 bp, Homo sapien
aagagaggtcgtctttccttgccta

SEQ ID NO: 2768459 - DNA, 25 bp, Homo sapien
tgtccatccaccagtcctcacaagt

SEQ ID NO: 2768460 - DNA, 25 bp, Homo sapien
gaagtaggtagcaactccaaagcat

SEQ ID NO: 2768461 - DNA, 25 bp, Homo sapien
taaggttgatggcaaggtacgaact

SEQ ID NO: 2768462 - DNA, 25 bp, Homo sapien
tgatggcaaggtacgaactgatata

SEQ ID NO: 2768463 - DNA, 25 bp, Homo sapien
gttcattaaggttgatggcaaggta

SEQ ID NO: 2768464 - DNA, 25 bp, Homo sapien
tgcatgcaggggttcattaaggttg

SEQ ID NO: 2768465 - DNA, 25 bp, Homo sapien
taagtacaaattgggtaaagtgaga

SEQ ID NO: 2768466 - DNA, 25 bp, Homo sapien
gctaagtacaaattgggtaaagtga

SEQ ID NO: 2768467 - DNA, 25 bp, Homo sapien
tgacaagacgggagataatttccat

SEQ ID NO: 2768468 - DNA, 25 bp, Homo sapien
ttgacaagacgggagataatttcca

SEQ ID NO: 2768469 - DNA, 25 bp, Homo sapien
ggtaaatgataccattcagactgat

SEQ ID NO: 2768470 - DNA, 25 bp, Homo sapien
aaggtaaatgataccattcagactg

SEQ ID NO: 2768471 - DNA, 25 bp, Homo sapien
tcatcaagttcaacactggtacact

SEQ ID NO: 2768472 - DNA, 25 bp, Homo sapien
tcaacactggtacactggtaacctg

SEQ ID NO: 2768473 - DNA, 25 bp, Homo sapien
gatcttttgacgtggttcacatgaa

SEQ ID NO: 2768474 - DNA, 25 bp, Homo sapien
tggcaacagctttgctactcgactt

SEQ ID NO: 2768475 - DNA, 25 bp, Homo sapien
cgaggaaagggtatctgcctcacta

SEQ ID NO: 2768476 - DNA, 25 bp, Homo sapien
tgggaataactggtgtgatcaccaa

SEQ ID NO: 2768477 - DNA, 25 bp, Homo sapien
tgctaacagggaaatatatagcagt

SEQ ID NO: 2768478 - DNA, 25 bp, Homo sapien
gaaagacattataaagatcaaagca

SEQ ID NO: 2768479 - DNA, 25 bp, Homo sapien
gtgctaacagggaaatatatagcag

SEQ ID NO: 2768480 - DNA, 25 bp, Homo sapien
aggaaagacattataaagatcaaag

SEQ ID NO: 2768481 - DNA, 25 bp, Homo sapien
aaaatgagggaggagtcgctccttt

SEQ ID NO: 2768482 - DNA, 25 bp, Homo sapien
gaaattgttcttgatctattcagga

SEQ ID NO: 2768483 - DNA, 25 bp, Homo sapien
tgggaggctatttgtaagtgactca

SEQ ID NO: 2768484 - DNA, 25 bp, Homo sapien
catttctgattgtatctggttcttc

SEQ ID NO: 2768485 - DNA, 25 bp, Homo sapien
tcctccaaggcttcaggctacaggg

SEQ ID NO: 2768486 - DNA, 25 bp, Homo sapien
tagaaggcagctgaattaccatacc

SEQ ID NO: 2768487 - DNA, 25 bp, Homo sapien
tcctaggctaaaccctgcataggtg

SEQ ID NO: 2768488 - DNA, 25 bp, Homo sapien
tctagaggccggagtcatattccct

SEQ ID NO: 2768489 - DNA, 25 bp, Homo sapien
gaaccacattactgaggtgctggcc

SEQ ID NO: 2768490 - DNA, 25 bp, Homo sapien
tgcttctgtcccttaaacctgttaa

SEQ ID NO: 2768491 - DNA, 25 bp, Homo sapien
aacttggcttgaaaggtacttatca

SEQ ID NO: 2768492 - DNA, 25 bp, Homo sapien
gaaagtaggttatgcaaacttggct

SEQ ID NO: 2768493 - DNA, 25 bp, Homo sapien
cagtgctctcagacacgctgtccac

SEQ ID NO: 2768494 - DNA, 25 bp, Homo sapien
acacgctgtccacaccgcccacccc

SEQ ID NO: 2768495 - DNA, 25 bp, Homo sapien
ccccaaaaggatgctctggctcttc

SEQ ID NO: 2768496 - DNA, 25 bp, Homo sapien
caccccaaaaggatgctctggctct

SEQ ID NO: 2768497 - DNA, 25 bp, Homo sapien
tcatgaagaatcttatggatttctg

SEQ ID NO: 2768498 - DNA, 25 bp, Homo sapien
tctgaaggtatcgtccagggactca

SEQ ID NO: 2768499 - DNA, 25 bp, Homo sapien
ttatggatttctgaaggtatcgtcc

SEQ ID NO: 2768500 - DNA, 25 bp, Homo sapien
gaagaatcttatggatttctgaagg

SEQ ID NO: 2768501 - DNA, 25 bp, Homo sapien
agtctcctctctttcatactctaca

SEQ ID NO: 2768502 - DNA, 25 bp, Homo sapien
cttggtttgaggtgcaagcccagca

SEQ ID NO: 2768503 - DNA, 25 bp, Homo sapien
tggtttgaggtgcaagcccagcact

SEQ ID NO: 2768504 - DNA, 25 bp, Homo sapien
cagcacttccatgtttttttgtatg

SEQ ID NO: 2768505 - DNA, 25 bp, Homo sapien
gcccagcacttccatgtttttttgt

SEQ ID NO: 2768506 - DNA, 25 bp, Homo sapien
tgccccactggacagtgaaagcttt

SEQ ID NO: 2768507 - DNA, 25 bp, Homo sapien
ctgccccactggacagtgaaagctt

SEQ ID NO: 2768508 - DNA, 25 bp, Homo sapien
gaaggtaactggagactgcgtagcc

SEQ ID NO: 2768509 - DNA, 25 bp, Homo sapien
taactggagactgcgtagcctttct

SEQ ID NO: 2768510 - DNA, 25 bp, Homo sapien
ggagactgcgtagcctttcttactg

SEQ ID NO: 2768511 - DNA, 25 bp, Homo sapien
actggagactgcgtagcctttctta

SEQ ID NO: 2768512 - DNA, 25 bp, Homo sapien
ggaatcagtcttgcctggatttccc

SEQ ID NO: 2768513 - DNA, 25 bp, Homo sapien
tctcccaaacactgggggacctgaa

SEQ ID NO: 2768514 - DNA, 25 bp, Homo sapien
gaaaaggtctggaatcagtcttgcc

SEQ ID NO: 2768515 - DNA, 25 bp, Homo sapien
tgaaacttctgaatgtagccaggtg

SEQ ID NO: 2768516 - DNA, 25 bp, Homo sapien
caaggtgagccttgaggttgcccaa

SEQ ID NO: 2768517 - DNA, 25 bp, Homo sapien
aaaactgtgaccatgttgattctct

SEQ ID NO: 2768518 - DNA, 25 bp, Homo sapien
gacttcctcttatggatataactcg

SEQ ID NO: 2768519 - DNA, 25 bp, Homo sapien
gacttttccaggtcgatttattaga

SEQ ID NO: 2768520 - DNA, 25 bp, Homo sapien
gctgaatgagcataactgggcaggt

SEQ ID NO: 2768521 - DNA, 25 bp, Homo sapien
gaatgagcataactgggcaggtctg

SEQ ID NO: 2768522 - DNA, 25 bp, Homo sapien
ctacagctgaatgagcataactggg

SEQ ID NO: 2768523 - DNA, 25 bp, Homo sapien
gaaagggaagtggtaagcagctggg

SEQ ID NO: 2768524 - DNA, 25 bp, Homo sapien
gctgggtttgttaggcaatggtttc

SEQ ID NO: 2768525 - DNA, 25 bp, Homo sapien
tcagataacagttcattcatcagac

SEQ ID NO: 2768526 - DNA, 25 bp, Homo sapien
tggtagctgtactgactcagataac

SEQ ID NO: 2768527 - DNA, 25 bp, Homo sapien
gacaactggaagactgagtagggct

SEQ ID NO: 2768528 - DNA, 25 bp, Homo sapien
cgtacgcttgtgagattcgacgact

SEQ ID NO: 2768529 - DNA, 25 bp, Homo sapien
gtgagattcgacgactatagtgttc

SEQ ID NO: 2768530 - DNA, 25 bp, Homo sapien
cgcttgtgagattcgacgactatag

SEQ ID NO: 2768531 - DNA, 25 bp, Homo sapien
ttcgacgactatagtgttcagagag

SEQ ID NO: 2768532 - DNA, 25 bp, Homo sapien
catccttctattcatcagatttctg

SEQ ID NO: 2768533 - DNA, 25 bp, Homo sapien
gttatggtctctggagtatttccca

SEQ ID NO: 2768534 - DNA, 25 bp, Homo sapien
aaaaaggctagtgagtctcatcatt

SEQ ID NO: 2768535 - DNA, 25 bp, Homo sapien
taggcagtattattaaaggtacttg

SEQ ID NO: 2768536 - DNA, 25 bp, Homo sapien
gtctcagccttatttcccttgaagt

SEQ ID NO: 2768537 - DNA, 25 bp, Homo sapien
gccttatttcccttgaagtcatgta

SEQ ID NO: 2768538 - DNA, 25 bp, Homo sapien
ttttgtctcagccttatttcccttg

SEQ ID NO: 2768539 - DNA, 25 bp, Homo sapien
cttatttcccttgaagtcatgtaaa

SEQ ID NO: 2768540 - DNA, 25 bp, Homo sapien
gaaaaatatacctgacctagcctgg

SEQ ID NO: 2768541 - DNA, 25 bp, Homo sapien
gttctgttgatacatgactggacaa

SEQ ID NO: 2768542 - DNA, 25 bp, Homo sapien
cctagcctggttatgtctgtattta

SEQ ID NO: 2768543 - DNA, 25 bp, Homo sapien
ccatttggcgttttaatggaacagt

SEQ ID NO: 2768544 - DNA, 25 bp, Homo sapien
gccaatgactctcattgaaaattaa

SEQ ID NO: 2768545 - DNA, 25 bp, Homo sapien
tggctttaatacacatagttggttg

SEQ ID NO: 2768546 - DNA, 25 bp, Homo sapien
ggaagaactccaattggtcacccaa

SEQ ID NO: 2768547 - DNA, 25 bp, Homo sapien
catagttggttgtcgcaactgccaa

SEQ ID NO: 2768548 - DNA, 25 bp, Homo sapien
ttaaaatgctatagccatcattagc

SEQ ID NO: 2768549 - DNA, 25 bp, Homo sapien
tcctcctcttgttaaaatgctatag

SEQ ID NO: 2768550 - DNA, 25 bp, Homo sapien
tcttgttaaaatgctatagccatca

SEQ ID NO: 2768551 - DNA, 25 bp, Homo sapien
cctcttgttaaaatgctatagccat

SEQ ID NO: 2768552 - DNA, 25 bp, Homo sapien
gaaaggatcatgttcttgccctctc

SEQ ID NO: 2768553 - DNA, 25 bp, Homo sapien
tctgccagctcatttaagtactttg

SEQ ID NO: 2768554 - DNA, 25 bp, Homo sapien
tgaatgtctgccagaataatgctga

SEQ ID NO: 2768555 - DNA, 25 bp, Homo sapien
ctgggacagaaaggatcatgttctt

SEQ ID NO: 2768556 - DNA, 25 bp, Homo sapien
cactgatataacttggtcttagagc

SEQ ID NO: 2768557 - DNA, 25 bp, Homo sapien
tacaagaactactgtgattgccttc

SEQ ID NO: 2768558 - DNA, 25 bp, Homo sapien
gaaaagttgaaatcgcagaatgcag

SEQ ID NO: 2768559 - DNA, 25 bp, Homo sapien
tactgcgtgtcaataggttgaactc

SEQ ID NO: 2768560 - DNA, 25 bp, Homo sapien
cccagcctctaaattttcctcacaa

SEQ ID NO: 2768561 - DNA, 25 bp, Homo sapien
tgcccagcctctaaattttcctcac

SEQ ID NO: 2768562 - DNA, 25 bp, Homo sapien
agcctctaaattttcctcacaatgg

SEQ ID NO: 2768563 - DNA, 25 bp, Homo sapien
taaattttcctcacaatggtgcttt

SEQ ID NO: 2768564 - DNA, 25 bp, Homo sapien
acccaacagatctcgtgaaatagtg

SEQ ID NO: 2768565 - DNA, 25 bp, Homo sapien
gcaagaccctcctgcctgtaaaatc

SEQ ID NO: 2768566 - DNA, 25 bp, Homo sapien
aaacacctccgtgattaaattatct

SEQ ID NO: 2768567 - DNA, 25 bp, Homo sapien
caggatggggcaaaacacctccgtg

SEQ ID NO: 2768568 - DNA, 25 bp, Homo sapien
gagactgaacaatttataaacgaaa

SEQ ID NO: 2768569 - DNA, 25 bp, Homo sapien
atttttacagtagcaccccactctc

SEQ ID NO: 2768570 - DNA, 25 bp, Homo sapien
cttacactgctaaataagacatacc

SEQ ID NO: 2768571 - DNA, 25 bp, Homo sapien
cacataatggcgggaaggagaagaa

SEQ ID NO: 2768572 - DNA, 25 bp, Homo sapien
gttctgttaagccaagttcttcact

SEQ ID NO: 2768573 - DNA, 25 bp, Homo sapien
tgttaagccaagttcttcactggaa

SEQ ID NO: 2768574 - DNA, 25 bp, Homo sapien
gaggtgcccatagcttgttctgtta

SEQ ID NO: 2768575 - DNA, 25 bp, Homo sapien
tgcccatagcttgttctgttaagcc

SEQ ID NO: 2768576 - DNA, 25 bp, Homo sapien
ctgcaatatcagtcaatccagtcat

SEQ ID NO: 2768577 - DNA, 25 bp, Homo sapien
cacaattcatcactgctattcatac

SEQ ID NO: 2768578 - DNA, 25 bp, Homo sapien
ctctcacacaattcatcactgctat

SEQ ID NO: 2768579 - DNA, 25 bp, Homo sapien
cacacaattcatcactgctattcat

SEQ ID NO: 2768580 - DNA, 25 bp, Homo sapien
ctcacacaattcatcactgctattc

SEQ ID NO: 2768581 - DNA, 25 bp, Homo sapien
tcttccaataacgactgggctgcat

SEQ ID NO: 2768582 - DNA, 25 bp, Homo sapien
tgtaatatgtcagaaggcacaaccc

SEQ ID NO: 2768583 - DNA, 25 bp, Homo sapien
tcatttgtcaatcctccccagagaa

SEQ ID NO: 2768584 - DNA, 25 bp, Homo sapien
gcccctgctggcctattcacgaaaa

SEQ ID NO: 2768585 - DNA, 25 bp, Homo sapien
gaaaattcaggttctgaagtctcct

SEQ ID NO: 2768586 - DNA, 25 bp, Homo sapien
gaagtagtattctgatcactggaac

SEQ ID NO: 2768587 - DNA, 25 bp, Homo sapien
cggcagtaggaaacacacaggtttt

SEQ ID NO: 2768588 - DNA, 25 bp, Homo sapien
gctgacagctgaatcggcagtagga

SEQ ID NO: 2768589 - DNA, 25 bp, Homo sapien
gccagaagagaattcaatgtgatcc

SEQ ID NO: 2768590 - DNA, 25 bp, Homo sapien
ccagaagagaattcaatgtgatcca

SEQ ID NO: 2768591 - DNA, 25 bp, Homo sapien
aattttctgaagcttagcactgaga

SEQ ID NO: 2768592 - DNA, 25 bp, Homo sapien
tgcagccgtttccacaatagataat

SEQ ID NO: 2768593 - DNA, 25 bp, Homo sapien
tctgtcctttgaatcggaactctgg

SEQ ID NO: 2768594 - DNA, 25 bp, Homo sapien
tctgtattgctagcaactgctcgtc

SEQ ID NO: 2768595 - DNA, 25 bp, Homo sapien
tctgctgtatgtctgatggtgtagg

SEQ ID NO: 2768596 - DNA, 25 bp, Homo sapien
gctccttcacttctgtaatgcctgc

SEQ ID NO: 2768597 - DNA, 25 bp, Homo sapien
tgtaggtgaggtgacactaggctcc

SEQ ID NO: 2768598 - DNA, 25 bp, Homo sapien
taatgcctgctctcaagctttttcc

SEQ ID NO: 2768599 - DNA, 25 bp, Homo sapien
aataaatccatagaggaattggctg

SEQ ID NO: 2768600 - DNA, 25 bp, Homo sapien
taaatccatagaggaattggctgat

SEQ ID NO: 2768601 - DNA, 25 bp, Homo sapien
aaatccatagaggaattggctgatt

SEQ ID NO: 2768602 - DNA, 25 bp, Homo sapien
ataaatccatagaggaattggctga

SEQ ID NO: 2768603 - DNA, 25 bp, Homo sapien
gccatataatgtaactctgcagacg

SEQ ID NO: 2768604 - DNA, 25 bp, Homo sapien
taacattatcatttgaaggctcttc

SEQ ID NO: 2768605 - DNA, 25 bp, Homo sapien
gctagatgatcgctttgctgtttga

SEQ ID NO: 2768606 - DNA, 25 bp, Homo sapien
agtaactgaagctgccatataatgt

SEQ ID NO: 2768607 - DNA, 25 bp, Homo sapien
gaagatcattagcttcaatgtcaat

SEQ ID NO: 2768608 - DNA, 25 bp, Homo sapien
gtagaagatcattagcttcaatgtc

SEQ ID NO: 2768609 - DNA, 25 bp, Homo sapien
tcacatttatataagtatgtccaac

SEQ ID NO: 2768610 - DNA, 25 bp, Homo sapien
agatcattagcttcaatgtcaatca

SEQ ID NO: 2768611 - DNA, 25 bp, Homo sapien
agccaaaacacataaaaccaaagag

SEQ ID NO: 2768612 - DNA, 25 bp, Homo sapien
tgagccaaaacacataaaaccaaag

SEQ ID NO: 2768613 - DNA, 25 bp, Homo sapien
cacataaaaccaaagagggttacat

SEQ ID NO: 2768614 - DNA, 25 bp, Homo sapien
gagccaaaacacataaaaccaaaga

SEQ ID NO: 2768615 - DNA, 25 bp, Homo sapien
aatacattttagcgcaaaggtatta

SEQ ID NO: 2768616 - DNA, 25 bp, Homo sapien
acattttagcgcaaaggtattatta

SEQ ID NO: 2768617 - DNA, 25 bp, Homo sapien
tacattttagcgcaaaggtattatt

SEQ ID NO: 2768618 - DNA, 25 bp, Homo sapien
ataatacattttagcgcaaaggtat

SEQ ID NO: 2768619 - DNA, 25 bp, Homo sapien
tgaggagcagtcaaaggctcatgtt

SEQ ID NO: 2768620 - DNA, 25 bp, Homo sapien
actgtatgaggtattgagggtgacc

SEQ ID NO: 2768621 - DNA, 25 bp, Homo sapien
gagggtgaccaaggtttctctgaca

SEQ ID NO: 2768622 - DNA, 25 bp, Homo sapien
atagacatctgggaccaagagctga

SEQ ID NO: 2768623 - DNA, 25 bp, Homo sapien
caacttcttgagaagtagcttcctt

SEQ ID NO: 2768624 - DNA, 25 bp, Homo sapien
tggtaccacattcagaaacaacttc

SEQ ID NO: 2768625 - DNA, 25 bp, Homo sapien
gcttggtaccacattcagaaacaac

SEQ ID NO: 2768626 - DNA, 25 bp, Homo sapien
acttcttgagaagtagcttccttat

SEQ ID NO: 2768627 - DNA, 25 bp, Homo sapien
tcttgacttcctatagctttctttt

SEQ ID NO: 2768628 - DNA, 25 bp, Homo sapien
ctgtatttgtacttgcatcttgact

SEQ ID NO: 2768629 - DNA, 25 bp, Homo sapien
gcatcttgacttcctatagctttct

SEQ ID NO: 2768630 - DNA, 25 bp, Homo sapien
tgtatttgtacttgcatcttgactt

SEQ ID NO: 2768631 - DNA, 25 bp, Homo sapien
ctaacagattaccaggagcccagca

SEQ ID NO: 2768632 - DNA, 25 bp, Homo sapien
aagtaatcattgagaagctaacaga

SEQ ID NO: 2768633 - DNA, 25 bp, Homo sapien
gaagctaacagattaccaggagccc

SEQ ID NO: 2768634 - DNA, 25 bp, Homo sapien
tcattgagaagctaacagattacca

SEQ ID NO: 2768635 - DNA, 25 bp, Homo sapien
catccaaaggatgggaaccacaatg

SEQ ID NO: 2768636 - DNA, 25 bp, Homo sapien
tcgaagtcatccaaaggatgggaac

SEQ ID NO: 2768637 - DNA, 25 bp, Homo sapien
caaaaggaacgtcgaagtcatccaa

SEQ ID NO: 2768638 - DNA, 25 bp, Homo sapien
gatgggaaccacaatgttcttgttg

SEQ ID NO: 2768639 - DNA, 25 bp, Homo sapien
ttttcatgtaccatcaagttgcttt

SEQ ID NO: 2768640 - DNA, 25 bp, Homo sapien
aggcagatgctctaaactgcagttt

SEQ ID NO: 2768641 - DNA, 25 bp, Homo sapien
taaactgcagtttttcatgtaccat

SEQ ID NO: 2768642 - DNA, 25 bp, Homo sapien
cagatgctctaaactgcagtttttc

SEQ ID NO: 2768643 - DNA, 25 bp, Homo sapien
tatggaattctctggtcgaaaagtc

SEQ ID NO: 2768644 - DNA, 25 bp, Homo sapien
ttatggaattctctggtcgaaaagt

SEQ ID NO: 2768645 - DNA, 25 bp, Homo sapien
tggaattctctggtcgaaaagtcac

SEQ ID NO: 2768646 - DNA, 25 bp, Homo sapien
atggaattctctggtcgaaaagtca

SEQ ID NO: 2768647 - DNA, 25 bp, Homo sapien
gacctttagaagttgaaggtgtcca

SEQ ID NO: 2768648 - DNA, 25 bp, Homo sapien
tgtttaaacgcaatgaggttttcaa

SEQ ID NO: 2768649 - DNA, 25 bp, Homo sapien
tatgtgttagtttctgttggctttg

SEQ ID NO: 2768650 - DNA, 25 bp, Homo sapien
attatgtgttagtttctgttggctt

SEQ ID NO: 2768651 - DNA, 25 bp, Homo sapien
aggttttcaagtgggataagttgtg

SEQ ID NO: 2768652 - DNA, 25 bp, Homo sapien
taaaggaatactcccatgtggaaca

SEQ ID NO: 2768653 - DNA, 25 bp, Homo sapien
gggtccctggcttaacatcaaatag

SEQ ID NO: 2768654 - DNA, 25 bp, Homo sapien
cagcaggagctggataaaacgaagt

SEQ ID NO: 2768655 - DNA, 25 bp, Homo sapien
gcaggtatagtaacggaagtccaaa

SEQ ID NO: 2768656 - DNA, 25 bp, Homo sapien
ccagtactattttgaccagatggga

SEQ ID NO: 2768657 - DNA, 25 bp, Homo sapien
taaatgcacagactgagactgctgt

SEQ ID NO: 2768658 - DNA, 25 bp, Homo sapien
gattcttggctttcccctaaatgca

SEQ ID NO: 2768659 - DNA, 25 bp, Homo sapien
ctgggagattagcaaaggatgatcc

SEQ ID NO: 2768660 - DNA, 25 bp, Homo sapien
taacggactccgaacaatctggtaa

SEQ ID NO: 2768661 - DNA, 25 bp, Homo sapien
aacaatctggtaactgagccgtgaa

SEQ ID NO: 2768662 - DNA, 25 bp, Homo sapien
tcttgcagcatctgcctaacggact

SEQ ID NO: 2768663 - DNA, 25 bp, Homo sapien
ggtaactgagccgtgaattcatttc

SEQ ID NO: 2768664 - DNA, 25 bp, Homo sapien
tggttgtgaagcaacattgactcca

SEQ ID NO: 2768665 - DNA, 25 bp, Homo sapien
gaagcaacattgactccatttgata

SEQ ID NO: 2768666 - DNA, 25 bp, Homo sapien
tgactccatttgatatcagaagtgg

SEQ ID NO: 2768667 - DNA, 25 bp, Homo sapien
caggtggttgtgaagcaacattgac

SEQ ID NO: 2768668 - DNA, 25 bp, Homo sapien
tgcattcatgcttgcacaagtcact

SEQ ID NO: 2768669 - DNA, 25 bp, Homo sapien
attcatgcttgcacaagtcactggc

SEQ ID NO: 2768670 - DNA, 25 bp, Homo sapien
gcattcatgcttgcacaagtcactg

SEQ ID NO: 2768671 - DNA, 25 bp, Homo sapien
ggtgcattcatgcttgcacaagtca

SEQ ID NO: 2768672 - DNA, 25 bp, Homo sapien
gacagtaggggcaggtataggggta

SEQ ID NO: 2768673 - DNA, 25 bp, Homo sapien
cttgggacagtaggggcaggtatag

SEQ ID NO: 2768674 - DNA, 25 bp, Homo sapien
tacttgcattgattgaggagtggta

SEQ ID NO: 2768675 - DNA, 25 bp, Homo sapien
cccaggatgtgaaaaggcttcgatc

SEQ ID NO: 2768676 - DNA, 25 bp, Homo sapien
gaaatttctgaactcgtatctactt

SEQ ID NO: 2768677 - DNA, 25 bp, Homo sapien
gagtggtatgcccaggatgtgaaaa

SEQ ID NO: 2768678 - DNA, 25 bp, Homo sapien
caggtgattagtaagcaagatattc

SEQ ID NO: 2768679 - DNA, 25 bp, Homo sapien
ggtatgagtgatctatgctcagcca

SEQ ID NO: 2768680 - DNA, 25 bp, Homo sapien
gatctatgctcagccatctaagagt

SEQ ID NO: 2768681 - DNA, 25 bp, Homo sapien
tctttgcattatctaaggtatgagt

SEQ ID NO: 2768682 - DNA, 25 bp, Homo sapien
ttttgttcagtcgatttttcctcca

SEQ ID NO: 2768683 - DNA, 25 bp, Homo sapien
tccataattgtctccagtggttctt

SEQ ID NO: 2768684 - DNA, 25 bp, Homo sapien
tcatcatgcaaatggcaagactggg

SEQ ID NO: 2768685 - DNA, 25 bp, Homo sapien
aagactgggacttctgaaacctcca

SEQ ID NO: 2768686 - DNA, 25 bp, Homo sapien
aagtcatcatgcaaatggcaagact

SEQ ID NO: 2768687 - DNA, 25 bp, Homo sapien
ggacttctgaaacctccaacagatt

SEQ ID NO: 2768688 - DNA, 25 bp, Homo sapien
cttcatagtctgatatgtgcatatc

SEQ ID NO: 2768689 - DNA, 25 bp, Homo sapien
agtctgatatgtgcatatccatttc

SEQ ID NO: 2768690 - DNA, 25 bp, Homo sapien
tttttagtattatgagtgatggaaa

SEQ ID NO: 2768691 - DNA, 25 bp, Homo sapien
cttttatatcaggattttttgcttc

SEQ ID NO: 2768692 - DNA, 25 bp, Homo sapien
gctctccctctcaatattgggtcca

SEQ ID NO: 2768693 - DNA, 25 bp, Homo sapien
gagttgctactgcaactgaaccgcc

SEQ ID NO: 2768694 - DNA, 25 bp, Homo sapien
gacacccagtgtcacgattctctac

SEQ ID NO: 2768695 - DNA, 25 bp, Homo sapien
tccacctggagttgctactgcaact

SEQ ID NO: 2768696 - DNA, 25 bp, Homo sapien
actggactgtactcagaggatgact

SEQ ID NO: 2768697 - DNA, 25 bp, Homo sapien
tatgtagcaaaatagggttgttcca

SEQ ID NO: 2768698 - DNA, 25 bp, Homo sapien
ggatgactcagttataccagaatca

SEQ ID NO: 2768699 - DNA, 25 bp, Homo sapien
acagagtagccttctattagaccac

SEQ ID NO: 2768700 - DNA, 25 bp, Homo sapien
tgatcccttgattaaccagtactga

SEQ ID NO: 2768701 - DNA, 25 bp, Homo sapien
gaatgtcagcatccctggaataagg

SEQ ID NO: 2768702 - DNA, 25 bp, Homo sapien
gattcataggactcaggagcaacaa

SEQ ID NO: 2768703 - DNA, 25 bp, Homo sapien
gaaccagctctaaacacattctggc

SEQ ID NO: 2768704 - DNA, 25 bp, Homo sapien
tacaggaagtgtattttgtgataac

SEQ ID NO: 2768705 - DNA, 25 bp, Homo sapien
gaattgatgttaattccatgtgatt

SEQ ID NO: 2768706 - DNA, 25 bp, Homo sapien
tcatcatcacgttcaaattcccaaa

SEQ ID NO: 2768707 - DNA, 25 bp, Homo sapien
tccttttatcagttggcttatgaat

SEQ ID NO: 2768708 - DNA, 25 bp, Homo sapien
cctagttctgtgagtgtacttctgc

SEQ ID NO: 2768709 - DNA, 25 bp, Homo sapien
tcaaccgacaaagcttcagagaacg

SEQ ID NO: 2768710 - DNA, 25 bp, Homo sapien
gggaatatctgtcaacacctggagc

SEQ ID NO: 2768711 - DNA, 25 bp, Homo sapien
tggatagaatgcatgacaacagaca

SEQ ID NO: 2768712 - DNA, 25 bp, Homo sapien
gcctaagatcgcacagttactgact

SEQ ID NO: 2768713 - DNA, 25 bp, Homo sapien
gagccatgagccgaagtcagcttca

SEQ ID NO: 2768714 - DNA, 25 bp, Homo sapien
taaagcaggtaatactatgcccact

SEQ ID NO: 2768715 - DNA, 25 bp, Homo sapien
tcagagagactgagcaacttgccta

SEQ ID NO: 2768716 - DNA, 25 bp, Homo sapien
ggaaatgctttcacgaaaatttctg

SEQ ID NO: 2768717 - DNA, 25 bp, Homo sapien
taaaggaaccctcacgtcctcagga

SEQ ID NO: 2768718 - DNA, 25 bp, Homo sapien
cacaacacagtgtctgagtctctgg

SEQ ID NO: 2768719 - DNA, 25 bp, Homo sapien
gagagtgatatttgtctcttaaagg

SEQ ID NO: 2768720 - DNA, 25 bp, Homo sapien
gcagttctccaataaggctcaaaat

SEQ ID NO: 2768721 - DNA, 25 bp, Homo sapien
ggcagcattctataagcccattcca

SEQ ID NO: 2768722 - DNA, 25 bp, Homo sapien
taagacagtgctcaatcatacaaga

SEQ ID NO: 2768723 - DNA, 25 bp, Homo sapien
caagaatcaaactccacttcaaggt

SEQ ID NO: 2768724 - DNA, 25 bp, Homo sapien
tattgcctgcaactataggataact

SEQ ID NO: 2768725 - DNA, 25 bp, Homo sapien
gcaactataggataacttatcacgg

SEQ ID NO: 2768726 - DNA, 25 bp, Homo sapien
ttatcacggacatgcagcatccaac

SEQ ID NO: 2768727 - DNA, 25 bp, Homo sapien
taggataacttatcacggacatgca

SEQ ID NO: 2768728 - DNA, 25 bp, Homo sapien
gactatgtccctatttatgagcaaa

SEQ ID NO: 2768729 - DNA, 25 bp, Homo sapien
aatctgagccccaggacatgtaaga

SEQ ID NO: 2768730 - DNA, 25 bp, Homo sapien
gcctggcccttttgttacgtgaatg

SEQ ID NO: 2768731 - DNA, 25 bp, Homo sapien
tatgaaactaagctcatgacaggtg

SEQ ID NO: 2768732 - DNA, 25 bp, Homo sapien
gaaggaagggatcctttcattcgaa

SEQ ID NO: 2768733 - DNA, 25 bp, Homo sapien
taatggaaacttcatcaagcttgtg

SEQ ID NO: 2768734 - DNA, 25 bp, Homo sapien
cctttacagtaattaagtaatgact

SEQ ID NO: 2768735 - DNA, 25 bp, Homo sapien
ccaggtctaaaaaatgcgatacctc

SEQ ID NO: 2768736 - DNA, 25 bp, Homo sapien
ccacgtttcaggaaagggctctaag

SEQ ID NO: 2768737 - DNA, 25 bp, Homo sapien
aatggcatttactaccaggatggta

SEQ ID NO: 2768738 - DNA, 25 bp, Homo sapien
tgctagtgtcacttccagaaagaca

SEQ ID NO: 2768739 - DNA, 25 bp, Homo sapien
aggaagcattaacagcaggcttgca

SEQ ID NO: 2768740 - DNA, 25 bp, Homo sapien
tttcttgcccacctcaactgcaata

SEQ ID NO: 2768741 - DNA, 25 bp, Homo sapien
acctcaactgcaatatataccactg

SEQ ID NO: 2768742 - DNA, 25 bp, Homo sapien
ccgcccggaaaagcaggagaacacg

SEQ ID NO: 2768743 - DNA, 25 bp, Homo sapien
aagaacactgagccgcccggaaaag

SEQ ID NO: 2768744 - DNA, 25 bp, Homo sapien
ttaaaagaagatcatcaccatcttc

SEQ ID NO: 2768745 - DNA, 25 bp, Homo sapien
tttaaaagaagatcatcaccatctt

SEQ ID NO: 2768746 - DNA, 25 bp, Homo sapien
ggacagtacaatggaggagctggaa

SEQ ID NO: 2768747 - DNA, 25 bp, Homo sapien
gaggagctggaagatacaagccgaa

SEQ ID NO: 2768748 - DNA, 25 bp, Homo sapien
gaaatgtctccgaaagaatatctgc

SEQ ID NO: 2768749 - DNA, 25 bp, Homo sapien
cgaatggcactaagccccacagtct

SEQ ID NO: 2768750 - DNA, 25 bp, Homo sapien
cttgtactgaaccaaatagcagatt

SEQ ID NO: 2768751 - DNA, 25 bp, Homo sapien
ctgatgctttcagtacttcttgtac

SEQ ID NO: 2768752 - DNA, 25 bp, Homo sapien
aactgatgctttcagtacttcttgt

SEQ ID NO: 2768753 - DNA, 25 bp, Homo sapien
acttcttgtactgaaccaaatagca

SEQ ID NO: 2768754 - DNA, 25 bp, Homo sapien
aagcttgtattaaacttcttatcca

SEQ ID NO: 2768755 - DNA, 25 bp, Homo sapien
taaagcttgtattaaacttcttatc

SEQ ID NO: 2768756 - DNA, 25 bp, Homo sapien
gttgtcacaagttatcagcaatttg

SEQ ID NO: 2768757 - DNA, 25 bp, Homo sapien
tctatgttgtcacaagttatcagca

SEQ ID NO: 2768758 - DNA, 25 bp, Homo sapien
atgttgtcacaagttatcagcaatt

SEQ ID NO: 2768759 - DNA, 25 bp, Homo sapien
tgtcacaagttatcagcaatttgtt

SEQ ID NO: 2768760 - DNA, 25 bp, Homo sapien
caaagtgttaatacatttgtagaca

SEQ ID NO: 2768761 - DNA, 25 bp, Homo sapien
aaggtttatattaatctgacacgaa

SEQ ID NO: 2768762 - DNA, 25 bp, Homo sapien
catttgtagacatgtataaactttt

SEQ ID NO: 2768763 - DNA, 25 bp, Homo sapien
cgaatcagactatacatacataaca

SEQ ID NO: 2768764 - DNA, 25 bp, Homo sapien
tgtgctggagtcatacggagtggta

SEQ ID NO: 2768765 - DNA, 25 bp, Homo sapien
ggagtcatacggagtggtagattca

SEQ ID NO: 2768766 - DNA, 25 bp, Homo sapien
tctgtgctggagtcatacggagtgg

SEQ ID NO: 2768767 - DNA, 25 bp, Homo sapien
gctggagtcatacggagtggtagat

SEQ ID NO: 2768768 - DNA, 25 bp, Homo sapien
caccttagagtgttgcagaggaata

SEQ ID NO: 2768769 - DNA, 25 bp, Homo sapien
tgtccacacattagagagattctga

SEQ ID NO: 2768770 - DNA, 25 bp, Homo sapien
gaacagctggaaagccacaccaatt

SEQ ID NO: 2768771 - DNA, 25 bp, Homo sapien
cagaggaataagtcgaaaggactgc

SEQ ID NO: 2768772 - DNA, 25 bp, Homo sapien
cacatgacctatacaggctatgcct

SEQ ID NO: 2768773 - DNA, 25 bp, Homo sapien
tctctgttcctcgaaatggtgagtt

SEQ ID NO: 2768774 - DNA, 25 bp, Homo sapien
tatacaggctatgcctactgcaaga

SEQ ID NO: 2768775 - DNA, 25 bp, Homo sapien
tgttcctcgaaatggtgagtttctc

SEQ ID NO: 2768776 - DNA, 25 bp, Homo sapien
atggactggacgactctcactgctg

SEQ ID NO: 2768777 - DNA, 25 bp, Homo sapien
tgctgattggtgaaataggcagcca

SEQ ID NO: 2768778 - DNA, 25 bp, Homo sapien
tgagggggcaaaatgcaaagctgct

SEQ ID NO: 2768779 - DNA, 25 bp, Homo sapien
gaaataggcagccatgaaacgagcc

SEQ ID NO: 2768780 - DNA, 25 bp, Homo sapien
tcaggatgaacaccgcccaccattc

SEQ ID NO: 2768781 - DNA, 25 bp, Homo sapien
ccattccacactcaaaatgagactt

SEQ ID NO: 2768782 - DNA, 25 bp, Homo sapien
caccattccacactcaaaatgagac

SEQ ID NO: 2768783 - DNA, 25 bp, Homo sapien
ttccacactcaaaatgagactttgc

SEQ ID NO: 2768784 - DNA, 25 bp, Homo sapien
ggccaatacaagctgaattataata

SEQ ID NO: 2768785 - DNA, 25 bp, Homo sapien
tacaagctgaattataataggtacc

SEQ ID NO: 2768786 - DNA, 25 bp, Homo sapien
gcataaatccacttatatatacaga

SEQ ID NO: 2768787 - DNA, 25 bp, Homo sapien
tgaattataataggtaccgtacttc

SEQ ID NO: 2768788 - DNA, 25 bp, Homo sapien
ctcagctcaccacaaacctcgcctt

SEQ ID NO: 2768789 - DNA, 25 bp, Homo sapien
tcaccacaaacctcgccttctgggt

SEQ ID NO: 2768790 - DNA, 25 bp, Homo sapien
ctcaccacaaacctcgccttctggg

SEQ ID NO: 2768791 - DNA, 25 bp, Homo sapien
agctcaccacaaacctcgccttctg

SEQ ID NO: 2768792 - DNA, 25 bp, Homo sapien
aaagcactgatataagatttttttc

SEQ ID NO: 2768793 - DNA, 25 bp, Homo sapien
caaggtttaggccatcttcccgcct

SEQ ID NO: 2768794 - DNA, 25 bp, Homo sapien
cactagcaggattagaggacatgcg

SEQ ID NO: 2768795 - DNA, 25 bp, Homo sapien
tggctccaacaatagaaaggtatct

SEQ ID NO: 2768796 - DNA, 25 bp, Homo sapien
aagtgatctgacacatattcatggg

SEQ ID NO: 2768797 - DNA, 25 bp, Homo sapien
gacatgcgtcattcccacttgagaa

SEQ ID NO: 2768798 - DNA, 25 bp, Homo sapien
cagagaggtagaacaaccaactttt

SEQ ID NO: 2768799 - DNA, 25 bp, Homo sapien
aacatactgcattctgtagtcctag

SEQ ID NO: 2768800 - DNA, 25 bp, Homo sapien
taatatacttaatcaccagagaggt

SEQ ID NO: 2768801 - DNA, 25 bp, Homo sapien
cagctcagcaggcaattactatact

SEQ ID NO: 2768802 - DNA, 25 bp, Homo sapien
cgtatctgaagaaaatacgtccttc

SEQ ID NO: 2768803 - DNA, 25 bp, Homo sapien
aattatagctatagaggtggcagta

SEQ ID NO: 2768804 - DNA, 25 bp, Homo sapien
cacacaatccttgagcatcatttaa

SEQ ID NO: 2768805 - DNA, 25 bp, Homo sapien
ggatttctcttgctagctgatcaca

SEQ ID NO: 2768806 - DNA, 25 bp, Homo sapien
tagtgctcaattgacgggagtgtgt

SEQ ID NO: 2768807 - DNA, 25 bp, Homo sapien
gctcaccttaaaagtatgtaagcaa

SEQ ID NO: 2768808 - DNA, 25 bp, Homo sapien
ggaatgcccttggtgtagtgctcaa

SEQ ID NO: 2768809 - DNA, 25 bp, Homo sapien
tgaaacaagaagtaagctcacctta

SEQ ID NO: 2768810 - DNA, 25 bp, Homo sapien
tttctcttcgatttcttgtagagct

SEQ ID NO: 2768811 - DNA, 25 bp, Homo sapien
tgaacagacttttcatatgatccta

SEQ ID NO: 2768812 - DNA, 25 bp, Homo sapien
tcttcgatttcttgtagagcttttt

SEQ ID NO: 2768813 - DNA, 25 bp, Homo sapien
cagacttttcatatgatcctaataa

SEQ ID NO: 2768814 - DNA, 25 bp, Homo sapien
caggaactcttcgatttaattgtgc

SEQ ID NO: 2768815 - DNA, 25 bp, Homo sapien
tgacataacagggacttgacagtag

SEQ ID NO: 2768816 - DNA, 25 bp, Homo sapien
caatctccagtactctgtaggttag

SEQ ID NO: 2768817 - DNA, 25 bp, Homo sapien
tgtaggttagcctgcaaatgacata

SEQ ID NO: 2768818 - DNA, 25 bp, Homo sapien
aatattttaagcacctgtaatcttt

SEQ ID NO: 2768819 - DNA, 25 bp, Homo sapien
atattttaagcacctgtaatctttt

SEQ ID NO: 2768820 - DNA, 25 bp, Homo sapien
gggcccaagcgatcaccctacctca

SEQ ID NO: 2768821 - DNA, 25 bp, Homo sapien
tgggcccaagcgatcaccctacctc

SEQ ID NO: 2768822 - DNA, 25 bp, Homo sapien
tacaatatgggaattgtagctcagt

SEQ ID NO: 2768823 - DNA, 25 bp, Homo sapien
aaactaagctaatagtatcccagta

SEQ ID NO: 2768824 - DNA, 25 bp, Homo sapien
ctggaattagtgctaatagtttcac

SEQ ID NO: 2768825 - DNA, 25 bp, Homo sapien
tctataatgctgagtgctaacagat

SEQ ID NO: 2768826 - DNA, 25 bp, Homo sapien
ctggctgttgcacaggatttactac

SEQ ID NO: 2768827 - DNA, 25 bp, Homo sapien
gagttccaagaccagtttttctgaa

SEQ ID NO: 2768828 - DNA, 25 bp, Homo sapien
gatttactacttgaggatgaatctt

SEQ ID NO: 2768829 - DNA, 25 bp, Homo sapien
aaataggtaccaccaatgagtcttg

SEQ ID NO: 2768830 - DNA, 25 bp, Homo sapien
aataactgacccttttgttgctgag

SEQ ID NO: 2768831 - DNA, 25 bp, Homo sapien
gaaattcctatagtccacgctgcaa

SEQ ID NO: 2768832 - DNA, 25 bp, Homo sapien
cttcaggttgaagaatgtatacacc

SEQ ID NO: 2768833 - DNA, 25 bp, Homo sapien
cacgctgcaagtagacttttctgga

SEQ ID NO: 2768834 - DNA, 25 bp, Homo sapien
aaaaggacataagttgtctggaaag

SEQ ID NO: 2768835 - DNA, 25 bp, Homo sapien
ttccttcatactactacacagcaca

SEQ ID NO: 2768836 - DNA, 25 bp, Homo sapien
tatcatcctttgcatgtatcgtatc

SEQ ID NO: 2768837 - DNA, 25 bp, Homo sapien
gtatcgtatcaaacatagatgcaaa

SEQ ID NO: 2768838 - DNA, 25 bp, Homo sapien
cttggtgttctaacaggctagacct

SEQ ID NO: 2768839 - DNA, 25 bp, Homo sapien
ggctagaccttagggaattcagtga

SEQ ID NO: 2768840 - DNA, 25 bp, Homo sapien
cagtgatcgcaagttcagtcctttg

SEQ ID NO: 2768841 - DNA, 25 bp, Homo sapien
gggacagtgaaatcggctgaacttt

SEQ ID NO: 2768842 - DNA, 25 bp, Homo sapien
gaatcttgaaacgtaaactgctgtg

SEQ ID NO: 2768843 - DNA, 25 bp, Homo sapien
tcatagggtcactatcagaagctga

SEQ ID NO: 2768844 - DNA, 25 bp, Homo sapien
tcagatataacgaggtagggtaacc

SEQ ID NO: 2768845 - DNA, 25 bp, Homo sapien
tcaagaaatcgaagggttgtgacca

SEQ ID NO: 2768846 - DNA, 25 bp, Homo sapien
tatacgttattagtggatgaagagg

SEQ ID NO: 2768847 - DNA, 25 bp, Homo sapien
gagagccacgttttaacatacaagc

SEQ ID NO: 2768848 - DNA, 25 bp, Homo sapien
gaaaaagactatcatgcgtccagct

SEQ ID NO: 2768849 - DNA, 25 bp, Homo sapien
gttagcaattcaccttggcaggtca

SEQ ID NO: 2768850 - DNA, 25 bp, Homo sapien
tcctttaaggctaccacagagagta

SEQ ID NO: 2768851 - DNA, 25 bp, Homo sapien
taccacagagagtaacaaaattcag

SEQ ID NO: 2768852 - DNA, 25 bp, Homo sapien
tcttgttactacatcctttaaggct

SEQ ID NO: 2768853 - DNA, 25 bp, Homo sapien
ctggaaccacgggactcttgttact

SEQ ID NO: 2768854 - DNA, 25 bp, Homo sapien
ctttctgattaagagttactgccag

SEQ ID NO: 2768855 - DNA, 25 bp, Homo sapien
tcttgaaaaggcagaaattagagct

SEQ ID NO: 2768856 - DNA, 25 bp, Homo sapien
cagagatgacagtcttgttgagccc

SEQ ID NO: 2768857 - DNA, 25 bp, Homo sapien
ttactgccagggtaaggccatctct

SEQ ID NO: 2768858 - DNA, 25 bp, Homo sapien
aaatgttaacttcaggcattcccca

SEQ ID NO: 2768859 - DNA, 25 bp, Homo sapien
taacttcaggcattccccagaataa

SEQ ID NO: 2768860 - DNA, 25 bp, Homo sapien
tgccaccgaattgctagaaatgtta

SEQ ID NO: 2768861 - DNA, 25 bp, Homo sapien
cattctcatgccaccgaattgctag

SEQ ID NO: 2768862 - DNA, 25 bp, Homo sapien
aaacagcattcactacagcttcttt

SEQ ID NO: 2768863 - DNA, 25 bp, Homo sapien
agcttctttatcttcggtggaaggc

SEQ ID NO: 2768864 - DNA, 25 bp, Homo sapien
cagcattcactacagcttctttatc

SEQ ID NO: 2768865 - DNA, 25 bp, Homo sapien
ctttatcttcggtggaaggcaagag

SEQ ID NO: 2768866 - DNA, 25 bp, Homo sapien
catacaagtacagtctcaaagagct

SEQ ID NO: 2768867 - DNA, 25 bp, Homo sapien
gacccgccaatgaaaggcttttaga

SEQ ID NO: 2768868 - DNA, 25 bp, Homo sapien
tatgcatccagaaggtgttatgagc

SEQ ID NO: 2768869 - DNA, 25 bp, Homo sapien
tgttatgagcacaattcttttccca

SEQ ID NO: 2768870 - DNA, 25 bp, Homo sapien
ggaaaagctctcctgtagttagtac

SEQ ID NO: 2768871 - DNA, 25 bp, Homo sapien
gaaaagctctcctgtagttagtacc

SEQ ID NO: 2768872 - DNA, 25 bp, Homo sapien
tatctttcctgatagcaaattaatt

SEQ ID NO: 2768873 - DNA, 25 bp, Homo sapien
cattactggatgttgttaggacaat

SEQ ID NO: 2768874 - DNA, 25 bp, Homo sapien
gctgcagactaggaattttcttctt

SEQ ID NO: 2768875 - DNA, 25 bp, Homo sapien
ggacaataacatccttcaagaaagg

SEQ ID NO: 2768876 - DNA, 25 bp, Homo sapien
tgttgcccagccttaagtggagtag

SEQ ID NO: 2768877 - DNA, 25 bp, Homo sapien
gtggagtagatatttacaggcacta

SEQ ID NO: 2768878 - DNA, 25 bp, Homo sapien
cagacacgtaatcggtatagcacac

SEQ ID NO: 2768879 - DNA, 25 bp, Homo sapien
gccccttgatctcgggaggtcatca

SEQ ID NO: 2768880 - DNA, 25 bp, Homo sapien
ctttcccaaccaggagacacgtggc

SEQ ID NO: 2768881 - DNA, 25 bp, Homo sapien
tcccaaccaggagacacgtggccat

SEQ ID NO: 2768882 - DNA, 25 bp, Homo sapien
tttcccaaccaggagacacgtggcc

SEQ ID NO: 2768883 - DNA, 25 bp, Homo sapien
ttcccaaccaggagacacgtggcca

SEQ ID NO: 2768884 - DNA, 25 bp, Homo sapien
tgtcaagatttctaatcttatctcc

SEQ ID NO: 2768885 - DNA, 25 bp, Homo sapien
tcaagatttctaatcttatctccat

SEQ ID NO: 2768886 - DNA, 25 bp, Homo sapien
taatacctgttgatgtcaagatttc

SEQ ID NO: 2768887 - DNA, 25 bp, Homo sapien
cttaatacctgttgatgtcaagatt

SEQ ID NO: 2768888 - DNA, 25 bp, Homo sapien
gcagggtccggccagtcaggcgcga

SEQ ID NO: 2768889 - DNA, 25 bp, Homo sapien
gtgaagacgccaggccgacagctgc

SEQ ID NO: 2768890 - DNA, 25 bp, Homo sapien
gactgcgcggggtgaagacgccagg

SEQ ID NO: 2768891 - DNA, 25 bp, Homo sapien
agaaggctaggcgaggccgactgcg

SEQ ID NO: 2768892 - DNA, 25 bp, Homo sapien
ttattctccgcactgttttcgcctc

SEQ ID NO: 2768893 - DNA, 25 bp, Homo sapien
agcaggggtcacaagcaggcagccc

SEQ ID NO: 2768894 - DNA, 25 bp, Homo sapien
cctgttctcgtgactgacaggagca

SEQ ID NO: 2768895 - DNA, 25 bp, Homo sapien
tgtcctacggacttattctccgcac

SEQ ID NO: 2768896 - DNA, 25 bp, Homo sapien
caagctgcgtctcaagggctaaatt

SEQ ID NO: 2768897 - DNA, 25 bp, Homo sapien
cctaaagtaatgagacaattgggca

SEQ ID NO: 2768898 - DNA, 25 bp, Homo sapien
gatcccggatcccacatggtaaatt

SEQ ID NO: 2768899 - DNA, 25 bp, Homo sapien
tttaagcatccaagtgaaacagagt

SEQ ID NO: 2768900 - DNA, 25 bp, Homo sapien
gatacaactctgtaccatggtcata

SEQ ID NO: 2768901 - DNA, 25 bp, Homo sapien
aatttttccgtctcatgaataggag

SEQ ID NO: 2768902 - DNA, 25 bp, Homo sapien
caatgaataagtcaggtatacctaa

SEQ ID NO: 2768903 - DNA, 25 bp, Homo sapien
gaatggagactaccctgaggaatac

SEQ ID NO: 2768904 - DNA, 25 bp, Homo sapien
ggatcagcatgacactacagatgga

SEQ ID NO: 2768905 - DNA, 25 bp, Homo sapien
taatacagtggataaatgctactcc

SEQ ID NO: 2768906 - DNA, 25 bp, Homo sapien
tgtcataacaggctatccggctgat

SEQ ID NO: 2768907 - DNA, 25 bp, Homo sapien
taaaacctctcaaagcatgctgtgt

SEQ ID NO: 2768908 - DNA, 25 bp, Homo sapien
aaagggagctgaattctaagagaac

SEQ ID NO: 2768909 - DNA, 25 bp, Homo sapien
tgtagagaaggcaaccctatggtct

SEQ ID NO: 2768910 - DNA, 25 bp, Homo sapien
taagaggtagtagtacccactgagt

SEQ ID NO: 2768911 - DNA, 25 bp, Homo sapien
gagtgacgttctggcattctattaa

SEQ ID NO: 2768912 - DNA, 25 bp, Homo sapien
taaactatggaaggtagcagtatcc

SEQ ID NO: 2768913 - DNA, 25 bp, Homo sapien
ggcaaattgcttcaaacctgtgagg

SEQ ID NO: 2768914 - DNA, 25 bp, Homo sapien
tgttaaaacatagaaagcagggcct

SEQ ID NO: 2768915 - DNA, 25 bp, Homo sapien
tactgcagtggctttcaaatttgac

SEQ ID NO: 2768916 - DNA, 25 bp, Homo sapien
aggacacaacattagttacaagttt

SEQ ID NO: 2768917 - DNA, 25 bp, Homo sapien
tcaggacacaacattagttacaagt

SEQ ID NO: 2768918 - DNA, 25 bp, Homo sapien
gacacaacattagttacaagtttta

SEQ ID NO: 2768919 - DNA, 25 bp, Homo sapien
caacattagttacaagttttatcac

SEQ ID NO: 2768920 - DNA, 25 bp, Homo sapien
aaaccagttgttagaggacagttct

SEQ ID NO: 2768921 - DNA, 25 bp, Homo sapien
tgttagaggacagttctttcaaggg

SEQ ID NO: 2768922 - DNA, 25 bp, Homo sapien
gctcaaccaggtatatagctatgtc

SEQ ID NO: 2768923 - DNA, 25 bp, Homo sapien
tctcaagggctttaactgacaaaac

SEQ ID NO: 2768924 - DNA, 25 bp, Homo sapien
aggtgtaagtcactgtgcctggccg

SEQ ID NO: 2768925 - DNA, 25 bp, Homo sapien
ggtgtaagtcactgtgcctggccgc

SEQ ID NO: 2768926 - DNA, 25 bp, Homo sapien
tagtggagttttaatgccaatatcc

SEQ ID NO: 2768927 - DNA, 25 bp, Homo sapien
ggtactatttgtagatattagccac

SEQ ID NO: 2768928 - DNA, 25 bp, Homo sapien
ttctgcctgcagtacaattcaaaat

SEQ ID NO: 2768929 - DNA, 25 bp, Homo sapien
taatataaattcgaaatttctgcct

SEQ ID NO: 2768930 - DNA, 25 bp, Homo sapien
ataaaacggatgaaagtatatcaca

SEQ ID NO: 2768931 - DNA, 25 bp, Homo sapien
aaaacggatgaaagtatatcacagt

SEQ ID NO: 2768932 - DNA, 25 bp, Homo sapien
aacggatgaaagtatatcacagtaa

SEQ ID NO: 2768933 - DNA, 25 bp, Homo sapien
tacagatcataaaacggatgaaagt

SEQ ID NO: 2768934 - DNA, 25 bp, Homo sapien
gagatttaaaattcccagtgatggc

SEQ ID NO: 2768935 - DNA, 25 bp, Homo sapien
tactgacgagctcatagactggagc

SEQ ID NO: 2768936 - DNA, 25 bp, Homo sapien
gatggcttgtactgctactgacgag

SEQ ID NO: 2768937 - DNA, 25 bp, Homo sapien
gcatccaggcagagatttgtaaatc

SEQ ID NO: 2768938 - DNA, 25 bp, Homo sapien
ccaaaaggtgcagtggcttcttcat

SEQ ID NO: 2768939 - DNA, 25 bp, Homo sapien
aaaggtgcagtggcttcttcattct

SEQ ID NO: 2768940 - DNA, 25 bp, Homo sapien
caaaaggtgcagtggcttcttcatt

SEQ ID NO: 2768941 - DNA, 25 bp, Homo sapien
aaaaggtgcagtggcttcttcattc

SEQ ID NO: 2768942 - DNA, 25 bp, Homo sapien
tcacatggctactaaattatatatc

SEQ ID NO: 2768943 - DNA, 25 bp, Homo sapien
tgtgaggcaaattgtgtcaattgat

SEQ ID NO: 2768944 - DNA, 25 bp, Homo sapien
catttatactaaagtagacatcagg

SEQ ID NO: 2768945 - DNA, 25 bp, Homo sapien
tcaggatccatgcaaaacttatcgc

SEQ ID NO: 2768946 - DNA, 25 bp, Homo sapien
tctaggtaatggtactccaatttca

SEQ ID NO: 2768947 - DNA, 25 bp, Homo sapien
cacatcccagttcaaagtacaaacc

SEQ ID NO: 2768948 - DNA, 25 bp, Homo sapien
tcataaacttctagtagtctaggta

SEQ ID NO: 2768949 - DNA, 25 bp, Homo sapien
tcattgtctgtattacgaagcccac

SEQ ID NO: 2768950 - DNA, 25 bp, Homo sapien
tcagtcagcacaatcctaagacagg

SEQ ID NO: 2768951 - DNA, 25 bp, Homo sapien
caatcacagattacctatgcacaaa

SEQ ID NO: 2768952 - DNA, 25 bp, Homo sapien
tatagccaccatatctcattaagaa

SEQ ID NO: 2768953 - DNA, 25 bp, Homo sapien
tcagaaacttgtatagggttaccaa

SEQ ID NO: 2768954 - DNA, 25 bp, Homo sapien
tgccaaggagaacaatcttgagact

SEQ ID NO: 2768955 - DNA, 25 bp, Homo sapien
gaagcgtggtgtgccagcataaatt

SEQ ID NO: 2768956 - DNA, 25 bp, Homo sapien
tcttgagactaagagcatgcattct

SEQ ID NO: 2768957 - DNA, 25 bp, Homo sapien
attctatccgaggagctcaatgtca

SEQ ID NO: 2768958 - DNA, 25 bp, Homo sapien
caagtttaaatgggtcagcaaattc

SEQ ID NO: 2768959 - DNA, 25 bp, Homo sapien
gcaagtttgcactctgcaagtttaa

SEQ ID NO: 2768960 - DNA, 25 bp, Homo sapien
agtgtctgcaccaatatagggtctg

SEQ ID NO: 2768961 - DNA, 25 bp, Homo sapien
taaccggcacaatgaattattgcaa

SEQ ID NO: 2768962 - DNA, 25 bp, Homo sapien
cagctctcatgcgaggatgataggt

SEQ ID NO: 2768963 - DNA, 25 bp, Homo sapien
cctttttctaggagtcagatgaagc

SEQ ID NO: 2768964 - DNA, 25 bp, Homo sapien
ggctcctagactgcagtgccatgat

SEQ ID NO: 2768965 - DNA, 25 bp, Homo sapien
tcagcccagtgacaagctgccaaag

SEQ ID NO: 2768966 - DNA, 25 bp, Homo sapien
cctttgtagtgtctcctgtatctga

SEQ ID NO: 2768967 - DNA, 25 bp, Homo sapien
cctgtatctgaagttggatcctagc

SEQ ID NO: 2768968 - DNA, 25 bp, Homo sapien
atactgcctttgtagtgtctcctgt

SEQ ID NO: 2768969 - DNA, 25 bp, Homo sapien
tagtgtctcctgtatctgaagttgg

SEQ ID NO: 2768970 - DNA, 25 bp, Homo sapien
caatgtactctagtcgctgctgaag

SEQ ID NO: 2768971 - DNA, 25 bp, Homo sapien
tgaagaaattcaccatcggcagcta

SEQ ID NO: 2768972 - DNA, 25 bp, Homo sapien
tggaacttttggcactaagaatggc

SEQ ID NO: 2768973 - DNA, 25 bp, Homo sapien
taagaatggctcgagcaatgtactc

SEQ ID NO: 2768974 - DNA, 25 bp, Homo sapien
tttgatcaactttggccattcggac

SEQ ID NO: 2768975 - DNA, 25 bp, Homo sapien
tgttcttctcgtaataccgccagag

SEQ ID NO: 2768976 - DNA, 25 bp, Homo sapien
cattcggactagatgtggctccaga

SEQ ID NO: 2768977 - DNA, 25 bp, Homo sapien
tcagccagtctggacagtacacgag

SEQ ID NO: 2768978 - DNA, 25 bp, Homo sapien
gagctcatccttggatcgctgtgac

SEQ ID NO: 2768979 - DNA, 25 bp, Homo sapien
tctgcaaggtcgacttgtattagcc

SEQ ID NO: 2768980 - DNA, 25 bp, Homo sapien
aagggcaatactaaagagctcatcc

SEQ ID NO: 2768981 - DNA, 25 bp, Homo sapien
ttgtattagccaattataaagggca

SEQ ID NO: 2768982 - DNA, 25 bp, Homo sapien
tactcagcatatttggatcagatga

SEQ ID NO: 2768983 - DNA, 25 bp, Homo sapien
tgatgtcctgcttcttcattactca

SEQ ID NO: 2768984 - DNA, 25 bp, Homo sapien
tcagatgacaacactggaggaccag

SEQ ID NO: 2768985 - DNA, 25 bp, Homo sapien
ggagactgaggagcggccttacttt

SEQ ID NO: 2768986 - DNA, 25 bp, Homo sapien
gaagcccaagaccttgaggatcttt

SEQ ID NO: 2768987 - DNA, 25 bp, Homo sapien
tgaagtccaactatgtcttcttctg

SEQ ID NO: 2768988 - DNA, 25 bp, Homo sapien
aagtccaactatgtcttcttctggt

SEQ ID NO: 2768989 - DNA, 25 bp, Homo sapien
ttttttctctgcagccgtaagagaa

SEQ ID NO: 2768990 - DNA, 25 bp, Homo sapien
ggaaaggtccacttgattgctaatt

SEQ ID NO: 2768991 - DNA, 25 bp, Homo sapien
tgtctatactgagcacaaacattgg

SEQ ID NO: 2768992 - DNA, 25 bp, Homo sapien
tattttgaacttgtcgggaacgctg

SEQ ID NO: 2768993 - DNA, 25 bp, Homo sapien
aacttgtcgggaacgctggagaagc

SEQ ID NO: 2768994 - DNA, 25 bp, Homo sapien
tcatcagtgctatatagaagtgggc

SEQ ID NO: 2768995 - DNA, 25 bp, Homo sapien
gatgtagcagttgataagagaagca

SEQ ID NO: 2768996 - DNA, 25 bp, Homo sapien
gagaagcaattaatgcccctgtgag

SEQ ID NO: 2768997 - DNA, 25 bp, Homo sapien
cagcggcattatctctgatgtagca

SEQ ID NO: 2768998 - DNA, 25 bp, Homo sapien
ccagagcctgatatgattttcgaac

SEQ ID NO: 2768999 - DNA, 25 bp, Homo sapien
tgatagtgaattgatgttcacaaag

SEQ ID NO: 2769000 - DNA, 25 bp, Homo sapien
aagaagtttccataaagccagagcc

SEQ ID NO: 2769001 - DNA, 25 bp, Homo sapien
aattgatgttcacaaagaagtttcc

SEQ ID NO: 2769002 - DNA, 25 bp, Homo sapien
caactgctgaattgcctgaagtgaa

SEQ ID NO: 2769003 - DNA, 25 bp, Homo sapien
ctgctgaattgcctgaagtgaaatc

SEQ ID NO: 2769004 - DNA, 25 bp, Homo sapien
tgaaatcttttcacttagttgagcc

SEQ ID NO: 2769005 - DNA, 25 bp, Homo sapien
tgaattgcctgaagtgaaatctttt

SEQ ID NO: 2769006 - DNA, 25 bp, Homo sapien
tggggatttccgttttcaggacgca

SEQ ID NO: 2769007 - DNA, 25 bp, Homo sapien
ttcaggacgcatgaatcctatcagc

SEQ ID NO: 2769008 - DNA, 25 bp, Homo sapien
ttttcaggacgcatgaatcctatca

SEQ ID NO: 2769009 - DNA, 25 bp, Homo sapien
aggacgcatgaatcctatcagcctc

SEQ ID NO: 2769010 - DNA, 25 bp, Homo sapien
cctaatggtcctcctgcaaactggg

SEQ ID NO: 2769011 - DNA, 25 bp, Homo sapien
gcaaaccctttagttcttgtagcac

SEQ ID NO: 2769012 - DNA, 25 bp, Homo sapien
tgtctagaaattcctgcaaaccctt

SEQ ID NO: 2769013 - DNA, 25 bp, Homo sapien
agcactgactctagcagttggcagg

SEQ ID NO: 2769014 - DNA, 25 bp, Homo sapien
aactaagcttgcatcccaaatgttt

SEQ ID NO: 2769015 - DNA, 25 bp, Homo sapien
tccacaactaagcttgcatcccaaa

SEQ ID NO: 2769016 - DNA, 25 bp, Homo sapien
cacaactaagcttgcatcccaaatg

SEQ ID NO: 2769017 - DNA, 25 bp, Homo sapien
tctccacaactaagcttgcatccca

SEQ ID NO: 2769018 - DNA, 25 bp, Homo sapien
cacaaaatatcagtgttacggctgt

SEQ ID NO: 2769019 - DNA, 25 bp, Homo sapien
cccctgtgttaaggaacaactgtat

SEQ ID NO: 2769020 - DNA, 25 bp, Homo sapien
tatcagtgaggcttctagacagtag

SEQ ID NO: 2769021 - DNA, 25 bp, Homo sapien
tttttgactacatgaaggttgagga

SEQ ID NO: 2769022 - DNA, 25 bp, Homo sapien
ccagagcacacactggagttgacat

SEQ ID NO: 2769023 - DNA, 25 bp, Homo sapien
tcacacaactcatatttgtggcctg

SEQ ID NO: 2769024 - DNA, 25 bp, Homo sapien
tcccagagcacacactggagttgac

SEQ ID NO: 2769025 - DNA, 25 bp, Homo sapien
caatctctggtccagtcacacaact

SEQ ID NO: 2769026 - DNA, 25 bp, Homo sapien
aaaggatggatttggatagggacta

SEQ ID NO: 2769027 - DNA, 25 bp, Homo sapien
gatagggactaccactaggaacagg

SEQ ID NO: 2769028 - DNA, 25 bp, Homo sapien
ggactaccactaggaacaggagaac

SEQ ID NO: 2769029 - DNA, 25 bp, Homo sapien
gatttggatagggactaccactagg

SEQ ID NO: 2769030 - DNA, 25 bp, Homo sapien
gagaccccaagatgggaccaacatt

SEQ ID NO: 2769031 - DNA, 25 bp, Homo sapien
caagatgggaccaacattacttgga

SEQ ID NO: 2769032 - DNA, 25 bp, Homo sapien
tgggaccaacattacttggaggcgg

SEQ ID NO: 2769033 - DNA, 25 bp, Homo sapien
caacattacttggaggcggaagagt

SEQ ID NO: 2769034 - DNA, 25 bp, Homo sapien
aataaggcaagttgcacaagcctgg

SEQ ID NO: 2769035 - DNA, 25 bp, Homo sapien
gaataaggcaagttgcacaagcctg

SEQ ID NO: 2769036 - DNA, 25 bp, Homo sapien
gcaagaataaggcaagttgcacaag

SEQ ID NO: 2769037 - DNA, 25 bp, Homo sapien
tccggcttatgtctccaattttctt

SEQ ID NO: 2769038 - DNA, 25 bp, Homo sapien
cttttaacctagattctgacttagt

SEQ ID NO: 2769039 - DNA, 25 bp, Homo sapien
cttagtttccggcttatgtctccaa

SEQ ID NO: 2769040 - DNA, 25 bp, Homo sapien
cctagattctgacttagtttccggc

SEQ ID NO: 2769041 - DNA, 25 bp, Homo sapien
taagtttatgaaacataaggctccc

SEQ ID NO: 2769042 - DNA, 25 bp, Homo sapien
attactcacaagtagatgcctcagt

SEQ ID NO: 2769043 - DNA, 25 bp, Homo sapien
gatctacaggtctaagtttatgaaa

SEQ ID NO: 2769044 - DNA, 25 bp, Homo sapien
gcctcagttgatctacaggtctaag

SEQ ID NO: 2769045 - DNA, 25 bp, Homo sapien
tcttcggaggtaacatgtgctgctg

SEQ ID NO: 2769046 - DNA, 25 bp, Homo sapien
ggaatgaccatcaacaccagctgtc

SEQ ID NO: 2769047 - DNA, 25 bp, Homo sapien
tgtgctgctgtacaacaactggtga

SEQ ID NO: 2769048 - DNA, 25 bp, Homo sapien
ggaatatgatccttgtttaaaggtg

SEQ ID NO: 2769049 - DNA, 25 bp, Homo sapien
gggattacagccatatgtcaccacg

SEQ ID NO: 2769050 - DNA, 25 bp, Homo sapien
gtgtagtggagtgatcttggctcac

SEQ ID NO: 2769051 - DNA, 25 bp, Homo sapien
tttgagacgaagttgtctaggctgg

SEQ ID NO: 2769052 - DNA, 25 bp, Homo sapien
ttacagccatatgtcaccacgccca

SEQ ID NO: 2769053 - DNA, 25 bp, Homo sapien
gaaaagtatcatggttgacacacca

SEQ ID NO: 2769054 - DNA, 25 bp, Homo sapien
tcatggttgacacaccataaaatat

SEQ ID NO: 2769055 - DNA, 25 bp, Homo sapien
aagtatcatggttgacacaccataa

SEQ ID NO: 2769056 - DNA, 25 bp, Homo sapien
gtatcatggttgacacaccataaaa

SEQ ID NO: 2769057 - DNA, 25 bp, Homo sapien
gcttttccacggttgaagatgctga

SEQ ID NO: 2769058 - DNA, 25 bp, Homo sapien
taggccgtgctaatggctgtctgaa

SEQ ID NO: 2769059 - DNA, 25 bp, Homo sapien
tataaagagctctatgtacttttga

SEQ ID NO: 2769060 - DNA, 25 bp, Homo sapien
gaggtaagcggacatgaaccagcgt

SEQ ID NO: 2769061 - DNA, 25 bp, Homo sapien
gaattttcaatcactgctatttgga

SEQ ID NO: 2769062 - DNA, 25 bp, Homo sapien
ctgctatttggacaattggtttaaa

SEQ ID NO: 2769063 - DNA, 25 bp, Homo sapien
tttaaaaacagaacgatcgatggtc

SEQ ID NO: 2769064 - DNA, 25 bp, Homo sapien
cagccaataactgacagtccagtga

SEQ ID NO: 2769065 - DNA, 25 bp, Homo sapien
cagcagagacaatggcattctgtga

SEQ ID NO: 2769066 - DNA, 25 bp, Homo sapien
agcagagacaatggcattctgtgac

SEQ ID NO: 2769067 - DNA, 25 bp, Homo sapien
ctgtattactcctttctcagatcgt

SEQ ID NO: 2769068 - DNA, 25 bp, Homo sapien
tattactcctttctcagatcgtgta

SEQ ID NO: 2769069 - DNA, 25 bp, Homo sapien
cctttctcagatcgtgtatataaaa

SEQ ID NO: 2769070 - DNA, 25 bp, Homo sapien
tagaattatcaattgcaatttgaag

SEQ ID NO: 2769071 - DNA, 25 bp, Homo sapien
gaacgtgaattgtagcaaggaagga

SEQ ID NO: 2769072 - DNA, 25 bp, Homo sapien
tcttctgagaacgtgaattgtagca

SEQ ID NO: 2769073 - DNA, 25 bp, Homo sapien
tctgagaacgtgaattgtagcaagg

SEQ ID NO: 2769074 - DNA, 25 bp, Homo sapien
gaattgtagcaaggaaggaacaagg

SEQ ID NO: 2769075 - DNA, 25 bp, Homo sapien
gaaaattctgccattatcagtggaa

SEQ ID NO: 2769076 - DNA, 25 bp, Homo sapien
tccaccagacaaactatcattaaga

SEQ ID NO: 2769077 - DNA, 25 bp, Homo sapien
ccattatcagtggaagttattgtta

SEQ ID NO: 2769078 - DNA, 25 bp, Homo sapien
tatcagtaggaagagaatataaagg

SEQ ID NO: 2769079 - DNA, 25 bp, Homo sapien
tccaagaattactatgtctacaggg

SEQ ID NO: 2769080 - DNA, 25 bp, Homo sapien
ggtgtcgcacatgaggttgaaagat

SEQ ID NO: 2769081 - DNA, 25 bp, Homo sapien
tgtctacaggggtcgccaaaaccag

SEQ ID NO: 2769082 - DNA, 25 bp, Homo sapien
caaaaccaggaggtgtcgcacatga

SEQ ID NO: 2769083 - DNA, 25 bp, Homo sapien
aagaatagtctcactaagtccatca

SEQ ID NO: 2769084 - DNA, 25 bp, Homo sapien
agaatagtctcactaagtccatcaa

SEQ ID NO: 2769085 - DNA, 25 bp, Homo sapien
gcaagaatagtctcactaagtccat

SEQ ID NO: 2769086 - DNA, 25 bp, Homo sapien
caagaatagtctcactaagtccatc

SEQ ID NO: 2769087 - DNA, 25 bp, Homo sapien
tactacgggctaacagcttgggacc

SEQ ID NO: 2769088 - DNA, 25 bp, Homo sapien
tataggcgtttgagtcagcgtgctc

SEQ ID NO: 2769089 - DNA, 25 bp, Homo sapien
taaaaagtcaacagggagatcacca

SEQ ID NO: 2769090 - DNA, 25 bp, Homo sapien
tgactgatactgagaagcactgacc

SEQ ID NO: 2769091 - DNA, 25 bp, Homo sapien
acacccatcatgcaattacactgca

SEQ ID NO: 2769092 - DNA, 25 bp, Homo sapien
tcactgtcaattgtgagccaagctc

SEQ ID NO: 2769093 - DNA, 25 bp, Homo sapien
gctgataggagggaacacacccatc

SEQ ID NO: 2769094 - DNA, 25 bp, Homo sapien
tatcactgtcaattgtgagccaagc

SEQ ID NO: 2769095 - DNA, 25 bp, Homo sapien
tgctcaacaagttcaggtgggagag

SEQ ID NO: 2769096 - DNA, 25 bp, Homo sapien
ttgggtacggacagcaaaccaggtc

SEQ ID NO: 2769097 - DNA, 25 bp, Homo sapien
ccttgcaaaggataatccatatctg

SEQ ID NO: 2769098 - DNA, 25 bp, Homo sapien
actcttcggatggaactgatctctg

SEQ ID NO: 2769099 - DNA, 25 bp, Homo sapien
ctgatgtaattccataagccgtggg

SEQ ID NO: 2769100 - DNA, 25 bp, Homo sapien
tagcaactgatgtaattccataagc

SEQ ID NO: 2769101 - DNA, 25 bp, Homo sapien
aaattccatctcacaaaggggtcac

SEQ ID NO: 2769102 - DNA, 25 bp, Homo sapien
gtcactttttctagcaactgatgta

SEQ ID NO: 2769103 - DNA, 25 bp, Homo sapien
atctcagcatatcctcgccgggacc

SEQ ID NO: 2769104 - DNA, 25 bp, Homo sapien
tatcctcgccgggaccaacgctggg

SEQ ID NO: 2769105 - DNA, 25 bp, Homo sapien
caaattaggaagtcaggcgagagtc

SEQ ID NO: 2769106 - DNA, 25 bp, Homo sapien
gctggggataagtagcaaattagga

SEQ ID NO: 2769107 - DNA, 25 bp, Homo sapien
ccgcgcccaacaaagaagacggcat

SEQ ID NO: 2769108 - DNA, 25 bp, Homo sapien
caactgacggtcgatgagccgtcca

SEQ ID NO: 2769109 - DNA, 25 bp, Homo sapien
aaggtccgggtacatgcggtcctct

SEQ ID NO: 2769110 - DNA, 25 bp, Homo sapien
ggcagacaccataagcagctcggaa

SEQ ID NO: 2769111 - DNA, 25 bp, Homo sapien
gaagttagcttagatccgccgccta

SEQ ID NO: 2769112 - DNA, 25 bp, Homo sapien
acgcacttccgcttcatccggtggg

SEQ ID NO: 2769113 - DNA, 25 bp, Homo sapien
ctcggaaatcgtagacaccagggtc

SEQ ID NO: 2769114 - DNA, 25 bp, Homo sapien
ttggcgcctcgacatgacgcacttc

SEQ ID NO: 2769115 - DNA, 25 bp, Homo sapien
cagttgtttgggctgtccctgtggc

SEQ ID NO: 2769116 - DNA, 25 bp, Homo sapien
cctccagtggtctgagttgcgcggc

SEQ ID NO: 2769117 - DNA, 25 bp, Homo sapien
aagttattggcaagttcccctgcag

SEQ ID NO: 2769118 - DNA, 25 bp, Homo sapien
cttgaaggcggtacttcctccagca

SEQ ID NO: 2769119 - DNA, 25 bp, Homo sapien
gctgcagtgaaaaggggagtgcagg

SEQ ID NO: 2769120 - DNA, 25 bp, Homo sapien
tgaaaaggggagtgcaggtatcaaa

SEQ ID NO: 2769121 - DNA, 25 bp, Homo sapien
aaaggggagtgcaggtatcaaaatg

SEQ ID NO: 2769122 - DNA, 25 bp, Homo sapien
ggagtgcaggtatcaaaatgtgaat

SEQ ID NO: 2769123 - DNA, 25 bp, Homo sapien
ggagcaaaatacagatacagggatg

SEQ ID NO: 2769124 - DNA, 25 bp, Homo sapien
gaaggcatattaccagatctctcca

SEQ ID NO: 2769125 - DNA, 25 bp, Homo sapien
gttagtagccactaaagtctcccag

SEQ ID NO: 2769126 - DNA, 25 bp, Homo sapien
tcttactagctctgtcttgaaggca

SEQ ID NO: 2769127 - DNA, 25 bp, Homo sapien
cagacggggcggctgccaggtggag

SEQ ID NO: 2769128 - DNA, 25 bp, Homo sapien
agacggggcggctgccaggtggagg

SEQ ID NO: 2769129 - DNA, 25 bp, Homo sapien
ctcagacggggcggctgccaggtgg

SEQ ID NO: 2769130 - DNA, 25 bp, Homo sapien
acggggcggctgccaggtggagggg

SEQ ID NO: 2769131 - DNA, 25 bp, Homo sapien
gccacagttactctttagaagctga

SEQ ID NO: 2769132 - DNA, 25 bp, Homo sapien
ggtaagcttttgtatcctctcaagg

SEQ ID NO: 2769133 - DNA, 25 bp, Homo sapien
tggcatgctcactactcagctgcag

SEQ ID NO: 2769134 - DNA, 25 bp, Homo sapien
cactgctagtatggatcaaaatgag

SEQ ID NO: 2769135 - DNA, 25 bp, Homo sapien
gtttttgattgctaccaaggtggtg

SEQ ID NO: 2769136 - DNA, 25 bp, Homo sapien
tgacaaggtagtgttcacagttcca

SEQ ID NO: 2769137 - DNA, 25 bp, Homo sapien
gaagaatagtattgtagagagcagt

SEQ ID NO: 2769138 - DNA, 25 bp, Homo sapien
tcttaaacaaaatgcgggaatgttg

SEQ ID NO: 2769139 - DNA, 25 bp, Homo sapien
agactttaattctggttgcctgcac

SEQ ID NO: 2769140 - DNA, 25 bp, Homo sapien
tatcattaatctaacccagtgtgtg

SEQ ID NO: 2769141 - DNA, 25 bp, Homo sapien
tgcctgcactggtagctgtacttca

SEQ ID NO: 2769142 - DNA, 25 bp, Homo sapien
gcaagacagagtgcgacatgcaagc

SEQ ID NO: 2769143 - DNA, 25 bp, Homo sapien
acgggatggcggccgggaagaggcg

SEQ ID NO: 2769144 - DNA, 25 bp, Homo sapien
ttcccagactgggcagctgggcaga

SEQ ID NO: 2769145 - DNA, 25 bp, Homo sapien
tcacttcccagactgggcagctggg

SEQ ID NO: 2769146 - DNA, 25 bp, Homo sapien
cctcacttcccagactgggcagctg

SEQ ID NO: 2769147 - DNA, 25 bp, Homo sapien
cagttctctaaattggttcctgcca

SEQ ID NO: 2769148 - DNA, 25 bp, Homo sapien
cacagttctctaaattggttcctgc

SEQ ID NO: 2769149 - DNA, 25 bp, Homo sapien
acagttctctaaattggttcctgcc

SEQ ID NO: 2769150 - DNA, 25 bp, Homo sapien
agtaaagatttgcatgtgcaagatt

SEQ ID NO: 2769151 - DNA, 25 bp, Homo sapien
agatttgcatgtgcaagattgcagc

SEQ ID NO: 2769152 - DNA, 25 bp, Homo sapien
atttgcatgtgcaagattgcagcgg

SEQ ID NO: 2769153 - DNA, 25 bp, Homo sapien
taaagatttgcatgtgcaagattgc

SEQ ID NO: 2769154 - DNA, 25 bp, Homo sapien
tgaatgatcctctggtgattgagaa

SEQ ID NO: 2769155 - DNA, 25 bp, Homo sapien
tgctatcaaaaatcggacaaattcc

SEQ ID NO: 2769156 - DNA, 25 bp, Homo sapien
aattcctttcgagatattggtgaat

SEQ ID NO: 2769157 - DNA, 25 bp, Homo sapien
gagatattggtgaatgatcctctgg

SEQ ID NO: 2769158 - DNA, 25 bp, Homo sapien
tcttctaacacacccaataaattaa

SEQ ID NO: 2769159 - DNA, 25 bp, Homo sapien
gactttggtcaattaagaaggctcc

SEQ ID NO: 2769160 - DNA, 25 bp, Homo sapien
cacaagtagttcaaagtgggttcaa

SEQ ID NO: 2769161 - DNA, 25 bp, Homo sapien
tgttcaatcagtgagtcaataccaa

SEQ ID NO: 2769162 - DNA, 25 bp, Homo sapien
atgatcttgcttatttccccagaca

SEQ ID NO: 2769163 - DNA, 25 bp, Homo sapien
ctatgatcttgcttatttccccaga

SEQ ID NO: 2769164 - DNA, 25 bp, Homo sapien
tatgatcttgcttatttccccagac

SEQ ID NO: 2769165 - DNA, 25 bp, Homo sapien
tgatcttgcttatttccccagacac

SEQ ID NO: 2769166 - DNA, 25 bp, Homo sapien
ctgttcttaagcatgtgggccagca

SEQ ID NO: 2769167 - DNA, 25 bp, Homo sapien
ttcgctaaagtgctccgtgtagttg

SEQ ID NO: 2769168 - DNA, 25 bp, Homo sapien
tttattcgctaaagtgctccgtgta

SEQ ID NO: 2769169 - DNA, 25 bp, Homo sapien
ctctgttcttaagcatgtgggccag

SEQ ID NO: 2769170 - DNA, 25 bp, Homo sapien
cttccctccacccacttggattcac

SEQ ID NO: 2769171 - DNA, 25 bp, Homo sapien
ccggtgggtcctgagtgagccacca

SEQ ID NO: 2769172 - DNA, 25 bp, Homo sapien
ttccctccacccacttggattcacc

SEQ ID NO: 2769173 - DNA, 25 bp, Homo sapien
cctcattgcgctgcccccggtgggt

SEQ ID NO: 2769174 - DNA, 25 bp, Homo sapien
gaacccactgagtggtttgtacact

SEQ ID NO: 2769175 - DNA, 25 bp, Homo sapien
cactttatgaatggttgtcacaaac

SEQ ID NO: 2769176 - DNA, 25 bp, Homo sapien
gatataggcagaagatgcaaatctc

SEQ ID NO: 2769177 - DNA, 25 bp, Homo sapien
tgttgcttggataacatgagccaga

SEQ ID NO: 2769178 - DNA, 25 bp, Homo sapien
ttggaaggacaaatttcctttgcat

SEQ ID NO: 2769179 - DNA, 25 bp, Homo sapien
ccttgttgtttgaggcgtcttacca

SEQ ID NO: 2769180 - DNA, 25 bp, Homo sapien
caggaatgtgcccaataatggaatg

SEQ ID NO: 2769181 - DNA, 25 bp, Homo sapien
tcagggtcccttgttgtttgaggcg

SEQ ID NO: 2769182 - DNA, 25 bp, Homo sapien
taatggaatgttcagggtcccttgt

SEQ ID NO: 2769183 - DNA, 25 bp, Homo sapien
agagacggggttttaccacatgttg

SEQ ID NO: 2769184 - DNA, 25 bp, Homo sapien
ggttttaccacatgttggtcaggct

SEQ ID NO: 2769185 - DNA, 25 bp, Homo sapien
gtcctgctctgtcacccaggctgga

SEQ ID NO: 2769186 - DNA, 25 bp, Homo sapien
gagtcctgctctgtcacccaggctg

SEQ ID NO: 2769187 - DNA, 25 bp, Homo sapien
gactgtgggaaattgcagtagcaat

SEQ ID NO: 2769188 - DNA, 25 bp, Homo sapien
tatcaagggattgggtagactagca

SEQ ID NO: 2769189 - DNA, 25 bp, Homo sapien
ttccttttaaccaggcagatgcctt

SEQ ID NO: 2769190 - DNA, 25 bp, Homo sapien
tagaagtccttgatcttaagcaaac

SEQ ID NO: 2769191 - DNA, 25 bp, Homo sapien
ttaagtgccacgaagacgggacaat

SEQ ID NO: 2769192 - DNA, 25 bp, Homo sapien
caaagtgctagaaaaatggaccgat

SEQ ID NO: 2769193 - DNA, 25 bp, Homo sapien
aagacgggacaatttgtacttcttg

SEQ ID NO: 2769194 - DNA, 25 bp, Homo sapien
agtgctagaaaaatggaccgatcta

SEQ ID NO: 2769195 - DNA, 25 bp, Homo sapien
aaattagagggtcatccagcaaaac

SEQ ID NO: 2769196 - DNA, 25 bp, Homo sapien
tcagccttggcagatcgcagtgttc

SEQ ID NO: 2769197 - DNA, 25 bp, Homo sapien
gaaatgctaagagttcccaagctgg

SEQ ID NO: 2769198 - DNA, 25 bp, Homo sapien
caggaggatcctgtagcacttttca

SEQ ID NO: 2769199 - DNA, 25 bp, Homo sapien
tctttaggatgtcgccaccagtact

SEQ ID NO: 2769200 - DNA, 25 bp, Homo sapien
aaatgctgcttaggtggttccactt

SEQ ID NO: 2769201 - DNA, 25 bp, Homo sapien
gtcgccaccagtactttttatcaaa

SEQ ID NO: 2769202 - DNA, 25 bp, Homo sapien
gggctgtccttgtgcgtagcacttc

SEQ ID NO: 2769203 - DNA, 25 bp, Homo sapien
ctgttgtagattaatttgttagaga

SEQ ID NO: 2769204 - DNA, 25 bp, Homo sapien
cacgatttcttcgaataattctcca

SEQ ID NO: 2769205 - DNA, 25 bp, Homo sapien
ccatgtacaagagttctgttgtaga

SEQ ID NO: 2769206 - DNA, 25 bp, Homo sapien
tgttagagatatcgaaaaggttcat

SEQ ID NO: 2769207 - DNA, 25 bp, Homo sapien
ttataccatatcttccacagctctg

SEQ ID NO: 2769208 - DNA, 25 bp, Homo sapien
taccatatcttccacagctctgctt

SEQ ID NO: 2769209 - DNA, 25 bp, Homo sapien
tataccatatcttccacagctctgc

SEQ ID NO: 2769210 - DNA, 25 bp, Homo sapien
atcttataccatatcttccacagct

SEQ ID NO: 2769211 - DNA, 25 bp, Homo sapien
tttaagatagtgtcttgctatattg

SEQ ID NO: 2769212 - DNA, 25 bp, Homo sapien
tagtgtcttgctatattgttcaggc

SEQ ID NO: 2769213 - DNA, 25 bp, Homo sapien
gatagtgtcttgctatattgttcag

SEQ ID NO: 2769214 - DNA, 25 bp, Homo sapien
aagatagtgtcttgctatattgttc

SEQ ID NO: 2769215 - DNA, 25 bp, Homo sapien
tctacttctcccctaggggaatgag

SEQ ID NO: 2769216 - DNA, 25 bp, Homo sapien
tcccctaggggaatgagatctttgc

SEQ ID NO: 2769217 - DNA, 25 bp, Homo sapien
cctctgctccaggactaagctgttg

SEQ ID NO: 2769218 - DNA, 25 bp, Homo sapien
ccaggactaagctgttgttgcttgt

SEQ ID NO: 2769219 - DNA, 25 bp, Homo sapien
atttccccagctcggttggctgttc

SEQ ID NO: 2769220 - DNA, 25 bp, Homo sapien
tccccagctcggttggctgttcagt

SEQ ID NO: 2769221 - DNA, 25 bp, Homo sapien
cccagctcggttggctgttcagtgc

SEQ ID NO: 2769222 - DNA, 25 bp, Homo sapien
aagaaagccgcaagatttccccagc

SEQ ID NO: 2769223 - DNA, 25 bp, Homo sapien
ttgcatgtcattcttgcacaggggc

SEQ ID NO: 2769224 - DNA, 25 bp, Homo sapien
ggccatggtaatcttctctgtgtca

SEQ ID NO: 2769225 - DNA, 25 bp, Homo sapien
attccaattttagtatatatgctgc

SEQ ID NO: 2769226 - DNA, 25 bp, Homo sapien
taaaaatgtggaatgcttcacaaat

SEQ ID NO: 2769227 - DNA, 25 bp, Homo sapien
ggtgttttcactgagtaatctgttt

SEQ ID NO: 2769228 - DNA, 25 bp, Homo sapien
gccatcaaggttttgacctgggtgg

SEQ ID NO: 2769229 - DNA, 25 bp, Homo sapien
gagtggtgttttcactgagtaatct

SEQ ID NO: 2769230 - DNA, 25 bp, Homo sapien
tcattgagtggtgttttcactgagt

SEQ ID NO: 2769231 - DNA, 25 bp, Homo sapien
taaagagcaaatcactccatttttc

SEQ ID NO: 2769232 - DNA, 25 bp, Homo sapien
aagagcaaatcactccatttttcag

SEQ ID NO: 2769233 - DNA, 25 bp, Homo sapien
gagcaaatcactccatttttcaggt

SEQ ID NO: 2769234 - DNA, 25 bp, Homo sapien
ctaaagagcaaatcactccattttt

SEQ ID NO: 2769235 - DNA, 25 bp, Homo sapien
tcatgtatatatgggagccttcgga

SEQ ID NO: 2769236 - DNA, 25 bp, Homo sapien
ctgttgtgaatagggcagcagtaca

SEQ ID NO: 2769237 - DNA, 25 bp, Homo sapien
tctgatgtggtacagaacactagaa

SEQ ID NO: 2769238 - DNA, 25 bp, Homo sapien
cccttggtcccctgatgttttgctg

SEQ ID NO: 2769239 - DNA, 25 bp, Homo sapien
gagccaggagaggcagaggggacat

SEQ ID NO: 2769240 - DNA, 25 bp, Homo sapien
agtggggaggagagccaggagaggc

SEQ ID NO: 2769241 - DNA, 25 bp, Homo sapien
tggggaggagagccaggagaggcag

SEQ ID NO: 2769242 - DNA, 25 bp, Homo sapien
cagcagagccgggtgagtggggagg

SEQ ID NO: 2769243 - DNA, 25 bp, Homo sapien
tctactcgactatcccagtaatatg

SEQ ID NO: 2769244 - DNA, 25 bp, Homo sapien
atcccagtaatatgatttccttgct

SEQ ID NO: 2769245 - DNA, 25 bp, Homo sapien
gttttctactcgactatcccagtaa

SEQ ID NO: 2769246 - DNA, 25 bp, Homo sapien
cttgcttccttgctctggctcttaa

SEQ ID NO: 2769247 - DNA, 25 bp, Homo sapien
gagataggactattttctgcagcaa

SEQ ID NO: 2769248 - DNA, 25 bp, Homo sapien
cagcaattgggttatctttagatga

SEQ ID NO: 2769249 - DNA, 25 bp, Homo sapien
tgtcgtatagttggattgtactccc

SEQ ID NO: 2769250 - DNA, 25 bp, Homo sapien
tcagattcactcagcttttgaagga

SEQ ID NO: 2769251 - DNA, 25 bp, Homo sapien
aaggtcggctgccagtgaatctcag

SEQ ID NO: 2769252 - DNA, 25 bp, Homo sapien
cgtctaggcaggtcattccacggcg

SEQ ID NO: 2769253 - DNA, 25 bp, Homo sapien
gaagcatcggctctctttgaaggtc

SEQ ID NO: 2769254 - DNA, 25 bp, Homo sapien
tatccgtcacttgaactggctgcca

SEQ ID NO: 2769255 - DNA, 25 bp, Homo sapien
ctgtatcgttccagtcttagcatat

SEQ ID NO: 2769256 - DNA, 25 bp, Homo sapien
tatgctaatcttctctgtatcgttc

SEQ ID NO: 2769257 - DNA, 25 bp, Homo sapien
ttgcatgtcatgcttgtgcaggggc

SEQ ID NO: 2769258 - DNA, 25 bp, Homo sapien
gatacatatggaatacttcacaaat

SEQ ID NO: 2769259 - DNA, 25 bp, Homo sapien
gtgtcacgctcccagtaaagaagca

SEQ ID NO: 2769260 - DNA, 25 bp, Homo sapien
gcttctagcaggcacgtgtcgcatt

SEQ ID NO: 2769261 - DNA, 25 bp, Homo sapien
tttgacaagttagcagcgtggcagc

SEQ ID NO: 2769262 - DNA, 25 bp, Homo sapien
gaacctagttctttgcactgcagtg

SEQ ID NO: 2769263 - DNA, 25 bp, Homo sapien
tatggggacagcttaggctctaggt

SEQ ID NO: 2769264 - DNA, 25 bp, Homo sapien
tttcgaaatttaagagctgtgacct

SEQ ID NO: 2769265 - DNA, 25 bp, Homo sapien
cataacagtgtcttaaagtgacaac

SEQ ID NO: 2769266 - DNA, 25 bp, Homo sapien
tgtgacctgtttatagatatcataa

SEQ ID NO: 2769267 - DNA, 25 bp, Homo sapien
gactcatgtcagacaacatcagcat

SEQ ID NO: 2769268 - DNA, 25 bp, Homo sapien
aggaataatgatcaacttattcacg

SEQ ID NO: 2769269 - DNA, 25 bp, Homo sapien
gagcaattctagtacatgactcatg

SEQ ID NO: 2769270 - DNA, 25 bp, Homo sapien
tcaacttattcacgagcaattctag

SEQ ID NO: 2769271 - DNA, 25 bp, Homo sapien
caaagatctgagagatgtctagcat

SEQ ID NO: 2769272 - DNA, 25 bp, Homo sapien
cctgaagacaggagatctttgtgtg

SEQ ID NO: 2769273 - DNA, 25 bp, Homo sapien
gaggaccaggccatgggagaagtgc

SEQ ID NO: 2769274 - DNA, 25 bp, Homo sapien
ggtgtgcgtgtgttgaagtatgtag

SEQ ID NO: 2769275 - DNA, 25 bp, Homo sapien
ggggtgtgcgtgtgttgaagtatgt

SEQ ID NO: 2769276 - DNA, 25 bp, Homo sapien
gcctctttatcctggccactccttt

SEQ ID NO: 2769277 - DNA, 25 bp, Homo sapien
ggacagccagagagtgtctgttttg

SEQ ID NO: 2769278 - DNA, 25 bp, Homo sapien
aaatcctgcctctttatcctggcca

SEQ ID NO: 2769279 - DNA, 25 bp, Homo sapien
ctggccactcctttcagacaggaca

SEQ ID NO: 2769280 - DNA, 25 bp, Homo sapien
taaaatccgtagagtaccatgtggc

SEQ ID NO: 2769281 - DNA, 25 bp, Homo sapien
ctcttacagcactagaactgggact

SEQ ID NO: 2769282 - DNA, 25 bp, Homo sapien
gctgctggtgctgattagtggatat

SEQ ID NO: 2769283 - DNA, 25 bp, Homo sapien
ggaacaccatccaatcaccaggttg

SEQ ID NO: 2769284 - DNA, 25 bp, Homo sapien
tgaagaaagcccaaaacctcttgta

SEQ ID NO: 2769285 - DNA, 25 bp, Homo sapien
ttttgctacctgaagaaagcccaaa

SEQ ID NO: 2769286 - DNA, 25 bp, Homo sapien
tttggcatatacagatgcccactgc

SEQ ID NO: 2769287 - DNA, 25 bp, Homo sapien
tagtcacagcaaggcatggcaagga

SEQ ID NO: 2769288 - DNA, 25 bp, Homo sapien
agtctgcatgtgacctctggactgg

SEQ ID NO: 2769289 - DNA, 25 bp, Homo sapien
ttagggatgaagtctgcatgtgacc

SEQ ID NO: 2769290 - DNA, 25 bp, Homo sapien
tgaagtctgcatgtgacctctggac

SEQ ID NO: 2769291 - DNA, 25 bp, Homo sapien
gacctctggactggacgattcttgt

SEQ ID NO: 2769292 - DNA, 25 bp, Homo sapien
tgtggtgtggttgaattcaatacat

SEQ ID NO: 2769293 - DNA, 25 bp, Homo sapien
tctcatcatatggctgtgaatgtgg

SEQ ID NO: 2769294 - DNA, 25 bp, Homo sapien
catcatatggctgtgaatgtggtgt

SEQ ID NO: 2769295 - DNA, 25 bp, Homo sapien
aatgtggtgtggttgaattcaatac

SEQ ID NO: 2769296 - DNA, 25 bp, Homo sapien
tcccctccacacctaatcaatgcca

SEQ ID NO: 2769297 - DNA, 25 bp, Homo sapien
cttcccctccacacctaatcaatgc

SEQ ID NO: 2769298 - DNA, 25 bp, Homo sapien
ttcccctccacacctaatcaatgcc

SEQ ID NO: 2769299 - DNA, 25 bp, Homo sapien
cccctccacacctaatcaatgccat

SEQ ID NO: 2769300 - DNA, 25 bp, Homo sapien
gcaggggccaggcaacctcccaaca

SEQ ID NO: 2769301 - DNA, 25 bp, Homo sapien
aggggccaggcaacctcccaacagc

SEQ ID NO: 2769302 - DNA, 25 bp, Homo sapien
ggccaggcaacctcccaacagctcc

SEQ ID NO: 2769303 - DNA, 25 bp, Homo sapien
ggagcaggggccaggcaacctccca

SEQ ID NO: 2769304 - DNA, 25 bp, Homo sapien
gagggacagtatttccagcagagaa

SEQ ID NO: 2769305 - DNA, 25 bp, Homo sapien
tgagtgataaataccgccacgggag

SEQ ID NO: 2769306 - DNA, 25 bp, Homo sapien
gggcaagggtacaacactgagaaat

SEQ ID NO: 2769307 - DNA, 25 bp, Homo sapien
gaagttctgtaggacatccacagtg

SEQ ID NO: 2769308 - DNA, 25 bp, Homo sapien
gagatatcactgcacgggcgtcagc

SEQ ID NO: 2769309 - DNA, 25 bp, Homo sapien
gcgtcagcctcggtgctgttctgat

SEQ ID NO: 2769310 - DNA, 25 bp, Homo sapien
cctccctatttcacctcgtagagat

SEQ ID NO: 2769311 - DNA, 25 bp, Homo sapien
tttcacctcgtagagatatcactgc

SEQ ID NO: 2769312 - DNA, 25 bp, Homo sapien
ttctctcctgtcctccttatgcctg

SEQ ID NO: 2769313 - DNA, 25 bp, Homo sapien
ttcttctctcctgtcctccttatgc

SEQ ID NO: 2769314 - DNA, 25 bp, Homo sapien
tcttctctcctgtcctccttatgcc

SEQ ID NO: 2769315 - DNA, 25 bp, Homo sapien
ctctcctgtcctccttatgcctgat

SEQ ID NO: 2769316 - DNA, 25 bp, Homo sapien
acccttctctgcagcgcggatttca

SEQ ID NO: 2769317 - DNA, 25 bp, Homo sapien
tcgggaccagtatccaagctcctca

SEQ ID NO: 2769318 - DNA, 25 bp, Homo sapien
ccacataaggcggtcgggaccagta

SEQ ID NO: 2769319 - DNA, 25 bp, Homo sapien
taaggcggtcgggaccagtatccaa

SEQ ID NO: 2769320 - DNA, 25 bp, Homo sapien
tgggtaagtaatcctggacacactt

SEQ ID NO: 2769321 - DNA, 25 bp, Homo sapien
ggtaagtaatcctggacacactttg

SEQ ID NO: 2769322 - DNA, 25 bp, Homo sapien
tgaatgcctgaacccacaggttggt

SEQ ID NO: 2769323 - DNA, 25 bp, Homo sapien
tggtacccgtgactccaccaagtct

SEQ ID NO: 2769324 - DNA, 25 bp, Homo sapien
aattttggcttggagaaaacgcagc

SEQ ID NO: 2769325 - DNA, 25 bp, Homo sapien
ttatgttcccgctccaagtcactga

SEQ ID NO: 2769326 - DNA, 25 bp, Homo sapien
taaattcacaatctagggcatggag

SEQ ID NO: 2769327 - DNA, 25 bp, Homo sapien
tcatacatgtgttggctgcccgata

SEQ ID NO: 2769328 - DNA, 25 bp, Homo sapien
cagccagcatattctcgggagggca

SEQ ID NO: 2769329 - DNA, 25 bp, Homo sapien
gaacgagctattgacaccccttgga

SEQ ID NO: 2769330 - DNA, 25 bp, Homo sapien
tctctgtaaaccaacaggcctgagg

SEQ ID NO: 2769331 - DNA, 25 bp, Homo sapien
gaatgctggcgaaaaccacaactcg

SEQ ID NO: 2769332 - DNA, 25 bp, Homo sapien
tcactggtgaccacgcatcaacgga

SEQ ID NO: 2769333 - DNA, 25 bp, Homo sapien
tcaacggagctggttatgtaacatc

SEQ ID NO: 2769334 - DNA, 25 bp, Homo sapien
caaccgcgccggtaatcagtgatgg

SEQ ID NO: 2769335 - DNA, 25 bp, Homo sapien
ggaaatcaatcaccaaccgttggca

SEQ ID NO: 2769336 - DNA, 25 bp, Homo sapien
gtttggttcaagtgcatccaccgca

SEQ ID NO: 2769337 - DNA, 25 bp, Homo sapien
tggttgtagtaaacctcgggcctca

SEQ ID NO: 2769338 - DNA, 25 bp, Homo sapien
gttgtctgtagctggatctccctct

SEQ ID NO: 2769339 - DNA, 25 bp, Homo sapien
gagcttctagtgacatcggctgcca

SEQ ID NO: 2769340 - DNA, 25 bp, Homo sapien
tagtgacatcggctgccatcctgga

SEQ ID NO: 2769341 - DNA, 25 bp, Homo sapien
cctgtccagttgtctgtagctggat

SEQ ID NO: 2769342 - DNA, 25 bp, Homo sapien
tttgcactgtagcaggaatgcaata

SEQ ID NO: 2769343 - DNA, 25 bp, Homo sapien
ctttgcactgtagcaggaatgcaat

SEQ ID NO: 2769344 - DNA, 25 bp, Homo sapien
tccattctgggcaaacatttcctgg

SEQ ID NO: 2769345 - DNA, 25 bp, Homo sapien
cattctgggcaaacatttcctggga

SEQ ID NO: 2769346 - DNA, 25 bp, Homo sapien
cttttagcggaatgctttcttagaa

SEQ ID NO: 2769347 - DNA, 25 bp, Homo sapien
tctaaaaacgacaggtcatcatcaa

SEQ ID NO: 2769348 - DNA, 25 bp, Homo sapien
caaaggcgatgggtctgcaacatgc

SEQ ID NO: 2769349 - DNA, 25 bp, Homo sapien
gaatatggtaaaccaggttatcatc

SEQ ID NO: 2769350 - DNA, 25 bp, Homo sapien
gcaagagccgctgcagtacctaaaa

SEQ ID NO: 2769351 - DNA, 25 bp, Homo sapien
tattgcagttaagacacaaccccgg

SEQ ID NO: 2769352 - DNA, 25 bp, Homo sapien
tgtctcagctgcatcgcaagagccg

SEQ ID NO: 2769353 - DNA, 25 bp, Homo sapien
agttcctccttggtttcatagccca

SEQ ID NO: 2769354 - DNA, 25 bp, Homo sapien
agcactgccatttgtttatctggtg

SEQ ID NO: 2769355 - DNA, 25 bp, Homo sapien
tgaataaaatccatgacatcatcga

SEQ ID NO: 2769356 - DNA, 25 bp, Homo sapien
tgcagcctgccgattccgctctctt

SEQ ID NO: 2769357 - DNA, 25 bp, Homo sapien
cagtcttttaatggtggcttgaata

SEQ ID NO: 2769358 - DNA, 25 bp, Homo sapien
cacccagagggatactttaaacgca

SEQ ID NO: 2769359 - DNA, 25 bp, Homo sapien
ttgcctggataaccacagtggcccc

SEQ ID NO: 2769360 - DNA, 25 bp, Homo sapien
tagcattggcaggatcagctgcacg

SEQ ID NO: 2769361 - DNA, 25 bp, Homo sapien
gctgcacggaaatcacaaagctgtt

SEQ ID NO: 2769362 - DNA, 25 bp, Homo sapien
caaaaggactcacatcataggctct

SEQ ID NO: 2769363 - DNA, 25 bp, Homo sapien
gcccttgatacttggaagaacttga

SEQ ID NO: 2769364 - DNA, 25 bp, Homo sapien
aacatgcttgtatataaatcggaac

SEQ ID NO: 2769365 - DNA, 25 bp, Homo sapien
gaacctgggcatatagaaagttaag

SEQ ID NO: 2769366 - DNA, 25 bp, Homo sapien
gcccacgggtcggtaggccacacag

SEQ ID NO: 2769367 - DNA, 25 bp, Homo sapien
cttgcccacgggtcggtaggccaca

SEQ ID NO: 2769368 - DNA, 25 bp, Homo sapien
tcaggctggcttggggtacgtgcgg

SEQ ID NO: 2769369 - DNA, 25 bp, Homo sapien
ccatcaggctggcttggggtacgtg

SEQ ID NO: 2769370 - DNA, 25 bp, Homo sapien
cgagggagcggtcttcggcgggcgc

SEQ ID NO: 2769371 - DNA, 25 bp, Homo sapien
gcggccgagggagcggtcttcggcg

SEQ ID NO: 2769372 - DNA, 25 bp, Homo sapien
agggagcggtcttcggcgggcgcct

SEQ ID NO: 2769373 - DNA, 25 bp, Homo sapien
gccgagggagcggtcttcggcgggc

SEQ ID NO: 2769374 - DNA, 25 bp, Homo sapien
aggcggacgcggtgtggagcagcac

SEQ ID NO: 2769375 - DNA, 25 bp, Homo sapien
gggaaggcggacgcggtgtggagca

SEQ ID NO: 2769376 - DNA, 25 bp, Homo sapien
aaggcggacgcggtgtggagcagca

SEQ ID NO: 2769377 - DNA, 25 bp, Homo sapien
gaaggcggacgcggtgtggagcagc

SEQ ID NO: 2769378 - DNA, 25 bp, Homo sapien
gagaaccgcagaatgcacgttaagc

SEQ ID NO: 2769379 - DNA, 25 bp, Homo sapien
gaatgcacgttaagcctgggctccc

SEQ ID NO: 2769380 - DNA, 25 bp, Homo sapien
cgcagaatgcacgttaagcctgggc

SEQ ID NO: 2769381 - DNA, 25 bp, Homo sapien
gaaccgcagaatgcacgttaagcct

SEQ ID NO: 2769382 - DNA, 25 bp, Homo sapien
tcattcttcccacctaaataggtat

SEQ ID NO: 2769383 - DNA, 25 bp, Homo sapien
taggtattctgttgcgagagcaaga

SEQ ID NO: 2769384 - DNA, 25 bp, Homo sapien
cacctaaataggtattctgttgcga

SEQ ID NO: 2769385 - DNA, 25 bp, Homo sapien
attctgttgcgagagcaagaagtta

SEQ ID NO: 2769386 - DNA, 25 bp, Homo sapien
ccgaaaaccctctcttgactggatt

SEQ ID NO: 2769387 - DNA, 25 bp, Homo sapien
ggcaaagactgcatttgtcttgaaa

SEQ ID NO: 2769388 - DNA, 25 bp, Homo sapien
gcacctttgagagattctggcccta

SEQ ID NO: 2769389 - DNA, 25 bp, Homo sapien
gtcacgcctggacgactgtacccag

SEQ ID NO: 2769390 - DNA, 25 bp, Homo sapien
aaactcctagtgacctgcagcaccg

SEQ ID NO: 2769391 - DNA, 25 bp, Homo sapien
gaaaaagctaggttctgggtcgcga

SEQ ID NO: 2769392 - DNA, 25 bp, Homo sapien
tctgggtcgcgatgtgcagacacag

SEQ ID NO: 2769393 - DNA, 25 bp, Homo sapien
gcctcgcgggctggtttgcaaactc

SEQ ID NO: 2769394 - DNA, 25 bp, Homo sapien
gaaaggtactttggcagctaggacc

SEQ ID NO: 2769395 - DNA, 25 bp, Homo sapien
ccagctcccgggtgcgtgcgaaatg

SEQ ID NO: 2769396 - DNA, 25 bp, Homo sapien
agccacagaggcactagatttccct

SEQ ID NO: 2769397 - DNA, 25 bp, Homo sapien
taatgcgccattccaaatcgcggtg

SEQ ID NO: 2769398 - DNA, 25 bp, Homo sapien
tacacagtggaaaactccccgcgtc

SEQ ID NO: 2769399 - DNA, 25 bp, Homo sapien
cgaggggctctttcgttctcggtat

SEQ ID NO: 2769400 - DNA, 25 bp, Homo sapien
agcgcccggatcgagctcccctctt

SEQ ID NO: 2769401 - DNA, 25 bp, Homo sapien
agggcgcattcttccctctgagcgc

SEQ ID NO: 2769402 - DNA, 25 bp, Homo sapien
cacgtcccggcagggcaaaagcagc

SEQ ID NO: 2769403 - DNA, 25 bp, Homo sapien
ccaccacgtcccggcagggcaaaag

SEQ ID NO: 2769404 - DNA, 25 bp, Homo sapien
gaccaccacgtcccggcagggcaaa

SEQ ID NO: 2769405 - DNA, 25 bp, Homo sapien
accacgtcccggcagggcaaaagca

SEQ ID NO: 2769406 - DNA, 25 bp, Homo sapien
cgaggcacttctgagttcccggcag

SEQ ID NO: 2769407 - DNA, 25 bp, Homo sapien
gaggcaaggacgcccaggaaagcca

SEQ ID NO: 2769408 - DNA, 25 bp, Homo sapien
agaagtgctcgcagaagcagccgct

SEQ ID NO: 2769409 - DNA, 25 bp, Homo sapien
gggcaccagaaaccgtctgagccgt

SEQ ID NO: 2769410 - DNA, 25 bp, Homo sapien
tcccagagatcggacacttgttact

SEQ ID NO: 2769411 - DNA, 25 bp, Homo sapien
tacttgttgaaaaggcgccaccttc

SEQ ID NO: 2769412 - DNA, 25 bp, Homo sapien
ttccctgacaaagcgaaggcgcagc

SEQ ID NO: 2769413 - DNA, 25 bp, Homo sapien
gggacacggcggacttcccagagat

SEQ ID NO: 2769414 - DNA, 25 bp, Homo sapien
taccaaagccgaaactagctgggcc

SEQ ID NO: 2769415 - DNA, 25 bp, Homo sapien
gtcctggcggcggattctaccaaag

SEQ ID NO: 2769416 - DNA, 25 bp, Homo sapien
gattctaccaaagccgaaactagct

SEQ ID NO: 2769417 - DNA, 25 bp, Homo sapien
aacaaaccaccagtgcggaattagc

SEQ ID NO: 2769418 - DNA, 25 bp, Homo sapien
tctgtgacttgacggaagagcacct

SEQ ID NO: 2769419 - DNA, 25 bp, Homo sapien
agagaggacacatttcgacggcggt

SEQ ID NO: 2769420 - DNA, 25 bp, Homo sapien
tgacccaagccctgaatcgttctgt

SEQ ID NO: 2769421 - DNA, 25 bp, Homo sapien
aatgatagtatctctgcacgtccag

SEQ ID NO: 2769422 - DNA, 25 bp, Homo sapien
tccactttctactctcaccgtttgc

SEQ ID NO: 2769423 - DNA, 25 bp, Homo sapien
tacttttctctctcctcgcatagct

SEQ ID NO: 2769424 - DNA, 25 bp, Homo sapien
tctctcctcgcatagcttaggttcc

SEQ ID NO: 2769425 - DNA, 25 bp, Homo sapien
gcatagcttaggttccctctagtct

SEQ ID NO: 2769426 - DNA, 25 bp, Homo sapien
tcttgcctggagatccgaacgagac

SEQ ID NO: 2769427 - DNA, 25 bp, Homo sapien
ggttggacattaactccaggtgccc

SEQ ID NO: 2769428 - DNA, 25 bp, Homo sapien
tgctgccggagctgaggtcttgcct

SEQ ID NO: 2769429 - DNA, 25 bp, Homo sapien
cctgggagcacgagactggtttgtc

SEQ ID NO: 2769430 - DNA, 25 bp, Homo sapien
cggcccccattccagagctctgtgg

SEQ ID NO: 2769431 - DNA, 25 bp, Homo sapien
attccagagctctgtggatgggaga

SEQ ID NO: 2769432 - DNA, 25 bp, Homo sapien
ttggatgctgagtttccagcgatca

SEQ ID NO: 2769433 - DNA, 25 bp, Homo sapien
gtttccagcgatcaggggcccggcc

SEQ ID NO: 2769434 - DNA, 25 bp, Homo sapien
gagggcaagtccttacacaccctgt

SEQ ID NO: 2769435 - DNA, 25 bp, Homo sapien
ggcaagtccttacacaccctgtgca

SEQ ID NO: 2769436 - DNA, 25 bp, Homo sapien
ttttgttggttagttcaccaccaga

SEQ ID NO: 2769437 - DNA, 25 bp, Homo sapien
ggagggcaagtccttacacaccctg

SEQ ID NO: 2769438 - DNA, 25 bp, Homo sapien
agctgctttgactatgagggccagg

SEQ ID NO: 2769439 - DNA, 25 bp, Homo sapien
agagtccttggcgagctcccagtgg

SEQ ID NO: 2769440 - DNA, 25 bp, Homo sapien
cctggactgcctcataacttgggtc

SEQ ID NO: 2769441 - DNA, 25 bp, Homo sapien
tagggctgcagcctgtagacgtgat

SEQ ID NO: 2769442 - DNA, 25 bp, Homo sapien
tgtccacatgggcacataacaggca

SEQ ID NO: 2769443 - DNA, 25 bp, Homo sapien
caaagaccatggtagtcggctggca

SEQ ID NO: 2769444 - DNA, 25 bp, Homo sapien
tgtaaaatccagaactgtaggtgcc

SEQ ID NO: 2769445 - DNA, 25 bp, Homo sapien
taggtgccatacaagctgtccacat

SEQ ID NO: 2769446 - DNA, 25 bp, Homo sapien
tggaggatttaaaccatcgagatcc

SEQ ID NO: 2769447 - DNA, 25 bp, Homo sapien
catcgagatcctttatgctaacaga

SEQ ID NO: 2769448 - DNA, 25 bp, Homo sapien
tcatgcagccatgatgtatggagga

SEQ ID NO: 2769449 - DNA, 25 bp, Homo sapien
caggtttccagattgtcttcaagga

SEQ ID NO: 2769450 - DNA, 25 bp, Homo sapien
caaatccgtggtgtttactggaagc

SEQ ID NO: 2769451 - DNA, 25 bp, Homo sapien
ggtgtttactggaagcactgaatga

SEQ ID NO: 2769452 - DNA, 25 bp, Homo sapien
aacaacaaatccgtggtgtttactg

SEQ ID NO: 2769453 - DNA, 25 bp, Homo sapien
tccgtggtgtttactggaagcactg

SEQ ID NO: 2769454 - DNA, 25 bp, Homo sapien
gggcttaagggagatgacaaaaaca

SEQ ID NO: 2769455 - DNA, 25 bp, Homo sapien
cagtgatgttcaggctgcacgggcc

SEQ ID NO: 2769456 - DNA, 25 bp, Homo sapien
gcaacagctttcagttctaaggata

SEQ ID NO: 2769457 - DNA, 25 bp, Homo sapien
tgcacgggccaacatggaaagggct

SEQ ID NO: 2769458 - DNA, 25 bp, Homo sapien
tcatcttcctcatggctaaagaggt

SEQ ID NO: 2769459 - DNA, 25 bp, Homo sapien
attttggagttgacatgaaggctac

SEQ ID NO: 2769460 - DNA, 25 bp, Homo sapien
ttcatttgcaatgtcgtcatcttcc

SEQ ID NO: 2769461 - DNA, 25 bp, Homo sapien
ctgaaccgcatgcaagatggttgca

SEQ ID NO: 2769462 - DNA, 25 bp, Homo sapien
tgttgcgagttacaaaagcaccacc

SEQ ID NO: 2769463 - DNA, 25 bp, Homo sapien
tgcagctctcagcatgtgtcaccac

SEQ ID NO: 2769464 - DNA, 25 bp, Homo sapien
tcttcatgctcaggaattctgcaac

SEQ ID NO: 2769465 - DNA, 25 bp, Homo sapien
aagtgaatcttgttgcgagttacaa

SEQ ID NO: 2769466 - DNA, 25 bp, Homo sapien
cttggcatatagagggacggtgaac

SEQ ID NO: 2769467 - DNA, 25 bp, Homo sapien
gagcttggtattccaccgagagcag

SEQ ID NO: 2769468 - DNA, 25 bp, Homo sapien
ttgaaataccgcctcagagagacct

SEQ ID NO: 2769469 - DNA, 25 bp, Homo sapien
tcttgaaccattgtagggaccttgg

SEQ ID NO: 2769470 - DNA, 25 bp, Homo sapien
gtctacttgctctgacatttcaagc

SEQ ID NO: 2769471 - DNA, 25 bp, Homo sapien
tttctgattccagacgagacagcaa

SEQ ID NO: 2769472 - DNA, 25 bp, Homo sapien
tttgctcacagattcaaaatcaggg

SEQ ID NO: 2769473 - DNA, 25 bp, Homo sapien
gattccagacgagacagcaaagctt

SEQ ID NO: 2769474 - DNA, 25 bp, Homo sapien
tccagacgagacagcaaagctttgc

SEQ ID NO: 2769475 - DNA, 25 bp, Homo sapien
atggcaatagctccatacttgcaaa

SEQ ID NO: 2769476 - DNA, 25 bp, Homo sapien
gggttggtcagcacagtcacatcct

SEQ ID NO: 2769477 - DNA, 25 bp, Homo sapien
acatcctgagggcttttccagagtc

SEQ ID NO: 2769478 - DNA, 25 bp, Homo sapien
cagagtcttccatggcaatagctcc

SEQ ID NO: 2769479 - DNA, 25 bp, Homo sapien
cttcctgctggctagtcagagtcat

SEQ ID NO: 2769480 - DNA, 25 bp, Homo sapien
cattagtatgcctgatagttgccag

SEQ ID NO: 2769481 - DNA, 25 bp, Homo sapien
gccatggtctcaggacggcagtgta

SEQ ID NO: 2769482 - DNA, 25 bp, Homo sapien
tgaattaggacggactcagctggga

SEQ ID NO: 2769483 - DNA, 25 bp, Homo sapien
tctggcttcaaatgagtctggcagt

SEQ ID NO: 2769484 - DNA, 25 bp, Homo sapien
tgtgactggggactgatagccttgc

SEQ ID NO: 2769485 - DNA, 25 bp, Homo sapien
ctggggactgatagccttgcactgg

SEQ ID NO: 2769486 - DNA, 25 bp, Homo sapien
gggaggagcaatgccttgttctgga

SEQ ID NO: 2769487 - DNA, 25 bp, Homo sapien
agcaatgccttgttctggaaggcca

SEQ ID NO: 2769488 - DNA, 25 bp, Homo sapien
tctctcgtgcaatccatggagactg

SEQ ID NO: 2769489 - DNA, 25 bp, Homo sapien
actgcgattgcctccggagcctgtt

SEQ ID NO: 2769490 - DNA, 25 bp, Homo sapien
catcaggatgaacccttgtcttggc

SEQ ID NO: 2769491 - DNA, 25 bp, Homo sapien
ttgccccttgaggtgcatcaggatg

SEQ ID NO: 2769492 - DNA, 25 bp, Homo sapien
tccttggaccgccagcccacgccat

SEQ ID NO: 2769493 - DNA, 25 bp, Homo sapien
agcccacgccatccattctccatcc

SEQ ID NO: 2769494 - DNA, 25 bp, Homo sapien
ttctccatccacgatgcattgtttt

SEQ ID NO: 2769495 - DNA, 25 bp, Homo sapien
ccattctccatccacgatgcattgt

SEQ ID NO: 2769496 - DNA, 25 bp, Homo sapien
aagcaccttctgcttactgctttgg

SEQ ID NO: 2769497 - DNA, 25 bp, Homo sapien
caatagggtgtccttctgcaccagt

SEQ ID NO: 2769498 - DNA, 25 bp, Homo sapien
gccttcggctgtgaaatctggactt

SEQ ID NO: 2769499 - DNA, 25 bp, Homo sapien
gcctttggcgaggaagcttgcagct

SEQ ID NO: 2769500 - DNA, 25 bp, Homo sapien
cagaaccacctttaggtcttggcct

SEQ ID NO: 2769501 - DNA, 25 bp, Homo sapien
gtctctgagtttaggaccaggctga

SEQ ID NO: 2769502 - DNA, 25 bp, Homo sapien
gaatggcagtaattaggtctctgag

SEQ ID NO: 2769503 - DNA, 25 bp, Homo sapien
tctgctgcttgaggcagcattgaag

SEQ ID NO: 2769504 - DNA, 25 bp, Homo sapien
agcattgaagttaaggcccttggaa

SEQ ID NO: 2769505 - DNA, 25 bp, Homo sapien
gccagcaaaggctgacggagtcttt

SEQ ID NO: 2769506 - DNA, 25 bp, Homo sapien
cttcctcatttaagaatccttgtct

SEQ ID NO: 2769507 - DNA, 25 bp, Homo sapien
gctgacggagtctttttcagatgcc

SEQ ID NO: 2769508 - DNA, 25 bp, Homo sapien
aatccttgtctttacactgggctca

SEQ ID NO: 2769509 - DNA, 25 bp, Homo sapien
caaattcttcaaaagttgatcatcc

SEQ ID NO: 2769510 - DNA, 25 bp, Homo sapien
gatcatccatacatcatatgcttgg

SEQ ID NO: 2769511 - DNA, 25 bp, Homo sapien
gcttggtaattttcaatcagaacat

SEQ ID NO: 2769512 - DNA, 25 bp, Homo sapien
ctatgggtttcaaaggatgtgggct

SEQ ID NO: 2769513 - DNA, 25 bp, Homo sapien
taacctgctgtggtttcttagctca

SEQ ID NO: 2769514 - DNA, 25 bp, Homo sapien
gcgggaggccatcgctgtgtccatt

SEQ ID NO: 2769515 - DNA, 25 bp, Homo sapien
tcttagctcaacgtctccagtgcga

SEQ ID NO: 2769516 - DNA, 25 bp, Homo sapien
ctgttttggtgacctcagtccctgg

SEQ ID NO: 2769517 - DNA, 25 bp, Homo sapien
agcgctccacgctgaagaggaagga

SEQ ID NO: 2769518 - DNA, 25 bp, Homo sapien
agaggaaggaaacttcacacttaat

SEQ ID NO: 2769519 - DNA, 25 bp, Homo sapien
ggaaggaaacttcacacttaattca

SEQ ID NO: 2769520 - DNA, 25 bp, Homo sapien
cccaccgggaagagcgctccacgct

SEQ ID NO: 2769521 - DNA, 25 bp, Homo sapien
gactcctcccatgagggaatctcag

SEQ ID NO: 2769522 - DNA, 25 bp, Homo sapien
tgactcctcccatgagggaatctca

SEQ ID NO: 2769523 - DNA, 25 bp, Homo sapien
actcctcccatgagggaatctcagc

SEQ ID NO: 2769524 - DNA, 25 bp, Homo sapien
caggcacgtacaatacacccagcaa

SEQ ID NO: 2769525 - DNA, 25 bp, Homo sapien
ttaggggatgcagtcaatactcatg

SEQ ID NO: 2769526 - DNA, 25 bp, Homo sapien
cagtcaatactcatgtctgacttca

SEQ ID NO: 2769527 - DNA, 25 bp, Homo sapien
gggatgcagtcaatactcatgtctg

SEQ ID NO: 2769528 - DNA, 25 bp, Homo sapien
gatgcagtcaatactcatgtctgac

SEQ ID NO: 2769529 - DNA, 25 bp, Homo sapien
tatcgggcacttcgagggctgtcag

SEQ ID NO: 2769530 - DNA, 25 bp, Homo sapien
ggtatccttatctggcagggcctca

SEQ ID NO: 2769531 - DNA, 25 bp, Homo sapien
agatagatggcactgggtatcctta

SEQ ID NO: 2769532 - DNA, 25 bp, Homo sapien
gactggctagttgctctgagctgag

SEQ ID NO: 2769533 - DNA, 25 bp, Homo sapien
tggaggtacagtgggagttctcagg

SEQ ID NO: 2769534 - DNA, 25 bp, Homo sapien
gaggtacagtgggagttctcagggc

SEQ ID NO: 2769535 - DNA, 25 bp, Homo sapien
ctggaggtacagtgggagttctcag

SEQ ID NO: 2769536 - DNA, 25 bp, Homo sapien
ggtacagtgggagttctcagggctg

SEQ ID NO: 2769537 - DNA, 25 bp, Homo sapien
tccaaagaacccagaagagtgccca

SEQ ID NO: 2769538 - DNA, 25 bp, Homo sapien
ccaaagaacccagaagagtgcccat

SEQ ID NO: 2769539 - DNA, 25 bp, Homo sapien
tctcggcatgaatgcgtggcccgac

SEQ ID NO: 2769540 - DNA, 25 bp, Homo sapien
gctggagaggagacattgaaagctc

SEQ ID NO: 2769541 - DNA, 25 bp, Homo sapien
cattccattgaagcctgccagaagg

SEQ ID NO: 2769542 - DNA, 25 bp, Homo sapien
tatctgcctcttgacccagctgtgg

SEQ ID NO: 2769543 - DNA, 25 bp, Homo sapien
aatacacagcccgttctgcccagtg

SEQ ID NO: 2769544 - DNA, 25 bp, Homo sapien
tccccaagctaagttcaacaaagga

SEQ ID NO: 2769545 - DNA, 25 bp, Homo sapien
gaaggctggcgcaaaggcagctttc

SEQ ID NO: 2769546 - DNA, 25 bp, Homo sapien
ggagcagactgtggaaatacacagc

SEQ ID NO: 2769547 - DNA, 25 bp, Homo sapien
gagtagagtctggatccaaaccagg

SEQ ID NO: 2769548 - DNA, 25 bp, Homo sapien
cacaagctttcatgcgaggagccag

SEQ ID NO: 2769549 - DNA, 25 bp, Homo sapien
gctttagaagcccaagtgagtgtga

SEQ ID NO: 2769550 - DNA, 25 bp, Homo sapien
aatgtgggcattgacaaggcttagc

SEQ ID NO: 2769551 - DNA, 25 bp, Homo sapien
aatgccaactggactcttgcagaga

SEQ ID NO: 2769552 - DNA, 25 bp, Homo sapien
gactcttgcagagataaaaatgctc

SEQ ID NO: 2769553 - DNA, 25 bp, Homo sapien
tgctcagagctatcagctagaattt

SEQ ID NO: 2769554 - DNA, 25 bp, Homo sapien
gctcagagctatcagctagaatttt

SEQ ID NO: 2769555 - DNA, 25 bp, Homo sapien
caggagaaggccagcttgatgtctc

SEQ ID NO: 2769556 - DNA, 25 bp, Homo sapien
ttgatgtctcccatgggacctgctt

SEQ ID NO: 2769557 - DNA, 25 bp, Homo sapien
ggccagcttgatgtctcccatggga

SEQ ID NO: 2769558 - DNA, 25 bp, Homo sapien
atgggacctgctttggtgaatttca

SEQ ID NO: 2769559 - DNA, 25 bp, Homo sapien
catcaagtacttctaacaggtcatc

SEQ ID NO: 2769560 - DNA, 25 bp, Homo sapien
atccccttgtctggaggtagatgtg

SEQ ID NO: 2769561 - DNA, 25 bp, Homo sapien
ccccttgtctggaggtagatgtgtg

SEQ ID NO: 2769562 - DNA, 25 bp, Homo sapien
cttgtcataccatcaagtacttcta

SEQ ID NO: 2769563 - DNA, 25 bp, Homo sapien
tattttattcaactcttgatgcttc

SEQ ID NO: 2769564 - DNA, 25 bp, Homo sapien
tattcaactcttgatgcttctgcat

SEQ ID NO: 2769565 - DNA, 25 bp, Homo sapien
tgcatagccttctcctctgaagagt

SEQ ID NO: 2769566 - DNA, 25 bp, Homo sapien
ttcaactcttgatgcttctgcatag

SEQ ID NO: 2769567 - DNA, 25 bp, Homo sapien
ggctccttcgcatgaagccaccttg

SEQ ID NO: 2769568 - DNA, 25 bp, Homo sapien
ctaaatcactttgtgtctgccttca

SEQ ID NO: 2769569 - DNA, 25 bp, Homo sapien
tccacggtggctggcagtacacttc

SEQ ID NO: 2769570 - DNA, 25 bp, Homo sapien
ggtccacggtggctggcagtacact

SEQ ID NO: 2769571 - DNA, 25 bp, Homo sapien
ttcccatctttctggttctgacagt

SEQ ID NO: 2769572 - DNA, 25 bp, Homo sapien
ggtctctgctagctcatcattcttc

SEQ ID NO: 2769573 - DNA, 25 bp, Homo sapien
catctttctggttctgacagtaact

SEQ ID NO: 2769574 - DNA, 25 bp, Homo sapien
cttcctggtctctgctagctcatca

SEQ ID NO: 2769575 - DNA, 25 bp, Homo sapien
agagataggcactgtttgaattcat

SEQ ID NO: 2769576 - DNA, 25 bp, Homo sapien
catagagataggcactgtttgaatt

SEQ ID NO: 2769577 - DNA, 25 bp, Homo sapien
catcatagagataggcactgtttga

SEQ ID NO: 2769578 - DNA, 25 bp, Homo sapien
tagagataggcactgtttgaattca

SEQ ID NO: 2769579 - DNA, 25 bp, Homo sapien
gactgtggccctggagtgccacaga

SEQ ID NO: 2769580 - DNA, 25 bp, Homo sapien
cacagaaatgtgagtcccttccagc

SEQ ID NO: 2769581 - DNA, 25 bp, Homo sapien
tggagtgccacagaaatgtgagtcc

SEQ ID NO: 2769582 - DNA, 25 bp, Homo sapien
tggccctggagtgccacagaaatgt

SEQ ID NO: 2769583 - DNA, 25 bp, Homo sapien
caactcagggttccatgtgggagtc

SEQ ID NO: 2769584 - DNA, 25 bp, Homo sapien
ggttccatgtgggagtcagcagtct

SEQ ID NO: 2769585 - DNA, 25 bp, Homo sapien
ctgtagaatctgcaactcagggttc

SEQ ID NO: 2769586 - DNA, 25 bp, Homo sapien
gagtcagcagtctgtgaatagtcat

SEQ ID NO: 2769587 - DNA, 25 bp, Homo sapien
agttcatggctgttcgtccgtgaca

SEQ ID NO: 2769588 - DNA, 25 bp, Homo sapien
gacaggcgtttggtgcattttccag

SEQ ID NO: 2769589 - DNA, 25 bp, Homo sapien
tcatggctgttcgtccgtgacaggc

SEQ ID NO: 2769590 - DNA, 25 bp, Homo sapien
tcgtccgtgacaggcgtttggtgca

SEQ ID NO: 2769591 - DNA, 25 bp, Homo sapien
cttgtctcataagttcctaatggtt

SEQ ID NO: 2769592 - DNA, 25 bp, Homo sapien
tgggaccatgtgacatgagcatttc

SEQ ID NO: 2769593 - DNA, 25 bp, Homo sapien
ctgcagtgggaccatgtgacatgag

SEQ ID NO: 2769594 - DNA, 25 bp, Homo sapien
ctctttgagtaaacgatatacctgg

SEQ ID NO: 2769595 - DNA, 25 bp, Homo sapien
gagagatgccgattctttccactat

SEQ ID NO: 2769596 - DNA, 25 bp, Homo sapien
gatgccgattctttccactatcact

SEQ ID NO: 2769597 - DNA, 25 bp, Homo sapien
cgggagagatgccgattctttccac

SEQ ID NO: 2769598 - DNA, 25 bp, Homo sapien
cgattctttccactatcacttcatg

SEQ ID NO: 2769599 - DNA, 25 bp, Homo sapien
ctgtggcaagaaggccgtagagagc

SEQ ID NO: 2769600 - DNA, 25 bp, Homo sapien
aagaaggccgtagagagcagcaaaa

SEQ ID NO: 2769601 - DNA, 25 bp, Homo sapien
gcaagaaggccgtagagagcagcaa

SEQ ID NO: 2769602 - DNA, 25 bp, Homo sapien
tggcaagaaggccgtagagagcagc

SEQ ID NO: 2769603 - DNA, 25 bp, Homo sapien
cagtaagctgccctagccttgcagc

SEQ ID NO: 2769604 - DNA, 25 bp, Homo sapien
tgctcagtaagctgccctagccttg

SEQ ID NO: 2769605 - DNA, 25 bp, Homo sapien
gctgccctagccttgcagcttttgc

SEQ ID NO: 2769606 - DNA, 25 bp, Homo sapien
tttctatggcctctgctcagtaagc

SEQ ID NO: 2769607 - DNA, 25 bp, Homo sapien
acggatttttcaacaccactaattg

SEQ ID NO: 2769608 - DNA, 25 bp, Homo sapien
tccctctacggatttttcaacacca

SEQ ID NO: 2769609 - DNA, 25 bp, Homo sapien
tctcacccttgcataggcatttgtt

SEQ ID NO: 2769610 - DNA, 25 bp, Homo sapien
tgaaatcactgcctacgttttcttt

SEQ ID NO: 2769611 - DNA, 25 bp, Homo sapien
caccactgttggctctgggctttgg

SEQ ID NO: 2769612 - DNA, 25 bp, Homo sapien
tcacttaggtgggattcagagaaag

SEQ ID NO: 2769613 - DNA, 25 bp, Homo sapien
ctgggatgggattttgatcacttag

SEQ ID NO: 2769614 - DNA, 25 bp, Homo sapien
aataaccatcctcctattgctgctg

SEQ ID NO: 2769615 - DNA, 25 bp, Homo sapien
taaggcccacccacaaaacttctgc

SEQ ID NO: 2769616 - DNA, 25 bp, Homo sapien
aaggcccacccacaaaacttctgct

SEQ ID NO: 2769617 - DNA, 25 bp, Homo sapien
ggaaatgatgcaggcctgctaggtc

SEQ ID NO: 2769618 - DNA, 25 bp, Homo sapien
agagggaaatgatgcaggcctgcta

SEQ ID NO: 2769619 - DNA, 25 bp, Homo sapien
ttgtgggtccgaactctgtctgcag

SEQ ID NO: 2769620 - DNA, 25 bp, Homo sapien
aaggtgctggcttttagcgggacac

SEQ ID NO: 2769621 - DNA, 25 bp, Homo sapien
attacacctcccaacaatgttaaag

SEQ ID NO: 2769622 - DNA, 25 bp, Homo sapien
ttttgtgggtccgaactctgtctgc

SEQ ID NO: 2769623 - DNA, 25 bp, Homo sapien
tatgttcatgattaacccaaaacta

SEQ ID NO: 2769624 - DNA, 25 bp, Homo sapien
tactctaggctgggccgatgttcct

SEQ ID NO: 2769625 - DNA, 25 bp, Homo sapien
ggctgggccgatgttcctctgatgt

SEQ ID NO: 2769626 - DNA, 25 bp, Homo sapien
tgattaacccaaaactagactgaaa

SEQ ID NO: 2769627 - DNA, 25 bp, Homo sapien
atttttggttgattctgggcatctt

SEQ ID NO: 2769628 - DNA, 25 bp, Homo sapien
ttttggttgattctgggcatctttc

SEQ ID NO: 2769629 - DNA, 25 bp, Homo sapien
catttttggttgattctgggcatct

SEQ ID NO: 2769630 - DNA, 25 bp, Homo sapien
tttttggttgattctgggcatcttt

SEQ ID NO: 2769631 - DNA, 25 bp, Homo sapien
gaaccaagtcgacaaatggtccaag

SEQ ID NO: 2769632 - DNA, 25 bp, Homo sapien
tcgttggggtggaaccaagtcgaca

SEQ ID NO: 2769633 - DNA, 25 bp, Homo sapien
gccttttgatatggttctcgttggg

SEQ ID NO: 2769634 - DNA, 25 bp, Homo sapien
cagccttttgatatggttctcgttg

SEQ ID NO: 2769635 - DNA, 25 bp, Homo sapien
gtcagcttgctgtttgagattcaca

SEQ ID NO: 2769636 - DNA, 25 bp, Homo sapien
tgtcacactcccaaccggaatgtca

SEQ ID NO: 2769637 - DNA, 25 bp, Homo sapien
gagattcacactgacactcggtccc

SEQ ID NO: 2769638 - DNA, 25 bp, Homo sapien
actcccaaccggaatgtcagcttgc

SEQ ID NO: 2769639 - DNA, 25 bp, Homo sapien
tgccaacctgtacctgaaccgcggg

SEQ ID NO: 2769640 - DNA, 25 bp, Homo sapien
ggcgggtgggggactccggagctgc

SEQ ID NO: 2769641 - DNA, 25 bp, Homo sapien
ttgaaagaactgagtcgaggcgggt

SEQ ID NO: 2769642 - DNA, 25 bp, Homo sapien
gcggggagtcctgcaaggttttggc

SEQ ID NO: 2769643 - DNA, 25 bp, Homo sapien
gccagtcttagggacagagagcact

SEQ ID NO: 2769644 - DNA, 25 bp, Homo sapien
cagtattgctgtctgtgatacccag

SEQ ID NO: 2769645 - DNA, 25 bp, Homo sapien
cctgagctttccttagcagtattgc

SEQ ID NO: 2769646 - DNA, 25 bp, Homo sapien
tcatgtgcctgatctcctgagcttt

SEQ ID NO: 2769647 - DNA, 25 bp, Homo sapien
aacaatacttcttgatccaggtgag

SEQ ID NO: 2769648 - DNA, 25 bp, Homo sapien
tgaggtcgtctgtaagggctgcagt

SEQ ID NO: 2769649 - DNA, 25 bp, Homo sapien
ggtcgtctgtaagggctgcagtaaa

SEQ ID NO: 2769650 - DNA, 25 bp, Homo sapien
tccaggtgagatcaggccaaattcc

SEQ ID NO: 2769651 - DNA, 25 bp, Homo sapien
aggcatatgcatcaaacattctgac

SEQ ID NO: 2769652 - DNA, 25 bp, Homo sapien
agagtcagtgcccacatccttcacc

SEQ ID NO: 2769653 - DNA, 25 bp, Homo sapien
ggcatatgcatcaaacattctgaca

SEQ ID NO: 2769654 - DNA, 25 bp, Homo sapien
gagtcagtgcccacatccttcacca

SEQ ID NO: 2769655 - DNA, 25 bp, Homo sapien
gggtcctctcccaagagcgcatcgt

SEQ ID NO: 2769656 - DNA, 25 bp, Homo sapien
ctcccaagagcgcatcgtgatccat

SEQ ID NO: 2769657 - DNA, 25 bp, Homo sapien
tctcccaagagcgcatcgtgatcca

SEQ ID NO: 2769658 - DNA, 25 bp, Homo sapien
tcctctcccaagagcgcatcgtgat

SEQ ID NO: 2769659 - DNA, 25 bp, Homo sapien
gagggacccgtttgcagcttctcag

SEQ ID NO: 2769660 - DNA, 25 bp, Homo sapien
tgtctctggagggacccgtttgcag

SEQ ID NO: 2769661 - DNA, 25 bp, Homo sapien
gcagcttctcagacacgtgcaaaag

SEQ ID NO: 2769662 - DNA, 25 bp, Homo sapien
cgtttgcagcttctcagacacgtgc

SEQ ID NO: 2769663 - DNA, 25 bp, Homo sapien
actggaacagccatatgagtgtggg

SEQ ID NO: 2769664 - DNA, 25 bp, Homo sapien
gactgtgtctaagatgccaattgaa

SEQ ID NO: 2769665 - DNA, 25 bp, Homo sapien
tactatgtttcctttacagactgtg

SEQ ID NO: 2769666 - DNA, 25 bp, Homo sapien
tatgtttcctttacagactgtgtct

SEQ ID NO: 2769667 - DNA, 25 bp, Homo sapien
gggatctgacaagaatttcgtcttc

SEQ ID NO: 2769668 - DNA, 25 bp, Homo sapien
gacaagaatttcgtcttctgcagtg

SEQ ID NO: 2769669 - DNA, 25 bp, Homo sapien
atttcgtcttctgcagtgggaatgc

SEQ ID NO: 2769670 - DNA, 25 bp, Homo sapien
tgcagtgggaatgcatccactgtgg

SEQ ID NO: 2769671 - DNA, 25 bp, Homo sapien
catcttccctgattatttgcttttt

SEQ ID NO: 2769672 - DNA, 25 bp, Homo sapien
cagagactgccagttctttatacca

SEQ ID NO: 2769673 - DNA, 25 bp, Homo sapien
aacatgtctaaggagggttccagaa

SEQ ID NO: 2769674 - DNA, 25 bp, Homo sapien
ctggttctgctcaggttcttggctg

SEQ ID NO: 2769675 - DNA, 25 bp, Homo sapien
catttgaaagtcagggcatcccttt

SEQ ID NO: 2769676 - DNA, 25 bp, Homo sapien
tttgaaagtcagggcatccctttta

SEQ ID NO: 2769677 - DNA, 25 bp, Homo sapien
tcatttgaaagtcagggcatccctt

SEQ ID NO: 2769678 - DNA, 25 bp, Homo sapien
gaaagtcagggcatcccttttatac

SEQ ID NO: 2769679 - DNA, 25 bp, Homo sapien
tgatgggtccttttatcctgaaacg

SEQ ID NO: 2769680 - DNA, 25 bp, Homo sapien
tatcctgaaacgcttcacccgcttt

SEQ ID NO: 2769681 - DNA, 25 bp, Homo sapien
cgctttccaccccagcataacttca

SEQ ID NO: 2769682 - DNA, 25 bp, Homo sapien
tgaagtaccgccagccggctcagga

SEQ ID NO: 2769683 - DNA, 25 bp, Homo sapien
acccagatgttgaggagaggtgccc

SEQ ID NO: 2769684 - DNA, 25 bp, Homo sapien
caaggcctctttttcggagcttgtg

SEQ ID NO: 2769685 - DNA, 25 bp, Homo sapien
caggtggccaggttcgtgacgatcc

SEQ ID NO: 2769686 - DNA, 25 bp, Homo sapien
tctagctaccacatgaatggctttg

SEQ ID NO: 2769687 - DNA, 25 bp, Homo sapien
cttcttgtaccagatgtctgcggac

SEQ ID NO: 2769688 - DNA, 25 bp, Homo sapien
gcctggagcccttcttgtaccagat

SEQ ID NO: 2769689 - DNA, 25 bp, Homo sapien
tctttgcttgcctggagcccttctt

SEQ ID NO: 2769690 - DNA, 25 bp, Homo sapien
aggaacagctctttgcttgcctgga

SEQ ID NO: 2769691 - DNA, 25 bp, Homo sapien
ccttcctcttgagtggtgtcccttc

SEQ ID NO: 2769692 - DNA, 25 bp, Homo sapien
cttcctcttgagtggtgtcccttct

SEQ ID NO: 2769693 - DNA, 25 bp, Homo sapien
tgcagcagcggcatattgactattt

SEQ ID NO: 2769694 - DNA, 25 bp, Homo sapien
atgcagcagcggcatattgactatt

SEQ ID NO: 2769695 - DNA, 25 bp, Homo sapien
tgcatattcagatatcctgcatacc

SEQ ID NO: 2769696 - DNA, 25 bp, Homo sapien
catattcagatatcctgcataccat

SEQ ID NO: 2769697 - DNA, 25 bp, Homo sapien
tgtgcatattcagatatcctgcata

SEQ ID NO: 2769698 - DNA, 25 bp, Homo sapien
cttaggatctgtgcatattcagata

SEQ ID NO: 2769699 - DNA, 25 bp, Homo sapien
gagtcacataagaatgtgttctcag

SEQ ID NO: 2769700 - DNA, 25 bp, Homo sapien
tgtcccaggactagcaatgcccttg

SEQ ID NO: 2769701 - DNA, 25 bp, Homo sapien
acttcaggccgggagtcaagaccag

SEQ ID NO: 2769702 - DNA, 25 bp, Homo sapien
tctgcaacaatctagggagtcacat

SEQ ID NO: 2769703 - DNA, 25 bp, Homo sapien
tcccaagactctgaccaaggtttag

SEQ ID NO: 2769704 - DNA, 25 bp, Homo sapien
cttggcagtcactttttgatggctt

SEQ ID NO: 2769705 - DNA, 25 bp, Homo sapien
catggaacctcccaataacttggca

SEQ ID NO: 2769706 - DNA, 25 bp, Homo sapien
gcttctcggaattgtactgtctttt

SEQ ID NO: 2769707 - DNA, 25 bp, Homo sapien
tttctccacctgattattattctgg

SEQ ID NO: 2769708 - DNA, 25 bp, Homo sapien
ccccagcaaggctcaagttattact

SEQ ID NO: 2769709 - DNA, 25 bp, Homo sapien
gcataaattgaatccagccccagca

SEQ ID NO: 2769710 - DNA, 25 bp, Homo sapien
ggtgtcagttcttgtctcaggggct

SEQ ID NO: 2769711 - DNA, 25 bp, Homo sapien
tacatgggtacatagtatctggaag

SEQ ID NO: 2769712 - DNA, 25 bp, Homo sapien
ctggaaggtactgaacttagtttgc

SEQ ID NO: 2769713 - DNA, 25 bp, Homo sapien
tttcagagttgggtacatgggtaca

SEQ ID NO: 2769714 - DNA, 25 bp, Homo sapien
tctttcttctaggaactttcagagt

SEQ ID NO: 2769715 - DNA, 25 bp, Homo sapien
tccagcccaaccatgggtctgggac

SEQ ID NO: 2769716 - DNA, 25 bp, Homo sapien
ggggtgtactgaacctggattggca

SEQ ID NO: 2769717 - DNA, 25 bp, Homo sapien
gggtgtactgaacctggattggcaa

SEQ ID NO: 2769718 - DNA, 25 bp, Homo sapien
cagcccaaccatgggtctgggacac

SEQ ID NO: 2769719 - DNA, 25 bp, Homo sapien
tccatgagaactctcggcctctttc

SEQ ID NO: 2769720 - DNA, 25 bp, Homo sapien
ttccatgagaactctcggcctcttt

SEQ ID NO: 2769721 - DNA, 25 bp, Homo sapien
cattccaactccctggattttccat

SEQ ID NO: 2769722 - DNA, 25 bp, Homo sapien
tctccccattccaactccctggatt

SEQ ID NO: 2769723 - DNA, 25 bp, Homo sapien
tgtggccagagagtcttaacatcct

SEQ ID NO: 2769724 - DNA, 25 bp, Homo sapien
aaggagtcccattggtgtggccaga

SEQ ID NO: 2769725 - DNA, 25 bp, Homo sapien
tgagatcaaaggagtcccattggtg

SEQ ID NO: 2769726 - DNA, 25 bp, Homo sapien
gatcaaaggagtcccattggtgtgg

SEQ ID NO: 2769727 - DNA, 25 bp, Homo sapien
aacacaggcacgggtacttgaccat

SEQ ID NO: 2769728 - DNA, 25 bp, Homo sapien
aaacacaggcacgggtacttgacca

SEQ ID NO: 2769729 - DNA, 25 bp, Homo sapien
cacccagcgccaaacacaggcacgg

SEQ ID NO: 2769730 - DNA, 25 bp, Homo sapien
gcccagtgacccatcatgtgttatt

SEQ ID NO: 2769731 - DNA, 25 bp, Homo sapien
ggtcatcaggttctgccaaagtgca

SEQ ID NO: 2769732 - DNA, 25 bp, Homo sapien
tctgcccagtgacccatcatgtgtt

SEQ ID NO: 2769733 - DNA, 25 bp, Homo sapien
tcttcgaaacagctcaacaccctgg

SEQ ID NO: 2769734 - DNA, 25 bp, Homo sapien
tggtcccttcatatgccataggctc

SEQ ID NO: 2769735 - DNA, 25 bp, Homo sapien
ctccaagatggtcccttcatatgcc

SEQ ID NO: 2769736 - DNA, 25 bp, Homo sapien
gagatagaagagaccttcctccaag

SEQ ID NO: 2769737 - DNA, 25 bp, Homo sapien
tctgacttggagatagaagagacct

SEQ ID NO: 2769738 - DNA, 25 bp, Homo sapien
ttttgctgccattgcattggaaatt

SEQ ID NO: 2769739 - DNA, 25 bp, Homo sapien
taagtttagattagtgagagcattt

SEQ ID NO: 2769740 - DNA, 25 bp, Homo sapien
tttagattagtgagagcatttttgc

SEQ ID NO: 2769741 - DNA, 25 bp, Homo sapien
tgctgccattgcattggaaattcat

SEQ ID NO: 2769742 - DNA, 25 bp, Homo sapien
ctagccctgagtttgaaattgtgtg

SEQ ID NO: 2769743 - DNA, 25 bp, Homo sapien
aattgtgtgtgagtctccaaagaga

SEQ ID NO: 2769744 - DNA, 25 bp, Homo sapien
tcttcaagacatgcacacgacaggg

SEQ ID NO: 2769745 - DNA, 25 bp, Homo sapien
cctgttagtatggtacgcagttgca

SEQ ID NO: 2769746 - DNA, 25 bp, Homo sapien
tcagacactccagcgctcttcccac

SEQ ID NO: 2769747 - DNA, 25 bp, Homo sapien
ttgcactgcctaaatttgctggatt

SEQ ID NO: 2769748 - DNA, 25 bp, Homo sapien
ctgcctaaatttgctggattcactt

SEQ ID NO: 2769749 - DNA, 25 bp, Homo sapien
cactgcctaaatttgctggattcac

SEQ ID NO: 2769750 - DNA, 25 bp, Homo sapien
gaaaaccaggtaatgcgctcctccg

SEQ ID NO: 2769751 - DNA, 25 bp, Homo sapien
gatttaatccgaggcgtcttgctcc

SEQ ID NO: 2769752 - DNA, 25 bp, Homo sapien
gcgccggctgcgaaatggatttaat

SEQ ID NO: 2769753 - DNA, 25 bp, Homo sapien
tgtgcgcccgggacttggtgaaact

SEQ ID NO: 2769754 - DNA, 25 bp, Homo sapien
tcattctgatattcatgccaggaat

SEQ ID NO: 2769755 - DNA, 25 bp, Homo sapien
tctgatattcatgccaggaatatgc

SEQ ID NO: 2769756 - DNA, 25 bp, Homo sapien
gatattcatgccaggaatatgccat

SEQ ID NO: 2769757 - DNA, 25 bp, Homo sapien
cattctgatattcatgccaggaata

SEQ ID NO: 2769758 - DNA, 25 bp, Homo sapien
gaaggtaggtgttaattccctggca

SEQ ID NO: 2769759 - DNA, 25 bp, Homo sapien
tccctggcacttcaaggcttatagg

SEQ ID NO: 2769760 - DNA, 25 bp, Homo sapien
gaacaagcagctcagttatcccacc

SEQ ID NO: 2769761 - DNA, 25 bp, Homo sapien
tagaacctaaactcatgggagaaac

SEQ ID NO: 2769762 - DNA, 25 bp, Homo sapien
gggaggcaccagcttgtaagccaca

SEQ ID NO: 2769763 - DNA, 25 bp, Homo sapien
tagctccaaactacagggtctgtgg

SEQ ID NO: 2769764 - DNA, 25 bp, Homo sapien
gctcttcattagctccaaactacag

SEQ ID NO: 2769765 - DNA, 25 bp, Homo sapien
ggcaccagcttgtaagccacagaca

SEQ ID NO: 2769766 - DNA, 25 bp, Homo sapien
acagtgtcaaaactcccgtctggaa

SEQ ID NO: 2769767 - DNA, 25 bp, Homo sapien
gtgaagacagtgcatttgtacagtg

SEQ ID NO: 2769768 - DNA, 25 bp, Homo sapien
gacagtgcatttgtacagtgtcaaa

SEQ ID NO: 2769769 - DNA, 25 bp, Homo sapien
aaaactcccgtctggaatgatcttc

SEQ ID NO: 2769770 - DNA, 25 bp, Homo sapien
tcagccgactccaaagtgaggcact

SEQ ID NO: 2769771 - DNA, 25 bp, Homo sapien
cagccgactccaaagtgaggcacta

SEQ ID NO: 2769772 - DNA, 25 bp, Homo sapien
taaaatcatcagttctcttggggac

SEQ ID NO: 2769773 - DNA, 25 bp, Homo sapien
gattcaatcacctccgtcccacaac

SEQ ID NO: 2769774 - DNA, 25 bp, Homo sapien
catatcacttaggtagactttcttt

SEQ ID NO: 2769775 - DNA, 25 bp, Homo sapien
tcacctccgtcccacaacttgtggg

SEQ ID NO: 2769776 - DNA, 25 bp, Homo sapien
ctccagtcatcgctaaagcctgaat

SEQ ID NO: 2769777 - DNA, 25 bp, Homo sapien
ccctccagtcatcgctaaagcctga

SEQ ID NO: 2769778 - DNA, 25 bp, Homo sapien
gaccctccagtcatcgctaaagcct

SEQ ID NO: 2769779 - DNA, 25 bp, Homo sapien
ccagtcatcgctaaagcctgaatct

SEQ ID NO: 2769780 - DNA, 25 bp, Homo sapien
catccgtttgaagtaggtattccac

SEQ ID NO: 2769781 - DNA, 25 bp, Homo sapien
ctcaagtttcttgactgagccagaa

SEQ ID NO: 2769782 - DNA, 25 bp, Homo sapien
tcagggttagaaccaaggcaggctg

SEQ ID NO: 2769783 - DNA, 25 bp, Homo sapien
catagcttaattatatgccagctgc

SEQ ID NO: 2769784 - DNA, 25 bp, Homo sapien
ttcatgccgtttcttcttccacttg

SEQ ID NO: 2769785 - DNA, 25 bp, Homo sapien
caatcccttttttcatgccgtttct

SEQ ID NO: 2769786 - DNA, 25 bp, Homo sapien
ttttcatgccgtttcttcttccact

SEQ ID NO: 2769787 - DNA, 25 bp, Homo sapien
ctccaattcaaattccgtctgtgct

SEQ ID NO: 2769788 - DNA, 25 bp, Homo sapien
ctaccagcttctctactcacccaac

SEQ ID NO: 2769789 - DNA, 25 bp, Homo sapien
catctgtgtggccacttgcagtttc

SEQ ID NO: 2769790 - DNA, 25 bp, Homo sapien
tctgtgtggccacttgcagtttcca

SEQ ID NO: 2769791 - DNA, 25 bp, Homo sapien
tctctactcacccaacctctggcat

SEQ ID NO: 2769792 - DNA, 25 bp, Homo sapien
catgagaccctccgcatgctgaagg

SEQ ID NO: 2769793 - DNA, 25 bp, Homo sapien
tcatgagaccctccgcatgctgaag

SEQ ID NO: 2769794 - DNA, 25 bp, Homo sapien
tttcccttggtgaagctctgactgg

SEQ ID NO: 2769795 - DNA, 25 bp, Homo sapien
ctcatgagaccctccgcatgctgaa

SEQ ID NO: 2769796 - DNA, 25 bp, Homo sapien
agattcttgtttcgcaggcacttga

SEQ ID NO: 2769797 - DNA, 25 bp, Homo sapien
gcaggcgatttttgaacataacaca

SEQ ID NO: 2769798 - DNA, 25 bp, Homo sapien
ccttgtggcttgaatttgcaggcga

SEQ ID NO: 2769799 - DNA, 25 bp, Homo sapien
gcagatgtagtgatatagatctttc

SEQ ID NO: 2769800 - DNA, 25 bp, Homo sapien
ctttccttgtcacaaagagttgttc

SEQ ID NO: 2769801 - DNA, 25 bp, Homo sapien
gtgacactttggctatgccacagag

SEQ ID NO: 2769802 - DNA, 25 bp, Homo sapien
tgttcacgtgtgagaactactgaaa

SEQ ID NO: 2769803 - DNA, 25 bp, Homo sapien
gaaaaatgatcatctgagggtgaca

SEQ ID NO: 2769804 - DNA, 25 bp, Homo sapien
tttagctcagacagatacaaaggga

SEQ ID NO: 2769805 - DNA, 25 bp, Homo sapien
caagcatcatttcagtaataggcca

SEQ ID NO: 2769806 - DNA, 25 bp, Homo sapien
gccctcagggttgcaataagttgta

SEQ ID NO: 2769807 - DNA, 25 bp, Homo sapien
gatttattagcaatggccctcaggg

SEQ ID NO: 2769808 - DNA, 25 bp, Homo sapien
gctccagtccccatgactgtgtcat

SEQ ID NO: 2769809 - DNA, 25 bp, Homo sapien
cagctccagtccccatgactgtgtc

SEQ ID NO: 2769810 - DNA, 25 bp, Homo sapien
accagctccagtccccatgactgtg

SEQ ID NO: 2769811 - DNA, 25 bp, Homo sapien
ctctttggagtgtgattcttcacca

SEQ ID NO: 2769812 - DNA, 25 bp, Homo sapien
gttggcaggaggaaaccggagagaa

SEQ ID NO: 2769813 - DNA, 25 bp, Homo sapien
tggcaggaggaaaccggagagaaac

SEQ ID NO: 2769814 - DNA, 25 bp, Homo sapien
caggaggaaaccggagagaaacctg

SEQ ID NO: 2769815 - DNA, 25 bp, Homo sapien
gaggaaaccggagagaaacctgatc

SEQ ID NO: 2769816 - DNA, 25 bp, Homo sapien
ggtctgatgtggagagatgacccca

SEQ ID NO: 2769817 - DNA, 25 bp, Homo sapien
gagagatgaccccatgcttgacccc

SEQ ID NO: 2769818 - DNA, 25 bp, Homo sapien
aacctgagcctggtcccaaccaaga

SEQ ID NO: 2769819 - DNA, 25 bp, Homo sapien
tgatgtggagagatgaccccatgct

SEQ ID NO: 2769820 - DNA, 25 bp, Homo sapien
gactgactctagtaggttgtcaact

SEQ ID NO: 2769821 - DNA, 25 bp, Homo sapien
tccaactgagtctaaacaggaacca

SEQ ID NO: 2769822 - DNA, 25 bp, Homo sapien
tgtctccagcggctcttgatctgtg

SEQ ID NO: 2769823 - DNA, 25 bp, Homo sapien
tctaacataactgcattgactgact

SEQ ID NO: 2769824 - DNA, 25 bp, Homo sapien
ccactgctatgatgggggcccaaag

SEQ ID NO: 2769825 - DNA, 25 bp, Homo sapien
ggatatcattgcatattgccgccaa

SEQ ID NO: 2769826 - DNA, 25 bp, Homo sapien
gaggctcgggaatttcaatcatggc

SEQ ID NO: 2769827 - DNA, 25 bp, Homo sapien
gcaggcaatgtcttacgtggccaga

SEQ ID NO: 2769828 - DNA, 25 bp, Homo sapien
gataagaacggatttatggccctgg

SEQ ID NO: 2769829 - DNA, 25 bp, Homo sapien
tcttcaaaccttgcttgatgtgaca

SEQ ID NO: 2769830 - DNA, 25 bp, Homo sapien
tacaatcccaaagcatgtgacttcc

SEQ ID NO: 2769831 - DNA, 25 bp, Homo sapien
ccatgctggactaacttctgtttgc

SEQ ID NO: 2769832 - DNA, 25 bp, Homo sapien
tacaggagaacacaatgctacaatc

SEQ ID NO: 2769833 - DNA, 25 bp, Homo sapien
gttgtgttagctgatccctgcggtc

SEQ ID NO: 2769834 - DNA, 25 bp, Homo sapien
gcaggagcccagaattctagatcaa

SEQ ID NO: 2769835 - DNA, 25 bp, Homo sapien
gcttctctgggcgagtctcatggat

SEQ ID NO: 2769836 - DNA, 25 bp, Homo sapien
gaattcttatcactggcttggaccg

SEQ ID NO: 2769837 - DNA, 25 bp, Homo sapien
tctttggattgggaggcagagtccc

SEQ ID NO: 2769838 - DNA, 25 bp, Homo sapien
ggcagtaagagatctcagccaccta

SEQ ID NO: 2769839 - DNA, 25 bp, Homo sapien
gagcttcctctaatgggatgcatga

SEQ ID NO: 2769840 - DNA, 25 bp, Homo sapien
caatcgagttggtaaacacaagggc

SEQ ID NO: 2769841 - DNA, 25 bp, Homo sapien
tcttggtggcttcttactttgtgga

SEQ ID NO: 2769842 - DNA, 25 bp, Homo sapien
tacacgtgtgttgactttatcaagc

SEQ ID NO: 2769843 - DNA, 25 bp, Homo sapien
gaaggaatgtcctacaagtcttggt

SEQ ID NO: 2769844 - DNA, 25 bp, Homo sapien
tctccatagaatgcatgccctctgg

SEQ ID NO: 2769845 - DNA, 25 bp, Homo sapien
tgcagcagaactagcataaatttca

SEQ ID NO: 2769846 - DNA, 25 bp, Homo sapien
accctatatatgcagcagaactagc

SEQ ID NO: 2769847 - DNA, 25 bp, Homo sapien
atgcagcagaactagcataaatttc

SEQ ID NO: 2769848 - DNA, 25 bp, Homo sapien
tatgcagcagaactagcataaattt

SEQ ID NO: 2769849 - DNA, 25 bp, Homo sapien
taaaagatgcacttcatggcttctc

SEQ ID NO: 2769850 - DNA, 25 bp, Homo sapien
ttaaaagatgcacttcatggcttct

SEQ ID NO: 2769851 - DNA, 25 bp, Homo sapien
cttcactgccagaaaggtacgctca

SEQ ID NO: 2769852 - DNA, 25 bp, Homo sapien
aaggagggctatgactgtgactgcc

SEQ ID NO: 2769853 - DNA, 25 bp, Homo sapien
gaagcatgacttcacctccggagtg

SEQ ID NO: 2769854 - DNA, 25 bp, Homo sapien
gaatgaccgaaccatccatgtgaag

SEQ ID NO: 2769855 - DNA, 25 bp, Homo sapien
gccctggtatctagaataggcttcc

SEQ ID NO: 2769856 - DNA, 25 bp, Homo sapien
tggtatctagaataggcttcccaca

SEQ ID NO: 2769857 - DNA, 25 bp, Homo sapien
tctagaataggcttcccacatatat

SEQ ID NO: 2769858 - DNA, 25 bp, Homo sapien
ggacacggccctggtatctagaata

SEQ ID NO: 2769859 - DNA, 25 bp, Homo sapien
tattaaacatctccagttgccaggt

SEQ ID NO: 2769860 - DNA, 25 bp, Homo sapien
gagccttatatcattccagacacag

SEQ ID NO: 2769861 - DNA, 25 bp, Homo sapien
taatctcgggagatgggcatagcta

SEQ ID NO: 2769862 - DNA, 25 bp, Homo sapien
tagctattcccatcttaggtgagga

SEQ ID NO: 2769863 - DNA, 25 bp, Homo sapien
gacttgctcacacgtgtcagggttg

SEQ ID NO: 2769864 - DNA, 25 bp, Homo sapien
tcagggttgctaattcaggacagcc

SEQ ID NO: 2769865 - DNA, 25 bp, Homo sapien
tgggcttgactaggtggatcttccg

SEQ ID NO: 2769866 - DNA, 25 bp, Homo sapien
cctcatgcgccttaagtggtcagct

SEQ ID NO: 2769867 - DNA, 25 bp, Homo sapien
cacgagagtaaaggtggaaggcctt

SEQ ID NO: 2769868 - DNA, 25 bp, Homo sapien
ctttcacagcctcggcttggcactg

SEQ ID NO: 2769869 - DNA, 25 bp, Homo sapien
aaggtggaaggcctttcacagcctc

SEQ ID NO: 2769870 - DNA, 25 bp, Homo sapien
gggagggcacgagcacgagagtaaa

SEQ ID NO: 2769871 - DNA, 25 bp, Homo sapien
ctggccccgttgctgttctgaggag

SEQ ID NO: 2769872 - DNA, 25 bp, Homo sapien
ggaggcgaggtccatgatgttctca

SEQ ID NO: 2769873 - DNA, 25 bp, Homo sapien
ccaggccaggcctgatgcgagcagc

SEQ ID NO: 2769874 - DNA, 25 bp, Homo sapien
ggagctcagaggctaacagcagtcc

SEQ ID NO: 2769875 - DNA, 25 bp, Homo sapien
actggcgctttcctgctgctgcccc

SEQ ID NO: 2769876 - DNA, 25 bp, Homo sapien
ctgctggcacgggcactggcgcttt

SEQ ID NO: 2769877 - DNA, 25 bp, Homo sapien
tgccctgctggcacgggcactggcg

SEQ ID NO: 2769878 - DNA, 25 bp, Homo sapien
ccctgcaggagctgctaccccctcc

SEQ ID NO: 2769879 - DNA, 25 bp, Homo sapien
ccattgtgaggccagaagtcccagg

SEQ ID NO: 2769880 - DNA, 25 bp, Homo sapien
caaccattgtgaggccagaagtccc

SEQ ID NO: 2769881 - DNA, 25 bp, Homo sapien
ctcaaccattgtgaggccagaagtc

SEQ ID NO: 2769882 - DNA, 25 bp, Homo sapien
attgtgaggccagaagtcccagggc

SEQ ID NO: 2769883 - DNA, 25 bp, Homo sapien
gagattcggacaaaggccatgtccc

SEQ ID NO: 2769884 - DNA, 25 bp, Homo sapien
tgcccagggacacccgcattgttga

SEQ ID NO: 2769885 - DNA, 25 bp, Homo sapien
tcccttgggttagctgtcgtctgca

SEQ ID NO: 2769886 - DNA, 25 bp, Homo sapien
gagtctgcttgccaacgcatgccag

SEQ ID NO: 2769887 - DNA, 25 bp, Homo sapien
tgcaagctatttctgcccagcagcg

SEQ ID NO: 2769888 - DNA, 25 bp, Homo sapien
cccagcagcgtgttcccctgggccc

SEQ ID NO: 2769889 - DNA, 25 bp, Homo sapien
ataacctccataaccctggggagtg

SEQ ID NO: 2769890 - DNA, 25 bp, Homo sapien
cctggggagtggttgcaagctattt

SEQ ID NO: 2769891 - DNA, 25 bp, Homo sapien
catttccacagttccatgcaagcat

SEQ ID NO: 2769892 - DNA, 25 bp, Homo sapien
taaaggctatgccacggtcagctgt

SEQ ID NO: 2769893 - DNA, 25 bp, Homo sapien
cagatgatacctccccaaaaaccaa

SEQ ID NO: 2769894 - DNA, 25 bp, Homo sapien
tgtgccatcccaactaaaggctatg

SEQ ID NO: 2769895 - DNA, 25 bp, Homo sapien
ccagatgatacctccccaaaaacca

SEQ ID NO: 2769896 - DNA, 25 bp, Homo sapien
ctgttgtcacttcggataaaggcca

SEQ ID NO: 2769897 - DNA, 25 bp, Homo sapien
tgctttttacaattgagttggtctg

SEQ ID NO: 2769898 - DNA, 25 bp, Homo sapien
gcagtttcttctggttaaatccagg

SEQ ID NO: 2769899 - DNA, 25 bp, Homo sapien
tttacaattgagttggtctgcagtt

SEQ ID NO: 2769900 - DNA, 25 bp, Homo sapien
tctggttaaatccaggcccattcat

SEQ ID NO: 2769901 - DNA, 25 bp, Homo sapien
ccactgtatttcttacgggatagaa

SEQ ID NO: 2769902 - DNA, 25 bp, Homo sapien
tgttacaccaatggcacagcaatgt

SEQ ID NO: 2769903 - DNA, 25 bp, Homo sapien
acttctcctaagtgtgtaacatggg

SEQ ID NO: 2769904 - DNA, 25 bp, Homo sapien
atttgctaatgttggattcccacta

SEQ ID NO: 2769905 - DNA, 25 bp, Homo sapien
tactgagctttcacgatgtgcctag

SEQ ID NO: 2769906 - DNA, 25 bp, Homo sapien
taaggaccttgacttatggccagct

SEQ ID NO: 2769907 - DNA, 25 bp, Homo sapien
tatccaggccaatcttttgcaagca

SEQ ID NO: 2769908 - DNA, 25 bp, Homo sapien
tcttaagggcaacacataggatcta

SEQ ID NO: 2769909 - DNA, 25 bp, Homo sapien
tgggatctacacaagggtctagctg

SEQ ID NO: 2769910 - DNA, 25 bp, Homo sapien
tccacgagcggtgaaagtaatgctg

SEQ ID NO: 2769911 - DNA, 25 bp, Homo sapien
tatgagaccaccttgtaaatgcagg

SEQ ID NO: 2769912 - DNA, 25 bp, Homo sapien
taatgatctccattcctcgcaaggg

SEQ ID NO: 2769913 - DNA, 25 bp, Homo sapien
gggatggctctgattggatatattt

SEQ ID NO: 2769914 - DNA, 25 bp, Homo sapien
tgggtagccaagctcaacggcatgg

SEQ ID NO: 2769915 - DNA, 25 bp, Homo sapien
tgggaggaacatccaccagaaggtg

SEQ ID NO: 2769916 - DNA, 25 bp, Homo sapien
tctagaaaggagtaaacgtcaggca

SEQ ID NO: 2769917 - DNA, 25 bp, Homo sapien
ggtgtcaaagatcaccactgcctgg

SEQ ID NO: 2769918 - DNA, 25 bp, Homo sapien
gcctgaggtctgtaacccgcagttt

SEQ ID NO: 2769919 - DNA, 25 bp, Homo sapien
ggacaataggacacaaccacatggt

SEQ ID NO: 2769920 - DNA, 25 bp, Homo sapien
taaataacctgtgcagtccctccag

SEQ ID NO: 2769921 - DNA, 25 bp, Homo sapien
tgcttgaggctgatacatcgactga

SEQ ID NO: 2769922 - DNA, 25 bp, Homo sapien
tggaatatcagggtagaaggtttct

SEQ ID NO: 2769923 - DNA, 25 bp, Homo sapien
tggatttggaatatcagggtagaag

SEQ ID NO: 2769924 - DNA, 25 bp, Homo sapien
ctggatttggaatatcagggtagaa

SEQ ID NO: 2769925 - DNA, 25 bp, Homo sapien
tggcatttttaaggtcggtgaggac

SEQ ID NO: 2769926 - DNA, 25 bp, Homo sapien
taagcatgaatgcagccactggctc

SEQ ID NO: 2769927 - DNA, 25 bp, Homo sapien
gcacacacttgctggatgcctatgg

SEQ ID NO: 2769928 - DNA, 25 bp, Homo sapien
tttggaactgtaccgcagaccagcc

SEQ ID NO: 2769929 - DNA, 25 bp, Homo sapien
attctcgtttccgatagcaaaggat

SEQ ID NO: 2769930 - DNA, 25 bp, Homo sapien
tttccgatagcaaaggatacttgtc

SEQ ID NO: 2769931 - DNA, 25 bp, Homo sapien
tcgtttccgatagcaaaggatactt

SEQ ID NO: 2769932 - DNA, 25 bp, Homo sapien
tccgatagcaaaggatacttgtcac

SEQ ID NO: 2769933 - DNA, 25 bp, Homo sapien
actccaacaatgacagccactgcca

SEQ ID NO: 2769934 - DNA, 25 bp, Homo sapien
cactccaacaatgacagccactgcc

SEQ ID NO: 2769935 - DNA, 25 bp, Homo sapien
gatgagaatggcaataattaatccc

SEQ ID NO: 2769936 - DNA, 25 bp, Homo sapien
ggatgagaatggcaataattaatcc

SEQ ID NO: 2769937 - DNA, 25 bp, Homo sapien
agaatggcaataattaatcccacag

SEQ ID NO: 2769938 - DNA, 25 bp, Homo sapien
ctgggatgagaatggcaataattaa

SEQ ID NO: 2769939 - DNA, 25 bp, Homo sapien
cctttgtcaccacatacatactctt

SEQ ID NO: 2769940 - DNA, 25 bp, Homo sapien
tctcagtgtcttctgggatatgtca

SEQ ID NO: 2769941 - DNA, 25 bp, Homo sapien
actccaccatctgtataggctcgca

SEQ ID NO: 2769942 - DNA, 25 bp, Homo sapien
tataggctcgcaagaccaggtggta

SEQ ID NO: 2769943 - DNA, 25 bp, Homo sapien
ccatggtaagtgaaacagcggagaa

SEQ ID NO: 2769944 - DNA, 25 bp, Homo sapien
tagttaggcccttcagttctaagga

SEQ ID NO: 2769945 - DNA, 25 bp, Homo sapien
tggcagaaagcgaaaccatggtaag

SEQ ID NO: 2769946 - DNA, 25 bp, Homo sapien
cagtagtccgcccattttcctcaga

SEQ ID NO: 2769947 - DNA, 25 bp, Homo sapien
cattttactaatatcgaatctgcag

SEQ ID NO: 2769948 - DNA, 25 bp, Homo sapien
tgcagaagtatcctcaacagtaaaa

SEQ ID NO: 2769949 - DNA, 25 bp, Homo sapien
aaagcctctaagttcttccacagga

SEQ ID NO: 2769950 - DNA, 25 bp, Homo sapien
cctcatcttagatgtgtctctttct

SEQ ID NO: 2769951 - DNA, 25 bp, Homo sapien
tcagagagagatgatcacaaacgct

SEQ ID NO: 2769952 - DNA, 25 bp, Homo sapien
tcagtggctattcagatagacttca

SEQ ID NO: 2769953 - DNA, 25 bp, Homo sapien
gaagcttacatactaataaccatag

SEQ ID NO: 2769954 - DNA, 25 bp, Homo sapien
caaacacatatctagggaagcaatc

SEQ ID NO: 2769955 - DNA, 25 bp, Homo sapien
aattcttctatatatccaatcatgg

SEQ ID NO: 2769956 - DNA, 25 bp, Homo sapien
tatcttatacctggtcgaaactcat

SEQ ID NO: 2769957 - DNA, 25 bp, Homo sapien
aaaattatatcttatacctggtcga

SEQ ID NO: 2769958 - DNA, 25 bp, Homo sapien
gagcgtaataattgatatccttgat

SEQ ID NO: 2769959 - DNA, 25 bp, Homo sapien
gcttcagtgttaaaggaattaggtc

SEQ ID NO: 2769960 - DNA, 25 bp, Homo sapien
ggtccacatcatgcctctataaatc

SEQ ID NO: 2769961 - DNA, 25 bp, Homo sapien
taagccattcattcgaggtccacat

SEQ ID NO: 2769962 - DNA, 25 bp, Homo sapien
ctataaatcccttccttacctagtg

SEQ ID NO: 2769963 - DNA, 25 bp, Homo sapien
taaacgtttgttatgtgctggcacg

SEQ ID NO: 2769964 - DNA, 25 bp, Homo sapien
tcaagtgcctataaaacaccagtgg

SEQ ID NO: 2769965 - DNA, 25 bp, Homo sapien
cacgtcctaagtatgcagtaatgca

SEQ ID NO: 2769966 - DNA, 25 bp, Homo sapien
gaaacagctacaataagggccatct

SEQ ID NO: 2769967 - DNA, 25 bp, Homo sapien
cataaggcatggttccgaccgagac

SEQ ID NO: 2769968 - DNA, 25 bp, Homo sapien
gaccgagacgagttacaccacttaa

SEQ ID NO: 2769969 - DNA, 25 bp, Homo sapien
caccacttaatgacgtagtcgcaag

SEQ ID NO: 2769970 - DNA, 25 bp, Homo sapien
tttcccatcccaacaacttgttcta

SEQ ID NO: 2769971 - DNA, 25 bp, Homo sapien
ttcaataagaaaggaggatatttta

SEQ ID NO: 2769972 - DNA, 25 bp, Homo sapien
cttcaataagaaaggaggatatttt

SEQ ID NO: 2769973 - DNA, 25 bp, Homo sapien
tgtggacactgagaaggagaagtct

SEQ ID NO: 2769974 - DNA, 25 bp, Homo sapien
atgaggtgggatggccagtgtggac

SEQ ID NO: 2769975 - DNA, 25 bp, Homo sapien
caagggagaaagctgtggagacacc

SEQ ID NO: 2769976 - DNA, 25 bp, Homo sapien
agctgtggagacacccagaggcgat

SEQ ID NO: 2769977 - DNA, 25 bp, Homo sapien
gaatttttagccactacgctgatga

SEQ ID NO: 2769978 - DNA, 25 bp, Homo sapien
catactcgctattttggaaggtggt

SEQ ID NO: 2769979 - DNA, 25 bp, Homo sapien
tctgatgaacacgatacattgtagg

SEQ ID NO: 2769980 - DNA, 25 bp, Homo sapien
gaaggtggtgatgagcccacagaat

SEQ ID NO: 2769981 - DNA, 25 bp, Homo sapien
actctctccaagtatcaggcccctt

SEQ ID NO: 2769982 - DNA, 25 bp, Homo sapien
tctccaagtatcaggcccctttgaa

SEQ ID NO: 2769983 - DNA, 25 bp, Homo sapien
ctctctccaagtatcaggccccttt

SEQ ID NO: 2769984 - DNA, 25 bp, Homo sapien
ccactctctccaagtatcaggcccc

SEQ ID NO: 2769985 - DNA, 25 bp, Homo sapien
tatggatttaacttgtccagagcaa

SEQ ID NO: 2769986 - DNA, 25 bp, Homo sapien
aagtttcagtagaacaacgaatccg

SEQ ID NO: 2769987 - DNA, 25 bp, Homo sapien
caacgaatccgaaaagtatatagag

SEQ ID NO: 2769988 - DNA, 25 bp, Homo sapien
tagagtgtatggatttaacttgtcc

SEQ ID NO: 2769989 - DNA, 25 bp, Homo sapien
taattcttatatacctgccaagcca

SEQ ID NO: 2769990 - DNA, 25 bp, Homo sapien
tttgtatatgtaacacccaaagcag

SEQ ID NO: 2769991 - DNA, 25 bp, Homo sapien
caaagggctaatggtgatgcaataa

SEQ ID NO: 2769992 - DNA, 25 bp, Homo sapien
gccaagccaatgaaattatgccctg

SEQ ID NO: 2769993 - DNA, 25 bp, Homo sapien
ccttcactttgaatgaagtaggagt

SEQ ID NO: 2769994 - DNA, 25 bp, Homo sapien
taatctttgcaaagttgcctggtaa

SEQ ID NO: 2769995 - DNA, 25 bp, Homo sapien
gaaagtttaacagctgttgaattaa

SEQ ID NO: 2769996 - DNA, 25 bp, Homo sapien
tgccaagaaagtttaacagctgttg

SEQ ID NO: 2769997 - DNA, 25 bp, Homo sapien
aattgatagctttcgtttgtaggtg

SEQ ID NO: 2769998 - DNA, 25 bp, Homo sapien
ctttcgtttgtaggtgcttcagctc

SEQ ID NO: 2769999 - DNA, 25 bp, Homo sapien
taaaattgttgattgtgatcgaccc

SEQ ID NO: 2770000 - DNA, 25 bp, Homo sapien
gacccagcggattgtgagcattcaa

SEQ ID NO: 2770001 - DNA, 25 bp, Homo sapien
tgtagcttgtagcacgtgggcccac

SEQ ID NO: 2770002 - DNA, 25 bp, Homo sapien
caactaaagtgtagcttgtagcacg

SEQ ID NO: 2770003 - DNA, 25 bp, Homo sapien
taaagtgtagcttgtagcacgtggg

SEQ ID NO: 2770004 - DNA, 25 bp, Homo sapien
ctttcaactaaagtgtagcttgtag

SEQ ID NO: 2770005 - DNA, 25 bp, Homo sapien
ttcagttgttgaggagtatctggtg

SEQ ID NO: 2770006 - DNA, 25 bp, Homo sapien
agttgttgaggagtatctggtggat

SEQ ID NO: 2770007 - DNA, 25 bp, Homo sapien
cagttgttgaggagtatctggtgga

SEQ ID NO: 2770008 - DNA, 25 bp, Homo sapien
attcagttgttgaggagtatctggt

SEQ ID NO: 2770009 - DNA, 25 bp, Homo sapien
cggttccaaatatgttatcttcggt

SEQ ID NO: 2770010 - DNA, 25 bp, Homo sapien
tacatttgttccactacttgcagaa

SEQ ID NO: 2770011 - DNA, 25 bp, Homo sapien
tatcttgaggaaaaaccttagtctg

SEQ ID NO: 2770012 - DNA, 25 bp, Homo sapien
ttatgtctgagcctacaagtatcac

SEQ ID NO: 2770013 - DNA, 25 bp, Homo sapien
cccaggtaatcctcatgcagctgaa

SEQ ID NO: 2770014 - DNA, 25 bp, Homo sapien
gctcttcaattcctatgacagtgat

SEQ ID NO: 2770015 - DNA, 25 bp, Homo sapien
tcaaaatctccagggatggtgggct

SEQ ID NO: 2770016 - DNA, 25 bp, Homo sapien
tacagattcctgaagcctatctcag

SEQ ID NO: 2770017 - DNA, 25 bp, Homo sapien
caatgtagcatctaatttccacaaa

SEQ ID NO: 2770018 - DNA, 25 bp, Homo sapien
gaggcccaactccagtgatgaagtg

SEQ ID NO: 2770019 - DNA, 25 bp, Homo sapien
gtcactccactcttcgagaccagaa

SEQ ID NO: 2770020 - DNA, 25 bp, Homo sapien
ccagtgatgaagtgtatctttgcca

SEQ ID NO: 2770021 - DNA, 25 bp, Homo sapien
acagtcaccctacttgactatctaa

SEQ ID NO: 2770022 - DNA, 25 bp, Homo sapien
tatccattatctcatgagtattatc

SEQ ID NO: 2770023 - DNA, 25 bp, Homo sapien
tacttgactatctaacacagaactt

SEQ ID NO: 2770024 - DNA, 25 bp, Homo sapien
ccctacttgactatctaacacagaa

SEQ ID NO: 2770025 - DNA, 25 bp, Homo sapien
ttcaggcccgcaggtagcatgtgca

SEQ ID NO: 2770026 - DNA, 25 bp, Homo sapien
cagtggtaggataaccctctgggtc

SEQ ID NO: 2770027 - DNA, 25 bp, Homo sapien
caggcccctagaagaggtgctcagg

SEQ ID NO: 2770028 - DNA, 25 bp, Homo sapien
tacaatgtgctgagtgggccagtct

SEQ ID NO: 2770029 - DNA, 25 bp, Homo sapien
tccactttaggtataatgtagaggt

SEQ ID NO: 2770030 - DNA, 25 bp, Homo sapien
tcccagataacatttgagcggtgtg

SEQ ID NO: 2770031 - DNA, 25 bp, Homo sapien
gcagacaaattcaagatctctggag

SEQ ID NO: 2770032 - DNA, 25 bp, Homo sapien
taattttacgagctccatactctct

SEQ ID NO: 2770033 - DNA, 25 bp, Homo sapien
tattaatcgactgagtctcctacag

SEQ ID NO: 2770034 - DNA, 25 bp, Homo sapien
tcctacagtctgtcttgatttgcct

SEQ ID NO: 2770035 - DNA, 25 bp, Homo sapien
tattatttataatgctaccaataca

SEQ ID NO: 2770036 - DNA, 25 bp, Homo sapien
tattctaatcatgatcaggaccatt

SEQ ID NO: 2770037 - DNA, 25 bp, Homo sapien
ttttgttcatttagtgtgaatttac

SEQ ID NO: 2770038 - DNA, 25 bp, Homo sapien
cgttttgttcatttagtgtgaattt

SEQ ID NO: 2770039 - DNA, 25 bp, Homo sapien
acgttttgttcatttagtgtgaatt

SEQ ID NO: 2770040 - DNA, 25 bp, Homo sapien
aacgttttgttcatttagtgtgaat

SEQ ID NO: 2770041 - DNA, 25 bp, Homo sapien
tcataatcaccatgtgaaagagctg

SEQ ID NO: 2770042 - DNA, 25 bp, Homo sapien
ttctccaactgataacaagaacggg

SEQ ID NO: 2770043 - DNA, 25 bp, Homo sapien
gttatttcataatcaccatgtgaaa

SEQ ID NO: 2770044 - DNA, 25 bp, Homo sapien
ccaaaatcatgtagagaatttattg

SEQ ID NO: 2770045 - DNA, 25 bp, Homo sapien
ggaaatgaaactggcaactcccctg

SEQ ID NO: 2770046 - DNA, 25 bp, Homo sapien
gatgttcaacggatgctgatgaagg

SEQ ID NO: 2770047 - DNA, 25 bp, Homo sapien
tgagggaccagtgcatcacagcgct

SEQ ID NO: 2770048 - DNA, 25 bp, Homo sapien
tcacagcgctcctcatgctaggatg

SEQ ID NO: 2770049 - DNA, 25 bp, Homo sapien
cagttccacacttgcaaattgttag

SEQ ID NO: 2770050 - DNA, 25 bp, Homo sapien
ttccaagaacagttccacacttgca

SEQ ID NO: 2770051 - DNA, 25 bp, Homo sapien
acttcataatcagtaccacggcctg

SEQ ID NO: 2770052 - DNA, 25 bp, Homo sapien
acggcctgttccagagggtgctttc

SEQ ID NO: 2770053 - DNA, 25 bp, Homo sapien
tcaataatgggaccaagagagggct

SEQ ID NO: 2770054 - DNA, 25 bp, Homo sapien
gaatcttcaatagccccacttaagg

SEQ ID NO: 2770055 - DNA, 25 bp, Homo sapien
gggttaggctgctatcaaaaattcc

SEQ ID NO: 2770056 - DNA, 25 bp, Homo sapien
gaaagtgggccagctactagaccat

SEQ ID NO: 2770057 - DNA, 25 bp, Homo sapien
taaatgttgataacagccactggaa

SEQ ID NO: 2770058 - DNA, 25 bp, Homo sapien
gaagaataaatgttgataacagcca

SEQ ID NO: 2770059 - DNA, 25 bp, Homo sapien
gatggtcgtttcaaacatacgtaaa

SEQ ID NO: 2770060 - DNA, 25 bp, Homo sapien
atccaggatggtcgtttcaaacata

SEQ ID NO: 2770061 - DNA, 25 bp, Homo sapien
cagttccagttccatactgtgggca

SEQ ID NO: 2770062 - DNA, 25 bp, Homo sapien
tcaactacgctataagagtgactgg

SEQ ID NO: 2770063 - DNA, 25 bp, Homo sapien
tccctgttaattcaagagccagtcc

SEQ ID NO: 2770064 - DNA, 25 bp, Homo sapien
ccatctttcgggactcacgctatca

SEQ ID NO: 2770065 - DNA, 25 bp, Homo sapien
taacctgtcacaaaatgtactggca

SEQ ID NO: 2770066 - DNA, 25 bp, Homo sapien
tcttctatgtaagagtggaacagca

SEQ ID NO: 2770067 - DNA, 25 bp, Homo sapien
cacggtctacaacatctaagcaggt

SEQ ID NO: 2770068 - DNA, 25 bp, Homo sapien
gctctggcttcagaccacggtctac

SEQ ID NO: 2770069 - DNA, 25 bp, Homo sapien
tatttagttgttttgactcaataaa

SEQ ID NO: 2770070 - DNA, 25 bp, Homo sapien
aaatccagctttatgcttaaatata

SEQ ID NO: 2770071 - DNA, 25 bp, Homo sapien
caactgtatcaaaagtcttaaagat

SEQ ID NO: 2770072 - DNA, 25 bp, Homo sapien
tggagaaaattcaactgtatcaaaa

SEQ ID NO: 2770073 - DNA, 25 bp, Homo sapien
tgttccacaattcaacagtcctcgg

SEQ ID NO: 2770074 - DNA, 25 bp, Homo sapien
cactgccccattagcatttctgtca

SEQ ID NO: 2770075 - DNA, 25 bp, Homo sapien
aattctgcctgaagtctacatctca

SEQ ID NO: 2770076 - DNA, 25 bp, Homo sapien
ctccaactcgacaggtacaacaatt

SEQ ID NO: 2770077 - DNA, 25 bp, Homo sapien
cacttggcctcggttttctagcaga

SEQ ID NO: 2770078 - DNA, 25 bp, Homo sapien
tttatgtgatgcaccagcaccaagg

SEQ ID NO: 2770079 - DNA, 25 bp, Homo sapien
gatgtttacgctgtatgccggacgc

SEQ ID NO: 2770080 - DNA, 25 bp, Homo sapien
tgcgaattacctaaacagcccaggg

SEQ ID NO: 2770081 - DNA, 25 bp, Homo sapien
tgggaacctgcagcgcacagtgtca

SEQ ID NO: 2770082 - DNA, 25 bp, Homo sapien
tggccaactttaagctaccaaggtg

SEQ ID NO: 2770083 - DNA, 25 bp, Homo sapien
ccccattcctggctttagaaatgtt

SEQ ID NO: 2770084 - DNA, 25 bp, Homo sapien
taccaaggtgaaatcactaaacatg

SEQ ID NO: 2770085 - DNA, 25 bp, Homo sapien
catccctgctctgggttctgggacc

SEQ ID NO: 2770086 - DNA, 25 bp, Homo sapien
tctgggttctgggaccaatcttgtc

SEQ ID NO: 2770087 - DNA, 25 bp, Homo sapien
gctctgggttctgggaccaatcttg

SEQ ID NO: 2770088 - DNA, 25 bp, Homo sapien
ctataggctcatccctgctctgggt

SEQ ID NO: 2770089 - DNA, 25 bp, Homo sapien
ctataatgcgagccagcgctgggac

SEQ ID NO: 2770090 - DNA, 25 bp, Homo sapien
aacgtgacaccatccgataagcaaa

SEQ ID NO: 2770091 - DNA, 25 bp, Homo sapien
tagaaacgtgacaccatccgataag

SEQ ID NO: 2770092 - DNA, 25 bp, Homo sapien
tcatagaaacgtgacaccatccgat

SEQ ID NO: 2770093 - DNA, 25 bp, Homo sapien
gtgacaccatccgataagcaaacaa

SEQ ID NO: 2770094 - DNA, 25 bp, Homo sapien
gctctcaggacttccatttaccaca

SEQ ID NO: 2770095 - DNA, 25 bp, Homo sapien
ctgggcaaatctccccggtgccagt

SEQ ID NO: 2770096 - DNA, 25 bp, Homo sapien
gtgccagtcatctgcctagactgcc

SEQ ID NO: 2770097 - DNA, 25 bp, Homo sapien
tgtccagatagtgccttgcctgcct

SEQ ID NO: 2770098 - DNA, 25 bp, Homo sapien
cctgcctagtcttcctcccacaaga

SEQ ID NO: 2770099 - DNA, 25 bp, Homo sapien
tcttttgccaccaggtagagttagc

SEQ ID NO: 2770100 - DNA, 25 bp, Homo sapien
gcttattacactggacaaatgacca

SEQ ID NO: 2770101 - DNA, 25 bp, Homo sapien
gaaacaataatgtgatctcgcacag

SEQ ID NO: 2770102 - DNA, 25 bp, Homo sapien
cctgtcacagggagatggaacaagt

SEQ ID NO: 2770103 - DNA, 25 bp, Homo sapien
ccatgtgcttcccattagggttaga

SEQ ID NO: 2770104 - DNA, 25 bp, Homo sapien
gaacctggccagaacaagcaaggct

SEQ ID NO: 2770105 - DNA, 25 bp, Homo sapien
aaagggctcccaacgttcaatgatc

SEQ ID NO: 2770106 - DNA, 25 bp, Homo sapien
ccagggtcatgtttggaggtcgctt

SEQ ID NO: 2770107 - DNA, 25 bp, Homo sapien
tcagaactctttccaacttggcaaa

SEQ ID NO: 2770108 - DNA, 25 bp, Homo sapien
cagaactctttccaacttggcaaaa

SEQ ID NO: 2770109 - DNA, 25 bp, Homo sapien
tgtcaacctggacatcaggaaggcc

SEQ ID NO: 2770110 - DNA, 25 bp, Homo sapien
gtgtcaacctggacatcaggaaggc

SEQ ID NO: 2770111 - DNA, 25 bp, Homo sapien
cacagtcattcagagtcacatatga

SEQ ID NO: 2770112 - DNA, 25 bp, Homo sapien
acacacagtcattcagagtcacata

SEQ ID NO: 2770113 - DNA, 25 bp, Homo sapien
acagtcattcagagtcacatatgaa

SEQ ID NO: 2770114 - DNA, 25 bp, Homo sapien
cacacagtcattcagagtcacatat

SEQ ID NO: 2770115 - DNA, 25 bp, Homo sapien
ctgtaggatgccaaggattgactgg

SEQ ID NO: 2770116 - DNA, 25 bp, Homo sapien
aggaagaccatctctgtaggatgcc

SEQ ID NO: 2770117 - DNA, 25 bp, Homo sapien
actgaggaagaccatctctgtagga

SEQ ID NO: 2770118 - DNA, 25 bp, Homo sapien
gatgccaaggattgactggagaaag

SEQ ID NO: 2770119 - DNA, 25 bp, Homo sapien
caagtgcagttctgcagagcgaaag

SEQ ID NO: 2770120 - DNA, 25 bp, Homo sapien
aaagggcccggtgccttgcagcaga

SEQ ID NO: 2770121 - DNA, 25 bp, Homo sapien
taggagttgataatggtcttgcaag

SEQ ID NO: 2770122 - DNA, 25 bp, Homo sapien
tctgagctgggattaggagttgata

SEQ ID NO: 2770123 - DNA, 25 bp, Homo sapien
ctggctcggacagtgtaaaatcgcc

SEQ ID NO: 2770124 - DNA, 25 bp, Homo sapien
ggacagtgtaaaatcgcccttacca

SEQ ID NO: 2770125 - DNA, 25 bp, Homo sapien
gctcggacagtgtaaaatcgccctt

SEQ ID NO: 2770126 - DNA, 25 bp, Homo sapien
taaaatcgcccttaccattcatcca

SEQ ID NO: 2770127 - DNA, 25 bp, Homo sapien
tatagggtcacgaacagtacatctg

SEQ ID NO: 2770128 - DNA, 25 bp, Homo sapien
tgtgtactacttatagggtcacgaa

SEQ ID NO: 2770129 - DNA, 25 bp, Homo sapien
ggatttgtgtactacttatagggtc

SEQ ID NO: 2770130 - DNA, 25 bp, Homo sapien
tacttatagggtcacgaacagtaca

SEQ ID NO: 2770131 - DNA, 25 bp, Homo sapien
gtgtcagcatttgctcggcttcagg

SEQ ID NO: 2770132 - DNA, 25 bp, Homo sapien
ggcagaagatgaaacaggggcaggc

SEQ ID NO: 2770133 - DNA, 25 bp, Homo sapien
tggcagaagatgaaacaggggcagg

SEQ ID NO: 2770134 - DNA, 25 bp, Homo sapien
gtcagcatttgctcggcttcaggag

SEQ ID NO: 2770135 - DNA, 25 bp, Homo sapien
tactgaggtcttatacttaagaaca

SEQ ID NO: 2770136 - DNA, 25 bp, Homo sapien
tctccaagctgaagaatttattttc

SEQ ID NO: 2770137 - DNA, 25 bp, Homo sapien
cacaagaatctcctggttgcctgtc

SEQ ID NO: 2770138 - DNA, 25 bp, Homo sapien
tgtcagctccatttagttgaatttc

SEQ ID NO: 2770139 - DNA, 25 bp, Homo sapien
tctgaccagcagaacaccttgtggg

SEQ ID NO: 2770140 - DNA, 25 bp, Homo sapien
ggctgctgttgggatcactatacta

SEQ ID NO: 2770141 - DNA, 25 bp, Homo sapien
gctgaatgacctagccaaccaagag

SEQ ID NO: 2770142 - DNA, 25 bp, Homo sapien
ccttgtgggcaacgggctgaatgac

SEQ ID NO: 2770143 - DNA, 25 bp, Homo sapien
tcagtatagaggtgttcttaatctg

SEQ ID NO: 2770144 - DNA, 25 bp, Homo sapien
gaggtgttcttaatctgtgcgatgt

SEQ ID NO: 2770145 - DNA, 25 bp, Homo sapien
gtatagaggtgttcttaatctgtgc

SEQ ID NO: 2770146 - DNA, 25 bp, Homo sapien
tagaggtgttcttaatctgtgcgat

SEQ ID NO: 2770147 - DNA, 25 bp, Homo sapien
gctggcacagcctgttggttctatt

SEQ ID NO: 2770148 - DNA, 25 bp, Homo sapien
ggctgtccctatccatagagatgtg

SEQ ID NO: 2770149 - DNA, 25 bp, Homo sapien
gggattggggtatgggtatctctcc

SEQ ID NO: 2770150 - DNA, 25 bp, Homo sapien
gctgtgaaccagctggcacagcctg

SEQ ID NO: 2770151 - DNA, 25 bp, Homo sapien
tggaatgtactgacgaatgttcccc

SEQ ID NO: 2770152 - DNA, 25 bp, Homo sapien
ttccacactcaaagagtcagaagtc

SEQ ID NO: 2770153 - DNA, 25 bp, Homo sapien
atctggcaccagttcatagcccaag

SEQ ID NO: 2770154 - DNA, 25 bp, Homo sapien
gcccaagaattgagctaaaaatgga

SEQ ID NO: 2770155 - DNA, 25 bp, Homo sapien
tccttcatcccttctggggaagaaa

SEQ ID NO: 2770156 - DNA, 25 bp, Homo sapien
tctccttcatcccttctggggaaga

SEQ ID NO: 2770157 - DNA, 25 bp, Homo sapien
ttctggggaagaaatcttagaaaca

SEQ ID NO: 2770158 - DNA, 25 bp, Homo sapien
atcccttctggggaagaaatcttag

SEQ ID NO: 2770159 - DNA, 25 bp, Homo sapien
tctagaagtcttgaaccaaaggtcg

SEQ ID NO: 2770160 - DNA, 25 bp, Homo sapien
gaaagcggctggaattcaacttctt

SEQ ID NO: 2770161 - DNA, 25 bp, Homo sapien
acatggataccggaaggaagcgacc

SEQ ID NO: 2770162 - DNA, 25 bp, Homo sapien
tggagactggctaccacaagatgtt

SEQ ID NO: 2770163 - DNA, 25 bp, Homo sapien
aggttgaccttttcaggaggcaaga

SEQ ID NO: 2770164 - DNA, 25 bp, Homo sapien
tttcaggaggcaagatcattattcc

SEQ ID NO: 2770165 - DNA, 25 bp, Homo sapien
tccaaaatcagtgaagtaatcatca

SEQ ID NO: 2770166 - DNA, 25 bp, Homo sapien
cactcaattcaaatggaaggttgac

SEQ ID NO: 2770167 - DNA, 25 bp, Homo sapien
ccttggcaaccccacttcaaaatag

SEQ ID NO: 2770168 - DNA, 25 bp, Homo sapien
aatgttcgtgaagccatgaacttca

SEQ ID NO: 2770169 - DNA, 25 bp, Homo sapien
atggcacagccttggcaaccccact

SEQ ID NO: 2770170 - DNA, 25 bp, Homo sapien
tcattcttctgatggactatttgat

SEQ ID NO: 2770171 - DNA, 25 bp, Homo sapien
aaatgtattgtgtatggtccactta

SEQ ID NO: 2770172 - DNA, 25 bp, Homo sapien
aaaaaatgtattgtgtatggtccac

SEQ ID NO: 2770173 - DNA, 25 bp, Homo sapien
ggtccacttatatgtacgttcacta

SEQ ID NO: 2770174 - DNA, 25 bp, Homo sapien
ctagatatgggtggtttgttgtttg

SEQ ID NO: 2770175 - DNA, 25 bp, Homo sapien
agaagcacagcgtgttcctgtgcat

SEQ ID NO: 2770176 - DNA, 25 bp, Homo sapien
gttcctgtgcatgaacatactgtta

SEQ ID NO: 2770177 - DNA, 25 bp, Homo sapien
catactgttatctttggcttggtct

SEQ ID NO: 2770178 - DNA, 25 bp, Homo sapien
gtagaacagtccagatggtgctcct

SEQ ID NO: 2770179 - DNA, 25 bp, Homo sapien
tggtgtacagcgaccaggtactgtc

SEQ ID NO: 2770180 - DNA, 25 bp, Homo sapien
cagcgaccaggtactgtctagaaaa

SEQ ID NO: 2770181 - DNA, 25 bp, Homo sapien
cctgcactggtaactggtgtacagc

SEQ ID NO: 2770182 - DNA, 25 bp, Homo sapien
cactggtaactggtgtacagcgacc

SEQ ID NO: 2770183 - DNA, 25 bp, Homo sapien
gggaacaggcagctacatcaaccaa

SEQ ID NO: 2770184 - DNA, 25 bp, Homo sapien
tgtccccaacaggtacatgcctggg

SEQ ID NO: 2770185 - DNA, 25 bp, Homo sapien
cagccagggaacaggcagctacatc

SEQ ID NO: 2770186 - DNA, 25 bp, Homo sapien
aggtacatgcctgggaagacagcca

SEQ ID NO: 2770187 - DNA, 25 bp, Homo sapien
tcgtcgggtcggatctgtgcaatta

SEQ ID NO: 2770188 - DNA, 25 bp, Homo sapien
gctcctagagggaagaactttgtct

SEQ ID NO: 2770189 - DNA, 25 bp, Homo sapien
gaagagtacatatctccaaacggag

SEQ ID NO: 2770190 - DNA, 25 bp, Homo sapien
aaagctttctttgtacatcgtcggg

SEQ ID NO: 2770191 - DNA, 25 bp, Homo sapien
actctctccttcgtgttggtacagg

SEQ ID NO: 2770192 - DNA, 25 bp, Homo sapien
gacgctggagttagatcttgttgcc

SEQ ID NO: 2770193 - DNA, 25 bp, Homo sapien
tacaggatagctcctttgccataac

SEQ ID NO: 2770194 - DNA, 25 bp, Homo sapien
catttctgtggggtcctttaccact

SEQ ID NO: 2770195 - DNA, 25 bp, Homo sapien
tgagcctctagctggtgactccaat

SEQ ID NO: 2770196 - DNA, 25 bp, Homo sapien
tcttggggatgttctttgctgtaat

SEQ ID NO: 2770197 - DNA, 25 bp, Homo sapien
ggtgactccaatttgcctgcatagg

SEQ ID NO: 2770198 - DNA, 25 bp, Homo sapien
caatttgcctgcataggaactgctt

SEQ ID NO: 2770199 - DNA, 25 bp, Homo sapien
cctcaattctgaattcacctctgcc

SEQ ID NO: 2770200 - DNA, 25 bp, Homo sapien
ctggacaaattgaattgcttccaca

SEQ ID NO: 2770201 - DNA, 25 bp, Homo sapien
ggacaaattgaattgcttccacact

SEQ ID NO: 2770202 - DNA, 25 bp, Homo sapien
tgcttccacactggttttcctgact

SEQ ID NO: 2770203 - DNA, 25 bp, Homo sapien
cttccacactggttttcctgacttc

SEQ ID NO: 2770204 - DNA, 25 bp, Homo sapien
tgcgttcatgcactttgctaagaag

SEQ ID NO: 2770205 - DNA, 25 bp, Homo sapien
ccttcaagatctggccaaaaaccac

SEQ ID NO: 2770206 - DNA, 25 bp, Homo sapien
agctgtcctgcgttcatgcactttg

SEQ ID NO: 2770207 - DNA, 25 bp, Homo sapien
tcaagatctggccaaaaaccacctc

SEQ ID NO: 2770208 - DNA, 25 bp, Homo sapien
ccaatccctcttctaggccaaagca

SEQ ID NO: 2770209 - DNA, 25 bp, Homo sapien
gttacccatgcccaatccctcttct

SEQ ID NO: 2770210 - DNA, 25 bp, Homo sapien
agtgttacccatgcccaatccctct

SEQ ID NO: 2770211 - DNA, 25 bp, Homo sapien
cttctaggccaaagcacccagcaca

SEQ ID NO: 2770212 - DNA, 25 bp, Homo sapien
ggatgaggccagtttgggctgcaga

SEQ ID NO: 2770213 - DNA, 25 bp, Homo sapien
gatgaggccagtttgggctgcagag

SEQ ID NO: 2770214 - DNA, 25 bp, Homo sapien
tcctccagcaattatggtagagttc

SEQ ID NO: 2770215 - DNA, 25 bp, Homo sapien
aacatatgtggccagttgatcacct

SEQ ID NO: 2770216 - DNA, 25 bp, Homo sapien
cacctcaatcctccagcaattatgg

SEQ ID NO: 2770217 - DNA, 25 bp, Homo sapien
gagttctactggaacaggcagctga

SEQ ID NO: 2770218 - DNA, 25 bp, Homo sapien
tccacagtgctctatccccattaaa

SEQ ID NO: 2770219 - DNA, 25 bp, Homo sapien
ctctccacagtgctctatccccatt

SEQ ID NO: 2770220 - DNA, 25 bp, Homo sapien
acagtgctctatccccattaaatgg

SEQ ID NO: 2770221 - DNA, 25 bp, Homo sapien
cacagtgctctatccccattaaatg

SEQ ID NO: 2770222 - DNA, 25 bp, Homo sapien
tttctggagtagggttgatgttacc

SEQ ID NO: 2770223 - DNA, 25 bp, Homo sapien
gaatttctggagtagggttgatgtt

SEQ ID NO: 2770224 - DNA, 25 bp, Homo sapien
tgaatttctggagtagggttgatgt

SEQ ID NO: 2770225 - DNA, 25 bp, Homo sapien
atttctggagtagggttgatgttac

SEQ ID NO: 2770226 - DNA, 25 bp, Homo sapien
tgtatcagaacagacaacttgctct

SEQ ID NO: 2770227 - DNA, 25 bp, Homo sapien
cctaggtgccgggagtctgaagttc

SEQ ID NO: 2770228 - DNA, 25 bp, Homo sapien
tattctgagtcggaaagtcagcacc

SEQ ID NO: 2770229 - DNA, 25 bp, Homo sapien
cttcttgtggaatatgggcctgaaa

SEQ ID NO: 2770230 - DNA, 25 bp, Homo sapien
ctcctctgccatgtctgaaatacag

SEQ ID NO: 2770231 - DNA, 25 bp, Homo sapien
tctcctctgccatgtctgaaataca

SEQ ID NO: 2770232 - DNA, 25 bp, Homo sapien
tgcaggcgtttgtttcttgcaagtg

SEQ ID NO: 2770233 - DNA, 25 bp, Homo sapien
gtgtagtcagtgatgccttgcctgg

SEQ ID NO: 2770234 - DNA, 25 bp, Homo sapien
tcctgtcctgatttttgcaggcgtt

SEQ ID NO: 2770235 - DNA, 25 bp, Homo sapien
ttttccagggcaactcatgtatgtg

SEQ ID NO: 2770236 - DNA, 25 bp, Homo sapien
atatgcattaagataccttctgaag

SEQ ID NO: 2770237 - DNA, 25 bp, Homo sapien
ccatatgcattaagataccttctga

SEQ ID NO: 2770238 - DNA, 25 bp, Homo sapien
catatgcattaagataccttctgaa

SEQ ID NO: 2770239 - DNA, 25 bp, Homo sapien
cccttccaaggcaagttggtgtttg

SEQ ID NO: 2770240 - DNA, 25 bp, Homo sapien
tgaacttaagcctgcaacaacccca

SEQ ID NO: 2770241 - DNA, 25 bp, Homo sapien
aacatacatgggaaacacagaaggg

SEQ ID NO: 2770242 - DNA, 25 bp, Homo sapien
ctttactttcagtccaagcccttga

SEQ ID NO: 2770243 - DNA, 25 bp, Homo sapien
ccaaggaaatgtgatccaccaggca

SEQ ID NO: 2770244 - DNA, 25 bp, Homo sapien
cagtctcttcagtatctcaaggttg

SEQ ID NO: 2770245 - DNA, 25 bp, Homo sapien
taccccaaatataacttcagtttgc

SEQ ID NO: 2770246 - DNA, 25 bp, Homo sapien
ttaatctgggtccatagctcagaag

SEQ ID NO: 2770247 - DNA, 25 bp, Homo sapien
tcaaggttgctatacacaataagct

SEQ ID NO: 2770248 - DNA, 25 bp, Homo sapien
ttcaggtatctagcctctgggacag

SEQ ID NO: 2770249 - DNA, 25 bp, Homo sapien
agcagcaggcagtatcgagccttca

SEQ ID NO: 2770250 - DNA, 25 bp, Homo sapien
ccatgggccatgcaacgttcagtta

SEQ ID NO: 2770251 - DNA, 25 bp, Homo sapien
tcttcctcacggcatgttgccccta

SEQ ID NO: 2770252 - DNA, 25 bp, Homo sapien
gaagaggcagaaagtcttatctgag

SEQ ID NO: 2770253 - DNA, 25 bp, Homo sapien
gcttgttggagatctccttgcaggg

SEQ ID NO: 2770254 - DNA, 25 bp, Homo sapien
aggcagaaagtcttatctgaggagc

SEQ ID NO: 2770255 - DNA, 25 bp, Homo sapien
ttttgttggcttgttggagatctcc

SEQ ID NO: 2770256 - DNA, 25 bp, Homo sapien
gatccaagcgtgcagagatccatgc

SEQ ID NO: 2770257 - DNA, 25 bp, Homo sapien
gaaattttatgacctcctcacgctg

SEQ ID NO: 2770258 - DNA, 25 bp, Homo sapien
gccgggaatcccagtctctaacaag

SEQ ID NO: 2770259 - DNA, 25 bp, Homo sapien
gatcccacaggaagtttcgaaccca

SEQ ID NO: 2770260 - DNA, 25 bp, Homo sapien
tataaactaacaagagacacactgt

SEQ ID NO: 2770261 - DNA, 25 bp, Homo sapien
catgtggctatactatcctcaggca

SEQ ID NO: 2770262 - DNA, 25 bp, Homo sapien
cacagatatgctctaggtaaatgaa

SEQ ID NO: 2770263 - DNA, 25 bp, Homo sapien
gaaggcagcaatagtcagaatgcag

SEQ ID NO: 2770264 - DNA, 25 bp, Homo sapien
cctgcggacaccacctagtgttggt

SEQ ID NO: 2770265 - DNA, 25 bp, Homo sapien
cctattttatctgagtgggacctaa

SEQ ID NO: 2770266 - DNA, 25 bp, Homo sapien
cacatacatgcagggcaaagcaatg

SEQ ID NO: 2770267 - DNA, 25 bp, Homo sapien
tggtgttgattctacccagggatac

SEQ ID NO: 2770268 - DNA, 25 bp, Homo sapien
ggccagaaaccgcacacaggagttg

SEQ ID NO: 2770269 - DNA, 25 bp, Homo sapien
ccagaaaccgcacacaggagttgaa

SEQ ID NO: 2770270 - DNA, 25 bp, Homo sapien
tggctcttgggccagaaaccgcaca

SEQ ID NO: 2770271 - DNA, 25 bp, Homo sapien
tcttgggccagaaaccgcacacagg

SEQ ID NO: 2770272 - DNA, 25 bp, Homo sapien
tcctgcagtaagatgcagatcttct

SEQ ID NO: 2770273 - DNA, 25 bp, Homo sapien
cttgccattttgccaaatctgcttt

SEQ ID NO: 2770274 - DNA, 25 bp, Homo sapien
taatgactcctgcagtaagatgcag

SEQ ID NO: 2770275 - DNA, 25 bp, Homo sapien
tcctgttgactctcaacatcactga

SEQ ID NO: 2770276 - DNA, 25 bp, Homo sapien
tgctcctaagggcacttgagtatca

SEQ ID NO: 2770277 - DNA, 25 bp, Homo sapien
taagggcacttgagtatcaaccctt

SEQ ID NO: 2770278 - DNA, 25 bp, Homo sapien
tcctaagggcacttgagtatcaacc

SEQ ID NO: 2770279 - DNA, 25 bp, Homo sapien
ggcacttgagtatcaacccttgcat

SEQ ID NO: 2770280 - DNA, 25 bp, Homo sapien
catagcgctctaggcagttgtttcc

SEQ ID NO: 2770281 - DNA, 25 bp, Homo sapien
ccttggctacacagtaaatttcctg

SEQ ID NO: 2770282 - DNA, 25 bp, Homo sapien
ttctacataattgctgtcgccctcc

SEQ ID NO: 2770283 - DNA, 25 bp, Homo sapien
tgtctccaggtgtgtgttcgttgca

SEQ ID NO: 2770284 - DNA, 25 bp, Homo sapien
agctgctgacccaaagacatcagcc

SEQ ID NO: 2770285 - DNA, 25 bp, Homo sapien
aaaagtcccatgcacaggccagctg

SEQ ID NO: 2770286 - DNA, 25 bp, Homo sapien
aagtcccatgcacaggccagctgct

SEQ ID NO: 2770287 - DNA, 25 bp, Homo sapien
gctgctgacccaaagacatcagcct

SEQ ID NO: 2770288 - DNA, 25 bp, Homo sapien
gttgtgctcgttgtagtctgaaatc

SEQ ID NO: 2770289 - DNA, 25 bp, Homo sapien
cccaggtcgtggcttccaactgtct

SEQ ID NO: 2770290 - DNA, 25 bp, Homo sapien
cctctttgttctgttgtgctcgttg

SEQ ID NO: 2770291 - DNA, 25 bp, Homo sapien
ggtcgtggcttccaactgtctgccc

SEQ ID NO: 2770292 - DNA, 25 bp, Homo sapien
ttgagggcagaaatttctctaacat

SEQ ID NO: 2770293 - DNA, 25 bp, Homo sapien
ggcagaaatttctctaacatctcac

SEQ ID NO: 2770294 - DNA, 25 bp, Homo sapien
ctgccacccacaaatttgagggcag

SEQ ID NO: 2770295 - DNA, 25 bp, Homo sapien
agggcagaaatttctctaacatctc

SEQ ID NO: 2770296 - DNA, 25 bp, Homo sapien
cctctagcacgatgattcaaaccca

SEQ ID NO: 2770297 - DNA, 25 bp, Homo sapien
cctcctctagcacgatgattcaaac

SEQ ID NO: 2770298 - DNA, 25 bp, Homo sapien
cacctcctctagcacgatgattcaa

SEQ ID NO: 2770299 - DNA, 25 bp, Homo sapien
cctccacctcctctagcacgatgat

SEQ ID NO: 2770300 - DNA, 25 bp, Homo sapien
atcacacggatctgggggactccca

SEQ ID NO: 2770301 - DNA, 25 bp, Homo sapien
gtattcgaaatccagattctccggg

SEQ ID NO: 2770302 - DNA, 25 bp, Homo sapien
acagtattcgaaatccagattctcc

SEQ ID NO: 2770303 - DNA, 25 bp, Homo sapien
gggcatgcggccttggccatcacac

SEQ ID NO: 2770304 - DNA, 25 bp, Homo sapien
ctgcaggcagaaggaagccgtggtt

SEQ ID NO: 2770305 - DNA, 25 bp, Homo sapien
tgcaggcagaaggaagccgtggttc

SEQ ID NO: 2770306 - DNA, 25 bp, Homo sapien
cggaggcgcgaaggcagtgaagtcg

SEQ ID NO: 2770307 - DNA, 25 bp, Homo sapien
cctggggatctctccgagcagtgcc

SEQ ID NO: 2770308 - DNA, 25 bp, Homo sapien
cggtccacgaccagctcctccctgg

SEQ ID NO: 2770309 - DNA, 25 bp, Homo sapien
gaagtcgcctccactccagtgttct

SEQ ID NO: 2770310 - DNA, 25 bp, Homo sapien
aacttaaagcggaagccaaagtgca

SEQ ID NO: 2770311 - DNA, 25 bp, Homo sapien
agtatctccaggcttcacgtggctt

SEQ ID NO: 2770312 - DNA, 25 bp, Homo sapien
ggcttgacaaatctgctatgtccag

SEQ ID NO: 2770313 - DNA, 25 bp, Homo sapien
aaatgaggtcgtgctcaggcactgg

SEQ ID NO: 2770314 - DNA, 25 bp, Homo sapien
cttagaatcagtgcccagtaaacat

SEQ ID NO: 2770315 - DNA, 25 bp, Homo sapien
gatcgatacctaggattgcctactg

SEQ ID NO: 2770316 - DNA, 25 bp, Homo sapien
tatattatttgcgtatccctggaaa

SEQ ID NO: 2770317 - DNA, 25 bp, Homo sapien
ccacattaattggatgatcgatacc

SEQ ID NO: 2770318 - DNA, 25 bp, Homo sapien
gagataagaccgcaaacctactagg

SEQ ID NO: 2770319 - DNA, 25 bp, Homo sapien
cattgaagcgttattcccagtagcc

SEQ ID NO: 2770320 - DNA, 25 bp, Homo sapien
gagcccagaggccaagttatgaatt

SEQ ID NO: 2770321 - DNA, 25 bp, Homo sapien
tgtaaatcggcacaaccattatgga

SEQ ID NO: 2770322 - DNA, 25 bp, Homo sapien
catatgtatacctatgcatatatga

SEQ ID NO: 2770323 - DNA, 25 bp, Homo sapien
tgtatacctatgtatatatgaatat

SEQ ID NO: 2770324 - DNA, 25 bp, Homo sapien
tatgtatacctatgcatatatgaat

SEQ ID NO: 2770325 - DNA, 25 bp, Homo sapien
acctatgcatatatgaatatacaca

SEQ ID NO: 2770326 - DNA, 25 bp, Homo sapien
tatacatatgtatatatgaatatac

SEQ ID NO: 2770327 - DNA, 25 bp, Homo sapien
tacatatgtatatatgaatatacac

SEQ ID NO: 2770328 - DNA, 25 bp, Homo sapien
atgaatatacacatatatgtataca

SEQ ID NO: 2770329 - DNA, 25 bp, Homo sapien
cacatatatgtatacatatgtatat

SEQ ID NO: 2770330 - DNA, 25 bp, Homo sapien
tatacatatgtatatgaatacacat

SEQ ID NO: 2770331 - DNA, 25 bp, Homo sapien
tatacatgtgtacatgtgaatacac

SEQ ID NO: 2770332 - DNA, 25 bp, Homo sapien
gtatatgaatacacatatgtataca

SEQ ID NO: 2770333 - DNA, 25 bp, Homo sapien
gtatacatgtgtacatgtgaataca

SEQ ID NO: 2770334 - DNA, 25 bp, Homo sapien
gcatgtgtacttgtgaatacacata

SEQ ID NO: 2770335 - DNA, 25 bp, Homo sapien
catatgcatgcattgtacatatgaa

SEQ ID NO: 2770336 - DNA, 25 bp, Homo sapien
catgcattgtacatatgaatacaca

SEQ ID NO: 2770337 - DNA, 25 bp, Homo sapien
gtatgcatatgcgtgtatatgaata

SEQ ID NO: 2770338 - DNA, 25 bp, Homo sapien
tatatgtgagcagtgacaacgtgct

SEQ ID NO: 2770339 - DNA, 25 bp, Homo sapien
aaagtcccgcggagagtgccattga

SEQ ID NO: 2770340 - DNA, 25 bp, Homo sapien
ataaaagtaggccaaccaagccagg

SEQ ID NO: 2770341 - DNA, 25 bp, Homo sapien
tatatacacgcactggaatacatgt

SEQ ID NO: 2770342 - DNA, 25 bp, Homo sapien
tacatacctgggtacgtgtgtatac

SEQ ID NO: 2770343 - DNA, 25 bp, Homo sapien
tgcatacatacctgggtacgtgtgt

SEQ ID NO: 2770344 - DNA, 25 bp, Homo sapien
cgtgcatacatacctgggtacgtgt

SEQ ID NO: 2770345 - DNA, 25 bp, Homo sapien
gcatacatacctgggtacgtgtgta

SEQ ID NO: 2770346 - DNA, 25 bp, Homo sapien
aaagcagaacggtgtttgctagcgg

SEQ ID NO: 2770347 - DNA, 25 bp, Homo sapien
aagttgtggaaatctaatgtattgc

SEQ ID NO: 2770348 - DNA, 25 bp, Homo sapien
acagaaagacaaacgctgcttaatc

SEQ ID NO: 2770349 - DNA, 25 bp, Homo sapien
aaaatgcacaagttgtggaaatcta

SEQ ID NO: 2770350 - DNA, 25 bp, Homo sapien
gagcttggccaggtatcttactttg

SEQ ID NO: 2770351 - DNA, 25 bp, Homo sapien
acaaaacagaagcagacataagagc

SEQ ID NO: 2770352 - DNA, 25 bp, Homo sapien
ccctggaggacaattatactttcct

SEQ ID NO: 2770353 - DNA, 25 bp, Homo sapien
ggacaattatactttcctattccat

SEQ ID NO: 2770354 - DNA, 25 bp, Homo sapien
ccctttatctgcctagaagttgggc

SEQ ID NO: 2770355 - DNA, 25 bp, Homo sapien
caaaatatgccactttaacgtaagg

SEQ ID NO: 2770356 - DNA, 25 bp, Homo sapien
gacccaaaggcaactgaaaatcaac

SEQ ID NO: 2770357 - DNA, 25 bp, Homo sapien
aggagagcaacttatatcaccagag

SEQ ID NO: 2770358 - DNA, 25 bp, Homo sapien
tgactagaacaacatcgaaagatgt

SEQ ID NO: 2770359 - DNA, 25 bp, Homo sapien
aatttggggcaagaatgaacagcac

SEQ ID NO: 2770360 - DNA, 25 bp, Homo sapien
ttagaagtctcctctgactagaaca

SEQ ID NO: 2770361 - DNA, 25 bp, Homo sapien
caccttgtaggatgctcttggaaac

SEQ ID NO: 2770362 - DNA, 25 bp, Homo sapien
tgtgcttccaggggattccacataa

SEQ ID NO: 2770363 - DNA, 25 bp, Homo sapien
ctgtgcttccaggggattccacata

SEQ ID NO: 2770364 - DNA, 25 bp, Homo sapien
ctttggggattttgccagattcctt

SEQ ID NO: 2770365 - DNA, 25 bp, Homo sapien
tctttggggattttgccagattcct

SEQ ID NO: 2770366 - DNA, 25 bp, Homo sapien
taagacatattttatccttttctat

SEQ ID NO: 2770367 - DNA, 25 bp, Homo sapien
tcttaagacatattttatccttttc

SEQ ID NO: 2770368 - DNA, 25 bp, Homo sapien
tatcttaagacatattttatccttt

SEQ ID NO: 2770369 - DNA, 25 bp, Homo sapien
ggccagagtgtgatggcgcaatctt

SEQ ID NO: 2770370 - DNA, 25 bp, Homo sapien
tgcaaccatgggcagaacctaaatg

SEQ ID NO: 2770371 - DNA, 25 bp, Homo sapien
cagatgaactaagaatgcaaccatg

SEQ ID NO: 2770372 - DNA, 25 bp, Homo sapien
caccatttatatagcgaagctgtga

SEQ ID NO: 2770373 - DNA, 25 bp, Homo sapien
ggtcatgtaacttgaggaggctcag

SEQ ID NO: 2770374 - DNA, 25 bp, Homo sapien
taagatgtcaatgtcagctgggcac

SEQ ID NO: 2770375 - DNA, 25 bp, Homo sapien
taaggccaatatcaccaccaataat

SEQ ID NO: 2770376 - DNA, 25 bp, Homo sapien
cgcgttaaggcctaaaagtgaatct

SEQ ID NO: 2770377 - DNA, 25 bp, Homo sapien
caataataatcacagaggcacgcgt

SEQ ID NO: 2770378 - DNA, 25 bp, Homo sapien
tcaaagggagcctgttccgttcctc

SEQ ID NO: 2770379 - DNA, 25 bp, Homo sapien
tggtggtggtcagcaaccttgccat

SEQ ID NO: 2770380 - DNA, 25 bp, Homo sapien
caggatctgtctcagtggtcacaca

SEQ ID NO: 2770381 - DNA, 25 bp, Homo sapien
cagaataatatgtgccttggccaca

SEQ ID NO: 2770382 - DNA, 25 bp, Homo sapien
ccactgttaagggtataatcgcgaa

SEQ ID NO: 2770383 - DNA, 25 bp, Homo sapien
ggcagtttccataaccatgcagatg

SEQ ID NO: 2770384 - DNA, 25 bp, Homo sapien
gatctgactttatggacccagtgca

SEQ ID NO: 2770385 - DNA, 25 bp, Homo sapien
tgcagatggctaaactaatggactc

SEQ ID NO: 2770386 - DNA, 25 bp, Homo sapien
gaggagccagatatgtgaacaaaca

SEQ ID NO: 2770387 - DNA, 25 bp, Homo sapien
tatgcatcatggtctttgtggcccc

SEQ ID NO: 2770388 - DNA, 25 bp, Homo sapien
agctgatctggagcaaggccccttg

SEQ ID NO: 2770389 - DNA, 25 bp, Homo sapien
tcaaaggcccagacacggtaaagat

SEQ ID NO: 2770390 - DNA, 25 bp, Homo sapien
cgaagaaactttgtcggacagggcg

SEQ ID NO: 2770391 - DNA, 25 bp, Homo sapien
tgtcgtagcattgggaaataaaggt

SEQ ID NO: 2770392 - DNA, 25 bp, Homo sapien
taaaccatgtgtagcatgtcgtagc

SEQ ID NO: 2770393 - DNA, 25 bp, Homo sapien
tcgggactgttgtagccgaagaaac

SEQ ID NO: 2770394 - DNA, 25 bp, Homo sapien
taaaggacttctcttgcctgaagat

SEQ ID NO: 2770395 - DNA, 25 bp, Homo sapien
cgccaaatggaaacacggccaaaat

SEQ ID NO: 2770396 - DNA, 25 bp, Homo sapien
aagattttcggacggggatctcacg

SEQ ID NO: 2770397 - DNA, 25 bp, Homo sapien
ctggacgccaaatggaaacacggcc

SEQ ID NO: 2770398 - DNA, 25 bp, Homo sapien
gctggcccgtgcgtccttggccggg

SEQ ID NO: 2770399 - DNA, 25 bp, Homo sapien
gttccgccggctggcccgtgcgtcc

SEQ ID NO: 2770400 - DNA, 25 bp, Homo sapien
ctctggttccgccggctggcccgtg

SEQ ID NO: 2770401 - DNA, 25 bp, Homo sapien
ccggctggcccgtgcgtccttggcc

SEQ ID NO: 2770402 - DNA, 25 bp, Homo sapien
cttgactcccacctgagagagccat

SEQ ID NO: 2770403 - DNA, 25 bp, Homo sapien
ctcctctcgtaacccttgactccca

SEQ ID NO: 2770404 - DNA, 25 bp, Homo sapien
ctctcctctcgtaacccttgactcc

SEQ ID NO: 2770405 - DNA, 25 bp, Homo sapien
cccttgactcccacctgagagagcc

SEQ ID NO: 2770406 - DNA, 25 bp, Homo sapien
ttttctgggaatccgtgtatctctc

SEQ ID NO: 2770407 - DNA, 25 bp, Homo sapien
tgggaatccgtgtatctctcccacc

SEQ ID NO: 2770408 - DNA, 25 bp, Homo sapien
tctgggaatccgtgtatctctccca

SEQ ID NO: 2770409 - DNA, 25 bp, Homo sapien
ttctgggaatccgtgtatctctccc

SEQ ID NO: 2770410 - DNA, 25 bp, Homo sapien
ggacggacatgaaaggagaaatact

SEQ ID NO: 2770411 - DNA, 25 bp, Homo sapien
tatccagtggacaggttcaagaggt

SEQ ID NO: 2770412 - DNA, 25 bp, Homo sapien
gaaacacttaaccattatccagtgg

SEQ ID NO: 2770413 - DNA, 25 bp, Homo sapien
cccatggctgtagcttctgactgtg

SEQ ID NO: 2770414 - DNA, 25 bp, Homo sapien
ggattcatagcctgacatatgtgag

SEQ ID NO: 2770415 - DNA, 25 bp, Homo sapien
cctgacatatgtgagagacagtata

SEQ ID NO: 2770416 - DNA, 25 bp, Homo sapien
agacagtataaagggcaggaattcc

SEQ ID NO: 2770417 - DNA, 25 bp, Homo sapien
cagtataaagggcaggaattccaga

SEQ ID NO: 2770418 - DNA, 25 bp, Homo sapien
gaggatgatatactaagcccacaga

SEQ ID NO: 2770419 - DNA, 25 bp, Homo sapien
tccccttgcttatgactagaaacta

SEQ ID NO: 2770420 - DNA, 25 bp, Homo sapien
tactcgatattctaggaaaacatca

SEQ ID NO: 2770421 - DNA, 25 bp, Homo sapien
agcccacagaatataagggatattt

SEQ ID NO: 2770422 - DNA, 25 bp, Homo sapien
tccaaggcctgttgtcgcaaagaac

SEQ ID NO: 2770423 - DNA, 25 bp, Homo sapien
ggaacataccccttcagatggaggt

SEQ ID NO: 2770424 - DNA, 25 bp, Homo sapien
tgtggtctccagtactcaaagaggc

SEQ ID NO: 2770425 - DNA, 25 bp, Homo sapien
ggagagccttttgcgaccagccaaa

SEQ ID NO: 2770426 - DNA, 25 bp, Homo sapien
gcaaggttgtgtcagcctacgcaaa

SEQ ID NO: 2770427 - DNA, 25 bp, Homo sapien
ctgacactaaaacctgtcagagaca

SEQ ID NO: 2770428 - DNA, 25 bp, Homo sapien
tcagcctacgcaaatcactaaatgt

SEQ ID NO: 2770429 - DNA, 25 bp, Homo sapien
gacactaaaacctgtcagagacaca

SEQ ID NO: 2770430 - DNA, 25 bp, Homo sapien
tatgctcatgcttctggtgcccaat

SEQ ID NO: 2770431 - DNA, 25 bp, Homo sapien
tgaagagaaacaagtagccacacct

SEQ ID NO: 2770432 - DNA, 25 bp, Homo sapien
gactttagggccagtattgtcagca

SEQ ID NO: 2770433 - DNA, 25 bp, Homo sapien
cctcacgtagtagaaagcggtatcc

SEQ ID NO: 2770434 - DNA, 25 bp, Homo sapien
gcagttatagcacaccccattgtgg

SEQ ID NO: 2770435 - DNA, 25 bp, Homo sapien
aaagaatcctaatcagtccagctgg

SEQ ID NO: 2770436 - DNA, 25 bp, Homo sapien
caagaccaaagaccacgatgacagg

SEQ ID NO: 2770437 - DNA, 25 bp, Homo sapien
cccattgtggtaataggatgcagcc

SEQ ID NO: 2770438 - DNA, 25 bp, Homo sapien
tgctttggtggtgttgccaacacag

SEQ ID NO: 2770439 - DNA, 25 bp, Homo sapien
ggtgttgccaacacagcctctgctt

SEQ ID NO: 2770440 - DNA, 25 bp, Homo sapien
tgtatcaactataggttgctttggt

SEQ ID NO: 2770441 - DNA, 25 bp, Homo sapien
tcaggattcagcagatgtatcaact

SEQ ID NO: 2770442 - DNA, 25 bp, Homo sapien
aattcttgtatgaacctccgacacg

SEQ ID NO: 2770443 - DNA, 25 bp, Homo sapien
cagagtaaaggcatatgtcatcaaa

SEQ ID NO: 2770444 - DNA, 25 bp, Homo sapien
cagcaaatgggaaacctcagagtaa

SEQ ID NO: 2770445 - DNA, 25 bp, Homo sapien
ctccgacacggaagtctgaatgtgc

SEQ ID NO: 2770446 - DNA, 25 bp, Homo sapien
taatcttagaacttctttgcgaagg

SEQ ID NO: 2770447 - DNA, 25 bp, Homo sapien
gagtatacggcacattggtgtatca

SEQ ID NO: 2770448 - DNA, 25 bp, Homo sapien
gaaactgaactactcaaattaatga

SEQ ID NO: 2770449 - DNA, 25 bp, Homo sapien
gttaaaagcccagtctcatgacatt

SEQ ID NO: 2770450 - DNA, 25 bp, Homo sapien
accacttctaaaggattatggatag

SEQ ID NO: 2770451 - DNA, 25 bp, Homo sapien
tggatagtctgctcacaccaatcag

SEQ ID NO: 2770452 - DNA, 25 bp, Homo sapien
ctgcatccagaaatccccgaaaact

SEQ ID NO: 2770453 - DNA, 25 bp, Homo sapien
gcatccagaaatccccgaaaactta

SEQ ID NO: 2770454 - DNA, 25 bp, Homo sapien
tgaatgactacatattgcactcagt

SEQ ID NO: 2770455 - DNA, 25 bp, Homo sapien
catattgcactcagttggttgctgg

SEQ ID NO: 2770456 - DNA, 25 bp, Homo sapien
gactacatattgcactcagttggtt

SEQ ID NO: 2770457 - DNA, 25 bp, Homo sapien
aataaaggcagttatcatctgtatg

SEQ ID NO: 2770458 - DNA, 25 bp, Homo sapien
ttccgtaagactcatctgctgtcgt

SEQ ID NO: 2770459 - DNA, 25 bp, Homo sapien
gaggcatctgaatggattgaattca

SEQ ID NO: 2770460 - DNA, 25 bp, Homo sapien
tacaagacctccagttccagatgga

SEQ ID NO: 2770461 - DNA, 25 bp, Homo sapien
gactcatctgctgtcgtagcaagtg

SEQ ID NO: 2770462 - DNA, 25 bp, Homo sapien
cctcgatcatcatgtggtggtatgt

SEQ ID NO: 2770463 - DNA, 25 bp, Homo sapien
ggcaaatgctcttgcacctcgatca

SEQ ID NO: 2770464 - DNA, 25 bp, Homo sapien
atcatgggcaaatgctcttgcacct

SEQ ID NO: 2770465 - DNA, 25 bp, Homo sapien
tgctcttgcacctcgatcatcatgt

SEQ ID NO: 2770466 - DNA, 25 bp, Homo sapien
tcatttatatccaccgggagagcaa

SEQ ID NO: 2770467 - DNA, 25 bp, Homo sapien
catggaccgcactgaggaagatcgt

SEQ ID NO: 2770468 - DNA, 25 bp, Homo sapien
ggagagcaagaccaatgtaatcatc

SEQ ID NO: 2770469 - DNA, 25 bp, Homo sapien
tatgtggcactggacaccatggacc

SEQ ID NO: 2770470 - DNA, 25 bp, Homo sapien
tcacttgagactactagatttggca

SEQ ID NO: 2770471 - DNA, 25 bp, Homo sapien
cagtagtcagagcatggtccaagga

SEQ ID NO: 2770472 - DNA, 25 bp, Homo sapien
cacacaagacagacacaagagcaaa

SEQ ID NO: 2770473 - DNA, 25 bp, Homo sapien
gacgagatatccttgtaaaaagcac

SEQ ID NO: 2770474 - DNA, 25 bp, Homo sapien
gtttgttattgtaggtcttaagctc

SEQ ID NO: 2770475 - DNA, 25 bp, Homo sapien
tgttattgtaggtcttaagctcctg

SEQ ID NO: 2770476 - DNA, 25 bp, Homo sapien
ttgtaggtcttaagctcctgattcc

SEQ ID NO: 2770477 - DNA, 25 bp, Homo sapien
tgattcccccgacatgcttcttttt

SEQ ID NO: 2770478 - DNA, 25 bp, Homo sapien
tcagtgtagcatagccaaaagcatc

SEQ ID NO: 2770479 - DNA, 25 bp, Homo sapien
ggcaccagggacaccgaatttgatt

SEQ ID NO: 2770480 - DNA, 25 bp, Homo sapien
aaaatgtgctagtagagctgctgcc

SEQ ID NO: 2770481 - DNA, 25 bp, Homo sapien
taatctggactcaaaactgttggcc

SEQ ID NO: 2770482 - DNA, 25 bp, Homo sapien
tggttttagctatgagcccaagtac

SEQ ID NO: 2770483 - DNA, 25 bp, Homo sapien
tcgatggcacagattcactttcact

SEQ ID NO: 2770484 - DNA, 25 bp, Homo sapien
gatgtttgcgactatgcctcacagc

SEQ ID NO: 2770485 - DNA, 25 bp, Homo sapien
tctagagctggttgactccgagttc

SEQ ID NO: 2770486 - DNA, 25 bp, Homo sapien
gagaccccaatttgatgagccgata

SEQ ID NO: 2770487 - DNA, 25 bp, Homo sapien
tcttcctgtagcaaattgagacccc

SEQ ID NO: 2770488 - DNA, 25 bp, Homo sapien
aatcacgttttcttcctgtagcaaa

SEQ ID NO: 2770489 - DNA, 25 bp, Homo sapien
ttagtatatctggaatcacgttttc

SEQ ID NO: 2770490 - DNA, 25 bp, Homo sapien
tcttacagaagtgtttattacaaac

SEQ ID NO: 2770491 - DNA, 25 bp, Homo sapien
atcttacagaagtgtttattacaaa

SEQ ID NO: 2770492 - DNA, 25 bp, Homo sapien
ccaaatctggtgtacgaacattacg

SEQ ID NO: 2770493 - DNA, 25 bp, Homo sapien
cttatccaaatctggtgtacgaaca

SEQ ID NO: 2770494 - DNA, 25 bp, Homo sapien
ggtgtacgaacattacgacagagtt

SEQ ID NO: 2770495 - DNA, 25 bp, Homo sapien
cgaacattacgacagagttctgtaa

SEQ ID NO: 2770496 - DNA, 25 bp, Homo sapien
aatggcagcctgttttatggtgtac

SEQ ID NO: 2770497 - DNA, 25 bp, Homo sapien
ccaacaaatggcagcctgttttatg

SEQ ID NO: 2770498 - DNA, 25 bp, Homo sapien
tatggtgtactagttgtccataaag

SEQ ID NO: 2770499 - DNA, 25 bp, Homo sapien
taaaggtgtataggcaggtagacgt

SEQ ID NO: 2770500 - DNA, 25 bp, Homo sapien
agatgattactatatctcttggcta

SEQ ID NO: 2770501 - DNA, 25 bp, Homo sapien
gattactatatctcttggctaattt

SEQ ID NO: 2770502 - DNA, 25 bp, Homo sapien
taataaagatgattactatatctct

SEQ ID NO: 2770503 - DNA, 25 bp, Homo sapien
tactatatctcttggctaatttaaa

SEQ ID NO: 2770504 - DNA, 25 bp, Homo sapien
gttatcaccatcaacaggcttccgg

SEQ ID NO: 2770505 - DNA, 25 bp, Homo sapien
gagttgttcctcaatcaagtcaaca

SEQ ID NO: 2770506 - DNA, 25 bp, Homo sapien
cttccggtaagtagtaagtgcttca

SEQ ID NO: 2770507 - DNA, 25 bp, Homo sapien
tggttactccgacgaacatagttat

SEQ ID NO: 2770508 - DNA, 25 bp, Homo sapien
ataacctctttcattcagataggaa

SEQ ID NO: 2770509 - DNA, 25 bp, Homo sapien
ctacataacctctttcattcagata

SEQ ID NO: 2770510 - DNA, 25 bp, Homo sapien
acataacctctttcattcagatagg

SEQ ID NO: 2770511 - DNA, 25 bp, Homo sapien
cataacctctttcattcagatagga

SEQ ID NO: 2770512 - DNA, 25 bp, Homo sapien
caggagaagcaaacccttgtctcca

SEQ ID NO: 2770513 - DNA, 25 bp, Homo sapien
gtgggataacgctggtttcatctga

SEQ ID NO: 2770514 - DNA, 25 bp, Homo sapien
ccaaggtgggataacgctggtttca

SEQ ID NO: 2770515 - DNA, 25 bp, Homo sapien
aggagaagcaaacccttgtctccaa

SEQ ID NO: 2770516 - DNA, 25 bp, Homo sapien
gcttcatcgaggatatcaagagctt

SEQ ID NO: 2770517 - DNA, 25 bp, Homo sapien
gttttgttgcatagagtctgcaggc

SEQ ID NO: 2770518 - DNA, 25 bp, Homo sapien
tcatgtagctgggtcactaacaact

SEQ ID NO: 2770519 - DNA, 25 bp, Homo sapien
ggtcactaacaactcaattccccaa

SEQ ID NO: 2770520 - DNA, 25 bp, Homo sapien
ggaaaggatgactctagccaatcca

SEQ ID NO: 2770521 - DNA, 25 bp, Homo sapien
aaaggatgactctagccaatccatc

SEQ ID NO: 2770522 - DNA, 25 bp, Homo sapien
aggatgactctagccaatccatctc

SEQ ID NO: 2770523 - DNA, 25 bp, Homo sapien
gaaaggatgactctagccaatccat

SEQ ID NO: 2770524 - DNA, 25 bp, Homo sapien
ttttagcaagtgatcttggtttttc

SEQ ID NO: 2770525 - DNA, 25 bp, Homo sapien
aaacagtaagttttagcaagtgatc

SEQ ID NO: 2770526 - DNA, 25 bp, Homo sapien
ctagaaacagtaagttttagcaagt

SEQ ID NO: 2770527 - DNA, 25 bp, Homo sapien
cagtaagttttagcaagtgatcttg

SEQ ID NO: 2770528 - DNA, 25 bp, Homo sapien
tcattccagatgaagcattgagcca

SEQ ID NO: 2770529 - DNA, 25 bp, Homo sapien
tgactaagggtggtcaataaaccat

SEQ ID NO: 2770530 - DNA, 25 bp, Homo sapien
tgagccactgaacaatatcctttac

SEQ ID NO: 2770531 - DNA, 25 bp, Homo sapien
tgaagacttctttcgggtttcattc

SEQ ID NO: 2770532 - DNA, 25 bp, Homo sapien
tactgctgggcttgtaaaaataaag

SEQ ID NO: 2770533 - DNA, 25 bp, Homo sapien
ccagatccaggttggcatataattt

SEQ ID NO: 2770534 - DNA, 25 bp, Homo sapien
actggcaacctacaaccgtgagctg

SEQ ID NO: 2770535 - DNA, 25 bp, Homo sapien
ctacaaccgtgagctgtttggcctt

SEQ ID NO: 2770536 - DNA, 25 bp, Homo sapien
tagtttcttagatttacatttggcc

SEQ ID NO: 2770537 - DNA, 25 bp, Homo sapien
tcatctttatagtttcttagattta

SEQ ID NO: 2770538 - DNA, 25 bp, Homo sapien
agtttcttagatttacatttggcca

SEQ ID NO: 2770539 - DNA, 25 bp, Homo sapien
taagaatggtccctataagattcca

SEQ ID NO: 2770540 - DNA, 25 bp, Homo sapien
caagattctctttatgttgaaggac

SEQ ID NO: 2770541 - DNA, 25 bp, Homo sapien
tggctatctctaaggttaattaaaa

SEQ ID NO: 2770542 - DNA, 25 bp, Homo sapien
ggtccctataagattccaattccat

SEQ ID NO: 2770543 - DNA, 25 bp, Homo sapien
tctgaactcggagatactgatcccg

SEQ ID NO: 2770544 - DNA, 25 bp, Homo sapien
tgaagactataaggcttaggtcctc

SEQ ID NO: 2770545 - DNA, 25 bp, Homo sapien
catttcatggaagcgttttaaacag

SEQ ID NO: 2770546 - DNA, 25 bp, Homo sapien
gatcccgtttctggtgtgttgcaat

SEQ ID NO: 2770547 - DNA, 25 bp, Homo sapien
tagggttggcaagcagtgtaaatga

SEQ ID NO: 2770548 - DNA, 25 bp, Homo sapien
gggatatcaaaggatgcagccatat

SEQ ID NO: 2770549 - DNA, 25 bp, Homo sapien
ggctatgtgaatgaggaagaattgt

SEQ ID NO: 2770550 - DNA, 25 bp, Homo sapien
gcagccatattcattagggttggca

SEQ ID NO: 2770551 - DNA, 25 bp, Homo sapien
tctcaggatacagtaccaagggctt

SEQ ID NO: 2770552 - DNA, 25 bp, Homo sapien
caggatacagtaccaagggcttttt

SEQ ID NO: 2770553 - DNA, 25 bp, Homo sapien
atatctatctcaggatacagtacca

SEQ ID NO: 2770554 - DNA, 25 bp, Homo sapien
tctatctcaggatacagtaccaagg

SEQ ID NO: 2770555 - DNA, 25 bp, Homo sapien
tggtagctctaactgagatatgatc

SEQ ID NO: 2770556 - DNA, 25 bp, Homo sapien
tatgtaaaagctctcctaaaaggat

SEQ ID NO: 2770557 - DNA, 25 bp, Homo sapien
gatcatcactgtttgttatcacttc

SEQ ID NO: 2770558 - DNA, 25 bp, Homo sapien
tgtttgttatcacttcaactagacc

SEQ ID NO: 2770559 - DNA, 25 bp, Homo sapien
ccacacctggcatgaaagaatctgt

SEQ ID NO: 2770560 - DNA, 25 bp, Homo sapien
gaaagaatctgttagagaaaataaa

SEQ ID NO: 2770561 - DNA, 25 bp, Homo sapien
cctggcatgaaagaatctgttagag

SEQ ID NO: 2770562 - DNA, 25 bp, Homo sapien
caggggtatgccatcatgcatggct

SEQ ID NO: 2770563 - DNA, 25 bp, Homo sapien
tatcagtgccaaataattatccatg

SEQ ID NO: 2770564 - DNA, 25 bp, Homo sapien
aagtccattacgaataaatgcagag

SEQ ID NO: 2770565 - DNA, 25 bp, Homo sapien
caaataattatccatgaggtctggc

SEQ ID NO: 2770566 - DNA, 25 bp, Homo sapien
aaatgcagagagtatcagtgccaaa

SEQ ID NO: 2770567 - DNA, 25 bp, Homo sapien
catctgaaagcctccaactgtcttg

SEQ ID NO: 2770568 - DNA, 25 bp, Homo sapien
agccatctgaaagcctccaactgtc

SEQ ID NO: 2770569 - DNA, 25 bp, Homo sapien
ccatctgaaagcctccaactgtctt

SEQ ID NO: 2770570 - DNA, 25 bp, Homo sapien
gccatctgaaagcctccaactgtct

SEQ ID NO: 2770571 - DNA, 25 bp, Homo sapien
gaggaagacgaaatatatcataaag

SEQ ID NO: 2770572 - DNA, 25 bp, Homo sapien
tcctcagtcacaacaggtagaggaa

SEQ ID NO: 2770573 - DNA, 25 bp, Homo sapien
ctcagtcacaacaggtagaggaaga

SEQ ID NO: 2770574 - DNA, 25 bp, Homo sapien
aatatatcataaagcacttcaagta

SEQ ID NO: 2770575 - DNA, 25 bp, Homo sapien
gaaccttttatagtgagaatgccct

SEQ ID NO: 2770576 - DNA, 25 bp, Homo sapien
taaaggtccaggaatgaaacaatcc

SEQ ID NO: 2770577 - DNA, 25 bp, Homo sapien
tcacatttaaacaaggcacacctgg

SEQ ID NO: 2770578 - DNA, 25 bp, Homo sapien
aaacgtagtctgtagtgcttgaacc

SEQ ID NO: 2770579 - DNA, 25 bp, Homo sapien
actcctattagagactggatcccag

SEQ ID NO: 2770580 - DNA, 25 bp, Homo sapien
ggtatgcaaagtactcctattagag

SEQ ID NO: 2770581 - DNA, 25 bp, Homo sapien
gactggatcccagaatttccaggtt

SEQ ID NO: 2770582 - DNA, 25 bp, Homo sapien
tagagactggatcccagaatttcca

SEQ ID NO: 2770583 - DNA, 25 bp, Homo sapien
gaactcttctctgggagtaagaaca

SEQ ID NO: 2770584 - DNA, 25 bp, Homo sapien
aaatatatttgaagcatactctgta

SEQ ID NO: 2770585 - DNA, 25 bp, Homo sapien
tagagattaccaataatttcgtcat

SEQ ID NO: 2770586 - DNA, 25 bp, Homo sapien
catgagtctgactgcctgatgaact

SEQ ID NO: 2770587 - DNA, 25 bp, Homo sapien
gaaatcaaaatatacctactagaat

SEQ ID NO: 2770588 - DNA, 25 bp, Homo sapien
gtcacatatgctgatgatgggagta

SEQ ID NO: 2770589 - DNA, 25 bp, Homo sapien
agtcacatatgctgatgatgggagt

SEQ ID NO: 2770590 - DNA, 25 bp, Homo sapien
tgggagtataaaatagtgtaagtat

SEQ ID NO: 2770591 - DNA, 25 bp, Homo sapien
taaggagatagtagctaggatgcag

SEQ ID NO: 2770592 - DNA, 25 bp, Homo sapien
gaaacagacatcattacaggaagcg

SEQ ID NO: 2770593 - DNA, 25 bp, Homo sapien
ccacccctctaagtttctaatgatg

SEQ ID NO: 2770594 - DNA, 25 bp, Homo sapien
tacaggaagcgtagagtctggacgt

SEQ ID NO: 2770595 - DNA, 25 bp, Homo sapien
tcaattactcttaatggcaaaaccc

SEQ ID NO: 2770596 - DNA, 25 bp, Homo sapien
tgcacaatccctattctcaagaaat

SEQ ID NO: 2770597 - DNA, 25 bp, Homo sapien
agggttacctaggtacacagaaatg

SEQ ID NO: 2770598 - DNA, 25 bp, Homo sapien
ggaactattaatggcctatcttgct

SEQ ID NO: 2770599 - DNA, 25 bp, Homo sapien
gcatctgaattaggtgctacaataa

SEQ ID NO: 2770600 - DNA, 25 bp, Homo sapien
gctaattcctattgactattacaaa

SEQ ID NO: 2770601 - DNA, 25 bp, Homo sapien
tataaagcaatgtagagtaacctac

SEQ ID NO: 2770602 - DNA, 25 bp, Homo sapien
tgtacgagttcctttggttctaata

SEQ ID NO: 2770603 - DNA, 25 bp, Homo sapien
ttttactggctagaaatcgtgcttc

SEQ ID NO: 2770604 - DNA, 25 bp, Homo sapien
cattttactggctagaaatcgtgct

SEQ ID NO: 2770605 - DNA, 25 bp, Homo sapien
actggctagaaatcgtgcttctctg

SEQ ID NO: 2770606 - DNA, 25 bp, Homo sapien
ctagaaatcgtgcttctctgtcttc

SEQ ID NO: 2770607 - DNA, 25 bp, Homo sapien
catgtctaccctgtcgattgtccct

SEQ ID NO: 2770608 - DNA, 25 bp, Homo sapien
tatttgaacgtttccaacaagcaag

SEQ ID NO: 2770609 - DNA, 25 bp, Homo sapien
taagcatctgtggtactaggctgcc

SEQ ID NO: 2770610 - DNA, 25 bp, Homo sapien
gctatgcagcaccagctaaaatgag

SEQ ID NO: 2770611 - DNA, 25 bp, Homo sapien
tccctggcaatgtatactatgtatc

SEQ ID NO: 2770612 - DNA, 25 bp, Homo sapien
tctccaaatacctagtgaacatgtg

SEQ ID NO: 2770613 - DNA, 25 bp, Homo sapien
tgcagtgcaataaagtctaccagaa

SEQ ID NO: 2770614 - DNA, 25 bp, Homo sapien
cactagatagcgtatttaatggaat

SEQ ID NO: 2770615 - DNA, 25 bp, Homo sapien
tatctggactatgtctgtagtgaaa

SEQ ID NO: 2770616 - DNA, 25 bp, Homo sapien
agtgaaaatcagtatagggtgctaa

SEQ ID NO: 2770617 - DNA, 25 bp, Homo sapien
gtccttcagctgtatctggactatg

SEQ ID NO: 2770618 - DNA, 25 bp, Homo sapien
tgtagtgaaaatcagtatagggtgc

SEQ ID NO: 2770619 - DNA, 25 bp, Homo sapien
taattagcaggagctattcacacac

SEQ ID NO: 2770620 - DNA, 25 bp, Homo sapien
gcaatacatgcacacgaagaaacta

SEQ ID NO: 2770621 - DNA, 25 bp, Homo sapien
cacacacaatgtactaaaggcctta

SEQ ID NO: 2770622 - DNA, 25 bp, Homo sapien
tcttataaggtatacagtagccctg

SEQ ID NO: 2770623 - DNA, 25 bp, Homo sapien
tgtttagtccacctcgaagggccac

SEQ ID NO: 2770624 - DNA, 25 bp, Homo sapien
tacatcagctcgcacatactgtcga

SEQ ID NO: 2770625 - DNA, 25 bp, Homo sapien
tagggcctcatttattcgacttaat

SEQ ID NO: 2770626 - DNA, 25 bp, Homo sapien
cgacttaattggcaatcgatcacat

SEQ ID NO: 2770627 - DNA, 25 bp, Homo sapien
aagaattcatgcattaaaggcctca

SEQ ID NO: 2770628 - DNA, 25 bp, Homo sapien
tatagaattttaatgtcgcattgaa

SEQ ID NO: 2770629 - DNA, 25 bp, Homo sapien
tgttaaataacaagttctccacttc

SEQ ID NO: 2770630 - DNA, 25 bp, Homo sapien
ttatatatccaatcacatcatctgc

SEQ ID NO: 2770631 - DNA, 25 bp, Homo sapien
aatattttactgaaggccttttctg

SEQ ID NO: 2770632 - DNA, 25 bp, Homo sapien
ttatgtgtactgatttgcgtatgct

SEQ ID NO: 2770633 - DNA, 25 bp, Homo sapien
aaaatgattaggaaggagttccact

SEQ ID NO: 2770634 - DNA, 25 bp, Homo sapien
tatcaggatggtactggcctcaaaa

SEQ ID NO: 2770635 - DNA, 25 bp, Homo sapien
gtccagagctaagtcctgaatatcc

SEQ ID NO: 2770636 - DNA, 25 bp, Homo sapien
ttggtccagagctaagtcctgaata

SEQ ID NO: 2770637 - DNA, 25 bp, Homo sapien
ttttaaagtaagtgtgatgtagtgc

SEQ ID NO: 2770638 - DNA, 25 bp, Homo sapien
tcctaatttgattgaactgtagcct

SEQ ID NO: 2770639 - DNA, 25 bp, Homo sapien
cgtcaagctaccactggctttcttc

SEQ ID NO: 2770640 - DNA, 25 bp, Homo sapien
tccccgtcaagctaccactggcttt

SEQ ID NO: 2770641 - DNA, 25 bp, Homo sapien
atttatagattcaaagctatccccg

SEQ ID NO: 2770642 - DNA, 25 bp, Homo sapien
atagattcaaagctatccccgtcaa

SEQ ID NO: 2770643 - DNA, 25 bp, Homo sapien
tgcaattaatgagttggtcacagaa

SEQ ID NO: 2770644 - DNA, 25 bp, Homo sapien
catgctcggaccattctgtctcttt

SEQ ID NO: 2770645 - DNA, 25 bp, Homo sapien
catttccaactgcaattaatgagtt

SEQ ID NO: 2770646 - DNA, 25 bp, Homo sapien
aatggcaatgcatgctcggaccatt

SEQ ID NO: 2770647 - DNA, 25 bp, Homo sapien
gaaacaaggaagcattcacagtaat

SEQ ID NO: 2770648 - DNA, 25 bp, Homo sapien
aggaaacaaggaagcattcacagta

SEQ ID NO: 2770649 - DNA, 25 bp, Homo sapien
acaaggaagcattcacagtaatcat

SEQ ID NO: 2770650 - DNA, 25 bp, Homo sapien
taggaaacaaggaagcattcacagt

SEQ ID NO: 2770651 - DNA, 25 bp, Homo sapien
gagactgacatgagccagaagtaga

SEQ ID NO: 2770652 - DNA, 25 bp, Homo sapien
aagggggaaatcagagacatggaaa

SEQ ID NO: 2770653 - DNA, 25 bp, Homo sapien
gaattccttaattattcatagtgta

SEQ ID NO: 2770654 - DNA, 25 bp, Homo sapien
tagtagtaactgactagtggaaaaa

SEQ ID NO: 2770655 - DNA, 25 bp, Homo sapien
gtcctctctacctcgttgctctgtt

SEQ ID NO: 2770656 - DNA, 25 bp, Homo sapien
actaatcgaagtgcttgtgtcctct

SEQ ID NO: 2770657 - DNA, 25 bp, Homo sapien
tctctacctcgttgctctgttgtat

SEQ ID NO: 2770658 - DNA, 25 bp, Homo sapien
ctttctgactaatcgaagtgcttgt

SEQ ID NO: 2770659 - DNA, 25 bp, Homo sapien
tgatgtccaaacaaatagcaccaaa

SEQ ID NO: 2770660 - DNA, 25 bp, Homo sapien
agtcttttatgtagaagcataattt

SEQ ID NO: 2770661 - DNA, 25 bp, Homo sapien
ttgatgtccaaacaaatagcaccaa

SEQ ID NO: 2770662 - DNA, 25 bp, Homo sapien
tgaaagtcttttatgtagaagcata

SEQ ID NO: 2770663 - DNA, 25 bp, Homo sapien
gcaaataacatgatcctgagacaac

SEQ ID NO: 2770664 - DNA, 25 bp, Homo sapien
caacatccacattgtgcaaaagcag

SEQ ID NO: 2770665 - DNA, 25 bp, Homo sapien
tgcatgcagtgttctctccaagaca

SEQ ID NO: 2770666 - DNA, 25 bp, Homo sapien
gattctgctcaatatctacactctg

SEQ ID NO: 2770667 - DNA, 25 bp, Homo sapien
aatggcatcagaaacgtgggacagt

SEQ ID NO: 2770668 - DNA, 25 bp, Homo sapien
ggaaagacttcatagccaagacacg

SEQ ID NO: 2770669 - DNA, 25 bp, Homo sapien
ccaacatgtgtatagatggagtacc

SEQ ID NO: 2770670 - DNA, 25 bp, Homo sapien
aaggtataccatgcaaccactaggc

SEQ ID NO: 2770671 - DNA, 25 bp, Homo sapien
ctagctattaaatagtccactttca

SEQ ID NO: 2770672 - DNA, 25 bp, Homo sapien
atatcgaagcgctcgtagccctgct

SEQ ID NO: 2770673 - DNA, 25 bp, Homo sapien
cctgctgctcgcacttcttttgctt

SEQ ID NO: 2770674 - DNA, 25 bp, Homo sapien
ctggagaatactggagtcttggatg

SEQ ID NO: 2770675 - DNA, 25 bp, Homo sapien
tatcctcatagtgaaagcccagttt

SEQ ID NO: 2770676 - DNA, 25 bp, Homo sapien
gatatcctcatagtgaaagcccagt

SEQ ID NO: 2770677 - DNA, 25 bp, Homo sapien
ctcatagtgaaagcccagtttttct

SEQ ID NO: 2770678 - DNA, 25 bp, Homo sapien
tcctcatagtgaaagcccagttttt

SEQ ID NO: 2770679 - DNA, 25 bp, Homo sapien
tgagtccacgttaggtggttgccct

SEQ ID NO: 2770680 - DNA, 25 bp, Homo sapien
tcatgtaatcctgtcctttggtagc

SEQ ID NO: 2770681 - DNA, 25 bp, Homo sapien
ccatacgtcctctatgttcatgaca

SEQ ID NO: 2770682 - DNA, 25 bp, Homo sapien
ctaataaacctgaatgatgtggatc

SEQ ID NO: 2770683 - DNA, 25 bp, Homo sapien
tgcacttattgttgcccgagcagct

SEQ ID NO: 2770684 - DNA, 25 bp, Homo sapien
ttgagagcggtggtctaatactacc

SEQ ID NO: 2770685 - DNA, 25 bp, Homo sapien
tgatgcatctaggtaggactccacc

SEQ ID NO: 2770686 - DNA, 25 bp, Homo sapien
ggagaatctcctcatgcttgatgca

SEQ ID NO: 2770687 - DNA, 25 bp, Homo sapien
cgaataacttagtgaaatactgtgg

SEQ ID NO: 2770688 - DNA, 25 bp, Homo sapien
gagaggaggtggagcgaataactta

SEQ ID NO: 2770689 - DNA, 25 bp, Homo sapien
aaagggaaactaatcctaatgcaag

SEQ ID NO: 2770690 - DNA, 25 bp, Homo sapien
tgtgggggaaatttagaccaacaga

SEQ ID NO: 2770691 - DNA, 25 bp, Homo sapien
ttctcatatttgatactccctgcaa

SEQ ID NO: 2770692 - DNA, 25 bp, Homo sapien
cttagtaaagttattcagatggcct

SEQ ID NO: 2770693 - DNA, 25 bp, Homo sapien
gtaaagttattcagatggcctagct

SEQ ID NO: 2770694 - DNA, 25 bp, Homo sapien
gaatctctcttaagttatcagaagg

SEQ ID NO: 2770695 - DNA, 25 bp, Homo sapien
cagctaaaggcctggctgccctaga

SEQ ID NO: 2770696 - DNA, 25 bp, Homo sapien
cctgtgcaactagaaggtcatcaaa

SEQ ID NO: 2770697 - DNA, 25 bp, Homo sapien
aaatgacctcgcatcagacccatga

SEQ ID NO: 2770698 - DNA, 25 bp, Homo sapien
caggtgctgccagcggtgtttctgc

SEQ ID NO: 2770699 - DNA, 25 bp, Homo sapien
tggtggactatttggagggagacac

SEQ ID NO: 2770700 - DNA, 25 bp, Homo sapien
ccaggtggtggactatttggaggga

SEQ ID NO: 2770701 - DNA, 25 bp, Homo sapien
cagccaggtggtggactatttggag

SEQ ID NO: 2770702 - DNA, 25 bp, Homo sapien
tggactatttggagggagacacaaa

SEQ ID NO: 2770703 - DNA, 25 bp, Homo sapien
gatacatatgcgacttcaacagtag

SEQ ID NO: 2770704 - DNA, 25 bp, Homo sapien
tccactagcgaagacactgggagtc

SEQ ID NO: 2770705 - DNA, 25 bp, Homo sapien
ctgggagtagagctgaacaatgcat

SEQ ID NO: 2770706 - DNA, 25 bp, Homo sapien
tccaagccaccatgagattaactgt

SEQ ID NO: 2770707 - DNA, 25 bp, Homo sapien
ccacaggtacaaaaggtgagaaaag

SEQ ID NO: 2770708 - DNA, 25 bp, Homo sapien
ttatccacaggtacaaaaggtgaga

SEQ ID NO: 2770709 - DNA, 25 bp, Homo sapien
tatccacaggtacaaaaggtgagaa

SEQ ID NO: 2770710 - DNA, 25 bp, Homo sapien
ctttatccacaggtacaaaaggtga

SEQ ID NO: 2770711 - DNA, 25 bp, Homo sapien
aacaatctaacatttcctgaaattc

SEQ ID NO: 2770712 - DNA, 25 bp, Homo sapien
taacatttcctgaaattctaacaat

SEQ ID NO: 2770713 - DNA, 25 bp, Homo sapien
tgcttcaaacaatctaacatttcct

SEQ ID NO: 2770714 - DNA, 25 bp, Homo sapien
gcttcaaacaatctaacatttcctg

SEQ ID NO: 2770715 - DNA, 25 bp, Homo sapien
agcaagtccttggagacctacaaag

SEQ ID NO: 2770716 - DNA, 25 bp, Homo sapien
cataaagcaagtccttggagaccta

SEQ ID NO: 2770717 - DNA, 25 bp, Homo sapien
cagaaagttaacaaggatacccagg

SEQ ID NO: 2770718 - DNA, 25 bp, Homo sapien
agttaacaaggatacccaggaattg

SEQ ID NO: 2770719 - DNA, 25 bp, Homo sapien
gctgtagtaagcttatgcaccaaaa

SEQ ID NO: 2770720 - DNA, 25 bp, Homo sapien
cagggaatcctagagcaagtacaga

SEQ ID NO: 2770721 - DNA, 25 bp, Homo sapien
tcaaaaacacttatattagtcaggc

SEQ ID NO: 2770722 - DNA, 25 bp, Homo sapien
taggcggatccctacagcctgggag

SEQ ID NO: 2770723 - DNA, 25 bp, Homo sapien
aatcttttaatcatttcatccttgt

SEQ ID NO: 2770724 - DNA, 25 bp, Homo sapien
taatcttttaatcatttcatccttg

SEQ ID NO: 2770725 - DNA, 25 bp, Homo sapien
ctaatcttttaatcatttcatcctt

SEQ ID NO: 2770726 - DNA, 25 bp, Homo sapien
tactgacccatgctaaccaaatcca

SEQ ID NO: 2770727 - DNA, 25 bp, Homo sapien
tggtttctgcaactacactgtctca

SEQ ID NO: 2770728 - DNA, 25 bp, Homo sapien
tgacttttccatcacactactgacc

SEQ ID NO: 2770729 - DNA, 25 bp, Homo sapien
tgtcctcctcaagcttaccatttgc

SEQ ID NO: 2770730 - DNA, 25 bp, Homo sapien
gaaaggcagtggaatctttttctat

SEQ ID NO: 2770731 - DNA, 25 bp, Homo sapien
ttccaactctcacatcactatttct

SEQ ID NO: 2770732 - DNA, 25 bp, Homo sapien
cactatttcttagggggcaaataat

SEQ ID NO: 2770733 - DNA, 25 bp, Homo sapien
tttctcggagacaagcaccaaaaga

SEQ ID NO: 2770734 - DNA, 25 bp, Homo sapien
gacttcgtcggaatcagtaggctca

SEQ ID NO: 2770735 - DNA, 25 bp, Homo sapien
aaccgggttacactccaagctacag

SEQ ID NO: 2770736 - DNA, 25 bp, Homo sapien
gattctgtacagctgaaccgggtta

SEQ ID NO: 2770737 - DNA, 25 bp, Homo sapien
tacagcccgtgtgaaatatgacttc

SEQ ID NO: 2770738 - DNA, 25 bp, Homo sapien
ctgtaagtgatagaggaaacactgg

SEQ ID NO: 2770739 - DNA, 25 bp, Homo sapien
aagcaccgagcaggtccggcttctg

SEQ ID NO: 2770740 - DNA, 25 bp, Homo sapien
gatgtggtcgctcttccctcaaaca

SEQ ID NO: 2770741 - DNA, 25 bp, Homo sapien
tctaggtttcactaccaagttatca

SEQ ID NO: 2770742 - DNA, 25 bp, Homo sapien
gcagtaatgaccagttctaggtttc

SEQ ID NO: 2770743 - DNA, 25 bp, Homo sapien
gctcgagcccagagggtcgccgggt

SEQ ID NO: 2770744 - DNA, 25 bp, Homo sapien
gccgggtctgccgagttccactcgg

SEQ ID NO: 2770745 - DNA, 25 bp, Homo sapien
agggctcgggcgagggaagcgggcg

SEQ ID NO: 2770746 - DNA, 25 bp, Homo sapien
gcaaaccactctgccggagctcgag

SEQ ID NO: 2770747 - DNA, 25 bp, Homo sapien
agcgggacgttctcctcgccgctgt

SEQ ID NO: 2770748 - DNA, 25 bp, Homo sapien
ggacgttctcctcgccgctgtcatt

SEQ ID NO: 2770749 - DNA, 25 bp, Homo sapien
agatccagcgggacgttctcctcgc

SEQ ID NO: 2770750 - DNA, 25 bp, Homo sapien
ctcgggtcagatccagcgggacgtt

SEQ ID NO: 2770751 - DNA, 25 bp, Homo sapien
cgtactcggaggttcttcagagagc

SEQ ID NO: 2770752 - DNA, 25 bp, Homo sapien
tactcggaggttcttcagagagcgg

SEQ ID NO: 2770753 - DNA, 25 bp, Homo sapien
ctcgtactcggaggttcttcagaga

SEQ ID NO: 2770754 - DNA, 25 bp, Homo sapien
ctcggaggttcttcagagagcggcc

SEQ ID NO: 2770755 - DNA, 25 bp, Homo sapien
tctcctgtagagtcgcacacatact

SEQ ID NO: 2770756 - DNA, 25 bp, Homo sapien
tgagccaacattccagacttccagg

SEQ ID NO: 2770757 - DNA, 25 bp, Homo sapien
tattgagggctggtcacataagtac

SEQ ID NO: 2770758 - DNA, 25 bp, Homo sapien
gaaagggcacaatgagtgaagtcca

SEQ ID NO: 2770759 - DNA, 25 bp, Homo sapien
tgtactgttagagaagggcccaatc

SEQ ID NO: 2770760 - DNA, 25 bp, Homo sapien
ttagcaagcttatcaaggagtcctc

SEQ ID NO: 2770761 - DNA, 25 bp, Homo sapien
taaagaggtgccatgcataaaagcc

SEQ ID NO: 2770762 - DNA, 25 bp, Homo sapien
cactagcaagaggtaagacagcact

SEQ ID NO: 2770763 - DNA, 25 bp, Homo sapien
aatatcatcatagatctctccatca

SEQ ID NO: 2770764 - DNA, 25 bp, Homo sapien
aggtaactccgaaggacataaccat

SEQ ID NO: 2770765 - DNA, 25 bp, Homo sapien
cgctaggtaactccgaaggacataa

SEQ ID NO: 2770766 - DNA, 25 bp, Homo sapien
taggtaactccgaaggacataacca

SEQ ID NO: 2770767 - DNA, 25 bp, Homo sapien
gtccgctaggtaactccgaaggaca

SEQ ID NO: 2770768 - DNA, 25 bp, Homo sapien
cacaagagagtaatcatagtatatt

SEQ ID NO: 2770769 - DNA, 25 bp, Homo sapien
aaattgtatcaataatacaggttga

SEQ ID NO: 2770770 - DNA, 25 bp, Homo sapien
attgaataattgtatctatctctgg

SEQ ID NO: 2770771 - DNA, 25 bp, Homo sapien
ataatacaggttgaaaaatctttag

SEQ ID NO: 2770772 - DNA, 25 bp, Homo sapien
gtaactttagttgaatataggactc

SEQ ID NO: 2770773 - DNA, 25 bp, Homo sapien
catctgtggtttgtataacttctag

SEQ ID NO: 2770774 - DNA, 25 bp, Homo sapien
cttctagagattcaccaggttttac

SEQ ID NO: 2770775 - DNA, 25 bp, Homo sapien
tacctgtagatctctggttccccac

SEQ ID NO: 2770776 - DNA, 25 bp, Homo sapien
cttagcttttccaacattagttcct

SEQ ID NO: 2770777 - DNA, 25 bp, Homo sapien
tcttagcttttccaacattagttcc

SEQ ID NO: 2770778 - DNA, 25 bp, Homo sapien
ggaagcatagctttagagaggagtc

SEQ ID NO: 2770779 - DNA, 25 bp, Homo sapien
ggcaaaggatttgggctatctactc

SEQ ID NO: 2770780 - DNA, 25 bp, Homo sapien
tcacaggcccaaggttaatcaggaa

SEQ ID NO: 2770781 - DNA, 25 bp, Homo sapien
tatctactcacaaacctcgcaggga

SEQ ID NO: 2770782 - DNA, 25 bp, Homo sapien
ggaaatcagaggtatccacatcatc

SEQ ID NO: 2770783 - DNA, 25 bp, Homo sapien
cagaggtatccacatcatcgtaaac

SEQ ID NO: 2770784 - DNA, 25 bp, Homo sapien
cagggaaatcagaggtatccacatc

SEQ ID NO: 2770785 - DNA, 25 bp, Homo sapien
gaaacagggaaatcagaggtatcca

SEQ ID NO: 2770786 - DNA, 25 bp, Homo sapien
caattgtttaggaggagcagggaaa

SEQ ID NO: 2770787 - DNA, 25 bp, Homo sapien
ccaattgtttaggaggagcagggaa

SEQ ID NO: 2770788 - DNA, 25 bp, Homo sapien
tattagtagcatttgattcaataca

SEQ ID NO: 2770789 - DNA, 25 bp, Homo sapien
tcaatacatattagtgtagttattg

SEQ ID NO: 2770790 - DNA, 25 bp, Homo sapien
atagaatattagtagcatttgattc

SEQ ID NO: 2770791 - DNA, 25 bp, Homo sapien
tacatattagtgtagttattgtaca

SEQ ID NO: 2770792 - DNA, 25 bp, Homo sapien
cttcattattgtctgagtcagagac

SEQ ID NO: 2770793 - DNA, 25 bp, Homo sapien
caggaccacgtattactcttctctt

SEQ ID NO: 2770794 - DNA, 25 bp, Homo sapien
gagactttaggtttctctcgtatac

SEQ ID NO: 2770795 - DNA, 25 bp, Homo sapien
tctgagtcagagactttaggtttct

SEQ ID NO: 2770796 - DNA, 25 bp, Homo sapien
agaatgtaataatcagcggcaagtg

SEQ ID NO: 2770797 - DNA, 25 bp, Homo sapien
aataatcagcggcaagtgaagacat

SEQ ID NO: 2770798 - DNA, 25 bp, Homo sapien
tttggagcatgcaggcattgatcag

SEQ ID NO: 2770799 - DNA, 25 bp, Homo sapien
gcaggcattgatcagaatgtaataa

SEQ ID NO: 2770800 - DNA, 25 bp, Homo sapien
tcttcctcttcaatcccatcataaa

SEQ ID NO: 2770801 - DNA, 25 bp, Homo sapien
ttcaatcccatcataaatgtcatca

SEQ ID NO: 2770802 - DNA, 25 bp, Homo sapien
cctcttcaatcccatcataaatgtc

SEQ ID NO: 2770803 - DNA, 25 bp, Homo sapien
tcttcaatcccatcataaatgtcat

SEQ ID NO: 2770804 - DNA, 25 bp, Homo sapien
cttcatttggattggaggaaaatct

SEQ ID NO: 2770805 - DNA, 25 bp, Homo sapien
ttcatttggattggaggaaaatctt

SEQ ID NO: 2770806 - DNA, 25 bp, Homo sapien
taaagttctgaactggaccagagat

SEQ ID NO: 2770807 - DNA, 25 bp, Homo sapien
tacccaggtgaagagctagcacaga

SEQ ID NO: 2770808 - DNA, 25 bp, Homo sapien
tagaaatggctgacaatgaagattg

SEQ ID NO: 2770809 - DNA, 25 bp, Homo sapien
ttttgggatcacaatggaggtttcc

SEQ ID NO: 2770810 - DNA, 25 bp, Homo sapien
tcttggtcatcttcaataggtcttg

SEQ ID NO: 2770811 - DNA, 25 bp, Homo sapien
tgctaatatcatcctgctctgcaac

SEQ ID NO: 2770812 - DNA, 25 bp, Homo sapien
tcatagtcaatctctacagcagttg

SEQ ID NO: 2770813 - DNA, 25 bp, Homo sapien
gggcaccaagagagtcttttttcag

SEQ ID NO: 2770814 - DNA, 25 bp, Homo sapien
tcgatgcctatgacgagttctggag

SEQ ID NO: 2770815 - DNA, 25 bp, Homo sapien
tgtaaagtactcctaactcgatgcc

SEQ ID NO: 2770816 - DNA, 25 bp, Homo sapien
gacggaactatacctgccatttaac

SEQ ID NO: 2770817 - DNA, 25 bp, Homo sapien
aacagatgaggtgaagacggaacta

SEQ ID NO: 2770818 - DNA, 25 bp, Homo sapien
tgacatcacaacaagcttttgcaag

SEQ ID NO: 2770819 - DNA, 25 bp, Homo sapien
tgtgatgcggatgatttcaatttgc

SEQ ID NO: 2770820 - DNA, 25 bp, Homo sapien
ggatgacttgaatagggcctgttag

SEQ ID NO: 2770821 - DNA, 25 bp, Homo sapien
cttctgggttgtctgtgatgcggat

SEQ ID NO: 2770822 - DNA, 25 bp, Homo sapien
ctacctataaccaacatttacaggg

SEQ ID NO: 2770823 - DNA, 25 bp, Homo sapien
gctacctataaccaacatttacagg

SEQ ID NO: 2770824 - DNA, 25 bp, Homo sapien
aaagatataagtctacaacttgcta

SEQ ID NO: 2770825 - DNA, 25 bp, Homo sapien
tataagtctacaacttgctaagcta

SEQ ID NO: 2770826 - DNA, 25 bp, Homo sapien
taaaattggagcagacattacctgc

SEQ ID NO: 2770827 - DNA, 25 bp, Homo sapien
tattctgaacagtatggtggcttat

SEQ ID NO: 2770828 - DNA, 25 bp, Homo sapien
gctgtgtgctatgtatctttatgga

SEQ ID NO: 2770829 - DNA, 25 bp, Homo sapien
tagcaagcaaatgttacacgaggtt

SEQ ID NO: 2770830 - DNA, 25 bp, Homo sapien
attctttcactcattagcaagcaag

SEQ ID NO: 2770831 - DNA, 25 bp, Homo sapien
ttttctccagctctaacctcttctt

SEQ ID NO: 2770832 - DNA, 25 bp, Homo sapien
ccagctctaacctcttcttttcttc

SEQ ID NO: 2770833 - DNA, 25 bp, Homo sapien
tctccagctctaacctcttcttttc

SEQ ID NO: 2770834 - DNA, 25 bp, Homo sapien
cctttttctccagctctaacctctt

SEQ ID NO: 2770835 - DNA, 25 bp, Homo sapien
ttaaaaccagtaggaggcacactgc

SEQ ID NO: 2770836 - DNA, 25 bp, Homo sapien
ggcacactgctgaggataccttcca

SEQ ID NO: 2770837 - DNA, 25 bp, Homo sapien
tctgcaggtgttgatgcgtcggaac

SEQ ID NO: 2770838 - DNA, 25 bp, Homo sapien
tatttttcatagcaccccgtgggtg

SEQ ID NO: 2770839 - DNA, 25 bp, Homo sapien
actacttaaaggagccatactgtga

SEQ ID NO: 2770840 - DNA, 25 bp, Homo sapien
tatcttgctatataaatcagacgtg

SEQ ID NO: 2770841 - DNA, 25 bp, Homo sapien
tggtccagaggaataactacttaaa

SEQ ID NO: 2770842 - DNA, 25 bp, Homo sapien
gcttagacttaaaatgaaggcaaca

SEQ ID NO: 2770843 - DNA, 25 bp, Homo sapien
gtctgaactctctctggtttcttgt

SEQ ID NO: 2770844 - DNA, 25 bp, Homo sapien
tgtctgaactctctctggtttcttg

SEQ ID NO: 2770845 - DNA, 25 bp, Homo sapien
gctgtctgaactctctctggtttct

SEQ ID NO: 2770846 - DNA, 25 bp, Homo sapien
atgctgtctgaactctctctggttt

SEQ ID NO: 2770847 - DNA, 25 bp, Homo sapien
tcagcccacgcttcccttctttgga

SEQ ID NO: 2770848 - DNA, 25 bp, Homo sapien
tgtaaggaacatcaatctggtaggg

SEQ ID NO: 2770849 - DNA, 25 bp, Homo sapien
tcatcaagcatgtcagggaatctgt

SEQ ID NO: 2770850 - DNA, 25 bp, Homo sapien
cagtttccattacatggattatgga

SEQ ID NO: 2770851 - DNA, 25 bp, Homo sapien
gggaatctgtcaatccaatattgtt

SEQ ID NO: 2770852 - DNA, 25 bp, Homo sapien
cagggaagttgttgagtaagacgtc

SEQ ID NO: 2770853 - DNA, 25 bp, Homo sapien
tttctgggaggtaggcttgggactg

SEQ ID NO: 2770854 - DNA, 25 bp, Homo sapien
gagtaagacgtctggcctttgctag

SEQ ID NO: 2770855 - DNA, 25 bp, Homo sapien
ttggctggccggatgggatggtgga

SEQ ID NO: 2770856 - DNA, 25 bp, Homo sapien
actcaatcctccatcgactttctgg

SEQ ID NO: 2770857 - DNA, 25 bp, Homo sapien
gggctttggaattacgcaggttgcc

SEQ ID NO: 2770858 - DNA, 25 bp, Homo sapien
atcctccatcgactttctggtttca

SEQ ID NO: 2770859 - DNA, 25 bp, Homo sapien
tggaattacgcaggttgccttgttt

SEQ ID NO: 2770860 - DNA, 25 bp, Homo sapien
ggataaaatcaatataagccagtaa

SEQ ID NO: 2770861 - DNA, 25 bp, Homo sapien
taggataaaatcaatataagccagt

SEQ ID NO: 2770862 - DNA, 25 bp, Homo sapien
ttaggataaaatcaatataagccag

SEQ ID NO: 2770863 - DNA, 25 bp, Homo sapien
ttttaggataaaatcaatataagcc

SEQ ID NO: 2770864 - DNA, 25 bp, Homo sapien
cccagaggtgaagccaagccatata

SEQ ID NO: 2770865 - DNA, 25 bp, Homo sapien
acccagaggtgaagccaagccatat

SEQ ID NO: 2770866 - DNA, 25 bp, Homo sapien
ctaacacttgacgtccaagaactct

SEQ ID NO: 2770867 - DNA, 25 bp, Homo sapien
gcatttgatgatgcattttccaaaa

SEQ ID NO: 2770868 - DNA, 25 bp, Homo sapien
agaactaacacttgacgtccaagaa

SEQ ID NO: 2770869 - DNA, 25 bp, Homo sapien
aactaacacttgacgtccaagaact

SEQ ID NO: 2770870 - DNA, 25 bp, Homo sapien
tcattgtctgagagttccttctggc

SEQ ID NO: 2770871 - DNA, 25 bp, Homo sapien
gagagttccttctggctatcacttg

SEQ ID NO: 2770872 - DNA, 25 bp, Homo sapien
gcaagagccaaagcatacgtgggcc

SEQ ID NO: 2770873 - DNA, 25 bp, Homo sapien
tatcacttgccctttctgcaagagc

SEQ ID NO: 2770874 - DNA, 25 bp, Homo sapien
gaaaagccttgttaagatgccatgg

SEQ ID NO: 2770875 - DNA, 25 bp, Homo sapien
aaaagccttgttaagatgccatggc

SEQ ID NO: 2770876 - DNA, 25 bp, Homo sapien
aagccttgttaagatgccatggcat

SEQ ID NO: 2770877 - DNA, 25 bp, Homo sapien
aaagccttgttaagatgccatggca

SEQ ID NO: 2770878 - DNA, 25 bp, Homo sapien
tgggctggagtatgccggtgtccaa

SEQ ID NO: 2770879 - DNA, 25 bp, Homo sapien
tgtccaatggttgtaactagctggg

SEQ ID NO: 2770880 - DNA, 25 bp, Homo sapien
tatgccggtgtccaatggttgtaac

SEQ ID NO: 2770881 - DNA, 25 bp, Homo sapien
tggagtatgccggtgtccaatggtt

SEQ ID NO: 2770882 - DNA, 25 bp, Homo sapien
ggtcctacagtaattggtacagctg

SEQ ID NO: 2770883 - DNA, 25 bp, Homo sapien
ggtcctgtcttcataatacacctca

SEQ ID NO: 2770884 - DNA, 25 bp, Homo sapien
gatgtactaggaactgtgctacgtg

SEQ ID NO: 2770885 - DNA, 25 bp, Homo sapien
caaagcaactgctcttaactcatga

SEQ ID NO: 2770886 - DNA, 25 bp, Homo sapien
tgtttttgaaggacggagactgcca

SEQ ID NO: 2770887 - DNA, 25 bp, Homo sapien
tgactgagagcacatgaggcaacct

SEQ ID NO: 2770888 - DNA, 25 bp, Homo sapien
caaactgtaaggtgagtgagcagcc

SEQ ID NO: 2770889 - DNA, 25 bp, Homo sapien
aaaaagccgttgtggtgtgcagtcg

SEQ ID NO: 2770890 - DNA, 25 bp, Homo sapien
agtgccacttgggtgccgcctactg

SEQ ID NO: 2770891 - DNA, 25 bp, Homo sapien
cacttgtgacctagtgccacttggg

SEQ ID NO: 2770892 - DNA, 25 bp, Homo sapien
gccttcgcttggcttcagccagtag

SEQ ID NO: 2770893 - DNA, 25 bp, Homo sapien
gcttcagccagtaggagatggcaaa

SEQ ID NO: 2770894 - DNA, 25 bp, Homo sapien
tgaaaagcgtgacaccgggcaacat

SEQ ID NO: 2770895 - DNA, 25 bp, Homo sapien
gggcaacatgtgttaccaccatgct

SEQ ID NO: 2770896 - DNA, 25 bp, Homo sapien
cgtgacaccgggcaacatgtgttac

SEQ ID NO: 2770897 - DNA, 25 bp, Homo sapien
caccgggcaacatgtgttaccacca

SEQ ID NO: 2770898 - DNA, 25 bp, Homo sapien
tagagaatcattccttgttacaaaa

SEQ ID NO: 2770899 - DNA, 25 bp, Homo sapien
catactgaatagcaaacgagaaaag

SEQ ID NO: 2770900 - DNA, 25 bp, Homo sapien
cacatatgagtaccagatatagaga

SEQ ID NO: 2770901 - DNA, 25 bp, Homo sapien
aacattctctgccttggagtaaacc

SEQ ID NO: 2770902 - DNA, 25 bp, Homo sapien
tcgtcaggtcaacatttggtggtct

SEQ ID NO: 2770903 - DNA, 25 bp, Homo sapien
tgtggaatttcgtcaggtcaacatt

SEQ ID NO: 2770904 - DNA, 25 bp, Homo sapien
caggtcaacatttggtggtctgttg

SEQ ID NO: 2770905 - DNA, 25 bp, Homo sapien
ccagaagaggttttgtggaatttcg

SEQ ID NO: 2770906 - DNA, 25 bp, Homo sapien
tgctccagtgggctttagaaacggg

SEQ ID NO: 2770907 - DNA, 25 bp, Homo sapien
caaacttaggtacattgctgggtcc

SEQ ID NO: 2770908 - DNA, 25 bp, Homo sapien
gaagggtcggctattgactgagaca

SEQ ID NO: 2770909 - DNA, 25 bp, Homo sapien
gaagaaggtttgactgccacaggtg

SEQ ID NO: 2770910 - DNA, 25 bp, Homo sapien
gagggactttacatctgcctttcca

SEQ ID NO: 2770911 - DNA, 25 bp, Homo sapien
gggactttacatctgcctttccatc

SEQ ID NO: 2770912 - DNA, 25 bp, Homo sapien
agggactttacatctgcctttccat

SEQ ID NO: 2770913 - DNA, 25 bp, Homo sapien
aaacatagggaacaaaaaatagctg

SEQ ID NO: 2770914 - DNA, 25 bp, Homo sapien
aacatagggaacaaaaaatagctga

SEQ ID NO: 2770915 - DNA, 25 bp, Homo sapien
caaacatagggaacaaaaaatagct

SEQ ID NO: 2770916 - DNA, 25 bp, Homo sapien
caggcgattgtactcactttcagaa

SEQ ID NO: 2770917 - DNA, 25 bp, Homo sapien
ctgtatccatactagcaggcgattg

SEQ ID NO: 2770918 - DNA, 25 bp, Homo sapien
tccatactagcaggcgattgtactc

SEQ ID NO: 2770919 - DNA, 25 bp, Homo sapien
tactagcaggcgattgtactcactt

SEQ ID NO: 2770920 - DNA, 25 bp, Homo sapien
aatgggctgtgatgcattccagtgg

SEQ ID NO: 2770921 - DNA, 25 bp, Homo sapien
agtgggctgagcctcggaggctgga

SEQ ID NO: 2770922 - DNA, 25 bp, Homo sapien
tgtgatgcattccagtgggctgagc

SEQ ID NO: 2770923 - DNA, 25 bp, Homo sapien
ctatttcattgcaaatgggctgtga

SEQ ID NO: 2770924 - DNA, 25 bp, Homo sapien
ccctcttcaacaggatgtgggaact

SEQ ID NO: 2770925 - DNA, 25 bp, Homo sapien
gggaacttgactctcgccgcaaatt

SEQ ID NO: 2770926 - DNA, 25 bp, Homo sapien
tctcgccgcaaattaagttcttggg

SEQ ID NO: 2770927 - DNA, 25 bp, Homo sapien
tgcaggctctgggcgaaggcatggg

SEQ ID NO: 2770928 - DNA, 25 bp, Homo sapien
ccaccacagatatcgctgtgcatta

SEQ ID NO: 2770929 - DNA, 25 bp, Homo sapien
ttccgagcactgatgatccggatcc

SEQ ID NO: 2770930 - DNA, 25 bp, Homo sapien
tcctggtctggtgttattccgagca

SEQ ID NO: 2770931 - DNA, 25 bp, Homo sapien
ctcttccagagtgaattagagcaga

SEQ ID NO: 2770932 - DNA, 25 bp, Homo sapien
ctcccaaatgctggcgccttgtatt

SEQ ID NO: 2770933 - DNA, 25 bp, Homo sapien
tcccaaatgctggcgccttgtattc

SEQ ID NO: 2770934 - DNA, 25 bp, Homo sapien
cccaaatgctggcgccttgtattct

SEQ ID NO: 2770935 - DNA, 25 bp, Homo sapien
gagatccagagttcgatttgaggaa

SEQ ID NO: 2770936 - DNA, 25 bp, Homo sapien
cagcttctagtcaatgagagatcca

SEQ ID NO: 2770937 - DNA, 25 bp, Homo sapien
aagaatatgcaatattagccaggca

SEQ ID NO: 2770938 - DNA, 25 bp, Homo sapien
cagagttcgatttgaggaaagtgaa

SEQ ID NO: 2770939 - DNA, 25 bp, Homo sapien
aaacgcatttggtatttagtaatca

SEQ ID NO: 2770940 - DNA, 25 bp, Homo sapien
taagcacatcacacctcttagctca

SEQ ID NO: 2770941 - DNA, 25 bp, Homo sapien
tgataactgcacagaaacaagactc

SEQ ID NO: 2770942 - DNA, 25 bp, Homo sapien
aagactctgtcataagatgagcatc

SEQ ID NO: 2770943 - DNA, 25 bp, Homo sapien
tcactttgggttgcgctttttctca

SEQ ID NO: 2770944 - DNA, 25 bp, Homo sapien
cttcactttgggttgcgctttttct

SEQ ID NO: 2770945 - DNA, 25 bp, Homo sapien
cactttgggttgcgctttttctcat

SEQ ID NO: 2770946 - DNA, 25 bp, Homo sapien
ttgggttgcgctttttctcattaaa

SEQ ID NO: 2770947 - DNA, 25 bp, Homo sapien
caggggtggttgaagaggggcataa

SEQ ID NO: 2770948 - DNA, 25 bp, Homo sapien
tgtaatgccacattttacccttaaa

SEQ ID NO: 2770949 - DNA, 25 bp, Homo sapien
gaggagggaacaggcaattaatgtt

SEQ ID NO: 2770950 - DNA, 25 bp, Homo sapien
tcaatagtggcaatgtttgcgcaac

SEQ ID NO: 2770951 - DNA, 25 bp, Homo sapien
gcaacaatgcgaatgtatgtaatgc

SEQ ID NO: 2770952 - DNA, 25 bp, Homo sapien
gctcctctcagggatctttggggag

SEQ ID NO: 2770953 - DNA, 25 bp, Homo sapien
tggcatcctgtggtgtattcagaag

SEQ ID NO: 2770954 - DNA, 25 bp, Homo sapien
catcctgtggtgtattcagaagcaa

SEQ ID NO: 2770955 - DNA, 25 bp, Homo sapien
ggatctgtcttatcctcacattttt

SEQ ID NO: 2770956 - DNA, 25 bp, Homo sapien
cctgtggtgtattcagaagcaaaca

SEQ ID NO: 2770957 - DNA, 25 bp, Homo sapien
ccactagatgtcagtgtgattgctc

SEQ ID NO: 2770958 - DNA, 25 bp, Homo sapien
ctgctgcgagcttccaagcctctgg

SEQ ID NO: 2770959 - DNA, 25 bp, Homo sapien
tgcagcattgcaccagaaatcagct

SEQ ID NO: 2770960 - DNA, 25 bp, Homo sapien
gctctatgaagcagccgtaacttgg

SEQ ID NO: 2770961 - DNA, 25 bp, Homo sapien
gatggcctcctttagtggatcttcc

SEQ ID NO: 2770962 - DNA, 25 bp, Homo sapien
gggtctgggccctactcacttctag

SEQ ID NO: 2770963 - DNA, 25 bp, Homo sapien
tgctctgcatgtggaactcaagaac

SEQ ID NO: 2770964 - DNA, 25 bp, Homo sapien
tactcacttctagctgtcgcatctg

SEQ ID NO: 2770965 - DNA, 25 bp, Homo sapien
gaagacaggggctgatactccctta

SEQ ID NO: 2770966 - DNA, 25 bp, Homo sapien
aagacaggggctgatactcccttac

SEQ ID NO: 2770967 - DNA, 25 bp, Homo sapien
agaagacaggggctgatactccctt

SEQ ID NO: 2770968 - DNA, 25 bp, Homo sapien
ttagaagacaggggctgatactccc

SEQ ID NO: 2770969 - DNA, 25 bp, Homo sapien
gctgcttgcacgaaatacgaagcta

SEQ ID NO: 2770970 - DNA, 25 bp, Homo sapien
catgtaaaacacagtaggactctga

SEQ ID NO: 2770971 - DNA, 25 bp, Homo sapien
gggattgatgtccaccattccccag

SEQ ID NO: 2770972 - DNA, 25 bp, Homo sapien
taatttgttctatagagtcattctc

SEQ ID NO: 2770973 - DNA, 25 bp, Homo sapien
tgatgctggcatcacggtctaatga

SEQ ID NO: 2770974 - DNA, 25 bp, Homo sapien
ctagacacccgttcaaaggcattat

SEQ ID NO: 2770975 - DNA, 25 bp, Homo sapien
cacccgttcaaaggcattatccaca

SEQ ID NO: 2770976 - DNA, 25 bp, Homo sapien
ctgatgctggcatcacggtctaatg

SEQ ID NO: 2770977 - DNA, 25 bp, Homo sapien
caaagtgtctgcatacaatctctac

SEQ ID NO: 2770978 - DNA, 25 bp, Homo sapien
caaagaagggacaataaagagcagc

SEQ ID NO: 2770979 - DNA, 25 bp, Homo sapien
gaggtctctgtagtcaaatagggaa

SEQ ID NO: 2770980 - DNA, 25 bp, Homo sapien
aaaatctgtctaggagcttatccag

SEQ ID NO: 2770981 - DNA, 25 bp, Homo sapien
tgtgtatgtgcatctccactttttt

SEQ ID NO: 2770982 - DNA, 25 bp, Homo sapien
ttgtaaattccatggtcccgcaatc

SEQ ID NO: 2770983 - DNA, 25 bp, Homo sapien
aaattccatggtcccgcaatcacac

SEQ ID NO: 2770984 - DNA, 25 bp, Homo sapien
tccatggtcccgcaatcacactatc

SEQ ID NO: 2770985 - DNA, 25 bp, Homo sapien
taaattccatggtcccgcaatcaca

SEQ ID NO: 2770986 - DNA, 25 bp, Homo sapien
gggcgggcgagatcttatcacctct

SEQ ID NO: 2770987 - DNA, 25 bp, Homo sapien
gcgggcgagatcttatcacctctgg

SEQ ID NO: 2770988 - DNA, 25 bp, Homo sapien
aagggcgggcgagatcttatcacct

SEQ ID NO: 2770989 - DNA, 25 bp, Homo sapien
gaagggcgggcgagatcttatcacc

SEQ ID NO: 2770990 - DNA, 25 bp, Homo sapien
tgtccaaaatcagctgcctacgcag

SEQ ID NO: 2770991 - DNA, 25 bp, Homo sapien
tactgtcaaggtaaggcttccacac

SEQ ID NO: 2770992 - DNA, 25 bp, Homo sapien
ccaaagggaaactatctgaactgca

SEQ ID NO: 2770993 - DNA, 25 bp, Homo sapien
tcaaccagctagcttcaaggagcct

SEQ ID NO: 2770994 - DNA, 25 bp, Homo sapien
ccgatcaacaaagcctccttgaaat

SEQ ID NO: 2770995 - DNA, 25 bp, Homo sapien
aaccgatcaacaaagcctccttgaa

SEQ ID NO: 2770996 - DNA, 25 bp, Homo sapien
accgatcaacaaagcctccttgaaa

SEQ ID NO: 2770997 - DNA, 25 bp, Homo sapien
caaccgatcaacaaagcctccttga

SEQ ID NO: 2770998 - DNA, 25 bp, Homo sapien
tatttaaggcccaagccaggatcaa

SEQ ID NO: 2770999 - DNA, 25 bp, Homo sapien
tcaggactatgattggcctccacag

SEQ ID NO: 2771000 - DNA, 25 bp, Homo sapien
gaagtagccctaccctcaaaatatg

SEQ ID NO: 2771001 - DNA, 25 bp, Homo sapien
gaggatgcacgtcacttcagaagta

SEQ ID NO: 2771002 - DNA, 25 bp, Homo sapien
caataagttacagggaaagggcaat

SEQ ID NO: 2771003 - DNA, 25 bp, Homo sapien
aggtggggattggtcacagtggtga

SEQ ID NO: 2771004 - DNA, 25 bp, Homo sapien
tgagcaagcacaggagtcatcgtct

SEQ ID NO: 2771005 - DNA, 25 bp, Homo sapien
tgcacaatctccaattgagcaagca

SEQ ID NO: 2771006 - DNA, 25 bp, Homo sapien
cgtaataagagaaggaataaccagt

SEQ ID NO: 2771007 - DNA, 25 bp, Homo sapien
ggcaggtatcctctccgtaataaga

SEQ ID NO: 2771008 - DNA, 25 bp, Homo sapien
tggcacacaatgaccccgaagatgg

SEQ ID NO: 2771009 - DNA, 25 bp, Homo sapien
tcagagcatttgtatagctggccag

SEQ ID NO: 2771010 - DNA, 25 bp, Homo sapien
gaaaagagttgatatgcctggcaca

SEQ ID NO: 2771011 - DNA, 25 bp, Homo sapien
tggtctgtccagctttcacacattg

SEQ ID NO: 2771012 - DNA, 25 bp, Homo sapien
gaaggcttctctgctgctagctcac

SEQ ID NO: 2771013 - DNA, 25 bp, Homo sapien
gctagctcactgatctcctgttttt

SEQ ID NO: 2771014 - DNA, 25 bp, Homo sapien
aaggcttctctgctgctagctcact

SEQ ID NO: 2771015 - DNA, 25 bp, Homo sapien
tgctagctcactgatctcctgtttt

SEQ ID NO: 2771016 - DNA, 25 bp, Homo sapien
gattgtacaaccaatgttaatcagc

SEQ ID NO: 2771017 - DNA, 25 bp, Homo sapien
cataaggctaggtattaagttggac

SEQ ID NO: 2771018 - DNA, 25 bp, Homo sapien
tttcaaaaggtctcagaccctaagc

SEQ ID NO: 2771019 - DNA, 25 bp, Homo sapien
gaccctaagcaccatgttctctaat

SEQ ID NO: 2771020 - DNA, 25 bp, Homo sapien
aatatgatcaaatagaaggaatttc

SEQ ID NO: 2771021 - DNA, 25 bp, Homo sapien
gatcaaatagaaggaatttcacata

SEQ ID NO: 2771022 - DNA, 25 bp, Homo sapien
atgatcaaatagaaggaatttcaca

SEQ ID NO: 2771023 - DNA, 25 bp, Homo sapien
caaatagaaggaatttcacataatt

SEQ ID NO: 2771024 - DNA, 25 bp, Homo sapien
tcagtcctctggtaaactagtagtt

SEQ ID NO: 2771025 - DNA, 25 bp, Homo sapien
tggacctggcagaatatgttaacca

SEQ ID NO: 2771026 - DNA, 25 bp, Homo sapien
cactgttgacttctcattagggaac

SEQ ID NO: 2771027 - DNA, 25 bp, Homo sapien
taaattgcatggtacagacgtgtgg

SEQ ID NO: 2771028 - DNA, 25 bp, Homo sapien
tcattggggaactctagggctggca

SEQ ID NO: 2771029 - DNA, 25 bp, Homo sapien
tttcattggggaactctagggctgg

SEQ ID NO: 2771030 - DNA, 25 bp, Homo sapien
ctatttttcattggggaactctagg

SEQ ID NO: 2771031 - DNA, 25 bp, Homo sapien
ttggggaactctagggctggcaatc

SEQ ID NO: 2771032 - DNA, 25 bp, Homo sapien
tctaggagtagaaacgcacacaagg

SEQ ID NO: 2771033 - DNA, 25 bp, Homo sapien
caacatggatgcttggaagatctac

SEQ ID NO: 2771034 - DNA, 25 bp, Homo sapien
caatctcatcatgggtgtaagctag

SEQ ID NO: 2771035 - DNA, 25 bp, Homo sapien
gaatccaatgaccaacctggttgag

SEQ ID NO: 2771036 - DNA, 25 bp, Homo sapien
ggcccaaagcttatcattatgcaat

SEQ ID NO: 2771037 - DNA, 25 bp, Homo sapien
actatttgggtgatgcgtacaccag

SEQ ID NO: 2771038 - DNA, 25 bp, Homo sapien
accagaggcccaaagcttatcatta

SEQ ID NO: 2771039 - DNA, 25 bp, Homo sapien
ttgggtgatgcgtacaccagaggcc

SEQ ID NO: 2771040 - DNA, 25 bp, Homo sapien
accccaaagtgcatatttttgtctt

SEQ ID NO: 2771041 - DNA, 25 bp, Homo sapien
aaccccaaagtgcatatttttgtct

SEQ ID NO: 2771042 - DNA, 25 bp, Homo sapien
tcacaggcaattccctcaaatttga

SEQ ID NO: 2771043 - DNA, 25 bp, Homo sapien
tcaaatttgaatgggcaggcacaca

SEQ ID NO: 2771044 - DNA, 25 bp, Homo sapien
ttttttgtttactgatttcacaggc

SEQ ID NO: 2771045 - DNA, 25 bp, Homo sapien
ggcacacaaacactttccatccatt

SEQ ID NO: 2771046 - DNA, 25 bp, Homo sapien
ccattttggcatgtgtggcattttc

SEQ ID NO: 2771047 - DNA, 25 bp, Homo sapien
ctccattttggcatgtgtggcattt

SEQ ID NO: 2771048 - DNA, 25 bp, Homo sapien
tccattttggcatgtgtggcatttt

SEQ ID NO: 2771049 - DNA, 25 bp, Homo sapien
gaaccagattatatataggagacag

SEQ ID NO: 2771050 - DNA, 25 bp, Homo sapien
tgtttctttaggtgtgcatttttca

SEQ ID NO: 2771051 - DNA, 25 bp, Homo sapien
ttcactggaaccagattatatatag

SEQ ID NO: 2771052 - DNA, 25 bp, Homo sapien
tcattgatatagtcttcaatggctc

SEQ ID NO: 2771053 - DNA, 25 bp, Homo sapien
gaagacctataacagattgggagac

SEQ ID NO: 2771054 - DNA, 25 bp, Homo sapien
caatgtgggaccctagattggatcc

SEQ ID NO: 2771055 - DNA, 25 bp, Homo sapien
caaggccttgaggtaggaaacaact

SEQ ID NO: 2771056 - DNA, 25 bp, Homo sapien
gacatttgacgtgataactgaccag

SEQ ID NO: 2771057 - DNA, 25 bp, Homo sapien
tcaatcacggttcctcggagaagct

SEQ ID NO: 2771058 - DNA, 25 bp, Homo sapien
ggttccacctcttatgagtgaaaca

SEQ ID NO: 2771059 - DNA, 25 bp, Homo sapien
tttgactaatgagaacaggagcatc

SEQ ID NO: 2771060 - DNA, 25 bp, Homo sapien
gaagaggcccagttgacaaagtcag

SEQ ID NO: 2771061 - DNA, 25 bp, Homo sapien
gagatacatccagatgatacccaag

SEQ ID NO: 2771062 - DNA, 25 bp, Homo sapien
gccagagatacatccagatgatacc

SEQ ID NO: 2771063 - DNA, 25 bp, Homo sapien
tacatccagatgatacccaaggcat

SEQ ID NO: 2771064 - DNA, 25 bp, Homo sapien
gagaaagccagagatacatccagat

SEQ ID NO: 2771065 - DNA, 25 bp, Homo sapien
ttgtgagcacaacatcgcgatttct

SEQ ID NO: 2771066 - DNA, 25 bp, Homo sapien
gagctactgtagtgagttccatagg

SEQ ID NO: 2771067 - DNA, 25 bp, Homo sapien
tagagtcctcctagagacccagagc

SEQ ID NO: 2771068 - DNA, 25 bp, Homo sapien
tcccttttcataggtagttggcaaa

SEQ ID NO: 2771069 - DNA, 25 bp, Homo sapien
caatttgttcttcgtaatgttcggt

SEQ ID NO: 2771070 - DNA, 25 bp, Homo sapien
gaaaactacccttgccatgtaaaga

SEQ ID NO: 2771071 - DNA, 25 bp, Homo sapien
taaagaaattgaggaggctgtttcc

SEQ ID NO: 2771072 - DNA, 25 bp, Homo sapien
ggctgtttcctcacaacattgttca

SEQ ID NO: 2771073 - DNA, 25 bp, Homo sapien
cacgttccaaggtcttcggtagtat

SEQ ID NO: 2771074 - DNA, 25 bp, Homo sapien
tcatagatcaaagaagccacgttcc

SEQ ID NO: 2771075 - DNA, 25 bp, Homo sapien
tcggtagtatgtcagagtgtttcca

SEQ ID NO: 2771076 - DNA, 25 bp, Homo sapien
gatcccggttacagagtccattgta

SEQ ID NO: 2771077 - DNA, 25 bp, Homo sapien
tagcctgctgttcgtgccagctcag

SEQ ID NO: 2771078 - DNA, 25 bp, Homo sapien
cgaagtcgcatctttatgcatctgc

SEQ ID NO: 2771079 - DNA, 25 bp, Homo sapien
agtcattgtcaccattacaccgaag

SEQ ID NO: 2771080 - DNA, 25 bp, Homo sapien
ccactctgtctctgcaggggggacg

SEQ ID NO: 2771081 - DNA, 25 bp, Homo sapien
tctgtctcccacagcgtcggtgcat

SEQ ID NO: 2771082 - DNA, 25 bp, Homo sapien
tgtccaaagacctcaatgcttcttg

SEQ ID NO: 2771083 - DNA, 25 bp, Homo sapien
gggctctgtgggcacacactgtcgt

SEQ ID NO: 2771084 - DNA, 25 bp, Homo sapien
aagtcatttccgcagtcatcctcag

SEQ ID NO: 2771085 - DNA, 25 bp, Homo sapien
gcacaatatcagttggaatgattag

SEQ ID NO: 2771086 - DNA, 25 bp, Homo sapien
aaggtgcatccatacaactatatcc

SEQ ID NO: 2771087 - DNA, 25 bp, Homo sapien
ggtctaaaggtgcatccatacaact

SEQ ID NO: 2771088 - DNA, 25 bp, Homo sapien
ctgcacaatatcagttggaatgatt

SEQ ID NO: 2771089 - DNA, 25 bp, Homo sapien
tgttatttagggtaacactctgcat

SEQ ID NO: 2771090 - DNA, 25 bp, Homo sapien
agtggtggaagaagtcactgatgtt

SEQ ID NO: 2771091 - DNA, 25 bp, Homo sapien
ctgatgttatttagggtaacactct

SEQ ID NO: 2771092 - DNA, 25 bp, Homo sapien
ctgcaatgagtcaatggttttaaga

SEQ ID NO: 2771093 - DNA, 25 bp, Homo sapien
tgagacaaggatcgcattgtgacca

SEQ ID NO: 2771094 - DNA, 25 bp, Homo sapien
ggatcgcattgtgaccattcactcc

SEQ ID NO: 2771095 - DNA, 25 bp, Homo sapien
tttgtctgagacaaggatcgcattg

SEQ ID NO: 2771096 - DNA, 25 bp, Homo sapien
caaggatcgcattgtgaccattcac

SEQ ID NO: 2771097 - DNA, 25 bp, Homo sapien
gtctatgtgtgatgcagagccactg

SEQ ID NO: 2771098 - DNA, 25 bp, Homo sapien
gctttctgttagctctgggtcataa

SEQ ID NO: 2771099 - DNA, 25 bp, Homo sapien
tgcagagccactgctttctgttagc

SEQ ID NO: 2771100 - DNA, 25 bp, Homo sapien
ctgcagtctatgtgtgatgcagagc

SEQ ID NO: 2771101 - DNA, 25 bp, Homo sapien
ggaatttaactcagctctgcaccaa

SEQ ID NO: 2771102 - DNA, 25 bp, Homo sapien
agttaacaaggatatccaggaattt

SEQ ID NO: 2771103 - DNA, 25 bp, Homo sapien
taacaaggatatccaggaatttaac

SEQ ID NO: 2771104 - DNA, 25 bp, Homo sapien
cagatcagtgagacagaaagttaac

SEQ ID NO: 2771105 - DNA, 25 bp, Homo sapien
tccagctaatggggctttccggtcc

SEQ ID NO: 2771106 - DNA, 25 bp, Homo sapien
cagctaatggggctttccggtcctc

SEQ ID NO: 2771107 - DNA, 25 bp, Homo sapien
ccagctaatggggctttccggtcct

SEQ ID NO: 2771108 - DNA, 25 bp, Homo sapien
gtccagctaatggggctttccggtc

SEQ ID NO: 2771109 - DNA, 25 bp, Homo sapien
ccagggggtacgcacttcaaagcaa

SEQ ID NO: 2771110 - DNA, 25 bp, Homo sapien
tacgcacttcaaagcaatcaaagct

SEQ ID NO: 2771111 - DNA, 25 bp, Homo sapien
gggggtacgcacttcaaagcaatca

SEQ ID NO: 2771112 - DNA, 25 bp, Homo sapien
gtacgcacttcaaagcaatcaaagc

SEQ ID NO: 2771113 - DNA, 25 bp, Homo sapien
gattgcaactgcaaagctccggcag

SEQ ID NO: 2771114 - DNA, 25 bp, Homo sapien
aaatgcagattgcaactgcaaagct

SEQ ID NO: 2771115 - DNA, 25 bp, Homo sapien
tgctgtgaggatgcttatttctaaa

SEQ ID NO: 2771116 - DNA, 25 bp, Homo sapien
tgtgctgtgaggatgcttatttcta

SEQ ID NO: 2771117 - DNA, 25 bp, Homo sapien
ctgcgagtggggtggcagggcaggt

SEQ ID NO: 2771118 - DNA, 25 bp, Homo sapien
gcatttatttgcaaagggccagagg

SEQ ID NO: 2771119 - DNA, 25 bp, Homo sapien
aagggccagaggacagggaacaagc

SEQ ID NO: 2771120 - DNA, 25 bp, Homo sapien
gtaaggcatttatttgcaaagggcc

SEQ ID NO: 2771121 - DNA, 25 bp, Homo sapien
ctggtaaggcatttatttgcaaagg

SEQ ID NO: 2771122 - DNA, 25 bp, Homo sapien
taattgacttgtgatgagaccctgc

SEQ ID NO: 2771123 - DNA, 25 bp, Homo sapien
ggatcattctaacgtgtagccaggg

SEQ ID NO: 2771124 - DNA, 25 bp, Homo sapien
gagactgaggatgaccaccttgaga

SEQ ID NO: 2771125 - DNA, 25 bp, Homo sapien
cattaagggcgtccaccagaaagag

SEQ ID NO: 2771126 - DNA, 25 bp, Homo sapien
actgccaagtaataagatgattcga

SEQ ID NO: 2771127 - DNA, 25 bp, Homo sapien
gagtgtaggccatgcagaactgcca

SEQ ID NO: 2771128 - DNA, 25 bp, Homo sapien
caactcgtgtaactatgtcatggga

SEQ ID NO: 2771129 - DNA, 25 bp, Homo sapien
gaatggatgccacaactcgtgtaac

SEQ ID NO: 2771130 - DNA, 25 bp, Homo sapien
gaaatgaggcttatgtttctgtgtg

SEQ ID NO: 2771131 - DNA, 25 bp, Homo sapien
gcatcatcatgcattagactagagc

SEQ ID NO: 2771132 - DNA, 25 bp, Homo sapien
cacattgagattacatcatttgtcc

SEQ ID NO: 2771133 - DNA, 25 bp, Homo sapien
ccttaacatctatcatgtgtctgag

SEQ ID NO: 2771134 - DNA, 25 bp, Homo sapien
cacacaggctcaacgggttagacgc

SEQ ID NO: 2771135 - DNA, 25 bp, Homo sapien
gactgcactgaaaggaatgtccgcc

SEQ ID NO: 2771136 - DNA, 25 bp, Homo sapien
caagttaacctgtggcaagatctca

SEQ ID NO: 2771137 - DNA, 25 bp, Homo sapien
aatgtccgcctcttgtacacacgag

SEQ ID NO: 2771138 - DNA, 25 bp, Homo sapien
ctcatgcaacagctctccagagggg

SEQ ID NO: 2771139 - DNA, 25 bp, Homo sapien
tgataaaggcctagcatgaccccaa

SEQ ID NO: 2771140 - DNA, 25 bp, Homo sapien
aatcaatagagggtcatgtggcccc

SEQ ID NO: 2771141 - DNA, 25 bp, Homo sapien
tgggagaaaaggacaatcttggcct

SEQ ID NO: 2771142 - DNA, 25 bp, Homo sapien
caagaacctgagcattaagggtcaa

SEQ ID NO: 2771143 - DNA, 25 bp, Homo sapien
aaacagtatgatatgaagggatgtg

SEQ ID NO: 2771144 - DNA, 25 bp, Homo sapien
caaaacagtatgatatgaagggatg

SEQ ID NO: 2771145 - DNA, 25 bp, Homo sapien
attcaaaacagtatgatatgaaggg

SEQ ID NO: 2771146 - DNA, 25 bp, Homo sapien
tcaaaacagtatgatatgaagggat

SEQ ID NO: 2771147 - DNA, 25 bp, Homo sapien
acaagaggcagggttcagtagggaa

SEQ ID NO: 2771148 - DNA, 25 bp, Homo sapien
tactgtacttcatttacacttaagc

SEQ ID NO: 2771149 - DNA, 25 bp, Homo sapien
gaaggcaggtgttctagaaggttcc

SEQ ID NO: 2771150 - DNA, 25 bp, Homo sapien
tcagtagggaaactactgtacttca

SEQ ID NO: 2771151 - DNA, 25 bp, Homo sapien
gctttgtttttgactactaaggcca

SEQ ID NO: 2771152 - DNA, 25 bp, Homo sapien
tattcctctggatggtctgcagacc

SEQ ID NO: 2771153 - DNA, 25 bp, Homo sapien
aatcagaacgtgtctggctatcagc

SEQ ID NO: 2771154 - DNA, 25 bp, Homo sapien
tacgtcaaagctggaacaagggcag

SEQ ID NO: 2771155 - DNA, 25 bp, Homo sapien
tatatctccccttgaatggaaggtg

SEQ ID NO: 2771156 - DNA, 25 bp, Homo sapien
cagtaatagtatctcctagggctga

SEQ ID NO: 2771157 - DNA, 25 bp, Homo sapien
aatctattgatgtagcaggttgacc

SEQ ID NO: 2771158 - DNA, 25 bp, Homo sapien
gagttccccttacccaatctattga

SEQ ID NO: 2771159 - DNA, 25 bp, Homo sapien
caatggaatctgaaccctttatagg

SEQ ID NO: 2771160 - DNA, 25 bp, Homo sapien
aaagagttacactgagccctcccag

SEQ ID NO: 2771161 - DNA, 25 bp, Homo sapien
tgatccagatgcctataagctcaat

SEQ ID NO: 2771162 - DNA, 25 bp, Homo sapien
tttgagctcctactgcctatgaagg

SEQ ID NO: 2771163 - DNA, 25 bp, Homo sapien
cagtagagattttcctgtcgattac

SEQ ID NO: 2771164 - DNA, 25 bp, Homo sapien
gacaggcttattaggatcttctact

SEQ ID NO: 2771165 - DNA, 25 bp, Homo sapien
tctattcttaagtgcccagcctagt

SEQ ID NO: 2771166 - DNA, 25 bp, Homo sapien
cacaaaaacccctgagacaggctta

SEQ ID NO: 2771167 - DNA, 25 bp, Homo sapien
ccaaatggatccctatacatctcag

SEQ ID NO: 2771168 - DNA, 25 bp, Homo sapien
cctatacatctcagaagatacaggt

SEQ ID NO: 2771169 - DNA, 25 bp, Homo sapien
aatggatccctatacatctcagaag

SEQ ID NO: 2771170 - DNA, 25 bp, Homo sapien
ggatccctatacatctcagaagata

SEQ ID NO: 2771171 - DNA, 25 bp, Homo sapien
aaatcatctagtcaataaatacagt

SEQ ID NO: 2771172 - DNA, 25 bp, Homo sapien
atcatctagtcaataaatacagtta

SEQ ID NO: 2771173 - DNA, 25 bp, Homo sapien
tcttttaaaaatcgcttaggtcata

SEQ ID NO: 2771174 - DNA, 25 bp, Homo sapien
gataaaatcatctagtcaataaata

SEQ ID NO: 2771175 - DNA, 25 bp, Homo sapien
ttggtaactggcagggaaacttgtc

SEQ ID NO: 2771176 - DNA, 25 bp, Homo sapien
taactggcagggaaacttgtctggg

SEQ ID NO: 2771177 - DNA, 25 bp, Homo sapien
gatgaaccaaaagaatctttaaaga

SEQ ID NO: 2771178 - DNA, 25 bp, Homo sapien
aaatgcattgtcagtagatttggta

SEQ ID NO: 2771179 - DNA, 25 bp, Homo sapien
aggccagtccccgagtcagcttatt

SEQ ID NO: 2771180 - DNA, 25 bp, Homo sapien
tggatgacgccttattacacagccc

SEQ ID NO: 2771181 - DNA, 25 bp, Homo sapien
tagctcatggcagcccttttaagat

SEQ ID NO: 2771182 - DNA, 25 bp, Homo sapien
tacatcagtggaacaaaaatcaaca

SEQ ID NO: 2771183 - DNA, 25 bp, Homo sapien
tgatctctttatccccaagtgggtc

SEQ ID NO: 2771184 - DNA, 25 bp, Homo sapien
tgggtctaaggcagtgaaggcatca

SEQ ID NO: 2771185 - DNA, 25 bp, Homo sapien
tctcctgaggaatgccaaccttgct

SEQ ID NO: 2771186 - DNA, 25 bp, Homo sapien
aaataactggcaaaggcactcaaag

SEQ ID NO: 2771187 - DNA, 25 bp, Homo sapien
gagtgaccaggagagaggagtgcat

SEQ ID NO: 2771188 - DNA, 25 bp, Homo sapien
tggctgaggaggagtgaccaggaga

SEQ ID NO: 2771189 - DNA, 25 bp, Homo sapien
ggaggagtgaccaggagagaggagt

SEQ ID NO: 2771190 - DNA, 25 bp, Homo sapien
aggagtgaccaggagagaggagtgc

SEQ ID NO: 2771191 - DNA, 25 bp, Homo sapien
tattgctctgaaaaggattccccaa

SEQ ID NO: 2771192 - DNA, 25 bp, Homo sapien
tgacgggctgactaaaacctgaagg

SEQ ID NO: 2771193 - DNA, 25 bp, Homo sapien
gacttgtaccaaaaatgacgggctg

SEQ ID NO: 2771194 - DNA, 25 bp, Homo sapien
tgaaggttgaccacccatcatggct

SEQ ID NO: 2771195 - DNA, 25 bp, Homo sapien
gaacagagcctgttaatagcaggaa

SEQ ID NO: 2771196 - DNA, 25 bp, Homo sapien
ggaaaccagcaatcacacatgtgca

SEQ ID NO: 2771197 - DNA, 25 bp, Homo sapien
tcctgattagaagggtagtacggtc

SEQ ID NO: 2771198 - DNA, 25 bp, Homo sapien
tggcaactggctcacgtctggagtc

SEQ ID NO: 2771199 - DNA, 25 bp, Homo sapien
aggaaactgggtgcaagaatattca

SEQ ID NO: 2771200 - DNA, 25 bp, Homo sapien
aaggtcatagtctgggatggtagaa

SEQ ID NO: 2771201 - DNA, 25 bp, Homo sapien
atcaggcacactggctctaaatccg

SEQ ID NO: 2771202 - DNA, 25 bp, Homo sapien
tatattctacaatacaggctctaaa

SEQ ID NO: 2771203 - DNA, 25 bp, Homo sapien
cttctaagagggctatgtgttgaaa

SEQ ID NO: 2771204 - DNA, 25 bp, Homo sapien
tgttgaaaggacataggccttcgat

SEQ ID NO: 2771205 - DNA, 25 bp, Homo sapien
taagagggctatgtgttgaaaggac

SEQ ID NO: 2771206 - DNA, 25 bp, Homo sapien
tatgtgttgaaaggacataggcctt

SEQ ID NO: 2771207 - DNA, 25 bp, Homo sapien
ggagcacttgttttgaagagatcca

SEQ ID NO: 2771208 - DNA, 25 bp, Homo sapien
caggagcacttgttttgaagagatc

SEQ ID NO: 2771209 - DNA, 25 bp, Homo sapien
gagcacttgttttgaagagatccag

SEQ ID NO: 2771210 - DNA, 25 bp, Homo sapien
aggagcacttgttttgaagagatcc

SEQ ID NO: 2771211 - DNA, 25 bp, Homo sapien
cctgtgggtgacgcctggcctgaag

SEQ ID NO: 2771212 - DNA, 25 bp, Homo sapien
tcctgtgggtgacgcctggcctgaa

SEQ ID NO: 2771213 - DNA, 25 bp, Homo sapien
ctgtgggtgacgcctggcctgaagg

SEQ ID NO: 2771214 - DNA, 25 bp, Homo sapien
agatgtctgatgcaagcaagtcatt

SEQ ID NO: 2771215 - DNA, 25 bp, Homo sapien
gatgtctgatgcaagcaagtcattg

SEQ ID NO: 2771216 - DNA, 25 bp, Homo sapien
aagatgtctgatgcaagcaagtcat

SEQ ID NO: 2771217 - DNA, 25 bp, Homo sapien
tactcactaacagtgaaatacagcc

SEQ ID NO: 2771218 - DNA, 25 bp, Homo sapien
gccttagttactcactaacagtgaa

SEQ ID NO: 2771219 - DNA, 25 bp, Homo sapien
tagttactcactaacagtgaaatac

SEQ ID NO: 2771220 - DNA, 25 bp, Homo sapien
gaagccttagttactcactaacagt

SEQ ID NO: 2771221 - DNA, 25 bp, Homo sapien
tacacactcacattggtctggtctc

SEQ ID NO: 2771222 - DNA, 25 bp, Homo sapien
cagtctacatagagatcatagggtc

SEQ ID NO: 2771223 - DNA, 25 bp, Homo sapien
catagggtcttaatccaggcaagcc

SEQ ID NO: 2771224 - DNA, 25 bp, Homo sapien
tgtctgacactacctaggacttgca

SEQ ID NO: 2771225 - DNA, 25 bp, Homo sapien
cccaacccagaacacgatgatcaaa

SEQ ID NO: 2771226 - DNA, 25 bp, Homo sapien
tcccaacccagaacacgatgatcaa

SEQ ID NO: 2771227 - DNA, 25 bp, Homo sapien
tgagaagcttaaaaacggtggcagt

SEQ ID NO: 2771228 - DNA, 25 bp, Homo sapien
agaggaaagtactcctggagaacca

SEQ ID NO: 2771229 - DNA, 25 bp, Homo sapien
ttagtttaatcataagtgacaagac

SEQ ID NO: 2771230 - DNA, 25 bp, Homo sapien
caagacatgcacacggaaagcaggg

SEQ ID NO: 2771231 - DNA, 25 bp, Homo sapien
tggatatgtggagaagacaattcac

SEQ ID NO: 2771232 - DNA, 25 bp, Homo sapien
aatggatatgtggagaagacaattc

SEQ ID NO: 2771233 - DNA, 25 bp, Homo sapien
ggtaccgaacatgcactctgctaat

SEQ ID NO: 2771234 - DNA, 25 bp, Homo sapien
taatggatatgtggagaagacaatt

SEQ ID NO: 2771235 - DNA, 25 bp, Homo sapien
aagtcctgctttacgccattctgta

SEQ ID NO: 2771236 - DNA, 25 bp, Homo sapien
cattctgtatggacagtcctttggg

SEQ ID NO: 2771237 - DNA, 25 bp, Homo sapien
ggaggatttgacagagaagccgttc

SEQ ID NO: 2771238 - DNA, 25 bp, Homo sapien
gagtcatgtggtgaggactggacag

SEQ ID NO: 2771239 - DNA, 25 bp, Homo sapien
tctggctgtgtgaaaggatcgtcac

SEQ ID NO: 2771240 - DNA, 25 bp, Homo sapien
cattactcagcggagtagacgagct

SEQ ID NO: 2771241 - DNA, 25 bp, Homo sapien
tcgtcacggaaaggatcaggattag

SEQ ID NO: 2771242 - DNA, 25 bp, Homo sapien
cctgtttgccagtccggttagagat

SEQ ID NO: 2771243 - DNA, 25 bp, Homo sapien
gataaatcggttgatcattacctcc

SEQ ID NO: 2771244 - DNA, 25 bp, Homo sapien
ccatgttgtgacttcaaatgagaaa

SEQ ID NO: 2771245 - DNA, 25 bp, Homo sapien
gtagtccattactccctagctatag

SEQ ID NO: 2771246 - DNA, 25 bp, Homo sapien
tatttaagtctcaacctcattaggt

SEQ ID NO: 2771247 - DNA, 25 bp, Homo sapien
ggaagagctattaatctagggatct

SEQ ID NO: 2771248 - DNA, 25 bp, Homo sapien
tctagggatctttatacaatcaaaa

SEQ ID NO: 2771249 - DNA, 25 bp, Homo sapien
tatacaatcaaaaggtaggataaaa

SEQ ID NO: 2771250 - DNA, 25 bp, Homo sapien
tggaagagctattaatctagggatc

SEQ ID NO: 2771251 - DNA, 25 bp, Homo sapien
cttaggacaccaaacaggagccaca

SEQ ID NO: 2771252 - DNA, 25 bp, Homo sapien
acaggagccacaatgttagacttct

SEQ ID NO: 2771253 - DNA, 25 bp, Homo sapien
ggttagaacagttgagtgttcacag

SEQ ID NO: 2771254 - DNA, 25 bp, Homo sapien
ctctgggttagaacagttgagtgtt

SEQ ID NO: 2771255 - DNA, 25 bp, Homo sapien
tacagaacctgctcgtagggagctc

SEQ ID NO: 2771256 - DNA, 25 bp, Homo sapien
tatcttatggcatgtacacaaggac

SEQ ID NO: 2771257 - DNA, 25 bp, Homo sapien
taagacccacgttgtttctagccca

SEQ ID NO: 2771258 - DNA, 25 bp, Homo sapien
gctcttctctgggtggctaatctca

SEQ ID NO: 2771259 - DNA, 25 bp, Homo sapien
catcactaatggaggagagcacaaa

SEQ ID NO: 2771260 - DNA, 25 bp, Homo sapien
gggagtgacaaccatctaggaccaa

SEQ ID NO: 2771261 - DNA, 25 bp, Homo sapien
tttatgcagtaaggattcacaggcc

SEQ ID NO: 2771262 - DNA, 25 bp, Homo sapien
tttaatgttggtctccctgccggag

SEQ ID NO: 2771263 - DNA, 25 bp, Homo sapien
ggttcccatggtgacttaagattca

SEQ ID NO: 2771264 - DNA, 25 bp, Homo sapien
ggccaggaggctttatgattaacca

SEQ ID NO: 2771265 - DNA, 25 bp, Homo sapien
cctaagtgataccaagaaggactac

SEQ ID NO: 2771266 - DNA, 25 bp, Homo sapien
taaaatcctatgagaatgggcagct

SEQ ID NO: 2771267 - DNA, 25 bp, Homo sapien
tggactatttaggtcaggaggtgta

SEQ ID NO: 2771268 - DNA, 25 bp, Homo sapien
ggtgtagacatgtccccaaacaaat

SEQ ID NO: 2771269 - DNA, 25 bp, Homo sapien
tgttggactatttaggtcaggaggt

SEQ ID NO: 2771270 - DNA, 25 bp, Homo sapien
ctatttaggtcaggaggtgtagaca

SEQ ID NO: 2771271 - DNA, 25 bp, Homo sapien
tgttagtttggtcatctagaatcat

SEQ ID NO: 2771272 - DNA, 25 bp, Homo sapien
ttcagtttgttagtttggtcatcta

SEQ ID NO: 2771273 - DNA, 25 bp, Homo sapien
atctagaatcattagggcctcactc

SEQ ID NO: 2771274 - DNA, 25 bp, Homo sapien
tctagaatcattagggcctcactcc

SEQ ID NO: 2771275 - DNA, 25 bp, Homo sapien
aacatctttcatgatcagagaagtc

SEQ ID NO: 2771276 - DNA, 25 bp, Homo sapien
acatagtaataagcgaggtggcgag

SEQ ID NO: 2771277 - DNA, 25 bp, Homo sapien
aagcagcaatggttttggtatcatc

SEQ ID NO: 2771278 - DNA, 25 bp, Homo sapien
gtatttgtccactctattagtctgc

SEQ ID NO: 2771279 - DNA, 25 bp, Homo sapien
aaacaagtatgcctatggttcacag

SEQ ID NO: 2771280 - DNA, 25 bp, Homo sapien
ccagggagtgcagattagaagtgcc

SEQ ID NO: 2771281 - DNA, 25 bp, Homo sapien
gaatagacaatacatatagaagcca

SEQ ID NO: 2771282 - DNA, 25 bp, Homo sapien
tattaaacatagtcctgagtacagt

SEQ ID NO: 2771283 - DNA, 25 bp, Homo sapien
ttaagatcaacaactaatggttcag

SEQ ID NO: 2771284 - DNA, 25 bp, Homo sapien
taagatcaacaactaatggttcagc

SEQ ID NO: 2771285 - DNA, 25 bp, Homo sapien
tataagaaggtccattctcacaatc

SEQ ID NO: 2771286 - DNA, 25 bp, Homo sapien
tcaccactgttgtgaagtcagtatt

SEQ ID NO: 2771287 - DNA, 25 bp, Homo sapien
tgtccacagaggacaagtccccagg

SEQ ID NO: 2771288 - DNA, 25 bp, Homo sapien
tgagtgacagacactccaatgtcca

SEQ ID NO: 2771289 - DNA, 25 bp, Homo sapien
tcacatcacgggcaatgaaagaaat

SEQ ID NO: 2771290 - DNA, 25 bp, Homo sapien
accaaatgcccggttgtctgtcaca

SEQ ID NO: 2771291 - DNA, 25 bp, Homo sapien
gtttttatggcaaaaaactgatgct

SEQ ID NO: 2771292 - DNA, 25 bp, Homo sapien
aatcttatttactggatgttcatgc

SEQ ID NO: 2771293 - DNA, 25 bp, Homo sapien
gagtggccgaggaaccatcctatgt

SEQ ID NO: 2771294 - DNA, 25 bp, Homo sapien
cattgacgatggctcagagtggccg

SEQ ID NO: 2771295 - DNA, 25 bp, Homo sapien
aagacatgatgccacatagccagga

SEQ ID NO: 2771296 - DNA, 25 bp, Homo sapien
gacatttagcccttaagccaagcca

SEQ ID NO: 2771297 - DNA, 25 bp, Homo sapien
caagtagcaaattgttggtcagact

SEQ ID NO: 2771298 - DNA, 25 bp, Homo sapien
tatgatatatttgttccccacagaa

SEQ ID NO: 2771299 - DNA, 25 bp, Homo sapien
tccccacagaactttgagaacgaag

SEQ ID NO: 2771300 - DNA, 25 bp, Homo sapien
caggtggtcagagaggtatcagcaa

SEQ ID NO: 2771301 - DNA, 25 bp, Homo sapien
tgttgacccagatcctttgtttgtg

SEQ ID NO: 2771302 - DNA, 25 bp, Homo sapien
aatgttgacccagatcctttgtttg

SEQ ID NO: 2771303 - DNA, 25 bp, Homo sapien
atgttgacccagatcctttgtttgt

SEQ ID NO: 2771304 - DNA, 25 bp, Homo sapien
gttgacccagatcctttgtttgtgt

SEQ ID NO: 2771305 - DNA, 25 bp, Homo sapien
attttatcccctcttgcatctggca

SEQ ID NO: 2771306 - DNA, 25 bp, Homo sapien
ctttgaaccttgctaagagatattc

SEQ ID NO: 2771307 - DNA, 25 bp, Homo sapien
ttgcatctggcacatcatcaatgcc

SEQ ID NO: 2771308 - DNA, 25 bp, Homo sapien
tattttacaccatcgcctttgaacc

SEQ ID NO: 2771309 - DNA, 25 bp, Homo sapien
ggtcgggctgaccattggttgcact

SEQ ID NO: 2771310 - DNA, 25 bp, Homo sapien
tgcacttgtttctacttcgttagac

SEQ ID NO: 2771311 - DNA, 25 bp, Homo sapien
gcttttggtgcggcctgttggtcgg

SEQ ID NO: 2771312 - DNA, 25 bp, Homo sapien
gcacttgtttctacttcgttagaca

SEQ ID NO: 2771313 - DNA, 25 bp, Homo sapien
caaataaacataacctcccacagac

SEQ ID NO: 2771314 - DNA, 25 bp, Homo sapien
cagcaaacctcagtaccagtggaca

SEQ ID NO: 2771315 - DNA, 25 bp, Homo sapien
acaccaggcgatcccgatggagaag

SEQ ID NO: 2771316 - DNA, 25 bp, Homo sapien
ccagtggacacttggtgacaccagg

SEQ ID NO: 2771317 - DNA, 25 bp, Homo sapien
ctgtaggcagagtttagaggcatat

SEQ ID NO: 2771318 - DNA, 25 bp, Homo sapien
tcagaacacagcagacccagacttt

SEQ ID NO: 2771319 - DNA, 25 bp, Homo sapien
cagactttatgccagaataggctta

SEQ ID NO: 2771320 - DNA, 25 bp, Homo sapien
taggcagagtttagaggcatattga

SEQ ID NO: 2771321 - DNA, 25 bp, Homo sapien
cttttgtagttctttggactcattt

SEQ ID NO: 2771322 - DNA, 25 bp, Homo sapien
tttgtagttctttggactcattttg

SEQ ID NO: 2771323 - DNA, 25 bp, Homo sapien
ttctcctgctgtattagactgaaga

SEQ ID NO: 2771324 - DNA, 25 bp, Homo sapien
gcttaactataaaggcagtgactag

SEQ ID NO: 2771325 - DNA, 25 bp, Homo sapien
taagcctggtaagactgcaaatgcc

SEQ ID NO: 2771326 - DNA, 25 bp, Homo sapien
tagggatcgaaaacttgctaggcat

SEQ ID NO: 2771327 - DNA, 25 bp, Homo sapien
taagcacttgatatctggtaacatt

SEQ ID NO: 2771328 - DNA, 25 bp, Homo sapien
taatgagggcagttgtagctatgcg

SEQ ID NO: 2771329 - DNA, 25 bp, Homo sapien
tattccagcacagcttcacgtagtc

SEQ ID NO: 2771330 - DNA, 25 bp, Homo sapien
ctcaatgtctgggatatagatggca

SEQ ID NO: 2771331 - DNA, 25 bp, Homo sapien
agaaccaggtttgtaacccagactg

SEQ ID NO: 2771332 - DNA, 25 bp, Homo sapien
cagggactccagtactagctaagca

SEQ ID NO: 2771333 - DNA, 25 bp, Homo sapien
gaggcctcagtatcagcaccatgag

SEQ ID NO: 2771334 - DNA, 25 bp, Homo sapien
tatctccggttagtgaagccagagc

SEQ ID NO: 2771335 - DNA, 25 bp, Homo sapien
tggagacatcagcatcagccctctg

SEQ ID NO: 2771336 - DNA, 25 bp, Homo sapien
cctctataaagaacgtttagaagag

SEQ ID NO: 2771337 - DNA, 25 bp, Homo sapien
aagaagctttatgcatccaaataag

SEQ ID NO: 2771338 - DNA, 25 bp, Homo sapien
tcaaagaagctttatgcatccaaat

SEQ ID NO: 2771339 - DNA, 25 bp, Homo sapien
ctctataaagaacgtttagaagagt

SEQ ID NO: 2771340 - DNA, 25 bp, Homo sapien
cactgaatcatttgggctatgacct

SEQ ID NO: 2771341 - DNA, 25 bp, Homo sapien
gaccatttggtacgtgagtttcata

SEQ ID NO: 2771342 - DNA, 25 bp, Homo sapien
gacctgctttacatcagggaccatt

SEQ ID NO: 2771343 - DNA, 25 bp, Homo sapien
gtgagtttcatatatctcaagcaag

SEQ ID NO: 2771344 - DNA, 25 bp, Homo sapien
tgggtaggacaatgttgtgggcaca

SEQ ID NO: 2771345 - DNA, 25 bp, Homo sapien
ctgggtaggacaatgttgtgggcac

SEQ ID NO: 2771346 - DNA, 25 bp, Homo sapien
gggtaggacaatgttgtgggcacaa

SEQ ID NO: 2771347 - DNA, 25 bp, Homo sapien
gtcacttgcactaggtgactgtgat

SEQ ID NO: 2771348 - DNA, 25 bp, Homo sapien
ctggagacactactgcaggaccaga

SEQ ID NO: 2771349 - DNA, 25 bp, Homo sapien
ccaccaggttttggtggtagcccag

SEQ ID NO: 2771350 - DNA, 25 bp, Homo sapien
ggagacactactgcaggaccagaga

SEQ ID NO: 2771351 - DNA, 25 bp, Homo sapien
agggaccctcataggagaccccaag

SEQ ID NO: 2771352 - DNA, 25 bp, Homo sapien
ggaccctcataggagaccccaagac

SEQ ID NO: 2771353 - DNA, 25 bp, Homo sapien
accctcataggagaccccaagacca

SEQ ID NO: 2771354 - DNA, 25 bp, Homo sapien
gaagggaccctcataggagacccca

SEQ ID NO: 2771355 - DNA, 25 bp, Homo sapien
ggcattaaccttccatgagagactt

SEQ ID NO: 2771356 - DNA, 25 bp, Homo sapien
acttgccgctgggtcacatttccac

SEQ ID NO: 2771357 - DNA, 25 bp, Homo sapien
tctgatatgatctattcgagttggg

SEQ ID NO: 2771358 - DNA, 25 bp, Homo sapien
gtcacatttccacatctgatatgat

SEQ ID NO: 2771359 - DNA, 25 bp, Homo sapien
gcaatgatgaatactccattggtag

SEQ ID NO: 2771360 - DNA, 25 bp, Homo sapien
gaatactccattggtagaagttaaa

SEQ ID NO: 2771361 - DNA, 25 bp, Homo sapien
cattggtagaagttaaactagcaac

SEQ ID NO: 2771362 - DNA, 25 bp, Homo sapien
tagaagttaaactagcaacttggaa

SEQ ID NO: 2771363 - DNA, 25 bp, Homo sapien
ctagaagaacatatggatattgctc

SEQ ID NO: 2771364 - DNA, 25 bp, Homo sapien
gaacatatggatattgctcattata

SEQ ID NO: 2771365 - DNA, 25 bp, Homo sapien
gaagaacatatggatattgctcatt

SEQ ID NO: 2771366 - DNA, 25 bp, Homo sapien
tagaagaacatatggatattgctca

SEQ ID NO: 2771367 - DNA, 25 bp, Homo sapien
catttcctcacatttgccatgacct

SEQ ID NO: 2771368 - DNA, 25 bp, Homo sapien
tttcctcacatttgccatgacctat

SEQ ID NO: 2771369 - DNA, 25 bp, Homo sapien
cagccatttcctcacatttgccatg

SEQ ID NO: 2771370 - DNA, 25 bp, Homo sapien
cctcacatttgccatgacctatcat

SEQ ID NO: 2771371 - DNA, 25 bp, Homo sapien
gccaaactggtatagcattcttcat

SEQ ID NO: 2771372 - DNA, 25 bp, Homo sapien
cattcttcatatgattatgtcagcc

SEQ ID NO: 2771373 - DNA, 25 bp, Homo sapien
gattcacatttcgtcccaaagccaa

SEQ ID NO: 2771374 - DNA, 25 bp, Homo sapien
tcagccctctgacatatgttcaaac

SEQ ID NO: 2771375 - DNA, 25 bp, Homo sapien
ggattgctccttctctgtcaggagt

SEQ ID NO: 2771376 - DNA, 25 bp, Homo sapien
cttcagggggaaggattgctccttc

SEQ ID NO: 2771377 - DNA, 25 bp, Homo sapien
tcattcagtttaatccgggtggtcc

SEQ ID NO: 2771378 - DNA, 25 bp, Homo sapien
acttccttctgtgacaatgctgact

SEQ ID NO: 2771379 - DNA, 25 bp, Homo sapien
aaggaagatatcttcctgctccctt

SEQ ID NO: 2771380 - DNA, 25 bp, Homo sapien
tcagcaaggaagatatcttcctgct

SEQ ID NO: 2771381 - DNA, 25 bp, Homo sapien
agcaaggaagatatcttcctgctcc

SEQ ID NO: 2771382 - DNA, 25 bp, Homo sapien
gaagatatcttcctgctcccttaac

SEQ ID NO: 2771383 - DNA, 25 bp, Homo sapien
tcagataatcgaggcctggttgagc

SEQ ID NO: 2771384 - DNA, 25 bp, Homo sapien
ggttgagcaggccagtaaatatcat

SEQ ID NO: 2771385 - DNA, 25 bp, Homo sapien
gccagaggtccctgtactaccttca

SEQ ID NO: 2771386 - DNA, 25 bp, Homo sapien
gccaacaagtgccttaaaagccgta

SEQ ID NO: 2771387 - DNA, 25 bp, Homo sapien
tctcggtttacagagcggctctctt

SEQ ID NO: 2771388 - DNA, 25 bp, Homo sapien
gtgtctggaagcttgtttctgctct

SEQ ID NO: 2771389 - DNA, 25 bp, Homo sapien
ctgctcttctcggtttacagagcgg

SEQ ID NO: 2771390 - DNA, 25 bp, Homo sapien
aatttttaagtctttccatgtgtct

SEQ ID NO: 2771391 - DNA, 25 bp, Homo sapien
tgtttattaactcgcgctgcagcgg

SEQ ID NO: 2771392 - DNA, 25 bp, Homo sapien
tgcggcgggcctcgcttaaatagcc

SEQ ID NO: 2771393 - DNA, 25 bp, Homo sapien
tagctattgcctccgtgaagcgagc

SEQ ID NO: 2771394 - DNA, 25 bp, Homo sapien
cactcccggcgagagatatggttct

SEQ ID NO: 2771395 - DNA, 25 bp, Homo sapien
aggggtgtggaggcagggagggcca

SEQ ID NO: 2771396 - DNA, 25 bp, Homo sapien
ctaggggtgtggaggcagggagggc

SEQ ID NO: 2771397 - DNA, 25 bp, Homo sapien
taggggtgtggaggcagggagggcc

SEQ ID NO: 2771398 - DNA, 25 bp, Homo sapien
ggggtgtggaggcagggagggccat

SEQ ID NO: 2771399 - DNA, 25 bp, Homo sapien
taaactgccccttttgaagcctgtc

SEQ ID NO: 2771400 - DNA, 25 bp, Homo sapien
cttaaactgccccttttgaagcctg

SEQ ID NO: 2771401 - DNA, 25 bp, Homo sapien
tgctcttgtcttccttaaactgccc

SEQ ID NO: 2771402 - DNA, 25 bp, Homo sapien
gctcttgtcttccttaaactgcccc

SEQ ID NO: 2771403 - DNA, 25 bp, Homo sapien
taagtctcggagtagcagtaagtcc

SEQ ID NO: 2771404 - DNA, 25 bp, Homo sapien
tccttttggtttatacctgccatcg

SEQ ID NO: 2771405 - DNA, 25 bp, Homo sapien
cttgctacaaacaggtagggtcctt

SEQ ID NO: 2771406 - DNA, 25 bp, Homo sapien
cctgccatcgatgtaagacaactgt

SEQ ID NO: 2771407 - DNA, 25 bp, Homo sapien
tatcatgtcaagcagaaccagcaac

SEQ ID NO: 2771408 - DNA, 25 bp, Homo sapien
aagtccatgcctgagctggttctag

SEQ ID NO: 2771409 - DNA, 25 bp, Homo sapien
tgtcctgcaatcttagggaaccttg

SEQ ID NO: 2771410 - DNA, 25 bp, Homo sapien
ttttcattgtatgcttaagcccctc

SEQ ID NO: 2771411 - DNA, 25 bp, Homo sapien
taggcagggctatagataaccagca

SEQ ID NO: 2771412 - DNA, 25 bp, Homo sapien
ccctgtgaagggctaacactacttg

SEQ ID NO: 2771413 - DNA, 25 bp, Homo sapien
aaagtcagtggttctgcgaatgcct

SEQ ID NO: 2771414 - DNA, 25 bp, Homo sapien
gggagcttccccagcataaagtctt

SEQ ID NO: 2771415 - DNA, 25 bp, Homo sapien
gacagtgtacagtcagtttgatttt

SEQ ID NO: 2771416 - DNA, 25 bp, Homo sapien
gctgctgaaagaccaagcaactcat

SEQ ID NO: 2771417 - DNA, 25 bp, Homo sapien
tctttataagacagtgtacagtcag

SEQ ID NO: 2771418 - DNA, 25 bp, Homo sapien
tgagctcaatttgtcctgctagaac

SEQ ID NO: 2771419 - DNA, 25 bp, Homo sapien
gaagtgtgtcagttgtctaaatgaa

SEQ ID NO: 2771420 - DNA, 25 bp, Homo sapien
gacgcagtttcaccggcttctcaca

SEQ ID NO: 2771421 - DNA, 25 bp, Homo sapien
ttgtaattatggagctcatctctca

SEQ ID NO: 2771422 - DNA, 25 bp, Homo sapien
tgagacaacaaacaggagcctacca

SEQ ID NO: 2771423 - DNA, 25 bp, Homo sapien
tgaaactagaaatagttaggagtta

SEQ ID NO: 2771424 - DNA, 25 bp, Homo sapien
cccagagtttaataagattctcagg

SEQ ID NO: 2771425 - DNA, 25 bp, Homo sapien
catgaaactagaaatagttaggagt

SEQ ID NO: 2771426 - DNA, 25 bp, Homo sapien
cagagtttaataagattctcagggt

SEQ ID NO: 2771427 - DNA, 25 bp, Homo sapien
aaaccatgctgaacatactttatgc

SEQ ID NO: 2771428 - DNA, 25 bp, Homo sapien
gatattttgagtaaggcagtgcagg

SEQ ID NO: 2771429 - DNA, 25 bp, Homo sapien
tatggaatcctacccacacaagcag

SEQ ID NO: 2771430 - DNA, 25 bp, Homo sapien
taaagttgccttatgatctttggga

SEQ ID NO: 2771431 - DNA, 25 bp, Homo sapien
caagagcatgcagttggtaggttgc

SEQ ID NO: 2771432 - DNA, 25 bp, Homo sapien
tggtttcagttctcactacaagaag

SEQ ID NO: 2771433 - DNA, 25 bp, Homo sapien
tagttaggcttcatgacaattctgg

SEQ ID NO: 2771434 - DNA, 25 bp, Homo sapien
gaagaccgctgttctctcagaggaa

SEQ ID NO: 2771435 - DNA, 25 bp, Homo sapien
ggtacttcctgctcgagacactttg

SEQ ID NO: 2771436 - DNA, 25 bp, Homo sapien
gctgggaacgacctttctagataaa

SEQ ID NO: 2771437 - DNA, 25 bp, Homo sapien
ctcttcaaggcccaaatcaagtgca

SEQ ID NO: 2771438 - DNA, 25 bp, Homo sapien
tattctccacccaaccctgattatt

SEQ ID NO: 2771439 - DNA, 25 bp, Homo sapien
gaaacttgctgagaccccataggtt

SEQ ID NO: 2771440 - DNA, 25 bp, Homo sapien
ttccagggaaacttgctgagacccc

SEQ ID NO: 2771441 - DNA, 25 bp, Homo sapien
gctgagaccccataggttttcaggg

SEQ ID NO: 2771442 - DNA, 25 bp, Homo sapien
cagggaaacttgctgagaccccata

SEQ ID NO: 2771443 - DNA, 25 bp, Homo sapien
atatcagtgatgtaaccaaagagtg

SEQ ID NO: 2771444 - DNA, 25 bp, Homo sapien
gggttcctgggtaactgtgagtgga

SEQ ID NO: 2771445 - DNA, 25 bp, Homo sapien
accaaagagtggctggaaacggatg

SEQ ID NO: 2771446 - DNA, 25 bp, Homo sapien
tctgagagaaaagggttcctgggta

SEQ ID NO: 2771447 - DNA, 25 bp, Homo sapien
gactgcctccaagcattcatcgagg

SEQ ID NO: 2771448 - DNA, 25 bp, Homo sapien
ttcatcgaggcagcaaccctgaaca

SEQ ID NO: 2771449 - DNA, 25 bp, Homo sapien
cctttgccagaggaatagctgtgct

SEQ ID NO: 2771450 - DNA, 25 bp, Homo sapien
tgtgctagaagaatcgactgcctcc

SEQ ID NO: 2771451 - DNA, 25 bp, Homo sapien
cagagtcctctccttgacgaatctg

SEQ ID NO: 2771452 - DNA, 25 bp, Homo sapien
ctccttgacgaatctgatttgagaa

SEQ ID NO: 2771453 - DNA, 25 bp, Homo sapien
ttcgccagagtcctctccttgacga

SEQ ID NO: 2771454 - DNA, 25 bp, Homo sapien
ccttgacgaatctgatttgagaatt

SEQ ID NO: 2771455 - DNA, 25 bp, Homo sapien
aaagctgtttaaggggctcaggtgc

SEQ ID NO: 2771456 - DNA, 25 bp, Homo sapien
ggaaactctgctgataaagctgttt

SEQ ID NO: 2771457 - DNA, 25 bp, Homo sapien
aaagccacccttgttgattcctctc

SEQ ID NO: 2771458 - DNA, 25 bp, Homo sapien
tgccctgaacgtactgcaaagttct

SEQ ID NO: 2771459 - DNA, 25 bp, Homo sapien
gcaaagttctaccacgaaaagtgga

SEQ ID NO: 2771460 - DNA, 25 bp, Homo sapien
tatcaaaccggctgccctgaacgta

SEQ ID NO: 2771461 - DNA, 25 bp, Homo sapien
tctcttggcatgaacttggacatct

SEQ ID NO: 2771462 - DNA, 25 bp, Homo sapien
aataaggcaagtccagagaaagaga

SEQ ID NO: 2771463 - DNA, 25 bp, Homo sapien
gacataactgtgaatcctctccagg

SEQ ID NO: 2771464 - DNA, 25 bp, Homo sapien
aaggctccaacatagcagcgccaat

SEQ ID NO: 2771465 - DNA, 25 bp, Homo sapien
actcctcatctgtgtttgttctcat

SEQ ID NO: 2771466 - DNA, 25 bp, Homo sapien
cttcaactcctcatctgtgtttgtt

SEQ ID NO: 2771467 - DNA, 25 bp, Homo sapien
tcaactcctcatctgtgtttgttct

SEQ ID NO: 2771468 - DNA, 25 bp, Homo sapien
ccccaaacttctcttcaactcctca

SEQ ID NO: 2771469 - DNA, 25 bp, Homo sapien
tcccaaagtgcctgattttccacgt

SEQ ID NO: 2771470 - DNA, 25 bp, Homo sapien
aaatcatgtctgagaaaggttccat

SEQ ID NO: 2771471 - DNA, 25 bp, Homo sapien
tctggtgcacagagtaataccaaat

SEQ ID NO: 2771472 - DNA, 25 bp, Homo sapien
ggttccatgattcccaaagtgcctg

SEQ ID NO: 2771473 - DNA, 25 bp, Homo sapien
gatgatgccattaatcaagatcagg

SEQ ID NO: 2771474 - DNA, 25 bp, Homo sapien
gattatgaagctggatacactggtt

SEQ ID NO: 2771475 - DNA, 25 bp, Homo sapien
tgatcctcaacttgctaggtgggca

SEQ ID NO: 2771476 - DNA, 25 bp, Homo sapien
tgagaggacctttatgtgaaagcac

SEQ ID NO: 2771477 - DNA, 25 bp, Homo sapien
ctcccaaacgcttgagtagatccct

SEQ ID NO: 2771478 - DNA, 25 bp, Homo sapien
gttagtggttgtactctgagtactc

SEQ ID NO: 2771479 - DNA, 25 bp, Homo sapien
caaacgcttgagtagatcccttttt

SEQ ID NO: 2771480 - DNA, 25 bp, Homo sapien
aataactctgaaggacgatctatgt

SEQ ID NO: 2771481 - DNA, 25 bp, Homo sapien
tggatccgacaggtaatatctcatt

SEQ ID NO: 2771482 - DNA, 25 bp, Homo sapien
ccattactgatttattgctggatcc

SEQ ID NO: 2771483 - DNA, 25 bp, Homo sapien
cattcactacatctctaatgaagtc

SEQ ID NO: 2771484 - DNA, 25 bp, Homo sapien
tgaagtctctggagatcagggtccc

SEQ ID NO: 2771485 - DNA, 25 bp, Homo sapien
gataggactttgtcaatgaggatgg

SEQ ID NO: 2771486 - DNA, 25 bp, Homo sapien
gccctgtgcagctttgcgagtgaga

SEQ ID NO: 2771487 - DNA, 25 bp, Homo sapien
cccgggtatactggagacaaaatga

SEQ ID NO: 2771488 - DNA, 25 bp, Homo sapien
aatgaaggcactgtgggataggact

SEQ ID NO: 2771489 - DNA, 25 bp, Homo sapien
taggaatggcctgcattgcacacaa

SEQ ID NO: 2771490 - DNA, 25 bp, Homo sapien
aagattccatgtctcataggaatgg

SEQ ID NO: 2771491 - DNA, 25 bp, Homo sapien
gcattgcacacaagttctttttcta

SEQ ID NO: 2771492 - DNA, 25 bp, Homo sapien
ttgttggactcagaaattgacaatc

SEQ ID NO: 2771493 - DNA, 25 bp, Homo sapien
tctgtctttggtaaagcgggtgtca

SEQ ID NO: 2771494 - DNA, 25 bp, Homo sapien
taaagcgggtgtcatgggcttcttg

SEQ ID NO: 2771495 - DNA, 25 bp, Homo sapien
actggacaagtctgtctttggtaaa

SEQ ID NO: 2771496 - DNA, 25 bp, Homo sapien
agcgggtgtcatgggcttcttgcca

SEQ ID NO: 2771497 - DNA, 25 bp, Homo sapien
actatagcttccaaccaaagctttc

SEQ ID NO: 2771498 - DNA, 25 bp, Homo sapien
gcttccaaccaaagctttcttagaa

SEQ ID NO: 2771499 - DNA, 25 bp, Homo sapien
catgtaattgattctgagtgatttc

SEQ ID NO: 2771500 - DNA, 25 bp, Homo sapien
ccttcctttacatgtccagtgtggg

SEQ ID NO: 2771501 - DNA, 25 bp, Homo sapien
tcccactctccatcctatttcagat

SEQ ID NO: 2771502 - DNA, 25 bp, Homo sapien
gggcttgcactccttagagccttac

SEQ ID NO: 2771503 - DNA, 25 bp, Homo sapien
agccttaccctttgctaatgtaatg

SEQ ID NO: 2771504 - DNA, 25 bp, Homo sapien
tccttagagccttaccctttgctaa

SEQ ID NO: 2771505 - DNA, 25 bp, Homo sapien
aagatttcaggctgattattttgca

SEQ ID NO: 2771506 - DNA, 25 bp, Homo sapien
taaggtctgaacgtcctggaccctc

SEQ ID NO: 2771507 - DNA, 25 bp, Homo sapien
catgattaaggtctgaacgtcctgg

SEQ ID NO: 2771508 - DNA, 25 bp, Homo sapien
acgtcctggaccctcaaagatttca

SEQ ID NO: 2771509 - DNA, 25 bp, Homo sapien
taatctgagtcactatatctttttg

SEQ ID NO: 2771510 - DNA, 25 bp, Homo sapien
gttcagtgtcgaatgaaggcaattt

SEQ ID NO: 2771511 - DNA, 25 bp, Homo sapien
tgagtcactatatctttttgctcca

SEQ ID NO: 2771512 - DNA, 25 bp, Homo sapien
ctgagtttctgttcagtgtcgaatg

SEQ ID NO: 2771513 - DNA, 25 bp, Homo sapien
gacgaaccaacatcatactggattg

SEQ ID NO: 2771514 - DNA, 25 bp, Homo sapien
gaaccaacatcatactggattgagc

SEQ ID NO: 2771515 - DNA, 25 bp, Homo sapien
ctaaagacgaaccaacatcatactg

SEQ ID NO: 2771516 - DNA, 25 bp, Homo sapien
ccaacatcatactggattgagcaag

SEQ ID NO: 2771517 - DNA, 25 bp, Homo sapien
tttaatcagcttcttcctgtaagtc

SEQ ID NO: 2771518 - DNA, 25 bp, Homo sapien
ttgaagggcccttccacaaaattca

SEQ ID NO: 2771519 - DNA, 25 bp, Homo sapien
tgaagggcccttccacaaaattcat

SEQ ID NO: 2771520 - DNA, 25 bp, Homo sapien
agcttcttcctgtaagtcttgaagg

SEQ ID NO: 2771521 - DNA, 25 bp, Homo sapien
tgacccagttgcgtgttctcctcca

SEQ ID NO: 2771522 - DNA, 25 bp, Homo sapien
acccagttgcgtgttctcctccagc

SEQ ID NO: 2771523 - DNA, 25 bp, Homo sapien
tctgacccagttgcgtgttctcctc

SEQ ID NO: 2771524 - DNA, 25 bp, Homo sapien
ttctgacccagttgcgtgttctcct

SEQ ID NO: 2771525 - DNA, 25 bp, Homo sapien
gtcttctgctcggaattctgagaac

SEQ ID NO: 2771526 - DNA, 25 bp, Homo sapien
tagtcttctgctcggaattctgaga

SEQ ID NO: 2771527 - DNA, 25 bp, Homo sapien
ttagtcttctgctcggaattctgag

SEQ ID NO: 2771528 - DNA, 25 bp, Homo sapien
tcttctgctcggaattctgagaaca

SEQ ID NO: 2771529 - DNA, 25 bp, Homo sapien
gtcattttagatgtacccctggctc

SEQ ID NO: 2771530 - DNA, 25 bp, Homo sapien
cccctggctctgagttagcactaaa

SEQ ID NO: 2771531 - DNA, 25 bp, Homo sapien
gaaatgtccagggtaccatctatgt

SEQ ID NO: 2771532 - DNA, 25 bp, Homo sapien
gcactaaatgcacatgttctgctgg

SEQ ID NO: 2771533 - DNA, 25 bp, Homo sapien
cctgaacctggtatttgggaaatga

SEQ ID NO: 2771534 - DNA, 25 bp, Homo sapien
tccaagtttccaggactaggcacag

SEQ ID NO: 2771535 - DNA, 25 bp, Homo sapien
ggaaatgacatgagattgcccacgc

SEQ ID NO: 2771536 - DNA, 25 bp, Homo sapien
ggcacagtgtcttgaggccaattgt

SEQ ID NO: 2771537 - DNA, 25 bp, Homo sapien
agttaatgttttccacggaatctat

SEQ ID NO: 2771538 - DNA, 25 bp, Homo sapien
taatgttttccacggaatctatctg

SEQ ID NO: 2771539 - DNA, 25 bp, Homo sapien
gttttccacggaatctatctgaaca

SEQ ID NO: 2771540 - DNA, 25 bp, Homo sapien
atgttttccacggaatctatctgaa

SEQ ID NO: 2771541 - DNA, 25 bp, Homo sapien
caatctcgtagaggctcatcgcaca

SEQ ID NO: 2771542 - DNA, 25 bp, Homo sapien
tccgcatcacctaaagcagaaagtc

SEQ ID NO: 2771543 - DNA, 25 bp, Homo sapien
ttcttccaagaatccgcatcaccta

SEQ ID NO: 2771544 - DNA, 25 bp, Homo sapien
tgttctggtacattccaatctcgta

SEQ ID NO: 2771545 - DNA, 25 bp, Homo sapien
ggccttggttttctgagaaatacat

SEQ ID NO: 2771546 - DNA, 25 bp, Homo sapien
cctgatcttttcacaagggccttgg

SEQ ID NO: 2771547 - DNA, 25 bp, Homo sapien
tttcacaagggccttggttttctga

SEQ ID NO: 2771548 - DNA, 25 bp, Homo sapien
cacaagggccttggttttctgagaa

SEQ ID NO: 2771549 - DNA, 25 bp, Homo sapien
ttgttgaggataccggttgggtaca

SEQ ID NO: 2771550 - DNA, 25 bp, Homo sapien
tggccgttgttgaggataccggttg

SEQ ID NO: 2771551 - DNA, 25 bp, Homo sapien
tgaggataccggttgggtacagaat

SEQ ID NO: 2771552 - DNA, 25 bp, Homo sapien
accggttgggtacagaatgagtcat

SEQ ID NO: 2771553 - DNA, 25 bp, Homo sapien
gctccaagctcagctgtccttttga

SEQ ID NO: 2771554 - DNA, 25 bp, Homo sapien
ccaagctcagctgtccttttgagat

SEQ ID NO: 2771555 - DNA, 25 bp, Homo sapien
catgttgcagggctccaagctcagc

SEQ ID NO: 2771556 - DNA, 25 bp, Homo sapien
caaagagcatgttgcagggctccaa

SEQ ID NO: 2771557 - DNA, 25 bp, Homo sapien
cttctttgctgccattgtggataag

SEQ ID NO: 2771558 - DNA, 25 bp, Homo sapien
cttcaaactactctgaatgtcattc

SEQ ID NO: 2771559 - DNA, 25 bp, Homo sapien
tcttttcttcaaactactctgaatg

SEQ ID NO: 2771560 - DNA, 25 bp, Homo sapien
ttctttgctgccattgtggataagt

SEQ ID NO: 2771561 - DNA, 25 bp, Homo sapien
gaacacatagaaaagatcatccgtg

SEQ ID NO: 2771562 - DNA, 25 bp, Homo sapien
tccgtgtgtaattgtaacatcctgg

SEQ ID NO: 2771563 - DNA, 25 bp, Homo sapien
ccattgggctagaggtccgattaat

SEQ ID NO: 2771564 - DNA, 25 bp, Homo sapien
catgtcaccattgggctagaggtcc

SEQ ID NO: 2771565 - DNA, 25 bp, Homo sapien
tttgtggttttagttcgatattgac

SEQ ID NO: 2771566 - DNA, 25 bp, Homo sapien
tgtggttttagttcgatattgacct

SEQ ID NO: 2771567 - DNA, 25 bp, Homo sapien
tggttttagttcgatattgacctct

SEQ ID NO: 2771568 - DNA, 25 bp, Homo sapien
cattatttgtggttttagttcgata

SEQ ID NO: 2771569 - DNA, 25 bp, Homo sapien
tgaggtattcctggtagttccccat

SEQ ID NO: 2771570 - DNA, 25 bp, Homo sapien
ttcctggtagttccccatttgtgct

SEQ ID NO: 2771571 - DNA, 25 bp, Homo sapien
gtagttccccatttgtgctatagga

SEQ ID NO: 2771572 - DNA, 25 bp, Homo sapien
ccccatttgtgctataggaacactg

SEQ ID NO: 2771573 - DNA, 25 bp, Homo sapien
tcagtttcctgtactccttttttgc

SEQ ID NO: 2771574 - DNA, 25 bp, Homo sapien
gtgattggctccagacttttatttc

SEQ ID NO: 2771575 - DNA, 25 bp, Homo sapien
cctttaagaaatctgcgagtgtgct

SEQ ID NO: 2771576 - DNA, 25 bp, Homo sapien
aagaaatctgcgagtgtgcttcaaa

SEQ ID NO: 2771577 - DNA, 25 bp, Homo sapien
gaaatgacactgtaactaagtccat

SEQ ID NO: 2771578 - DNA, 25 bp, Homo sapien
ctgtaactaagtccatattccatac

SEQ ID NO: 2771579 - DNA, 25 bp, Homo sapien
ctattttggcctgttgactcagttt

SEQ ID NO: 2771580 - DNA, 25 bp, Homo sapien
cagttttttgaggtatgaaatgaca

SEQ ID NO: 2771581 - DNA, 25 bp, Homo sapien
actattgctgacgtacacctgccaa

SEQ ID NO: 2771582 - DNA, 25 bp, Homo sapien
cttgaagggcccgagatagtaggga

SEQ ID NO: 2771583 - DNA, 25 bp, Homo sapien
gcactattgctgacgtacacctgcc

SEQ ID NO: 2771584 - DNA, 25 bp, Homo sapien
catactaacagctttcttgaagggc

SEQ ID NO: 2771585 - DNA, 25 bp, Homo sapien
ggctgagatccaaaaggccttgata

SEQ ID NO: 2771586 - DNA, 25 bp, Homo sapien
gtgttggcgaattttgatctggcca

SEQ ID NO: 2771587 - DNA, 25 bp, Homo sapien
caaaaggccttgatatatctggctg

SEQ ID NO: 2771588 - DNA, 25 bp, Homo sapien
ggaacaggccaatgacctataggaa

SEQ ID NO: 2771589 - DNA, 25 bp, Homo sapien
tgattaagcattcttggagaacaca

SEQ ID NO: 2771590 - DNA, 25 bp, Homo sapien
tacgaccagccgtctggtgtgattg

SEQ ID NO: 2771591 - DNA, 25 bp, Homo sapien
accagccgtctggtgtgattgcagg

SEQ ID NO: 2771592 - DNA, 25 bp, Homo sapien
aaaatacgaccagccgtctggtgtg

SEQ ID NO: 2771593 - DNA, 25 bp, Homo sapien
cgaccagccgtctggtgtgattgca

SEQ ID NO: 2771594 - DNA, 25 bp, Homo sapien
ctgttctgattctactgacatggtg

SEQ ID NO: 2771595 - DNA, 25 bp, Homo sapien
cactggtggtagtcaacttgctccc

SEQ ID NO: 2771596 - DNA, 25 bp, Homo sapien
ctgtcaactgttctgattctactga

SEQ ID NO: 2771597 - DNA, 25 bp, Homo sapien
tggactccactggtggtagtcaact

SEQ ID NO: 2771598 - DNA, 25 bp, Homo sapien
cagccttgatagcacagggcggctc

SEQ ID NO: 2771599 - DNA, 25 bp, Homo sapien
agccttgatagcacagggcggctct

SEQ ID NO: 2771600 - DNA, 25 bp, Homo sapien
ccagccttgatagcacagggcggct

SEQ ID NO: 2771601 - DNA, 25 bp, Homo sapien
ctagaggaggaacagggcgagcgag

SEQ ID NO: 2771602 - DNA, 25 bp, Homo sapien
gggcttttggcataatcctttagca

SEQ ID NO: 2771603 - DNA, 25 bp, Homo sapien
gcagatacgttatcggaaaaccaac

SEQ ID NO: 2771604 - DNA, 25 bp, Homo sapien
tcaaagcctgtttaatccctgcagc

SEQ ID NO: 2771605 - DNA, 25 bp, Homo sapien
tagcacttttggtgctgcagatacg

SEQ ID NO: 2771606 - DNA, 25 bp, Homo sapien
gaaagaaagaatgttgaaagttgtg

SEQ ID NO: 2771607 - DNA, 25 bp, Homo sapien
agaaagaatgttgaaagttgtgttc

SEQ ID NO: 2771608 - DNA, 25 bp, Homo sapien
cttagaaagaaagaatgttgaaagt

SEQ ID NO: 2771609 - DNA, 25 bp, Homo sapien
gttgaaagttgtgttctatgcaaac

SEQ ID NO: 2771610 - DNA, 25 bp, Homo sapien
cttcaattttggttccagaaaacat

SEQ ID NO: 2771611 - DNA, 25 bp, Homo sapien
taaaagtcttagaatattcccgatg

SEQ ID NO: 2771612 - DNA, 25 bp, Homo sapien
cagttcctctgtgtagtaaaagtct

SEQ ID NO: 2771613 - DNA, 25 bp, Homo sapien
cctctgtgtagtaaaagtcttagaa

SEQ ID NO: 2771614 - DNA, 25 bp, Homo sapien
gaatattcccgatgctgttttttga

SEQ ID NO: 2771615 - DNA, 25 bp, Homo sapien
actctgacgcaaacatgctgccaaa

SEQ ID NO: 2771616 - DNA, 25 bp, Homo sapien
ccagcgggctgatgtcccacgggct

SEQ ID NO: 2771617 - DNA, 25 bp, Homo sapien
tcatttgcaaccactctgacgcaaa

SEQ ID NO: 2771618 - DNA, 25 bp, Homo sapien
agtggagcagcgctctagggaaccc

SEQ ID NO: 2771619 - DNA, 25 bp, Homo sapien
ttccatttgaagagtgaacacactc

SEQ ID NO: 2771620 - DNA, 25 bp, Homo sapien
ccttttatgtgggagttctatgtaa

SEQ ID NO: 2771621 - DNA, 25 bp, Homo sapien
tacgcagtaatatacacagcaccaa

SEQ ID NO: 2771622 - DNA, 25 bp, Homo sapien
gatattgagtttggacttacgcagt

SEQ ID NO: 2771623 - DNA, 25 bp, Homo sapien
aagcagcaaattggaatcactgatg

SEQ ID NO: 2771624 - DNA, 25 bp, Homo sapien
tggtgttctaactctaaaagcagca

SEQ ID NO: 2771625 - DNA, 25 bp, Homo sapien
tcactgatgtggcagctgatatctt

SEQ ID NO: 2771626 - DNA, 25 bp, Homo sapien
gatgatcctggacatattcccaagc

SEQ ID NO: 2771627 - DNA, 25 bp, Homo sapien
tctgaaaggcttttggattttatac

SEQ ID NO: 2771628 - DNA, 25 bp, Homo sapien
ttcagtctgaaaggcttttggattt

SEQ ID NO: 2771629 - DNA, 25 bp, Homo sapien
agtctgaaaggcttttggattttat

SEQ ID NO: 2771630 - DNA, 25 bp, Homo sapien
gtttcagtctgaaaggcttttggat

SEQ ID NO: 2771631 - DNA, 25 bp, Homo sapien
gagctctgagctttcgcttaagtaa

SEQ ID NO: 2771632 - DNA, 25 bp, Homo sapien
taatgtttcggcatgtcagggagaa

SEQ ID NO: 2771633 - DNA, 25 bp, Homo sapien
cagggagaatcttgatatgggcagc

SEQ ID NO: 2771634 - DNA, 25 bp, Homo sapien
tttgtttattagacacctgagctct

SEQ ID NO: 2771635 - DNA, 25 bp, Homo sapien
ttcatgacttatacagatgatttca

SEQ ID NO: 2771636 - DNA, 25 bp, Homo sapien
gttcgaattcatgacttatacagat

SEQ ID NO: 2771637 - DNA, 25 bp, Homo sapien
gagtactgttcgaattcatgactta

SEQ ID NO: 2771638 - DNA, 25 bp, Homo sapien
ctgagagtactgttcgaattcatga

SEQ ID NO: 2771639 - DNA, 25 bp, Homo sapien
ttaaaagaattcccacttcccatca

SEQ ID NO: 2771640 - DNA, 25 bp, Homo sapien
taaaagaattcccacttcccatcag

SEQ ID NO: 2771641 - DNA, 25 bp, Homo sapien
aattcccacttcccatcagcgatag

SEQ ID NO: 2771642 - DNA, 25 bp, Homo sapien
tcccacttcccatcagcgatagcac

SEQ ID NO: 2771643 - DNA, 25 bp, Homo sapien
ggctttccatccctggtgtatgctg

SEQ ID NO: 2771644 - DNA, 25 bp, Homo sapien
tcccctgcatcgaatgtaaagcctg

SEQ ID NO: 2771645 - DNA, 25 bp, Homo sapien
gatggaatgaccagccactcgaata

SEQ ID NO: 2771646 - DNA, 25 bp, Homo sapien
cactcgaatagttcccttatggtgt

SEQ ID NO: 2771647 - DNA, 25 bp, Homo sapien
ggaagggatagtggatccgaactct

SEQ ID NO: 2771648 - DNA, 25 bp, Homo sapien
catagggtggcacatgtagtgtgta

SEQ ID NO: 2771649 - DNA, 25 bp, Homo sapien
agcagccatagggtggcacatgtag

SEQ ID NO: 2771650 - DNA, 25 bp, Homo sapien
tctgtattctcccttgactcttgca

SEQ ID NO: 2771651 - DNA, 25 bp, Homo sapien
tgtggaatctatgggtcaacgaaag

SEQ ID NO: 2771652 - DNA, 25 bp, Homo sapien
gaatctatgggtcaacgaaagatag

SEQ ID NO: 2771653 - DNA, 25 bp, Homo sapien
ctatgggtcaacgaaagatagggtt

SEQ ID NO: 2771654 - DNA, 25 bp, Homo sapien
tctatgggtcaacgaaagatagggt

SEQ ID NO: 2771655 - DNA, 25 bp, Homo sapien
tgctttctgtctcccgcagagagat

SEQ ID NO: 2771656 - DNA, 25 bp, Homo sapien
agtcaacactgaaatccttccgatt

SEQ ID NO: 2771657 - DNA, 25 bp, Homo sapien
aagtcactaagaatcttcctcttgg

SEQ ID NO: 2771658 - DNA, 25 bp, Homo sapien
cgcagagagatttccttgagcaggg

SEQ ID NO: 2771659 - DNA, 25 bp, Homo sapien
tggcccagaaatatccagcttcaaa

SEQ ID NO: 2771660 - DNA, 25 bp, Homo sapien
ctggcccagaaatatccagcttcaa

SEQ ID NO: 2771661 - DNA, 25 bp, Homo sapien
ggcccagaaatatccagcttcaaat

SEQ ID NO: 2771662 - DNA, 25 bp, Homo sapien
tatagcttcagggtcatcttcggga

SEQ ID NO: 2771663 - DNA, 25 bp, Homo sapien
tagcgtcatgcacgagaaggttgtg

SEQ ID NO: 2771664 - DNA, 25 bp, Homo sapien
catcagttatgttaaattagggccc

SEQ ID NO: 2771665 - DNA, 25 bp, Homo sapien
gtttgttttatcaccactctggagg

SEQ ID NO: 2771666 - DNA, 25 bp, Homo sapien
taggcctgagttttaccaacaggct

SEQ ID NO: 2771667 - DNA, 25 bp, Homo sapien
aataggcctgagttttaccaacagg

SEQ ID NO: 2771668 - DNA, 25 bp, Homo sapien
ctaataggcctgagttttaccaaca

SEQ ID NO: 2771669 - DNA, 25 bp, Homo sapien
aggcctgagttttaccaacaggctt

SEQ ID NO: 2771670 - DNA, 25 bp, Homo sapien
ttccttcttttctccgtgttctctc

SEQ ID NO: 2771671 - DNA, 25 bp, Homo sapien
cacagtgctttcctacaccctgaaa

SEQ ID NO: 2771672 - DNA, 25 bp, Homo sapien
ctccttctccccgaactagtatgtg

SEQ ID NO: 2771673 - DNA, 25 bp, Homo sapien
ttctccccgaactagtatgtgcttt

SEQ ID NO: 2771674 - DNA, 25 bp, Homo sapien
tcttgacacctcagatctaaaaatg

SEQ ID NO: 2771675 - DNA, 25 bp, Homo sapien
cagctcctgtgattggagaccacac

SEQ ID NO: 2771676 - DNA, 25 bp, Homo sapien
gacagaaatcaactcttgacacctc

SEQ ID NO: 2771677 - DNA, 25 bp, Homo sapien
agctcctgtgattggagaccacaca

SEQ ID NO: 2771678 - DNA, 25 bp, Homo sapien
acaaatgaagcaatgggaacattgg

SEQ ID NO: 2771679 - DNA, 25 bp, Homo sapien
ctggaaatgtggagaaacaaatgaa

SEQ ID NO: 2771680 - DNA, 25 bp, Homo sapien
aatgaagcaatgggaacattggtgc

SEQ ID NO: 2771681 - DNA, 25 bp, Homo sapien
tgaagcaatgggaacattggtgcag

SEQ ID NO: 2771682 - DNA, 25 bp, Homo sapien
gactttcagagggtgtgaacagctg

SEQ ID NO: 2771683 - DNA, 25 bp, Homo sapien
ttcagagggtgtgaacagctgtgat

SEQ ID NO: 2771684 - DNA, 25 bp, Homo sapien
agctgtgatactgagggggcctgac

SEQ ID NO: 2771685 - DNA, 25 bp, Homo sapien
aaaaacagcaaggaagcagtgactt

SEQ ID NO: 2771686 - DNA, 25 bp, Homo sapien
tcaatatcattggtcgcaagttgat

SEQ ID NO: 2771687 - DNA, 25 bp, Homo sapien
tcccacctggcctttggataatgtg

SEQ ID NO: 2771688 - DNA, 25 bp, Homo sapien
catttcttagatctaggaacaagcc

SEQ ID NO: 2771689 - DNA, 25 bp, Homo sapien
ggaacaagccttcctctggcgagat

SEQ ID NO: 2771690 - DNA, 25 bp, Homo sapien
ctctttcattgatggcaattcttct

SEQ ID NO: 2771691 - DNA, 25 bp, Homo sapien
gcttcacttctctttcattgatggc

SEQ ID NO: 2771692 - DNA, 25 bp, Homo sapien
ttcacttctctttcattgatggcaa

SEQ ID NO: 2771693 - DNA, 25 bp, Homo sapien
cttctctttcattgatggcaattct

SEQ ID NO: 2771694 - DNA, 25 bp, Homo sapien
tatttgaacagcgattatcatcagg

SEQ ID NO: 2771695 - DNA, 25 bp, Homo sapien
ctctttcatagtgacaaactttcat

SEQ ID NO: 2771696 - DNA, 25 bp, Homo sapien
tttcatatttgaacagcgattatca

SEQ ID NO: 2771697 - DNA, 25 bp, Homo sapien
tctttcatagtgacaaactttcata

SEQ ID NO: 2771698 - DNA, 25 bp, Homo sapien
atctgtaagtcctgtagaccaccgg

SEQ ID NO: 2771699 - DNA, 25 bp, Homo sapien
aaatctgtaagtcctgtagaccacc

SEQ ID NO: 2771700 - DNA, 25 bp, Homo sapien
aatctgtaagtcctgtagaccaccg

SEQ ID NO: 2771701 - DNA, 25 bp, Homo sapien
aacttcacagagactctagtaacat

SEQ ID NO: 2771702 - DNA, 25 bp, Homo sapien
agagactctagtaacatctcccaaa

SEQ ID NO: 2771703 - DNA, 25 bp, Homo sapien
agactctagtaacatctcccaaagc

SEQ ID NO: 2771704 - DNA, 25 bp, Homo sapien
gagactctagtaacatctcccaaag

SEQ ID NO: 2771705 - DNA, 25 bp, Homo sapien
tgtgcacaggcccatactgtggcag

SEQ ID NO: 2771706 - DNA, 25 bp, Homo sapien
acaggcccatactgtggcagtctca

SEQ ID NO: 2771707 - DNA, 25 bp, Homo sapien
aggtctgtgcacaggcccatactgt

SEQ ID NO: 2771708 - DNA, 25 bp, Homo sapien
ggtctgtgcacaggcccatactgtg

SEQ ID NO: 2771709 - DNA, 25 bp, Homo sapien
aggctgcaagttgcaggccaaggtg

SEQ ID NO: 2771710 - DNA, 25 bp, Homo sapien
gcaagttgcaggccaaggtgctcat

SEQ ID NO: 2771711 - DNA, 25 bp, Homo sapien
ctgcaagttgcaggccaaggtgctc

SEQ ID NO: 2771712 - DNA, 25 bp, Homo sapien
gctgcaagttgcaggccaaggtgct

SEQ ID NO: 2771713 - DNA, 25 bp, Homo sapien
gtgagctcctcaaattctgggcatg

SEQ ID NO: 2771714 - DNA, 25 bp, Homo sapien
ctggtgagctcctcaaattctgggc

SEQ ID NO: 2771715 - DNA, 25 bp, Homo sapien
ggtgagctcctcaaattctgggcat

SEQ ID NO: 2771716 - DNA, 25 bp, Homo sapien
gagctcctcaaattctgggcatgtt

SEQ ID NO: 2771717 - DNA, 25 bp, Homo sapien
agtcgtaggtctaaccactgagatg

SEQ ID NO: 2771718 - DNA, 25 bp, Homo sapien
taggtctaaccactgagatgtcaga

SEQ ID NO: 2771719 - DNA, 25 bp, Homo sapien
caagtcgtaggtctaaccactgaga

SEQ ID NO: 2771720 - DNA, 25 bp, Homo sapien
cgtaggtctaaccactgagatgtca

SEQ ID NO: 2771721 - DNA, 25 bp, Homo sapien
aaggcgggtgtttgtattgctcaca

SEQ ID NO: 2771722 - DNA, 25 bp, Homo sapien
ccccactctctggtggtgcataagg

SEQ ID NO: 2771723 - DNA, 25 bp, Homo sapien
gcaaaggcgggtgtttgtattgctc

SEQ ID NO: 2771724 - DNA, 25 bp, Homo sapien
ctctggtggtgcataaggcaaaggc

SEQ ID NO: 2771725 - DNA, 25 bp, Homo sapien
actggcagccatatccagggacttg

SEQ ID NO: 2771726 - DNA, 25 bp, Homo sapien
cagggacttgtggtcagaatggagt

SEQ ID NO: 2771727 - DNA, 25 bp, Homo sapien
gtcactggcagccatatccagggac

SEQ ID NO: 2771728 - DNA, 25 bp, Homo sapien
tggcagccatatccagggacttgtg

SEQ ID NO: 2771729 - DNA, 25 bp, Homo sapien
ctcataatcagtcctggactgctga

SEQ ID NO: 2771730 - DNA, 25 bp, Homo sapien
tggtgacactcataatcagtcctgg

SEQ ID NO: 2771731 - DNA, 25 bp, Homo sapien
gacactcataatcagtcctggactg

SEQ ID NO: 2771732 - DNA, 25 bp, Homo sapien
gctgttggtgacactcataatcagt

SEQ ID NO: 2771733 - DNA, 25 bp, Homo sapien
tcttctgagagtgcttcgggatttt

SEQ ID NO: 2771734 - DNA, 25 bp, Homo sapien
gcttcgggattttgatatggtccca

SEQ ID NO: 2771735 - DNA, 25 bp, Homo sapien
ttaatatatgttcttctgagagtgc

SEQ ID NO: 2771736 - DNA, 25 bp, Homo sapien
ctgagagtgcttcgggattttgata

SEQ ID NO: 2771737 - DNA, 25 bp, Homo sapien
ctggatggtccattttcttaccaca

SEQ ID NO: 2771738 - DNA, 25 bp, Homo sapien
ggatggtccattttcttaccacatc

SEQ ID NO: 2771739 - DNA, 25 bp, Homo sapien
ttttcttaccacatccagaaagcat

SEQ ID NO: 2771740 - DNA, 25 bp, Homo sapien
atggtccattttcttaccacatcca

SEQ ID NO: 2771741 - DNA, 25 bp, Homo sapien
gaaacgataagcagaaagaactcgg

SEQ ID NO: 2771742 - DNA, 25 bp, Homo sapien
gaactcgggatatagtataaaggaa

SEQ ID NO: 2771743 - DNA, 25 bp, Homo sapien
cttgattgacctgaaacgataagca

SEQ ID NO: 2771744 - DNA, 25 bp, Homo sapien
gaaagaactcgggatatagtataaa

SEQ ID NO: 2771745 - DNA, 25 bp, Homo sapien
catacggatgtccatcagtgttcca

SEQ ID NO: 2771746 - DNA, 25 bp, Homo sapien
gtgttccaaaccctgcaagacttga

SEQ ID NO: 2771747 - DNA, 25 bp, Homo sapien
actgttctggtgtttgcatggctgg

SEQ ID NO: 2771748 - DNA, 25 bp, Homo sapien
tactccttggccaaagagccttatg

SEQ ID NO: 2771749 - DNA, 25 bp, Homo sapien
ccgtgttccgctccaacagcttcct

SEQ ID NO: 2771750 - DNA, 25 bp, Homo sapien
tccgtgttccgctccaacagcttcc

SEQ ID NO: 2771751 - DNA, 25 bp, Homo sapien
ccagaactaaaaggagaccatgcaa

SEQ ID NO: 2771752 - DNA, 25 bp, Homo sapien
ccatgcaaagcctgagcgacagcct

SEQ ID NO: 2771753 - DNA, 25 bp, Homo sapien
atgcaaagcctgagcgacagcctgg

SEQ ID NO: 2771754 - DNA, 25 bp, Homo sapien
ggaatgggaggcatccagaactaaa

SEQ ID NO: 2771755 - DNA, 25 bp, Homo sapien
cccgcatcgttctgtagatcgacaa

SEQ ID NO: 2771756 - DNA, 25 bp, Homo sapien
cctggaggcggagaaccggaagctg

SEQ ID NO: 2771757 - DNA, 25 bp, Homo sapien
ctggaggcggagaaccggaagctgg

SEQ ID NO: 2771758 - DNA, 25 bp, Homo sapien
gcatcgttctgtagatcgacaatgc

SEQ ID NO: 2771759 - DNA, 25 bp, Homo sapien
tccacccgtgaatggatgagtcaga

SEQ ID NO: 2771760 - DNA, 25 bp, Homo sapien
caagagtccaacacatagtagtccc

SEQ ID NO: 2771761 - DNA, 25 bp, Homo sapien
tgctaggacggcactgtgtggaatc

SEQ ID NO: 2771762 - DNA, 25 bp, Homo sapien
gagcttaccctcaccagacatagaa

SEQ ID NO: 2771763 - DNA, 25 bp, Homo sapien
gagagaagaacgtgagcatatacaa

SEQ ID NO: 2771764 - DNA, 25 bp, Homo sapien
gaacgtgagcatatacaattgagcc

SEQ ID NO: 2771765 - DNA, 25 bp, Homo sapien
gaagaacgtgagcatatacaattga

SEQ ID NO: 2771766 - DNA, 25 bp, Homo sapien
acgtgagcatatacaattgagcctt

SEQ ID NO: 2771767 - DNA, 25 bp, Homo sapien
tctgaagacacatgcttggctgact

SEQ ID NO: 2771768 - DNA, 25 bp, Homo sapien
caagaaatagggtgtatcatgcagg

SEQ ID NO: 2771769 - DNA, 25 bp, Homo sapien
tgctttccttgtcttatgtaagctt

SEQ ID NO: 2771770 - DNA, 25 bp, Homo sapien
tccaaaaattaaggtcatcagggtc

SEQ ID NO: 2771771 - DNA, 25 bp, Homo sapien
tgtgtttgcccggattttctggatt

SEQ ID NO: 2771772 - DNA, 25 bp, Homo sapien
aagatcaacacataaatcctgtttg

SEQ ID NO: 2771773 - DNA, 25 bp, Homo sapien
ctgtttgtgtttgcccggattttct

SEQ ID NO: 2771774 - DNA, 25 bp, Homo sapien
ttccctagttctttatgtcctaaga

SEQ ID NO: 2771775 - DNA, 25 bp, Homo sapien
gaaagatagattcacgtaatacacc

SEQ ID NO: 2771776 - DNA, 25 bp, Homo sapien
acaaatctagctcctcagggctact

SEQ ID NO: 2771777 - DNA, 25 bp, Homo sapien
caaatctagctcctcagggctactc

SEQ ID NO: 2771778 - DNA, 25 bp, Homo sapien
cctcactttcactaccaggaactga

SEQ ID NO: 2771779 - DNA, 25 bp, Homo sapien
cactaccaggaactgaatttggata

SEQ ID NO: 2771780 - DNA, 25 bp, Homo sapien
ctcactttcactaccaggaactgaa

SEQ ID NO: 2771781 - DNA, 25 bp, Homo sapien
ctttcactaccaggaactgaatttg

SEQ ID NO: 2771782 - DNA, 25 bp, Homo sapien
cttttattacctaaatgtgagctct

SEQ ID NO: 2771783 - DNA, 25 bp, Homo sapien
ttttattacctaaatgtgagctctt

SEQ ID NO: 2771784 - DNA, 25 bp, Homo sapien
ctatttcctatagggtcttcattta

SEQ ID NO: 2771785 - DNA, 25 bp, Homo sapien
tatttcctatagggtcttcatttac

SEQ ID NO: 2771786 - DNA, 25 bp, Homo sapien
atttccctgtgttcgtatgagcagg

SEQ ID NO: 2771787 - DNA, 25 bp, Homo sapien
ctgtgttcgtatgagcaggaccacc

SEQ ID NO: 2771788 - DNA, 25 bp, Homo sapien
gtgttcgtatgagcaggaccaccat

SEQ ID NO: 2771789 - DNA, 25 bp, Homo sapien
ccctgtgttcgtatgagcaggacca

SEQ ID NO: 2771790 - DNA, 25 bp, Homo sapien
tcatttgttcttgtactgacactgt

SEQ ID NO: 2771791 - DNA, 25 bp, Homo sapien
tgttcttgtactgacactgtatctg

SEQ ID NO: 2771792 - DNA, 25 bp, Homo sapien
tcttgtactgacactgtatctgctg

SEQ ID NO: 2771793 - DNA, 25 bp, Homo sapien
tgtactgacactgtatctgctgatt

SEQ ID NO: 2771794 - DNA, 25 bp, Homo sapien
cagaaaccttattgctactttcacc

SEQ ID NO: 2771795 - DNA, 25 bp, Homo sapien
ccagaaaccttattgctactttcac

SEQ ID NO: 2771796 - DNA, 25 bp, Homo sapien
agaaaccttattgctactttcacca

SEQ ID NO: 2771797 - DNA, 25 bp, Homo sapien
gaaaccttattgctactttcaccat

SEQ ID NO: 2771798 - DNA, 25 bp, Homo sapien
ttaaccaccctctgtcatgcccaat

SEQ ID NO: 2771799 - DNA, 25 bp, Homo sapien
aacatgtgtgagaaattcattcccc

SEQ ID NO: 2771800 - DNA, 25 bp, Homo sapien
gagaaattcattccccttcagaaag

SEQ ID NO: 2771801 - DNA, 25 bp, Homo sapien
tccaatcaagctctgaacatgtgtg

SEQ ID NO: 2771802 - DNA, 25 bp, Homo sapien
ccacattttcggttcggctttcctg

SEQ ID NO: 2771803 - DNA, 25 bp, Homo sapien
atactctgctgcttgttatttctga

SEQ ID NO: 2771804 - DNA, 25 bp, Homo sapien
acatactctgctgcttgttatttct

SEQ ID NO: 2771805 - DNA, 25 bp, Homo sapien
cattttcggttcggctttcctgaat

SEQ ID NO: 2771806 - DNA, 25 bp, Homo sapien
aattatctgttttggcttgaaacca

SEQ ID NO: 2771807 - DNA, 25 bp, Homo sapien
tttggcttgaaaccactcttaccag

SEQ ID NO: 2771808 - DNA, 25 bp, Homo sapien
gagccaaagagcatttattgtattc

SEQ ID NO: 2771809 - DNA, 25 bp, Homo sapien
gtctgggaggcaatatcactacaca

SEQ ID NO: 2771810 - DNA, 25 bp, Homo sapien
ctgggagtacaaggcattagccaca

SEQ ID NO: 2771811 - DNA, 25 bp, Homo sapien
aatatttccaagtcatagtgaccag

SEQ ID NO: 2771812 - DNA, 25 bp, Homo sapien
tagtgaccagaattacaagctttgg

SEQ ID NO: 2771813 - DNA, 25 bp, Homo sapien
tttatagagcaacggcaagagtcac

SEQ ID NO: 2771814 - DNA, 25 bp, Homo sapien
tgctggtttccagaattacttgggc

SEQ ID NO: 2771815 - DNA, 25 bp, Homo sapien
ccagcgacttctggcgaggaccagt

SEQ ID NO: 2771816 - DNA, 25 bp, Homo sapien
gaggccaggtccaagtattaatgag

SEQ ID NO: 2771817 - DNA, 25 bp, Homo sapien
caaagacaatagcacacagcagtgg

SEQ ID NO: 2771818 - DNA, 25 bp, Homo sapien
ccctgtggtgtgagtcctcaggaat

SEQ ID NO: 2771819 - DNA, 25 bp, Homo sapien
atgttctggtgcctataagtaccca

SEQ ID NO: 2771820 - DNA, 25 bp, Homo sapien
gtggtgtgagtcctcaggaatgttc

SEQ ID NO: 2771821 - DNA, 25 bp, Homo sapien
ggtgcctataagtacccagcaccat

SEQ ID NO: 2771822 - DNA, 25 bp, Homo sapien
ccttcctcttgatacctttaatcct

SEQ ID NO: 2771823 - DNA, 25 bp, Homo sapien
ctgagccactaaggaccaatgagta

SEQ ID NO: 2771824 - DNA, 25 bp, Homo sapien
ggccctcaacccttcctcttgatac

SEQ ID NO: 2771825 - DNA, 25 bp, Homo sapien
gagccactaaggaccaatgagtagg

SEQ ID NO: 2771826 - DNA, 25 bp, Homo sapien
tctcagcgcttccacggtttttatt

SEQ ID NO: 2771827 - DNA, 25 bp, Homo sapien
cttctcagcgcttccacggttttta

SEQ ID NO: 2771828 - DNA, 25 bp, Homo sapien
ggcttctcagcgcttccacggtttt

SEQ ID NO: 2771829 - DNA, 25 bp, Homo sapien
tctggcttctcagcgcttccacggt

SEQ ID NO: 2771830 - DNA, 25 bp, Homo sapien
cccttaggccaaaggatggactaat

SEQ ID NO: 2771831 - DNA, 25 bp, Homo sapien
taatgttgagggacagtctctttcc

SEQ ID NO: 2771832 - DNA, 25 bp, Homo sapien
tcctgcttggatgggtctaaatcag

SEQ ID NO: 2771833 - DNA, 25 bp, Homo sapien
gatgctcgccaggttaacccttagg

SEQ ID NO: 2771834 - DNA, 25 bp, Homo sapien
aaggtggtaggttgcgatgacggca

SEQ ID NO: 2771835 - DNA, 25 bp, Homo sapien
taggttgcgatgacggcaagtagac

SEQ ID NO: 2771836 - DNA, 25 bp, Homo sapien
gacggcaagtagacaccacaagaag

SEQ ID NO: 2771837 - DNA, 25 bp, Homo sapien
cacacagcaaagctcggagggaccg

SEQ ID NO: 2771838 - DNA, 25 bp, Homo sapien
tccaatagctgatgacttagtgtca

SEQ ID NO: 2771839 - DNA, 25 bp, Homo sapien
gacttagtgtcaggcaagtccacag

SEQ ID NO: 2771840 - DNA, 25 bp, Homo sapien
tgttcaaagcactctttccaatagc

SEQ ID NO: 2771841 - DNA, 25 bp, Homo sapien
aaagcactctttccaatagctgatg

SEQ ID NO: 2771842 - DNA, 25 bp, Homo sapien
cattcctacaccaagattcacagta

SEQ ID NO: 2771843 - DNA, 25 bp, Homo sapien
gccattcctacaccaagattcacag

SEQ ID NO: 2771844 - DNA, 25 bp, Homo sapien
ataatgccattcctacaccaagatt

SEQ ID NO: 2771845 - DNA, 25 bp, Homo sapien
aatgccattcctacaccaagattca

SEQ ID NO: 2771846 - DNA, 25 bp, Homo sapien
ggcttctgtaccatgtccaaattgt

SEQ ID NO: 2771847 - DNA, 25 bp, Homo sapien
gcttgactcaggcaataagttccaa

SEQ ID NO: 2771848 - DNA, 25 bp, Homo sapien
tccataaagctatgagagaaagagc

SEQ ID NO: 2771849 - DNA, 25 bp, Homo sapien
tatcacacgaattctgtaggtcaga

SEQ ID NO: 2771850 - DNA, 25 bp, Homo sapien
actgaaatgttgatcatggccacac

SEQ ID NO: 2771851 - DNA, 25 bp, Homo sapien
ctgggccaccgtgtgagatttgtga

SEQ ID NO: 2771852 - DNA, 25 bp, Homo sapien
ttgatcatggccacactgtgaggcc

SEQ ID NO: 2771853 - DNA, 25 bp, Homo sapien
gatttgtgacaggatgcttgagcag

SEQ ID NO: 2771854 - DNA, 25 bp, Homo sapien
actgtcctttgtgccagttctgtgc

SEQ ID NO: 2771855 - DNA, 25 bp, Homo sapien
tgcgcagactctgacccacttcgtg

SEQ ID NO: 2771856 - DNA, 25 bp, Homo sapien
cccacttcgtgcaggtgcaatctga

SEQ ID NO: 2771857 - DNA, 25 bp, Homo sapien
gatgaacagtgctgcgcagactctg

SEQ ID NO: 2771858 - DNA, 25 bp, Homo sapien
caaaagtcttatgatggtctctctc

SEQ ID NO: 2771859 - DNA, 25 bp, Homo sapien
tctgaatccaggtccattgggaacc

SEQ ID NO: 2771860 - DNA, 25 bp, Homo sapien
ctctctcctttgagtcaatttcctg

SEQ ID NO: 2771861 - DNA, 25 bp, Homo sapien
gaatccaggtccattgggaacctga

SEQ ID NO: 2771862 - DNA, 25 bp, Homo sapien
acatctctcaggtctgcagcgtgcc

SEQ ID NO: 2771863 - DNA, 25 bp, Homo sapien
tgcagctgtgaacatctctcaggtc

SEQ ID NO: 2771864 - DNA, 25 bp, Homo sapien
tactgctgcagctgtgaacatctct

SEQ ID NO: 2771865 - DNA, 25 bp, Homo sapien
caacaccatactgctgcagctgtga

SEQ ID NO: 2771866 - DNA, 25 bp, Homo sapien
atccaagactctggacaggcagtca

SEQ ID NO: 2771867 - DNA, 25 bp, Homo sapien
tccaaagttccataaaatccatcat

SEQ ID NO: 2771868 - DNA, 25 bp, Homo sapien
aatccatcatgtaagccaatccaag

SEQ ID NO: 2771869 - DNA, 25 bp, Homo sapien
caccttgaaggagtattgctatatc

SEQ ID NO: 2771870 - DNA, 25 bp, Homo sapien
ggaactctcccaatttcaaagtcag

SEQ ID NO: 2771871 - DNA, 25 bp, Homo sapien
tacaactctttaggtcagaagtctg

SEQ ID NO: 2771872 - DNA, 25 bp, Homo sapien
taaaatcaacatttcagcacggttg

SEQ ID NO: 2771873 - DNA, 25 bp, Homo sapien
ttcagttggtaaggcctgcaatggc

SEQ ID NO: 2771874 - DNA, 25 bp, Homo sapien
gtcagcagccatttcccgcctttga

SEQ ID NO: 2771875 - DNA, 25 bp, Homo sapien
tcagcagccatttcccgcctttgaa

SEQ ID NO: 2771876 - DNA, 25 bp, Homo sapien
tcagcaagagccagcatcctcagga

SEQ ID NO: 2771877 - DNA, 25 bp, Homo sapien
atcagcaagagccagcatcctcagg

SEQ ID NO: 2771878 - DNA, 25 bp, Homo sapien
gctgctgtttcactctttgtcacca

SEQ ID NO: 2771879 - DNA, 25 bp, Homo sapien
ctgctgtttcactctttgtcaccat

SEQ ID NO: 2771880 - DNA, 25 bp, Homo sapien
ctgatttatgaggaaaattcttttt

SEQ ID NO: 2771881 - DNA, 25 bp, Homo sapien
agaaggcaatgtcaccaatccagtc

SEQ ID NO: 2771882 - DNA, 25 bp, Homo sapien
gaaagaaggcaatgtcaccaatcca

SEQ ID NO: 2771883 - DNA, 25 bp, Homo sapien
aatgtcaccaatccagtccatcttc

SEQ ID NO: 2771884 - DNA, 25 bp, Homo sapien
aatggtgctgttcaagtatggtgtt

SEQ ID NO: 2771885 - DNA, 25 bp, Homo sapien
gagattcaggacaaaattaagtgca

SEQ ID NO: 2771886 - DNA, 25 bp, Homo sapien
gacagatcaatgacctcaatgagcc

SEQ ID NO: 2771887 - DNA, 25 bp, Homo sapien
tcataaatccacagacagccagaca

SEQ ID NO: 2771888 - DNA, 25 bp, Homo sapien
ctagtgatactcaacaaagctcctg

SEQ ID NO: 2771889 - DNA, 25 bp, Homo sapien
aacaaagctcctgtgacagagtctc

SEQ ID NO: 2771890 - DNA, 25 bp, Homo sapien
caacaaagctcctgtgacagagtct

SEQ ID NO: 2771891 - DNA, 25 bp, Homo sapien
ggactgtgcactagtgatactcaac

SEQ ID NO: 2771892 - DNA, 25 bp, Homo sapien
gttgagggtgactcctcttttgacc

SEQ ID NO: 2771893 - DNA, 25 bp, Homo sapien
caagtcgtgaatgtctaccttgtgc

SEQ ID NO: 2771894 - DNA, 25 bp, Homo sapien
tgactcacacctgaatctttctgtg

SEQ ID NO: 2771895 - DNA, 25 bp, Homo sapien
tcttttgaccccattacagcgtact

SEQ ID NO: 2771896 - DNA, 25 bp, Homo sapien
gcattcggcaggtgcccctctagga

SEQ ID NO: 2771897 - DNA, 25 bp, Homo sapien
ctggcattcggcaggtgcccctcta

SEQ ID NO: 2771898 - DNA, 25 bp, Homo sapien
ctacagtgatatcaagacaaacagg

SEQ ID NO: 2771899 - DNA, 25 bp, Homo sapien
ctgcagcctctacagtgatatcaag

SEQ ID NO: 2771900 - DNA, 25 bp, Homo sapien
tctaacgagtataacacggccggcc

SEQ ID NO: 2771901 - DNA, 25 bp, Homo sapien
aaaagatcgcagttaggcagtcctc

SEQ ID NO: 2771902 - DNA, 25 bp, Homo sapien
cctttcagggcggagaagttcccag

SEQ ID NO: 2771903 - DNA, 25 bp, Homo sapien
tcaaaatgattctaagggccgcgca

SEQ ID NO: 2771904 - DNA, 25 bp, Homo sapien
gaaatagtacactccgagcggcagg

SEQ ID NO: 2771905 - DNA, 25 bp, Homo sapien
gcgctagcgcagacaccgtatttct

SEQ ID NO: 2771906 - DNA, 25 bp, Homo sapien
cccgcggacaggaggttcaagaaat

SEQ ID NO: 2771907 - DNA, 25 bp, Homo sapien
gtcgccggtttcagtggtggcccca

SEQ ID NO: 2771908 - DNA, 25 bp, Homo sapien
cactacgtggacaagcgattggcgg

SEQ ID NO: 2771909 - DNA, 25 bp, Homo sapien
catcgtggtgctgtgcaagtcgcgc

SEQ ID NO: 2771910 - DNA, 25 bp, Homo sapien
gacacctggtgcttcatcgactgga

SEQ ID NO: 2771911 - DNA, 25 bp, Homo sapien
ggagacgaccttctacacgctggta

SEQ ID NO: 2771912 - DNA, 25 bp, Homo sapien
ggatttctgcacagccacggatgaa

SEQ ID NO: 2771913 - DNA, 25 bp, Homo sapien
agcatgtaaagctatggatttctgc

SEQ ID NO: 2771914 - DNA, 25 bp, Homo sapien
catgtaaagctatggatttctgcac

SEQ ID NO: 2771915 - DNA, 25 bp, Homo sapien
gcacagccacggatgaattattttc

SEQ ID NO: 2771916 - DNA, 25 bp, Homo sapien
tataggtgagtcctcgtctaatgct

SEQ ID NO: 2771917 - DNA, 25 bp, Homo sapien
agggtagctataggtgagtcctcgt

SEQ ID NO: 2771918 - DNA, 25 bp, Homo sapien
tagctataggtgagtcctcgtctaa

SEQ ID NO: 2771919 - DNA, 25 bp, Homo sapien
taggtgagtcctcgtctaatgctca

SEQ ID NO: 2771920 - DNA, 25 bp, Homo sapien
gaaactctcaagtggagcaacactg

SEQ ID NO: 2771921 - DNA, 25 bp, Homo sapien
gaaacgtcaggttcagacttaacca

SEQ ID NO: 2771922 - DNA, 25 bp, Homo sapien
ccaaaattctgttctgcgagtctcg

SEQ ID NO: 2771923 - DNA, 25 bp, Homo sapien
tctcggagatggctttacacagtgc

SEQ ID NO: 2771924 - DNA, 25 bp, Homo sapien
caatcaagttgactcacgtgggtcc

SEQ ID NO: 2771925 - DNA, 25 bp, Homo sapien
gaggactttgcgaatatcagagacc

SEQ ID NO: 2771926 - DNA, 25 bp, Homo sapien
ggatgctaccccactatgacagagg

SEQ ID NO: 2771927 - DNA, 25 bp, Homo sapien
aaatgcctcttctgccgcattggcg

SEQ ID NO: 2771928 - DNA, 25 bp, Homo sapien
gatggcaagttgcatcagaaagctt

SEQ ID NO: 2771929 - DNA, 25 bp, Homo sapien
tgtatgtcagaagtgcagaattggg

SEQ ID NO: 2771930 - DNA, 25 bp, Homo sapien
taatggtcaccttgtaacagttttg

SEQ ID NO: 2771931 - DNA, 25 bp, Homo sapien
agatgtaaaaagattcccaaacgtg

SEQ ID NO: 2771932 - DNA, 25 bp, Homo sapien
atacattgctagcagaaatcccaaa

SEQ ID NO: 2771933 - DNA, 25 bp, Homo sapien
tttaatacattgctagcagaaatcc

SEQ ID NO: 2771934 - DNA, 25 bp, Homo sapien
aaagttgtgcataaactggtcataa

SEQ ID NO: 2771935 - DNA, 25 bp, Homo sapien
ttcctttaaagttgtgcataaactg

SEQ ID NO: 2771936 - DNA, 25 bp, Homo sapien
tggacacacactatatcaggatggt

SEQ ID NO: 2771937 - DNA, 25 bp, Homo sapien
tggatgaatctcaacatggatgggt

SEQ ID NO: 2771938 - DNA, 25 bp, Homo sapien
gaaccaactgcaaaagggctttaga

SEQ ID NO: 2771939 - DNA, 25 bp, Homo sapien
aatctaacgtatagccacagaaagc

SEQ ID NO: 2771940 - DNA, 25 bp, Homo sapien
gctggcaagagaccacaacatcggt

SEQ ID NO: 2771941 - DNA, 25 bp, Homo sapien
tgtaggccccagttgcagtagatct

SEQ ID NO: 2771942 - DNA, 25 bp, Homo sapien
caaggttcacaatgtagctggcaag

SEQ ID NO: 2771943 - DNA, 25 bp, Homo sapien
gaagcactgtgagaggaagccatcc

SEQ ID NO: 2771944 - DNA, 25 bp, Homo sapien
aaactatttattcacaaattacaca

SEQ ID NO: 2771945 - DNA, 25 bp, Homo sapien
ctatttattcacaaattacacaaaa

SEQ ID NO: 2771946 - DNA, 25 bp, Homo sapien
atataccaaatgttgagtactcact

SEQ ID NO: 2771947 - DNA, 25 bp, Homo sapien
aactatttattcacaaattacacaa

SEQ ID NO: 2771948 - DNA, 25 bp, Homo sapien
tttggagcactctgaaactaacctc

SEQ ID NO: 2771949 - DNA, 25 bp, Homo sapien
cctgagtgtcagaagtaacagaacc

SEQ ID NO: 2771950 - DNA, 25 bp, Homo sapien
tataagctccaacagtagtaagatc

SEQ ID NO: 2771951 - DNA, 25 bp, Homo sapien
caaggcaagtgctaatttctccaac

SEQ ID NO: 2771952 - DNA, 25 bp, Homo sapien
gacagacttactctaatgaagcaag

SEQ ID NO: 2771953 - DNA, 25 bp, Homo sapien
tatgtcaaaacttcaagaggcaatc

SEQ ID NO: 2771954 - DNA, 25 bp, Homo sapien
caagcaagaagtaagttgtttccag

SEQ ID NO: 2771955 - DNA, 25 bp, Homo sapien
tattttacaaccaggcgttctccta

SEQ ID NO: 2771956 - DNA, 25 bp, Homo sapien
gagccatctggtggtgtagcaccat

SEQ ID NO: 2771957 - DNA, 25 bp, Homo sapien
tgtgaagggctacttgaaaacttcg

SEQ ID NO: 2771958 - DNA, 25 bp, Homo sapien
cagttacagtctctatggccccaga

SEQ ID NO: 2771959 - DNA, 25 bp, Homo sapien
tcactttcaaagtcatagtctggaa

SEQ ID NO: 2771960 - DNA, 25 bp, Homo sapien
taaagatttgctcatgcaaaatatt

SEQ ID NO: 2771961 - DNA, 25 bp, Homo sapien
ttgtctggaaattatcacttgtcca

SEQ ID NO: 2771962 - DNA, 25 bp, Homo sapien
aaaaagaatcaaatgatgcaactga

SEQ ID NO: 2771963 - DNA, 25 bp, Homo sapien
tggaaattatcacttgtccatccca

SEQ ID NO: 2771964 - DNA, 25 bp, Homo sapien
tgagcacgtcccaaagtctgccaag

SEQ ID NO: 2771965 - DNA, 25 bp, Homo sapien
aaccaagttgagcacgtcccaaagt

SEQ ID NO: 2771966 - DNA, 25 bp, Homo sapien
gtctgccaagactcccatgaatgtg

SEQ ID NO: 2771967 - DNA, 25 bp, Homo sapien
gctggacggccatttctgctgcatg

SEQ ID NO: 2771968 - DNA, 25 bp, Homo sapien
gggtagcatcatttggagttaactg

SEQ ID NO: 2771969 - DNA, 25 bp, Homo sapien
ctgtgatttcatctcgtatagggta

SEQ ID NO: 2771970 - DNA, 25 bp, Homo sapien
tcatctcgtatagggtagcatcatt

SEQ ID NO: 2771971 - DNA, 25 bp, Homo sapien
gagttaactgtagtgcttcatccca

SEQ ID NO: 2771972 - DNA, 25 bp, Homo sapien
caagtttggcattacttgttctcac

SEQ ID NO: 2771973 - DNA, 25 bp, Homo sapien
cactttattgatgaggaaccaatgg

SEQ ID NO: 2771974 - DNA, 25 bp, Homo sapien
aagtatgcctcccatttagttctgc

SEQ ID NO: 2771975 - DNA, 25 bp, Homo sapien
gaaccaatggttgagagcagctaaa

SEQ ID NO: 2771976 - DNA, 25 bp, Homo sapien
ccatttttagatcacaggaaacttg

SEQ ID NO: 2771977 - DNA, 25 bp, Homo sapien
agggtggcaccacttagttcctcca

SEQ ID NO: 2771978 - DNA, 25 bp, Homo sapien
tctttggtttacttctgttggcctg

SEQ ID NO: 2771979 - DNA, 25 bp, Homo sapien
tgccaacgaggcctataaaggttta

SEQ ID NO: 2771980 - DNA, 25 bp, Homo sapien
cagcaaagagacagacataggcaca

SEQ ID NO: 2771981 - DNA, 25 bp, Homo sapien
tggaagataccagtcaaaggcacac

SEQ ID NO: 2771982 - DNA, 25 bp, Homo sapien
gttacctacgacatatacttgccaa

SEQ ID NO: 2771983 - DNA, 25 bp, Homo sapien
ggctctcaacagataccaaacacag

SEQ ID NO: 2771984 - DNA, 25 bp, Homo sapien
ataactcttcatcccattacggaca

SEQ ID NO: 2771985 - DNA, 25 bp, Homo sapien
tctttgattaatttagcacctagaa

SEQ ID NO: 2771986 - DNA, 25 bp, Homo sapien
taatttagcacctagaatagatttt

SEQ ID NO: 2771987 - DNA, 25 bp, Homo sapien
tcttcatcccattacggacagtgag

SEQ ID NO: 2771988 - DNA, 25 bp, Homo sapien
cttcaaactgctgggaagtgacctt

SEQ ID NO: 2771989 - DNA, 25 bp, Homo sapien
ttcctacgtttaatggcatgaagcc

SEQ ID NO: 2771990 - DNA, 25 bp, Homo sapien
agccagttcccttcatcgttgtcaa

SEQ ID NO: 2771991 - DNA, 25 bp, Homo sapien
attttcagccaaactggctccttca

SEQ ID NO: 2771992 - DNA, 25 bp, Homo sapien
aaaattagagtcgatactgtcaaac

SEQ ID NO: 2771993 - DNA, 25 bp, Homo sapien
tttgctgcatcgactgattctccct

SEQ ID NO: 2771994 - DNA, 25 bp, Homo sapien
tagcatgcagtcctatttggtagca

SEQ ID NO: 2771995 - DNA, 25 bp, Homo sapien
agtgaaaattgctccttgatccatg

SEQ ID NO: 2771996 - DNA, 25 bp, Homo sapien
cgggcaaaggaaagacgactcagtc

SEQ ID NO: 2771997 - DNA, 25 bp, Homo sapien
tggcccacccctgggcgttcgaaca

SEQ ID NO: 2771998 - DNA, 25 bp, Homo sapien
cctgggcgttcgaacagtccacaga

SEQ ID NO: 2771999 - DNA, 25 bp, Homo sapien
agtctttcccctccgccaatctctt

SEQ ID NO: 2772000 - DNA, 25 bp, Homo sapien
gccagaacgtagctgtgcatcatgt

SEQ ID NO: 2772001 - DNA, 25 bp, Homo sapien
tacaagtgagttggacccagaaggc

SEQ ID NO: 2772002 - DNA, 25 bp, Homo sapien
tatagcctagctgatgaggtcggcc

SEQ ID NO: 2772003 - DNA, 25 bp, Homo sapien
attcggttataaagggctcgaggcg

SEQ ID NO: 2772004 - DNA, 25 bp, Homo sapien
ttattcggacttgggtatttgacaa

SEQ ID NO: 2772005 - DNA, 25 bp, Homo sapien
gatgagtgacaaaccggttattcgg

SEQ ID NO: 2772006 - DNA, 25 bp, Homo sapien
aagtgattatcagttgtgactttta

SEQ ID NO: 2772007 - DNA, 25 bp, Homo sapien
aaaaaattgagtttgttgccaatga

SEQ ID NO: 2772008 - DNA, 25 bp, Homo sapien
tctttcattccaaaggtgccagtca

SEQ ID NO: 2772009 - DNA, 25 bp, Homo sapien
tcagaacacagatccatggagttcc

SEQ ID NO: 2772010 - DNA, 25 bp, Homo sapien
ccccaggctaccaagcattaattca

SEQ ID NO: 2772011 - DNA, 25 bp, Homo sapien
gagttccacatctagccccaggcta

SEQ ID NO: 2772012 - DNA, 25 bp, Homo sapien
tcccatatgccccaacctggtagaa

SEQ ID NO: 2772013 - DNA, 25 bp, Homo sapien
gatatattaagctcccatatgcccc

SEQ ID NO: 2772014 - DNA, 25 bp, Homo sapien
agcaatggagtttatttcagtgaaa

SEQ ID NO: 2772015 - DNA, 25 bp, Homo sapien
tagatatgatatattaagctcccat

SEQ ID NO: 2772016 - DNA, 25 bp, Homo sapien
tatttatgaagttaaggagcccaga

SEQ ID NO: 2772017 - DNA, 25 bp, Homo sapien
tagaatcccctaaagagagggccac

SEQ ID NO: 2772018 - DNA, 25 bp, Homo sapien
cattatgctgcacttagagacccta

SEQ ID NO: 2772019 - DNA, 25 bp, Homo sapien
taatgactgacatgatgggccagag

SEQ ID NO: 2772020 - DNA, 25 bp, Homo sapien
taaatcatgttccaatccctgtgca

SEQ ID NO: 2772021 - DNA, 25 bp, Homo sapien
taagcctgagacctataattcactg

SEQ ID NO: 2772022 - DNA, 25 bp, Homo sapien
aaattgcattccaaaacgccagccc

SEQ ID NO: 2772023 - DNA, 25 bp, Homo sapien
aatagccaaaaatcaagtaagcctg

SEQ ID NO: 2772024 - DNA, 25 bp, Homo sapien
tgcaagaattttaattagatttgca

SEQ ID NO: 2772025 - DNA, 25 bp, Homo sapien
ttattgtgcaagaattttaattaga

SEQ ID NO: 2772026 - DNA, 25 bp, Homo sapien
aagaattttaattagatttgcacac

SEQ ID NO: 2772027 - DNA, 25 bp, Homo sapien
tgtgcaagaattttaattagatttg

SEQ ID NO: 2772028 - DNA, 25 bp, Homo sapien
cactcctttggcaagatcgatagtt

SEQ ID NO: 2772029 - DNA, 25 bp, Homo sapien
ccaggtcttggagttaggtcaacag

SEQ ID NO: 2772030 - DNA, 25 bp, Homo sapien
tcaagtgaggtcacagatgaggtaa

SEQ ID NO: 2772031 - DNA, 25 bp, Homo sapien
gatctctgtggagtagcagtccctg

SEQ ID NO: 2772032 - DNA, 25 bp, Homo sapien
gtgtactatctttgagtttataaag

SEQ ID NO: 2772033 - DNA, 25 bp, Homo sapien
aaaaattcaaacgtgaacctcatct

SEQ ID NO: 2772034 - DNA, 25 bp, Homo sapien
ttctgctactatgtgtgtactatct

SEQ ID NO: 2772035 - DNA, 25 bp, Homo sapien
aaaattcaaacgtgaacctcatcta

SEQ ID NO: 2772036 - DNA, 25 bp, Homo sapien
caccttaggatcagactacacctgg

SEQ ID NO: 2772037 - DNA, 25 bp, Homo sapien
gaattggccaatgaagaattgccat

SEQ ID NO: 2772038 - DNA, 25 bp, Homo sapien
cctgcactcaacagcgtagcttaat

SEQ ID NO: 2772039 - DNA, 25 bp, Homo sapien
tgcagcagaaaactatcaccttagg

SEQ ID NO: 2772040 - DNA, 25 bp, Homo sapien
cacttggtataactgtagactcatt

SEQ ID NO: 2772041 - DNA, 25 bp, Homo sapien
gataagttctactatccacttggta

SEQ ID NO: 2772042 - DNA, 25 bp, Homo sapien
cttcgtacacgcaaataatatgggt

SEQ ID NO: 2772043 - DNA, 25 bp, Homo sapien
tacggaaatccagtagataagttct

SEQ ID NO: 2772044 - DNA, 25 bp, Homo sapien
aattcatcaagggtatggcgtgccc

SEQ ID NO: 2772045 - DNA, 25 bp, Homo sapien
ggtgtttcagcaaccaagaatggta

SEQ ID NO: 2772046 - DNA, 25 bp, Homo sapien
tattatgagatggtaggcaactgcc

SEQ ID NO: 2772047 - DNA, 25 bp, Homo sapien
gaatcaggtgggcttgtcgccaaat

SEQ ID NO: 2772048 - DNA, 25 bp, Homo sapien
tactatcagatctgataacttccaa

SEQ ID NO: 2772049 - DNA, 25 bp, Homo sapien
atcagatctgataacttccaaactg

SEQ ID NO: 2772050 - DNA, 25 bp, Homo sapien
actatcagatctgataacttccaaa

SEQ ID NO: 2772051 - DNA, 25 bp, Homo sapien
agatctgataacttccaaactgctt

SEQ ID NO: 2772052 - DNA, 25 bp, Homo sapien
aaagcatagagaataaccccactgc

SEQ ID NO: 2772053 - DNA, 25 bp, Homo sapien
ggccctcttcatgggatccacctgc

SEQ ID NO: 2772054 - DNA, 25 bp, Homo sapien
gtttcaaaaggctaatcacagaagg

SEQ ID NO: 2772055 - DNA, 25 bp, Homo sapien
tgaggggtatagaagatcccatcac

SEQ ID NO: 2772056 - DNA, 25 bp, Homo sapien
gaaagccaggcaaattggttcacag

SEQ ID NO: 2772057 - DNA, 25 bp, Homo sapien
agtcaagtgccttaactagctgcag

SEQ ID NO: 2772058 - DNA, 25 bp, Homo sapien
gatgggatctgacaatagggccaaa

SEQ ID NO: 2772059 - DNA, 25 bp, Homo sapien
tagctgcagactagttagatcaccc

SEQ ID NO: 2772060 - DNA, 25 bp, Homo sapien
aactattcaaaaagcgacactgtac

SEQ ID NO: 2772061 - DNA, 25 bp, Homo sapien
aatctaaaattaggtactcctgcct

SEQ ID NO: 2772062 - DNA, 25 bp, Homo sapien
gcagtctaggccaacaagcttataa

SEQ ID NO: 2772063 - DNA, 25 bp, Homo sapien
cagtagtatagtgaaggacaaagag

SEQ ID NO: 2772064 - DNA, 25 bp, Homo sapien
tcaatgctggtagttagtaaattga

SEQ ID NO: 2772065 - DNA, 25 bp, Homo sapien
aatgctggtagttagtaaattgaga

SEQ ID NO: 2772066 - DNA, 25 bp, Homo sapien
tgctggtagttagtaaattgagagg

SEQ ID NO: 2772067 - DNA, 25 bp, Homo sapien
tggtagttagtaaattgagaggtta

SEQ ID NO: 2772068 - DNA, 25 bp, Homo sapien
catagttgggtgagccacaacttgt

SEQ ID NO: 2772069 - DNA, 25 bp, Homo sapien
ctgaaattacttctggtgcagcata

SEQ ID NO: 2772070 - DNA, 25 bp, Homo sapien
agcatagttgggtgagccacaactt

SEQ ID NO: 2772071 - DNA, 25 bp, Homo sapien
atagttgggtgagccacaacttgtt

SEQ ID NO: 2772072 - DNA, 25 bp, Homo sapien
gcccaggccggacaggcgatctcaa

SEQ ID NO: 2772073 - DNA, 25 bp, Homo sapien
ccaggccggacaggcgatctcaact

SEQ ID NO: 2772074 - DNA, 25 bp, Homo sapien
tcgcccaggccggacaggcgatctc

SEQ ID NO: 2772075 - DNA, 25 bp, Homo sapien
caggccggacaggcgatctcaactc

SEQ ID NO: 2772076 - DNA, 25 bp, Homo sapien
aaatctctatggaccaccatatgcc

SEQ ID NO: 2772077 - DNA, 25 bp, Homo sapien
gaacagacgccgactttctttttca

SEQ ID NO: 2772078 - DNA, 25 bp, Homo sapien
tgtgtgcatcaagcaggacattttc

SEQ ID NO: 2772079 - DNA, 25 bp, Homo sapien
tccacaccagaaaggatctgttgga

SEQ ID NO: 2772080 - DNA, 25 bp, Homo sapien
tctatattttgagatccagtctcgt

SEQ ID NO: 2772081 - DNA, 25 bp, Homo sapien
tatctatattttgagatccagtctc

SEQ ID NO: 2772082 - DNA, 25 bp, Homo sapien
aatttatctatattttgagatccag

SEQ ID NO: 2772083 - DNA, 25 bp, Homo sapien
tatattttgagatccagtctcgttc

SEQ ID NO: 2772084 - DNA, 25 bp, Homo sapien
aaggtagtgttcaaaatgtcctaca

SEQ ID NO: 2772085 - DNA, 25 bp, Homo sapien
ttgtatctgtaacttaaggtagtgt

SEQ ID NO: 2772086 - DNA, 25 bp, Homo sapien
taccacataacctgggtatgagaaa

SEQ ID NO: 2772087 - DNA, 25 bp, Homo sapien
cacaaaggggcttttgcataccaca

SEQ ID NO: 2772088 - DNA, 25 bp, Homo sapien
gtttttactactccaggtacatcag

SEQ ID NO: 2772089 - DNA, 25 bp, Homo sapien
ctgtttttactactccaggtacatc

SEQ ID NO: 2772090 - DNA, 25 bp, Homo sapien
tgtttttactactccaggtacatca

SEQ ID NO: 2772091 - DNA, 25 bp, Homo sapien
caaagtatttgtataccctggaagc

SEQ ID NO: 2772092 - DNA, 25 bp, Homo sapien
tgagcaatcatataagccgcgaggc

SEQ ID NO: 2772093 - DNA, 25 bp, Homo sapien
gggctcaagccaattccgtcattaa

SEQ ID NO: 2772094 - DNA, 25 bp, Homo sapien
tagaattgactagcaaggcctagat

SEQ ID NO: 2772095 - DNA, 25 bp, Homo sapien
acatattccatcaccatgaaaatat

SEQ ID NO: 2772096 - DNA, 25 bp, Homo sapien
aatatcagatggtgtactgatgacc

SEQ ID NO: 2772097 - DNA, 25 bp, Homo sapien
tatcagatggtgtactgatgacctg

SEQ ID NO: 2772098 - DNA, 25 bp, Homo sapien
atgaaaatatcagatggtgtactga

SEQ ID NO: 2772099 - DNA, 25 bp, Homo sapien
tgcaaaggtccccaagtagaagcct

SEQ ID NO: 2772100 - DNA, 25 bp, Homo sapien
aacaagtttgagtcagccagttcag

SEQ ID NO: 2772101 - DNA, 25 bp, Homo sapien
cacaggaggttacttcaggatttca

SEQ ID NO: 2772102 - DNA, 25 bp, Homo sapien
tatctcaggtggtggaacatgctat

SEQ ID NO: 2772103 - DNA, 25 bp, Homo sapien
cattaccagaagagcatctttccag

SEQ ID NO: 2772104 - DNA, 25 bp, Homo sapien
tgaggctaactgacatcatgtgggc

SEQ ID NO: 2772105 - DNA, 25 bp, Homo sapien
gctgataagcacaagggcaaaacat

SEQ ID NO: 2772106 - DNA, 25 bp, Homo sapien
tactaccgcattctcactagtgagg

SEQ ID NO: 2772107 - DNA, 25 bp, Homo sapien
ccgcacacagcctaggaagaaactt

SEQ ID NO: 2772108 - DNA, 25 bp, Homo sapien
accgcacacagcctaggaagaaact

SEQ ID NO: 2772109 - DNA, 25 bp, Homo sapien
caccgcacacagcctaggaagaaac

SEQ ID NO: 2772110 - DNA, 25 bp, Homo sapien
cgcacacagcctaggaagaaacttt

SEQ ID NO: 2772111 - DNA, 25 bp, Homo sapien
gaaaagatgactggactatatttaa

SEQ ID NO: 2772112 - DNA, 25 bp, Homo sapien
cttgtcacattaagtaggttaacaa

SEQ ID NO: 2772113 - DNA, 25 bp, Homo sapien
aaagatgaaaagatgactggactat

SEQ ID NO: 2772114 - DNA, 25 bp, Homo sapien
tgtcacattaagtaggttaacaaaa

SEQ ID NO: 2772115 - DNA, 25 bp, Homo sapien
catcaaggctccgaatcttctgtcg

SEQ ID NO: 2772116 - DNA, 25 bp, Homo sapien
tcttcacagctactttatgcccagt

SEQ ID NO: 2772117 - DNA, 25 bp, Homo sapien
gatgcctgaaaagcttgaggttctg

SEQ ID NO: 2772118 - DNA, 25 bp, Homo sapien
tatgcccagtcaattcatgtttgcc

SEQ ID NO: 2772119 - DNA, 25 bp, Homo sapien
cccaaatgttcagatgtttaagagt

SEQ ID NO: 2772120 - DNA, 25 bp, Homo sapien
catcctcagaaaatagctaagcaaa

SEQ ID NO: 2772121 - DNA, 25 bp, Homo sapien
gaaagctagaagactaaaggaagag

SEQ ID NO: 2772122 - DNA, 25 bp, Homo sapien
ttataagagtagtcatctagcatcc

SEQ ID NO: 2772123 - DNA, 25 bp, Homo sapien
tagacagtcggtggtgacagaattt

SEQ ID NO: 2772124 - DNA, 25 bp, Homo sapien
tgttatcactagacagtcggtggtg

SEQ ID NO: 2772125 - DNA, 25 bp, Homo sapien
taaatgttatcactagacagtcggt

SEQ ID NO: 2772126 - DNA, 25 bp, Homo sapien
tcactagacagtcggtggtgacaga

SEQ ID NO: 2772127 - DNA, 25 bp, Homo sapien
aatacatagcatagcaaattggcac

SEQ ID NO: 2772128 - DNA, 25 bp, Homo sapien
actgcaatagagtcacccaaagagc

SEQ ID NO: 2772129 - DNA, 25 bp, Homo sapien
tacagatgaacaaaacggacatctc

SEQ ID NO: 2772130 - DNA, 25 bp, Homo sapien
tacctgcagtattagaaatgatgca

SEQ ID NO: 2772131 - DNA, 25 bp, Homo sapien
taagagcagccaacttgactgttaa

SEQ ID NO: 2772132 - DNA, 25 bp, Homo sapien
caagctctggcttggcacagacttt

SEQ ID NO: 2772133 - DNA, 25 bp, Homo sapien
gaaggaaggcaaccctataatcaca

SEQ ID NO: 2772134 - DNA, 25 bp, Homo sapien
gaagcaaagtcacagtaacatatgg

SEQ ID NO: 2772135 - DNA, 25 bp, Homo sapien
aatgaaaaagcgtaagcatcctggg

SEQ ID NO: 2772136 - DNA, 25 bp, Homo sapien
caataggaagcgaaagaggagacct

SEQ ID NO: 2772137 - DNA, 25 bp, Homo sapien
cctgctcaggaaagttcagtatcca

SEQ ID NO: 2772138 - DNA, 25 bp, Homo sapien
ggtaggaatggccttcattggttgc

SEQ ID NO: 2772139 - DNA, 25 bp, Homo sapien
ttgcctccatacataacaggagcag

SEQ ID NO: 2772140 - DNA, 25 bp, Homo sapien
aagacatgattttgagggggccgga

SEQ ID NO: 2772141 - DNA, 25 bp, Homo sapien
tccatacataacaggagcaggacca

SEQ ID NO: 2772142 - DNA, 25 bp, Homo sapien
agaaccggctggcaccaaagacatg

SEQ ID NO: 2772143 - DNA, 25 bp, Homo sapien
ttgctcccagcctatagtgttccag

SEQ ID NO: 2772144 - DNA, 25 bp, Homo sapien
tatttagcaggatagggctttttgc

SEQ ID NO: 2772145 - DNA, 25 bp, Homo sapien
tacatgaagactgggaaccaaacaa

SEQ ID NO: 2772146 - DNA, 25 bp, Homo sapien
gatcatgacttcttaaatggaacac

SEQ ID NO: 2772147 - DNA, 25 bp, Homo sapien
aaaccaggctaaatattctccccag

SEQ ID NO: 2772148 - DNA, 25 bp, Homo sapien
gaatgtagtaaatggactctgtcag

SEQ ID NO: 2772149 - DNA, 25 bp, Homo sapien
ccagtgagtaaactcagttgtagcc

SEQ ID NO: 2772150 - DNA, 25 bp, Homo sapien
gttgtagccaaactaaatgctgttc

SEQ ID NO: 2772151 - DNA, 25 bp, Homo sapien
agaaaaactaacaaagactgccatt

SEQ ID NO: 2772152 - DNA, 25 bp, Homo sapien
aagggcacagaacctaacatcttga

SEQ ID NO: 2772153 - DNA, 25 bp, Homo sapien
tccatgctttttttgggcagaggga

SEQ ID NO: 2772154 - DNA, 25 bp, Homo sapien
aatgatattactctgctcatccatg

SEQ ID NO: 2772155 - DNA, 25 bp, Homo sapien
ttacccaattctggcatttgcttct

SEQ ID NO: 2772156 - DNA, 25 bp, Homo sapien
tggacctgtcctaatagctgttatt

SEQ ID NO: 2772157 - DNA, 25 bp, Homo sapien
gacattgtccgccttgcagattttc

SEQ ID NO: 2772158 - DNA, 25 bp, Homo sapien
taagaaggttcaggcagttgcttcc

SEQ ID NO: 2772159 - DNA, 25 bp, Homo sapien
gggccggtaaatcgacagcctccta

SEQ ID NO: 2772160 - DNA, 25 bp, Homo sapien
gaggacggaaataccgacaacgcca

SEQ ID NO: 2772161 - DNA, 25 bp, Homo sapien
gcggaaacacatttcgcactcggga

SEQ ID NO: 2772162 - DNA, 25 bp, Homo sapien
ccaaggaccgccaaggaagcgatgg

SEQ ID NO: 2772163 - DNA, 25 bp, Homo sapien
acccagaatgtagtggccgatcttc

SEQ ID NO: 2772164 - DNA, 25 bp, Homo sapien
ccagaatgtagtggccgatcttcac

SEQ ID NO: 2772165 - DNA, 25 bp, Homo sapien
agaatgtagtggccgatcttcaccc

SEQ ID NO: 2772166 - DNA, 25 bp, Homo sapien
aatgtagtggccgatcttcacccgc

SEQ ID NO: 2772167 - DNA, 25 bp, Homo sapien
ttctccaggaactgagtctgcgcat

SEQ ID NO: 2772168 - DNA, 25 bp, Homo sapien
tttctccaggaactgagtctgcgca

SEQ ID NO: 2772169 - DNA, 25 bp, Homo sapien
ctttctccaggaactgagtctgcgc

SEQ ID NO: 2772170 - DNA, 25 bp, Homo sapien
gtcgggcgcagacgctccccctggc

SEQ ID NO: 2772171 - DNA, 25 bp, Homo sapien
tacgtcgggcgcagacgctccccct

SEQ ID NO: 2772172 - DNA, 25 bp, Homo sapien
gcagccaccgagccgagtcaccgcc

SEQ ID NO: 2772173 - DNA, 25 bp, Homo sapien
accgagccgagtcaccgccctgcgc

SEQ ID NO: 2772174 - DNA, 25 bp, Homo sapien
tcctggaacgattaggcggaccgtc

SEQ ID NO: 2772175 - DNA, 25 bp, Homo sapien
tgcggtcgcagaagaccatccagag

SEQ ID NO: 2772176 - DNA, 25 bp, Homo sapien
ggaagcccgcttgagtgatgcacat

SEQ ID NO: 2772177 - DNA, 25 bp, Homo sapien
gcttgttacgagagccgcgtgaatt

SEQ ID NO: 2772178 - DNA, 25 bp, Homo sapien
ctctaggagcgctgtcggtgttttc

SEQ ID NO: 2772179 - DNA, 25 bp, Homo sapien
acccgagctcttttttcgcttggag

SEQ ID NO: 2772180 - DNA, 25 bp, Homo sapien
taagttgctagagggcaccacgatg

SEQ ID NO: 2772181 - DNA, 25 bp, Homo sapien
aagcaagctctgttgcgaggagcag

SEQ ID NO: 2772182 - DNA, 25 bp, Homo sapien
gatggttgccgggtctgtgtggata

SEQ ID NO: 2772183 - DNA, 25 bp, Homo sapien
cagcggctcattggggatgggccat

SEQ ID NO: 2772184 - DNA, 25 bp, Homo sapien
ccgggtctgtgtggatagaagtaga

SEQ ID NO: 2772185 - DNA, 25 bp, Homo sapien
tgtgcccagcggctcattggggatg

SEQ ID NO: 2772186 - DNA, 25 bp, Homo sapien
ataagaaacagccgcattaaaaatt

SEQ ID NO: 2772187 - DNA, 25 bp, Homo sapien
ctgaacttccctgataagtccccaa

SEQ ID NO: 2772188 - DNA, 25 bp, Homo sapien
cctcctgaacttccctgataagtcc

SEQ ID NO: 2772189 - DNA, 25 bp, Homo sapien
tcctgaacttccctgataagtcccc

SEQ ID NO: 2772190 - DNA, 25 bp, Homo sapien
ctacaagtatgtgctatgatgcctg

SEQ ID NO: 2772191 - DNA, 25 bp, Homo sapien
gctacaagtatgtgctatgatgcct

SEQ ID NO: 2772192 - DNA, 25 bp, Homo sapien
ctggggctacaagtatgtgctatga

SEQ ID NO: 2772193 - DNA, 25 bp, Homo sapien
ctgtgacgcagggaccatagtttct

SEQ ID NO: 2772194 - DNA, 25 bp, Homo sapien
cggccgctcctcagtcaattctaaa

SEQ ID NO: 2772195 - DNA, 25 bp, Homo sapien
tctgtaggttgcttccctgtgacgc

SEQ ID NO: 2772196 - DNA, 25 bp, Homo sapien
taggacaattgttcactctgaggct

SEQ ID NO: 2772197 - DNA, 25 bp, Homo sapien
cagccctcccatgtaagactggtca

SEQ ID NO: 2772198 - DNA, 25 bp, Homo sapien
gagagagccggcataaaatagcccc

SEQ ID NO: 2772199 - DNA, 25 bp, Homo sapien
tcctgaggaccagatgtgtgacact

SEQ ID NO: 2772200 - DNA, 25 bp, Homo sapien
tgccatgcgatctccctgaaattgt

SEQ ID NO: 2772201 - DNA, 25 bp, Homo sapien
catgaacctccgaacctggcagagt

SEQ ID NO: 2772202 - DNA, 25 bp, Homo sapien
ggactgcacgttttacctattgaaa

SEQ ID NO: 2772203 - DNA, 25 bp, Homo sapien
tctgacgattacataggactgcacg

SEQ ID NO: 2772204 - DNA, 25 bp, Homo sapien
agctgaaatcagaggaatcgtgccc

SEQ ID NO: 2772205 - DNA, 25 bp, Homo sapien
tcttagttcttgaggttatgcagtg

SEQ ID NO: 2772206 - DNA, 25 bp, Homo sapien
tcttgaggttatgcagtgtctttgc

SEQ ID NO: 2772207 - DNA, 25 bp, Homo sapien
gcttctcttgtattatgatccaaac

SEQ ID NO: 2772208 - DNA, 25 bp, Homo sapien
cattcttagttcttgaggttatgca

SEQ ID NO: 2772209 - DNA, 25 bp, Homo sapien
tttctgtagagaactcccggacagc

SEQ ID NO: 2772210 - DNA, 25 bp, Homo sapien
tctgggcctagatagcttttgacac

SEQ ID NO: 2772211 - DNA, 25 bp, Homo sapien
tggtttccaccaatactaagtcaag

SEQ ID NO: 2772212 - DNA, 25 bp, Homo sapien
tgttacctagtttccagcttcaaga

SEQ ID NO: 2772213 - DNA, 25 bp, Homo sapien
tcctctgactggttaccattatgtc

SEQ ID NO: 2772214 - DNA, 25 bp, Homo sapien
tcatagttatgccctcctctgactg

SEQ ID NO: 2772215 - DNA, 25 bp, Homo sapien
gactggttaccattatgtcagctgt

SEQ ID NO: 2772216 - DNA, 25 bp, Homo sapien
tctgactggttaccattatgtcagc

SEQ ID NO: 2772217 - DNA, 25 bp, Homo sapien
cctccctggctcagcttaaatctta

SEQ ID NO: 2772218 - DNA, 25 bp, Homo sapien
ttcacctattgagtgacaaactcct

SEQ ID NO: 2772219 - DNA, 25 bp, Homo sapien
cagcttaaatcttagcctggcttca

SEQ ID NO: 2772220 - DNA, 25 bp, Homo sapien
tgtgtctcaattagaggtgaggcct

SEQ ID NO: 2772221 - DNA, 25 bp, Homo sapien
gaaacaggtagtctgctttgacagc

SEQ ID NO: 2772222 - DNA, 25 bp, Homo sapien
cctgactttgtgaactaagatggga

SEQ ID NO: 2772223 - DNA, 25 bp, Homo sapien
tgcgactataggacgtgagctaccg

SEQ ID NO: 2772224 - DNA, 25 bp, Homo sapien
taacttaaggcaggactgaagtgct

SEQ ID NO: 2772225 - DNA, 25 bp, Homo sapien
gtgggccagggtgatctcgatctct

SEQ ID NO: 2772226 - DNA, 25 bp, Homo sapien
atgtgggccagggtgatctcgatct

SEQ ID NO: 2772227 - DNA, 25 bp, Homo sapien
ccatgtgggccagggtgatctcgat

SEQ ID NO: 2772228 - DNA, 25 bp, Homo sapien
caccatgtgggccagggtgatctcg

SEQ ID NO: 2772229 - DNA, 25 bp, Homo sapien
ggcaatggcaattggactctaacca

SEQ ID NO: 2772230 - DNA, 25 bp, Homo sapien
aaagaattagtcgagtgaatctcca

SEQ ID NO: 2772231 - DNA, 25 bp, Homo sapien
cacaccggcctcaagggttgtttat

SEQ ID NO: 2772232 - DNA, 25 bp, Homo sapien
ggtcagggtaccttcactagactta

SEQ ID NO: 2772233 - DNA, 25 bp, Homo sapien
aagcccaagagagatttaatcagca

SEQ ID NO: 2772234 - DNA, 25 bp, Homo sapien
ccacgaaaactaggaaggcacgaca

SEQ ID NO: 2772235 - DNA, 25 bp, Homo sapien
aaagtgatacccttccaaggccagg

SEQ ID NO: 2772236 - DNA, 25 bp, Homo sapien
tagcacattataaagccattccagg

SEQ ID NO: 2772237 - DNA, 25 bp, Homo sapien
cacccaattaccaagttgagggcta

SEQ ID NO: 2772238 - DNA, 25 bp, Homo sapien
ttttctcaaacctatttacatattc

SEQ ID NO: 2772239 - DNA, 25 bp, Homo sapien
tcacacctagcaggcttttttcact

SEQ ID NO: 2772240 - DNA, 25 bp, Homo sapien
acttagctagccaccttacacacag

SEQ ID NO: 2772241 - DNA, 25 bp, Homo sapien
tttacatattcttaagttgactcac

SEQ ID NO: 2772242 - DNA, 25 bp, Homo sapien
aaaatacccacctatgccacatgag

SEQ ID NO: 2772243 - DNA, 25 bp, Homo sapien
tcaggtgtgccaagtgagcattaca

SEQ ID NO: 2772244 - DNA, 25 bp, Homo sapien
gtggtactcccaagctctatgtgac

SEQ ID NO: 2772245 - DNA, 25 bp, Homo sapien
gtaaatctgatatgaagctagccca

SEQ ID NO: 2772246 - DNA, 25 bp, Homo sapien
gcaacagctgccctcttgggtttag

SEQ ID NO: 2772247 - DNA, 25 bp, Homo sapien
ttaggtgttgttccttcacggaatc

SEQ ID NO: 2772248 - DNA, 25 bp, Homo sapien
aggtgttgttccttcacggaatcca

SEQ ID NO: 2772249 - DNA, 25 bp, Homo sapien
tgttgttccttcacggaatccatgc

SEQ ID NO: 2772250 - DNA, 25 bp, Homo sapien
agactgaggctgcactgagccgtga

SEQ ID NO: 2772251 - DNA, 25 bp, Homo sapien
caagcctgggcaacatagtgaaacc

SEQ ID NO: 2772252 - DNA, 25 bp, Homo sapien
cgtgatcgtgccactacactcaagc

SEQ ID NO: 2772253 - DNA, 25 bp, Homo sapien
ctgaggctggggagactgaggctgc

SEQ ID NO: 2772254 - DNA, 25 bp, Homo sapien
ttatgatcgaacatacaaactgtac

SEQ ID NO: 2772255 - DNA, 25 bp, Homo sapien
ctgaatctgcggtatacaattttta

SEQ ID NO: 2772256 - DNA, 25 bp, Homo sapien
aatctgcggtatacaatttttaggt

SEQ ID NO: 2772257 - DNA, 25 bp, Homo sapien
gaatctgcggtatacaatttttagg

SEQ ID NO: 2772258 - DNA, 25 bp, Homo sapien
tctgcggtatacaatttttaggtgc

SEQ ID NO: 2772259 - DNA, 25 bp, Homo sapien
ctcattcgaccagttccggtggtat

SEQ ID NO: 2772260 - DNA, 25 bp, Homo sapien
cattcgaccagttccggtggtattt

SEQ ID NO: 2772261 - DNA, 25 bp, Homo sapien
cttttagccttggcactccagttat

SEQ ID NO: 2772262 - DNA, 25 bp, Homo sapien
tggtatttcgtcttttagccttggc

SEQ ID NO: 2772263 - DNA, 25 bp, Homo sapien
cagcggcggcacaacgtgtgcgtct

SEQ ID NO: 2772264 - DNA, 25 bp, Homo sapien
ttagagccacagcggcggcacaacg

SEQ ID NO: 2772265 - DNA, 25 bp, Homo sapien
cggcggcacaacgtgtgcgtcttat

SEQ ID NO: 2772266 - DNA, 25 bp, Homo sapien
ccacagcggcggcacaacgtgtgcg

SEQ ID NO: 2772267 - DNA, 25 bp, Homo sapien
gccaccgcatgcctctttccagccc

SEQ ID NO: 2772268 - DNA, 25 bp, Homo sapien
cacaaaggacgaggatggaacgcga

SEQ ID NO: 2772269 - DNA, 25 bp, Homo sapien
cagttccccttatccggaatcttgc

SEQ ID NO: 2772270 - DNA, 25 bp, Homo sapien
cagcccaccagttccccttatccgg

SEQ ID NO: 2772271 - DNA, 25 bp, Homo sapien
tgcggccgagaccagaaagaccgga

SEQ ID NO: 2772272 - DNA, 25 bp, Homo sapien
gcggccgagaccagaaagaccggaa

SEQ ID NO: 2772273 - DNA, 25 bp, Homo sapien
cgcccagggaagcacttcctgcggg

SEQ ID NO: 2772274 - DNA, 25 bp, Homo sapien
tccgctatatcacgctcagaagctt

SEQ ID NO: 2772275 - DNA, 25 bp, Homo sapien
tatatcacgctcagaagcttccgcc

SEQ ID NO: 2772276 - DNA, 25 bp, Homo sapien
aaggcacttccgctatatcacgctc

SEQ ID NO: 2772277 - DNA, 25 bp, Homo sapien
gagtgcagtaccctggatccagtaa

SEQ ID NO: 2772278 - DNA, 25 bp, Homo sapien
gtgccttccccagtcagaagagctg

SEQ ID NO: 2772279 - DNA, 25 bp, Homo sapien
atgcaaaggagagtgcagtaccctg

SEQ ID NO: 2772280 - DNA, 25 bp, Homo sapien
aagtgccttccccagtcagaagagc

SEQ ID NO: 2772281 - DNA, 25 bp, Homo sapien
tcctcttgttccttagtgctttgca

SEQ ID NO: 2772282 - DNA, 25 bp, Homo sapien
ctgtaagtgtgtggaggtttcctcc

SEQ ID NO: 2772283 - DNA, 25 bp, Homo sapien
gctttgcattttatgatcgtgcatc

SEQ ID NO: 2772284 - DNA, 25 bp, Homo sapien
tcacggttcctctttctgtaagtgt

SEQ ID NO: 2772285 - DNA, 25 bp, Homo sapien
ttacagcgcggacattcagagtttg

SEQ ID NO: 2772286 - DNA, 25 bp, Homo sapien
gcagtatcagttacagcgcggacat

SEQ ID NO: 2772287 - DNA, 25 bp, Homo sapien
tcagagtttggcaggacacggatgt

SEQ ID NO: 2772288 - DNA, 25 bp, Homo sapien
tcctttagcagagtaaataaaccca

SEQ ID NO: 2772289 - DNA, 25 bp, Homo sapien
tgattgaagtcatgagccaagaagc

SEQ ID NO: 2772290 - DNA, 25 bp, Homo sapien
ggaagttaaatccattggcaagaga

SEQ ID NO: 2772291 - DNA, 25 bp, Homo sapien
gcaggtcatctaggcaaggaagtta

SEQ ID NO: 2772292 - DNA, 25 bp, Homo sapien
gaagcctaagctgaaacaggaagga

SEQ ID NO: 2772293 - DNA, 25 bp, Homo sapien
aacataggactggaagtttgcccct

SEQ ID NO: 2772294 - DNA, 25 bp, Homo sapien
gaacatcagttcatgcctgaggcat

SEQ ID NO: 2772295 - DNA, 25 bp, Homo sapien
gagttttcagggagtacacaggtag

SEQ ID NO: 2772296 - DNA, 25 bp, Homo sapien
gctggaatacttactcttgtcggga

SEQ ID NO: 2772297 - DNA, 25 bp, Homo sapien
aacattgactgaaaaacgaagcaca

SEQ ID NO: 2772298 - DNA, 25 bp, Homo sapien
cacatgcgatgttggcttgagggtc

SEQ ID NO: 2772299 - DNA, 25 bp, Homo sapien
caaaataatcagctgccctagtcaa

SEQ ID NO: 2772300 - DNA, 25 bp, Homo sapien
gttatacggcagatcaatgatgtcc

SEQ ID NO: 2772301 - DNA, 25 bp, Homo sapien
tgccagacagcagcatagttaaatg

SEQ ID NO: 2772302 - DNA, 25 bp, Homo sapien
gcatagttaaatgagtcgtgtaggg

SEQ ID NO: 2772303 - DNA, 25 bp, Homo sapien
tatgctagtcgtgtcttgccagaca

SEQ ID NO: 2772304 - DNA, 25 bp, Homo sapien
agaccttgcggatattgtatgctag

SEQ ID NO: 2772305 - DNA, 25 bp, Homo sapien
tctaattttagagcctggtgagtgc

SEQ ID NO: 2772306 - DNA, 25 bp, Homo sapien
tgagctcacaggttactagcccttc

SEQ ID NO: 2772307 - DNA, 25 bp, Homo sapien
tctgccaggctcctgatgagctcac

SEQ ID NO: 2772308 - DNA, 25 bp, Homo sapien
ggttggagactaactcaagtaagag

SEQ ID NO: 2772309 - DNA, 25 bp, Homo sapien
gacaactccagttgagcaatttctc

SEQ ID NO: 2772310 - DNA, 25 bp, Homo sapien
ctttcactggaagcctatttgtttc

SEQ ID NO: 2772311 - DNA, 25 bp, Homo sapien
gtaactgggacaactccagttgagc

SEQ ID NO: 2772312 - DNA, 25 bp, Homo sapien
ttctttcactggaagcctatttgtt

SEQ ID NO: 2772313 - DNA, 25 bp, Homo sapien
cagagttcttcaaagcagtgcttag

SEQ ID NO: 2772314 - DNA, 25 bp, Homo sapien
gccactaggcagtccatgaacatta

SEQ ID NO: 2772315 - DNA, 25 bp, Homo sapien
gagtagcaaaataatatgattcaga

SEQ ID NO: 2772316 - DNA, 25 bp, Homo sapien
ccatgaacattacaaaatctccatc

SEQ ID NO: 2772317 - DNA, 25 bp, Homo sapien
tcacatggcagccggagaaagaagt

SEQ ID NO: 2772318 - DNA, 25 bp, Homo sapien
cacatggcagccggagaaagaagtg

SEQ ID NO: 2772319 - DNA, 25 bp, Homo sapien
tcttcacatggcagccggagaaaga

SEQ ID NO: 2772320 - DNA, 25 bp, Homo sapien
cttcacatggcagccggagaaagaa

SEQ ID NO: 2772321 - DNA, 25 bp, Homo sapien
agttctgcatggctgaaaaggcctc

SEQ ID NO: 2772322 - DNA, 25 bp, Homo sapien
atggctgaaaaggcctcaggaaact

SEQ ID NO: 2772323 - DNA, 25 bp, Homo sapien
tctgcatggctgaaaaggcctcagg

SEQ ID NO: 2772324 - DNA, 25 bp, Homo sapien
ctgcatggctgaaaaggcctcagga

SEQ ID NO: 2772325 - DNA, 25 bp, Homo sapien
aagccagcagtttatttcttgatgg

SEQ ID NO: 2772326 - DNA, 25 bp, Homo sapien
agccagcagtttatttcttgatggc

SEQ ID NO: 2772327 - DNA, 25 bp, Homo sapien
gaaaagccagcagtttatttcttga

SEQ ID NO: 2772328 - DNA, 25 bp, Homo sapien
aaagccagcagtttatttcttgatg

SEQ ID NO: 2772329 - DNA, 25 bp, Homo sapien
caggagggtttgcaaagcagcctca

SEQ ID NO: 2772330 - DNA, 25 bp, Homo sapien
ctcaggagggtttgcaaagcagcct

SEQ ID NO: 2772331 - DNA, 25 bp, Homo sapien
ggatcttgacgaagtgcttggagtc

SEQ ID NO: 2772332 - DNA, 25 bp, Homo sapien
tctctggacactaatacacggatct

SEQ ID NO: 2772333 - DNA, 25 bp, Homo sapien
ttggaaaatcgtagtctattggtgt

SEQ ID NO: 2772334 - DNA, 25 bp, Homo sapien
tttaggcaattggaaaatcgtagtc

SEQ ID NO: 2772335 - DNA, 25 bp, Homo sapien
tgtttctgatgcctgcaaagggctg

SEQ ID NO: 2772336 - DNA, 25 bp, Homo sapien
tgtgatcagtaggtttaggcaattg

SEQ ID NO: 2772337 - DNA, 25 bp, Homo sapien
gtcagttgttctctgtctagtaact

SEQ ID NO: 2772338 - DNA, 25 bp, Homo sapien
tctagtaactccacatattggctgg

SEQ ID NO: 2772339 - DNA, 25 bp, Homo sapien
cagttgttctctgtctagtaactcc

SEQ ID NO: 2772340 - DNA, 25 bp, Homo sapien
catattggctggtcaaattgagaac

SEQ ID NO: 2772341 - DNA, 25 bp, Homo sapien
gaagtgtttatgtaagggcagcagc

SEQ ID NO: 2772342 - DNA, 25 bp, Homo sapien
tgaggtgaagaagtgtttatgtaag

SEQ ID NO: 2772343 - DNA, 25 bp, Homo sapien
tgttgagtatgggttatcttatggg

SEQ ID NO: 2772344 - DNA, 25 bp, Homo sapien
gttatcttatgggatgaggtgaaga

SEQ ID NO: 2772345 - DNA, 25 bp, Homo sapien
tgacagctgcactcctgatcacctc

SEQ ID NO: 2772346 - DNA, 25 bp, Homo sapien
ctgtgagtttgacagctgcactcct

SEQ ID NO: 2772347 - DNA, 25 bp, Homo sapien
agtgtgtgtggaggatccacagaat

SEQ ID NO: 2772348 - DNA, 25 bp, Homo sapien
tgtgtgtggaggatccacagaattt

SEQ ID NO: 2772349 - DNA, 25 bp, Homo sapien
cagatatgaattttaggaaccaagg

SEQ ID NO: 2772350 - DNA, 25 bp, Homo sapien
ggcatcctataggtcctcagaacgg

SEQ ID NO: 2772351 - DNA, 25 bp, Homo sapien
tttgtaaaggccagtgagcactcac

SEQ ID NO: 2772352 - DNA, 25 bp, Homo sapien
gcaactggaaagtgaacctttgtga

SEQ ID NO: 2772353 - DNA, 25 bp, Homo sapien
tgtagaaatccctggcccttggtag

SEQ ID NO: 2772354 - DNA, 25 bp, Homo sapien
gacggtctaataccccatagagctc

SEQ ID NO: 2772355 - DNA, 25 bp, Homo sapien
gtttcacacagaattgcctgtagaa

SEQ ID NO: 2772356 - DNA, 25 bp, Homo sapien
tcctgatcaaggagacggtctaata

SEQ ID NO: 2772357 - DNA, 25 bp, Homo sapien
aaagggaatgcagaccatcaagaca

SEQ ID NO: 2772358 - DNA, 25 bp, Homo sapien
aatgcagaccatcaagacatcacgg

SEQ ID NO: 2772359 - DNA, 25 bp, Homo sapien
agaccatcaagacatcacggcaagc

SEQ ID NO: 2772360 - DNA, 25 bp, Homo sapien
gggaatgcagaccatcaagacatca

SEQ ID NO: 2772361 - DNA, 25 bp, Homo sapien
cagctagaccaggcttattggtact

SEQ ID NO: 2772362 - DNA, 25 bp, Homo sapien
gctagaccaggcttattggtacttc

SEQ ID NO: 2772363 - DNA, 25 bp, Homo sapien
agctagaccaggcttattggtactt

SEQ ID NO: 2772364 - DNA, 25 bp, Homo sapien
gcagctagaccaggcttattggtac

SEQ ID NO: 2772365 - DNA, 25 bp, Homo sapien
taagaagatggcagtcaatctcaca

SEQ ID NO: 2772366 - DNA, 25 bp, Homo sapien
gaagatggcagtcaatctcacatca

SEQ ID NO: 2772367 - DNA, 25 bp, Homo sapien
ataagaagatggcagtcaatctcac

SEQ ID NO: 2772368 - DNA, 25 bp, Homo sapien
agatggcagtcaatctcacatcatc

SEQ ID NO: 2772369 - DNA, 25 bp, Homo sapien
gcagcactatttccttgaagtagaa

SEQ ID NO: 2772370 - DNA, 25 bp, Homo sapien
gctttcacagacgacttcagtgcga

SEQ ID NO: 2772371 - DNA, 25 bp, Homo sapien
aagctcacgtctcggtctgtcagca

SEQ ID NO: 2772372 - DNA, 25 bp, Homo sapien
ttgaagtagaagctcacgtctcggt

SEQ ID NO: 2772373 - DNA, 25 bp, Homo sapien
ctagcattaactgcttatgtttctt

SEQ ID NO: 2772374 - DNA, 25 bp, Homo sapien
ccatgcttccaaaggattggttcct

SEQ ID NO: 2772375 - DNA, 25 bp, Homo sapien
tggcgttggagtcccaggcactttg

SEQ ID NO: 2772376 - DNA, 25 bp, Homo sapien
agccccggatgctgtgttgccgagc

SEQ ID NO: 2772377 - DNA, 25 bp, Homo sapien
cagcacatttcgcagattcccatgc

SEQ ID NO: 2772378 - DNA, 25 bp, Homo sapien
taacagatgtctagtctcaatggaa

SEQ ID NO: 2772379 - DNA, 25 bp, Homo sapien
ccggaatttgaagcgtcagtgctac

SEQ ID NO: 2772380 - DNA, 25 bp, Homo sapien
gctttgtttgatccctcacagattt

SEQ ID NO: 2772381 - DNA, 25 bp, Homo sapien
ttggctggaatagtcttcaggccgg

SEQ ID NO: 2772382 - DNA, 25 bp, Homo sapien
gtgtgctctgagggctgttctccct

SEQ ID NO: 2772383 - DNA, 25 bp, Homo sapien
cagtgagtgtgctctgagggctgtt

SEQ ID NO: 2772384 - DNA, 25 bp, Homo sapien
ccagtgagtgtgctctgagggctgt

SEQ ID NO: 2772385 - DNA, 25 bp, Homo sapien
tgctctgagggctgttctcccttgc

SEQ ID NO: 2772386 - DNA, 25 bp, Homo sapien
gatgtccagtatgactccgtgttgc

SEQ ID NO: 2772387 - DNA, 25 bp, Homo sapien
gagatgagagcagctgttccatgat

SEQ ID NO: 2772388 - DNA, 25 bp, Homo sapien
tatccggtagttctccgaggaggag

SEQ ID NO: 2772389 - DNA, 25 bp, Homo sapien
gagaagaaagctgcgccggttatcc

SEQ ID NO: 2772390 - DNA, 25 bp, Homo sapien
tgtttgtcctccttcgactattagt

SEQ ID NO: 2772391 - DNA, 25 bp, Homo sapien
gtttgtcctccttcgactattagtc

SEQ ID NO: 2772392 - DNA, 25 bp, Homo sapien
ctgctgagtagagtccataagttgt

SEQ ID NO: 2772393 - DNA, 25 bp, Homo sapien
cgcctatgtggtgggtactaggact

SEQ ID NO: 2772394 - DNA, 25 bp, Homo sapien
tctctcatggcttgggcttgcaaac

SEQ ID NO: 2772395 - DNA, 25 bp, Homo sapien
tggccagtgaacatacgcctatgtg

SEQ ID NO: 2772396 - DNA, 25 bp, Homo sapien
atcacatgccgcctatggctccagg

SEQ ID NO: 2772397 - DNA, 25 bp, Homo sapien
gacaagtgagcatcttctggcccag

SEQ ID NO: 2772398 - DNA, 25 bp, Homo sapien
agtgtgcagctaaccagcttcagga

SEQ ID NO: 2772399 - DNA, 25 bp, Homo sapien
cagctctggatacaagccggtgaca

SEQ ID NO: 2772400 - DNA, 25 bp, Homo sapien
tgaaattgcctcaaccctggcgatg

SEQ ID NO: 2772401 - DNA, 25 bp, Homo sapien
ctattaaggcttgcaagagtttccc

SEQ ID NO: 2772402 - DNA, 25 bp, Homo sapien
ccactggaggctggcttttcagcca

SEQ ID NO: 2772403 - DNA, 25 bp, Homo sapien
cctggcgatgtcatcttctaactca

SEQ ID NO: 2772404 - DNA, 25 bp, Homo sapien
gatggtagattgtgcctaagatctc

SEQ ID NO: 2772405 - DNA, 25 bp, Homo sapien
caactgtatccatgtgaaagctggc

SEQ ID NO: 2772406 - DNA, 25 bp, Homo sapien
tctttttgtctgaggactggcatgt

SEQ ID NO: 2772407 - DNA, 25 bp, Homo sapien
tggcttctagaatgaactgaaaact

SEQ ID NO: 2772408 - DNA, 25 bp, Homo sapien
catttcctctaggaacatcagaatt

SEQ ID NO: 2772409 - DNA, 25 bp, Homo sapien
tttcctctaggaacatcagaatttc

SEQ ID NO: 2772410 - DNA, 25 bp, Homo sapien
ttcctctaggaacatcagaatttct

SEQ ID NO: 2772411 - DNA, 25 bp, Homo sapien
tctccagaccgtccagcatttcctc

SEQ ID NO: 2772412 - DNA, 25 bp, Homo sapien
tcttgatctgaacctgcacgtcatc

SEQ ID NO: 2772413 - DNA, 25 bp, Homo sapien
gaacctgcacgtcatcactttccag

SEQ ID NO: 2772414 - DNA, 25 bp, Homo sapien
cttagctattttagaagaaatcttg

SEQ ID NO: 2772415 - DNA, 25 bp, Homo sapien
aagaaatcttgatctgaacctgcac

SEQ ID NO: 2772416 - DNA, 25 bp, Homo sapien
aaccctgcagtctttccacttccaa

SEQ ID NO: 2772417 - DNA, 25 bp, Homo sapien
tgcagtctttccacttccaagtgaa

SEQ ID NO: 2772418 - DNA, 25 bp, Homo sapien
cctgcagtctttccacttccaagtg

SEQ ID NO: 2772419 - DNA, 25 bp, Homo sapien
tgcaaaccctgcagtctttccactt

SEQ ID NO: 2772420 - DNA, 25 bp, Homo sapien
gtgtctagtaggtgttttagtaata

SEQ ID NO: 2772421 - DNA, 25 bp, Homo sapien
gcgaaaatgtcgatgtaaattataa

SEQ ID NO: 2772422 - DNA, 25 bp, Homo sapien
tgtttcttccatcggcgaaaatgtc

SEQ ID NO: 2772423 - DNA, 25 bp, Homo sapien
tctccaccaagcttgtttcttccat

SEQ ID NO: 2772424 - DNA, 25 bp, Homo sapien
gcagccgcctgacggatggtgggca

SEQ ID NO: 2772425 - DNA, 25 bp, Homo sapien
tatatagaacagaccaatagttgag

SEQ ID NO: 2772426 - DNA, 25 bp, Homo sapien
ccaagcagtgaaccaattttaaagt

SEQ ID NO: 2772427 - DNA, 25 bp, Homo sapien
gccagaagtccaagcagtgaaccaa

SEQ ID NO: 2772428 - DNA, 25 bp, Homo sapien
cagcactttcgcagtgatctggaag

SEQ ID NO: 2772429 - DNA, 25 bp, Homo sapien
gcgtccatggatcgttcatagagaa

SEQ ID NO: 2772430 - DNA, 25 bp, Homo sapien
tgcattcacattatcccacatcatg

SEQ ID NO: 2772431 - DNA, 25 bp, Homo sapien
ttttcctagggcgtccatggatcgt

SEQ ID NO: 2772432 - DNA, 25 bp, Homo sapien
tctgcattcacattatcccacatca

SEQ ID NO: 2772433 - DNA, 25 bp, Homo sapien
ggtggtcttgtagtgagagctgagg

SEQ ID NO: 2772434 - DNA, 25 bp, Homo sapien
gggcagcagcctccgaatattctcc

SEQ ID NO: 2772435 - DNA, 25 bp, Homo sapien
tcctcaagaatgttaaggtggtctt

SEQ ID NO: 2772436 - DNA, 25 bp, Homo sapien
gcagcctccgaatattctcctcaag

SEQ ID NO: 2772437 - DNA, 25 bp, Homo sapien
aatagggctagctaaggaatccagg

SEQ ID NO: 2772438 - DNA, 25 bp, Homo sapien
taatggcgattaaggctttccaccg

SEQ ID NO: 2772439 - DNA, 25 bp, Homo sapien
taaggctttccaccgaatagggcta

SEQ ID NO: 2772440 - DNA, 25 bp, Homo sapien
tccaggggctcgtctctaatgaagt

SEQ ID NO: 2772441 - DNA, 25 bp, Homo sapien
ggaaaactggaacccctgatcctca

SEQ ID NO: 2772442 - DNA, 25 bp, Homo sapien
aactggaacccctgatcctcagcat

SEQ ID NO: 2772443 - DNA, 25 bp, Homo sapien
atcttggacagcaatgccaatctca

SEQ ID NO: 2772444 - DNA, 25 bp, Homo sapien
agcatcttggacagcaatgccaatc

SEQ ID NO: 2772445 - DNA, 25 bp, Homo sapien
ttgttcatcacagacatgcccagaa

SEQ ID NO: 2772446 - DNA, 25 bp, Homo sapien
tgttcatcacagacatgcccagaac

SEQ ID NO: 2772447 - DNA, 25 bp, Homo sapien
ttggtcaggctctttttcccagaaa

SEQ ID NO: 2772448 - DNA, 25 bp, Homo sapien
tggagagaagttgcttcttgggagc

SEQ ID NO: 2772449 - DNA, 25 bp, Homo sapien
aagagacaggacttgggatatgata

SEQ ID NO: 2772450 - DNA, 25 bp, Homo sapien
tatcttgattaagtctggagagaag

SEQ ID NO: 2772451 - DNA, 25 bp, Homo sapien
ccaaatggttctcggcacagtatcc

SEQ ID NO: 2772452 - DNA, 25 bp, Homo sapien
caatatccaaatggttctcggcaca

SEQ ID NO: 2772453 - DNA, 25 bp, Homo sapien
aatggttctcggcacagtatcctaa

SEQ ID NO: 2772454 - DNA, 25 bp, Homo sapien
tacatcgattcatgaaaaacttttc

SEQ ID NO: 2772455 - DNA, 25 bp, Homo sapien
gatcccccagttggttgggagcagt

SEQ ID NO: 2772456 - DNA, 25 bp, Homo sapien
tctttgatcccccagttggttggga

SEQ ID NO: 2772457 - DNA, 25 bp, Homo sapien
cccccagttggttgggagcagtcag

SEQ ID NO: 2772458 - DNA, 25 bp, Homo sapien
tgtctttgatcccccagttggttgg

SEQ ID NO: 2772459 - DNA, 25 bp, Homo sapien
tttacaaagtctgaatcttggcagc

SEQ ID NO: 2772460 - DNA, 25 bp, Homo sapien
agtctgaatcttggcagcatgctaa

SEQ ID NO: 2772461 - DNA, 25 bp, Homo sapien
ctgtgagtttacaaagtctgaatct

SEQ ID NO: 2772462 - DNA, 25 bp, Homo sapien
caaagtctgaatcttggcagcatgc

SEQ ID NO: 2772463 - DNA, 25 bp, Homo sapien
ctgtttgaaatcctgagtcagctga

SEQ ID NO: 2772464 - DNA, 25 bp, Homo sapien
gagtcagctgaatggtccaggccac

SEQ ID NO: 2772465 - DNA, 25 bp, Homo sapien
tattgctgtaactgcccatttgctg

SEQ ID NO: 2772466 - DNA, 25 bp, Homo sapien
catcactgatcttccataaggattc

SEQ ID NO: 2772467 - DNA, 25 bp, Homo sapien
agcatggtttcccatagaacggtac

SEQ ID NO: 2772468 - DNA, 25 bp, Homo sapien
catagaacggtactgatgttctttc

SEQ ID NO: 2772469 - DNA, 25 bp, Homo sapien
catggtttcccatagaacggtactg

SEQ ID NO: 2772470 - DNA, 25 bp, Homo sapien
gtttcccatagaacggtactgatgt

SEQ ID NO: 2772471 - DNA, 25 bp, Homo sapien
tcttcaaaagccctattgcaccagc

SEQ ID NO: 2772472 - DNA, 25 bp, Homo sapien
acgtgttttccataggtctaccaat

SEQ ID NO: 2772473 - DNA, 25 bp, Homo sapien
tctaccaattttgggtgaattatct

SEQ ID NO: 2772474 - DNA, 25 bp, Homo sapien
cagaagctcaggtaaacgtgttttc

SEQ ID NO: 2772475 - DNA, 25 bp, Homo sapien
agaagtctggccagtagctgctgtg

SEQ ID NO: 2772476 - DNA, 25 bp, Homo sapien
tctggccagtagctgctgtggtgaa

SEQ ID NO: 2772477 - DNA, 25 bp, Homo sapien
aagtctggccagtagctgctgtggt

SEQ ID NO: 2772478 - DNA, 25 bp, Homo sapien
cagaagtctggccagtagctgctgt

SEQ ID NO: 2772479 - DNA, 25 bp, Homo sapien
tgcaggggttagagattggggttgg

SEQ ID NO: 2772480 - DNA, 25 bp, Homo sapien
aatggatccctcataatagaaaagc

SEQ ID NO: 2772481 - DNA, 25 bp, Homo sapien
aaatggatccctcataatagaaaag

SEQ ID NO: 2772482 - DNA, 25 bp, Homo sapien
gaaatggatccctcataatagaaaa

SEQ ID NO: 2772483 - DNA, 25 bp, Homo sapien
aagtgctgtcgactccttggcactg

SEQ ID NO: 2772484 - DNA, 25 bp, Homo sapien
cagctcctgtagagacgacaagtgc

SEQ ID NO: 2772485 - DNA, 25 bp, Homo sapien
cacaaaagtcaggatccttggccat

SEQ ID NO: 2772486 - DNA, 25 bp, Homo sapien
gatgatactaaacaggggctccaga

SEQ ID NO: 2772487 - DNA, 25 bp, Homo sapien
acctcaaggcttgtttctcggacag

SEQ ID NO: 2772488 - DNA, 25 bp, Homo sapien
cattctcatgaaagttagttttcac

SEQ ID NO: 2772489 - DNA, 25 bp, Homo sapien
gaggcattccaatgaccagtgggtc

SEQ ID NO: 2772490 - DNA, 25 bp, Homo sapien
gcttgtttctcggacagattcctct

SEQ ID NO: 2772491 - DNA, 25 bp, Homo sapien
gatctgagtgtttgtgttttcccaa

SEQ ID NO: 2772492 - DNA, 25 bp, Homo sapien
ctgagtgtttgtgttttcccaaaat

SEQ ID NO: 2772493 - DNA, 25 bp, Homo sapien
tgtttgtgttttcccaaaattcata

SEQ ID NO: 2772494 - DNA, 25 bp, Homo sapien
tgtgatctgagtgtttgtgttttcc

SEQ ID NO: 2772495 - DNA, 25 bp, Homo sapien
gaagacataatcaatcaatggccat

SEQ ID NO: 2772496 - DNA, 25 bp, Homo sapien
gacataatcaatcaatggccatcct

SEQ ID NO: 2772497 - DNA, 25 bp, Homo sapien
atggccatccttcccgagcttcaat

SEQ ID NO: 2772498 - DNA, 25 bp, Homo sapien
gagcttcaatataggacttttcaca

SEQ ID NO: 2772499 - DNA, 25 bp, Homo sapien
tgagatcacccatgacgattttgac

SEQ ID NO: 2772500 - DNA, 25 bp, Homo sapien
cgattttgactgttctttctattga

SEQ ID NO: 2772501 - DNA, 25 bp, Homo sapien
ttttgtactgagatcacccatgacg

SEQ ID NO: 2772502 - DNA, 25 bp, Homo sapien
cacccatgacgattttgactgttct

SEQ ID NO: 2772503 - DNA, 25 bp, Homo sapien
ccactcgaatggcttcattattact

SEQ ID NO: 2772504 - DNA, 25 bp, Homo sapien
cttaacaaagtcaagattcccactc

SEQ ID NO: 2772505 - DNA, 25 bp, Homo sapien
gattcccactcgaatggcttcatta

SEQ ID NO: 2772506 - DNA, 25 bp, Homo sapien
aaagtcaagattcccactcgaatgg

SEQ ID NO: 2772507 - DNA, 25 bp, Homo sapien
atttttattaaaagccttctggatg

SEQ ID NO: 2772508 - DNA, 25 bp, Homo sapien
aaagccttctggatgctggtcctac

SEQ ID NO: 2772509 - DNA, 25 bp, Homo sapien
gtcatcatcatcacttggggacatt

SEQ ID NO: 2772510 - DNA, 25 bp, Homo sapien
catcatcatcacttggggacatttt

SEQ ID NO: 2772511 - DNA, 25 bp, Homo sapien
ttttcctttactggaggctctggag

SEQ ID NO: 2772512 - DNA, 25 bp, Homo sapien
gaatgagaaaacagcttgaagcttt

SEQ ID NO: 2772513 - DNA, 25 bp, Homo sapien
tcattttcctttactggaggctctg

SEQ ID NO: 2772514 - DNA, 25 bp, Homo sapien
tagaatgagaaaacagcttgaagct

SEQ ID NO: 2772515 - DNA, 25 bp, Homo sapien
ctgctggagtaaattgataaagatg

SEQ ID NO: 2772516 - DNA, 25 bp, Homo sapien
agtaaattgataaagatggatcttc

SEQ ID NO: 2772517 - DNA, 25 bp, Homo sapien
gctggagtaaattgataaagatgga

SEQ ID NO: 2772518 - DNA, 25 bp, Homo sapien
ggagtaaattgataaagatggatct

SEQ ID NO: 2772519 - DNA, 25 bp, Homo sapien
cacggaagtcttcccgatgcagcag

SEQ ID NO: 2772520 - DNA, 25 bp, Homo sapien
tgtctttatactggttcaggagcca

SEQ ID NO: 2772521 - DNA, 25 bp, Homo sapien
ctctttgtctttatactggttcagg

SEQ ID NO: 2772522 - DNA, 25 bp, Homo sapien
ctggcccagggcgtatccacggaag

SEQ ID NO: 2772523 - DNA, 25 bp, Homo sapien
atgaagatcttgtcagacagtcggt

SEQ ID NO: 2772524 - DNA, 25 bp, Homo sapien
tcttgtcagacagtcggttggcatc

SEQ ID NO: 2772525 - DNA, 25 bp, Homo sapien
gatcttgtcagacagtcggttggca

SEQ ID NO: 2772526 - DNA, 25 bp, Homo sapien
ttggcatccagtctggggtagggaa

SEQ ID NO: 2772527 - DNA, 25 bp, Homo sapien
ctgcatttaaaacacacaaccacag

SEQ ID NO: 2772528 - DNA, 25 bp, Homo sapien
tgcatttaaaacacacaaccacaga

SEQ ID NO: 2772529 - DNA, 25 bp, Homo sapien
agcctgagcatggtttgcatggtga

SEQ ID NO: 2772530 - DNA, 25 bp, Homo sapien
cctcggccagcctgagcatggtttg

SEQ ID NO: 2772531 - DNA, 25 bp, Homo sapien
ggccagcctgagcatggtttgcatg

SEQ ID NO: 2772532 - DNA, 25 bp, Homo sapien
ctgagcatggtttgcatggtgagca

SEQ ID NO: 2772533 - DNA, 25 bp, Homo sapien
tgggcagcagaatcatccatgctca

SEQ ID NO: 2772534 - DNA, 25 bp, Homo sapien
agtctggactagtggctgggcagca

SEQ ID NO: 2772535 - DNA, 25 bp, Homo sapien
agtggccaaattcagagcagtctgg

SEQ ID NO: 2772536 - DNA, 25 bp, Homo sapien
tctgcaaatgcaaagctggatgaag

SEQ ID NO: 2772537 - DNA, 25 bp, Homo sapien
tctaccgtttgctcccatttagctt

SEQ ID NO: 2772538 - DNA, 25 bp, Homo sapien
ggcagagatgctatctcttctaccg

SEQ ID NO: 2772539 - DNA, 25 bp, Homo sapien
cttctaccgtttgctcccatttagc

SEQ ID NO: 2772540 - DNA, 25 bp, Homo sapien
gatgctatctcttctaccgtttgct

SEQ ID NO: 2772541 - DNA, 25 bp, Homo sapien
gctggttgccaattcagccagggca

SEQ ID NO: 2772542 - DNA, 25 bp, Homo sapien
gaaatcatgtgcagcaagagacacc

SEQ ID NO: 2772543 - DNA, 25 bp, Homo sapien
gggcaagcacaacgaattcatctgg

SEQ ID NO: 2772544 - DNA, 25 bp, Homo sapien
gagacaccaaaacctcaccagctag

SEQ ID NO: 2772545 - DNA, 25 bp, Homo sapien
caattgcatcatccaagatgtcagt

SEQ ID NO: 2772546 - DNA, 25 bp, Homo sapien
caatcgttggacaattgcatcatcc

SEQ ID NO: 2772547 - DNA, 25 bp, Homo sapien
aataaatcaatcgttggacaattgc

SEQ ID NO: 2772548 - DNA, 25 bp, Homo sapien
gaagcataataaatcaatcgttgga

SEQ ID NO: 2772549 - DNA, 25 bp, Homo sapien
cagaagtgagatgactgtaaatgtc

SEQ ID NO: 2772550 - DNA, 25 bp, Homo sapien
taacagaagtgagatgactgtaaat

SEQ ID NO: 2772551 - DNA, 25 bp, Homo sapien
gaataacagaagtgagatgactgta

SEQ ID NO: 2772552 - DNA, 25 bp, Homo sapien
aagtgagatgactgtaaatgtcttc

SEQ ID NO: 2772553 - DNA, 25 bp, Homo sapien
tgttcagcatgccaagagtgaggtt

SEQ ID NO: 2772554 - DNA, 25 bp, Homo sapien
gccaagagtgaggttaatatcccca

SEQ ID NO: 2772555 - DNA, 25 bp, Homo sapien
cttgttcagcatgccaagagtgagg

SEQ ID NO: 2772556 - DNA, 25 bp, Homo sapien
cagcatgccaagagtgaggttaata

SEQ ID NO: 2772557 - DNA, 25 bp, Homo sapien
atggattcctctgtactaagtgtca

SEQ ID NO: 2772558 - DNA, 25 bp, Homo sapien
tggattcctctgtactaagtgtcat

SEQ ID NO: 2772559 - DNA, 25 bp, Homo sapien
ggtctctaaaagatagcacctaagt

SEQ ID NO: 2772560 - DNA, 25 bp, Homo sapien
caaagaggcaggttggcaagtttct

SEQ ID NO: 2772561 - DNA, 25 bp, Homo sapien
catataaggttcacataagcctctc

SEQ ID NO: 2772562 - DNA, 25 bp, Homo sapien
gaactcctgctaaccaacaaaatgg

SEQ ID NO: 2772563 - DNA, 25 bp, Homo sapien
tttggtgaccagagtatttgggaaa

SEQ ID NO: 2772564 - DNA, 25 bp, Homo sapien
tgctttactgtcctgatgttgggaa

SEQ ID NO: 2772565 - DNA, 25 bp, Homo sapien
tatggtgaactcgttgattgttaca

SEQ ID NO: 2772566 - DNA, 25 bp, Homo sapien
gtgctcctctccctaaacttgagtc

SEQ ID NO: 2772567 - DNA, 25 bp, Homo sapien
cattttccgcttcccaagtcagcat

SEQ ID NO: 2772568 - DNA, 25 bp, Homo sapien
gagatcctcaacattttccgcttcc

SEQ ID NO: 2772569 - DNA, 25 bp, Homo sapien
agatcctcaacattttccgcttccc

SEQ ID NO: 2772570 - DNA, 25 bp, Homo sapien
caacattttccgcttcccaagtcag

SEQ ID NO: 2772571 - DNA, 25 bp, Homo sapien
aggactgaatgcacagcagccattg

SEQ ID NO: 2772572 - DNA, 25 bp, Homo sapien
ctctctaaggactgaatgcacagca

SEQ ID NO: 2772573 - DNA, 25 bp, Homo sapien
ctttccccatataaacccagtatga

SEQ ID NO: 2772574 - DNA, 25 bp, Homo sapien
ggacaggaggttagagaactctcta

SEQ ID NO: 2772575 - DNA, 25 bp, Homo sapien
tggtggcttggcgtcatgataattg

SEQ ID NO: 2772576 - DNA, 25 bp, Homo sapien
ggcgtcatgataattggggccttct

SEQ ID NO: 2772577 - DNA, 25 bp, Homo sapien
ctggtggcttggcgtcatgataatt

SEQ ID NO: 2772578 - DNA, 25 bp, Homo sapien
gtcatgataattggggccttctgct

SEQ ID NO: 2772579 - DNA, 25 bp, Homo sapien
ccagcaggtgctcattgtgtgttag

SEQ ID NO: 2772580 - DNA, 25 bp, Homo sapien
caggtgctcattgtgtgttagaaca

SEQ ID NO: 2772581 - DNA, 25 bp, Homo sapien
gttagaacatggaattcttggttgt

SEQ ID NO: 2772582 - DNA, 25 bp, Homo sapien
gcaggtgctcattgtgtgttagaac

SEQ ID NO: 2772583 - DNA, 25 bp, Homo sapien
ttaagtcatgtgattttgctgaaca

SEQ ID NO: 2772584 - DNA, 25 bp, Homo sapien
gagaattgagtgaacatcatcctgg

SEQ ID NO: 2772585 - DNA, 25 bp, Homo sapien
agaggcaacagtgcggaaagaggca

SEQ ID NO: 2772586 - DNA, 25 bp, Homo sapien
gagcaagacgcttgtgtgggcttaa

SEQ ID NO: 2772587 - DNA, 25 bp, Homo sapien
ggcagagatgagaattgagtgaaca

SEQ ID NO: 2772588 - DNA, 25 bp, Homo sapien
ggagatgtgaatccatatagctcaa

SEQ ID NO: 2772589 - DNA, 25 bp, Homo sapien
gaacatgtgtggagatgtgaatcca

SEQ ID NO: 2772590 - DNA, 25 bp, Homo sapien
aatccatatagctcaaagggtggac

SEQ ID NO: 2772591 - DNA, 25 bp, Homo sapien
gatgtgaatccatatagctcaaagg

SEQ ID NO: 2772592 - DNA, 25 bp, Homo sapien
cagcagaccgtgacagcccgctacc

SEQ ID NO: 2772593 - DNA, 25 bp, Homo sapien
agcagaccgtgacagcccgctacct

SEQ ID NO: 2772594 - DNA, 25 bp, Homo sapien
acagcagaccgtgacagcccgctac

SEQ ID NO: 2772595 - DNA, 25 bp, Homo sapien
agcctctagatttgctgacactccc

SEQ ID NO: 2772596 - DNA, 25 bp, Homo sapien
gcttggattctcagcctctagattt

SEQ ID NO: 2772597 - DNA, 25 bp, Homo sapien
tctcagcctctagatttgctgacac

SEQ ID NO: 2772598 - DNA, 25 bp, Homo sapien
tggattctcagcctctagatttgct

SEQ ID NO: 2772599 - DNA, 25 bp, Homo sapien
cccatctcataggattttagccagg

SEQ ID NO: 2772600 - DNA, 25 bp, Homo sapien
tatccatatccctgtgtgcccttga

SEQ ID NO: 2772601 - DNA, 25 bp, Homo sapien
gctttggtgagaccctcttgtcctc

SEQ ID NO: 2772602 - DNA, 25 bp, Homo sapien
gaatacttaatgctgtgcctgctac

SEQ ID NO: 2772603 - DNA, 25 bp, Homo sapien
tgccctttgaccacagttgactggt

SEQ ID NO: 2772604 - DNA, 25 bp, Homo sapien
ctgaacttgccctttgaccacagtt

SEQ ID NO: 2772605 - DNA, 25 bp, Homo sapien
tgaacttgccctttgaccacagttg

SEQ ID NO: 2772606 - DNA, 25 bp, Homo sapien
acttgccctttgaccacagttgact

SEQ ID NO: 2772607 - DNA, 25 bp, Homo sapien
tgggactcacccttccgtgttgtat

SEQ ID NO: 2772608 - DNA, 25 bp, Homo sapien
tctccaaaacaattatcaccatcaa

SEQ ID NO: 2772609 - DNA, 25 bp, Homo sapien
ttccttgcataagatgataattaag

SEQ ID NO: 2772610 - DNA, 25 bp, Homo sapien
tgataattaaggatgggactcaccc

SEQ ID NO: 2772611 - DNA, 25 bp, Homo sapien
tttttgtgtgtctacccctgaatga

SEQ ID NO: 2772612 - DNA, 25 bp, Homo sapien
gtgtctacccctgaatgaatgtatg

SEQ ID NO: 2772613 - DNA, 25 bp, Homo sapien
gtgtgtctacccctgaatgaatgta

SEQ ID NO: 2772614 - DNA, 25 bp, Homo sapien
tttgtgtgtctacccctgaatgaat

SEQ ID NO: 2772615 - DNA, 25 bp, Homo sapien
tcaggactttggtcagtacttgaca

SEQ ID NO: 2772616 - DNA, 25 bp, Homo sapien
tgtatacacactcagaaattatttg

SEQ ID NO: 2772617 - DNA, 25 bp, Homo sapien
tgaaagctgggcttcaagaatgtgt

SEQ ID NO: 2772618 - DNA, 25 bp, Homo sapien
tgttttattatctgccgagttctca

SEQ ID NO: 2772619 - DNA, 25 bp, Homo sapien
cgagaatgcttaatgtcacaggcta

SEQ ID NO: 2772620 - DNA, 25 bp, Homo sapien
tgctacagggcgtcatgagctggaa

SEQ ID NO: 2772621 - DNA, 25 bp, Homo sapien
gagctggaactgaataagacatgcc

SEQ ID NO: 2772622 - DNA, 25 bp, Homo sapien
tacataagggcctcagaagtcacat

SEQ ID NO: 2772623 - DNA, 25 bp, Homo sapien
cactttccaggatgcagtatttcca

SEQ ID NO: 2772624 - DNA, 25 bp, Homo sapien
cctgtttgcacatcttatagttccc

SEQ ID NO: 2772625 - DNA, 25 bp, Homo sapien
cacttgttgatgatcccattttgac

SEQ ID NO: 2772626 - DNA, 25 bp, Homo sapien
gatgttcaatgttttctcacttgtt

SEQ ID NO: 2772627 - DNA, 25 bp, Homo sapien
ccgttcctgtcggttggtggtagat

SEQ ID NO: 2772628 - DNA, 25 bp, Homo sapien
tggatgttggctgaaaaaatttccc

SEQ ID NO: 2772629 - DNA, 25 bp, Homo sapien
aaccatcatcatggctgctaaatgg

SEQ ID NO: 2772630 - DNA, 25 bp, Homo sapien
tcctgtcggttggtggtagatattt

SEQ ID NO: 2772631 - DNA, 25 bp, Homo sapien
ttgtcctttcaagaccccattctaa

SEQ ID NO: 2772632 - DNA, 25 bp, Homo sapien
catttttcccagtcatagcaggtgt

SEQ ID NO: 2772633 - DNA, 25 bp, Homo sapien
tttttcccagtcatagcaggtgtca

SEQ ID NO: 2772634 - DNA, 25 bp, Homo sapien
aagtcttgtcctttcaagaccccat

SEQ ID NO: 2772635 - DNA, 25 bp, Homo sapien
taaacatttctcagccaaaaactta

SEQ ID NO: 2772636 - DNA, 25 bp, Homo sapien
tggcaggaaccaatatgtagaaaat

SEQ ID NO: 2772637 - DNA, 25 bp, Homo sapien
cttggcaggaaccaatatgtagaaa

SEQ ID NO: 2772638 - DNA, 25 bp, Homo sapien
gcaggaaccaatatgtagaaaatgg

SEQ ID NO: 2772639 - DNA, 25 bp, Homo sapien
tggagtctgtgtcaaacacacagag

SEQ ID NO: 2772640 - DNA, 25 bp, Homo sapien
agcgggtgaagtaaagtaatcgttg

SEQ ID NO: 2772641 - DNA, 25 bp, Homo sapien
taaagtaatcgttggagtctgtgtc

SEQ ID NO: 2772642 - DNA, 25 bp, Homo sapien
gtgaagtaaagtaatcgttggagtc

SEQ ID NO: 2772643 - DNA, 25 bp, Homo sapien
attcagatcctgattgtttctgtcc

SEQ ID NO: 2772644 - DNA, 25 bp, Homo sapien
cattcagatcctgattgtttctgtc

SEQ ID NO: 2772645 - DNA, 25 bp, Homo sapien
caatgatcttatgcaaggaatctgc

SEQ ID NO: 2772646 - DNA, 25 bp, Homo sapien
caagaggatcctctgaagggctaag

SEQ ID NO: 2772647 - DNA, 25 bp, Homo sapien
aattcagctttcaagtggcacacag

SEQ ID NO: 2772648 - DNA, 25 bp, Homo sapien
tcccagcacaggagcaacaaatact

SEQ ID NO: 2772649 - DNA, 25 bp, Homo sapien
aatctctgaaatggtgtaattgtca

SEQ ID NO: 2772650 - DNA, 25 bp, Homo sapien
ttttcacaggtgagagagtttgaaa

SEQ ID NO: 2772651 - DNA, 25 bp, Homo sapien
gatggcccagcaacaacaaagcctt

SEQ ID NO: 2772652 - DNA, 25 bp, Homo sapien
gctcaatggattcaccaattctata

SEQ ID NO: 2772653 - DNA, 25 bp, Homo sapien
ccaggtcccgtctggtaagcatctg

SEQ ID NO: 2772654 - DNA, 25 bp, Homo sapien
tctccaaccaagtatagttgctttt

SEQ ID NO: 2772655 - DNA, 25 bp, Homo sapien
tactggtatccaacagtttcaaagc

SEQ ID NO: 2772656 - DNA, 25 bp, Homo sapien
taagcatctgaagtactggtatcca

SEQ ID NO: 2772657 - DNA, 25 bp, Homo sapien
caaaagtgaggtttaggatgctgac

SEQ ID NO: 2772658 - DNA, 25 bp, Homo sapien
aaccaaaagtgaggtttaggatgct

SEQ ID NO: 2772659 - DNA, 25 bp, Homo sapien
ccaaaagtgaggtttaggatgctga

SEQ ID NO: 2772660 - DNA, 25 bp, Homo sapien
caaaccaaaagtgaggtttaggatg

SEQ ID NO: 2772661 - DNA, 25 bp, Homo sapien
tgaggacacccggaatctgcttcta

SEQ ID NO: 2772662 - DNA, 25 bp, Homo sapien
tgcttctatctcaggaagatcgacc

SEQ ID NO: 2772663 - DNA, 25 bp, Homo sapien
caggaagatcgacctctttcatttc

SEQ ID NO: 2772664 - DNA, 25 bp, Homo sapien
gtcatcattgatacatggttgtcca

SEQ ID NO: 2772665 - DNA, 25 bp, Homo sapien
agtcttcctcttgtcgcttctcccc

SEQ ID NO: 2772666 - DNA, 25 bp, Homo sapien
gattgaaaatgtgcagtcttcctct

SEQ ID NO: 2772667 - DNA, 25 bp, Homo sapien
ttgttttccatgattgaaaatgtgc

SEQ ID NO: 2772668 - DNA, 25 bp, Homo sapien
ccatgattgaaaatgtgcagtcttc

SEQ ID NO: 2772669 - DNA, 25 bp, Homo sapien
gtagcatcacaggtactccaggaag

SEQ ID NO: 2772670 - DNA, 25 bp, Homo sapien
cgggttctcgatctcttataagtag

SEQ ID NO: 2772671 - DNA, 25 bp, Homo sapien
gatctcttataagtagcatcacagg

SEQ ID NO: 2772672 - DNA, 25 bp, Homo sapien
gggcaggattattgcattctcgggt

SEQ ID NO: 2772673 - DNA, 25 bp, Homo sapien
catattccttagatagatactggtg

SEQ ID NO: 2772674 - DNA, 25 bp, Homo sapien
gcatagggaagctgggtaactttcc

SEQ ID NO: 2772675 - DNA, 25 bp, Homo sapien
cccatggatcatggtgcagctgaat

SEQ ID NO: 2772676 - DNA, 25 bp, Homo sapien
gacacattgcctgatttccttttag

SEQ ID NO: 2772677 - DNA, 25 bp, Homo sapien
ctcacaatagattcctgatacttac

SEQ ID NO: 2772678 - DNA, 25 bp, Homo sapien
acctcacaatagattcctgatactt

SEQ ID NO: 2772679 - DNA, 25 bp, Homo sapien
ctacctcacaatagattcctgatac

SEQ ID NO: 2772680 - DNA, 25 bp, Homo sapien
tacctcacaatagattcctgatact

SEQ ID NO: 2772681 - DNA, 25 bp, Homo sapien
cattattagggcatggagcacactg

SEQ ID NO: 2772682 - DNA, 25 bp, Homo sapien
gcaaagctttcctgaggttgttccg

SEQ ID NO: 2772683 - DNA, 25 bp, Homo sapien
tgtttcttaccaagtccacgatggg

SEQ ID NO: 2772684 - DNA, 25 bp, Homo sapien
cacactggcaaggatcgaacttggc

SEQ ID NO: 2772685 - DNA, 25 bp, Homo sapien
gattctaaccactcagaaaatgtct

SEQ ID NO: 2772686 - DNA, 25 bp, Homo sapien
ctcccatgccaaagctgctccatat

SEQ ID NO: 2772687 - DNA, 25 bp, Homo sapien
agctgctccatattcactccttcca

SEQ ID NO: 2772688 - DNA, 25 bp, Homo sapien
ccacctcgaatcagggatatggatt

SEQ ID NO: 2772689 - DNA, 25 bp, Homo sapien
tggtggtgcacctatgttccacttt

SEQ ID NO: 2772690 - DNA, 25 bp, Homo sapien
tgttggtggtgcacctatgttccac

SEQ ID NO: 2772691 - DNA, 25 bp, Homo sapien
gcttgttggtggtgcacctatgttc

SEQ ID NO: 2772692 - DNA, 25 bp, Homo sapien
ggtgcacctatgttccacttttgtt

SEQ ID NO: 2772693 - DNA, 25 bp, Homo sapien
cgatcaaagaagtgacagatgtcac

SEQ ID NO: 2772694 - DNA, 25 bp, Homo sapien
ctttggagggacacacataaagtgg

SEQ ID NO: 2772695 - DNA, 25 bp, Homo sapien
ttggagggacacacataaagtggtg

SEQ ID NO: 2772696 - DNA, 25 bp, Homo sapien
gaccagtcctcctctgttggaggtg

SEQ ID NO: 2772697 - DNA, 25 bp, Homo sapien
ttaaaaagagtgaggactgaagaaa

SEQ ID NO: 2772698 - DNA, 25 bp, Homo sapien
cagttaaaaagagtgaggactgaag

SEQ ID NO: 2772699 - DNA, 25 bp, Homo sapien
aaagagtgaggactgaagaaagtta

SEQ ID NO: 2772700 - DNA, 25 bp, Homo sapien
aagagtgaggactgaagaaagttac

SEQ ID NO: 2772701 - DNA, 25 bp, Homo sapien
cactgctaaactgatagagaaggtc

SEQ ID NO: 2772702 - DNA, 25 bp, Homo sapien
gccagaggtgaagtaatgagtccca

SEQ ID NO: 2772703 - DNA, 25 bp, Homo sapien
gagtcccaaagtcatcgaatattcg

SEQ ID NO: 2772704 - DNA, 25 bp, Homo sapien
gaatattcggctgtacaaagcagag

SEQ ID NO: 2772705 - DNA, 25 bp, Homo sapien
cctgacttgagaatgagccttgttg

SEQ ID NO: 2772706 - DNA, 25 bp, Homo sapien
gcagaattatggttgatattttcac

SEQ ID NO: 2772707 - DNA, 25 bp, Homo sapien
cttgaatggcttgtttgaaggcaga

SEQ ID NO: 2772708 - DNA, 25 bp, Homo sapien
ttgtgtccaagagaagttaaatcct

SEQ ID NO: 2772709 - DNA, 25 bp, Homo sapien
aatggttcaccacctttttattctg

SEQ ID NO: 2772710 - DNA, 25 bp, Homo sapien
ggtgttggagttgccaccatgctag

SEQ ID NO: 2772711 - DNA, 25 bp, Homo sapien
taatcactgacggtgttggagttgc

SEQ ID NO: 2772712 - DNA, 25 bp, Homo sapien
cttataatcactgacggtgttggag

SEQ ID NO: 2772713 - DNA, 25 bp, Homo sapien
attttccagattggccggaacacgg

SEQ ID NO: 2772714 - DNA, 25 bp, Homo sapien
ttggccggaacacggtatggattac

SEQ ID NO: 2772715 - DNA, 25 bp, Homo sapien
cattttccagattggccggaacacg

SEQ ID NO: 2772716 - DNA, 25 bp, Homo sapien
ccagattggccggaacacggtatgg

SEQ ID NO: 2772717 - DNA, 25 bp, Homo sapien
tcctccagtgaaagagttatcaagg

SEQ ID NO: 2772718 - DNA, 25 bp, Homo sapien
ttcctccagtgaaagagttatcaag

SEQ ID NO: 2772719 - DNA, 25 bp, Homo sapien
aaatgacttgaaggaatcccccaca

SEQ ID NO: 2772720 - DNA, 25 bp, Homo sapien
caaatgacttgaaggaatcccccac

SEQ ID NO: 2772721 - DNA, 25 bp, Homo sapien
atgacttgaaggaatcccccacacc

SEQ ID NO: 2772722 - DNA, 25 bp, Homo sapien
gacaaatgacttgaaggaatccccc

SEQ ID NO: 2772723 - DNA, 25 bp, Homo sapien
ctgttctccccaagatgataaaaag

SEQ ID NO: 2772724 - DNA, 25 bp, Homo sapien
tgttctccccaagatgataaaaaga

SEQ ID NO: 2772725 - DNA, 25 bp, Homo sapien
ccccaagatgataaaaagatgttac

SEQ ID NO: 2772726 - DNA, 25 bp, Homo sapien
tctccccaagatgataaaaagatgt

SEQ ID NO: 2772727 - DNA, 25 bp, Homo sapien
ctccattgcattctaactttctggc

SEQ ID NO: 2772728 - DNA, 25 bp, Homo sapien
gggattatacttccgtgtgcatact

SEQ ID NO: 2772729 - DNA, 25 bp, Homo sapien
gtccctttcatctgaattgtctcca

SEQ ID NO: 2772730 - DNA, 25 bp, Homo sapien
attgcccatcaactgtacactaggg

SEQ ID NO: 2772731 - DNA, 25 bp, Homo sapien
gttggcatctgtaccagtatgtaca

SEQ ID NO: 2772732 - DNA, 25 bp, Homo sapien
tgatgttggcatctgtaccagtatg

SEQ ID NO: 2772733 - DNA, 25 bp, Homo sapien
tcttgcctgtagtcaatgatgttgg

SEQ ID NO: 2772734 - DNA, 25 bp, Homo sapien
gatgttggcatctgtaccagtatgt

SEQ ID NO: 2772735 - DNA, 25 bp, Homo sapien
tgtgacatgggtgagaatggttcca

SEQ ID NO: 2772736 - DNA, 25 bp, Homo sapien
acatgggtgagaatggttccaggtc

SEQ ID NO: 2772737 - DNA, 25 bp, Homo sapien
tgacatgggtgagaatggttccagg

SEQ ID NO: 2772738 - DNA, 25 bp, Homo sapien
catgggtgagaatggttccaggtca

SEQ ID NO: 2772739 - DNA, 25 bp, Homo sapien
gaatgcatggttgaaaggctaccag

SEQ ID NO: 2772740 - DNA, 25 bp, Homo sapien
caaactgactgggacgcaagacaga

SEQ ID NO: 2772741 - DNA, 25 bp, Homo sapien
taccagaggcgcagtgcatggctgt

SEQ ID NO: 2772742 - DNA, 25 bp, Homo sapien
tttgcagagcttagatggaatgcat

SEQ ID NO: 2772743 - DNA, 25 bp, Homo sapien
actatgctgttaagcctgtcaggga

SEQ ID NO: 2772744 - DNA, 25 bp, Homo sapien
ttcagaattctcagaaggcacaggc

SEQ ID NO: 2772745 - DNA, 25 bp, Homo sapien
tcagggaatcagagccctctattgt

SEQ ID NO: 2772746 - DNA, 25 bp, Homo sapien
tacaatatcaatactgggagcaaaa

SEQ ID NO: 2772747 - DNA, 25 bp, Homo sapien
tcctgcttgctgcaaatctgttcac

SEQ ID NO: 2772748 - DNA, 25 bp, Homo sapien
gttacattctctagtctcctgcttg

SEQ ID NO: 2772749 - DNA, 25 bp, Homo sapien
gtttttcaatacaagggtcacagtc

SEQ ID NO: 2772750 - DNA, 25 bp, Homo sapien
gaccatggtccaaaatctcccagga

SEQ ID NO: 2772751 - DNA, 25 bp, Homo sapien
ctgggttccagaattgcaagttttt

SEQ ID NO: 2772752 - DNA, 25 bp, Homo sapien
tctgggttccagaattgcaagtttt

SEQ ID NO: 2772753 - DNA, 25 bp, Homo sapien
ttttgagcagctggtccactgagtc

SEQ ID NO: 2772754 - DNA, 25 bp, Homo sapien
tttttgagcagctggtccactgagt

SEQ ID NO: 2772755 - DNA, 25 bp, Homo sapien
cttggcccttgttgatcagagcatt

SEQ ID NO: 2772756 - DNA, 25 bp, Homo sapien
agtacaagacagagcgtctggccat

SEQ ID NO: 2772757 - DNA, 25 bp, Homo sapien
aggatgaagtacaagacagagcgtc

SEQ ID NO: 2772758 - DNA, 25 bp, Homo sapien
ttggcccttgttgatcagagcattc

SEQ ID NO: 2772759 - DNA, 25 bp, Homo sapien
ttttgtgtgagcaatagcctcaagt

SEQ ID NO: 2772760 - DNA, 25 bp, Homo sapien
gcctcaagtacatttcagctgttcc

SEQ ID NO: 2772761 - DNA, 25 bp, Homo sapien
tggaaacctgctaaagagaacgttc

SEQ ID NO: 2772762 - DNA, 25 bp, Homo sapien
gaaacctgctaaagagaacgttcac

SEQ ID NO: 2772763 - DNA, 25 bp, Homo sapien
cagaagcctagcaacacctagaggg

SEQ ID NO: 2772764 - DNA, 25 bp, Homo sapien
ggcaatgctgtcatatcccagaagc

SEQ ID NO: 2772765 - DNA, 25 bp, Homo sapien
tgctagctaacacaaggcaatgctg

SEQ ID NO: 2772766 - DNA, 25 bp, Homo sapien
ggtgtcctcggacctaagctgcaaa

SEQ ID NO: 2772767 - DNA, 25 bp, Homo sapien
tagtcaccctactatacactatata

SEQ ID NO: 2772768 - DNA, 25 bp, Homo sapien
aatgtttcaagtcatctcctctagc

SEQ ID NO: 2772769 - DNA, 25 bp, Homo sapien
atagtcaccctactatacactatat

SEQ ID NO: 2772770 - DNA, 25 bp, Homo sapien
gggaatgtttcaagtcatctcctct

SEQ ID NO: 2772771 - DNA, 25 bp, Homo sapien
tacattgaactgtgattccctggac

SEQ ID NO: 2772772 - DNA, 25 bp, Homo sapien
gcttatataagctggcgctagcaca

SEQ ID NO: 2772773 - DNA, 25 bp, Homo sapien
gactaaagactttacgggtcatgca

SEQ ID NO: 2772774 - DNA, 25 bp, Homo sapien
gagcccctgggagatagtaaaacat

SEQ ID NO: 2772775 - DNA, 25 bp, Homo sapien
atacttcagcacatcaaaatccaag

SEQ ID NO: 2772776 - DNA, 25 bp, Homo sapien
gatacttcagcacatcaaaatccaa

SEQ ID NO: 2772777 - DNA, 25 bp, Homo sapien
taatgaatgttatgttgaagacata

SEQ ID NO: 2772778 - DNA, 25 bp, Homo sapien
agctctcagcaggaatcttactata

SEQ ID NO: 2772779 - DNA, 25 bp, Homo sapien
tctccccagcatgtgttcaatgaag

SEQ ID NO: 2772780 - DNA, 25 bp, Homo sapien
taagtcccgtgaatagttatctgac

SEQ ID NO: 2772781 - DNA, 25 bp, Homo sapien
ccagagtccaatgagatatcacagc

SEQ ID NO: 2772782 - DNA, 25 bp, Homo sapien
gactccataaaaaccattaggccag

SEQ ID NO: 2772783 - DNA, 25 bp, Homo sapien
ggaccacaagcaagtgggcagcaga

SEQ ID NO: 2772784 - DNA, 25 bp, Homo sapien
tgacgtcagttctggtgtcatggca

SEQ ID NO: 2772785 - DNA, 25 bp, Homo sapien
ttatgtaggcatgacgtcagttctg

SEQ ID NO: 2772786 - DNA, 25 bp, Homo sapien
taggcatgacgtcagttctggtgtc

SEQ ID NO: 2772787 - DNA, 25 bp, Homo sapien
taactctgctagtgttcgctttagg

SEQ ID NO: 2772788 - DNA, 25 bp, Homo sapien
gcgaaggcaagtggagatttaactc

SEQ ID NO: 2772789 - DNA, 25 bp, Homo sapien
acaccggagggtaaactgattcagg

SEQ ID NO: 2772790 - DNA, 25 bp, Homo sapien
tccaagaagagagctttagacaccg

SEQ ID NO: 2772791 - DNA, 25 bp, Homo sapien
agtttttaggtcctgagcattcagt

SEQ ID NO: 2772792 - DNA, 25 bp, Homo sapien
aggtcctgagcattcagtgatgaga

SEQ ID NO: 2772793 - DNA, 25 bp, Homo sapien
caggtcttgtgggagatggccgttc

SEQ ID NO: 2772794 - DNA, 25 bp, Homo sapien
attcagtgatgagaccaggtcttgt

SEQ ID NO: 2772795 - DNA, 25 bp, Homo sapien
gggtcaaggactttcctgaaatata

SEQ ID NO: 2772796 - DNA, 25 bp, Homo sapien
atacaaggtaatttgtgggtcaagg

SEQ ID NO: 2772797 - DNA, 25 bp, Homo sapien
tacatcacatgtacacggacaattt

SEQ ID NO: 2772798 - DNA, 25 bp, Homo sapien
gaaatatatcagagtagaaaagtac

SEQ ID NO: 2772799 - DNA, 25 bp, Homo sapien
tagttttgctagattaacatatctt

SEQ ID NO: 2772800 - DNA, 25 bp, Homo sapien
aaatttcatgaaattcacggtggcc

SEQ ID NO: 2772801 - DNA, 25 bp, Homo sapien
gccattcttatgttagttttgctag

SEQ ID NO: 2772802 - DNA, 25 bp, Homo sapien
ggcataatcattcagtttttagtat

SEQ ID NO: 2772803 - DNA, 25 bp, Homo sapien
tcaagctcttttcactacaccatag

SEQ ID NO: 2772804 - DNA, 25 bp, Homo sapien
tttagccacgtttgagaatgattca

SEQ ID NO: 2772805 - DNA, 25 bp, Homo sapien
taattctgtgtcgaagtttagccac

SEQ ID NO: 2772806 - DNA, 25 bp, Homo sapien
ctacaccatagtgcataattctgtg

SEQ ID NO: 2772807 - DNA, 25 bp, Homo sapien
tatagagatgtgtaatgatacctcc

SEQ ID NO: 2772808 - DNA, 25 bp, Homo sapien
gagaatatttgtcactatagagatg

SEQ ID NO: 2772809 - DNA, 25 bp, Homo sapien
tgtgtaatgatacctcctttggtca

SEQ ID NO: 2772810 - DNA, 25 bp, Homo sapien
aggtggaggagaatatttgtcacta

SEQ ID NO: 2772811 - DNA, 25 bp, Homo sapien
caagttttcttagagtcgtccatgc

SEQ ID NO: 2772812 - DNA, 25 bp, Homo sapien
gatttaccctcacaatatacccata

SEQ ID NO: 2772813 - DNA, 25 bp, Homo sapien
tgttactggccgacgtcatcatctg

SEQ ID NO: 2772814 - DNA, 25 bp, Homo sapien
tgttaccagaattgctacagtagac

SEQ ID NO: 2772815 - DNA, 25 bp, Homo sapien
gtaccaggactttattaggcatttc

SEQ ID NO: 2772816 - DNA, 25 bp, Homo sapien
ttggtaccaggactttattaggcat

SEQ ID NO: 2772817 - DNA, 25 bp, Homo sapien
accaggactttattaggcatttcac

SEQ ID NO: 2772818 - DNA, 25 bp, Homo sapien
tggtaccaggactttattaggcatt

SEQ ID NO: 2772819 - DNA, 25 bp, Homo sapien
aattaaggctggtcacaatgtgccc

SEQ ID NO: 2772820 - DNA, 25 bp, Homo sapien
taatcagatccaagcccaaagaagg

SEQ ID NO: 2772821 - DNA, 25 bp, Homo sapien
catttgcaggacctagagctgacca

SEQ ID NO: 2772822 - DNA, 25 bp, Homo sapien
tatggagggaggtagatctcgcccc

SEQ ID NO: 2772823 - DNA, 25 bp, Homo sapien
catttactgggtacttgcagggcaa

SEQ ID NO: 2772824 - DNA, 25 bp, Homo sapien
tcatcaagagcatcattaagagggc

SEQ ID NO: 2772825 - DNA, 25 bp, Homo sapien
cccaactgtggatgactatagagca

SEQ ID NO: 2772826 - DNA, 25 bp, Homo sapien
tatagacagcgtaggagtcataggc

SEQ ID NO: 2772827 - DNA, 25 bp, Homo sapien
tgcggacccactgcatcatggcagg

SEQ ID NO: 2772828 - DNA, 25 bp, Homo sapien
caaagacatagttgagctttatgac

SEQ ID NO: 2772829 - DNA, 25 bp, Homo sapien
gacagtgctgataaagtcaccaagt

SEQ ID NO: 2772830 - DNA, 25 bp, Homo sapien
caagttctacaaaatcggcagtgac

SEQ ID NO: 2772831 - DNA, 25 bp, Homo sapien
tattgatccgtattggagttctcat

SEQ ID NO: 2772832 - DNA, 25 bp, Homo sapien
gagaaatattcactatattgatccg

SEQ ID NO: 2772833 - DNA, 25 bp, Homo sapien
tctgcaggagaaatattcactatat

SEQ ID NO: 2772834 - DNA, 25 bp, Homo sapien
tcactatattgatccgtattggagt

SEQ ID NO: 2772835 - DNA, 25 bp, Homo sapien
tttctttacttgccctgtttctcca

SEQ ID NO: 2772836 - DNA, 25 bp, Homo sapien
ctgaccccatgtctactatactctt

SEQ ID NO: 2772837 - DNA, 25 bp, Homo sapien
tttacttgccctgtttctccattct

SEQ ID NO: 2772838 - DNA, 25 bp, Homo sapien
cccatgtctactatactcttcatct

SEQ ID NO: 2772839 - DNA, 25 bp, Homo sapien
aaattcatatcaggagttttatata

SEQ ID NO: 2772840 - DNA, 25 bp, Homo sapien
agttttatataagtaggatttcctg

SEQ ID NO: 2772841 - DNA, 25 bp, Homo sapien
cctgcctacacactcagcttttaag

SEQ ID NO: 2772842 - DNA, 25 bp, Homo sapien
tacacactcagcttttaagagaaaa

SEQ ID NO: 2772843 - DNA, 25 bp, Homo sapien
ttctggggagtcaagtgctccttca

SEQ ID NO: 2772844 - DNA, 25 bp, Homo sapien
tcataggcttcatcacttggtaaga

SEQ ID NO: 2772845 - DNA, 25 bp, Homo sapien
cttcatcacttggtaagaagagaaa

SEQ ID NO: 2772846 - DNA, 25 bp, Homo sapien
catcacttggtaagaagagaaagcc

SEQ ID NO: 2772847 - DNA, 25 bp, Homo sapien
tctagtgacccatcagagattcttc

SEQ ID NO: 2772848 - DNA, 25 bp, Homo sapien
gaagacttgcatcatgcccaaaatg

SEQ ID NO: 2772849 - DNA, 25 bp, Homo sapien
caaaggatgatctctacacaggtaa

SEQ ID NO: 2772850 - DNA, 25 bp, Homo sapien
gcatagaactatgctggaagctgga

SEQ ID NO: 2772851 - DNA, 25 bp, Homo sapien
gccactggactatggtagaagacca

SEQ ID NO: 2772852 - DNA, 25 bp, Homo sapien
tctggctgctcaggacctactggag

SEQ ID NO: 2772853 - DNA, 25 bp, Homo sapien
gagtggctaaccatttccgcatgag

SEQ ID NO: 2772854 - DNA, 25 bp, Homo sapien
taacttcctgggcaaaaatcgctgg

SEQ ID NO: 2772855 - DNA, 25 bp, Homo sapien
cttctttccctcttgcaatatccat

SEQ ID NO: 2772856 - DNA, 25 bp, Homo sapien
aaaggacaagataagctgtactgtg

SEQ ID NO: 2772857 - DNA, 25 bp, Homo sapien
gtgttctttgcaacagaagtcaaat

SEQ ID NO: 2772858 - DNA, 25 bp, Homo sapien
caaatatcccaacatgagaagagcc

SEQ ID NO: 2772859 - DNA, 25 bp, Homo sapien
aatatcccaacatgagaagagcctc

SEQ ID NO: 2772860 - DNA, 25 bp, Homo sapien
cagttactccacatggtaccaatgc

SEQ ID NO: 2772861 - DNA, 25 bp, Homo sapien
tattattgcataactccaaggagta

SEQ ID NO: 2772862 - DNA, 25 bp, Homo sapien
tcaagcaatatatcagagttccagt

SEQ ID NO: 2772863 - DNA, 25 bp, Homo sapien
ccaatgcttggtaatgtcagtcttt

SEQ ID NO: 2772864 - DNA, 25 bp, Homo sapien
caataaatcatcacctgaaggtaca

SEQ ID NO: 2772865 - DNA, 25 bp, Homo sapien
tttagtggaaacttcatgggccagg

SEQ ID NO: 2772866 - DNA, 25 bp, Homo sapien
gaaatttaattcacgccagacccac

SEQ ID NO: 2772867 - DNA, 25 bp, Homo sapien
catgaagcagaaatggagactttcc

SEQ ID NO: 2772868 - DNA, 25 bp, Homo sapien
tgtgcaagttctcaacggatctggt

SEQ ID NO: 2772869 - DNA, 25 bp, Homo sapien
caatagattagaaagatcattcacc

SEQ ID NO: 2772870 - DNA, 25 bp, Homo sapien
gatcattcaccgtgactgaaatggt

SEQ ID NO: 2772871 - DNA, 25 bp, Homo sapien
ttctcatggtagtgtgcaagttctc

SEQ ID NO: 2772872 - DNA, 25 bp, Homo sapien
gtgagccgctgtgcccgtcccccgc

SEQ ID NO: 2772873 - DNA, 25 bp, Homo sapien
ggtgtgagccgctgtgcccgtcccc

SEQ ID NO: 2772874 - DNA, 25 bp, Homo sapien
gtgtgagccgctgtgcccgtccccc

SEQ ID NO: 2772875 - DNA, 25 bp, Homo sapien
gagccgctgtgcccgtcccccgccc

SEQ ID NO: 2772876 - DNA, 25 bp, Homo sapien
attccctggaccgtgaatttcctgt

SEQ ID NO: 2772877 - DNA, 25 bp, Homo sapien
tatgattccctggaccgtgaatttc

SEQ ID NO: 2772878 - DNA, 25 bp, Homo sapien
ttccctggaccgtgaatttcctgta

SEQ ID NO: 2772879 - DNA, 25 bp, Homo sapien
tgattccctggaccgtgaatttcct

SEQ ID NO: 2772880 - DNA, 25 bp, Homo sapien
cggatgtcgcaatgccaagccctgc

SEQ ID NO: 2772881 - DNA, 25 bp, Homo sapien
tcagcactgacagctgtccttctac

SEQ ID NO: 2772882 - DNA, 25 bp, Homo sapien
catgtgccgtttcagattcttacta

SEQ ID NO: 2772883 - DNA, 25 bp, Homo sapien
tattactgtatgttctgatatccag

SEQ ID NO: 2772884 - DNA, 25 bp, Homo sapien
tgtagggcacctcactttatggcca

SEQ ID NO: 2772885 - DNA, 25 bp, Homo sapien
ccagcagttttatccttgtgacaag

SEQ ID NO: 2772886 - DNA, 25 bp, Homo sapien
aagtcagtgccatatagaggtaacg

SEQ ID NO: 2772887 - DNA, 25 bp, Homo sapien
caacagcagcggttgaaagagaagc

SEQ ID NO: 2772888 - DNA, 25 bp, Homo sapien
cagtgtagtgcccagggccaagtga

SEQ ID NO: 2772889 - DNA, 25 bp, Homo sapien
caagcaaccagacccactcagcatc

SEQ ID NO: 2772890 - DNA, 25 bp, Homo sapien
gatgggaaaccagtgtagtgcccag

SEQ ID NO: 2772891 - DNA, 25 bp, Homo sapien
ttcagaattggaatcagatcccgga

SEQ ID NO: 2772892 - DNA, 25 bp, Homo sapien
tggcacaaagtagttcatggaattc

SEQ ID NO: 2772893 - DNA, 25 bp, Homo sapien
aatatactttggtctaaatgctgtg

SEQ ID NO: 2772894 - DNA, 25 bp, Homo sapien
gctgcatcaatagttatggccttca

SEQ ID NO: 2772895 - DNA, 25 bp, Homo sapien
cattcttcgcagaagccctatctga

SEQ ID NO: 2772896 - DNA, 25 bp, Homo sapien
aaaggttgtgaatttctggctgggc

SEQ ID NO: 2772897 - DNA, 25 bp, Homo sapien
tcacaaactaattaaaatacccatc

SEQ ID NO: 2772898 - DNA, 25 bp, Homo sapien
gaccaactcttcaagcacttttcaa

SEQ ID NO: 2772899 - DNA, 25 bp, Homo sapien
tgatctttccctacctttgttgaga

SEQ ID NO: 2772900 - DNA, 25 bp, Homo sapien
gaacctgtattgacaccttattatc

SEQ ID NO: 2772901 - DNA, 25 bp, Homo sapien
gaaaattaagcataaggtgcacaga

SEQ ID NO: 2772902 - DNA, 25 bp, Homo sapien
ttccccagtacatgcacactctttc

SEQ ID NO: 2772903 - DNA, 25 bp, Homo sapien
atttgttacaagtgatgaacctgta

SEQ ID NO: 2772904 - DNA, 25 bp, Homo sapien
caacttgtccatgataggtgctagg

SEQ ID NO: 2772905 - DNA, 25 bp, Homo sapien
tgataggtgctaggcccatgaggtt

SEQ ID NO: 2772906 - DNA, 25 bp, Homo sapien
gcccatgaggtttgctggacctaca

SEQ ID NO: 2772907 - DNA, 25 bp, Homo sapien
ttgctggacctacaagagccccagg

SEQ ID NO: 2772908 - DNA, 25 bp, Homo sapien
tggcccaggcattgcaaacacattc

SEQ ID NO: 2772909 - DNA, 25 bp, Homo sapien
cagtttttgaatccataaaatagag

SEQ ID NO: 2772910 - DNA, 25 bp, Homo sapien
tcttatagagttgtcttactgattc

SEQ ID NO: 2772911 - DNA, 25 bp, Homo sapien
ctatcttatagagttgtcttactga

SEQ ID NO: 2772912 - DNA, 25 bp, Homo sapien
gtttttgaatccataaaatagagaa

SEQ ID NO: 2772913 - DNA, 25 bp, Homo sapien
taattgttgacgtccattgaagaac

SEQ ID NO: 2772914 - DNA, 25 bp, Homo sapien
tatcagaccattttagattctccac

SEQ ID NO: 2772915 - DNA, 25 bp, Homo sapien
tttgtagaggtctcaattgttggga

SEQ ID NO: 2772916 - DNA, 25 bp, Homo sapien
gaacatggagatcagcaaaagattc

SEQ ID NO: 2772917 - DNA, 25 bp, Homo sapien
gagggttaatattatcatcaattct

SEQ ID NO: 2772918 - DNA, 25 bp, Homo sapien
ggagggttaatattatcatcaattc

SEQ ID NO: 2772919 - DNA, 25 bp, Homo sapien
taggagggttaatattatcatcaat

SEQ ID NO: 2772920 - DNA, 25 bp, Homo sapien
agggttaatattatcatcaattctg

SEQ ID NO: 2772921 - DNA, 25 bp, Homo sapien
ccaaaagctcttctctaatagctgt

SEQ ID NO: 2772922 - DNA, 25 bp, Homo sapien
caaaagctcttctctaatagctgta

SEQ ID NO: 2772923 - DNA, 25 bp, Homo sapien
tcacactgtagtggaatgggcccta

SEQ ID NO: 2772924 - DNA, 25 bp, Homo sapien
tggaatgggccctagatccaatgac

SEQ ID NO: 2772925 - DNA, 25 bp, Homo sapien
aattagcttagatacagtcacactg

SEQ ID NO: 2772926 - DNA, 25 bp, Homo sapien
gggttgcctaagatctaagtgctgg

SEQ ID NO: 2772927 - DNA, 25 bp, Homo sapien
tgagcactgagaaaatgcggaaaga

SEQ ID NO: 2772928 - DNA, 25 bp, Homo sapien
ccattgtgtttcagctcactctcca

SEQ ID NO: 2772929 - DNA, 25 bp, Homo sapien
aagactgggccttccctatcctctg

SEQ ID NO: 2772930 - DNA, 25 bp, Homo sapien
tccctatcctctgtacaccattgtg

SEQ ID NO: 2772931 - DNA, 25 bp, Homo sapien
ccactgagtcactgcaatctgtttc

SEQ ID NO: 2772932 - DNA, 25 bp, Homo sapien
caccatataaggagtcaccacagct

SEQ ID NO: 2772933 - DNA, 25 bp, Homo sapien
gcctcacttgttaacctgcactgat

SEQ ID NO: 2772934 - DNA, 25 bp, Homo sapien
tctctcctccataaagtgtgctaca

SEQ ID NO: 2772935 - DNA, 25 bp, Homo sapien
taaacgtatttgcaacacctgtgag

SEQ ID NO: 2772936 - DNA, 25 bp, Homo sapien
ggctggaaatatacacttgggactt

SEQ ID NO: 2772937 - DNA, 25 bp, Homo sapien
catctaaagtgagtagagggcccag

SEQ ID NO: 2772938 - DNA, 25 bp, Homo sapien
gttccatgtagcagaagcctgtaga

SEQ ID NO: 2772939 - DNA, 25 bp, Homo sapien
ttccttgtttccttcttttctgcca

SEQ ID NO: 2772940 - DNA, 25 bp, Homo sapien
ccttgtttccttcttttctgccaat

SEQ ID NO: 2772941 - DNA, 25 bp, Homo sapien
ttgtttccttcttttctgccaatca

SEQ ID NO: 2772942 - DNA, 25 bp, Homo sapien
tgtttccttcttttctgccaatcat

SEQ ID NO: 2772943 - DNA, 25 bp, Homo sapien
aactgtgaaaggaactgagctgtgt

SEQ ID NO: 2772944 - DNA, 25 bp, Homo sapien
aaactgtgaaaggaactgagctgtg

SEQ ID NO: 2772945 - DNA, 25 bp, Homo sapien
gaaaactgtgaaaggaactgagctg

SEQ ID NO: 2772946 - DNA, 25 bp, Homo sapien
aaagaaaactgtgaaaggaactgag

SEQ ID NO: 2772947 - DNA, 25 bp, Homo sapien
gagctgagcctcaaatggaaagaca

SEQ ID NO: 2772948 - DNA, 25 bp, Homo sapien
ctatggttggactgcttctggaggc

SEQ ID NO: 2772949 - DNA, 25 bp, Homo sapien
gcttctggaggctaagcagagctga

SEQ ID NO: 2772950 - DNA, 25 bp, Homo sapien
ccatcttcacagtctatggttggac

SEQ ID NO: 2772951 - DNA, 25 bp, Homo sapien
tgataaatcctgcactccagatgag

SEQ ID NO: 2772952 - DNA, 25 bp, Homo sapien
gaaaaaaggagtcaaggtctgagcc

SEQ ID NO: 2772953 - DNA, 25 bp, Homo sapien
aagaggagactagactgcacgtcca

SEQ ID NO: 2772954 - DNA, 25 bp, Homo sapien
ctgtagaagagagctaatgagaccc

SEQ ID NO: 2772955 - DNA, 25 bp, Homo sapien
ccgagcaatggagcaacaacaaaat

SEQ ID NO: 2772956 - DNA, 25 bp, Homo sapien
cagtgatggcagagtcagcaatagg

SEQ ID NO: 2772957 - DNA, 25 bp, Homo sapien
caatgggtgaccaagctctgggagc

SEQ ID NO: 2772958 - DNA, 25 bp, Homo sapien
ggagatgttggcatcagcagcttcc

SEQ ID NO: 2772959 - DNA, 25 bp, Homo sapien
ggctttctgatgctacattttgcat

SEQ ID NO: 2772960 - DNA, 25 bp, Homo sapien
ttgatgcttttgatggctttctgat

SEQ ID NO: 2772961 - DNA, 25 bp, Homo sapien
gcttttgatggctttctgatgctac

SEQ ID NO: 2772962 - DNA, 25 bp, Homo sapien
ctttgatgttgatgcttttgatggc

SEQ ID NO: 2772963 - DNA, 25 bp, Homo sapien
tctgtcccgagcagtaaacatacgg

SEQ ID NO: 2772964 - DNA, 25 bp, Homo sapien
tgaaaagatcaagtgtgtgctcccc

SEQ ID NO: 2772965 - DNA, 25 bp, Homo sapien
taaagtatggccgtgtcccagctgt

SEQ ID NO: 2772966 - DNA, 25 bp, Homo sapien
tggtccaagtcgcacacatcaagct

SEQ ID NO: 2772967 - DNA, 25 bp, Homo sapien
tccaaaccgatacgaaatggtgccc

SEQ ID NO: 2772968 - DNA, 25 bp, Homo sapien
tgggcgaagtgtgttgccaacacgc

SEQ ID NO: 2772969 - DNA, 25 bp, Homo sapien
acttggaccagactcgagacagcgg

SEQ ID NO: 2772970 - DNA, 25 bp, Homo sapien
ttcaagggcagctatcacgccgcct

SEQ ID NO: 2772971 - DNA, 25 bp, Homo sapien
catgccagggatagactcaggtcct

SEQ ID NO: 2772972 - DNA, 25 bp, Homo sapien
aaggcgagcccctgacactagctcg

SEQ ID NO: 2772973 - DNA, 25 bp, Homo sapien
agctcgcgttcttcacacacggtca

SEQ ID NO: 2772974 - DNA, 25 bp, Homo sapien
ctcaggtccttgcaccgaaggcgag

SEQ ID NO: 2772975 - DNA, 25 bp, Homo sapien
agtcaccttgactctagcgcctcgg

SEQ ID NO: 2772976 - DNA, 25 bp, Homo sapien
gggtcacgaggcaccatcctggagc

SEQ ID NO: 2772977 - DNA, 25 bp, Homo sapien
cgcgggcatcgtggcaagttaccac

SEQ ID NO: 2772978 - DNA, 25 bp, Homo sapien
ctggaagacgagtttccctcccgcg

SEQ ID NO: 2772979 - DNA, 25 bp, Homo sapien
ttgccatccagtcggctaatttcag

SEQ ID NO: 2772980 - DNA, 25 bp, Homo sapien
tccagtcggctaatttcagctcgtt

SEQ ID NO: 2772981 - DNA, 25 bp, Homo sapien
agagttgccatccagtcggctaatt

SEQ ID NO: 2772982 - DNA, 25 bp, Homo sapien
tcggctaatttcagctcgtttttcc

SEQ ID NO: 2772983 - DNA, 25 bp, Homo sapien
tggcaggctgctgccgctaatccaa

SEQ ID NO: 2772984 - DNA, 25 bp, Homo sapien
cgtgcagcgcgctggtcccagcact

SEQ ID NO: 2772985 - DNA, 25 bp, Homo sapien
gccgctaatccaatgtttgctctag

SEQ ID NO: 2772986 - DNA, 25 bp, Homo sapien
caatgtttgctctagccccgctaga

SEQ ID NO: 2772987 - DNA, 25 bp, Homo sapien
tttatgattgtgttctttgttcagc

SEQ ID NO: 2772988 - DNA, 25 bp, Homo sapien
catcaaagactgtaagtttatgatt

SEQ ID NO: 2772989 - DNA, 25 bp, Homo sapien
gactgtaagtttatgattgtgttct

SEQ ID NO: 2772990 - DNA, 25 bp, Homo sapien
ttatgattgtgttctttgttcagct

SEQ ID NO: 2772991 - DNA, 25 bp, Homo sapien
tgttgcaatttggtggtctgtgcat

SEQ ID NO: 2772992 - DNA, 25 bp, Homo sapien
gcacagatttcagtacatgctgcct

SEQ ID NO: 2772993 - DNA, 25 bp, Homo sapien
gcacaatgttgcaatttggtggtct

SEQ ID NO: 2772994 - DNA, 25 bp, Homo sapien
acagatttcagtacatgctgcctgc

SEQ ID NO: 2772995 - DNA, 25 bp, Homo sapien
catactcttcagcaagattaactgt

SEQ ID NO: 2772996 - DNA, 25 bp, Homo sapien
tgtgtttaccaacacatactcttca

SEQ ID NO: 2772997 - DNA, 25 bp, Homo sapien
atactcttcagcaagattaactgtt

SEQ ID NO: 2772998 - DNA, 25 bp, Homo sapien
gtttaccaacacatactcttcagca

SEQ ID NO: 2772999 - DNA, 25 bp, Homo sapien
gctaagcctagtggagggcagtcct

SEQ ID NO: 2773000 - DNA, 25 bp, Homo sapien
cctctggagtaaaagagacctttag

SEQ ID NO: 2773001 - DNA, 25 bp, Homo sapien
gctctagtccgtagatgattgggct

SEQ ID NO: 2773002 - DNA, 25 bp, Homo sapien
gcagtccttcagaggaagcaggtgg

SEQ ID NO: 2773003 - DNA, 25 bp, Homo sapien
tgggaggctttagctgctgtgaact

SEQ ID NO: 2773004 - DNA, 25 bp, Homo sapien
aggtttgctgcagtgatactcccac

SEQ ID NO: 2773005 - DNA, 25 bp, Homo sapien
tttatcttcccgctcaacactcagg

SEQ ID NO: 2773006 - DNA, 25 bp, Homo sapien
tatcttcccgctcaacactcaggaa

SEQ ID NO: 2773007 - DNA, 25 bp, Homo sapien
tacattttattaatctttgacacaa

SEQ ID NO: 2773008 - DNA, 25 bp, Homo sapien
atgcttacattttattaatctttga

SEQ ID NO: 2773009 - DNA, 25 bp, Homo sapien
cattttattaatctttgacacaatt

SEQ ID NO: 2773010 - DNA, 25 bp, Homo sapien
tttattaatctttgacacaatttac

SEQ ID NO: 2773011 - DNA, 25 bp, Homo sapien
gggccccagttatgagcagcatctt

SEQ ID NO: 2773012 - DNA, 25 bp, Homo sapien
ggccccagttatgagcagcatcttc

SEQ ID NO: 2773013 - DNA, 25 bp, Homo sapien
tcaagggccccagttatgagcagca

SEQ ID NO: 2773014 - DNA, 25 bp, Homo sapien
aagggccccagttatgagcagcatc

SEQ ID NO: 2773015 - DNA, 25 bp, Homo sapien
agcccttaaactatgcaaccagatc

SEQ ID NO: 2773016 - DNA, 25 bp, Homo sapien
aagcccttaaactatgcaaccagat

SEQ ID NO: 2773017 - DNA, 25 bp, Homo sapien
tcagtgaataacaggaagaggtctt

SEQ ID NO: 2773018 - DNA, 25 bp, Homo sapien
tgaataacaggaagaggtcttgcag

SEQ ID NO: 2773019 - DNA, 25 bp, Homo sapien
agtgaataacaggaagaggtcttgc

SEQ ID NO: 2773020 - DNA, 25 bp, Homo sapien
aataacaggaagaggtcttgcagac

SEQ ID NO: 2773021 - DNA, 25 bp, Homo sapien
cccaactagcatcatggattttgac

SEQ ID NO: 2773022 - DNA, 25 bp, Homo sapien
caactagcatcatggattttgactc

SEQ ID NO: 2773023 - DNA, 25 bp, Homo sapien
tttcacagttttcggggtatatgga

SEQ ID NO: 2773024 - DNA, 25 bp, Homo sapien
tgttcctgagactccatgctggttt

SEQ ID NO: 2773025 - DNA, 25 bp, Homo sapien
tgtaagataattgatgcagatgcac

SEQ ID NO: 2773026 - DNA, 25 bp, Homo sapien
atgtaagataattgatgcagatgca

SEQ ID NO: 2773027 - DNA, 25 bp, Homo sapien
catgtaagataattgatgcagatgc

SEQ ID NO: 2773028 - DNA, 25 bp, Homo sapien
acctgtcccgacactgcagtttcaa

SEQ ID NO: 2773029 - DNA, 25 bp, Homo sapien
ggttgacagaacagtccctccagaa

SEQ ID NO: 2773030 - DNA, 25 bp, Homo sapien
ccctccagaagtttcagcaatgcat

SEQ ID NO: 2773031 - DNA, 25 bp, Homo sapien
gaagtttcagcaatgcatttaaggt

SEQ ID NO: 2773032 - DNA, 25 bp, Homo sapien
cagctattagaataatattggcatc

SEQ ID NO: 2773033 - DNA, 25 bp, Homo sapien
ggaattctctccttgataatatctg

SEQ ID NO: 2773034 - DNA, 25 bp, Homo sapien
aatattggcatcagttgccaggatc

SEQ ID NO: 2773035 - DNA, 25 bp, Homo sapien
tatctgattctttctgtctaatttg

SEQ ID NO: 2773036 - DNA, 25 bp, Homo sapien
taagtcaagcaatttccgcattaac

SEQ ID NO: 2773037 - DNA, 25 bp, Homo sapien
cagctgagtgcatacccactgatca

SEQ ID NO: 2773038 - DNA, 25 bp, Homo sapien
taacggatataacgcagggcttcgc

SEQ ID NO: 2773039 - DNA, 25 bp, Homo sapien
tatctgacttctcgcatgggctttc

SEQ ID NO: 2773040 - DNA, 25 bp, Homo sapien
gaggctggcctcttaatatctgtgt

SEQ ID NO: 2773041 - DNA, 25 bp, Homo sapien
aacttttcacagtattggcaattga

SEQ ID NO: 2773042 - DNA, 25 bp, Homo sapien
gtaacctcagaatggctgcaccatc

SEQ ID NO: 2773043 - DNA, 25 bp, Homo sapien
tatccaagccaactggaccaagaga

SEQ ID NO: 2773044 - DNA, 25 bp, Homo sapien
ctccggtaacctcagaatggctgca

SEQ ID NO: 2773045 - DNA, 25 bp, Homo sapien
agttgacctgttgaaacatcgttgc

SEQ ID NO: 2773046 - DNA, 25 bp, Homo sapien
cctgttgaaacatcgttgccttttt

SEQ ID NO: 2773047 - DNA, 25 bp, Homo sapien
gttgacctgttgaaacatcgttgcc

SEQ ID NO: 2773048 - DNA, 25 bp, Homo sapien
tgacctgttgaaacatcgttgcctt

SEQ ID NO: 2773049 - DNA, 25 bp, Homo sapien
ccatgaagaccatagcaaaacatct

SEQ ID NO: 2773050 - DNA, 25 bp, Homo sapien
tcactttcattaaggccgtggccac

SEQ ID NO: 2773051 - DNA, 25 bp, Homo sapien
cccgagcaatattctgggaatgtgt

SEQ ID NO: 2773052 - DNA, 25 bp, Homo sapien
gagtggtagtgaacaacaaccttgt

SEQ ID NO: 2773053 - DNA, 25 bp, Homo sapien
tataaatttcctgagctaacatggc

SEQ ID NO: 2773054 - DNA, 25 bp, Homo sapien
tcttgtctccctgtaatgggagcca

SEQ ID NO: 2773055 - DNA, 25 bp, Homo sapien
taccagagattgtaatcccctagag

SEQ ID NO: 2773056 - DNA, 25 bp, Homo sapien
acatggcaaaaagcctacctgagaa

SEQ ID NO: 2773057 - DNA, 25 bp, Homo sapien
tgccacagtgataattgggttgagt

SEQ ID NO: 2773058 - DNA, 25 bp, Homo sapien
gcttctgccaaagtgtagctctggg

SEQ ID NO: 2773059 - DNA, 25 bp, Homo sapien
ctgccaaagtgtagctctgggcccc

SEQ ID NO: 2773060 - DNA, 25 bp, Homo sapien
gataattgggttgagtatttgctga

SEQ ID NO: 2773061 - DNA, 25 bp, Homo sapien
ctacaagtactaacgaaagaaattg

SEQ ID NO: 2773062 - DNA, 25 bp, Homo sapien
tacagtattcgtggagggaagctac

SEQ ID NO: 2773063 - DNA, 25 bp, Homo sapien
tattcgtggagggaagctacaagta

SEQ ID NO: 2773064 - DNA, 25 bp, Homo sapien
aattgggtgggagactcatgcaaga

SEQ ID NO: 2773065 - DNA, 25 bp, Homo sapien
cctgcatcctagtgtttgctttgca

SEQ ID NO: 2773066 - DNA, 25 bp, Homo sapien
tgccgtggaagcaggtgctctgcct

SEQ ID NO: 2773067 - DNA, 25 bp, Homo sapien
tgcctgcatcctagtgtttgctttg

SEQ ID NO: 2773068 - DNA, 25 bp, Homo sapien
aagttcttgccgtggaagcaggtgc

SEQ ID NO: 2773069 - DNA, 25 bp, Homo sapien
ttatgattatctggaactccaggct

SEQ ID NO: 2773070 - DNA, 25 bp, Homo sapien
gaccgcagattatgattatctggaa

SEQ ID NO: 2773071 - DNA, 25 bp, Homo sapien
aagcagaccgcagattatgattatc

SEQ ID NO: 2773072 - DNA, 25 bp, Homo sapien
ttctgaaagcagaccgcagattatg

SEQ ID NO: 2773073 - DNA, 25 bp, Homo sapien
gtagaaacttctaatgatactaggg

SEQ ID NO: 2773074 - DNA, 25 bp, Homo sapien
gggcacttgtagaaacttctaatga

SEQ ID NO: 2773075 - DNA, 25 bp, Homo sapien
tcaagggcttcaggctttagggcac

SEQ ID NO: 2773076 - DNA, 25 bp, Homo sapien
caactgaagcccgttagcagcaacc

SEQ ID NO: 2773077 - DNA, 25 bp, Homo sapien
gcgtggtcctgccaaacagtctcgt

SEQ ID NO: 2773078 - DNA, 25 bp, Homo sapien
acgcgtggtcctgccaaacagtctc

SEQ ID NO: 2773079 - DNA, 25 bp, Homo sapien
ggtcctgccaaacagtctcgtccat

SEQ ID NO: 2773080 - DNA, 25 bp, Homo sapien
gtggtcctgccaaacagtctcgtcc

SEQ ID NO: 2773081 - DNA, 25 bp, Homo sapien
cacactacacttccagagtttcctt

SEQ ID NO: 2773082 - DNA, 25 bp, Homo sapien
tcagctctagcatacctggatggcc

SEQ ID NO: 2773083 - DNA, 25 bp, Homo sapien
gagcctgttctttgcttttagtcaa

SEQ ID NO: 2773084 - DNA, 25 bp, Homo sapien
tatgacttataaatgctcaagccac

SEQ ID NO: 2773085 - DNA, 25 bp, Homo sapien
gatactcatagacatacaaggacag

SEQ ID NO: 2773086 - DNA, 25 bp, Homo sapien
tacagatggaccagagggatgaagc

SEQ ID NO: 2773087 - DNA, 25 bp, Homo sapien
gcattcacgcaggtttttatcttct

SEQ ID NO: 2773088 - DNA, 25 bp, Homo sapien
gcatctccagcattcacgcaggttt

SEQ ID NO: 2773089 - DNA, 25 bp, Homo sapien
ttgcttctttattgctccagaaagt

SEQ ID NO: 2773090 - DNA, 25 bp, Homo sapien
aaagtttcagtttctctttgatgcc

SEQ ID NO: 2773091 - DNA, 25 bp, Homo sapien
tttcagtttctctttgatgccctca

SEQ ID NO: 2773092 - DNA, 25 bp, Homo sapien
tgcttctttattgctccagaaagtt

SEQ ID NO: 2773093 - DNA, 25 bp, Homo sapien
tacatagaacctttcatgtaagcac

SEQ ID NO: 2773094 - DNA, 25 bp, Homo sapien
taattacaagtcttccatggggaca

SEQ ID NO: 2773095 - DNA, 25 bp, Homo sapien
taagcacattgggtaattacaagtc

SEQ ID NO: 2773096 - DNA, 25 bp, Homo sapien
cctttcatgtaagcacattgggtaa

SEQ ID NO: 2773097 - DNA, 25 bp, Homo sapien
tagcccacagggtctcaataacaga

SEQ ID NO: 2773098 - DNA, 25 bp, Homo sapien
ccttcttggcttgagaggaggtaca

SEQ ID NO: 2773099 - DNA, 25 bp, Homo sapien
ttctgaagtcattcccatgggcccc

SEQ ID NO: 2773100 - DNA, 25 bp, Homo sapien
tattatccgggatgcttctgaagtc

SEQ ID NO: 2773101 - DNA, 25 bp, Homo sapien
tattaaaatgtcacagcatgcctag

SEQ ID NO: 2773102 - DNA, 25 bp, Homo sapien
gtctgaaacacaagaaaactaataa

SEQ ID NO: 2773103 - DNA, 25 bp, Homo sapien
tagagaacagtttatatggctgcat

SEQ ID NO: 2773104 - DNA, 25 bp, Homo sapien
aaaatgaaaaacacgcagcctggta

SEQ ID NO: 2773105 - DNA, 25 bp, Homo sapien
ctgcattggcatgagttttggtgaa

SEQ ID NO: 2773106 - DNA, 25 bp, Homo sapien
tcaatttgcgatctgctgcattggc

SEQ ID NO: 2773107 - DNA, 25 bp, Homo sapien
gcattggcatgagttttggtgaaac

SEQ ID NO: 2773108 - DNA, 25 bp, Homo sapien
atttgcgatctgctgcattggcatg

SEQ ID NO: 2773109 - DNA, 25 bp, Homo sapien
tccaaatttcaatcatgtaggcaac

SEQ ID NO: 2773110 - DNA, 25 bp, Homo sapien
gccatggacattccctggagtttcc

SEQ ID NO: 2773111 - DNA, 25 bp, Homo sapien
ggagtttccatatgattttccatcc

SEQ ID NO: 2773112 - DNA, 25 bp, Homo sapien
gcaacaagcagccttgccatggaca

SEQ ID NO: 2773113 - DNA, 25 bp, Homo sapien
tcaatcagagtcaaccctttcttct

SEQ ID NO: 2773114 - DNA, 25 bp, Homo sapien
gagctcaatcagagtcaaccctttc

SEQ ID NO: 2773115 - DNA, 25 bp, Homo sapien
actcttctgtacgtcatccactgtc

SEQ ID NO: 2773116 - DNA, 25 bp, Homo sapien
gtactcttctgtacgtcatccactg

SEQ ID NO: 2773117 - DNA, 25 bp, Homo sapien
aaacagaaataacctcgcaagttcg

SEQ ID NO: 2773118 - DNA, 25 bp, Homo sapien
cctcgcaagttcgacgaggtcgggt

SEQ ID NO: 2773119 - DNA, 25 bp, Homo sapien
taattattatatggcacaaaacaga

SEQ ID NO: 2773120 - DNA, 25 bp, Homo sapien
gaaataacctcgcaagttcgacgag

SEQ ID NO: 2773121 - DNA, 25 bp, Homo sapien
cttttcagtaataatgcggttgaca

SEQ ID NO: 2773122 - DNA, 25 bp, Homo sapien
gtaataatgcggttgacacattgct

SEQ ID NO: 2773123 - DNA, 25 bp, Homo sapien
tccagtcaatggtaatgtacatttc

SEQ ID NO: 2773124 - DNA, 25 bp, Homo sapien
ttccagtcaatggtaatgtacattt

SEQ ID NO: 2773125 - DNA, 25 bp, Homo sapien
gtgatagcctgccaactcagcaatg

SEQ ID NO: 2773126 - DNA, 25 bp, Homo sapien
caggctaagtatatgggcagaggct

SEQ ID NO: 2773127 - DNA, 25 bp, Homo sapien
tctgaggcatgtctgaggaacacag

SEQ ID NO: 2773128 - DNA, 25 bp, Homo sapien
caatgtagaactggcctctgaggca

SEQ ID NO: 2773129 - DNA, 25 bp, Homo sapien
ttgaagctaggaaagaattatacgc

SEQ ID NO: 2773130 - DNA, 25 bp, Homo sapien
tgtggtaccttagaaagcctctgtt

SEQ ID NO: 2773131 - DNA, 25 bp, Homo sapien
gcaggcatttctatcataaaggaga

SEQ ID NO: 2773132 - DNA, 25 bp, Homo sapien
ccccaaacagaacctggctactgta

SEQ ID NO: 2773133 - DNA, 25 bp, Homo sapien
tcatttattttcctctatcagaaat

SEQ ID NO: 2773134 - DNA, 25 bp, Homo sapien
tattttcctctatcagaaattccag

SEQ ID NO: 2773135 - DNA, 25 bp, Homo sapien
catttattttcctctatcagaaatt

SEQ ID NO: 2773136 - DNA, 25 bp, Homo sapien
tttattttcctctatcagaaattcc

SEQ ID NO: 2773137 - DNA, 25 bp, Homo sapien
aaatccacagttaggtgacctggtg

SEQ ID NO: 2773138 - DNA, 25 bp, Homo sapien
gtacactgggttttgatgtattgca

SEQ ID NO: 2773139 - DNA, 25 bp, Homo sapien
taaaatccacagttaggtgacctgg

SEQ ID NO: 2773140 - DNA, 25 bp, Homo sapien
tgacctggtggtacactgggttttg

SEQ ID NO: 2773141 - DNA, 25 bp, Homo sapien
ggtgaccaccactttggttttcgca

SEQ ID NO: 2773142 - DNA, 25 bp, Homo sapien
ttcgcactggacactaaatccatag

SEQ ID NO: 2773143 - DNA, 25 bp, Homo sapien
ctttgcagaatgctccatggtgacc

SEQ ID NO: 2773144 - DNA, 25 bp, Homo sapien
tgcagaatgctccatggtgaccacc

SEQ ID NO: 2773145 - DNA, 25 bp, Homo sapien
aagaaatagtcctctaagcatgctc

SEQ ID NO: 2773146 - DNA, 25 bp, Homo sapien
taagcctctttatatctgtcttccc

SEQ ID NO: 2773147 - DNA, 25 bp, Homo sapien
tgtaagcctctttatatctgtcttc

SEQ ID NO: 2773148 - DNA, 25 bp, Homo sapien
aaagaaatagtcctctaagcatgct

SEQ ID NO: 2773149 - DNA, 25 bp, Homo sapien
tcttgaattttgatcctggtgggtg

SEQ ID NO: 2773150 - DNA, 25 bp, Homo sapien
attttgatcctggtgggtgccaaac

SEQ ID NO: 2773151 - DNA, 25 bp, Homo sapien
ttgaattttgatcctggtgggtgcc

SEQ ID NO: 2773152 - DNA, 25 bp, Homo sapien
gaattttgatcctggtgggtgccaa

SEQ ID NO: 2773153 - DNA, 25 bp, Homo sapien
ggaaacctgcatcgctcctagcatt

SEQ ID NO: 2773154 - DNA, 25 bp, Homo sapien
tccagttagccaggtcaccatattt

SEQ ID NO: 2773155 - DNA, 25 bp, Homo sapien
tagcattgtcagatcgacgtgtcca

SEQ ID NO: 2773156 - DNA, 25 bp, Homo sapien
tagccaggtcaccatatttggaaac

SEQ ID NO: 2773157 - DNA, 25 bp, Homo sapien
tcagagccttgctaacacactcaga

SEQ ID NO: 2773158 - DNA, 25 bp, Homo sapien
tcagctcattccatactgtctgaaa

SEQ ID NO: 2773159 - DNA, 25 bp, Homo sapien
cacactcagacgatgactcagctca

SEQ ID NO: 2773160 - DNA, 25 bp, Homo sapien
ttccatactgtctgaaacatgaggg

SEQ ID NO: 2773161 - DNA, 25 bp, Homo sapien
gcaaatgattcatcgctggagaaaa

SEQ ID NO: 2773162 - DNA, 25 bp, Homo sapien
ttgcaaatgattcatcgctggagaa

SEQ ID NO: 2773163 - DNA, 25 bp, Homo sapien
caaatgattcatcgctggagaaaaa

SEQ ID NO: 2773164 - DNA, 25 bp, Homo sapien
tcattgcaaatgattcatcgctgga

SEQ ID NO: 2773165 - DNA, 25 bp, Homo sapien
ttcatttggcctgaactctcgactt

SEQ ID NO: 2773166 - DNA, 25 bp, Homo sapien
ttctttttctgactcatctgtactc

SEQ ID NO: 2773167 - DNA, 25 bp, Homo sapien
tgaactctcgacttttcatctctct

SEQ ID NO: 2773168 - DNA, 25 bp, Homo sapien
tttttctgactcatctgtactctct

SEQ ID NO: 2773169 - DNA, 25 bp, Homo sapien
caaaaggaccacaggcagtctgaat

SEQ ID NO: 2773170 - DNA, 25 bp, Homo sapien
tctgaatatccctagctgtgcaaca

SEQ ID NO: 2773171 - DNA, 25 bp, Homo sapien
taaacagcatgtaagacgtagtgga

SEQ ID NO: 2773172 - DNA, 25 bp, Homo sapien
caaaattggaataggaaatagctcc

SEQ ID NO: 2773173 - DNA, 25 bp, Homo sapien
gagctattgctaaagggtacagtac

SEQ ID NO: 2773174 - DNA, 25 bp, Homo sapien
cacagtaggcctttcagagttgagt

SEQ ID NO: 2773175 - DNA, 25 bp, Homo sapien
caaccagaagctgtttcactccaaa

SEQ ID NO: 2773176 - DNA, 25 bp, Homo sapien
gaagcctgaaatttggaacatgcag

SEQ ID NO: 2773177 - DNA, 25 bp, Homo sapien
agtacctccttaagcacctctcctg

SEQ ID NO: 2773178 - DNA, 25 bp, Homo sapien
gcagagtacctccttaagcacctct

SEQ ID NO: 2773179 - DNA, 25 bp, Homo sapien
cctccttaagcacctctcctgctcc

SEQ ID NO: 2773180 - DNA, 25 bp, Homo sapien
cagcagagtacctccttaagcacct

SEQ ID NO: 2773181 - DNA, 25 bp, Homo sapien
ttccattaaatgtgccttcatctgc

SEQ ID NO: 2773182 - DNA, 25 bp, Homo sapien
attgatgagatctgcatcagcttca

SEQ ID NO: 2773183 - DNA, 25 bp, Homo sapien
cattgatgagatctgcatcagcttc

SEQ ID NO: 2773184 - DNA, 25 bp, Homo sapien
tcagcttcatgttgtcgtggatatg

SEQ ID NO: 2773185 - DNA, 25 bp, Homo sapien
cttcatgttgtcgtggatatggacc

SEQ ID NO: 2773186 - DNA, 25 bp, Homo sapien
agagggattcctatgcccaaattag

SEQ ID NO: 2773187 - DNA, 25 bp, Homo sapien
gccaggagagggattcctatgccca

SEQ ID NO: 2773188 - DNA, 25 bp, Homo sapien
ttcactttgaagatgaacagttata

SEQ ID NO: 2773189 - DNA, 25 bp, Homo sapien
caggagagggattcctatgcccaaa

SEQ ID NO: 2773190 - DNA, 25 bp, Homo sapien
tcccctatgtgagtttgcaccataa

SEQ ID NO: 2773191 - DNA, 25 bp, Homo sapien
tgtgagtttgcaccataacacaagg

SEQ ID NO: 2773192 - DNA, 25 bp, Homo sapien
gagtttgcaccataacacaaggtat

SEQ ID NO: 2773193 - DNA, 25 bp, Homo sapien
gagcagcaacatgctattcttttcc

SEQ ID NO: 2773194 - DNA, 25 bp, Homo sapien
aaagcaaaggctatgtctttgcccg

SEQ ID NO: 2773195 - DNA, 25 bp, Homo sapien
ggctatgtctttgcccgggctcaga

SEQ ID NO: 2773196 - DNA, 25 bp, Homo sapien
tgcaagaggtctaatagcctgatca

SEQ ID NO: 2773197 - DNA, 25 bp, Homo sapien
caagaggtctaatagcctgatcaat

SEQ ID NO: 2773198 - DNA, 25 bp, Homo sapien
ggccctcttgatgattcgttccctt

SEQ ID NO: 2773199 - DNA, 25 bp, Homo sapien
aaactcaagagcggccctcttgatg

SEQ ID NO: 2773200 - DNA, 25 bp, Homo sapien
ccctcttgatgattcgttcccttac

SEQ ID NO: 2773201 - DNA, 25 bp, Homo sapien
ctcaaactcaagagcggccctcttg

SEQ ID NO: 2773202 - DNA, 25 bp, Homo sapien
tctccctctttccggattgataaac

SEQ ID NO: 2773203 - DNA, 25 bp, Homo sapien
atctccctctttccggattgataaa

SEQ ID NO: 2773204 - DNA, 25 bp, Homo sapien
ctccctctttccggattgataaacg

SEQ ID NO: 2773205 - DNA, 25 bp, Homo sapien
taaggcgatgtacataaatctgagg

SEQ ID NO: 2773206 - DNA, 25 bp, Homo sapien
atttttctccctttataaggcgatg

SEQ ID NO: 2773207 - DNA, 25 bp, Homo sapien
gaatatggatgtcttctggagcaaa

SEQ ID NO: 2773208 - DNA, 25 bp, Homo sapien
gagcaaatgctccaatatccacaat

SEQ ID NO: 2773209 - DNA, 25 bp, Homo sapien
ttacttattgtgcaatgctcacaaa

SEQ ID NO: 2773210 - DNA, 25 bp, Homo sapien
acattttacttattgtgcaatgctc

SEQ ID NO: 2773211 - DNA, 25 bp, Homo sapien
ttattgtgcaatgctcacaaatagc

SEQ ID NO: 2773212 - DNA, 25 bp, Homo sapien
tgtgcaatgctcacaaatagctgaa

SEQ ID NO: 2773213 - DNA, 25 bp, Homo sapien
tacgaatatgtcaaattatcacagg

SEQ ID NO: 2773214 - DNA, 25 bp, Homo sapien
caggtctatcatgtatcaaaaaaga

SEQ ID NO: 2773215 - DNA, 25 bp, Homo sapien
ggtaccctgaaaacatacaggtcta

SEQ ID NO: 2773216 - DNA, 25 bp, Homo sapien
aagaggaggtcagcatgtaaggcat

SEQ ID NO: 2773217 - DNA, 25 bp, Homo sapien
tctgtgggtatagctgctggccatg

SEQ ID NO: 2773218 - DNA, 25 bp, Homo sapien
gaatcaacagcacttgactcacacc

SEQ ID NO: 2773219 - DNA, 25 bp, Homo sapien
ccaggaagctgggttctaatctaga

SEQ ID NO: 2773220 - DNA, 25 bp, Homo sapien
caagttcttatcctgggtcaagcag

SEQ ID NO: 2773221 - DNA, 25 bp, Homo sapien
gggttagtgccatacactcgcagca

SEQ ID NO: 2773222 - DNA, 25 bp, Homo sapien
cctagacctgtcaatcaagatggca

SEQ ID NO: 2773223 - DNA, 25 bp, Homo sapien
ttgttccatgcagaaagtgtctccc

SEQ ID NO: 2773224 - DNA, 25 bp, Homo sapien
tctgcataaacaaggccaagaagtg

SEQ ID NO: 2773225 - DNA, 25 bp, Homo sapien
aactggccgtcaagtataagtcaaa

SEQ ID NO: 2773226 - DNA, 25 bp, Homo sapien
gacagaggcatcatgcttttaaaag

SEQ ID NO: 2773227 - DNA, 25 bp, Homo sapien
gatggcagcaactacagctggatac

SEQ ID NO: 2773228 - DNA, 25 bp, Homo sapien
tgcttctaataaaatgagtccatca

SEQ ID NO: 2773229 - DNA, 25 bp, Homo sapien
caacagacaacagagctccaacatg

SEQ ID NO: 2773230 - DNA, 25 bp, Homo sapien
gaggaaacacgaagaaatccaagat

SEQ ID NO: 2773231 - DNA, 25 bp, Homo sapien
aaagctaccttttgcgagttaatca

SEQ ID NO: 2773232 - DNA, 25 bp, Homo sapien
ctagaaaatagcctcgaaagggcca

SEQ ID NO: 2773233 - DNA, 25 bp, Homo sapien
gttttgactgaaagctgaagttaac

SEQ ID NO: 2773234 - DNA, 25 bp, Homo sapien
ctgtctcgtaaactagccatggcac

SEQ ID NO: 2773235 - DNA, 25 bp, Homo sapien
gctgaagttaactaaaatagttgaa

SEQ ID NO: 2773236 - DNA, 25 bp, Homo sapien
gccttgggtaaacctttgctgtctc

SEQ ID NO: 2773237 - DNA, 25 bp, Homo sapien
gcacattggcaagttgaaattcctt

SEQ ID NO: 2773238 - DNA, 25 bp, Homo sapien
cattggcaagttgaaattccttgca

SEQ ID NO: 2773239 - DNA, 25 bp, Homo sapien
tttgcacattggcaagttgaaattc

SEQ ID NO: 2773240 - DNA, 25 bp, Homo sapien
tggcaagttgaaattccttgcactt

SEQ ID NO: 2773241 - DNA, 25 bp, Homo sapien
aaatcacgtttcctgctcggtccgc

SEQ ID NO: 2773242 - DNA, 25 bp, Homo sapien
aagtgctgaccattgaactccctca

SEQ ID NO: 2773243 - DNA, 25 bp, Homo sapien
tcaccaaagcaaaatcccctgtaat

SEQ ID NO: 2773244 - DNA, 25 bp, Homo sapien
aaatcccctgtaattgcttcctcca

SEQ ID NO: 2773245 - DNA, 25 bp, Homo sapien
gcctgcacggatcctctctgcaagt

SEQ ID NO: 2773246 - DNA, 25 bp, Homo sapien
ctttgttgtatttgatgggcgatcc

SEQ ID NO: 2773247 - DNA, 25 bp, Homo sapien
tccttcttgtaccagggtcccatac

SEQ ID NO: 2773248 - DNA, 25 bp, Homo sapien
tggcttactggcaatggcaacactg

SEQ ID NO: 2773249 - DNA, 25 bp, Homo sapien
ctaattcaccagataagtactgtcg

SEQ ID NO: 2773250 - DNA, 25 bp, Homo sapien
gagaccatgcgttttatctgcttgg

SEQ ID NO: 2773251 - DNA, 25 bp, Homo sapien
tctgcttggaccgaagcaaaagccc

SEQ ID NO: 2773252 - DNA, 25 bp, Homo sapien
taagtactgtcgttcaaattctgca

SEQ ID NO: 2773253 - DNA, 25 bp, Homo sapien
aagcatctataagattctctggaat

SEQ ID NO: 2773254 - DNA, 25 bp, Homo sapien
gcatctataagattctctggaattc

SEQ ID NO: 2773255 - DNA, 25 bp, Homo sapien
catctataagattctctggaattcc

SEQ ID NO: 2773256 - DNA, 25 bp, Homo sapien
taaagcatctataagattctctgga

SEQ ID NO: 2773257 - DNA, 25 bp, Homo sapien
ctgtataaaacttggtatggcgatg

SEQ ID NO: 2773258 - DNA, 25 bp, Homo sapien
caaccaaaaccgtggcaccatcagg

SEQ ID NO: 2773259 - DNA, 25 bp, Homo sapien
tataaaacttggtatggcgatgagc

SEQ ID NO: 2773260 - DNA, 25 bp, Homo sapien
aaaccgtggcaccatcagggatgtc

SEQ ID NO: 2773261 - DNA, 25 bp, Homo sapien
tggtggaaaaggaacaaacacatcc

SEQ ID NO: 2773262 - DNA, 25 bp, Homo sapien
ctggtggaaaaggaacaaacacatc

SEQ ID NO: 2773263 - DNA, 25 bp, Homo sapien
catctggttgaggagacaatataca

SEQ ID NO: 2773264 - DNA, 25 bp, Homo sapien
gagggttctctcatccgtactttaa

SEQ ID NO: 2773265 - DNA, 25 bp, Homo sapien
tggtacagttcaacagaagcagcag

SEQ ID NO: 2773266 - DNA, 25 bp, Homo sapien
ttgagggagactaagtgtaaggcat

SEQ ID NO: 2773267 - DNA, 25 bp, Homo sapien
tcggcccaagggtatcgctgtgctc

SEQ ID NO: 2773268 - DNA, 25 bp, Homo sapien
tttatatatccaagtctatctgcag

SEQ ID NO: 2773269 - DNA, 25 bp, Homo sapien
cagcaccgctgcaatctcactgaag

SEQ ID NO: 2773270 - DNA, 25 bp, Homo sapien
gagtaaaatggtccagttctgaacc

SEQ ID NO: 2773271 - DNA, 25 bp, Homo sapien
ggaatgcctccggataccactcggt

SEQ ID NO: 2773272 - DNA, 25 bp, Homo sapien
cgaggacagtgcataaggcaaaacc

SEQ ID NO: 2773273 - DNA, 25 bp, Homo sapien
ggcaaaaccacaagtcagtccacgg

SEQ ID NO: 2773274 - DNA, 25 bp, Homo sapien
taccactcggtggagagtcggcagt

SEQ ID NO: 2773275 - DNA, 25 bp, Homo sapien
tggtttcccagcttggccggcaaga

SEQ ID NO: 2773276 - DNA, 25 bp, Homo sapien
catggctaacccagcctcaggttct

SEQ ID NO: 2773277 - DNA, 25 bp, Homo sapien
gttctgggcctctagaggttcctct

SEQ ID NO: 2773278 - DNA, 25 bp, Homo sapien
cggtgaactcgagcagagccatggc

SEQ ID NO: 2773279 - DNA, 25 bp, Homo sapien
cgcgccacggatgccagatcccagg

SEQ ID NO: 2773280 - DNA, 25 bp, Homo sapien
caagcaaaggcggtcatccgagggg

SEQ ID NO: 2773281 - DNA, 25 bp, Homo sapien
gtgaccagggcaccgcgccacggat

SEQ ID NO: 2773282 - DNA, 25 bp, Homo sapien
ggccaggaacgcgtcgccgcgtgtc

SEQ ID NO: 2773283 - DNA, 25 bp, Homo sapien
cgggcaccactcagggtttggtcca

SEQ ID NO: 2773284 - DNA, 25 bp, Homo sapien
cactcagggtttggtccacgttctt

SEQ ID NO: 2773285 - DNA, 25 bp, Homo sapien
acgcgggcaccactcagggtttggt

SEQ ID NO: 2773286 - DNA, 25 bp, Homo sapien
gcaccactcagggtttggtccacgt

SEQ ID NO: 2773287 - DNA, 25 bp, Homo sapien
cggaggagaggagtttgagagccgc

SEQ ID NO: 2773288 - DNA, 25 bp, Homo sapien
ggttgccccagatccgcgggcagag

SEQ ID NO: 2773289 - DNA, 25 bp, Homo sapien
aggagaggagtttgagagccgccat

SEQ ID NO: 2773290 - DNA, 25 bp, Homo sapien
gaggcgcagagccgaagcccggagg

SEQ ID NO: 2773291 - DNA, 25 bp, Homo sapien
agcgcgcgtttgagcgtcggtgcgc

SEQ ID NO: 2773292 - DNA, 25 bp, Homo sapien
gttggagcgcgcgtttgagcgtcgg

SEQ ID NO: 2773293 - DNA, 25 bp, Homo sapien
ggctgcgggttggagcgcgcgtttg

SEQ ID NO: 2773294 - DNA, 25 bp, Homo sapien
gctgcgggttggagcgcgcgtttga

SEQ ID NO: 2773295 - DNA, 25 bp, Homo sapien
cgtgtgcagctgtgttggcgcacac

SEQ ID NO: 2773296 - DNA, 25 bp, Homo sapien
gggcgggctggaggctcgacagcgc

SEQ ID NO: 2773297 - DNA, 25 bp, Homo sapien
tcgacagcgcgtcgatgacgtcctc

SEQ ID NO: 2773298 - DNA, 25 bp, Homo sapien
tcctctcagcgcctcaggtgtctgg

SEQ ID NO: 2773299 - DNA, 25 bp, Homo sapien
ctgtcggtcaagaggtgtgagcaac

SEQ ID NO: 2773300 - DNA, 25 bp, Homo sapien
agcacttgcctcgaactgtcggtca

SEQ ID NO: 2773301 - DNA, 25 bp, Homo sapien
gaacaagattaagactggacctctg

SEQ ID NO: 2773302 - DNA, 25 bp, Homo sapien
gacctgagtttagcacaccttttct

SEQ ID NO: 2773303 - DNA, 25 bp, Homo sapien
gtttgcgaatttcgggctctttctc

SEQ ID NO: 2773304 - DNA, 25 bp, Homo sapien
atccaagtttgcgaatttcgggctc

SEQ ID NO: 2773305 - DNA, 25 bp, Homo sapien
gctctttctcgcactggagtcccag

SEQ ID NO: 2773306 - DNA, 25 bp, Homo sapien
ctttctcgcactggagtcccagcaa

SEQ ID NO: 2773307 - DNA, 25 bp, Homo sapien
gcattccaattgagtctgcttttcc

SEQ ID NO: 2773308 - DNA, 25 bp, Homo sapien
attccaattgagtctgcttttccac

SEQ ID NO: 2773309 - DNA, 25 bp, Homo sapien
tccaattgagtctgcttttccactt

SEQ ID NO: 2773310 - DNA, 25 bp, Homo sapien
cattccaattgagtctgcttttcca

SEQ ID NO: 2773311 - DNA, 25 bp, Homo sapien
aatagcctagcatctcatttctcag

SEQ ID NO: 2773312 - DNA, 25 bp, Homo sapien
cacagttgatggtgtactccccagg

SEQ ID NO: 2773313 - DNA, 25 bp, Homo sapien
gcaaggcatgactgtgtggcaccat

SEQ ID NO: 2773314 - DNA, 25 bp, Homo sapien
gatacatgcaggtaatgtgtcagag

SEQ ID NO: 2773315 - DNA, 25 bp, Homo sapien
tctgtaagtcccatgcagtgaagct

SEQ ID NO: 2773316 - DNA, 25 bp, Homo sapien
gccatcaatgagaccgtcatccttg

SEQ ID NO: 2773317 - DNA, 25 bp, Homo sapien
cattgtcccttgaaaggtaataggc

SEQ ID NO: 2773318 - DNA, 25 bp, Homo sapien
ctggaggaacaagattggcaaactc

SEQ ID NO: 2773319 - DNA, 25 bp, Homo sapien
ttttggaagttatgtattgtgttcc

SEQ ID NO: 2773320 - DNA, 25 bp, Homo sapien
aagttatgtattgtgttccttctgc

SEQ ID NO: 2773321 - DNA, 25 bp, Homo sapien
tatttctaatcccttgtgtttagta

SEQ ID NO: 2773322 - DNA, 25 bp, Homo sapien
cacagccctgtaattagtctgtttt

SEQ ID NO: 2773323 - DNA, 25 bp, Homo sapien
gaggttgcctgcttcctatcaaagg

SEQ ID NO: 2773324 - DNA, 25 bp, Homo sapien
aaggcgactctgtgctacatgttgg

SEQ ID NO: 2773325 - DNA, 25 bp, Homo sapien
gggtagtccttcaaagtagaatcac

SEQ ID NO: 2773326 - DNA, 25 bp, Homo sapien
ttatgtttgttactagggtggcctc

SEQ ID NO: 2773327 - DNA, 25 bp, Homo sapien
gaccctgaggatatagctttttaaa

SEQ ID NO: 2773328 - DNA, 25 bp, Homo sapien
ttgggaactgtctactgctttagca

SEQ ID NO: 2773329 - DNA, 25 bp, Homo sapien
tagaatgaagtaacctcaaggtacc

SEQ ID NO: 2773330 - DNA, 25 bp, Homo sapien
tagtggaggaagttagacaagcatt

SEQ ID NO: 2773331 - DNA, 25 bp, Homo sapien
agatacatttaatatagccacaatt

SEQ ID NO: 2773332 - DNA, 25 bp, Homo sapien
gccacaattaaagtatgtattatgt

SEQ ID NO: 2773333 - DNA, 25 bp, Homo sapien
ttacagcggtattacattaagatac

SEQ ID NO: 2773334 - DNA, 25 bp, Homo sapien
tatgtatttatgctggtgttctttc

SEQ ID NO: 2773335 - DNA, 25 bp, Homo sapien
aaggaactggtgattttgctggaaa

SEQ ID NO: 2773336 - DNA, 25 bp, Homo sapien
agttatgatcctttgctgatagcag

SEQ ID NO: 2773337 - DNA, 25 bp, Homo sapien
caactacgaaactaaaatgttcagt

SEQ ID NO: 2773338 - DNA, 25 bp, Homo sapien
aatgtacactctttgatttggtctg

SEQ ID NO: 2773339 - DNA, 25 bp, Homo sapien
gttcacaggagatggcgccaagcac

SEQ ID NO: 2773340 - DNA, 25 bp, Homo sapien
tgaagaagtctgttcgccctgaaat

SEQ ID NO: 2773341 - DNA, 25 bp, Homo sapien
gataagtcataatctcccatgggtg

SEQ ID NO: 2773342 - DNA, 25 bp, Homo sapien
aagcacgtgcataacttcttggcca

SEQ ID NO: 2773343 - DNA, 25 bp, Homo sapien
gacaggttagcataacatgcctcta

SEQ ID NO: 2773344 - DNA, 25 bp, Homo sapien
acaggttagcataacatgcctctat

SEQ ID NO: 2773345 - DNA, 25 bp, Homo sapien
agacaggttagcataacatgcctct

SEQ ID NO: 2773346 - DNA, 25 bp, Homo sapien
tagacaggttagcataacatgcctc

SEQ ID NO: 2773347 - DNA, 25 bp, Homo sapien
gtaactcctgtaaggctgcctggat

SEQ ID NO: 2773348 - DNA, 25 bp, Homo sapien
cagcaatgtaactcctgtaaggctg

SEQ ID NO: 2773349 - DNA, 25 bp, Homo sapien
aatgtaactcctgtaaggctgcctg

SEQ ID NO: 2773350 - DNA, 25 bp, Homo sapien
gcaatgtaactcctgtaaggctgcc

SEQ ID NO: 2773351 - DNA, 25 bp, Homo sapien
tcaacaggagtagctccaatggcag

SEQ ID NO: 2773352 - DNA, 25 bp, Homo sapien
ttcagcacagcctggtggtcagtat

SEQ ID NO: 2773353 - DNA, 25 bp, Homo sapien
cagcacagcctggtggtcagtattc

SEQ ID NO: 2773354 - DNA, 25 bp, Homo sapien
tcagcacagcctggtggtcagtatt

SEQ ID NO: 2773355 - DNA, 25 bp, Homo sapien
gcagggtttccaatcacagcaatga

SEQ ID NO: 2773356 - DNA, 25 bp, Homo sapien
tcagcagggtttccaatcacagcaa

SEQ ID NO: 2773357 - DNA, 25 bp, Homo sapien
cagcagggtttccaatcacagcaat

SEQ ID NO: 2773358 - DNA, 25 bp, Homo sapien
atcagcagggtttccaatcacagca

SEQ ID NO: 2773359 - DNA, 25 bp, Homo sapien
ttcttttgtagaggtactgttccat

SEQ ID NO: 2773360 - DNA, 25 bp, Homo sapien
ctgccagcagaagcctctaggtcct

SEQ ID NO: 2773361 - DNA, 25 bp, Homo sapien
cagcagaagcctctaggtcctcttc

SEQ ID NO: 2773362 - DNA, 25 bp, Homo sapien
gatgcagatgctatcactttttctt

SEQ ID NO: 2773363 - DNA, 25 bp, Homo sapien
taaatctgcaactggttgtgatcgg

SEQ ID NO: 2773364 - DNA, 25 bp, Homo sapien
ggctagtcaactgaagcagtgagtg

SEQ ID NO: 2773365 - DNA, 25 bp, Homo sapien
tcaactgaagcagtgagtgtggaaa

SEQ ID NO: 2773366 - DNA, 25 bp, Homo sapien
aaacaccattgcactcagagcagtc

SEQ ID NO: 2773367 - DNA, 25 bp, Homo sapien
attgccactgtcatagggccaacac

SEQ ID NO: 2773368 - DNA, 25 bp, Homo sapien
cattagcattgccactgtcataggg

SEQ ID NO: 2773369 - DNA, 25 bp, Homo sapien
tagcattgccactgtcatagggcca

SEQ ID NO: 2773370 - DNA, 25 bp, Homo sapien
gcattgccactgtcatagggccaac

SEQ ID NO: 2773371 - DNA, 25 bp, Homo sapien
ttgcctaactcctttaaaatccaca

SEQ ID NO: 2773372 - DNA, 25 bp, Homo sapien
cagttacaggatcttgaactgtatc

SEQ ID NO: 2773373 - DNA, 25 bp, Homo sapien
ttgaactgtatctattcccacatca

SEQ ID NO: 2773374 - DNA, 25 bp, Homo sapien
cttaggtttagcagttacaggatct

SEQ ID NO: 2773375 - DNA, 25 bp, Homo sapien
tctgcaagaattgtatgtttcctca

SEQ ID NO: 2773376 - DNA, 25 bp, Homo sapien
atatctgcaagaattgtatgtttcc

SEQ ID NO: 2773377 - DNA, 25 bp, Homo sapien
ctgcaacagatattacaatatctgc

SEQ ID NO: 2773378 - DNA, 25 bp, Homo sapien
gcaacagatattacaatatctgcaa

SEQ ID NO: 2773379 - DNA, 25 bp, Homo sapien
gtgacattgcaataggcattacaac

SEQ ID NO: 2773380 - DNA, 25 bp, Homo sapien
cagtgacattgcaataggcattaca

SEQ ID NO: 2773381 - DNA, 25 bp, Homo sapien
gcagtgacattgcaataggcattac

SEQ ID NO: 2773382 - DNA, 25 bp, Homo sapien
tgcagtgacattgcaataggcatta

SEQ ID NO: 2773383 - DNA, 25 bp, Homo sapien
tggtatacggaatactggtccagat

SEQ ID NO: 2773384 - DNA, 25 bp, Homo sapien
ggtatacggaatactggtccagata

SEQ ID NO: 2773385 - DNA, 25 bp, Homo sapien
ctggtatacggaatactggtccaga

SEQ ID NO: 2773386 - DNA, 25 bp, Homo sapien
gtatacggaatactggtccagatac

SEQ ID NO: 2773387 - DNA, 25 bp, Homo sapien
catgaaagccatcaacatccttatc

SEQ ID NO: 2773388 - DNA, 25 bp, Homo sapien
caacatccttatctggaaaaacaga

SEQ ID NO: 2773389 - DNA, 25 bp, Homo sapien
gaattgcagatctttctctcatcaa

SEQ ID NO: 2773390 - DNA, 25 bp, Homo sapien
gaaaaacagaattgcagatctttct

SEQ ID NO: 2773391 - DNA, 25 bp, Homo sapien
ggtggagaaggaggccatctacatt

SEQ ID NO: 2773392 - DNA, 25 bp, Homo sapien
aggtggagaaggaggccatctacat

SEQ ID NO: 2773393 - DNA, 25 bp, Homo sapien
ctggaagaggcaggtggagaaggag

SEQ ID NO: 2773394 - DNA, 25 bp, Homo sapien
tggagaaggaggccatctacattac

SEQ ID NO: 2773395 - DNA, 25 bp, Homo sapien
tgaccagagccacgctcaggcatgg

SEQ ID NO: 2773396 - DNA, 25 bp, Homo sapien
aggcatggccctttgttgccagagg

SEQ ID NO: 2773397 - DNA, 25 bp, Homo sapien
caggcatggccctttgttgccagag

SEQ ID NO: 2773398 - DNA, 25 bp, Homo sapien
gcaggagttttgctgaccagagcca

SEQ ID NO: 2773399 - DNA, 25 bp, Homo sapien
ttcatttagttggcaatgggttctt

SEQ ID NO: 2773400 - DNA, 25 bp, Homo sapien
tcatttagttggcaatgggttcttc

SEQ ID NO: 2773401 - DNA, 25 bp, Homo sapien
catttagttggcaatgggttcttcc

SEQ ID NO: 2773402 - DNA, 25 bp, Homo sapien
tgacagaccaagagtgagtatctga

SEQ ID NO: 2773403 - DNA, 25 bp, Homo sapien
caatcatccaatccggacagattct

SEQ ID NO: 2773404 - DNA, 25 bp, Homo sapien
ttaataaactgcacacgcttaagcg

SEQ ID NO: 2773405 - DNA, 25 bp, Homo sapien
caatccaatcatccaatccggacag

SEQ ID NO: 2773406 - DNA, 25 bp, Homo sapien
attcttaataaactgcacacgctta

SEQ ID NO: 2773407 - DNA, 25 bp, Homo sapien
tgcttctgtactctcacttcttcgt

SEQ ID NO: 2773408 - DNA, 25 bp, Homo sapien
tgtactctcacttcttcgtactcag

SEQ ID NO: 2773409 - DNA, 25 bp, Homo sapien
tactctcacttcttcgtactcaggg

SEQ ID NO: 2773410 - DNA, 25 bp, Homo sapien
tcacttcttcgtactcagggctaga

SEQ ID NO: 2773411 - DNA, 25 bp, Homo sapien
tttgtgccaaattcaaccccttctg

SEQ ID NO: 2773412 - DNA, 25 bp, Homo sapien
ggtatcgaaagatacactgaattcc

SEQ ID NO: 2773413 - DNA, 25 bp, Homo sapien
ctattctggtaactgaaagtttggt

SEQ ID NO: 2773414 - DNA, 25 bp, Homo sapien
aagaagaggtaaggcaaggaacaat

SEQ ID NO: 2773415 - DNA, 25 bp, Homo sapien
tgaattcctttcttatgtgatccgt

SEQ ID NO: 2773416 - DNA, 25 bp, Homo sapien
taggacccgataggactcatcttca

SEQ ID NO: 2773417 - DNA, 25 bp, Homo sapien
tccacagttcctcagtgactaagat

SEQ ID NO: 2773418 - DNA, 25 bp, Homo sapien
tcctcagtgactaagatagaaccta

SEQ ID NO: 2773419 - DNA, 25 bp, Homo sapien
cacccttactcaatgacatagagag

SEQ ID NO: 2773420 - DNA, 25 bp, Homo sapien
gtgtctctataccttgaagctttgc

SEQ ID NO: 2773421 - DNA, 25 bp, Homo sapien
ttcttcagtgtctctataccttgaa

SEQ ID NO: 2773422 - DNA, 25 bp, Homo sapien
ttcagtgtctctataccttgaagct

SEQ ID NO: 2773423 - DNA, 25 bp, Homo sapien
cacttggaactttctgtgcttcttt

SEQ ID NO: 2773424 - DNA, 25 bp, Homo sapien
taactggagtgatcgttttggtgat

SEQ ID NO: 2773425 - DNA, 25 bp, Homo sapien
actggagtgatcgttttggtgatga

SEQ ID NO: 2773426 - DNA, 25 bp, Homo sapien
aatgtaactggagtgatcgttttgg

SEQ ID NO: 2773427 - DNA, 25 bp, Homo sapien
tgtaactggagtgatcgttttggtg

SEQ ID NO: 2773428 - DNA, 25 bp, Homo sapien
catttttcatgtctagttcggaggt

SEQ ID NO: 2773429 - DNA, 25 bp, Homo sapien
tcatgtctagttcggaggttggatg

SEQ ID NO: 2773430 - DNA, 25 bp, Homo sapien
tttttcatgtctagttcggaggttg

SEQ ID NO: 2773431 - DNA, 25 bp, Homo sapien
tttcatgtctagttcggaggttgga

SEQ ID NO: 2773432 - DNA, 25 bp, Homo sapien
cagcactgtcagttctatggaggca

SEQ ID NO: 2773433 - DNA, 25 bp, Homo sapien
gaaacttggatactatgagctgcca

SEQ ID NO: 2773434 - DNA, 25 bp, Homo sapien
taatgagttaagataggagcttccc

SEQ ID NO: 2773435 - DNA, 25 bp, Homo sapien
taaacaccgaatgagaattgcactg

SEQ ID NO: 2773436 - DNA, 25 bp, Homo sapien
gcttgcctggcttatgagtgctgtc

SEQ ID NO: 2773437 - DNA, 25 bp, Homo sapien
tattatcctaggagctgacttccca

SEQ ID NO: 2773438 - DNA, 25 bp, Homo sapien
gtagcatagcatatacacccttctg

SEQ ID NO: 2773439 - DNA, 25 bp, Homo sapien
aaattagatgcccatggaagactca

SEQ ID NO: 2773440 - DNA, 25 bp, Homo sapien
aattcatcccatgaacaactttctg

SEQ ID NO: 2773441 - DNA, 25 bp, Homo sapien
caattcatcccatgaacaactttct

SEQ ID NO: 2773442 - DNA, 25 bp, Homo sapien
caatgacatagaggaaagaaggtct

SEQ ID NO: 2773443 - DNA, 25 bp, Homo sapien
ggaagaggaccaagttagctgataa

SEQ ID NO: 2773444 - DNA, 25 bp, Homo sapien
gaaggtctgggtacacagctgccct

SEQ ID NO: 2773445 - DNA, 25 bp, Homo sapien
aaaatttcattgaccgggctgggca

SEQ ID NO: 2773446 - DNA, 25 bp, Homo sapien
cattaattccttggtcctgagataa

SEQ ID NO: 2773447 - DNA, 25 bp, Homo sapien
attaattccttggtcctgagataac

SEQ ID NO: 2773448 - DNA, 25 bp, Homo sapien
tctccttcttgtttagctatccaca

SEQ ID NO: 2773449 - DNA, 25 bp, Homo sapien
ttgtttagctatccacattcttcct

SEQ ID NO: 2773450 - DNA, 25 bp, Homo sapien
caaaccatccattcataatgcagcc

SEQ ID NO: 2773451 - DNA, 25 bp, Homo sapien
tccaaaccatccattcataatgcag

SEQ ID NO: 2773452 - DNA, 25 bp, Homo sapien
ttgctgggtttcagtaccgatagtc

SEQ ID NO: 2773453 - DNA, 25 bp, Homo sapien
cttcctcaagttagcaagaccatct

SEQ ID NO: 2773454 - DNA, 25 bp, Homo sapien
tctggagcttccagctgctacagct

SEQ ID NO: 2773455 - DNA, 25 bp, Homo sapien
tcagcttgctgggtttcagtaccga

SEQ ID NO: 2773456 - DNA, 25 bp, Homo sapien
ctagaaagttcaaggtcgagaggct

SEQ ID NO: 2773457 - DNA, 25 bp, Homo sapien
agggcatcagtctcttccccgtgag

SEQ ID NO: 2773458 - DNA, 25 bp, Homo sapien
ttttgctggtgaaaacattctggag

SEQ ID NO: 2773459 - DNA, 25 bp, Homo sapien
ttctggagagtcctgaggcattgca

SEQ ID NO: 2773460 - DNA, 25 bp, Homo sapien
ctgacaaccaaagtaagaagcaaat

SEQ ID NO: 2773461 - DNA, 25 bp, Homo sapien
tgaatagtgtggtacattctaacaa

SEQ ID NO: 2773462 - DNA, 25 bp, Homo sapien
gaatagtgtggtacattctaacaat

SEQ ID NO: 2773463 - DNA, 25 bp, Homo sapien
atagtgtggtacattctaacaatga

SEQ ID NO: 2773464 - DNA, 25 bp, Homo sapien
tcagttcagaggcatcgtggcaagg

SEQ ID NO: 2773465 - DNA, 25 bp, Homo sapien
tcttctgagagtgctgtgcgcatat

SEQ ID NO: 2773466 - DNA, 25 bp, Homo sapien
ttctgagagtgctgtgcgcatatct

SEQ ID NO: 2773467 - DNA, 25 bp, Homo sapien
gaggcatcgtggcaaggtgtatttc

SEQ ID NO: 2773468 - DNA, 25 bp, Homo sapien
taaaacggccaggttctgaggtctg

SEQ ID NO: 2773469 - DNA, 25 bp, Homo sapien
gggcgtactcagtgccaaaccttat

SEQ ID NO: 2773470 - DNA, 25 bp, Homo sapien
tctgggaagggcgtactcagtgcca

SEQ ID NO: 2773471 - DNA, 25 bp, Homo sapien
gaagggcgtactcagtgccaaacct

SEQ ID NO: 2773472 - DNA, 25 bp, Homo sapien
ggaaatagtgacatacttctcagtg

SEQ ID NO: 2773473 - DNA, 25 bp, Homo sapien
cttgggttcttgtgaacatgtggga

SEQ ID NO: 2773474 - DNA, 25 bp, Homo sapien
aatagtgacatacttctcagtgtcc

SEQ ID NO: 2773475 - DNA, 25 bp, Homo sapien
ttgttgcttgggttcttgtgaacat

SEQ ID NO: 2773476 - DNA, 25 bp, Homo sapien
tggaagctccatggatgactgaagg

SEQ ID NO: 2773477 - DNA, 25 bp, Homo sapien
cctattaaaatgagagttaactgct

SEQ ID NO: 2773478 - DNA, 25 bp, Homo sapien
tccctgtgcagaggtcattgaggtt

SEQ ID NO: 2773479 - DNA, 25 bp, Homo sapien
ggttgtcatgggtatcctattaaaa

SEQ ID NO: 2773480 - DNA, 25 bp, Homo sapien
tggaaaatatgcttcacacccaatt

SEQ ID NO: 2773481 - DNA, 25 bp, Homo sapien
aatatgcttcacacccaatttcaga

SEQ ID NO: 2773482 - DNA, 25 bp, Homo sapien
acagctccttctcgcacagaaacaa

SEQ ID NO: 2773483 - DNA, 25 bp, Homo sapien
ccttctcgcacagaaacaaactctt

SEQ ID NO: 2773484 - DNA, 25 bp, Homo sapien
gctcctagcagaaagctactgtccc

SEQ ID NO: 2773485 - DNA, 25 bp, Homo sapien
cctagcagaaagctactgtccctat

SEQ ID NO: 2773486 - DNA, 25 bp, Homo sapien
gctgactataagcagctcctagcag

SEQ ID NO: 2773487 - DNA, 25 bp, Homo sapien
gcaccctgctgactataagcagctc

SEQ ID NO: 2773488 - DNA, 25 bp, Homo sapien
cccagctatacccttgcaaatctgt

SEQ ID NO: 2773489 - DNA, 25 bp, Homo sapien
gttaacatggtttcccccagctata

SEQ ID NO: 2773490 - DNA, 25 bp, Homo sapien
gctatacccttgcaaatctgtccag

SEQ ID NO: 2773491 - DNA, 25 bp, Homo sapien
gacattctgaagactgttaacatgg

SEQ ID NO: 2773492 - DNA, 25 bp, Homo sapien
agtcctgacttctctctagagccat

SEQ ID NO: 2773493 - DNA, 25 bp, Homo sapien
taaacgccataagcaggcattcaat

SEQ ID NO: 2773494 - DNA, 25 bp, Homo sapien
tatctctaggaaccaattccttttg

SEQ ID NO: 2773495 - DNA, 25 bp, Homo sapien
attcagcttcacagttatctctagg

SEQ ID NO: 2773496 - DNA, 25 bp, Homo sapien
tccttttgaaggcatcactcagcaa

SEQ ID NO: 2773497 - DNA, 25 bp, Homo sapien
gactgtgagaatccaatacactgag

SEQ ID NO: 2773498 - DNA, 25 bp, Homo sapien
ggttgactgtgagaatccaatacac

SEQ ID NO: 2773499 - DNA, 25 bp, Homo sapien
tgctggttgactgtgagaatccaat

SEQ ID NO: 2773500 - DNA, 25 bp, Homo sapien
ctgtgagaatccaatacactgagac

SEQ ID NO: 2773501 - DNA, 25 bp, Homo sapien
tctccttgccagtatgagcagggag

SEQ ID NO: 2773502 - DNA, 25 bp, Homo sapien
tgattgaacctcctattcctctcct

SEQ ID NO: 2773503 - DNA, 25 bp, Homo sapien
gggtcccctgacttcgccctggcag

SEQ ID NO: 2773504 - DNA, 25 bp, Homo sapien
tgttgcatgagcacccaatctgggt

SEQ ID NO: 2773505 - DNA, 25 bp, Homo sapien
cagtctgtaccatacatgggctgag

SEQ ID NO: 2773506 - DNA, 25 bp, Homo sapien
gaatgctgccgatatgaacttcatc

SEQ ID NO: 2773507 - DNA, 25 bp, Homo sapien
gatgcccactctagcatgccttagg

SEQ ID NO: 2773508 - DNA, 25 bp, Homo sapien
tgattcatggaacggaggccacagc

SEQ ID NO: 2773509 - DNA, 25 bp, Homo sapien
tctcctagaattgaagtcagagtct

SEQ ID NO: 2773510 - DNA, 25 bp, Homo sapien
ctcatgcagggtttgtgatagtcca

SEQ ID NO: 2773511 - DNA, 25 bp, Homo sapien
aagtcagagtctcaagctgccttgt

SEQ ID NO: 2773512 - DNA, 25 bp, Homo sapien
ttctctcctagaattgaagtcagag

SEQ ID NO: 2773513 - DNA, 25 bp, Homo sapien
tacccagcctactgtctttttctat

SEQ ID NO: 2773514 - DNA, 25 bp, Homo sapien
ctataaatataaatcatcatgctac

SEQ ID NO: 2773515 - DNA, 25 bp, Homo sapien
cgtacccagcctactgtctttttct

SEQ ID NO: 2773516 - DNA, 25 bp, Homo sapien
ccagcctactgtctttttctataaa

SEQ ID NO: 2773517 - DNA, 25 bp, Homo sapien
ggcctgcgataaggagccttgtgtt

SEQ ID NO: 2773518 - DNA, 25 bp, Homo sapien
gattggatttgagccctttgaggcc

SEQ ID NO: 2773519 - DNA, 25 bp, Homo sapien
ggagccttgtgttgtaaaagattgg

SEQ ID NO: 2773520 - DNA, 25 bp, Homo sapien
ttagtccgggtaagctcagttgacc

SEQ ID NO: 2773521 - DNA, 25 bp, Homo sapien
gataccaaagtcaatattcttttca

SEQ ID NO: 2773522 - DNA, 25 bp, Homo sapien
aaaaggcctttgattctgtactttg

SEQ ID NO: 2773523 - DNA, 25 bp, Homo sapien
aggcctttgattctgtactttgtcc

SEQ ID NO: 2773524 - DNA, 25 bp, Homo sapien
caagaaaaggcctttgattctgtac

SEQ ID NO: 2773525 - DNA, 25 bp, Homo sapien
tcatttacaagaaaaggcctttgat

SEQ ID NO: 2773526 - DNA, 25 bp, Homo sapien
tgctgcagtcgttttgttgcttgga

SEQ ID NO: 2773527 - DNA, 25 bp, Homo sapien
aatgctgcagtcgttttgttgcttg

SEQ ID NO: 2773528 - DNA, 25 bp, Homo sapien
gcagtcgttttgttgcttggatata

SEQ ID NO: 2773529 - DNA, 25 bp, Homo sapien
ctgcagtcgttttgttgcttggata

SEQ ID NO: 2773530 - DNA, 25 bp, Homo sapien
tctcagctagggctgtgatttgctt

SEQ ID NO: 2773531 - DNA, 25 bp, Homo sapien
tgaaagacagcgaacacaaacctgt

SEQ ID NO: 2773532 - DNA, 25 bp, Homo sapien
ccatatcgaacttgtataacagtca

SEQ ID NO: 2773533 - DNA, 25 bp, Homo sapien
cacagatgaatttgaagctcacaca

SEQ ID NO: 2773534 - DNA, 25 bp, Homo sapien
cacaaacctgtatttgcagtctctg

SEQ ID NO: 2773535 - DNA, 25 bp, Homo sapien
gagaggtctagcctacagatggaac

SEQ ID NO: 2773536 - DNA, 25 bp, Homo sapien
taaaggagtctcatgcacatactac

SEQ ID NO: 2773537 - DNA, 25 bp, Homo sapien
gatggaacctatgagatctggacaa

SEQ ID NO: 2773538 - DNA, 25 bp, Homo sapien
caaatggagacatagcagagcacac

SEQ ID NO: 2773539 - DNA, 25 bp, Homo sapien
caaataattgttcattctatattct

SEQ ID NO: 2773540 - DNA, 25 bp, Homo sapien
cattctatattctttggtgtttgat

SEQ ID NO: 2773541 - DNA, 25 bp, Homo sapien
attctatattctttggtgtttgatt

SEQ ID NO: 2773542 - DNA, 25 bp, Homo sapien
ccaagcctgacagcccgcgagctgc

SEQ ID NO: 2773543 - DNA, 25 bp, Homo sapien
ccgcgctctctgatcagaggcgaag

SEQ ID NO: 2773544 - DNA, 25 bp, Homo sapien
cgagctgccaagcagggcgcagcca

SEQ ID NO: 2773545 - DNA, 25 bp, Homo sapien
gcgaacccgcgctctctgatcagag

SEQ ID NO: 2773546 - DNA, 25 bp, Homo sapien
ggagattaacagaggttttgctcgc

SEQ ID NO: 2773547 - DNA, 25 bp, Homo sapien
tcctgtgatttactgtgggaagtct

SEQ ID NO: 2773548 - DNA, 25 bp, Homo sapien
agtctcccaggttcttcccttcgct

SEQ ID NO: 2773549 - DNA, 25 bp, Homo sapien
acagaggttttgctcgcttcttcct

SEQ ID NO: 2773550 - DNA, 25 bp, Homo sapien
tataaagggattgaagaggtttcta

SEQ ID NO: 2773551 - DNA, 25 bp, Homo sapien
gaatagccttccactcatccaaagt

SEQ ID NO: 2773552 - DNA, 25 bp, Homo sapien
gcccagtccttattttgaatagcct

SEQ ID NO: 2773553 - DNA, 25 bp, Homo sapien
ttgcccagtccttattttgaatagc

SEQ ID NO: 2773554 - DNA, 25 bp, Homo sapien
gtcatctcttttggaccctcctctt

SEQ ID NO: 2773555 - DNA, 25 bp, Homo sapien
ctgccactggatgatgttcttcacc

SEQ ID NO: 2773556 - DNA, 25 bp, Homo sapien
ttcaggtgtttcctcagtcacattt

SEQ ID NO: 2773557 - DNA, 25 bp, Homo sapien
gtgtctgccactggatgatgttctt

SEQ ID NO: 2773558 - DNA, 25 bp, Homo sapien
ctcagtcacatttgattgatccaag

SEQ ID NO: 2773559 - DNA, 25 bp, Homo sapien
tttgggggactctgttaattcatct

SEQ ID NO: 2773560 - DNA, 25 bp, Homo sapien
attcatctttgacaattccccagtt

SEQ ID NO: 2773561 - DNA, 25 bp, Homo sapien
attccccagttgtgagatctgctac

SEQ ID NO: 2773562 - DNA, 25 bp, Homo sapien
tgggggactctgttaattcatcttt

SEQ ID NO: 2773563 - DNA, 25 bp, Homo sapien
cacgttacaggtcctcgtgcttcag

SEQ ID NO: 2773564 - DNA, 25 bp, Homo sapien
ccacgttacaggtcctcgtgcttca

SEQ ID NO: 2773565 - DNA, 25 bp, Homo sapien
ctccttggcccatttcacgtccact

SEQ ID NO: 2773566 - DNA, 25 bp, Homo sapien
ggtcggtcaataatcagtctatcaa

SEQ ID NO: 2773567 - DNA, 25 bp, Homo sapien
ccatgaccttgaataggtcggtcaa

SEQ ID NO: 2773568 - DNA, 25 bp, Homo sapien
atttcacgtccactgccctctcgac

SEQ ID NO: 2773569 - DNA, 25 bp, Homo sapien
gtcttcgttcacaaggtggtctcct

SEQ ID NO: 2773570 - DNA, 25 bp, Homo sapien
cttttcaagtcttcgttcacaaggt

SEQ ID NO: 2773571 - DNA, 25 bp, Homo sapien
aagtcttcgttcacaaggtggtctc

SEQ ID NO: 2773572 - DNA, 25 bp, Homo sapien
tcaagtcttcgttcacaaggtggtc

SEQ ID NO: 2773573 - DNA, 25 bp, Homo sapien
ccttcaccgtgaagttgttgagcag

SEQ ID NO: 2773574 - DNA, 25 bp, Homo sapien
tatcagttattttcccttcaccgtg

SEQ ID NO: 2773575 - DNA, 25 bp, Homo sapien
ttcccttcaccgtgaagttgttgag

SEQ ID NO: 2773576 - DNA, 25 bp, Homo sapien
ctatcagttattttcccttcaccgt

SEQ ID NO: 2773577 - DNA, 25 bp, Homo sapien
gaggcagaaggttatgaccaatgct

SEQ ID NO: 2773578 - DNA, 25 bp, Homo sapien
ggaggcagaaggttatgaccaatgc

SEQ ID NO: 2773579 - DNA, 25 bp, Homo sapien
gcagaaggttatgaccaatgctgga

SEQ ID NO: 2773580 - DNA, 25 bp, Homo sapien
ggcagaaggttatgaccaatgctgg

SEQ ID NO: 2773581 - DNA, 25 bp, Homo sapien
tggtgtcgcatgaggtgtgagttgg

SEQ ID NO: 2773582 - DNA, 25 bp, Homo sapien
taagtaggtatgagctacatgtgaa

SEQ ID NO: 2773583 - DNA, 25 bp, Homo sapien
gtaggtatgagctacatgtgaaggc

SEQ ID NO: 2773584 - DNA, 25 bp, Homo sapien
gatgaataagtaggtatgagctaca

SEQ ID NO: 2773585 - DNA, 25 bp, Homo sapien
tgaataagtaggtatgagctacatg

SEQ ID NO: 2773586 - DNA, 25 bp, Homo sapien
gaggtttttttgatatacagtcaga

SEQ ID NO: 2773587 - DNA, 25 bp, Homo sapien
tctcacatttactacgcctaaaggt

SEQ ID NO: 2773588 - DNA, 25 bp, Homo sapien
tgcgtaaaggctttgccagaatcgt

SEQ ID NO: 2773589 - DNA, 25 bp, Homo sapien
ccagtaaatgttttccgacactcat

SEQ ID NO: 2773590 - DNA, 25 bp, Homo sapien
tgcacaacgaggtttgcactctgac

SEQ ID NO: 2773591 - DNA, 25 bp, Homo sapien
gaggtttgcactctgactaaatcct

SEQ ID NO: 2773592 - DNA, 25 bp, Homo sapien
caacgaggtttgcactctgactaaa

SEQ ID NO: 2773593 - DNA, 25 bp, Homo sapien
cacaacgaggtttgcactctgacta

SEQ ID NO: 2773594 - DNA, 25 bp, Homo sapien
ctacaatgtaaaagactttcgccca

SEQ ID NO: 2773595 - DNA, 25 bp, Homo sapien
atgtaaaagactttcgcccaagctg

SEQ ID NO: 2773596 - DNA, 25 bp, Homo sapien
ctgggttttcggattgttaacagtg

SEQ ID NO: 2773597 - DNA, 25 bp, Homo sapien
cggattgttaacagtgtcagaatta

SEQ ID NO: 2773598 - DNA, 25 bp, Homo sapien
tttgaagctttcaggtaagtgacag

SEQ ID NO: 2773599 - DNA, 25 bp, Homo sapien
ctttgaagctttcaggtaagtgaca

SEQ ID NO: 2773600 - DNA, 25 bp, Homo sapien
aagctttcaggtaagtgacagtcat

SEQ ID NO: 2773601 - DNA, 25 bp, Homo sapien
tgaagctttcaggtaagtgacagtc

SEQ ID NO: 2773602 - DNA, 25 bp, Homo sapien
aactgaaggttcttggtttcagcac

SEQ ID NO: 2773603 - DNA, 25 bp, Homo sapien
taactgaaggttcttggtttcagca

SEQ ID NO: 2773604 - DNA, 25 bp, Homo sapien
cagtaactgaaggttcttggtttca

SEQ ID NO: 2773605 - DNA, 25 bp, Homo sapien
gtaactgaaggttcttggtttcagc

SEQ ID NO: 2773606 - DNA, 25 bp, Homo sapien
gcctgtctgacgaaactcccctggg

SEQ ID NO: 2773607 - DNA, 25 bp, Homo sapien
actgggcggcatgggcctagggcca

SEQ ID NO: 2773608 - DNA, 25 bp, Homo sapien
tcaaggcctgtctgacgaaactccc

SEQ ID NO: 2773609 - DNA, 25 bp, Homo sapien
ttcactgggcggcatgggcctaggg

SEQ ID NO: 2773610 - DNA, 25 bp, Homo sapien
tgcgcagctagctatttgcctgccg

SEQ ID NO: 2773611 - DNA, 25 bp, Homo sapien
tagctatttgcctgccgccttggag

SEQ ID NO: 2773612 - DNA, 25 bp, Homo sapien
agctagctatttgcctgccgccttg

SEQ ID NO: 2773613 - DNA, 25 bp, Homo sapien
actccttgcgcagctagctatttgc

SEQ ID NO: 2773614 - DNA, 25 bp, Homo sapien
ataactggtcgaatcggttggtgac

SEQ ID NO: 2773615 - DNA, 25 bp, Homo sapien
caaataactggtcgaatcggttggt

SEQ ID NO: 2773616 - DNA, 25 bp, Homo sapien
aaataactggtcgaatcggttggtg

SEQ ID NO: 2773617 - DNA, 25 bp, Homo sapien
taactggtcgaatcggttggtgacc

SEQ ID NO: 2773618 - DNA, 25 bp, Homo sapien
tcccagaagatcgaagaacaatttt

SEQ ID NO: 2773619 - DNA, 25 bp, Homo sapien
cccagaagatcgaagaacaattttt

SEQ ID NO: 2773620 - DNA, 25 bp, Homo sapien
ccagaagatcgaagaacaatttttt

SEQ ID NO: 2773621 - DNA, 25 bp, Homo sapien
cttcccagaagatcgaagaacaatt

SEQ ID NO: 2773622 - DNA, 25 bp, Homo sapien
tatctctgcatttgtgacagctggg

SEQ ID NO: 2773623 - DNA, 25 bp, Homo sapien
gggctggccttcattggcatatgcc

SEQ ID NO: 2773624 - DNA, 25 bp, Homo sapien
tagaaatctgagctatgctggcagt

SEQ ID NO: 2773625 - DNA, 25 bp, Homo sapien
ggcagtgtcatgctgtacaatcgaa

SEQ ID NO: 2773626 - DNA, 25 bp, Homo sapien
cttatggggtctgttttcactgtca

SEQ ID NO: 2773627 - DNA, 25 bp, Homo sapien
tcactgtcagttctttctgtgaatg

SEQ ID NO: 2773628 - DNA, 25 bp, Homo sapien
actgtcagttctttctgtgaatgca

SEQ ID NO: 2773629 - DNA, 25 bp, Homo sapien
tgttttcactgtcagttctttctgt

SEQ ID NO: 2773630 - DNA, 25 bp, Homo sapien
cacttgggactactggattgcatca

SEQ ID NO: 2773631 - DNA, 25 bp, Homo sapien
tatgtcgaggcagcaggtgtctctg

SEQ ID NO: 2773632 - DNA, 25 bp, Homo sapien
tctctgtagatcagggcagcaatcc

SEQ ID NO: 2773633 - DNA, 25 bp, Homo sapien
tgtaagtctcctagctatgtcgagg

SEQ ID NO: 2773634 - DNA, 25 bp, Homo sapien
ggccacaagaacaaatgaagtaaac

SEQ ID NO: 2773635 - DNA, 25 bp, Homo sapien
tagctggcctactaaggccacaaga

SEQ ID NO: 2773636 - DNA, 25 bp, Homo sapien
agctgacatccgtaacaatgacatc

SEQ ID NO: 2773637 - DNA, 25 bp, Homo sapien
ggttgacagctgacatccgtaacaa

SEQ ID NO: 2773638 - DNA, 25 bp, Homo sapien
aatccagtagtattgctccggtagg

SEQ ID NO: 2773639 - DNA, 25 bp, Homo sapien
cagtagtattgctccggtaggttca

SEQ ID NO: 2773640 - DNA, 25 bp, Homo sapien
actaaatccagtagtattgctccgg

SEQ ID NO: 2773641 - DNA, 25 bp, Homo sapien
gtattgctccggtaggttcaatcat

SEQ ID NO: 2773642 - DNA, 25 bp, Homo sapien
ttcctgaattatgggagaataaggg

SEQ ID NO: 2773643 - DNA, 25 bp, Homo sapien
ctgtttttcctgaattatgggagaa

SEQ ID NO: 2773644 - DNA, 25 bp, Homo sapien
agtttgaccaaaatttcacttagct

SEQ ID NO: 2773645 - DNA, 25 bp, Homo sapien
ttgaccaaaatttcacttagctgtt

SEQ ID NO: 2773646 - DNA, 25 bp, Homo sapien
taatcatttttgaacactagctaca

SEQ ID NO: 2773647 - DNA, 25 bp, Homo sapien
aatccaagtcttatgatgaatactc

SEQ ID NO: 2773648 - DNA, 25 bp, Homo sapien
tttagaagcattaactgacaaaatc

SEQ ID NO: 2773649 - DNA, 25 bp, Homo sapien
tttaggtatgatcagcaaataaaag

SEQ ID NO: 2773650 - DNA, 25 bp, Homo sapien
tggcagcagctaggttcaagaagtg

SEQ ID NO: 2773651 - DNA, 25 bp, Homo sapien
tgacagcactgataatgcccagaaa

SEQ ID NO: 2773652 - DNA, 25 bp, Homo sapien
caagtttaagcggttttggcagccg

SEQ ID NO: 2773653 - DNA, 25 bp, Homo sapien
gccgaggaaacagctgtgacattgt

SEQ ID NO: 2773654 - DNA, 25 bp, Homo sapien
cccagtagtagcaaatggagccaca

SEQ ID NO: 2773655 - DNA, 25 bp, Homo sapien
taaggagagttaagacccaaggaga

SEQ ID NO: 2773656 - DNA, 25 bp, Homo sapien
tattgtggaaaagaagtgagcatct

SEQ ID NO: 2773657 - DNA, 25 bp, Homo sapien
gaaattgaatatcccactaacttgg

SEQ ID NO: 2773658 - DNA, 25 bp, Homo sapien
gaaacttccacatttgtccctctaa

SEQ ID NO: 2773659 - DNA, 25 bp, Homo sapien
taggaaacttccacatttgtccctc

SEQ ID NO: 2773660 - DNA, 25 bp, Homo sapien
ccacatttgtccctctaagccagag

SEQ ID NO: 2773661 - DNA, 25 bp, Homo sapien
ttgtccctctaagccagagatagga

SEQ ID NO: 2773662 - DNA, 25 bp, Homo sapien
caaggagtcaccttcccaaggaagt

SEQ ID NO: 2773663 - DNA, 25 bp, Homo sapien
ccattgttcctccaatgcttgacca

SEQ ID NO: 2773664 - DNA, 25 bp, Homo sapien
tgttcctccaatgcttgaccactct

SEQ ID NO: 2773665 - DNA, 25 bp, Homo sapien
ctgtctcaaggagtcaccttcccaa

SEQ ID NO: 2773666 - DNA, 25 bp, Homo sapien
cactgctcatgtcatcgaatctatc

SEQ ID NO: 2773667 - DNA, 25 bp, Homo sapien
ctggtacactgctcatgtcatcgaa

SEQ ID NO: 2773668 - DNA, 25 bp, Homo sapien
tgctcatgtcatcgaatctatcttc

SEQ ID NO: 2773669 - DNA, 25 bp, Homo sapien
tgtcatcgaatctatcttcctccca

SEQ ID NO: 2773670 - DNA, 25 bp, Homo sapien
tgcttacttcctgtatgatcttctc

SEQ ID NO: 2773671 - DNA, 25 bp, Homo sapien
tagtttaagacccagttctactgct

SEQ ID NO: 2773672 - DNA, 25 bp, Homo sapien
tcgcaaggagagagagcgtagcacc

SEQ ID NO: 2773673 - DNA, 25 bp, Homo sapien
tagcaccgcagtttaagtactcagc

SEQ ID NO: 2773674 - DNA, 25 bp, Homo sapien
gaaagttaaagcatccaacagttgg

SEQ ID NO: 2773675 - DNA, 25 bp, Homo sapien
actgctcccgagagagccctagctt

SEQ ID NO: 2773676 - DNA, 25 bp, Homo sapien
aactcttgaaagttaaagcatccaa

SEQ ID NO: 2773677 - DNA, 25 bp, Homo sapien
caactctaatcactgctcccgagag

SEQ ID NO: 2773678 - DNA, 25 bp, Homo sapien
gcagagtggagtagctaagacacag

SEQ ID NO: 2773679 - DNA, 25 bp, Homo sapien
tactttagggctacagtggcagagt

SEQ ID NO: 2773680 - DNA, 25 bp, Homo sapien
tattggaccacacccatgcctgttt

SEQ ID NO: 2773681 - DNA, 25 bp, Homo sapien
gagcataggtccacaaacctaaaat

SEQ ID NO: 2773682 - DNA, 25 bp, Homo sapien
gtcctctttgagcccataatcacct

SEQ ID NO: 2773683 - DNA, 25 bp, Homo sapien
tgacacctagaatggtggctggacc

SEQ ID NO: 2773684 - DNA, 25 bp, Homo sapien
taatacgggttagtgtacatcaccc

SEQ ID NO: 2773685 - DNA, 25 bp, Homo sapien
gatgatactatagactcagagccta

SEQ ID NO: 2773686 - DNA, 25 bp, Homo sapien
gactagaagttgacctcatagctga

SEQ ID NO: 2773687 - DNA, 25 bp, Homo sapien
gtcaccaccagcatgctagcctccc

SEQ ID NO: 2773688 - DNA, 25 bp, Homo sapien
tcaccaccagcatgctagcctccca

SEQ ID NO: 2773689 - DNA, 25 bp, Homo sapien
caccaccagcatgctagcctcccat

SEQ ID NO: 2773690 - DNA, 25 bp, Homo sapien
gaataaaattgattagccaattgca

SEQ ID NO: 2773691 - DNA, 25 bp, Homo sapien
attgtctgagtagaaaacactgagc

SEQ ID NO: 2773692 - DNA, 25 bp, Homo sapien
taacattatggttgagaattgtctg

SEQ ID NO: 2773693 - DNA, 25 bp, Homo sapien
tgtactgtgcaaagtttaaggcgga

SEQ ID NO: 2773694 - DNA, 25 bp, Homo sapien
tcctgtgaatcctgatgtcgtatct

SEQ ID NO: 2773695 - DNA, 25 bp, Homo sapien
tgtgaatcctgatgtcgtatcttgc

SEQ ID NO: 2773696 - DNA, 25 bp, Homo sapien
ctgtcctgtgaatcctgatgtcgta

SEQ ID NO: 2773697 - DNA, 25 bp, Homo sapien
aatcctgatgtcgtatcttgcaaca

SEQ ID NO: 2773698 - DNA, 25 bp, Homo sapien
catgtggctatgtgagcacagacca

SEQ ID NO: 2773699 - DNA, 25 bp, Homo sapien
tactcaatgcgactgccttgccctt

SEQ ID NO: 2773700 - DNA, 25 bp, Homo sapien
tgcccttgcctgacaaagagtttct

SEQ ID NO: 2773701 - DNA, 25 bp, Homo sapien
cattcatatagtacagtccccacag

SEQ ID NO: 2773702 - DNA, 25 bp, Homo sapien
ctctcttgcaggaaggactatgaaa

SEQ ID NO: 2773703 - DNA, 25 bp, Homo sapien
cctaattcaattcaaagctgtgtgt

SEQ ID NO: 2773704 - DNA, 25 bp, Homo sapien
gtatttcccatttatcgcagacctt

SEQ ID NO: 2773705 - DNA, 25 bp, Homo sapien
cagaccttttttaggaagcaagctt

SEQ ID NO: 2773706 - DNA, 25 bp, Homo sapien
gtgatacagtgcatccaggtcagcc

SEQ ID NO: 2773707 - DNA, 25 bp, Homo sapien
gaaccggaccacagatttctctaaa

SEQ ID NO: 2773708 - DNA, 25 bp, Homo sapien
tccacaatgccatggagacttcatt

SEQ ID NO: 2773709 - DNA, 25 bp, Homo sapien
ctagattcgtatgtgggataaacag

SEQ ID NO: 2773710 - DNA, 25 bp, Homo sapien
tggtaggagctccagcatagcgcac

SEQ ID NO: 2773711 - DNA, 25 bp, Homo sapien
gaaaatacctaagcagccgcagatg

SEQ ID NO: 2773712 - DNA, 25 bp, Homo sapien
tctattgacggttcgaaattcccgc

SEQ ID NO: 2773713 - DNA, 25 bp, Homo sapien
gactcacaattcagaacacccaatg

SEQ ID NO: 2773714 - DNA, 25 bp, Homo sapien
tctgctaaacttgaggacacatccc

SEQ ID NO: 2773715 - DNA, 25 bp, Homo sapien
caaaagtcttgagtaggccgggtgt

SEQ ID NO: 2773716 - DNA, 25 bp, Homo sapien
actttaggcccaacactaggtgaga

SEQ ID NO: 2773717 - DNA, 25 bp, Homo sapien
taagggacttctaatagggcatctc

SEQ ID NO: 2773718 - DNA, 25 bp, Homo sapien
ctaaattttatttctgaattctaat

SEQ ID NO: 2773719 - DNA, 25 bp, Homo sapien
tactaaattttatttctgaattcta

SEQ ID NO: 2773720 - DNA, 25 bp, Homo sapien
cttgtactaaattttatttctgaat

SEQ ID NO: 2773721 - DNA, 25 bp, Homo sapien
tttatttctgaattctaataacaaa

SEQ ID NO: 2773722 - DNA, 25 bp, Homo sapien
gcgtagacggttttgagcttagcag

SEQ ID NO: 2773723 - DNA, 25 bp, Homo sapien
aaaacaaggagattgcaattcttcg

SEQ ID NO: 2773724 - DNA, 25 bp, Homo sapien
gagcaacgcctttctgttggcaaag

SEQ ID NO: 2773725 - DNA, 25 bp, Homo sapien
taccattcgcgatttagagcaacgc

SEQ ID NO: 2773726 - DNA, 25 bp, Homo sapien
aaagcaatcgaaagtttcacttctg

SEQ ID NO: 2773727 - DNA, 25 bp, Homo sapien
gcaatcgaaagtttcacttctgttt

SEQ ID NO: 2773728 - DNA, 25 bp, Homo sapien
aagcaatcgaaagtttcacttctgt

SEQ ID NO: 2773729 - DNA, 25 bp, Homo sapien
agcaatcgaaagtttcacttctgtt

SEQ ID NO: 2773730 - DNA, 25 bp, Homo sapien
tctgtactgcattcttgcttaatag

SEQ ID NO: 2773731 - DNA, 25 bp, Homo sapien
agtattaaccataaaggaggtcagg

SEQ ID NO: 2773732 - DNA, 25 bp, Homo sapien
ggacaaatccgtactgtatccaatt

SEQ ID NO: 2773733 - DNA, 25 bp, Homo sapien
tgaatttatttggacaaatccgtac

SEQ ID NO: 2773734 - DNA, 25 bp, Homo sapien
tacttactaagcaatatagagacag

SEQ ID NO: 2773735 - DNA, 25 bp, Homo sapien
cctattaaaccatcattgactatgg

SEQ ID NO: 2773736 - DNA, 25 bp, Homo sapien
tccccttatatcttttaagacagcc

SEQ ID NO: 2773737 - DNA, 25 bp, Homo sapien
ttatatcttttaagacagccactca

SEQ ID NO: 2773738 - DNA, 25 bp, Homo sapien
agtaaaaatcaggatgagtcttaga

SEQ ID NO: 2773739 - DNA, 25 bp, Homo sapien
aaaggctttattcatgtgtgatagt

SEQ ID NO: 2773740 - DNA, 25 bp, Homo sapien
aaatcaggatgagtcttagatatac

SEQ ID NO: 2773741 - DNA, 25 bp, Homo sapien
ggatgagtcttagatatacaaaaga

SEQ ID NO: 2773742 - DNA, 25 bp, Homo sapien
tttaaaatctggaagccaattcagt

SEQ ID NO: 2773743 - DNA, 25 bp, Homo sapien
aaaagctgcaatcacctttcagttg

SEQ ID NO: 2773744 - DNA, 25 bp, Homo sapien
ttatccaacagaaacccctaggtca

SEQ ID NO: 2773745 - DNA, 25 bp, Homo sapien
tcagtagatttctccatgtttgcac

SEQ ID NO: 2773746 - DNA, 25 bp, Homo sapien
aatatcagatgtcgacaatggcagc

SEQ ID NO: 2773747 - DNA, 25 bp, Homo sapien
tacactgtcaggtgattgcagaccc

SEQ ID NO: 2773748 - DNA, 25 bp, Homo sapien
tctttcagcgtcaactggcactggc

SEQ ID NO: 2773749 - DNA, 25 bp, Homo sapien
gctggaggcaaacgtcactgacaag

SEQ ID NO: 2773750 - DNA, 25 bp, Homo sapien
tgaaaatagcaaattactgcccgac

SEQ ID NO: 2773751 - DNA, 25 bp, Homo sapien
aaggctgtcagctgaaaatagcaaa

SEQ ID NO: 2773752 - DNA, 25 bp, Homo sapien
cattgaccataatatccattccgca

SEQ ID NO: 2773753 - DNA, 25 bp, Homo sapien
tgcccgactcccattgaccataata

SEQ ID NO: 2773754 - DNA, 25 bp, Homo sapien
atttcttttcacagtaagcaatctt

SEQ ID NO: 2773755 - DNA, 25 bp, Homo sapien
cacagtaagcaatcttaatggcttc

SEQ ID NO: 2773756 - DNA, 25 bp, Homo sapien
cgtgagagagcagtttccacatttc

SEQ ID NO: 2773757 - DNA, 25 bp, Homo sapien
cttttcacagtaagcaatcttaatg

SEQ ID NO: 2773758 - DNA, 25 bp, Homo sapien
aaccaagatgatatacaagacggcc

SEQ ID NO: 2773759 - DNA, 25 bp, Homo sapien
caaaccaagatgatatacaagacgg

SEQ ID NO: 2773760 - DNA, 25 bp, Homo sapien
ggcaaaccaagatgatatacaagac

SEQ ID NO: 2773761 - DNA, 25 bp, Homo sapien
caagatgatatacaagacggccaca

SEQ ID NO: 2773762 - DNA, 25 bp, Homo sapien
taaggcagcacaaatttgacacaac

SEQ ID NO: 2773763 - DNA, 25 bp, Homo sapien
gatcctactcaaatacagtctggga

SEQ ID NO: 2773764 - DNA, 25 bp, Homo sapien
ccaggtactgcacaccaggtcaggt

SEQ ID NO: 2773765 - DNA, 25 bp, Homo sapien
gagctacaaatgagctcccaggtac

SEQ ID NO: 2773766 - DNA, 25 bp, Homo sapien
aaccagcagggtatagtgtcataga

SEQ ID NO: 2773767 - DNA, 25 bp, Homo sapien
gctgcatctgcctccaataggttgt

SEQ ID NO: 2773768 - DNA, 25 bp, Homo sapien
gaaaaatctagaggagtggtcacca

SEQ ID NO: 2773769 - DNA, 25 bp, Homo sapien
ggcagaaagctgtatagccctgaat

SEQ ID NO: 2773770 - DNA, 25 bp, Homo sapien
ttcttgttgataaacaggaatatgc

SEQ ID NO: 2773771 - DNA, 25 bp, Homo sapien
taaaagagtccagacatctgtttgg

SEQ ID NO: 2773772 - DNA, 25 bp, Homo sapien
gataaacaggaatatgctctgaaac

SEQ ID NO: 2773773 - DNA, 25 bp, Homo sapien
catttaaaagagtccagacatctgt

SEQ ID NO: 2773774 - DNA, 25 bp, Homo sapien
ccttgatgattaacaacaatataag

SEQ ID NO: 2773775 - DNA, 25 bp, Homo sapien
tttaatcgagaagagattccttgat

SEQ ID NO: 2773776 - DNA, 25 bp, Homo sapien
cagttttactcgcaggtcttctaat

SEQ ID NO: 2773777 - DNA, 25 bp, Homo sapien
cttcagttttactcgcaggtcttct

SEQ ID NO: 2773778 - DNA, 25 bp, Homo sapien
aattttctatgtgaaactctccttc

SEQ ID NO: 2773779 - DNA, 25 bp, Homo sapien
acccatactgcacctattctttata

SEQ ID NO: 2773780 - DNA, 25 bp, Homo sapien
ttgatttgattagtggtttttctcc

SEQ ID NO: 2773781 - DNA, 25 bp, Homo sapien
tatttttaactaacccatactgcac

SEQ ID NO: 2773782 - DNA, 25 bp, Homo sapien
agataccactggatgactgtaagga

SEQ ID NO: 2773783 - DNA, 25 bp, Homo sapien
taacccaagactttgatagcaagcc

SEQ ID NO: 2773784 - DNA, 25 bp, Homo sapien
gatggctgcatctatagtagtgaac

SEQ ID NO: 2773785 - DNA, 25 bp, Homo sapien
tatttgcagaagtacattttagagc

SEQ ID NO: 2773786 - DNA, 25 bp, Homo sapien
ttagatgcctgcagtatgcacaggt

SEQ ID NO: 2773787 - DNA, 25 bp, Homo sapien
tagatgcctgcagtatgcacaggta

SEQ ID NO: 2773788 - DNA, 25 bp, Homo sapien
ttgatctcttatgctccaggctggg

SEQ ID NO: 2773789 - DNA, 25 bp, Homo sapien
tcttgatctcttatgctccaggctg

SEQ ID NO: 2773790 - DNA, 25 bp, Homo sapien
ccacagtcactgaaccattggagtt

SEQ ID NO: 2773791 - DNA, 25 bp, Homo sapien
gagtttagcattggatcttgatctc

SEQ ID NO: 2773792 - DNA, 25 bp, Homo sapien
ctctctgttcctcccgatgggagga

SEQ ID NO: 2773793 - DNA, 25 bp, Homo sapien
ctatatatgatatcttgataagaac

SEQ ID NO: 2773794 - DNA, 25 bp, Homo sapien
agcccagagcacatattgcaagtag

SEQ ID NO: 2773795 - DNA, 25 bp, Homo sapien
ccagcccagagcacatattgcaagt

SEQ ID NO: 2773796 - DNA, 25 bp, Homo sapien
cagcccagagcacatattgcaagta

SEQ ID NO: 2773797 - DNA, 25 bp, Homo sapien
acaaccacttccaacgggcctgctt

SEQ ID NO: 2773798 - DNA, 25 bp, Homo sapien
gcacactctgatatttatagtcctg

SEQ ID NO: 2773799 - DNA, 25 bp, Homo sapien
cactctgatatttatagtcctgttg

SEQ ID NO: 2773800 - DNA, 25 bp, Homo sapien
ctgatatttatagtcctgttgttta

SEQ ID NO: 2773801 - DNA, 25 bp, Homo sapien
tcaggtatagtccaaagttcaatgt

SEQ ID NO: 2773802 - DNA, 25 bp, Homo sapien
gaccttgcaagcagagcaaacccct

SEQ ID NO: 2773803 - DNA, 25 bp, Homo sapien
ggtatagtccaaagttcaatgttca

SEQ ID NO: 2773804 - DNA, 25 bp, Homo sapien
tcaatgttcattcttgcagtgacct

SEQ ID NO: 2773805 - DNA, 25 bp, Homo sapien
tttttattgtcactgaagtcgtact

SEQ ID NO: 2773806 - DNA, 25 bp, Homo sapien
ttgtcactgaagtcgtacttcctgg

SEQ ID NO: 2773807 - DNA, 25 bp, Homo sapien
tattgtcactgaagtcgtacttcct

SEQ ID NO: 2773808 - DNA, 25 bp, Homo sapien
cactgaagtcgtacttcctggaaga

SEQ ID NO: 2773809 - DNA, 25 bp, Homo sapien
aaaaaaacatgggtcaggcacaaat

SEQ ID NO: 2773810 - DNA, 25 bp, Homo sapien
cagtacatagacaattacagctgct

SEQ ID NO: 2773811 - DNA, 25 bp, Homo sapien
cagatggtataaatccagatctcct

SEQ ID NO: 2773812 - DNA, 25 bp, Homo sapien
gtataaatccagatctccttcccac

SEQ ID NO: 2773813 - DNA, 25 bp, Homo sapien
ggcagatggtataaatccagatctc

SEQ ID NO: 2773814 - DNA, 25 bp, Homo sapien
gatggtataaatccagatctccttc

SEQ ID NO: 2773815 - DNA, 25 bp, Homo sapien
ggcgtaaaaggctgccaccctgact

SEQ ID NO: 2773816 - DNA, 25 bp, Homo sapien
gagcattaattgtaacacaccccta

SEQ ID NO: 2773817 - DNA, 25 bp, Homo sapien
tctgaacatcgagaggagttcggct

SEQ ID NO: 2773818 - DNA, 25 bp, Homo sapien
tcctggatgctagacaaagacccgg

SEQ ID NO: 2773819 - DNA, 25 bp, Homo sapien
cattgtctgcctgtggaactcggca

SEQ ID NO: 2773820 - DNA, 25 bp, Homo sapien
gaaagctaagaagccccattgtctg

SEQ ID NO: 2773821 - DNA, 25 bp, Homo sapien
agtcactgcttggtattcctgggtc

SEQ ID NO: 2773822 - DNA, 25 bp, Homo sapien
ttttttaacaacgtgcctgtccatg

SEQ ID NO: 2773823 - DNA, 25 bp, Homo sapien
caaagggctaaagtgtccagaaggc

SEQ ID NO: 2773824 - DNA, 25 bp, Homo sapien
gggctaaagtgtccagaaggcttga

SEQ ID NO: 2773825 - DNA, 25 bp, Homo sapien
aaagggctaaagtgtccagaaggct

SEQ ID NO: 2773826 - DNA, 25 bp, Homo sapien
taaagtgtccagaaggcttgagaaa

SEQ ID NO: 2773827 - DNA, 25 bp, Homo sapien
ctgaatggagattggattttatgag

SEQ ID NO: 2773828 - DNA, 25 bp, Homo sapien
cactgacgtggctcctgacggtaag

SEQ ID NO: 2773829 - DNA, 25 bp, Homo sapien
ggtaagtcagatgtctcaccccagc

SEQ ID NO: 2773830 - DNA, 25 bp, Homo sapien
tttatgaggcactgacgtggctcct

SEQ ID NO: 2773831 - DNA, 25 bp, Homo sapien
tttcactgtaagaatgggaaaagct

SEQ ID NO: 2773832 - DNA, 25 bp, Homo sapien
caggtgtgcactacgacgtagagag

SEQ ID NO: 2773833 - DNA, 25 bp, Homo sapien
tgcacccgacaagttaatatgagaa

SEQ ID NO: 2773834 - DNA, 25 bp, Homo sapien
gatttggagacctgtagaatcaaag

SEQ ID NO: 2773835 - DNA, 25 bp, Homo sapien
ggtcttgccattcccagatccaaag

SEQ ID NO: 2773836 - DNA, 25 bp, Homo sapien
aattgtccacagtcagaaatggtgg

SEQ ID NO: 2773837 - DNA, 25 bp, Homo sapien
tgctgtgtgcagtcaccaccctgat

SEQ ID NO: 2773838 - DNA, 25 bp, Homo sapien
accagtgccattatgctgtgtgcag

SEQ ID NO: 2773839 - DNA, 25 bp, Homo sapien
agctcaaaggagacacggcccaagg

SEQ ID NO: 2773840 - DNA, 25 bp, Homo sapien
aaggagacacggcccaagggctcac

SEQ ID NO: 2773841 - DNA, 25 bp, Homo sapien
gctcaaaggagacacggcccaaggg

SEQ ID NO: 2773842 - DNA, 25 bp, Homo sapien
tcaaaggagacacggcccaagggct

SEQ ID NO: 2773843 - DNA, 25 bp, Homo sapien
cagagatgtcagtgtcgaagaacat

SEQ ID NO: 2773844 - DNA, 25 bp, Homo sapien
gagatgtcagtgtcgaagaacatgg

SEQ ID NO: 2773845 - DNA, 25 bp, Homo sapien
agagatgtcagtgtcgaagaacatg

SEQ ID NO: 2773846 - DNA, 25 bp, Homo sapien
ttctggcagcggtggcatctgcaaa

SEQ ID NO: 2773847 - DNA, 25 bp, Homo sapien
atagtacagggcttctggcagcggt

SEQ ID NO: 2773848 - DNA, 25 bp, Homo sapien
agggcttctggcagcggtggcatct

SEQ ID NO: 2773849 - DNA, 25 bp, Homo sapien
tacagggcttctggcagcggtggca

SEQ ID NO: 2773850 - DNA, 25 bp, Homo sapien
tgctaccgacggtggggtccaaagc

SEQ ID NO: 2773851 - DNA, 25 bp, Homo sapien
ctgaaccagcccggagatgccagcg

SEQ ID NO: 2773852 - DNA, 25 bp, Homo sapien
tcaagaagacgcagatgctaccgac

SEQ ID NO: 2773853 - DNA, 25 bp, Homo sapien
caaagcggcctgaaccagcccggag

SEQ ID NO: 2773854 - DNA, 25 bp, Homo sapien
tgcgtgcaaggaacagttccagtgt

SEQ ID NO: 2773855 - DNA, 25 bp, Homo sapien
agttaagcaggtcgtgtcgcaggcc

SEQ ID NO: 2773856 - DNA, 25 bp, Homo sapien
agcagttaagcaggtcgtgtcgcag

SEQ ID NO: 2773857 - DNA, 25 bp, Homo sapien
gtaaaagtccgcagcgacgccatga

SEQ ID NO: 2773858 - DNA, 25 bp, Homo sapien
gggtgggagggtcctgaactgcaga

SEQ ID NO: 2773859 - DNA, 25 bp, Homo sapien
gagcgccctgggcatgtgtacttcc

SEQ ID NO: 2773860 - DNA, 25 bp, Homo sapien
ggtcctgaactgcagagagcgccct

SEQ ID NO: 2773861 - DNA, 25 bp, Homo sapien
atggaaccctgggttttcagcagct

SEQ ID NO: 2773862 - DNA, 25 bp, Homo sapien
ccaggcagcttcaggccgctttgga

SEQ ID NO: 2773863 - DNA, 25 bp, Homo sapien
cagcttcaggccgctttggaactca

SEQ ID NO: 2773864 - DNA, 25 bp, Homo sapien
agcttcaggccgctttggaactcac

SEQ ID NO: 2773865 - DNA, 25 bp, Homo sapien
aggcagcttcaggccgctttggaac

SEQ ID NO: 2773866 - DNA, 25 bp, Homo sapien
tgcgtcttcttgaggggactgaaga

SEQ ID NO: 2773867 - DNA, 25 bp, Homo sapien
tcttgaggggactgaagaccgtctg

SEQ ID NO: 2773868 - DNA, 25 bp, Homo sapien
ggactgaagaccgtctgtggtttca

SEQ ID NO: 2773869 - DNA, 25 bp, Homo sapien
ggtagcatctgcgtcttcttgaggg

SEQ ID NO: 2773870 - DNA, 25 bp, Homo sapien
gctgaacccatggagttctgtccac

SEQ ID NO: 2773871 - DNA, 25 bp, Homo sapien
caccaaccctggaagaacagtcttg

SEQ ID NO: 2773872 - DNA, 25 bp, Homo sapien
caagaacaaacctgtgcctgggcac

SEQ ID NO: 2773873 - DNA, 25 bp, Homo sapien
taggcaggtccagagtgcttgtcac

SEQ ID NO: 2773874 - DNA, 25 bp, Homo sapien
gggtggtgaaagacgtgctctgcag

SEQ ID NO: 2773875 - DNA, 25 bp, Homo sapien
tgatggtgcaggcagtctgctagat

SEQ ID NO: 2773876 - DNA, 25 bp, Homo sapien
cagatcttgatggtgcaggcagtct

SEQ ID NO: 2773877 - DNA, 25 bp, Homo sapien
gtggtgaaagacgtgctctgcagtc

SEQ ID NO: 2773878 - DNA, 25 bp, Homo sapien
tgagggttcccactgaggtgcctcg

SEQ ID NO: 2773879 - DNA, 25 bp, Homo sapien
tcttgatggaatcgtcggttttcag

SEQ ID NO: 2773880 - DNA, 25 bp, Homo sapien
cttcttgatggaatcgtcggttttc

SEQ ID NO: 2773881 - DNA, 25 bp, Homo sapien
gcatgagggttcccactgaggtgcc

SEQ ID NO: 2773882 - DNA, 25 bp, Homo sapien
tggtttgggaccattgaaccctgcc

SEQ ID NO: 2773883 - DNA, 25 bp, Homo sapien
tgagccaggagcaacaaaaggtttg

SEQ ID NO: 2773884 - DNA, 25 bp, Homo sapien
tgatggccattggacccctcttgag

SEQ ID NO: 2773885 - DNA, 25 bp, Homo sapien
tcctgacctggtggcatatgacatg

SEQ ID NO: 2773886 - DNA, 25 bp, Homo sapien
ctccaggactgttcttccaggttta

SEQ ID NO: 2773887 - DNA, 25 bp, Homo sapien
ttccaggtttaatggacagaactcc

SEQ ID NO: 2773888 - DNA, 25 bp, Homo sapien
ccaggtttaatggacagaactccat

SEQ ID NO: 2773889 - DNA, 25 bp, Homo sapien
actgttcttccaggtttaatggaca

SEQ ID NO: 2773890 - DNA, 25 bp, Homo sapien
caagcttgggctactaggaagcaca

SEQ ID NO: 2773891 - DNA, 25 bp, Homo sapien
gggaagccaggccattaaaatatgc

SEQ ID NO: 2773892 - DNA, 25 bp, Homo sapien
taaggacagcactcttgaataaagc

SEQ ID NO: 2773893 - DNA, 25 bp, Homo sapien
tctttgactgagtgggacaactaca

SEQ ID NO: 2773894 - DNA, 25 bp, Homo sapien
tgctgcactgcgattccaccgggca

SEQ ID NO: 2773895 - DNA, 25 bp, Homo sapien
caaaaacagcctcgagactctcatg

SEQ ID NO: 2773896 - DNA, 25 bp, Homo sapien
gactctcatgtcgatgagtcaatgg

SEQ ID NO: 2773897 - DNA, 25 bp, Homo sapien
cagctctacgggagctctgctccgg

SEQ ID NO: 2773898 - DNA, 25 bp, Homo sapien
taatgctgtggaccaaacctttggc

SEQ ID NO: 2773899 - DNA, 25 bp, Homo sapien
gtaacacgcacagaaacacatagaa

SEQ ID NO: 2773900 - DNA, 25 bp, Homo sapien
tgaaactctagccatgacatggcat

SEQ ID NO: 2773901 - DNA, 25 bp, Homo sapien
tacttataagccaatatggtgccat

SEQ ID NO: 2773902 - DNA, 25 bp, Homo sapien
gaggcgggctccacaagcttgatct

SEQ ID NO: 2773903 - DNA, 25 bp, Homo sapien
caggagcgcgttctttggattcccc

SEQ ID NO: 2773904 - DNA, 25 bp, Homo sapien
cagaagatcgaattcgcgggacggc

SEQ ID NO: 2773905 - DNA, 25 bp, Homo sapien
tcccctggaagaagcgatgcactgg

SEQ ID NO: 2773906 - DNA, 25 bp, Homo sapien
gaatacagccctaaattactagaag

SEQ ID NO: 2773907 - DNA, 25 bp, Homo sapien
cttggaatgcgtcagtgaatacagc

SEQ ID NO: 2773908 - DNA, 25 bp, Homo sapien
ggagctcttggaatgcgtcagtgaa

SEQ ID NO: 2773909 - DNA, 25 bp, Homo sapien
tcaggagctcttggaatgcgtcagt

SEQ ID NO: 2773910 - DNA, 25 bp, Homo sapien
tgcattaatggctggacagcaggtc

SEQ ID NO: 2773911 - DNA, 25 bp, Homo sapien
ccagagagtattatcagggcaaatg

SEQ ID NO: 2773912 - DNA, 25 bp, Homo sapien
gcatcaccagccttagcagtttttg

SEQ ID NO: 2773913 - DNA, 25 bp, Homo sapien
tctttcactgttactggaggccact

SEQ ID NO: 2773914 - DNA, 25 bp, Homo sapien
gatgtaatttgctcctaagattaag

SEQ ID NO: 2773915 - DNA, 25 bp, Homo sapien
tacgtgaatctcattaattccatgt

SEQ ID NO: 2773916 - DNA, 25 bp, Homo sapien
tccatgtcttgatgtaatttgctcc

SEQ ID NO: 2773917 - DNA, 25 bp, Homo sapien
tgctcctaagattaaggttcccacc

SEQ ID NO: 2773918 - DNA, 25 bp, Homo sapien
gattccacaaaggagtaggcgcggc

SEQ ID NO: 2773919 - DNA, 25 bp, Homo sapien
tcagctggtgaaagaaggacgcgat

SEQ ID NO: 2773920 - DNA, 25 bp, Homo sapien
cagaccgcagcgcactttgagaagg

SEQ ID NO: 2773921 - DNA, 25 bp, Homo sapien
taatttggaccgctcatgagaccag

SEQ ID NO: 2773922 - DNA, 25 bp, Homo sapien
ctggcacgggactctgggtcgccta

SEQ ID NO: 2773923 - DNA, 25 bp, Homo sapien
actctgggtcgcctaggtttgctga

SEQ ID NO: 2773924 - DNA, 25 bp, Homo sapien
ccaggactggcacgggactctgggt

SEQ ID NO: 2773925 - DNA, 25 bp, Homo sapien
gggtcgcctaggtttgctgattgca

SEQ ID NO: 2773926 - DNA, 25 bp, Homo sapien
agggaaggatcagccaggagttgtg

SEQ ID NO: 2773927 - DNA, 25 bp, Homo sapien
ggaaggatcagccaggagttgtgca

SEQ ID NO: 2773928 - DNA, 25 bp, Homo sapien
gaaggatcagccaggagttgtgcat

SEQ ID NO: 2773929 - DNA, 25 bp, Homo sapien
ggagggaaggatcagccaggagttg

SEQ ID NO: 2773930 - DNA, 25 bp, Homo sapien
tgtagcacaactagcagaaaaccgt

SEQ ID NO: 2773931 - DNA, 25 bp, Homo sapien
caagcgacttcgatgcagggaaccg

SEQ ID NO: 2773932 - DNA, 25 bp, Homo sapien
gacaacattcgttttgacgcagcca

SEQ ID NO: 2773933 - DNA, 25 bp, Homo sapien
gaaactccgtacgacaagtgctgtg

SEQ ID NO: 2773934 - DNA, 25 bp, Homo sapien
ccgcctgggcggactaatatcacaa

SEQ ID NO: 2773935 - DNA, 25 bp, Homo sapien
ctgtattgttgctgcgttcaaccca

SEQ ID NO: 2773936 - DNA, 25 bp, Homo sapien
gggctggttgcaggaacaaagtaaa

SEQ ID NO: 2773937 - DNA, 25 bp, Homo sapien
ttctgattgccaacagctgcctacg

SEQ ID NO: 2773938 - DNA, 25 bp, Homo sapien
tcggcctaggtttccgaggataatg

SEQ ID NO: 2773939 - DNA, 25 bp, Homo sapien
ctaggtttccgaggataatgaaagg

SEQ ID NO: 2773940 - DNA, 25 bp, Homo sapien
gcctaggtttccgaggataatgaaa

SEQ ID NO: 2773941 - DNA, 25 bp, Homo sapien
tacagaaggggcggacaactcttcc

SEQ ID NO: 2773942 - DNA, 25 bp, Homo sapien
tcggtcccgtacctcttctgcggga

SEQ ID NO: 2773943 - DNA, 25 bp, Homo sapien
tcttctgcgggatgtaactctgtgg

SEQ ID NO: 2773944 - DNA, 25 bp, Homo sapien
gaaccgctcctttattctgatgatt

SEQ ID NO: 2773945 - DNA, 25 bp, Homo sapien
taactctgtgggaaccgctccttta

SEQ ID NO: 2773946 - DNA, 25 bp, Homo sapien
ggcaaaagtccgctacctctccaag

SEQ ID NO: 2773947 - DNA, 25 bp, Homo sapien
gagaaaaatggacggcaagactcca

SEQ ID NO: 2773948 - DNA, 25 bp, Homo sapien
tgatggcaaaagtccgctacctctc

SEQ ID NO: 2773949 - DNA, 25 bp, Homo sapien
caggagagaaaaatggacggcaaga

SEQ ID NO: 2773950 - DNA, 25 bp, Homo sapien
cctcacttagggaagtatgagtttg

SEQ ID NO: 2773951 - DNA, 25 bp, Homo sapien
tgcctgtggctgaatagataaatgt

SEQ ID NO: 2773952 - DNA, 25 bp, Homo sapien
ttaccattcagtgttaaatcaactt

SEQ ID NO: 2773953 - DNA, 25 bp, Homo sapien
accattcagtgttaaatcaactttt

SEQ ID NO: 2773954 - DNA, 25 bp, Homo sapien
tgagtaagaattgtcacttcctgac

SEQ ID NO: 2773955 - DNA, 25 bp, Homo sapien
caaatctctaggtattgcaggcaaa

SEQ ID NO: 2773956 - DNA, 25 bp, Homo sapien
tcctttccttacaggtgagtaagaa

SEQ ID NO: 2773957 - DNA, 25 bp, Homo sapien
gaccaggaacatcaggatatttgga

SEQ ID NO: 2773958 - DNA, 25 bp, Homo sapien
tttggaacccctatgtatgcactgt

SEQ ID NO: 2773959 - DNA, 25 bp, Homo sapien
tacatcacagatgaacctaagggac

SEQ ID NO: 2773960 - DNA, 25 bp, Homo sapien
caatgcagaaaggtggttgcctggc

SEQ ID NO: 2773961 - DNA, 25 bp, Homo sapien
caagtgtccattcacacatgaaagg

SEQ ID NO: 2773962 - DNA, 25 bp, Homo sapien
gatcatcaggcgtcagattctcagg

SEQ ID NO: 2773963 - DNA, 25 bp, Homo sapien
gagaagtgcgcaaggtagatccctc

SEQ ID NO: 2773964 - DNA, 25 bp, Homo sapien
ctaagtcacgtcagataagcggagc

SEQ ID NO: 2773965 - DNA, 25 bp, Homo sapien
gcagttcacgataggtttggcgctc

SEQ ID NO: 2773966 - DNA, 25 bp, Homo sapien
ggtttaatatactgtggcatgggct

SEQ ID NO: 2773967 - DNA, 25 bp, Homo sapien
gatcaaagcgccagtgattcagctc

SEQ ID NO: 2773968 - DNA, 25 bp, Homo sapien
gagttaacaaccacagcattccagg

SEQ ID NO: 2773969 - DNA, 25 bp, Homo sapien
taattccagatcagacaattccagg

SEQ ID NO: 2773970 - DNA, 25 bp, Homo sapien
ttccagacaaatgttaagccaaaga

SEQ ID NO: 2773971 - DNA, 25 bp, Homo sapien
ccaaagaaggccagtgtagctctag

SEQ ID NO: 2773972 - DNA, 25 bp, Homo sapien
tgtagctctagtactacattggctt

SEQ ID NO: 2773973 - DNA, 25 bp, Homo sapien
gaaggccagtgtagctctagtacta

SEQ ID NO: 2773974 - DNA, 25 bp, Homo sapien
taacatgccagactgaagccaacat

SEQ ID NO: 2773975 - DNA, 25 bp, Homo sapien
gggcagggtatggtatctcacacat

SEQ ID NO: 2773976 - DNA, 25 bp, Homo sapien
ccatgggtggtagcacacagaccta

SEQ ID NO: 2773977 - DNA, 25 bp, Homo sapien
taatgacagctctttgtgatgcaga

SEQ ID NO: 2773978 - DNA, 25 bp, Homo sapien
ggagacaggagcaaaccttcaaatt

SEQ ID NO: 2773979 - DNA, 25 bp, Homo sapien
tttaatgattacaggcttctgagtg

SEQ ID NO: 2773980 - DNA, 25 bp, Homo sapien
gaggagacaggagcaaaccttcaaa

SEQ ID NO: 2773981 - DNA, 25 bp, Homo sapien
gtttaatgattacaggcttctgagt

SEQ ID NO: 2773982 - DNA, 25 bp, Homo sapien
ttgatcagttggggtagggagatga

SEQ ID NO: 2773983 - DNA, 25 bp, Homo sapien
aattgatcagttggggtagggagat

SEQ ID NO: 2773984 - DNA, 25 bp, Homo sapien
agaaattgatcagttggggtaggga

SEQ ID NO: 2773985 - DNA, 25 bp, Homo sapien
aaattgatcagttggggtagggaga

SEQ ID NO: 2773986 - DNA, 25 bp, Homo sapien
gagtagttttactggcatgcaggac

SEQ ID NO: 2773987 - DNA, 25 bp, Homo sapien
gaacagctgacatgagtagttttac

SEQ ID NO: 2773988 - DNA, 25 bp, Homo sapien
gctgacatgagtagttttactggca

SEQ ID NO: 2773989 - DNA, 25 bp, Homo sapien
ctgcagaacagctgacatgagtagt

SEQ ID NO: 2773990 - DNA, 25 bp, Homo sapien
ctatgatcttgtagcagagtctaca

SEQ ID NO: 2773991 - DNA, 25 bp, Homo sapien
ggacaagttgacctaatgattaatg

SEQ ID NO: 2773992 - DNA, 25 bp, Homo sapien
gcaggtcagggacaagttgacctaa

SEQ ID NO: 2773993 - DNA, 25 bp, Homo sapien
tagcagagtctacatacttctgaga

SEQ ID NO: 2773994 - DNA, 25 bp, Homo sapien
aaatgttcccaagcagactcatgtc

SEQ ID NO: 2773995 - DNA, 25 bp, Homo sapien
tatttgttcggtccatgcaattaac

SEQ ID NO: 2773996 - DNA, 25 bp, Homo sapien
agcaaaaaagtcaacaatatcattt

SEQ ID NO: 2773997 - DNA, 25 bp, Homo sapien
tcacgaatacttcagctctccatga

SEQ ID NO: 2773998 - DNA, 25 bp, Homo sapien
tggactcccatcaagacaggttacc

SEQ ID NO: 2773999 - DNA, 25 bp, Homo sapien
aaagttcctatgacctcctccaaag

SEQ ID NO: 2774000 - DNA, 25 bp, Homo sapien
taggaaaggctctacatcgtttgtc

SEQ ID NO: 2774001 - DNA, 25 bp, Homo sapien
ttttcccgctacagggtgttgctca

SEQ ID NO: 2774002 - DNA, 25 bp, Homo sapien
gtcctgccatcgcttctgcctagga

SEQ ID NO: 2774003 - DNA, 25 bp, Homo sapien
cctgccatcgcttctgcctaggatc

SEQ ID NO: 2774004 - DNA, 25 bp, Homo sapien
ttgtcctgccatcgcttctgcctag

SEQ ID NO: 2774005 - DNA, 25 bp, Homo sapien
tctgcctaggatcccccagaaaagg

SEQ ID NO: 2774006 - DNA, 25 bp, Homo sapien
gatgctcatggcagggtctgtaggt

SEQ ID NO: 2774007 - DNA, 25 bp, Homo sapien
atgctcatggcagggtctgtaggtc

SEQ ID NO: 2774008 - DNA, 25 bp, Homo sapien
agatgctcatggcagggtctgtagg

SEQ ID NO: 2774009 - DNA, 25 bp, Homo sapien
tgctcatggcagggtctgtaggtct

SEQ ID NO: 2774010 - DNA, 25 bp, Homo sapien
taggcctcagtctgattgaacagtg

SEQ ID NO: 2774011 - DNA, 25 bp, Homo sapien
ggagagggaggattcaacacttaca

SEQ ID NO: 2774012 - DNA, 25 bp, Homo sapien
tcagaaaggaagtaggcctcagtct

SEQ ID NO: 2774013 - DNA, 25 bp, Homo sapien
aaatatgaatgcttgtagaaaggac

SEQ ID NO: 2774014 - DNA, 25 bp, Homo sapien
attgcatttcccagaagaaagaaga

SEQ ID NO: 2774015 - DNA, 25 bp, Homo sapien
tgcattgcatttcccagaagaaaga

SEQ ID NO: 2774016 - DNA, 25 bp, Homo sapien
ctgcattgcatttcccagaagaaag

SEQ ID NO: 2774017 - DNA, 25 bp, Homo sapien
gcatttcccagaagaaagaagaaaa

SEQ ID NO: 2774018 - DNA, 25 bp, Homo sapien
caaagatcacggtgctagagacaga

SEQ ID NO: 2774019 - DNA, 25 bp, Homo sapien
ccggagcctcgcagtccatttttct

SEQ ID NO: 2774020 - DNA, 25 bp, Homo sapien
gccaatttcacgtccaacaccggag

SEQ ID NO: 2774021 - DNA, 25 bp, Homo sapien
tccctgggcttagaggcggatgtct

SEQ ID NO: 2774022 - DNA, 25 bp, Homo sapien
aaatatccccaaatatcaaggacat

SEQ ID NO: 2774023 - DNA, 25 bp, Homo sapien
gaaatatccccaaatatcaaggaca

SEQ ID NO: 2774024 - DNA, 25 bp, Homo sapien
ttagaaatatccccaaatatcaagg

SEQ ID NO: 2774025 - DNA, 25 bp, Homo sapien
ctgttttagaaatatccccaaatat

SEQ ID NO: 2774026 - DNA, 25 bp, Homo sapien
tcagaataaggagcgattcccacag

SEQ ID NO: 2774027 - DNA, 25 bp, Homo sapien
cacagggaagggacgggaccagcgg

SEQ ID NO: 2774028 - DNA, 25 bp, Homo sapien
gaaccatcagaataaggagcgattc

SEQ ID NO: 2774029 - DNA, 25 bp, Homo sapien
cctgaagcctgggttgagcggcgct

SEQ ID NO: 2774030 - DNA, 25 bp, Homo sapien
cctagaatccgtgagggctgaaccg

SEQ ID NO: 2774031 - DNA, 25 bp, Homo sapien
caatgtaaagtgttcgcgacctgca

SEQ ID NO: 2774032 - DNA, 25 bp, Homo sapien
ggttgttgaccgctagcctagaatc

SEQ ID NO: 2774033 - DNA, 25 bp, Homo sapien
tggaggagccaaatccgtcccattc

SEQ ID NO: 2774034 - DNA, 25 bp, Homo sapien
gggccctcagtaattagggatcacg

SEQ ID NO: 2774035 - DNA, 25 bp, Homo sapien
gatcacggatcagccaagaaaaata

SEQ ID NO: 2774036 - DNA, 25 bp, Homo sapien
cgtgggagtaatgtcagtagcagtt

SEQ ID NO: 2774037 - DNA, 25 bp, Homo sapien
agtaattagggatcacggatcagcc

SEQ ID NO: 2774038 - DNA, 25 bp, Homo sapien
gcatttgtctggcaaagtcgctggc

SEQ ID NO: 2774039 - DNA, 25 bp, Homo sapien
gcctgacagttttccggttgcgaca

SEQ ID NO: 2774040 - DNA, 25 bp, Homo sapien
ggatcaccggtttctcacatccgca

SEQ ID NO: 2774041 - DNA, 25 bp, Homo sapien
gagcagccagattttcacaccagcg

SEQ ID NO: 2774042 - DNA, 25 bp, Homo sapien
ttgctctgggcgtcccattctccat

SEQ ID NO: 2774043 - DNA, 25 bp, Homo sapien
gaggccttctagtcccggtgtcact

SEQ ID NO: 2774044 - DNA, 25 bp, Homo sapien
catccgaggccttctagtcccggtg

SEQ ID NO: 2774045 - DNA, 25 bp, Homo sapien
ctgcttgctctgggcgtcccattct

SEQ ID NO: 2774046 - DNA, 25 bp, Homo sapien
tcgttagctctttcaccagcggcgc

SEQ ID NO: 2774047 - DNA, 25 bp, Homo sapien
tgaggtctctcggtctcagcacagc

SEQ ID NO: 2774048 - DNA, 25 bp, Homo sapien
cacggcacatgtggcacggagtttc

SEQ ID NO: 2774049 - DNA, 25 bp, Homo sapien
gacagcgctgttggttgcgccataa

SEQ ID NO: 2774050 - DNA, 25 bp, Homo sapien
aacaagtttcgatttcagggtgcct

SEQ ID NO: 2774051 - DNA, 25 bp, Homo sapien
gatctgagggattcggagcttcccc

SEQ ID NO: 2774052 - DNA, 25 bp, Homo sapien
gcccagccggtgactacgatttcta

SEQ ID NO: 2774053 - DNA, 25 bp, Homo sapien
gatttctcaacccaagcaagtaccc

SEQ ID NO: 2774054 - DNA, 25 bp, Homo sapien
tctccgcttcggtggtttcaggtcc

SEQ ID NO: 2774055 - DNA, 25 bp, Homo sapien
tgcagcaacgcttttgccagtagcg

SEQ ID NO: 2774056 - DNA, 25 bp, Homo sapien
tctgcttctaatgcggagctggcgg

SEQ ID NO: 2774057 - DNA, 25 bp, Homo sapien
cagtagcgcccactgagcggttttt

SEQ ID NO: 2774058 - DNA, 25 bp, Homo sapien
gcaccgttcttagcgcccaacggaa

SEQ ID NO: 2774059 - DNA, 25 bp, Homo sapien
tcccgtacgcggagtccataagttg

SEQ ID NO: 2774060 - DNA, 25 bp, Homo sapien
cccgtacgcggagtccataagttgt

SEQ ID NO: 2774061 - DNA, 25 bp, Homo sapien
ctgcaccgttcttagcgcccaacgg

SEQ ID NO: 2774062 - DNA, 25 bp, Homo sapien
tcagcgccgccagattcttgctagc

SEQ ID NO: 2774063 - DNA, 25 bp, Homo sapien
agcgctatccgctaggtgccggcgc

SEQ ID NO: 2774064 - DNA, 25 bp, Homo sapien
gtgccggcgcttgctgagtctcagc

SEQ ID NO: 2774065 - DNA, 25 bp, Homo sapien
tcttgctagcgaggtccagagcagt

SEQ ID NO: 2774066 - DNA, 25 bp, Homo sapien
gcattcccacctgagctgcagcaaa

SEQ ID NO: 2774067 - DNA, 25 bp, Homo sapien
caggttgccaagagcatgacactgc

SEQ ID NO: 2774068 - DNA, 25 bp, Homo sapien
ggggggaggatcaccagctactctg

SEQ ID NO: 2774069 - DNA, 25 bp, Homo sapien
gaggtccaggttgccaagagcatga

SEQ ID NO: 2774070 - DNA, 25 bp, Homo sapien
tgtatccgctggtgaaaggacgcga

SEQ ID NO: 2774071 - DNA, 25 bp, Homo sapien
gacgcgatggagttgccgtgtcccc

SEQ ID NO: 2774072 - DNA, 25 bp, Homo sapien
gaggcggcgggaccagatgcctcca

SEQ ID NO: 2774073 - DNA, 25 bp, Homo sapien
ccgggattccgcaaaggaggcggcg

SEQ ID NO: 2774074 - DNA, 25 bp, Homo sapien
gagctctcctgggccgacctagatt

SEQ ID NO: 2774075 - DNA, 25 bp, Homo sapien
tgggccgacctagatttccactgcc

SEQ ID NO: 2774076 - DNA, 25 bp, Homo sapien
cgacctagatttccactgccacata

SEQ ID NO: 2774077 - DNA, 25 bp, Homo sapien
gatttccactgccacatactttccg

SEQ ID NO: 2774078 - DNA, 25 bp, Homo sapien
atccggcgcaggcaattcaggagga

SEQ ID NO: 2774079 - DNA, 25 bp, Homo sapien
tgcatagggtctcaacatacgcccg

SEQ ID NO: 2774080 - DNA, 25 bp, Homo sapien
tcgcctgctctggatccggcgcagg

SEQ ID NO: 2774081 - DNA, 25 bp, Homo sapien
gcgcagagtcgcctgctctggatcc

SEQ ID NO: 2774082 - DNA, 25 bp, Homo sapien
ctctcgcttagtggacagacgactg

SEQ ID NO: 2774083 - DNA, 25 bp, Homo sapien
gagccggagacttccatccgagaag

SEQ ID NO: 2774084 - DNA, 25 bp, Homo sapien
gagagtgtcagcctactgctgtccc

SEQ ID NO: 2774085 - DNA, 25 bp, Homo sapien
tccgagaagacctttgagagtgtca

SEQ ID NO: 2774086 - DNA, 25 bp, Homo sapien
gagttcctgctgatgacgttgagta

SEQ ID NO: 2774087 - DNA, 25 bp, Homo sapien
tgacgttgagtaaggatgaggctca

SEQ ID NO: 2774088 - DNA, 25 bp, Homo sapien
gttcctgctgatgacgttgagtaag

SEQ ID NO: 2774089 - DNA, 25 bp, Homo sapien
tgctgatgacgttgagtaaggatga

SEQ ID NO: 2774090 - DNA, 25 bp, Homo sapien
catgggaaagcattgagtctgtcac

SEQ ID NO: 2774091 - DNA, 25 bp, Homo sapien
aagacttggagaggatatctttgcc

SEQ ID NO: 2774092 - DNA, 25 bp, Homo sapien
tccaatctagacaatcaatagggtg

SEQ ID NO: 2774093 - DNA, 25 bp, Homo sapien
tgacttttgagtattaaaccagcct

SEQ ID NO: 2774094 - DNA, 25 bp, Homo sapien
cttgctggggatatacacaaacatt

SEQ ID NO: 2774095 - DNA, 25 bp, Homo sapien
ttgtgcactgtttgtaggaatataa

SEQ ID NO: 2774096 - DNA, 25 bp, Homo sapien
gagatccggcaattctcttgctggg

SEQ ID NO: 2774097 - DNA, 25 bp, Homo sapien
gaattagcatgagatccggcaattc

SEQ ID NO: 2774098 - DNA, 25 bp, Homo sapien
tgccagtccgaggaaccagggatac

SEQ ID NO: 2774099 - DNA, 25 bp, Homo sapien
tgaagagccgctatggtaccactag

SEQ ID NO: 2774100 - DNA, 25 bp, Homo sapien
aaatccctggataatgcggcccgga

SEQ ID NO: 2774101 - DNA, 25 bp, Homo sapien
aaatctcaggtaatctagtccccga

SEQ ID NO: 2774102 - DNA, 25 bp, Homo sapien
aaagtgctgaaagagcgcctcctcg

SEQ ID NO: 2774103 - DNA, 25 bp, Homo sapien
tacccaatgaaacgcctgtggcaga

SEQ ID NO: 2774104 - DNA, 25 bp, Homo sapien
aatgcggacactgaacgactagcgg

SEQ ID NO: 2774105 - DNA, 25 bp, Homo sapien
gcggagtacccagcggcaaacttta

SEQ ID NO: 2774106 - DNA, 25 bp, Homo sapien
ggaacttgcaacgactacgtaggca

SEQ ID NO: 2774107 - DNA, 25 bp, Homo sapien
gttgaacgatgcgatcctacggcta

SEQ ID NO: 2774108 - DNA, 25 bp, Homo sapien
ccaaaaagttcctgtagcctagaca

SEQ ID NO: 2774109 - DNA, 25 bp, Homo sapien
tacgtaggcacggttaaagccagca

SEQ ID NO: 2774110 - DNA, 25 bp, Homo sapien
tctgcctcacttctcaactgagcca

SEQ ID NO: 2774111 - DNA, 25 bp, Homo sapien
ttcccagcataaacagccgctgctt

SEQ ID NO: 2774112 - DNA, 25 bp, Homo sapien
tgcggctccaacagttccagcagac

SEQ ID NO: 2774113 - DNA, 25 bp, Homo sapien
tcacttctcaactgagccatcttcc

SEQ ID NO: 2774114 - DNA, 25 bp, Homo sapien
tattcctggacatgaggactctacc

SEQ ID NO: 2774115 - DNA, 25 bp, Homo sapien
ccattgtgaccctgttggtaaggca

SEQ ID NO: 2774116 - DNA, 25 bp, Homo sapien
caagtttagtaaatgagtgagccct

SEQ ID NO: 2774117 - DNA, 25 bp, Homo sapien
gtttgtgtcctggtctgaaaaccaa

SEQ ID NO: 2774118 - DNA, 25 bp, Homo sapien
tagcatcatgacgttcacgaattcc

SEQ ID NO: 2774119 - DNA, 25 bp, Homo sapien
aaagcagattcctctcacaagggtg

SEQ ID NO: 2774120 - DNA, 25 bp, Homo sapien
taaccaggtgactgaatccttcatg

SEQ ID NO: 2774121 - DNA, 25 bp, Homo sapien
tcacaatatcctgaagcaccactga

SEQ ID NO: 2774122 - DNA, 25 bp, Homo sapien
aattctgtggaggaactaggaggaa

SEQ ID NO: 2774123 - DNA, 25 bp, Homo sapien
tagtcaagagtttatcggtcaccaa

SEQ ID NO: 2774124 - DNA, 25 bp, Homo sapien
cacacacataattgttagtcaagag

SEQ ID NO: 2774125 - DNA, 25 bp, Homo sapien
gaatacagccccaaattactacagc

SEQ ID NO: 2774126 - DNA, 25 bp, Homo sapien
tttttacctgctctactacagttat

SEQ ID NO: 2774127 - DNA, 25 bp, Homo sapien
ttacctgctctactacagttataac

SEQ ID NO: 2774128 - DNA, 25 bp, Homo sapien
cctgcatgatctttgtttttacctg

SEQ ID NO: 2774129 - DNA, 25 bp, Homo sapien
tactttctgtctagactcctgcatg

SEQ ID NO: 2774130 - DNA, 25 bp, Homo sapien
aaagttcctatgacctcctcccaag

SEQ ID NO: 2774131 - DNA, 25 bp, Homo sapien
tttgccctcaagtttgaatcctagg

SEQ ID NO: 2774132 - DNA, 25 bp, Homo sapien
ttattgtttcggatgacacagcagg

SEQ ID NO: 2774133 - DNA, 25 bp, Homo sapien
gggaaataggaaaggctctacatca

SEQ ID NO: 2774134 - DNA, 25 bp, Homo sapien
tgttagtctctgtaggggagcagcc

SEQ ID NO: 2774135 - DNA, 25 bp, Homo sapien
gacaggatattccttccgtctaggg

SEQ ID NO: 2774136 - DNA, 25 bp, Homo sapien
gggtgctgattgcaacttttttgct

SEQ ID NO: 2774137 - DNA, 25 bp, Homo sapien
ctcctatggactcccattaagacag

SEQ ID NO: 2774138 - DNA, 25 bp, Homo sapien
gcaatggctccagactgctcttccg

SEQ ID NO: 2774139 - DNA, 25 bp, Homo sapien
ggacattttcctactgagcagtggc

SEQ ID NO: 2774140 - DNA, 25 bp, Homo sapien
gctcttccgtttgataaagtggctg

SEQ ID NO: 2774141 - DNA, 25 bp, Homo sapien
aaatggatttccttaccaggcaggc

SEQ ID NO: 2774142 - DNA, 25 bp, Homo sapien
tcgaggatatctgacagagtgaacc

SEQ ID NO: 2774143 - DNA, 25 bp, Homo sapien
tacatccaacgctggaatctttcag

SEQ ID NO: 2774144 - DNA, 25 bp, Homo sapien
cccagaagatagaaatcaatgatgc

SEQ ID NO: 2774145 - DNA, 25 bp, Homo sapien
ccatcagaataaggagcgattgcca

SEQ ID NO: 2774146 - DNA, 25 bp, Homo sapien
tccacggagatcttgaacctagagt

SEQ ID NO: 2774147 - DNA, 25 bp, Homo sapien
tagaatctctgatggctctgaacgg

SEQ ID NO: 2774148 - DNA, 25 bp, Homo sapien
cctagagtttccaagttccgaagag

SEQ ID NO: 2774149 - DNA, 25 bp, Homo sapien
gaagagatgcggttgtcgacagctc

SEQ ID NO: 2774150 - DNA, 25 bp, Homo sapien
ctagggcagagggatggtgtggaag

SEQ ID NO: 2774151 - DNA, 25 bp, Homo sapien
gggcagagggatggtgtggaaggac

SEQ ID NO: 2774152 - DNA, 25 bp, Homo sapien
agggcagagggatggtgtggaagga

SEQ ID NO: 2774153 - DNA, 25 bp, Homo sapien
tagggcagagggatggtgtggaagg

SEQ ID NO: 2774154 - DNA, 25 bp, Homo sapien
caatgtaatgctgtttgcgaccagc

SEQ ID NO: 2774155 - DNA, 25 bp, Homo sapien
cagccacggccattggaagagcagt

SEQ ID NO: 2774156 - DNA, 25 bp, Homo sapien
gccccattcacggtccttattccag

SEQ ID NO: 2774157 - DNA, 25 bp, Homo sapien
tgcgaccagcataagctttagctct

SEQ ID NO: 2774158 - DNA, 25 bp, Homo sapien
taattacggattatggcacagccaa

SEQ ID NO: 2774159 - DNA, 25 bp, Homo sapien
tcggtaattacggattatggcacag

SEQ ID NO: 2774160 - DNA, 25 bp, Homo sapien
tgaagccactgacttgaggggggag

SEQ ID NO: 2774161 - DNA, 25 bp, Homo sapien
cggattatggcacagccaagaaaaa

SEQ ID NO: 2774162 - DNA, 25 bp, Homo sapien
tgatggcgcccaaaagaacgcgcat

SEQ ID NO: 2774163 - DNA, 25 bp, Homo sapien
caagacaatgttgcacccagtgcca

SEQ ID NO: 2774164 - DNA, 25 bp, Homo sapien
tagttggtctgcacgaaacgtttcc

SEQ ID NO: 2774165 - DNA, 25 bp, Homo sapien
gaacgcgcatttgtctttggcaaca

SEQ ID NO: 2774166 - DNA, 25 bp, Homo sapien
gacagtaccgttggttgcgccgtaa

SEQ ID NO: 2774167 - DNA, 25 bp, Homo sapien
gaggtctcttggttgcggcactgct

SEQ ID NO: 2774168 - DNA, 25 bp, Homo sapien
gtattttctcggtgcctacagcgcc

SEQ ID NO: 2774169 - DNA, 25 bp, Homo sapien
cactgcttctggctcggtgcctgta

SEQ ID NO: 2774170 - DNA, 25 bp, Homo sapien
tccctgctgtcaggtgccaggttgt

SEQ ID NO: 2774171 - DNA, 25 bp, Homo sapien
ttctctcaggatccggggagccgag

SEQ ID NO: 2774172 - DNA, 25 bp, Homo sapien
gccaggttgtgtctggtggctctcc

SEQ ID NO: 2774173 - DNA, 25 bp, Homo sapien
gggagccgagctcggtctcagtctc

SEQ ID NO: 2774174 - DNA, 25 bp, Homo sapien
agaccagcatgtgggaccccatgta

SEQ ID NO: 2774175 - DNA, 25 bp, Homo sapien
agcctataaagtaaacgtgaatatc

SEQ ID NO: 2774176 - DNA, 25 bp, Homo sapien
tatctaaggaacactgatgcaagac

SEQ ID NO: 2774177 - DNA, 25 bp, Homo sapien
cgtgaatatctaaggaacactgatg

SEQ ID NO: 2774178 - DNA, 25 bp, Homo sapien
aaaaatgggcgactaccctggcctg

SEQ ID NO: 2774179 - DNA, 25 bp, Homo sapien
cagatttccctgcaccagatagtat

SEQ ID NO: 2774180 - DNA, 25 bp, Homo sapien
tatgacccatcaggcatctgacaag

SEQ ID NO: 2774181 - DNA, 25 bp, Homo sapien
agaaaaggatccaagtctgctccag

SEQ ID NO: 2774182 - DNA, 25 bp, Homo sapien
tctctaacaccactcattctattgc

SEQ ID NO: 2774183 - DNA, 25 bp, Homo sapien
taatgctttcttcaggtgccaggtc

SEQ ID NO: 2774184 - DNA, 25 bp, Homo sapien
cttcaagcatctgcttgctttctct

SEQ ID NO: 2774185 - DNA, 25 bp, Homo sapien
cactcattctattgcccctactgag

SEQ ID NO: 2774186 - DNA, 25 bp, Homo sapien
gcacagtgcgagtgagaaaccggcc

SEQ ID NO: 2774187 - DNA, 25 bp, Homo sapien
ccaacaagcggtgctaccaggagaa

SEQ ID NO: 2774188 - DNA, 25 bp, Homo sapien
tgaaacgaccagtactgccacggaa

SEQ ID NO: 2774189 - DNA, 25 bp, Homo sapien
gaacaacaggctctgcgaaaccaag

SEQ ID NO: 2774190 - DNA, 25 bp, Homo sapien
gaattctacaatcgtaaaatagatt

SEQ ID NO: 2774191 - DNA, 25 bp, Homo sapien
tctaagaattctacaatcgtaaaat

SEQ ID NO: 2774192 - DNA, 25 bp, Homo sapien
aattctacaatcgtaaaatagattt

SEQ ID NO: 2774193 - DNA, 25 bp, Homo sapien
attctacaatcgtaaaatagatttc

SEQ ID NO: 2774194 - DNA, 25 bp, Homo sapien
ctgaaagtaataagcgacgcgaaac

SEQ ID NO: 2774195 - DNA, 25 bp, Homo sapien
gaaactgaaagtaataagcgacgcg

SEQ ID NO: 2774196 - DNA, 25 bp, Homo sapien
agtaataagcgacgcgaaacaagaa

SEQ ID NO: 2774197 - DNA, 25 bp, Homo sapien
taagcgacgcgaaacaagaaagaaa

SEQ ID NO: 2774198 - DNA, 25 bp, Homo sapien
ggtaactgagaatcttttcaaggag

SEQ ID NO: 2774199 - DNA, 25 bp, Homo sapien
tggagacgtttggtaactgagaatc

SEQ ID NO: 2774200 - DNA, 25 bp, Homo sapien
tctaggtggagacgtttggtaactg

SEQ ID NO: 2774201 - DNA, 25 bp, Homo sapien
gtaactgagaatcttttcaaggagg

SEQ ID NO: 2774202 - DNA, 25 bp, Homo sapien
aggatggcggcgttccaaaaggcac

SEQ ID NO: 2774203 - DNA, 25 bp, Homo sapien
cagagaacgcggcaaaaccaacgcg

SEQ ID NO: 2774204 - DNA, 25 bp, Homo sapien
gctgcttagctccacagatccgtga

SEQ ID NO: 2774205 - DNA, 25 bp, Homo sapien
tccgtgaacagcacgcccagagtac

SEQ ID NO: 2774206 - DNA, 25 bp, Homo sapien
agtactggatacaaaggaagaggcc

SEQ ID NO: 2774207 - DNA, 25 bp, Homo sapien
tacttggttccaaggtgctctggac

SEQ ID NO: 2774208 - DNA, 25 bp, Homo sapien
ggaaagcagtcccaaatcacagctg

SEQ ID NO: 2774209 - DNA, 25 bp, Homo sapien
tccgttttgccagtagactccgggc

SEQ ID NO: 2774210 - DNA, 25 bp, Homo sapien
ggcggaggccagtcagatattaaga

SEQ ID NO: 2774211 - DNA, 25 bp, Homo sapien
tcaagcctcagaccaacgtttgcgc

SEQ ID NO: 2774212 - DNA, 25 bp, Homo sapien
agggagagtctctgcactaccatca

SEQ ID NO: 2774213 - DNA, 25 bp, Homo sapien
aattccgacagaaaaacatggcgag

SEQ ID NO: 2774214 - DNA, 25 bp, Homo sapien
ttgccagtgagaaacagccggcgct

SEQ ID NO: 2774215 - DNA, 25 bp, Homo sapien
cagctgcccgtagcaaatgtctgtg

SEQ ID NO: 2774216 - DNA, 25 bp, Homo sapien
gaaattgtgaaaccagcggcgctgg

SEQ ID NO: 2774217 - DNA, 25 bp, Homo sapien
taatttttggccgtgagaaggttgc

SEQ ID NO: 2774218 - DNA, 25 bp, Homo sapien
tctcccaatcggatcctgaaaacac

SEQ ID NO: 2774219 - DNA, 25 bp, Homo sapien
tcctgaaaacaccatgcaaccaatt

SEQ ID NO: 2774220 - DNA, 25 bp, Homo sapien
gcgaacgcatcatctcccaatcgga

SEQ ID NO: 2774221 - DNA, 25 bp, Homo sapien
caggagcgttcccacgcgaacgcat

SEQ ID NO: 2774222 - DNA, 25 bp, Homo sapien
tttcaattgtgcctacaattttcac

SEQ ID NO: 2774223 - DNA, 25 bp, Homo sapien
tcaatcataacaaccctgctgactt

SEQ ID NO: 2774224 - DNA, 25 bp, Homo sapien
gctgactttcaattgtgcctacaat

SEQ ID NO: 2774225 - DNA, 25 bp, Homo sapien
caaccctgctgactttcaattgtgc

SEQ ID NO: 2774226 - DNA, 25 bp, Homo sapien
ctttcctagaccagccacgtagctt

SEQ ID NO: 2774227 - DNA, 25 bp, Homo sapien
tagtgatcatctcccaactatttgg

SEQ ID NO: 2774228 - DNA, 25 bp, Homo sapien
tataaaagcacagtctgtactggac

SEQ ID NO: 2774229 - DNA, 25 bp, Homo sapien
tgtactggacagaatcatttactcc

SEQ ID NO: 2774230 - DNA, 25 bp, Homo sapien
gctgccatgctgggcttacataggc

SEQ ID NO: 2774231 - DNA, 25 bp, Homo sapien
tgctgggcttacataggctagagtc

SEQ ID NO: 2774232 - DNA, 25 bp, Homo sapien
gccaccagacttaagcctaaagtaa

SEQ ID NO: 2774233 - DNA, 25 bp, Homo sapien
ccatgctgggcttacataggctaga

SEQ ID NO: 2774234 - DNA, 25 bp, Homo sapien
gttgttgagacccacactctggggc

SEQ ID NO: 2774235 - DNA, 25 bp, Homo sapien
aaataagtgtatgctgagatcgttc

SEQ ID NO: 2774236 - DNA, 25 bp, Homo sapien
tgagatcgttcgaagatggctgaat

SEQ ID NO: 2774237 - DNA, 25 bp, Homo sapien
tgaaaccacagaagagctacactca

SEQ ID NO: 2774238 - DNA, 25 bp, Homo sapien
ctttgagggcaccatggaatccgat

SEQ ID NO: 2774239 - DNA, 25 bp, Homo sapien
tatgacgagatggttttagaaggca

SEQ ID NO: 2774240 - DNA, 25 bp, Homo sapien
tgaatggaacgtgggaataaaactg

SEQ ID NO: 2774241 - DNA, 25 bp, Homo sapien
tagcatacagggtcagaaagatttg

SEQ ID NO: 2774242 - DNA, 25 bp, Homo sapien
taaatcgggacttgcttaggctgag

SEQ ID NO: 2774243 - DNA, 25 bp, Homo sapien
tgaaaaatcgccagcatagccaggg

SEQ ID NO: 2774244 - DNA, 25 bp, Homo sapien
tagccagggcgagactattgcgaat

SEQ ID NO: 2774245 - DNA, 25 bp, Homo sapien
caaacagggtcgaatggtgagatcc

SEQ ID NO: 2774246 - DNA, 25 bp, Homo sapien
tcacgcagaaaatgtcgaccctcgg

SEQ ID NO: 2774247 - DNA, 25 bp, Homo sapien
gaaccaacggtgttgtcacgcagaa

SEQ ID NO: 2774248 - DNA, 25 bp, Homo sapien
cgagaaattcggtgcaacaagtgct

SEQ ID NO: 2774249 - DNA, 25 bp, Homo sapien
tgctgggaccctaagagtgacgcca

SEQ ID NO: 2774250 - DNA, 25 bp, Homo sapien
tggtgctgcccatgaacatccgccg

SEQ ID NO: 2774251 - DNA, 25 bp, Homo sapien
caggacaaatactgcttctggctcg

SEQ ID NO: 2774252 - DNA, 25 bp, Homo sapien
cgccggctctgagaaacgagctgca

SEQ ID NO: 2774253 - DNA, 25 bp, Homo sapien
acaaatactgcttctggctcgatgg

SEQ ID NO: 2774254 - DNA, 25 bp, Homo sapien
tcaaccgatcccttgcgatgcgcat

SEQ ID NO: 2774255 - DNA, 25 bp, Homo sapien
gaatcgggcggattgggctggccct

SEQ ID NO: 2774256 - DNA, 25 bp, Homo sapien
tagcgaagtcatactgagggcccca

SEQ ID NO: 2774257 - DNA, 25 bp, Homo sapien
gaaaaggaggcagtatagggaccga

SEQ ID NO: 2774258 - DNA, 25 bp, Homo sapien
aagccaccatactgatcctaggttg

SEQ ID NO: 2774259 - DNA, 25 bp, Homo sapien
tccagaattggccttgcgaagtgac

SEQ ID NO: 2774260 - DNA, 25 bp, Homo sapien
tccccaaatgtgctcttccagaatt

SEQ ID NO: 2774261 - DNA, 25 bp, Homo sapien
gaagtgactgcttggttctctctgc

SEQ ID NO: 2774262 - DNA, 25 bp, Homo sapien
ccagaaacatgcatgggtaagaatt

SEQ ID NO: 2774263 - DNA, 25 bp, Homo sapien
tctgcaggcacgatctctaccattg

SEQ ID NO: 2774264 - DNA, 25 bp, Homo sapien
ttttgcacagttttatcacgtgggc

SEQ ID NO: 2774265 - DNA, 25 bp, Homo sapien
tgtttgagcaaacctagaggtgtca

SEQ ID NO: 2774266 - DNA, 25 bp, Homo sapien
cacaagggcaatatgagggccctca

SEQ ID NO: 2774267 - DNA, 25 bp, Homo sapien
aagggcaatatgagggccctcactg

SEQ ID NO: 2774268 - DNA, 25 bp, Homo sapien
cttaggtctgaagggttcagtccca

SEQ ID NO: 2774269 - DNA, 25 bp, Homo sapien
agaagctcttaggtctgaagggttc

SEQ ID NO: 2774270 - DNA, 25 bp, Homo sapien
tttcacccttagggagctagtttgc

SEQ ID NO: 2774271 - DNA, 25 bp, Homo sapien
cgagtttcacccttagggagctagt

SEQ ID NO: 2774272 - DNA, 25 bp, Homo sapien
acccttagggagctagtttgcagtt

SEQ ID NO: 2774273 - DNA, 25 bp, Homo sapien
tcacccttagggagctagtttgcag

SEQ ID NO: 2774274 - DNA, 25 bp, Homo sapien
ctaggagctatccgagcaagtgaat

SEQ ID NO: 2774275 - DNA, 25 bp, Homo sapien
acagtttggcttcgggttcctgctg

SEQ ID NO: 2774276 - DNA, 25 bp, Homo sapien
ctgtcctcggtcctcgtccccttgg

SEQ ID NO: 2774277 - DNA, 25 bp, Homo sapien
aagacagtttggcttcgggttcctg

SEQ ID NO: 2774278 - DNA, 25 bp, Homo sapien
tccactagagacactactgccacat

SEQ ID NO: 2774279 - DNA, 25 bp, Homo sapien
tgcacaggccgaagaaccactagag

SEQ ID NO: 2774280 - DNA, 25 bp, Homo sapien
agcagcccagcggatttcagcgttt

SEQ ID NO: 2774281 - DNA, 25 bp, Homo sapien
aagacttgctgcgtgtcgaccctgg

SEQ ID NO: 2774282 - DNA, 25 bp, Homo sapien
cagcacacgggctccataagacttg

SEQ ID NO: 2774283 - DNA, 25 bp, Homo sapien
cagctccgccagttgtatttcctat

SEQ ID NO: 2774284 - DNA, 25 bp, Homo sapien
tatgtaggcccatatatccaagggc

SEQ ID NO: 2774285 - DNA, 25 bp, Homo sapien
aacttgcaaatctctatctctacgg

SEQ ID NO: 2774286 - DNA, 25 bp, Homo sapien
caattcaatctacaagcagctagcc

SEQ ID NO: 2774287 - DNA, 25 bp, Homo sapien
ggctcgagctcatgggtgtacatta

SEQ ID NO: 2774288 - DNA, 25 bp, Homo sapien
attgaatgaacagcgagagcaggac

SEQ ID NO: 2774289 - DNA, 25 bp, Homo sapien
tcataaaatgatcctcgaccgattg

SEQ ID NO: 2774290 - DNA, 25 bp, Homo sapien
gagacgatggaatgccttcaggagt

SEQ ID NO: 2774291 - DNA, 25 bp, Homo sapien
gacaccataggaaataggcatcagt

SEQ ID NO: 2774292 - DNA, 25 bp, Homo sapien
gatctgccaggaaaaacttagatgg

SEQ ID NO: 2774293 - DNA, 25 bp, Homo sapien
ttctaataataacctgccaagtgcc

SEQ ID NO: 2774294 - DNA, 25 bp, Homo sapien
tctacaatgggatggatcaatacct

SEQ ID NO: 2774295 - DNA, 25 bp, Homo sapien
ctggcattgattcagtatggtggtg

SEQ ID NO: 2774296 - DNA, 25 bp, Homo sapien
tcctgagtgttaatagtgctggttg

SEQ ID NO: 2774297 - DNA, 25 bp, Homo sapien
gctgagagataataagacagaatca

SEQ ID NO: 2774298 - DNA, 25 bp, Homo sapien
gacagaatcaaaaagttctggcatt

SEQ ID NO: 2774299 - DNA, 25 bp, Homo sapien
ccactgttgcaagtttatcatcttc

SEQ ID NO: 2774300 - DNA, 25 bp, Homo sapien
cccaggcagagtacatgtaataaga

SEQ ID NO: 2774301 - DNA, 25 bp, Homo sapien
tgcattagctcccaacaagaaagtt

SEQ ID NO: 2774302 - DNA, 25 bp, Homo sapien
gatggctaacctgtgtccttacatg

SEQ ID NO: 2774303 - DNA, 25 bp, Homo sapien
gatgttctgtcaaccaaactttgtt

SEQ ID NO: 2774304 - DNA, 25 bp, Homo sapien
taccttttcagtcacaacttaacta

SEQ ID NO: 2774305 - DNA, 25 bp, Homo sapien
caccgcatccgggtgagacacgtga

SEQ ID NO: 2774306 - DNA, 25 bp, Homo sapien
ggtgagacacgtgactttcacttaa

SEQ ID NO: 2774307 - DNA, 25 bp, Homo sapien
catgcccagccgtgacccttttttt

SEQ ID NO: 2774308 - DNA, 25 bp, Homo sapien
tccgggtgagacacgtgactttcac

SEQ ID NO: 2774309 - DNA, 25 bp, Homo sapien
tgaaaagagtttctgtattacacta

SEQ ID NO: 2774310 - DNA, 25 bp, Homo sapien
taaaccatttagtgatattgcccat

SEQ ID NO: 2774311 - DNA, 25 bp, Homo sapien
gtcagataatacatatagctcagtt

SEQ ID NO: 2774312 - DNA, 25 bp, Homo sapien
taaggagaggctttgccaatttgtt

SEQ ID NO: 2774313 - DNA, 25 bp, Homo sapien
tataggaaacacaaggctgcatgat

SEQ ID NO: 2774314 - DNA, 25 bp, Homo sapien
caaacgttcttgtctaccccagtag

SEQ ID NO: 2774315 - DNA, 25 bp, Homo sapien
gaaaagtgcattgttactgtgcagt

SEQ ID NO: 2774316 - DNA, 25 bp, Homo sapien
gtgcagttaaattttggcttctggc

SEQ ID NO: 2774317 - DNA, 25 bp, Homo sapien
ttgcgcctggccacaagtggatttt

SEQ ID NO: 2774318 - DNA, 25 bp, Homo sapien
aagggggacagatacaaaaagagtg

SEQ ID NO: 2774319 - DNA, 25 bp, Homo sapien
gacagatacaaaaagagtgggctga

SEQ ID NO: 2774320 - DNA, 25 bp, Homo sapien
tccaggaattctcattcatttacag

SEQ ID NO: 2774321 - DNA, 25 bp, Homo sapien
taggaggatcttcagtcatacagtg

SEQ ID NO: 2774322 - DNA, 25 bp, Homo sapien
tgtgatggccagaaaactgcttgtt

SEQ ID NO: 2774323 - DNA, 25 bp, Homo sapien
agtagcgtatataacctctctgtga

SEQ ID NO: 2774324 - DNA, 25 bp, Homo sapien
tcatacagtgaagccaatgaagcca

SEQ ID NO: 2774325 - DNA, 25 bp, Homo sapien
tagtattcctctctttcttcctcac

SEQ ID NO: 2774326 - DNA, 25 bp, Homo sapien
ttagtattcctctctttcttcctca

SEQ ID NO: 2774327 - DNA, 25 bp, Homo sapien
tcatgtcctcactggcctcagaaaa

SEQ ID NO: 2774328 - DNA, 25 bp, Homo sapien
ccacgtaccagtgaacaaaagcact

SEQ ID NO: 2774329 - DNA, 25 bp, Homo sapien
agaatccacaccaacctccttataa

SEQ ID NO: 2774330 - DNA, 25 bp, Homo sapien
cctcccttctctcacccacgtacca

SEQ ID NO: 2774331 - DNA, 25 bp, Homo sapien
gacatacattcaagtcaaacttgtg

SEQ ID NO: 2774332 - DNA, 25 bp, Homo sapien
catacattcaagtcaaacttgtggt

SEQ ID NO: 2774333 - DNA, 25 bp, Homo sapien
cttgacatacattcaagtcaaactt

SEQ ID NO: 2774334 - DNA, 25 bp, Homo sapien
atacattcaagtcaaacttgtggtc

SEQ ID NO: 2774335 - DNA, 25 bp, Homo sapien
gggagggctggcagttaatgccaac

SEQ ID NO: 2774336 - DNA, 25 bp, Homo sapien
caccagtcaccacagtgggagggct

SEQ ID NO: 2774337 - DNA, 25 bp, Homo sapien
cacagctctctgtgtcttgaccagg

SEQ ID NO: 2774338 - DNA, 25 bp, Homo sapien
tctgtgtcttgaccaggtctccacc

SEQ ID NO: 2774339 - DNA, 25 bp, Homo sapien
acgtctttgagaaccatgtcaccac

SEQ ID NO: 2774340 - DNA, 25 bp, Homo sapien
aattagatgatacacttggtcttga

SEQ ID NO: 2774341 - DNA, 25 bp, Homo sapien
gagaaccatgtcaccacggtaaaac

SEQ ID NO: 2774342 - DNA, 25 bp, Homo sapien
gggcaccaaaccacaaattagatga

SEQ ID NO: 2774343 - DNA, 25 bp, Homo sapien
gatgacagggcatatgtgtccagac

SEQ ID NO: 2774344 - DNA, 25 bp, Homo sapien
tgacagggcatatgtgtccagacgg

SEQ ID NO: 2774345 - DNA, 25 bp, Homo sapien
cagggcatatgtgtccagacggaag

SEQ ID NO: 2774346 - DNA, 25 bp, Homo sapien
ggatggggggataggccaccagctt

SEQ ID NO: 2774347 - DNA, 25 bp, Homo sapien
ttagtataggttgggcgttcagtat

SEQ ID NO: 2774348 - DNA, 25 bp, Homo sapien
attcagtttagtataggttgggcgt

SEQ ID NO: 2774349 - DNA, 25 bp, Homo sapien
cagtttagtataggttgggcgttca

SEQ ID NO: 2774350 - DNA, 25 bp, Homo sapien
taggttgggcgttcagtatcaaggt

SEQ ID NO: 2774351 - DNA, 25 bp, Homo sapien
aaccaactccttcaccaaagctgtg

SEQ ID NO: 2774352 - DNA, 25 bp, Homo sapien
cttcttgccgtaatcaaccgggagt

SEQ ID NO: 2774353 - DNA, 25 bp, Homo sapien
taatcaaccgggagttgttccatga

SEQ ID NO: 2774354 - DNA, 25 bp, Homo sapien
agaaccaactccttcaccaaagctg

SEQ ID NO: 2774355 - DNA, 25 bp, Homo sapien
caaatttggtccaaaacgaggtcag

SEQ ID NO: 2774356 - DNA, 25 bp, Homo sapien
tggtccaaaacgaggtcagtgatct

SEQ ID NO: 2774357 - DNA, 25 bp, Homo sapien
tcagccagtttacaaatttggtcca

SEQ ID NO: 2774358 - DNA, 25 bp, Homo sapien
cagccagtttacaaatttggtccaa

SEQ ID NO: 2774359 - DNA, 25 bp, Homo sapien
agctggttgtaggtgccagtgcaaa

SEQ ID NO: 2774360 - DNA, 25 bp, Homo sapien
cagtgcaaacttcatcatcaattac

SEQ ID NO: 2774361 - DNA, 25 bp, Homo sapien
gttgtaggtgccagtgcaaacttca

SEQ ID NO: 2774362 - DNA, 25 bp, Homo sapien
taggtgccagtgcaaacttcatcat

SEQ ID NO: 2774363 - DNA, 25 bp, Homo sapien
ggcacatgcttgccggagcccgtct

SEQ ID NO: 2774364 - DNA, 25 bp, Homo sapien
gggcacatgcttgccggagcccgtc

SEQ ID NO: 2774365 - DNA, 25 bp, Homo sapien
acatgcttgccggagcccgtctcac

SEQ ID NO: 2774366 - DNA, 25 bp, Homo sapien
tgggcacatgcttgccggagcccgt

SEQ ID NO: 2774367 - DNA, 25 bp, Homo sapien
cctccccgagtggtcttgtcacttg

SEQ ID NO: 2774368 - DNA, 25 bp, Homo sapien
tgtcacttggcatctggccattggg

SEQ ID NO: 2774369 - DNA, 25 bp, Homo sapien
catctggccattgggctggatgcca

SEQ ID NO: 2774370 - DNA, 25 bp, Homo sapien
tgaaggagtcatctcctccccgagt

SEQ ID NO: 2774371 - DNA, 25 bp, Homo sapien
atgagatggagatgcggtcacgcat

SEQ ID NO: 2774372 - DNA, 25 bp, Homo sapien
caatgagatggagatgcggtcacgc

SEQ ID NO: 2774373 - DNA, 25 bp, Homo sapien
ccaatgagatggagatgcggtcacg

SEQ ID NO: 2774374 - DNA, 25 bp, Homo sapien
gccaatgagatggagatgcggtcac

SEQ ID NO: 2774375 - DNA, 25 bp, Homo sapien
ggctttgatctgcagtgatgtgact

SEQ ID NO: 2774376 - DNA, 25 bp, Homo sapien
agtgatgtgactccataattttgtc

SEQ ID NO: 2774377 - DNA, 25 bp, Homo sapien
agtttctaagctctcattaatgtcc

SEQ ID NO: 2774378 - DNA, 25 bp, Homo sapien
gatgtgactccataattttgtctgg

SEQ ID NO: 2774379 - DNA, 25 bp, Homo sapien
aggtatgtgatcacttccgttattt

SEQ ID NO: 2774380 - DNA, 25 bp, Homo sapien
taggtatgtgatcacttccgttatt

SEQ ID NO: 2774381 - DNA, 25 bp, Homo sapien
ccggctcctatagtaatctttctta

SEQ ID NO: 2774382 - DNA, 25 bp, Homo sapien
ccctgtgcccggctcctatagtaat

SEQ ID NO: 2774383 - DNA, 25 bp, Homo sapien
tgcccggctcctatagtaatctttc

SEQ ID NO: 2774384 - DNA, 25 bp, Homo sapien
tgtgcccggctcctatagtaatctt

SEQ ID NO: 2774385 - DNA, 25 bp, Homo sapien
gatgcgtagatcaaaggcttaaggc

SEQ ID NO: 2774386 - DNA, 25 bp, Homo sapien
tatttgagaagcgatcccaggatgc

SEQ ID NO: 2774387 - DNA, 25 bp, Homo sapien
tttccacctaggtcaaggatggccc

SEQ ID NO: 2774388 - DNA, 25 bp, Homo sapien
tctgcagacattccacgtcagggag

SEQ ID NO: 2774389 - DNA, 25 bp, Homo sapien
gttacccttgctctgttgactgcca

SEQ ID NO: 2774390 - DNA, 25 bp, Homo sapien
gaacgctagcctctaaatgacccag

SEQ ID NO: 2774391 - DNA, 25 bp, Homo sapien
catgggacttttaggttggagactc

SEQ ID NO: 2774392 - DNA, 25 bp, Homo sapien
catctgtttgggtctagtgtcaacc

SEQ ID NO: 2774393 - DNA, 25 bp, Homo sapien
gccggcaatggactttgagaaaacc

SEQ ID NO: 2774394 - DNA, 25 bp, Homo sapien
gtattacatgcaccattttgccacc

SEQ ID NO: 2774395 - DNA, 25 bp, Homo sapien
ggtgtatgattaatgctctgtgcca

SEQ ID NO: 2774396 - DNA, 25 bp, Homo sapien
tctgtgccagtatttgcaggcctgc

SEQ ID NO: 2774397 - DNA, 25 bp, Homo sapien
tcagactaggtaaaaacttgggtca

SEQ ID NO: 2774398 - DNA, 25 bp, Homo sapien
tagacaagagtatcttacaaacact

SEQ ID NO: 2774399 - DNA, 25 bp, Homo sapien
tcatagttcagcaccaaaaagatct

SEQ ID NO: 2774400 - DNA, 25 bp, Homo sapien
gtggaatacttctagtcagactagg

SEQ ID NO: 2774401 - DNA, 25 bp, Homo sapien
aaatagcctaataatgccctgcccc

SEQ ID NO: 2774402 - DNA, 25 bp, Homo sapien
gaatttaggttgtcagcctctatgt

SEQ ID NO: 2774403 - DNA, 25 bp, Homo sapien
tatgttgaatttataacactgaagc

SEQ ID NO: 2774404 - DNA, 25 bp, Homo sapien
tagcctaataatgccctgcccctat

SEQ ID NO: 2774405 - DNA, 25 bp, Homo sapien
ttcaggagcacacctagagctatat

SEQ ID NO: 2774406 - DNA, 25 bp, Homo sapien
tgttgttcagcataatctaccatga

SEQ ID NO: 2774407 - DNA, 25 bp, Homo sapien
cctcttcaatggcagtgtttctctg

SEQ ID NO: 2774408 - DNA, 25 bp, Homo sapien
taaaataaggtgcaaagaaggactg

SEQ ID NO: 2774409 - DNA, 25 bp, Homo sapien
tttcaaagggtttgtgcgtatcaca

SEQ ID NO: 2774410 - DNA, 25 bp, Homo sapien
ctggacttaacattccagattccag

SEQ ID NO: 2774411 - DNA, 25 bp, Homo sapien
tacaataacttttgtcactgctggc

SEQ ID NO: 2774412 - DNA, 25 bp, Homo sapien
tgttgtcacattccccaagctagaa

SEQ ID NO: 2774413 - DNA, 25 bp, Homo sapien
attggccagaccacaacaggaagca

SEQ ID NO: 2774414 - DNA, 25 bp, Homo sapien
caagtacacgatagtcatccaggct

SEQ ID NO: 2774415 - DNA, 25 bp, Homo sapien
cattcgagtacatttggcattggcc

SEQ ID NO: 2774416 - DNA, 25 bp, Homo sapien
tacagagcccttaacatcattcgag

SEQ ID NO: 2774417 - DNA, 25 bp, Homo sapien
cagggagtcttggtactttcttggc

SEQ ID NO: 2774418 - DNA, 25 bp, Homo sapien
ccattactaatgacagctgcttcag

SEQ ID NO: 2774419 - DNA, 25 bp, Homo sapien
ttggtactttcttggcagggcttgg

SEQ ID NO: 2774420 - DNA, 25 bp, Homo sapien
ctgtggcagggagtcttggtacttt

SEQ ID NO: 2774421 - DNA, 25 bp, Homo sapien
catctctaaagggaggacagtatca

SEQ ID NO: 2774422 - DNA, 25 bp, Homo sapien
gacaatttgaggacagattttgacc

SEQ ID NO: 2774423 - DNA, 25 bp, Homo sapien
gaaaacgtaagtaaagtgcctagca

SEQ ID NO: 2774424 - DNA, 25 bp, Homo sapien
tacttactacctataatcctgggca

SEQ ID NO: 2774425 - DNA, 25 bp, Homo sapien
tacaattggaaatagtacagctaga

SEQ ID NO: 2774426 - DNA, 25 bp, Homo sapien
gctagaatctactcccagagccctt

SEQ ID NO: 2774427 - DNA, 25 bp, Homo sapien
aaagcactttatacaattggaaata

SEQ ID NO: 2774428 - DNA, 25 bp, Homo sapien
cctaaaccctaagatatggagatgg

SEQ ID NO: 2774429 - DNA, 25 bp, Homo sapien
ctcagttgctatgtttgaatgcaca

SEQ ID NO: 2774430 - DNA, 25 bp, Homo sapien
tttcatccaccctaactaagtacca

SEQ ID NO: 2774431 - DNA, 25 bp, Homo sapien
tcatccaccctaactaagtaccacg

SEQ ID NO: 2774432 - DNA, 25 bp, Homo sapien
gcttttcatccaccctaactaagta

SEQ ID NO: 2774433 - DNA, 25 bp, Homo sapien
catccaccctaactaagtaccacgt

SEQ ID NO: 2774434 - DNA, 25 bp, Homo sapien
aagagtgaatctattgaaccctggg

SEQ ID NO: 2774435 - DNA, 25 bp, Homo sapien
agtgaatctattgaaccctggggaa

SEQ ID NO: 2774436 - DNA, 25 bp, Homo sapien
aaagagtgaatctattgaaccctgg

SEQ ID NO: 2774437 - DNA, 25 bp, Homo sapien
tcaaagagtgaatctattgaaccct

SEQ ID NO: 2774438 - DNA, 25 bp, Homo sapien
ctgacatcagattagtactgagtaa

SEQ ID NO: 2774439 - DNA, 25 bp, Homo sapien
gtagcatccttaatgatatcagccc

SEQ ID NO: 2774440 - DNA, 25 bp, Homo sapien
tatccttatcgtatatgtagcatcc

SEQ ID NO: 2774441 - DNA, 25 bp, Homo sapien
gagtaaagtcttgatatccttatcg

SEQ ID NO: 2774442 - DNA, 25 bp, Homo sapien
tcaagccttgatttaagatcacata

SEQ ID NO: 2774443 - DNA, 25 bp, Homo sapien
gccttgatttaagatcacataaact

SEQ ID NO: 2774444 - DNA, 25 bp, Homo sapien
gttttcagcgaagacatctggtgcc

SEQ ID NO: 2774445 - DNA, 25 bp, Homo sapien
gaagacatctggtgccacaccagtt

SEQ ID NO: 2774446 - DNA, 25 bp, Homo sapien
gactgctaaatcaacttccccagag

SEQ ID NO: 2774447 - DNA, 25 bp, Homo sapien
tattgagtatctgccactagacaag

SEQ ID NO: 2774448 - DNA, 25 bp, Homo sapien
taaatatagccaagaccataagcct

SEQ ID NO: 2774449 - DNA, 25 bp, Homo sapien
tgggacagattcaggtgctcacttg

SEQ ID NO: 2774450 - DNA, 25 bp, Homo sapien
cggtgtagcatcttgtgtgacttta

SEQ ID NO: 2774451 - DNA, 25 bp, Homo sapien
ccaggaaagccagtatgaaattaac

SEQ ID NO: 2774452 - DNA, 25 bp, Homo sapien
ttaactgatccaaagctacagcgtg

SEQ ID NO: 2774453 - DNA, 25 bp, Homo sapien
cttctggaagaactgtagcctcaac

SEQ ID NO: 2774454 - DNA, 25 bp, Homo sapien
aaatctaacatctcccaaataaggg

SEQ ID NO: 2774455 - DNA, 25 bp, Homo sapien
gaacagatgcaagggaaccatatac

SEQ ID NO: 2774456 - DNA, 25 bp, Homo sapien
catctctatcaaagtaggtgtcttc

SEQ ID NO: 2774457 - DNA, 25 bp, Homo sapien
tgtgctagaacagatgcaagggaac

SEQ ID NO: 2774458 - DNA, 25 bp, Homo sapien
cagagctagccttcataaatgcctt

SEQ ID NO: 2774459 - DNA, 25 bp, Homo sapien
gctgtagtgaatataggcccttgtg

SEQ ID NO: 2774460 - DNA, 25 bp, Homo sapien
cgagttgaacacacatagcatgcta

SEQ ID NO: 2774461 - DNA, 25 bp, Homo sapien
gacaggtggagtacaaaagctgact

SEQ ID NO: 2774462 - DNA, 25 bp, Homo sapien
gaaaagtcatggtattacaggagcc

SEQ ID NO: 2774463 - DNA, 25 bp, Homo sapien
catccgagctagagatttctgaacc

SEQ ID NO: 2774464 - DNA, 25 bp, Homo sapien
taaggaagtcattcagcaacatccg

SEQ ID NO: 2774465 - DNA, 25 bp, Homo sapien
ttatctctattctggtcattaagga

SEQ ID NO: 2774466 - DNA, 25 bp, Homo sapien
cttccaggccactatagatactatt

SEQ ID NO: 2774467 - DNA, 25 bp, Homo sapien
ttgcagtagacagaatagcagcggt

SEQ ID NO: 2774468 - DNA, 25 bp, Homo sapien
tcagatagcatatcaggcttgtaaa

SEQ ID NO: 2774469 - DNA, 25 bp, Homo sapien
aatgcactgaggtagcactgtatgg

SEQ ID NO: 2774470 - DNA, 25 bp, Homo sapien
gtagcactgtatggagagttttcca

SEQ ID NO: 2774471 - DNA, 25 bp, Homo sapien
ctagcatttcctgtggcatatacag

SEQ ID NO: 2774472 - DNA, 25 bp, Homo sapien
tatctcctgcaactaccagggcata

SEQ ID NO: 2774473 - DNA, 25 bp, Homo sapien
gcaatatctcctgcaactaccaggg

SEQ ID NO: 2774474 - DNA, 25 bp, Homo sapien
cagcaatatctcctgcaactaccag

SEQ ID NO: 2774475 - DNA, 25 bp, Homo sapien
gtgtcatctgggtctattgaacctt

SEQ ID NO: 2774476 - DNA, 25 bp, Homo sapien
caaattacaaaagtttgcgtattgc

SEQ ID NO: 2774477 - DNA, 25 bp, Homo sapien
acggcggggaataggcatgtaacat

SEQ ID NO: 2774478 - DNA, 25 bp, Homo sapien
attgcattaattaaagtgtcatctg

SEQ ID NO: 2774479 - DNA, 25 bp, Homo sapien
gagctggactcaatccagttaacag

SEQ ID NO: 2774480 - DNA, 25 bp, Homo sapien
agctggactcaatccagttaacagc

SEQ ID NO: 2774481 - DNA, 25 bp, Homo sapien
gacagcagctgtgcctccatagcat

SEQ ID NO: 2774482 - DNA, 25 bp, Homo sapien
cagcagctgtgcctccatagcatgc

SEQ ID NO: 2774483 - DNA, 25 bp, Homo sapien
gaagacagcagctgtgcctccatag

SEQ ID NO: 2774484 - DNA, 25 bp, Homo sapien
ttgaagacagcagctgtgcctccat

SEQ ID NO: 2774485 - DNA, 25 bp, Homo sapien
tatctgtgcagaagcccatcttggc

SEQ ID NO: 2774486 - DNA, 25 bp, Homo sapien
tctgcttgatcaacatattgagaag

SEQ ID NO: 2774487 - DNA, 25 bp, Homo sapien
aatagatctcaagggcaacaattcc

SEQ ID NO: 2774488 - DNA, 25 bp, Homo sapien
ttccagccgcccaatgcaatcatag

SEQ ID NO: 2774489 - DNA, 25 bp, Homo sapien
cattcaaaggaagtgatccaggcat

SEQ ID NO: 2774490 - DNA, 25 bp, Homo sapien
cagatacatatcttttgaggccata

SEQ ID NO: 2774491 - DNA, 25 bp, Homo sapien
tggcagtcatgtttacctctgattg

SEQ ID NO: 2774492 - DNA, 25 bp, Homo sapien
gaacatatggcacaaacaaatcgtt

SEQ ID NO: 2774493 - DNA, 25 bp, Homo sapien
gtttctgattaagtagtccatgtaa

SEQ ID NO: 2774494 - DNA, 25 bp, Homo sapien
tgaaggatagagaactgcagtctcc

SEQ ID NO: 2774495 - DNA, 25 bp, Homo sapien
ctgtgtgaaggatagagaactgcag

SEQ ID NO: 2774496 - DNA, 25 bp, Homo sapien
gcagtctccaggtctgtcactgttt

SEQ ID NO: 2774497 - DNA, 25 bp, Homo sapien
aaggatagagaactgcagtctccag

SEQ ID NO: 2774498 - DNA, 25 bp, Homo sapien
cagagggaatcaacatgggtcaaga

SEQ ID NO: 2774499 - DNA, 25 bp, Homo sapien
cagtattgccaaagtctcaagcaga

SEQ ID NO: 2774500 - DNA, 25 bp, Homo sapien
gaatgataagactgcctagggccaa

SEQ ID NO: 2774501 - DNA, 25 bp, Homo sapien
aaagcaggtttgcagactcatggga

SEQ ID NO: 2774502 - DNA, 25 bp, Homo sapien
caaagattagcctctccgctactgg

SEQ ID NO: 2774503 - DNA, 25 bp, Homo sapien
caacacacgccatgcattaggatga

SEQ ID NO: 2774504 - DNA, 25 bp, Homo sapien
gagtagcctgctatcagttttgaga

SEQ ID NO: 2774505 - DNA, 25 bp, Homo sapien
tatatgtagtgtgtccagagtagcc

SEQ ID NO: 2774506 - DNA, 25 bp, Homo sapien
ccactggattatggaagatccaacc

SEQ ID NO: 2774507 - DNA, 25 bp, Homo sapien
gacaggtaatatgtatcccaccttt

SEQ ID NO: 2774508 - DNA, 25 bp, Homo sapien
tctaaatgaaactaattggagattc

SEQ ID NO: 2774509 - DNA, 25 bp, Homo sapien
tgatgttacaacaatatcgggtttt

SEQ ID NO: 2774510 - DNA, 25 bp, Homo sapien
tcgccaccagctttatagccgccaa

SEQ ID NO: 2774511 - DNA, 25 bp, Homo sapien
acgaaaggacagtccgcggcgcctc

SEQ ID NO: 2774512 - DNA, 25 bp, Homo sapien
gaaagggagtgagccacgaaaggac

SEQ ID NO: 2774513 - DNA, 25 bp, Homo sapien
gtgaccgagcggcagcagaggaaag

SEQ ID NO: 2774514 - DNA, 25 bp, Homo sapien
ccagaatggaaggagttgctaccca

SEQ ID NO: 2774515 - DNA, 25 bp, Homo sapien
tcagctgatccagagtgggttcaac

SEQ ID NO: 2774516 - DNA, 25 bp, Homo sapien
gctctgttcaaaatatgggtctggc

SEQ ID NO: 2774517 - DNA, 25 bp, Homo sapien
aaagttagtcatgtggtcaagtcca

SEQ ID NO: 2774518 - DNA, 25 bp, Homo sapien
tcacagagcaattgagactagtgaa

SEQ ID NO: 2774519 - DNA, 25 bp, Homo sapien
gagcaattgagactagtgaatcatc

SEQ ID NO: 2774520 - DNA, 25 bp, Homo sapien
atccccaattgactccctgcatctg

SEQ ID NO: 2774521 - DNA, 25 bp, Homo sapien
attgagactagtgaatcatcatccc

SEQ ID NO: 2774522 - DNA, 25 bp, Homo sapien
cattttagaagattccccaccaggc

SEQ ID NO: 2774523 - DNA, 25 bp, Homo sapien
gctagactccaaagatgacctccaa

SEQ ID NO: 2774524 - DNA, 25 bp, Homo sapien
tgaatgtggcacaagacctggcagc

SEQ ID NO: 2774525 - DNA, 25 bp, Homo sapien
tattttaagtgtccacatgtggcag

SEQ ID NO: 2774526 - DNA, 25 bp, Homo sapien
tagcttctggtagggtccttcagac

SEQ ID NO: 2774527 - DNA, 25 bp, Homo sapien
aatttgggccactgattggtcaggg

SEQ ID NO: 2774528 - DNA, 25 bp, Homo sapien
gaatcattaggatatggaaattgca

SEQ ID NO: 2774529 - DNA, 25 bp, Homo sapien
tgattacatggtgctgagtcaggag

SEQ ID NO: 2774530 - DNA, 25 bp, Homo sapien
caaagtgacctagtgattaatgctg

SEQ ID NO: 2774531 - DNA, 25 bp, Homo sapien
gaatgtctcgaagggaaaacttagc

SEQ ID NO: 2774532 - DNA, 25 bp, Homo sapien
taaagcctaatacgtaggccaggtg

SEQ ID NO: 2774533 - DNA, 25 bp, Homo sapien
gaagcaatagccaaacaactatgag

SEQ ID NO: 2774534 - DNA, 25 bp, Homo sapien
ttgtaatgaaacatcaagcactggg

SEQ ID NO: 2774535 - DNA, 25 bp, Homo sapien
acatcaagcactgggatgaggagaa

SEQ ID NO: 2774536 - DNA, 25 bp, Homo sapien
aattgtaatgaaacatcaagcactg

SEQ ID NO: 2774537 - DNA, 25 bp, Homo sapien
gtaatgaaacatcaagcactgggat

SEQ ID NO: 2774538 - DNA, 25 bp, Homo sapien
taggcagagcgtaaaatcaccacac

SEQ ID NO: 2774539 - DNA, 25 bp, Homo sapien
ttttaacctatggagactcagtgcc

SEQ ID NO: 2774540 - DNA, 25 bp, Homo sapien
gcttcttatgaacactactgggctc

SEQ ID NO: 2774541 - DNA, 25 bp, Homo sapien
tatcaactcaaacgtgtgagcccgg

SEQ ID NO: 2774542 - DNA, 25 bp, Homo sapien
tccagttgagtatattattggctac

SEQ ID NO: 2774543 - DNA, 25 bp, Homo sapien
tacatttgcataccgcacaattgtt

SEQ ID NO: 2774544 - DNA, 25 bp, Homo sapien
gagaagttatatctatatgctcctc

SEQ ID NO: 2774545 - DNA, 25 bp, Homo sapien
tgttctgttgtctacaataaggaga

SEQ ID NO: 2774546 - DNA, 25 bp, Homo sapien
gccaagtccacttgaggaattgtct

SEQ ID NO: 2774547 - DNA, 25 bp, Homo sapien
agtccacttgaggaattgtctctgt

SEQ ID NO: 2774548 - DNA, 25 bp, Homo sapien
caagtccacttgaggaattgtctct

SEQ ID NO: 2774549 - DNA, 25 bp, Homo sapien
tgtctctgtagatttatctgtagac

SEQ ID NO: 2774550 - DNA, 25 bp, Homo sapien
gccctgttactgttcctcttgccat

SEQ ID NO: 2774551 - DNA, 25 bp, Homo sapien
tgtttcgtgtttcccctgatgtgcc

SEQ ID NO: 2774552 - DNA, 25 bp, Homo sapien
agttttatggccgtatgtttcgtgt

SEQ ID NO: 2774553 - DNA, 25 bp, Homo sapien
tttcccctgatgtgccctgttactg

SEQ ID NO: 2774554 - DNA, 25 bp, Homo sapien
ggtgtttcttcctgtggcaaacatt

SEQ ID NO: 2774555 - DNA, 25 bp, Homo sapien
tcttcctgtggcaaacatttccttt

SEQ ID NO: 2774556 - DNA, 25 bp, Homo sapien
ttcctgtggcaaacatttcctttac

SEQ ID NO: 2774557 - DNA, 25 bp, Homo sapien
ctgtggcaaacatttcctttaccat

SEQ ID NO: 2774558 - DNA, 25 bp, Homo sapien
cagtatggttgtgcgggctgacaca

SEQ ID NO: 2774559 - DNA, 25 bp, Homo sapien
gattcttctgcgcttgacatgaagg

SEQ ID NO: 2774560 - DNA, 25 bp, Homo sapien
gctgacacagattcttctgcgcttg

SEQ ID NO: 2774561 - DNA, 25 bp, Homo sapien
gcttaacagtatggttgtgcgggct

SEQ ID NO: 2774562 - DNA, 25 bp, Homo sapien
ttgggacactgtattcctagagact

SEQ ID NO: 2774563 - DNA, 25 bp, Homo sapien
tttgggacactgtattcctagagac

SEQ ID NO: 2774564 - DNA, 25 bp, Homo sapien
cctctgattctccacggtgagagtt

SEQ ID NO: 2774565 - DNA, 25 bp, Homo sapien
gaagtgtcttgaaaacgccttattc

SEQ ID NO: 2774566 - DNA, 25 bp, Homo sapien
taaagctgagcaccacaaggttcaa

SEQ ID NO: 2774567 - DNA, 25 bp, Homo sapien
ccgtaaggatttgtagattctctca

SEQ ID NO: 2774568 - DNA, 25 bp, Homo sapien
aaacttctgaccctgttattcaggg

SEQ ID NO: 2774569 - DNA, 25 bp, Homo sapien
gcatgcacagtttctggtaactaga

SEQ ID NO: 2774570 - DNA, 25 bp, Homo sapien
ttttctagatgacgcaagttgaatc

SEQ ID NO: 2774571 - DNA, 25 bp, Homo sapien
ctttttcagctaatgtagggactac

SEQ ID NO: 2774572 - DNA, 25 bp, Homo sapien
tgctatcataggagaaaacgtggct

SEQ ID NO: 2774573 - DNA, 25 bp, Homo sapien
ccctatgtgtattagatagagagtc

SEQ ID NO: 2774574 - DNA, 25 bp, Homo sapien
ctcactatggtcagttggtttgcta

SEQ ID NO: 2774575 - DNA, 25 bp, Homo sapien
acaaacagcctaattctcactatgg

SEQ ID NO: 2774576 - DNA, 25 bp, Homo sapien
tcagaagctcattaatgaagtcact

SEQ ID NO: 2774577 - DNA, 25 bp, Homo sapien
ggagtttgaacaagaaaactgctgt

SEQ ID NO: 2774578 - DNA, 25 bp, Homo sapien
agaagctcattaatgaagtcactgt

SEQ ID NO: 2774579 - DNA, 25 bp, Homo sapien
gttattgtatttatgttcagaaaca

SEQ ID NO: 2774580 - DNA, 25 bp, Homo sapien
gaactttataatatgctcctgatga

SEQ ID NO: 2774581 - DNA, 25 bp, Homo sapien
tcaggacatctttggacagagagac

SEQ ID NO: 2774582 - DNA, 25 bp, Homo sapien
ttgcttgggaaagtcatgaacactt

SEQ ID NO: 2774583 - DNA, 25 bp, Homo sapien
tagtcctaaccacagcactacaggg

SEQ ID NO: 2774584 - DNA, 25 bp, Homo sapien
ccatcagctctctggatgcgacaca

SEQ ID NO: 2774585 - DNA, 25 bp, Homo sapien
cagcagccaagtcacaatccccatc

SEQ ID NO: 2774586 - DNA, 25 bp, Homo sapien
ccccatcagctctctggatgcgaca

SEQ ID NO: 2774587 - DNA, 25 bp, Homo sapien
catcagctctctggatgcgacacat

SEQ ID NO: 2774588 - DNA, 25 bp, Homo sapien
atgatgtgaaacctccgtgcaacag

SEQ ID NO: 2774589 - DNA, 25 bp, Homo sapien
gatgtgaaacctccgtgcaacagct

SEQ ID NO: 2774590 - DNA, 25 bp, Homo sapien
tgaaacctccgtgcaacagctggag

SEQ ID NO: 2774591 - DNA, 25 bp, Homo sapien
tgtgaaacctccgtgcaacagctgg

SEQ ID NO: 2774592 - DNA, 25 bp, Homo sapien
cagcagatgcgtttcccagctggcc

SEQ ID NO: 2774593 - DNA, 25 bp, Homo sapien
caccagtgggtttcaaatggatcca

SEQ ID NO: 2774594 - DNA, 25 bp, Homo sapien
tttgtgagatcagcagatgcgtttc

SEQ ID NO: 2774595 - DNA, 25 bp, Homo sapien
gcaaagcccaacagatccatctggg

SEQ ID NO: 2774596 - DNA, 25 bp, Homo sapien
tggtatctgtagtcgtggctgccgt

SEQ ID NO: 2774597 - DNA, 25 bp, Homo sapien
cgtggctgccgtggaccaggagaga

SEQ ID NO: 2774598 - DNA, 25 bp, Homo sapien
tcgtggctgccgtggaccaggagag

SEQ ID NO: 2774599 - DNA, 25 bp, Homo sapien
ctactggtatctgtagtcgtggctg

SEQ ID NO: 2774600 - DNA, 25 bp, Homo sapien
ccttcccgcctctgcgcgtacgcaa

SEQ ID NO: 2774601 - DNA, 25 bp, Homo sapien
gacgtccagccgcccttcccgcctc

SEQ ID NO: 2774602 - DNA, 25 bp, Homo sapien
cttcccgcctctgcgcgtacgcaac

SEQ ID NO: 2774603 - DNA, 25 bp, Homo sapien
tggtgaggaggcttctttaaggccg

SEQ ID NO: 2774604 - DNA, 25 bp, Homo sapien
ctggtgaggaggcttctttaaggcc

SEQ ID NO: 2774605 - DNA, 25 bp, Homo sapien
gaggaggcttctttaaggccgtgga

SEQ ID NO: 2774606 - DNA, 25 bp, Homo sapien
gtgaggaggcttctttaaggccgtg

SEQ ID NO: 2774607 - DNA, 25 bp, Homo sapien
gcgcggagaggaccgacgtgaagaa

SEQ ID NO: 2774608 - DNA, 25 bp, Homo sapien
gcgcgcggagaggaccgacgtgaag

SEQ ID NO: 2774609 - DNA, 25 bp, Homo sapien
cgcggagaggaccgacgtgaagaag

SEQ ID NO: 2774610 - DNA, 25 bp, Homo sapien
ccgcgcgcggagaggaccgacgtga

SEQ ID NO: 2774611 - DNA, 25 bp, Homo sapien
gggtggagtcccaggcagcgcgtga

SEQ ID NO: 2774612 - DNA, 25 bp, Homo sapien
ctgccaaagtataacaagtactacg

SEQ ID NO: 2774613 - DNA, 25 bp, Homo sapien
caagtactacgcgaagggtaggtag

SEQ ID NO: 2774614 - DNA, 25 bp, Homo sapien
tgacggccggatgcccagacgcgca

SEQ ID NO: 2774615 - DNA, 25 bp, Homo sapien
tgcattttgccgttccaccccaccg

SEQ ID NO: 2774616 - DNA, 25 bp, Homo sapien
tcagtcccatgtgaaggtgggtcct

SEQ ID NO: 2774617 - DNA, 25 bp, Homo sapien
ctctgcctcctcgacctgctgttcc

SEQ ID NO: 2774618 - DNA, 25 bp, Homo sapien
tatggcagagccttcctcattaccc

SEQ ID NO: 2774619 - DNA, 25 bp, Homo sapien
tttagaagagattccctctagttca

SEQ ID NO: 2774620 - DNA, 25 bp, Homo sapien
aatgcagttacaatctccaaataca

SEQ ID NO: 2774621 - DNA, 25 bp, Homo sapien
caaatgcagttacaatctccaaata

SEQ ID NO: 2774622 - DNA, 25 bp, Homo sapien
agagattccctctagttcaaatgca

SEQ ID NO: 2774623 - DNA, 25 bp, Homo sapien
ctttgacataatttgtatggttcaa

SEQ ID NO: 2774624 - DNA, 25 bp, Homo sapien
tctttgacataatttgtatggttca

SEQ ID NO: 2774625 - DNA, 25 bp, Homo sapien
ttgacataatttgtatggttcaatc

SEQ ID NO: 2774626 - DNA, 25 bp, Homo sapien
gacataatttgtatggttcaatctc

SEQ ID NO: 2774627 - DNA, 25 bp, Homo sapien
ctttccagtgaaggcctaagtgtcc

SEQ ID NO: 2774628 - DNA, 25 bp, Homo sapien
ttccagtgaaggcctaagtgtccag

SEQ ID NO: 2774629 - DNA, 25 bp, Homo sapien
cccctttccagtgaaggcctaagtg

SEQ ID NO: 2774630 - DNA, 25 bp, Homo sapien
ccagtgaaggcctaagtgtccagtg

SEQ ID NO: 2774631 - DNA, 25 bp, Homo sapien
caaggccacgatggcgagtcctctc

SEQ ID NO: 2774632 - DNA, 25 bp, Homo sapien
ccacgatggcgagtcctctctgctg

SEQ ID NO: 2774633 - DNA, 25 bp, Homo sapien
agccaaggccacgatggcgagtcct

SEQ ID NO: 2774634 - DNA, 25 bp, Homo sapien
tgtagggccgcacagacagccaagg

SEQ ID NO: 2774635 - DNA, 25 bp, Homo sapien
caacacaagtgaggctgttcgatca

SEQ ID NO: 2774636 - DNA, 25 bp, Homo sapien
acacaagtgaggctgttcgatcagg

SEQ ID NO: 2774637 - DNA, 25 bp, Homo sapien
cagcaacacaagtgaggctgttcga

SEQ ID NO: 2774638 - DNA, 25 bp, Homo sapien
gcaacacaagtgaggctgttcgatc

SEQ ID NO: 2774639 - DNA, 25 bp, Homo sapien
aggtcttgataaaggaggacagaga

SEQ ID NO: 2774640 - DNA, 25 bp, Homo sapien
gtcttgataaaggaggacagagaac

SEQ ID NO: 2774641 - DNA, 25 bp, Homo sapien
ggtcttgataaaggaggacagagaa

SEQ ID NO: 2774642 - DNA, 25 bp, Homo sapien
ctggcttcagtgttccttcacccca

SEQ ID NO: 2774643 - DNA, 25 bp, Homo sapien
ggcttcagtgttccttcaccccagg

SEQ ID NO: 2774644 - DNA, 25 bp, Homo sapien
cttcagtgttccttcaccccaggct

SEQ ID NO: 2774645 - DNA, 25 bp, Homo sapien
tcagtgttccttcaccccaggctct

SEQ ID NO: 2774646 - DNA, 25 bp, Homo sapien
tttcaaagataccttgaagttgatt

SEQ ID NO: 2774647 - DNA, 25 bp, Homo sapien
gaagttgattttcatctgatctcac

SEQ ID NO: 2774648 - DNA, 25 bp, Homo sapien
gcattcttaaataaggccctatatt

SEQ ID NO: 2774649 - DNA, 25 bp, Homo sapien
ccacgtccggtcactatgtagcatt

SEQ ID NO: 2774650 - DNA, 25 bp, Homo sapien
tatgtagcattcttaaataaggccc

SEQ ID NO: 2774651 - DNA, 25 bp, Homo sapien
agccaccacgtccggtcactatgta

SEQ ID NO: 2774652 - DNA, 25 bp, Homo sapien
gaataaggcaccaatcactaacatt

SEQ ID NO: 2774653 - DNA, 25 bp, Homo sapien
acagcagatgccatatatgccacaa

SEQ ID NO: 2774654 - DNA, 25 bp, Homo sapien
aagaaaatctgctgtggataaggca

SEQ ID NO: 2774655 - DNA, 25 bp, Homo sapien
taaggcattgctttatgaaccctcc

SEQ ID NO: 2774656 - DNA, 25 bp, Homo sapien
gctgtctttcagtatcaggcagagt

SEQ ID NO: 2774657 - DNA, 25 bp, Homo sapien
tatgctgtctttcagtatcaggcag

SEQ ID NO: 2774658 - DNA, 25 bp, Homo sapien
ctttcagtatcaggcagagtaaaat

SEQ ID NO: 2774659 - DNA, 25 bp, Homo sapien
atatatgctgtctttcagtatcagg

SEQ ID NO: 2774660 - DNA, 25 bp, Homo sapien
cacttcctgagcaagaggattgcag

SEQ ID NO: 2774661 - DNA, 25 bp, Homo sapien
atgatgtgtcacaagtgctctgaag

SEQ ID NO: 2774662 - DNA, 25 bp, Homo sapien
taacacacgagattctaggctagag

SEQ ID NO: 2774663 - DNA, 25 bp, Homo sapien
caatatctcaggaaaattggatcca

SEQ ID NO: 2774664 - DNA, 25 bp, Homo sapien
tcagacatcaatacgaactccatgt

SEQ ID NO: 2774665 - DNA, 25 bp, Homo sapien
acatcaatacgaactccatgttttg

SEQ ID NO: 2774666 - DNA, 25 bp, Homo sapien
aactccatgttttgaagacatcatt

SEQ ID NO: 2774667 - DNA, 25 bp, Homo sapien
cagacatcaatacgaactccatgtt

SEQ ID NO: 2774668 - DNA, 25 bp, Homo sapien
ctgttaaatacataacgaatgaaca

SEQ ID NO: 2774669 - DNA, 25 bp, Homo sapien
aatacataacgaatgaacagatgtg

SEQ ID NO: 2774670 - DNA, 25 bp, Homo sapien
cataacgaatgaacagatgtgaggt

SEQ ID NO: 2774671 - DNA, 25 bp, Homo sapien
tttccaaatgggcatatccacaaac

SEQ ID NO: 2774672 - DNA, 25 bp, Homo sapien
gtcttcgcgggagagtcaaagcagc

SEQ ID NO: 2774673 - DNA, 25 bp, Homo sapien
tttcagggtcagaaccacaacggga

SEQ ID NO: 2774674 - DNA, 25 bp, Homo sapien
cacaacgggaatcacagtagaacag

SEQ ID NO: 2774675 - DNA, 25 bp, Homo sapien
ccatctcggatatgatgtgaagtcc

SEQ ID NO: 2774676 - DNA, 25 bp, Homo sapien
aatcaaggtctcaggaatatggtga

SEQ ID NO: 2774677 - DNA, 25 bp, Homo sapien
atttataatctaagtgtacagtttg

SEQ ID NO: 2774678 - DNA, 25 bp, Homo sapien
ggcctctaagagcactgtaaaaata

SEQ ID NO: 2774679 - DNA, 25 bp, Homo sapien
aagtgtgagcaggatatcctttaca

SEQ ID NO: 2774680 - DNA, 25 bp, Homo sapien
agtaaaaatagatcactgtcatgaa

SEQ ID NO: 2774681 - DNA, 25 bp, Homo sapien
gtaaaaatagatcactgtcatgaat

SEQ ID NO: 2774682 - DNA, 25 bp, Homo sapien
taaaaatagatcactgtcatgaata

SEQ ID NO: 2774683 - DNA, 25 bp, Homo sapien
tcatgaatacttattcagttttgat

SEQ ID NO: 2774684 - DNA, 25 bp, Homo sapien
caagacctggctaaacgcatcctct

SEQ ID NO: 2774685 - DNA, 25 bp, Homo sapien
gcatcctctgtaagccagcactgaa

SEQ ID NO: 2774686 - DNA, 25 bp, Homo sapien
gctaaacgcatcctctgtaagccag

SEQ ID NO: 2774687 - DNA, 25 bp, Homo sapien
ttaggtacagttcgtgggtctttgc

SEQ ID NO: 2774688 - DNA, 25 bp, Homo sapien
tgctgtaaagatcagcaaaatagtg

SEQ ID NO: 2774689 - DNA, 25 bp, Homo sapien
gatgctgtaaagatcagcaaaatag

SEQ ID NO: 2774690 - DNA, 25 bp, Homo sapien
atgatgctgtaaagatcagcaaaat

SEQ ID NO: 2774691 - DNA, 25 bp, Homo sapien
tgatgctgtaaagatcagcaaaata

SEQ ID NO: 2774692 - DNA, 25 bp, Homo sapien
gcacgaagccagtcattttgctgaa

SEQ ID NO: 2774693 - DNA, 25 bp, Homo sapien
gaagtctgtcagctacgaggcaaaa

SEQ ID NO: 2774694 - DNA, 25 bp, Homo sapien
gcattatctgagagagcacgaagcc

SEQ ID NO: 2774695 - DNA, 25 bp, Homo sapien
tcttgattccagtgactaccgccca

SEQ ID NO: 2774696 - DNA, 25 bp, Homo sapien
gctacaagtctgcagtaaagcatgg

SEQ ID NO: 2774697 - DNA, 25 bp, Homo sapien
ttcagtgctacaagtctgcagtaaa

SEQ ID NO: 2774698 - DNA, 25 bp, Homo sapien
gggtcttttcagtctcggatgccat

SEQ ID NO: 2774699 - DNA, 25 bp, Homo sapien
gcagtaaagcatgggtcttttcagt

SEQ ID NO: 2774700 - DNA, 25 bp, Homo sapien
aaacaatatgttagtatagactaaa

SEQ ID NO: 2774701 - DNA, 25 bp, Homo sapien
tgaacagtctattcttgtttacatt

SEQ ID NO: 2774702 - DNA, 25 bp, Homo sapien
atgaacagtctattcttgtttacat

SEQ ID NO: 2774703 - DNA, 25 bp, Homo sapien
gacaaacaatatgttagtatagact

SEQ ID NO: 2774704 - DNA, 25 bp, Homo sapien
tctgacaacagtaatcccttccttt

SEQ ID NO: 2774705 - DNA, 25 bp, Homo sapien
aatagatctatctcccagctgtgtg

SEQ ID NO: 2774706 - DNA, 25 bp, Homo sapien
gcaatctattgctttaaggtcatca

SEQ ID NO: 2774707 - DNA, 25 bp, Homo sapien
tgaatatccgttgggtttgtgtacc

SEQ ID NO: 2774708 - DNA, 25 bp, Homo sapien
cagtgagtacttatgtccaacgtct

SEQ ID NO: 2774709 - DNA, 25 bp, Homo sapien
cacaaaggagaaaggctaatagaat

SEQ ID NO: 2774710 - DNA, 25 bp, Homo sapien
gctccactacacgaaatagcctagg

SEQ ID NO: 2774711 - DNA, 25 bp, Homo sapien
tctagtaatgaaagtggtccaggct

SEQ ID NO: 2774712 - DNA, 25 bp, Homo sapien
gaagcttcacttgctagcctgccgt

SEQ ID NO: 2774713 - DNA, 25 bp, Homo sapien
cctaatgggccatgaacctgtactg

SEQ ID NO: 2774714 - DNA, 25 bp, Homo sapien
tctccaatgagaagctaacgctgcc

SEQ ID NO: 2774715 - DNA, 25 bp, Homo sapien
taagaagcacgtgacctagaactcg

SEQ ID NO: 2774716 - DNA, 25 bp, Homo sapien
gctccttcaactcccatcagacctt

SEQ ID NO: 2774717 - DNA, 25 bp, Homo sapien
gggcccacaagtgcagctctgacat

SEQ ID NO: 2774718 - DNA, 25 bp, Homo sapien
tctgacatcgaaagtgtcatcctct

SEQ ID NO: 2774719 - DNA, 25 bp, Homo sapien
cctgcaggttactcaagcatcaaaa

SEQ ID NO: 2774720 - DNA, 25 bp, Homo sapien
cagtctagtagatctgcagcaactt

SEQ ID NO: 2774721 - DNA, 25 bp, Homo sapien
caattccataggtctttagctcaca

SEQ ID NO: 2774722 - DNA, 25 bp, Homo sapien
gatgcaggttccgttttgttcccaa

SEQ ID NO: 2774723 - DNA, 25 bp, Homo sapien
cagaggcaagtctgcagaccgctct

SEQ ID NO: 2774724 - DNA, 25 bp, Homo sapien
tcaagaacttcagttaaaatgacac

SEQ ID NO: 2774725 - DNA, 25 bp, Homo sapien
acttcagttaaaatgacaccagaca

SEQ ID NO: 2774726 - DNA, 25 bp, Homo sapien
acaccagacacaggccgggggcggt

SEQ ID NO: 2774727 - DNA, 25 bp, Homo sapien
ttaaaatgacaccagacacaggccg

SEQ ID NO: 2774728 - DNA, 25 bp, Homo sapien
ttctatagattcttccaggatctgg

SEQ ID NO: 2774729 - DNA, 25 bp, Homo sapien
tatgtgaagcgtacttactttgcag

SEQ ID NO: 2774730 - DNA, 25 bp, Homo sapien
gatttccaggtactctcaaccaaga

SEQ ID NO: 2774731 - DNA, 25 bp, Homo sapien
tggagtctacaacaatgctcattct

SEQ ID NO: 2774732 - DNA, 25 bp, Homo sapien
aacttgaattaatggccaacccaga

SEQ ID NO: 2774733 - DNA, 25 bp, Homo sapien
taaatgcccttatccacttagctgg

SEQ ID NO: 2774734 - DNA, 25 bp, Homo sapien
ggcctgtaagttagccctaatgaga

SEQ ID NO: 2774735 - DNA, 25 bp, Homo sapien
gaaggccattcaggtatgagaagaa

SEQ ID NO: 2774736 - DNA, 25 bp, Homo sapien
gatgtccttataaagccagtgcatt

SEQ ID NO: 2774737 - DNA, 25 bp, Homo sapien
aatttattttcaaccctcattccag

SEQ ID NO: 2774738 - DNA, 25 bp, Homo sapien
cactgagcctgacccaattacaaat

SEQ ID NO: 2774739 - DNA, 25 bp, Homo sapien
taaaaagccaatatccacttaactg

SEQ ID NO: 2774740 - DNA, 25 bp, Homo sapien
tatcacggtttacgaataggaacac

SEQ ID NO: 2774741 - DNA, 25 bp, Homo sapien
catgatgatccaaatttaaagcgac

SEQ ID NO: 2774742 - DNA, 25 bp, Homo sapien
ttaaagcgacctcaacaagcaaaat

SEQ ID NO: 2774743 - DNA, 25 bp, Homo sapien
tacagaaatgcacaactatacttgg

SEQ ID NO: 2774744 - DNA, 25 bp, Homo sapien
tccgcagcctatgaactaaagatac

SEQ ID NO: 2774745 - DNA, 25 bp, Homo sapien
taaattcctccctatgactcgcaga

SEQ ID NO: 2774746 - DNA, 25 bp, Homo sapien
aagatactgtttgggatagcttctc

SEQ ID NO: 2774747 - DNA, 25 bp, Homo sapien
cattttctgcaatggccaaactttg

SEQ ID NO: 2774748 - DNA, 25 bp, Homo sapien
gatctagaaaaagcgcgaagccgga

SEQ ID NO: 2774749 - DNA, 25 bp, Homo sapien
gcattcaagcctcaaaggctccggg

SEQ ID NO: 2774750 - DNA, 25 bp, Homo sapien
tttcaagcctcagaagttcccagac

SEQ ID NO: 2774751 - DNA, 25 bp, Homo sapien
ggaaaggaccatgtcacactctcag

SEQ ID NO: 2774752 - DNA, 25 bp, Homo sapien
ccaagtcgaaaggaagcgacgcatg

SEQ ID NO: 2774753 - DNA, 25 bp, Homo sapien
aggacgccgggatactggccagctc

SEQ ID NO: 2774754 - DNA, 25 bp, Homo sapien
ccctcggtcggagccatagagacgt

SEQ ID NO: 2774755 - DNA, 25 bp, Homo sapien
tgggtagatacctcgagtttctcct

SEQ ID NO: 2774756 - DNA, 25 bp, Homo sapien
aggaaacttttgggacgtcagagtg

SEQ ID NO: 2774757 - DNA, 25 bp, Homo sapien
gaaacttttgggacgtcagagtgag

SEQ ID NO: 2774758 - DNA, 25 bp, Homo sapien
ggaaacttttgggacgtcagagtga

SEQ ID NO: 2774759 - DNA, 25 bp, Homo sapien
gcacccaagtggtggcccggaagct

SEQ ID NO: 2774760 - DNA, 25 bp, Homo sapien
tcagtttagccggagctgtgccgca

SEQ ID NO: 2774761 - DNA, 25 bp, Homo sapien
agaaaagtggcctccccgaatgcca

SEQ ID NO: 2774762 - DNA, 25 bp, Homo sapien
gtgccgcaaacgtagctgccgacat

SEQ ID NO: 2774763 - DNA, 25 bp, Homo sapien
tctctaaggtgcagcgatacggcca

SEQ ID NO: 2774764 - DNA, 25 bp, Homo sapien
tcggccgtcgcatctctaaggtgca

SEQ ID NO: 2774765 - DNA, 25 bp, Homo sapien
gatacggccaacttccttccgcgaa

SEQ ID NO: 2774766 - DNA, 25 bp, Homo sapien
cctcagggtgggcaacggagctttt

SEQ ID NO: 2774767 - DNA, 25 bp, Homo sapien
tgagggaccgggcgacctggccgac

SEQ ID NO: 2774768 - DNA, 25 bp, Homo sapien
ctgagggaccgggcgacctggccga

SEQ ID NO: 2774769 - DNA, 25 bp, Homo sapien
cgggcgacctggccgaccggcggct

SEQ ID NO: 2774770 - DNA, 25 bp, Homo sapien
ggcgacctggccgaccggcggctcc

SEQ ID NO: 2774771 - DNA, 25 bp, Homo sapien
ttgccacgatgcgggcggatgttgt

SEQ ID NO: 2774772 - DNA, 25 bp, Homo sapien
tgccacgatgcgggcggatgttgtg

SEQ ID NO: 2774773 - DNA, 25 bp, Homo sapien
ctttgccacgatgcgggcggatgtt

SEQ ID NO: 2774774 - DNA, 25 bp, Homo sapien
cacgatgcgggcggatgttgtggag

SEQ ID NO: 2774775 - DNA, 25 bp, Homo sapien
tgtttactgggactttggctaggtc

SEQ ID NO: 2774776 - DNA, 25 bp, Homo sapien
tactgggactttggctaggtcccat

SEQ ID NO: 2774777 - DNA, 25 bp, Homo sapien
cttcgaaatatttattattaagata

SEQ ID NO: 2774778 - DNA, 25 bp, Homo sapien
cttcaaagttaaatgtcagttcttt

SEQ ID NO: 2774779 - DNA, 25 bp, Homo sapien
aagttaaatgtcagttctttcacaa

SEQ ID NO: 2774780 - DNA, 25 bp, Homo sapien
taaatgtcagttctttcacaatcat

SEQ ID NO: 2774781 - DNA, 25 bp, Homo sapien
gttaaatgtcagttctttcacaatc

SEQ ID NO: 2774782 - DNA, 25 bp, Homo sapien
tataccagtcacttgaaacaacatc

SEQ ID NO: 2774783 - DNA, 25 bp, Homo sapien
tggcttactagtaattttataccag

SEQ ID NO: 2774784 - DNA, 25 bp, Homo sapien
tgtgccggggtaatacgtacaatat

SEQ ID NO: 2774785 - DNA, 25 bp, Homo sapien
tacgtacaatatcttggcttactag

SEQ ID NO: 2774786 - DNA, 25 bp, Homo sapien
cctggtttataatgatcaaaagact

SEQ ID NO: 2774787 - DNA, 25 bp, Homo sapien
taacttctcctagcaaggtttctga

SEQ ID NO: 2774788 - DNA, 25 bp, Homo sapien
gaaatctggtttaggataccactat

SEQ ID NO: 2774789 - DNA, 25 bp, Homo sapien
caatatcgtgaaggatttcagaggt

SEQ ID NO: 2774790 - DNA, 25 bp, Homo sapien
agttaaacttctgtatcttttcaag

SEQ ID NO: 2774791 - DNA, 25 bp, Homo sapien
taaacttctgtatcttttcaagttc

SEQ ID NO: 2774792 - DNA, 25 bp, Homo sapien
gcaacaaatcaacttgactcaactg

SEQ ID NO: 2774793 - DNA, 25 bp, Homo sapien
cacagagggttaacatgatgaacat

SEQ ID NO: 2774794 - DNA, 25 bp, Homo sapien
actcaactgatacttactgagtgcc

SEQ ID NO: 2774795 - DNA, 25 bp, Homo sapien
tctttctggaatagactacctactt

SEQ ID NO: 2774796 - DNA, 25 bp, Homo sapien
tactagaatacaacttaggtagctt

SEQ ID NO: 2774797 - DNA, 25 bp, Homo sapien
tatagggggaatggagctactcctc

SEQ ID NO: 2774798 - DNA, 25 bp, Homo sapien
tatgaaacgtactatttgttgacta

SEQ ID NO: 2774799 - DNA, 25 bp, Homo sapien
ccgaagtggagatacctaaggcttt

SEQ ID NO: 2774800 - DNA, 25 bp, Homo sapien
aagagccactcattttcatgttaag

SEQ ID NO: 2774801 - DNA, 25 bp, Homo sapien
taaagtattagctcttctaaacaga

SEQ ID NO: 2774802 - DNA, 25 bp, Homo sapien
caatgcaaggttttcttacctttag

SEQ ID NO: 2774803 - DNA, 25 bp, Homo sapien
aaaagtctcagtttaccatttgaca

SEQ ID NO: 2774804 - DNA, 25 bp, Homo sapien
gatgacgaatgagtgggcatctctc

SEQ ID NO: 2774805 - DNA, 25 bp, Homo sapien
tgggtcagtctcctgcaccatgatg

SEQ ID NO: 2774806 - DNA, 25 bp, Homo sapien
catctctctgggactagtctgggtc

SEQ ID NO: 2774807 - DNA, 25 bp, Homo sapien
tgggactagtctgggtcagtctcct

SEQ ID NO: 2774808 - DNA, 25 bp, Homo sapien
tatggttcagggtgttcaatctgaa

SEQ ID NO: 2774809 - DNA, 25 bp, Homo sapien
caccaacctaagttaagaccttgat

SEQ ID NO: 2774810 - DNA, 25 bp, Homo sapien
aatctgaattaactgctcttgtcca

SEQ ID NO: 2774811 - DNA, 25 bp, Homo sapien
tttcatatggttcagggtgttcaat

SEQ ID NO: 2774812 - DNA, 25 bp, Homo sapien
tcagagtaggcaagaaatcttccca

SEQ ID NO: 2774813 - DNA, 25 bp, Homo sapien
ttcccacactgggtatgagtgactc

SEQ ID NO: 2774814 - DNA, 25 bp, Homo sapien
ccaatttagggttagagtaatgcca

SEQ ID NO: 2774815 - DNA, 25 bp, Homo sapien
tagcatgtactttgtcatcagagta

SEQ ID NO: 2774816 - DNA, 25 bp, Homo sapien
gcatatacgatagttatggcttaaa

SEQ ID NO: 2774817 - DNA, 25 bp, Homo sapien
cagcagcatatacgatagttatggc

SEQ ID NO: 2774818 - DNA, 25 bp, Homo sapien
tttccagcagcatatacgatagtta

SEQ ID NO: 2774819 - DNA, 25 bp, Homo sapien
atagttatggcttaaagaaagtctc

SEQ ID NO: 2774820 - DNA, 25 bp, Homo sapien
ttagagaaccgacagtgaatggact

SEQ ID NO: 2774821 - DNA, 25 bp, Homo sapien
tcccggtctatctggaggaaggtta

SEQ ID NO: 2774822 - DNA, 25 bp, Homo sapien
agtgaatggacttcccggtctatct

SEQ ID NO: 2774823 - DNA, 25 bp, Homo sapien
gtttaattagagaaccgacagtgaa

SEQ ID NO: 2774824 - DNA, 25 bp, Homo sapien
caccactgattaagagttgggtggc

SEQ ID NO: 2774825 - DNA, 25 bp, Homo sapien
taataacttaaaactaccacatgca

SEQ ID NO: 2774826 - DNA, 25 bp, Homo sapien
ataacttaaaactaccacatgcaaa

SEQ ID NO: 2774827 - DNA, 25 bp, Homo sapien
taaaactaccacatgcaaaaaagaa

SEQ ID NO: 2774828 - DNA, 25 bp, Homo sapien
ttctgagctgtctgggcagacttcg

SEQ ID NO: 2774829 - DNA, 25 bp, Homo sapien
agccttctgagctgtctgggcagac

SEQ ID NO: 2774830 - DNA, 25 bp, Homo sapien
ccttctgagctgtctgggcagactt

SEQ ID NO: 2774831 - DNA, 25 bp, Homo sapien
tctgagctgtctgggcagacttcgt

SEQ ID NO: 2774832 - DNA, 25 bp, Homo sapien
ccacctccagcagccttcttgtcca

SEQ ID NO: 2774833 - DNA, 25 bp, Homo sapien
cttgccacctccagcagccttcttg

SEQ ID NO: 2774834 - DNA, 25 bp, Homo sapien
acctccagcagccttcttgtccact

SEQ ID NO: 2774835 - DNA, 25 bp, Homo sapien
tgtccactgctttgatgacacccac

SEQ ID NO: 2774836 - DNA, 25 bp, Homo sapien
atgacccaaaggtggatagtctgag

SEQ ID NO: 2774837 - DNA, 25 bp, Homo sapien
gtctcatatcacgaacagcaaaatg

SEQ ID NO: 2774838 - DNA, 25 bp, Homo sapien
tctgagaagctctcaacaatgggct

SEQ ID NO: 2774839 - DNA, 25 bp, Homo sapien
atcacgaacagcaaaatgacccaaa

SEQ ID NO: 2774840 - DNA, 25 bp, Homo sapien
gaatttagggccatcttccagcttt

SEQ ID NO: 2774841 - DNA, 25 bp, Homo sapien
ttagggccatcttccagctttttac

SEQ ID NO: 2774842 - DNA, 25 bp, Homo sapien
cttcaagaatttagggccatcttcc

SEQ ID NO: 2774843 - DNA, 25 bp, Homo sapien
aatttagggccatcttccagctttt

SEQ ID NO: 2774844 - DNA, 25 bp, Homo sapien
aggataattacctgagcaatgaagt

SEQ ID NO: 2774845 - DNA, 25 bp, Homo sapien
atgaagtcagctgtttccattggtg

SEQ ID NO: 2774846 - DNA, 25 bp, Homo sapien
gtgagccgcgtggcaatccaatata

SEQ ID NO: 2774847 - DNA, 25 bp, Homo sapien
taattacctgagcaatgaagtcagc

SEQ ID NO: 2774848 - DNA, 25 bp, Homo sapien
accagcaacgttgccacgacgaaca

SEQ ID NO: 2774849 - DNA, 25 bp, Homo sapien
gcaacgttgccacgacgaacatcct

SEQ ID NO: 2774850 - DNA, 25 bp, Homo sapien
tcaccagcaacgttgccacgacgaa

SEQ ID NO: 2774851 - DNA, 25 bp, Homo sapien
cagcaacgttgccacgacgaacatc

SEQ ID NO: 2774852 - DNA, 25 bp, Homo sapien
agcagcatggtgccgctggcactgc

SEQ ID NO: 2774853 - DNA, 25 bp, Homo sapien
tcaagcagcatggtgccgctggcac

SEQ ID NO: 2774854 - DNA, 25 bp, Homo sapien
agcatggtgccgctggcactgccat

SEQ ID NO: 2774855 - DNA, 25 bp, Homo sapien
gcatggtgccgctggcactgccatc

SEQ ID NO: 2774856 - DNA, 25 bp, Homo sapien
ctggctgtagggtggctcagtggaa

SEQ ID NO: 2774857 - DNA, 25 bp, Homo sapien
tggctgtagggtggctcagtggaat

SEQ ID NO: 2774858 - DNA, 25 bp, Homo sapien
gctgtagggtggctcagtggaatcc

SEQ ID NO: 2774859 - DNA, 25 bp, Homo sapien
tgtagggtggctcagtggaatccat

SEQ ID NO: 2774860 - DNA, 25 bp, Homo sapien
taacaccaacaattagttgtttcac

SEQ ID NO: 2774861 - DNA, 25 bp, Homo sapien
gtttcacacccagtgtgtaagccag

SEQ ID NO: 2774862 - DNA, 25 bp, Homo sapien
ttaacaccaacaattagttgtttca

SEQ ID NO: 2774863 - DNA, 25 bp, Homo sapien
ttagttgtttcacacccagtgtgta

SEQ ID NO: 2774864 - DNA, 25 bp, Homo sapien
tggagataccagtttcaaattcgcc

SEQ ID NO: 2774865 - DNA, 25 bp, Homo sapien
cttggagataccagtttcaaattcg

SEQ ID NO: 2774866 - DNA, 25 bp, Homo sapien
gataccagtttcaaattcgccaaca

SEQ ID NO: 2774867 - DNA, 25 bp, Homo sapien
ggagataccagtttcaaattcgcca

SEQ ID NO: 2774868 - DNA, 25 bp, Homo sapien
ctgagatgtccctgtaatcatgttt

SEQ ID NO: 2774869 - DNA, 25 bp, Homo sapien
atcatgtttttgatgaagtctctga

SEQ ID NO: 2774870 - DNA, 25 bp, Homo sapien
atgtttttgatgaagtctctgagtc

SEQ ID NO: 2774871 - DNA, 25 bp, Homo sapien
agcctgagatgtccctgtaatcatg

SEQ ID NO: 2774872 - DNA, 25 bp, Homo sapien
ggtctcaaatttccacaaggagata

SEQ ID NO: 2774873 - DNA, 25 bp, Homo sapien
caaatttccacaaggagatatcaat

SEQ ID NO: 2774874 - DNA, 25 bp, Homo sapien
atttccacaaggagatatcaatggt

SEQ ID NO: 2774875 - DNA, 25 bp, Homo sapien
tctcaaatttccacaaggagatatc

SEQ ID NO: 2774876 - DNA, 25 bp, Homo sapien
cacgttcacgctcagctttcagttt

SEQ ID NO: 2774877 - DNA, 25 bp, Homo sapien
caggcatacttgaaggagtcctttc

SEQ ID NO: 2774878 - DNA, 25 bp, Homo sapien
agtttatgcaagacccaggcatact

SEQ ID NO: 2774879 - DNA, 25 bp, Homo sapien
atacttgaaggagtcctttcccatc

SEQ ID NO: 2774880 - DNA, 25 bp, Homo sapien
cgatgccaccacatttgtaggtcag

SEQ ID NO: 2774881 - DNA, 25 bp, Homo sapien
gtcgatgccaccacatttgtaggtc

SEQ ID NO: 2774882 - DNA, 25 bp, Homo sapien
ttgtcgatgccaccacatttgtagg

SEQ ID NO: 2774883 - DNA, 25 bp, Homo sapien
tgcccgaatttacgtgtccaatgac

SEQ ID NO: 2774884 - DNA, 25 bp, Homo sapien
ttcacaacacctgtgttctggtggc

SEQ ID NO: 2774885 - DNA, 25 bp, Homo sapien
ttttcacaacacctgtgttctggtg

SEQ ID NO: 2774886 - DNA, 25 bp, Homo sapien
cacaacacctgtgttctggtggcaa

SEQ ID NO: 2774887 - DNA, 25 bp, Homo sapien
caacacctgtgttctggtggcaaac

SEQ ID NO: 2774888 - DNA, 25 bp, Homo sapien
caggaaatttatcatgagccacccc

SEQ ID NO: 2774889 - DNA, 25 bp, Homo sapien
cacattagcaggaaatttatcatga

SEQ ID NO: 2774890 - DNA, 25 bp, Homo sapien
ccaaactaattttcctacacattag

SEQ ID NO: 2774891 - DNA, 25 bp, Homo sapien
tacattaacatggtaaccaaactaa

SEQ ID NO: 2774892 - DNA, 25 bp, Homo sapien
gatttgaaaacagatccatccccag

SEQ ID NO: 2774893 - DNA, 25 bp, Homo sapien
tctattgagttcatattttgatggg

SEQ ID NO: 2774894 - DNA, 25 bp, Homo sapien
caaaataagccccttctgatttgaa

SEQ ID NO: 2774895 - DNA, 25 bp, Homo sapien
atccccagaataaatctctattgag

SEQ ID NO: 2774896 - DNA, 25 bp, Homo sapien
caaaccattttcactagttcaggat

SEQ ID NO: 2774897 - DNA, 25 bp, Homo sapien
taggaatattcatcagattgtctct

SEQ ID NO: 2774898 - DNA, 25 bp, Homo sapien
agttcaggataggaatattcatcag

SEQ ID NO: 2774899 - DNA, 25 bp, Homo sapien
atgtaacacctttgtaccaaaccat

SEQ ID NO: 2774900 - DNA, 25 bp, Homo sapien
taagactggttctgataaaaagctt

SEQ ID NO: 2774901 - DNA, 25 bp, Homo sapien
agactggttctgataaaaagcttca

SEQ ID NO: 2774902 - DNA, 25 bp, Homo sapien
aagactggttctgataaaaagcttc

SEQ ID NO: 2774903 - DNA, 25 bp, Homo sapien
gatatttccattcctctggacaggc

SEQ ID NO: 2774904 - DNA, 25 bp, Homo sapien
gttatatgtgcatcaattttagaca

SEQ ID NO: 2774905 - DNA, 25 bp, Homo sapien
aaaatctactctgagttatatgtgc

SEQ ID NO: 2774906 - DNA, 25 bp, Homo sapien
agcactgcttgacccatgtgtatac

SEQ ID NO: 2774907 - DNA, 25 bp, Homo sapien
cctggtaaatttccacgtatacaga

SEQ ID NO: 2774908 - DNA, 25 bp, Homo sapien
gttccatttacacaactcatcttct

SEQ ID NO: 2774909 - DNA, 25 bp, Homo sapien
tccacgtatacagattttgccagtt

SEQ ID NO: 2774910 - DNA, 25 bp, Homo sapien
ttctttggatttcatgatctggcaa

SEQ ID NO: 2774911 - DNA, 25 bp, Homo sapien
tgccactctccatatatatcatggt

SEQ ID NO: 2774912 - DNA, 25 bp, Homo sapien
gcagaggtatgcatgaccatctaaa

SEQ ID NO: 2774913 - DNA, 25 bp, Homo sapien
gatgttatcttcacaatgccactct

SEQ ID NO: 2774914 - DNA, 25 bp, Homo sapien
tcatggtaccatctgtatcaagact

SEQ ID NO: 2774915 - DNA, 25 bp, Homo sapien
gaaggtatgatggtttcagataaaa

SEQ ID NO: 2774916 - DNA, 25 bp, Homo sapien
ttcgaaaatctagggctcgctgtag

SEQ ID NO: 2774917 - DNA, 25 bp, Homo sapien
aaagggcaagtagctgaagagtttc

SEQ ID NO: 2774918 - DNA, 25 bp, Homo sapien
tctttcagaaggtatgatggtttca

SEQ ID NO: 2774919 - DNA, 25 bp, Homo sapien
cagtgccacagggagaaagttgcaa

SEQ ID NO: 2774920 - DNA, 25 bp, Homo sapien
gtgtcctttgacgaattctttctgg

SEQ ID NO: 2774921 - DNA, 25 bp, Homo sapien
tcataaagtatcattcgcagttcag

SEQ ID NO: 2774922 - DNA, 25 bp, Homo sapien
tctggttgttctaaaggatgtgctg

SEQ ID NO: 2774923 - DNA, 25 bp, Homo sapien
aaaacaacagcataaatagttctct

SEQ ID NO: 2774924 - DNA, 25 bp, Homo sapien
aaaaacaacagcataaatagttctc

SEQ ID NO: 2774925 - DNA, 25 bp, Homo sapien
aggtggctgcctgctagaccgctct

SEQ ID NO: 2774926 - DNA, 25 bp, Homo sapien
taactaaaatggaacttaatcactc

SEQ ID NO: 2774927 - DNA, 25 bp, Homo sapien
tgtccctgtcccatagataaatcaa

SEQ ID NO: 2774928 - DNA, 25 bp, Homo sapien
ttaatcactcctaccaaaagcaggc

SEQ ID NO: 2774929 - DNA, 25 bp, Homo sapien
tttccttggctaatcacaaggctgg

SEQ ID NO: 2774930 - DNA, 25 bp, Homo sapien
tacagggcactttagatacattggc

SEQ ID NO: 2774931 - DNA, 25 bp, Homo sapien
gcctacaaaggccacacagtctggt

SEQ ID NO: 2774932 - DNA, 25 bp, Homo sapien
tatcatcatcaaggtttcagcacaa

SEQ ID NO: 2774933 - DNA, 25 bp, Homo sapien
ggatataaagtcaaccgaagcaggg

SEQ ID NO: 2774934 - DNA, 25 bp, Homo sapien
aaacgggtgctgatacatagatgga

SEQ ID NO: 2774935 - DNA, 25 bp, Homo sapien
tcatcacccagcacattacgtcagg

SEQ ID NO: 2774936 - DNA, 25 bp, Homo sapien
cataccataggaaaccataacccgg

SEQ ID NO: 2774937 - DNA, 25 bp, Homo sapien
ggagcctgatcaaaacaaccaccaa

SEQ ID NO: 2774938 - DNA, 25 bp, Homo sapien
acaaccaccaaaagtcttccactca

SEQ ID NO: 2774939 - DNA, 25 bp, Homo sapien
aggagcctgatcaaaacaaccacca

SEQ ID NO: 2774940 - DNA, 25 bp, Homo sapien
caaccaccaaaagtcttccactcac

SEQ ID NO: 2774941 - DNA, 25 bp, Homo sapien
atgctctggaagccgcagcgtcggc

SEQ ID NO: 2774942 - DNA, 25 bp, Homo sapien
gtttgacaaattaccagcgagtgat

SEQ ID NO: 2774943 - DNA, 25 bp, Homo sapien
cagcaacggtccctggctttgattt

SEQ ID NO: 2774944 - DNA, 25 bp, Homo sapien
cgaaaagttgcggaaatgaggccca

SEQ ID NO: 2774945 - DNA, 25 bp, Homo sapien
cgccacgaaacaggaaagcggagac

SEQ ID NO: 2774946 - DNA, 25 bp, Homo sapien
caaccctagaggaataaggtggcag

SEQ ID NO: 2774947 - DNA, 25 bp, Homo sapien
gagtgttttggccaagatgcccgcc

SEQ ID NO: 2774948 - DNA, 25 bp, Homo sapien
cagcgccaactgtaaccactaagag

SEQ ID NO: 2774949 - DNA, 25 bp, Homo sapien
actccggaggctgccctcgctgcgt

SEQ ID NO: 2774950 - DNA, 25 bp, Homo sapien
agccgcttcagagctccgcaacagg

SEQ ID NO: 2774951 - DNA, 25 bp, Homo sapien
cgcttcagagctccgcaacagggaa

SEQ ID NO: 2774952 - DNA, 25 bp, Homo sapien
agggagccgcttcagagctccgcaa

SEQ ID NO: 2774953 - DNA, 25 bp, Homo sapien
gatggtgcattccacaagagggcag

SEQ ID NO: 2774954 - DNA, 25 bp, Homo sapien
cagggggtgccatctttggtaaggt

SEQ ID NO: 2774955 - DNA, 25 bp, Homo sapien
cagaagcagcaaagatggtgcattc

SEQ ID NO: 2774956 - DNA, 25 bp, Homo sapien
ggttcccagtgtagggttctgagca

SEQ ID NO: 2774957 - DNA, 25 bp, Homo sapien
taaggcatgacaatcctaaaggcca

SEQ ID NO: 2774958 - DNA, 25 bp, Homo sapien
caattatgcaaagtctggtcaacca

SEQ ID NO: 2774959 - DNA, 25 bp, Homo sapien
ctaaaggccaacaattgtggacggg

SEQ ID NO: 2774960 - DNA, 25 bp, Homo sapien
gctgacacgtttctgtttaaggcat

SEQ ID NO: 2774961 - DNA, 25 bp, Homo sapien
atttattagggctgaggtggtacca

SEQ ID NO: 2774962 - DNA, 25 bp, Homo sapien
ggataagcatctaaccaactagcaa

SEQ ID NO: 2774963 - DNA, 25 bp, Homo sapien
taaaaagcccttggtatcaaatagc

SEQ ID NO: 2774964 - DNA, 25 bp, Homo sapien
tctagtaaaaaagtcgatgcaaccc

SEQ ID NO: 2774965 - DNA, 25 bp, Homo sapien
gattttattgcagccaaaacagtag

SEQ ID NO: 2774966 - DNA, 25 bp, Homo sapien
caccatacctaaactgctttataaa

SEQ ID NO: 2774967 - DNA, 25 bp, Homo sapien
cagtagaattaactgtacataataa

SEQ ID NO: 2774968 - DNA, 25 bp, Homo sapien
tgtgttctgctaaatcaccatacct

SEQ ID NO: 2774969 - DNA, 25 bp, Homo sapien
ttcttctatctctgggtccatctca

SEQ ID NO: 2774970 - DNA, 25 bp, Homo sapien
ataagcttcttctatctctgggtcc

SEQ ID NO: 2774971 - DNA, 25 bp, Homo sapien
ttcataagcttcttctatctctggg

SEQ ID NO: 2774972 - DNA, 25 bp, Homo sapien
gctctgattccaaacaaaacttttc

SEQ ID NO: 2774973 - DNA, 25 bp, Homo sapien
tccagcggtatacccaagtagatgg

SEQ ID NO: 2774974 - DNA, 25 bp, Homo sapien
gataacctgaagttcaatgccaaga

SEQ ID NO: 2774975 - DNA, 25 bp, Homo sapien
cattagggcaagagaatatgatgct

SEQ ID NO: 2774976 - DNA, 25 bp, Homo sapien
taccaactgctgatgagtccttttc

SEQ ID NO: 2774977 - DNA, 25 bp, Homo sapien
atcaccagccccggataaatctgtt

SEQ ID NO: 2774978 - DNA, 25 bp, Homo sapien
tcaccagccccggataaatctgttc

SEQ ID NO: 2774979 - DNA, 25 bp, Homo sapien
agccccggataaatctgttccattt

SEQ ID NO: 2774980 - DNA, 25 bp, Homo sapien
tcaagtaattcttggtatttctctt

SEQ ID NO: 2774981 - DNA, 25 bp, Homo sapien
aaggaacaccatcagatgtataaaa

SEQ ID NO: 2774982 - DNA, 25 bp, Homo sapien
gaacaccatcagatgtataaaatgt

SEQ ID NO: 2774983 - DNA, 25 bp, Homo sapien
tggatcagctgcagtgaaaggaaca

SEQ ID NO: 2774984 - DNA, 25 bp, Homo sapien
tgcagtgaaaggaacaccatcagat

SEQ ID NO: 2774985 - DNA, 25 bp, Homo sapien
agtagttaggatcattttctggtgt

SEQ ID NO: 2774986 - DNA, 25 bp, Homo sapien
cataaagtagttaggatcattttct

SEQ ID NO: 2774987 - DNA, 25 bp, Homo sapien
taaagtagttaggatcattttctgg

SEQ ID NO: 2774988 - DNA, 25 bp, Homo sapien
aagtagttaggatcattttctggtg

SEQ ID NO: 2774989 - DNA, 25 bp, Homo sapien
cggagttctacaagcttcaagagca

SEQ ID NO: 2774990 - DNA, 25 bp, Homo sapien
ccagttacttgaccggagttctaca

SEQ ID NO: 2774991 - DNA, 25 bp, Homo sapien
cttgaccggagttctacaagcttca

SEQ ID NO: 2774992 - DNA, 25 bp, Homo sapien
gttctacaagcttcaagagcatctg

SEQ ID NO: 2774993 - DNA, 25 bp, Homo sapien
tttgcatctaggacaacgttttcaa

SEQ ID NO: 2774994 - DNA, 25 bp, Homo sapien
gtttgcatctaggacaacgttttca

SEQ ID NO: 2774995 - DNA, 25 bp, Homo sapien
ttgcatctaggacaacgttttcaat

SEQ ID NO: 2774996 - DNA, 25 bp, Homo sapien
gaccaacctgaagaatatctgctct

SEQ ID NO: 2774997 - DNA, 25 bp, Homo sapien
tactgcacaaattaaattgtcatcc

SEQ ID NO: 2774998 - DNA, 25 bp, Homo sapien
cagggcattcagcaattctcgaaga

SEQ ID NO: 2774999 - DNA, 25 bp, Homo sapien
catccataggattagaaaacagggc

SEQ ID NO: 2775000 - DNA, 25 bp, Homo sapien
gagtaacttcatccccttttgcagc

SEQ ID NO: 2775001 - DNA, 25 bp, Homo sapien
ggccaattccaatgtttacgaggta

SEQ ID NO: 2775002 - DNA, 25 bp, Homo sapien
cagcttactgtgcttacgtggccaa

SEQ ID NO: 2775003 - DNA, 25 bp, Homo sapien
taactgctgtgaaggtaacttccgt

SEQ ID NO: 2775004 - DNA, 25 bp, Homo sapien
tacagtactacagaagcacatatgg

SEQ ID NO: 2775005 - DNA, 25 bp, Homo sapien
gagctcccatataagagaaatttgg

SEQ ID NO: 2775006 - DNA, 25 bp, Homo sapien
gaagtagcaattggcggaagttgcc

SEQ ID NO: 2775007 - DNA, 25 bp, Homo sapien
tgggctaattgtcagatgatgggac

SEQ ID NO: 2775008 - DNA, 25 bp, Homo sapien
ggtaattacacaggcgagctcccat

SEQ ID NO: 2775009 - DNA, 25 bp, Homo sapien
agtcttttctggtactgctaatttc

SEQ ID NO: 2775010 - DNA, 25 bp, Homo sapien
tcttttctggtactgctaatttcag

SEQ ID NO: 2775011 - DNA, 25 bp, Homo sapien
gtcttttctggtactgctaatttca

SEQ ID NO: 2775012 - DNA, 25 bp, Homo sapien
cttttctggtactgctaatttcaga

SEQ ID NO: 2775013 - DNA, 25 bp, Homo sapien
cttgcaaagcatcatctgttgtaac

SEQ ID NO: 2775014 - DNA, 25 bp, Homo sapien
tgctctgtaagatgattcaaaaaat

SEQ ID NO: 2775015 - DNA, 25 bp, Homo sapien
caagttcttgcaaagcatcatctgt

SEQ ID NO: 2775016 - DNA, 25 bp, Homo sapien
tgtaagatgattcaaaaaatcctga

SEQ ID NO: 2775017 - DNA, 25 bp, Homo sapien
gaatatagcagaacagaggatccag

SEQ ID NO: 2775018 - DNA, 25 bp, Homo sapien
ttaaagccacaaatttcttcagtct

SEQ ID NO: 2775019 - DNA, 25 bp, Homo sapien
gaaagtagaactgctctgaatatag

SEQ ID NO: 2775020 - DNA, 25 bp, Homo sapien
cagacaggcactccaacgtgtttga

SEQ ID NO: 2775021 - DNA, 25 bp, Homo sapien
cctgaagggtaaaattcaggggcat

SEQ ID NO: 2775022 - DNA, 25 bp, Homo sapien
ttaatacaggagctacaaccacctg

SEQ ID NO: 2775023 - DNA, 25 bp, Homo sapien
tgaagggtaaaattcaggggcattc

SEQ ID NO: 2775024 - DNA, 25 bp, Homo sapien
gaagggtaaaattcaggggcattca

SEQ ID NO: 2775025 - DNA, 25 bp, Homo sapien
tccgagttctgctgtgggattttat

SEQ ID NO: 2775026 - DNA, 25 bp, Homo sapien
cgagttctgctgtgggattttatcc

SEQ ID NO: 2775027 - DNA, 25 bp, Homo sapien
ccgagttctgctgtgggattttatc

SEQ ID NO: 2775028 - DNA, 25 bp, Homo sapien
aagaggtggttactcgctagggtct

SEQ ID NO: 2775029 - DNA, 25 bp, Homo sapien
ctgctgaggggaggcgatttttact

SEQ ID NO: 2775030 - DNA, 25 bp, Homo sapien
ctagggtctcgctttagagggctgc

SEQ ID NO: 2775031 - DNA, 25 bp, Homo sapien
cctctcaaatgagtgcttgcgagct

SEQ ID NO: 2775032 - DNA, 25 bp, Homo sapien
cctcggcacgcgtggagggccgtgg

SEQ ID NO: 2775033 - DNA, 25 bp, Homo sapien
tcacgcggccctctcggggaatgct

SEQ ID NO: 2775034 - DNA, 25 bp, Homo sapien
gtggggaccgcagacagcgcgtcgg

SEQ ID NO: 2775035 - DNA, 25 bp, Homo sapien
ggaagcgttcgccaaggaggactgg

SEQ ID NO: 2775036 - DNA, 25 bp, Homo sapien
gggacctcgcactgggcccctggcg

SEQ ID NO: 2775037 - DNA, 25 bp, Homo sapien
cggggacctcgcactgggcccctgg

SEQ ID NO: 2775038 - DNA, 25 bp, Homo sapien
acctcgcactgggcccctggcggcg

SEQ ID NO: 2775039 - DNA, 25 bp, Homo sapien
ggacctcgcactgggcccctggcgg

SEQ ID NO: 2775040 - DNA, 25 bp, Homo sapien
gggctttgggttgcggcggctggtg

SEQ ID NO: 2775041 - DNA, 25 bp, Homo sapien
ctggtgccgcgcccgctcagcaggc

SEQ ID NO: 2775042 - DNA, 25 bp, Homo sapien
tgccgctgcgctcgcgataggacgc

SEQ ID NO: 2775043 - DNA, 25 bp, Homo sapien
aaggcgccgcgggtcggctatagcc

SEQ ID NO: 2775044 - DNA, 25 bp, Homo sapien
cgcctcactcgggcctcatggagga

SEQ ID NO: 2775045 - DNA, 25 bp, Homo sapien
ctcggtgcttctggcggagcggacg

SEQ ID NO: 2775046 - DNA, 25 bp, Homo sapien
acaggcaggcccgacctactcggta

SEQ ID NO: 2775047 - DNA, 25 bp, Homo sapien
tcggtagttctcaggagagacgtgc

SEQ ID NO: 2775048 - DNA, 25 bp, Homo sapien
gacctactcggtagttctcaggaga

SEQ ID NO: 2775049 - DNA, 25 bp, Homo sapien
ggcccgacctactcggtagttctca

SEQ ID NO: 2775050 - DNA, 25 bp, Homo sapien
tttcccatgtgaagataaggccatt

SEQ ID NO: 2775051 - DNA, 25 bp, Homo sapien
cttttatgatgaacagcaccttttc

SEQ ID NO: 2775052 - DNA, 25 bp, Homo sapien
tctaacaactgggactttcccatgt

SEQ ID NO: 2775053 - DNA, 25 bp, Homo sapien
catgtgaagataaggccattctgca

SEQ ID NO: 2775054 - DNA, 25 bp, Homo sapien
cattacagatggactaggactctat

SEQ ID NO: 2775055 - DNA, 25 bp, Homo sapien
tcagttaaacagctatgtctcattc

SEQ ID NO: 2775056 - DNA, 25 bp, Homo sapien
ggcattacagatggactaggactct

SEQ ID NO: 2775057 - DNA, 25 bp, Homo sapien
taaacagctatgtctcattccaggg

SEQ ID NO: 2775058 - DNA, 25 bp, Homo sapien
caaaggttaatatctactgtagact

SEQ ID NO: 2775059 - DNA, 25 bp, Homo sapien
gagtattccatacatcaacaaagca

SEQ ID NO: 2775060 - DNA, 25 bp, Homo sapien
gtagtgttaatctgacagagtctcc

SEQ ID NO: 2775061 - DNA, 25 bp, Homo sapien
ggttgtagtttaaatcaggtgttgc

SEQ ID NO: 2775062 - DNA, 25 bp, Homo sapien
aaatgttagcttggagacttgtagc

SEQ ID NO: 2775063 - DNA, 25 bp, Homo sapien
ctaacaacaggtatgctatcatttt

SEQ ID NO: 2775064 - DNA, 25 bp, Homo sapien
atttaaatgttagcttggagacttg

SEQ ID NO: 2775065 - DNA, 25 bp, Homo sapien
tctattaaaggcaaatcataacagg

SEQ ID NO: 2775066 - DNA, 25 bp, Homo sapien
cattctttactaccgcaaggtcagg

SEQ ID NO: 2775067 - DNA, 25 bp, Homo sapien
gtgattgaccacatataggctcttt

SEQ ID NO: 2775068 - DNA, 25 bp, Homo sapien
caaggattcacaatcagactgcact

SEQ ID NO: 2775069 - DNA, 25 bp, Homo sapien
gactgcacttgtaattcctgtataa

SEQ ID NO: 2775070 - DNA, 25 bp, Homo sapien
caggtagagagaaaggttagtgttt

SEQ ID NO: 2775071 - DNA, 25 bp, Homo sapien
ctaattactgtaagctatgtacagc

SEQ ID NO: 2775072 - DNA, 25 bp, Homo sapien
tagtgtttcaattgttctcacaaaa

SEQ ID NO: 2775073 - DNA, 25 bp, Homo sapien
taagctatgtacagctcaaaagaaa

SEQ ID NO: 2775074 - DNA, 25 bp, Homo sapien
tttggcattttatcagttcagcccc

SEQ ID NO: 2775075 - DNA, 25 bp, Homo sapien
ttaagtgtgtgtgctgtcagggccc

SEQ ID NO: 2775076 - DNA, 25 bp, Homo sapien
gttcagccccatgtaattaacttat

SEQ ID NO: 2775077 - DNA, 25 bp, Homo sapien
agtccaacggtgtgaattccaaagt

SEQ ID NO: 2775078 - DNA, 25 bp, Homo sapien
taggctgtagccaattacaaaccac

SEQ ID NO: 2775079 - DNA, 25 bp, Homo sapien
caagcagattttaggctgtagccaa

SEQ ID NO: 2775080 - DNA, 25 bp, Homo sapien
ttttgaacaagcagattttaggctg

SEQ ID NO: 2775081 - DNA, 25 bp, Homo sapien
acaaaagacttagaagagccatgat

SEQ ID NO: 2775082 - DNA, 25 bp, Homo sapien
gcccaaaagttagcttgaggtcgaa

SEQ ID NO: 2775083 - DNA, 25 bp, Homo sapien
tatgtcaagttggtaccatacaggc

SEQ ID NO: 2775084 - DNA, 25 bp, Homo sapien
cgcacgcggccaattgtaaacttct

SEQ ID NO: 2775085 - DNA, 25 bp, Homo sapien
taaaattttagccacgagaccagta

SEQ ID NO: 2775086 - DNA, 25 bp, Homo sapien
tgagcagagaggaaattcagaagcc

SEQ ID NO: 2775087 - DNA, 25 bp, Homo sapien
ctgcttttgctgtgagatgtgcctc

SEQ ID NO: 2775088 - DNA, 25 bp, Homo sapien
ctcatgaatggctagggctgtcccc

SEQ ID NO: 2775089 - DNA, 25 bp, Homo sapien
aataactagctaagcccgggcaaca

SEQ ID NO: 2775090 - DNA, 25 bp, Homo sapien
caaagagaccaggtaatgcaatgca

SEQ ID NO: 2775091 - DNA, 25 bp, Homo sapien
gagagtggagctttagacctgataa

SEQ ID NO: 2775092 - DNA, 25 bp, Homo sapien
ggtgggagacccatatcaatcagcc

SEQ ID NO: 2775093 - DNA, 25 bp, Homo sapien
taagaacttgcccatgactcttcag

SEQ ID NO: 2775094 - DNA, 25 bp, Homo sapien
acagggtctttagatgttcccacag

SEQ ID NO: 2775095 - DNA, 25 bp, Homo sapien
cagggtctttagatgttcccacaga

SEQ ID NO: 2775096 - DNA, 25 bp, Homo sapien
tacagggtctttagatgttcccaca

SEQ ID NO: 2775097 - DNA, 25 bp, Homo sapien
tctctgagcatggatttcattctgg

SEQ ID NO: 2775098 - DNA, 25 bp, Homo sapien
atctctgagcatggatttcattctg

SEQ ID NO: 2775099 - DNA, 25 bp, Homo sapien
tggatatggggcaggatgctctctg

SEQ ID NO: 2775100 - DNA, 25 bp, Homo sapien
cccatgaagggattaacaagccgag

SEQ ID NO: 2775101 - DNA, 25 bp, Homo sapien
catttgccctccatggataggtgtc

SEQ ID NO: 2775102 - DNA, 25 bp, Homo sapien
tatatagaggtagatcagcaggact

SEQ ID NO: 2775103 - DNA, 25 bp, Homo sapien
ccagttttgggattcacctgcatca

SEQ ID NO: 2775104 - DNA, 25 bp, Homo sapien
aaaacctctgtatgaggtagaaatt

SEQ ID NO: 2775105 - DNA, 25 bp, Homo sapien
cctaaacacagaagcgaacattcgt

SEQ ID NO: 2775106 - DNA, 25 bp, Homo sapien
cctctgtatgaggtagaaattggtt

SEQ ID NO: 2775107 - DNA, 25 bp, Homo sapien
cgaacattcgtgcaagatatctatt

SEQ ID NO: 2775108 - DNA, 25 bp, Homo sapien
atccaccaccttcttacgtgtgttc

SEQ ID NO: 2775109 - DNA, 25 bp, Homo sapien
aaaacacggcgcgacatttagaact

SEQ ID NO: 2775110 - DNA, 25 bp, Homo sapien
tatagggctttatgcaactacactg

SEQ ID NO: 2775111 - DNA, 25 bp, Homo sapien
ccttcaatcttctgaggtgaagaaa

SEQ ID NO: 2775112 - DNA, 25 bp, Homo sapien
ctctcacaaatgacatcctttgcag

SEQ ID NO: 2775113 - DNA, 25 bp, Homo sapien
aacctggtatcaggttgtgaattcc

SEQ ID NO: 2775114 - DNA, 25 bp, Homo sapien
tcaggttgtgaattccactctcaca

SEQ ID NO: 2775115 - DNA, 25 bp, Homo sapien
gggtcaagcccactcatcaaatttt

SEQ ID NO: 2775116 - DNA, 25 bp, Homo sapien
ctggaaattctagtgtaggtaccct

SEQ ID NO: 2775117 - DNA, 25 bp, Homo sapien
tccagagtacgtaagtaccaacagt

SEQ ID NO: 2775118 - DNA, 25 bp, Homo sapien
taagagagtggtaccacgtgtcttc

SEQ ID NO: 2775119 - DNA, 25 bp, Homo sapien
gggaaccagcgctttcagtaagaga

SEQ ID NO: 2775120 - DNA, 25 bp, Homo sapien
tgggatagtgcgaagatccccagat

SEQ ID NO: 2775121 - DNA, 25 bp, Homo sapien
gatagtgcgaagatccccagatcct

SEQ ID NO: 2775122 - DNA, 25 bp, Homo sapien
ggatagtgcgaagatccccagatcc

SEQ ID NO: 2775123 - DNA, 25 bp, Homo sapien
cttgggatagtgcgaagatccccag

SEQ ID NO: 2775124 - DNA, 25 bp, Homo sapien
gactggcgaacaatcaacaaccaca

SEQ ID NO: 2775125 - DNA, 25 bp, Homo sapien
gagactggcgaacaatcaacaacca

SEQ ID NO: 2775126 - DNA, 25 bp, Homo sapien
ggcgaacaatcaacaaccacagaaa

SEQ ID NO: 2775127 - DNA, 25 bp, Homo sapien
tggcgaacaatcaacaaccacagaa

SEQ ID NO: 2775128 - DNA, 25 bp, Homo sapien
attgttccagctgtgttagaaaagt

SEQ ID NO: 2775129 - DNA, 25 bp, Homo sapien
tgttccagctgtgttagaaaagttc

SEQ ID NO: 2775130 - DNA, 25 bp, Homo sapien
ccagctgtgttagaaaagttcaggt

SEQ ID NO: 2775131 - DNA, 25 bp, Homo sapien
ctgtgttagaaaagttcaggttcct

SEQ ID NO: 2775132 - DNA, 25 bp, Homo sapien
tgctagctaatgtggctgaccatac

SEQ ID NO: 2775133 - DNA, 25 bp, Homo sapien
tttccactgcaacgcagtttgggtc

SEQ ID NO: 2775134 - DNA, 25 bp, Homo sapien
tattccgctgcttccctgtcagaga

SEQ ID NO: 2775135 - DNA, 25 bp, Homo sapien
gaccatactgtataagccgagactc

SEQ ID NO: 2775136 - DNA, 25 bp, Homo sapien
gagcctgacttagtggcccctgagc

SEQ ID NO: 2775137 - DNA, 25 bp, Homo sapien
tacacatcttgaggaagtgccatga

SEQ ID NO: 2775138 - DNA, 25 bp, Homo sapien
gcaagaggaccactggaaaagggct

SEQ ID NO: 2775139 - DNA, 25 bp, Homo sapien
tccttattggatatgagtcagcctc

SEQ ID NO: 2775140 - DNA, 25 bp, Homo sapien
ccttaaaacctgtcgagtgtctgca

SEQ ID NO: 2775141 - DNA, 25 bp, Homo sapien
aacactcttgattggtcagcctggg

SEQ ID NO: 2775142 - DNA, 25 bp, Homo sapien
gatttttggctactgggcacctctc

SEQ ID NO: 2775143 - DNA, 25 bp, Homo sapien
gattacatgtcttctcaggttcagc

SEQ ID NO: 2775144 - DNA, 25 bp, Homo sapien
gaggacatcacgctttgtaactggt

SEQ ID NO: 2775145 - DNA, 25 bp, Homo sapien
caggtttgattgacaaggactggcg

SEQ ID NO: 2775146 - DNA, 25 bp, Homo sapien
ttctttgttctgatgggaccccaga

SEQ ID NO: 2775147 - DNA, 25 bp, Homo sapien
agctgccgcgtttggcaccaggttt

SEQ ID NO: 2775148 - DNA, 25 bp, Homo sapien
tcgccttttggttcggagagcgcgc

SEQ ID NO: 2775149 - DNA, 25 bp, Homo sapien
ctgtgcaggtgcagatatttgcagc

SEQ ID NO: 2775150 - DNA, 25 bp, Homo sapien
gagacctgtcaaagagcaaagcggg

SEQ ID NO: 2775151 - DNA, 25 bp, Homo sapien
agaccacggccctcgccgggagaga

SEQ ID NO: 2775152 - DNA, 25 bp, Homo sapien
gccacactgggacttttagtagaag

SEQ ID NO: 2775153 - DNA, 25 bp, Homo sapien
tcagaattgtggttgctcatcagct

SEQ ID NO: 2775154 - DNA, 25 bp, Homo sapien
taatgagccttaacacataactggg

SEQ ID NO: 2775155 - DNA, 25 bp, Homo sapien
caggactttactctggaaggcccgt

SEQ ID NO: 2775156 - DNA, 25 bp, Homo sapien
aaagcccctggcacttacctcaggg

SEQ ID NO: 2775157 - DNA, 25 bp, Homo sapien
tttacagcatttggtcaggtttagt

SEQ ID NO: 2775158 - DNA, 25 bp, Homo sapien
tgccttggagaaaatatgcaacttc

SEQ ID NO: 2775159 - DNA, 25 bp, Homo sapien
tatttgtgcatgatagcaaatccag

SEQ ID NO: 2775160 - DNA, 25 bp, Homo sapien
tgaaggctttgtaggggcctcggta

SEQ ID NO: 2775161 - DNA, 25 bp, Homo sapien
ggcagagatatctactctgaaggct

SEQ ID NO: 2775162 - DNA, 25 bp, Homo sapien
tggggggtcgcaccagtccttctgt

SEQ ID NO: 2775163 - DNA, 25 bp, Homo sapien
tccttctgtcctcacgttggcagag

SEQ ID NO: 2775164 - DNA, 25 bp, Homo sapien
ccccttggcaatacaggcacaaaca

SEQ ID NO: 2775165 - DNA, 25 bp, Homo sapien
ccttggcaatacaggcacaaacacg

SEQ ID NO: 2775166 - DNA, 25 bp, Homo sapien
tgggccccttggcaatacaggcaca

SEQ ID NO: 2775167 - DNA, 25 bp, Homo sapien
ggccccttggcaatacaggcacaaa

SEQ ID NO: 2775168 - DNA, 25 bp, Homo sapien
tacatttctagagtgtatcacctct

SEQ ID NO: 2775169 - DNA, 25 bp, Homo sapien
tcacctcttgataaattaagcacaa

SEQ ID NO: 2775170 - DNA, 25 bp, Homo sapien
ggcatcgttatgaaaagtgttactg

SEQ ID NO: 2775171 - DNA, 25 bp, Homo sapien
gtaatgtgtctttcccagaatactg

SEQ ID NO: 2775172 - DNA, 25 bp, Homo sapien
tgtcttctgttcaggactcatctgg

SEQ ID NO: 2775173 - DNA, 25 bp, Homo sapien
cattgtcttctgttcaggactcatc

SEQ ID NO: 2775174 - DNA, 25 bp, Homo sapien
ttctgttcaggactcatctggaatt

SEQ ID NO: 2775175 - DNA, 25 bp, Homo sapien
actatatatgtttctcattgtcttc

SEQ ID NO: 2775176 - DNA, 25 bp, Homo sapien
tcttggttactgatatctttgcaca

SEQ ID NO: 2775177 - DNA, 25 bp, Homo sapien
gcacactgacatcctctgattcttc

SEQ ID NO: 2775178 - DNA, 25 bp, Homo sapien
tcatagctagtcttggttactgata

SEQ ID NO: 2775179 - DNA, 25 bp, Homo sapien
tacctattgtcatagtcatagctag

SEQ ID NO: 2775180 - DNA, 25 bp, Homo sapien
tggcagtggcttatagaggaatgat

SEQ ID NO: 2775181 - DNA, 25 bp, Homo sapien
tggcttatagaggaatgattctcac

SEQ ID NO: 2775182 - DNA, 25 bp, Homo sapien
gcagtggcttatagaggaatgattc

SEQ ID NO: 2775183 - DNA, 25 bp, Homo sapien
agttatggcagtggcttatagagga

SEQ ID NO: 2775184 - DNA, 25 bp, Homo sapien
tctggggagtttctgcagaggaagt

SEQ ID NO: 2775185 - DNA, 25 bp, Homo sapien
ttctggggagtttctgcagaggaag

SEQ ID NO: 2775186 - DNA, 25 bp, Homo sapien
tgaaatctgagtagggggttctggg

SEQ ID NO: 2775187 - DNA, 25 bp, Homo sapien
tgcctgtggcaagaggtgaaatctg

SEQ ID NO: 2775188 - DNA, 25 bp, Homo sapien
cctgtcctggtacttgaaacttcac

SEQ ID NO: 2775189 - DNA, 25 bp, Homo sapien
ttccttatcagcctgtcctggtact

SEQ ID NO: 2775190 - DNA, 25 bp, Homo sapien
ctgtcctggtacttgaaacttcacc

SEQ ID NO: 2775191 - DNA, 25 bp, Homo sapien
aagaatcttttccttatcagcctgt

SEQ ID NO: 2775192 - DNA, 25 bp, Homo sapien
gtctggtgttgctgacacaaacatc

SEQ ID NO: 2775193 - DNA, 25 bp, Homo sapien
aagttagtatagcaatggaacgatc

SEQ ID NO: 2775194 - DNA, 25 bp, Homo sapien
aatgtagtctggtgttgctgacaca

SEQ ID NO: 2775195 - DNA, 25 bp, Homo sapien
tgtgggaagttagtatagcaatgga

SEQ ID NO: 2775196 - DNA, 25 bp, Homo sapien
tgaattctctttgttataaactaac

SEQ ID NO: 2775197 - DNA, 25 bp, Homo sapien
cttgcaaaagccagattgtgtatct

SEQ ID NO: 2775198 - DNA, 25 bp, Homo sapien
ttgcaaaagccagattgtgtatctt

SEQ ID NO: 2775199 - DNA, 25 bp, Homo sapien
tcttccttaataactcttgcaaaag

SEQ ID NO: 2775200 - DNA, 25 bp, Homo sapien
tccttaataactcttgcaaaagcca

SEQ ID NO: 2775201 - DNA, 25 bp, Homo sapien
cctgtccaagggtccggaatttctg

SEQ ID NO: 2775202 - DNA, 25 bp, Homo sapien
tacataaggaagtgaccctgtccaa

SEQ ID NO: 2775203 - DNA, 25 bp, Homo sapien
tggacacaggggtacataaggaagt

SEQ ID NO: 2775204 - DNA, 25 bp, Homo sapien
caagggtccggaatttctgtctccg

SEQ ID NO: 2775205 - DNA, 25 bp, Homo sapien
gcatggcttgttgaatacttggctg

SEQ ID NO: 2775206 - DNA, 25 bp, Homo sapien
gatcgaattggattgatcttttgtc

SEQ ID NO: 2775207 - DNA, 25 bp, Homo sapien
ctgaggatcgaattggattgatctt

SEQ ID NO: 2775208 - DNA, 25 bp, Homo sapien
ttcatttttggcctcaaactcactg

SEQ ID NO: 2775209 - DNA, 25 bp, Homo sapien
tcatttttggcctcaaactcactgc

SEQ ID NO: 2775210 - DNA, 25 bp, Homo sapien
cggacagacgtcctgaccacgatgt

SEQ ID NO: 2775211 - DNA, 25 bp, Homo sapien
ggatgccggacagacgtcctgacca

SEQ ID NO: 2775212 - DNA, 25 bp, Homo sapien
acaaggatgccggacagacgtcctg

SEQ ID NO: 2775213 - DNA, 25 bp, Homo sapien
gacgtcctgaccacgatgtttattt

SEQ ID NO: 2775214 - DNA, 25 bp, Homo sapien
agcctttgatgtgaccggagcctca

SEQ ID NO: 2775215 - DNA, 25 bp, Homo sapien
ggagcctttgatgtgaccggagcct

SEQ ID NO: 2775216 - DNA, 25 bp, Homo sapien
gaggagcctttgatgtgaccggagc

SEQ ID NO: 2775217 - DNA, 25 bp, Homo sapien
gcctttgatgtgaccggagcctcat

SEQ ID NO: 2775218 - DNA, 25 bp, Homo sapien
gacattggtccactcatactctgct

SEQ ID NO: 2775219 - DNA, 25 bp, Homo sapien
tatgacattggtccactcatactct

SEQ ID NO: 2775220 - DNA, 25 bp, Homo sapien
ggtccactcatactctgctgtatca

SEQ ID NO: 2775221 - DNA, 25 bp, Homo sapien
attggtccactcatactctgctgta

SEQ ID NO: 2775222 - DNA, 25 bp, Homo sapien
catctgtagataacactgaagccac

SEQ ID NO: 2775223 - DNA, 25 bp, Homo sapien
tggaatctgccagggagtagccgct

SEQ ID NO: 2775224 - DNA, 25 bp, Homo sapien
cataatggcccaaacatgtgacaca

SEQ ID NO: 2775225 - DNA, 25 bp, Homo sapien
gcttttaggagcacaaggcagccag

SEQ ID NO: 2775226 - DNA, 25 bp, Homo sapien
aagggcagttagcaaagtcagtttt

SEQ ID NO: 2775227 - DNA, 25 bp, Homo sapien
ttcctgaagggttaagagtcatgaa

SEQ ID NO: 2775228 - DNA, 25 bp, Homo sapien
tcctgaagggttaagagtcatgaag

SEQ ID NO: 2775229 - DNA, 25 bp, Homo sapien
gaagggcagttagcaaagtcagttt

SEQ ID NO: 2775230 - DNA, 25 bp, Homo sapien
tgatcctaaattcctaaaatgcctt

SEQ ID NO: 2775231 - DNA, 25 bp, Homo sapien
cattgaactgagtcttagatcttct

SEQ ID NO: 2775232 - DNA, 25 bp, Homo sapien
gatcttcttcgggctgtgcatgcat

SEQ ID NO: 2775233 - DNA, 25 bp, Homo sapien
gtttttgtgctttctgacattgaac

SEQ ID NO: 2775234 - DNA, 25 bp, Homo sapien
tgactcagaacgaaccacgtctttt

SEQ ID NO: 2775235 - DNA, 25 bp, Homo sapien
ttccttagtacactcagagtcacac

SEQ ID NO: 2775236 - DNA, 25 bp, Homo sapien
gaactttgactcagaacgaaccacg

SEQ ID NO: 2775237 - DNA, 25 bp, Homo sapien
tggtctggaactttgactcagaacg

SEQ ID NO: 2775238 - DNA, 25 bp, Homo sapien
tatccgggagattagacagtgtttg

SEQ ID NO: 2775239 - DNA, 25 bp, Homo sapien
gattagacagtgtttgtttatctgc

SEQ ID NO: 2775240 - DNA, 25 bp, Homo sapien
gatactcgttatccgggagattaga

SEQ ID NO: 2775241 - DNA, 25 bp, Homo sapien
ctttctccagatactcgttatccgg

SEQ ID NO: 2775242 - DNA, 25 bp, Homo sapien
ctgcagaggttaacttaagcatctt

SEQ ID NO: 2775243 - DNA, 25 bp, Homo sapien
taacttaagcatcttcacaagcaag

SEQ ID NO: 2775244 - DNA, 25 bp, Homo sapien
ggttaacttaagcatcttcacaagc

SEQ ID NO: 2775245 - DNA, 25 bp, Homo sapien
taagcatcttcacaagcaagtttat

SEQ ID NO: 2775246 - DNA, 25 bp, Homo sapien
caatgcccgttaaacatgtgtgaag

SEQ ID NO: 2775247 - DNA, 25 bp, Homo sapien
tcacccaatggttacatcaatgccc

SEQ ID NO: 2775248 - DNA, 25 bp, Homo sapien
tgacagatttgggttgtcgtccttt

SEQ ID NO: 2775249 - DNA, 25 bp, Homo sapien
tctgtgacagatttgggttgtcgtc

SEQ ID NO: 2775250 - DNA, 25 bp, Homo sapien
gtttcattttgcgagcatgagcttc

SEQ ID NO: 2775251 - DNA, 25 bp, Homo sapien
cttgttgagagaaactgagtttatc

SEQ ID NO: 2775252 - DNA, 25 bp, Homo sapien
ttgtttcattttgcgagcatgagct

SEQ ID NO: 2775253 - DNA, 25 bp, Homo sapien
ggattgtttcattttgcgagcatga

SEQ ID NO: 2775254 - DNA, 25 bp, Homo sapien
gattgtccctgctaattccatatga

SEQ ID NO: 2775255 - DNA, 25 bp, Homo sapien
gaactcttagaactccccctgtgaa

SEQ ID NO: 2775256 - DNA, 25 bp, Homo sapien
ttccatatgaagtaagagtgccaaa

SEQ ID NO: 2775257 - DNA, 25 bp, Homo sapien
cacactgagttaaaatattgctaca

SEQ ID NO: 2775258 - DNA, 25 bp, Homo sapien
ctggacttggcggtttaatctctcc

SEQ ID NO: 2775259 - DNA, 25 bp, Homo sapien
ggacttggcggtttaatctctccat

SEQ ID NO: 2775260 - DNA, 25 bp, Homo sapien
acttggcggtttaatctctccatca

SEQ ID NO: 2775261 - DNA, 25 bp, Homo sapien
gttctggacttggcggtttaatctc

SEQ ID NO: 2775262 - DNA, 25 bp, Homo sapien
aaagccaaggtcaaatgggataagc

SEQ ID NO: 2775263 - DNA, 25 bp, Homo sapien
ccaaggtcaaatgggataagcagtt

SEQ ID NO: 2775264 - DNA, 25 bp, Homo sapien
gtcaaatgggataagcagttgaact

SEQ ID NO: 2775265 - DNA, 25 bp, Homo sapien
ggtcaaatgggataagcagttgaac

SEQ ID NO: 2775266 - DNA, 25 bp, Homo sapien
ggtttggatatactttctttctgga

SEQ ID NO: 2775267 - DNA, 25 bp, Homo sapien
ctggcctgtggtctagagggcagaa

SEQ ID NO: 2775268 - DNA, 25 bp, Homo sapien
gtctctggcctgtggtctagagggc

SEQ ID NO: 2775269 - DNA, 25 bp, Homo sapien
tctctggcctgtggtctagagggca

SEQ ID NO: 2775270 - DNA, 25 bp, Homo sapien
ccagggtcacagttggtctctcttt

SEQ ID NO: 2775271 - DNA, 25 bp, Homo sapien
ctcagagttgcagcgccacaaaatt

SEQ ID NO: 2775272 - DNA, 25 bp, Homo sapien
gctcagagttgcagcgccacaaaat

SEQ ID NO: 2775273 - DNA, 25 bp, Homo sapien
agctcagagttgcagcgccacaaaa

SEQ ID NO: 2775274 - DNA, 25 bp, Homo sapien
tcactcttgatgcatcaaggccttg

SEQ ID NO: 2775275 - DNA, 25 bp, Homo sapien
ggtacttatatccaggactatgaag

SEQ ID NO: 2775276 - DNA, 25 bp, Homo sapien
tgtaggtacttatatccaggactat

SEQ ID NO: 2775277 - DNA, 25 bp, Homo sapien
caaggccttgttaatttcatgtagg

SEQ ID NO: 2775278 - DNA, 25 bp, Homo sapien
attctgtcttaattgatatccccag

SEQ ID NO: 2775279 - DNA, 25 bp, Homo sapien
ttgatatccccagtgtgtttttata

SEQ ID NO: 2775280 - DNA, 25 bp, Homo sapien
ttctgtcttaattgatatccccagt

SEQ ID NO: 2775281 - DNA, 25 bp, Homo sapien
aattctgtcttaattgatatcccca

SEQ ID NO: 2775282 - DNA, 25 bp, Homo sapien
tatgttgacttgtcttcaaatgcac

SEQ ID NO: 2775283 - DNA, 25 bp, Homo sapien
tgtcttcaaatgcactaatccagtg

SEQ ID NO: 2775284 - DNA, 25 bp, Homo sapien
ttcgagtctgcacttgatacggttt

SEQ ID NO: 2775285 - DNA, 25 bp, Homo sapien
taatccagtgttctgttgcttcgag

SEQ ID NO: 2775286 - DNA, 25 bp, Homo sapien
atctttctcctatcatgtctggttt

SEQ ID NO: 2775287 - DNA, 25 bp, Homo sapien
ctatggttcgttctccggtttggca

SEQ ID NO: 2775288 - DNA, 25 bp, Homo sapien
ttagagtcccagtaagaaccactca

SEQ ID NO: 2775289 - DNA, 25 bp, Homo sapien
tcaattagagtcccagtaagaacca

SEQ ID NO: 2775290 - DNA, 25 bp, Homo sapien
aattagagtcccagtaagaaccact

SEQ ID NO: 2775291 - DNA, 25 bp, Homo sapien
tagagtcccagtaagaaccactcac

SEQ ID NO: 2775292 - DNA, 25 bp, Homo sapien
cataatccctagagcccttttcttg

SEQ ID NO: 2775293 - DNA, 25 bp, Homo sapien
cttccagagttcctggccataatcc

SEQ ID NO: 2775294 - DNA, 25 bp, Homo sapien
ccagtaagtgtttggattctcttga

SEQ ID NO: 2775295 - DNA, 25 bp, Homo sapien
tgcttgaccttgaggctctctgaag

SEQ ID NO: 2775296 - DNA, 25 bp, Homo sapien
aattcttgtgcaaagaccatgcaac

SEQ ID NO: 2775297 - DNA, 25 bp, Homo sapien
gaccatgcaactctttttctgtatc

SEQ ID NO: 2775298 - DNA, 25 bp, Homo sapien
tgtgtgtaattcttgtgcaaagacc

SEQ ID NO: 2775299 - DNA, 25 bp, Homo sapien
acatatggggtgcttcttgaatttg

SEQ ID NO: 2775300 - DNA, 25 bp, Homo sapien
tgagattggaatgctgaaacagtac

SEQ ID NO: 2775301 - DNA, 25 bp, Homo sapien
ttggaatgctgaaacagtactatgg

SEQ ID NO: 2775302 - DNA, 25 bp, Homo sapien
gaaacagtactatggaagagagcca

SEQ ID NO: 2775303 - DNA, 25 bp, Homo sapien
cttggctaattgagattggaatgct

SEQ ID NO: 2775304 - DNA, 25 bp, Homo sapien
aaagtaatgaaactgtcaacatggt

SEQ ID NO: 2775305 - DNA, 25 bp, Homo sapien
tctatgaactggcaaatgtagcaca

SEQ ID NO: 2775306 - DNA, 25 bp, Homo sapien
gtttcttgtaagtttattatgcgtc

SEQ ID NO: 2775307 - DNA, 25 bp, Homo sapien
tctaatattcaccttcagagttcct

SEQ ID NO: 2775308 - DNA, 25 bp, Homo sapien
tctgattcaatccttgcttttcctt

SEQ ID NO: 2775309 - DNA, 25 bp, Homo sapien
cttctgattcaatccttgcttttcc

SEQ ID NO: 2775310 - DNA, 25 bp, Homo sapien
ttcaatccttgcttttccttgtgtc

SEQ ID NO: 2775311 - DNA, 25 bp, Homo sapien
caatccttgcttttccttgtgtcat

SEQ ID NO: 2775312 - DNA, 25 bp, Homo sapien
cttgtattcattggttggtaaggtt

SEQ ID NO: 2775313 - DNA, 25 bp, Homo sapien
tcattggttggtaaggtttggaata

SEQ ID NO: 2775314 - DNA, 25 bp, Homo sapien
caatttttggcttgctattagtcta

SEQ ID NO: 2775315 - DNA, 25 bp, Homo sapien
caaactgtgagagggccttggccat

SEQ ID NO: 2775316 - DNA, 25 bp, Homo sapien
agaatttccaaactgtgagagggcc

SEQ ID NO: 2775317 - DNA, 25 bp, Homo sapien
tattagtctaaggacactggtgtca

SEQ ID NO: 2775318 - DNA, 25 bp, Homo sapien
agctttcagcaagcaagcatctatc

SEQ ID NO: 2775319 - DNA, 25 bp, Homo sapien
agcaagcaagcatctatctggaagc

SEQ ID NO: 2775320 - DNA, 25 bp, Homo sapien
tcagctttcagcaagcaagcatcta

SEQ ID NO: 2775321 - DNA, 25 bp, Homo sapien
cagctttcagcaagcaagcatctat

SEQ ID NO: 2775322 - DNA, 25 bp, Homo sapien
ccgaggaggactcattagaaatata

SEQ ID NO: 2775323 - DNA, 25 bp, Homo sapien
gctgataaccgaggaggactcatta

SEQ ID NO: 2775324 - DNA, 25 bp, Homo sapien
ggaaagctgataaccgaggaggact

SEQ ID NO: 2775325 - DNA, 25 bp, Homo sapien
gataaccgaggaggactcattagaa

SEQ ID NO: 2775326 - DNA, 25 bp, Homo sapien
atctttttcgaatctcttaatagtg

SEQ ID NO: 2775327 - DNA, 25 bp, Homo sapien
gggaacagagctcaacaacagcttc

SEQ ID NO: 2775328 - DNA, 25 bp, Homo sapien
tccaaatctttttcgaatctcttaa

SEQ ID NO: 2775329 - DNA, 25 bp, Homo sapien
ctgggaacagagctcaacaacagct

SEQ ID NO: 2775330 - DNA, 25 bp, Homo sapien
cacatgagatgatgtcaacactagc

SEQ ID NO: 2775331 - DNA, 25 bp, Homo sapien
gaataggcttatgaccttggtaaac

SEQ ID NO: 2775332 - DNA, 25 bp, Homo sapien
tcaacactagcatgaccaatatatc

SEQ ID NO: 2775333 - DNA, 25 bp, Homo sapien
ccaatatatcattgtagaataggct

SEQ ID NO: 2775334 - DNA, 25 bp, Homo sapien
agaatgagactctgagatagattta

SEQ ID NO: 2775335 - DNA, 25 bp, Homo sapien
atgagactctgagatagatttaggg

SEQ ID NO: 2775336 - DNA, 25 bp, Homo sapien
tcacaggtcagtattcccagaatga

SEQ ID NO: 2775337 - DNA, 25 bp, Homo sapien
caggtcagtattcccagaatgagac

SEQ ID NO: 2775338 - DNA, 25 bp, Homo sapien
ggtgacatgtgagactgagcttctg

SEQ ID NO: 2775339 - DNA, 25 bp, Homo sapien
actgtgcagtaagaacgaggcattg

SEQ ID NO: 2775340 - DNA, 25 bp, Homo sapien
taaggtgattgcataggattttcca

SEQ ID NO: 2775341 - DNA, 25 bp, Homo sapien
cttggtcctggatgtattattttca

SEQ ID NO: 2775342 - DNA, 25 bp, Homo sapien
cggccatgtgacaggtcctcttctt

SEQ ID NO: 2775343 - DNA, 25 bp, Homo sapien
ttaaaaagctgtccctcatctacgt

SEQ ID NO: 2775344 - DNA, 25 bp, Homo sapien
aatttaatcagatctttaaatgcac

SEQ ID NO: 2775345 - DNA, 25 bp, Homo sapien
tctcagagctgcatggcaacggcca

SEQ ID NO: 2775346 - DNA, 25 bp, Homo sapien
cagagatgatggcaagagtagcagc

SEQ ID NO: 2775347 - DNA, 25 bp, Homo sapien
ccttgcatggagtggtgaaacctgt

SEQ ID NO: 2775348 - DNA, 25 bp, Homo sapien
ggcaagagtagcagccttgcatgga

SEQ ID NO: 2775349 - DNA, 25 bp, Homo sapien
cagccttgcatggagtggtgaaacc

SEQ ID NO: 2775350 - DNA, 25 bp, Homo sapien
aatggagttcattgtgggtcatctt

SEQ ID NO: 2775351 - DNA, 25 bp, Homo sapien
actggaatggagttcattgtgggtc

SEQ ID NO: 2775352 - DNA, 25 bp, Homo sapien
agaagaagagcatcactggaatgga

SEQ ID NO: 2775353 - DNA, 25 bp, Homo sapien
tggaatggagttcattgtgggtcat

SEQ ID NO: 2775354 - DNA, 25 bp, Homo sapien
gaagccaccttcaatggaattaatt

SEQ ID NO: 2775355 - DNA, 25 bp, Homo sapien
gccactagacctggcaaaatatccc

SEQ ID NO: 2775356 - DNA, 25 bp, Homo sapien
gaataaaattgctcttctgaagcca

SEQ ID NO: 2775357 - DNA, 25 bp, Homo sapien
tttgcagagtagatgattcacgacg

SEQ ID NO: 2775358 - DNA, 25 bp, Homo sapien
cagtgagcctagctatatccagggc

SEQ ID NO: 2775359 - DNA, 25 bp, Homo sapien
catgtcactgaagattggtcaatca

SEQ ID NO: 2775360 - DNA, 25 bp, Homo sapien
tccagggccctactcttggcttaaa

SEQ ID NO: 2775361 - DNA, 25 bp, Homo sapien
ggtgtactcttcttcactagttgcg

SEQ ID NO: 2775362 - DNA, 25 bp, Homo sapien
gatgtggacagcctctttaccgcca

SEQ ID NO: 2775363 - DNA, 25 bp, Homo sapien
taagtcaactgatagcacacgggca

SEQ ID NO: 2775364 - DNA, 25 bp, Homo sapien
gggaccatactcctacagaggcaga

SEQ ID NO: 2775365 - DNA, 25 bp, Homo sapien
gcccctgggagagttgcgcttcata

SEQ ID NO: 2775366 - DNA, 25 bp, Homo sapien
tgctgccagttaaatgatgcatagg

SEQ ID NO: 2775367 - DNA, 25 bp, Homo sapien
gatgcataggtattgtatccatttt

SEQ ID NO: 2775368 - DNA, 25 bp, Homo sapien
catttgcctcccattatgctgccag

SEQ ID NO: 2775369 - DNA, 25 bp, Homo sapien
cctctccttcagcttacagtcattg

SEQ ID NO: 2775370 - DNA, 25 bp, Homo sapien
ccgatttctactgatgttatctcca

SEQ ID NO: 2775371 - DNA, 25 bp, Homo sapien
gcaacaactccgatttctactgatg

SEQ ID NO: 2775372 - DNA, 25 bp, Homo sapien
taatggctttgacggcaacaactcc

SEQ ID NO: 2775373 - DNA, 25 bp, Homo sapien
catggctaagtaatagttgctgtta

SEQ ID NO: 2775374 - DNA, 25 bp, Homo sapien
gagtcatttgctgtgacccaagata

SEQ ID NO: 2775375 - DNA, 25 bp, Homo sapien
ttgagtcatttgctgtgacccaaga

SEQ ID NO: 2775376 - DNA, 25 bp, Homo sapien
tcatttgctgtgacccaagataact

SEQ ID NO: 2775377 - DNA, 25 bp, Homo sapien
tttgctgtgacccaagataactgac

SEQ ID NO: 2775378 - DNA, 25 bp, Homo sapien
ctgatgctgtactaccagcaccggg

SEQ ID NO: 2775379 - DNA, 25 bp, Homo sapien
gatgctgtactaccagcaccgggat

SEQ ID NO: 2775380 - DNA, 25 bp, Homo sapien
tgatgctgtactaccagcaccggga

SEQ ID NO: 2775381 - DNA, 25 bp, Homo sapien
gtcttgaaactttgttatgccccat

SEQ ID NO: 2775382 - DNA, 25 bp, Homo sapien
ttccaggcaagcatcagttacttgt

SEQ ID NO: 2775383 - DNA, 25 bp, Homo sapien
acttgtcttgaaactttgttatgcc

SEQ ID NO: 2775384 - DNA, 25 bp, Homo sapien
aagcatcagttacttgtcttgaaac

SEQ ID NO: 2775385 - DNA, 25 bp, Homo sapien
tctacattgaaagatgcggcacaga

SEQ ID NO: 2775386 - DNA, 25 bp, Homo sapien
ggttgacaaaagcatccgtccagca

SEQ ID NO: 2775387 - DNA, 25 bp, Homo sapien
gagtccctgcagtgaccggaggtct

SEQ ID NO: 2775388 - DNA, 25 bp, Homo sapien
tgaagctctgtgtagacctcctggt

SEQ ID NO: 2775389 - DNA, 25 bp, Homo sapien
tttacatctcaggttctaaatgttg

SEQ ID NO: 2775390 - DNA, 25 bp, Homo sapien
tctcaggttctaaatgttgtacaaa

SEQ ID NO: 2775391 - DNA, 25 bp, Homo sapien
tgttgtacaaatatgaccagaatag

SEQ ID NO: 2775392 - DNA, 25 bp, Homo sapien
ttgtacaaatatgaccagaatagtt

SEQ ID NO: 2775393 - DNA, 25 bp, Homo sapien
tctggtatagcaagacaattttcct

SEQ ID NO: 2775394 - DNA, 25 bp, Homo sapien
tgaccacttgccactactaagccaa

SEQ ID NO: 2775395 - DNA, 25 bp, Homo sapien
gaggcccatactgagaaatttccac

SEQ ID NO: 2775396 - DNA, 25 bp, Homo sapien
ttattatctcagacaaaggactggc

SEQ ID NO: 2775397 - DNA, 25 bp, Homo sapien
aatgtaataatcttggaggagattt

SEQ ID NO: 2775398 - DNA, 25 bp, Homo sapien
gggaactgttatggttgctcagcac

SEQ ID NO: 2775399 - DNA, 25 bp, Homo sapien
gaggagatttaacacccattatctg

SEQ ID NO: 2775400 - DNA, 25 bp, Homo sapien
ttatctgaagacctaaaacctctag

SEQ ID NO: 2775401 - DNA, 25 bp, Homo sapien
ttagtcaaagagttgcttgtacaca

SEQ ID NO: 2775402 - DNA, 25 bp, Homo sapien
gagttgcttgtacacaatgcaaaag

SEQ ID NO: 2775403 - DNA, 25 bp, Homo sapien
caaagagttgcttgtacacaatgca

SEQ ID NO: 2775404 - DNA, 25 bp, Homo sapien
gtcaaagagttgcttgtacacaatg

SEQ ID NO: 2775405 - DNA, 25 bp, Homo sapien
atcttcagagacactaattttgttc

SEQ ID NO: 2775406 - DNA, 25 bp, Homo sapien
tcttcagagacactaattttgttca

SEQ ID NO: 2775407 - DNA, 25 bp, Homo sapien
cttcagagacactaattttgttcat

SEQ ID NO: 2775408 - DNA, 25 bp, Homo sapien
aaatcttcagagacactaattttgt

SEQ ID NO: 2775409 - DNA, 25 bp, Homo sapien
tactgagaggtaataggcacatgag

SEQ ID NO: 2775410 - DNA, 25 bp, Homo sapien
taaccatcatgatagccttgagtga

SEQ ID NO: 2775411 - DNA, 25 bp, Homo sapien
ccttgagtgaggtacaattagtatc

SEQ ID NO: 2775412 - DNA, 25 bp, Homo sapien
ttttcacttaaaaggccatcaggac

SEQ ID NO: 2775413 - DNA, 25 bp, Homo sapien
tattcttcagtgctgaaatcttgac

SEQ ID NO: 2775414 - DNA, 25 bp, Homo sapien
cagcagcaactctcaaggttattct

SEQ ID NO: 2775415 - DNA, 25 bp, Homo sapien
tatatgataagagttgccttgcagc

SEQ ID NO: 2775416 - DNA, 25 bp, Homo sapien
tgatgacaatcagagggtttgctag

SEQ ID NO: 2775417 - DNA, 25 bp, Homo sapien
ttcaggcagtttggcatcaagacaa

SEQ ID NO: 2775418 - DNA, 25 bp, Homo sapien
ggaactgaagccatactacctgggt

SEQ ID NO: 2775419 - DNA, 25 bp, Homo sapien
gactagttgcatcttatcaaagggc

SEQ ID NO: 2775420 - DNA, 25 bp, Homo sapien
ggagccagacttttttaactgcagg

SEQ ID NO: 2775421 - DNA, 25 bp, Homo sapien
tctttttctgattatctaaaccaag

SEQ ID NO: 2775422 - DNA, 25 bp, Homo sapien
agaaaaagaagtttagcatactttg

SEQ ID NO: 2775423 - DNA, 25 bp, Homo sapien
tttccagaaaaagaagtttagcata

SEQ ID NO: 2775424 - DNA, 25 bp, Homo sapien
ttctgattatctaaaccaagtaaat

SEQ ID NO: 2775425 - DNA, 25 bp, Homo sapien
gcagaatgatgatctagtaatggga

SEQ ID NO: 2775426 - DNA, 25 bp, Homo sapien
gcaggaagagttattgggagcaaaa

SEQ ID NO: 2775427 - DNA, 25 bp, Homo sapien
atgggataatcagcactctgaaggg

SEQ ID NO: 2775428 - DNA, 25 bp, Homo sapien
aaatggcaaagtagctagtaagtgt

SEQ ID NO: 2775429 - DNA, 25 bp, Homo sapien
gaatcgaaatgagaagacggtcctg

SEQ ID NO: 2775430 - DNA, 25 bp, Homo sapien
gaaggaattcactgcagaatcgaaa

SEQ ID NO: 2775431 - DNA, 25 bp, Homo sapien
aaaagaaattgacctggaatgctgg

SEQ ID NO: 2775432 - DNA, 25 bp, Homo sapien
gacggtcctgatggagtatattgaa

SEQ ID NO: 2775433 - DNA, 25 bp, Homo sapien
agcatgttaacacaaggtccttgaa

SEQ ID NO: 2775434 - DNA, 25 bp, Homo sapien
tattagggatttacaatggctcaga

SEQ ID NO: 2775435 - DNA, 25 bp, Homo sapien
tcaagttgtcctcaacacaggagca

SEQ ID NO: 2775436 - DNA, 25 bp, Homo sapien
tcagaagcagggttgtcacagacta

SEQ ID NO: 2775437 - DNA, 25 bp, Homo sapien
taattggatgcacgtgttagcggca

SEQ ID NO: 2775438 - DNA, 25 bp, Homo sapien
cactagtggctttccaagatgcagg

SEQ ID NO: 2775439 - DNA, 25 bp, Homo sapien
tcagtatcagagtgtcactagtggc

SEQ ID NO: 2775440 - DNA, 25 bp, Homo sapien
tattgtgccaattagaacacagcgt

SEQ ID NO: 2775441 - DNA, 25 bp, Homo sapien
actgagaagaaagagtgccgattac

SEQ ID NO: 2775442 - DNA, 25 bp, Homo sapien
cacagataaaggtaacatgcactga

SEQ ID NO: 2775443 - DNA, 25 bp, Homo sapien
agagtgccgattacaaaataatgtt

SEQ ID NO: 2775444 - DNA, 25 bp, Homo sapien
agaagaaagagtgccgattacaaaa

SEQ ID NO: 2775445 - DNA, 25 bp, Homo sapien
caatgctcgtgattaaatgctgccg

SEQ ID NO: 2775446 - DNA, 25 bp, Homo sapien
caatacgggcatctgattcctgaca

SEQ ID NO: 2775447 - DNA, 25 bp, Homo sapien
ggccacctgcaatgacacgtttaat

SEQ ID NO: 2775448 - DNA, 25 bp, Homo sapien
tgaattctcatgctccaatacgggc

SEQ ID NO: 2775449 - DNA, 25 bp, Homo sapien
aggagagatacaaccaataggctgg

SEQ ID NO: 2775450 - DNA, 25 bp, Homo sapien
gagataaagcctatactacatactc

SEQ ID NO: 2775451 - DNA, 25 bp, Homo sapien
tgatagttgtaggactattatgact

SEQ ID NO: 2775452 - DNA, 25 bp, Homo sapien
ctggttctgcccatgtctagttgaa

SEQ ID NO: 2775453 - DNA, 25 bp, Homo sapien
cctttttggaatatctattcttaat

SEQ ID NO: 2775454 - DNA, 25 bp, Homo sapien
ttaattgtctcaagtttagggtaca

SEQ ID NO: 2775455 - DNA, 25 bp, Homo sapien
tttggaatatctattcttaattgtc

SEQ ID NO: 2775456 - DNA, 25 bp, Homo sapien
aggcccaggagccttttttgtgagt

SEQ ID NO: 2775457 - DNA, 25 bp, Homo sapien
agttctccttcttggtcccgctgac

SEQ ID NO: 2775458 - DNA, 25 bp, Homo sapien
tccttgaaggtgattgtagctccgc

SEQ ID NO: 2775459 - DNA, 25 bp, Homo sapien
ctcaatcttgagaaagtacttggtg

SEQ ID NO: 2775460 - DNA, 25 bp, Homo sapien
gagaatagctttctccagcggacat

SEQ ID NO: 2775461 - DNA, 25 bp, Homo sapien
agaagagttggtggcctctggtgac

SEQ ID NO: 2775462 - DNA, 25 bp, Homo sapien
gaagaagagttggtggcctctggtg

SEQ ID NO: 2775463 - DNA, 25 bp, Homo sapien
aggaagaagagttggtggcctctgg

SEQ ID NO: 2775464 - DNA, 25 bp, Homo sapien
aagagttggtggcctctggtgacac

SEQ ID NO: 2775465 - DNA, 25 bp, Homo sapien
ggctgaggcacaatgtgtcagtatc

SEQ ID NO: 2775466 - DNA, 25 bp, Homo sapien
caggtgacagggacggaagacacca

SEQ ID NO: 2775467 - DNA, 25 bp, Homo sapien
tgaggcacaatgtgtcagtatccat

SEQ ID NO: 2775468 - DNA, 25 bp, Homo sapien
acggaagacaccaagaacagcaaca

SEQ ID NO: 2775469 - DNA, 25 bp, Homo sapien
tactgaaactctcggcactggaaat

SEQ ID NO: 2775470 - DNA, 25 bp, Homo sapien
tgaaactctcggcactggaaattgt

SEQ ID NO: 2775471 - DNA, 25 bp, Homo sapien
ctctcggcactggaaattgtctcat

SEQ ID NO: 2775472 - DNA, 25 bp, Homo sapien
tgtactgaaactctcggcactggaa

SEQ ID NO: 2775473 - DNA, 25 bp, Homo sapien
tggtggctgctggttagctccctct

SEQ ID NO: 2775474 - DNA, 25 bp, Homo sapien
tggctgctggttagctccctctggg

SEQ ID NO: 2775475 - DNA, 25 bp, Homo sapien
tggttagctccctctgggcgcggat

SEQ ID NO: 2775476 - DNA, 25 bp, Homo sapien
tgctggttagctccctctgggcgcg

SEQ ID NO: 2775477 - DNA, 25 bp, Homo sapien
tccataactcctcggaaaagccggc

SEQ ID NO: 2775478 - DNA, 25 bp, Homo sapien
agcctcccggtaaatggtggacgtg

SEQ ID NO: 2775479 - DNA, 25 bp, Homo sapien
ggatccgctgcctacgcctctggag

SEQ ID NO: 2775480 - DNA, 25 bp, Homo sapien
gctcctttctcggatccgctgccta

SEQ ID NO: 2775481 - DNA, 25 bp, Homo sapien
tcctttcttcaccatgttagatgcc

SEQ ID NO: 2775482 - DNA, 25 bp, Homo sapien
tcttcaccatgttagatgccaaaaa

SEQ ID NO: 2775483 - DNA, 25 bp, Homo sapien
ttcttcaccatgttagatgccaaaa

SEQ ID NO: 2775484 - DNA, 25 bp, Homo sapien
ctttcttcaccatgttagatgccaa

SEQ ID NO: 2775485 - DNA, 25 bp, Homo sapien
cctgccgatttgaaggctgccgaaa

SEQ ID NO: 2775486 - DNA, 25 bp, Homo sapien
agagagcgcgatgcctttgcaccga

SEQ ID NO: 2775487 - DNA, 25 bp, Homo sapien
gaaagtccgcttgtaaacaggttga

SEQ ID NO: 2775488 - DNA, 25 bp, Homo sapien
ggacatctgaaaccctaggctgctg

SEQ ID NO: 2775489 - DNA, 25 bp, Homo sapien
tagcccgagaaagcctgagaaaagt

SEQ ID NO: 2775490 - DNA, 25 bp, Homo sapien
cacctcttaggttagcccgagaaag

SEQ ID NO: 2775491 - DNA, 25 bp, Homo sapien
ttaggttagcccgagaaagcctgag

SEQ ID NO: 2775492 - DNA, 25 bp, Homo sapien
ggtcacctcttaggttagcccgaga

SEQ ID NO: 2775493 - DNA, 25 bp, Homo sapien
taggcctctgctttttatgtctttt

SEQ ID NO: 2775494 - DNA, 25 bp, Homo sapien
tttaggcctctgctttttatgtctt

SEQ ID NO: 2775495 - DNA, 25 bp, Homo sapien
ttaggcctctgctttttatgtcttt

SEQ ID NO: 2775496 - DNA, 25 bp, Homo sapien
ctttaggcctctgctttttatgtct

SEQ ID NO: 2775497 - DNA, 25 bp, Homo sapien
ttggtttgacagaacatttggacac

SEQ ID NO: 2775498 - DNA, 25 bp, Homo sapien
ggtttgacagaacatttggacacat

SEQ ID NO: 2775499 - DNA, 25 bp, Homo sapien
ttctttggtttgacagaacatttgg

SEQ ID NO: 2775500 - DNA, 25 bp, Homo sapien
ctttggtttgacagaacatttggac

SEQ ID NO: 2775501 - DNA, 25 bp, Homo sapien
gacaactatccccatactgagtggc

SEQ ID NO: 2775502 - DNA, 25 bp, Homo sapien
caggtagctactctggcatggcaat

SEQ ID NO: 2775503 - DNA, 25 bp, Homo sapien
cacttcttatatggaggttagcctc

SEQ ID NO: 2775504 - DNA, 25 bp, Homo sapien
cagagactgcaagaccttttgtagc

SEQ ID NO: 2775505 - DNA, 25 bp, Homo sapien
ccagacttgtaagtcctcccacagc

SEQ ID NO: 2775506 - DNA, 25 bp, Homo sapien
tctggtagtctggaccacacagctc

SEQ ID NO: 2775507 - DNA, 25 bp, Homo sapien
ccccagacttgtaagtcctcccaca

SEQ ID NO: 2775508 - DNA, 25 bp, Homo sapien
ttctctggtagtctggaccacacag

SEQ ID NO: 2775509 - DNA, 25 bp, Homo sapien
tttttgtcagttgtcccaggatccc

SEQ ID NO: 2775510 - DNA, 25 bp, Homo sapien
ggctttttgtcagttgtcccaggat

SEQ ID NO: 2775511 - DNA, 25 bp, Homo sapien
ggctggctttttgtcagttgtccca

SEQ ID NO: 2775512 - DNA, 25 bp, Homo sapien
ctttcttggctggctttttgtcagt

SEQ ID NO: 2775513 - DNA, 25 bp, Homo sapien
cctgtcaacgtatgccagatgtgtt

SEQ ID NO: 2775514 - DNA, 25 bp, Homo sapien
tactgagtaatactttcagaggcaa

SEQ ID NO: 2775515 - DNA, 25 bp, Homo sapien
aatactttcagaggcaaacaccagg

SEQ ID NO: 2775516 - DNA, 25 bp, Homo sapien
gggagtcactccgaatcctgtcaac

SEQ ID NO: 2775517 - DNA, 25 bp, Homo sapien
tgtgatcctgtttcatatctgcccc

SEQ ID NO: 2775518 - DNA, 25 bp, Homo sapien
gagctaatatccgagtttactttat

SEQ ID NO: 2775519 - DNA, 25 bp, Homo sapien
agaggtgcaaggtcattaacaaata

SEQ ID NO: 2775520 - DNA, 25 bp, Homo sapien
gagccttcaaacttgagctaatatc

SEQ ID NO: 2775521 - DNA, 25 bp, Homo sapien
tctttgtgatgctaggtggcactac

SEQ ID NO: 2775522 - DNA, 25 bp, Homo sapien
caagacttggtatttcatagctggc

SEQ ID NO: 2775523 - DNA, 25 bp, Homo sapien
aaaaccggtagcatatcagtcagca

SEQ ID NO: 2775524 - DNA, 25 bp, Homo sapien
gaattgtcctaaacgttcagagtaa

SEQ ID NO: 2775525 - DNA, 25 bp, Homo sapien
cttcaatgtccagtaagcagttgct

SEQ ID NO: 2775526 - DNA, 25 bp, Homo sapien
tttttggcagctggccataaagctt

SEQ ID NO: 2775527 - DNA, 25 bp, Homo sapien
agcttcaatgtccagtaagcagttg

SEQ ID NO: 2775528 - DNA, 25 bp, Homo sapien
agctggccataaagcttcaatgtcc

SEQ ID NO: 2775529 - DNA, 25 bp, Homo sapien
ttggctttcacaggccagtactttt

SEQ ID NO: 2775530 - DNA, 25 bp, Homo sapien
cgagaatctcctcaatctggctctt

SEQ ID NO: 2775531 - DNA, 25 bp, Homo sapien
ttgatttggctttcacaggccagta

SEQ ID NO: 2775532 - DNA, 25 bp, Homo sapien
caatctggctctttgatttggcttt

SEQ ID NO: 2775533 - DNA, 25 bp, Homo sapien
ttaatttcaatgaagccttcaaaca

SEQ ID NO: 2775534 - DNA, 25 bp, Homo sapien
gctatagcatgttttgaaaggtcca

SEQ ID NO: 2775535 - DNA, 25 bp, Homo sapien
tttcattctgcttcaagtgcctttc

SEQ ID NO: 2775536 - DNA, 25 bp, Homo sapien
tgctattggaccttttgcaggacaa

SEQ ID NO: 2775537 - DNA, 25 bp, Homo sapien
aggacaactctggactgctatagca

SEQ ID NO: 2775538 - DNA, 25 bp, Homo sapien
cctgtcgcaggtgttctctggatgg

SEQ ID NO: 2775539 - DNA, 25 bp, Homo sapien
tgttctctggatgggtctgccttca

SEQ ID NO: 2775540 - DNA, 25 bp, Homo sapien
tcgcaggtgttctctggatgggtct

SEQ ID NO: 2775541 - DNA, 25 bp, Homo sapien
ttctcagcctgtcgcaggtgttctc

SEQ ID NO: 2775542 - DNA, 25 bp, Homo sapien
caagcagaaagtttatccctggaag

SEQ ID NO: 2775543 - DNA, 25 bp, Homo sapien
tacttgcttaatgactccctgtctg

SEQ ID NO: 2775544 - DNA, 25 bp, Homo sapien
cacagttacttgcttaatgactccc

SEQ ID NO: 2775545 - DNA, 25 bp, Homo sapien
cagttacttgcttaatgactccctg

SEQ ID NO: 2775546 - DNA, 25 bp, Homo sapien
cctccagcatatgagggagatattc

SEQ ID NO: 2775547 - DNA, 25 bp, Homo sapien
aggatcccagtctccaaaggcctga

SEQ ID NO: 2775548 - DNA, 25 bp, Homo sapien
tctggtccaagtaagcttcctgctg

SEQ ID NO: 2775549 - DNA, 25 bp, Homo sapien
caccaaacccttgctcaggtctagg

SEQ ID NO: 2775550 - DNA, 25 bp, Homo sapien
ttggcccgaacctttctcttgcttc

SEQ ID NO: 2775551 - DNA, 25 bp, Homo sapien
ctcttttctcatcgctaacatgact

SEQ ID NO: 2775552 - DNA, 25 bp, Homo sapien
cgctaacatgacttgtaaaagtaac

SEQ ID NO: 2775553 - DNA, 25 bp, Homo sapien
tctcatcgctaacatgacttgtaaa

SEQ ID NO: 2775554 - DNA, 25 bp, Homo sapien
ctgcggtcctgtctttgagccttct

SEQ ID NO: 2775555 - DNA, 25 bp, Homo sapien
ttaaaggtgattcttggatgcagct

SEQ ID NO: 2775556 - DNA, 25 bp, Homo sapien
tgctgcggtcctgtctttgagcctt

SEQ ID NO: 2775557 - DNA, 25 bp, Homo sapien
gccttcttgtcagcatttaaaggtg

SEQ ID NO: 2775558 - DNA, 25 bp, Homo sapien
agatcatggacattcctgtatgtct

SEQ ID NO: 2775559 - DNA, 25 bp, Homo sapien
gatcatggacattcctgtatgtctg

SEQ ID NO: 2775560 - DNA, 25 bp, Homo sapien
tttccctcacagatgtcagccatga

SEQ ID NO: 2775561 - DNA, 25 bp, Homo sapien
atgatgtcatcatggatgcaggcaa

SEQ ID NO: 2775562 - DNA, 25 bp, Homo sapien
atgatgtgatgggaagcagagagcc

SEQ ID NO: 2775563 - DNA, 25 bp, Homo sapien
ctcttttttccctcacagatgtcag

SEQ ID NO: 2775564 - DNA, 25 bp, Homo sapien
ttagcagatgaccataaccttttga

SEQ ID NO: 2775565 - DNA, 25 bp, Homo sapien
cttttgattgcatcacgaacagtta

SEQ ID NO: 2775566 - DNA, 25 bp, Homo sapien
cagttaaaagctctttaatctgcat

SEQ ID NO: 2775567 - DNA, 25 bp, Homo sapien
tgcatcacgaacagttaaaagctct

SEQ ID NO: 2775568 - DNA, 25 bp, Homo sapien
ctgatgaattaaggtgatatcatac

SEQ ID NO: 2775569 - DNA, 25 bp, Homo sapien
gatagctgatgaattaaggtgatat

SEQ ID NO: 2775570 - DNA, 25 bp, Homo sapien
cctgatagctgatgaattaaggtga

SEQ ID NO: 2775571 - DNA, 25 bp, Homo sapien
tagctgatgaattaaggtgatatca

SEQ ID NO: 2775572 - DNA, 25 bp, Homo sapien
gccagaacatttgctacgaggtatg

SEQ ID NO: 2775573 - DNA, 25 bp, Homo sapien
ctggaaagccagaacatttgctacg

SEQ ID NO: 2775574 - DNA, 25 bp, Homo sapien
tttgctacgaggtatggacagtcat

SEQ ID NO: 2775575 - DNA, 25 bp, Homo sapien
gcagccagagaacagtttgaaatga

SEQ ID NO: 2775576 - DNA, 25 bp, Homo sapien
gaaatggcacaccatctaatccgat

SEQ ID NO: 2775577 - DNA, 25 bp, Homo sapien
aatttgctggcaacctgagtgtgtt

SEQ ID NO: 2775578 - DNA, 25 bp, Homo sapien
acatggcgaaattaggaaatggcac

SEQ ID NO: 2775579 - DNA, 25 bp, Homo sapien
cctggctgtgttcagctagagccca

SEQ ID NO: 2775580 - DNA, 25 bp, Homo sapien
ctgttgcaagaaaagtaacttcaaa

SEQ ID NO: 2775581 - DNA, 25 bp, Homo sapien
cttcaaagttagtaaaagtcactct

SEQ ID NO: 2775582 - DNA, 25 bp, Homo sapien
aagttagtaaaagtcactctgattt

SEQ ID NO: 2775583 - DNA, 25 bp, Homo sapien
actgttgcaagaaaagtaacttcaa

SEQ ID NO: 2775584 - DNA, 25 bp, Homo sapien
gatcttccgtaccattttcagtggg

SEQ ID NO: 2775585 - DNA, 25 bp, Homo sapien
gcatctgtcctttgtgatcttccgt

SEQ ID NO: 2775586 - DNA, 25 bp, Homo sapien
tacacatttttgtgcatctgtcctt

SEQ ID NO: 2775587 - DNA, 25 bp, Homo sapien
tgtcctttgtgatcttccgtaccat

SEQ ID NO: 2775588 - DNA, 25 bp, Homo sapien
tgactgtgacctggcattagtagaa

SEQ ID NO: 2775589 - DNA, 25 bp, Homo sapien
tgtgacctggcattagtagaagaag

SEQ ID NO: 2775590 - DNA, 25 bp, Homo sapien
tacccaagacagtaaccaaagagat

SEQ ID NO: 2775591 - DNA, 25 bp, Homo sapien
aaaaagacaggctgctacccaagac

SEQ ID NO: 2775592 - DNA, 25 bp, Homo sapien
aacctgctcatagccacagacttca

SEQ ID NO: 2775593 - DNA, 25 bp, Homo sapien
tcatttgtgttgttgtcatgaaact

SEQ ID NO: 2775594 - DNA, 25 bp, Homo sapien
acaaacctgctcatagccacagact

SEQ ID NO: 2775595 - DNA, 25 bp, Homo sapien
gattgttgtgggtgagcaagcagca

SEQ ID NO: 2775596 - DNA, 25 bp, Homo sapien
agctcgctgaagctagtggtaaagt

SEQ ID NO: 2775597 - DNA, 25 bp, Homo sapien
gacagctcgctgaagctagtggtaa

SEQ ID NO: 2775598 - DNA, 25 bp, Homo sapien
cagctcgctgaagctagtggtaaag

SEQ ID NO: 2775599 - DNA, 25 bp, Homo sapien
gggacagctcgctgaagctagtggt

SEQ ID NO: 2775600 - DNA, 25 bp, Homo sapien
gtgccatgtctcagcagagtttcca

SEQ ID NO: 2775601 - DNA, 25 bp, Homo sapien
cctgaccattgatgtagtgcatgtg

SEQ ID NO: 2775602 - DNA, 25 bp, Homo sapien
gtgcatgtgccatgtctcagcagag

SEQ ID NO: 2775603 - DNA, 25 bp, Homo sapien
cagccacatgtctggcatatcccag

SEQ ID NO: 2775604 - DNA, 25 bp, Homo sapien
ccgtgaagtcagctgggaccttact

SEQ ID NO: 2775605 - DNA, 25 bp, Homo sapien
tcagactcttgatatttaccgtgaa

SEQ ID NO: 2775606 - DNA, 25 bp, Homo sapien
gatatttaccgtgaagtcagctggg

SEQ ID NO: 2775607 - DNA, 25 bp, Homo sapien
tcatttgagtcagactcttgatatt

SEQ ID NO: 2775608 - DNA, 25 bp, Homo sapien
gacataaacaggacactcattgaga

SEQ ID NO: 2775609 - DNA, 25 bp, Homo sapien
tgtttataacaaatatcctcttctc

SEQ ID NO: 2775610 - DNA, 25 bp, Homo sapien
ttctcatccttaagatgtgaggtca

SEQ ID NO: 2775611 - DNA, 25 bp, Homo sapien
tgaggtcaagatcaggtataaatta

SEQ ID NO: 2775612 - DNA, 25 bp, Homo sapien
ccttgacatggtggttgtaccagga

SEQ ID NO: 2775613 - DNA, 25 bp, Homo sapien
taaaagaagctagagttccttgaca

SEQ ID NO: 2775614 - DNA, 25 bp, Homo sapien
agttcaataataagatgtcaagcaa

SEQ ID NO: 2775615 - DNA, 25 bp, Homo sapien
aagcaatccaaacaccatctcacag

SEQ ID NO: 2775616 - DNA, 25 bp, Homo sapien
ccaagctgttgcctcaaagtaacta

SEQ ID NO: 2775617 - DNA, 25 bp, Homo sapien
taaaatgtatttgcctgtaccaagc

SEQ ID NO: 2775618 - DNA, 25 bp, Homo sapien
tttaaaatgtatttgcctgtaccaa

SEQ ID NO: 2775619 - DNA, 25 bp, Homo sapien
tgttgcctcaaagtaactaagcgca

SEQ ID NO: 2775620 - DNA, 25 bp, Homo sapien
cagtaatgtaaggtggcagcccaca

SEQ ID NO: 2775621 - DNA, 25 bp, Homo sapien
gcaacttgatcttccagtaatgtaa

SEQ ID NO: 2775622 - DNA, 25 bp, Homo sapien
tgatcttccagtaatgtaaggtggc

SEQ ID NO: 2775623 - DNA, 25 bp, Homo sapien
tcttccagtaatgtaaggtggcagc

SEQ ID NO: 2775624 - DNA, 25 bp, Homo sapien
tcttcacctactctagctccttcca

SEQ ID NO: 2775625 - DNA, 25 bp, Homo sapien
cacctactctagctccttccacctt

SEQ ID NO: 2775626 - DNA, 25 bp, Homo sapien
ttcacctactctagctccttccacc

SEQ ID NO: 2775627 - DNA, 25 bp, Homo sapien
atcttcacctactctagctccttcc

SEQ ID NO: 2775628 - DNA, 25 bp, Homo sapien
tgtccacatggcaaatgctgtatac

SEQ ID NO: 2775629 - DNA, 25 bp, Homo sapien
catcaatgcatatggtccattaaca

SEQ ID NO: 2775630 - DNA, 25 bp, Homo sapien
ccattaacatttgaccgctgtccac

SEQ ID NO: 2775631 - DNA, 25 bp, Homo sapien
tactcatcaatgcatatggtccatt

SEQ ID NO: 2775632 - DNA, 25 bp, Homo sapien
atgcctgagatgacatatactgggc

SEQ ID NO: 2775633 - DNA, 25 bp, Homo sapien
cctgagatgacatatactgggcact

SEQ ID NO: 2775634 - DNA, 25 bp, Homo sapien
gcggtatttctcaatgcctgagatg

SEQ ID NO: 2775635 - DNA, 25 bp, Homo sapien
ctcactgcggtatttctcaatgcct

SEQ ID NO: 2775636 - DNA, 25 bp, Homo sapien
aagaggtccaggtaactgtacccat

SEQ ID NO: 2775637 - DNA, 25 bp, Homo sapien
taactgtacccatgatcaatcctca

SEQ ID NO: 2775638 - DNA, 25 bp, Homo sapien
ggtccaggtaactgtacccatgatc

SEQ ID NO: 2775639 - DNA, 25 bp, Homo sapien
caggtaactgtacccatgatcaatc

SEQ ID NO: 2775640 - DNA, 25 bp, Homo sapien
cactcaagtaattattcagcacaaa

SEQ ID NO: 2775641 - DNA, 25 bp, Homo sapien
ggcacgaatttgagcaactggcaat

SEQ ID NO: 2775642 - DNA, 25 bp, Homo sapien
tacagtaatctgctacaatctgctg

SEQ ID NO: 2775643 - DNA, 25 bp, Homo sapien
cagatgacccaatgtaaaatggaca

SEQ ID NO: 2775644 - DNA, 25 bp, Homo sapien
taagctaatcatagagcctaacaga

SEQ ID NO: 2775645 - DNA, 25 bp, Homo sapien
tgagcagattgattgttaccttggt

SEQ ID NO: 2775646 - DNA, 25 bp, Homo sapien
tcaacctcactgataggaggataca

SEQ ID NO: 2775647 - DNA, 25 bp, Homo sapien
tgaaacatgctacaccagggtattt

SEQ ID NO: 2775648 - DNA, 25 bp, Homo sapien
aggttgcagacagccggcttcttgg

SEQ ID NO: 2775649 - DNA, 25 bp, Homo sapien
cattctttgggcagctaaaatctag

SEQ ID NO: 2775650 - DNA, 25 bp, Homo sapien
ggctagcttctagtgagggtcctct

SEQ ID NO: 2775651 - DNA, 25 bp, Homo sapien
gctggcttgaccagaaagagcactt

SEQ ID NO: 2775652 - DNA, 25 bp, Homo sapien
ttttctactgttgggcaaggtggga

SEQ ID NO: 2775653 - DNA, 25 bp, Homo sapien
tcttatgtttttctactgttgggca

SEQ ID NO: 2775654 - DNA, 25 bp, Homo sapien
gggcaaggtgggaaatgtgtattct

SEQ ID NO: 2775655 - DNA, 25 bp, Homo sapien
aaatgtgtattctgacatatagact

SEQ ID NO: 2775656 - DNA, 25 bp, Homo sapien
caagaacaccaagcatgtcaaagtt

SEQ ID NO: 2775657 - DNA, 25 bp, Homo sapien
tgtaaacttcttcaaagcttgggca

SEQ ID NO: 2775658 - DNA, 25 bp, Homo sapien
caagcatgtcaaagttcttgtttct

SEQ ID NO: 2775659 - DNA, 25 bp, Homo sapien
taaacttcttcaaagcttgggcaag

SEQ ID NO: 2775660 - DNA, 25 bp, Homo sapien
agtaaggtggcagagaaacctcatc

SEQ ID NO: 2775661 - DNA, 25 bp, Homo sapien
gagtaaggtggcagagaaacctcat

SEQ ID NO: 2775662 - DNA, 25 bp, Homo sapien
ggagatatctgagcttaaggaaaaa

SEQ ID NO: 2775663 - DNA, 25 bp, Homo sapien
gttccactagttgccttctggacat

SEQ ID NO: 2775664 - DNA, 25 bp, Homo sapien
gagagacctctgttccactagttgc

SEQ ID NO: 2775665 - DNA, 25 bp, Homo sapien
gggatcggagagacctctgttccac

SEQ ID NO: 2775666 - DNA, 25 bp, Homo sapien
actcagcagtaggatggctgaattg

SEQ ID NO: 2775667 - DNA, 25 bp, Homo sapien
gctgaattggatagtagccctattt

SEQ ID NO: 2775668 - DNA, 25 bp, Homo sapien
ttttatgactgtacatatgtaccac

SEQ ID NO: 2775669 - DNA, 25 bp, Homo sapien
tatccatgtatctgttggtggacac

SEQ ID NO: 2775670 - DNA, 25 bp, Homo sapien
aaatacacacccatagaccctgttt

SEQ ID NO: 2775671 - DNA, 25 bp, Homo sapien
taataactcagtctataaaccttac

SEQ ID NO: 2775672 - DNA, 25 bp, Homo sapien
aagccaatcatgagaatgttgaggg

SEQ ID NO: 2775673 - DNA, 25 bp, Homo sapien
tttatgcaacccaaaccccattgtg

SEQ ID NO: 2775674 - DNA, 25 bp, Homo sapien
ttctcttgatgttttgcataacctt

SEQ ID NO: 2775675 - DNA, 25 bp, Homo sapien
tctcttgatgttttgcataaccttc

SEQ ID NO: 2775676 - DNA, 25 bp, Homo sapien
tgcataaccttctgggatatccctg

SEQ ID NO: 2775677 - DNA, 25 bp, Homo sapien
cttctcttgatgttttgcataacct

SEQ ID NO: 2775678 - DNA, 25 bp, Homo sapien
gcaatacctaagcagagtttaatct

SEQ ID NO: 2775679 - DNA, 25 bp, Homo sapien
ttaagcattctctagatttctgtca

SEQ ID NO: 2775680 - DNA, 25 bp, Homo sapien
tctatacttggctaccctcttagca

SEQ ID NO: 2775681 - DNA, 25 bp, Homo sapien
gaaatgcagcttttgagggaggtca

SEQ ID NO: 2775682 - DNA, 25 bp, Homo sapien
tttattccagccactccatttctag

SEQ ID NO: 2775683 - DNA, 25 bp, Homo sapien
tagagttgaagatgattcagccact

SEQ ID NO: 2775684 - DNA, 25 bp, Homo sapien
gccactccatttctagcatacacta

SEQ ID NO: 2775685 - DNA, 25 bp, Homo sapien
ccatttctagcatacactacagaga

SEQ ID NO: 2775686 - DNA, 25 bp, Homo sapien
aatagttcctggcaaaggaggttgc

SEQ ID NO: 2775687 - DNA, 25 bp, Homo sapien
gcgtcaggtctaagcacacaagttc

SEQ ID NO: 2775688 - DNA, 25 bp, Homo sapien
tacaagtaacctaggtggcagcatc

SEQ ID NO: 2775689 - DNA, 25 bp, Homo sapien
ggaggttgccgtatagggtcctaca

SEQ ID NO: 2775690 - DNA, 25 bp, Homo sapien
gcggcgctgcgtgcggtcgcctgcg

SEQ ID NO: 2775691 - DNA, 25 bp, Homo sapien
cggcgctgcgtgcggtcgcctgcga

SEQ ID NO: 2775692 - DNA, 25 bp, Homo sapien
actttctactgaatagaccaaaaga

SEQ ID NO: 2775693 - DNA, 25 bp, Homo sapien
ttttactgaaggaacaataatgatg

SEQ ID NO: 2775694 - DNA, 25 bp, Homo sapien
gatgttctacttcagatagttcact

SEQ ID NO: 2775695 - DNA, 25 bp, Homo sapien
ggtacacaaagtaagcctctttatg

SEQ ID NO: 2775696 - DNA, 25 bp, Homo sapien
aaacagccattgaccctcttcaggg

SEQ ID NO: 2775697 - DNA, 25 bp, Homo sapien
tctcttccacgaagtgtttgataaa

SEQ ID NO: 2775698 - DNA, 25 bp, Homo sapien
gataaacagccattgaccctcttca

SEQ ID NO: 2775699 - DNA, 25 bp, Homo sapien
gtgtttgataaacagccattgaccc

SEQ ID NO: 2775700 - DNA, 25 bp, Homo sapien
catttccatgggatactgcaatctg

SEQ ID NO: 2775701 - DNA, 25 bp, Homo sapien
tctgtttaaaagtagccactgggga

SEQ ID NO: 2775702 - DNA, 25 bp, Homo sapien
atttccatgggatactgcaatctgc

SEQ ID NO: 2775703 - DNA, 25 bp, Homo sapien
cactggggattagtgagctccattg

SEQ ID NO: 2775704 - DNA, 25 bp, Homo sapien
ggactgacgttcagccttaaggcgc

SEQ ID NO: 2775705 - DNA, 25 bp, Homo sapien
caaggactgacgttcagccttaagg

SEQ ID NO: 2775706 - DNA, 25 bp, Homo sapien
tcacaaggactgacgttcagcctta

SEQ ID NO: 2775707 - DNA, 25 bp, Homo sapien
aggactgacgttcagccttaaggcg

SEQ ID NO: 2775708 - DNA, 25 bp, Homo sapien
cagattgggagacctgcccaagcct

SEQ ID NO: 2775709 - DNA, 25 bp, Homo sapien
gatgagatttgtcttattgaccaac

SEQ ID NO: 2775710 - DNA, 25 bp, Homo sapien
gcccaagccttgagtatgatgagat

SEQ ID NO: 2775711 - DNA, 25 bp, Homo sapien
gccttaaccgcaggcagagtttgga

SEQ ID NO: 2775712 - DNA, 25 bp, Homo sapien
tttgagttgggaattcccagccaac

SEQ ID NO: 2775713 - DNA, 25 bp, Homo sapien
ctgtgttactgtgctagagatgatc

SEQ ID NO: 2775714 - DNA, 25 bp, Homo sapien
gcttggctggcctacgtctatagtt

SEQ ID NO: 2775715 - DNA, 25 bp, Homo sapien
actttgtagaaaccaagcttggctg

SEQ ID NO: 2775716 - DNA, 25 bp, Homo sapien
cagcttcacgctggttcattctgaa

SEQ ID NO: 2775717 - DNA, 25 bp, Homo sapien
gcttgcagagcttgatatatgtttc

SEQ ID NO: 2775718 - DNA, 25 bp, Homo sapien
gggctgcttgcagagcttgatatat

SEQ ID NO: 2775719 - DNA, 25 bp, Homo sapien
tcgtggggcattgtgaattggtttc

SEQ ID NO: 2775720 - DNA, 25 bp, Homo sapien
gatatatgtttcttgtagtcgtggg

SEQ ID NO: 2775721 - DNA, 25 bp, Homo sapien
gtcaaattgccagaggcaactttgc

SEQ ID NO: 2775722 - DNA, 25 bp, Homo sapien
gaaacagtcaaattgccagaggcaa

SEQ ID NO: 2775723 - DNA, 25 bp, Homo sapien
tgtggaaacagtcaaattgccagag

SEQ ID NO: 2775724 - DNA, 25 bp, Homo sapien
ctctgtggaaacagtcaaattgcca

SEQ ID NO: 2775725 - DNA, 25 bp, Homo sapien
tgaagtcagtattgttagccttgcc

SEQ ID NO: 2775726 - DNA, 25 bp, Homo sapien
ctgaagtcagtattgttagccttgc

SEQ ID NO: 2775727 - DNA, 25 bp, Homo sapien
gaatcccgagtcttccacagagaaa

SEQ ID NO: 2775728 - DNA, 25 bp, Homo sapien
aaatagtcgatgcaagtttgtcaca

SEQ ID NO: 2775729 - DNA, 25 bp, Homo sapien
tcaaccaccaaaaatagtcgatgca

SEQ ID NO: 2775730 - DNA, 25 bp, Homo sapien
ctctcctcctgacaagccaaatggg

SEQ ID NO: 2775731 - DNA, 25 bp, Homo sapien
taaagcttaaaactgtagggtcatc

SEQ ID NO: 2775732 - DNA, 25 bp, Homo sapien
taaaactgtagggtcatctataaaa

SEQ ID NO: 2775733 - DNA, 25 bp, Homo sapien
caaatggtgtaaagcttaaaactgt

SEQ ID NO: 2775734 - DNA, 25 bp, Homo sapien
taacaacttcacaaatggtgtaaag

SEQ ID NO: 2775735 - DNA, 25 bp, Homo sapien
agattactccctccgaagaggagga

SEQ ID NO: 2775736 - DNA, 25 bp, Homo sapien
gtatgttccttaagattactccctc

SEQ ID NO: 2775737 - DNA, 25 bp, Homo sapien
tagagtgtatgttccttaagattac

SEQ ID NO: 2775738 - DNA, 25 bp, Homo sapien
cctggaggaacagagtagagtgtat

SEQ ID NO: 2775739 - DNA, 25 bp, Homo sapien
caatgccccaatacttagcatgact

SEQ ID NO: 2775740 - DNA, 25 bp, Homo sapien
gccccaatacttagcatgacttctg

SEQ ID NO: 2775741 - DNA, 25 bp, Homo sapien
tgccccaatacttagcatgacttct

SEQ ID NO: 2775742 - DNA, 25 bp, Homo sapien
ccaatacttagcatgacttctggct

SEQ ID NO: 2775743 - DNA, 25 bp, Homo sapien
agagccatggaacccacatactgca

SEQ ID NO: 2775744 - DNA, 25 bp, Homo sapien
tgggttagagcatgttgtaagtctc

SEQ ID NO: 2775745 - DNA, 25 bp, Homo sapien
tataatctgcctgaagagccatgga

SEQ ID NO: 2775746 - DNA, 25 bp, Homo sapien
cagaattggtacttcattaccagaa

SEQ ID NO: 2775747 - DNA, 25 bp, Homo sapien
catatttcatttcgttttgttttgg

SEQ ID NO: 2775748 - DNA, 25 bp, Homo sapien
aagccatatttcatttcgttttgtt

SEQ ID NO: 2775749 - DNA, 25 bp, Homo sapien
tgttttggcttttagttttgcttga

SEQ ID NO: 2775750 - DNA, 25 bp, Homo sapien
aaagccatatttcatttcgttttgt

SEQ ID NO: 2775751 - DNA, 25 bp, Homo sapien
gtacaccaaatagtcatcaggaatt

SEQ ID NO: 2775752 - DNA, 25 bp, Homo sapien
aaatgacttagctgttttgctgtac

SEQ ID NO: 2775753 - DNA, 25 bp, Homo sapien
tgttttgctgtacaccaaatagtca

SEQ ID NO: 2775754 - DNA, 25 bp, Homo sapien
gcatattctacaaatgacttagctg

SEQ ID NO: 2775755 - DNA, 25 bp, Homo sapien
gtaccatttggaacatcatatctaa

SEQ ID NO: 2775756 - DNA, 25 bp, Homo sapien
catcatgaacacaagaggacaaagt

SEQ ID NO: 2775757 - DNA, 25 bp, Homo sapien
gacaaagtaccatttggaacatcat

SEQ ID NO: 2775758 - DNA, 25 bp, Homo sapien
ggaacatcatatctaataatctgga

SEQ ID NO: 2775759 - DNA, 25 bp, Homo sapien
gtaagatcggttccacattctttgc

SEQ ID NO: 2775760 - DNA, 25 bp, Homo sapien
cagctaactgttgagttgggaaatc

SEQ ID NO: 2775761 - DNA, 25 bp, Homo sapien
aatcacctgtaagatcggttccaca

SEQ ID NO: 2775762 - DNA, 25 bp, Homo sapien
tgttgagttgggaaatcacctgtaa

SEQ ID NO: 2775763 - DNA, 25 bp, Homo sapien
tttcagtgtgcgaggagagaaggag

SEQ ID NO: 2775764 - DNA, 25 bp, Homo sapien
cttttactccagcataagtccaaac

SEQ ID NO: 2775765 - DNA, 25 bp, Homo sapien
ggctgtttcagtgtgcgaggagaga

SEQ ID NO: 2775766 - DNA, 25 bp, Homo sapien
ctgtttcagtgtgcgaggagagaag

SEQ ID NO: 2775767 - DNA, 25 bp, Homo sapien
cctcaatcactgacaaacgaaaggt

SEQ ID NO: 2775768 - DNA, 25 bp, Homo sapien
gctgtcctcaatcactgacaaacga

SEQ ID NO: 2775769 - DNA, 25 bp, Homo sapien
ctgaaatgacatgttatcagtaatt

SEQ ID NO: 2775770 - DNA, 25 bp, Homo sapien
agagagctgtcctcaatcactgaca

SEQ ID NO: 2775771 - DNA, 25 bp, Homo sapien
ctggacacttggatgagaatgtggc

SEQ ID NO: 2775772 - DNA, 25 bp, Homo sapien
cttggatgagaatgtggctcttcat

SEQ ID NO: 2775773 - DNA, 25 bp, Homo sapien
gacacttggatgagaatgtggctct

SEQ ID NO: 2775774 - DNA, 25 bp, Homo sapien
acttggatgagaatgtggctcttca

SEQ ID NO: 2775775 - DNA, 25 bp, Homo sapien
cttccttgatagaagcaacatacac

SEQ ID NO: 2775776 - DNA, 25 bp, Homo sapien
cacttccttgatagaagcaacatac

SEQ ID NO: 2775777 - DNA, 25 bp, Homo sapien
tccttgatagaagcaacatacacag

SEQ ID NO: 2775778 - DNA, 25 bp, Homo sapien
tgccacttccttgatagaagcaaca

SEQ ID NO: 2775779 - DNA, 25 bp, Homo sapien
caactccagaggttctatcttccct

SEQ ID NO: 2775780 - DNA, 25 bp, Homo sapien
gaggttctatcttccctattattgt

SEQ ID NO: 2775781 - DNA, 25 bp, Homo sapien
tccagaggttctatcttccctatta

SEQ ID NO: 2775782 - DNA, 25 bp, Homo sapien
tccctattattgtggtagattccat

SEQ ID NO: 2775783 - DNA, 25 bp, Homo sapien
gaatcatggtatgagaatgaacatg

SEQ ID NO: 2775784 - DNA, 25 bp, Homo sapien
ttaatcacgtggaatcatggtatga

SEQ ID NO: 2775785 - DNA, 25 bp, Homo sapien
ttcagcaaacgacttcagtgccctt

SEQ ID NO: 2775786 - DNA, 25 bp, Homo sapien
tcagcaaacgacttcagtgccctta

SEQ ID NO: 2775787 - DNA, 25 bp, Homo sapien
tccaggtcaccctcaacaacatcag

SEQ ID NO: 2775788 - DNA, 25 bp, Homo sapien
ttaacaacagcaactgcatcagtaa

SEQ ID NO: 2775789 - DNA, 25 bp, Homo sapien
gcatcagtaacaacggcatctgcat

SEQ ID NO: 2775790 - DNA, 25 bp, Homo sapien
taatcattacaagattaacaacagc

SEQ ID NO: 2775791 - DNA, 25 bp, Homo sapien
ttctaactagcaagtgccaggaggc

SEQ ID NO: 2775792 - DNA, 25 bp, Homo sapien
tgtctagccaagatcccatgctatg

SEQ ID NO: 2775793 - DNA, 25 bp, Homo sapien
caggctgggttagacagcgtgacca

SEQ ID NO: 2775794 - DNA, 25 bp, Homo sapien
aagaaacattgctagctatggcacc

SEQ ID NO: 2775795 - DNA, 25 bp, Homo sapien
gatgttagaagagttaggcaaacaa

SEQ ID NO: 2775796 - DNA, 25 bp, Homo sapien
tgttaggttggtaatagatgttaga

SEQ ID NO: 2775797 - DNA, 25 bp, Homo sapien
agaacatttagaactgcacatttta

SEQ ID NO: 2775798 - DNA, 25 bp, Homo sapien
aattatacttctgggtgatactgac

SEQ ID NO: 2775799 - DNA, 25 bp, Homo sapien
caatgctagtctcctacggtggcca

SEQ ID NO: 2775800 - DNA, 25 bp, Homo sapien
cataacaggcagcaaggatccactt

SEQ ID NO: 2775801 - DNA, 25 bp, Homo sapien
taccgcagccagttgttaggaatct

SEQ ID NO: 2775802 - DNA, 25 bp, Homo sapien
tgtgttcccaaacagacgtgatgct

SEQ ID NO: 2775803 - DNA, 25 bp, Homo sapien
catttttcggcgtggagctgccagg

SEQ ID NO: 2775804 - DNA, 25 bp, Homo sapien
aatcgtggcttttctgcgtctgggt

SEQ ID NO: 2775805 - DNA, 25 bp, Homo sapien
ggatggctcccgacgacatctgtcg

SEQ ID NO: 2775806 - DNA, 25 bp, Homo sapien
tgtgaagcgcctgcgtgctcttgtg

SEQ ID NO: 2775807 - DNA, 25 bp, Homo sapien
tggctgagtctgcggcggctgggac

SEQ ID NO: 2775808 - DNA, 25 bp, Homo sapien
ggctgagtctgcggcggctgggact

SEQ ID NO: 2775809 - DNA, 25 bp, Homo sapien
cggtgggggaggcatagtggaaagt

SEQ ID NO: 2775810 - DNA, 25 bp, Homo sapien
aggcatagtggaaagttcgagcggc

SEQ ID NO: 2775811 - DNA, 25 bp, Homo sapien
gggaggcatagtggaaagttcgagc

SEQ ID NO: 2775812 - DNA, 25 bp, Homo sapien
atagtggaaagttcgagcggccaga

SEQ ID NO: 2775813 - DNA, 25 bp, Homo sapien
caggctggtcgctgtgtacaccggt

SEQ ID NO: 2775814 - DNA, 25 bp, Homo sapien
tacaccggtggagattgtgtcctca

SEQ ID NO: 2775815 - DNA, 25 bp, Homo sapien
taattgatgggagcgattgcctgca

SEQ ID NO: 2775816 - DNA, 25 bp, Homo sapien
cgtagtagacgatgtggaattcagg

SEQ ID NO: 2775817 - DNA, 25 bp, Homo sapien
cgttctcctgattgttgaaaacacc

SEQ ID NO: 2775818 - DNA, 25 bp, Homo sapien
catgtttcacaatctgcttgaggat

SEQ ID NO: 2775819 - DNA, 25 bp, Homo sapien
ctgcttgaggatttcgttctcctga

SEQ ID NO: 2775820 - DNA, 25 bp, Homo sapien
gtcatgtttcacaatctgcttgagg

SEQ ID NO: 2775821 - DNA, 25 bp, Homo sapien
tggtttgcaatacagcttttcctgc

SEQ ID NO: 2775822 - DNA, 25 bp, Homo sapien
tgagtggtttgcaatacagcttttc

SEQ ID NO: 2775823 - DNA, 25 bp, Homo sapien
gagtggtttgcaatacagcttttcc

SEQ ID NO: 2775824 - DNA, 25 bp, Homo sapien
gtggtttgcaatacagcttttcctg

SEQ ID NO: 2775825 - DNA, 25 bp, Homo sapien
cagtggtaccatcttggttcagggc

SEQ ID NO: 2775826 - DNA, 25 bp, Homo sapien
tggtaccatcttggttcagggcaac

SEQ ID NO: 2775827 - DNA, 25 bp, Homo sapien
gtaccatcttggttcagggcaacct

SEQ ID NO: 2775828 - DNA, 25 bp, Homo sapien
agtggtaccatcttggttcagggca

SEQ ID NO: 2775829 - DNA, 25 bp, Homo sapien
atgccaggagattaaattttatata

SEQ ID NO: 2775830 - DNA, 25 bp, Homo sapien
atataaagaaggtagaaaactagag

SEQ ID NO: 2775831 - DNA, 25 bp, Homo sapien
tatataaagaaggtagaaaactaga

SEQ ID NO: 2775832 - DNA, 25 bp, Homo sapien
caggagattaaattttatataaaga

SEQ ID NO: 2775833 - DNA, 25 bp, Homo sapien
tatgtatcagctcgaacactggcag

SEQ ID NO: 2775834 - DNA, 25 bp, Homo sapien
ccacggaaagtgagtaaagacgaca

SEQ ID NO: 2775835 - DNA, 25 bp, Homo sapien
tagtcggtcaatggcaactgtctca

SEQ ID NO: 2775836 - DNA, 25 bp, Homo sapien
ggatattcctccaggacctcgttga

SEQ ID NO: 2775837 - DNA, 25 bp, Homo sapien
aaggctgaaacacagtataccttat

SEQ ID NO: 2775838 - DNA, 25 bp, Homo sapien
tggtttaaatgcaaggctgaaacac

SEQ ID NO: 2775839 - DNA, 25 bp, Homo sapien
gggtgatgattagaaagacgatttt

SEQ ID NO: 2775840 - DNA, 25 bp, Homo sapien
ccttcccactccaatcctctgaaat

SEQ ID NO: 2775841 - DNA, 25 bp, Homo sapien
tctaaataccagaatgaggagggct

SEQ ID NO: 2775842 - DNA, 25 bp, Homo sapien
tactctaggccactgacatctctct

SEQ ID NO: 2775843 - DNA, 25 bp, Homo sapien
cactatcctcaggtacatggttggc

SEQ ID NO: 2775844 - DNA, 25 bp, Homo sapien
ttgctttatgaacgaaccactgaca

SEQ ID NO: 2775845 - DNA, 25 bp, Homo sapien
gtctcttaactaagagcctgtttag

SEQ ID NO: 2775846 - DNA, 25 bp, Homo sapien
taagtcacccgctttctgttctgtc

SEQ ID NO: 2775847 - DNA, 25 bp, Homo sapien
tgtacgtatattccatgttccctct

SEQ ID NO: 2775848 - DNA, 25 bp, Homo sapien
tagtattcttccaggatacctgctg

SEQ ID NO: 2775849 - DNA, 25 bp, Homo sapien
catcatcactatcatagcagaaact

SEQ ID NO: 2775850 - DNA, 25 bp, Homo sapien
atcatcactatcatagcagaaactc

SEQ ID NO: 2775851 - DNA, 25 bp, Homo sapien
tttttagcaaggtaaattgccatct

SEQ ID NO: 2775852 - DNA, 25 bp, Homo sapien
taactacaggctacattttgcagcc

SEQ ID NO: 2775853 - DNA, 25 bp, Homo sapien
aggtgatcctataccaattctgggc

SEQ ID NO: 2775854 - DNA, 25 bp, Homo sapien
tctgggcaatcatatgtgaatagca

SEQ ID NO: 2775855 - DNA, 25 bp, Homo sapien
caacttgctcagcatggcagtcaca

SEQ ID NO: 2775856 - DNA, 25 bp, Homo sapien
cacggctccttctcgtatgatataa

SEQ ID NO: 2775857 - DNA, 25 bp, Homo sapien
ggatccgcattagcaaataaaggca

SEQ ID NO: 2775858 - DNA, 25 bp, Homo sapien
tactggattttgtaatgacaccagc

SEQ ID NO: 2775859 - DNA, 25 bp, Homo sapien
gtttccgacagttgaagttgactat

SEQ ID NO: 2775860 - DNA, 25 bp, Homo sapien
tttccgacagttgaagttgactatc

SEQ ID NO: 2775861 - DNA, 25 bp, Homo sapien
ttctcagcaccacatcacacttatt

SEQ ID NO: 2775862 - DNA, 25 bp, Homo sapien
agttaaccatgatatccaggaattg

SEQ ID NO: 2775863 - DNA, 25 bp, Homo sapien
tcacacttattccaaaattgacaac

SEQ ID NO: 2775864 - DNA, 25 bp, Homo sapien
agacagaaagttaaccatgatatcc

SEQ ID NO: 2775865 - DNA, 25 bp, Homo sapien
gatctttggacactaaaccaaggaa

SEQ ID NO: 2775866 - DNA, 25 bp, Homo sapien
taaagcaatagaatttgagatcttt

SEQ ID NO: 2775867 - DNA, 25 bp, Homo sapien
gagatctttggacactaaaccaagg

SEQ ID NO: 2775868 - DNA, 25 bp, Homo sapien
tcttaaagcaatagaatttgagatc

SEQ ID NO: 2775869 - DNA, 25 bp, Homo sapien
tgctggaaggcaaactaagggaaca

SEQ ID NO: 2775870 - DNA, 25 bp, Homo sapien
taagggaacagtgaaaatagtctat

SEQ ID NO: 2775871 - DNA, 25 bp, Homo sapien
tttaaatggtagtcagagaaatcag

SEQ ID NO: 2775872 - DNA, 25 bp, Homo sapien
tgagatgctttagtttaggacaatg

SEQ ID NO: 2775873 - DNA, 25 bp, Homo sapien
gcatactgaggacaataaatcttac

SEQ ID NO: 2775874 - DNA, 25 bp, Homo sapien
tgcatactgaggacaataaatctta

SEQ ID NO: 2775875 - DNA, 25 bp, Homo sapien
tgtattatgcatactgaggacaata

SEQ ID NO: 2775876 - DNA, 25 bp, Homo sapien
ttatgtattatgcatactgaggaca

SEQ ID NO: 2775877 - DNA, 25 bp, Homo sapien
gcatatcagctggtaacttatggaa

SEQ ID NO: 2775878 - DNA, 25 bp, Homo sapien
cagaggatcattgagttcattgaga

SEQ ID NO: 2775879 - DNA, 25 bp, Homo sapien
aatcatgtatcttctgacgcatatc

SEQ ID NO: 2775880 - DNA, 25 bp, Homo sapien
cttatggaatgacatgtattgttcc

SEQ ID NO: 2775881 - DNA, 25 bp, Homo sapien
tgttagttccctagagagcttgatg

SEQ ID NO: 2775882 - DNA, 25 bp, Homo sapien
tccctcaggcgtgagtgaattctca

SEQ ID NO: 2775883 - DNA, 25 bp, Homo sapien
cataaggtctgtgcatactcctgct

SEQ ID NO: 2775884 - DNA, 25 bp, Homo sapien
ggacaaagattatgccctccctcag

SEQ ID NO: 2775885 - DNA, 25 bp, Homo sapien
atatctctcagaattcccatatgtt

SEQ ID NO: 2775886 - DNA, 25 bp, Homo sapien
aattatatctctcagaattcccata

SEQ ID NO: 2775887 - DNA, 25 bp, Homo sapien
gaattatatctctcagaattcccat

SEQ ID NO: 2775888 - DNA, 25 bp, Homo sapien
ttatatctctcagaattcccatatg

SEQ ID NO: 2775889 - DNA, 25 bp, Homo sapien
gtgttctttgcagaccataagcttc

SEQ ID NO: 2775890 - DNA, 25 bp, Homo sapien
tgtgttctttgcagaccataagctt

SEQ ID NO: 2775891 - DNA, 25 bp, Homo sapien
ctgtgttctttgcagaccataagct

SEQ ID NO: 2775892 - DNA, 25 bp, Homo sapien
cgcctcgaagaatccagagactgga

SEQ ID NO: 2775893 - DNA, 25 bp, Homo sapien
gcaggtggccccgacgatcatgctc

SEQ ID NO: 2775894 - DNA, 25 bp, Homo sapien
ttctcttgatactgccgcctcgaag

SEQ ID NO: 2775895 - DNA, 25 bp, Homo sapien
aagcggtggcatggccgacaaacat

SEQ ID NO: 2775896 - DNA, 25 bp, Homo sapien
gagtgcgtatgaatactgctttccc

SEQ ID NO: 2775897 - DNA, 25 bp, Homo sapien
aatgcacagcatgtgactcatagct

SEQ ID NO: 2775898 - DNA, 25 bp, Homo sapien
gactcatagctttgaagagtgcgta

SEQ ID NO: 2775899 - DNA, 25 bp, Homo sapien
aagagtgcgtatgaatactgctttc

SEQ ID NO: 2775900 - DNA, 25 bp, Homo sapien
tcaatggcaatgtctctggaaggct

SEQ ID NO: 2775901 - DNA, 25 bp, Homo sapien
taagcttctctctatttacataaga

SEQ ID NO: 2775902 - DNA, 25 bp, Homo sapien
cgtgtatgttgcatttaagtcagta

SEQ ID NO: 2775903 - DNA, 25 bp, Homo sapien
aaggctgttatttgaatgcgtgtat

SEQ ID NO: 2775904 - DNA, 25 bp, Homo sapien
gttcaggaaattgacctgtatggat

SEQ ID NO: 2775905 - DNA, 25 bp, Homo sapien
aattgacctgtatggattccaacaa

SEQ ID NO: 2775906 - DNA, 25 bp, Homo sapien
cctgtatggattccaacaacaaact

SEQ ID NO: 2775907 - DNA, 25 bp, Homo sapien
caggaaattgacctgtatggattcc

SEQ ID NO: 2775908 - DNA, 25 bp, Homo sapien
catttaaagacacccagcaatctgg

SEQ ID NO: 2775909 - DNA, 25 bp, Homo sapien
tgaagacaaccatcccagtggcaca

SEQ ID NO: 2775910 - DNA, 25 bp, Homo sapien
ctggcgagatcatatgtcatgtgga

SEQ ID NO: 2775911 - DNA, 25 bp, Homo sapien
gaagtcctgcagtagtggtactaag

SEQ ID NO: 2775912 - DNA, 25 bp, Homo sapien
tgggctttcacccagcatttaaact

SEQ ID NO: 2775913 - DNA, 25 bp, Homo sapien
tcatgttttctgctaaattcagcat

SEQ ID NO: 2775914 - DNA, 25 bp, Homo sapien
aactcacaaatcactgtcatgtttt

SEQ ID NO: 2775915 - DNA, 25 bp, Homo sapien
gggctttcacccagcatttaaactc

SEQ ID NO: 2775916 - DNA, 25 bp, Homo sapien
gttgcactggctacatcttcatcct

SEQ ID NO: 2775917 - DNA, 25 bp, Homo sapien
ttttgttgcactggctacatcttca

SEQ ID NO: 2775918 - DNA, 25 bp, Homo sapien
catcaatttttgttgcactggctac

SEQ ID NO: 2775919 - DNA, 25 bp, Homo sapien
gcactggctacatcttcatccttca

SEQ ID NO: 2775920 - DNA, 25 bp, Homo sapien
tgtatatctctatgtcaggagacag

SEQ ID NO: 2775921 - DNA, 25 bp, Homo sapien
gacaggtagcctatgtccagccctg

SEQ ID NO: 2775922 - DNA, 25 bp, Homo sapien
taatattctagctaagacaggtagc

SEQ ID NO: 2775923 - DNA, 25 bp, Homo sapien
caatatagatgccatgactggtgac

SEQ ID NO: 2775924 - DNA, 25 bp, Homo sapien
ttgatctgaccacactgaagtgatc

SEQ ID NO: 2775925 - DNA, 25 bp, Homo sapien
ttgttgatctgaccacactgaagtg

SEQ ID NO: 2775926 - DNA, 25 bp, Homo sapien
tttgttcctgcttgttgatctgacc

SEQ ID NO: 2775927 - DNA, 25 bp, Homo sapien
aaatttgttcctgcttgttgatctg

SEQ ID NO: 2775928 - DNA, 25 bp, Homo sapien
tagtaagagatgacatagatccttg

SEQ ID NO: 2775929 - DNA, 25 bp, Homo sapien
catagatccttgaggcttgtaccat

SEQ ID NO: 2775930 - DNA, 25 bp, Homo sapien
gagatgacatagatccttgaggctt

SEQ ID NO: 2775931 - DNA, 25 bp, Homo sapien
tctgggagcccttgaacacttggac

SEQ ID NO: 2775932 - DNA, 25 bp, Homo sapien
tgatattaattagctccatgcctgt

SEQ ID NO: 2775933 - DNA, 25 bp, Homo sapien
taaagccaatatgaggacagacgcg

SEQ ID NO: 2775934 - DNA, 25 bp, Homo sapien
cacgcaaactggagttgctatacca

SEQ ID NO: 2775935 - DNA, 25 bp, Homo sapien
gatgaaacgccaaaatagacaagct

SEQ ID NO: 2775936 - DNA, 25 bp, Homo sapien
tatcactagttgaaggctcagatga

SEQ ID NO: 2775937 - DNA, 25 bp, Homo sapien
aagttctaccatgtgtaaaatgcca

SEQ ID NO: 2775938 - DNA, 25 bp, Homo sapien
gagtaaattgatgtggccaacttcc

SEQ ID NO: 2775939 - DNA, 25 bp, Homo sapien
cccaccagcaaaaagtatcactagt

SEQ ID NO: 2775940 - DNA, 25 bp, Homo sapien
cttaatagagggctgacatcagtgc

SEQ ID NO: 2775941 - DNA, 25 bp, Homo sapien
gaagggttggagttagctatttgct

SEQ ID NO: 2775942 - DNA, 25 bp, Homo sapien
caatcagaatattgttggagctgaa

SEQ ID NO: 2775943 - DNA, 25 bp, Homo sapien
aacaattactctcactacaaaggca

SEQ ID NO: 2775944 - DNA, 25 bp, Homo sapien
caagttgtctaaaggtgacatctcc

SEQ ID NO: 2775945 - DNA, 25 bp, Homo sapien
gatggtcacaggaatcaataattag

SEQ ID NO: 2775946 - DNA, 25 bp, Homo sapien
gggcacatcttttgatacactgcag

SEQ ID NO: 2775947 - DNA, 25 bp, Homo sapien
tcaggctcatgggaacattgggcac

SEQ ID NO: 2775948 - DNA, 25 bp, Homo sapien
gaagcccaggttatcaattgtttat

SEQ ID NO: 2775949 - DNA, 25 bp, Homo sapien
ggataacaggcctctatcagatgta

SEQ ID NO: 2775950 - DNA, 25 bp, Homo sapien
caaagacattcttattgttgagtac

SEQ ID NO: 2775951 - DNA, 25 bp, Homo sapien
tgttgagtactttgtacattattct

SEQ ID NO: 2775952 - DNA, 25 bp, Homo sapien
aaagcactatcaagctagcaaggaa

SEQ ID NO: 2775953 - DNA, 25 bp, Homo sapien
cctaggcctgttcataactcagcac

SEQ ID NO: 2775954 - DNA, 25 bp, Homo sapien
ctcagcacctattggtttcagcagg

SEQ ID NO: 2775955 - DNA, 25 bp, Homo sapien
aaacattaccatttgcctaggcctg

SEQ ID NO: 2775956 - DNA, 25 bp, Homo sapien
caaaggacattggtggtaaggagta

SEQ ID NO: 2775957 - DNA, 25 bp, Homo sapien
gagtatactcttatatgaccacatg

SEQ ID NO: 2775958 - DNA, 25 bp, Homo sapien
cacatggcctgccattttatctgat

SEQ ID NO: 2775959 - DNA, 25 bp, Homo sapien
gaagccaaaggacattggtggtaag

SEQ ID NO: 2775960 - DNA, 25 bp, Homo sapien
cagttgttcattgtaaaacagccat

SEQ ID NO: 2775961 - DNA, 25 bp, Homo sapien
taaattggcataaaacgatcactat

SEQ ID NO: 2775962 - DNA, 25 bp, Homo sapien
caaatatatcacttatgcatggaaa

SEQ ID NO: 2775963 - DNA, 25 bp, Homo sapien
gcatggaaaagagtcgtcgaataca

SEQ ID NO: 2775964 - DNA, 25 bp, Homo sapien
gattccaactggtatgatgactaga

SEQ ID NO: 2775965 - DNA, 25 bp, Homo sapien
gaagtgccctggctgtcttgtaaac

SEQ ID NO: 2775966 - DNA, 25 bp, Homo sapien
gatgagatgaagtcaaccacaaacc

SEQ ID NO: 2775967 - DNA, 25 bp, Homo sapien
tgtaaacctcacaatgcgaagtgcc

SEQ ID NO: 2775968 - DNA, 25 bp, Homo sapien
ttatactgcattgaagttttcaccc

SEQ ID NO: 2775969 - DNA, 25 bp, Homo sapien
atactgcattgaagttttcacccac

SEQ ID NO: 2775970 - DNA, 25 bp, Homo sapien
tatactgcattgaagttttcaccca

SEQ ID NO: 2775971 - DNA, 25 bp, Homo sapien
cctccagcataatcccacggtctct

SEQ ID NO: 2775972 - DNA, 25 bp, Homo sapien
tccagcataatcccacggtctctga

SEQ ID NO: 2775973 - DNA, 25 bp, Homo sapien
ccagcataatcccacggtctctgag

SEQ ID NO: 2775974 - DNA, 25 bp, Homo sapien
ctccagcataatcccacggtctctg

SEQ ID NO: 2775975 - DNA, 25 bp, Homo sapien
ctgtttgcctgcagtgagctctcat

SEQ ID NO: 2775976 - DNA, 25 bp, Homo sapien
tgctgtgacactgatttaagaacac

SEQ ID NO: 2775977 - DNA, 25 bp, Homo sapien
agcaatgggcctgttgttgctgtga

SEQ ID NO: 2775978 - DNA, 25 bp, Homo sapien
ggctgtatttcgtaaatgtctatag

SEQ ID NO: 2775979 - DNA, 25 bp, Homo sapien
tccatccctgtacaataaggtttta

SEQ ID NO: 2775980 - DNA, 25 bp, Homo sapien
ctttccatccctgtacaataaggtt

SEQ ID NO: 2775981 - DNA, 25 bp, Homo sapien
tactgttgaaccaagcaaggaactg

SEQ ID NO: 2775982 - DNA, 25 bp, Homo sapien
tgacatcacccaaaccacatttacg

SEQ ID NO: 2775983 - DNA, 25 bp, Homo sapien
gctttaccgccccagtctggactgg

SEQ ID NO: 2775984 - DNA, 25 bp, Homo sapien
aaggctagctattttggagtactcc

SEQ ID NO: 2775985 - DNA, 25 bp, Homo sapien
ggcacatacttgcaggtgccagtgg

SEQ ID NO: 2775986 - DNA, 25 bp, Homo sapien
caatccatcacgtttcccagaaggt

SEQ ID NO: 2775987 - DNA, 25 bp, Homo sapien
aatgttctcatgacctgcttggaga

SEQ ID NO: 2775988 - DNA, 25 bp, Homo sapien
catctgtgtattgggcagggaaatg

SEQ ID NO: 2775989 - DNA, 25 bp, Homo sapien
caagtaagatcagaaaacgtcttaa

SEQ ID NO: 2775990 - DNA, 25 bp, Homo sapien
tcaccgaacgaatacttgagcgaca

SEQ ID NO: 2775991 - DNA, 25 bp, Homo sapien
tacttgagcgacaagtaagatcaga

SEQ ID NO: 2775992 - DNA, 25 bp, Homo sapien
ccgaacgaatacttgagcgacaagt

SEQ ID NO: 2775993 - DNA, 25 bp, Homo sapien
tccctcctggttgagaccacacttg

SEQ ID NO: 2775994 - DNA, 25 bp, Homo sapien
gaatcgctgtctccggttacccagt

SEQ ID NO: 2775995 - DNA, 25 bp, Homo sapien
aactgctcgggcttgtgaatcgctg

SEQ ID NO: 2775996 - DNA, 25 bp, Homo sapien
tctcgtctctgaagtaaaagtttcc

SEQ ID NO: 2775997 - DNA, 25 bp, Homo sapien
ggtgaactgcctctgcatgaagccg

SEQ ID NO: 2775998 - DNA, 25 bp, Homo sapien
caccttgaagcacacggagttgccg

SEQ ID NO: 2775999 - DNA, 25 bp, Homo sapien
tagacgaagagttgggcttgccgcc

SEQ ID NO: 2776000 - DNA, 25 bp, Homo sapien
gaagacgctgttgccatcgtcccgg

SEQ ID NO: 2776001 - DNA, 25 bp, Homo sapien
cggcgccggagacacgtagccgaga

SEQ ID NO: 2776002 - DNA, 25 bp, Homo sapien
cgacggcgcgggctccagactcgcc

SEQ ID NO: 2776003 - DNA, 25 bp, Homo sapien
cggagacacgtagccgagagggtag

SEQ ID NO: 2776004 - DNA, 25 bp, Homo sapien
gccggagacacgtagccgagagggt

SEQ ID NO: 2776005 - DNA, 25 bp, Homo sapien
cttagtggctgcggtccgggctccg

SEQ ID NO: 2776006 - DNA, 25 bp, Homo sapien
ccgcgccgctgctagctgcgcgcct

SEQ ID NO: 2776007 - DNA, 25 bp, Homo sapien
ccgaccgcgccgctgctagctgcgc

SEQ ID NO: 2776008 - DNA, 25 bp, Homo sapien
gccgccgctgcccttagtggctgcg

SEQ ID NO: 2776009 - DNA, 25 bp, Homo sapien
caaatccgggatgaagaccagtaac

SEQ ID NO: 2776010 - DNA, 25 bp, Homo sapien
gctgtgctagatcaaatccgggatg

SEQ ID NO: 2776011 - DNA, 25 bp, Homo sapien
tgatgtaacactctgctgtgctaga

SEQ ID NO: 2776012 - DNA, 25 bp, Homo sapien
caattctagcatagctgatgtaaca

SEQ ID NO: 2776013 - DNA, 25 bp, Homo sapien
gctctgacactgaggcaataatcaa

SEQ ID NO: 2776014 - DNA, 25 bp, Homo sapien
cctacaagaaaaggataaattcctg

SEQ ID NO: 2776015 - DNA, 25 bp, Homo sapien
ctgacactgaggcaataatcaatag

SEQ ID NO: 2776016 - DNA, 25 bp, Homo sapien
actataaacacatatacgcaaataa

SEQ ID NO: 2776017 - DNA, 25 bp, Homo sapien
ctctcagatcatcaaagtcattctt

SEQ ID NO: 2776018 - DNA, 25 bp, Homo sapien
taatctgaatccttcttctctcaga

SEQ ID NO: 2776019 - DNA, 25 bp, Homo sapien
atcaaagtcattcttcgtctagctt

SEQ ID NO: 2776020 - DNA, 25 bp, Homo sapien
tcagagtaatttgataatctgaatc

SEQ ID NO: 2776021 - DNA, 25 bp, Homo sapien
cctccaatacatctataatcttatc

SEQ ID NO: 2776022 - DNA, 25 bp, Homo sapien
ataatcttatcttgaatagtgtcgt

SEQ ID NO: 2776023 - DNA, 25 bp, Homo sapien
tcttatcttgaatagtgtcgttcat

SEQ ID NO: 2776024 - DNA, 25 bp, Homo sapien
caatcattgtcgaaaaaaacctcca

SEQ ID NO: 2776025 - DNA, 25 bp, Homo sapien
tctgcaaagtgatgctaggtagcac

SEQ ID NO: 2776026 - DNA, 25 bp, Homo sapien
caagacagacgctttttgagatact

SEQ ID NO: 2776027 - DNA, 25 bp, Homo sapien
taatctcagagagttaagtccctct

SEQ ID NO: 2776028 - DNA, 25 bp, Homo sapien
tatttgggagcacattgaagcctat

SEQ ID NO: 2776029 - DNA, 25 bp, Homo sapien
ccccagctctgtgatattagcggct

SEQ ID NO: 2776030 - DNA, 25 bp, Homo sapien
atccctaaccccagctctgtgatat

SEQ ID NO: 2776031 - DNA, 25 bp, Homo sapien
gctctgtgatattagcggctgctgt

SEQ ID NO: 2776032 - DNA, 25 bp, Homo sapien
taaccccagctctgtgatattagcg

SEQ ID NO: 2776033 - DNA, 25 bp, Homo sapien
gatgtagattttgtcttttcacata

SEQ ID NO: 2776034 - DNA, 25 bp, Homo sapien
atgtagattttgtcttttcacatag

SEQ ID NO: 2776035 - DNA, 25 bp, Homo sapien
tctcgctggatttcattcatttgat

SEQ ID NO: 2776036 - DNA, 25 bp, Homo sapien
tgtagattttgtcttttcacatagt

SEQ ID NO: 2776037 - DNA, 25 bp, Homo sapien
tgcagggatagtccccatctttcaa

SEQ ID NO: 2776038 - DNA, 25 bp, Homo sapien
aagattaggtcttgaactgacacag

SEQ ID NO: 2776039 - DNA, 25 bp, Homo sapien
tattacaacttaggttccaagaagc

SEQ ID NO: 2776040 - DNA, 25 bp, Homo sapien
gaagtcacaggccagtcatatatga

SEQ ID NO: 2776041 - DNA, 25 bp, Homo sapien
gagaagaacgcacatattagaaagc

SEQ ID NO: 2776042 - DNA, 25 bp, Homo sapien
tccatgttcaccataggcctttttg

SEQ ID NO: 2776043 - DNA, 25 bp, Homo sapien
gagttcctcagaaatcttcagtctg

SEQ ID NO: 2776044 - DNA, 25 bp, Homo sapien
cacagactctgtaaaaacttggatt

SEQ ID NO: 2776045 - DNA, 25 bp, Homo sapien
tccaccgaaggcctcaaagcgctcc

SEQ ID NO: 2776046 - DNA, 25 bp, Homo sapien
caccgaaggcctcaaagcgctccaa

SEQ ID NO: 2776047 - DNA, 25 bp, Homo sapien
gtttccaccgaaggcctcaaagcgc

SEQ ID NO: 2776048 - DNA, 25 bp, Homo sapien
ttttatgtgaagatattcccgtttc

SEQ ID NO: 2776049 - DNA, 25 bp, Homo sapien
ggttcagctctgtgagttgtatgca

SEQ ID NO: 2776050 - DNA, 25 bp, Homo sapien
gaaggttcagctctgtgagttgtat

SEQ ID NO: 2776051 - DNA, 25 bp, Homo sapien
gttgtatgcacacatctcaaagaag

SEQ ID NO: 2776052 - DNA, 25 bp, Homo sapien
gagttgtatgcacacatctcaaaga

SEQ ID NO: 2776053 - DNA, 25 bp, Homo sapien
attacaaaacgagaatttggaatag

SEQ ID NO: 2776054 - DNA, 25 bp, Homo sapien
caaaacgagaatttggaatagagaa

SEQ ID NO: 2776055 - DNA, 25 bp, Homo sapien
acaaaacgagaatttggaatagaga

SEQ ID NO: 2776056 - DNA, 25 bp, Homo sapien
tacaaaacgagaatttggaatagag

SEQ ID NO: 2776057 - DNA, 25 bp, Homo sapien
ctgggaagcttccagcctaaggtca

SEQ ID NO: 2776058 - DNA, 25 bp, Homo sapien
cagcctaaggtcaatcttacggata

SEQ ID NO: 2776059 - DNA, 25 bp, Homo sapien
aatcttacggatactgattgctttt

SEQ ID NO: 2776060 - DNA, 25 bp, Homo sapien
tgggaagcttccagcctaaggtcaa

SEQ ID NO: 2776061 - DNA, 25 bp, Homo sapien
cactatactccagctgggtggcaca

SEQ ID NO: 2776062 - DNA, 25 bp, Homo sapien
tatataaaaaagcattcaaactggg

SEQ ID NO: 2776063 - DNA, 25 bp, Homo sapien
taaaaaagcattcaaactgggctca

SEQ ID NO: 2776064 - DNA, 25 bp, Homo sapien
aacatttaacaattagccaagcatg

SEQ ID NO: 2776065 - DNA, 25 bp, Homo sapien
catcagcaaagcacacaggctggct

SEQ ID NO: 2776066 - DNA, 25 bp, Homo sapien
cagcaaagcacacaggctggctcat

SEQ ID NO: 2776067 - DNA, 25 bp, Homo sapien
tgcatcagcaaagcacacaggctgg

SEQ ID NO: 2776068 - DNA, 25 bp, Homo sapien
ctgcatcagcaaagcacacaggctg

SEQ ID NO: 2776069 - DNA, 25 bp, Homo sapien
gctactataatggttccagaacccc

SEQ ID NO: 2776070 - DNA, 25 bp, Homo sapien
gctatggctagatacaatgagagat

SEQ ID NO: 2776071 - DNA, 25 bp, Homo sapien
gctgaatgttatctctagccacaaa

SEQ ID NO: 2776072 - DNA, 25 bp, Homo sapien
tcactcataaacacgtgctgctgaa

SEQ ID NO: 2776073 - DNA, 25 bp, Homo sapien
tctgtgctatttacacagtacagaa

SEQ ID NO: 2776074 - DNA, 25 bp, Homo sapien
aatgtgatagttacaaacatgtgct

SEQ ID NO: 2776075 - DNA, 25 bp, Homo sapien
aacatgtgctatgattttgcagcat

SEQ ID NO: 2776076 - DNA, 25 bp, Homo sapien
tttaggcacatatgcttacaaagga

SEQ ID NO: 2776077 - DNA, 25 bp, Homo sapien
tttatagcataggaccattgtgtgg

SEQ ID NO: 2776078 - DNA, 25 bp, Homo sapien
tgcacagtgcccatcatatgccatg

SEQ ID NO: 2776079 - DNA, 25 bp, Homo sapien
cagttattattatccttagtgaagc

SEQ ID NO: 2776080 - DNA, 25 bp, Homo sapien
agtatcatatgaaagaagggtctat

SEQ ID NO: 2776081 - DNA, 25 bp, Homo sapien
cacaatttagattctttttctaaga

SEQ ID NO: 2776082 - DNA, 25 bp, Homo sapien
acttttttcaattctgatttgtcac

SEQ ID NO: 2776083 - DNA, 25 bp, Homo sapien
gatttgtcacaatttagattctttt

SEQ ID NO: 2776084 - DNA, 25 bp, Homo sapien
tctgatttgtcacaatttagattct

SEQ ID NO: 2776085 - DNA, 25 bp, Homo sapien
caaggcattagtgttgcagcaggtg

SEQ ID NO: 2776086 - DNA, 25 bp, Homo sapien
tacattcatccgttcaatacacatt

SEQ ID NO: 2776087 - DNA, 25 bp, Homo sapien
gagcagtgggacacttcatggtcat

SEQ ID NO: 2776088 - DNA, 25 bp, Homo sapien
acgactatatggacctgcaccctaa

SEQ ID NO: 2776089 - DNA, 25 bp, Homo sapien
tctgacatatatcgttgatgaagct

SEQ ID NO: 2776090 - DNA, 25 bp, Homo sapien
tagatctgacatatatcgttgatga

SEQ ID NO: 2776091 - DNA, 25 bp, Homo sapien
tttagatctgacatatatcgttgat

SEQ ID NO: 2776092 - DNA, 25 bp, Homo sapien
gatctgacatatatcgttgatgaag

SEQ ID NO: 2776093 - DNA, 25 bp, Homo sapien
gggacattattttctataccattgc

SEQ ID NO: 2776094 - DNA, 25 bp, Homo sapien
cattattttctataccattgctatc

SEQ ID NO: 2776095 - DNA, 25 bp, Homo sapien
gacattattttctataccattgcta

SEQ ID NO: 2776096 - DNA, 25 bp, Homo sapien
attttctataccattgctatcatct

SEQ ID NO: 2776097 - DNA, 25 bp, Homo sapien
gaataatggccactaagaaaacacc

SEQ ID NO: 2776098 - DNA, 25 bp, Homo sapien
cagagctcggagaatagaggaatcc

SEQ ID NO: 2776099 - DNA, 25 bp, Homo sapien
tgttcagaagtgatggtccattcca

SEQ ID NO: 2776100 - DNA, 25 bp, Homo sapien
cagtgatccttatggtgctatacaa

SEQ ID NO: 2776101 - DNA, 25 bp, Homo sapien
ggcttcgaggaattcggaactccca

SEQ ID NO: 2776102 - DNA, 25 bp, Homo sapien
aagaagaattctcacgcaggtaggc

SEQ ID NO: 2776103 - DNA, 25 bp, Homo sapien
gaaataacagatgccatagccccaa

SEQ ID NO: 2776104 - DNA, 25 bp, Homo sapien
gcttaactctaaacaaaggctgtgt

SEQ ID NO: 2776105 - DNA, 25 bp, Homo sapien
tgttcaatctgctcaaattctttcc

SEQ ID NO: 2776106 - DNA, 25 bp, Homo sapien
agctgttcaatctgctcaaattctt

SEQ ID NO: 2776107 - DNA, 25 bp, Homo sapien
atctgctcaaattctttcccctcat

SEQ ID NO: 2776108 - DNA, 25 bp, Homo sapien
caatctgctcaaattctttcccctc

SEQ ID NO: 2776109 - DNA, 25 bp, Homo sapien
tagtgcacggcaccagtaagattcc

SEQ ID NO: 2776110 - DNA, 25 bp, Homo sapien
tgcacggcaccagtaagattcccca

SEQ ID NO: 2776111 - DNA, 25 bp, Homo sapien
gcacggcaccagtaagattccccat

SEQ ID NO: 2776112 - DNA, 25 bp, Homo sapien
aatagtgcacggcaccagtaagatt

SEQ ID NO: 2776113 - DNA, 25 bp, Homo sapien
tacactcccattactactgtaccag

SEQ ID NO: 2776114 - DNA, 25 bp, Homo sapien
catgtcaagacagtagaatccccta

SEQ ID NO: 2776115 - DNA, 25 bp, Homo sapien
cctacgtaagagatcaatggcttgt

SEQ ID NO: 2776116 - DNA, 25 bp, Homo sapien
tcccattactactgtaccaggtcca

SEQ ID NO: 2776117 - DNA, 25 bp, Homo sapien
tagtgcattactagggcaatgacct

SEQ ID NO: 2776118 - DNA, 25 bp, Homo sapien
tgaagagctacctgcttgggaagca

SEQ ID NO: 2776119 - DNA, 25 bp, Homo sapien
tgacaatgactgagtgacaacatgg

SEQ ID NO: 2776120 - DNA, 25 bp, Homo sapien
tagacactcagtaattaaggacaca

SEQ ID NO: 2776121 - DNA, 25 bp, Homo sapien
gaagcaagccattctgctattgatg

SEQ ID NO: 2776122 - DNA, 25 bp, Homo sapien
tggagccttgagaatagcatccaca

SEQ ID NO: 2776123 - DNA, 25 bp, Homo sapien
gtcacagcagacagtcgggctttag

SEQ ID NO: 2776124 - DNA, 25 bp, Homo sapien
ttagatcatggcaatggtgaagcaa

SEQ ID NO: 2776125 - DNA, 25 bp, Homo sapien
catttgtttgctattaatgatggtg

SEQ ID NO: 2776126 - DNA, 25 bp, Homo sapien
cctctcgaaagaaacaagaataact

SEQ ID NO: 2776127 - DNA, 25 bp, Homo sapien
tttcctctcgaaagaaacaagaata

SEQ ID NO: 2776128 - DNA, 25 bp, Homo sapien
agaataacttcccatttgtttgcta

SEQ ID NO: 2776129 - DNA, 25 bp, Homo sapien
tgggtatacaaggtgcttcctgttg

SEQ ID NO: 2776130 - DNA, 25 bp, Homo sapien
tgttgcactgacaagataattattc

SEQ ID NO: 2776131 - DNA, 25 bp, Homo sapien
ctgtattgggtatacaaggtgcttc

SEQ ID NO: 2776132 - DNA, 25 bp, Homo sapien
tatacaaggtgcttcctgttgcact

SEQ ID NO: 2776133 - DNA, 25 bp, Homo sapien
tttttttctactggcatactagaat

SEQ ID NO: 2776134 - DNA, 25 bp, Homo sapien
gttgtgaactggcatgtgagattta

SEQ ID NO: 2776135 - DNA, 25 bp, Homo sapien
ttttctactggcatactagaatgtt

SEQ ID NO: 2776136 - DNA, 25 bp, Homo sapien
tgtgaactggcatgtgagatttaca

SEQ ID NO: 2776137 - DNA, 25 bp, Homo sapien
tgaatcatggatctaggcattttgc

SEQ ID NO: 2776138 - DNA, 25 bp, Homo sapien
gaagaataccccactacctaggata

SEQ ID NO: 2776139 - DNA, 25 bp, Homo sapien
gaaactggttaagtctctggatcca

SEQ ID NO: 2776140 - DNA, 25 bp, Homo sapien
tgctgcaacccctagtgaatcatgg

SEQ ID NO: 2776141 - DNA, 25 bp, Homo sapien
gggcacctgaagattataagatact

SEQ ID NO: 2776142 - DNA, 25 bp, Homo sapien
tatcggacgtcaggtgctatgtttg

SEQ ID NO: 2776143 - DNA, 25 bp, Homo sapien
tgtgtttggaagacggtagtatatc

SEQ ID NO: 2776144 - DNA, 25 bp, Homo sapien
tatttagggatgcatacctgggtaa

SEQ ID NO: 2776145 - DNA, 25 bp, Homo sapien
attcagcaccatcatctaactttat

SEQ ID NO: 2776146 - DNA, 25 bp, Homo sapien
ccatcatctaactttatggtgagat

SEQ ID NO: 2776147 - DNA, 25 bp, Homo sapien
tcagcaccatcatctaactttatgg

SEQ ID NO: 2776148 - DNA, 25 bp, Homo sapien
caccatcatctaactttatggtgag

SEQ ID NO: 2776149 - DNA, 25 bp, Homo sapien
cagtcagtgatatgttatgactctc

SEQ ID NO: 2776150 - DNA, 25 bp, Homo sapien
ttctctgagaggtggacttgtaaaa

SEQ ID NO: 2776151 - DNA, 25 bp, Homo sapien
tatgttatgactctccaaggaaaag

SEQ ID NO: 2776152 - DNA, 25 bp, Homo sapien
agaggtggacttgtaaaaggcgaat

SEQ ID NO: 2776153 - DNA, 25 bp, Homo sapien
tatgagtaagtttctgacctgatgc

SEQ ID NO: 2776154 - DNA, 25 bp, Homo sapien
ctcaccagatcgtctcagatggcat

SEQ ID NO: 2776155 - DNA, 25 bp, Homo sapien
tataacgcacttggtagcaaaaggt

SEQ ID NO: 2776156 - DNA, 25 bp, Homo sapien
gcaaaaggttccagctcagaatcac

SEQ ID NO: 2776157 - DNA, 25 bp, Homo sapien
gaactgcaatactctgaggtgaacc

SEQ ID NO: 2776158 - DNA, 25 bp, Homo sapien
ttttgcgggaaaagatccaggtatc

SEQ ID NO: 2776159 - DNA, 25 bp, Homo sapien
caacttaaccctgacgcctatggaa

SEQ ID NO: 2776160 - DNA, 25 bp, Homo sapien
gatgaaactccttaatgcccacact

SEQ ID NO: 2776161 - DNA, 25 bp, Homo sapien
tcccaattttagttactggtggcca

SEQ ID NO: 2776162 - DNA, 25 bp, Homo sapien
aaggaaatctgcgaaggaacccacg

SEQ ID NO: 2776163 - DNA, 25 bp, Homo sapien
taatgttttgcacgtaatccctctg

SEQ ID NO: 2776164 - DNA, 25 bp, Homo sapien
aacatcctcggcaaggtgaggtggc

SEQ ID NO: 2776165 - DNA, 25 bp, Homo sapien
agtcgctagctggtccctgcaacca

SEQ ID NO: 2776166 - DNA, 25 bp, Homo sapien
ggaggtgatactcgagccttactct

SEQ ID NO: 2776167 - DNA, 25 bp, Homo sapien
ctctcgaatcaagaaaagggagtag

SEQ ID NO: 2776168 - DNA, 25 bp, Homo sapien
tcatgccatatttgcccaagccaag

SEQ ID NO: 2776169 - DNA, 25 bp, Homo sapien
gcgcgccggcgatgccctctgcccg

SEQ ID NO: 2776170 - DNA, 25 bp, Homo sapien
cccggcgcgccggcgatgccctctg

SEQ ID NO: 2776171 - DNA, 25 bp, Homo sapien
tctgcccgcggggacccgagcctcg

SEQ ID NO: 2776172 - DNA, 25 bp, Homo sapien
gcgatgccctctgcccgcggggacc

SEQ ID NO: 2776173 - DNA, 25 bp, Homo sapien
cgtccgccgagcttgggcgcgcggc

SEQ ID NO: 2776174 - DNA, 25 bp, Homo sapien
tggggcactgccgtccgccgagctt

SEQ ID NO: 2776175 - DNA, 25 bp, Homo sapien
gggcactgccgtccgccgagcttgg

SEQ ID NO: 2776176 - DNA, 25 bp, Homo sapien
ctgccgtccgccgagcttgggcgcg

SEQ ID NO: 2776177 - DNA, 25 bp, Homo sapien
gggtccgcctgggtcctcgtggaga

SEQ ID NO: 2776178 - DNA, 25 bp, Homo sapien
agggtccgcctgggtcctcgtggag

SEQ ID NO: 2776179 - DNA, 25 bp, Homo sapien
ggtccgcctgggtcctcgtggagac

SEQ ID NO: 2776180 - DNA, 25 bp, Homo sapien
cagagggtccgcctgggtcctcgtg

SEQ ID NO: 2776181 - DNA, 25 bp, Homo sapien
ccgagacgctcttaccgcgcccggc

SEQ ID NO: 2776182 - DNA, 25 bp, Homo sapien
cccgagacgctcttaccgcgcccgg

SEQ ID NO: 2776183 - DNA, 25 bp, Homo sapien
ccccgagacgctcttaccgcgcccg

SEQ ID NO: 2776184 - DNA, 25 bp, Homo sapien
cgagacgctcttaccgcgcccggcc

SEQ ID NO: 2776185 - DNA, 25 bp, Homo sapien
agttgatgctgatccccactgttgc

SEQ ID NO: 2776186 - DNA, 25 bp, Homo sapien
ccaagttgatgctgatccccactgt

SEQ ID NO: 2776187 - DNA, 25 bp, Homo sapien
gatgctgatccccactgttgctttt

SEQ ID NO: 2776188 - DNA, 25 bp, Homo sapien
atgctgatccccactgttgcttttg

SEQ ID NO: 2776189 - DNA, 25 bp, Homo sapien
tctcagagtattgcagttctgagaa

SEQ ID NO: 2776190 - DNA, 25 bp, Homo sapien
ctcagagtattgcagttctgagaac

SEQ ID NO: 2776191 - DNA, 25 bp, Homo sapien
atctcagagtattgcagttctgaga

SEQ ID NO: 2776192 - DNA, 25 bp, Homo sapien
attctgttgatttgaggtgtagagg

SEQ ID NO: 2776193 - DNA, 25 bp, Homo sapien
atcattgttggtttatcatctgttt

SEQ ID NO: 2776194 - DNA, 25 bp, Homo sapien
tgtagtcaactttggaattggtgtg

SEQ ID NO: 2776195 - DNA, 25 bp, Homo sapien
tgatttgaggtgtagaggtctttag

SEQ ID NO: 2776196 - DNA, 25 bp, Homo sapien
tttctgtatgcaatccaggaacaaa

SEQ ID NO: 2776197 - DNA, 25 bp, Homo sapien
tctgtatgcaatccaggaacaaaat

SEQ ID NO: 2776198 - DNA, 25 bp, Homo sapien
atttctgtatgcaatccaggaacaa

SEQ ID NO: 2776199 - DNA, 25 bp, Homo sapien
tcttcagtaagtcacttatttctgt

SEQ ID NO: 2776200 - DNA, 25 bp, Homo sapien
tgtgaaaactgtctacagatgggca

SEQ ID NO: 2776201 - DNA, 25 bp, Homo sapien
cagcattatgtgaaaactgtctaca

SEQ ID NO: 2776202 - DNA, 25 bp, Homo sapien
actgtctacagatgggcatgatagt

SEQ ID NO: 2776203 - DNA, 25 bp, Homo sapien
attatgtgaaaactgtctacagatg

SEQ ID NO: 2776204 - DNA, 25 bp, Homo sapien
tccagaaacccaatggaatggcagg

SEQ ID NO: 2776205 - DNA, 25 bp, Homo sapien
ttgtacttgtactgctgtccagaaa

SEQ ID NO: 2776206 - DNA, 25 bp, Homo sapien
tatctatagggaatcttgtacttgt

SEQ ID NO: 2776207 - DNA, 25 bp, Homo sapien
caaatgaatgtatctatagggaatc

SEQ ID NO: 2776208 - DNA, 25 bp, Homo sapien
aaagttggctgtcctatgtacctca

SEQ ID NO: 2776209 - DNA, 25 bp, Homo sapien
ccgcaccaaaactcgaactatcaag

SEQ ID NO: 2776210 - DNA, 25 bp, Homo sapien
caagagatacttgaagttcctccaa

SEQ ID NO: 2776211 - DNA, 25 bp, Homo sapien
gaagttcctccaaagttggctgtcc

SEQ ID NO: 2776212 - DNA, 25 bp, Homo sapien
gctacgttcatctgcattggtgcaa

SEQ ID NO: 2776213 - DNA, 25 bp, Homo sapien
attggtgcaaagcaggtgtctacac

SEQ ID NO: 2776214 - DNA, 25 bp, Homo sapien
ggtgtctacaccagctaactcacat

SEQ ID NO: 2776215 - DNA, 25 bp, Homo sapien
tcatacaaccatccaacgacatgct

SEQ ID NO: 2776216 - DNA, 25 bp, Homo sapien
tattagtactgcatcgtcactatgg

SEQ ID NO: 2776217 - DNA, 25 bp, Homo sapien
tactgcatcgtcactatggatttgc

SEQ ID NO: 2776218 - DNA, 25 bp, Homo sapien
tatcttgcgtccatcccttctacgt

SEQ ID NO: 2776219 - DNA, 25 bp, Homo sapien
tcccttctacgtgctattagtactg

SEQ ID NO: 2776220 - DNA, 25 bp, Homo sapien
gtctaggctctatgttttacacgta

SEQ ID NO: 2776221 - DNA, 25 bp, Homo sapien
tccttcggctatcccaggtttgagg

SEQ ID NO: 2776222 - DNA, 25 bp, Homo sapien
tatctccaaagagaaattttagtcc

SEQ ID NO: 2776223 - DNA, 25 bp, Homo sapien
ttacacgtatatatctccaaagaga

SEQ ID NO: 2776224 - DNA, 25 bp, Homo sapien
aagacaggccacaagtattctctca

SEQ ID NO: 2776225 - DNA, 25 bp, Homo sapien
tcctaagacagggattaccattaag

SEQ ID NO: 2776226 - DNA, 25 bp, Homo sapien
tcatgaattaggttaagcaaacact

SEQ ID NO: 2776227 - DNA, 25 bp, Homo sapien
tcacctggtaaatctacttcaaagc

SEQ ID NO: 2776228 - DNA, 25 bp, Homo sapien
tcaccaatggattaaccattgcatt

SEQ ID NO: 2776229 - DNA, 25 bp, Homo sapien
gccacttcagatgttctctcaccaa

SEQ ID NO: 2776230 - DNA, 25 bp, Homo sapien
atttttccaactggttgtatcagcc

SEQ ID NO: 2776231 - DNA, 25 bp, Homo sapien
tatcagcctagggatgacaaatatt

SEQ ID NO: 2776232 - DNA, 25 bp, Homo sapien
aatacattgtttaaggccaaacctg

SEQ ID NO: 2776233 - DNA, 25 bp, Homo sapien
atacattgtttaaggccaaacctgg

SEQ ID NO: 2776234 - DNA, 25 bp, Homo sapien
acattgtttaaggccaaacctggtg

SEQ ID NO: 2776235 - DNA, 25 bp, Homo sapien
aggcgtctgaggcaggatgattgct

SEQ ID NO: 2776236 - DNA, 25 bp, Homo sapien
gaacccaggatttcgaggctccagt

SEQ ID NO: 2776237 - DNA, 25 bp, Homo sapien
ctgtagctgcagctactcaggcgtc

SEQ ID NO: 2776238 - DNA, 25 bp, Homo sapien
tagctgcagctactcaggcgtctga

SEQ ID NO: 2776239 - DNA, 25 bp, Homo sapien
tccttccaattaactcctgttctct

SEQ ID NO: 2776240 - DNA, 25 bp, Homo sapien
catttggttgtactgtaagaatggg

SEQ ID NO: 2776241 - DNA, 25 bp, Homo sapien
gctgccaatgttccttccaattaac

SEQ ID NO: 2776242 - DNA, 25 bp, Homo sapien
cctagttactccaatgctgccaatg

SEQ ID NO: 2776243 - DNA, 25 bp, Homo sapien
tctgctacggtttttactggagctc

SEQ ID NO: 2776244 - DNA, 25 bp, Homo sapien
gacttaaattctgattggcgctttg

SEQ ID NO: 2776245 - DNA, 25 bp, Homo sapien
ttcctgtggtatcaacagtatcaac

SEQ ID NO: 2776246 - DNA, 25 bp, Homo sapien
tctgattggcgctttgtagaaaggc

SEQ ID NO: 2776247 - DNA, 25 bp, Homo sapien
tgcttctcgtcttctgacatagcaa

SEQ ID NO: 2776248 - DNA, 25 bp, Homo sapien
ctgcttctcgtcttctgacatagca

SEQ ID NO: 2776249 - DNA, 25 bp, Homo sapien
gcttctcgtcttctgacatagcaac

SEQ ID NO: 2776250 - DNA, 25 bp, Homo sapien
ttctcgtcttctgacatagcaacaa

SEQ ID NO: 2776251 - DNA, 25 bp, Homo sapien
cacaagaagcatggcccaagcatct

SEQ ID NO: 2776252 - DNA, 25 bp, Homo sapien
tgcacaagaagcatggcccaagcat

SEQ ID NO: 2776253 - DNA, 25 bp, Homo sapien
tctgcttctggtgaaagcctcacgt

SEQ ID NO: 2776254 - DNA, 25 bp, Homo sapien
cttctggtgaaagcctcacgtgctg

SEQ ID NO: 2776255 - DNA, 25 bp, Homo sapien
catgcctctggtattaagcaggacc

SEQ ID NO: 2776256 - DNA, 25 bp, Homo sapien
gctaaaataacctagacagaaaaga

SEQ ID NO: 2776257 - DNA, 25 bp, Homo sapien
catagatttggaagcaatgtgaaaa

SEQ ID NO: 2776258 - DNA, 25 bp, Homo sapien
ctcgctccctggacttactttactt

SEQ ID NO: 2776259 - DNA, 25 bp, Homo sapien
gtgcagtggtatagttacagtacac

SEQ ID NO: 2776260 - DNA, 25 bp, Homo sapien
ttacagtagacctatcagaagaggt

SEQ ID NO: 2776261 - DNA, 25 bp, Homo sapien
tggtatagttacagtacactgcagc

SEQ ID NO: 2776262 - DNA, 25 bp, Homo sapien
ggttttttacagtagacctatcaga

SEQ ID NO: 2776263 - DNA, 25 bp, Homo sapien
ctgccactagcagaggctattttga

SEQ ID NO: 2776264 - DNA, 25 bp, Homo sapien
tcaaaatccatcatagggcttcttg

SEQ ID NO: 2776265 - DNA, 25 bp, Homo sapien
ttaagactgtactaatggctgggtc

SEQ ID NO: 2776266 - DNA, 25 bp, Homo sapien
ttcttgtcggcttcactcctggcct

SEQ ID NO: 2776267 - DNA, 25 bp, Homo sapien
agggagtcttcacgaccgctcagct

SEQ ID NO: 2776268 - DNA, 25 bp, Homo sapien
tgggtttgccacaagactataattc

SEQ ID NO: 2776269 - DNA, 25 bp, Homo sapien
cggtttgggtttgccacaagactat

SEQ ID NO: 2776270 - DNA, 25 bp, Homo sapien
cccgcccgggatggctaatactctg

SEQ ID NO: 2776271 - DNA, 25 bp, Homo sapien
agccggtgattgctctctggctgtc

SEQ ID NO: 2776272 - DNA, 25 bp, Homo sapien
ccagccggtgattgctctctggctg

SEQ ID NO: 2776273 - DNA, 25 bp, Homo sapien
cagccggtgattgctctctggctgt

SEQ ID NO: 2776274 - DNA, 25 bp, Homo sapien
cccagccggtgattgctctctggct

SEQ ID NO: 2776275 - DNA, 25 bp, Homo sapien
gcgggtgagggagaaagtgagactt

SEQ ID NO: 2776276 - DNA, 25 bp, Homo sapien
atctgggaatgcaaagccgacctcc

SEQ ID NO: 2776277 - DNA, 25 bp, Homo sapien
gtcatcaccatccattgtcagaagg

SEQ ID NO: 2776278 - DNA, 25 bp, Homo sapien
tgagacttggtgtcatcaccatcca

SEQ ID NO: 2776279 - DNA, 25 bp, Homo sapien
tgaatatttacgaaagctggaagcg

SEQ ID NO: 2776280 - DNA, 25 bp, Homo sapien
cctcttctctcacccaggatcactt

SEQ ID NO: 2776281 - DNA, 25 bp, Homo sapien
ttaactgaatatttacgaaagctgg

SEQ ID NO: 2776282 - DNA, 25 bp, Homo sapien
aggatcacttccgaaaccacttcgc

SEQ ID NO: 2776283 - DNA, 25 bp, Homo sapien
gaattcagaaggatatcgacgtcgt

SEQ ID NO: 2776284 - DNA, 25 bp, Homo sapien
taatggggatgtgttcaaggcaaga

SEQ ID NO: 2776285 - DNA, 25 bp, Homo sapien
cgtgatccagaagtccagagctgag

SEQ ID NO: 2776286 - DNA, 25 bp, Homo sapien
tatcgacgtcgtgatccagaagtcc

SEQ ID NO: 2776287 - DNA, 25 bp, Homo sapien
agggattcctcggattcccaaggca

SEQ ID NO: 2776288 - DNA, 25 bp, Homo sapien
ggattcctcggattcccaaggcacc

SEQ ID NO: 2776289 - DNA, 25 bp, Homo sapien
tagtcccctccgactggcaaagaga

SEQ ID NO: 2776290 - DNA, 25 bp, Homo sapien
ggcagtgcgtggtatttccagcccc

SEQ ID NO: 2776291 - DNA, 25 bp, Homo sapien
cataacatgtacatacctgaaactc

SEQ ID NO: 2776292 - DNA, 25 bp, Homo sapien
taagtacatgagagtaaatcacatt

SEQ ID NO: 2776293 - DNA, 25 bp, Homo sapien
gcctactaattttcaatcaccatag

SEQ ID NO: 2776294 - DNA, 25 bp, Homo sapien
gtttgaatattgagcttaaacataa

SEQ ID NO: 2776295 - DNA, 25 bp, Homo sapien
cagacgggtgaatgagtacggaggt

SEQ ID NO: 2776296 - DNA, 25 bp, Homo sapien
tccccaaagtttgcttaagtgtatg

SEQ ID NO: 2776297 - DNA, 25 bp, Homo sapien
taagtgtatggttctcacacattcc

SEQ ID NO: 2776298 - DNA, 25 bp, Homo sapien
taagggttagtttgtaagtgatgct

SEQ ID NO: 2776299 - DNA, 25 bp, Homo sapien
cagaacagggtttcttccaacctga

SEQ ID NO: 2776300 - DNA, 25 bp, Homo sapien
agaatcagaacagggtttcttccaa

SEQ ID NO: 2776301 - DNA, 25 bp, Homo sapien
tcaagaatcagaacagggtttcttc

SEQ ID NO: 2776302 - DNA, 25 bp, Homo sapien
atcagaacagggtttcttccaacct

SEQ ID NO: 2776303 - DNA, 25 bp, Homo sapien
tggctacaatgcagtgtaaatattg

SEQ ID NO: 2776304 - DNA, 25 bp, Homo sapien
ggctacaatgcagtgtaaatattgc

SEQ ID NO: 2776305 - DNA, 25 bp, Homo sapien
gctacaatgcagtgtaaatattgca

SEQ ID NO: 2776306 - DNA, 25 bp, Homo sapien
ttggctacaatgcagtgtaaatatt

SEQ ID NO: 2776307 - DNA, 25 bp, Homo sapien
cataaaattcgataaacatacaagt

SEQ ID NO: 2776308 - DNA, 25 bp, Homo sapien
tgaaaaacataaaattcgataaaca

SEQ ID NO: 2776309 - DNA, 25 bp, Homo sapien
acataaaattcgataaacatacaag

SEQ ID NO: 2776310 - DNA, 25 bp, Homo sapien
agatctgatcacgaactctaagagg

SEQ ID NO: 2776311 - DNA, 25 bp, Homo sapien
gccacatgattagcatcactaacca

SEQ ID NO: 2776312 - DNA, 25 bp, Homo sapien
tcagatctgatcacgaactctaaga

SEQ ID NO: 2776313 - DNA, 25 bp, Homo sapien
agccacatgattagcatcactaacc

SEQ ID NO: 2776314 - DNA, 25 bp, Homo sapien
gcgtaacttaagttgtcttgtctta

SEQ ID NO: 2776315 - DNA, 25 bp, Homo sapien
caaaagcgtaacttaagttgtcttg

SEQ ID NO: 2776316 - DNA, 25 bp, Homo sapien
tttctggtacgttctcaaatactgc

SEQ ID NO: 2776317 - DNA, 25 bp, Homo sapien
aagttgtcttgtcttatgtatagca

SEQ ID NO: 2776318 - DNA, 25 bp, Homo sapien
cataccgtgaacagtaactgataac

SEQ ID NO: 2776319 - DNA, 25 bp, Homo sapien
ttcttcataccgtgaacagtaactg

SEQ ID NO: 2776320 - DNA, 25 bp, Homo sapien
tattttcttcataccgtgaacagta

SEQ ID NO: 2776321 - DNA, 25 bp, Homo sapien
ccgtgaacagtaactgataacttta

SEQ ID NO: 2776322 - DNA, 25 bp, Homo sapien
tgtatacatggacaatgtgactcct

SEQ ID NO: 2776323 - DNA, 25 bp, Homo sapien
aagactttgaagtgccctttgctgc

SEQ ID NO: 2776324 - DNA, 25 bp, Homo sapien
taaacatatttgcatggcctacaaa

SEQ ID NO: 2776325 - DNA, 25 bp, Homo sapien
agaaattcatcatgcgcaatgtagg

SEQ ID NO: 2776326 - DNA, 25 bp, Homo sapien
tgcttgcatgatcagtgcattagaa

SEQ ID NO: 2776327 - DNA, 25 bp, Homo sapien
cccaactgcagttatatgagagata

SEQ ID NO: 2776328 - DNA, 25 bp, Homo sapien
tctggaattactgatatagagatgc

SEQ ID NO: 2776329 - DNA, 25 bp, Homo sapien
catctcattattggtacctctgtgc

SEQ ID NO: 2776330 - DNA, 25 bp, Homo sapien
tctttgtacaaggattagggagttc

SEQ ID NO: 2776331 - DNA, 25 bp, Homo sapien
ttaggacaccatcccagcaattcag

SEQ ID NO: 2776332 - DNA, 25 bp, Homo sapien
tgagaaggtcctatgagcaacacaa

SEQ ID NO: 2776333 - DNA, 25 bp, Homo sapien
tctaattatctgctgccccacctgt

SEQ ID NO: 2776334 - DNA, 25 bp, Homo sapien
caactggagctcaggtagtaacaca

SEQ ID NO: 2776335 - DNA, 25 bp, Homo sapien
tgttccagtccactagttatcttca

SEQ ID NO: 2776336 - DNA, 25 bp, Homo sapien
ttttgtagcctaccgtatgtgaacg

SEQ ID NO: 2776337 - DNA, 25 bp, Homo sapien
cttctagttaagtggcaaattggca

SEQ ID NO: 2776338 - DNA, 25 bp, Homo sapien
tttgtgattgccaaggagagaaatt

SEQ ID NO: 2776339 - DNA, 25 bp, Homo sapien
ttgtgattgccaaggagagaaatta

SEQ ID NO: 2776340 - DNA, 25 bp, Homo sapien
tgattgccaaggagagaaattaaac

SEQ ID NO: 2776341 - DNA, 25 bp, Homo sapien
tgtgattgccaaggagagaaattaa

SEQ ID NO: 2776342 - DNA, 25 bp, Homo sapien
caaattcaaattcagtctgctgtcc

SEQ ID NO: 2776343 - DNA, 25 bp, Homo sapien
gagaagctattgacctcagacaact

SEQ ID NO: 2776344 - DNA, 25 bp, Homo sapien
ctccaagaattgaagtaaacccagg

SEQ ID NO: 2776345 - DNA, 25 bp, Homo sapien
gaaatagccattgctcactagctcc

SEQ ID NO: 2776346 - DNA, 25 bp, Homo sapien
catactaatagtgtgtgagggccca

SEQ ID NO: 2776347 - DNA, 25 bp, Homo sapien
gaaatgagatgcttaacccagtcac

SEQ ID NO: 2776348 - DNA, 25 bp, Homo sapien
tgttagcaggatatcatggcagtca

SEQ ID NO: 2776349 - DNA, 25 bp, Homo sapien
tccgcctccaggacagtacttggtg

SEQ ID NO: 2776350 - DNA, 25 bp, Homo sapien
taatgtaaatactgccaagagatca

SEQ ID NO: 2776351 - DNA, 25 bp, Homo sapien
caagagatcagtaaggccaaatatt

SEQ ID NO: 2776352 - DNA, 25 bp, Homo sapien
ccagcaagtcagtaaaaaatagtgc

SEQ ID NO: 2776353 - DNA, 25 bp, Homo sapien
tgcacaggatagtattgcaacctgc

SEQ ID NO: 2776354 - DNA, 25 bp, Homo sapien
tactgaatgcctctgtatgttagta

SEQ ID NO: 2776355 - DNA, 25 bp, Homo sapien
actgaatgcctctgtatgttagtaa

SEQ ID NO: 2776356 - DNA, 25 bp, Homo sapien
taaaatactgaatgcctctgtatgt

SEQ ID NO: 2776357 - DNA, 25 bp, Homo sapien
aatactgaatgcctctgtatgttag

SEQ ID NO: 2776358 - DNA, 25 bp, Homo sapien
taaatgcctaggtcaatgcactgtg

SEQ ID NO: 2776359 - DNA, 25 bp, Homo sapien
gatggctgcaatatgacagtcacct

SEQ ID NO: 2776360 - DNA, 25 bp, Homo sapien
cattgtagccccaattactggaagg

SEQ ID NO: 2776361 - DNA, 25 bp, Homo sapien
gaatacctgacttattgcctgtgca

SEQ ID NO: 2776362 - DNA, 25 bp, Homo sapien
ggagttaattcagcatatggcatca

SEQ ID NO: 2776363 - DNA, 25 bp, Homo sapien
tatggcatcaacgtaagtcactgta

SEQ ID NO: 2776364 - DNA, 25 bp, Homo sapien
taggaaacttgcactgctactccag

SEQ ID NO: 2776365 - DNA, 25 bp, Homo sapien
catggacccatgttggataggaaac

SEQ ID NO: 2776366 - DNA, 25 bp, Homo sapien
gtttccagtggatatccaaggattc

SEQ ID NO: 2776367 - DNA, 25 bp, Homo sapien
tatccaaggattctgggttaagagt

SEQ ID NO: 2776368 - DNA, 25 bp, Homo sapien
gtggcttcatgactcctgataagaa

SEQ ID NO: 2776369 - DNA, 25 bp, Homo sapien
aatgtccttcatgaattgtttccag

SEQ ID NO: 2776370 - DNA, 25 bp, Homo sapien
tccaggcgccccgtgtatggaaagc

SEQ ID NO: 2776371 - DNA, 25 bp, Homo sapien
ccccgtgtatggaaagcttcctgaa

SEQ ID NO: 2776372 - DNA, 25 bp, Homo sapien
ttgttgaagtattccaggcgccccg

SEQ ID NO: 2776373 - DNA, 25 bp, Homo sapien
tgtttgttgaagtattccaggcgcc

SEQ ID NO: 2776374 - DNA, 25 bp, Homo sapien
tgaatttaatttccctggcaccttc

SEQ ID NO: 2776375 - DNA, 25 bp, Homo sapien
cttgtatacctttggttactgaatt

SEQ ID NO: 2776376 - DNA, 25 bp, Homo sapien
atttccctggcaccttcagcaaagc

SEQ ID NO: 2776377 - DNA, 25 bp, Homo sapien
caccttcagcaaagcttcgtggcat

SEQ ID NO: 2776378 - DNA, 25 bp, Homo sapien
aaaattcctgtcacattgagtattt

SEQ ID NO: 2776379 - DNA, 25 bp, Homo sapien
aattcctgtcacattgagtatttct

SEQ ID NO: 2776380 - DNA, 25 bp, Homo sapien
attcctgtcacattgagtatttctt

SEQ ID NO: 2776381 - DNA, 25 bp, Homo sapien
aaattcctgtcacattgagtatttc

SEQ ID NO: 2776382 - DNA, 25 bp, Homo sapien
tcaggacacgtggctttgatgactt

SEQ ID NO: 2776383 - DNA, 25 bp, Homo sapien
gctttgatgactttgatcccctttc

SEQ ID NO: 2776384 - DNA, 25 bp, Homo sapien
ggctttgatgactttgatccccttt

SEQ ID NO: 2776385 - DNA, 25 bp, Homo sapien
gtcttggtggccatgatgcaataat

SEQ ID NO: 2776386 - DNA, 25 bp, Homo sapien
ggaatgaacatgacttgaagtgagg

SEQ ID NO: 2776387 - DNA, 25 bp, Homo sapien
tcttctcagctccaacacaacacga

SEQ ID NO: 2776388 - DNA, 25 bp, Homo sapien
acgaccaatcctgcaaccatgacat

SEQ ID NO: 2776389 - DNA, 25 bp, Homo sapien
tgaaatatgagattgtggaatgaac

SEQ ID NO: 2776390 - DNA, 25 bp, Homo sapien
caggccatttgataataatacacga

SEQ ID NO: 2776391 - DNA, 25 bp, Homo sapien
taaaaactgtcccagcaagagaatc

SEQ ID NO: 2776392 - DNA, 25 bp, Homo sapien
tgtgtcctaacattagtttattcag

SEQ ID NO: 2776393 - DNA, 25 bp, Homo sapien
tgtcccaattcagtatagagaggtc

SEQ ID NO: 2776394 - DNA, 25 bp, Homo sapien
ttgcactctgggcacccttgaactc

SEQ ID NO: 2776395 - DNA, 25 bp, Homo sapien
gctcaaacctagaaaagggaactgc

SEQ ID NO: 2776396 - DNA, 25 bp, Homo sapien
tctgggctcaaacctagaaaaggga

SEQ ID NO: 2776397 - DNA, 25 bp, Homo sapien
cttggatcttgcttgcactctgggc

SEQ ID NO: 2776398 - DNA, 25 bp, Homo sapien
tacagattcaacacacttagaatca

SEQ ID NO: 2776399 - DNA, 25 bp, Homo sapien
cagattcaacacacttagaatcaaa

SEQ ID NO: 2776400 - DNA, 25 bp, Homo sapien
tcaacacacttagaatcaaaatacc

SEQ ID NO: 2776401 - DNA, 25 bp, Homo sapien
gattcaacacacttagaatcaaaat

SEQ ID NO: 2776402 - DNA, 25 bp, Homo sapien
ctattgacgaaagcctctttccagt

SEQ ID NO: 2776403 - DNA, 25 bp, Homo sapien
gagcattcagagatgaggctgttct

SEQ ID NO: 2776404 - DNA, 25 bp, Homo sapien
gatgaggctgttctaccagggccaa

SEQ ID NO: 2776405 - DNA, 25 bp, Homo sapien
aggagtaagctgttgatccactggc

SEQ ID NO: 2776406 - DNA, 25 bp, Homo sapien
tattcagagtggaattctgagtctc

SEQ ID NO: 2776407 - DNA, 25 bp, Homo sapien
caattttagcataagaggagaaagc

SEQ ID NO: 2776408 - DNA, 25 bp, Homo sapien
tttttcgcagaaattgctgcctggc

SEQ ID NO: 2776409 - DNA, 25 bp, Homo sapien
ctgagtctcttagatgaatctcaaa

SEQ ID NO: 2776410 - DNA, 25 bp, Homo sapien
tcttggtaggaaaccattcagaccg

SEQ ID NO: 2776411 - DNA, 25 bp, Homo sapien
gaaggttccagggagtctcctcagg

SEQ ID NO: 2776412 - DNA, 25 bp, Homo sapien
agagcgcaggccttggttgcctgat

SEQ ID NO: 2776413 - DNA, 25 bp, Homo sapien
cagaccgggtatcctggtggctgtc

SEQ ID NO: 2776414 - DNA, 25 bp, Homo sapien
ctagggaaagagcggagcaggccat

SEQ ID NO: 2776415 - DNA, 25 bp, Homo sapien
tggtgctaatcaagactgctcgatg

SEQ ID NO: 2776416 - DNA, 25 bp, Homo sapien
cactttgcactttcaacgggctgga

SEQ ID NO: 2776417 - DNA, 25 bp, Homo sapien
tgacatggacgctgatttatagagc

SEQ ID NO: 2776418 - DNA, 25 bp, Homo sapien
tatgaggcgacagagctgcatgtgt

SEQ ID NO: 2776419 - DNA, 25 bp, Homo sapien
taagtttgcttgtaacacagacagt

SEQ ID NO: 2776420 - DNA, 25 bp, Homo sapien
ttgcttgtaacacagacagttttcc

SEQ ID NO: 2776421 - DNA, 25 bp, Homo sapien
gggacagtaagtttgcttgtaacac

SEQ ID NO: 2776422 - DNA, 25 bp, Homo sapien
gggccagggaagaccggagagagag

SEQ ID NO: 2776423 - DNA, 25 bp, Homo sapien
aacagctgcgtggtgcagccaatcc

SEQ ID NO: 2776424 - DNA, 25 bp, Homo sapien
agctccggaactggacaacagctgc

SEQ ID NO: 2776425 - DNA, 25 bp, Homo sapien
actcggattgaacgcggcagctccg

SEQ ID NO: 2776426 - DNA, 25 bp, Homo sapien
tcagtgaaagcatcggagggactcg

SEQ ID NO: 2776427 - DNA, 25 bp, Homo sapien
tgaaaaagggatggcgctgcagcac

SEQ ID NO: 2776428 - DNA, 25 bp, Homo sapien
ctgtgggaacgagcgaccgatctca

SEQ ID NO: 2776429 - DNA, 25 bp, Homo sapien
ggcgagagcaaggagcctcccggcc

SEQ ID NO: 2776430 - DNA, 25 bp, Homo sapien
ccggctggagtgtgcgaagggcttc

SEQ ID NO: 2776431 - DNA, 25 bp, Homo sapien
tctgtttccccatgacccggaggac

SEQ ID NO: 2776432 - DNA, 25 bp, Homo sapien
tgtttccccatgacccggaggacgc

SEQ ID NO: 2776433 - DNA, 25 bp, Homo sapien
cctctgtttccccatgacccggagg

SEQ ID NO: 2776434 - DNA, 25 bp, Homo sapien
tttccccatgacccggaggacgcgc

SEQ ID NO: 2776435 - DNA, 25 bp, Homo sapien
gaagagcgagcttcggttccgcccg

SEQ ID NO: 2776436 - DNA, 25 bp, Homo sapien
ggaaggtctcatccctgggacgctg

SEQ ID NO: 2776437 - DNA, 25 bp, Homo sapien
cacgcgcgtgttttcttgtggataa

SEQ ID NO: 2776438 - DNA, 25 bp, Homo sapien
ttgtggataactgcctcggacttgg

SEQ ID NO: 2776439 - DNA, 25 bp, Homo sapien
caggcagtcgctagaagttccaatc

SEQ ID NO: 2776440 - DNA, 25 bp, Homo sapien
gacagcccctttgctgattagagaa

SEQ ID NO: 2776441 - DNA, 25 bp, Homo sapien
tttcatttgtacatcgcctgccgac

SEQ ID NO: 2776442 - DNA, 25 bp, Homo sapien
gggcgaatcccacagtaattgcgca

SEQ ID NO: 2776443 - DNA, 25 bp, Homo sapien
ctgagtcagtccgcccaattttatg

SEQ ID NO: 2776444 - DNA, 25 bp, Homo sapien
cagtccgcccaattttatgctccat

SEQ ID NO: 2776445 - DNA, 25 bp, Homo sapien
tcagtccgcccaattttatgctcca

SEQ ID NO: 2776446 - DNA, 25 bp, Homo sapien
agtcagtccgcccaattttatgctc

SEQ ID NO: 2776447 - DNA, 25 bp, Homo sapien
ttctctctgccaatcgatgggaaag

SEQ ID NO: 2776448 - DNA, 25 bp, Homo sapien
tctgccaatcgatgggaaagagcat

SEQ ID NO: 2776449 - DNA, 25 bp, Homo sapien
tagattctctctgccaatcgatggg

SEQ ID NO: 2776450 - DNA, 25 bp, Homo sapien
ttagattctctctgccaatcgatgg

SEQ ID NO: 2776451 - DNA, 25 bp, Homo sapien
gccaacgtacaatggcacgttccat

SEQ ID NO: 2776452 - DNA, 25 bp, Homo sapien
ttcttatttggccaacgtacaatgg

SEQ ID NO: 2776453 - DNA, 25 bp, Homo sapien
tctccccaagtgacaattctttctc

SEQ ID NO: 2776454 - DNA, 25 bp, Homo sapien
gacaattctttctcactaccagtga

SEQ ID NO: 2776455 - DNA, 25 bp, Homo sapien
tgaaatgccacattcctttattcca

SEQ ID NO: 2776456 - DNA, 25 bp, Homo sapien
cctcagttgtgagggctgcgtatgt

SEQ ID NO: 2776457 - DNA, 25 bp, Homo sapien
tattccatgcccacctttgtgttgc

SEQ ID NO: 2776458 - DNA, 25 bp, Homo sapien
aatcctgtggttgggtgattagcac

SEQ ID NO: 2776459 - DNA, 25 bp, Homo sapien
aattgagcatgataagttgcagccc

SEQ ID NO: 2776460 - DNA, 25 bp, Homo sapien
tgagctgacagaacaccagagagtc

SEQ ID NO: 2776461 - DNA, 25 bp, Homo sapien
gatctaaatttcctcgaatgtaggg

SEQ ID NO: 2776462 - DNA, 25 bp, Homo sapien
tacgtatgcgattgaactaaactga

SEQ ID NO: 2776463 - DNA, 25 bp, Homo sapien
aaggcttggcaagggagcagtttat

SEQ ID NO: 2776464 - DNA, 25 bp, Homo sapien
gctgggctactgttagatcacaatt

SEQ ID NO: 2776465 - DNA, 25 bp, Homo sapien
ttagcacaacacttcaaaggcttgg

SEQ ID NO: 2776466 - DNA, 25 bp, Homo sapien
cacaacacttcaaaggcttgggctt

SEQ ID NO: 2776467 - DNA, 25 bp, Homo sapien
ggactttatagccatacttctattt

SEQ ID NO: 2776468 - DNA, 25 bp, Homo sapien
tatctaagtgtattagtaaaagcaa

SEQ ID NO: 2776469 - DNA, 25 bp, Homo sapien
gcaaacctattacatcttccttttg

SEQ ID NO: 2776470 - DNA, 25 bp, Homo sapien
tattttcattatctaagtgtattag

SEQ ID NO: 2776471 - DNA, 25 bp, Homo sapien
agaaaatgcagcatacaagactgtt

SEQ ID NO: 2776472 - DNA, 25 bp, Homo sapien
aaaatgcagcatacaagactgttgc

SEQ ID NO: 2776473 - DNA, 25 bp, Homo sapien
tgcagcatacaagactgttgcaagc

SEQ ID NO: 2776474 - DNA, 25 bp, Homo sapien
gcatacaagactgttgcaagcgttt

SEQ ID NO: 2776475 - DNA, 25 bp, Homo sapien
catggttgcctgtaaggaagagcca

SEQ ID NO: 2776476 - DNA, 25 bp, Homo sapien
ctaagaaacgtacgctgttagcatc

SEQ ID NO: 2776477 - DNA, 25 bp, Homo sapien
ttacttcccggaaagaccatggtgc

SEQ ID NO: 2776478 - DNA, 25 bp, Homo sapien
gccagaagtgtttgtactcaagctt

SEQ ID NO: 2776479 - DNA, 25 bp, Homo sapien
tgtgggccaatgatctgatggcaca

SEQ ID NO: 2776480 - DNA, 25 bp, Homo sapien
tgtgttgtgggccaatgatctgatg

SEQ ID NO: 2776481 - DNA, 25 bp, Homo sapien
ggccaatgatctgatggcacattgc

SEQ ID NO: 2776482 - DNA, 25 bp, Homo sapien
atgatctgatggcacattgccctct

SEQ ID NO: 2776483 - DNA, 25 bp, Homo sapien
gtcccctgcattcttttcgattatt

SEQ ID NO: 2776484 - DNA, 25 bp, Homo sapien
tctccctgacagtcccctgcattct

SEQ ID NO: 2776485 - DNA, 25 bp, Homo sapien
tgaaatcttaagcttgttgcagtaa

SEQ ID NO: 2776486 - DNA, 25 bp, Homo sapien
tattgtcccactgtttattagtaca

SEQ ID NO: 2776487 - DNA, 25 bp, Homo sapien
gtggtatgaaatcttaagcttgttg

SEQ ID NO: 2776488 - DNA, 25 bp, Homo sapien
taagcttgttgcagtaatcaatcag

SEQ ID NO: 2776489 - DNA, 25 bp, Homo sapien
gatatgatcaaaactggcaaacagc

SEQ ID NO: 2776490 - DNA, 25 bp, Homo sapien
aaacagttcgatatgcagctcaggc

SEQ ID NO: 2776491 - DNA, 25 bp, Homo sapien
gggtcacctcttgcacacactatgg

SEQ ID NO: 2776492 - DNA, 25 bp, Homo sapien
ccttaaatggtttgtggacgtctca

SEQ ID NO: 2776493 - DNA, 25 bp, Homo sapien
gtcccgatgacaccctgctcagtga

SEQ ID NO: 2776494 - DNA, 25 bp, Homo sapien
cagtgaagtgcaaacaatcgatggg

SEQ ID NO: 2776495 - DNA, 25 bp, Homo sapien
tctctgtcaatcaatgagtgtctct

SEQ ID NO: 2776496 - DNA, 25 bp, Homo sapien
caaacaatcgatgggttctctgtca

SEQ ID NO: 2776497 - DNA, 25 bp, Homo sapien
gacttttgacgtatcactgcagcca

SEQ ID NO: 2776498 - DNA, 25 bp, Homo sapien
gaggcatgtgctaacctaggactga

SEQ ID NO: 2776499 - DNA, 25 bp, Homo sapien
aaacgctcttctcgaacaggtgcag

SEQ ID NO: 2776500 - DNA, 25 bp, Homo sapien
cactaactttgatactggaagcaga

SEQ ID NO: 2776501 - DNA, 25 bp, Homo sapien
attcagcaagcacatctgagcaaac

SEQ ID NO: 2776502 - DNA, 25 bp, Homo sapien
tgaaattcagcaagcacatctgagc

SEQ ID NO: 2776503 - DNA, 25 bp, Homo sapien
aaattcagcaagcacatctgagcaa

SEQ ID NO: 2776504 - DNA, 25 bp, Homo sapien
cagtttataagggggagtgaggtca

SEQ ID NO: 2776505 - DNA, 25 bp, Homo sapien
tccaaagaatgtatatggagttgct

SEQ ID NO: 2776506 - DNA, 25 bp, Homo sapien
gaattatgcaactaggaggaagtag

SEQ ID NO: 2776507 - DNA, 25 bp, Homo sapien
ggatgatggaggcattctagcttta

SEQ ID NO: 2776508 - DNA, 25 bp, Homo sapien
caagaccaggaccagttaggcaaaa

SEQ ID NO: 2776509 - DNA, 25 bp, Homo sapien
ggccatgcttatcttctctatatca

SEQ ID NO: 2776510 - DNA, 25 bp, Homo sapien
ttccaattttagtatatgtgctgcc

SEQ ID NO: 2776511 - DNA, 25 bp, Homo sapien
ttagtatatgtgctgccgaagcaag

SEQ ID NO: 2776512 - DNA, 25 bp, Homo sapien
gtatatgtgctgccgaagcaagcac

SEQ ID NO: 2776513 - DNA, 25 bp, Homo sapien
cagcaaaggctatcatacaaaggag

SEQ ID NO: 2776514 - DNA, 25 bp, Homo sapien
ccatttctggataatgcatgctgca

SEQ ID NO: 2776515 - DNA, 25 bp, Homo sapien
tgatgcctgaaacaatgagagctgt

SEQ ID NO: 2776516 - DNA, 25 bp, Homo sapien
tggaatcaatggcagcggatcccgt

SEQ ID NO: 2776517 - DNA, 25 bp, Homo sapien
gggataattgtccacagtcatttcc

SEQ ID NO: 2776518 - DNA, 25 bp, Homo sapien
tggaaagcgaagcatattcccgctg

SEQ ID NO: 2776519 - DNA, 25 bp, Homo sapien
gggttcccacgaccaatgagaaaga

SEQ ID NO: 2776520 - DNA, 25 bp, Homo sapien
taacagggacacacggcataggggt

SEQ ID NO: 2776521 - DNA, 25 bp, Homo sapien
ccttgaagtaatctatcatcaacta

SEQ ID NO: 2776522 - DNA, 25 bp, Homo sapien
gtaatctatcatcaactatctcaat

SEQ ID NO: 2776523 - DNA, 25 bp, Homo sapien
cttgagcaccttgaagtaatctatc

SEQ ID NO: 2776524 - DNA, 25 bp, Homo sapien
gagcaccttgaagtaatctatcatc

SEQ ID NO: 2776525 - DNA, 25 bp, Homo sapien
tgtttcacacataggctccctgctg

SEQ ID NO: 2776526 - DNA, 25 bp, Homo sapien
gaagggaagtgatggacatcctttg

SEQ ID NO: 2776527 - DNA, 25 bp, Homo sapien
gactctcttcatgaccccctgataa

SEQ ID NO: 2776528 - DNA, 25 bp, Homo sapien
ccagtcgatattctgacagacttga

SEQ ID NO: 2776529 - DNA, 25 bp, Homo sapien
tgaaatacaggtcatgcttccagca

SEQ ID NO: 2776530 - DNA, 25 bp, Homo sapien
catatcagcagtcacacttggcagc

SEQ ID NO: 2776531 - DNA, 25 bp, Homo sapien
ggcagccgctttacaaggttgtcag

SEQ ID NO: 2776532 - DNA, 25 bp, Homo sapien
catcagggcccgtgacttgtccttt

SEQ ID NO: 2776533 - DNA, 25 bp, Homo sapien
aaccacgtactgcttagagatacta

SEQ ID NO: 2776534 - DNA, 25 bp, Homo sapien
ccacgtactgcttagagatactatg

SEQ ID NO: 2776535 - DNA, 25 bp, Homo sapien
tcaaccacgtactgcttagagatac

SEQ ID NO: 2776536 - DNA, 25 bp, Homo sapien
cttcaaccacgtactgcttagagat

SEQ ID NO: 2776537 - DNA, 25 bp, Homo sapien
ctgcctgataatctgatctccccat

SEQ ID NO: 2776538 - DNA, 25 bp, Homo sapien
tgctgtgtccattgtgaaggatgtt

SEQ ID NO: 2776539 - DNA, 25 bp, Homo sapien
gaaggatgttgaccctaccccttca

SEQ ID NO: 2776540 - DNA, 25 bp, Homo sapien
tcacctgcctgataatctgatctcc

SEQ ID NO: 2776541 - DNA, 25 bp, Homo sapien
tctcagtgtcaagggcacatgtcat

SEQ ID NO: 2776542 - DNA, 25 bp, Homo sapien
cttttctaggacaattcatcatctc

SEQ ID NO: 2776543 - DNA, 25 bp, Homo sapien
catctcagtgtcaagggcacatgtc

SEQ ID NO: 2776544 - DNA, 25 bp, Homo sapien
atcatctcagtgtcaagggcacatg

SEQ ID NO: 2776545 - DNA, 25 bp, Homo sapien
taatttcagggatatgatgtaggaa

SEQ ID NO: 2776546 - DNA, 25 bp, Homo sapien
cgtaatactaatttcagggatatga

SEQ ID NO: 2776547 - DNA, 25 bp, Homo sapien
tcgttgctgtagtgaaacgtaatac

SEQ ID NO: 2776548 - DNA, 25 bp, Homo sapien
tatctaactctagtgatttgacatc

SEQ ID NO: 2776549 - DNA, 25 bp, Homo sapien
caaaccagcaggtgaagagatattc

SEQ ID NO: 2776550 - DNA, 25 bp, Homo sapien
gccctcaaaccagcaggtgaagaga

SEQ ID NO: 2776551 - DNA, 25 bp, Homo sapien
accagcaggtgaagagatattctcc

SEQ ID NO: 2776552 - DNA, 25 bp, Homo sapien
tagagatgaaggccctcaaaccagc

SEQ ID NO: 2776553 - DNA, 25 bp, Homo sapien
ttgtcttcctggttctgagaagaac

SEQ ID NO: 2776554 - DNA, 25 bp, Homo sapien
ctcattgtcttcctggttctgagaa

SEQ ID NO: 2776555 - DNA, 25 bp, Homo sapien
tcattgtcttcctggttctgagaag

SEQ ID NO: 2776556 - DNA, 25 bp, Homo sapien
cattgtcttcctggttctgagaaga

SEQ ID NO: 2776557 - DNA, 25 bp, Homo sapien
gaagatgtcaagggaactgttactc

SEQ ID NO: 2776558 - DNA, 25 bp, Homo sapien
tactcttatgaaagtcaagttttcc

SEQ ID NO: 2776559 - DNA, 25 bp, Homo sapien
tgtcaagggaactgttactcttatg

SEQ ID NO: 2776560 - DNA, 25 bp, Homo sapien
ctgttactcttatgaaagtcaagtt

SEQ ID NO: 2776561 - DNA, 25 bp, Homo sapien
ttctactgtcataattcctttgttc

SEQ ID NO: 2776562 - DNA, 25 bp, Homo sapien
tgttctactgtcataattcctttgt

SEQ ID NO: 2776563 - DNA, 25 bp, Homo sapien
gattgttctactgtcataattcctt

SEQ ID NO: 2776564 - DNA, 25 bp, Homo sapien
gaagtgattgttctactgtcataat

SEQ ID NO: 2776565 - DNA, 25 bp, Homo sapien
gtaaatgtactgcccaagcaatcac

SEQ ID NO: 2776566 - DNA, 25 bp, Homo sapien
tcactgcatgtagcaatgaatatca

SEQ ID NO: 2776567 - DNA, 25 bp, Homo sapien
gcatgtagcaatgaatatcacaccc

SEQ ID NO: 2776568 - DNA, 25 bp, Homo sapien
tgtccagaccccagtgtagcacaaa

SEQ ID NO: 2776569 - DNA, 25 bp, Homo sapien
cctggctgtccagaccccagtgtag

SEQ ID NO: 2776570 - DNA, 25 bp, Homo sapien
cctttcaatgatatacttaatcctc

SEQ ID NO: 2776571 - DNA, 25 bp, Homo sapien
ccctcccagtcatttacaacataat

SEQ ID NO: 2776572 - DNA, 25 bp, Homo sapien
tttcaatgatatacttaatcctccc

SEQ ID NO: 2776573 - DNA, 25 bp, Homo sapien
tcaatgatatacttaatcctcccac

SEQ ID NO: 2776574 - DNA, 25 bp, Homo sapien
cagcctgtgttctgtatgcatatta

SEQ ID NO: 2776575 - DNA, 25 bp, Homo sapien
tagtcacatgcttaacaatttgggc

SEQ ID NO: 2776576 - DNA, 25 bp, Homo sapien
gccatcaagcttgtagcagacgtca

SEQ ID NO: 2776577 - DNA, 25 bp, Homo sapien
gacagaagcatgcagtgacctctgg

SEQ ID NO: 2776578 - DNA, 25 bp, Homo sapien
cttataacaggtaccagatgatgca

SEQ ID NO: 2776579 - DNA, 25 bp, Homo sapien
cacaattctacagccctttggagca

SEQ ID NO: 2776580 - DNA, 25 bp, Homo sapien
tgaagccacttagcacaggatcttg

SEQ ID NO: 2776581 - DNA, 25 bp, Homo sapien
gcttggtgcaatctgtgaagccact

SEQ ID NO: 2776582 - DNA, 25 bp, Homo sapien
tccaggcatccaagtgagggtcacc

SEQ ID NO: 2776583 - DNA, 25 bp, Homo sapien
caagtgagggtcacctctctttttt

SEQ ID NO: 2776584 - DNA, 25 bp, Homo sapien
aagaacttttccaaggagcatccag

SEQ ID NO: 2776585 - DNA, 25 bp, Homo sapien
ttttccaaggagcatccaggcatcc

SEQ ID NO: 2776586 - DNA, 25 bp, Homo sapien
ctctttggtttcaccaatctcttta

SEQ ID NO: 2776587 - DNA, 25 bp, Homo sapien
caggctctctgctacggccttggaa

SEQ ID NO: 2776588 - DNA, 25 bp, Homo sapien
ttttcagaggtctttttcaccttga

SEQ ID NO: 2776589 - DNA, 25 bp, Homo sapien
tgctacggccttggaatagctcagg

SEQ ID NO: 2776590 - DNA, 25 bp, Homo sapien
ctctgctacggccttggaatagctc

SEQ ID NO: 2776591 - DNA, 25 bp, Homo sapien
agcatcaattcggaaaggcaagtgt

SEQ ID NO: 2776592 - DNA, 25 bp, Homo sapien
ctccagcatcaattcggaaaggcaa

SEQ ID NO: 2776593 - DNA, 25 bp, Homo sapien
catcaattcggaaaggcaagtgtct

SEQ ID NO: 2776594 - DNA, 25 bp, Homo sapien
ccagcatcaattcggaaaggcaagt

SEQ ID NO: 2776595 - DNA, 25 bp, Homo sapien
catgaatgatgtgtatgtagctttc

SEQ ID NO: 2776596 - DNA, 25 bp, Homo sapien
tgtaatataaatcaatgtgaacagc

SEQ ID NO: 2776597 - DNA, 25 bp, Homo sapien
ttctgagaaagggaactccacactt

SEQ ID NO: 2776598 - DNA, 25 bp, Homo sapien
aatcaatgtgaacagctgcttctga

SEQ ID NO: 2776599 - DNA, 25 bp, Homo sapien
gactatgactgcactatgctgacaa

SEQ ID NO: 2776600 - DNA, 25 bp, Homo sapien
cccaatgttttggtaggctgactcc

SEQ ID NO: 2776601 - DNA, 25 bp, Homo sapien
tgtactccaaccttgctgtaataag

SEQ ID NO: 2776602 - DNA, 25 bp, Homo sapien
aaattaggaagagtagcatgtatgc

SEQ ID NO: 2776603 - DNA, 25 bp, Homo sapien
taaaaaggatatgctcttctctgcc

SEQ ID NO: 2776604 - DNA, 25 bp, Homo sapien
tgtgtaggtccgctaaggagtttca

SEQ ID NO: 2776605 - DNA, 25 bp, Homo sapien
cctacgtcattggatccctggagat

SEQ ID NO: 2776606 - DNA, 25 bp, Homo sapien
gaataggattgctgacatagtctgc

SEQ ID NO: 2776607 - DNA, 25 bp, Homo sapien
gcagttggattcttcagagactcat

SEQ ID NO: 2776608 - DNA, 25 bp, Homo sapien
gactcatcggtctcttcactttgaa

SEQ ID NO: 2776609 - DNA, 25 bp, Homo sapien
cgtcctctacttcagcagttggatt

SEQ ID NO: 2776610 - DNA, 25 bp, Homo sapien
ggagcagaagttcttcgtcctctac

SEQ ID NO: 2776611 - DNA, 25 bp, Homo sapien
ggtaagctttgccacagcatacccc

SEQ ID NO: 2776612 - DNA, 25 bp, Homo sapien
ttctttcactatcagtttgtcaaac

SEQ ID NO: 2776613 - DNA, 25 bp, Homo sapien
taaatgatacacaatgaactgccca

SEQ ID NO: 2776614 - DNA, 25 bp, Homo sapien
cacagtcaccactcatctgatttct

SEQ ID NO: 2776615 - DNA, 25 bp, Homo sapien
tgcacatgtgcaggcattctgacct

SEQ ID NO: 2776616 - DNA, 25 bp, Homo sapien
cgtgggaaacactccgcagctgctt

SEQ ID NO: 2776617 - DNA, 25 bp, Homo sapien
tcctctaggagaatgtgaagccaga

SEQ ID NO: 2776618 - DNA, 25 bp, Homo sapien
tagcctagcaaagatcaacctgacc

SEQ ID NO: 2776619 - DNA, 25 bp, Homo sapien
tgtacaatggaagcatactagaagt

SEQ ID NO: 2776620 - DNA, 25 bp, Homo sapien
tctggctaatcacccagtgtgggtt

SEQ ID NO: 2776621 - DNA, 25 bp, Homo sapien
tgccaactaagaagtaaggtatctg

SEQ ID NO: 2776622 - DNA, 25 bp, Homo sapien
tctgctgcgggagttctctcctgtt

SEQ ID NO: 2776623 - DNA, 25 bp, Homo sapien
aacgtccttacaattttctggaatg

SEQ ID NO: 2776624 - DNA, 25 bp, Homo sapien
gacagatgcagaggaaacgtcctta

SEQ ID NO: 2776625 - DNA, 25 bp, Homo sapien
ttatcgtttccgcacgctgccaaca

SEQ ID NO: 2776626 - DNA, 25 bp, Homo sapien
tgtagacacgaagcgcaaattgaac

SEQ ID NO: 2776627 - DNA, 25 bp, Homo sapien
tggtcccgaacgaacttgagtagcg

SEQ ID NO: 2776628 - DNA, 25 bp, Homo sapien
tctaggccagcgattggattcacct

SEQ ID NO: 2776629 - DNA, 25 bp, Homo sapien
taaaggaggacaacctaagactgca

SEQ ID NO: 2776630 - DNA, 25 bp, Homo sapien
aaagaactaagtgtggcctcccagg

SEQ ID NO: 2776631 - DNA, 25 bp, Homo sapien
taaactcagagctgcccgttggaca

SEQ ID NO: 2776632 - DNA, 25 bp, Homo sapien
tttgccaaatgtacgggtcagcgcg

SEQ ID NO: 2776633 - DNA, 25 bp, Homo sapien
taaaatctctctcgaactgaccggg

SEQ ID NO: 2776634 - DNA, 25 bp, Homo sapien
tagatttcagctgaaccggtcagga

SEQ ID NO: 2776635 - DNA, 25 bp, Homo sapien
cagcagaactcggttaaaaatcgtc

SEQ ID NO: 2776636 - DNA, 25 bp, Homo sapien
cgtctgttcctggtcacttaggagt

SEQ ID NO: 2776637 - DNA, 25 bp, Homo sapien
ggctccacgcagcagaactcggtta

SEQ ID NO: 2776638 - DNA, 25 bp, Homo sapien
ctcggttaaaaatcgtctgttcctg

SEQ ID NO: 2776639 - DNA, 25 bp, Homo sapien
tgaaagacaaaaagtcagtccgcgg

SEQ ID NO: 2776640 - DNA, 25 bp, Homo sapien
gatcatttcgctctttggcttcggg

SEQ ID NO: 2776641 - DNA, 25 bp, Homo sapien
ggtgcgttccaacctgattgtccca

SEQ ID NO: 2776642 - DNA, 25 bp, Homo sapien
ggagggacctcgtcaacaggtagac

SEQ ID NO: 2776643 - DNA, 25 bp, Homo sapien
agccactcgccaccggcggcagaaa

SEQ ID NO: 2776644 - DNA, 25 bp, Homo sapien
ggcagaaagtgagccccgcgcgcaa

SEQ ID NO: 2776645 - DNA, 25 bp, Homo sapien
ggagcagcgccacaggaggcgaggg

SEQ ID NO: 2776646 - DNA, 25 bp, Homo sapien
cgagcaagttgcctcgggagcccta

SEQ ID NO: 2776647 - DNA, 25 bp, Homo sapien
ggctctttggagttggagtcattgc

SEQ ID NO: 2776648 - DNA, 25 bp, Homo sapien
tttggagttggagtcattgcctgga

SEQ ID NO: 2776649 - DNA, 25 bp, Homo sapien
tcttgtgcggggttctctctcaggc

SEQ ID NO: 2776650 - DNA, 25 bp, Homo sapien
aggctgaggtgccaagggctctttg

SEQ ID NO: 2776651 - DNA, 25 bp, Homo sapien
gtatacagcaatatcctctttgtaa

SEQ ID NO: 2776652 - DNA, 25 bp, Homo sapien
agtgttattccacctctgccagttt

SEQ ID NO: 2776653 - DNA, 25 bp, Homo sapien
gcagtgttattccacctctgccagt

SEQ ID NO: 2776654 - DNA, 25 bp, Homo sapien
ttagtatacagcaatatcctctttg

SEQ ID NO: 2776655 - DNA, 25 bp, Homo sapien
tctgcctttgccctatcttcagatt

SEQ ID NO: 2776656 - DNA, 25 bp, Homo sapien
tcagatttccctttctgttttgaac

SEQ ID NO: 2776657 - DNA, 25 bp, Homo sapien
ttgtctgcctttgccctatcttcag

SEQ ID NO: 2776658 - DNA, 25 bp, Homo sapien
gcctttgccctatcttcagatttcc

SEQ ID NO: 2776659 - DNA, 25 bp, Homo sapien
ttgtctggttggaattcaatctcca

SEQ ID NO: 2776660 - DNA, 25 bp, Homo sapien
gaactcatggtcgaatttgtccttg

SEQ ID NO: 2776661 - DNA, 25 bp, Homo sapien
ttgtgactcacgtagtaatgtagat

SEQ ID NO: 2776662 - DNA, 25 bp, Homo sapien
gacattatccttgtaattactgttg

SEQ ID NO: 2776663 - DNA, 25 bp, Homo sapien
ggcattaacctggttgttgaaacac

SEQ ID NO: 2776664 - DNA, 25 bp, Homo sapien
gaacagaattcttccggtgttgacc

SEQ ID NO: 2776665 - DNA, 25 bp, Homo sapien
gttgaccttagaggttctaggcatt

SEQ ID NO: 2776666 - DNA, 25 bp, Homo sapien
caaagattgaactgggtttgggaat

SEQ ID NO: 2776667 - DNA, 25 bp, Homo sapien
atgccacactcctttcgtgaagctg

SEQ ID NO: 2776668 - DNA, 25 bp, Homo sapien
actcctttcgtgaagctgatgcaga

SEQ ID NO: 2776669 - DNA, 25 bp, Homo sapien
gccacactcctttcgtgaagctgat

SEQ ID NO: 2776670 - DNA, 25 bp, Homo sapien
cacactcctttcgtgaagctgatgc

SEQ ID NO: 2776671 - DNA, 25 bp, Homo sapien
aacgtttggcaggtgatggaacgcc

SEQ ID NO: 2776672 - DNA, 25 bp, Homo sapien
ctgctgctgttaaacgtttggcagg

SEQ ID NO: 2776673 - DNA, 25 bp, Homo sapien
cagtttgtgggccataatctgctgc

SEQ ID NO: 2776674 - DNA, 25 bp, Homo sapien
ggaacgccatggtgttcacactgac

SEQ ID NO: 2776675 - DNA, 25 bp, Homo sapien
ctgtttctacagagtgccaaccagg

SEQ ID NO: 2776676 - DNA, 25 bp, Homo sapien
ctacagagtgccaaccaggactgct

SEQ ID NO: 2776677 - DNA, 25 bp, Homo sapien
gatatgtgtagttcaaggagcacca

SEQ ID NO: 2776678 - DNA, 25 bp, Homo sapien
gactgctgtgggttcttgtttgtga

SEQ ID NO: 2776679 - DNA, 25 bp, Homo sapien
agaggaggtcgaagcactgaacttg

SEQ ID NO: 2776680 - DNA, 25 bp, Homo sapien
agctaggcgctgggaaagccacaga

SEQ ID NO: 2776681 - DNA, 25 bp, Homo sapien
cactaggcaggcagctaggcgctgg

SEQ ID NO: 2776682 - DNA, 25 bp, Homo sapien
aactcggaagaggaggtcgaagcac

SEQ ID NO: 2776683 - DNA, 25 bp, Homo sapien
tttctgtcccgaggggattcgtaga

SEQ ID NO: 2776684 - DNA, 25 bp, Homo sapien
ccgaggggattcgtagaaccagtag

SEQ ID NO: 2776685 - DNA, 25 bp, Homo sapien
tgtcccgaggggattcgtagaacca

SEQ ID NO: 2776686 - DNA, 25 bp, Homo sapien
ggattcgtagaaccagtagaaactg

SEQ ID NO: 2776687 - DNA, 25 bp, Homo sapien
ctaaactgggaattggtcctcatca

SEQ ID NO: 2776688 - DNA, 25 bp, Homo sapien
aactgggaattggtcctcatcaaca

SEQ ID NO: 2776689 - DNA, 25 bp, Homo sapien
gggaattggtcctcatcaacaaggg

SEQ ID NO: 2776690 - DNA, 25 bp, Homo sapien
ctgggaattggtcctcatcaacaag

SEQ ID NO: 2776691 - DNA, 25 bp, Homo sapien
ttgcaacgaggaccaaccctggtta

SEQ ID NO: 2776692 - DNA, 25 bp, Homo sapien
tcaggataaagacgcttctttttct

SEQ ID NO: 2776693 - DNA, 25 bp, Homo sapien
gaccaaccctggttattcaattcag

SEQ ID NO: 2776694 - DNA, 25 bp, Homo sapien
ccctggttattcaattcaggataaa

SEQ ID NO: 2776695 - DNA, 25 bp, Homo sapien
aacagaatcccggtggtttcatgga

SEQ ID NO: 2776696 - DNA, 25 bp, Homo sapien
tctgtgagacgtgaaaagctctgcc

SEQ ID NO: 2776697 - DNA, 25 bp, Homo sapien
ctttagggagtttgaatgaggacac

SEQ ID NO: 2776698 - DNA, 25 bp, Homo sapien
tccctactgcaaagaaagttgagaa

SEQ ID NO: 2776699 - DNA, 25 bp, Homo sapien
agggtaaccaagaacagctgcagag

SEQ ID NO: 2776700 - DNA, 25 bp, Homo sapien
aaagggtaaccaagaacagctgcag

SEQ ID NO: 2776701 - DNA, 25 bp, Homo sapien
gacaaagggtaaccaagaacagctg

SEQ ID NO: 2776702 - DNA, 25 bp, Homo sapien
caaagggtaaccaagaacagctgca

SEQ ID NO: 2776703 - DNA, 25 bp, Homo sapien
tgtaattccacgcttttagtacgtc

SEQ ID NO: 2776704 - DNA, 25 bp, Homo sapien
ggattctagctgttttgcttcttct

SEQ ID NO: 2776705 - DNA, 25 bp, Homo sapien
ttcttcttgactcaggtttggctgt

SEQ ID NO: 2776706 - DNA, 25 bp, Homo sapien
ccaggatgaatggttacatatggat

SEQ ID NO: 2776707 - DNA, 25 bp, Homo sapien
gtcttggcccaccaagaatcttcat

SEQ ID NO: 2776708 - DNA, 25 bp, Homo sapien
cagtcttggcccaccaagaatcttc

SEQ ID NO: 2776709 - DNA, 25 bp, Homo sapien
agtcttggcccaccaagaatcttca

SEQ ID NO: 2776710 - DNA, 25 bp, Homo sapien
ctgcaaagtgaactgatcccgcata

SEQ ID NO: 2776711 - DNA, 25 bp, Homo sapien
gaactgatcccgcataatccctgga

SEQ ID NO: 2776712 - DNA, 25 bp, Homo sapien
gatcccgcataatccctggaataat

SEQ ID NO: 2776713 - DNA, 25 bp, Homo sapien
ataatccctggaataatgtagcttc

SEQ ID NO: 2776714 - DNA, 25 bp, Homo sapien
gaagacttagatgggtgaccacttg

SEQ ID NO: 2776715 - DNA, 25 bp, Homo sapien
aagtaaccaggcctacaggtgagca

SEQ ID NO: 2776716 - DNA, 25 bp, Homo sapien
cctggattctgatcatgcttggaga

SEQ ID NO: 2776717 - DNA, 25 bp, Homo sapien
ggttcagacaacagctatgatggcc

SEQ ID NO: 2776718 - DNA, 25 bp, Homo sapien
cctgtctaagactcattctgccatg

SEQ ID NO: 2776719 - DNA, 25 bp, Homo sapien
tgtctaagactcattctgccatgtt

SEQ ID NO: 2776720 - DNA, 25 bp, Homo sapien
taagactcattctgccatgttttgc

SEQ ID NO: 2776721 - DNA, 25 bp, Homo sapien
gtctaagactcattctgccatgttt

SEQ ID NO: 2776722 - DNA, 25 bp, Homo sapien
tcagtactcaatccagtagaatcca

SEQ ID NO: 2776723 - DNA, 25 bp, Homo sapien
tgcccaattacagtcaagagtcttg

SEQ ID NO: 2776724 - DNA, 25 bp, Homo sapien
gaaatgtccactctccgtagttact

SEQ ID NO: 2776725 - DNA, 25 bp, Homo sapien
caaaacctgcacaacgaaatgtcca

SEQ ID NO: 2776726 - DNA, 25 bp, Homo sapien
tatgcgatatgaactagtagtggcc

SEQ ID NO: 2776727 - DNA, 25 bp, Homo sapien
tactttttctgtatgcgatatgaac

SEQ ID NO: 2776728 - DNA, 25 bp, Homo sapien
ttttctgtatgcgatatgaactagt

SEQ ID NO: 2776729 - DNA, 25 bp, Homo sapien
ctgtatgcgatatgaactagtagtg

SEQ ID NO: 2776730 - DNA, 25 bp, Homo sapien
ttctgccaatagctctcattctatc

SEQ ID NO: 2776731 - DNA, 25 bp, Homo sapien
aatagctctcattctatccatgtac

SEQ ID NO: 2776732 - DNA, 25 bp, Homo sapien
gccaatagctctcattctatccatg

SEQ ID NO: 2776733 - DNA, 25 bp, Homo sapien
tgccaatagctctcattctatccat

SEQ ID NO: 2776734 - DNA, 25 bp, Homo sapien
gctgtcttgtagcttacagagcctt

SEQ ID NO: 2776735 - DNA, 25 bp, Homo sapien
gctatatccttggcaaaagctgctg

SEQ ID NO: 2776736 - DNA, 25 bp, Homo sapien
agctatatccttggcaaaagctgct

SEQ ID NO: 2776737 - DNA, 25 bp, Homo sapien
ctgggttgactatgccgataaaatc

SEQ ID NO: 2776738 - DNA, 25 bp, Homo sapien
tccaaaagcaccaagattccatagc

SEQ ID NO: 2776739 - DNA, 25 bp, Homo sapien
agattccatagctgaattgctgtaa

SEQ ID NO: 2776740 - DNA, 25 bp, Homo sapien
ttgctgtaaaaagaacttctctaaa

SEQ ID NO: 2776741 - DNA, 25 bp, Homo sapien
acaatagttaccctgatttcttggt

SEQ ID NO: 2776742 - DNA, 25 bp, Homo sapien
aataggaatgttctgtttgaaggcc

SEQ ID NO: 2776743 - DNA, 25 bp, Homo sapien
tctataatcataggacaatttagct

SEQ ID NO: 2776744 - DNA, 25 bp, Homo sapien
tcttggtactcttctataatcatag

SEQ ID NO: 2776745 - DNA, 25 bp, Homo sapien
cagatgctgcctctactctattttc

SEQ ID NO: 2776746 - DNA, 25 bp, Homo sapien
ggcagatatacttcccatgatatcc

SEQ ID NO: 2776747 - DNA, 25 bp, Homo sapien
gtactgtcttgccagatgctgcctc

SEQ ID NO: 2776748 - DNA, 25 bp, Homo sapien
catgatatcctgtactgtcttgcca

SEQ ID NO: 2776749 - DNA, 25 bp, Homo sapien
aatggttttgttcccacaagagcaa

SEQ ID NO: 2776750 - DNA, 25 bp, Homo sapien
atggttttgttcccacaagagcaaa

SEQ ID NO: 2776751 - DNA, 25 bp, Homo sapien
aaatggttttgttcccacaagagca

SEQ ID NO: 2776752 - DNA, 25 bp, Homo sapien
gaacaagaatcagagagctgcgctc

SEQ ID NO: 2776753 - DNA, 25 bp, Homo sapien
taaagggtgatgagcaataaacgtc

SEQ ID NO: 2776754 - DNA, 25 bp, Homo sapien
gctgcgctctgtggtaagcttctga

SEQ ID NO: 2776755 - DNA, 25 bp, Homo sapien
taaatagccagtgttatccccaggg

SEQ ID NO: 2776756 - DNA, 25 bp, Homo sapien
tgaccaatgaataagaccctgatga

SEQ ID NO: 2776757 - DNA, 25 bp, Homo sapien
ggccagggtagtagaattatcacta

SEQ ID NO: 2776758 - DNA, 25 bp, Homo sapien
gatcaattgctaatgtcgcttctgc

SEQ ID NO: 2776759 - DNA, 25 bp, Homo sapien
taaaatcagccccattactgcttga

SEQ ID NO: 2776760 - DNA, 25 bp, Homo sapien
tttcatgagtcctgggtacttgcct

SEQ ID NO: 2776761 - DNA, 25 bp, Homo sapien
ggttttcatgagtcctgggtacttg

SEQ ID NO: 2776762 - DNA, 25 bp, Homo sapien
tggttttcatgagtcctgggtactt

SEQ ID NO: 2776763 - DNA, 25 bp, Homo sapien
ttttcatgagtcctgggtacttgcc

SEQ ID NO: 2776764 - DNA, 25 bp, Homo sapien
tggagtaagagccacccgagaaaga

SEQ ID NO: 2776765 - DNA, 25 bp, Homo sapien
acccgagaaagattccatgtcatgt

SEQ ID NO: 2776766 - DNA, 25 bp, Homo sapien
agagccacccgagaaagattccatg

SEQ ID NO: 2776767 - DNA, 25 bp, Homo sapien
ccgagaaagattccatgtcatgtat

SEQ ID NO: 2776768 - DNA, 25 bp, Homo sapien
agtagtgcagggaaatgatggtttc

SEQ ID NO: 2776769 - DNA, 25 bp, Homo sapien
gaaaccatcatttccctgcactact

SEQ ID NO: 2776770 - DNA, 25 bp, Homo sapien
aaggcaaagccttgtaccaggttag

SEQ ID NO: 2776771 - DNA, 25 bp, Homo sapien
ccaggttagaaatgatatgtgagca

SEQ ID NO: 2776772 - DNA, 25 bp, Homo sapien
gcaacttccgaaggacagaacactt

SEQ ID NO: 2776773 - DNA, 25 bp, Homo sapien
gaacacttccctatgatttgaaggc

SEQ ID NO: 2776774 - DNA, 25 bp, Homo sapien
cagttgatagatcacaggaggttca

SEQ ID NO: 2776775 - DNA, 25 bp, Homo sapien
tagatcacaggaggttcacattggt

SEQ ID NO: 2776776 - DNA, 25 bp, Homo sapien
tcagtttacccagttgatagatcac

SEQ ID NO: 2776777 - DNA, 25 bp, Homo sapien
cagggaccaccgtaaggattcctca

SEQ ID NO: 2776778 - DNA, 25 bp, Homo sapien
ttttcaggctctcgaataataatat

SEQ ID NO: 2776779 - DNA, 25 bp, Homo sapien
catatgaaagtagcaacatttgtgc

SEQ ID NO: 2776780 - DNA, 25 bp, Homo sapien
tgtttccatatgaaagtagcaacat

SEQ ID NO: 2776781 - DNA, 25 bp, Homo sapien
caacatttgtgcataaatgccttga

SEQ ID NO: 2776782 - DNA, 25 bp, Homo sapien
gtttatgaatcacaaaggagaattc

SEQ ID NO: 2776783 - DNA, 25 bp, Homo sapien
tctcaggatgttggatgtgtctcat

SEQ ID NO: 2776784 - DNA, 25 bp, Homo sapien
tattttgggagtcaccaagctcaag

SEQ ID NO: 2776785 - DNA, 25 bp, Homo sapien
ttttgggagtcaccaagctcaaggg

SEQ ID NO: 2776786 - DNA, 25 bp, Homo sapien
ttttctcaggatgttggatgtgtct

SEQ ID NO: 2776787 - DNA, 25 bp, Homo sapien
tctgcctttttggcattccttgttc

SEQ ID NO: 2776788 - DNA, 25 bp, Homo sapien
gtctgcctttttggcattccttgtt

SEQ ID NO: 2776789 - DNA, 25 bp, Homo sapien
cacaattctagacagacctgcctca

SEQ ID NO: 2776790 - DNA, 25 bp, Homo sapien
ctttatcatggcaaacaatagtgaa

SEQ ID NO: 2776791 - DNA, 25 bp, Homo sapien
tgcctcaggcttaagatgacactta

SEQ ID NO: 2776792 - DNA, 25 bp, Homo sapien
aatttgagtctgcaatctgttagac

SEQ ID NO: 2776793 - DNA, 25 bp, Homo sapien
cacgtataggaaggactattcagga

SEQ ID NO: 2776794 - DNA, 25 bp, Homo sapien
gaaggactattcaggatgtaagcac

SEQ ID NO: 2776795 - DNA, 25 bp, Homo sapien
tataggaaggactattcaggatgta

SEQ ID NO: 2776796 - DNA, 25 bp, Homo sapien
tcacgtataggaaggactattcagg

SEQ ID NO: 2776797 - DNA, 25 bp, Homo sapien
ctctaactcatttgtcttaggactg

SEQ ID NO: 2776798 - DNA, 25 bp, Homo sapien
taactcatttgtcttaggactgtag

SEQ ID NO: 2776799 - DNA, 25 bp, Homo sapien
aactcatttgtcttaggactgtagg

SEQ ID NO: 2776800 - DNA, 25 bp, Homo sapien
tctaactcatttgtcttaggactgt

SEQ ID NO: 2776801 - DNA, 25 bp, Homo sapien
tgttcagtgtggtctaaaagtaatt

SEQ ID NO: 2776802 - DNA, 25 bp, Homo sapien
aatgttcagtgtggtctaaaagtaa

SEQ ID NO: 2776803 - DNA, 25 bp, Homo sapien
aactttgatgttctaatgagctata

SEQ ID NO: 2776804 - DNA, 25 bp, Homo sapien
taatgagctataatgttcagtgtgg

SEQ ID NO: 2776805 - DNA, 25 bp, Homo sapien
ccaaaaagagaactgctattggcat

SEQ ID NO: 2776806 - DNA, 25 bp, Homo sapien
tctgtgttgcttccaaaggaccaaa

SEQ ID NO: 2776807 - DNA, 25 bp, Homo sapien
aaagagaactgctattggcattggc

SEQ ID NO: 2776808 - DNA, 25 bp, Homo sapien
gagaatctgtgttgcttccaaagga

SEQ ID NO: 2776809 - DNA, 25 bp, Homo sapien
cccacctgggcctaacttcaaatat

SEQ ID NO: 2776810 - DNA, 25 bp, Homo sapien
tccagctgagtagatggcaagccca

SEQ ID NO: 2776811 - DNA, 25 bp, Homo sapien
aagggtgtcaacagctctttgtccc

SEQ ID NO: 2776812 - DNA, 25 bp, Homo sapien
tgcaccttgcaagggtgtcaacagc

SEQ ID NO: 2776813 - DNA, 25 bp, Homo sapien
ttttaaatctgcaggacatgatgat

SEQ ID NO: 2776814 - DNA, 25 bp, Homo sapien
ccttttaggcagcactctttgtatt

SEQ ID NO: 2776815 - DNA, 25 bp, Homo sapien
taaattgataattgaccccaaggcc

SEQ ID NO: 2776816 - DNA, 25 bp, Homo sapien
tttgtacaatggttgtactgcacag

SEQ ID NO: 2776817 - DNA, 25 bp, Homo sapien
gggatgatgataagtatcaattgga

SEQ ID NO: 2776818 - DNA, 25 bp, Homo sapien
tactttgtaatatccacacatgtct

SEQ ID NO: 2776819 - DNA, 25 bp, Homo sapien
ggaaactgaaagtgatgattatggg

SEQ ID NO: 2776820 - DNA, 25 bp, Homo sapien
caggatagtgaacgggtacaccaga

SEQ ID NO: 2776821 - DNA, 25 bp, Homo sapien
tactagaggccataagggagtgttc

SEQ ID NO: 2776822 - DNA, 25 bp, Homo sapien
ttttctaaggccacatgtctagtac

SEQ ID NO: 2776823 - DNA, 25 bp, Homo sapien
gtacaaggctacatgagtcaccaca

SEQ ID NO: 2776824 - DNA, 25 bp, Homo sapien
tataaaccttgttcactatgcaaat

SEQ ID NO: 2776825 - DNA, 25 bp, Homo sapien
ttagtgcactattttaacgtctgta

SEQ ID NO: 2776826 - DNA, 25 bp, Homo sapien
gggattcatcaggtaccacaaacac

SEQ ID NO: 2776827 - DNA, 25 bp, Homo sapien
tctccagggattcatcaggtaccac

SEQ ID NO: 2776828 - DNA, 25 bp, Homo sapien
aacgtctgtatgaatctcctttgtc

SEQ ID NO: 2776829 - DNA, 25 bp, Homo sapien
gcatcattaggccataatatgcatg

SEQ ID NO: 2776830 - DNA, 25 bp, Homo sapien
taatatgcatgacgaggatgggcca

SEQ ID NO: 2776831 - DNA, 25 bp, Homo sapien
cattaggccataatatgcatgacga

SEQ ID NO: 2776832 - DNA, 25 bp, Homo sapien
ggccataatatgcatgacgaggatg

SEQ ID NO: 2776833 - DNA, 25 bp, Homo sapien
ctacaaattgcctttagactggatg

SEQ ID NO: 2776834 - DNA, 25 bp, Homo sapien
tagactggatgtttattgcccaatg

SEQ ID NO: 2776835 - DNA, 25 bp, Homo sapien
tgcctttagactggatgtttattgc

SEQ ID NO: 2776836 - DNA, 25 bp, Homo sapien
gactggatgtttattgcccaatgta

SEQ ID NO: 2776837 - DNA, 25 bp, Homo sapien
cctgagcctaagagtccacccaaat

SEQ ID NO: 2776838 - DNA, 25 bp, Homo sapien
ctgagcctaagagtccacccaaatc

SEQ ID NO: 2776839 - DNA, 25 bp, Homo sapien
tggtgtcgtggcaaaacaccaaact

SEQ ID NO: 2776840 - DNA, 25 bp, Homo sapien
ctgataaacaaaaaggacttggtgt

SEQ ID NO: 2776841 - DNA, 25 bp, Homo sapien
aaggacttggtgtcgtggcaaaaca

SEQ ID NO: 2776842 - DNA, 25 bp, Homo sapien
acaaaaaggacttggtgtcgtggca

SEQ ID NO: 2776843 - DNA, 25 bp, Homo sapien
ccttactttgtcctgttgagcattg

SEQ ID NO: 2776844 - DNA, 25 bp, Homo sapien
agacagttggccttactttgtcctg

SEQ ID NO: 2776845 - DNA, 25 bp, Homo sapien
cagttggccttactttgtcctgttg

SEQ ID NO: 2776846 - DNA, 25 bp, Homo sapien
tggccttactttgtcctgttgagca

SEQ ID NO: 2776847 - DNA, 25 bp, Homo sapien
gcaatacttcaccaagacatagatt

SEQ ID NO: 2776848 - DNA, 25 bp, Homo sapien
tgcaaagctactgccattttcgtct

SEQ ID NO: 2776849 - DNA, 25 bp, Homo sapien
ttgtttctctcactatatggtttac

SEQ ID NO: 2776850 - DNA, 25 bp, Homo sapien
gcaaagctactgccattttcgtctt

SEQ ID NO: 2776851 - DNA, 25 bp, Homo sapien
tttctctcactatatggtttactca

SEQ ID NO: 2776852 - DNA, 25 bp, Homo sapien
tgccatgaattagtttatcatgctc

SEQ ID NO: 2776853 - DNA, 25 bp, Homo sapien
ccatgaattagtttatcatgctctg

SEQ ID NO: 2776854 - DNA, 25 bp, Homo sapien
catgaattagtttatcatgctctgt

SEQ ID NO: 2776855 - DNA, 25 bp, Homo sapien
acttgccatgaattagtttatcatg

SEQ ID NO: 2776856 - DNA, 25 bp, Homo sapien
ggcagccaattaggagaaaacatct

SEQ ID NO: 2776857 - DNA, 25 bp, Homo sapien
taaaaacagggcagtcccattgact

SEQ ID NO: 2776858 - DNA, 25 bp, Homo sapien
aaagaaggctaatgttacagctgca

SEQ ID NO: 2776859 - DNA, 25 bp, Homo sapien
gaaaacatactgagctcggtgaagc

SEQ ID NO: 2776860 - DNA, 25 bp, Homo sapien
taagcctgttcccataagcatgcaa

SEQ ID NO: 2776861 - DNA, 25 bp, Homo sapien
tgttcccataagcatgcaacaccag

SEQ ID NO: 2776862 - DNA, 25 bp, Homo sapien
acaccagtttcagaggtagcctgat

SEQ ID NO: 2776863 - DNA, 25 bp, Homo sapien
tcccataagcatgcaacaccagttt

SEQ ID NO: 2776864 - DNA, 25 bp, Homo sapien
tgcaggataacacagagcactatca

SEQ ID NO: 2776865 - DNA, 25 bp, Homo sapien
cttcaagcttgttgcaggataacac

SEQ ID NO: 2776866 - DNA, 25 bp, Homo sapien
cacagagcactatcattgactctca

SEQ ID NO: 2776867 - DNA, 25 bp, Homo sapien
ggataacacagagcactatcattga

SEQ ID NO: 2776868 - DNA, 25 bp, Homo sapien
gccccacctgcaccactctggatgt

SEQ ID NO: 2776869 - DNA, 25 bp, Homo sapien
ctgggacactaaaccattatttata

SEQ ID NO: 2776870 - DNA, 25 bp, Homo sapien
actttactttattaattacactcat

SEQ ID NO: 2776871 - DNA, 25 bp, Homo sapien
caggaaagagattattgtgtaggtc

SEQ ID NO: 2776872 - DNA, 25 bp, Homo sapien
agcttgagtgggacgggtctaattt

SEQ ID NO: 2776873 - DNA, 25 bp, Homo sapien
tcatttctttctacgaaattccatg

SEQ ID NO: 2776874 - DNA, 25 bp, Homo sapien
aaaaatgttagtgccctctgtaagg

SEQ ID NO: 2776875 - DNA, 25 bp, Homo sapien
cagggaaaaggaggcttgctttttg

SEQ ID NO: 2776876 - DNA, 25 bp, Homo sapien
aggaggcttgctttttggttgatgt

SEQ ID NO: 2776877 - DNA, 25 bp, Homo sapien
tggaagaataagattaaggggtaca

SEQ ID NO: 2776878 - DNA, 25 bp, Homo sapien
ttgctttttggttgatgttcttcat

SEQ ID NO: 2776879 - DNA, 25 bp, Homo sapien
caaatattggatatggcctatagtt

SEQ ID NO: 2776880 - DNA, 25 bp, Homo sapien
tagttagcgtcactataaatttgca

SEQ ID NO: 2776881 - DNA, 25 bp, Homo sapien
ttggatatggcctatagttagcgtc

SEQ ID NO: 2776882 - DNA, 25 bp, Homo sapien
ggcctatagttagcgtcactataaa

SEQ ID NO: 2776883 - DNA, 25 bp, Homo sapien
ctggccaatgggatgacatcggcag

SEQ ID NO: 2776884 - DNA, 25 bp, Homo sapien
ggatgacatcggcagttgaacttga

SEQ ID NO: 2776885 - DNA, 25 bp, Homo sapien
gacatcggcagttgaacttgacaaa

SEQ ID NO: 2776886 - DNA, 25 bp, Homo sapien
ggcagttgaacttgacaaagtccat

SEQ ID NO: 2776887 - DNA, 25 bp, Homo sapien
tccgtgcaggaacatgctgtatagg

SEQ ID NO: 2776888 - DNA, 25 bp, Homo sapien
caagctccatttatgttaagggtcc

SEQ ID NO: 2776889 - DNA, 25 bp, Homo sapien
caaagcctacagtagtgtacggtaa

SEQ ID NO: 2776890 - DNA, 25 bp, Homo sapien
ccttgacctcttagggtgaagcaat

SEQ ID NO: 2776891 - DNA, 25 bp, Homo sapien
tgtgctgtgtacgatcatgctgacc

SEQ ID NO: 2776892 - DNA, 25 bp, Homo sapien
tgaccactacattgcaaaaccagat

SEQ ID NO: 2776893 - DNA, 25 bp, Homo sapien
gctgaccaccaaacgcaaaaatgtt

SEQ ID NO: 2776894 - DNA, 25 bp, Homo sapien
tgatatacggtgcatagacgagttt

SEQ ID NO: 2776895 - DNA, 25 bp, Homo sapien
gaagtctctagggtcttcatgtacc

SEQ ID NO: 2776896 - DNA, 25 bp, Homo sapien
ggccttgaagtctctagggtcttca

SEQ ID NO: 2776897 - DNA, 25 bp, Homo sapien
agggtcttcatgtacctttatttct

SEQ ID NO: 2776898 - DNA, 25 bp, Homo sapien
tgttgatgtcccatggccttgaagt

SEQ ID NO: 2776899 - DNA, 25 bp, Homo sapien
tcatctttgatatttagtaagcctg

SEQ ID NO: 2776900 - DNA, 25 bp, Homo sapien
catctttgatatttagtaagcctga

SEQ ID NO: 2776901 - DNA, 25 bp, Homo sapien
tagtttggtgtgcagtacagatttc

SEQ ID NO: 2776902 - DNA, 25 bp, Homo sapien
aggcaattttcggtagtttggtgtg

SEQ ID NO: 2776903 - DNA, 25 bp, Homo sapien
gagttagttctttatgatttgacaa

SEQ ID NO: 2776904 - DNA, 25 bp, Homo sapien
aatctccggagaactggtaaataca

SEQ ID NO: 2776905 - DNA, 25 bp, Homo sapien
tatatgcattctcttgagttagttc

SEQ ID NO: 2776906 - DNA, 25 bp, Homo sapien
ttgacaacttgcacggcagctgttc

SEQ ID NO: 2776907 - DNA, 25 bp, Homo sapien
catacgtgattttagtggacaagct

SEQ ID NO: 2776908 - DNA, 25 bp, Homo sapien
taatgtgcaggtagtcttgctgctc

SEQ ID NO: 2776909 - DNA, 25 bp, Homo sapien
cacctgctggcatacctcataggaa

SEQ ID NO: 2776910 - DNA, 25 bp, Homo sapien
gcaacagtgtcaattagatctatca

SEQ ID NO: 2776911 - DNA, 25 bp, Homo sapien
catcattccatgcaagaagctctgc

SEQ ID NO: 2776912 - DNA, 25 bp, Homo sapien
cagtgtcatggatctcatgaagtag

SEQ ID NO: 2776913 - DNA, 25 bp, Homo sapien
acgacatagcagacagtgtcatgga

SEQ ID NO: 2776914 - DNA, 25 bp, Homo sapien
gaagctctgcaacgacatagcagac

SEQ ID NO: 2776915 - DNA, 25 bp, Homo sapien
ttagtacttgagctacagccacagc

SEQ ID NO: 2776916 - DNA, 25 bp, Homo sapien
ccaggattgaaccagtatcaagttc

SEQ ID NO: 2776917 - DNA, 25 bp, Homo sapien
gccttctttccccaccaggattgaa

SEQ ID NO: 2776918 - DNA, 25 bp, Homo sapien
ggcactaatagtaataatctcctcc

SEQ ID NO: 2776919 - DNA, 25 bp, Homo sapien
tcttgccaataaccatggtaccatt

SEQ ID NO: 2776920 - DNA, 25 bp, Homo sapien
tcagggcaggaattagatgggtaca

SEQ ID NO: 2776921 - DNA, 25 bp, Homo sapien
ggtggcaccacctgcttgaaatgct

SEQ ID NO: 2776922 - DNA, 25 bp, Homo sapien
tttattattgctgcacaccattgca

SEQ ID NO: 2776923 - DNA, 25 bp, Homo sapien
cctggggaatctgtcactaatacta

SEQ ID NO: 2776924 - DNA, 25 bp, Homo sapien
cactaatactatggggctcgaatcc

SEQ ID NO: 2776925 - DNA, 25 bp, Homo sapien
gggaatctgtcactaatactatggg

SEQ ID NO: 2776926 - DNA, 25 bp, Homo sapien
gaacaatattccaaacatcaatcct

SEQ ID NO: 2776927 - DNA, 25 bp, Homo sapien
gctgccacctctctgtttggggcta

SEQ ID NO: 2776928 - DNA, 25 bp, Homo sapien
ctgccacctctctgtttggggctaa

SEQ ID NO: 2776929 - DNA, 25 bp, Homo sapien
ttttcagaaatggtagactatgggt

SEQ ID NO: 2776930 - DNA, 25 bp, Homo sapien
ttagttttcagaaatggtagactat

SEQ ID NO: 2776931 - DNA, 25 bp, Homo sapien
tatgggtttcaaagtggacagttag

SEQ ID NO: 2776932 - DNA, 25 bp, Homo sapien
ctatgggtttcaaagtggacagtta

SEQ ID NO: 2776933 - DNA, 25 bp, Homo sapien
ttgaacttcaccacaaaagaatgcg

SEQ ID NO: 2776934 - DNA, 25 bp, Homo sapien
tattcgtaaataagatcaaggttga

SEQ ID NO: 2776935 - DNA, 25 bp, Homo sapien
ggaaacattccacaccaacgatagg

SEQ ID NO: 2776936 - DNA, 25 bp, Homo sapien
gagtttaaagttcataacatattcg

SEQ ID NO: 2776937 - DNA, 25 bp, Homo sapien
ccatctagagagtctgcaaattttc

SEQ ID NO: 2776938 - DNA, 25 bp, Homo sapien
gagtctgcaaattttcccgtctcca

SEQ ID NO: 2776939 - DNA, 25 bp, Homo sapien
ctccagatacactaccacaaccacc

SEQ ID NO: 2776940 - DNA, 25 bp, Homo sapien
ccacaaccaccatctagagagtctg

SEQ ID NO: 2776941 - DNA, 25 bp, Homo sapien
ctgaagttgtaatccattggcaaac

SEQ ID NO: 2776942 - DNA, 25 bp, Homo sapien
cagctaccctgaagttgtaatccat

SEQ ID NO: 2776943 - DNA, 25 bp, Homo sapien
taccctgaagttgtaatccattggc

SEQ ID NO: 2776944 - DNA, 25 bp, Homo sapien
taaatcaacctccggtcttcttgtc

SEQ ID NO: 2776945 - DNA, 25 bp, Homo sapien
tcaaactttgccacaatctgtcacc

SEQ ID NO: 2776946 - DNA, 25 bp, Homo sapien
gagtttaactcgatgaagtctcctg

SEQ ID NO: 2776947 - DNA, 25 bp, Homo sapien
gctgattccagaggagtttaactcg

SEQ ID NO: 2776948 - DNA, 25 bp, Homo sapien
caggtcccataggtgaaagctgatt

SEQ ID NO: 2776949 - DNA, 25 bp, Homo sapien
tgctcagttggattcttatcaccaa

SEQ ID NO: 2776950 - DNA, 25 bp, Homo sapien
tatcaccaaattaatgcaagctttt

SEQ ID NO: 2776951 - DNA, 25 bp, Homo sapien
tgaattcctaagaaggaagtaacca

SEQ ID NO: 2776952 - DNA, 25 bp, Homo sapien
tttatgaattcctaagaaggaagta

SEQ ID NO: 2776953 - DNA, 25 bp, Homo sapien
catgtgattctgataagctactaac

SEQ ID NO: 2776954 - DNA, 25 bp, Homo sapien
gataagctactaactcatcagtaaa

SEQ ID NO: 2776955 - DNA, 25 bp, Homo sapien
gattctgataagctactaactcatc

SEQ ID NO: 2776956 - DNA, 25 bp, Homo sapien
tctgataagctactaactcatcagt

SEQ ID NO: 2776957 - DNA, 25 bp, Homo sapien
ctgttgctgcagatagggctctcct

SEQ ID NO: 2776958 - DNA, 25 bp, Homo sapien
cagcagtcactgtccgacgtgctac

SEQ ID NO: 2776959 - DNA, 25 bp, Homo sapien
cagtacttcattaccatagtgacac

SEQ ID NO: 2776960 - DNA, 25 bp, Homo sapien
gtgctactacactccctgttgctgc

SEQ ID NO: 2776961 - DNA, 25 bp, Homo sapien
ttccagagcactcttcagccaggac

SEQ ID NO: 2776962 - DNA, 25 bp, Homo sapien
ccagacttggtaccctttgctgtcc

SEQ ID NO: 2776963 - DNA, 25 bp, Homo sapien
aggacctgacctcccagacttggta

SEQ ID NO: 2776964 - DNA, 25 bp, Homo sapien
aaactgtgaagtagaaaagattgtt

SEQ ID NO: 2776965 - DNA, 25 bp, Homo sapien
tactactacgcagacgctgagggag

SEQ ID NO: 2776966 - DNA, 25 bp, Homo sapien
cagtatcttactgaaagccccggga

SEQ ID NO: 2776967 - DNA, 25 bp, Homo sapien
cactttcaggtttataggctctcac

SEQ ID NO: 2776968 - DNA, 25 bp, Homo sapien
tgttgttctgtaagcaagagcccgc

SEQ ID NO: 2776969 - DNA, 25 bp, Homo sapien
acatgggtctccagttagtgtctga

SEQ ID NO: 2776970 - DNA, 25 bp, Homo sapien
aatttcctcatcaagtcttggtcga

SEQ ID NO: 2776971 - DNA, 25 bp, Homo sapien
cgatcgagtactaaaggtttctgtt

SEQ ID NO: 2776972 - DNA, 25 bp, Homo sapien
gtctccagttagtgtctgaatttcc

SEQ ID NO: 2776973 - DNA, 25 bp, Homo sapien
gaactgcaaccttcatagatttcag

SEQ ID NO: 2776974 - DNA, 25 bp, Homo sapien
gaacaagtgagatactttggactgc

SEQ ID NO: 2776975 - DNA, 25 bp, Homo sapien
cagtgaatggacatgagatcagaat

SEQ ID NO: 2776976 - DNA, 25 bp, Homo sapien
tcagaaccggtttcttgagaacaag

SEQ ID NO: 2776977 - DNA, 25 bp, Homo sapien
tccatttcctttgtcttcctctaac

SEQ ID NO: 2776978 - DNA, 25 bp, Homo sapien
ctgatttccatttcctttgtcttcc

SEQ ID NO: 2776979 - DNA, 25 bp, Homo sapien
catttcctttgtcttcctctaacat

SEQ ID NO: 2776980 - DNA, 25 bp, Homo sapien
tttccatttcctttgtcttcctcta

SEQ ID NO: 2776981 - DNA, 25 bp, Homo sapien
tgggaaccaggagctttcctttgct

SEQ ID NO: 2776982 - DNA, 25 bp, Homo sapien
tagctgccattcaccccttcagcac

SEQ ID NO: 2776983 - DNA, 25 bp, Homo sapien
caagaaaagactaagttgccttcca

SEQ ID NO: 2776984 - DNA, 25 bp, Homo sapien
cagccagtccgtgtctgcttttggg

SEQ ID NO: 2776985 - DNA, 25 bp, Homo sapien
cctagaactgtgtgaagacccaaag

SEQ ID NO: 2776986 - DNA, 25 bp, Homo sapien
tcttggtggagatgtacggtgcttc

SEQ ID NO: 2776987 - DNA, 25 bp, Homo sapien
tagggttaacaacaactctggcctg

SEQ ID NO: 2776988 - DNA, 25 bp, Homo sapien
tcatggcccaaacactaggaggaag

SEQ ID NO: 2776989 - DNA, 25 bp, Homo sapien
ggtttctgacaagtgcctcacaggg

SEQ ID NO: 2776990 - DNA, 25 bp, Homo sapien
cagttcctgttatcccggtttctga

SEQ ID NO: 2776991 - DNA, 25 bp, Homo sapien
ggagttgccagtattaaccaaggag

SEQ ID NO: 2776992 - DNA, 25 bp, Homo sapien
caaaacgtttgagagggattggtca

SEQ ID NO: 2776993 - DNA, 25 bp, Homo sapien
aatggatttcattcaatttttctgc

SEQ ID NO: 2776994 - DNA, 25 bp, Homo sapien
attttatcattcatttcagtcactt

SEQ ID NO: 2776995 - DNA, 25 bp, Homo sapien
tttcagtcacttcaaaatggatttc

SEQ ID NO: 2776996 - DNA, 25 bp, Homo sapien
cagtcacttcaaaatggatttcatt

SEQ ID NO: 2776997 - DNA, 25 bp, Homo sapien
tttctgacagtgctccaagggttag

SEQ ID NO: 2776998 - DNA, 25 bp, Homo sapien
gggtttccaaatgcctgccgcttca

SEQ ID NO: 2776999 - DNA, 25 bp, Homo sapien
caagcctatcactttctgcacaggg

SEQ ID NO: 2777000 - DNA, 25 bp, Homo sapien
ggtgaaagcagaacacaagcctatc

SEQ ID NO: 2777001 - DNA, 25 bp, Homo sapien
gtagctttgattctctgttaagtgt

SEQ ID NO: 2777002 - DNA, 25 bp, Homo sapien
gcagcaacaatgctgtgctgtgaat

SEQ ID NO: 2777003 - DNA, 25 bp, Homo sapien
gataaagacgcagtccaacagaggt

SEQ ID NO: 2777004 - DNA, 25 bp, Homo sapien
tgaatacggatataaacagccatga

SEQ ID NO: 2777005 - DNA, 25 bp, Homo sapien
catgtcttttgggaaacttctatgt

SEQ ID NO: 2777006 - DNA, 25 bp, Homo sapien
acatgtcttttgggaaacttctatg

SEQ ID NO: 2777007 - DNA, 25 bp, Homo sapien
gagattagctatcttcttccatgtt

SEQ ID NO: 2777008 - DNA, 25 bp, Homo sapien
cattgtatgaatttgagattagcta

SEQ ID NO: 2777009 - DNA, 25 bp, Homo sapien
taggtgtgatgctactttgagatct

SEQ ID NO: 2777010 - DNA, 25 bp, Homo sapien
ctgtgtcccagacgttgttatttta

SEQ ID NO: 2777011 - DNA, 25 bp, Homo sapien
gtcccagacgttgttattttatatc

SEQ ID NO: 2777012 - DNA, 25 bp, Homo sapien
cgcacctggccgctcttttgtatgg

SEQ ID NO: 2777013 - DNA, 25 bp, Homo sapien
tctcagttctaaggatctttggtag

SEQ ID NO: 2777014 - DNA, 25 bp, Homo sapien
caccacccactatagtcatgaaaga

SEQ ID NO: 2777015 - DNA, 25 bp, Homo sapien
tctgtttagaagtggtaactcctac

SEQ ID NO: 2777016 - DNA, 25 bp, Homo sapien
gtatatcacatcctttcaacaagtc

SEQ ID NO: 2777017 - DNA, 25 bp, Homo sapien
ggcagctgcgggacaaaccgttgat

SEQ ID NO: 2777018 - DNA, 25 bp, Homo sapien
acaaaccgttgatgctgaatcggca

SEQ ID NO: 2777019 - DNA, 25 bp, Homo sapien
ttgcacggcagctgcgggacaaacc

SEQ ID NO: 2777020 - DNA, 25 bp, Homo sapien
cgggacaaaccgttgatgctgaatc

SEQ ID NO: 2777021 - DNA, 25 bp, Homo sapien
gctgatttatcactttcagcagctg

SEQ ID NO: 2777022 - DNA, 25 bp, Homo sapien
tgctgatttatcactttcagcagct

SEQ ID NO: 2777023 - DNA, 25 bp, Homo sapien
tccaatcagtctcgcattcatcatt

SEQ ID NO: 2777024 - DNA, 25 bp, Homo sapien
tttgagttccaatcagtctcgcatt

SEQ ID NO: 2777025 - DNA, 25 bp, Homo sapien
caccctccaagatgtagtctagcaa

SEQ ID NO: 2777026 - DNA, 25 bp, Homo sapien
atagaataggataaccacaagttgc

SEQ ID NO: 2777027 - DNA, 25 bp, Homo sapien
gataaccacaagttgcaaagtggct

SEQ ID NO: 2777028 - DNA, 25 bp, Homo sapien
cctccaagatgtagtctagcaaaat

SEQ ID NO: 2777029 - DNA, 25 bp, Homo sapien
tgaaggagctgttatctctggggaa

SEQ ID NO: 2777030 - DNA, 25 bp, Homo sapien
gagaattagcattcccaaggacctg

SEQ ID NO: 2777031 - DNA, 25 bp, Homo sapien
ttatctctggggaagtgaccacacc

SEQ ID NO: 2777032 - DNA, 25 bp, Homo sapien
atttcaggagaattagcattcccaa

SEQ ID NO: 2777033 - DNA, 25 bp, Homo sapien
tgtatccctttgtgtcaggtcttcc

SEQ ID NO: 2777034 - DNA, 25 bp, Homo sapien
catctcgaatctaatcgccccttgg

SEQ ID NO: 2777035 - DNA, 25 bp, Homo sapien
ccttggtgattcaggggactgagac

SEQ ID NO: 2777036 - DNA, 25 bp, Homo sapien
gaaggacgcagctgaatcctgagtg

SEQ ID NO: 2777037 - DNA, 25 bp, Homo sapien
caactcagacaaaagtccttgaaac

SEQ ID NO: 2777038 - DNA, 25 bp, Homo sapien
aaggggctactctccccaactcaga

SEQ ID NO: 2777039 - DNA, 25 bp, Homo sapien
tggaccgctgaagtcacatcttggc

SEQ ID NO: 2777040 - DNA, 25 bp, Homo sapien
ctggaccgctgaagtcacatcttgg

SEQ ID NO: 2777041 - DNA, 25 bp, Homo sapien
tgtgtgagacatgtaaaaatggacc

SEQ ID NO: 2777042 - DNA, 25 bp, Homo sapien
agagacctctcaggacatcccagga

SEQ ID NO: 2777043 - DNA, 25 bp, Homo sapien
tctgggctatgagtcttgtgaggca

SEQ ID NO: 2777044 - DNA, 25 bp, Homo sapien
aaaatggaccatgcacagttagcct

SEQ ID NO: 2777045 - DNA, 25 bp, Homo sapien
gcccagagttcacagcttgaggtga

SEQ ID NO: 2777046 - DNA, 25 bp, Homo sapien
tagttgctaccatagggtgctggag

SEQ ID NO: 2777047 - DNA, 25 bp, Homo sapien
cagcttgaggtgagctcttgggttt

SEQ ID NO: 2777048 - DNA, 25 bp, Homo sapien
tgaagttggccttagagcactgtga

SEQ ID NO: 2777049 - DNA, 25 bp, Homo sapien
taagaaggccttgacaagacgatat

SEQ ID NO: 2777050 - DNA, 25 bp, Homo sapien
attaagtaagaaggccttgacaaga

SEQ ID NO: 2777051 - DNA, 25 bp, Homo sapien
caggaagatttaattaagtaagaag

SEQ ID NO: 2777052 - DNA, 25 bp, Homo sapien
tgacaagacgatatatttctgagac

SEQ ID NO: 2777053 - DNA, 25 bp, Homo sapien
tatccatgcacactactgtagagct

SEQ ID NO: 2777054 - DNA, 25 bp, Homo sapien
aattcagagtccgtttgtaacctgg

SEQ ID NO: 2777055 - DNA, 25 bp, Homo sapien
tatacattggtgaatccaggaagag

SEQ ID NO: 2777056 - DNA, 25 bp, Homo sapien
tgcccatttcgcaacacatgaggga

SEQ ID NO: 2777057 - DNA, 25 bp, Homo sapien
ttaagtttactaattgatcacaagc

SEQ ID NO: 2777058 - DNA, 25 bp, Homo sapien
ttcactccctcagcttgttgattag

SEQ ID NO: 2777059 - DNA, 25 bp, Homo sapien
cttttttcactccctcagcttgttg

SEQ ID NO: 2777060 - DNA, 25 bp, Homo sapien
cacaagcagtcacagatttctttgt

SEQ ID NO: 2777061 - DNA, 25 bp, Homo sapien
actccccggattcttcacagacagg

SEQ ID NO: 2777062 - DNA, 25 bp, Homo sapien
aaactagtatttgcactcacacact

SEQ ID NO: 2777063 - DNA, 25 bp, Homo sapien
agagggaagcgttgcagtggcagcc

SEQ ID NO: 2777064 - DNA, 25 bp, Homo sapien
aacttaggaagttgaagtttggcat

SEQ ID NO: 2777065 - DNA, 25 bp, Homo sapien
agtgaagaccgacaacaaactgctc

SEQ ID NO: 2777066 - DNA, 25 bp, Homo sapien
acaagcagtgaagaccgacaacaaa

SEQ ID NO: 2777067 - DNA, 25 bp, Homo sapien
ctgctcctggaaaaccggtccaaat

SEQ ID NO: 2777068 - DNA, 25 bp, Homo sapien
gcagtgaagaccgacaacaaactgc

SEQ ID NO: 2777069 - DNA, 25 bp, Homo sapien
gaggccctttgtgaccctactgtgg

SEQ ID NO: 2777070 - DNA, 25 bp, Homo sapien
tcatcagcgatgagctcttcaggca

SEQ ID NO: 2777071 - DNA, 25 bp, Homo sapien
ggctagccgcctttcagacactaaa

SEQ ID NO: 2777072 - DNA, 25 bp, Homo sapien
tgttacagcatgaaccggatcgagc

SEQ ID NO: 2777073 - DNA, 25 bp, Homo sapien
gaaacggtctgtacattaatgcctc

SEQ ID NO: 2777074 - DNA, 25 bp, Homo sapien
gatgaacccttttgcttagagccag

SEQ ID NO: 2777075 - DNA, 25 bp, Homo sapien
taagggcttgaggagagatgaaccc

SEQ ID NO: 2777076 - DNA, 25 bp, Homo sapien
taagaacctccgtgctacaagaagg

SEQ ID NO: 2777077 - DNA, 25 bp, Homo sapien
tctttcgtttttaggacagcaaaga

SEQ ID NO: 2777078 - DNA, 25 bp, Homo sapien
tcgtttttaggacagcaaagatggg

SEQ ID NO: 2777079 - DNA, 25 bp, Homo sapien
ttcgtttttaggacagcaaagatgg

SEQ ID NO: 2777080 - DNA, 25 bp, Homo sapien
tttcgtttttaggacagcaaagatg

SEQ ID NO: 2777081 - DNA, 25 bp, Homo sapien
tccaggattaactggttggtggcac

SEQ ID NO: 2777082 - DNA, 25 bp, Homo sapien
aatgtccaggattaactggttggtg

SEQ ID NO: 2777083 - DNA, 25 bp, Homo sapien
agaatgtccaggattaactggttgg

SEQ ID NO: 2777084 - DNA, 25 bp, Homo sapien
tgtccaggattaactggttggtggc

SEQ ID NO: 2777085 - DNA, 25 bp, Homo sapien
tgagacaggctacccagctggttct

SEQ ID NO: 2777086 - DNA, 25 bp, Homo sapien
gagttaccctcaacatgagacaggc

SEQ ID NO: 2777087 - DNA, 25 bp, Homo sapien
tgttcatgccaggaatagtaacctc

SEQ ID NO: 2777088 - DNA, 25 bp, Homo sapien
tgtgttcaaaccagaacaagtggac

SEQ ID NO: 2777089 - DNA, 25 bp, Homo sapien
tttgttaggaaaacaaagtgcatcc

SEQ ID NO: 2777090 - DNA, 25 bp, Homo sapien
ttgttaggaaaacaaagtgcatccc

SEQ ID NO: 2777091 - DNA, 25 bp, Homo sapien
aggaaaacaaagtgcatccctttca

SEQ ID NO: 2777092 - DNA, 25 bp, Homo sapien
caataaatgttaactctgtagccta

SEQ ID NO: 2777093 - DNA, 25 bp, Homo sapien
ggtcctggattctacaactaagtga

SEQ ID NO: 2777094 - DNA, 25 bp, Homo sapien
gcctaggagtgatctggttacaagc

SEQ ID NO: 2777095 - DNA, 25 bp, Homo sapien
gcattactagccattgtgagcctca

SEQ ID NO: 2777096 - DNA, 25 bp, Homo sapien
gatcggtaattacaccccagggaca

SEQ ID NO: 2777097 - DNA, 25 bp, Homo sapien
gaaggcctattacttctaatctttc

SEQ ID NO: 2777098 - DNA, 25 bp, Homo sapien
tatgatcggtaattacaccccaggg

SEQ ID NO: 2777099 - DNA, 25 bp, Homo sapien
gcttcgtatgatcggtaattacacc

SEQ ID NO: 2777100 - DNA, 25 bp, Homo sapien
tactgaaccgtagaggaggctgtct

SEQ ID NO: 2777101 - DNA, 25 bp, Homo sapien
cagcatggctgatgaattaaattcc

SEQ ID NO: 2777102 - DNA, 25 bp, Homo sapien
cattttcttaacgtaggcaggctca

SEQ ID NO: 2777103 - DNA, 25 bp, Homo sapien
tgacactggacgaacaaagcaaagc

SEQ ID NO: 2777104 - DNA, 25 bp, Homo sapien
tagtacgcctttccgtatgcagtgc

SEQ ID NO: 2777105 - DNA, 25 bp, Homo sapien
tgctttgttttgaagcgtagtacgc

SEQ ID NO: 2777106 - DNA, 25 bp, Homo sapien
aataggatgccaccctgctttgttt

SEQ ID NO: 2777107 - DNA, 25 bp, Homo sapien
ttgaagcgtagtacgcctttccgta

SEQ ID NO: 2777108 - DNA, 25 bp, Homo sapien
cattggagaccaagcatcaacatga

SEQ ID NO: 2777109 - DNA, 25 bp, Homo sapien
gtagtaactaatccagccccacaag

SEQ ID NO: 2777110 - DNA, 25 bp, Homo sapien
gagggccttgcgcttgggtcataac

SEQ ID NO: 2777111 - DNA, 25 bp, Homo sapien
gcagccacgtgcaaaaagaccaaac

SEQ ID NO: 2777112 - DNA, 25 bp, Homo sapien
cagtctgaggtgttgaatatgatcc

SEQ ID NO: 2777113 - DNA, 25 bp, Homo sapien
tctaaatagaacaagtagggatagg

SEQ ID NO: 2777114 - DNA, 25 bp, Homo sapien
gcaccatttgcaatttgtgacagtt

SEQ ID NO: 2777115 - DNA, 25 bp, Homo sapien
gaggagtctgccgtaaagatatata

SEQ ID NO: 2777116 - DNA, 25 bp, Homo sapien
gcattccctattctgccttaggtag

SEQ ID NO: 2777117 - DNA, 25 bp, Homo sapien
tcaatggtgactggctgttgaggat

SEQ ID NO: 2777118 - DNA, 25 bp, Homo sapien
tgggacagccgatgaagacaatggt

SEQ ID NO: 2777119 - DNA, 25 bp, Homo sapien
ggataacgagttatggcattcccta

SEQ ID NO: 2777120 - DNA, 25 bp, Homo sapien
ttatacttggctcatatgaaaaagc

SEQ ID NO: 2777121 - DNA, 25 bp, Homo sapien
tacttggctcatatgaaaaagcctg

SEQ ID NO: 2777122 - DNA, 25 bp, Homo sapien
tggctcatatgaaaaagcctgagac

SEQ ID NO: 2777123 - DNA, 25 bp, Homo sapien
atgtgtatttgttccgttaccgcct

SEQ ID NO: 2777124 - DNA, 25 bp, Homo sapien
tgctggcctgtcattatttggaaat

SEQ ID NO: 2777125 - DNA, 25 bp, Homo sapien
gaaatcatacctaccacttgttctt

SEQ ID NO: 2777126 - DNA, 25 bp, Homo sapien
ctttctagaggtttggtgtcctctt

SEQ ID NO: 2777127 - DNA, 25 bp, Homo sapien
tggaaatacgcgcttttggaatttc

SEQ ID NO: 2777128 - DNA, 25 bp, Homo sapien
cacaaaagctatatctgcaagacaa

SEQ ID NO: 2777129 - DNA, 25 bp, Homo sapien
tgcaagacaagtttgattcatctag

SEQ ID NO: 2777130 - DNA, 25 bp, Homo sapien
caaagtgaccctaatcagcttacaa

SEQ ID NO: 2777131 - DNA, 25 bp, Homo sapien
tgtaaactgaaccatgtatgcactc

SEQ ID NO: 2777132 - DNA, 25 bp, Homo sapien
tgagacagattacacgatagacaga

SEQ ID NO: 2777133 - DNA, 25 bp, Homo sapien
acagattacacgatagacagataga

SEQ ID NO: 2777134 - DNA, 25 bp, Homo sapien
gacagattacacgatagacagatag

SEQ ID NO: 2777135 - DNA, 25 bp, Homo sapien
gagacagattacacgatagacagat

SEQ ID NO: 2777136 - DNA, 25 bp, Homo sapien
gagccactttgcttcctagaggcag

SEQ ID NO: 2777137 - DNA, 25 bp, Homo sapien
tccatgaagatctggaatgatgaca

SEQ ID NO: 2777138 - DNA, 25 bp, Homo sapien
tgtgacacatcagccctatctatag

SEQ ID NO: 2777139 - DNA, 25 bp, Homo sapien
tatctcaggcatcccattcagctca

SEQ ID NO: 2777140 - DNA, 25 bp, Homo sapien
tatcattgtatttcaggagcctggc

SEQ ID NO: 2777141 - DNA, 25 bp, Homo sapien
tcataacatgtctaactaggatagc

SEQ ID NO: 2777142 - DNA, 25 bp, Homo sapien
aatttatcttcagcttgactctctc

SEQ ID NO: 2777143 - DNA, 25 bp, Homo sapien
gacagtacagatatcattttttccc

SEQ ID NO: 2777144 - DNA, 25 bp, Homo sapien
gagacaataccctagaagttttgca

SEQ ID NO: 2777145 - DNA, 25 bp, Homo sapien
tggcagtgtgatgaccaatgaggtt

SEQ ID NO: 2777146 - DNA, 25 bp, Homo sapien
tgcttctattgagacaataccctag

SEQ ID NO: 2777147 - DNA, 25 bp, Homo sapien
caatgaggtttatctgaggtgcgat

SEQ ID NO: 2777148 - DNA, 25 bp, Homo sapien
tatgaaatctcttcggatgggaatg

SEQ ID NO: 2777149 - DNA, 25 bp, Homo sapien
cctgaaggttggtaagcctgtcata

SEQ ID NO: 2777150 - DNA, 25 bp, Homo sapien
gaaacatacattggacgataagccc

SEQ ID NO: 2777151 - DNA, 25 bp, Homo sapien
tgggaatgttccttcaatcgtgcac

SEQ ID NO: 2777152 - DNA, 25 bp, Homo sapien
taatgaaacctgatgagaaagccga

SEQ ID NO: 2777153 - DNA, 25 bp, Homo sapien
ccagttgcaagtttagcccagccca

SEQ ID NO: 2777154 - DNA, 25 bp, Homo sapien
ttagacacccaatacaaagctgctg

SEQ ID NO: 2777155 - DNA, 25 bp, Homo sapien
tttactgttaacactcagggcagcc

SEQ ID NO: 2777156 - DNA, 25 bp, Homo sapien
caagagtgaatttgacctaggcaag

SEQ ID NO: 2777157 - DNA, 25 bp, Homo sapien
atttggtcagattgggataaggccc

SEQ ID NO: 2777158 - DNA, 25 bp, Homo sapien
tcactaggatgcagatggaccacac

SEQ ID NO: 2777159 - DNA, 25 bp, Homo sapien
taagacatctcaggatttcaccaga

SEQ ID NO: 2777160 - DNA, 25 bp, Homo sapien
aacctgggcgctactgtcatttggg

SEQ ID NO: 2777161 - DNA, 25 bp, Homo sapien
catttatcacaccaggacagggtct

SEQ ID NO: 2777162 - DNA, 25 bp, Homo sapien
tctagctacccgatgccagagcatg

SEQ ID NO: 2777163 - DNA, 25 bp, Homo sapien
gaaagctttggttagccttgcctta

SEQ ID NO: 2777164 - DNA, 25 bp, Homo sapien
acaatgcccttttgtgtacattcag

SEQ ID NO: 2777165 - DNA, 25 bp, Homo sapien
gattccttaaactgagatccctgat

SEQ ID NO: 2777166 - DNA, 25 bp, Homo sapien
tcatcatacagaaggcaggattcct

SEQ ID NO: 2777167 - DNA, 25 bp, Homo sapien
aactctaaagactgaaactgtagcc

SEQ ID NO: 2777168 - DNA, 25 bp, Homo sapien
tttatatcccatagttaactggaaa

SEQ ID NO: 2777169 - DNA, 25 bp, Homo sapien
taggaaatgctgtacaggttaggaa

SEQ ID NO: 2777170 - DNA, 25 bp, Homo sapien
ggttaggaagacctgtattaaagca

SEQ ID NO: 2777171 - DNA, 25 bp, Homo sapien
ggaagacctgtattaaagcaatcat

SEQ ID NO: 2777172 - DNA, 25 bp, Homo sapien
acaggcggaagctcgatggcaagcc

SEQ ID NO: 2777173 - DNA, 25 bp, Homo sapien
tatcagagtgacagtagccccttaa

SEQ ID NO: 2777174 - DNA, 25 bp, Homo sapien
tagcaatcatgcaaagtcacggctt

SEQ ID NO: 2777175 - DNA, 25 bp, Homo sapien
ggcatgccccaggttaactccttaa

SEQ ID NO: 2777176 - DNA, 25 bp, Homo sapien
taaactatcctgatgtggagagaaa

SEQ ID NO: 2777177 - DNA, 25 bp, Homo sapien
tagttaaagtcactgaggagggccc

SEQ ID NO: 2777178 - DNA, 25 bp, Homo sapien
gggagtacgtttctgagctagttaa

SEQ ID NO: 2777179 - DNA, 25 bp, Homo sapien
ttgtcccactagtataagagattgt

SEQ ID NO: 2777180 - DNA, 25 bp, Homo sapien
tccaagttgatgactcttcgtatat

SEQ ID NO: 2777181 - DNA, 25 bp, Homo sapien
taactgttggatgcccaaaagcact

SEQ ID NO: 2777182 - DNA, 25 bp, Homo sapien
gtttcctttccaagttgatgactct

SEQ ID NO: 2777183 - DNA, 25 bp, Homo sapien
ttaactgttggatgcccaaaagcac

SEQ ID NO: 2777184 - DNA, 25 bp, Homo sapien
gaactcctgcacttcctcggactct

SEQ ID NO: 2777185 - DNA, 25 bp, Homo sapien
aaaatcaggtccacatgctaaaatg

SEQ ID NO: 2777186 - DNA, 25 bp, Homo sapien
gatactacagtcagtaaaaagtcca

SEQ ID NO: 2777187 - DNA, 25 bp, Homo sapien
tttttcatgcttaacaaatcttgga

SEQ ID NO: 2777188 - DNA, 25 bp, Homo sapien
aaattcctgagaaaaatcaggtcca

SEQ ID NO: 2777189 - DNA, 25 bp, Homo sapien
tttccatatgggcaccttggctttt

SEQ ID NO: 2777190 - DNA, 25 bp, Homo sapien
ccatatgggcaccttggcttttaaa

SEQ ID NO: 2777191 - DNA, 25 bp, Homo sapien
ctcacagcttcaagagatgcagctc

SEQ ID NO: 2777192 - DNA, 25 bp, Homo sapien
ggcatagctcacagcttcaagagat

SEQ ID NO: 2777193 - DNA, 25 bp, Homo sapien
ctgaggacacagcaatgattatgct

SEQ ID NO: 2777194 - DNA, 25 bp, Homo sapien
gacacagcaatgattatgcttgctt

SEQ ID NO: 2777195 - DNA, 25 bp, Homo sapien
tgaggacacagcaatgattatgctt

SEQ ID NO: 2777196 - DNA, 25 bp, Homo sapien
aggacacagcaatgattatgcttgc

SEQ ID NO: 2777197 - DNA, 25 bp, Homo sapien
gtcacagattgtcatagggcctgca

SEQ ID NO: 2777198 - DNA, 25 bp, Homo sapien
taattgcagtagcattcagcagagg

SEQ ID NO: 2777199 - DNA, 25 bp, Homo sapien
tgatgggcaccaaggaaaatccttt

SEQ ID NO: 2777200 - DNA, 25 bp, Homo sapien
gcacagtgccaagtaatgcctagaa

SEQ ID NO: 2777201 - DNA, 25 bp, Homo sapien
ccaagtctatggaacactgctatgt

SEQ ID NO: 2777202 - DNA, 25 bp, Homo sapien
gctatgtgtttgactggccatttct

SEQ ID NO: 2777203 - DNA, 25 bp, Homo sapien
tccgccatgggtagatatgcttcat

SEQ ID NO: 2777204 - DNA, 25 bp, Homo sapien
cctaatgtcactacaaatctttctg

SEQ ID NO: 2777205 - DNA, 25 bp, Homo sapien
aaccgggcaatattcctcttctgac

SEQ ID NO: 2777206 - DNA, 25 bp, Homo sapien
ctggcaaaccgggcaatattcctct

SEQ ID NO: 2777207 - DNA, 25 bp, Homo sapien
tggcaaaccgggcaatattcctctt

SEQ ID NO: 2777208 - DNA, 25 bp, Homo sapien
gcaaaccgggcaatattcctcttct

SEQ ID NO: 2777209 - DNA, 25 bp, Homo sapien
aattctctctcctaacaatgacttt

SEQ ID NO: 2777210 - DNA, 25 bp, Homo sapien
tacaaatagggatattgcaccacag

SEQ ID NO: 2777211 - DNA, 25 bp, Homo sapien
caactgtgagacttcatctactgaa

SEQ ID NO: 2777212 - DNA, 25 bp, Homo sapien
gagcggagaaatcaccaactgtgag

SEQ ID NO: 2777213 - DNA, 25 bp, Homo sapien
ctgaaagtttctcggcagtaaagtt

SEQ ID NO: 2777214 - DNA, 25 bp, Homo sapien
taacggcaatttcgtctccaggctg

SEQ ID NO: 2777215 - DNA, 25 bp, Homo sapien
tccactaatgggggggataacggca

SEQ ID NO: 2777216 - DNA, 25 bp, Homo sapien
gggataacggcaatttcgtctccag

SEQ ID NO: 2777217 - DNA, 25 bp, Homo sapien
acggcaatttcgtctccaggctgaa

SEQ ID NO: 2777218 - DNA, 25 bp, Homo sapien
gacgaacagcaaatattatctgatt

SEQ ID NO: 2777219 - DNA, 25 bp, Homo sapien
tcttgacgaacagcaaatattatct

SEQ ID NO: 2777220 - DNA, 25 bp, Homo sapien
attcttgacgaacagcaaatattat

SEQ ID NO: 2777221 - DNA, 25 bp, Homo sapien
cttgacgaacagcaaatattatctg

SEQ ID NO: 2777222 - DNA, 25 bp, Homo sapien
tatgactcaaagtatcaacgctatg

SEQ ID NO: 2777223 - DNA, 25 bp, Homo sapien
tgaagaacatacttatacaccacaa

SEQ ID NO: 2777224 - DNA, 25 bp, Homo sapien
tatgatagacctcaaatcgcttcag

SEQ ID NO: 2777225 - DNA, 25 bp, Homo sapien
tacacatagtatatggagaaaggac

SEQ ID NO: 2777226 - DNA, 25 bp, Homo sapien
caggtaaagcagaatgggagacccc

SEQ ID NO: 2777227 - DNA, 25 bp, Homo sapien
caccagactggaggcaacactcaaa

SEQ ID NO: 2777228 - DNA, 25 bp, Homo sapien
gtgaaaacgtatacaagacctgctg

SEQ ID NO: 2777229 - DNA, 25 bp, Homo sapien
caggccactgtaagagcaacttaaa

SEQ ID NO: 2777230 - DNA, 25 bp, Homo sapien
agctgcaacgcttttatttcttgag

SEQ ID NO: 2777231 - DNA, 25 bp, Homo sapien
cttgaggcacagaaatggtctctga

SEQ ID NO: 2777232 - DNA, 25 bp, Homo sapien
cttccacagctgcaacgcttttatt

SEQ ID NO: 2777233 - DNA, 25 bp, Homo sapien
tctgaacgaactcctgttatttcag

SEQ ID NO: 2777234 - DNA, 25 bp, Homo sapien
taacatcgtccccagacgctaagga

SEQ ID NO: 2777235 - DNA, 25 bp, Homo sapien
tcttctaggaaaacatgttaagcct

SEQ ID NO: 2777236 - DNA, 25 bp, Homo sapien
tagattccggtctgtataacatcgt

SEQ ID NO: 2777237 - DNA, 25 bp, Homo sapien
ggtttgaaacacacgacagactgga

SEQ ID NO: 2777238 - DNA, 25 bp, Homo sapien
ggtccgactgaccaaggctgggtat

SEQ ID NO: 2777239 - DNA, 25 bp, Homo sapien
caagagttctcggagaggacccgac

SEQ ID NO: 2777240 - DNA, 25 bp, Homo sapien
ggaggcgccttcagaacgagtccgt

SEQ ID NO: 2777241 - DNA, 25 bp, Homo sapien
gctgccgtgagctgacaagagttct

SEQ ID NO: 2777242 - DNA, 25 bp, Homo sapien
acagcgggaccgaatcacggccgca

SEQ ID NO: 2777243 - DNA, 25 bp, Homo sapien
ctaggacagcgggaccgaatcacgg

SEQ ID NO: 2777244 - DNA, 25 bp, Homo sapien
cgggaccgaatcacggccgcaaagg

SEQ ID NO: 2777245 - DNA, 25 bp, Homo sapien
aggacagcgggaccgaatcacggcc

SEQ ID NO: 2777246 - DNA, 25 bp, Homo sapien
cactccaggtttcggaggcataacc

SEQ ID NO: 2777247 - DNA, 25 bp, Homo sapien
agccttctcagttgtagccctttgt

SEQ ID NO: 2777248 - DNA, 25 bp, Homo sapien
cttccaggtatccactgaaatctca

SEQ ID NO: 2777249 - DNA, 25 bp, Homo sapien
ctttgtttaaacactctagactgtg

SEQ ID NO: 2777250 - DNA, 25 bp, Homo sapien
gctttattaaggctcttgcttggtt

SEQ ID NO: 2777251 - DNA, 25 bp, Homo sapien
ttccatccataacatgatgtaagtt

SEQ ID NO: 2777252 - DNA, 25 bp, Homo sapien
ttagaaacatgacgctctaatgttg

SEQ ID NO: 2777253 - DNA, 25 bp, Homo sapien
acatgacgctctaatgttgatgaag

SEQ ID NO: 2777254 - DNA, 25 bp, Homo sapien
cttcaatatgcccacagctgttgat

SEQ ID NO: 2777255 - DNA, 25 bp, Homo sapien
ttcaatatgcccacagctgttgatt

SEQ ID NO: 2777256 - DNA, 25 bp, Homo sapien
gaagtgctgtcacatgagctgaaaa

SEQ ID NO: 2777257 - DNA, 25 bp, Homo sapien
ctctatggtattggaataaaaccag

SEQ ID NO: 2777258 - DNA, 25 bp, Homo sapien
agttgtccagtaagttctctatggt

SEQ ID NO: 2777259 - DNA, 25 bp, Homo sapien
tgaaaacacgccagagtaccgcatc

SEQ ID NO: 2777260 - DNA, 25 bp, Homo sapien
cattggttggacctctgtcagcaaa

SEQ ID NO: 2777261 - DNA, 25 bp, Homo sapien
gcaaacagatgtgatccagagacac

SEQ ID NO: 2777262 - DNA, 25 bp, Homo sapien
tgtcagcaaacagatgtgatccaga

SEQ ID NO: 2777263 - DNA, 25 bp, Homo sapien
agtgaatgaggacattggttggacc

SEQ ID NO: 2777264 - DNA, 25 bp, Homo sapien
tccagatctattccatccagcattg

SEQ ID NO: 2777265 - DNA, 25 bp, Homo sapien
caaatactatccagggaactgagtg

SEQ ID NO: 2777266 - DNA, 25 bp, Homo sapien
ataaatgtggtcaaatactatccag

SEQ ID NO: 2777267 - DNA, 25 bp, Homo sapien
ggaactgagtgcttctccagatcta

SEQ ID NO: 2777268 - DNA, 25 bp, Homo sapien
ctggcagaagcttgtaatgtagata

SEQ ID NO: 2777269 - DNA, 25 bp, Homo sapien
gaagcttgtaatgtagataagttca

SEQ ID NO: 2777270 - DNA, 25 bp, Homo sapien
gcagaagcttgtaatgtagataagt

SEQ ID NO: 2777271 - DNA, 25 bp, Homo sapien
gcttgtaatgtagataagttcatat

SEQ ID NO: 2777272 - DNA, 25 bp, Homo sapien
aattgggattcttctattagtgttc

SEQ ID NO: 2777273 - DNA, 25 bp, Homo sapien
gatacccatcagaaccaccacctat

SEQ ID NO: 2777274 - DNA, 25 bp, Homo sapien
tgttccaaccttgttgacttgaaaa

SEQ ID NO: 2777275 - DNA, 25 bp, Homo sapien
tagcagctgtcagccagatacccat

SEQ ID NO: 2777276 - DNA, 25 bp, Homo sapien
aagctgttctcgtggcatttatgac

SEQ ID NO: 2777277 - DNA, 25 bp, Homo sapien
cactggacaaatttaaatggaggag

SEQ ID NO: 2777278 - DNA, 25 bp, Homo sapien
gacaagaccaaaactggcactggac

SEQ ID NO: 2777279 - DNA, 25 bp, Homo sapien
ttttctgtcaatgtctccaaagttt

SEQ ID NO: 2777280 - DNA, 25 bp, Homo sapien
gaagaagtgtctttcctcttaggtg

SEQ ID NO: 2777281 - DNA, 25 bp, Homo sapien
gcttcaatagacctgtgcaccaagt

SEQ ID NO: 2777282 - DNA, 25 bp, Homo sapien
gcaccaagtcttttgacgtcagctt

SEQ ID NO: 2777283 - DNA, 25 bp, Homo sapien
acgacttccagtccagatttgctgg

SEQ ID NO: 2777284 - DNA, 25 bp, Homo sapien
ctaaagttcttcctgtattccaaag

SEQ ID NO: 2777285 - DNA, 25 bp, Homo sapien
ccaaagtatttcagaccaatgagta

SEQ ID NO: 2777286 - DNA, 25 bp, Homo sapien
aagttcttcctgtattccaaagtat

SEQ ID NO: 2777287 - DNA, 25 bp, Homo sapien
tatttcagaccaatgagtatttgct

SEQ ID NO: 2777288 - DNA, 25 bp, Homo sapien
taaagtccaggggttcaaatgaaga

SEQ ID NO: 2777289 - DNA, 25 bp, Homo sapien
gatgtaaagtccaggggttcaaatg

SEQ ID NO: 2777290 - DNA, 25 bp, Homo sapien
tacaatgaggtaatggcagcatttg

SEQ ID NO: 2777291 - DNA, 25 bp, Homo sapien
aatgaagagtcattacaatgaggta

SEQ ID NO: 2777292 - DNA, 25 bp, Homo sapien
atcatgatccatgggtctgcgttca

SEQ ID NO: 2777293 - DNA, 25 bp, Homo sapien
tcccatccaatcatgatccatgggt

SEQ ID NO: 2777294 - DNA, 25 bp, Homo sapien
tccaatcatgatccatgggtctgcg

SEQ ID NO: 2777295 - DNA, 25 bp, Homo sapien
ttctcccatccaatcatgatccatg

SEQ ID NO: 2777296 - DNA, 25 bp, Homo sapien
atgagtgatcccctcaggggatgag

SEQ ID NO: 2777297 - DNA, 25 bp, Homo sapien
gatgagtgatcccctcaggggatga

SEQ ID NO: 2777298 - DNA, 25 bp, Homo sapien
cagtcactggcaaaacagttggaca

SEQ ID NO: 2777299 - DNA, 25 bp, Homo sapien
tgtggccactctcctagttcacatc

SEQ ID NO: 2777300 - DNA, 25 bp, Homo sapien
tcctagttcacatccaacttcccat

SEQ ID NO: 2777301 - DNA, 25 bp, Homo sapien
ggacaaccaggcaactgtggccact

SEQ ID NO: 2777302 - DNA, 25 bp, Homo sapien
caatgcagaagaattgaggaacctg

SEQ ID NO: 2777303 - DNA, 25 bp, Homo sapien
agcaatgcagaagaattgaggaacc

SEQ ID NO: 2777304 - DNA, 25 bp, Homo sapien
gaaattacttctgctgccaacccac

SEQ ID NO: 2777305 - DNA, 25 bp, Homo sapien
ttgaggaacctgaaattacttctgc

SEQ ID NO: 2777306 - DNA, 25 bp, Homo sapien
cataattcctggacaccgtatggga

SEQ ID NO: 2777307 - DNA, 25 bp, Homo sapien
tgggaaatgctcagtgataatatca

SEQ ID NO: 2777308 - DNA, 25 bp, Homo sapien
gataatatcatgatggagtcattgg

SEQ ID NO: 2777309 - DNA, 25 bp, Homo sapien
tggtgggttgtatgcacataattcc

SEQ ID NO: 2777310 - DNA, 25 bp, Homo sapien
tccaggaaatgagtgccagatgatg

SEQ ID NO: 2777311 - DNA, 25 bp, Homo sapien
catgcatagggagattgtgtgacca

SEQ ID NO: 2777312 - DNA, 25 bp, Homo sapien
taaacaatggcctcaactccaggaa

SEQ ID NO: 2777313 - DNA, 25 bp, Homo sapien
tgctttagtccagagaggtgctcca

SEQ ID NO: 2777314 - DNA, 25 bp, Homo sapien
aggaaactggctctttatgagtttt

SEQ ID NO: 2777315 - DNA, 25 bp, Homo sapien
aaggaaactggctctttatgagttt

SEQ ID NO: 2777316 - DNA, 25 bp, Homo sapien
aaaggaaactggctctttatgagtt

SEQ ID NO: 2777317 - DNA, 25 bp, Homo sapien
taaaggaaactggctctttatgagt

SEQ ID NO: 2777318 - DNA, 25 bp, Homo sapien
tcaggaatgttacagctgaccggat

SEQ ID NO: 2777319 - DNA, 25 bp, Homo sapien
caggaatgttacagctgaccggatt

SEQ ID NO: 2777320 - DNA, 25 bp, Homo sapien
ttcgaagaagaaccgcattctctga

SEQ ID NO: 2777321 - DNA, 25 bp, Homo sapien
gtggatctttgtttcgaagaagaac

SEQ ID NO: 2777322 - DNA, 25 bp, Homo sapien
gaacgttcattttcagagagtgaac

SEQ ID NO: 2777323 - DNA, 25 bp, Homo sapien
cattttcagagagtgaactctgcat

SEQ ID NO: 2777324 - DNA, 25 bp, Homo sapien
ctgaacgttcattttcagagagtga

SEQ ID NO: 2777325 - DNA, 25 bp, Homo sapien
cgttcattttcagagagtgaactct

SEQ ID NO: 2777326 - DNA, 25 bp, Homo sapien
atttgctacttaaagatcctcctgc

SEQ ID NO: 2777327 - DNA, 25 bp, Homo sapien
tgatttgctacttaaagatcctcct

SEQ ID NO: 2777328 - DNA, 25 bp, Homo sapien
ttaataccgatctacaaccagttct

SEQ ID NO: 2777329 - DNA, 25 bp, Homo sapien
tagaactcttggatccctttaagca

SEQ ID NO: 2777330 - DNA, 25 bp, Homo sapien
catgtgtcaaggcaatgagtgagct

SEQ ID NO: 2777331 - DNA, 25 bp, Homo sapien
acttggtgatgctcatcatccggga

SEQ ID NO: 2777332 - DNA, 25 bp, Homo sapien
tgagcaactgttccacccaactcag

SEQ ID NO: 2777333 - DNA, 25 bp, Homo sapien
cctgcagactagagagagctttgga

SEQ ID NO: 2777334 - DNA, 25 bp, Homo sapien
tgaccatgttagtggcacgcccaag

SEQ ID NO: 2777335 - DNA, 25 bp, Homo sapien
ggtgtcacatcctagtcaatgccaa

SEQ ID NO: 2777336 - DNA, 25 bp, Homo sapien
aactgaggctcgtgttggtgtcaca

SEQ ID NO: 2777337 - DNA, 25 bp, Homo sapien
cttgagaagcttagattccagtggg

SEQ ID NO: 2777338 - DNA, 25 bp, Homo sapien
catgttacagtgtgatggtgctgcc

SEQ ID NO: 2777339 - DNA, 25 bp, Homo sapien
tagaagctcacactaggccagcggt

SEQ ID NO: 2777340 - DNA, 25 bp, Homo sapien
cacagtatatgtgcccttgagaagc

SEQ ID NO: 2777341 - DNA, 25 bp, Homo sapien
ctttactataatttcagtgatggag

SEQ ID NO: 2777342 - DNA, 25 bp, Homo sapien
tttactataatttcagtgatggaga

SEQ ID NO: 2777343 - DNA, 25 bp, Homo sapien
tagtcataatattcctagcatgttc

SEQ ID NO: 2777344 - DNA, 25 bp, Homo sapien
cattctcttttcttcggtagtcata

SEQ ID NO: 2777345 - DNA, 25 bp, Homo sapien
ggatgagtctaatctctcattcaga

SEQ ID NO: 2777346 - DNA, 25 bp, Homo sapien
taccttacgtcttcaatgttggttc

SEQ ID NO: 2777347 - DNA, 25 bp, Homo sapien
tttggttgtggtcttttgcctcttc

SEQ ID NO: 2777348 - DNA, 25 bp, Homo sapien
tgccatgtacttccttttggttgtg

SEQ ID NO: 2777349 - DNA, 25 bp, Homo sapien
cttccctgccatgtacttccttttg

SEQ ID NO: 2777350 - DNA, 25 bp, Homo sapien
cttctttaaagaacacaacatggtt

SEQ ID NO: 2777351 - DNA, 25 bp, Homo sapien
cgcttaagcactaattgattcattt

SEQ ID NO: 2777352 - DNA, 25 bp, Homo sapien
tccaacgcttaagcactaattgatt

SEQ ID NO: 2777353 - DNA, 25 bp, Homo sapien
acatcatgcctcctccaacgcttaa

SEQ ID NO: 2777354 - DNA, 25 bp, Homo sapien
ctcctccaacgcttaagcactaatt

SEQ ID NO: 2777355 - DNA, 25 bp, Homo sapien
agcgctgattggagccccagtattg

SEQ ID NO: 2777356 - DNA, 25 bp, Homo sapien
ctagcgctgattggagccccagtat

SEQ ID NO: 2777357 - DNA, 25 bp, Homo sapien
cgctgattggagccccagtattgga

SEQ ID NO: 2777358 - DNA, 25 bp, Homo sapien
ccagtattggaggtcacattctttc

SEQ ID NO: 2777359 - DNA, 25 bp, Homo sapien
ccagtgggggttgatgcttctgaaa

SEQ ID NO: 2777360 - DNA, 25 bp, Homo sapien
tgaagccaaaccttgggggaatata

SEQ ID NO: 2777361 - DNA, 25 bp, Homo sapien
ctgtaggcaaatcccaaggggaggg

SEQ ID NO: 2777362 - DNA, 25 bp, Homo sapien
ttctccaccagtacagtataaaagg

SEQ ID NO: 2777363 - DNA, 25 bp, Homo sapien
gaccaagatctatgcgggacatcag

SEQ ID NO: 2777364 - DNA, 25 bp, Homo sapien
ctccaagagaatggcccgctgggtc

SEQ ID NO: 2777365 - DNA, 25 bp, Homo sapien
tacaggtgatgctggggttgactcc

SEQ ID NO: 2777366 - DNA, 25 bp, Homo sapien
atcagagtaaaagcgtcatgcccag

SEQ ID NO: 2777367 - DNA, 25 bp, Homo sapien
aaactaacattcatcgttttgcctt

SEQ ID NO: 2777368 - DNA, 25 bp, Homo sapien
cacattactgtggtcctactgtctg

SEQ ID NO: 2777369 - DNA, 25 bp, Homo sapien
ttccaagccttcatatccaggagtc

SEQ ID NO: 2777370 - DNA, 25 bp, Homo sapien
gaaatccaagggttgttcaagtaca

SEQ ID NO: 2777371 - DNA, 25 bp, Homo sapien
cttgtgtagtggcccccagccccat

SEQ ID NO: 2777372 - DNA, 25 bp, Homo sapien
actgtgagcagaaacgcccgtaggc

SEQ ID NO: 2777373 - DNA, 25 bp, Homo sapien
tgtgagcagaaacgcccgtaggctt

SEQ ID NO: 2777374 - DNA, 25 bp, Homo sapien
tgactgtgagcagaaacgcccgtag

SEQ ID NO: 2777375 - DNA, 25 bp, Homo sapien
acatgactgtgagcagaaacgcccg

SEQ ID NO: 2777376 - DNA, 25 bp, Homo sapien
cactcttcctgagctgtaagccaag

SEQ ID NO: 2777377 - DNA, 25 bp, Homo sapien
tccaggatttgccattgaatgggct

SEQ ID NO: 2777378 - DNA, 25 bp, Homo sapien
tgccactgtcctgataacgtgtgtg

SEQ ID NO: 2777379 - DNA, 25 bp, Homo sapien
catgcttatgaatcaggaggcaggc

SEQ ID NO: 2777380 - DNA, 25 bp, Homo sapien
ttgaaatcctttcatcaacttgctc

SEQ ID NO: 2777381 - DNA, 25 bp, Homo sapien
tttccaactttctgagctacaacca

SEQ ID NO: 2777382 - DNA, 25 bp, Homo sapien
ttccaactttctgagctacaaccat

SEQ ID NO: 2777383 - DNA, 25 bp, Homo sapien
agaaagatttgcagttgcccatttt

SEQ ID NO: 2777384 - DNA, 25 bp, Homo sapien
agttaagggagtttatctctgagaa

SEQ ID NO: 2777385 - DNA, 25 bp, Homo sapien
tcagttaagggagtttatctctgag

SEQ ID NO: 2777386 - DNA, 25 bp, Homo sapien
catacattcttgtggtctagcactg

SEQ ID NO: 2777387 - DNA, 25 bp, Homo sapien
cagttcataaggttgacccttagag

SEQ ID NO: 2777388 - DNA, 25 bp, Homo sapien
ataaggttgacccttagagcttcct

SEQ ID NO: 2777389 - DNA, 25 bp, Homo sapien
ttgacccttagagcttccttccctg

SEQ ID NO: 2777390 - DNA, 25 bp, Homo sapien
tcataaggttgacccttagagcttc

SEQ ID NO: 2777391 - DNA, 25 bp, Homo sapien
gaacccaaggttggagcctctgtag

SEQ ID NO: 2777392 - DNA, 25 bp, Homo sapien
tattcttacagagcttggcaacagg

SEQ ID NO: 2777393 - DNA, 25 bp, Homo sapien
cattgacaacctgatctggaaccct

SEQ ID NO: 2777394 - DNA, 25 bp, Homo sapien
tcctttcctgagatagtccgaacag

SEQ ID NO: 2777395 - DNA, 25 bp, Homo sapien
cacttaatgcatcacctgtcccgta

SEQ ID NO: 2777396 - DNA, 25 bp, Homo sapien
taatgcatcacctgtcccgtatttc

SEQ ID NO: 2777397 - DNA, 25 bp, Homo sapien
acttaatgcatcacctgtcccgtat

SEQ ID NO: 2777398 - DNA, 25 bp, Homo sapien
atgcatcacctgtcccgtatttcca

SEQ ID NO: 2777399 - DNA, 25 bp, Homo sapien
ttaccagcctgctgcaccgaatgcg

SEQ ID NO: 2777400 - DNA, 25 bp, Homo sapien
tgagaggcacccaaacaactgtctt

SEQ ID NO: 2777401 - DNA, 25 bp, Homo sapien
ttagcacggctgtatttcgggatct

SEQ ID NO: 2777402 - DNA, 25 bp, Homo sapien
ttatagtctgtccagacagatccca

SEQ ID NO: 2777403 - DNA, 25 bp, Homo sapien
gcaaataagaactcgacgattccct

SEQ ID NO: 2777404 - DNA, 25 bp, Homo sapien
gggcacctccgaaagataattggga

SEQ ID NO: 2777405 - DNA, 25 bp, Homo sapien
cacctccgaaagataattgggaagg

SEQ ID NO: 2777406 - DNA, 25 bp, Homo sapien
tccagccgttttgatttcgggcacc

SEQ ID NO: 2777407 - DNA, 25 bp, Homo sapien
tctagatttaaagcgcggctgcgcc

SEQ ID NO: 2777408 - DNA, 25 bp, Homo sapien
tgcgcccggcttctgacgtccattg

SEQ ID NO: 2777409 - DNA, 25 bp, Homo sapien
ccccgtctagatttaaagcgcggct

SEQ ID NO: 2777410 - DNA, 25 bp, Homo sapien
cgtccattgaatcgcgcgggcggcc

SEQ ID NO: 2777411 - DNA, 25 bp, Homo sapien
atggtccgcgcgaggcaccagccgg

SEQ ID NO: 2777412 - DNA, 25 bp, Homo sapien
tccgcgcgaggcaccagccgggtgg

SEQ ID NO: 2777413 - DNA, 25 bp, Homo sapien
ccaggatggtccgcgcgaggcacca

SEQ ID NO: 2777414 - DNA, 25 bp, Homo sapien
ctgcccccaggatggtccgcgcgag

SEQ ID NO: 2777415 - DNA, 25 bp, Homo sapien
atttcgaaagatcgcggtggccgcg

SEQ ID NO: 2777416 - DNA, 25 bp, Homo sapien
gtcgggctggctgcgcctggaggcc

SEQ ID NO: 2777417 - DNA, 25 bp, Homo sapien
gaaagcagccctcggagatttcgaa

SEQ ID NO: 2777418 - DNA, 25 bp, Homo sapien
tctggcggattgcaaaacgggcccg

SEQ ID NO: 2777419 - DNA, 25 bp, Homo sapien
gctggctccgtcaagcgaagaacgg

SEQ ID NO: 2777420 - DNA, 25 bp, Homo sapien
agaacggccgctgccaggtcctgta

SEQ ID NO: 2777421 - DNA, 25 bp, Homo sapien
tgtacaagaccgaactgagcaagga

SEQ ID NO: 2777422 - DNA, 25 bp, Homo sapien
caggtcctgtacaagaccgaactga

SEQ ID NO: 2777423 - DNA, 25 bp, Homo sapien
cagcgagtgtgccatgaaggaagct

SEQ ID NO: 2777424 - DNA, 25 bp, Homo sapien
tgtgccctgacagtaagtcggatga

SEQ ID NO: 2777425 - DNA, 25 bp, Homo sapien
tgtctgtgccagtgacaatgccact

SEQ ID NO: 2777426 - DNA, 25 bp, Homo sapien
tgccacttatgccagcgagtgtgcc

SEQ ID NO: 2777427 - DNA, 25 bp, Homo sapien
tatggctgtatcagagggctttgaa

SEQ ID NO: 2777428 - DNA, 25 bp, Homo sapien
catctagccatttcggaagacaccg

SEQ ID NO: 2777429 - DNA, 25 bp, Homo sapien
gaatctgcccgtaaaacctgagcca

SEQ ID NO: 2777430 - DNA, 25 bp, Homo sapien
aaaatgcaacgctgtaatatggctg

SEQ ID NO: 2777431 - DNA, 25 bp, Homo sapien
taaactctctataagtgttcagtgt

SEQ ID NO: 2777432 - DNA, 25 bp, Homo sapien
tctagagtggtaaactctctataag

SEQ ID NO: 2777433 - DNA, 25 bp, Homo sapien
gagtggtaaactctctataagtgtt

SEQ ID NO: 2777434 - DNA, 25 bp, Homo sapien
tggtaaactctctataagtgttcag

SEQ ID NO: 2777435 - DNA, 25 bp, Homo sapien
gatgaggcccatagttgagacttgt

SEQ ID NO: 2777436 - DNA, 25 bp, Homo sapien
tcattggacacggagaggcattcat

SEQ ID NO: 2777437 - DNA, 25 bp, Homo sapien
attgtgaggtctactggatgaggcc

SEQ ID NO: 2777438 - DNA, 25 bp, Homo sapien
caaaaggcattataactctgactca

SEQ ID NO: 2777439 - DNA, 25 bp, Homo sapien
tccacaatgatgtccatggttaggg

SEQ ID NO: 2777440 - DNA, 25 bp, Homo sapien
tcagctgcagaagtagacattatag

SEQ ID NO: 2777441 - DNA, 25 bp, Homo sapien
catttgggccatcattcactagtcc

SEQ ID NO: 2777442 - DNA, 25 bp, Homo sapien
caaagaagtacaagatgcaagcctc

SEQ ID NO: 2777443 - DNA, 25 bp, Homo sapien
ctctcgggaaaggaaacgggcagat

SEQ ID NO: 2777444 - DNA, 25 bp, Homo sapien
tatataatgattagagccctgttgg

SEQ ID NO: 2777445 - DNA, 25 bp, Homo sapien
tactggcttgccactagagagaggc

SEQ ID NO: 2777446 - DNA, 25 bp, Homo sapien
tctccggtgtagattagctactggc

SEQ ID NO: 2777447 - DNA, 25 bp, Homo sapien
caaaagggactccatggaagaagga

SEQ ID NO: 2777448 - DNA, 25 bp, Homo sapien
ctaaacctcacacctattaatggaa

SEQ ID NO: 2777449 - DNA, 25 bp, Homo sapien
gtagtgctagagcaattggatagcc

SEQ ID NO: 2777450 - DNA, 25 bp, Homo sapien
ttggatagccacaagcaaaaacctg

SEQ ID NO: 2777451 - DNA, 25 bp, Homo sapien
gactgtctgctatcaatgggcgttg

SEQ ID NO: 2777452 - DNA, 25 bp, Homo sapien
cggcggtgtcaatgtcagtggtact

SEQ ID NO: 2777453 - DNA, 25 bp, Homo sapien
tcgtattcggcttgtcgctgaggga

SEQ ID NO: 2777454 - DNA, 25 bp, Homo sapien
tcatcctggcgtttgcctgcagcaa

SEQ ID NO: 2777455 - DNA, 25 bp, Homo sapien
tgtgctgtagtgttggtctcagttt

SEQ ID NO: 2777456 - DNA, 25 bp, Homo sapien
gagcttgtgctgtagtgttggtctc

SEQ ID NO: 2777457 - DNA, 25 bp, Homo sapien
tgagcttgtgctgtagtgttggtct

SEQ ID NO: 2777458 - DNA, 25 bp, Homo sapien
gctgtagtgttggtctcagtttcca

SEQ ID NO: 2777459 - DNA, 25 bp, Homo sapien
cattcagtgggagatacagggtaca

SEQ ID NO: 2777460 - DNA, 25 bp, Homo sapien
gaaaagcaatgggtgttggccccac

SEQ ID NO: 2777461 - DNA, 25 bp, Homo sapien
tccagcggacttagaagaagaaccc

SEQ ID NO: 2777462 - DNA, 25 bp, Homo sapien
caccgcatgtggctataggattgcc

SEQ ID NO: 2777463 - DNA, 25 bp, Homo sapien
gtttctggctggtcgtgacaaatca

SEQ ID NO: 2777464 - DNA, 25 bp, Homo sapien
gcctgttgtgaactgtcaagtgagt

SEQ ID NO: 2777465 - DNA, 25 bp, Homo sapien
gatgccatccgtttaagaatcagtg

SEQ ID NO: 2777466 - DNA, 25 bp, Homo sapien
gactgacgtaaagcgcagcctgttg

SEQ ID NO: 2777467 - DNA, 25 bp, Homo sapien
ttatttcaggacatgccatgtcaaa

SEQ ID NO: 2777468 - DNA, 25 bp, Homo sapien
gggctaatgattatctgtaagcatt

SEQ ID NO: 2777469 - DNA, 25 bp, Homo sapien
tgggctaatgattatctgtaagcat

SEQ ID NO: 2777470 - DNA, 25 bp, Homo sapien
tcaggacatgccatgtcaaaataaa

SEQ ID NO: 2777471 - DNA, 25 bp, Homo sapien
ctttcactaaatatgtataatgttt

SEQ ID NO: 2777472 - DNA, 25 bp, Homo sapien
tttcactaaatatgtataatgtttc

SEQ ID NO: 2777473 - DNA, 25 bp, Homo sapien
tggtattgaaaagagagcggccagc

SEQ ID NO: 2777474 - DNA, 25 bp, Homo sapien
tcaaccggcagatgacggacaatga

SEQ ID NO: 2777475 - DNA, 25 bp, Homo sapien
cctgggtggttgcaagaagcttgct

SEQ ID NO: 2777476 - DNA, 25 bp, Homo sapien
gcaagactctaaatcctgggtggtt

SEQ ID NO: 2777477 - DNA, 25 bp, Homo sapien
tccattgctggtgcagagctgcatt

SEQ ID NO: 2777478 - DNA, 25 bp, Homo sapien
cttgtgtatttgtcacgtagttctt

SEQ ID NO: 2777479 - DNA, 25 bp, Homo sapien
ttgtcacgtagttcttgttccgtgg

SEQ ID NO: 2777480 - DNA, 25 bp, Homo sapien
tatttgtcacgtagttcttgttccg

SEQ ID NO: 2777481 - DNA, 25 bp, Homo sapien
tggagatatacctgcttcccttttg

SEQ ID NO: 2777482 - DNA, 25 bp, Homo sapien
ttttgccttgcaccatgactgaaag

SEQ ID NO: 2777483 - DNA, 25 bp, Homo sapien
ccagccagcctacccatacagactg

SEQ ID NO: 2777484 - DNA, 25 bp, Homo sapien
cctgcttcatgtggagatatacctg

SEQ ID NO: 2777485 - DNA, 25 bp, Homo sapien
aaagtgaaaggtatcaatcacccct

SEQ ID NO: 2777486 - DNA, 25 bp, Homo sapien
gtgaaaggtatcaatcacccctgtg

SEQ ID NO: 2777487 - DNA, 25 bp, Homo sapien
aagtgaaaggtatcaatcacccctg

SEQ ID NO: 2777488 - DNA, 25 bp, Homo sapien
tgaaaggtatcaatcacccctgtga

SEQ ID NO: 2777489 - DNA, 25 bp, Homo sapien
aaaaaataagcattcctgtatacca

SEQ ID NO: 2777490 - DNA, 25 bp, Homo sapien
aaaaataagcattcctgtataccat

SEQ ID NO: 2777491 - DNA, 25 bp, Homo sapien
atcacaagcattccagccaggcaag

SEQ ID NO: 2777492 - DNA, 25 bp, Homo sapien
aatcacaagcattccagccaggcaa

SEQ ID NO: 2777493 - DNA, 25 bp, Homo sapien
cactttctgatcaggcctaactgtc

SEQ ID NO: 2777494 - DNA, 25 bp, Homo sapien
taactgtccaaaacaccctagtgtg

SEQ ID NO: 2777495 - DNA, 25 bp, Homo sapien
tagctaactcatggcggaaattcag

SEQ ID NO: 2777496 - DNA, 25 bp, Homo sapien
ggcttctcgttatccagtctgtttc

SEQ ID NO: 2777497 - DNA, 25 bp, Homo sapien
caatatcagatgaaagttatgttct

SEQ ID NO: 2777498 - DNA, 25 bp, Homo sapien
taaaatgcttagttgctggtgctgt

SEQ ID NO: 2777499 - DNA, 25 bp, Homo sapien
tccagtcccaaatcaattaattggc

SEQ ID NO: 2777500 - DNA, 25 bp, Homo sapien
caaggactggcccaaatattacatt

SEQ ID NO: 2777501 - DNA, 25 bp, Homo sapien
tctggagctctttgctggataagaa

SEQ ID NO: 2777502 - DNA, 25 bp, Homo sapien
catactccatcatgtgaggctgaga

SEQ ID NO: 2777503 - DNA, 25 bp, Homo sapien
gctaagtgggcaaatctttacaagc

SEQ ID NO: 2777504 - DNA, 25 bp, Homo sapien
gactgcccctttggaagtgcctatg

SEQ ID NO: 2777505 - DNA, 25 bp, Homo sapien
ccaggttgtagcctccagagttcag

SEQ ID NO: 2777506 - DNA, 25 bp, Homo sapien
ttcatttggtccaccgtctataagc

SEQ ID NO: 2777507 - DNA, 25 bp, Homo sapien
caccgtctataagcaggccaggttg

SEQ ID NO: 2777508 - DNA, 25 bp, Homo sapien
tcttcaccttcatttggtccaccgt

SEQ ID NO: 2777509 - DNA, 25 bp, Homo sapien
gacactgacaggatggatgctagct

SEQ ID NO: 2777510 - DNA, 25 bp, Homo sapien
tacccatgtcctggaatgcagccag

SEQ ID NO: 2777511 - DNA, 25 bp, Homo sapien
caagcttgtcctcttgtatccgtct

SEQ ID NO: 2777512 - DNA, 25 bp, Homo sapien
tgccaacatttggttcccaagcttg

SEQ ID NO: 2777513 - DNA, 25 bp, Homo sapien
taacaggaagtagtactggcccaat

SEQ ID NO: 2777514 - DNA, 25 bp, Homo sapien
tctagcaacttgctgtgtaagggtc

SEQ ID NO: 2777515 - DNA, 25 bp, Homo sapien
cggtgaggaggcaattctagcaact

SEQ ID NO: 2777516 - DNA, 25 bp, Homo sapien
agccaaggagtgattgctttctcct

SEQ ID NO: 2777517 - DNA, 25 bp, Homo sapien
tggtgtaaatcaacccagctgtagg

SEQ ID NO: 2777518 - DNA, 25 bp, Homo sapien
aggaactgggcccacggctttctga

SEQ ID NO: 2777519 - DNA, 25 bp, Homo sapien
ggtagactcgggctgacagcgatat

SEQ ID NO: 2777520 - DNA, 25 bp, Homo sapien
ggctttctgagacacctattgttga

SEQ ID NO: 2777521 - DNA, 25 bp, Homo sapien
attcagcaggcgctctgcttaagag

SEQ ID NO: 2777522 - DNA, 25 bp, Homo sapien
ctccttactggtgagctcttgccca

SEQ ID NO: 2777523 - DNA, 25 bp, Homo sapien
aggcgggcccctttgctccttactg

SEQ ID NO: 2777524 - DNA, 25 bp, Homo sapien
caggcgctctgcttaagagtggcag

SEQ ID NO: 2777525 - DNA, 25 bp, Homo sapien
aaaataattagtgaccctggcagac

SEQ ID NO: 2777526 - DNA, 25 bp, Homo sapien
tgtatctgaaacagactggcgtgtt

SEQ ID NO: 2777527 - DNA, 25 bp, Homo sapien
tgtatagacatcaattggagaggca

SEQ ID NO: 2777528 - DNA, 25 bp, Homo sapien
tagctacttaatcttgtgtatctga

SEQ ID NO: 2777529 - DNA, 25 bp, Homo sapien
atggatgcctgcttgatctgatggc

SEQ ID NO: 2777530 - DNA, 25 bp, Homo sapien
tggatgcctgcttgatctgatggct

SEQ ID NO: 2777531 - DNA, 25 bp, Homo sapien
gcacacacaggtctatgcagggcat

SEQ ID NO: 2777532 - DNA, 25 bp, Homo sapien
ggctcataaacgactcccctcatga

SEQ ID NO: 2777533 - DNA, 25 bp, Homo sapien
tctttcagctgtagaagggcaatct

SEQ ID NO: 2777534 - DNA, 25 bp, Homo sapien
tcttcaactagaggctcataaacga

SEQ ID NO: 2777535 - DNA, 25 bp, Homo sapien
tcatgatatactgattccctctttc

SEQ ID NO: 2777536 - DNA, 25 bp, Homo sapien
tggctctagaattctgtaagacagc

SEQ ID NO: 2777537 - DNA, 25 bp, Homo sapien
cacttccaccttcaatggctctaga

SEQ ID NO: 2777538 - DNA, 25 bp, Homo sapien
tccaccttcaatggctctagaattc

SEQ ID NO: 2777539 - DNA, 25 bp, Homo sapien
ccttcaatggctctagaattctgta

SEQ ID NO: 2777540 - DNA, 25 bp, Homo sapien
gtctttgaggcccatgtgatccgct

SEQ ID NO: 2777541 - DNA, 25 bp, Homo sapien
tagagtctttgaggcccatgtgatc

SEQ ID NO: 2777542 - DNA, 25 bp, Homo sapien
ttgtttagagtctttgaggcccatg

SEQ ID NO: 2777543 - DNA, 25 bp, Homo sapien
tttgaggcccatgtgatccgctggg

SEQ ID NO: 2777544 - DNA, 25 bp, Homo sapien
tgcctccgaattctcttccgttaga

SEQ ID NO: 2777545 - DNA, 25 bp, Homo sapien
gagtcagccagggagtgttttaaaa

SEQ ID NO: 2777546 - DNA, 25 bp, Homo sapien
aatataccaatacccagtctgcatg

SEQ ID NO: 2777547 - DNA, 25 bp, Homo sapien
tgagaggttgtatttccatcaagcc

SEQ ID NO: 2777548 - DNA, 25 bp, Homo sapien
tgtatattaccacggagctttctct

SEQ ID NO: 2777549 - DNA, 25 bp, Homo sapien
tcctttcgtcttgtatattaccacg

SEQ ID NO: 2777550 - DNA, 25 bp, Homo sapien
tatccaggtggttgcagatcattcc

SEQ ID NO: 2777551 - DNA, 25 bp, Homo sapien
tcacaattgtgctccaatatccagg

SEQ ID NO: 2777552 - DNA, 25 bp, Homo sapien
tgcaaaatattgtgtacttagcctt

SEQ ID NO: 2777553 - DNA, 25 bp, Homo sapien
tcttctatggctgctatttcattgc

SEQ ID NO: 2777554 - DNA, 25 bp, Homo sapien
gcctttatcctagggtagctcagtg

SEQ ID NO: 2777555 - DNA, 25 bp, Homo sapien
cagtggtgtcaaattccttccagta

SEQ ID NO: 2777556 - DNA, 25 bp, Homo sapien
cgagcagaaaggacgtcatcttccc

SEQ ID NO: 2777557 - DNA, 25 bp, Homo sapien
acacaaagaggtggcggcaaaatgt

SEQ ID NO: 2777558 - DNA, 25 bp, Homo sapien
caatcagagaagcaggacgagcaga

SEQ ID NO: 2777559 - DNA, 25 bp, Homo sapien
ccgctgtagggtcaagatgggaact

SEQ ID NO: 2777560 - DNA, 25 bp, Homo sapien
tgtctctctacaaggaggagccggt

SEQ ID NO: 2777561 - DNA, 25 bp, Homo sapien
caaattctacaaccagctcaagggc

SEQ ID NO: 2777562 - DNA, 25 bp, Homo sapien
caagggccgcaatgacctgatggaa

SEQ ID NO: 2777563 - DNA, 25 bp, Homo sapien
tcatgtacctgaacgaagtcgtggg

SEQ ID NO: 2777564 - DNA, 25 bp, Homo sapien
cagattatacgcaaactggccagaa

SEQ ID NO: 2777565 - DNA, 25 bp, Homo sapien
gatacactgcatgtctagaaagttg

SEQ ID NO: 2777566 - DNA, 25 bp, Homo sapien
tgaacctctcaggtaagaattgtgg

SEQ ID NO: 2777567 - DNA, 25 bp, Homo sapien
tctcaaaaaccctgtcaaagctgct

SEQ ID NO: 2777568 - DNA, 25 bp, Homo sapien
tcattttgatttgttcccttgggcc

SEQ ID NO: 2777569 - DNA, 25 bp, Homo sapien
cacgttggtctatgtctagctggag

SEQ ID NO: 2777570 - DNA, 25 bp, Homo sapien
taggcgtttggtgctttgtctgaca

SEQ ID NO: 2777571 - DNA, 25 bp, Homo sapien
tggaatggctgtacccacgttggtc

SEQ ID NO: 2777572 - DNA, 25 bp, Homo sapien
ttcacacactccgaaggaacagctt

SEQ ID NO: 2777573 - DNA, 25 bp, Homo sapien
caatggcttcaaaggaaatgcgaat

SEQ ID NO: 2777574 - DNA, 25 bp, Homo sapien
tggagacaaacaggcgacacaaacg

SEQ ID NO: 2777575 - DNA, 25 bp, Homo sapien
aatgcacagtatttcctcgagtcac

SEQ ID NO: 2777576 - DNA, 25 bp, Homo sapien
taatagaaagacagggcaatatggc

SEQ ID NO: 2777577 - DNA, 25 bp, Homo sapien
gaatatgcaaaccaagacacctgtg

SEQ ID NO: 2777578 - DNA, 25 bp, Homo sapien
caatatggcagttaattagcaacca

SEQ ID NO: 2777579 - DNA, 25 bp, Homo sapien
gaatctgttagcctctaagtacagg

SEQ ID NO: 2777580 - DNA, 25 bp, Homo sapien
gctgctcagggattacacagtgtta

SEQ ID NO: 2777581 - DNA, 25 bp, Homo sapien
ttttcattctgacggctgagacgct

SEQ ID NO: 2777582 - DNA, 25 bp, Homo sapien
gagctccgacctgctagacaaagag

SEQ ID NO: 2777583 - DNA, 25 bp, Homo sapien
gcttaggagcactcagccacggtgt

SEQ ID NO: 2777584 - DNA, 25 bp, Homo sapien
tccagcgttttccacgtgcaagtgg

SEQ ID NO: 2777585 - DNA, 25 bp, Homo sapien
agggctgtagaatccagcgttttcc

SEQ ID NO: 2777586 - DNA, 25 bp, Homo sapien
gtagaatccagcgttttccacgtgc

SEQ ID NO: 2777587 - DNA, 25 bp, Homo sapien
gaatccagcgttttccacgtgcaag

SEQ ID NO: 2777588 - DNA, 25 bp, Homo sapien
tattggccagcatactgactaacgg

SEQ ID NO: 2777589 - DNA, 25 bp, Homo sapien
gactaacggcatttagtattaccaa

SEQ ID NO: 2777590 - DNA, 25 bp, Homo sapien
caattaataaccagtcacaagtcac

SEQ ID NO: 2777591 - DNA, 25 bp, Homo sapien
tataataggtatgtgctgaaaaacc

SEQ ID NO: 2777592 - DNA, 25 bp, Homo sapien
tctccactttaaatgccatgctcaa

SEQ ID NO: 2777593 - DNA, 25 bp, Homo sapien
cagtgcagactactgtttgttgaca

SEQ ID NO: 2777594 - DNA, 25 bp, Homo sapien
tgccatgctcaaatacggttttatt

SEQ ID NO: 2777595 - DNA, 25 bp, Homo sapien
cttagtcaatacttgacctagaaaa

SEQ ID NO: 2777596 - DNA, 25 bp, Homo sapien
tctgccacaaagtaaggcttcaggt

SEQ ID NO: 2777597 - DNA, 25 bp, Homo sapien
tccgcagagggaagaactgccagtt

SEQ ID NO: 2777598 - DNA, 25 bp, Homo sapien
gaaattcctggtgcaaagaccagta

SEQ ID NO: 2777599 - DNA, 25 bp, Homo sapien
ggaatcctggctaagtccaccctta

SEQ ID NO: 2777600 - DNA, 25 bp, Homo sapien
tgttaagctgacaaatatggctggg

SEQ ID NO: 2777601 - DNA, 25 bp, Homo sapien
tattcaagtacagtgagtgactgct

SEQ ID NO: 2777602 - DNA, 25 bp, Homo sapien
ttttcagatccatcacctaagtggg

SEQ ID NO: 2777603 - DNA, 25 bp, Homo sapien
tctcagactcccacggagcggagat

SEQ ID NO: 2777604 - DNA, 25 bp, Homo sapien
tctccactcatgccactgccggctg

SEQ ID NO: 2777605 - DNA, 25 bp, Homo sapien
ccactcatgccactgccggctgatt

SEQ ID NO: 2777606 - DNA, 25 bp, Homo sapien
tccactcatgccactgccggctgat

SEQ ID NO: 2777607 - DNA, 25 bp, Homo sapien
ctccactcatgccactgccggctga

SEQ ID NO: 2777608 - DNA, 25 bp, Homo sapien
aaggcagctcgggtgccagcactcc

SEQ ID NO: 2777609 - DNA, 25 bp, Homo sapien
tgccagcagacggggctccactgaa

SEQ ID NO: 2777610 - DNA, 25 bp, Homo sapien
tctgtcctgaacgagactggagagt

SEQ ID NO: 2777611 - DNA, 25 bp, Homo sapien
ccgctctgtcctgaacgagactgga

SEQ ID NO: 2777612 - DNA, 25 bp, Homo sapien
aattgtacaagtcatgaacgtggcc

SEQ ID NO: 2777613 - DNA, 25 bp, Homo sapien
cccgctgacatagggctggcaatag

SEQ ID NO: 2777614 - DNA, 25 bp, Homo sapien
caattaataggatgccaagagagcc

SEQ ID NO: 2777615 - DNA, 25 bp, Homo sapien
caactccaggtacacggatgtcaaa

SEQ ID NO: 2777616 - DNA, 25 bp, Homo sapien
cttcaccaaagtcagagaaagccat

SEQ ID NO: 2777617 - DNA, 25 bp, Homo sapien
aatggaatactttatgaatttgcat

SEQ ID NO: 2777618 - DNA, 25 bp, Homo sapien
tagtatatgtgttgtcaaagtgagc

SEQ ID NO: 2777619 - DNA, 25 bp, Homo sapien
catgtcatccttccacaggagccac

SEQ ID NO: 2777620 - DNA, 25 bp, Homo sapien
ttccacaggagccacgctaatctct

SEQ ID NO: 2777621 - DNA, 25 bp, Homo sapien
tggcctttcatacattaagtgaggt

SEQ ID NO: 2777622 - DNA, 25 bp, Homo sapien
tcatacattaagtgaggtttggggc

SEQ ID NO: 2777623 - DNA, 25 bp, Homo sapien
gtgcctggcctttcatacattaagt

SEQ ID NO: 2777624 - DNA, 25 bp, Homo sapien
tttcatacattaagtgaggtttggg

SEQ ID NO: 2777625 - DNA, 25 bp, Homo sapien
cacagacaggtaagaatatctctca

SEQ ID NO: 2777626 - DNA, 25 bp, Homo sapien
tacacaggtgacagaagtactaaga

SEQ ID NO: 2777627 - DNA, 25 bp, Homo sapien
ggcaggaggtgtctttactagatca

SEQ ID NO: 2777628 - DNA, 25 bp, Homo sapien
agattgcaggaagccactaatgccc

SEQ ID NO: 2777629 - DNA, 25 bp, Homo sapien
taaagtttccctaggtccgcatcaa

SEQ ID NO: 2777630 - DNA, 25 bp, Homo sapien
gctaaaagctctcattcgtaagtgg

SEQ ID NO: 2777631 - DNA, 25 bp, Homo sapien
tctaacttgcagtgagggcgtgaat

SEQ ID NO: 2777632 - DNA, 25 bp, Homo sapien
gccctgcaagtactgatcacacacg

SEQ ID NO: 2777633 - DNA, 25 bp, Homo sapien
tgccagtttgtatagggcccacgta

SEQ ID NO: 2777634 - DNA, 25 bp, Homo sapien
gtcatttgagaaaagtacaacccga

SEQ ID NO: 2777635 - DNA, 25 bp, Homo sapien
tatgaagttagagggaaacgattcc

SEQ ID NO: 2777636 - DNA, 25 bp, Homo sapien
gcacgcagattggttagatagaagc

SEQ ID NO: 2777637 - DNA, 25 bp, Homo sapien
gcccatccggcacagtaattattta

SEQ ID NO: 2777638 - DNA, 25 bp, Homo sapien
aaatcagttactggccttacgcggc

SEQ ID NO: 2777639 - DNA, 25 bp, Homo sapien
tgataaactaagaagggacagcctc

SEQ ID NO: 2777640 - DNA, 25 bp, Homo sapien
aaatacttgtggataggccaggcct

SEQ ID NO: 2777641 - DNA, 25 bp, Homo sapien
aaaactagaccaaccagtgctatga

SEQ ID NO: 2777642 - DNA, 25 bp, Homo sapien
taaaactagaccaaccagtgctatg

SEQ ID NO: 2777643 - DNA, 25 bp, Homo sapien
tttaaaactagaccaaccagtgcta

SEQ ID NO: 2777644 - DNA, 25 bp, Homo sapien
aactagaccaaccagtgctatgata

SEQ ID NO: 2777645 - DNA, 25 bp, Homo sapien
agaaaaagctaactactctggtgga

SEQ ID NO: 2777646 - DNA, 25 bp, Homo sapien
gattaagagtagtaatcaaagttcc

SEQ ID NO: 2777647 - DNA, 25 bp, Homo sapien
tgtctctacctttgagcaatttaat

SEQ ID NO: 2777648 - DNA, 25 bp, Homo sapien
ggtggaagttacgtatatttgaagc

SEQ ID NO: 2777649 - DNA, 25 bp, Homo sapien
caaacctgatcacctactgagtagc

SEQ ID NO: 2777650 - DNA, 25 bp, Homo sapien
cagggccttagaactacatggtaaa

SEQ ID NO: 2777651 - DNA, 25 bp, Homo sapien
caggaagctgtacaaaatgtgtcca

SEQ ID NO: 2777652 - DNA, 25 bp, Homo sapien
tccttctagggatcttacagggcct

SEQ ID NO: 2777653 - DNA, 25 bp, Homo sapien
tagtttagacgtacattgacatcag

SEQ ID NO: 2777654 - DNA, 25 bp, Homo sapien
gcttctacatcactattacgttgca

SEQ ID NO: 2777655 - DNA, 25 bp, Homo sapien
cagacaatcgctatttccactgtac

SEQ ID NO: 2777656 - DNA, 25 bp, Homo sapien
ttgcaactgtgaacacggacatgtt

SEQ ID NO: 2777657 - DNA, 25 bp, Homo sapien
caggggtttgtagtctccataatgt

SEQ ID NO: 2777658 - DNA, 25 bp, Homo sapien
gcaggggtttgtagtctccataatg

SEQ ID NO: 2777659 - DNA, 25 bp, Homo sapien
ggggtttgtagtctccataatgtaa

SEQ ID NO: 2777660 - DNA, 25 bp, Homo sapien
gggtttgtagtctccataatgtaat

SEQ ID NO: 2777661 - DNA, 25 bp, Homo sapien
gggaataactcaaattccataaaca

SEQ ID NO: 2777662 - DNA, 25 bp, Homo sapien
cattttgtgctttggggaataactc

SEQ ID NO: 2777663 - DNA, 25 bp, Homo sapien
tctggacaatctgtgctgtgatttt

SEQ ID NO: 2777664 - DNA, 25 bp, Homo sapien
ttctggacaatctgtgctgtgattt

SEQ ID NO: 2777665 - DNA, 25 bp, Homo sapien
gaccattactaaaagctgcagctgg

SEQ ID NO: 2777666 - DNA, 25 bp, Homo sapien
tactaggctccatgatcttgtggaa

SEQ ID NO: 2777667 - DNA, 25 bp, Homo sapien
tgagattctacctacctctgaagaa

SEQ ID NO: 2777668 - DNA, 25 bp, Homo sapien
aatgttcactttactacgcagctcc

SEQ ID NO: 2777669 - DNA, 25 bp, Homo sapien
ttgaacatcatgtccctgcgtttcc

SEQ ID NO: 2777670 - DNA, 25 bp, Homo sapien
tgaacatcatgtccctgcgtttccc

SEQ ID NO: 2777671 - DNA, 25 bp, Homo sapien
gaacatcatgtccctgcgtttccca

SEQ ID NO: 2777672 - DNA, 25 bp, Homo sapien
ccttgaacatcatgtccctgcgttt

SEQ ID NO: 2777673 - DNA, 25 bp, Homo sapien
cctttcacaccaaatgcttgataac

SEQ ID NO: 2777674 - DNA, 25 bp, Homo sapien
tgccacagaacagtttcctttcaca

SEQ ID NO: 2777675 - DNA, 25 bp, Homo sapien
gtctgccacagaacagtttcctttc

SEQ ID NO: 2777676 - DNA, 25 bp, Homo sapien
tcctttcacaccaaatgcttgataa

SEQ ID NO: 2777677 - DNA, 25 bp, Homo sapien
caaacgaaagtgcttgacgggaaga

SEQ ID NO: 2777678 - DNA, 25 bp, Homo sapien
tgaggctagggcacaaagatttcct

SEQ ID NO: 2777679 - DNA, 25 bp, Homo sapien
gacaggagcattcagttcaaggttg

SEQ ID NO: 2777680 - DNA, 25 bp, Homo sapien
tcttacggcccaaaccaatgaggct

SEQ ID NO: 2777681 - DNA, 25 bp, Homo sapien
tctatctgaatcagcttgtaaaacc

SEQ ID NO: 2777682 - DNA, 25 bp, Homo sapien
gaacagtaagtttcatttcgaaatc

SEQ ID NO: 2777683 - DNA, 25 bp, Homo sapien
atctatctgaatcagcttgtaaaac

SEQ ID NO: 2777684 - DNA, 25 bp, Homo sapien
tttcatttcgaaatctatctgaatc

SEQ ID NO: 2777685 - DNA, 25 bp, Homo sapien
tgagggctgtaaaactaatctcagc

SEQ ID NO: 2777686 - DNA, 25 bp, Homo sapien
ggcacctcgatagtaccacatgaat

SEQ ID NO: 2777687 - DNA, 25 bp, Homo sapien
gggtcttctgacatgaaaggcaagt

SEQ ID NO: 2777688 - DNA, 25 bp, Homo sapien
gcagactttggcatggtaaaaatac

SEQ ID NO: 2777689 - DNA, 25 bp, Homo sapien
tgccagtggacttgactatatcagt

SEQ ID NO: 2777690 - DNA, 25 bp, Homo sapien
tgttggtctgtctgctattactcat

SEQ ID NO: 2777691 - DNA, 25 bp, Homo sapien
gtctgctattactcatgctgctgcc

SEQ ID NO: 2777692 - DNA, 25 bp, Homo sapien
ggacttgactatatcagtgcatctt

SEQ ID NO: 2777693 - DNA, 25 bp, Homo sapien
aacactttggatagctgtgatattg

SEQ ID NO: 2777694 - DNA, 25 bp, Homo sapien
ggagtaaatggactgagataccatt

SEQ ID NO: 2777695 - DNA, 25 bp, Homo sapien
ggtttggcaagcacacaaccaaaca

SEQ ID NO: 2777696 - DNA, 25 bp, Homo sapien
tcatctacccagttggataaaaatg

SEQ ID NO: 2777697 - DNA, 25 bp, Homo sapien
gcccacgataagtaactagacaatt

SEQ ID NO: 2777698 - DNA, 25 bp, Homo sapien
gaagtagtcctgtaaaaagcagtta

SEQ ID NO: 2777699 - DNA, 25 bp, Homo sapien
gaagtgaggaccaaatgtagtacca

SEQ ID NO: 2777700 - DNA, 25 bp, Homo sapien
gaagagtgatccacagaggaggccc

SEQ ID NO: 2777701 - DNA, 25 bp, Homo sapien
cattcgtgggaggatgaggccaaaa

SEQ ID NO: 2777702 - DNA, 25 bp, Homo sapien
caactatcataagaaagtagccaga

SEQ ID NO: 2777703 - DNA, 25 bp, Homo sapien
tgtaagctgctgtgtcctactcaat

SEQ ID NO: 2777704 - DNA, 25 bp, Homo sapien
cctagtgatctgaaggactgcagtc

SEQ ID NO: 2777705 - DNA, 25 bp, Homo sapien
tagacctggatcacacttaccaggt

SEQ ID NO: 2777706 - DNA, 25 bp, Homo sapien
cctggatcacacttaccaggttgat

SEQ ID NO: 2777707 - DNA, 25 bp, Homo sapien
gatcacacttaccaggttgatctgg

SEQ ID NO: 2777708 - DNA, 25 bp, Homo sapien
tggatcacacttaccaggttgatct

SEQ ID NO: 2777709 - DNA, 25 bp, Homo sapien
gttgtactcacaataccaagggtgc

SEQ ID NO: 2777710 - DNA, 25 bp, Homo sapien
tcaagaatggaacaactacatagcc

SEQ ID NO: 2777711 - DNA, 25 bp, Homo sapien
tacatagagggtgagtacatgcaaa

SEQ ID NO: 2777712 - DNA, 25 bp, Homo sapien
ggactgaacctgtagctaggccact

SEQ ID NO: 2777713 - DNA, 25 bp, Homo sapien
caaaagtagagcaaccgacaaaatt

SEQ ID NO: 2777714 - DNA, 25 bp, Homo sapien
ggttgcctctacgttttagctacag

SEQ ID NO: 2777715 - DNA, 25 bp, Homo sapien
tttagcgtaatgtcctcagaattca

SEQ ID NO: 2777716 - DNA, 25 bp, Homo sapien
aacatgggtatacaacagatcattc

SEQ ID NO: 2777717 - DNA, 25 bp, Homo sapien
cactagtctttgaatctgatcacca

SEQ ID NO: 2777718 - DNA, 25 bp, Homo sapien
gacacccagtgtcactagtctttga

SEQ ID NO: 2777719 - DNA, 25 bp, Homo sapien
tttgaatctgatcaccactaattcc

SEQ ID NO: 2777720 - DNA, 25 bp, Homo sapien
cagtgtcactagtctttgaatctga

SEQ ID NO: 2777721 - DNA, 25 bp, Homo sapien
gagggttccaatgcaggtggtctct

SEQ ID NO: 2777722 - DNA, 25 bp, Homo sapien
tggtctctgactatgctttggcaaa

SEQ ID NO: 2777723 - DNA, 25 bp, Homo sapien
ttatcaaacactccagagggttcca

SEQ ID NO: 2777724 - DNA, 25 bp, Homo sapien
gacatcggattacactggtctaggg

SEQ ID NO: 2777725 - DNA, 25 bp, Homo sapien
cacctttcgggtatgcacaacttct

SEQ ID NO: 2777726 - DNA, 25 bp, Homo sapien
cataccaaattgttgccatgcagta

SEQ ID NO: 2777727 - DNA, 25 bp, Homo sapien
cgttcaaacaactactaaggagctg

SEQ ID NO: 2777728 - DNA, 25 bp, Homo sapien
gagctgtcctaataacttggtagca

SEQ ID NO: 2777729 - DNA, 25 bp, Homo sapien
catcgtcaaaaggaatgtagcgcca

SEQ ID NO: 2777730 - DNA, 25 bp, Homo sapien
gacatcgtcaaaaggaatgtagcgc

SEQ ID NO: 2777731 - DNA, 25 bp, Homo sapien
gtcaaaaggaatgtagcgccatcta

SEQ ID NO: 2777732 - DNA, 25 bp, Homo sapien
gatatgacatcgtcaaaaggaatgt

SEQ ID NO: 2777733 - DNA, 25 bp, Homo sapien
ccttgggtgccctggtatacagttt

SEQ ID NO: 2777734 - DNA, 25 bp, Homo sapien
tacctcaatctagtaatgcactggg

SEQ ID NO: 2777735 - DNA, 25 bp, Homo sapien
agttgactgtggtacccttgggtgc

SEQ ID NO: 2777736 - DNA, 25 bp, Homo sapien
taaaacatcccctatgagttgactg

SEQ ID NO: 2777737 - DNA, 25 bp, Homo sapien
caaaagtctgtatatgactccctaa

SEQ ID NO: 2777738 - DNA, 25 bp, Homo sapien
tgaaatccacaaaagtctgtatatg

SEQ ID NO: 2777739 - DNA, 25 bp, Homo sapien
ttaacatgaaatccacaaaagtctg

SEQ ID NO: 2777740 - DNA, 25 bp, Homo sapien
gactccctaatcatgctgcaaccaa

SEQ ID NO: 2777741 - DNA, 25 bp, Homo sapien
cgccttgggctctttgtcagtttta

SEQ ID NO: 2777742 - DNA, 25 bp, Homo sapien
tggcatatgatcctggccttaaata

SEQ ID NO: 2777743 - DNA, 25 bp, Homo sapien
gagtagcaaaacttcaggtctgtgg

SEQ ID NO: 2777744 - DNA, 25 bp, Homo sapien
tgcgttttcaagatggatagccaat

SEQ ID NO: 2777745 - DNA, 25 bp, Homo sapien
ttacacgaagctagaacttgcaggg

SEQ ID NO: 2777746 - DNA, 25 bp, Homo sapien
tgtggcctctgatcactaaccaggg

SEQ ID NO: 2777747 - DNA, 25 bp, Homo sapien
taaaatggtgccgattgctcaaacc

SEQ ID NO: 2777748 - DNA, 25 bp, Homo sapien
caaacctttgtacccaaagcactgg

SEQ ID NO: 2777749 - DNA, 25 bp, Homo sapien
ggctctgaataaccgccagctaaat

SEQ ID NO: 2777750 - DNA, 25 bp, Homo sapien
caaacagtctcaatgcctagtagat

SEQ ID NO: 2777751 - DNA, 25 bp, Homo sapien
ccatatctggaagggaaccaacatg

SEQ ID NO: 2777752 - DNA, 25 bp, Homo sapien
gcccaagactgtccaacaccaagga

SEQ ID NO: 2777753 - DNA, 25 bp, Homo sapien
ttttaacctcaagatcgtatataag

SEQ ID NO: 2777754 - DNA, 25 bp, Homo sapien
tgagctcctgaacccctttagggtg

SEQ ID NO: 2777755 - DNA, 25 bp, Homo sapien
cttcaaatgaactgtcatgaagtgg

SEQ ID NO: 2777756 - DNA, 25 bp, Homo sapien
gttttcagcttggtatgtctctgcc

SEQ ID NO: 2777757 - DNA, 25 bp, Homo sapien
tttcagcttggtatgtctctgccag

SEQ ID NO: 2777758 - DNA, 25 bp, Homo sapien
ttcagcttggtatgtctctgccagg

SEQ ID NO: 2777759 - DNA, 25 bp, Homo sapien
ggctgaaaatatcccaaatttggca

SEQ ID NO: 2777760 - DNA, 25 bp, Homo sapien
ggaaatccatgccaagatacaacat

SEQ ID NO: 2777761 - DNA, 25 bp, Homo sapien
gggtgtggctgaaaacttcttctaa

SEQ ID NO: 2777762 - DNA, 25 bp, Homo sapien
tgatggactcaataatagaagagcg

SEQ ID NO: 2777763 - DNA, 25 bp, Homo sapien
tgccagaaggttactagaaggaatc

SEQ ID NO: 2777764 - DNA, 25 bp, Homo sapien
gttacagaagctaagtgggactaca

SEQ ID NO: 2777765 - DNA, 25 bp, Homo sapien
gagctgaggcctaccatcatcacaa

SEQ ID NO: 2777766 - DNA, 25 bp, Homo sapien
tctgagtcgaacattcaagagagcc

SEQ ID NO: 2777767 - DNA, 25 bp, Homo sapien
tcatggcccatcatctggttgaaca

SEQ ID NO: 2777768 - DNA, 25 bp, Homo sapien
aatcatggcccatcatctggttgaa

SEQ ID NO: 2777769 - DNA, 25 bp, Homo sapien
acaatcatggcccatcatctggttg

SEQ ID NO: 2777770 - DNA, 25 bp, Homo sapien
catggcccatcatctggttgaacat

SEQ ID NO: 2777771 - DNA, 25 bp, Homo sapien
taagtggaaaagtacctgctatacg

SEQ ID NO: 2777772 - DNA, 25 bp, Homo sapien
ctatacgacaagcaaagccaaagca

SEQ ID NO: 2777773 - DNA, 25 bp, Homo sapien
gaaaagtacctgctatacgacaagc

SEQ ID NO: 2777774 - DNA, 25 bp, Homo sapien
aagtgagtcaggatataagtggaaa

SEQ ID NO: 2777775 - DNA, 25 bp, Homo sapien
tttttcttaggtctaaatgacacat

SEQ ID NO: 2777776 - DNA, 25 bp, Homo sapien
cctcatactgactacaggcaatcaa

SEQ ID NO: 2777777 - DNA, 25 bp, Homo sapien
caagctctagaaactcctactctat

SEQ ID NO: 2777778 - DNA, 25 bp, Homo sapien
taattggcatgattaaggtagagca

SEQ ID NO: 2777779 - DNA, 25 bp, Homo sapien
caatgcaaataagactatagggtaa

SEQ ID NO: 2777780 - DNA, 25 bp, Homo sapien
catgggaattactgttgcacaaaac

SEQ ID NO: 2777781 - DNA, 25 bp, Homo sapien
tgcacccggcttgtttattcatgac

SEQ ID NO: 2777782 - DNA, 25 bp, Homo sapien
gagaagagactacttaagcatggga

SEQ ID NO: 2777783 - DNA, 25 bp, Homo sapien
gagtcaggtaggtatgtctgtatat

SEQ ID NO: 2777784 - DNA, 25 bp, Homo sapien
tacttgatccccatatttggagtca

SEQ ID NO: 2777785 - DNA, 25 bp, Homo sapien
ggaagttggaatctacagctatata

SEQ ID NO: 2777786 - DNA, 25 bp, Homo sapien
ggattaacaggccaccttgaactaa

SEQ ID NO: 2777787 - DNA, 25 bp, Homo sapien
tacatattccaatactgactgaagg

SEQ ID NO: 2777788 - DNA, 25 bp, Homo sapien
ggtataccaagcgtaggactctgtt

SEQ ID NO: 2777789 - DNA, 25 bp, Homo sapien
ctctgataaaaacgctgagggtata

SEQ ID NO: 2777790 - DNA, 25 bp, Homo sapien
catattccaatactgactgaaggca

SEQ ID NO: 2777791 - DNA, 25 bp, Homo sapien
aggtgtcagacacgccaagctcttc

SEQ ID NO: 2777792 - DNA, 25 bp, Homo sapien
tgccagagattacaggagaccaacc

SEQ ID NO: 2777793 - DNA, 25 bp, Homo sapien
cactaggtctctgcgattccagcaa

SEQ ID NO: 2777794 - DNA, 25 bp, Homo sapien
ggaagagttgccacttgtccactct

SEQ ID NO: 2777795 - DNA, 25 bp, Homo sapien
agattggggcaacagagtttggtca

SEQ ID NO: 2777796 - DNA, 25 bp, Homo sapien
agccagattggggcaacagagtttg

SEQ ID NO: 2777797 - DNA, 25 bp, Homo sapien
caggaagggagtggatggttagcat

SEQ ID NO: 2777798 - DNA, 25 bp, Homo sapien
tcaggaagggagtggatggttagca

SEQ ID NO: 2777799 - DNA, 25 bp, Homo sapien
acccaatgtgcatgatgcactacag

SEQ ID NO: 2777800 - DNA, 25 bp, Homo sapien
cacttagtgtttgatgcaaacaccc

SEQ ID NO: 2777801 - DNA, 25 bp, Homo sapien
cacaggagtaatccccctgctgttg

SEQ ID NO: 2777802 - DNA, 25 bp, Homo sapien
acctggtggtcgcccctcctaggag

SEQ ID NO: 2777803 - DNA, 25 bp, Homo sapien
taaggctgtgtctagcactgaaatc

SEQ ID NO: 2777804 - DNA, 25 bp, Homo sapien
caagtttaagccaccatttgttgga

SEQ ID NO: 2777805 - DNA, 25 bp, Homo sapien
gctacatatcctttgcatgacagtg

SEQ ID NO: 2777806 - DNA, 25 bp, Homo sapien
tttcaataagaacgggcagacaagt

SEQ ID NO: 2777807 - DNA, 25 bp, Homo sapien
ggtcgtcaaagacaaggaaagtcta

SEQ ID NO: 2777808 - DNA, 25 bp, Homo sapien
gacaaattcctattgagaggcgctc

SEQ ID NO: 2777809 - DNA, 25 bp, Homo sapien
cactgtacctctgggatcttccttc

SEQ ID NO: 2777810 - DNA, 25 bp, Homo sapien
cccttgatatgatgtgatgtggcac

SEQ ID NO: 2777811 - DNA, 25 bp, Homo sapien
gggcaggttttaacacacaactgtg

SEQ ID NO: 2777812 - DNA, 25 bp, Homo sapien
tatagtcagcctgcaataggaacag

SEQ ID NO: 2777813 - DNA, 25 bp, Homo sapien
gcatcttataaatatcagtgggtac

SEQ ID NO: 2777814 - DNA, 25 bp, Homo sapien
tgaagcctctaaaaatagtccatca

SEQ ID NO: 2777815 - DNA, 25 bp, Homo sapien
actttcgagaccattgctgttgcac

SEQ ID NO: 2777816 - DNA, 25 bp, Homo sapien
gctccctcgggttaccatgagagaa

SEQ ID NO: 2777817 - DNA, 25 bp, Homo sapien
taactacagtttcaaggctccctcg

SEQ ID NO: 2777818 - DNA, 25 bp, Homo sapien
gaatagcacatagaggagcaaggcg

SEQ ID NO: 2777819 - DNA, 25 bp, Homo sapien
gaacactcttgtctgattagggcct

SEQ ID NO: 2777820 - DNA, 25 bp, Homo sapien
cacggacttcgatgttcaagtgaca

SEQ ID NO: 2777821 - DNA, 25 bp, Homo sapien
taaaaggctcatcagtctagaacac

SEQ ID NO: 2777822 - DNA, 25 bp, Homo sapien
cactgtgaagtgagacgaccttgag

SEQ ID NO: 2777823 - DNA, 25 bp, Homo sapien
gaaagcaggatgattaaaggacact

SEQ ID NO: 2777824 - DNA, 25 bp, Homo sapien
tggacccttggtgataatgaatata

SEQ ID NO: 2777825 - DNA, 25 bp, Homo sapien
ggttacctctaccaagtgacagttg

SEQ ID NO: 2777826 - DNA, 25 bp, Homo sapien
cactaaagtttcaatggttacctct

SEQ ID NO: 2777827 - DNA, 25 bp, Homo sapien
ccttgacagactatgggctggtgac

SEQ ID NO: 2777828 - DNA, 25 bp, Homo sapien
tatgtatatggccattagcagcgcc

SEQ ID NO: 2777829 - DNA, 25 bp, Homo sapien
gcacaatggtacactgatggcacag

SEQ ID NO: 2777830 - DNA, 25 bp, Homo sapien
gatgcagcgtgtcttccgagtacaa

SEQ ID NO: 2777831 - DNA, 25 bp, Homo sapien
ttttgaactggccaaggtcactgca

SEQ ID NO: 2777832 - DNA, 25 bp, Homo sapien
actgcacagctagcctccacagatg

SEQ ID NO: 2777833 - DNA, 25 bp, Homo sapien
tccacacacgggcttggttgaacag

SEQ ID NO: 2777834 - DNA, 25 bp, Homo sapien
tgtactcccagttctctccacacac

SEQ ID NO: 2777835 - DNA, 25 bp, Homo sapien
tatggcagtcggataaattatgcac

SEQ ID NO: 2777836 - DNA, 25 bp, Homo sapien
gaacgacatgtcagtgcacatatgg

SEQ ID NO: 2777837 - DNA, 25 bp, Homo sapien
gcacatctggattacttttggcaag

SEQ ID NO: 2777838 - DNA, 25 bp, Homo sapien
ttttggcaagaaacatagctaagtg

SEQ ID NO: 2777839 - DNA, 25 bp, Homo sapien
gaagatgactgaatgatctatatgg

SEQ ID NO: 2777840 - DNA, 25 bp, Homo sapien
agtctttgggaggagtctcatctca

SEQ ID NO: 2777841 - DNA, 25 bp, Homo sapien
cgtttattccatagccagggtgcca

SEQ ID NO: 2777842 - DNA, 25 bp, Homo sapien
aggtttatcactgatgagttgttca

SEQ ID NO: 2777843 - DNA, 25 bp, Homo sapien
tcagcgccataggtggtaaccacgg

SEQ ID NO: 2777844 - DNA, 25 bp, Homo sapien
tatctggaacactgtagttgcttcc

SEQ ID NO: 2777845 - DNA, 25 bp, Homo sapien
tttcactaggagaatggtcagcgcc

SEQ ID NO: 2777846 - DNA, 25 bp, Homo sapien
ctaacttgtactcttagatacagaa

SEQ ID NO: 2777847 - DNA, 25 bp, Homo sapien
gatacgtacaatgaatttggccttc

SEQ ID NO: 2777848 - DNA, 25 bp, Homo sapien
cacaaaaactggaatcaagttcctc

SEQ ID NO: 2777849 - DNA, 25 bp, Homo sapien
cacactggtccgctatactagaagc

SEQ ID NO: 2777850 - DNA, 25 bp, Homo sapien
ggcaactagcctaatgatacgtaca

SEQ ID NO: 2777851 - DNA, 25 bp, Homo sapien
gacgaataaaccatagcctcagaga

SEQ ID NO: 2777852 - DNA, 25 bp, Homo sapien
gaaattcttatctactctgggaaac

SEQ ID NO: 2777853 - DNA, 25 bp, Homo sapien
cctcagagatgagtatggatgaatc

SEQ ID NO: 2777854 - DNA, 25 bp, Homo sapien
tacagcacagggagttttctatttc

SEQ ID NO: 2777855 - DNA, 25 bp, Homo sapien
gttcatctttcctccatcatatgtt

SEQ ID NO: 2777856 - DNA, 25 bp, Homo sapien
tcagttcatctttcctccatcatat

SEQ ID NO: 2777857 - DNA, 25 bp, Homo sapien
tcatctttcctccatcatatgttac

SEQ ID NO: 2777858 - DNA, 25 bp, Homo sapien
cagttcatctttcctccatcatatg

SEQ ID NO: 2777859 - DNA, 25 bp, Homo sapien
aatttaacgacaaccctgctgttgg

SEQ ID NO: 2777860 - DNA, 25 bp, Homo sapien
taacgacaaccctgctgttggcctt

SEQ ID NO: 2777861 - DNA, 25 bp, Homo sapien
tgctgcaatttaacgacaaccctgc

SEQ ID NO: 2777862 - DNA, 25 bp, Homo sapien
tcaatgctgcaatttaacgacaacc

SEQ ID NO: 2777863 - DNA, 25 bp, Homo sapien
tgttgtgaagtaaatcaggcaaact

SEQ ID NO: 2777864 - DNA, 25 bp, Homo sapien
aactaatgtgggctaacaagtcttt

SEQ ID NO: 2777865 - DNA, 25 bp, Homo sapien
ctgttgtgaagtaaatcaggcaaac

SEQ ID NO: 2777866 - DNA, 25 bp, Homo sapien
aatcaggcaaactaatgtgggctaa

SEQ ID NO: 2777867 - DNA, 25 bp, Homo sapien
gcagacatcgcctttctcccacttt

SEQ ID NO: 2777868 - DNA, 25 bp, Homo sapien
ttttctccgcagacatcgcctttct

SEQ ID NO: 2777869 - DNA, 25 bp, Homo sapien
tctcttttctccgcagacatcgcct

SEQ ID NO: 2777870 - DNA, 25 bp, Homo sapien
cgcagacatcgcctttctcccactt

SEQ ID NO: 2777871 - DNA, 25 bp, Homo sapien
caaaatggccactgtaaccctgcat

SEQ ID NO: 2777872 - DNA, 25 bp, Homo sapien
acacaaaatggccactgtaaccctg

SEQ ID NO: 2777873 - DNA, 25 bp, Homo sapien
aatgtacactgggaaagatacacac

SEQ ID NO: 2777874 - DNA, 25 bp, Homo sapien
aggtaggttctagaattagccccat

SEQ ID NO: 2777875 - DNA, 25 bp, Homo sapien
tgcttgcatatacaaggagacatgt

SEQ ID NO: 2777876 - DNA, 25 bp, Homo sapien
taaaaagctgtaaggcatcacatat

SEQ ID NO: 2777877 - DNA, 25 bp, Homo sapien
taacaggcccagtcagttgaaagct

SEQ ID NO: 2777878 - DNA, 25 bp, Homo sapien
aaggtgtgcctcatatcttcactca

SEQ ID NO: 2777879 - DNA, 25 bp, Homo sapien
catggtatcaatcctcgaagtggta

SEQ ID NO: 2777880 - DNA, 25 bp, Homo sapien
gaagagtggccacttctaagttgca

SEQ ID NO: 2777881 - DNA, 25 bp, Homo sapien
gctgtgattactggtcaaaaccttt

SEQ ID NO: 2777882 - DNA, 25 bp, Homo sapien
gcaatattgctgaactgaaggcatt

SEQ ID NO: 2777883 - DNA, 25 bp, Homo sapien
tgcctggaaattggtctcagggtca

SEQ ID NO: 2777884 - DNA, 25 bp, Homo sapien
agaaatggaccagctttcttacctg

SEQ ID NO: 2777885 - DNA, 25 bp, Homo sapien
tttcaagctccacacaactcagaga

SEQ ID NO: 2777886 - DNA, 25 bp, Homo sapien
tattcaaaatgagtgacaatgcttc

SEQ ID NO: 2777887 - DNA, 25 bp, Homo sapien
tgcagtaccttgcaaagaagtttgc

SEQ ID NO: 2777888 - DNA, 25 bp, Homo sapien
catttgactttcatacatgcgcctg

SEQ ID NO: 2777889 - DNA, 25 bp, Homo sapien
tcagtggaaaattgacttccaaacc

SEQ ID NO: 2777890 - DNA, 25 bp, Homo sapien
aaaccctctcattgtttcctcaata

SEQ ID NO: 2777891 - DNA, 25 bp, Homo sapien
tcctcaatatttaattgtaacagcg

SEQ ID NO: 2777892 - DNA, 25 bp, Homo sapien
tttaattgtaacagcgtgcagtgca

SEQ ID NO: 2777893 - DNA, 25 bp, Homo sapien
gcagattacagaataggatccatta

SEQ ID NO: 2777894 - DNA, 25 bp, Homo sapien
cattaatcctagtcaacattgaaca

SEQ ID NO: 2777895 - DNA, 25 bp, Homo sapien
caattttcagcctagcagattacag

SEQ ID NO: 2777896 - DNA, 25 bp, Homo sapien
acagaataggatccattaatcctag

SEQ ID NO: 2777897 - DNA, 25 bp, Homo sapien
caagaacatgacacctgaaggcgag

SEQ ID NO: 2777898 - DNA, 25 bp, Homo sapien
ggaacaagaacatgacacctgaagg

SEQ ID NO: 2777899 - DNA, 25 bp, Homo sapien
aacaagaacatgacacctgaaggcg

SEQ ID NO: 2777900 - DNA, 25 bp, Homo sapien
gaacatgacacctgaaggcgagtaa

SEQ ID NO: 2777901 - DNA, 25 bp, Homo sapien
ggcctttagcccctcaaaatagatg

SEQ ID NO: 2777902 - DNA, 25 bp, Homo sapien
ttctgcttcctatgaaaactaaggt

SEQ ID NO: 2777903 - DNA, 25 bp, Homo sapien
gctaaatagctagaaaactctgtgc

SEQ ID NO: 2777904 - DNA, 25 bp, Homo sapien
tgctctccaagtagggttaggtatg

SEQ ID NO: 2777905 - DNA, 25 bp, Homo sapien
cagtatttccggatgttatcagccc

SEQ ID NO: 2777906 - DNA, 25 bp, Homo sapien
gatccttggtagtagcggctccagt

SEQ ID NO: 2777907 - DNA, 25 bp, Homo sapien
caaatattaccccttgagatccttg

SEQ ID NO: 2777908 - DNA, 25 bp, Homo sapien
gagctgctggcttgtcttgatgatt

SEQ ID NO: 2777909 - DNA, 25 bp, Homo sapien
cactgatgacactgagcagcttata

SEQ ID NO: 2777910 - DNA, 25 bp, Homo sapien
actgatgacactgagcagcttatat

SEQ ID NO: 2777911 - DNA, 25 bp, Homo sapien
gatgacactgagcagcttatatttt

SEQ ID NO: 2777912 - DNA, 25 bp, Homo sapien
ctgatgacactgagcagcttatatt

SEQ ID NO: 2777913 - DNA, 25 bp, Homo sapien
gtatcaccttcagactcagtatttt

SEQ ID NO: 2777914 - DNA, 25 bp, Homo sapien
cagactcagtattttataatctcca

SEQ ID NO: 2777915 - DNA, 25 bp, Homo sapien
tcctatgtcctgtatcaccttcaga

SEQ ID NO: 2777916 - DNA, 25 bp, Homo sapien
tttctcctatgtcctgtatcacctt

SEQ ID NO: 2777917 - DNA, 25 bp, Homo sapien
ctctgctgatattctccaaaattct

SEQ ID NO: 2777918 - DNA, 25 bp, Homo sapien
aattctgttcatcagcttatttctt

SEQ ID NO: 2777919 - DNA, 25 bp, Homo sapien
gcttatttcttctcttgttgtacat

SEQ ID NO: 2777920 - DNA, 25 bp, Homo sapien
tctgctgatattctccaaaattctg

SEQ ID NO: 2777921 - DNA, 25 bp, Homo sapien
gtctttgctattcccaaaatctcct

SEQ ID NO: 2777922 - DNA, 25 bp, Homo sapien
tctttgctattcccaaaatctcctt

SEQ ID NO: 2777923 - DNA, 25 bp, Homo sapien
agtctttgctattcccaaaatctcc

SEQ ID NO: 2777924 - DNA, 25 bp, Homo sapien
cattaaaaacaaggatggtgccagg

SEQ ID NO: 2777925 - DNA, 25 bp, Homo sapien
caaagcaggtttcatatggtcagca

SEQ ID NO: 2777926 - DNA, 25 bp, Homo sapien
ggctcccctaggtcagcaaggcata

SEQ ID NO: 2777927 - DNA, 25 bp, Homo sapien
gattcccagcgatgctatgcaaaga

SEQ ID NO: 2777928 - DNA, 25 bp, Homo sapien
cttaataagagttactaatgtataa

SEQ ID NO: 2777929 - DNA, 25 bp, Homo sapien
aatggtctggaaaatacgcagccaa

SEQ ID NO: 2777930 - DNA, 25 bp, Homo sapien
caaataacttaatatgtattgagac

SEQ ID NO: 2777931 - DNA, 25 bp, Homo sapien
ggaaaatacgcagccaaatcaaata

SEQ ID NO: 2777932 - DNA, 25 bp, Homo sapien
agataataagtatatccagcacctc

SEQ ID NO: 2777933 - DNA, 25 bp, Homo sapien
ttatctcagtaggagaacactattt

SEQ ID NO: 2777934 - DNA, 25 bp, Homo sapien
tacaaatttatctcagtaggagaac

SEQ ID NO: 2777935 - DNA, 25 bp, Homo sapien
gttttagtgtggtataactgacaca

SEQ ID NO: 2777936 - DNA, 25 bp, Homo sapien
gcacattactgaggcactgccctac

SEQ ID NO: 2777937 - DNA, 25 bp, Homo sapien
tgggtaaacacagctgctatccact

SEQ ID NO: 2777938 - DNA, 25 bp, Homo sapien
tacctctctgggtctagcacccaca

SEQ ID NO: 2777939 - DNA, 25 bp, Homo sapien
cactcaaggatttagtttgtgggta

SEQ ID NO: 2777940 - DNA, 25 bp, Homo sapien
tcatactgaactccagagcacttag

SEQ ID NO: 2777941 - DNA, 25 bp, Homo sapien
tcatgcgccattagagaatttagtg

SEQ ID NO: 2777942 - DNA, 25 bp, Homo sapien
tagtgggttcactgaattgactgat

SEQ ID NO: 2777943 - DNA, 25 bp, Homo sapien
gagcacttagtattttcatgcgcca

SEQ ID NO: 2777944 - DNA, 25 bp, Homo sapien
taaaacatacgaagagaaggaaata

SEQ ID NO: 2777945 - DNA, 25 bp, Homo sapien
tcataaaagttaagggcagacatag

SEQ ID NO: 2777946 - DNA, 25 bp, Homo sapien
caaattcataaaagttaagggcaga

SEQ ID NO: 2777947 - DNA, 25 bp, Homo sapien
aattcataaaagttaagggcagaca

SEQ ID NO: 2777948 - DNA, 25 bp, Homo sapien
ttcataaaagttaagggcagacata

SEQ ID NO: 2777949 - DNA, 25 bp, Homo sapien
ttacattcaagatggcattctggaa

SEQ ID NO: 2777950 - DNA, 25 bp, Homo sapien
tttacattcaagatggcattctgga

SEQ ID NO: 2777951 - DNA, 25 bp, Homo sapien
cctttgtgggcttaatgcagattga

SEQ ID NO: 2777952 - DNA, 25 bp, Homo sapien
ggttaatggtgcatgaagtcactga

SEQ ID NO: 2777953 - DNA, 25 bp, Homo sapien
tgacacagtcagcacagcattatgg

SEQ ID NO: 2777954 - DNA, 25 bp, Homo sapien
agcattatggttaatggtgcatgaa

SEQ ID NO: 2777955 - DNA, 25 bp, Homo sapien
gaaatctacattgtctaatattaac

SEQ ID NO: 2777956 - DNA, 25 bp, Homo sapien
attaacatagctaccccaactttct

SEQ ID NO: 2777957 - DNA, 25 bp, Homo sapien
tgtctttatacttaaagtttgattc

SEQ ID NO: 2777958 - DNA, 25 bp, Homo sapien
gattcctacctgtcatataagggct

SEQ ID NO: 2777959 - DNA, 25 bp, Homo sapien
ttaagagattctaacccaagatggg

SEQ ID NO: 2777960 - DNA, 25 bp, Homo sapien
tatccatgcctaaaccttgtgacag

SEQ ID NO: 2777961 - DNA, 25 bp, Homo sapien
tgaacacctgaactggcatcctatc

SEQ ID NO: 2777962 - DNA, 25 bp, Homo sapien
ccagaacctgtgaggcctatgcaaa

SEQ ID NO: 2777963 - DNA, 25 bp, Homo sapien
ctgtggtcgacacgacgttatcggg

SEQ ID NO: 2777964 - DNA, 25 bp, Homo sapien
cagagtttggacaacagactggttt

SEQ ID NO: 2777965 - DNA, 25 bp, Homo sapien
tctggtcgtgcaggtggtggtccct

SEQ ID NO: 2777966 - DNA, 25 bp, Homo sapien
taagtccaggctctatagttccagc

SEQ ID NO: 2777967 - DNA, 25 bp, Homo sapien
gtttcaatcatataaccgaatgtca

SEQ ID NO: 2777968 - DNA, 25 bp, Homo sapien
gaatgtcataaggacatccaacatg

SEQ ID NO: 2777969 - DNA, 25 bp, Homo sapien
tgatatcatctccagtcccatggtt

SEQ ID NO: 2777970 - DNA, 25 bp, Homo sapien
cactggctgatagaaatatgcacac

SEQ ID NO: 2777971 - DNA, 25 bp, Homo sapien
tatttctaccttaatgactccggcc

SEQ ID NO: 2777972 - DNA, 25 bp, Homo sapien
tgtttaaagggcacctcctctgaga

SEQ ID NO: 2777973 - DNA, 25 bp, Homo sapien
acattttgtaggtctagcagagcac

SEQ ID NO: 2777974 - DNA, 25 bp, Homo sapien
ccaaggaccacactcgataaatact

SEQ ID NO: 2777975 - DNA, 25 bp, Homo sapien
ccacactcgataaatactttttaga

SEQ ID NO: 2777976 - DNA, 25 bp, Homo sapien
ctttttagattaacgaaacatccat

SEQ ID NO: 2777977 - DNA, 25 bp, Homo sapien
tagattaacgaaacatccatgagtt

SEQ ID NO: 2777978 - DNA, 25 bp, Homo sapien
ggaagagagtgctgctgcgctgaac

SEQ ID NO: 2777979 - DNA, 25 bp, Homo sapien
gaatggaagagagtgctgctgcgct

SEQ ID NO: 2777980 - DNA, 25 bp, Homo sapien
ctgctgcgctgaaccagacccgggg

SEQ ID NO: 2777981 - DNA, 25 bp, Homo sapien
tgctgcgctgaaccagacccggggc

SEQ ID NO: 2777982 - DNA, 25 bp, Homo sapien
ctttaggaggtcaacggaggaggat

SEQ ID NO: 2777983 - DNA, 25 bp, Homo sapien
ccttaccaagggcattttctatatt

SEQ ID NO: 2777984 - DNA, 25 bp, Homo sapien
acattccttaccaagggcattttct

SEQ ID NO: 2777985 - DNA, 25 bp, Homo sapien
aaaaggagctaggtggtcgggcaca

SEQ ID NO: 2777986 - DNA, 25 bp, Homo sapien
gatgtgcgtggctatgattaaaagc

SEQ ID NO: 2777987 - DNA, 25 bp, Homo sapien
tccccagtgatgtgcgtggctatga

SEQ ID NO: 2777988 - DNA, 25 bp, Homo sapien
ccccagtgatgtgcgtggctatgat

SEQ ID NO: 2777989 - DNA, 25 bp, Homo sapien
cagtgatgtgcgtggctatgattaa

SEQ ID NO: 2777990 - DNA, 25 bp, Homo sapien
ggcagcccaaggtaacactattata

SEQ ID NO: 2777991 - DNA, 25 bp, Homo sapien
tggagaatctaaccagccaaacctt

SEQ ID NO: 2777992 - DNA, 25 bp, Homo sapien
aacagcaagaactaaggcagcccaa

SEQ ID NO: 2777993 - DNA, 25 bp, Homo sapien
cactgcagccacgagaatgacatca

SEQ ID NO: 2777994 - DNA, 25 bp, Homo sapien
tcttgggaatggctaagagtcagtc

SEQ ID NO: 2777995 - DNA, 25 bp, Homo sapien
catgttttgccctcttagtgtccca

SEQ ID NO: 2777996 - DNA, 25 bp, Homo sapien
tacttgaagccatgtgtagcaccta

SEQ ID NO: 2777997 - DNA, 25 bp, Homo sapien
ggctggtagaaaccctggagtgaat

SEQ ID NO: 2777998 - DNA, 25 bp, Homo sapien
acttcgacttatgtactctgcctag

SEQ ID NO: 2777999 - DNA, 25 bp, Homo sapien
tcctgaaatagctcacatggctctg

SEQ ID NO: 2778000 - DNA, 25 bp, Homo sapien
gaacactaaaatcctaatcgccatg

SEQ ID NO: 2778001 - DNA, 25 bp, Homo sapien
tcgccatgcattggaattattccga

SEQ ID NO: 2778002 - DNA, 25 bp, Homo sapien
gaaaaatctaatctcaccctaataa

SEQ ID NO: 2778003 - DNA, 25 bp, Homo sapien
aaatgaagcatgtagtctaaatggc

SEQ ID NO: 2778004 - DNA, 25 bp, Homo sapien
aaatggctgatagttttcagctggc

SEQ ID NO: 2778005 - DNA, 25 bp, Homo sapien
gcatgtagtctaaatggctgatagt

SEQ ID NO: 2778006 - DNA, 25 bp, Homo sapien
agctactacaacaactgaaggcccc

SEQ ID NO: 2778007 - DNA, 25 bp, Homo sapien
tataagcacatatgaggacacacac

SEQ ID NO: 2778008 - DNA, 25 bp, Homo sapien
tcaaccctcctagagatgatcagtg

SEQ ID NO: 2778009 - DNA, 25 bp, Homo sapien
agttggcccaacctctgatttcagg

SEQ ID NO: 2778010 - DNA, 25 bp, Homo sapien
ttgaacagactagactgaagtgtag

SEQ ID NO: 2778011 - DNA, 25 bp, Homo sapien
gcagcaagaacacaatgttatctgg

SEQ ID NO: 2778012 - DNA, 25 bp, Homo sapien
tagactgaagtgtagtagcagagtc

SEQ ID NO: 2778013 - DNA, 25 bp, Homo sapien
gaacacaatgttatctggcaattca

SEQ ID NO: 2778014 - DNA, 25 bp, Homo sapien
tataaccttacagaagctgagggct

SEQ ID NO: 2778015 - DNA, 25 bp, Homo sapien
ccatgacggtaaaggcatctgctca

SEQ ID NO: 2778016 - DNA, 25 bp, Homo sapien
tgaagagcgctcactttggatgaag

SEQ ID NO: 2778017 - DNA, 25 bp, Homo sapien
gatgacactgctaacaagatctggg

SEQ ID NO: 2778018 - DNA, 25 bp, Homo sapien
gatgaccgaccaactctctaacttc

SEQ ID NO: 2778019 - DNA, 25 bp, Homo sapien
ctgatgaccgaccaactctctaact

SEQ ID NO: 2778020 - DNA, 25 bp, Homo sapien
tgatgaccgaccaactctctaactt

SEQ ID NO: 2778021 - DNA, 25 bp, Homo sapien
atgaccgaccaactctctaacttcc

SEQ ID NO: 2778022 - DNA, 25 bp, Homo sapien
ttctcgaagcttgaaaagggtgcca

SEQ ID NO: 2778023 - DNA, 25 bp, Homo sapien
tgatctggcccaaagtctatgtctg

SEQ ID NO: 2778024 - DNA, 25 bp, Homo sapien
catggtcaagaagtagccgtcaggg

SEQ ID NO: 2778025 - DNA, 25 bp, Homo sapien
actatatttgtgtaagcccagaggg

SEQ ID NO: 2778026 - DNA, 25 bp, Homo sapien
gcccatgcgtgagatgctgtcatcc

SEQ ID NO: 2778027 - DNA, 25 bp, Homo sapien
caagtgaccaagatttgtaactgga

SEQ ID NO: 2778028 - DNA, 25 bp, Homo sapien
ggctcgtctagtccaatgaacccta

SEQ ID NO: 2778029 - DNA, 25 bp, Homo sapien
gaaccctacatctttcaaatgagaa

SEQ ID NO: 2778030 - DNA, 25 bp, Homo sapien
gttcctctagcagagaggagtcttg

SEQ ID NO: 2778031 - DNA, 25 bp, Homo sapien
ttctacaccacatgatgacaatatc

SEQ ID NO: 2778032 - DNA, 25 bp, Homo sapien
ctctagcagagaggagtcttgcttt

SEQ ID NO: 2778033 - DNA, 25 bp, Homo sapien
tcctgaagggttcttctacaccaca

SEQ ID NO: 2778034 - DNA, 25 bp, Homo sapien
accgcctattgagaagacaatctgc

SEQ ID NO: 2778035 - DNA, 25 bp, Homo sapien
aatgtatgtgggtatctgtctgcac

SEQ ID NO: 2778036 - DNA, 25 bp, Homo sapien
taaagtggcaggttgaatacagtca

SEQ ID NO: 2778037 - DNA, 25 bp, Homo sapien
aagatgtggcacgatactaactccc

SEQ ID NO: 2778038 - DNA, 25 bp, Homo sapien
acttgtacttcaagacaatggcttc

SEQ ID NO: 2778039 - DNA, 25 bp, Homo sapien
tacttcaagacaatggcttcactca

SEQ ID NO: 2778040 - DNA, 25 bp, Homo sapien
ttgtacttcaagacaatggcttcac

SEQ ID NO: 2778041 - DNA, 25 bp, Homo sapien
tgtacttcaagacaatggcttcact

SEQ ID NO: 2778042 - DNA, 25 bp, Homo sapien
acttcagtcatggtacccgtcaggg

SEQ ID NO: 2778043 - DNA, 25 bp, Homo sapien
tgctgcacggccagtctagacagtc

SEQ ID NO: 2778044 - DNA, 25 bp, Homo sapien
gatatggcaataagcgccgacccag

SEQ ID NO: 2778045 - DNA, 25 bp, Homo sapien
tagtgcgactcaagctaagtgcgcg

SEQ ID NO: 2778046 - DNA, 25 bp, Homo sapien
ccccgatgcagaattagattcacta

SEQ ID NO: 2778047 - DNA, 25 bp, Homo sapien
tgtatcccgtatccccgatgcagaa

SEQ ID NO: 2778048 - DNA, 25 bp, Homo sapien
caatgcagtaatacactgtatcccg

SEQ ID NO: 2778049 - DNA, 25 bp, Homo sapien
aatctccttcaatgcagtaatacac

SEQ ID NO: 2778050 - DNA, 25 bp, Homo sapien
aataaatcaaagctatgctcgtcat

SEQ ID NO: 2778051 - DNA, 25 bp, Homo sapien
gagcttctcgtctaggttaacactg

SEQ ID NO: 2778052 - DNA, 25 bp, Homo sapien
gatattgtagtacttgttccacaga

SEQ ID NO: 2778053 - DNA, 25 bp, Homo sapien
gttaacactgacactgctggtcagc

SEQ ID NO: 2778054 - DNA, 25 bp, Homo sapien
taagtagctcataggataaaaggag

SEQ ID NO: 2778055 - DNA, 25 bp, Homo sapien
aatgagaggctcttgtgaagcgaag

SEQ ID NO: 2778056 - DNA, 25 bp, Homo sapien
aaatttgtaactaagggaatgagag

SEQ ID NO: 2778057 - DNA, 25 bp, Homo sapien
ggaagaagtgacagttctttgagaa

SEQ ID NO: 2778058 - DNA, 25 bp, Homo sapien
aaggagtaaggacacaccatcgcat

SEQ ID NO: 2778059 - DNA, 25 bp, Homo sapien
cacaccatcgcatcgggaagcaagt

SEQ ID NO: 2778060 - DNA, 25 bp, Homo sapien
gtaaggacacaccatcgcatcggga

SEQ ID NO: 2778061 - DNA, 25 bp, Homo sapien
acacaccatcgcatcgggaagcaag

SEQ ID NO: 2778062 - DNA, 25 bp, Homo sapien
tgcttgactgagtcgtctcaattca

SEQ ID NO: 2778063 - DNA, 25 bp, Homo sapien
cattctctgagctattggcaagact

SEQ ID NO: 2778064 - DNA, 25 bp, Homo sapien
aacattctctgagctattggcaaga

SEQ ID NO: 2778065 - DNA, 25 bp, Homo sapien
taaacattctctgagctattggcaa

SEQ ID NO: 2778066 - DNA, 25 bp, Homo sapien
tcagaatttgctgtagtggagtatt

SEQ ID NO: 2778067 - DNA, 25 bp, Homo sapien
caagcacacaaatcagaatttgctg

SEQ ID NO: 2778068 - DNA, 25 bp, Homo sapien
catcagaatcagacacgagagatat

SEQ ID NO: 2778069 - DNA, 25 bp, Homo sapien
tcagacacgagagatatgaaagcaa

SEQ ID NO: 2778070 - DNA, 25 bp, Homo sapien
ggctctggccgattctgatccccac

SEQ ID NO: 2778071 - DNA, 25 bp, Homo sapien
tggctctggccgattctgatcccca

SEQ ID NO: 2778072 - DNA, 25 bp, Homo sapien
cgttctcccctttgaggccaaattg

SEQ ID NO: 2778073 - DNA, 25 bp, Homo sapien
tctcccctttgaggccaaattgtcc

SEQ ID NO: 2778074 - DNA, 25 bp, Homo sapien
tctcacttcccgttctcccctttga

SEQ ID NO: 2778075 - DNA, 25 bp, Homo sapien
ggcaatctcacttcccgttctcccc

SEQ ID NO: 2778076 - DNA, 25 bp, Homo sapien
gaagtgggcatgtcaattcaaggaa

SEQ ID NO: 2778077 - DNA, 25 bp, Homo sapien
tggtggcaccaaactctaccagctg

SEQ ID NO: 2778078 - DNA, 25 bp, Homo sapien
tctgctctatgtaaaagtctaaggg

SEQ ID NO: 2778079 - DNA, 25 bp, Homo sapien
tcaaggaaaagtactcgtgaaccta

SEQ ID NO: 2778080 - DNA, 25 bp, Homo sapien
gaagaattacaactccgtcccagaa

SEQ ID NO: 2778081 - DNA, 25 bp, Homo sapien
tagtggacttgtaagctcacagaac

SEQ ID NO: 2778082 - DNA, 25 bp, Homo sapien
gctgttaacccaactagctctgtga

SEQ ID NO: 2778083 - DNA, 25 bp, Homo sapien
ttacaacctgggcattccaatggcc

SEQ ID NO: 2778084 - DNA, 25 bp, Homo sapien
catagggtgtgtcagaccatttttg

SEQ ID NO: 2778085 - DNA, 25 bp, Homo sapien
tagggtgtgtcagaccatttttgca

SEQ ID NO: 2778086 - DNA, 25 bp, Homo sapien
ggagcaagaggtgggggtcgaggga

SEQ ID NO: 2778087 - DNA, 25 bp, Homo sapien
ccaccttcaacacgaggaaccacac

SEQ ID NO: 2778088 - DNA, 25 bp, Homo sapien
gagaacaggaaagagatcagatttt

SEQ ID NO: 2778089 - DNA, 25 bp, Homo sapien
gaacaggaaagagatcagattttca

SEQ ID NO: 2778090 - DNA, 25 bp, Homo sapien
aacaggaaagagatcagattttcaa

SEQ ID NO: 2778091 - DNA, 25 bp, Homo sapien
agaacaggaaagagatcagattttc

SEQ ID NO: 2778092 - DNA, 25 bp, Homo sapien
agtagaaatgaaggtcgctaagaga

SEQ ID NO: 2778093 - DNA, 25 bp, Homo sapien
gaaggtcgctaagagacgaaggtct

SEQ ID NO: 2778094 - DNA, 25 bp, Homo sapien
cagtaagttctgaggagtagaaatg

SEQ ID NO: 2778095 - DNA, 25 bp, Homo sapien
cgctaagagacgaaggtctgtgatt

SEQ ID NO: 2778096 - DNA, 25 bp, Homo sapien
gtacagggacatgggtagtagggac

SEQ ID NO: 2778097 - DNA, 25 bp, Homo sapien
agggagaagtacagggacatgggta

SEQ ID NO: 2778098 - DNA, 25 bp, Homo sapien
gacatgggtagtagggacgggacca

SEQ ID NO: 2778099 - DNA, 25 bp, Homo sapien
gagaagtacagggacatgggtagta

SEQ ID NO: 2778100 - DNA, 25 bp, Homo sapien
taggtatacggcattttatggcttc

SEQ ID NO: 2778101 - DNA, 25 bp, Homo sapien
gcagtcagcatagcactcaaatagc

SEQ ID NO: 2778102 - DNA, 25 bp, Homo sapien
gagcagcccaagtaatcaacatgta

SEQ ID NO: 2778103 - DNA, 25 bp, Homo sapien
agctgggtcataccacttccacagg

SEQ ID NO: 2778104 - DNA, 25 bp, Homo sapien
cgtgatcacagatccctgcagcatc

SEQ ID NO: 2778105 - DNA, 25 bp, Homo sapien
atggcgtgatcacagatccctgcag

SEQ ID NO: 2778106 - DNA, 25 bp, Homo sapien
gcagcatcgacctcggagctcaggt

SEQ ID NO: 2778107 - DNA, 25 bp, Homo sapien
tgcagcatcgacctcggagctcagg

SEQ ID NO: 2778108 - DNA, 25 bp, Homo sapien
cacaaagaccctcatgatggtttta

SEQ ID NO: 2778109 - DNA, 25 bp, Homo sapien
ggtttgacctgaagatggagacata

SEQ ID NO: 2778110 - DNA, 25 bp, Homo sapien
acacgagttacgtggctggcacagc

SEQ ID NO: 2778111 - DNA, 25 bp, Homo sapien
ttcaattccctagcacctagcctgg

SEQ ID NO: 2778112 - DNA, 25 bp, Homo sapien
cagtgactgcgttctaggataattt

SEQ ID NO: 2778113 - DNA, 25 bp, Homo sapien
gttcccaaactacggatatgagtaa

SEQ ID NO: 2778114 - DNA, 25 bp, Homo sapien
tgaagactaggttttgttatgttcc

SEQ ID NO: 2778115 - DNA, 25 bp, Homo sapien
actacggatatgagtaaaccacatc

SEQ ID NO: 2778116 - DNA, 25 bp, Homo sapien
cattggaatccaggtaatgacagag

SEQ ID NO: 2778117 - DNA, 25 bp, Homo sapien
ctctagagttcaaaggaggccgtta

SEQ ID NO: 2778118 - DNA, 25 bp, Homo sapien
gaggccgttaggtctttctaagcaa

SEQ ID NO: 2778119 - DNA, 25 bp, Homo sapien
cagagagactaacatcgtcacgtcc

SEQ ID NO: 2778120 - DNA, 25 bp, Homo sapien
caagagcatcatttaaggagtgtaa

SEQ ID NO: 2778121 - DNA, 25 bp, Homo sapien
ctttatcttgggactgtaaggcaga

SEQ ID NO: 2778122 - DNA, 25 bp, Homo sapien
taaatatttggctgctataagtagc

SEQ ID NO: 2778123 - DNA, 25 bp, Homo sapien
tcaaatcttgctctaatatcccatt

SEQ ID NO: 2778124 - DNA, 25 bp, Homo sapien
ccaagagcatctatacttccaagca

SEQ ID NO: 2778125 - DNA, 25 bp, Homo sapien
agtgccaacagcacgccaagagcat

SEQ ID NO: 2778126 - DNA, 25 bp, Homo sapien
ccatggatggaatatgtaagagttc

SEQ ID NO: 2778127 - DNA, 25 bp, Homo sapien
ggatgatgataatctacccaaagag

SEQ ID NO: 2778128 - DNA, 25 bp, Homo sapien
aatgtggcaagcacttctaggtaag

SEQ ID NO: 2778129 - DNA, 25 bp, Homo sapien
gaagaccaaaccctagcatcagtga

SEQ ID NO: 2778130 - DNA, 25 bp, Homo sapien
tagggaaacagagtagaggcatcaa

SEQ ID NO: 2778131 - DNA, 25 bp, Homo sapien
cctgtgccagacaagtgcaatgtaa

SEQ ID NO: 2778132 - DNA, 25 bp, Homo sapien
gagcacagaagaaaacggcattcca

SEQ ID NO: 2778133 - DNA, 25 bp, Homo sapien
tcagggacttagcatggtcacatca

SEQ ID NO: 2778134 - DNA, 25 bp, Homo sapien
cataatgcgcaagcatctgagggct

SEQ ID NO: 2778135 - DNA, 25 bp, Homo sapien
gagaggtatccaagttcaaaggagc

SEQ ID NO: 2778136 - DNA, 25 bp, Homo sapien
taaaagtctgactaccaaaggccaa

SEQ ID NO: 2778137 - DNA, 25 bp, Homo sapien
tcttgcagctaggaatggcagcatg

SEQ ID NO: 2778138 - DNA, 25 bp, Homo sapien
gtaagtcttacaagtcttccaggag

SEQ ID NO: 2778139 - DNA, 25 bp, Homo sapien
tctacatatagtgggcagaagcttc

SEQ ID NO: 2778140 - DNA, 25 bp, Homo sapien
tggacatataaggtttttccctcaa

SEQ ID NO: 2778141 - DNA, 25 bp, Homo sapien
gacatataaggtttttccctcaata

SEQ ID NO: 2778142 - DNA, 25 bp, Homo sapien
ctggacatataaggtttttccctca

SEQ ID NO: 2778143 - DNA, 25 bp, Homo sapien
catataaggtttttccctcaataca

SEQ ID NO: 2778144 - DNA, 25 bp, Homo sapien
tagatgagacttgcaagagcacacg

SEQ ID NO: 2778145 - DNA, 25 bp, Homo sapien
ggcagaaacctatcaaattcagatt

SEQ ID NO: 2778146 - DNA, 25 bp, Homo sapien
tctggaaagcctacagcatattttg

SEQ ID NO: 2778147 - DNA, 25 bp, Homo sapien
aaggcatatgggcaataaaaactga

SEQ ID NO: 2778148 - DNA, 25 bp, Homo sapien
gatctcctgatctcgggatacatac

SEQ ID NO: 2778149 - DNA, 25 bp, Homo sapien
tgatctcgggatacatacacctcgg

SEQ ID NO: 2778150 - DNA, 25 bp, Homo sapien
tcgggatacatacacctcggcctct

SEQ ID NO: 2778151 - DNA, 25 bp, Homo sapien
tcctgatctcgggatacatacacct

SEQ ID NO: 2778152 - DNA, 25 bp, Homo sapien
gcaatgccttttttactgccttgat

SEQ ID NO: 2778153 - DNA, 25 bp, Homo sapien
ttaaaacatgcccaaaaattcttca

SEQ ID NO: 2778154 - DNA, 25 bp, Homo sapien
ttcaaccttcctcccaccaagagat

SEQ ID NO: 2778155 - DNA, 25 bp, Homo sapien
ctgcccttgaacctagcaatgcctt

SEQ ID NO: 2778156 - DNA, 25 bp, Homo sapien
gagactgttactcactaacctcggg

SEQ ID NO: 2778157 - DNA, 25 bp, Homo sapien
cagggaacaggagtctttagtttca

SEQ ID NO: 2778158 - DNA, 25 bp, Homo sapien
tatatatggtttacacccacatgca

SEQ ID NO: 2778159 - DNA, 25 bp, Homo sapien
tggcaaaatgttcaatcaggaaggc

SEQ ID NO: 2778160 - DNA, 25 bp, Homo sapien
aaatgagggtcaaccagaactgggc

SEQ ID NO: 2778161 - DNA, 25 bp, Homo sapien
gggagagccacaacataacacaggg

SEQ ID NO: 2778162 - DNA, 25 bp, Homo sapien
gaccaaagagcagtaaaccaggcat

SEQ ID NO: 2778163 - DNA, 25 bp, Homo sapien
gaagccagccctgctaaaagtagat

SEQ ID NO: 2778164 - DNA, 25 bp, Homo sapien
tacctaatggtacggatttgctcaa

SEQ ID NO: 2778165 - DNA, 25 bp, Homo sapien
tctaccctttgtagcacatcatggg

SEQ ID NO: 2778166 - DNA, 25 bp, Homo sapien
taaataggtcaagtccaccagtcta

SEQ ID NO: 2778167 - DNA, 25 bp, Homo sapien
taatatgactgcctaatccactcga

SEQ ID NO: 2778168 - DNA, 25 bp, Homo sapien
cacttattttgagacctcggtggac

SEQ ID NO: 2778169 - DNA, 25 bp, Homo sapien
tccaagtcccagtggatacctaaaa

SEQ ID NO: 2778170 - DNA, 25 bp, Homo sapien
ggagggtggaggctactataaacaa

SEQ ID NO: 2778171 - DNA, 25 bp, Homo sapien
gaactaactaacatagcacagagca

SEQ ID NO: 2778172 - DNA, 25 bp, Homo sapien
ggacagcagctaaatgtttacccag

SEQ ID NO: 2778173 - DNA, 25 bp, Homo sapien
ggaagattcactcatcaactggaaa

SEQ ID NO: 2778174 - DNA, 25 bp, Homo sapien
gatgctggtactgcctgttgggaca

SEQ ID NO: 2778175 - DNA, 25 bp, Homo sapien
tatccaaaaagctctgcacattgtg

SEQ ID NO: 2778176 - DNA, 25 bp, Homo sapien
tttagtagtacaggcaatgtcaccc

SEQ ID NO: 2778177 - DNA, 25 bp, Homo sapien
ggcagctctcttaacttacagggca

SEQ ID NO: 2778178 - DNA, 25 bp, Homo sapien
taggtttggcacctcaaagacagct

SEQ ID NO: 2778179 - DNA, 25 bp, Homo sapien
gataatccccgtaaccagctacagt

SEQ ID NO: 2778180 - DNA, 25 bp, Homo sapien
gcctcagttattcggagatcagaca

SEQ ID NO: 2778181 - DNA, 25 bp, Homo sapien
aaacgcctcagttattcggagatca

SEQ ID NO: 2778182 - DNA, 25 bp, Homo sapien
gtacagaaacgcctcagttattcgg

SEQ ID NO: 2778183 - DNA, 25 bp, Homo sapien
atccatgtacagaaacgcctcagtt

SEQ ID NO: 2778184 - DNA, 25 bp, Homo sapien
aaaaaagcagcgtctctggctgcga

SEQ ID NO: 2778185 - DNA, 25 bp, Homo sapien
gcagcctaaagcatccggaacggct

SEQ ID NO: 2778186 - DNA, 25 bp, Homo sapien
ccggcagcctaaagcatccggaacg

SEQ ID NO: 2778187 - DNA, 25 bp, Homo sapien
ctaaagcatccggaacggctccgaa

SEQ ID NO: 2778188 - DNA, 25 bp, Homo sapien
gttttctgagatgtcagtgagtccg

SEQ ID NO: 2778189 - DNA, 25 bp, Homo sapien
tcaattagatgttttctgagatgtc

SEQ ID NO: 2778190 - DNA, 25 bp, Homo sapien
ttctgagatgtcagtgagtccgccc

SEQ ID NO: 2778191 - DNA, 25 bp, Homo sapien
caattagatgttttctgagatgtca

SEQ ID NO: 2778192 - DNA, 25 bp, Homo sapien
cttctctgcttcctaaacctaaatg

SEQ ID NO: 2778193 - DNA, 25 bp, Homo sapien
tctgcttcctaaacctaaatgaagt

SEQ ID NO: 2778194 - DNA, 25 bp, Homo sapien
aactcctgtgactttaaaattctct

SEQ ID NO: 2778195 - DNA, 25 bp, Homo sapien
tctccagtggataccttgacaccca

SEQ ID NO: 2778196 - DNA, 25 bp, Homo sapien
ctgtgtcccagaagatgaacttcat

SEQ ID NO: 2778197 - DNA, 25 bp, Homo sapien
tagacctcactatttacagccagcc

SEQ ID NO: 2778198 - DNA, 25 bp, Homo sapien
aaagattgattggttgcttagagca

SEQ ID NO: 2778199 - DNA, 25 bp, Homo sapien
cctggcttgacaccttgcatgtagc

SEQ ID NO: 2778200 - DNA, 25 bp, Homo sapien
tgcatgtagccctggcaccactaaa

SEQ ID NO: 2778201 - DNA, 25 bp, Homo sapien
tcttagtttttcacagatattcaac

SEQ ID NO: 2778202 - DNA, 25 bp, Homo sapien
taaaacaaagggagccattcctcaa

SEQ ID NO: 2778203 - DNA, 25 bp, Homo sapien
gagccattcctcaaacacgttgttt

SEQ ID NO: 2778204 - DNA, 25 bp, Homo sapien
ttttaactgggagggagagtacaga

SEQ ID NO: 2778205 - DNA, 25 bp, Homo sapien
ttccctcctgcaaggtcgcctggtg

SEQ ID NO: 2778206 - DNA, 25 bp, Homo sapien
gttccctcctgcaaggtcgcctggt

SEQ ID NO: 2778207 - DNA, 25 bp, Homo sapien
tgccctatcccttgtgattcccgaa

SEQ ID NO: 2778208 - DNA, 25 bp, Homo sapien
caagaggtcttagtgtctccgccaa

SEQ ID NO: 2778209 - DNA, 25 bp, Homo sapien
tcagactgacaggtcccctggcatc

SEQ ID NO: 2778210 - DNA, 25 bp, Homo sapien
gagtggtaacagcttccttgggtga

SEQ ID NO: 2778211 - DNA, 25 bp, Homo sapien
tctggactttgtgctagcactgcca

SEQ ID NO: 2778212 - DNA, 25 bp, Homo sapien
tcagggtcctcctggaaccataaga

SEQ ID NO: 2778213 - DNA, 25 bp, Homo sapien
gctagcactgccatagaattgctca

SEQ ID NO: 2778214 - DNA, 25 bp, Homo sapien
gggtcctcctggaaccataagacat

SEQ ID NO: 2778215 - DNA, 25 bp, Homo sapien
ttgaagctgaaggttaaagatgagg

SEQ ID NO: 2778216 - DNA, 25 bp, Homo sapien
ccgggcttctgtttgaagctgaagg

SEQ ID NO: 2778217 - DNA, 25 bp, Homo sapien
cccgggcttctgtttgaagctgaag

SEQ ID NO: 2778218 - DNA, 25 bp, Homo sapien
aagctgaaggttaaagatgaggcca

SEQ ID NO: 2778219 - DNA, 25 bp, Homo sapien
gataagggttatcctggaggacaga

SEQ ID NO: 2778220 - DNA, 25 bp, Homo sapien
ccttgcagtgataagggttatcctg

SEQ ID NO: 2778221 - DNA, 25 bp, Homo sapien
tattgctgatgtgcaatctgtgggt

SEQ ID NO: 2778222 - DNA, 25 bp, Homo sapien
atgggcacatttgtattgctgatgt

SEQ ID NO: 2778223 - DNA, 25 bp, Homo sapien
tgcttcagtgcggccgttgctaccg

SEQ ID NO: 2778224 - DNA, 25 bp, Homo sapien
gaggttattctccaccgtgccagaa

SEQ ID NO: 2778225 - DNA, 25 bp, Homo sapien
gcacttctgaggttattctccaccg

SEQ ID NO: 2778226 - DNA, 25 bp, Homo sapien
taccgcccgctggtgcacttctgag

SEQ ID NO: 2778227 - DNA, 25 bp, Homo sapien
tatcaataagtaataaggcccattc

SEQ ID NO: 2778228 - DNA, 25 bp, Homo sapien
taaatggtgttatcaataagtaata

SEQ ID NO: 2778229 - DNA, 25 bp, Homo sapien
aataagtaataaggcccattccaag

SEQ ID NO: 2778230 - DNA, 25 bp, Homo sapien
ggtgttatcaataagtaataaggcc

SEQ ID NO: 2778231 - DNA, 25 bp, Homo sapien
cctccccagtggtaccttcagccat

SEQ ID NO: 2778232 - DNA, 25 bp, Homo sapien
tagcttctttcgtggcaattttccc

SEQ ID NO: 2778233 - DNA, 25 bp, Homo sapien
actaggccttattgtcatcacttcc

SEQ ID NO: 2778234 - DNA, 25 bp, Homo sapien
tagaaggcttctgatacacactagg

SEQ ID NO: 2778235 - DNA, 25 bp, Homo sapien
ctgcacgaagcaggaacttagagtt

SEQ ID NO: 2778236 - DNA, 25 bp, Homo sapien
taacctgcattaacactgcacgaag

SEQ ID NO: 2778237 - DNA, 25 bp, Homo sapien
taagtaggagttcctctgaggagat

SEQ ID NO: 2778238 - DNA, 25 bp, Homo sapien
cagcaatgggatatctggaaaagcc

SEQ ID NO: 2778239 - DNA, 25 bp, Homo sapien
aaggatagggctggaggcaaactcc

SEQ ID NO: 2778240 - DNA, 25 bp, Homo sapien
actgccagtgctgagctggaaggat

SEQ ID NO: 2778241 - DNA, 25 bp, Homo sapien
ctggtgctaacctcaactgccagtg

SEQ ID NO: 2778242 - DNA, 25 bp, Homo sapien
gttgctggtgtattccatcctggta

SEQ ID NO: 2778243 - DNA, 25 bp, Homo sapien
aggcctttccctaaaagatttgatg

SEQ ID NO: 2778244 - DNA, 25 bp, Homo sapien
gctctctccttcatcaaatctaggc

SEQ ID NO: 2778245 - DNA, 25 bp, Homo sapien
tcatttaatcaagtcgtcaaggaac

SEQ ID NO: 2778246 - DNA, 25 bp, Homo sapien
caagtcgtcaaggaacttgatatca

SEQ ID NO: 2778247 - DNA, 25 bp, Homo sapien
ctgtcctccaaattaccatacagtt

SEQ ID NO: 2778248 - DNA, 25 bp, Homo sapien
tgttcaaccctggtattatcaactg

SEQ ID NO: 2778249 - DNA, 25 bp, Homo sapien
caaccctggtattatcaactgtggc

SEQ ID NO: 2778250 - DNA, 25 bp, Homo sapien
accctggtattatcaactgtggcca

SEQ ID NO: 2778251 - DNA, 25 bp, Homo sapien
ttcaaccctggtattatcaactgtg

SEQ ID NO: 2778252 - DNA, 25 bp, Homo sapien
gaccttcgaaggctggctgctgata

SEQ ID NO: 2778253 - DNA, 25 bp, Homo sapien
gataaaagcacaacacggaaccaga

SEQ ID NO: 2778254 - DNA, 25 bp, Homo sapien
tccagttgggactaagtgacatcgt

SEQ ID NO: 2778255 - DNA, 25 bp, Homo sapien
tcaagaagcttcacccgacagtaca

SEQ ID NO: 2778256 - DNA, 25 bp, Homo sapien
caagtgatgatgattgggttccgcg

SEQ ID NO: 2778257 - DNA, 25 bp, Homo sapien
tgtagaacatgggtgctcttcaccc

SEQ ID NO: 2778258 - DNA, 25 bp, Homo sapien
ccagctggtccattctgttgtagca

SEQ ID NO: 2778259 - DNA, 25 bp, Homo sapien
ggttccgcgtgtgtagatcagctcc

SEQ ID NO: 2778260 - DNA, 25 bp, Homo sapien
cctggcaaaaggtgctctgtaatgt

SEQ ID NO: 2778261 - DNA, 25 bp, Homo sapien
ggtgctctgtaatgtgcactcccat

SEQ ID NO: 2778262 - DNA, 25 bp, Homo sapien
cttaaggggaggatgtgtccactca

SEQ ID NO: 2778263 - DNA, 25 bp, Homo sapien
tgtgtccactcagtgtccagcctgg

SEQ ID NO: 2778264 - DNA, 25 bp, Homo sapien
tgtgtgacccagatcacatctctat

SEQ ID NO: 2778265 - DNA, 25 bp, Homo sapien
ctgttgatcttgtggtagaactcct

SEQ ID NO: 2778266 - DNA, 25 bp, Homo sapien
tgttgatcttgtggtagaactcctc

SEQ ID NO: 2778267 - DNA, 25 bp, Homo sapien
gttgatcttgtggtagaactcctct

SEQ ID NO: 2778268 - DNA, 25 bp, Homo sapien
cctgttgatcttgtggtagaactcc

SEQ ID NO: 2778269 - DNA, 25 bp, Homo sapien
tcaagggcatgaagagctacatctc

SEQ ID NO: 2778270 - DNA, 25 bp, Homo sapien
ccaaggcagcgatgatgactgggac

SEQ ID NO: 2778271 - DNA, 25 bp, Homo sapien
acgagtgggacgacagctccacggt

SEQ ID NO: 2778272 - DNA, 25 bp, Homo sapien
ggacctcgacggctcgtcttcggcg

SEQ ID NO: 2778273 - DNA, 25 bp, Homo sapien
tggcctgtcgggaccagcatgggct

SEQ ID NO: 2778274 - DNA, 25 bp, Homo sapien
ggtgcagagcctcatcgcagtggga

SEQ ID NO: 2778275 - DNA, 25 bp, Homo sapien
ctgctgaggaagctgtgccagtgaa

SEQ ID NO: 2778276 - DNA, 25 bp, Homo sapien
cagtctgccccaggagttgcaccaa

SEQ ID NO: 2778277 - DNA, 25 bp, Homo sapien
cacagtcgtggacatgcaccatgat

SEQ ID NO: 2778278 - DNA, 25 bp, Homo sapien
caagtggaagtttgccaagccggca

SEQ ID NO: 2778279 - DNA, 25 bp, Homo sapien
cagtctgggccgaaccatatgggat

SEQ ID NO: 2778280 - DNA, 25 bp, Homo sapien
gaggagctgtcactgtaccgtatga

SEQ ID NO: 2778281 - DNA, 25 bp, Homo sapien
tagtgaagccagtgatagaagaggt

SEQ ID NO: 2778282 - DNA, 25 bp, Homo sapien
tttgggtggtagaaagtagtgaagc

SEQ ID NO: 2778283 - DNA, 25 bp, Homo sapien
atagaagaggtaggcagactgagaa

SEQ ID NO: 2778284 - DNA, 25 bp, Homo sapien
gaaagtagtgaagccagtgatagaa

SEQ ID NO: 2778285 - DNA, 25 bp, Homo sapien
tccatgcaggaatagtatttagggt

SEQ ID NO: 2778286 - DNA, 25 bp, Homo sapien
tgggttgctcatccctatgttggtg

SEQ ID NO: 2778287 - DNA, 25 bp, Homo sapien
cccacttagtatgaatccatgcagg

SEQ ID NO: 2778288 - DNA, 25 bp, Homo sapien
taatgtggtctaaacctggaaccca

SEQ ID NO: 2778289 - DNA, 25 bp, Homo sapien
gagattctggcttacagtgccccaa

SEQ ID NO: 2778290 - DNA, 25 bp, Homo sapien
taatatgtcatgaaaagtggtgtgg

SEQ ID NO: 2778291 - DNA, 25 bp, Homo sapien
ggctgataaataccaaaaagattca

SEQ ID NO: 2778292 - DNA, 25 bp, Homo sapien
gggaaatacagatggctgataaata

SEQ ID NO: 2778293 - DNA, 25 bp, Homo sapien
tcttggtcctattgaaacattgcag

SEQ ID NO: 2778294 - DNA, 25 bp, Homo sapien
gccagggtggacatagcttaaatta

SEQ ID NO: 2778295 - DNA, 25 bp, Homo sapien
tataatgccactgattcatacggga

SEQ ID NO: 2778296 - DNA, 25 bp, Homo sapien
ggtcatcatgatcagtgtggtacaa

SEQ ID NO: 2778297 - DNA, 25 bp, Homo sapien
tagtctgtcaagtatgtaaagtttg

SEQ ID NO: 2778298 - DNA, 25 bp, Homo sapien
tgttatgattagtgcagatcagcca

SEQ ID NO: 2778299 - DNA, 25 bp, Homo sapien
aaatgccatgtctgatacctttaag

SEQ ID NO: 2778300 - DNA, 25 bp, Homo sapien
tacctttaagtccataagcattcaa

SEQ ID NO: 2778301 - DNA, 25 bp, Homo sapien
caccagcctgcggaattcaaatctg

SEQ ID NO: 2778302 - DNA, 25 bp, Homo sapien
tcaaatctgtgcctccgcgacgtga

SEQ ID NO: 2778303 - DNA, 25 bp, Homo sapien
gctggctggtgttttgactgtcaca

SEQ ID NO: 2778304 - DNA, 25 bp, Homo sapien
tctgagacattcgtgagcggctggc

SEQ ID NO: 2778305 - DNA, 25 bp, Homo sapien
accagacttcggaccagcatattct

SEQ ID NO: 2778306 - DNA, 25 bp, Homo sapien
cagacttcggaccagcatattctgt

SEQ ID NO: 2778307 - DNA, 25 bp, Homo sapien
ccagacttcggaccagcatattctg

SEQ ID NO: 2778308 - DNA, 25 bp, Homo sapien
aagcacagcaacaggtcggggagct

SEQ ID NO: 2778309 - DNA, 25 bp, Homo sapien
tgtattctgtgcgtccacagcagac

SEQ ID NO: 2778310 - DNA, 25 bp, Homo sapien
cagtatagagcttggcaagcacagc

SEQ ID NO: 2778311 - DNA, 25 bp, Homo sapien
catgtccccagtatagagcttggca

SEQ ID NO: 2778312 - DNA, 25 bp, Homo sapien
tcccgagatgtaacagattgactga

SEQ ID NO: 2778313 - DNA, 25 bp, Homo sapien
cagattgactgaggtcagacgcaga

SEQ ID NO: 2778314 - DNA, 25 bp, Homo sapien
gatgtaacagattgactgaggtcag

SEQ ID NO: 2778315 - DNA, 25 bp, Homo sapien
cactgctgtcccgagatgtaacaga

SEQ ID NO: 2778316 - DNA, 25 bp, Homo sapien
tttaccaccagattgcccttggcaa

SEQ ID NO: 2778317 - DNA, 25 bp, Homo sapien
accagattgcccttggcaaggcttg

SEQ ID NO: 2778318 - DNA, 25 bp, Homo sapien
ccaccagattgcccttggcaaggct

SEQ ID NO: 2778319 - DNA, 25 bp, Homo sapien
taccaccagattgcccttggcaagg

SEQ ID NO: 2778320 - DNA, 25 bp, Homo sapien
tgccttataggccttgcaccccttg

SEQ ID NO: 2778321 - DNA, 25 bp, Homo sapien
cttgcaccccttggtccctttctgc

SEQ ID NO: 2778322 - DNA, 25 bp, Homo sapien
ttataggccttgcaccccttggtcc

SEQ ID NO: 2778323 - DNA, 25 bp, Homo sapien
gccttataggccttgcaccccttgg

SEQ ID NO: 2778324 - DNA, 25 bp, Homo sapien
gattatgtatggtctcagcaggctg

SEQ ID NO: 2778325 - DNA, 25 bp, Homo sapien
ggtgtccttgggaaacgcccttgca

SEQ ID NO: 2778326 - DNA, 25 bp, Homo sapien
agaaaactgtgctccacgaataggg

SEQ ID NO: 2778327 - DNA, 25 bp, Homo sapien
tgaggactgacggattggaatgact

SEQ ID NO: 2778328 - DNA, 25 bp, Homo sapien
tgtagcaaagactaacaaggcttgc

SEQ ID NO: 2778329 - DNA, 25 bp, Homo sapien
gaaatacttccctttagcgaatgta

SEQ ID NO: 2778330 - DNA, 25 bp, Homo sapien
ttgctggaaactgattagttctggg

SEQ ID NO: 2778331 - DNA, 25 bp, Homo sapien
atacttccctttagcgaatgtagca

SEQ ID NO: 2778332 - DNA, 25 bp, Homo sapien
aatatgagtgccaagaaagccactg

SEQ ID NO: 2778333 - DNA, 25 bp, Homo sapien
gaattcgcctctataccctggcaag

SEQ ID NO: 2778334 - DNA, 25 bp, Homo sapien
tcaagttgtccatgagaattcgcct

SEQ ID NO: 2778335 - DNA, 25 bp, Homo sapien
ggattcacttcagccctttgcagag

SEQ ID NO: 2778336 - DNA, 25 bp, Homo sapien
tgctgcagcttggcgagccacagca

SEQ ID NO: 2778337 - DNA, 25 bp, Homo sapien
gctgcagcttggcgagccacagcag

SEQ ID NO: 2778338 - DNA, 25 bp, Homo sapien
ctgcagcttggcgagccacagcaga

SEQ ID NO: 2778339 - DNA, 25 bp, Homo sapien
tcctctaagttgcatcccttttcct

SEQ ID NO: 2778340 - DNA, 25 bp, Homo sapien
atttcactagctgccggctctcagg

SEQ ID NO: 2778341 - DNA, 25 bp, Homo sapien
ccaggccagtcctctaagttgcatc

SEQ ID NO: 2778342 - DNA, 25 bp, Homo sapien
gccagtcctctaagttgcatccctt

SEQ ID NO: 2778343 - DNA, 25 bp, Homo sapien
ctacacagcatcctgggctggccac

SEQ ID NO: 2778344 - DNA, 25 bp, Homo sapien
tacacagcatcctgggctggccact

SEQ ID NO: 2778345 - DNA, 25 bp, Homo sapien
ctggaatgacgttctagaaattatt

SEQ ID NO: 2778346 - DNA, 25 bp, Homo sapien
gaatgacgttctagaaattattttc

SEQ ID NO: 2778347 - DNA, 25 bp, Homo sapien
accctgcgggtcccagggtagtctg

SEQ ID NO: 2778348 - DNA, 25 bp, Homo sapien
ctgcgggtcccagggtagtctgctc

SEQ ID NO: 2778349 - DNA, 25 bp, Homo sapien
tatctggtaaaagaaaggagaagtg

SEQ ID NO: 2778350 - DNA, 25 bp, Homo sapien
atctggtaaaagaaaggagaagtgg

SEQ ID NO: 2778351 - DNA, 25 bp, Homo sapien
caaaacactgtccacttaatttgaa

SEQ ID NO: 2778352 - DNA, 25 bp, Homo sapien
ccttctccactgtcacccgagccat

SEQ ID NO: 2778353 - DNA, 25 bp, Homo sapien
gcagccataggtcccttttccttct

SEQ ID NO: 2778354 - DNA, 25 bp, Homo sapien
tgaaggcaacaaggcatggtgcagc

SEQ ID NO: 2778355 - DNA, 25 bp, Homo sapien
gtgaagccgcaaggcctctcctttc

SEQ ID NO: 2778356 - DNA, 25 bp, Homo sapien
cagtgaagccgcaaggcctctcctt

SEQ ID NO: 2778357 - DNA, 25 bp, Homo sapien
agtgttccaactctcagttaattca

SEQ ID NO: 2778358 - DNA, 25 bp, Homo sapien
aactctcagttaattcaccagtgaa

SEQ ID NO: 2778359 - DNA, 25 bp, Homo sapien
aaaacatgttcttggcagagatgcc

SEQ ID NO: 2778360 - DNA, 25 bp, Homo sapien
gggccatgtttctttcttagcatag

SEQ ID NO: 2778361 - DNA, 25 bp, Homo sapien
caggggagtggatccagccaaaaca

SEQ ID NO: 2778362 - DNA, 25 bp, Homo sapien
tcaccagacaagaactctggctccc

SEQ ID NO: 2778363 - DNA, 25 bp, Homo sapien
caagaagtcagttctctctggaggt

SEQ ID NO: 2778364 - DNA, 25 bp, Homo sapien
ccagccagcctgtcgaacaaatcga

SEQ ID NO: 2778365 - DNA, 25 bp, Homo sapien
cagtgatttagaggctccacggaga

SEQ ID NO: 2778366 - DNA, 25 bp, Homo sapien
tccacggagaccctaggaggtgctg

SEQ ID NO: 2778367 - DNA, 25 bp, Homo sapien
gccaactttcaatgaactctaccag

SEQ ID NO: 2778368 - DNA, 25 bp, Homo sapien
tagtcactgaagacttgttctctgg

SEQ ID NO: 2778369 - DNA, 25 bp, Homo sapien
catggttgttggcagttcctgagtt

SEQ ID NO: 2778370 - DNA, 25 bp, Homo sapien
gttctctggtttcaaatgccaactt

SEQ ID NO: 2778371 - DNA, 25 bp, Homo sapien
gctttccataagcatcagcctgatc

SEQ ID NO: 2778372 - DNA, 25 bp, Homo sapien
tttccataagcatcagcctgatctc

SEQ ID NO: 2778373 - DNA, 25 bp, Homo sapien
tttgttggcaatctctggctttcca

SEQ ID NO: 2778374 - DNA, 25 bp, Homo sapien
tccataagcatcagcctgatctctg

SEQ ID NO: 2778375 - DNA, 25 bp, Homo sapien
atttagcggcgtctatttgccaggg

SEQ ID NO: 2778376 - DNA, 25 bp, Homo sapien
gggtgttaatggaaatcagcagaac

SEQ ID NO: 2778377 - DNA, 25 bp, Homo sapien
ccatttagcggcgtctatttgccag

SEQ ID NO: 2778378 - DNA, 25 bp, Homo sapien
gcagaacaaaaatcgcagcttcttg

SEQ ID NO: 2778379 - DNA, 25 bp, Homo sapien
cgaggccagatggaagtctccactg

SEQ ID NO: 2778380 - DNA, 25 bp, Homo sapien
gcagcaccagtggacagatgcaaac

SEQ ID NO: 2778381 - DNA, 25 bp, Homo sapien
ccctgttgcccggaatatttggagg

SEQ ID NO: 2778382 - DNA, 25 bp, Homo sapien
tatttggagggcatcgagacagcaa

SEQ ID NO: 2778383 - DNA, 25 bp, Homo sapien
tcatgaaaacagtactgctccttcc

SEQ ID NO: 2778384 - DNA, 25 bp, Homo sapien
ctcatgaaaacagtactgctccttc

SEQ ID NO: 2778385 - DNA, 25 bp, Homo sapien
ttgccctccaggcagaagtgtggag

SEQ ID NO: 2778386 - DNA, 25 bp, Homo sapien
tccttttcttgccctccaggcagaa

SEQ ID NO: 2778387 - DNA, 25 bp, Homo sapien
ttttcttgccctccaggcagaagtg

SEQ ID NO: 2778388 - DNA, 25 bp, Homo sapien
tcttgccctccaggcagaagtgtgg

SEQ ID NO: 2778389 - DNA, 25 bp, Homo sapien
tgcttggcagcacatgtgaagtctg

SEQ ID NO: 2778390 - DNA, 25 bp, Homo sapien
catctgggtctaggacacagcattt

SEQ ID NO: 2778391 - DNA, 25 bp, Homo sapien
cccacgggttgatggaactgtgata

SEQ ID NO: 2778392 - DNA, 25 bp, Homo sapien
ggaactgtgataaccagctcacaag

SEQ ID NO: 2778393 - DNA, 25 bp, Homo sapien
agagtctggtagaacttcccacagc

SEQ ID NO: 2778394 - DNA, 25 bp, Homo sapien
gaacaagagctactctgggtgctgc

SEQ ID NO: 2778395 - DNA, 25 bp, Homo sapien
gccaatgaattgttccctgtagtca

SEQ ID NO: 2778396 - DNA, 25 bp, Homo sapien
ttggagaagcttccataggacccac

SEQ ID NO: 2778397 - DNA, 25 bp, Homo sapien
tgctttattcatggccatggtacct

SEQ ID NO: 2778398 - DNA, 25 bp, Homo sapien
ctgtctcccttcttttcattgtctc

SEQ ID NO: 2778399 - DNA, 25 bp, Homo sapien
ctctgtctcccttcttttcattgtc

SEQ ID NO: 2778400 - DNA, 25 bp, Homo sapien
tctgtctcccttcttttcattgtct

SEQ ID NO: 2778401 - DNA, 25 bp, Homo sapien
tatgttcccggcactgtgctattgt

SEQ ID NO: 2778402 - DNA, 25 bp, Homo sapien
tccatgcccaattccccggaagaga

SEQ ID NO: 2778403 - DNA, 25 bp, Homo sapien
ggaaagattccatacatcactggga

SEQ ID NO: 2778404 - DNA, 25 bp, Homo sapien
tacctttaccctgatgacaaaggca

SEQ ID NO: 2778405 - DNA, 25 bp, Homo sapien
ctttgtaggaagagctgcatgtcgg

SEQ ID NO: 2778406 - DNA, 25 bp, Homo sapien
agtgtttgtgcatctctctgggagc

SEQ ID NO: 2778407 - DNA, 25 bp, Homo sapien
gcatgtcggagtgttaacccgccag

SEQ ID NO: 2778408 - DNA, 25 bp, Homo sapien
ggaactgcgtcctcttacaggctct

SEQ ID NO: 2778409 - DNA, 25 bp, Homo sapien
gcttcctgtttataaatgcgctctg

SEQ ID NO: 2778410 - DNA, 25 bp, Homo sapien
gccacattcagcaattgctatcaga

SEQ ID NO: 2778411 - DNA, 25 bp, Homo sapien
ttttcagtgagtcagcagtttcttg

SEQ ID NO: 2778412 - DNA, 25 bp, Homo sapien
ttgctatcagatgctgaatgtctgt

SEQ ID NO: 2778413 - DNA, 25 bp, Homo sapien
cttgcatcacccattcatgcaatcg

SEQ ID NO: 2778414 - DNA, 25 bp, Homo sapien
tcacccattcatgcaatcgaatatc

SEQ ID NO: 2778415 - DNA, 25 bp, Homo sapien
tcatgcaatcgaatatccttcagtg

SEQ ID NO: 2778416 - DNA, 25 bp, Homo sapien
cattcatgcaatcgaatatccttca

SEQ ID NO: 2778417 - DNA, 25 bp, Homo sapien
ctggtctcttccggttagtcaggaa

SEQ ID NO: 2778418 - DNA, 25 bp, Homo sapien
tctcttccggttagtcaggaaaggc

SEQ ID NO: 2778419 - DNA, 25 bp, Homo sapien
tggtctcttccggttagtcaggaaa

SEQ ID NO: 2778420 - DNA, 25 bp, Homo sapien
gaagtactttgcttatggagggaca

SEQ ID NO: 2778421 - DNA, 25 bp, Homo sapien
gcctgcagggttggaagtactttgc

SEQ ID NO: 2778422 - DNA, 25 bp, Homo sapien
gcactggagaatgcgtgccagatct

SEQ ID NO: 2778423 - DNA, 25 bp, Homo sapien
tgtagacctacctggcaaagaccca

SEQ ID NO: 2778424 - DNA, 25 bp, Homo sapien
cctgtgctcattaggaggaactgct

SEQ ID NO: 2778425 - DNA, 25 bp, Homo sapien
tctatctagaagtagggccaccggg

SEQ ID NO: 2778426 - DNA, 25 bp, Homo sapien
caaaaagaaccttagcctagagagg

SEQ ID NO: 2778427 - DNA, 25 bp, Homo sapien
gaatgtagaccaaaatgagcccctc

SEQ ID NO: 2778428 - DNA, 25 bp, Homo sapien
tcagggttcaagctcagtaaggatg

SEQ ID NO: 2778429 - DNA, 25 bp, Homo sapien
caagctcagtaaggatgagtaggtt

SEQ ID NO: 2778430 - DNA, 25 bp, Homo sapien
gcagaagattctactcaactggtgc

SEQ ID NO: 2778431 - DNA, 25 bp, Homo sapien
caactggtgcttccataaggttaga

SEQ ID NO: 2778432 - DNA, 25 bp, Homo sapien
ctctggctggttgctttctttgtac

SEQ ID NO: 2778433 - DNA, 25 bp, Homo sapien
tactcatcccctagaaatccagcag

SEQ ID NO: 2778434 - DNA, 25 bp, Homo sapien
tgtgagctctaacatagttcctctg

SEQ ID NO: 2778435 - DNA, 25 bp, Homo sapien
ggatctaagatgactctatgccagc

SEQ ID NO: 2778436 - DNA, 25 bp, Homo sapien
tcttccatgttaacatcctgcaatg

SEQ ID NO: 2778437 - DNA, 25 bp, Homo sapien
tttcagcagactcttccatgttaac

SEQ ID NO: 2778438 - DNA, 25 bp, Homo sapien
ccatgttaacatcctgcaatgcttg

SEQ ID NO: 2778439 - DNA, 25 bp, Homo sapien
tatttcagcagactcttccatgtta

SEQ ID NO: 2778440 - DNA, 25 bp, Homo sapien
tcaacatgattccaaaagagagcct

SEQ ID NO: 2778441 - DNA, 25 bp, Homo sapien
gacccaggcgtaactgtgtgcctaa

SEQ ID NO: 2778442 - DNA, 25 bp, Homo sapien
tgtgcctaagggtcatggaagagtc

SEQ ID NO: 2778443 - DNA, 25 bp, Homo sapien
tggagacaagtgacccaggcgtaac

SEQ ID NO: 2778444 - DNA, 25 bp, Homo sapien
gagtcaataggcaatggatccccag

SEQ ID NO: 2778445 - DNA, 25 bp, Homo sapien
tgtacacatgtaccagggacacctg

SEQ ID NO: 2778446 - DNA, 25 bp, Homo sapien
cgcatatgtacacatgtaccaggga

SEQ ID NO: 2778447 - DNA, 25 bp, Homo sapien
tatgtacacatgtaccagggacacc

SEQ ID NO: 2778448 - DNA, 25 bp, Homo sapien
tacacatgtaccagggacacctggc

SEQ ID NO: 2778449 - DNA, 25 bp, Homo sapien
agagcaccaacattgaggagcctga

SEQ ID NO: 2778450 - DNA, 25 bp, Homo sapien
ctctaatcaaagcacccataagcat

SEQ ID NO: 2778451 - DNA, 25 bp, Homo sapien
tctgctctaatcaaagcacccataa

SEQ ID NO: 2778452 - DNA, 25 bp, Homo sapien
gaggagcctgaattcccctctgccc

SEQ ID NO: 2778453 - DNA, 25 bp, Homo sapien
agcacatttgtccactggctcggcc

SEQ ID NO: 2778454 - DNA, 25 bp, Homo sapien
agcagcacatttgtccactggctcg

SEQ ID NO: 2778455 - DNA, 25 bp, Homo sapien
gtttgtcggcagagtttgaccaggt

SEQ ID NO: 2778456 - DNA, 25 bp, Homo sapien
ttggtttgtcggcagagtttgacca

SEQ ID NO: 2778457 - DNA, 25 bp, Homo sapien
tctggggcttgataaggggttttgc

SEQ ID NO: 2778458 - DNA, 25 bp, Homo sapien
tccggattggtctggggcttgataa

SEQ ID NO: 2778459 - DNA, 25 bp, Homo sapien
tggggttgtgtgttccggattggtc

SEQ ID NO: 2778460 - DNA, 25 bp, Homo sapien
tgttccggattggtctggggcttga

SEQ ID NO: 2778461 - DNA, 25 bp, Homo sapien
cttctggctcaacaaccagacacac

SEQ ID NO: 2778462 - DNA, 25 bp, Homo sapien
actttcagcacgaagaccacggcag

SEQ ID NO: 2778463 - DNA, 25 bp, Homo sapien
accacggcagccaagggtatgatga

SEQ ID NO: 2778464 - DNA, 25 bp, Homo sapien
catcagagggtaactgctctctctg

SEQ ID NO: 2778465 - DNA, 25 bp, Homo sapien
actgcagccactttcagcacgaaga

SEQ ID NO: 2778466 - DNA, 25 bp, Homo sapien
ccctaaagtttctgtctgtgccaca

SEQ ID NO: 2778467 - DNA, 25 bp, Homo sapien
ctgtccccagggatctgctttctgc

SEQ ID NO: 2778468 - DNA, 25 bp, Homo sapien
tgtctgtgccacaagtcttgaggaa

SEQ ID NO: 2778469 - DNA, 25 bp, Homo sapien
caaaagctgactattagtggtggct

SEQ ID NO: 2778470 - DNA, 25 bp, Homo sapien
catatcactggctgtacatgatctg

SEQ ID NO: 2778471 - DNA, 25 bp, Homo sapien
ggtcaggcggcactatggtgaaggg

SEQ ID NO: 2778472 - DNA, 25 bp, Homo sapien
gtgaaggggagataacatatcactg

SEQ ID NO: 2778473 - DNA, 25 bp, Homo sapien
tgagagagaactggggttacaaggt

SEQ ID NO: 2778474 - DNA, 25 bp, Homo sapien
tcaatgcccctctgagtgaatacag

SEQ ID NO: 2778475 - DNA, 25 bp, Homo sapien
gtgaatacagtagcctcttctatca

SEQ ID NO: 2778476 - DNA, 25 bp, Homo sapien
tcatcccagccttctatgtacaggg

SEQ ID NO: 2778477 - DNA, 25 bp, Homo sapien
tatcactgtgctgtagaacccctct

SEQ ID NO: 2778478 - DNA, 25 bp, Homo sapien
tctgtcggcaattttcaggtttggc

SEQ ID NO: 2778479 - DNA, 25 bp, Homo sapien
ctgtcggcaattttcaggtttggca

SEQ ID NO: 2778480 - DNA, 25 bp, Homo sapien
cggcaattttcaggtttggcataac

SEQ ID NO: 2778481 - DNA, 25 bp, Homo sapien
gtcggcaattttcaggtttggcata

SEQ ID NO: 2778482 - DNA, 25 bp, Homo sapien
tcctgtatgaaccacacctgagagt

SEQ ID NO: 2778483 - DNA, 25 bp, Homo sapien
agtaggtcagtaaggttcacaatgc

SEQ ID NO: 2778484 - DNA, 25 bp, Homo sapien
tgtccaaagttggtgaccacctggt

SEQ ID NO: 2778485 - DNA, 25 bp, Homo sapien
cagaaggtaagccattgccaaaaag

SEQ ID NO: 2778486 - DNA, 25 bp, Homo sapien
ctgccctgcagaactttcaactgaa

SEQ ID NO: 2778487 - DNA, 25 bp, Homo sapien
aacctactgccctgcagaactttca

SEQ ID NO: 2778488 - DNA, 25 bp, Homo sapien
agccaacctactgccctgcagaact

SEQ ID NO: 2778489 - DNA, 25 bp, Homo sapien
gtcccacagccaacctactgccctg

SEQ ID NO: 2778490 - DNA, 25 bp, Homo sapien
ggaggcatctaacttaaatcggcca

SEQ ID NO: 2778491 - DNA, 25 bp, Homo sapien
gagattcaggcaatttaaataagag

SEQ ID NO: 2778492 - DNA, 25 bp, Homo sapien
caaatttcacaggacgagcactgag

SEQ ID NO: 2778493 - DNA, 25 bp, Homo sapien
aatcggccaattagaaccttgtctc

SEQ ID NO: 2778494 - DNA, 25 bp, Homo sapien
aaacagaaagaacaaattggcattt

SEQ ID NO: 2778495 - DNA, 25 bp, Homo sapien
gaaagaacaaattggcatttcatta

SEQ ID NO: 2778496 - DNA, 25 bp, Homo sapien
cagaaagaacaaattggcatttcat

SEQ ID NO: 2778497 - DNA, 25 bp, Homo sapien
agaacaaattggcatttcattagaa

SEQ ID NO: 2778498 - DNA, 25 bp, Homo sapien
ccttctcccagtacaactgtttaag

SEQ ID NO: 2778499 - DNA, 25 bp, Homo sapien
gggcacagtgaagtccccacttgga

SEQ ID NO: 2778500 - DNA, 25 bp, Homo sapien
caactgtttaagcttatgagataaa

SEQ ID NO: 2778501 - DNA, 25 bp, Homo sapien
taaagctaagttgtcatccttctcc

SEQ ID NO: 2778502 - DNA, 25 bp, Homo sapien
gcagacaactctgctgaccaggctc

SEQ ID NO: 2778503 - DNA, 25 bp, Homo sapien
taatacagaattcctcgggtcccag

SEQ ID NO: 2778504 - DNA, 25 bp, Homo sapien
tctacgtgctggtatagtatcaacc

SEQ ID NO: 2778505 - DNA, 25 bp, Homo sapien
aatgtaaaggaatcttccgcagtcc

SEQ ID NO: 2778506 - DNA, 25 bp, Homo sapien
tcttcaccaactccataacctgtct

SEQ ID NO: 2778507 - DNA, 25 bp, Homo sapien
ttaataagtgtcttcattaagcatt

SEQ ID NO: 2778508 - DNA, 25 bp, Homo sapien
tccataacctgtctgcaggtttctt

SEQ ID NO: 2778509 - DNA, 25 bp, Homo sapien
accaactccataacctgtctgcagg

SEQ ID NO: 2778510 - DNA, 25 bp, Homo sapien
caccaacctcctgagtctaggggaa

SEQ ID NO: 2778511 - DNA, 25 bp, Homo sapien
caacctcctgagtctaggggaactt

SEQ ID NO: 2778512 - DNA, 25 bp, Homo sapien
gagttcagtctcaccaacctcctga

SEQ ID NO: 2778513 - DNA, 25 bp, Homo sapien
tcagagttcagtctcaccaacctcc

SEQ ID NO: 2778514 - DNA, 25 bp, Homo sapien
catgagatgaaaggggcttcacaga

SEQ ID NO: 2778515 - DNA, 25 bp, Homo sapien
ttcccgcactgtccacatcattggt

SEQ ID NO: 2778516 - DNA, 25 bp, Homo sapien
catcattggtcacagctttcaggtc

SEQ ID NO: 2778517 - DNA, 25 bp, Homo sapien
aagttatagttctgtttcccgcact

SEQ ID NO: 2778518 - DNA, 25 bp, Homo sapien
aggatggcaggtctgaaattgactc

SEQ ID NO: 2778519 - DNA, 25 bp, Homo sapien
gatggcaggtctgaaattgactcac

SEQ ID NO: 2778520 - DNA, 25 bp, Homo sapien
ggatggcaggtctgaaattgactca

SEQ ID NO: 2778521 - DNA, 25 bp, Homo sapien
gttcttccagcccagaatcttctct

SEQ ID NO: 2778522 - DNA, 25 bp, Homo sapien
cttccagcccagaatcttctctcat

SEQ ID NO: 2778523 - DNA, 25 bp, Homo sapien
gtggttcttccagcccagaatcttc

SEQ ID NO: 2778524 - DNA, 25 bp, Homo sapien
ggttcttccagcccagaatcttctc

SEQ ID NO: 2778525 - DNA, 25 bp, Homo sapien
gagcctttgctaaaggttttagcat

SEQ ID NO: 2778526 - DNA, 25 bp, Homo sapien
ctgggtgtagtgacccagtaggcca

SEQ ID NO: 2778527 - DNA, 25 bp, Homo sapien
gcacagaggtcaccactggtcatct

SEQ ID NO: 2778528 - DNA, 25 bp, Homo sapien
aaggacttaagagccaaatgcccat

SEQ ID NO: 2778529 - DNA, 25 bp, Homo sapien
cctcattgatttgtgcctgggagaa

SEQ ID NO: 2778530 - DNA, 25 bp, Homo sapien
ctcctccaggcccagatgacaagta

SEQ ID NO: 2778531 - DNA, 25 bp, Homo sapien
tcctccaggcccagatgacaagtag

SEQ ID NO: 2778532 - DNA, 25 bp, Homo sapien
ttctcccacttaggctgcagacaga

SEQ ID NO: 2778533 - DNA, 25 bp, Homo sapien
cttcttctcccacttaggctgcaga

SEQ ID NO: 2778534 - DNA, 25 bp, Homo sapien
gaaattgtcatgaagcttctcgctg

SEQ ID NO: 2778535 - DNA, 25 bp, Homo sapien
caagctctgagctattcgcaaagat

SEQ ID NO: 2778536 - DNA, 25 bp, Homo sapien
ctgaaggatgttattggctgttacc

SEQ ID NO: 2778537 - DNA, 25 bp, Homo sapien
tattcgcaaagatggtgaaattgtc

SEQ ID NO: 2778538 - DNA, 25 bp, Homo sapien
gtgcaaactgtgatggatggtatag

SEQ ID NO: 2778539 - DNA, 25 bp, Homo sapien
gcaaactgtgatggatggtatagtt

SEQ ID NO: 2778540 - DNA, 25 bp, Homo sapien
caaactgtgatggatggtatagttt

SEQ ID NO: 2778541 - DNA, 25 bp, Homo sapien
tgcaaactgtgatggatggtatagt

SEQ ID NO: 2778542 - DNA, 25 bp, Homo sapien
tcagaggtgtttctgacaagagttg

SEQ ID NO: 2778543 - DNA, 25 bp, Homo sapien
gaggtgtttctgacaagagttgaaa

SEQ ID NO: 2778544 - DNA, 25 bp, Homo sapien
ttctgacaagagttgaaaagttcat

SEQ ID NO: 2778545 - DNA, 25 bp, Homo sapien
ggtgtttctgacaagagttgaaaag

SEQ ID NO: 2778546 - DNA, 25 bp, Homo sapien
ccactcgtacagaggtgctatgaga

SEQ ID NO: 2778547 - DNA, 25 bp, Homo sapien
cagaggtgctatgagaatttctttg

SEQ ID NO: 2778548 - DNA, 25 bp, Homo sapien
tgtgtccactcgtacagaggtgcta

SEQ ID NO: 2778549 - DNA, 25 bp, Homo sapien
gaaagttgtgtccactcgtacagag

SEQ ID NO: 2778550 - DNA, 25 bp, Homo sapien
tcaaaacttagtgaccccaggagtc

SEQ ID NO: 2778551 - DNA, 25 bp, Homo sapien
caaaacttagtgaccccaggagtca

SEQ ID NO: 2778552 - DNA, 25 bp, Homo sapien
aaaacttagtgaccccaggagtcat

SEQ ID NO: 2778553 - DNA, 25 bp, Homo sapien
taataagtagaacaaattcacagtc

SEQ ID NO: 2778554 - DNA, 25 bp, Homo sapien
taagtagaacaaattcacagtcaaa

SEQ ID NO: 2778555 - DNA, 25 bp, Homo sapien
cagtggtttaataagtagaacaaat

SEQ ID NO: 2778556 - DNA, 25 bp, Homo sapien
tggtttaataagtagaacaaattca

SEQ ID NO: 2778557 - DNA, 25 bp, Homo sapien
ctagaagttctctggagccaccttc

SEQ ID NO: 2778558 - DNA, 25 bp, Homo sapien
ttgaggtagtcttctagaagttctc

SEQ ID NO: 2778559 - DNA, 25 bp, Homo sapien
ttttgaggtagtcttctagaagttc

SEQ ID NO: 2778560 - DNA, 25 bp, Homo sapien
tctagaagttctctggagccacctt

SEQ ID NO: 2778561 - DNA, 25 bp, Homo sapien
cattcatcacatccagggaaaaaca

SEQ ID NO: 2778562 - DNA, 25 bp, Homo sapien
aaaatccacttaggcgtggtgtcca

SEQ ID NO: 2778563 - DNA, 25 bp, Homo sapien
caccaagatttcgactctgctcaca

SEQ ID NO: 2778564 - DNA, 25 bp, Homo sapien
catccagggaaaaacagtcctgttc

SEQ ID NO: 2778565 - DNA, 25 bp, Homo sapien
ccacatccggttgtgtgaaagtcaa

SEQ ID NO: 2778566 - DNA, 25 bp, Homo sapien
tggagttccgactatgaacactgcc

SEQ ID NO: 2778567 - DNA, 25 bp, Homo sapien
gaacactgcctctgaaggaatatta

SEQ ID NO: 2778568 - DNA, 25 bp, Homo sapien
aggaatattatcttcatgcccagcc

SEQ ID NO: 2778569 - DNA, 25 bp, Homo sapien
caactactagagtctcgatgtgcag

SEQ ID NO: 2778570 - DNA, 25 bp, Homo sapien
tatgtggctttaactttcactctca

SEQ ID NO: 2778571 - DNA, 25 bp, Homo sapien
cctgcgtgtgatgtgggtgaccttc

SEQ ID NO: 2778572 - DNA, 25 bp, Homo sapien
ctctcacctctaagtatgtggcttt

SEQ ID NO: 2778573 - DNA, 25 bp, Homo sapien
atcctgagaaaatgagtgggaaaca

SEQ ID NO: 2778574 - DNA, 25 bp, Homo sapien
tcctgagaaaatgagtgggaaacag

SEQ ID NO: 2778575 - DNA, 25 bp, Homo sapien
catcctgagaaaatgagtgggaaac

SEQ ID NO: 2778576 - DNA, 25 bp, Homo sapien
tctgcaccctgatgcctgaaaagca

SEQ ID NO: 2778577 - DNA, 25 bp, Homo sapien
gacataagggtctgacacactggcc

SEQ ID NO: 2778578 - DNA, 25 bp, Homo sapien
tgtcacaaacagcacgaagcgatcc

SEQ ID NO: 2778579 - DNA, 25 bp, Homo sapien
ccccgtgttgttggctatctggaca

SEQ ID NO: 2778580 - DNA, 25 bp, Homo sapien
gtcaataagcgctggccattccgca

SEQ ID NO: 2778581 - DNA, 25 bp, Homo sapien
tgccccgctgggtgtacagcaactg

SEQ ID NO: 2778582 - DNA, 25 bp, Homo sapien
cagagatctgccagggtcaataagc

SEQ ID NO: 2778583 - DNA, 25 bp, Homo sapien
cattccgcacaacatgaaagacctt

SEQ ID NO: 2778584 - DNA, 25 bp, Homo sapien
ctgtgagtcaagatccctgactgct

SEQ ID NO: 2778585 - DNA, 25 bp, Homo sapien
tttccatagatgaatgctgtgagtc

SEQ ID NO: 2778586 - DNA, 25 bp, Homo sapien
tgtgagtcaagatccctgactgctc

SEQ ID NO: 2778587 - DNA, 25 bp, Homo sapien
catagatgaatgctgtgagtcaaga

SEQ ID NO: 2778588 - DNA, 25 bp, Homo sapien
atcagacaagttaagcagtttcagc

SEQ ID NO: 2778589 - DNA, 25 bp, Homo sapien
tgaacatagtgatattgtcattact

SEQ ID NO: 2778590 - DNA, 25 bp, Homo sapien
gcttcccatgttgagggcccttgga

SEQ ID NO: 2778591 - DNA, 25 bp, Homo sapien
gatctgattgtccaaaatttgaaca

SEQ ID NO: 2778592 - DNA, 25 bp, Homo sapien
ggataaacttcagccattgtgttgt

SEQ ID NO: 2778593 - DNA, 25 bp, Homo sapien
tgagtctatgtattttgcaacaacc

SEQ ID NO: 2778594 - DNA, 25 bp, Homo sapien
tgttgtaactggaaatatcagctct

SEQ ID NO: 2778595 - DNA, 25 bp, Homo sapien
caatgtactatagtactggacccga

SEQ ID NO: 2778596 - DNA, 25 bp, Homo sapien
gtggatgagtgatgtcagagcgggt

SEQ ID NO: 2778597 - DNA, 25 bp, Homo sapien
aggtggatgagtgatgtcagagcgg

SEQ ID NO: 2778598 - DNA, 25 bp, Homo sapien
ggatgagtgatgtcagagcgggtct

SEQ ID NO: 2778599 - DNA, 25 bp, Homo sapien
gaggtggatgagtgatgtcagagcg

SEQ ID NO: 2778600 - DNA, 25 bp, Homo sapien
agttctaacggccactgcaaagtcc

SEQ ID NO: 2778601 - DNA, 25 bp, Homo sapien
gagagtttcgatgacccctgtgcac

SEQ ID NO: 2778602 - DNA, 25 bp, Homo sapien
gattaatggcattcccgggatcact

SEQ ID NO: 2778603 - DNA, 25 bp, Homo sapien
ccatgtaatcagaggagtgccaccc

SEQ ID NO: 2778604 - DNA, 25 bp, Homo sapien
caaatagaagaagcaagtttccttc

SEQ ID NO: 2778605 - DNA, 25 bp, Homo sapien
agttctcaaatagaagaagcaagtt

SEQ ID NO: 2778606 - DNA, 25 bp, Homo sapien
tacttggggtcagttgtttcttaga

SEQ ID NO: 2778607 - DNA, 25 bp, Homo sapien
taccttaaggtatgggggatcattg

SEQ ID NO: 2778608 - DNA, 25 bp, Homo sapien
gtggaacacgttcttgcagatataa

SEQ ID NO: 2778609 - DNA, 25 bp, Homo sapien
gaacccatgaataggccttccctct

SEQ ID NO: 2778610 - DNA, 25 bp, Homo sapien
tggtacatttaattgaaggaaccca

SEQ ID NO: 2778611 - DNA, 25 bp, Homo sapien
aatagtatttgagaatgatggatac

SEQ ID NO: 2778612 - DNA, 25 bp, Homo sapien
aagctgtctccattacttgctcagg

SEQ ID NO: 2778613 - DNA, 25 bp, Homo sapien
tctttgaaaacaagggcatccctta

SEQ ID NO: 2778614 - DNA, 25 bp, Homo sapien
ggcacagaggcaagttctaacctct

SEQ ID NO: 2778615 - DNA, 25 bp, Homo sapien
cacatttggttatcaagacctccca

SEQ ID NO: 2778616 - DNA, 25 bp, Homo sapien
gaggttcctcgagcaaatttcccag

SEQ ID NO: 2778617 - DNA, 25 bp, Homo sapien
atctactgttaggtccagatactcc

SEQ ID NO: 2778618 - DNA, 25 bp, Homo sapien
tgaattgaataacatgccacttgtt

SEQ ID NO: 2778619 - DNA, 25 bp, Homo sapien
tacttttatgccttcctacataagc

SEQ ID NO: 2778620 - DNA, 25 bp, Homo sapien
tttatgccttcctacataagccttc

SEQ ID NO: 2778621 - DNA, 25 bp, Homo sapien
cacttgtacccaaatttactctcac

SEQ ID NO: 2778622 - DNA, 25 bp, Homo sapien
ggtcatccatatgaagtctctgctc

SEQ ID NO: 2778623 - DNA, 25 bp, Homo sapien
gccagttgtctcataacgtttgtca

SEQ ID NO: 2778624 - DNA, 25 bp, Homo sapien
taacatagcacagttccaccaaatg

SEQ ID NO: 2778625 - DNA, 25 bp, Homo sapien
gaactccacatagctttcaccataa

SEQ ID NO: 2778626 - DNA, 25 bp, Homo sapien
ttaattgaagagatagctcagagga

SEQ ID NO: 2778627 - DNA, 25 bp, Homo sapien
gctgcaagcaaaagtaatccctgtg

SEQ ID NO: 2778628 - DNA, 25 bp, Homo sapien
tctatgatgttgaactccacatagc

SEQ ID NO: 2778629 - DNA, 25 bp, Homo sapien
acgtgcggcagagtaactcgccggg

SEQ ID NO: 2778630 - DNA, 25 bp, Homo sapien
tatggtaacccgagccctgcgggtc

SEQ ID NO: 2778631 - DNA, 25 bp, Homo sapien
gccaaagaagattccagcggtaagt

SEQ ID NO: 2778632 - DNA, 25 bp, Homo sapien
gattccagcggtaagtttatggtaa

SEQ ID NO: 2778633 - DNA, 25 bp, Homo sapien
agatggaagtttttcgcggcggcgc

SEQ ID NO: 2778634 - DNA, 25 bp, Homo sapien
ttctgctcgtaggaatacagtcagg

SEQ ID NO: 2778635 - DNA, 25 bp, Homo sapien
cagccgcaccgaccgggagatggaa

SEQ ID NO: 2778636 - DNA, 25 bp, Homo sapien
cagtcaggaggccgactttaaaact

SEQ ID NO: 2778637 - DNA, 25 bp, Homo sapien
aggcagccagtaggacgaggcggcg

SEQ ID NO: 2778638 - DNA, 25 bp, Homo sapien
ggcaggcagccagtaggacgaggcg

SEQ ID NO: 2778639 - DNA, 25 bp, Homo sapien
caggcaggcagccagtaggacgagg

SEQ ID NO: 2778640 - DNA, 25 bp, Homo sapien
ggcagccagtaggacgaggcggcgg

SEQ ID NO: 2778641 - DNA, 25 bp, Homo sapien
ccccgccctccgctggtagcatcaa

SEQ ID NO: 2778642 - DNA, 25 bp, Homo sapien
gccccttcagcgcaaggagcgggct

SEQ ID NO: 2778643 - DNA, 25 bp, Homo sapien
tgcatcctgaagctgttgcgcccct

SEQ ID NO: 2778644 - DNA, 25 bp, Homo sapien
gccatttgcatcctgaagctgttgc

SEQ ID NO: 2778645 - DNA, 25 bp, Homo sapien
gtggatagtgctccaccccttcttg

SEQ ID NO: 2778646 - DNA, 25 bp, Homo sapien
catctcgttgaggattgccagcaaa

SEQ ID NO: 2778647 - DNA, 25 bp, Homo sapien
aacaccctcatcatgtggatagtgc

SEQ ID NO: 2778648 - DNA, 25 bp, Homo sapien
tcttccaagggtcgtagggattgtg

SEQ ID NO: 2778649 - DNA, 25 bp, Homo sapien
tccatccactagaacacttcaaaga

SEQ ID NO: 2778650 - DNA, 25 bp, Homo sapien
tcactcctactgaactggggaatgt

SEQ ID NO: 2778651 - DNA, 25 bp, Homo sapien
tgtgggaagctctgaatccatccac

SEQ ID NO: 2778652 - DNA, 25 bp, Homo sapien
aatgtgaggaggtctcatgaatggt

SEQ ID NO: 2778653 - DNA, 25 bp, Homo sapien
caaatgccaagtctgtgcaagccac

SEQ ID NO: 2778654 - DNA, 25 bp, Homo sapien
tactgttcgtcaaatgccaagtctg

SEQ ID NO: 2778655 - DNA, 25 bp, Homo sapien
tatttatagtcgttaagcttcggaa

SEQ ID NO: 2778656 - DNA, 25 bp, Homo sapien
tgtgcaagccactttatatttatag

SEQ ID NO: 2778657 - DNA, 25 bp, Homo sapien
gaaaataattgtccactcctcagtg

SEQ ID NO: 2778658 - DNA, 25 bp, Homo sapien
tgtggcactccaaatacagcttcag

SEQ ID NO: 2778659 - DNA, 25 bp, Homo sapien
caactcgcgagattccactgcaaat

SEQ ID NO: 2778660 - DNA, 25 bp, Homo sapien
agactcagtgttcagccaactcgcg

SEQ ID NO: 2778661 - DNA, 25 bp, Homo sapien
ctcaacagccctttcatgcactgac

SEQ ID NO: 2778662 - DNA, 25 bp, Homo sapien
cctcaacagccctttcatgcactga

SEQ ID NO: 2778663 - DNA, 25 bp, Homo sapien
tcctcaacagccctttcatgcactg

SEQ ID NO: 2778664 - DNA, 25 bp, Homo sapien
ctgccatcgtctgcatccacagaag

SEQ ID NO: 2778665 - DNA, 25 bp, Homo sapien
caattgtgagatgacctttgatgat

SEQ ID NO: 2778666 - DNA, 25 bp, Homo sapien
tcttcactgccatcgtctgcatcca

SEQ ID NO: 2778667 - DNA, 25 bp, Homo sapien
cattaagtttccactgtctgcagtg

SEQ ID NO: 2778668 - DNA, 25 bp, Homo sapien
taagttaaaatcattggctacagct

SEQ ID NO: 2778669 - DNA, 25 bp, Homo sapien
cctaagttaaaatcattggctacag

SEQ ID NO: 2778670 - DNA, 25 bp, Homo sapien
aagttaaaatcattggctacagctg

SEQ ID NO: 2778671 - DNA, 25 bp, Homo sapien
ctcctaagttaaaatcattggctac

SEQ ID NO: 2778672 - DNA, 25 bp, Homo sapien
taataattcaaggatataaggattc

SEQ ID NO: 2778673 - DNA, 25 bp, Homo sapien
gaaagagatctgaggcatcccgcat

SEQ ID NO: 2778674 - DNA, 25 bp, Homo sapien
tcaggaagcaaagccgaaagagatc

SEQ ID NO: 2778675 - DNA, 25 bp, Homo sapien
aattcaaggatataaggattcagga

SEQ ID NO: 2778676 - DNA, 25 bp, Homo sapien
cttcttttacataagtgtcatactc

SEQ ID NO: 2778677 - DNA, 25 bp, Homo sapien
taagcagacaattggttatcattca

SEQ ID NO: 2778678 - DNA, 25 bp, Homo sapien
cagttttcccacatgcttcagatag

SEQ ID NO: 2778679 - DNA, 25 bp, Homo sapien
tctggcaaggccaaacactgtgaaa

SEQ ID NO: 2778680 - DNA, 25 bp, Homo sapien
acctcacgtatgtgttttcatcagg

SEQ ID NO: 2778681 - DNA, 25 bp, Homo sapien
cactttttcatccaagtcaggtttg

SEQ ID NO: 2778682 - DNA, 25 bp, Homo sapien
ccagcgccggcaatcagcatgctca

SEQ ID NO: 2778683 - DNA, 25 bp, Homo sapien
tttgcatcagatgtagtgggggaaa

SEQ ID NO: 2778684 - DNA, 25 bp, Homo sapien
agtgggggaaatcctccagcgccgg

SEQ ID NO: 2778685 - DNA, 25 bp, Homo sapien
gcttttgccacagctgatttgacca

SEQ ID NO: 2778686 - DNA, 25 bp, Homo sapien
tgagtgaaaccaagctagctgcttt

SEQ ID NO: 2778687 - DNA, 25 bp, Homo sapien
gatttgaccagaggcttatgctcaa

SEQ ID NO: 2778688 - DNA, 25 bp, Homo sapien
taatgtttacgactgccactgagtg

SEQ ID NO: 2778689 - DNA, 25 bp, Homo sapien
ctaatattagaattaggagtcaatg

SEQ ID NO: 2778690 - DNA, 25 bp, Homo sapien
taatttaccctaacatttgatccca

SEQ ID NO: 2778691 - DNA, 25 bp, Homo sapien
aaagtctctgaatctaatattagaa

SEQ ID NO: 2778692 - DNA, 25 bp, Homo sapien
aagataactgctttctttgctgtgg

SEQ ID NO: 2778693 - DNA, 25 bp, Homo sapien
cgtccagatctgatcaaatctaatg

SEQ ID NO: 2778694 - DNA, 25 bp, Homo sapien
gcttcttcgtccagatctgatcaaa

SEQ ID NO: 2778695 - DNA, 25 bp, Homo sapien
aagacgactttatgcttcttcgtcc

SEQ ID NO: 2778696 - DNA, 25 bp, Homo sapien
gactttatgcttcttcgtccagatc

SEQ ID NO: 2778697 - DNA, 25 bp, Homo sapien
tatatccaatggagaagaagggctt

SEQ ID NO: 2778698 - DNA, 25 bp, Homo sapien
ccaagcacaactatatccaatggag

SEQ ID NO: 2778699 - DNA, 25 bp, Homo sapien
atttgcaggattccacaccaccaca

SEQ ID NO: 2778700 - DNA, 25 bp, Homo sapien
ttctttgtgatcatttgcaggattc

SEQ ID NO: 2778701 - DNA, 25 bp, Homo sapien
gcacaaccgtattcatcctttttag

SEQ ID NO: 2778702 - DNA, 25 bp, Homo sapien
tagctttggacagccctccagtgct

SEQ ID NO: 2778703 - DNA, 25 bp, Homo sapien
ctttttagctttggacagccctcca

SEQ ID NO: 2778704 - DNA, 25 bp, Homo sapien
tggtgctgtccacattagcatgttc

SEQ ID NO: 2778705 - DNA, 25 bp, Homo sapien
gactttagatttgtaagctccacac

SEQ ID NO: 2778706 - DNA, 25 bp, Homo sapien
ctcaacacaaacctgctcgatgctg

SEQ ID NO: 2778707 - DNA, 25 bp, Homo sapien
acagcctcaacacaaacctgctcga

SEQ ID NO: 2778708 - DNA, 25 bp, Homo sapien
agcctcaacacaaacctgctcgatg

SEQ ID NO: 2778709 - DNA, 25 bp, Homo sapien
aagaacatctagtacaacagtcctg

SEQ ID NO: 2778710 - DNA, 25 bp, Homo sapien
cacacacattcacaactctgttggc

SEQ ID NO: 2778711 - DNA, 25 bp, Homo sapien
aacaaaacctaacagcttatgcagc

SEQ ID NO: 2778712 - DNA, 25 bp, Homo sapien
ctctgttggccaacttcaagaataa

SEQ ID NO: 2778713 - DNA, 25 bp, Homo sapien
aattgaaaattcacctaagtcacag

SEQ ID NO: 2778714 - DNA, 25 bp, Homo sapien
taaagttgacatgttttctgctgaa

SEQ ID NO: 2778715 - DNA, 25 bp, Homo sapien
gaaaattcacctaagtcacagcact

SEQ ID NO: 2778716 - DNA, 25 bp, Homo sapien
tcacagcacttatgtttaaataagg

SEQ ID NO: 2778717 - DNA, 25 bp, Homo sapien
ttcttatgcttattaaggttattat

SEQ ID NO: 2778718 - DNA, 25 bp, Homo sapien
tttcttatgcttattaaggttatta

SEQ ID NO: 2778719 - DNA, 25 bp, Homo sapien
tcttatgcttattaaggttattatt

SEQ ID NO: 2778720 - DNA, 25 bp, Homo sapien
cttatgcttattaaggttattatta

SEQ ID NO: 2778721 - DNA, 25 bp, Homo sapien
tctctgaggtggcatacgttaaagc

SEQ ID NO: 2778722 - DNA, 25 bp, Homo sapien
ggtaacccgggaactacatcagcag

SEQ ID NO: 2778723 - DNA, 25 bp, Homo sapien
aaagaactaatttgactcactgcgg

SEQ ID NO: 2778724 - DNA, 25 bp, Homo sapien
ttctagagaagctacctaccaagga

SEQ ID NO: 2778725 - DNA, 25 bp, Homo sapien
ccatttcctcattacgggagacccg

SEQ ID NO: 2778726 - DNA, 25 bp, Homo sapien
gggagacccggcagcattctctttc

SEQ ID NO: 2778727 - DNA, 25 bp, Homo sapien
ttcctcattacgggagacccggcag

SEQ ID NO: 2778728 - DNA, 25 bp, Homo sapien
gagacccggcagcattctctttcac

SEQ ID NO: 2778729 - DNA, 25 bp, Homo sapien
tctgtgcaatggaggcctaagcttt

SEQ ID NO: 2778730 - DNA, 25 bp, Homo sapien
gatactagccatctctgtgactata

SEQ ID NO: 2778731 - DNA, 25 bp, Homo sapien
ctgtactggccagctattcaacaaa

SEQ ID NO: 2778732 - DNA, 25 bp, Homo sapien
catagcaccatctcataggttgtgt

SEQ ID NO: 2778733 - DNA, 25 bp, Homo sapien
ggaattattacacttaaatgctttc

SEQ ID NO: 2778734 - DNA, 25 bp, Homo sapien
taaacctcaaaattattgatgggct

SEQ ID NO: 2778735 - DNA, 25 bp, Homo sapien
tggtaatcaatcatatttatcctcc

SEQ ID NO: 2778736 - DNA, 25 bp, Homo sapien
tgactcttaaagcttatccaataaa

SEQ ID NO: 2778737 - DNA, 25 bp, Homo sapien
cagttgcaggtctctctgcaatcca

SEQ ID NO: 2778738 - DNA, 25 bp, Homo sapien
gacttggttactgaatattggaaga

SEQ ID NO: 2778739 - DNA, 25 bp, Homo sapien
tctgcaatccatcccgaaggtgccg

SEQ ID NO: 2778740 - DNA, 25 bp, Homo sapien
catcccgaaggtgccgtagggacag

SEQ ID NO: 2778741 - DNA, 25 bp, Homo sapien
catccatgcctgagactgtgcggta

SEQ ID NO: 2778742 - DNA, 25 bp, Homo sapien
cataattattgctccaggcggccac

SEQ ID NO: 2778743 - DNA, 25 bp, Homo sapien
tgtcacagtgttgagggcagtccac

SEQ ID NO: 2778744 - DNA, 25 bp, Homo sapien
gatcctccccattagaaggctgaca

SEQ ID NO: 2778745 - DNA, 25 bp, Homo sapien
gatgaaggctggattaacacgctgc

SEQ ID NO: 2778746 - DNA, 25 bp, Homo sapien
tccggctcggctctccagtcgtggt

SEQ ID NO: 2778747 - DNA, 25 bp, Homo sapien
gccgtccaaactggtagctgagcct

SEQ ID NO: 2778748 - DNA, 25 bp, Homo sapien
agttttatacactgggttgcccgca

SEQ ID NO: 2778749 - DNA, 25 bp, Homo sapien
ggatagaaccacacgaggcctttgg

SEQ ID NO: 2778750 - DNA, 25 bp, Homo sapien
gaaaggcagtccaagggatagaacc

SEQ ID NO: 2778751 - DNA, 25 bp, Homo sapien
tggcacagctgttctataagggtct

SEQ ID NO: 2778752 - DNA, 25 bp, Homo sapien
aacaaagaggttcggagactggcac

SEQ ID NO: 2778753 - DNA, 25 bp, Homo sapien
attctgtttaacatgtagaaagctt

SEQ ID NO: 2778754 - DNA, 25 bp, Homo sapien
tctgcgttggttttgttcattctgt

SEQ ID NO: 2778755 - DNA, 25 bp, Homo sapien
gctctgcgttggttttgttcattct

SEQ ID NO: 2778756 - DNA, 25 bp, Homo sapien
tgctctgcgttggttttgttcattc

SEQ ID NO: 2778757 - DNA, 25 bp, Homo sapien
aaaaagtgctaaaagcaattagccg

SEQ ID NO: 2778758 - DNA, 25 bp, Homo sapien
aaaagtgctaaaagcaattagccgg

SEQ ID NO: 2778759 - DNA, 25 bp, Homo sapien
aaagtgctaaaagcaattagccgga

SEQ ID NO: 2778760 - DNA, 25 bp, Homo sapien
aagtgctaaaagcaattagccggat

SEQ ID NO: 2778761 - DNA, 25 bp, Homo sapien
aatccagggttttcacaggcaacac

SEQ ID NO: 2778762 - DNA, 25 bp, Homo sapien
tgatgtccaaatgtcccacactgaa

SEQ ID NO: 2778763 - DNA, 25 bp, Homo sapien
tctccgtaagaatgtggtaggcacc

SEQ ID NO: 2778764 - DNA, 25 bp, Homo sapien
gtgaagtctatctcccctgctagga

SEQ ID NO: 2778765 - DNA, 25 bp, Homo sapien
agaaggagttttccaagcataaggc

SEQ ID NO: 2778766 - DNA, 25 bp, Homo sapien
gaacagcatgaacaaagccacagag

SEQ ID NO: 2778767 - DNA, 25 bp, Homo sapien
tgagctagtccccaaaggtacaagg

SEQ ID NO: 2778768 - DNA, 25 bp, Homo sapien
gaatcaatgacatgcactgcacact

SEQ ID NO: 2778769 - DNA, 25 bp, Homo sapien
gttccagaaacagtctgccgttatg

SEQ ID NO: 2778770 - DNA, 25 bp, Homo sapien
acagtctgccgttatgtttatttac

SEQ ID NO: 2778771 - DNA, 25 bp, Homo sapien
aagttccagaaacagtctgccgtta

SEQ ID NO: 2778772 - DNA, 25 bp, Homo sapien
cagaaacagtctgccgttatgttta

SEQ ID NO: 2778773 - DNA, 25 bp, Homo sapien
ttgaatgggcggcacaggtcgcaga

SEQ ID NO: 2778774 - DNA, 25 bp, Homo sapien
ggcacaggtcgcagagaacctgata

SEQ ID NO: 2778775 - DNA, 25 bp, Homo sapien
gataatgtagcaatagagaacttct

SEQ ID NO: 2778776 - DNA, 25 bp, Homo sapien
atgaatgataatgtagcaatagaga

SEQ ID NO: 2778777 - DNA, 25 bp, Homo sapien
ccccacgtcaatcataacaaagagg

SEQ ID NO: 2778778 - DNA, 25 bp, Homo sapien
cgtcaatcataacaaagaggaaatc

SEQ ID NO: 2778779 - DNA, 25 bp, Homo sapien
cacgtcaatcataacaaagaggaaa

SEQ ID NO: 2778780 - DNA, 25 bp, Homo sapien
atcccccacgtcaatcataacaaag

SEQ ID NO: 2778781 - DNA, 25 bp, Homo sapien
tctaccctgacaaccagttcatcat

SEQ ID NO: 2778782 - DNA, 25 bp, Homo sapien
tctcagtttgggctggtacaaaccc

SEQ ID NO: 2778783 - DNA, 25 bp, Homo sapien
cctcatgacgcaattgcacatgtgt

SEQ ID NO: 2778784 - DNA, 25 bp, Homo sapien
tggtctcaaggctagcaccctcatg

SEQ ID NO: 2778785 - DNA, 25 bp, Homo sapien
tggtacaaacccatcaggtcctgta

SEQ ID NO: 2778786 - DNA, 25 bp, Homo sapien
caagcatataagtgtttcagggaac

SEQ ID NO: 2778787 - DNA, 25 bp, Homo sapien
tcagggaacataattgtagatgaga

SEQ ID NO: 2778788 - DNA, 25 bp, Homo sapien
gactgcttcgagctactctcccttg

SEQ ID NO: 2778789 - DNA, 25 bp, Homo sapien
actgagtactaaactcatcatgaga

SEQ ID NO: 2778790 - DNA, 25 bp, Homo sapien
agcagatctctccaggcctttacaa

SEQ ID NO: 2778791 - DNA, 25 bp, Homo sapien
cagatctctccaggcctttacaagt

SEQ ID NO: 2778792 - DNA, 25 bp, Homo sapien
caagcagatctctccaggcctttac

SEQ ID NO: 2778793 - DNA, 25 bp, Homo sapien
ctgggactccctttccgttgcttct

SEQ ID NO: 2778794 - DNA, 25 bp, Homo sapien
tgaccagggatagttaactctccag

SEQ ID NO: 2778795 - DNA, 25 bp, Homo sapien
gctgttagagctgggaaactccttc

SEQ ID NO: 2778796 - DNA, 25 bp, Homo sapien
tatggccaatagtgtgatgctgcga

SEQ ID NO: 2778797 - DNA, 25 bp, Homo sapien
gatgctgcgagggaatccacaaaga

SEQ ID NO: 2778798 - DNA, 25 bp, Homo sapien
gaaagagtttccctatccatgctat

SEQ ID NO: 2778799 - DNA, 25 bp, Homo sapien
atctggccgccgacgtgaaaacctt

SEQ ID NO: 2778800 - DNA, 25 bp, Homo sapien
tcaataaccagggaagagccaacaa

SEQ ID NO: 2778801 - DNA, 25 bp, Homo sapien
cagccacacgcgaaggtgaccttaa

SEQ ID NO: 2778802 - DNA, 25 bp, Homo sapien
caaaagggaactatcctgaggcaat

SEQ ID NO: 2778803 - DNA, 25 bp, Homo sapien
tacagggtgtatttatggcagagcc

SEQ ID NO: 2778804 - DNA, 25 bp, Homo sapien
tgcaacacatccaaggttacagggt

SEQ ID NO: 2778805 - DNA, 25 bp, Homo sapien
aagaagcggatctctgggaagcaga

SEQ ID NO: 2778806 - DNA, 25 bp, Homo sapien
cccgggtctggtctggactcaaaga

SEQ ID NO: 2778807 - DNA, 25 bp, Homo sapien
gtctggactcaaagacaggtgcagc

SEQ ID NO: 2778808 - DNA, 25 bp, Homo sapien
atacagaggccgtcccatcagctgc

SEQ ID NO: 2778809 - DNA, 25 bp, Homo sapien
agcagaaaacacccgggtctggtct

SEQ ID NO: 2778810 - DNA, 25 bp, Homo sapien
tgctgctcaggactgtaggcaatgt

SEQ ID NO: 2778811 - DNA, 25 bp, Homo sapien
caggactgtaggcaatgtaagttgg

SEQ ID NO: 2778812 - DNA, 25 bp, Homo sapien
taagttggggccatgagtcccatcc

SEQ ID NO: 2778813 - DNA, 25 bp, Homo sapien
ggccatgagtcccatcccaggataa

SEQ ID NO: 2778814 - DNA, 25 bp, Homo sapien
cagttgcaatctcctttgtcttagg

SEQ ID NO: 2778815 - DNA, 25 bp, Homo sapien
tcttaggtagccagattaaggaaca

SEQ ID NO: 2778816 - DNA, 25 bp, Homo sapien
gggagtaccttgaccagttgcaatc

SEQ ID NO: 2778817 - DNA, 25 bp, Homo sapien
tcattcttgggagtaccttgaccag

SEQ ID NO: 2778818 - DNA, 25 bp, Homo sapien
caagattccagaagatcaaaatgaa

SEQ ID NO: 2778819 - DNA, 25 bp, Homo sapien
acaagattccagaagatcaaaatga

SEQ ID NO: 2778820 - DNA, 25 bp, Homo sapien
aagagagcttgttgggggcataggc

SEQ ID NO: 2778821 - DNA, 25 bp, Homo sapien
gcataggctctgttgtaaactattt

SEQ ID NO: 2778822 - DNA, 25 bp, Homo sapien
tatccaagatgtgtaagcgtccatc

SEQ ID NO: 2778823 - DNA, 25 bp, Homo sapien
tgtaagcgtccatccttcattcctc

SEQ ID NO: 2778824 - DNA, 25 bp, Homo sapien
ttatatccaagatgtgtaagcgtcc

SEQ ID NO: 2778825 - DNA, 25 bp, Homo sapien
caagatgtgtaagcgtccatccttc

SEQ ID NO: 2778826 - DNA, 25 bp, Homo sapien
tactgggaatttggaccgatcatca

SEQ ID NO: 2778827 - DNA, 25 bp, Homo sapien
caagtcatgaatactgggaatttgg

SEQ ID NO: 2778828 - DNA, 25 bp, Homo sapien
tcaagtcatgaatactgggaatttg

SEQ ID NO: 2778829 - DNA, 25 bp, Homo sapien
aatttggaccgatcatcattctcaa

SEQ ID NO: 2778830 - DNA, 25 bp, Homo sapien
tgactgccgtagactgggttatgac

SEQ ID NO: 2778831 - DNA, 25 bp, Homo sapien
cttgactgccgtagactgggttatg

SEQ ID NO: 2778832 - DNA, 25 bp, Homo sapien
gggttatgactttcagcggttggcc

SEQ ID NO: 2778833 - DNA, 25 bp, Homo sapien
ctgccgtagactgggttatgacttt

SEQ ID NO: 2778834 - DNA, 25 bp, Homo sapien
cacacagcttgcttgtggcgaagtg

SEQ ID NO: 2778835 - DNA, 25 bp, Homo sapien
ccaacatgatgctgggctacccgaa

SEQ ID NO: 2778836 - DNA, 25 bp, Homo sapien
tccatcactgcagccgctggaaagc

SEQ ID NO: 2778837 - DNA, 25 bp, Homo sapien
tgccatccggtgaccacttcagagc

SEQ ID NO: 2778838 - DNA, 25 bp, Homo sapien
ctgctgaggataaagtgattccagc

SEQ ID NO: 2778839 - DNA, 25 bp, Homo sapien
gcatatttctcagccgctttttagt

SEQ ID NO: 2778840 - DNA, 25 bp, Homo sapien
tcagagccccaactactgacaaatg

SEQ ID NO: 2778841 - DNA, 25 bp, Homo sapien
gctttttagttaccacatcccataa

SEQ ID NO: 2778842 - DNA, 25 bp, Homo sapien
cattcattatcattgcagagatgag

SEQ ID NO: 2778843 - DNA, 25 bp, Homo sapien
gacaactttggtgtaagaagaaatc

SEQ ID NO: 2778844 - DNA, 25 bp, Homo sapien
gacatagacttcacagcattcatta

SEQ ID NO: 2778845 - DNA, 25 bp, Homo sapien
agactcccttcctgcgagctacaga

SEQ ID NO: 2778846 - DNA, 25 bp, Homo sapien
tgtggccctcctaagtcatttgcac

SEQ ID NO: 2778847 - DNA, 25 bp, Homo sapien
catttgcacatgagtgatattgttt

SEQ ID NO: 2778848 - DNA, 25 bp, Homo sapien
ggccctcctaagtcatttgcacatg

SEQ ID NO: 2778849 - DNA, 25 bp, Homo sapien
tcatttgcacatgagtgatattgtt

SEQ ID NO: 2778850 - DNA, 25 bp, Homo sapien
gttccctcttttatccaggacacag

SEQ ID NO: 2778851 - DNA, 25 bp, Homo sapien
tatagttacaagtgagacttaagtc

SEQ ID NO: 2778852 - DNA, 25 bp, Homo sapien
caatcccattgtggttctccccatt

SEQ ID NO: 2778853 - DNA, 25 bp, Homo sapien
caggacacagaagagatatagttac

SEQ ID NO: 2778854 - DNA, 25 bp, Homo sapien
gatggaaggattcatctctgactcc

SEQ ID NO: 2778855 - DNA, 25 bp, Homo sapien
ggaatcgtttatatcaccagaactt

SEQ ID NO: 2778856 - DNA, 25 bp, Homo sapien
agtagtcatttcgaagaccagtaat

SEQ ID NO: 2778857 - DNA, 25 bp, Homo sapien
gaccagtaatatgaatcttcacctc

SEQ ID NO: 2778858 - DNA, 25 bp, Homo sapien
ctctgtatttagaagttaaaagtgt

SEQ ID NO: 2778859 - DNA, 25 bp, Homo sapien
tctgtatttagaagttaaaagtgtg

SEQ ID NO: 2778860 - DNA, 25 bp, Homo sapien
tttgtccccgtgatccactgatgag

SEQ ID NO: 2778861 - DNA, 25 bp, Homo sapien
gctttcggcaaagaggtacacctga

SEQ ID NO: 2778862 - DNA, 25 bp, Homo sapien
taaaagaatcaacaacagagccttg

SEQ ID NO: 2778863 - DNA, 25 bp, Homo sapien
ttgcatagagtattcagagggcctc

SEQ ID NO: 2778864 - DNA, 25 bp, Homo sapien
tcctgttcaaatcgtttcttcatgc

SEQ ID NO: 2778865 - DNA, 25 bp, Homo sapien
tcaaatcgtttcttcatgctgccac

SEQ ID NO: 2778866 - DNA, 25 bp, Homo sapien
atcctcctgttcaaatcgtttcttc

SEQ ID NO: 2778867 - DNA, 25 bp, Homo sapien
tgttcaaatcgtttcttcatgctgc

SEQ ID NO: 2778868 - DNA, 25 bp, Homo sapien
gagactagaatttatagccagccaa

SEQ ID NO: 2778869 - DNA, 25 bp, Homo sapien
ccagaaagagcacaacatagctgcc

SEQ ID NO: 2778870 - DNA, 25 bp, Homo sapien
aagacaactgtgcaactggccaaga

SEQ ID NO: 2778871 - DNA, 25 bp, Homo sapien
ttctcaacagcaacagtggatacta

SEQ ID NO: 2778872 - DNA, 25 bp, Homo sapien
ttggcttgatagtgaataatagttg

SEQ ID NO: 2778873 - DNA, 25 bp, Homo sapien
tactcagctaaacaattatactaga

SEQ ID NO: 2778874 - DNA, 25 bp, Homo sapien
ctaaggcaacttttaatactcagct

SEQ ID NO: 2778875 - DNA, 25 bp, Homo sapien
tacggaataaaacattggagcattt

SEQ ID NO: 2778876 - DNA, 25 bp, Homo sapien
gcatttttccattagcctgctgaac

SEQ ID NO: 2778877 - DNA, 25 bp, Homo sapien
ttagcctgctgaaccacgttctggg

SEQ ID NO: 2778878 - DNA, 25 bp, Homo sapien
tccaaacacattcggattgctcaca

SEQ ID NO: 2778879 - DNA, 25 bp, Homo sapien
tgaaccacgttctgggttacaaaga

SEQ ID NO: 2778880 - DNA, 25 bp, Homo sapien
aatggagagcagagttacttgtttc

SEQ ID NO: 2778881 - DNA, 25 bp, Homo sapien
tccagtctctgtccattgcatgagg

SEQ ID NO: 2778882 - DNA, 25 bp, Homo sapien
tctctgtccattgcatgaggtgcct

SEQ ID NO: 2778883 - DNA, 25 bp, Homo sapien
ctgcccttttgaggcaacactttct

SEQ ID NO: 2778884 - DNA, 25 bp, Homo sapien
tctcaggcggtgtcttcagcactga

SEQ ID NO: 2778885 - DNA, 25 bp, Homo sapien
gcactgatccggaagcttctgggag

SEQ ID NO: 2778886 - DNA, 25 bp, Homo sapien
cttccccaaaggaatcagaggacag

SEQ ID NO: 2778887 - DNA, 25 bp, Homo sapien
tagagtcaaggtctctttctcaggc

SEQ ID NO: 2778888 - DNA, 25 bp, Homo sapien
ccaccttgtggtaatggggctactc

SEQ ID NO: 2778889 - DNA, 25 bp, Homo sapien
acctctgcggacagcctcttcgcaa

SEQ ID NO: 2778890 - DNA, 25 bp, Homo sapien
cggacagcctcttcgcaaagttgct

SEQ ID NO: 2778891 - DNA, 25 bp, Homo sapien
ccttgtggtaatggggctactcgca

SEQ ID NO: 2778892 - DNA, 25 bp, Homo sapien
acgtagcattaactgaatcgagtac

SEQ ID NO: 2778893 - DNA, 25 bp, Homo sapien
aatacgtagcattaactgaatcgag

SEQ ID NO: 2778894 - DNA, 25 bp, Homo sapien
tacgtagcattaactgaatcgagta

SEQ ID NO: 2778895 - DNA, 25 bp, Homo sapien
cttaaagtcagaatacgtagcatta

SEQ ID NO: 2778896 - DNA, 25 bp, Homo sapien
aacagctgtaagtccactggcctca

SEQ ID NO: 2778897 - DNA, 25 bp, Homo sapien
cagctgtaagtccactggcctcagt

SEQ ID NO: 2778898 - DNA, 25 bp, Homo sapien
aaacagctgtaagtccactggcctc

SEQ ID NO: 2778899 - DNA, 25 bp, Homo sapien
aaaacagctgtaagtccactggcct

SEQ ID NO: 2778900 - DNA, 25 bp, Homo sapien
tgaggccacagctgttgtaaagtgt

SEQ ID NO: 2778901 - DNA, 25 bp, Homo sapien
ttctttcgcagaagacaggagccaa

SEQ ID NO: 2778902 - DNA, 25 bp, Homo sapien
ctgaggccacagctgttgtaaagtg

SEQ ID NO: 2778903 - DNA, 25 bp, Homo sapien
aagagaacttctttcgcagaagaca

SEQ ID NO: 2778904 - DNA, 25 bp, Homo sapien
tgcccgcagggtctacagagcatct

SEQ ID NO: 2778905 - DNA, 25 bp, Homo sapien
ctttatctctatcgccagcagctgc

SEQ ID NO: 2778906 - DNA, 25 bp, Homo sapien
cattttcaggtaaacatcatccttt

SEQ ID NO: 2778907 - DNA, 25 bp, Homo sapien
gctgcccgcagggtctacagagcat

SEQ ID NO: 2778908 - DNA, 25 bp, Homo sapien
ccaggatgaggatgttacccaaagc

SEQ ID NO: 2778909 - DNA, 25 bp, Homo sapien
caagagcactgtgtatgactgaaat

SEQ ID NO: 2778910 - DNA, 25 bp, Homo sapien
tggtaatgaatgttcccaggatgag

SEQ ID NO: 2778911 - DNA, 25 bp, Homo sapien
cactagaccactctttggattcaag

SEQ ID NO: 2778912 - DNA, 25 bp, Homo sapien
gagtattcagctgtcgttcttgtga

SEQ ID NO: 2778913 - DNA, 25 bp, Homo sapien
ctaactcctgatcatcttacagcag

SEQ ID NO: 2778914 - DNA, 25 bp, Homo sapien
caggcatcacatgaaagagtattca

SEQ ID NO: 2778915 - DNA, 25 bp, Homo sapien
tctttggtgcgtagagaagaatact

SEQ ID NO: 2778916 - DNA, 25 bp, Homo sapien
gactggctgcaaatgtccgcacaag

SEQ ID NO: 2778917 - DNA, 25 bp, Homo sapien
gcaccaccaaagtcagttccactga

SEQ ID NO: 2778918 - DNA, 25 bp, Homo sapien
tcgtgggtcaaaatgcctccaaggt

SEQ ID NO: 2778919 - DNA, 25 bp, Homo sapien
catatctatgctacttcgtgggtca

SEQ ID NO: 2778920 - DNA, 25 bp, Homo sapien
ctttggagagcacacgcatgatact

SEQ ID NO: 2778921 - DNA, 25 bp, Homo sapien
ttggagagcacacgcatgatacttt

SEQ ID NO: 2778922 - DNA, 25 bp, Homo sapien
tctttggagagcacacgcatgatac

SEQ ID NO: 2778923 - DNA, 25 bp, Homo sapien
agtctttggagagcacacgcatgat

SEQ ID NO: 2778924 - DNA, 25 bp, Homo sapien
cttccgtgcggaccctccgaggcgc

SEQ ID NO: 2778925 - DNA, 25 bp, Homo sapien
atctcctcttccgtgcggaccctcc

SEQ ID NO: 2778926 - DNA, 25 bp, Homo sapien
ctcttccgtgcggaccctccgaggc

SEQ ID NO: 2778927 - DNA, 25 bp, Homo sapien
ctcctcttccgtgcggaccctccga

SEQ ID NO: 2778928 - DNA, 25 bp, Homo sapien
acgcctaatcgtcaaacccctggag

SEQ ID NO: 2778929 - DNA, 25 bp, Homo sapien
tggcctctctgctcgactgcctctg

SEQ ID NO: 2778930 - DNA, 25 bp, Homo sapien
acttcgccctgcctggcgtttggcc

SEQ ID NO: 2778931 - DNA, 25 bp, Homo sapien
tcttcccaggtctaagtcagtcttg

SEQ ID NO: 2778932 - DNA, 25 bp, Homo sapien
taaaacttaacttcagaatgatgga

SEQ ID NO: 2778933 - DNA, 25 bp, Homo sapien
gaaacagaaactcgccacttggcaa

SEQ ID NO: 2778934 - DNA, 25 bp, Homo sapien
tcccctagtgtgaagtagagaaagt

SEQ ID NO: 2778935 - DNA, 25 bp, Homo sapien
cattatagccattaattccacagca

SEQ ID NO: 2778936 - DNA, 25 bp, Homo sapien
gagatcagatgagattgggcacatt

SEQ ID NO: 2778937 - DNA, 25 bp, Homo sapien
cacattcagggtggtatggctgtag

SEQ ID NO: 2778938 - DNA, 25 bp, Homo sapien
cattcagggtggtatggctgtagac

SEQ ID NO: 2778939 - DNA, 25 bp, Homo sapien
tcagatgagattgggcacattcagg

SEQ ID NO: 2778940 - DNA, 25 bp, Homo sapien
tgaatgatgcttacttgcaaagttt

SEQ ID NO: 2778941 - DNA, 25 bp, Homo sapien
accctgaatgatgcttacttgcaaa

SEQ ID NO: 2778942 - DNA, 25 bp, Homo sapien
aatgatgcttacttgcaaagttttc

SEQ ID NO: 2778943 - DNA, 25 bp, Homo sapien
cctgaatgatgcttacttgcaaagt

SEQ ID NO: 2778944 - DNA, 25 bp, Homo sapien
cactcttagctgtgtagtggctcag

SEQ ID NO: 2778945 - DNA, 25 bp, Homo sapien
gcagttcaagttaccaatggctaac

SEQ ID NO: 2778946 - DNA, 25 bp, Homo sapien
cattagtccacaagatgacgcccca

SEQ ID NO: 2778947 - DNA, 25 bp, Homo sapien
ctcatcactggttagagtccaagga

SEQ ID NO: 2778948 - DNA, 25 bp, Homo sapien
tatcccgaactgtggtaactttata

SEQ ID NO: 2778949 - DNA, 25 bp, Homo sapien
cagatagcagtacatacatgacaaa

SEQ ID NO: 2778950 - DNA, 25 bp, Homo sapien
gcaggttctgccacgctgccaagtc

SEQ ID NO: 2778951 - DNA, 25 bp, Homo sapien
taagaatactcattaaggagagagg

SEQ ID NO: 2778952 - DNA, 25 bp, Homo sapien
tacaatgcatcggtatcaagatgct

SEQ ID NO: 2778953 - DNA, 25 bp, Homo sapien
aagtgtttcagggtggcattcaacc

SEQ ID NO: 2778954 - DNA, 25 bp, Homo sapien
ggcacttcagtggaaacacagggca

SEQ ID NO: 2778955 - DNA, 25 bp, Homo sapien
tctgggcctagagtccttaagtgac

SEQ ID NO: 2778956 - DNA, 25 bp, Homo sapien
cctggtgtcagtattcgcgggctct

SEQ ID NO: 2778957 - DNA, 25 bp, Homo sapien
gcgctcggaaatctccctcaggatg

SEQ ID NO: 2778958 - DNA, 25 bp, Homo sapien
tcactgtggctcaggttcaacgcgc

SEQ ID NO: 2778959 - DNA, 25 bp, Homo sapien
tctgaagggcttcatcgcagcgctc

SEQ ID NO: 2778960 - DNA, 25 bp, Homo sapien
ggttcggctggcgagttccttcagc

SEQ ID NO: 2778961 - DNA, 25 bp, Homo sapien
tgtttctgggtcaatgtcacgtgca

SEQ ID NO: 2778962 - DNA, 25 bp, Homo sapien
ccaggtgccgggttcggctggcgag

SEQ ID NO: 2778963 - DNA, 25 bp, Homo sapien
tgcacgttccgctccttgagcgagg

SEQ ID NO: 2778964 - DNA, 25 bp, Homo sapien
ctggtcgccagaccagtgtccctac

SEQ ID NO: 2778965 - DNA, 25 bp, Homo sapien
attcctggtcgccagaccagtgtcc

SEQ ID NO: 2778966 - DNA, 25 bp, Homo sapien
aggattcctggtcgccagaccagtg

SEQ ID NO: 2778967 - DNA, 25 bp, Homo sapien
ccaggattcctggtcgccagaccag

SEQ ID NO: 2778968 - DNA, 25 bp, Homo sapien
ttgattattctcaacaagcgcgtct

SEQ ID NO: 2778969 - DNA, 25 bp, Homo sapien
tattctcaacaagcgcgtctcccaa

SEQ ID NO: 2778970 - DNA, 25 bp, Homo sapien
gattattctcaacaagcgcgtctcc

SEQ ID NO: 2778971 - DNA, 25 bp, Homo sapien
ttattctcaacaagcgcgtctccca

SEQ ID NO: 2778972 - DNA, 25 bp, Homo sapien
cttccagtattgctcaggcgggggc

SEQ ID NO: 2778973 - DNA, 25 bp, Homo sapien
gcgggggcacgtctggagggcgcag

SEQ ID NO: 2778974 - DNA, 25 bp, Homo sapien
caggcgggggcacgtctggagggcg

SEQ ID NO: 2778975 - DNA, 25 bp, Homo sapien
tccagtattgctcaggcgggggcac

SEQ ID NO: 2778976 - DNA, 25 bp, Homo sapien
aatggtgatatgtcgcaaggagaga

SEQ ID NO: 2778977 - DNA, 25 bp, Homo sapien
tctccgctggccagggtaggcgaca

SEQ ID NO: 2778978 - DNA, 25 bp, Homo sapien
cagggtaggcgacatcatagaggat

SEQ ID NO: 2778979 - DNA, 25 bp, Homo sapien
cagggcccgaatggtgatatgtcgc

SEQ ID NO: 2778980 - DNA, 25 bp, Homo sapien
agttgctggagagtcgttgacagtt

SEQ ID NO: 2778981 - DNA, 25 bp, Homo sapien
atccagcggttcgacttctccacgg

SEQ ID NO: 2778982 - DNA, 25 bp, Homo sapien
gctgggtttaccaccttcacgacca

SEQ ID NO: 2778983 - DNA, 25 bp, Homo sapien
cgatcccagataaagcgctatgtag

SEQ ID NO: 2778984 - DNA, 25 bp, Homo sapien
tctgcttccgtttggtgggaatggt

SEQ ID NO: 2778985 - DNA, 25 bp, Homo sapien
gaaatcttgcagattgaagtctgct

SEQ ID NO: 2778986 - DNA, 25 bp, Homo sapien
tccaccgtgtctctgaaatcttgca

SEQ ID NO: 2778987 - DNA, 25 bp, Homo sapien
gaaatgagatcatccaccgtgtctc

SEQ ID NO: 2778988 - DNA, 25 bp, Homo sapien
gggctcggcggcggtctgctcgcac

SEQ ID NO: 2778989 - DNA, 25 bp, Homo sapien
tcggcggcggtctgctcgcacttac

SEQ ID NO: 2778990 - DNA, 25 bp, Homo sapien
ctcggcggcggtctgctcgcactta

SEQ ID NO: 2778991 - DNA, 25 bp, Homo sapien
gctcggcggcggtctgctcgcactt

SEQ ID NO: 2778992 - DNA, 25 bp, Homo sapien
aattcaagccccatccgagacaggg

SEQ ID NO: 2778993 - DNA, 25 bp, Homo sapien
tgagagcacgtcttgaacaccggat

SEQ ID NO: 2778994 - DNA, 25 bp, Homo sapien
gcagtaatttgaggccgcgtttccc

SEQ ID NO: 2778995 - DNA, 25 bp, Homo sapien
tcttttctcgtacagccggtgcacc

SEQ ID NO: 2778996 - DNA, 25 bp, Homo sapien
tttcgaagggctgaacaggactttg

SEQ ID NO: 2778997 - DNA, 25 bp, Homo sapien
ggactttgaaaaagcgcccaattgc

SEQ ID NO: 2778998 - DNA, 25 bp, Homo sapien
gactttgaaaaagcgcccaattgct

SEQ ID NO: 2778999 - DNA, 25 bp, Homo sapien
agcttttcgaagggctgaacaggac

SEQ ID NO: 2779000 - DNA, 25 bp, Homo sapien
acttccagagtcctttgtccttcct

SEQ ID NO: 2779001 - DNA, 25 bp, Homo sapien
acattttctgcaagattacttccag

SEQ ID NO: 2779002 - DNA, 25 bp, Homo sapien
tttctgcaagattacttccagagtc

SEQ ID NO: 2779003 - DNA, 25 bp, Homo sapien
cattttctgcaagattacttccaga

SEQ ID NO: 2779004 - DNA, 25 bp, Homo sapien
agctgagtgtgcctgcgctcccgac

SEQ ID NO: 2779005 - DNA, 25 bp, Homo sapien
aaaccacgaggctccacgagaaggg

SEQ ID NO: 2779006 - DNA, 25 bp, Homo sapien
tttgggttgcgtgaaaccacgaggc

SEQ ID NO: 2779007 - DNA, 25 bp, Homo sapien
ggttgcgtgaaaccacgaggctcca

SEQ ID NO: 2779008 - DNA, 25 bp, Homo sapien
cagcgaggtcctgcaggtctatggt

SEQ ID NO: 2779009 - DNA, 25 bp, Homo sapien
cgtcggacccgagtagcgaagagca

SEQ ID NO: 2779010 - DNA, 25 bp, Homo sapien
aggtcaccaccaggcggcgcgtcgg

SEQ ID NO: 2779011 - DNA, 25 bp, Homo sapien
agcgaagagcagtcagcgaggtcct

SEQ ID NO: 2779012 - DNA, 25 bp, Homo sapien
ggaagaacttccgcggaggagcgaa

SEQ ID NO: 2779013 - DNA, 25 bp, Homo sapien
tccgggggatcctcgtacaccgaca

SEQ ID NO: 2779014 - DNA, 25 bp, Homo sapien
tgtgcatccggggaagaacttccgc

SEQ ID NO: 2779015 - DNA, 25 bp, Homo sapien
cgacaccgggctcccgcctgtgcat

SEQ ID NO: 2779016 - DNA, 25 bp, Homo sapien
ctggccgggcacacaaacgttgaac

SEQ ID NO: 2779017 - DNA, 25 bp, Homo sapien
cgggcacacaaacgttgaacgcggg

SEQ ID NO: 2779018 - DNA, 25 bp, Homo sapien
cacaaacgttgaacgcgggtcagcc

SEQ ID NO: 2779019 - DNA, 25 bp, Homo sapien
cacacaaacgttgaacgcgggtcag

SEQ ID NO: 2779020 - DNA, 25 bp, Homo sapien
agatgctgtcgaaggcccgacggcc

SEQ ID NO: 2779021 - DNA, 25 bp, Homo sapien
cggcttccccggcttgcagagcagc

SEQ ID NO: 2779022 - DNA, 25 bp, Homo sapien
agtgccagcattctgttggggcaga

SEQ ID NO: 2779023 - DNA, 25 bp, Homo sapien
gggcagatgctgtcgaaggcccgac

SEQ ID NO: 2779024 - DNA, 25 bp, Homo sapien
cgcgtgaccgagaaggagccgaggg

SEQ ID NO: 2779025 - DNA, 25 bp, Homo sapien
cgggtgccgactgctcggaggcggc

SEQ ID NO: 2779026 - DNA, 25 bp, Homo sapien
ggctggggcagcgatccacaccctg

SEQ ID NO: 2779027 - DNA, 25 bp, Homo sapien
gggcaggcgcgtgaccgagaaggag

SEQ ID NO: 2779028 - DNA, 25 bp, Homo sapien
cgtgagcacagcctttaaaagaccg

SEQ ID NO: 2779029 - DNA, 25 bp, Homo sapien
cactcttctcggcagtggcgcgtga

SEQ ID NO: 2779030 - DNA, 25 bp, Homo sapien
tagaataccggcagggatgccctgg

SEQ ID NO: 2779031 - DNA, 25 bp, Homo sapien
gaaataaacgtggagtgacacccgc

SEQ ID NO: 2779032 - DNA, 25 bp, Homo sapien
tttggctggtctcttcgcagtcgta

SEQ ID NO: 2779033 - DNA, 25 bp, Homo sapien
gtcgtagttgccattcccaagccaa

SEQ ID NO: 2779034 - DNA, 25 bp, Homo sapien
acgccacagtggaaagtaccgaatc

SEQ ID NO: 2779035 - DNA, 25 bp, Homo sapien
gcggcccatcgccacgtttggctgg

SEQ ID NO: 2779036 - DNA, 25 bp, Homo sapien
ggagtcaaaactccggcaagcctct

SEQ ID NO: 2779037 - DNA, 25 bp, Homo sapien
aacgattcctgtaacgtgactgagg

SEQ ID NO: 2779038 - DNA, 25 bp, Homo sapien
tgactgaggtacagactgcgctggc

SEQ ID NO: 2779039 - DNA, 25 bp, Homo sapien
tgcatcagattcgtaacagtgagac

SEQ ID NO: 2779040 - DNA, 25 bp, Homo sapien
ggagcactgagtaaataactgccac

SEQ ID NO: 2779041 - DNA, 25 bp, Homo sapien
aatggggagcactgagtaaataact

SEQ ID NO: 2779042 - DNA, 25 bp, Homo sapien
tggggagcactgagtaaataactgc

SEQ ID NO: 2779043 - DNA, 25 bp, Homo sapien
ctgaatggggagcactgagtaaata

SEQ ID NO: 2779044 - DNA, 25 bp, Homo sapien
ctcaatatagccattatgactatta

SEQ ID NO: 2779045 - DNA, 25 bp, Homo sapien
gctcaatatagccattatgactatt

SEQ ID NO: 2779046 - DNA, 25 bp, Homo sapien
tagcatgaacagttggaccacgtga

SEQ ID NO: 2779047 - DNA, 25 bp, Homo sapien
gaacacgggatttctcatgcctgga

SEQ ID NO: 2779048 - DNA, 25 bp, Homo sapien
cacgtgattgcagggtaaatgggct

SEQ ID NO: 2779049 - DNA, 25 bp, Homo sapien
taaatgggctcaacctgcaatggct

SEQ ID NO: 2779050 - DNA, 25 bp, Homo sapien
tggaattcagtatccaggacctcac

SEQ ID NO: 2779051 - DNA, 25 bp, Homo sapien
gcctgactccactaatctctggaat

SEQ ID NO: 2779052 - DNA, 25 bp, Homo sapien
caattacagagtggacccagaggga

SEQ ID NO: 2779053 - DNA, 25 bp, Homo sapien
tagaggttctattcgagggtcacag

SEQ ID NO: 2779054 - DNA, 25 bp, Homo sapien
tatttacaacctgcagctgaccaag

SEQ ID NO: 2779055 - DNA, 25 bp, Homo sapien
tattggtgaaagactcagcttcctc

SEQ ID NO: 2779056 - DNA, 25 bp, Homo sapien
tcctcatgtgctcgctgcaaaataa

SEQ ID NO: 2779057 - DNA, 25 bp, Homo sapien
gatgctagtatcgtacactatttac

SEQ ID NO: 2779058 - DNA, 25 bp, Homo sapien
agaggtccagcagccgggccaggga

SEQ ID NO: 2779059 - DNA, 25 bp, Homo sapien
acgggagaggtccagcagccgggcc

SEQ ID NO: 2779060 - DNA, 25 bp, Homo sapien
ggagaggtccagcagccgggccagg

SEQ ID NO: 2779061 - DNA, 25 bp, Homo sapien
ctacgggagaggtccagcagccggg

SEQ ID NO: 2779062 - DNA, 25 bp, Homo sapien
ttatttcgagctcgggggcaggctg

SEQ ID NO: 2779063 - DNA, 25 bp, Homo sapien
tatttcgagctcgggggcaggctgc

SEQ ID NO: 2779064 - DNA, 25 bp, Homo sapien
atttcgagctcgggggcaggctgca

SEQ ID NO: 2779065 - DNA, 25 bp, Homo sapien
tttcgagctcgggggcaggctgcac

SEQ ID NO: 2779066 - DNA, 25 bp, Homo sapien
gatctgaacgggcagcatgtgagtc

SEQ ID NO: 2779067 - DNA, 25 bp, Homo sapien
gagtcaaggaagtactgtttatggc

SEQ ID NO: 2779068 - DNA, 25 bp, Homo sapien
aacgggcagcatgtgagtcaaggaa

SEQ ID NO: 2779069 - DNA, 25 bp, Homo sapien
caaggaagtactgtttatggccacc

SEQ ID NO: 2779070 - DNA, 25 bp, Homo sapien
ggcttgcgcttccagagcttcggag

SEQ ID NO: 2779071 - DNA, 25 bp, Homo sapien
tggtgaaggcatagtcggccagact

SEQ ID NO: 2779072 - DNA, 25 bp, Homo sapien
agcacgatgcactcgaggttgcaga

SEQ ID NO: 2779073 - DNA, 25 bp, Homo sapien
gaagaagctaatggtgggcgcaccc

SEQ ID NO: 2779074 - DNA, 25 bp, Homo sapien
tgcttcacgcgcggcgggtgcacct

SEQ ID NO: 2779075 - DNA, 25 bp, Homo sapien
gaaggcgccgcagcagagggccaga

SEQ ID NO: 2779076 - DNA, 25 bp, Homo sapien
ccgggagaaggcgccgcagcagagg

SEQ ID NO: 2779077 - DNA, 25 bp, Homo sapien
gctgcttcacgcgcggcgggtgcac

SEQ ID NO: 2779078 - DNA, 25 bp, Homo sapien
gtcaggcacagcgactcgaaggaga

SEQ ID NO: 2779079 - DNA, 25 bp, Homo sapien
gaggaagcggtccagagtgttcacc

SEQ ID NO: 2779080 - DNA, 25 bp, Homo sapien
aattggcggtgcaccgggatcagcc

SEQ ID NO: 2779081 - DNA, 25 bp, Homo sapien
tgagcagcttacagcgggattccgc

SEQ ID NO: 2779082 - DNA, 25 bp, Homo sapien
ccaggagaggggcaagaagatttca

SEQ ID NO: 2779083 - DNA, 25 bp, Homo sapien
tgtgcagagagcgtcgtacacgtta

SEQ ID NO: 2779084 - DNA, 25 bp, Homo sapien
cgtgctgagccggaacaccgggatt

SEQ ID NO: 2779085 - DNA, 25 bp, Homo sapien
actgggaaacgcgtgggccgtgctg

SEQ ID NO: 2779086 - DNA, 25 bp, Homo sapien
gaaacgaattcctctctaccgtgcc

SEQ ID NO: 2779087 - DNA, 25 bp, Homo sapien
gggcaagtccctcaagccgtctacg

SEQ ID NO: 2779088 - DNA, 25 bp, Homo sapien
acggccccttgtgcttcgactcggg

SEQ ID NO: 2779089 - DNA, 25 bp, Homo sapien
tgcccgagttcggtaggagtccaga

SEQ ID NO: 2779090 - DNA, 25 bp, Homo sapien
cgcgaaggttctggtcgttgtcccg

SEQ ID NO: 2779091 - DNA, 25 bp, Homo sapien
tcgaacaggtcgcaaatgccggagt

SEQ ID NO: 2779092 - DNA, 25 bp, Homo sapien
ggtctgtagatctagctgcgccacg

SEQ ID NO: 2779093 - DNA, 25 bp, Homo sapien
tctctgcgccgtctgagccggagct

SEQ ID NO: 2779094 - DNA, 25 bp, Homo sapien
aggctggcgcggtcctaagtacccg

SEQ ID NO: 2779095 - DNA, 25 bp, Homo sapien
ctgcggcgggcagcaaacgcgcact

SEQ ID NO: 2779096 - DNA, 25 bp, Homo sapien
cgcactcgaaagtgcgaaggaggcc

SEQ ID NO: 2779097 - DNA, 25 bp, Homo sapien
gtggccgctttactaccttcaacgc

SEQ ID NO: 2779098 - DNA, 25 bp, Homo sapien
tctgcaggccgtgaagactttctcc

SEQ ID NO: 2779099 - DNA, 25 bp, Homo sapien
gctttcgcgctcaaaacaaaacgga

SEQ ID NO: 2779100 - DNA, 25 bp, Homo sapien
ggctagaattctgtcgacacgggaa

SEQ ID NO: 2779101 - DNA, 25 bp, Homo sapien
gatcaacctcagtcggcaagcaagt

SEQ ID NO: 2779102 - DNA, 25 bp, Homo sapien
ggttcaggggcagggatatcacagc

SEQ ID NO: 2779103 - DNA, 25 bp, Homo sapien
cagttcaatcgcgtatataaaaagg

SEQ ID NO: 2779104 - DNA, 25 bp, Homo sapien
caggggcagggatatcacagcggta

SEQ ID NO: 2779105 - DNA, 25 bp, Homo sapien
agttcaatcgcgtatataaaaaggg

SEQ ID NO: 2779106 - DNA, 25 bp, Homo sapien
ttgcccttattaacacaacgatgag

SEQ ID NO: 2779107 - DNA, 25 bp, Homo sapien
tgataggggatgaggcagctacaca

SEQ ID NO: 2779108 - DNA, 25 bp, Homo sapien
cagggaatcacaacattaagctaca

SEQ ID NO: 2779109 - DNA, 25 bp, Homo sapien
tctgcagacatcaaggactgatagg

SEQ ID NO: 2779110 - DNA, 25 bp, Homo sapien
ccaccacctttaagttaatggctag

SEQ ID NO: 2779111 - DNA, 25 bp, Homo sapien
tgtgatgacccattttcagataatt

SEQ ID NO: 2779112 - DNA, 25 bp, Homo sapien
taatggctagtaccaacattttaag

SEQ ID NO: 2779113 - DNA, 25 bp, Homo sapien
tattgtaaatgtagtggcaaataca

SEQ ID NO: 2779114 - DNA, 25 bp, Homo sapien
tgtttttatcaattccgtaatgatc

SEQ ID NO: 2779115 - DNA, 25 bp, Homo sapien
tatcaattccgtaatgatctgcaga

SEQ ID NO: 2779116 - DNA, 25 bp, Homo sapien
tttatcaattccgtaatgatctgca

SEQ ID NO: 2779117 - DNA, 25 bp, Homo sapien
tcaattccgtaatgatctgcagaat

SEQ ID NO: 2779118 - DNA, 25 bp, Homo sapien
ggttatgccatacctagtttgacaa

SEQ ID NO: 2779119 - DNA, 25 bp, Homo sapien
gattttattgctgtaggttatgcca

SEQ ID NO: 2779120 - DNA, 25 bp, Homo sapien
tccaaggtatgcacatgtaaataag

SEQ ID NO: 2779121 - DNA, 25 bp, Homo sapien
taacatttgtataggctaaacccca

SEQ ID NO: 2779122 - DNA, 25 bp, Homo sapien
tacctggctccaagaaccatgattt

SEQ ID NO: 2779123 - DNA, 25 bp, Homo sapien
ggcaaagggaaacactgatatcatt

SEQ ID NO: 2779124 - DNA, 25 bp, Homo sapien
tacacccaacttggtaagttctgct

SEQ ID NO: 2779125 - DNA, 25 bp, Homo sapien
gagagcactaacatacttcttcctt

SEQ ID NO: 2779126 - DNA, 25 bp, Homo sapien
gaaacacatggtggaaaaaccatgc

SEQ ID NO: 2779127 - DNA, 25 bp, Homo sapien
caaactgcaaactcagatgtccatt

SEQ ID NO: 2779128 - DNA, 25 bp, Homo sapien
gagaaatagctctgcatttgaaaga

SEQ ID NO: 2779129 - DNA, 25 bp, Homo sapien
gactggagtgcggatactcgcctca

SEQ ID NO: 2779130 - DNA, 25 bp, Homo sapien
gaaaatgacagctatctttacaggg

SEQ ID NO: 2779131 - DNA, 25 bp, Homo sapien
aaatgacagctatctttacaggggc

SEQ ID NO: 2779132 - DNA, 25 bp, Homo sapien
aaaatgacagctatctttacagggg

SEQ ID NO: 2779133 - DNA, 25 bp, Homo sapien
gtcaatccagggcagtgtgaatgtg

SEQ ID NO: 2779134 - DNA, 25 bp, Homo sapien
cgttctcggtgctgaacttctatat

SEQ ID NO: 2779135 - DNA, 25 bp, Homo sapien
tcaaatacactctggcataccttat

SEQ ID NO: 2779136 - DNA, 25 bp, Homo sapien
tccagccatcaatagaaagaagacg

SEQ ID NO: 2779137 - DNA, 25 bp, Homo sapien
ttctctcaaatacactctggcatac

SEQ ID NO: 2779138 - DNA, 25 bp, Homo sapien
tattctacattttaagctcagagta

SEQ ID NO: 2779139 - DNA, 25 bp, Homo sapien
taagctcagagtatttgtaaagcta

SEQ ID NO: 2779140 - DNA, 25 bp, Homo sapien
aaaaatagaaggaggtcatttatct

SEQ ID NO: 2779141 - DNA, 25 bp, Homo sapien
cattttaagctcagagtatttgtaa

SEQ ID NO: 2779142 - DNA, 25 bp, Homo sapien
tgtgctttgccttgggccgtctcca

SEQ ID NO: 2779143 - DNA, 25 bp, Homo sapien
caaatctcgatttactgaggatggg

SEQ ID NO: 2779144 - DNA, 25 bp, Homo sapien
cagccaccagtacagctttaagaag

SEQ ID NO: 2779145 - DNA, 25 bp, Homo sapien
gccgtctccacaatgcaagccaatt

SEQ ID NO: 2779146 - DNA, 25 bp, Homo sapien
tcccaagatagtgtttatgaaattg

SEQ ID NO: 2779147 - DNA, 25 bp, Homo sapien
tacatagtggtacaattgtaactca

SEQ ID NO: 2779148 - DNA, 25 bp, Homo sapien
aaaactgagacttctaattcccaag

SEQ ID NO: 2779149 - DNA, 25 bp, Homo sapien
tctcactctgtacatagtggtacaa

SEQ ID NO: 2779150 - DNA, 25 bp, Homo sapien
tacgtacaagttacttgctggaaga

SEQ ID NO: 2779151 - DNA, 25 bp, Homo sapien
gactctgagtgagagatccatatta

SEQ ID NO: 2779152 - DNA, 25 bp, Homo sapien
tatgtgacaagtattttcctaggca

SEQ ID NO: 2779153 - DNA, 25 bp, Homo sapien
ttatagttacccatgactctgagtg

SEQ ID NO: 2779154 - DNA, 25 bp, Homo sapien
taacagtgatgttctattaagaaag

SEQ ID NO: 2779155 - DNA, 25 bp, Homo sapien
aagttcctccggcagtatgtgattt

SEQ ID NO: 2779156 - DNA, 25 bp, Homo sapien
tgtgatttcagaacgataacctcct

SEQ ID NO: 2779157 - DNA, 25 bp, Homo sapien
gataacctccttcttgtcgtgcttt

SEQ ID NO: 2779158 - DNA, 25 bp, Homo sapien
gggatcttgcttgtagcagctacca

SEQ ID NO: 2779159 - DNA, 25 bp, Homo sapien
tcagagctagtaaccaaagtaagat

SEQ ID NO: 2779160 - DNA, 25 bp, Homo sapien
gcagctaccaattgtatataagaat

SEQ ID NO: 2779161 - DNA, 25 bp, Homo sapien
gcttactgataacagccagattatg

SEQ ID NO: 2779162 - DNA, 25 bp, Homo sapien
ccaattggtgtggtaaaaggagact

SEQ ID NO: 2779163 - DNA, 25 bp, Homo sapien
ggtgtggtaaaaggagacttctctg

SEQ ID NO: 2779164 - DNA, 25 bp, Homo sapien
tggtgtggtaaaaggagacttctct

SEQ ID NO: 2779165 - DNA, 25 bp, Homo sapien
attggtgtggtaaaaggagacttct

SEQ ID NO: 2779166 - DNA, 25 bp, Homo sapien
ggaaatcttcaggagaaccaagatt

SEQ ID NO: 2779167 - DNA, 25 bp, Homo sapien
tttcggagcaaattcattgcattgc

SEQ ID NO: 2779168 - DNA, 25 bp, Homo sapien
cttcaggagaaccaagattacattt

SEQ ID NO: 2779169 - DNA, 25 bp, Homo sapien
acggagtcagtttaggctcatttaa

SEQ ID NO: 2779170 - DNA, 25 bp, Homo sapien
tccatccgagttcccttgagattac

SEQ ID NO: 2779171 - DNA, 25 bp, Homo sapien
gacaaaatccatccgagttcccttg

SEQ ID NO: 2779172 - DNA, 25 bp, Homo sapien
aaatccatccgagttcccttgagat

SEQ ID NO: 2779173 - DNA, 25 bp, Homo sapien
gggcgaaggacaaaatccatccgag

SEQ ID NO: 2779174 - DNA, 25 bp, Homo sapien
cataattcctccaaaggtacacgta

SEQ ID NO: 2779175 - DNA, 25 bp, Homo sapien
ctaaatacatattatcagaaatgtc

SEQ ID NO: 2779176 - DNA, 25 bp, Homo sapien
cacaatactggtttatgtgttttac

SEQ ID NO: 2779177 - DNA, 25 bp, Homo sapien
ttatcagaaatgtcacacaatactg

SEQ ID NO: 2779178 - DNA, 25 bp, Homo sapien
cagaaatgtcacacaatactggttt

SEQ ID NO: 2779179 - DNA, 25 bp, Homo sapien
tctcttgtgtacattcggaaacaga

SEQ ID NO: 2779180 - DNA, 25 bp, Homo sapien
cattcggaaacagaagccatctctg

SEQ ID NO: 2779181 - DNA, 25 bp, Homo sapien
tgtacattcggaaacagaagccatc

SEQ ID NO: 2779182 - DNA, 25 bp, Homo sapien
cttgtgtacattcggaaacagaagc

SEQ ID NO: 2779183 - DNA, 25 bp, Homo sapien
caaagaactcatctgactgctttca

SEQ ID NO: 2779184 - DNA, 25 bp, Homo sapien
aaagcactggctttactgacaaacg

SEQ ID NO: 2779185 - DNA, 25 bp, Homo sapien
gctttactgacaaacgtctccacca

SEQ ID NO: 2779186 - DNA, 25 bp, Homo sapien
tcttccctggcgctgcaaagcactg

SEQ ID NO: 2779187 - DNA, 25 bp, Homo sapien
ttacaaatacaacatcaggaatagt

SEQ ID NO: 2779188 - DNA, 25 bp, Homo sapien
tatcaattacaaatacaacatcagg

SEQ ID NO: 2779189 - DNA, 25 bp, Homo sapien
aggaatagtgatacccgtctctgca

SEQ ID NO: 2779190 - DNA, 25 bp, Homo sapien
tcaggaatagtgatacccgtctctg

SEQ ID NO: 2779191 - DNA, 25 bp, Homo sapien
gagggggaagtgtgaatgctgcagc

SEQ ID NO: 2779192 - DNA, 25 bp, Homo sapien
cagcttgatcttgggttgaaagaat

SEQ ID NO: 2779193 - DNA, 25 bp, Homo sapien
gaaagaatagaatgcagagctatca

SEQ ID NO: 2779194 - DNA, 25 bp, Homo sapien
agaatagaatgcagagctatcactt

SEQ ID NO: 2779195 - DNA, 25 bp, Homo sapien
ttcttagcaagagtttctctttaga

SEQ ID NO: 2779196 - DNA, 25 bp, Homo sapien
atagttcttagcaagagtttctctt

SEQ ID NO: 2779197 - DNA, 25 bp, Homo sapien
tcttagcaagagtttctctttagaa

SEQ ID NO: 2779198 - DNA, 25 bp, Homo sapien
atcatagttcttagcaagagtttct

SEQ ID NO: 2779199 - DNA, 25 bp, Homo sapien
tgatagaagatcatacaactgctga

SEQ ID NO: 2779200 - DNA, 25 bp, Homo sapien
atatttctgaattggggacttttat

SEQ ID NO: 2779201 - DNA, 25 bp, Homo sapien
gtcctggtaaaaagatcaatactgc

SEQ ID NO: 2779202 - DNA, 25 bp, Homo sapien
ctgctgaatatgagcaagtcctggt

SEQ ID NO: 2779203 - DNA, 25 bp, Homo sapien
tgaggattcatgtatagaatagcat

SEQ ID NO: 2779204 - DNA, 25 bp, Homo sapien
atagcatgctgagtgcggctgctgt

SEQ ID NO: 2779205 - DNA, 25 bp, Homo sapien
tgctgagtgcggctgctgtactttt

SEQ ID NO: 2779206 - DNA, 25 bp, Homo sapien
tgctgtacttttggtaaaatggatt

SEQ ID NO: 2779207 - DNA, 25 bp, Homo sapien
cctgctttgcttgtaacattaatgg

SEQ ID NO: 2779208 - DNA, 25 bp, Homo sapien
ttccccctgctttgcttgtaacatt

SEQ ID NO: 2779209 - DNA, 25 bp, Homo sapien
gcttgtaacattaatggttacttct

SEQ ID NO: 2779210 - DNA, 25 bp, Homo sapien
gagtctttttccagtacaaagcctg

SEQ ID NO: 2779211 - DNA, 25 bp, Homo sapien
aatttccttcaagataattagtagg

SEQ ID NO: 2779212 - DNA, 25 bp, Homo sapien
gtccacagtggcactcattagaatc

SEQ ID NO: 2779213 - DNA, 25 bp, Homo sapien
cattagaatcaagtgtagatcagaa

SEQ ID NO: 2779214 - DNA, 25 bp, Homo sapien
ttagtaggaagtctgactggacact

SEQ ID NO: 2779215 - DNA, 25 bp, Homo sapien
caagctcgagattccatccggatct

SEQ ID NO: 2779216 - DNA, 25 bp, Homo sapien
catgagacacattacttagaagacc

SEQ ID NO: 2779217 - DNA, 25 bp, Homo sapien
tcatctacaataacatgagacacat

SEQ ID NO: 2779218 - DNA, 25 bp, Homo sapien
cccctgttgtacaatagagtaacct

SEQ ID NO: 2779219 - DNA, 25 bp, Homo sapien
aactaattcctatactttgccgtca

SEQ ID NO: 2779220 - DNA, 25 bp, Homo sapien
gcctgaaatgtgctactgatcaacc

SEQ ID NO: 2779221 - DNA, 25 bp, Homo sapien
gataatccttctcataggacagtgg

SEQ ID NO: 2779222 - DNA, 25 bp, Homo sapien
cgtcactctggttaaggtttggcca

SEQ ID NO: 2779223 - DNA, 25 bp, Homo sapien
cattccatttggatcacaaaagcaa

SEQ ID NO: 2779224 - DNA, 25 bp, Homo sapien
acacattccatttggatcacaaaag

SEQ ID NO: 2779225 - DNA, 25 bp, Homo sapien
tcactgaggtggagttgaatgacag

SEQ ID NO: 2779226 - DNA, 25 bp, Homo sapien
cattcactgaggtggagttgaatga

SEQ ID NO: 2779227 - DNA, 25 bp, Homo sapien
accactacccgatgccttttaagag

SEQ ID NO: 2779228 - DNA, 25 bp, Homo sapien
caaacatctcggtaagtgggaggaa

SEQ ID NO: 2779229 - DNA, 25 bp, Homo sapien
gattcctcgggatcttcagagtttt

SEQ ID NO: 2779230 - DNA, 25 bp, Homo sapien
taagagtttcaacaattgagtcccg

SEQ ID NO: 2779231 - DNA, 25 bp, Homo sapien
cagagttccacttaatcagtgtcta

SEQ ID NO: 2779232 - DNA, 25 bp, Homo sapien
taggaaaagaactactgtccagagt

SEQ ID NO: 2779233 - DNA, 25 bp, Homo sapien
tacttattcctgcagtggcactata

SEQ ID NO: 2779234 - DNA, 25 bp, Homo sapien
caagcaaatagttcatagtgcctta

SEQ ID NO: 2779235 - DNA, 25 bp, Homo sapien
catcttcagacttgattaccctaac

SEQ ID NO: 2779236 - DNA, 25 bp, Homo sapien
caggtgctgagcttgcatgccatct

SEQ ID NO: 2779237 - DNA, 25 bp, Homo sapien
tgtagggcatactaccaggacatca

SEQ ID NO: 2779238 - DNA, 25 bp, Homo sapien
ggctaaagtagctcccaggtgctga

SEQ ID NO: 2779239 - DNA, 25 bp, Homo sapien
gataatgataatctatcagacaata

SEQ ID NO: 2779240 - DNA, 25 bp, Homo sapien
tatttccatggaaggcattattaga

SEQ ID NO: 2779241 - DNA, 25 bp, Homo sapien
ctacaaagaagcaaacgcattttaa

SEQ ID NO: 2779242 - DNA, 25 bp, Homo sapien
tgagatgtagaattgagagcttcct

SEQ ID NO: 2779243 - DNA, 25 bp, Homo sapien
ttccagtccaacttcgagcagtata

SEQ ID NO: 2779244 - DNA, 25 bp, Homo sapien
tatctacctactggaactttttcaa

SEQ ID NO: 2779245 - DNA, 25 bp, Homo sapien
ccaacttcgagcagtatagtcaaaa

SEQ ID NO: 2779246 - DNA, 25 bp, Homo sapien
tacatttccagtatctacctactgg

SEQ ID NO: 2779247 - DNA, 25 bp, Homo sapien
caatctgataaatactatacttgct

SEQ ID NO: 2779248 - DNA, 25 bp, Homo sapien
gggactaaactaactataatgcaat

SEQ ID NO: 2779249 - DNA, 25 bp, Homo sapien
acagtttttagaagaccatccagtc

SEQ ID NO: 2779250 - DNA, 25 bp, Homo sapien
aaaactgacaatttagtgtgggact

SEQ ID NO: 2779251 - DNA, 25 bp, Homo sapien
ggctgggttaaatactggatggtct

SEQ ID NO: 2779252 - DNA, 25 bp, Homo sapien
tggctgggttaaatactggatggtc

SEQ ID NO: 2779253 - DNA, 25 bp, Homo sapien
ctgcttgttcttttgcatccagcag

SEQ ID NO: 2779254 - DNA, 25 bp, Homo sapien
tcctgagcctctttttggccttgct

SEQ ID NO: 2779255 - DNA, 25 bp, Homo sapien
gctgcaagatgtaagtacctttcat

SEQ ID NO: 2779256 - DNA, 25 bp, Homo sapien
ttcttttgcatccagcagttttgct

SEQ ID NO: 2779257 - DNA, 25 bp, Homo sapien
gttcagcatatcgtaaaatccactc

SEQ ID NO: 2779258 - DNA, 25 bp, Homo sapien
tccactctttcatatttacttccat

SEQ ID NO: 2779259 - DNA, 25 bp, Homo sapien
ttttgttgttcagcatatcgtaaaa

SEQ ID NO: 2779260 - DNA, 25 bp, Homo sapien
cagcatatcgtaaaatccactcttt

SEQ ID NO: 2779261 - DNA, 25 bp, Homo sapien
tgcaatggaggtgaaatagtggctt

SEQ ID NO: 2779262 - DNA, 25 bp, Homo sapien
taggcctacttttaggttgctgctc

SEQ ID NO: 2779263 - DNA, 25 bp, Homo sapien
tactcttagggtcctcttcatatgt

SEQ ID NO: 2779264 - DNA, 25 bp, Homo sapien
gtatttgaggagactgaaatttagg

SEQ ID NO: 2779265 - DNA, 25 bp, Homo sapien
aaggtttaaacagagccaatccaag

SEQ ID NO: 2779266 - DNA, 25 bp, Homo sapien
ctgaaaggtttaaacagagccaatc

SEQ ID NO: 2779267 - DNA, 25 bp, Homo sapien
gaaaggtttaaacagagccaatcca

SEQ ID NO: 2779268 - DNA, 25 bp, Homo sapien
tgaaaggtttaaacagagccaatcc

SEQ ID NO: 2779269 - DNA, 25 bp, Homo sapien
gaaaatgcttgtaaagccatgtata

SEQ ID NO: 2779270 - DNA, 25 bp, Homo sapien
ataagagtgtattggtcatggcatc

SEQ ID NO: 2779271 - DNA, 25 bp, Homo sapien
ctccatataagagtgtattggtcat

SEQ ID NO: 2779272 - DNA, 25 bp, Homo sapien
cttcaatgtcctttgtcttaaatga

SEQ ID NO: 2779273 - DNA, 25 bp, Homo sapien
gctcattgatcactccaataattct

SEQ ID NO: 2779274 - DNA, 25 bp, Homo sapien
ctttttatgctcattgatcactcca

SEQ ID NO: 2779275 - DNA, 25 bp, Homo sapien
gctttttatgctcattgatcactcc

SEQ ID NO: 2779276 - DNA, 25 bp, Homo sapien
tcactccaataattctttgctctag

SEQ ID NO: 2779277 - DNA, 25 bp, Homo sapien
gatttgcaggaccactagaatcatt

SEQ ID NO: 2779278 - DNA, 25 bp, Homo sapien
atttgcaggaccactagaatcattt

SEQ ID NO: 2779279 - DNA, 25 bp, Homo sapien
tttgcaggaccactagaatcatttg

SEQ ID NO: 2779280 - DNA, 25 bp, Homo sapien
cagttatccaagtaattttcttcat

SEQ ID NO: 2779281 - DNA, 25 bp, Homo sapien
agcggcagcggtggccggcctggac

SEQ ID NO: 2779282 - DNA, 25 bp, Homo sapien
cttgcttgacacggggctccctgga

SEQ ID NO: 2779283 - DNA, 25 bp, Homo sapien
gggctccctggagccggcagcggca

SEQ ID NO: 2779284 - DNA, 25 bp, Homo sapien
cggcagcggtggccggcctggacac

SEQ ID NO: 2779285 - DNA, 25 bp, Homo sapien
caccgcggccgctggagccttgtgt

SEQ ID NO: 2779286 - DNA, 25 bp, Homo sapien
gctctggaagcagacacggcggccc

SEQ ID NO: 2779287 - DNA, 25 bp, Homo sapien
gcctccccggcaattccagcctcgg

SEQ ID NO: 2779288 - DNA, 25 bp, Homo sapien
agcctcggcagatttggctctggaa

SEQ ID NO: 2779289 - DNA, 25 bp, Homo sapien
tgcacagccgagagctcttcacatt

SEQ ID NO: 2779290 - DNA, 25 bp, Homo sapien
aattggtcgaattcagcaggctccg

SEQ ID NO: 2779291 - DNA, 25 bp, Homo sapien
gagcagcttatccactttaggtcgg

SEQ ID NO: 2779292 - DNA, 25 bp, Homo sapien
tgtggcagaagatccttcgcggccc

SEQ ID NO: 2779293 - DNA, 25 bp, Homo sapien
cccacaagtgtctcagggcctgcag

SEQ ID NO: 2779294 - DNA, 25 bp, Homo sapien
tcttcgtggatgaagaggctgccgt

SEQ ID NO: 2779295 - DNA, 25 bp, Homo sapien
cctgcagtgtagtcatatgagctcc

SEQ ID NO: 2779296 - DNA, 25 bp, Homo sapien
gcagtcagtgaaatccttagccagg

SEQ ID NO: 2779297 - DNA, 25 bp, Homo sapien
gggtagccagggctcattcgagtaa

SEQ ID NO: 2779298 - DNA, 25 bp, Homo sapien
tgggtagccagggctcattcgagta

SEQ ID NO: 2779299 - DNA, 25 bp, Homo sapien
tagacgatgatgcctgggacccaca

SEQ ID NO: 2779300 - DNA, 25 bp, Homo sapien
atgtagacgatgatgcctgggaccc

SEQ ID NO: 2779301 - DNA, 25 bp, Homo sapien
aggatgtagacgatgatgcctggga

SEQ ID NO: 2779302 - DNA, 25 bp, Homo sapien
agacgatgatgcctgggacccacac

SEQ ID NO: 2779303 - DNA, 25 bp, Homo sapien
aatggtgtagtacttgcaggccaaa

SEQ ID NO: 2779304 - DNA, 25 bp, Homo sapien
tgaatggtgtagtacttgcaggcca

SEQ ID NO: 2779305 - DNA, 25 bp, Homo sapien
actgaatggtgtagtacttgcaggc

SEQ ID NO: 2779306 - DNA, 25 bp, Homo sapien
gtgcactgaatggtgtagtacttgc

SEQ ID NO: 2779307 - DNA, 25 bp, Homo sapien
cacggtatgctggtgtgccataggt

SEQ ID NO: 2779308 - DNA, 25 bp, Homo sapien
ccataggtggtcttcatcaggccgt

SEQ ID NO: 2779309 - DNA, 25 bp, Homo sapien
gtagttgttgctgttcttgcaggca

SEQ ID NO: 2779310 - DNA, 25 bp, Homo sapien
actgaccagattgaagtcagtgatg

SEQ ID NO: 2779311 - DNA, 25 bp, Homo sapien
tatcaacatgtatacatgctcctgc

SEQ ID NO: 2779312 - DNA, 25 bp, Homo sapien
tggtgatgatgtggttgaacagctc

SEQ ID NO: 2779313 - DNA, 25 bp, Homo sapien
caccggctggacaatgttggcatga

SEQ ID NO: 2779314 - DNA, 25 bp, Homo sapien
cagctctatgctagcagggatcagt

SEQ ID NO: 2779315 - DNA, 25 bp, Homo sapien
cataaactgttaatcttgcctcggt

SEQ ID NO: 2779316 - DNA, 25 bp, Homo sapien
tatccctgcatttctctacctctgg

SEQ ID NO: 2779317 - DNA, 25 bp, Homo sapien
aataagggaattgaaacacctctag

SEQ ID NO: 2779318 - DNA, 25 bp, Homo sapien
gatctttgctcactggcattgcctc

SEQ ID NO: 2779319 - DNA, 25 bp, Homo sapien
ggtggagtccacatagtcaagtctt

SEQ ID NO: 2779320 - DNA, 25 bp, Homo sapien
tttaataggaactgtcctgggtgga

SEQ ID NO: 2779321 - DNA, 25 bp, Homo sapien
tcatagtgcagaagttgtgagatct

SEQ ID NO: 2779322 - DNA, 25 bp, Homo sapien
aaaaatgcggcattctgtactgaaa

SEQ ID NO: 2779323 - DNA, 25 bp, Homo sapien
gaaccaccacttcaggataccattg

SEQ ID NO: 2779324 - DNA, 25 bp, Homo sapien
gattctagggtctgctagcctggct

SEQ ID NO: 2779325 - DNA, 25 bp, Homo sapien
cactcagtagccctgttcacagcaa

SEQ ID NO: 2779326 - DNA, 25 bp, Homo sapien
cattcattgtctagcttggaaagca

SEQ ID NO: 2779327 - DNA, 25 bp, Homo sapien
tcacaagcagatgaccctaagaagt

SEQ ID NO: 2779328 - DNA, 25 bp, Homo sapien
tatgagtttctacagtcacaagcag

SEQ ID NO: 2779329 - DNA, 25 bp, Homo sapien
actgagggcctttactacattgaac

SEQ ID NO: 2779330 - DNA, 25 bp, Homo sapien
cataggttaaacttctctgcaacag

SEQ ID NO: 2779331 - DNA, 25 bp, Homo sapien
tagtcaagtaatccagaggctgtta

SEQ ID NO: 2779332 - DNA, 25 bp, Homo sapien
aaactatttactgtacctctgcctg

SEQ ID NO: 2779333 - DNA, 25 bp, Homo sapien
tcttaactatgaaggatgacaaagg

SEQ ID NO: 2779334 - DNA, 25 bp, Homo sapien
gcaagtgtcattaggaaagcttcta

SEQ ID NO: 2779335 - DNA, 25 bp, Homo sapien
tgctgcctgagagatactgcctggt

SEQ ID NO: 2779336 - DNA, 25 bp, Homo sapien
tatgcttgatgtacgtgaacaccag

SEQ ID NO: 2779337 - DNA, 25 bp, Homo sapien
taattcgttgtatgaggcgcctgga

SEQ ID NO: 2779338 - DNA, 25 bp, Homo sapien
gaagcaaatcttgagccctggacca

SEQ ID NO: 2779339 - DNA, 25 bp, Homo sapien
gaggtggctgcaaattcctctaggt

SEQ ID NO: 2779340 - DNA, 25 bp, Homo sapien
ccccatggagtatttcagagtcaaa

SEQ ID NO: 2779341 - DNA, 25 bp, Homo sapien
tgtatgttttccacctcacagaggt

SEQ ID NO: 2779342 - DNA, 25 bp, Homo sapien
tgcgcccgacctagcatttatcttt

SEQ ID NO: 2779343 - DNA, 25 bp, Homo sapien
gagagatattgtgtttgctgccagc

SEQ ID NO: 2779344 - DNA, 25 bp, Homo sapien
ttgctgccagcctctacttgtagag

SEQ ID NO: 2779345 - DNA, 25 bp, Homo sapien
gagtcagctaaaggaatgtgagatt

SEQ ID NO: 2779346 - DNA, 25 bp, Homo sapien
cacctgtttgattacagttgactac

SEQ ID NO: 2779347 - DNA, 25 bp, Homo sapien
taaatcaaacatcattcatagaaag

SEQ ID NO: 2779348 - DNA, 25 bp, Homo sapien
aaatcaaacatcattcatagaaagc

SEQ ID NO: 2779349 - DNA, 25 bp, Homo sapien
aaaaatgtatacaggtggggcactg

SEQ ID NO: 2779350 - DNA, 25 bp, Homo sapien
aaaatgtatacaggtggggcactgt

SEQ ID NO: 2779351 - DNA, 25 bp, Homo sapien
taaaaatgtatacaggtggggcact

SEQ ID NO: 2779352 - DNA, 25 bp, Homo sapien
cttgtggcaatcattttcctttaga

SEQ ID NO: 2779353 - DNA, 25 bp, Homo sapien
tagagctattagataaccactgagt

SEQ ID NO: 2779354 - DNA, 25 bp, Homo sapien
ggtaactatgtacacacaaagtgtg

SEQ ID NO: 2779355 - DNA, 25 bp, Homo sapien
gcatccaagaggcatagcagcagca

SEQ ID NO: 2779356 - DNA, 25 bp, Homo sapien
tgaagaaatccgatacatatacagc

SEQ ID NO: 2779357 - DNA, 25 bp, Homo sapien
gctggtgattgctcggatagtgatt

SEQ ID NO: 2779358 - DNA, 25 bp, Homo sapien
tcccagttgttggtgtttcatgcag

SEQ ID NO: 2779359 - DNA, 25 bp, Homo sapien
ctttctttgaagaaatccgatacat

SEQ ID NO: 2779360 - DNA, 25 bp, Homo sapien
gagattcttgcccactgcatagtct

SEQ ID NO: 2779361 - DNA, 25 bp, Homo sapien
gtaggctgttgacctgtatacttac

SEQ ID NO: 2779362 - DNA, 25 bp, Homo sapien
ctggtgtgtatcctgaagtgacttt

SEQ ID NO: 2779363 - DNA, 25 bp, Homo sapien
tatcaagatgtaggctgttgacctg

SEQ ID NO: 2779364 - DNA, 25 bp, Homo sapien
gaatgagtccagtcaacacatcgct

SEQ ID NO: 2779365 - DNA, 25 bp, Homo sapien
tcagaaactcgagaaaggcccacat

SEQ ID NO: 2779366 - DNA, 25 bp, Homo sapien
caacaagaccaaattgcagtgtggg

SEQ ID NO: 2779367 - DNA, 25 bp, Homo sapien
cataaatggatacggcaacaagacc

SEQ ID NO: 2779368 - DNA, 25 bp, Homo sapien
actattgccctactaacttgttcac

SEQ ID NO: 2779369 - DNA, 25 bp, Homo sapien
ggaacaggacttctaggcaaacatt

SEQ ID NO: 2779370 - DNA, 25 bp, Homo sapien
cacaagaatctattgccagtctagc

SEQ ID NO: 2779371 - DNA, 25 bp, Homo sapien
agggacagttcctccccttgcaatt

SEQ ID NO: 2779372 - DNA, 25 bp, Homo sapien
tgagtcttgggataaagtgctagca

SEQ ID NO: 2779373 - DNA, 25 bp, Homo sapien
ttgactttgggtgcatctctgaagg

SEQ ID NO: 2779374 - DNA, 25 bp, Homo sapien
catgcctgacccagtatcgtggtta

SEQ ID NO: 2779375 - DNA, 25 bp, Homo sapien
gttttctgtacactaatcggaccta

SEQ ID NO: 2779376 - DNA, 25 bp, Homo sapien
tctagaatggacttaagctagtccc

SEQ ID NO: 2779377 - DNA, 25 bp, Homo sapien
tatcaataatcaactaagctccaac

SEQ ID NO: 2779378 - DNA, 25 bp, Homo sapien
tccccaacatgccagtgaaaagaat

SEQ ID NO: 2779379 - DNA, 25 bp, Homo sapien
gagctaggactccaaggtctttcct

SEQ ID NO: 2779380 - DNA, 25 bp, Homo sapien
gaattccacagctgacatgcccaga

SEQ ID NO: 2779381 - DNA, 25 bp, Homo sapien
gctcatgcttcagcgccaaggctaa

SEQ ID NO: 2779382 - DNA, 25 bp, Homo sapien
tatttggaccacatagccctgcctt

SEQ ID NO: 2779383 - DNA, 25 bp, Homo sapien
aaagtggacaccctgaatttctcag

SEQ ID NO: 2779384 - DNA, 25 bp, Homo sapien
taataccaataaacgcccacatcaa

SEQ ID NO: 2779385 - DNA, 25 bp, Homo sapien
tatgaaaggataaacgaaatcgaca

SEQ ID NO: 2779386 - DNA, 25 bp, Homo sapien
cctgaatgaccactgggtcagggaa

SEQ ID NO: 2779387 - DNA, 25 bp, Homo sapien
aaatagaggcaggacataccgaaac

SEQ ID NO: 2779388 - DNA, 25 bp, Homo sapien
gcaacataagaaacccataagccaa

SEQ ID NO: 2779389 - DNA, 25 bp, Homo sapien
tcatggcttcaaaggatctcccacc

SEQ ID NO: 2779390 - DNA, 25 bp, Homo sapien
tcccaatccaggaccaaatggcttt

SEQ ID NO: 2779391 - DNA, 25 bp, Homo sapien
catgcctagctatcagagactactg

SEQ ID NO: 2779392 - DNA, 25 bp, Homo sapien
aaaccacccagtctgctgcaattgg

SEQ ID NO: 2779393 - DNA, 25 bp, Homo sapien
tgtgaggacattctacaacctggaa

SEQ ID NO: 2779394 - DNA, 25 bp, Homo sapien
tcactgaagggtggtgctattgcct

SEQ ID NO: 2779395 - DNA, 25 bp, Homo sapien
caacatctgtgatactacttaggca

SEQ ID NO: 2779396 - DNA, 25 bp, Homo sapien
gcttttatgactagccaggcaagcc

SEQ ID NO: 2779397 - DNA, 25 bp, Homo sapien
cagaactagactaacaacagcaggc

SEQ ID NO: 2779398 - DNA, 25 bp, Homo sapien
caggcaagccaaattgattgctcca

SEQ ID NO: 2779399 - DNA, 25 bp, Homo sapien
cctacatttgatgacagatctgtcc

SEQ ID NO: 2779400 - DNA, 25 bp, Homo sapien
tgccacaaacagcatgcagtacatg

SEQ ID NO: 2779401 - DNA, 25 bp, Homo sapien
atggaaaacgaagagtggcctgaat

SEQ ID NO: 2779402 - DNA, 25 bp, Homo sapien
cgaagagtggcctgaatagaaggac

SEQ ID NO: 2779403 - DNA, 25 bp, Homo sapien
cagcatgcagtacatggaaaacgaa

SEQ ID NO: 2779404 - DNA, 25 bp, Homo sapien
tcagccacctttgcatactgggcat

SEQ ID NO: 2779405 - DNA, 25 bp, Homo sapien
tactgcattgtgtctagtactagga

SEQ ID NO: 2779406 - DNA, 25 bp, Homo sapien
cctcgtacctttctatgggatgctg

SEQ ID NO: 2779407 - DNA, 25 bp, Homo sapien
caatttgtagaagtcctcagccacc

SEQ ID NO: 2779408 - DNA, 25 bp, Homo sapien
cagtgtctatgccaccaggaaccgg

SEQ ID NO: 2779409 - DNA, 25 bp, Homo sapien
caggaaccggcagatactttcaagg

SEQ ID NO: 2779410 - DNA, 25 bp, Homo sapien
gatctacagcactaactgacgcagg

SEQ ID NO: 2779411 - DNA, 25 bp, Homo sapien
tatgaattcttgctccagaccagtg

SEQ ID NO: 2779412 - DNA, 25 bp, Homo sapien
gagccacttacccaatagacaaagg

SEQ ID NO: 2779413 - DNA, 25 bp, Homo sapien
caacatttaggtgcccattttagta

SEQ ID NO: 2779414 - DNA, 25 bp, Homo sapien
ttagtatatttaaagagtggaaagc

SEQ ID NO: 2779415 - DNA, 25 bp, Homo sapien
gaaaccaattcttatcgtacaacat

SEQ ID NO: 2779416 - DNA, 25 bp, Homo sapien
tccattatggtcaaaggcagtcaga

SEQ ID NO: 2779417 - DNA, 25 bp, Homo sapien
caaaaccgaggagcattaggaagtc

SEQ ID NO: 2779418 - DNA, 25 bp, Homo sapien
ttgtcagaaatcttgggcagtgtca

SEQ ID NO: 2779419 - DNA, 25 bp, Homo sapien
aattcaagtcttaggccggataccg

SEQ ID NO: 2779420 - DNA, 25 bp, Homo sapien
atagcagacagagcgcaaaagtgtg

SEQ ID NO: 2779421 - DNA, 25 bp, Homo sapien
gcagtaatagcagacagagcgcaaa

SEQ ID NO: 2779422 - DNA, 25 bp, Homo sapien
taatagcagacagagcgcaaaagtg

SEQ ID NO: 2779423 - DNA, 25 bp, Homo sapien
cagtaatagcagacagagcgcaaaa

SEQ ID NO: 2779424 - DNA, 25 bp, Homo sapien
taagcggacacttgcatatggatgg

SEQ ID NO: 2779425 - DNA, 25 bp, Homo sapien
gtgctttcccaacccttacacagga

SEQ ID NO: 2779426 - DNA, 25 bp, Homo sapien
cccttacacaggactgtaagcggac

SEQ ID NO: 2779427 - DNA, 25 bp, Homo sapien
tgcttttaaagagggtgctttccca

SEQ ID NO: 2779428 - DNA, 25 bp, Homo sapien
tcagcaacactggtcattaaggaaa

SEQ ID NO: 2779429 - DNA, 25 bp, Homo sapien
gacacaacaaagtactcactgtagg

SEQ ID NO: 2779430 - DNA, 25 bp, Homo sapien
tacatagcaagccacagattgagag

SEQ ID NO: 2779431 - DNA, 25 bp, Homo sapien
taggcacagaaacttgaccctccgg

SEQ ID NO: 2779432 - DNA, 25 bp, Homo sapien
gaggccgcagtctgcctattgaata

SEQ ID NO: 2779433 - DNA, 25 bp, Homo sapien
caatgtaaccatcgctgcagttgat

SEQ ID NO: 2779434 - DNA, 25 bp, Homo sapien
gatcacaaacatccaagaagtgagg

SEQ ID NO: 2779435 - DNA, 25 bp, Homo sapien
gactgactagcagctgcaccaaata

SEQ ID NO: 2779436 - DNA, 25 bp, Homo sapien
tgataaaggaatttgagtgcaaaag

SEQ ID NO: 2779437 - DNA, 25 bp, Homo sapien
ctgataaaggaatttgagtgcaaaa

SEQ ID NO: 2779438 - DNA, 25 bp, Homo sapien
gataaaggaatttgagtgcaaaagg

SEQ ID NO: 2779439 - DNA, 25 bp, Homo sapien
ggaaatggtaaatcgcaaaaatatc

SEQ ID NO: 2779440 - DNA, 25 bp, Homo sapien
aaatggtaaatcgcaaaaatatctt

SEQ ID NO: 2779441 - DNA, 25 bp, Homo sapien
tggtaaatcgcaaaaatatctttgt

SEQ ID NO: 2779442 - DNA, 25 bp, Homo sapien
aggaaatggtaaatcgcaaaaatat

SEQ ID NO: 2779443 - DNA, 25 bp, Homo sapien
agacagtaagactctagctacctga

SEQ ID NO: 2779444 - DNA, 25 bp, Homo sapien
agtaagactctagctacctgaaacc

SEQ ID NO: 2779445 - DNA, 25 bp, Homo sapien
aagactctagctacctgaaaccaaa

SEQ ID NO: 2779446 - DNA, 25 bp, Homo sapien
tcctgagaattcaaagaatactgaa

SEQ ID NO: 2779447 - DNA, 25 bp, Homo sapien
gaaacttccacatctcaggtatgag

SEQ ID NO: 2779448 - DNA, 25 bp, Homo sapien
ggtatgagctgttcttaggcactga

SEQ ID NO: 2779449 - DNA, 25 bp, Homo sapien
gggttatccctgactgccaacagag

SEQ ID NO: 2779450 - DNA, 25 bp, Homo sapien
cacatcgctgagagaagcagacaat

SEQ ID NO: 2779451 - DNA, 25 bp, Homo sapien
aggttggtctcaatacttcagggct

SEQ ID NO: 2779452 - DNA, 25 bp, Homo sapien
accacatccaccatattttctggtt

SEQ ID NO: 2779453 - DNA, 25 bp, Homo sapien
ttggtctcaatacttcagggctcaa

SEQ ID NO: 2779454 - DNA, 25 bp, Homo sapien
caccacatccaccatattttctggt

SEQ ID NO: 2779455 - DNA, 25 bp, Homo sapien
atactgaatggaatgattattccac

SEQ ID NO: 2779456 - DNA, 25 bp, Homo sapien
gataatactgaatggaatgattatt

SEQ ID NO: 2779457 - DNA, 25 bp, Homo sapien
taatactgaatggaatgattattcc

SEQ ID NO: 2779458 - DNA, 25 bp, Homo sapien
aacgataatactgaatggaatgatt

SEQ ID NO: 2779459 - DNA, 25 bp, Homo sapien
ctaataacgcataaggtatggtgtc

SEQ ID NO: 2779460 - DNA, 25 bp, Homo sapien
tgtaagggtacttgatggactcatc

SEQ ID NO: 2779461 - DNA, 25 bp, Homo sapien
cgcataaggtatggtgtcttctttg

SEQ ID NO: 2779462 - DNA, 25 bp, Homo sapien
tacagaatactcctcgttggaaggg

SEQ ID NO: 2779463 - DNA, 25 bp, Homo sapien
cttgaagtaagaattgcaaaaggca

SEQ ID NO: 2779464 - DNA, 25 bp, Homo sapien
gtaagaattgcaaaaggcaatccag

SEQ ID NO: 2779465 - DNA, 25 bp, Homo sapien
gaagtaagaattgcaaaaggcaatc

SEQ ID NO: 2779466 - DNA, 25 bp, Homo sapien
ttgaagtaagaattgcaaaaggcaa

SEQ ID NO: 2779467 - DNA, 25 bp, Homo sapien
ccatatttggataggtcattgtcac

SEQ ID NO: 2779468 - DNA, 25 bp, Homo sapien
ggcaataattatcccacagactctg

SEQ ID NO: 2779469 - DNA, 25 bp, Homo sapien
gcagcaatgcatgcaacggaagtta

SEQ ID NO: 2779470 - DNA, 25 bp, Homo sapien
cattgtcactggctaagctatcaga

SEQ ID NO: 2779471 - DNA, 25 bp, Homo sapien
gcacctaacagagagcgctgttttt

SEQ ID NO: 2779472 - DNA, 25 bp, Homo sapien
tatactcacctcctaaaacgccaaa

SEQ ID NO: 2779473 - DNA, 25 bp, Homo sapien
caatggagtcaagcataaaagcacc

SEQ ID NO: 2779474 - DNA, 25 bp, Homo sapien
ccatgccaagctggtttgttggttt

SEQ ID NO: 2779475 - DNA, 25 bp, Homo sapien
aaatctgttcaatctattataagag

SEQ ID NO: 2779476 - DNA, 25 bp, Homo sapien
gaaatgggaaagtagctctggctcc

SEQ ID NO: 2779477 - DNA, 25 bp, Homo sapien
gaacaaagcaggtctacagaggaag

SEQ ID NO: 2779478 - DNA, 25 bp, Homo sapien
tattccaaaagggttagtgcacacc

SEQ ID NO: 2779479 - DNA, 25 bp, Homo sapien
tagcctggtccctgaaccgggtgaa

SEQ ID NO: 2779480 - DNA, 25 bp, Homo sapien
aatgaaaacagaaaaatttctaatg

SEQ ID NO: 2779481 - DNA, 25 bp, Homo sapien
tccttatttgaaaaaacaatgttca

SEQ ID NO: 2779482 - DNA, 25 bp, Homo sapien
atgaaaacagaaaaatttctaatgg

SEQ ID NO: 2779483 - DNA, 25 bp, Homo sapien
cttatttgaaaaaacaatgttcaag

SEQ ID NO: 2779484 - DNA, 25 bp, Homo sapien
gtcccctacagctgaacttacttat

SEQ ID NO: 2779485 - DNA, 25 bp, Homo sapien
aaagtactgtaatcagctgtcttcc

SEQ ID NO: 2779486 - DNA, 25 bp, Homo sapien
tctatgtcaatattatcaaaactta

SEQ ID NO: 2779487 - DNA, 25 bp, Homo sapien
tattcagaaagaacgattactattc

SEQ ID NO: 2779488 - DNA, 25 bp, Homo sapien
tctgccgtacgatagcttactgggc

SEQ ID NO: 2779489 - DNA, 25 bp, Homo sapien
cctggccaatagtgacatatcttaa

SEQ ID NO: 2779490 - DNA, 25 bp, Homo sapien
aagcaagcataatcttagtttcagc

SEQ ID NO: 2779491 - DNA, 25 bp, Homo sapien
tactgggctttaacaagtgtctgga

SEQ ID NO: 2779492 - DNA, 25 bp, Homo sapien
aaacagtgggtatattcctcaagca

SEQ ID NO: 2779493 - DNA, 25 bp, Homo sapien
gaaacactgcctctggactaaaaca

SEQ ID NO: 2779494 - DNA, 25 bp, Homo sapien
gaagacagtactgtggatttacccc

SEQ ID NO: 2779495 - DNA, 25 bp, Homo sapien
tcttcagaatgacatcaagttgttc

SEQ ID NO: 2779496 - DNA, 25 bp, Homo sapien
tcatggtacggatagttgatgctgt

SEQ ID NO: 2779497 - DNA, 25 bp, Homo sapien
gatgtgacggtactgtcatggtacg

SEQ ID NO: 2779498 - DNA, 25 bp, Homo sapien
cccaattttagaacagccataggca

SEQ ID NO: 2779499 - DNA, 25 bp, Homo sapien
aagccaacccccactaggatgagga

SEQ ID NO: 2779500 - DNA, 25 bp, Homo sapien
gtaaagtctactgaatgggatgcaa

SEQ ID NO: 2779501 - DNA, 25 bp, Homo sapien
aaatcctagccatattttgccctct

SEQ ID NO: 2779502 - DNA, 25 bp, Homo sapien
caattcacttcattaggaagtaaag

SEQ ID NO: 2779503 - DNA, 25 bp, Homo sapien
tatacccaagggcaaagattaagga

SEQ ID NO: 2779504 - DNA, 25 bp, Homo sapien
tgtttattaaaagattataggactc

SEQ ID NO: 2779505 - DNA, 25 bp, Homo sapien
tattaaaagattataggactcaggc

SEQ ID NO: 2779506 - DNA, 25 bp, Homo sapien
tgaaagttaatggaacagtgtatta

SEQ ID NO: 2779507 - DNA, 25 bp, Homo sapien
gaaagttaatggaacagtgtattat

SEQ ID NO: 2779508 - DNA, 25 bp, Homo sapien
accacttgctgttgccgaaacatac

SEQ ID NO: 2779509 - DNA, 25 bp, Homo sapien
ggctccaatcacactgaaccacttg

SEQ ID NO: 2779510 - DNA, 25 bp, Homo sapien
gctgttgccgaaacatactgttttc

SEQ ID NO: 2779511 - DNA, 25 bp, Homo sapien
ttccactgtccccttaaggctccaa

SEQ ID NO: 2779512 - DNA, 25 bp, Homo sapien
ggctcacgcctgcaatcctagcact

SEQ ID NO: 2779513 - DNA, 25 bp, Homo sapien
tcacgcctgcaatcctagcactttg

SEQ ID NO: 2779514 - DNA, 25 bp, Homo sapien
gaacaaaaatttattggccaggcgc

SEQ ID NO: 2779515 - DNA, 25 bp, Homo sapien
agtggctcacgcctgcaatcctagc

SEQ ID NO: 2779516 - DNA, 25 bp, Homo sapien
catgaaaagaggctataggagagga

SEQ ID NO: 2779517 - DNA, 25 bp, Homo sapien
agaggaagaaaggatgctcacaggc

SEQ ID NO: 2779518 - DNA, 25 bp, Homo sapien
tacagaaggcaaatcaagactaaaa

SEQ ID NO: 2779519 - DNA, 25 bp, Homo sapien
tagaatttgcaacttaagctaggag

SEQ ID NO: 2779520 - DNA, 25 bp, Homo sapien
agagggaaatcagtactacaggaaa

SEQ ID NO: 2779521 - DNA, 25 bp, Homo sapien
acatttaggtttgggcaacacagcc

SEQ ID NO: 2779522 - DNA, 25 bp, Homo sapien
ttacaaggtgtgaagggtgtgggca

SEQ ID NO: 2779523 - DNA, 25 bp, Homo sapien
taacacagctgtaactgcaagcatg

SEQ ID NO: 2779524 - DNA, 25 bp, Homo sapien
cacaaactactggaatcttgaaggc

SEQ ID NO: 2779525 - DNA, 25 bp, Homo sapien
gaaggcaatttgtgtacgctccagc

SEQ ID NO: 2779526 - DNA, 25 bp, Homo sapien
ggcagcctacctcacaagactctta

SEQ ID NO: 2779527 - DNA, 25 bp, Homo sapien
tatggctactgtagaagcactgagc

SEQ ID NO: 2779528 - DNA, 25 bp, Homo sapien
gaaatcatccatactatccttttcc

SEQ ID NO: 2779529 - DNA, 25 bp, Homo sapien
ctgaaatcatccatactatcctttt

SEQ ID NO: 2779530 - DNA, 25 bp, Homo sapien
cttttccttgtaattaatcataaat

SEQ ID NO: 2779531 - DNA, 25 bp, Homo sapien
catccatactatccttttccttgta

SEQ ID NO: 2779532 - DNA, 25 bp, Homo sapien
tagagaaagaatttggaagggctaa

SEQ ID NO: 2779533 - DNA, 25 bp, Homo sapien
tctatacttcatctactcaattggc

SEQ ID NO: 2779534 - DNA, 25 bp, Homo sapien
gctatcatgcagaactaaagtcact

SEQ ID NO: 2779535 - DNA, 25 bp, Homo sapien
ggtgtgagccatcctctctaaattc

SEQ ID NO: 2779536 - DNA, 25 bp, Homo sapien
tgaaaaattctcctactaatcaagt

SEQ ID NO: 2779537 - DNA, 25 bp, Homo sapien
tcttccccttctttacaaaagatca

SEQ ID NO: 2779538 - DNA, 25 bp, Homo sapien
tctcctactaatcaagttgtgtgtt

SEQ ID NO: 2779539 - DNA, 25 bp, Homo sapien
gatcattagatgtccaagagtaaag

SEQ ID NO: 2779540 - DNA, 25 bp, Homo sapien
catgcctggtctaataattcttgac

SEQ ID NO: 2779541 - DNA, 25 bp, Homo sapien
gaaggccatgcccagttcgcatgac

SEQ ID NO: 2779542 - DNA, 25 bp, Homo sapien
ggacccagggcctgctactctccac

SEQ ID NO: 2779543 - DNA, 25 bp, Homo sapien
agttcgcatgacctccccaaaggga

SEQ ID NO: 2779544 - DNA, 25 bp, Homo sapien
tagctgaggtatcatagggaggtcc

SEQ ID NO: 2779545 - DNA, 25 bp, Homo sapien
atcggccactcagaacagacactag

SEQ ID NO: 2779546 - DNA, 25 bp, Homo sapien
cagcctcaatagttaagtggtgcac

SEQ ID NO: 2779547 - DNA, 25 bp, Homo sapien
taaaacacatgatccaagaaggcac

SEQ ID NO: 2779548 - DNA, 25 bp, Homo sapien
tccattcagctactggtggaaccaa

SEQ ID NO: 2779549 - DNA, 25 bp, Homo sapien
ggcactcagggaggtaacacaccaa

SEQ ID NO: 2779550 - DNA, 25 bp, Homo sapien
tatctggttacaggactaaattcca

SEQ ID NO: 2779551 - DNA, 25 bp, Homo sapien
ggtagtcaagtatatctggctgggt

SEQ ID NO: 2779552 - DNA, 25 bp, Homo sapien
tgaagtctcccttattagtaactgg

SEQ ID NO: 2779553 - DNA, 25 bp, Homo sapien
catcctatattcaggtgagaacacg

SEQ ID NO: 2779554 - DNA, 25 bp, Homo sapien
tagtgaatcaaggagaaggttcccc

SEQ ID NO: 2779555 - DNA, 25 bp, Homo sapien
gaagacaaggcaggatagtgaatca

SEQ ID NO: 2779556 - DNA, 25 bp, Homo sapien
tgctcttataaaaattctagggtaa

SEQ ID NO: 2779557 - DNA, 25 bp, Homo sapien
agaaagctggcaaattctaatgctc

SEQ ID NO: 2779558 - DNA, 25 bp, Homo sapien
aatgctcttataaaaattctagggt

SEQ ID NO: 2779559 - DNA, 25 bp, Homo sapien
gctggcaaattctaatgctcttata

SEQ ID NO: 2779560 - DNA, 25 bp, Homo sapien
aactcagacctgtatgcttccaatg

SEQ ID NO: 2779561 - DNA, 25 bp, Homo sapien
tcaggtgagttacccaagcaacagg

SEQ ID NO: 2779562 - DNA, 25 bp, Homo sapien
gaacatacagattaagacacagtcc

SEQ ID NO: 2779563 - DNA, 25 bp, Homo sapien
tgggccacatgccaaggagaacata

SEQ ID NO: 2779564 - DNA, 25 bp, Homo sapien
tatgagctgtgggaatactgttcac

SEQ ID NO: 2779565 - DNA, 25 bp, Homo sapien
tgtctatgagctgtgggaatactgt

SEQ ID NO: 2779566 - DNA, 25 bp, Homo sapien
tctatgagctgtgggaatactgttc

SEQ ID NO: 2779567 - DNA, 25 bp, Homo sapien
cttgtctatgagctgtgggaatact

SEQ ID NO: 2779568 - DNA, 25 bp, Homo sapien
tctacagaatgcagatgaccaagct

SEQ ID NO: 2779569 - DNA, 25 bp, Homo sapien
gggcacatgggatatcttgatagag

SEQ ID NO: 2779570 - DNA, 25 bp, Homo sapien
aattcctgactataccattgttagc

SEQ ID NO: 2779571 - DNA, 25 bp, Homo sapien
aaaaatgcacttcccaattcctgac

SEQ ID NO: 2779572 - DNA, 25 bp, Homo sapien
tcattgagactgctatccccaaaag

SEQ ID NO: 2779573 - DNA, 25 bp, Homo sapien
gcactggtatttgcagctcctagca

SEQ ID NO: 2779574 - DNA, 25 bp, Homo sapien
cccctttagagagccttcattgaga

SEQ ID NO: 2779575 - DNA, 25 bp, Homo sapien
tcctccacggccaactcattttgtt

SEQ ID NO: 2779576 - DNA, 25 bp, Homo sapien
caaagatccatagcacattcttgag

SEQ ID NO: 2779577 - DNA, 25 bp, Homo sapien
ccaagaatatgccagtttgacaaat

SEQ ID NO: 2779578 - DNA, 25 bp, Homo sapien
gagtttagtgacttttgctgccaac

SEQ ID NO: 2779579 - DNA, 25 bp, Homo sapien
aataggattctagactgacccaaga

SEQ ID NO: 2779580 - DNA, 25 bp, Homo sapien
gaaacagtggttggtagaatctttc

SEQ ID NO: 2779581 - DNA, 25 bp, Homo sapien
gaagccctacctttattttcaatca

SEQ ID NO: 2779582 - DNA, 25 bp, Homo sapien
aatactggctactgaaaattctgag

SEQ ID NO: 2779583 - DNA, 25 bp, Homo sapien
tatattctaggcttacaaatcagtc

SEQ ID NO: 2779584 - DNA, 25 bp, Homo sapien
tgtagtttcccccttaaagatggca

SEQ ID NO: 2779585 - DNA, 25 bp, Homo sapien
gatggcacttgcaggtacaaagatg

SEQ ID NO: 2779586 - DNA, 25 bp, Homo sapien
ggcacttgcaggtacaaagatgcag

SEQ ID NO: 2779587 - DNA, 25 bp, Homo sapien
cacttgcaggtacaaagatgcagag

SEQ ID NO: 2779588 - DNA, 25 bp, Homo sapien
aacagcagtttgacattgagtttct

SEQ ID NO: 2779589 - DNA, 25 bp, Homo sapien
ttcaacagcagtttgacattgagtt

SEQ ID NO: 2779590 - DNA, 25 bp, Homo sapien
caacagcagtttgacattgagtttc

SEQ ID NO: 2779591 - DNA, 25 bp, Homo sapien
acagcagtttgacattgagtttctt

SEQ ID NO: 2779592 - DNA, 25 bp, Homo sapien
tcacgataaatcaggcactggcgcc

SEQ ID NO: 2779593 - DNA, 25 bp, Homo sapien
taaagacagtgttcagttgggcgcg

SEQ ID NO: 2779594 - DNA, 25 bp, Homo sapien
tataacagactccaccagaaaggcg

SEQ ID NO: 2779595 - DNA, 25 bp, Homo sapien
caaaatgcagttttagggcccagcg

SEQ ID NO: 2779596 - DNA, 25 bp, Homo sapien
acgcagagcacatcgagggccacgt

SEQ ID NO: 2779597 - DNA, 25 bp, Homo sapien
atcgagggccacgtacggcagccgc

SEQ ID NO: 2779598 - DNA, 25 bp, Homo sapien
acggcagccgcgtcttgtcaaacat

SEQ ID NO: 2779599 - DNA, 25 bp, Homo sapien
ccagcaacacgcagagcacatcgag

SEQ ID NO: 2779600 - DNA, 25 bp, Homo sapien
ccgggctgcccggcaagggcgatgg

SEQ ID NO: 2779601 - DNA, 25 bp, Homo sapien
gcggccgaggcccttgattctcgag

SEQ ID NO: 2779602 - DNA, 25 bp, Homo sapien
cccgcgaacactcggttagtgccga

SEQ ID NO: 2779603 - DNA, 25 bp, Homo sapien
ccttgattctcgagcccgggccggg

SEQ ID NO: 2779604 - DNA, 25 bp, Homo sapien
agccgcggcagctctgtagcctcag

SEQ ID NO: 2779605 - DNA, 25 bp, Homo sapien
gccggcacggcctgccccggttgct

SEQ ID NO: 2779606 - DNA, 25 bp, Homo sapien
cgcaggaccgggcagcgcgcgggtt

SEQ ID NO: 2779607 - DNA, 25 bp, Homo sapien
tccagactctcgctttaaggatggg

SEQ ID NO: 2779608 - DNA, 25 bp, Homo sapien
gctgagcagcgcaggaccgggcagc

SEQ ID NO: 2779609 - DNA, 25 bp, Homo sapien
ggctttgctctggaccgcaattgct

SEQ ID NO: 2779610 - DNA, 25 bp, Homo sapien
gcggcatccgcccagaagtgcggct

SEQ ID NO: 2779611 - DNA, 25 bp, Homo sapien
cgttccgatccagggggctttgctc

SEQ ID NO: 2779612 - DNA, 25 bp, Homo sapien
tggtctccgaactcggcctcggtac

SEQ ID NO: 2779613 - DNA, 25 bp, Homo sapien
tccttcccaaccaaagagagggtca

SEQ ID NO: 2779614 - DNA, 25 bp, Homo sapien
gagagggtcacatcttgggtaaaaa

SEQ ID NO: 2779615 - DNA, 25 bp, Homo sapien
atcttgggtaaaaatggagctcacc

SEQ ID NO: 2779616 - DNA, 25 bp, Homo sapien
gggtaaaaatggagctcacctgagc

SEQ ID NO: 2779617 - DNA, 25 bp, Homo sapien
tgaatccaacagcagccgagacgat

SEQ ID NO: 2779618 - DNA, 25 bp, Homo sapien
gggtgaatccaacagcagccgagac

SEQ ID NO: 2779619 - DNA, 25 bp, Homo sapien
aacagcagccgagacgatctttaag

SEQ ID NO: 2779620 - DNA, 25 bp, Homo sapien
atggaatcttcaaactaattactaa

SEQ ID NO: 2779621 - DNA, 25 bp, Homo sapien
caactcagacatcattaggcgtgtg

SEQ ID NO: 2779622 - DNA, 25 bp, Homo sapien
ggccacggctattctccaactcaga

SEQ ID NO: 2779623 - DNA, 25 bp, Homo sapien
gaaaaccatcgaggagccagtgctg

SEQ ID NO: 2779624 - DNA, 25 bp, Homo sapien
cgtgtgatcacatggtctggaagca

SEQ ID NO: 2779625 - DNA, 25 bp, Homo sapien
ggagaaatcctggaagccaaagttc

SEQ ID NO: 2779626 - DNA, 25 bp, Homo sapien
gagaaatcctggaagccaaagttct

SEQ ID NO: 2779627 - DNA, 25 bp, Homo sapien
tgaggatgaccgcgcgcaggagttt

SEQ ID NO: 2779628 - DNA, 25 bp, Homo sapien
ctgaggatgaccgcgcgcaggagtt

SEQ ID NO: 2779629 - DNA, 25 bp, Homo sapien
gacacttctcggatgccacatgctg

SEQ ID NO: 2779630 - DNA, 25 bp, Homo sapien
ggactggtatagcactggtatgaca

SEQ ID NO: 2779631 - DNA, 25 bp, Homo sapien
ctggtatagcactggtatgacactt

SEQ ID NO: 2779632 - DNA, 25 bp, Homo sapien
ctggtatgacacttctcggatgcca

SEQ ID NO: 2779633 - DNA, 25 bp, Homo sapien
gatagaaaaggcctggtcagcattt

SEQ ID NO: 2779634 - DNA, 25 bp, Homo sapien
ggctctcggagaaacttaacactgt

SEQ ID NO: 2779635 - DNA, 25 bp, Homo sapien
ttaacactgtatcgcagtgacaact

SEQ ID NO: 2779636 - DNA, 25 bp, Homo sapien
gaaggcctcttcacttgcaaagatg

SEQ ID NO: 2779637 - DNA, 25 bp, Homo sapien
actgcaattctctcacggctaatac

SEQ ID NO: 2779638 - DNA, 25 bp, Homo sapien
cacggctaatacagcaatggccttt

SEQ ID NO: 2779639 - DNA, 25 bp, Homo sapien
tccctccgaaaattcatctgcctaa

SEQ ID NO: 2779640 - DNA, 25 bp, Homo sapien
cagttatttccctccgaaaattcat

SEQ ID NO: 2779641 - DNA, 25 bp, Homo sapien
tctgttcctcggcatgggggctgag

SEQ ID NO: 2779642 - DNA, 25 bp, Homo sapien
gactggcttctgctggatggaaaat

SEQ ID NO: 2779643 - DNA, 25 bp, Homo sapien
ggaaaatgcaagctgagtggtttaa

SEQ ID NO: 2779644 - DNA, 25 bp, Homo sapien
ctggcttctgctggatggaaaatgc

SEQ ID NO: 2779645 - DNA, 25 bp, Homo sapien
cctggctcccaacacatggtcttgg

SEQ ID NO: 2779646 - DNA, 25 bp, Homo sapien
tgagccacatggtggaaaccgagca

SEQ ID NO: 2779647 - DNA, 25 bp, Homo sapien
agcagagctgagtttgactggatcc

SEQ ID NO: 2779648 - DNA, 25 bp, Homo sapien
tcttggcaacacgtgtcatggctgc

SEQ ID NO: 2779649 - DNA, 25 bp, Homo sapien
tatgtacagggggaatgctcaggag

SEQ ID NO: 2779650 - DNA, 25 bp, Homo sapien
tgtacagggggaatgctcaggagtc

SEQ ID NO: 2779651 - DNA, 25 bp, Homo sapien
atgtacagggggaatgctcaggagt

SEQ ID NO: 2779652 - DNA, 25 bp, Homo sapien
ctatgtacagggggaatgctcagga

SEQ ID NO: 2779653 - DNA, 25 bp, Homo sapien
aggcttccaggtgcacactaagctg

SEQ ID NO: 2779654 - DNA, 25 bp, Homo sapien
caggtgcacactaagctgcagcttc

SEQ ID NO: 2779655 - DNA, 25 bp, Homo sapien
gcttccaggtgcacactaagctgca

SEQ ID NO: 2779656 - DNA, 25 bp, Homo sapien
ttccaggtgcacactaagctgcagc

SEQ ID NO: 2779657 - DNA, 25 bp, Homo sapien
acttttctttgatggtgaacttatg

SEQ ID NO: 2779658 - DNA, 25 bp, Homo sapien
tcttctgtatgcagagaccttttgc

SEQ ID NO: 2779659 - DNA, 25 bp, Homo sapien
agctacagtgtagccaggaacatgc

SEQ ID NO: 2779660 - DNA, 25 bp, Homo sapien
gaccttttgctcagctacagtgtag

SEQ ID NO: 2779661 - DNA, 25 bp, Homo sapien
ttagacagacatctttttagaaaaa

SEQ ID NO: 2779662 - DNA, 25 bp, Homo sapien
tagacagacatctttttagaaaaat

SEQ ID NO: 2779663 - DNA, 25 bp, Homo sapien
ctggaaggatgacctggttgttgat

SEQ ID NO: 2779664 - DNA, 25 bp, Homo sapien
gcaacattgtcctatattcttctct

SEQ ID NO: 2779665 - DNA, 25 bp, Homo sapien
tgtgtatgatgtggccacagcacag

SEQ ID NO: 2779666 - DNA, 25 bp, Homo sapien
cttcaaaacatgtgtatgatgtggc

SEQ ID NO: 2779667 - DNA, 25 bp, Homo sapien
tcctggggattacattgacattact

SEQ ID NO: 2779668 - DNA, 25 bp, Homo sapien
tttgtatacatttcatgatcctggg

SEQ ID NO: 2779669 - DNA, 25 bp, Homo sapien
ggggattacattgacattacttttg

SEQ ID NO: 2779670 - DNA, 25 bp, Homo sapien
ggattacattgacattacttttgtc

SEQ ID NO: 2779671 - DNA, 25 bp, Homo sapien
tgatgccatgaaaacttctttttaa

SEQ ID NO: 2779672 - DNA, 25 bp, Homo sapien
ttaacactgatgccatgaaaacttc

SEQ ID NO: 2779673 - DNA, 25 bp, Homo sapien
cactgatgccatgaaaacttctttt

SEQ ID NO: 2779674 - DNA, 25 bp, Homo sapien
taacactgatgccatgaaaacttct

SEQ ID NO: 2779675 - DNA, 25 bp, Homo sapien
tcccaaacagtagaggtttgggcaa

SEQ ID NO: 2779676 - DNA, 25 bp, Homo sapien
aaacagtagaggtttgggcaaactg

SEQ ID NO: 2779677 - DNA, 25 bp, Homo sapien
cagtagaggtttgggcaaactgcag

SEQ ID NO: 2779678 - DNA, 25 bp, Homo sapien
agaggtttgggcaaactgcagaaat

SEQ ID NO: 2779679 - DNA, 25 bp, Homo sapien
gaagcaggatttgacaatatgctgc

SEQ ID NO: 2779680 - DNA, 25 bp, Homo sapien
tttagaattacacaacagcagcatt

SEQ ID NO: 2779681 - DNA, 25 bp, Homo sapien
gctctgacaccctgagaatctttac

SEQ ID NO: 2779682 - DNA, 25 bp, Homo sapien
tgttgtcaaggctcaaaatatcatg

SEQ ID NO: 2779683 - DNA, 25 bp, Homo sapien
gggtatatgaatacaaaggccagtc

SEQ ID NO: 2779684 - DNA, 25 bp, Homo sapien
taatttaggccatgtcagacgctct

SEQ ID NO: 2779685 - DNA, 25 bp, Homo sapien
aaaatgatgatgaaaacgtggaaga

SEQ ID NO: 2779686 - DNA, 25 bp, Homo sapien
tgaacaatcaggttagccacgccca

SEQ ID NO: 2779687 - DNA, 25 bp, Homo sapien
cagtttttgagggaccgttagcatc

SEQ ID NO: 2779688 - DNA, 25 bp, Homo sapien
ccatggcattcagcatgattacgaa

SEQ ID NO: 2779689 - DNA, 25 bp, Homo sapien
tagcatcccggtttaagtataagaa

SEQ ID NO: 2779690 - DNA, 25 bp, Homo sapien
gattgtggctacttcctcagaaaca

SEQ ID NO: 2779691 - DNA, 25 bp, Homo sapien
cctcctatgtttgggtagaaacagg

SEQ ID NO: 2779692 - DNA, 25 bp, Homo sapien
cacaataattagattaagaatcagc

SEQ ID NO: 2779693 - DNA, 25 bp, Homo sapien
tgatcactccagctcccacaataat

SEQ ID NO: 2779694 - DNA, 25 bp, Homo sapien
tccctcctatgtttgggtagaaaca

SEQ ID NO: 2779695 - DNA, 25 bp, Homo sapien
caattgtggtaacgagaaagtgaaa

SEQ ID NO: 2779696 - DNA, 25 bp, Homo sapien
aacgagaaagtgaaattagctcttc

SEQ ID NO: 2779697 - DNA, 25 bp, Homo sapien
aagtacactggtagtgtgtatcaga

SEQ ID NO: 2779698 - DNA, 25 bp, Homo sapien
cttctgtgcaattatactggttaaa

SEQ ID NO: 2779699 - DNA, 25 bp, Homo sapien
atcaaagcaaccctttgggcccaag

SEQ ID NO: 2779700 - DNA, 25 bp, Homo sapien
taaataagtggttagtcatataccc

SEQ ID NO: 2779701 - DNA, 25 bp, Homo sapien
gggcccaagtcatcagaggttaatt

SEQ ID NO: 2779702 - DNA, 25 bp, Homo sapien
tgaccggctaacacccatgctttct

SEQ ID NO: 2779703 - DNA, 25 bp, Homo sapien
cagagttttgcaaatgtaaattaaa

SEQ ID NO: 2779704 - DNA, 25 bp, Homo sapien
gtagagaggagaatcaattgtctgc

SEQ ID NO: 2779705 - DNA, 25 bp, Homo sapien
ggagaatcaattgtctgctagtaaa

SEQ ID NO: 2779706 - DNA, 25 bp, Homo sapien
gaatcaattgtctgctagtaaaaca

SEQ ID NO: 2779707 - DNA, 25 bp, Homo sapien
gataataacactagaaccatagctg

SEQ ID NO: 2779708 - DNA, 25 bp, Homo sapien
tatacttatcagtgcttgagacctg

SEQ ID NO: 2779709 - DNA, 25 bp, Homo sapien
ttatcgaagaagcagactacatcag

SEQ ID NO: 2779710 - DNA, 25 bp, Homo sapien
tactgatagctatacctgcataaac

SEQ ID NO: 2779711 - DNA, 25 bp, Homo sapien
ggccctgatagtttcaatgaccaat

SEQ ID NO: 2779712 - DNA, 25 bp, Homo sapien
ctattaatctgcctcttgtcggtca

SEQ ID NO: 2779713 - DNA, 25 bp, Homo sapien
cattctagacaagggagtggcttct

SEQ ID NO: 2779714 - DNA, 25 bp, Homo sapien
tacaagcatgcccactatgctcggc

SEQ ID NO: 2779715 - DNA, 25 bp, Homo sapien
tgcttggcacatcctgctggtcaag

SEQ ID NO: 2779716 - DNA, 25 bp, Homo sapien
ggcacatcctgctggtcaagagaag

SEQ ID NO: 2779717 - DNA, 25 bp, Homo sapien
catttgttgcttggcacatcctgct

SEQ ID NO: 2779718 - DNA, 25 bp, Homo sapien
tgttgcttggcacatcctgctggtc

SEQ ID NO: 2779719 - DNA, 25 bp, Homo sapien
ccaaaagctggacacgagccaggta

SEQ ID NO: 2779720 - DNA, 25 bp, Homo sapien
tggcccaaaagctggacacgagcca

SEQ ID NO: 2779721 - DNA, 25 bp, Homo sapien
ctaggataaatgtcaccgaagatat

SEQ ID NO: 2779722 - DNA, 25 bp, Homo sapien
tcaccgaagatatggcccaaaagct

SEQ ID NO: 2779723 - DNA, 25 bp, Homo sapien
gtcactgctagggaagttgtctaaa

SEQ ID NO: 2779724 - DNA, 25 bp, Homo sapien
cactgctagggaagttgtctaaaaa

SEQ ID NO: 2779725 - DNA, 25 bp, Homo sapien
gaatatccttgcaatgaaggacagg

SEQ ID NO: 2779726 - DNA, 25 bp, Homo sapien
taagagtgggtatacagtcatcatc

SEQ ID NO: 2779727 - DNA, 25 bp, Homo sapien
tctggtgactcataggacatctctc

SEQ ID NO: 2779728 - DNA, 25 bp, Homo sapien
tatttgagtaccacaaggtgcctgg

SEQ ID NO: 2779729 - DNA, 25 bp, Homo sapien
cacagagagggtacacggtgcctta

SEQ ID NO: 2779730 - DNA, 25 bp, Homo sapien
ggtattaaaacccaggcctatctga

SEQ ID NO: 2779731 - DNA, 25 bp, Homo sapien
tcaccagcatataagcaatgcacaa

SEQ ID NO: 2779732 - DNA, 25 bp, Homo sapien
tacaatctttggataatggtggtga

SEQ ID NO: 2779733 - DNA, 25 bp, Homo sapien
gctcaatacaatctttggataatgg

SEQ ID NO: 2779734 - DNA, 25 bp, Homo sapien
taatgtcaccagcatataagcaatg

SEQ ID NO: 2779735 - DNA, 25 bp, Homo sapien
cagtctccagtgcaattgtgtcata

SEQ ID NO: 2779736 - DNA, 25 bp, Homo sapien
tccaaattgcaggtccttagctact

SEQ ID NO: 2779737 - DNA, 25 bp, Homo sapien
cagatgtaaactaagtgcagcaagg

SEQ ID NO: 2779738 - DNA, 25 bp, Homo sapien
tattaagtgcttgtaggtgccaggc

SEQ ID NO: 2779739 - DNA, 25 bp, Homo sapien
caactgtatagacctctattagaac

SEQ ID NO: 2779740 - DNA, 25 bp, Homo sapien
tcagtaacaactgtatagacctcta

SEQ ID NO: 2779741 - DNA, 25 bp, Homo sapien
taacaactgtatagacctctattag

SEQ ID NO: 2779742 - DNA, 25 bp, Homo sapien
atttcagtaacaactgtatagacct

SEQ ID NO: 2779743 - DNA, 25 bp, Homo sapien
aaaaagcaagggtaagcactccagt

SEQ ID NO: 2779744 - DNA, 25 bp, Homo sapien
tcttcaagagtgtgatgatacaatt

SEQ ID NO: 2779745 - DNA, 25 bp, Homo sapien
caagggtaagcactccagtcagctg

SEQ ID NO: 2779746 - DNA, 25 bp, Homo sapien
gttcttcaagagtgtgatgatacaa

SEQ ID NO: 2779747 - DNA, 25 bp, Homo sapien
aaaattctgttggtataaaccaatg

SEQ ID NO: 2779748 - DNA, 25 bp, Homo sapien
aattctgttggtataaaccaatgaa

SEQ ID NO: 2779749 - DNA, 25 bp, Homo sapien
aaattctgttggtataaaccaatga

SEQ ID NO: 2779750 - DNA, 25 bp, Homo sapien
aaaatcaaataaaggacagacactg

SEQ ID NO: 2779751 - DNA, 25 bp, Homo sapien
tgacaaggaaaatcaaataaaggac

SEQ ID NO: 2779752 - DNA, 25 bp, Homo sapien
taaaggtgacaaggaaaatcaaata

SEQ ID NO: 2779753 - DNA, 25 bp, Homo sapien
ggaaaatcaaataaaggacagacac

SEQ ID NO: 2779754 - DNA, 25 bp, Homo sapien
agacttgaaattgagcagtgggagg

SEQ ID NO: 2779755 - DNA, 25 bp, Homo sapien
tttgaaaaaaatgaaggagacttga

SEQ ID NO: 2779756 - DNA, 25 bp, Homo sapien
aggagacttgaaattgagcagtggg

SEQ ID NO: 2779757 - DNA, 25 bp, Homo sapien
ttgaaaaaaatgaaggagacttgaa

SEQ ID NO: 2779758 - DNA, 25 bp, Homo sapien
tatcccaccacttttcaaactgttg

SEQ ID NO: 2779759 - DNA, 25 bp, Homo sapien
tccactcccggcacttggacaaatc

SEQ ID NO: 2779760 - DNA, 25 bp, Homo sapien
tcctgtgtcattggcatagaaaatc

SEQ ID NO: 2779761 - DNA, 25 bp, Homo sapien
tcatagagctgttgtcaggatggcc

SEQ ID NO: 2779762 - DNA, 25 bp, Homo sapien
agggttgctattattggtactcagt

SEQ ID NO: 2779763 - DNA, 25 bp, Homo sapien
attggtactcagtatagtgtctgtg

SEQ ID NO: 2779764 - DNA, 25 bp, Homo sapien
ttggtactcagtatagtgtctgtgt

SEQ ID NO: 2779765 - DNA, 25 bp, Homo sapien
cagggttgctattattggtactcag

SEQ ID NO: 2779766 - DNA, 25 bp, Homo sapien
tgatgccaaagacttacagtaaggc

SEQ ID NO: 2779767 - DNA, 25 bp, Homo sapien
tagatctaaggccatatacgaattg

SEQ ID NO: 2779768 - DNA, 25 bp, Homo sapien
tgtactgggttaaatagcattcccc

SEQ ID NO: 2779769 - DNA, 25 bp, Homo sapien
aatttatgtccactagaaacctcag

SEQ ID NO: 2779770 - DNA, 25 bp, Homo sapien
atttggttttcacgtaaatccagat

SEQ ID NO: 2779771 - DNA, 25 bp, Homo sapien
aaattagctgagtgttaccgcgggt

SEQ ID NO: 2779772 - DNA, 25 bp, Homo sapien
tcaaaggctcttagggaaattagct

SEQ ID NO: 2779773 - DNA, 25 bp, Homo sapien
ataaacttccagctcggtacagtgg

SEQ ID NO: 2779774 - DNA, 25 bp, Homo sapien
ttaaggctagaactaacattacagt

SEQ ID NO: 2779775 - DNA, 25 bp, Homo sapien
gctagaactaacattacagtggtaa

SEQ ID NO: 2779776 - DNA, 25 bp, Homo sapien
ccaagtcctagaatttaaggctaga

SEQ ID NO: 2779777 - DNA, 25 bp, Homo sapien
tacagtggtaatagtatttgaaagt

SEQ ID NO: 2779778 - DNA, 25 bp, Homo sapien
aggagccgaaataatgtctgcagac

SEQ ID NO: 2779779 - DNA, 25 bp, Homo sapien
taaactatcattgctccaatgagag

SEQ ID NO: 2779780 - DNA, 25 bp, Homo sapien
gaaaaggagactcgaccactgccca

SEQ ID NO: 2779781 - DNA, 25 bp, Homo sapien
ccaatgagagacaccaaggagaaaa

SEQ ID NO: 2779782 - DNA, 25 bp, Homo sapien
tagacaaatgcatcagtaagggcca

SEQ ID NO: 2779783 - DNA, 25 bp, Homo sapien
gcaagtgataaactaaggttagaca

SEQ ID NO: 2779784 - DNA, 25 bp, Homo sapien
tgggtattctatcgctagacattag

SEQ ID NO: 2779785 - DNA, 25 bp, Homo sapien
gataacctgagaaacagattatagt

SEQ ID NO: 2779786 - DNA, 25 bp, Homo sapien
tggagtagtttaataacatggaagt

SEQ ID NO: 2779787 - DNA, 25 bp, Homo sapien
taacatggaagttaacagttataga

SEQ ID NO: 2779788 - DNA, 25 bp, Homo sapien
aatggtgtggagtagtttaataaca

SEQ ID NO: 2779789 - DNA, 25 bp, Homo sapien
cagttatagagccaataatcccagc

SEQ ID NO: 2779790 - DNA, 25 bp, Homo sapien
ggaagctgcttagtaggcacagaaa

SEQ ID NO: 2779791 - DNA, 25 bp, Homo sapien
gagttgctagggctacagacacaca

SEQ ID NO: 2779792 - DNA, 25 bp, Homo sapien
caaagtctggcctgttgattcatac

SEQ ID NO: 2779793 - DNA, 25 bp, Homo sapien
cgagtagaggtaaggtgttcacaca

SEQ ID NO: 2779794 - DNA, 25 bp, Homo sapien
taatacccataatctattgtcactg

SEQ ID NO: 2779795 - DNA, 25 bp, Homo sapien
cataatctattgtcactgtgtcaaa

SEQ ID NO: 2779796 - DNA, 25 bp, Homo sapien
agggaaatgcttattaatacccata

SEQ ID NO: 2779797 - DNA, 25 bp, Homo sapien
tacccataatctattgtcactgtgt

SEQ ID NO: 2779798 - DNA, 25 bp, Homo sapien
ctctgtagcagcaataaagtgttaa

SEQ ID NO: 2779799 - DNA, 25 bp, Homo sapien
acatcatagtccgtgatttcactac

SEQ ID NO: 2779800 - DNA, 25 bp, Homo sapien
tgttaaaaggcccatcagtatgatg

SEQ ID NO: 2779801 - DNA, 25 bp, Homo sapien
cagtatgatgacacacattccagta

SEQ ID NO: 2779802 - DNA, 25 bp, Homo sapien
ggaatgcttagtatagatgttccca

SEQ ID NO: 2779803 - DNA, 25 bp, Homo sapien
tgttttatgccccaaggaatgctta

SEQ ID NO: 2779804 - DNA, 25 bp, Homo sapien
aatgcttagtatagatgttcccatc

SEQ ID NO: 2779805 - DNA, 25 bp, Homo sapien
tttatgccccaaggaatgcttagta

SEQ ID NO: 2779806 - DNA, 25 bp, Homo sapien
ctgaaaacacagagtaatagcagta

SEQ ID NO: 2779807 - DNA, 25 bp, Homo sapien
cgtatccttcagtgtaactttgaag

SEQ ID NO: 2779808 - DNA, 25 bp, Homo sapien
tcttctggagctggaactacatggt

SEQ ID NO: 2779809 - DNA, 25 bp, Homo sapien
aagtttataagcagagcccaatgga

SEQ ID NO: 2779810 - DNA, 25 bp, Homo sapien
atggactatacacatagcactcttc

SEQ ID NO: 2779811 - DNA, 25 bp, Homo sapien
gtggtgagccggctgtagtaatgaa

SEQ ID NO: 2779812 - DNA, 25 bp, Homo sapien
gaggcatggtcactaaccctctgaa

SEQ ID NO: 2779813 - DNA, 25 bp, Homo sapien
gccttgtctgcaggagtggtgagcc

SEQ ID NO: 2779814 - DNA, 25 bp, Homo sapien
gattcacattcacgatgtttgtggg

SEQ ID NO: 2779815 - DNA, 25 bp, Homo sapien
aaagtgttcagccaaaaattctgga

SEQ ID NO: 2779816 - DNA, 25 bp, Homo sapien
tacaaagggaatatacacttgacaa

SEQ ID NO: 2779817 - DNA, 25 bp, Homo sapien
ctggaagtcagcctttgaagaaaat

SEQ ID NO: 2779818 - DNA, 25 bp, Homo sapien
tatcctccattagtaatgggatgca

SEQ ID NO: 2779819 - DNA, 25 bp, Homo sapien
acagttttcatcgagatgctgagtg

SEQ ID NO: 2779820 - DNA, 25 bp, Homo sapien
tgactactctgagggcagaatgact

SEQ ID NO: 2779821 - DNA, 25 bp, Homo sapien
cttttccaacagttttcatcgagat

SEQ ID NO: 2779822 - DNA, 25 bp, Homo sapien
tccaacagttttcatcgagatgctg

SEQ ID NO: 2779823 - DNA, 25 bp, Homo sapien
aaatatttatggtcatgccacagaa

SEQ ID NO: 2779824 - DNA, 25 bp, Homo sapien
cactcttaagaaggtctgtacccca

SEQ ID NO: 2779825 - DNA, 25 bp, Homo sapien
tgtagttcagctgtgccacactaaa

SEQ ID NO: 2779826 - DNA, 25 bp, Homo sapien
tcctactgaccagttatgcttctct

SEQ ID NO: 2779827 - DNA, 25 bp, Homo sapien
gagggagggtagtggctggaacaat

SEQ ID NO: 2779828 - DNA, 25 bp, Homo sapien
taggggacaggctagagagaaaaac

SEQ ID NO: 2779829 - DNA, 25 bp, Homo sapien
aacaattgggtggtaaagtagagct

SEQ ID NO: 2779830 - DNA, 25 bp, Homo sapien
tgtgtagtgtgttgggagggagggt

SEQ ID NO: 2779831 - DNA, 25 bp, Homo sapien
agtttcataacccaattccccatgg

SEQ ID NO: 2779832 - DNA, 25 bp, Homo sapien
catagatgtgatgcaaacgaaacac

SEQ ID NO: 2779833 - DNA, 25 bp, Homo sapien
ggcccttacaaaagaggcttagcat

SEQ ID NO: 2779834 - DNA, 25 bp, Homo sapien
aagagtaactgcaatgccatgccag

SEQ ID NO: 2779835 - DNA, 25 bp, Homo sapien
gggtcggtacactatggcctgataa

SEQ ID NO: 2779836 - DNA, 25 bp, Homo sapien
tgggtgtcacagcagtacgaagtac

SEQ ID NO: 2779837 - DNA, 25 bp, Homo sapien
tagagtccttctgtgcagaccaggg

SEQ ID NO: 2779838 - DNA, 25 bp, Homo sapien
gaaattaaggtgaacgagcctgacc

SEQ ID NO: 2779839 - DNA, 25 bp, Homo sapien
aagaaggctaggagtaaatacagta

SEQ ID NO: 2779840 - DNA, 25 bp, Homo sapien
gagtaaagtgtctggcaaacagaag

SEQ ID NO: 2779841 - DNA, 25 bp, Homo sapien
caggcagacagacaactagcgaata

SEQ ID NO: 2779842 - DNA, 25 bp, Homo sapien
gtgatctcacctaaaaacgtcatag

SEQ ID NO: 2779843 - DNA, 25 bp, Homo sapien
tgtatatggttaaggaaaaggtcca

SEQ ID NO: 2779844 - DNA, 25 bp, Homo sapien
ttattcaatagggaatatttcccca

SEQ ID NO: 2779845 - DNA, 25 bp, Homo sapien
tgtaaatggctactcagttatccca

SEQ ID NO: 2779846 - DNA, 25 bp, Homo sapien
gatagttgtaggtgttcggtcttat

SEQ ID NO: 2779847 - DNA, 25 bp, Homo sapien
tttccattataataccaagctgaca

SEQ ID NO: 2779848 - DNA, 25 bp, Homo sapien
tgtaatagactaagtctctgacata

SEQ ID NO: 2779849 - DNA, 25 bp, Homo sapien
tccattataataccaagctgacaac

SEQ ID NO: 2779850 - DNA, 25 bp, Homo sapien
aatagccatggaaatgtaatagact

SEQ ID NO: 2779851 - DNA, 25 bp, Homo sapien
aatggaatgcactttaatgacttac

SEQ ID NO: 2779852 - DNA, 25 bp, Homo sapien
gattgtaaatagctgattccctctc

SEQ ID NO: 2779853 - DNA, 25 bp, Homo sapien
ttctgatggccactataaatgacaa

SEQ ID NO: 2779854 - DNA, 25 bp, Homo sapien
cctgccaacttactgtaatggaatg

SEQ ID NO: 2779855 - DNA, 25 bp, Homo sapien
tgcggccttctgcagcggttgtgtc

SEQ ID NO: 2779856 - DNA, 25 bp, Homo sapien
cctgcggccttctgcagcggttgtg

SEQ ID NO: 2779857 - DNA, 25 bp, Homo sapien
ccctgcggccttctgcagcggttgt

SEQ ID NO: 2779858 - DNA, 25 bp, Homo sapien
gaccctgcggccttctgcagcggtt

SEQ ID NO: 2779859 - DNA, 25 bp, Homo sapien
cccagacgatgggcagcggggcaga

SEQ ID NO: 2779860 - DNA, 25 bp, Homo sapien
gacggggtggctgccgggtggagag

SEQ ID NO: 2779861 - DNA, 25 bp, Homo sapien
atgtgatggtggccgggaagaggcg

SEQ ID NO: 2779862 - DNA, 25 bp, Homo sapien
cggggtggctgccgggtggagaggc

SEQ ID NO: 2779863 - DNA, 25 bp, Homo sapien
tacctcgagcacttagcatattacc

SEQ ID NO: 2779864 - DNA, 25 bp, Homo sapien
aactatctgctgaaattttacctca

SEQ ID NO: 2779865 - DNA, 25 bp, Homo sapien
gcatattaccttgcgcaaagtgggt

SEQ ID NO: 2779866 - DNA, 25 bp, Homo sapien
ttacttttactcttctacctcgagc

SEQ ID NO: 2779867 - DNA, 25 bp, Homo sapien
ttttggatcttagatccgatggctc

SEQ ID NO: 2779868 - DNA, 25 bp, Homo sapien
gatctacctcagaggtgccaagatg

SEQ ID NO: 2779869 - DNA, 25 bp, Homo sapien
tctttcatgatctacctcagaggtg

SEQ ID NO: 2779870 - DNA, 25 bp, Homo sapien
cataggtccaggatctctttcatga

SEQ ID NO: 2779871 - DNA, 25 bp, Homo sapien
ctcacactctaagcactgaagaagt

SEQ ID NO: 2779872 - DNA, 25 bp, Homo sapien
tctcacactctaagcactgaagaag

SEQ ID NO: 2779873 - DNA, 25 bp, Homo sapien
tttctcacactctaagcactgaaga

SEQ ID NO: 2779874 - DNA, 25 bp, Homo sapien
tcacactctaagcactgaagaagtt

SEQ ID NO: 2779875 - DNA, 25 bp, Homo sapien
ttcctgcccaacgtttaagcaagtc

SEQ ID NO: 2779876 - DNA, 25 bp, Homo sapien
cgtttaagcaagtcaaagctctcat

SEQ ID NO: 2779877 - DNA, 25 bp, Homo sapien
gcccaacgtttaagcaagtcaaagc

SEQ ID NO: 2779878 - DNA, 25 bp, Homo sapien
tgtgacacagatgttagtaacatgt

SEQ ID NO: 2779879 - DNA, 25 bp, Homo sapien
gaagttgaaaagatgattgtaggga

SEQ ID NO: 2779880 - DNA, 25 bp, Homo sapien
gatgattgtagggaagccagtatcc

SEQ ID NO: 2779881 - DNA, 25 bp, Homo sapien
gaaaagatgattgtagggaagccag

SEQ ID NO: 2779882 - DNA, 25 bp, Homo sapien
gttgaaaagatgattgtagggaagc

SEQ ID NO: 2779883 - DNA, 25 bp, Homo sapien
ttgagtaggtttctccaactcggtg

SEQ ID NO: 2779884 - DNA, 25 bp, Homo sapien
gagtaggtttctccaactcggtgga

SEQ ID NO: 2779885 - DNA, 25 bp, Homo sapien
tgagtaggtttctccaactcggtgg

SEQ ID NO: 2779886 - DNA, 25 bp, Homo sapien
gacgagaagataaagattcccttcc

SEQ ID NO: 2779887 - DNA, 25 bp, Homo sapien
tcaacctcggagaactagacgagaa

SEQ ID NO: 2779888 - DNA, 25 bp, Homo sapien
aattctcgcaatttgcgaccgcggg

SEQ ID NO: 2779889 - DNA, 25 bp, Homo sapien
tggagttctgaatgcgccaagcccg

SEQ ID NO: 2779890 - DNA, 25 bp, Homo sapien
cttgccattcatagagccccggagg

SEQ ID NO: 2779891 - DNA, 25 bp, Homo sapien
cacgtgagaaaacgctgatgcggca

SEQ ID NO: 2779892 - DNA, 25 bp, Homo sapien
ggcgagtccagtcggaactgcagcc

SEQ ID NO: 2779893 - DNA, 25 bp, Homo sapien
ccagttccttgtcccggctggaggc

SEQ ID NO: 2779894 - DNA, 25 bp, Homo sapien
ggctttcctggcgcgtgttgtatga

SEQ ID NO: 2779895 - DNA, 25 bp, Homo sapien
tcctggcgcgtgttgtatgatctgg

SEQ ID NO: 2779896 - DNA, 25 bp, Homo sapien
gttgtatgatctggttacgtccttg

SEQ ID NO: 2779897 - DNA, 25 bp, Homo sapien
ggcgcgtgttgtatgatctggttac

SEQ ID NO: 2779898 - DNA, 25 bp, Homo sapien
aaagggaatgcacctcctccatgag

SEQ ID NO: 2779899 - DNA, 25 bp, Homo sapien
aggaaaagggaatgcacctcctcca

SEQ ID NO: 2779900 - DNA, 25 bp, Homo sapien
gaaaagggaatgcacctcctccatg

SEQ ID NO: 2779901 - DNA, 25 bp, Homo sapien
ggaggaaaagggaatgcacctcctc

SEQ ID NO: 2779902 - DNA, 25 bp, Homo sapien
atgtggagcgagtctctgaaatgca

SEQ ID NO: 2779903 - DNA, 25 bp, Homo sapien
cccggatgtggagcgagtctctgaa

SEQ ID NO: 2779904 - DNA, 25 bp, Homo sapien
ctggaatccccggatgtggagcgag

SEQ ID NO: 2779905 - DNA, 25 bp, Homo sapien
gaatccccggatgtggagcgagtct

SEQ ID NO: 2779906 - DNA, 25 bp, Homo sapien
ctgtgatgggtaaaaggggagagag

SEQ ID NO: 2779907 - DNA, 25 bp, Homo sapien
gtgatgggtaaaaggggagagagca

SEQ ID NO: 2779908 - DNA, 25 bp, Homo sapien
tgtgatgggtaaaaggggagagagc

SEQ ID NO: 2779909 - DNA, 25 bp, Homo sapien
gcttttctacgggaactggcctgaa

SEQ ID NO: 2779910 - DNA, 25 bp, Homo sapien
cagccgtttaagtcgcgtgggcgcc

SEQ ID NO: 2779911 - DNA, 25 bp, Homo sapien
agaggtgagtgggccgcttttctac

SEQ ID NO: 2779912 - DNA, 25 bp, Homo sapien
acgcagtgggcgtcttgcacgtgca

SEQ ID NO: 2779913 - DNA, 25 bp, Homo sapien
tgtggatggagtaggaggagttttg

SEQ ID NO: 2779914 - DNA, 25 bp, Homo sapien
gaggagttttgaagccgtccttcga

SEQ ID NO: 2779915 - DNA, 25 bp, Homo sapien
agagtcccacgggtgcccaaagtct

SEQ ID NO: 2779916 - DNA, 25 bp, Homo sapien
gagtcccacgggtgcccaaagtctg

SEQ ID NO: 2779917 - DNA, 25 bp, Homo sapien
cagaggaggcgaaggggccttattc

SEQ ID NO: 2779918 - DNA, 25 bp, Homo sapien
ggcttcttcactgcgttttctctga

SEQ ID NO: 2779919 - DNA, 25 bp, Homo sapien
tgcagaggaggcgaaggggccttat

SEQ ID NO: 2779920 - DNA, 25 bp, Homo sapien
cactgcgttttctctgaacagacat

SEQ ID NO: 2779921 - DNA, 25 bp, Homo sapien
gcctgtatagtgatcacttctgtct

SEQ ID NO: 2779922 - DNA, 25 bp, Homo sapien
tgaccgtgaatgtaagcctgtatag

SEQ ID NO: 2779923 - DNA, 25 bp, Homo sapien
tgttaactgaccgtgaatgtaagcc

SEQ ID NO: 2779924 - DNA, 25 bp, Homo sapien
gaggcctcttgttaactgaccgtga

SEQ ID NO: 2779925 - DNA, 25 bp, Homo sapien
gcattatggcccttctacatggcca

SEQ ID NO: 2779926 - DNA, 25 bp, Homo sapien
gataagagaatctcatgtatatgaa

SEQ ID NO: 2779927 - DNA, 25 bp, Homo sapien
gaactcttgttgaatttgcattatg

SEQ ID NO: 2779928 - DNA, 25 bp, Homo sapien
ttgagctgtgggttatatagaaatg

SEQ ID NO: 2779929 - DNA, 25 bp, Homo sapien
tctggagagtcagaagtctgagatc

SEQ ID NO: 2779930 - DNA, 25 bp, Homo sapien
agttctggagagtcagaagtctgag

SEQ ID NO: 2779931 - DNA, 25 bp, Homo sapien
gttcatagatggtgtcttctctctg

SEQ ID NO: 2779932 - DNA, 25 bp, Homo sapien
ctggttcatagatggtgtcttctct

SEQ ID NO: 2779933 - DNA, 25 bp, Homo sapien
ctcgggaaactcttcagttatcaat

SEQ ID NO: 2779934 - DNA, 25 bp, Homo sapien
ccataggcagtgctttcggggccag

SEQ ID NO: 2779935 - DNA, 25 bp, Homo sapien
gctttcggggccagtagccttgctg

SEQ ID NO: 2779936 - DNA, 25 bp, Homo sapien
caagttagttgtggtgctctcagct

SEQ ID NO: 2779937 - DNA, 25 bp, Homo sapien
ttagtttatccatatagcaagatgt

SEQ ID NO: 2779938 - DNA, 25 bp, Homo sapien
tatccatatagcaagatgtaatggc

SEQ ID NO: 2779939 - DNA, 25 bp, Homo sapien
ccatatagcaagatgtaatggccat

SEQ ID NO: 2779940 - DNA, 25 bp, Homo sapien
tttatccatatagcaagatgtaatg

SEQ ID NO: 2779941 - DNA, 25 bp, Homo sapien
cccattccattcacacctatagatg

SEQ ID NO: 2779942 - DNA, 25 bp, Homo sapien
tccattcacacctatagatgcacag

SEQ ID NO: 2779943 - DNA, 25 bp, Homo sapien
cacacctatagatgcacagcttcca

SEQ ID NO: 2779944 - DNA, 25 bp, Homo sapien
tatagatgcacagcttccattactg

SEQ ID NO: 2779945 - DNA, 25 bp, Homo sapien
ctatgcaatgtctgattgaaaatca

SEQ ID NO: 2779946 - DNA, 25 bp, Homo sapien
tatgcaatgtctgattgaaaatcac

SEQ ID NO: 2779947 - DNA, 25 bp, Homo sapien
ctgtaaaacttggtcaaatccactc

SEQ ID NO: 2779948 - DNA, 25 bp, Homo sapien
tcaaatccactcatgctgctgtggc

SEQ ID NO: 2779949 - DNA, 25 bp, Homo sapien
tgagttttcctgtaaaacttggtca

SEQ ID NO: 2779950 - DNA, 25 bp, Homo sapien
aaacttggtcaaatccactcatgct

SEQ ID NO: 2779951 - DNA, 25 bp, Homo sapien
ccgtaagcagtaccgctggctcctg

SEQ ID NO: 2779952 - DNA, 25 bp, Homo sapien
tggctaccgtaagcagtaccgctgg

SEQ ID NO: 2779953 - DNA, 25 bp, Homo sapien
cacaattcaagaagggttctacata

SEQ ID NO: 2779954 - DNA, 25 bp, Homo sapien
gcacaattcaagaagggttctacat

SEQ ID NO: 2779955 - DNA, 25 bp, Homo sapien
ctgccatcaggaccaatttcaatgt

SEQ ID NO: 2779956 - DNA, 25 bp, Homo sapien
atcaggaccaatttcaatgtgtacc

SEQ ID NO: 2779957 - DNA, 25 bp, Homo sapien
gccatcaggaccaatttcaatgtgt

SEQ ID NO: 2779958 - DNA, 25 bp, Homo sapien
catcaggaccaatttcaatgtgtac

SEQ ID NO: 2779959 - DNA, 25 bp, Homo sapien
agcattgagcagtcaaaaaaattac

SEQ ID NO: 2779960 - DNA, 25 bp, Homo sapien
tacaaatgtcattctcagtagctct

SEQ ID NO: 2779961 - DNA, 25 bp, Homo sapien
tcagtagctctgtaaggtaatccac

SEQ ID NO: 2779962 - DNA, 25 bp, Homo sapien
agtagctctgtaaggtaatccacac

SEQ ID NO: 2779963 - DNA, 25 bp, Homo sapien
aaacaataattgaggtctcttccaa

SEQ ID NO: 2779964 - DNA, 25 bp, Homo sapien
tatatacagtgtcctgttgtgctct

SEQ ID NO: 2779965 - DNA, 25 bp, Homo sapien
aaggtagagccaccatccccatatt

SEQ ID NO: 2779966 - DNA, 25 bp, Homo sapien
cccatatttgtgatcagacattcct

SEQ ID NO: 2779967 - DNA, 25 bp, Homo sapien
tataattgtcacaggctccatatcc

SEQ ID NO: 2779968 - DNA, 25 bp, Homo sapien
attgtcacaggctccatatcctcca

SEQ ID NO: 2779969 - DNA, 25 bp, Homo sapien
atagccatagccattataattgtca

SEQ ID NO: 2779970 - DNA, 25 bp, Homo sapien
gccattataattgtcacaggctcca

SEQ ID NO: 2779971 - DNA, 25 bp, Homo sapien
aatgctgttaaaacctctgccagaa

SEQ ID NO: 2779972 - DNA, 25 bp, Homo sapien
tgctgttaaaacctctgccagaacc

SEQ ID NO: 2779973 - DNA, 25 bp, Homo sapien
atgctgttaaaacctctgccagaac

SEQ ID NO: 2779974 - DNA, 25 bp, Homo sapien
caatgctgttaaaacctctgccaga

SEQ ID NO: 2779975 - DNA, 25 bp, Homo sapien
ggattgtagtgagttccaacttcag

SEQ ID NO: 2779976 - DNA, 25 bp, Homo sapien
cataagcttttatggtggattgtag

SEQ ID NO: 2779977 - DNA, 25 bp, Homo sapien
gtagtgagttccaacttcagccctg

SEQ ID NO: 2779978 - DNA, 25 bp, Homo sapien
tttatggtggattgtagtgagttcc

SEQ ID NO: 2779979 - DNA, 25 bp, Homo sapien
ttttcggttattttctgcgaagcaa

SEQ ID NO: 2779980 - DNA, 25 bp, Homo sapien
cggttattttctgcgaagcaaactg

SEQ ID NO: 2779981 - DNA, 25 bp, Homo sapien
ttattttctgcgaagcaaactgcac

SEQ ID NO: 2779982 - DNA, 25 bp, Homo sapien
gcacgaagacctcccctatactcct

SEQ ID NO: 2779983 - DNA, 25 bp, Homo sapien
ctggcaatgttatccgatttggcac

SEQ ID NO: 2779984 - DNA, 25 bp, Homo sapien
atcattggccgtgtcaggactattt

SEQ ID NO: 2779985 - DNA, 25 bp, Homo sapien
catcattggccgtgtcaggactatt

SEQ ID NO: 2779986 - DNA, 25 bp, Homo sapien
cttgaatgcttcaacaaaactgtgt

SEQ ID NO: 2779987 - DNA, 25 bp, Homo sapien
cgccacctttggtgcccaacatcat

SEQ ID NO: 2779988 - DNA, 25 bp, Homo sapien
tcagaagaaacgctgcacttcatcg

SEQ ID NO: 2779989 - DNA, 25 bp, Homo sapien
cttcaacataaacccctcgccacct

SEQ ID NO: 2779990 - DNA, 25 bp, Homo sapien
agaagaaacgctgcacttcatcggc

SEQ ID NO: 2779991 - DNA, 25 bp, Homo sapien
caggactaggaggaaggcagcttct

SEQ ID NO: 2779992 - DNA, 25 bp, Homo sapien
ttttaagcatttggatctggagatc

SEQ ID NO: 2779993 - DNA, 25 bp, Homo sapien
tccaagctgcgtgggctctttgaga

SEQ ID NO: 2779994 - DNA, 25 bp, Homo sapien
gaactgcttgttggatgcgtgctgt

SEQ ID NO: 2779995 - DNA, 25 bp, Homo sapien
agcttatgctccagttgtttgtcca

SEQ ID NO: 2779996 - DNA, 25 bp, Homo sapien
tctggtgtggtctgatccccctctg

SEQ ID NO: 2779997 - DNA, 25 bp, Homo sapien
gcctgtgctttgggccacagcttat

SEQ ID NO: 2779998 - DNA, 25 bp, Homo sapien
gatgcgtgggaataagtccttgtgt

SEQ ID NO: 2779999 - DNA, 25 bp, Homo sapien
cttggtgcatgggacccatccgcat

SEQ ID NO: 2780000 - DNA, 25 bp, Homo sapien
ctggtgaaataggctaccagccaga

SEQ ID NO: 2780001 - DNA, 25 bp, Homo sapien
gaccttggtgcatgggacccatccg

SEQ ID NO: 2780002 - DNA, 25 bp, Homo sapien
tggtgaaataggctaccagccagat

SEQ ID NO: 2780003 - DNA, 25 bp, Homo sapien
aaaacaagcagtattctcagcagca

SEQ ID NO: 2780004 - DNA, 25 bp, Homo sapien
acaagcagtattctcagcagcactg

SEQ ID NO: 2780005 - DNA, 25 bp, Homo sapien
tatgtcagagagatgctttaaaaca

SEQ ID NO: 2780006 - DNA, 25 bp, Homo sapien
gcactgatatagctacgagaaccta

SEQ ID NO: 2780007 - DNA, 25 bp, Homo sapien
cttgacacagagctctatgcagggc

SEQ ID NO: 2780008 - DNA, 25 bp, Homo sapien
agaccccaggccacaatagcccttg

SEQ ID NO: 2780009 - DNA, 25 bp, Homo sapien
tttgctccgaagcacaaacagctcc

SEQ ID NO: 2780010 - DNA, 25 bp, Homo sapien
gacgcttgtcgtgtgctgatgaaaa

SEQ ID NO: 2780011 - DNA, 25 bp, Homo sapien
ggacggtacccctgaggcctgcact

SEQ ID NO: 2780012 - DNA, 25 bp, Homo sapien
tccttgtctgagagagccttgagtg

SEQ ID NO: 2780013 - DNA, 25 bp, Homo sapien
gtgactgagcatgggtgacccgtca

SEQ ID NO: 2780014 - DNA, 25 bp, Homo sapien
agtgaaggagctcaggacggtaccc

SEQ ID NO: 2780015 - DNA, 25 bp, Homo sapien
agcagaatggactgacagggcttcc

SEQ ID NO: 2780016 - DNA, 25 bp, Homo sapien
cagaatggactgacagggcttccag

SEQ ID NO: 2780017 - DNA, 25 bp, Homo sapien
gactgacagggcttccagatggaca

SEQ ID NO: 2780018 - DNA, 25 bp, Homo sapien
aatggactgacagggcttccagatg

SEQ ID NO: 2780019 - DNA, 25 bp, Homo sapien
aaatgccctgctggcgtctaattgg

SEQ ID NO: 2780020 - DNA, 25 bp, Homo sapien
cattgccgggtggtcccaggtggag

SEQ ID NO: 2780021 - DNA, 25 bp, Homo sapien
tctctggctaagtgttgtaatgaaa

SEQ ID NO: 2780022 - DNA, 25 bp, Homo sapien
tggcgtctaattggagaccattgcc

SEQ ID NO: 2780023 - DNA, 25 bp, Homo sapien
gacccagccatcgtttcccctcgtc

SEQ ID NO: 2780024 - DNA, 25 bp, Homo sapien
aggacccagccatcgtttcccctcg

SEQ ID NO: 2780025 - DNA, 25 bp, Homo sapien
cagccatcgtttcccctcgtcccag

SEQ ID NO: 2780026 - DNA, 25 bp, Homo sapien
gacaggacccagccatcgtttcccc

SEQ ID NO: 2780027 - DNA, 25 bp, Homo sapien
cctccgcaggatgcttctccttgga

SEQ ID NO: 2780028 - DNA, 25 bp, Homo sapien
ccgcaggatgcttctccttggacat

SEQ ID NO: 2780029 - DNA, 25 bp, Homo sapien
ctccgcaggatgcttctccttggac

SEQ ID NO: 2780030 - DNA, 25 bp, Homo sapien
tccgcaggatgcttctccttggaca

SEQ ID NO: 2780031 - DNA, 25 bp, Homo sapien
tgggttgtagataaatccatctgtg

SEQ ID NO: 2780032 - DNA, 25 bp, Homo sapien
cttgagcatgggttgtagataaatc

SEQ ID NO: 2780033 - DNA, 25 bp, Homo sapien
gaggggtcctccttgcttgaagtca

SEQ ID NO: 2780034 - DNA, 25 bp, Homo sapien
ccccacgagcacttgagcatgggtt

SEQ ID NO: 2780035 - DNA, 25 bp, Homo sapien
gccaaacaccgagcactatgctggg

SEQ ID NO: 2780036 - DNA, 25 bp, Homo sapien
ctgttcatataagcaagctctgcca

SEQ ID NO: 2780037 - DNA, 25 bp, Homo sapien
catataagcaagctctgccaaacac

SEQ ID NO: 2780038 - DNA, 25 bp, Homo sapien
tgccaaacaccgagcactatgctgg

SEQ ID NO: 2780039 - DNA, 25 bp, Homo sapien
ggtgatcagaaaggtctgccggttc

SEQ ID NO: 2780040 - DNA, 25 bp, Homo sapien
tgatcagaaaggtctgccggttcat

SEQ ID NO: 2780041 - DNA, 25 bp, Homo sapien
agcaggtgatcagaaaggtctgccg

SEQ ID NO: 2780042 - DNA, 25 bp, Homo sapien
caggtgatcagaaaggtctgccggt

SEQ ID NO: 2780043 - DNA, 25 bp, Homo sapien
tgtggattaccaccatatagctcac

SEQ ID NO: 2780044 - DNA, 25 bp, Homo sapien
gaatgtccacaggtttctaaaacta

SEQ ID NO: 2780045 - DNA, 25 bp, Homo sapien
tagtcacagggaataaagaatcagg

SEQ ID NO: 2780046 - DNA, 25 bp, Homo sapien
gacagaacttttctatggagaaccc

SEQ ID NO: 2780047 - DNA, 25 bp, Homo sapien
taagttgtccaagagccaaccccga

SEQ ID NO: 2780048 - DNA, 25 bp, Homo sapien
tatggaagagcctatacgcagttgt

SEQ ID NO: 2780049 - DNA, 25 bp, Homo sapien
cacattaggataagatgagccacca

SEQ ID NO: 2780050 - DNA, 25 bp, Homo sapien
ccttaaagaaatcaggcttgagcct

SEQ ID NO: 2780051 - DNA, 25 bp, Homo sapien
tattaagaccaagatagtgtactgg

SEQ ID NO: 2780052 - DNA, 25 bp, Homo sapien
tgcatagtcagatgatagtaaccac

SEQ ID NO: 2780053 - DNA, 25 bp, Homo sapien
gctacgatttcagacctcagctatt

SEQ ID NO: 2780054 - DNA, 25 bp, Homo sapien
aaatgtcacaaaacccacacgaagc

SEQ ID NO: 2780055 - DNA, 25 bp, Homo sapien
gaccagtccaaagaagaattaggct

SEQ ID NO: 2780056 - DNA, 25 bp, Homo sapien
tttccttgctgctgttcccgagtgc

SEQ ID NO: 2780057 - DNA, 25 bp, Homo sapien
tcccgagtgccgactgatccatagt

SEQ ID NO: 2780058 - DNA, 25 bp, Homo sapien
ggctgtaagactgctagttcatacc

SEQ ID NO: 2780059 - DNA, 25 bp, Homo sapien
taggttttaatggtacaaagtgtga

SEQ ID NO: 2780060 - DNA, 25 bp, Homo sapien
tttgtccagacaaggttttctgatg

SEQ ID NO: 2780061 - DNA, 25 bp, Homo sapien
ggtaggataccacagacatcagtaa

SEQ ID NO: 2780062 - DNA, 25 bp, Homo sapien
cagtgagtgaactagttttgtccag

SEQ ID NO: 2780063 - DNA, 25 bp, Homo sapien
tcagattacaaaagctgggctcatg

SEQ ID NO: 2780064 - DNA, 25 bp, Homo sapien
cactaccaatggaagggacctaagg

SEQ ID NO: 2780065 - DNA, 25 bp, Homo sapien
ccaagttgtcttagtgtgcctcaaa

SEQ ID NO: 2780066 - DNA, 25 bp, Homo sapien
cactgatatacacgaagctgctcct

SEQ ID NO: 2780067 - DNA, 25 bp, Homo sapien
agccgccttgccgtacagtctgtgg

SEQ ID NO: 2780068 - DNA, 25 bp, Homo sapien
tagaagatgacatgcatgaagaccc

SEQ ID NO: 2780069 - DNA, 25 bp, Homo sapien
gtcgcagcctccatgccaactgttt

SEQ ID NO: 2780070 - DNA, 25 bp, Homo sapien
ttttaggcatgccttcatcagtcgc

SEQ ID NO: 2780071 - DNA, 25 bp, Homo sapien
cactgggcaatatgactctttgaag

SEQ ID NO: 2780072 - DNA, 25 bp, Homo sapien
gaccactgggcaatatgactctttg

SEQ ID NO: 2780073 - DNA, 25 bp, Homo sapien
tgggcaatatgactctttgaaggat

SEQ ID NO: 2780074 - DNA, 25 bp, Homo sapien
gtgaccactgggcaatatgactctt

SEQ ID NO: 2780075 - DNA, 25 bp, Homo sapien
gaacattaggccagatgtgtttttt

SEQ ID NO: 2780076 - DNA, 25 bp, Homo sapien
acattaggccagatgtgttttttaa

SEQ ID NO: 2780077 - DNA, 25 bp, Homo sapien
ctggaacattaggccagatgtgttt

SEQ ID NO: 2780078 - DNA, 25 bp, Homo sapien
ggaacattaggccagatgtgttttt

SEQ ID NO: 2780079 - DNA, 25 bp, Homo sapien
aaaattaggaacaaagcaatgctct

SEQ ID NO: 2780080 - DNA, 25 bp, Homo sapien
ctagaggtcttagccagtgcattaa

SEQ ID NO: 2780081 - DNA, 25 bp, Homo sapien
gcaatgctcttatatggtctagatg

SEQ ID NO: 2780082 - DNA, 25 bp, Homo sapien
gatgtactatatgtactagaggtct

SEQ ID NO: 2780083 - DNA, 25 bp, Homo sapien
agtggaggaagaagcgaatgcgcag

SEQ ID NO: 2780084 - DNA, 25 bp, Homo sapien
ctcggcgccatgagagccaagtgga

SEQ ID NO: 2780085 - DNA, 25 bp, Homo sapien
agcgaatgcgcaggctgaagcgcaa

SEQ ID NO: 2780086 - DNA, 25 bp, Homo sapien
aggaagaagcgaatgcgcaggctga

SEQ ID NO: 2780087 - DNA, 25 bp, Homo sapien
cctctgatcgccgatcacctctgag

SEQ ID NO: 2780088 - DNA, 25 bp, Homo sapien
tcgccctctgatcgccgatcacctc

SEQ ID NO: 2780089 - DNA, 25 bp, Homo sapien
catcgccctctgatcgccgatcacc

SEQ ID NO: 2780090 - DNA, 25 bp, Homo sapien
cttcatcgccctctgatcgccgatc

SEQ ID NO: 2780091 - DNA, 25 bp, Homo sapien
ctggacctgtgacattctggactat

SEQ ID NO: 2780092 - DNA, 25 bp, Homo sapien
ggacctgtgacattctggactattt

SEQ ID NO: 2780093 - DNA, 25 bp, Homo sapien
tctgccctggacctgtgacattctg

SEQ ID NO: 2780094 - DNA, 25 bp, Homo sapien
tggtcctctgccctggacctgtgac

SEQ ID NO: 2780095 - DNA, 25 bp, Homo sapien
tggccgagtgtaacaaccatataat

SEQ ID NO: 2780096 - DNA, 25 bp, Homo sapien
tgtaacaaccatataataaatcacc

SEQ ID NO: 2780097 - DNA, 25 bp, Homo sapien
ccgagtgtaacaaccatataataaa

SEQ ID NO: 2780098 - DNA, 25 bp, Homo sapien
gagtgtaacaaccatataataaatc

SEQ ID NO: 2780099 - DNA, 25 bp, Homo sapien
tatgtaaaagacatacgcaaaagac

SEQ ID NO: 2780100 - DNA, 25 bp, Homo sapien
gactacacgctatgtgattctattt

SEQ ID NO: 2780101 - DNA, 25 bp, Homo sapien
tataaaattcttggccgtggctcac

SEQ ID NO: 2780102 - DNA, 25 bp, Homo sapien
ggagaagtatatgcaacatcatgga

SEQ ID NO: 2780103 - DNA, 25 bp, Homo sapien
taagcaaacaggcacgactatggct

SEQ ID NO: 2780104 - DNA, 25 bp, Homo sapien
tgctaagcaaacaggcacgactatg

SEQ ID NO: 2780105 - DNA, 25 bp, Homo sapien
ttgtcaataggaatgctaagcaaac

SEQ ID NO: 2780106 - DNA, 25 bp, Homo sapien
aacaggcacgactatggcttcaatt

SEQ ID NO: 2780107 - DNA, 25 bp, Homo sapien
taagaagacataatacaacttccca

SEQ ID NO: 2780108 - DNA, 25 bp, Homo sapien
ggtgtgatgggaaataatgttgaca

SEQ ID NO: 2780109 - DNA, 25 bp, Homo sapien
tacaacttcccaaccagacttactg

SEQ ID NO: 2780110 - DNA, 25 bp, Homo sapien
tgttgacatatgaactaagaagaca

SEQ ID NO: 2780111 - DNA, 25 bp, Homo sapien
gagtggcacgagtaggaataaacta

SEQ ID NO: 2780112 - DNA, 25 bp, Homo sapien
tcaaaaggaggatatagctggtaca

SEQ ID NO: 2780113 - DNA, 25 bp, Homo sapien
caagcctaagatccctaaataccac

SEQ ID NO: 2780114 - DNA, 25 bp, Homo sapien
gctaagaactttaggagctgctcaa

SEQ ID NO: 2780115 - DNA, 25 bp, Homo sapien
tgtccacatactaactcaaggctca

SEQ ID NO: 2780116 - DNA, 25 bp, Homo sapien
gtaactaacatcctatgaagctcag

SEQ ID NO: 2780117 - DNA, 25 bp, Homo sapien
tcatgctgctctctaagatgccacc

SEQ ID NO: 2780118 - DNA, 25 bp, Homo sapien
aaggtcctcgttggcaagactcaag

SEQ ID NO: 2780119 - DNA, 25 bp, Homo sapien
gcattcaaccaacaaggcacatgga

SEQ ID NO: 2780120 - DNA, 25 bp, Homo sapien
tactacttatcattaactaggctgg

SEQ ID NO: 2780121 - DNA, 25 bp, Homo sapien
tattcattactgaccctaacagcaa

SEQ ID NO: 2780122 - DNA, 25 bp, Homo sapien
ggaagatacagaagagccagatgat

SEQ ID NO: 2780123 - DNA, 25 bp, Homo sapien
agcttgcagttgaagaaaatgatga

SEQ ID NO: 2780124 - DNA, 25 bp, Homo sapien
tgaataggcaagtaagaaaacaggg

SEQ ID NO: 2780125 - DNA, 25 bp, Homo sapien
gaaagggtacgcacaatcaacagga

SEQ ID NO: 2780126 - DNA, 25 bp, Homo sapien
agttagcatgaggagcttgcagttg

SEQ ID NO: 2780127 - DNA, 25 bp, Homo sapien
gtaaaagtgaattctggaccatcct

SEQ ID NO: 2780128 - DNA, 25 bp, Homo sapien
tgtatgctgccattcgtaccatgta

SEQ ID NO: 2780129 - DNA, 25 bp, Homo sapien
taccatgtacaatgtgtcactagtc

SEQ ID NO: 2780130 - DNA, 25 bp, Homo sapien
cttcccaccttcatctgtgtatgct

SEQ ID NO: 2780131 - DNA, 25 bp, Homo sapien
ctgtgtgggaagaatccacattcac

SEQ ID NO: 2780132 - DNA, 25 bp, Homo sapien
gtgtgggaagaatccacattcacag

SEQ ID NO: 2780133 - DNA, 25 bp, Homo sapien
tgtgtgggaagaatccacattcaca

SEQ ID NO: 2780134 - DNA, 25 bp, Homo sapien
tctaagacagcttcgtttttcccta

SEQ ID NO: 2780135 - DNA, 25 bp, Homo sapien
ttgtccgaacagtaggtcctttgga

SEQ ID NO: 2780136 - DNA, 25 bp, Homo sapien
caggaagttggtcccactctaagac

SEQ ID NO: 2780137 - DNA, 25 bp, Homo sapien
cgaacagtaggtcctttggaaggtg

SEQ ID NO: 2780138 - DNA, 25 bp, Homo sapien
catcagcatatactggagtaactgt

SEQ ID NO: 2780139 - DNA, 25 bp, Homo sapien
cagcatatactggagtaactgttat

SEQ ID NO: 2780140 - DNA, 25 bp, Homo sapien
catatactggagtaactgttatcaa

SEQ ID NO: 2780141 - DNA, 25 bp, Homo sapien
tccatcagcatatactggagtaact

SEQ ID NO: 2780142 - DNA, 25 bp, Homo sapien
cacggtaccatcttcttgttgccag

SEQ ID NO: 2780143 - DNA, 25 bp, Homo sapien
gataacacacaccactcaagtatat

SEQ ID NO: 2780144 - DNA, 25 bp, Homo sapien
tagtccattccacccaaagcatgtt

SEQ ID NO: 2780145 - DNA, 25 bp, Homo sapien
taaataggtgcgatgcacggtacca

SEQ ID NO: 2780146 - DNA, 25 bp, Homo sapien
ctttaagatccattacagggtgagt

SEQ ID NO: 2780147 - DNA, 25 bp, Homo sapien
caggctccatctcacagatacaaac

SEQ ID NO: 2780148 - DNA, 25 bp, Homo sapien
ttcttactgttagggttgctagata

SEQ ID NO: 2780149 - DNA, 25 bp, Homo sapien
tgagagtcacttcataatccaagat

SEQ ID NO: 2780150 - DNA, 25 bp, Homo sapien
aatgtgatttccatcttgtgagagt

SEQ ID NO: 2780151 - DNA, 25 bp, Homo sapien
gctagatagcgatcatttgtgagat

SEQ ID NO: 2780152 - DNA, 25 bp, Homo sapien
cagttctgtagccttgagtatggga

SEQ ID NO: 2780153 - DNA, 25 bp, Homo sapien
gatggatctattttataccagaaac

SEQ ID NO: 2780154 - DNA, 25 bp, Homo sapien
cttccacacgagttgtacagttctg

SEQ ID NO: 2780155 - DNA, 25 bp, Homo sapien
ccttgagtatgggatggatctattt

SEQ ID NO: 2780156 - DNA, 25 bp, Homo sapien
tgacctaaacctctagaagagctgg

SEQ ID NO: 2780157 - DNA, 25 bp, Homo sapien
aaagcaatctggctgaggactccca

SEQ ID NO: 2780158 - DNA, 25 bp, Homo sapien
gatgttctcaagtcacatgacctaa

SEQ ID NO: 2780159 - DNA, 25 bp, Homo sapien
taagaattcctggtcaagacaaagc

SEQ ID NO: 2780160 - DNA, 25 bp, Homo sapien
ctggaattccaatagctttacttct

SEQ ID NO: 2780161 - DNA, 25 bp, Homo sapien
ctggcctccatgataatttaattag

SEQ ID NO: 2780162 - DNA, 25 bp, Homo sapien
ttattaaaaccagaaccagttcaca

SEQ ID NO: 2780163 - DNA, 25 bp, Homo sapien
actgcagtttgaataaaatgatcac

SEQ ID NO: 2780164 - DNA, 25 bp, Homo sapien
tatcttcataggtgatcccacttgc

SEQ ID NO: 2780165 - DNA, 25 bp, Homo sapien
tcatacagcgaatcctaaacacata

SEQ ID NO: 2780166 - DNA, 25 bp, Homo sapien
agtgaatgaagatcgggtggatgct

SEQ ID NO: 2780167 - DNA, 25 bp, Homo sapien
catcttccttcatacagcgaatcct

SEQ ID NO: 2780168 - DNA, 25 bp, Homo sapien
ataacactcttaatacttgggttgg

SEQ ID NO: 2780169 - DNA, 25 bp, Homo sapien
ggctccaagttgaggcatctttggt

SEQ ID NO: 2780170 - DNA, 25 bp, Homo sapien
tattttagtattataacactcttaa

SEQ ID NO: 2780171 - DNA, 25 bp, Homo sapien
gaggcatctttggtcctatattgaa

SEQ ID NO: 2780172 - DNA, 25 bp, Homo sapien
gatactagacagttcctctgagttg

SEQ ID NO: 2780173 - DNA, 25 bp, Homo sapien
aattttaagatactagacagttcct

SEQ ID NO: 2780174 - DNA, 25 bp, Homo sapien
gataaattatgtggcggattgggct

SEQ ID NO: 2780175 - DNA, 25 bp, Homo sapien
ttcctctgagttgatcactgataaa

SEQ ID NO: 2780176 - DNA, 25 bp, Homo sapien
gggtgtcacgttttgctttgcaatc

SEQ ID NO: 2780177 - DNA, 25 bp, Homo sapien
tgcttctacccagacttcaatgttg

SEQ ID NO: 2780178 - DNA, 25 bp, Homo sapien
taaccttcccaagggcattctctgc

SEQ ID NO: 2780179 - DNA, 25 bp, Homo sapien
aaatacacagtagaataatcaacag

SEQ ID NO: 2780180 - DNA, 25 bp, Homo sapien
cctctttctagtcaaacttaggcaa

SEQ ID NO: 2780181 - DNA, 25 bp, Homo sapien
cacaatatgctagaaggtgacagga

SEQ ID NO: 2780182 - DNA, 25 bp, Homo sapien
gaaataaggtagaggattcaggaat

SEQ ID NO: 2780183 - DNA, 25 bp, Homo sapien
acaaaaatggttagcctctaaggag

SEQ ID NO: 2780184 - DNA, 25 bp, Homo sapien
cttcccctcgttcacaatgcaactc

SEQ ID NO: 2780185 - DNA, 25 bp, Homo sapien
attttcttcccctcgttcacaatgc

SEQ ID NO: 2780186 - DNA, 25 bp, Homo sapien
tttcttcccctcgttcacaatgcaa

SEQ ID NO: 2780187 - DNA, 25 bp, Homo sapien
tcttcccctcgttcacaatgcaact

SEQ ID NO: 2780188 - DNA, 25 bp, Homo sapien
gtatattgctccttaggaatagtaa

SEQ ID NO: 2780189 - DNA, 25 bp, Homo sapien
tagtatattgctccttaggaatagt

SEQ ID NO: 2780190 - DNA, 25 bp, Homo sapien
agtatattgctccttaggaatagta

SEQ ID NO: 2780191 - DNA, 25 bp, Homo sapien
tcacttggtactgcctcgagatggt

SEQ ID NO: 2780192 - DNA, 25 bp, Homo sapien
tcctgttctcgctatgtgagatgcc

SEQ ID NO: 2780193 - DNA, 25 bp, Homo sapien
gaatgagttattgtgagctctggtc

SEQ ID NO: 2780194 - DNA, 25 bp, Homo sapien
tctcatgtcgtatcataatccccag

SEQ ID NO: 2780195 - DNA, 25 bp, Homo sapien
gcactagccaagtctgcaacgtcaa

SEQ ID NO: 2780196 - DNA, 25 bp, Homo sapien
actagccaagtctgcaacgtcaaca

SEQ ID NO: 2780197 - DNA, 25 bp, Homo sapien
cactagccaagtctgcaacgtcaac

SEQ ID NO: 2780198 - DNA, 25 bp, Homo sapien
ctagccaagtctgcaacgtcaacat

SEQ ID NO: 2780199 - DNA, 25 bp, Homo sapien
gaaagcagatccagggttgcctagg

SEQ ID NO: 2780200 - DNA, 25 bp, Homo sapien
gaaggcacacgtaaaagggcataaa

SEQ ID NO: 2780201 - DNA, 25 bp, Homo sapien
cttgatacggcaaaactaaggtgac

SEQ ID NO: 2780202 - DNA, 25 bp, Homo sapien
tgtggtggtgactataagactctat

SEQ ID NO: 2780203 - DNA, 25 bp, Homo sapien
aattagtaagtgaaggagtagggat

SEQ ID NO: 2780204 - DNA, 25 bp, Homo sapien
cttctacttctaaatgtcatgcttt

SEQ ID NO: 2780205 - DNA, 25 bp, Homo sapien
gtcatgctttttccattgggtttca

SEQ ID NO: 2780206 - DNA, 25 bp, Homo sapien
aggagtagggatttgaagctaagtc

SEQ ID NO: 2780207 - DNA, 25 bp, Homo sapien
gagagtaattccttgtagcctttgc

SEQ ID NO: 2780208 - DNA, 25 bp, Homo sapien
tcttaaccccagtagcacaaaatgt

SEQ ID NO: 2780209 - DNA, 25 bp, Homo sapien
cacaaaatgttactctatgggcaga

SEQ ID NO: 2780210 - DNA, 25 bp, Homo sapien
tagagatcttccctaaccaccctgt

SEQ ID NO: 2780211 - DNA, 25 bp, Homo sapien
aagtaatattatgtcacctcaggca

SEQ ID NO: 2780212 - DNA, 25 bp, Homo sapien
ttcacattggtagctcccacctgaa

SEQ ID NO: 2780213 - DNA, 25 bp, Homo sapien
gcaatatagtaagactctcgcctct

SEQ ID NO: 2780214 - DNA, 25 bp, Homo sapien
cacctcaggcatagtatataatagt

SEQ ID NO: 2780215 - DNA, 25 bp, Homo sapien
tactcttacatcattccctaacagg

SEQ ID NO: 2780216 - DNA, 25 bp, Homo sapien
ttttgcttgaccacaccatgccatt

SEQ ID NO: 2780217 - DNA, 25 bp, Homo sapien
gcaaagcaaatacttaagctcctca

SEQ ID NO: 2780218 - DNA, 25 bp, Homo sapien
tgtagactcagcaaaccactagact

SEQ ID NO: 2780219 - DNA, 25 bp, Homo sapien
caagtgcggagcgaatagaatttca

SEQ ID NO: 2780220 - DNA, 25 bp, Homo sapien
tgtactcagggctgcgataatcgag

SEQ ID NO: 2780221 - DNA, 25 bp, Homo sapien
gaagggaaatccacctcgagaatga

SEQ ID NO: 2780222 - DNA, 25 bp, Homo sapien
tgcgcctgggtgaagtttgtactca

SEQ ID NO: 2780223 - DNA, 25 bp, Homo sapien
ctgggccagacccgtcggcctggca

SEQ ID NO: 2780224 - DNA, 25 bp, Homo sapien
actccgcgggccttttggctgctcg

SEQ ID NO: 2780225 - DNA, 25 bp, Homo sapien
tgggccagacccgtcggcctggcag

SEQ ID NO: 2780226 - DNA, 25 bp, Homo sapien
gactccgcgggccttttggctgctc

SEQ ID NO: 2780227 - DNA, 25 bp, Homo sapien
tagcgattcccgtaacgcggctctt

SEQ ID NO: 2780228 - DNA, 25 bp, Homo sapien
taggcgctgattggcccctgagaga

SEQ ID NO: 2780229 - DNA, 25 bp, Homo sapien
tttgcgcccaggcattggtccagtg

SEQ ID NO: 2780230 - DNA, 25 bp, Homo sapien
tcccagactagatcgaagggttccc

SEQ ID NO: 2780231 - DNA, 25 bp, Homo sapien
tgggcggaaagagcggaatgttcca

SEQ ID NO: 2780232 - DNA, 25 bp, Homo sapien
ctgtgggcggaaagagcggaatgtt

SEQ ID NO: 2780233 - DNA, 25 bp, Homo sapien
tgtgggcggaaagagcggaatgttc

SEQ ID NO: 2780234 - DNA, 25 bp, Homo sapien
gggcggaaagagcggaatgttccat

SEQ ID NO: 2780235 - DNA, 25 bp, Homo sapien
aacccaatcatcaggcttataaact

SEQ ID NO: 2780236 - DNA, 25 bp, Homo sapien
gtgccaacgtcgtaacaaggtttgc

SEQ ID NO: 2780237 - DNA, 25 bp, Homo sapien
tgccaacgtcgtaacaaggtttgcg

SEQ ID NO: 2780238 - DNA, 25 bp, Homo sapien
catcaggcttataaactacaaaaga

SEQ ID NO: 2780239 - DNA, 25 bp, Homo sapien
gcagaaacactttggacaccaacac

SEQ ID NO: 2780240 - DNA, 25 bp, Homo sapien
tcatagcattgtgcccactttgccc

SEQ ID NO: 2780241 - DNA, 25 bp, Homo sapien
gaaacactttggacaccaacacatg

SEQ ID NO: 2780242 - DNA, 25 bp, Homo sapien
tcaaacttcatcatagcattgtgcc

SEQ ID NO: 2780243 - DNA, 25 bp, Homo sapien
gtggatgacccagagactaagattg

SEQ ID NO: 2780244 - DNA, 25 bp, Homo sapien
gatgacccagagactaagattgttt

SEQ ID NO: 2780245 - DNA, 25 bp, Homo sapien
ccagagactaagattgtttccttca

SEQ ID NO: 2780246 - DNA, 25 bp, Homo sapien
gacccagagactaagattgtttcct

SEQ ID NO: 2780247 - DNA, 25 bp, Homo sapien
catttccatagatcaacacaatctc

SEQ ID NO: 2780248 - DNA, 25 bp, Homo sapien
ccaatccctcatttccatagatcaa

SEQ ID NO: 2780249 - DNA, 25 bp, Homo sapien
ttgttgttagcagcggcaacaactg

SEQ ID NO: 2780250 - DNA, 25 bp, Homo sapien
aatgcggttgttgttagcagcggca

SEQ ID NO: 2780251 - DNA, 25 bp, Homo sapien
ttcccagatgggatggctgccggga

SEQ ID NO: 2780252 - DNA, 25 bp, Homo sapien
acttcccagatgggatggctgccgg

SEQ ID NO: 2780253 - DNA, 25 bp, Homo sapien
tcccagatgggatggctgccgggaa

SEQ ID NO: 2780254 - DNA, 25 bp, Homo sapien
cccagatgggatggctgccgggaag

SEQ ID NO: 2780255 - DNA, 25 bp, Homo sapien
acgtcccagacgatgggcggcgagg

SEQ ID NO: 2780256 - DNA, 25 bp, Homo sapien
cgtcccagacgatgggcggcgaggc

SEQ ID NO: 2780257 - DNA, 25 bp, Homo sapien
ctcacgtcccagacgatgggcggcg

SEQ ID NO: 2780258 - DNA, 25 bp, Homo sapien
tcacgtcccagacgatgggcggcga

SEQ ID NO: 2780259 - DNA, 25 bp, Homo sapien
tttgctccagtaggagctcgttcat

SEQ ID NO: 2780260 - DNA, 25 bp, Homo sapien
ctgcttcctcagtagggatatggca

SEQ ID NO: 2780261 - DNA, 25 bp, Homo sapien
gtctgcttcctcagtagggatatgg

SEQ ID NO: 2780262 - DNA, 25 bp, Homo sapien
tgtcaacatgttttttgctccagta

SEQ ID NO: 2780263 - DNA, 25 bp, Homo sapien
ttccgggttttgtgtatgcctagcc

SEQ ID NO: 2780264 - DNA, 25 bp, Homo sapien
caggggatccttatacccgaacact

SEQ ID NO: 2780265 - DNA, 25 bp, Homo sapien
ttgtgtatgcctagccactttgagg

SEQ ID NO: 2780266 - DNA, 25 bp, Homo sapien
atgagggaataagccaaagggagaa

SEQ ID NO: 2780267 - DNA, 25 bp, Homo sapien
tcaggtaggactgagtcttagacta

SEQ ID NO: 2780268 - DNA, 25 bp, Homo sapien
caggtaggactgagtcttagactat

SEQ ID NO: 2780269 - DNA, 25 bp, Homo sapien
aggtaggactgagtcttagactatg

SEQ ID NO: 2780270 - DNA, 25 bp, Homo sapien
tcttgccctctggaatggaagcctc

SEQ ID NO: 2780271 - DNA, 25 bp, Homo sapien
ggaagcctcttcagatagattcatc

SEQ ID NO: 2780272 - DNA, 25 bp, Homo sapien
ggtcatcttgccttttcgcattagg

SEQ ID NO: 2780273 - DNA, 25 bp, Homo sapien
ctccagaggacctagcatctacggg

SEQ ID NO: 2780274 - DNA, 25 bp, Homo sapien
cagcaactcgtagcacagtgcacat

SEQ ID NO: 2780275 - DNA, 25 bp, Homo sapien
tctcagcaactcgtagcacagtgca

SEQ ID NO: 2780276 - DNA, 25 bp, Homo sapien
gacatctcagcaactcgtagcacag

SEQ ID NO: 2780277 - DNA, 25 bp, Homo sapien
gaaagcacacactgtaatgacatct

SEQ ID NO: 2780278 - DNA, 25 bp, Homo sapien
ccgccttggttgtaatagtggctag

SEQ ID NO: 2780279 - DNA, 25 bp, Homo sapien
tagtggctagcaggccgtgttccat

SEQ ID NO: 2780280 - DNA, 25 bp, Homo sapien
ttggttgtaatagtggctagcaggc

SEQ ID NO: 2780281 - DNA, 25 bp, Homo sapien
ttgtaatagtggctagcaggccgtg

SEQ ID NO: 2780282 - DNA, 25 bp, Homo sapien
agggtccttcacttaagttgctgtc

SEQ ID NO: 2780283 - DNA, 25 bp, Homo sapien
ggtccttcacttaagttgctgtcaa

SEQ ID NO: 2780284 - DNA, 25 bp, Homo sapien
agttgctgtcaaagcctttgaactt

SEQ ID NO: 2780285 - DNA, 25 bp, Homo sapien
tttccaataaagcagggcctggaca

SEQ ID NO: 2780286 - DNA, 25 bp, Homo sapien
cctccccttctaactcaatacatct

SEQ ID NO: 2780287 - DNA, 25 bp, Homo sapien
tctcttaaattcatcccagaaaaat

SEQ ID NO: 2780288 - DNA, 25 bp, Homo sapien
catctcttaaattcatcccagaaaa

SEQ ID NO: 2780289 - DNA, 25 bp, Homo sapien
tacatctcttaaattcatcccagaa

SEQ ID NO: 2780290 - DNA, 25 bp, Homo sapien
cttttcatggagccgtggctctgca

SEQ ID NO: 2780291 - DNA, 25 bp, Homo sapien
cagtcttttcatggagccgtggctc

SEQ ID NO: 2780292 - DNA, 25 bp, Homo sapien
agtcttttcatggagccgtggctct

SEQ ID NO: 2780293 - DNA, 25 bp, Homo sapien
gtcttttcatggagccgtggctctg

SEQ ID NO: 2780294 - DNA, 25 bp, Homo sapien
cccatggcaggggagaatccagaag

SEQ ID NO: 2780295 - DNA, 25 bp, Homo sapien
acccccatggcaggggagaatccag

SEQ ID NO: 2780296 - DNA, 25 bp, Homo sapien
ccacccccatggcaggggagaatcc

SEQ ID NO: 2780297 - DNA, 25 bp, Homo sapien
ccccatggcaggggagaatccagaa

SEQ ID NO: 2780298 - DNA, 25 bp, Homo sapien
cttcgttcactgttatgtctttggc

SEQ ID NO: 2780299 - DNA, 25 bp, Homo sapien
gtctttggcccaggttcactttcag

SEQ ID NO: 2780300 - DNA, 25 bp, Homo sapien
tgttatgtctttggcccaggttcac

SEQ ID NO: 2780301 - DNA, 25 bp, Homo sapien
cgttcactgttatgtctttggccca

SEQ ID NO: 2780302 - DNA, 25 bp, Homo sapien
cttttattcagcaaagcgtactttt

SEQ ID NO: 2780303 - DNA, 25 bp, Homo sapien
aattcacagacttaatatgcacacc

SEQ ID NO: 2780304 - DNA, 25 bp, Homo sapien
gcatgtggaagtcacagaaattcac

SEQ ID NO: 2780305 - DNA, 25 bp, Homo sapien
ttagaatgacaataaatgtgaagac

SEQ ID NO: 2780306 - DNA, 25 bp, Homo sapien
cttacaaactggagtaatcttgtcc

SEQ ID NO: 2780307 - DNA, 25 bp, Homo sapien
cagcttactaaattggtcttcgttc

SEQ ID NO: 2780308 - DNA, 25 bp, Homo sapien
aaactgatggcttatagaatgcagc

SEQ ID NO: 2780309 - DNA, 25 bp, Homo sapien
ctacatttctgcagcgagtggccca

SEQ ID NO: 2780310 - DNA, 25 bp, Homo sapien
tcttcgttgacttggaattgcagga

SEQ ID NO: 2780311 - DNA, 25 bp, Homo sapien
tgctgtgctgtgtcttcgttgactt

SEQ ID NO: 2780312 - DNA, 25 bp, Homo sapien
gaagcactcggtttgtccgcagagg

SEQ ID NO: 2780313 - DNA, 25 bp, Homo sapien
cttggaattgcaggaagcactcggt

SEQ ID NO: 2780314 - DNA, 25 bp, Homo sapien
gggagctaggttgttccgagtgaaa

SEQ ID NO: 2780315 - DNA, 25 bp, Homo sapien
ggttgttccgagtgaaaggaagatc

SEQ ID NO: 2780316 - DNA, 25 bp, Homo sapien
agctaggttgttccgagtgaaagga

SEQ ID NO: 2780317 - DNA, 25 bp, Homo sapien
tgttccgagtgaaaggaagatccct

SEQ ID NO: 2780318 - DNA, 25 bp, Homo sapien
ttcttgtgacggcttataaataacc

SEQ ID NO: 2780319 - DNA, 25 bp, Homo sapien
tataaataaccaggctagcagacaa

SEQ ID NO: 2780320 - DNA, 25 bp, Homo sapien
aaataaccaggctagcagacaatac

SEQ ID NO: 2780321 - DNA, 25 bp, Homo sapien
gcttataaataaccaggctagcaga

SEQ ID NO: 2780322 - DNA, 25 bp, Homo sapien
ccaagtctctaggataagtgcttca

SEQ ID NO: 2780323 - DNA, 25 bp, Homo sapien
caatgaattaagctgacgtgctcca

SEQ ID NO: 2780324 - DNA, 25 bp, Homo sapien
tgaattaagctgacgtgctccaaat

SEQ ID NO: 2780325 - DNA, 25 bp, Homo sapien
ttaagctgacgtgctccaaattcca

SEQ ID NO: 2780326 - DNA, 25 bp, Homo sapien
gaagtgtcaaaaggtggcagaccac

SEQ ID NO: 2780327 - DNA, 25 bp, Homo sapien
cataacagaaggtattcgtttggcc

SEQ ID NO: 2780328 - DNA, 25 bp, Homo sapien
gggacaggcctaactctggaaaaca

SEQ ID NO: 2780329 - DNA, 25 bp, Homo sapien
ggaagcaaaatcttgactggagttt

SEQ ID NO: 2780330 - DNA, 25 bp, Homo sapien
ggacatttccagtatagagcctgct

SEQ ID NO: 2780331 - DNA, 25 bp, Homo sapien
tattgtcactccagttcctagctta

SEQ ID NO: 2780332 - DNA, 25 bp, Homo sapien
ccagttcctagcttaaaactgtacg

SEQ ID NO: 2780333 - DNA, 25 bp, Homo sapien
gagaatgaacatgaaatcaaggaca

SEQ ID NO: 2780334 - DNA, 25 bp, Homo sapien
tgctgggatccttctgatgggctct

SEQ ID NO: 2780335 - DNA, 25 bp, Homo sapien
gcttatcagaagaagacacagtcca

SEQ ID NO: 2780336 - DNA, 25 bp, Homo sapien
acttttctgagatcgctgggccata

SEQ ID NO: 2780337 - DNA, 25 bp, Homo sapien
tgttcttggcagttggtacccacga

SEQ ID NO: 2780338 - DNA, 25 bp, Homo sapien
tgatgtcccgcaggttgctgtccat

SEQ ID NO: 2780339 - DNA, 25 bp, Homo sapien
ttgggagaggagtttgacacacgcc

SEQ ID NO: 2780340 - DNA, 25 bp, Homo sapien
ccgtgtgaccgcagtacagggcata

SEQ ID NO: 2780341 - DNA, 25 bp, Homo sapien
caagggcgtgctctcattgatgtcc

SEQ ID NO: 2780342 - DNA, 25 bp, Homo sapien
gaattgttcaggctgcttagccagc

SEQ ID NO: 2780343 - DNA, 25 bp, Homo sapien
gctgcttagccagcaacagctcctg

SEQ ID NO: 2780344 - DNA, 25 bp, Homo sapien
taaatgagcccgaaggatgatggtg

SEQ ID NO: 2780345 - DNA, 25 bp, Homo sapien
atagtaagtgttaaatgagcccgaa

SEQ ID NO: 2780346 - DNA, 25 bp, Homo sapien
tagctccttcttatctctaagcttc

SEQ ID NO: 2780347 - DNA, 25 bp, Homo sapien
tttcaagttgtctaaactttagctc

SEQ ID NO: 2780348 - DNA, 25 bp, Homo sapien
tcaggatgtcctgcaaacacagcca

SEQ ID NO: 2780349 - DNA, 25 bp, Homo sapien
cttcaggatgtcctgcaaacacagc

SEQ ID NO: 2780350 - DNA, 25 bp, Homo sapien
aacaacctgatacagttccttgcag

SEQ ID NO: 2780351 - DNA, 25 bp, Homo sapien
acatctttgatgatcgaaaacaaca

SEQ ID NO: 2780352 - DNA, 25 bp, Homo sapien
gcagttctaaaagcccaatagtcca

SEQ ID NO: 2780353 - DNA, 25 bp, Homo sapien
aaacaacaacaacctgatacagttc

SEQ ID NO: 2780354 - DNA, 25 bp, Homo sapien
taagattcagttagggggaaatgac

SEQ ID NO: 2780355 - DNA, 25 bp, Homo sapien
gggaaatgactagtttcccagcact

SEQ ID NO: 2780356 - DNA, 25 bp, Homo sapien
tagtttcccagcactttctggttac

SEQ ID NO: 2780357 - DNA, 25 bp, Homo sapien
aatgactagtttcccagcactttct

SEQ ID NO: 2780358 - DNA, 25 bp, Homo sapien
gctgccgctgcgatatgtacacatg

SEQ ID NO: 2780359 - DNA, 25 bp, Homo sapien
tgcaggttacactcagggactcttg

SEQ ID NO: 2780360 - DNA, 25 bp, Homo sapien
catgaataatatcgctgaagcccgc

SEQ ID NO: 2780361 - DNA, 25 bp, Homo sapien
tagttgattatggacggcccctggt

SEQ ID NO: 2780362 - DNA, 25 bp, Homo sapien
cttcctttcgcctccctcgcccctg

SEQ ID NO: 2780363 - DNA, 25 bp, Homo sapien
tcgcctccctcgcccctggggtgga

SEQ ID NO: 2780364 - DNA, 25 bp, Homo sapien
tccctcgcccctggggtggagtcat

SEQ ID NO: 2780365 - DNA, 25 bp, Homo sapien
actcgtactctcttcctttcgcctc

SEQ ID NO: 2780366 - DNA, 25 bp, Homo sapien
gactgcccagtggagagcggtttta

SEQ ID NO: 2780367 - DNA, 25 bp, Homo sapien
tggttgtggaaagccgcccagtgga

SEQ ID NO: 2780368 - DNA, 25 bp, Homo sapien
cagtggagagcggttttaaagtctt

SEQ ID NO: 2780369 - DNA, 25 bp, Homo sapien
tatccacaagggtggggtctgcccc

SEQ ID NO: 2780370 - DNA, 25 bp, Homo sapien
caaagatcacttggactcataggga

SEQ ID NO: 2780371 - DNA, 25 bp, Homo sapien
tgagccttcgaagcatctaggagct

SEQ ID NO: 2780372 - DNA, 25 bp, Homo sapien
tgggcccgcagaaattgtagttgtc

SEQ ID NO: 2780373 - DNA, 25 bp, Homo sapien
tcagagtctgttggataagacagcc

SEQ ID NO: 2780374 - DNA, 25 bp, Homo sapien
ttcctgtcaaggctaaaatgagagc

SEQ ID NO: 2780375 - DNA, 25 bp, Homo sapien
gactgctcacaaaaatctgcttaca

SEQ ID NO: 2780376 - DNA, 25 bp, Homo sapien
aagttctaacccagatgccaacagc

SEQ ID NO: 2780377 - DNA, 25 bp, Homo sapien
ttaactcccggtagctgcaacagac

SEQ ID NO: 2780378 - DNA, 25 bp, Homo sapien
gaggccagggtggcagatcacctga

SEQ ID NO: 2780379 - DNA, 25 bp, Homo sapien
aggccagggtggcagatcacctgaa

SEQ ID NO: 2780380 - DNA, 25 bp, Homo sapien
gaagcacaatggttcagaaacgccc

SEQ ID NO: 2780381 - DNA, 25 bp, Homo sapien
acaatggttcagaaacgcccttcct

SEQ ID NO: 2780382 - DNA, 25 bp, Homo sapien
gcacaatggttcagaaacgcccttc

SEQ ID NO: 2780383 - DNA, 25 bp, Homo sapien
agaggaagcacaatggttcagaaac

SEQ ID NO: 2780384 - DNA, 25 bp, Homo sapien
atgcaaaatgaccacttgttgcttg

SEQ ID NO: 2780385 - DNA, 25 bp, Homo sapien
tgaccacttgttgcttgagagtgtg

SEQ ID NO: 2780386 - DNA, 25 bp, Homo sapien
aaaatgaccacttgttgcttgagag

SEQ ID NO: 2780387 - DNA, 25 bp, Homo sapien
aatgaccacttgttgcttgagagtg

SEQ ID NO: 2780388 - DNA, 25 bp, Homo sapien
ctgttgcaacaggaccgtgaggagc

SEQ ID NO: 2780389 - DNA, 25 bp, Homo sapien
gattaatctcgctgatgttcgactg

SEQ ID NO: 2780390 - DNA, 25 bp, Homo sapien
tcattgtcctggtgattaatctcgc

SEQ ID NO: 2780391 - DNA, 25 bp, Homo sapien
tgttcgactgttgcaacaggaccgt

SEQ ID NO: 2780392 - DNA, 25 bp, Homo sapien
tcagttgactgaagtcaacgctcca

SEQ ID NO: 2780393 - DNA, 25 bp, Homo sapien
gaagtcaacgctccatctgggagag

SEQ ID NO: 2780394 - DNA, 25 bp, Homo sapien
gggcagccgagcatagtggagaggg

SEQ ID NO: 2780395 - DNA, 25 bp, Homo sapien
gatctcctgctcagttgactgaagt

SEQ ID NO: 2780396 - DNA, 25 bp, Homo sapien
cacatacactaaagggacaatggct

SEQ ID NO: 2780397 - DNA, 25 bp, Homo sapien
tggctatgactgcatacagtacatc

SEQ ID NO: 2780398 - DNA, 25 bp, Homo sapien
taaaggattgagtgatccaacaggc

SEQ ID NO: 2780399 - DNA, 25 bp, Homo sapien
tactgcacgatctgagtttctgtat

SEQ ID NO: 2780400 - DNA, 25 bp, Homo sapien
ctggctcattattggccattgttta

SEQ ID NO: 2780401 - DNA, 25 bp, Homo sapien
cttctctggctcattattggccatt

SEQ ID NO: 2780402 - DNA, 25 bp, Homo sapien
ctctctagggcccatttggtctgag

SEQ ID NO: 2780403 - DNA, 25 bp, Homo sapien
cattgtttactctctagggcccatt

SEQ ID NO: 2780404 - DNA, 25 bp, Homo sapien
attgctgcttgccttccaacactag

SEQ ID NO: 2780405 - DNA, 25 bp, Homo sapien
tctttcacaccagcgccctctgaat

SEQ ID NO: 2780406 - DNA, 25 bp, Homo sapien
cttccaacactagcatgtgcagcgt

SEQ ID NO: 2780407 - DNA, 25 bp, Homo sapien
actagcatgtgcagcgttgtacaaa

SEQ ID NO: 2780408 - DNA, 25 bp, Homo sapien
gtctgtgcacacatttttgtggacc

SEQ ID NO: 2780409 - DNA, 25 bp, Homo sapien
cagtaggatgtaggactgcatttac

SEQ ID NO: 2780410 - DNA, 25 bp, Homo sapien
tgtgtgcccggcagtaggatgtagg

SEQ ID NO: 2780411 - DNA, 25 bp, Homo sapien
taggactgcatttacatgggcctgt

SEQ ID NO: 2780412 - DNA, 25 bp, Homo sapien
ttctgagtagactcacacagccttc

SEQ ID NO: 2780413 - DNA, 25 bp, Homo sapien
gcatgcagtggcaggcggccatttt

SEQ ID NO: 2780414 - DNA, 25 bp, Homo sapien
ggcaggcggccatttttatctggga

SEQ ID NO: 2780415 - DNA, 25 bp, Homo sapien
tatctgggatattgtgcttggcacc

SEQ ID NO: 2780416 - DNA, 25 bp, Homo sapien
agccatagcaaatgcaagaagctgc

SEQ ID NO: 2780417 - DNA, 25 bp, Homo sapien
cactggtagcaatggtggtcatagt

SEQ ID NO: 2780418 - DNA, 25 bp, Homo sapien
gtggtcatagtgaagatttctgggt

SEQ ID NO: 2780419 - DNA, 25 bp, Homo sapien
gcaagaagctgcactggtagcaatg

SEQ ID NO: 2780420 - DNA, 25 bp, Homo sapien
tgtgtccgcttgacgtccagaaacc

SEQ ID NO: 2780421 - DNA, 25 bp, Homo sapien
tcctgcatgttaatattggctccca

SEQ ID NO: 2780422 - DNA, 25 bp, Homo sapien
tgtgcggccataagcatcctgcatg

SEQ ID NO: 2780423 - DNA, 25 bp, Homo sapien
taggtggccaggcataaacttgtgc

SEQ ID NO: 2780424 - DNA, 25 bp, Homo sapien
gcagtcagagcattgacatctccat

SEQ ID NO: 2780425 - DNA, 25 bp, Homo sapien
ggtcttcccgaatcactgcagtcag

SEQ ID NO: 2780426 - DNA, 25 bp, Homo sapien
cacagcattctaggatagaagggtc

SEQ ID NO: 2780427 - DNA, 25 bp, Homo sapien
tagaagggtcttcccgaatcactgc

SEQ ID NO: 2780428 - DNA, 25 bp, Homo sapien
tcaggtcaacttcctcagatgagtc

SEQ ID NO: 2780429 - DNA, 25 bp, Homo sapien
gtcaggtcaacttcctcagatgagt

SEQ ID NO: 2780430 - DNA, 25 bp, Homo sapien
ccgccgtgtattggaaaggaacctg

SEQ ID NO: 2780431 - DNA, 25 bp, Homo sapien
gcattcaggcttctcgaagccaggg

SEQ ID NO: 2780432 - DNA, 25 bp, Homo sapien
gaaaggtggatcactcatgccattt

SEQ ID NO: 2780433 - DNA, 25 bp, Homo sapien
catgccatttgtaacaccgccgtgt

SEQ ID NO: 2780434 - DNA, 25 bp, Homo sapien
atgctatccctccccacaacagtcc

SEQ ID NO: 2780435 - DNA, 25 bp, Homo sapien
tgctatccctccccacaacagtccc

SEQ ID NO: 2780436 - DNA, 25 bp, Homo sapien
gggccattctttgctccaagggcag

SEQ ID NO: 2780437 - DNA, 25 bp, Homo sapien
ccaagggcagactgccatggagact

SEQ ID NO: 2780438 - DNA, 25 bp, Homo sapien
gactgccatggagactgaatcctct

SEQ ID NO: 2780439 - DNA, 25 bp, Homo sapien
tcagttcctccggttatatttcacc

SEQ ID NO: 2780440 - DNA, 25 bp, Homo sapien
agcaaatcacagagggagtcgggca

SEQ ID NO: 2780441 - DNA, 25 bp, Homo sapien
tctgctgaggactctagccaccatc

SEQ ID NO: 2780442 - DNA, 25 bp, Homo sapien
cacagagggagtcgggcactctgct

SEQ ID NO: 2780443 - DNA, 25 bp, Homo sapien
tgctgaggactctagccaccatcac

SEQ ID NO: 2780444 - DNA, 25 bp, Homo sapien
tcttcagttacataatatgtagact

SEQ ID NO: 2780445 - DNA, 25 bp, Homo sapien
gtatcttcagttacataatatgtag

SEQ ID NO: 2780446 - DNA, 25 bp, Homo sapien
tatcttcagttacataatatgtaga

SEQ ID NO: 2780447 - DNA, 25 bp, Homo sapien
agtatcttcagttacataatatgta

SEQ ID NO: 2780448 - DNA, 25 bp, Homo sapien
tcgcttcctgcgtgtgtgggctttg

SEQ ID NO: 2780449 - DNA, 25 bp, Homo sapien
cttcctgcgtgtgtgggctttgaga

SEQ ID NO: 2780450 - DNA, 25 bp, Homo sapien
aaatggctttactacaggtcgcttc

SEQ ID NO: 2780451 - DNA, 25 bp, Homo sapien
tactacaggtcgcttcctgcgtgtg

SEQ ID NO: 2780452 - DNA, 25 bp, Homo sapien
cagaagagatgttgctatggtgaaa

SEQ ID NO: 2780453 - DNA, 25 bp, Homo sapien
tgggaccagaagagatgttgctatg

SEQ ID NO: 2780454 - DNA, 25 bp, Homo sapien
aagaacacgtgggaccagaagagat

SEQ ID NO: 2780455 - DNA, 25 bp, Homo sapien
cacgtgggaccagaagagatgttgc

SEQ ID NO: 2780456 - DNA, 25 bp, Homo sapien
ctcgttggagccctgaaggtccttc

SEQ ID NO: 2780457 - DNA, 25 bp, Homo sapien
ggagccctgaaggtccttctgcatc

SEQ ID NO: 2780458 - DNA, 25 bp, Homo sapien
ccctgaaggtccttctgcatcatat

SEQ ID NO: 2780459 - DNA, 25 bp, Homo sapien
tcgttggagccctgaaggtccttct

SEQ ID NO: 2780460 - DNA, 25 bp, Homo sapien
tgctgaaatccatggtagcctgtct

SEQ ID NO: 2780461 - DNA, 25 bp, Homo sapien
ggtgctgaaatccatggtagcctgt

SEQ ID NO: 2780462 - DNA, 25 bp, Homo sapien
aaacacagaaggggtgctgaaatcc

SEQ ID NO: 2780463 - DNA, 25 bp, Homo sapien
tcaaacacagaaggggtgctgaaat

SEQ ID NO: 2780464 - DNA, 25 bp, Homo sapien
tcaacatgacagtcagaggcagcat

SEQ ID NO: 2780465 - DNA, 25 bp, Homo sapien
tgtacatgggcataatacaccctcc

SEQ ID NO: 2780466 - DNA, 25 bp, Homo sapien
gagctgcaggttgttgtcaaggcaa

SEQ ID NO: 2780467 - DNA, 25 bp, Homo sapien
gaggcagcatcgtttgccaagacct

SEQ ID NO: 2780468 - DNA, 25 bp, Homo sapien
ggccagacagagcatgtgcaaagct

SEQ ID NO: 2780469 - DNA, 25 bp, Homo sapien
aaaaacacagcagatcacggagctt

SEQ ID NO: 2780470 - DNA, 25 bp, Homo sapien
gctggaatgtcgctttacaccaaca

SEQ ID NO: 2780471 - DNA, 25 bp, Homo sapien
agcagatcacggagcttcagcagct

SEQ ID NO: 2780472 - DNA, 25 bp, Homo sapien
tcatgcggtcaatgggatttcagct

SEQ ID NO: 2780473 - DNA, 25 bp, Homo sapien
tctcacagtgggtctaatgggcccc

SEQ ID NO: 2780474 - DNA, 25 bp, Homo sapien
tctcagggcttactggacattggct

SEQ ID NO: 2780475 - DNA, 25 bp, Homo sapien
gaggtccaagcagcaatcagagttg

SEQ ID NO: 2780476 - DNA, 25 bp, Homo sapien
caggcgagattgggctcattcaggg

SEQ ID NO: 2780477 - DNA, 25 bp, Homo sapien
gcaggcgagattgggctcattcagg

SEQ ID NO: 2780478 - DNA, 25 bp, Homo sapien
agcaggcgagattgggctcattcag

SEQ ID NO: 2780479 - DNA, 25 bp, Homo sapien
acagatgaaggccacccattgggca

SEQ ID NO: 2780480 - DNA, 25 bp, Homo sapien
cagtgaccgacagatgaaggccacc

SEQ ID NO: 2780481 - DNA, 25 bp, Homo sapien
gaaggccacccattgggcactcaca

SEQ ID NO: 2780482 - DNA, 25 bp, Homo sapien
catgctttatttggaagcagagtgc

SEQ ID NO: 2780483 - DNA, 25 bp, Homo sapien
tggaactcgatcttcttgtcaatgc

SEQ ID NO: 2780484 - DNA, 25 bp, Homo sapien
caggcaggtggaactcgatcttctt

SEQ ID NO: 2780485 - DNA, 25 bp, Homo sapien
cttgaaatacttgccgtacgagttt

SEQ ID NO: 2780486 - DNA, 25 bp, Homo sapien
ttcagcaacttgaaatacttgccgt

SEQ ID NO: 2780487 - DNA, 25 bp, Homo sapien
ctgtgccaggtggaccacagagaat

SEQ ID NO: 2780488 - DNA, 25 bp, Homo sapien
gtgccaggtggaccacagagaatga

SEQ ID NO: 2780489 - DNA, 25 bp, Homo sapien
tgccaggtggaccacagagaatgac

SEQ ID NO: 2780490 - DNA, 25 bp, Homo sapien
tgtgccaggtggaccacagagaatg

SEQ ID NO: 2780491 - DNA, 25 bp, Homo sapien
ttgtccaaccccccagtattgacat

SEQ ID NO: 2780492 - DNA, 25 bp, Homo sapien
ccaaccccccagtattgacataggt

SEQ ID NO: 2780493 - DNA, 25 bp, Homo sapien
cctttaggaggctttgtacccatct

SEQ ID NO: 2780494 - DNA, 25 bp, Homo sapien
ccagtattgacataggtctcctggg

SEQ ID NO: 2780495 - DNA, 25 bp, Homo sapien
catcattgtgaccaggggacccgta

SEQ ID NO: 2780496 - DNA, 25 bp, Homo sapien
caccgcatgtaccttgtgtctgagc

SEQ ID NO: 2780497 - DNA, 25 bp, Homo sapien
ccctatcaccgcatgtaccttgtgt

SEQ ID NO: 2780498 - DNA, 25 bp, Homo sapien
tatcaccgcatgtaccttgtgtctg

SEQ ID NO: 2780499 - DNA, 25 bp, Homo sapien
ggaagttcctccacctcaactatca

SEQ ID NO: 2780500 - DNA, 25 bp, Homo sapien
gtcttggccacttgagctgccactg

SEQ ID NO: 2780501 - DNA, 25 bp, Homo sapien
actgctggaagttcctccacctcaa

SEQ ID NO: 2780502 - DNA, 25 bp, Homo sapien
gctggaagttcctccacctcaacta

SEQ ID NO: 2780503 - DNA, 25 bp, Homo sapien
gggttcagcagcctagccatgggaa

SEQ ID NO: 2780504 - DNA, 25 bp, Homo sapien
ccaccgtgtagagatggtggcccgc

SEQ ID NO: 2780505 - DNA, 25 bp, Homo sapien
caccttcttgtgagctgagtctgag

SEQ ID NO: 2780506 - DNA, 25 bp, Homo sapien
tggcccgcgtggtgacagtcatttg

SEQ ID NO: 2780507 - DNA, 25 bp, Homo sapien
atgccttaaccgtatgcgtgttgtc

SEQ ID NO: 2780508 - DNA, 25 bp, Homo sapien
tggcaatgccttaaccgtatgcgtg

SEQ ID NO: 2780509 - DNA, 25 bp, Homo sapien
accgtatgcgtgttgtcaggcccga

SEQ ID NO: 2780510 - DNA, 25 bp, Homo sapien
taaccgtatgcgtgttgtcaggccc

SEQ ID NO: 2780511 - DNA, 25 bp, Homo sapien
tgtccgattttgacaaaaaacagct

SEQ ID NO: 2780512 - DNA, 25 bp, Homo sapien
aaccgctctggctgcaagattacag

SEQ ID NO: 2780513 - DNA, 25 bp, Homo sapien
taatctgtctagagtgagtcatgaa

SEQ ID NO: 2780514 - DNA, 25 bp, Homo sapien
caatcacatgtggatagagacagat

SEQ ID NO: 2780515 - DNA, 25 bp, Homo sapien
ccttcaccacgtggaaaattctctc

SEQ ID NO: 2780516 - DNA, 25 bp, Homo sapien
tcagcctttacccataatttgtctt

SEQ ID NO: 2780517 - DNA, 25 bp, Homo sapien
ttcaccacgtggaaaattctctcag

SEQ ID NO: 2780518 - DNA, 25 bp, Homo sapien
gcttcctcatactgcttgccttcac

SEQ ID NO: 2780519 - DNA, 25 bp, Homo sapien
gggtggtcattctctgtaataaaca

SEQ ID NO: 2780520 - DNA, 25 bp, Homo sapien
aaataaacacctggaaggaatatgc

SEQ ID NO: 2780521 - DNA, 25 bp, Homo sapien
taaacattggatggttccgtaactc

SEQ ID NO: 2780522 - DNA, 25 bp, Homo sapien
gggacatgatgtagacccagaaata

SEQ ID NO: 2780523 - DNA, 25 bp, Homo sapien
ctttcttggattcaaagccttctta

SEQ ID NO: 2780524 - DNA, 25 bp, Homo sapien
gctttcttggattcaaagccttctt

SEQ ID NO: 2780525 - DNA, 25 bp, Homo sapien
tgctttcttggattcaaagccttct

SEQ ID NO: 2780526 - DNA, 25 bp, Homo sapien
tttcttggattcaaagccttcttac

SEQ ID NO: 2780527 - DNA, 25 bp, Homo sapien
tctctgtgacattgccctgcagccg

SEQ ID NO: 2780528 - DNA, 25 bp, Homo sapien
atggtgtccccggatgcatgcacag

SEQ ID NO: 2780529 - DNA, 25 bp, Homo sapien
tatgtgagaaacaggagatggtgtc

SEQ ID NO: 2780530 - DNA, 25 bp, Homo sapien
gagacttgtgcctgagtgcttcccc

SEQ ID NO: 2780531 - DNA, 25 bp, Homo sapien
gagtcgtctgttcagcattccccat

SEQ ID NO: 2780532 - DNA, 25 bp, Homo sapien
aaggcttagttgaatttaggacaag

SEQ ID NO: 2780533 - DNA, 25 bp, Homo sapien
ccataaaaggcttagttgaatttag

SEQ ID NO: 2780534 - DNA, 25 bp, Homo sapien
agtcgtctgttcagcattccccata

SEQ ID NO: 2780535 - DNA, 25 bp, Homo sapien
ccagttttgtacagggtcaggtaca

SEQ ID NO: 2780536 - DNA, 25 bp, Homo sapien
ggcaggtgtgtccagttttgtacag

SEQ ID NO: 2780537 - DNA, 25 bp, Homo sapien
caggtgtgtccagttttgtacaggg

SEQ ID NO: 2780538 - DNA, 25 bp, Homo sapien
tgtgtccagttttgtacagggtcag

SEQ ID NO: 2780539 - DNA, 25 bp, Homo sapien
agttttgctaggctttctttcagca

SEQ ID NO: 2780540 - DNA, 25 bp, Homo sapien
tagttttgctaggctttctttcagc

SEQ ID NO: 2780541 - DNA, 25 bp, Homo sapien
tatgtcaggcaaatcttggtagagg

SEQ ID NO: 2780542 - DNA, 25 bp, Homo sapien
ctggatggcctggagacaaaagaca

SEQ ID NO: 2780543 - DNA, 25 bp, Homo sapien
aaagcagacattaggagggcacgga

SEQ ID NO: 2780544 - DNA, 25 bp, Homo sapien
tccctgggaaaccagacttgagtgg

SEQ ID NO: 2780545 - DNA, 25 bp, Homo sapien
agagagttttcacaatgtaagtgct

SEQ ID NO: 2780546 - DNA, 25 bp, Homo sapien
tcatttgggagacccagacaagtgg

SEQ ID NO: 2780547 - DNA, 25 bp, Homo sapien
atgcacacaagcacagatagggttt

SEQ ID NO: 2780548 - DNA, 25 bp, Homo sapien
cacacaagcacagatagggtttctg

SEQ ID NO: 2780549 - DNA, 25 bp, Homo sapien
gagtaattccaagtgggacccgtca

SEQ ID NO: 2780550 - DNA, 25 bp, Homo sapien
tggaagaagacaggcttgagtttcg

SEQ ID NO: 2780551 - DNA, 25 bp, Homo sapien
cgaaagcgtcgatgagtaattccaa

SEQ ID NO: 2780552 - DNA, 25 bp, Homo sapien
gactgcagaaacaaagcggcttccc

SEQ ID NO: 2780553 - DNA, 25 bp, Homo sapien
gactcacgagtgtcagccgctggag

SEQ ID NO: 2780554 - DNA, 25 bp, Homo sapien
cccatcgttctgtgactcacgagtg

SEQ ID NO: 2780555 - DNA, 25 bp, Homo sapien
cgttctgtgactcacgagtgtcagc

SEQ ID NO: 2780556 - DNA, 25 bp, Homo sapien
ccgtcccgcgtcctcttcctctgtt

SEQ ID NO: 2780557 - DNA, 25 bp, Homo sapien
tcttctcatccccatgcacttaggg

SEQ ID NO: 2780558 - DNA, 25 bp, Homo sapien
tgggcacgcagccagacacgatcca

SEQ ID NO: 2780559 - DNA, 25 bp, Homo sapien
cagagatctcattgtgagcattttc

SEQ ID NO: 2780560 - DNA, 25 bp, Homo sapien
tcccagccctcagagatctcattgt

SEQ ID NO: 2780561 - DNA, 25 bp, Homo sapien
ggaagatccctgacacacgaagttt

SEQ ID NO: 2780562 - DNA, 25 bp, Homo sapien
gccagacggacaagctgaggtttat

SEQ ID NO: 2780563 - DNA, 25 bp, Homo sapien
tgtgaagactgatgcgccagacgga

SEQ ID NO: 2780564 - DNA, 25 bp, Homo sapien
gaagcgcgttcccatgtcttagaga

SEQ ID NO: 2780565 - DNA, 25 bp, Homo sapien
taattagtgctaatcgaggtgatgg

SEQ ID NO: 2780566 - DNA, 25 bp, Homo sapien
gaccacccgtgaaggtgtgagtaga

SEQ ID NO: 2780567 - DNA, 25 bp, Homo sapien
tccagagcctttgggtgatgatggc

SEQ ID NO: 2780568 - DNA, 25 bp, Homo sapien
tgacctttcaatccagagcctttgg

SEQ ID NO: 2780569 - DNA, 25 bp, Homo sapien
cccaattaagtcctctggcctcaaa

SEQ ID NO: 2780570 - DNA, 25 bp, Homo sapien
aaacaaagtagtaaattgatgaact

SEQ ID NO: 2780571 - DNA, 25 bp, Homo sapien
tcccaagatcctctacccaattaag

SEQ ID NO: 2780572 - DNA, 25 bp, Homo sapien
ctctggcctcaaaacaaagtagtaa

SEQ ID NO: 2780573 - DNA, 25 bp, Homo sapien
ttcaccacgatggtgagtgacagcc

SEQ ID NO: 2780574 - DNA, 25 bp, Homo sapien
cagctgtctggagcgacccagagga

SEQ ID NO: 2780575 - DNA, 25 bp, Homo sapien
gcaggcattgccctcagcggggcaa

SEQ ID NO: 2780576 - DNA, 25 bp, Homo sapien
gtctgtttcaggacttcagtgttca

SEQ ID NO: 2780577 - DNA, 25 bp, Homo sapien
aggctttcatctccctagagcaaat

SEQ ID NO: 2780578 - DNA, 25 bp, Homo sapien
agagcaaattattaacacattccac

SEQ ID NO: 2780579 - DNA, 25 bp, Homo sapien
ccaccaaagttgtgagggtggaggc

SEQ ID NO: 2780580 - DNA, 25 bp, Homo sapien
taataaagagttgcccgaaacgtga

SEQ ID NO: 2780581 - DNA, 25 bp, Homo sapien
taatgatagtggttggaaaggcgcc

SEQ ID NO: 2780582 - DNA, 25 bp, Homo sapien
cacagccagttgcccttagccttaa

SEQ ID NO: 2780583 - DNA, 25 bp, Homo sapien
gaaaggcgccaaggtccttgtgccc

SEQ ID NO: 2780584 - DNA, 25 bp, Homo sapien
ggagcatggttggctgactccttgt

SEQ ID NO: 2780585 - DNA, 25 bp, Homo sapien
tcgctaatcacttggctttggctgc

SEQ ID NO: 2780586 - DNA, 25 bp, Homo sapien
ctttggctgctgaaggtcgtagagc

SEQ ID NO: 2780587 - DNA, 25 bp, Homo sapien
acggagactgagctggcacaactgt

SEQ ID NO: 2780588 - DNA, 25 bp, Homo sapien
acaactgtgaccacttcgctaatca

SEQ ID NO: 2780589 - DNA, 25 bp, Homo sapien
aagctttgtgctgagtcgagggact

SEQ ID NO: 2780590 - DNA, 25 bp, Homo sapien
ctaaggaagctttgtgctgagtcga

SEQ ID NO: 2780591 - DNA, 25 bp, Homo sapien
aggaagctttgtgctgagtcgaggg

SEQ ID NO: 2780592 - DNA, 25 bp, Homo sapien
taaggaagctttgtgctgagtcgag

SEQ ID NO: 2780593 - DNA, 25 bp, Homo sapien
catgtcctaggtcgctgacagggta

SEQ ID NO: 2780594 - DNA, 25 bp, Homo sapien
tgagacaggaactacagccatcacc

SEQ ID NO: 2780595 - DNA, 25 bp, Homo sapien
gatcgaccaataagactgagacagg

SEQ ID NO: 2780596 - DNA, 25 bp, Homo sapien
aggaactacagccatcaccccattt

SEQ ID NO: 2780597 - DNA, 25 bp, Homo sapien
tcttgttacgttctttaggagagga

SEQ ID NO: 2780598 - DNA, 25 bp, Homo sapien
tgcaggtttgaagaggttgttggac

SEQ ID NO: 2780599 - DNA, 25 bp, Homo sapien
tttgaagaggttgttggacgaagga

SEQ ID NO: 2780600 - DNA, 25 bp, Homo sapien
tgaagaggttgttggacgaaggagg

SEQ ID NO: 2780601 - DNA, 25 bp, Homo sapien
caggtttgaagaggttgttggacga

SEQ ID NO: 2780602 - DNA, 25 bp, Homo sapien
tctgtactccatccggaagatattc

SEQ ID NO: 2780603 - DNA, 25 bp, Homo sapien
catccggaagatattctagttgaca

SEQ ID NO: 2780604 - DNA, 25 bp, Homo sapien
tcaggtatctcccagttacatctgt

SEQ ID NO: 2780605 - DNA, 25 bp, Homo sapien
acttggcactgactgcacattcagg

SEQ ID NO: 2780606 - DNA, 25 bp, Homo sapien
ctgtcttcttggtctaggtctgctg

SEQ ID NO: 2780607 - DNA, 25 bp, Homo sapien
tctaggtctgctgaacccacttcca

SEQ ID NO: 2780608 - DNA, 25 bp, Homo sapien
tcttggtctaggtctgctgaaccca

SEQ ID NO: 2780609 - DNA, 25 bp, Homo sapien
tctggtcctctgcttcactcgacat

SEQ ID NO: 2780610 - DNA, 25 bp, Homo sapien
ccacttttgctgtcttaagctcatt

SEQ ID NO: 2780611 - DNA, 25 bp, Homo sapien
tttgctgtcttaagctcattaactt

SEQ ID NO: 2780612 - DNA, 25 bp, Homo sapien
tcattaactttcttcaaggttttgc

SEQ ID NO: 2780613 - DNA, 25 bp, Homo sapien
cttcaaggttttgcccattgttgcc

SEQ ID NO: 2780614 - DNA, 25 bp, Homo sapien
tgtcaacgtgctggaagaaggtagt

SEQ ID NO: 2780615 - DNA, 25 bp, Homo sapien
gattgtcctgtgtgatacgatgcca

SEQ ID NO: 2780616 - DNA, 25 bp, Homo sapien
gaaaagtgcctatgtagtctctggc

SEQ ID NO: 2780617 - DNA, 25 bp, Homo sapien
ggtagttgcttctcaaaggctgcca

SEQ ID NO: 2780618 - DNA, 25 bp, Homo sapien
gaaagggcattctaattcgaaagtg

SEQ ID NO: 2780619 - DNA, 25 bp, Homo sapien
cctggataaccatcattagtgaatg

SEQ ID NO: 2780620 - DNA, 25 bp, Homo sapien
tcttctctaggccactgcaccaagg

SEQ ID NO: 2780621 - DNA, 25 bp, Homo sapien
tgacacatctcactgtgaaagcaga

SEQ ID NO: 2780622 - DNA, 25 bp, Homo sapien
tccctgctcaacaatataaatacac

SEQ ID NO: 2780623 - DNA, 25 bp, Homo sapien
tgtgcctgggtgtaagtcctgtttc

SEQ ID NO: 2780624 - DNA, 25 bp, Homo sapien
ttttggagctaattcagcttgacag

SEQ ID NO: 2780625 - DNA, 25 bp, Homo sapien
catatggtacatattcctctgatat

SEQ ID NO: 2780626 - DNA, 25 bp, Homo sapien
catccagtgccttgatcacagtagg

SEQ ID NO: 2780627 - DNA, 25 bp, Homo sapien
gacccctgggctagaagatcaagta

SEQ ID NO: 2780628 - DNA, 25 bp, Homo sapien
aaagagaaattgtcatagtgcccca

SEQ ID NO: 2780629 - DNA, 25 bp, Homo sapien
gcaccccacatatcctagagctgag

SEQ ID NO: 2780630 - DNA, 25 bp, Homo sapien
tttgttgcgcaatagtgccccagcc

SEQ ID NO: 2780631 - DNA, 25 bp, Homo sapien
tcgaatgcatggtaaacatagggcc

SEQ ID NO: 2780632 - DNA, 25 bp, Homo sapien
tgccccagcccggatgaatgtcatt

SEQ ID NO: 2780633 - DNA, 25 bp, Homo sapien
ggaagtcttgacaccgctcggcaag

SEQ ID NO: 2780634 - DNA, 25 bp, Homo sapien
aggtcctgagatccccattctgagg

SEQ ID NO: 2780635 - DNA, 25 bp, Homo sapien
tgaggcccttcgctgactcactgct

SEQ ID NO: 2780636 - DNA, 25 bp, Homo sapien
actacatccacacggtgaaggcagg

SEQ ID NO: 2780637 - DNA, 25 bp, Homo sapien
tgtccactctcagggcaactacatc

SEQ ID NO: 2780638 - DNA, 25 bp, Homo sapien
aaagtgctctttgcccttaacactg

SEQ ID NO: 2780639 - DNA, 25 bp, Homo sapien
gctggcactagctccacagtggcta

SEQ ID NO: 2780640 - DNA, 25 bp, Homo sapien
actgtacagattcacacagctggca

SEQ ID NO: 2780641 - DNA, 25 bp, Homo sapien
gagctctgcgcagttttgtctgcct

SEQ ID NO: 2780642 - DNA, 25 bp, Homo sapien
tcagtcaagtgcagccacaagagga

SEQ ID NO: 2780643 - DNA, 25 bp, Homo sapien
tcaagtgcagccacaagaggagaca

SEQ ID NO: 2780644 - DNA, 25 bp, Homo sapien
aagtgcagccacaagaggagacaga

SEQ ID NO: 2780645 - DNA, 25 bp, Homo sapien
caagtgcagccacaagaggagacag

SEQ ID NO: 2780646 - DNA, 25 bp, Homo sapien
cctctggctgcctatgtaaagtcta

SEQ ID NO: 2780647 - DNA, 25 bp, Homo sapien
taaggtcaccttcgccaagttcctc

SEQ ID NO: 2780648 - DNA, 25 bp, Homo sapien
tgcctgagtgttgacatcccaatct

SEQ ID NO: 2780649 - DNA, 25 bp, Homo sapien
gatttgaatctcactccctgcgttc

SEQ ID NO: 2780650 - DNA, 25 bp, Homo sapien
ggaagcacagcgacatactttgctg

SEQ ID NO: 2780651 - DNA, 25 bp, Homo sapien
tccattgattgtccatttgtgtaag

SEQ ID NO: 2780652 - DNA, 25 bp, Homo sapien
ccatttgtgtaagatggcacatggg

SEQ ID NO: 2780653 - DNA, 25 bp, Homo sapien
ggcacatgggtcatcacaggaagac

SEQ ID NO: 2780654 - DNA, 25 bp, Homo sapien
gaactatctgcttctcggtactgaa

SEQ ID NO: 2780655 - DNA, 25 bp, Homo sapien
caataacagggtgtggtgaccatca

SEQ ID NO: 2780656 - DNA, 25 bp, Homo sapien
tgaaatctgaaccttgcccttgcgg

SEQ ID NO: 2780657 - DNA, 25 bp, Homo sapien
gaactgacagttcatagaccatggt

SEQ ID NO: 2780658 - DNA, 25 bp, Homo sapien
taagcaatacaccatatgtgcaggc

SEQ ID NO: 2780659 - DNA, 25 bp, Homo sapien
gatttaatgtgcagtccgaacccag

SEQ ID NO: 2780660 - DNA, 25 bp, Homo sapien
gaagttaggcgagagagcaagccca

SEQ ID NO: 2780661 - DNA, 25 bp, Homo sapien
gagctgtggacctgattctacccca

SEQ ID NO: 2780662 - DNA, 25 bp, Homo sapien
catagaggtcaggccatgttctagg

SEQ ID NO: 2780663 - DNA, 25 bp, Homo sapien
ggtcaggccatgttctaggctaagt

SEQ ID NO: 2780664 - DNA, 25 bp, Homo sapien
tagaggtcaggccatgttctaggct

SEQ ID NO: 2780665 - DNA, 25 bp, Homo sapien
gttctaggctaagtgcaactctgaa

SEQ ID NO: 2780666 - DNA, 25 bp, Homo sapien
agcggagaggctcaattaacaatga

SEQ ID NO: 2780667 - DNA, 25 bp, Homo sapien
gggtaagattctctctgcaagcgga

SEQ ID NO: 2780668 - DNA, 25 bp, Homo sapien
gctctatgcaggtaagggttagtca

SEQ ID NO: 2780669 - DNA, 25 bp, Homo sapien
tgacagaagaagaattccagcactg

SEQ ID NO: 2780670 - DNA, 25 bp, Homo sapien
gctagtccgtagttccagtctctga

SEQ ID NO: 2780671 - DNA, 25 bp, Homo sapien
tgaagaacttctaagagtcagggtg

SEQ ID NO: 2780672 - DNA, 25 bp, Homo sapien
gatagttccattggccaaaggtcca

SEQ ID NO: 2780673 - DNA, 25 bp, Homo sapien
aagggcttccctcaaagtcaacagg

SEQ ID NO: 2780674 - DNA, 25 bp, Homo sapien
gatggaaactagtcttacagcccac

SEQ ID NO: 2780675 - DNA, 25 bp, Homo sapien
ggtgaggcacatccactctgatgga

SEQ ID NO: 2780676 - DNA, 25 bp, Homo sapien
gagcacacgtggaaaaggcaccact

SEQ ID NO: 2780677 - DNA, 25 bp, Homo sapien
cataaaacgcttacacctgggaatc

SEQ ID NO: 2780678 - DNA, 25 bp, Homo sapien
cattccaacttgggcgacagagcga

SEQ ID NO: 2780679 - DNA, 25 bp, Homo sapien
cgccactgcattccaacttgggcga

SEQ ID NO: 2780680 - DNA, 25 bp, Homo sapien
ttgcgccactgcattccaacttggg

SEQ ID NO: 2780681 - DNA, 25 bp, Homo sapien
gcattccaacttgggcgacagagcg

SEQ ID NO: 2780682 - DNA, 25 bp, Homo sapien
gctgctctaatgacacgatgtgtgc

SEQ ID NO: 2780683 - DNA, 25 bp, Homo sapien
ttttcggaagtgttgacccagcagc

SEQ ID NO: 2780684 - DNA, 25 bp, Homo sapien
tgagagccttggaaatcgctgcccg

SEQ ID NO: 2780685 - DNA, 25 bp, Homo sapien
tagattctgagatgctccggtcgct

SEQ ID NO: 2780686 - DNA, 25 bp, Homo sapien
cagtctctgtggtaataatctccct

SEQ ID NO: 2780687 - DNA, 25 bp, Homo sapien
agttttgcctttgcggctgtttatt

SEQ ID NO: 2780688 - DNA, 25 bp, Homo sapien
gctaagactcttaaacctgtcagcg

SEQ ID NO: 2780689 - DNA, 25 bp, Homo sapien
tcagcgaagcggtttccagcccagt

SEQ ID NO: 2780690 - DNA, 25 bp, Homo sapien
caaagcctagtgttcagtgtccctg

SEQ ID NO: 2780691 - DNA, 25 bp, Homo sapien
ggttttccatccgtgctggtcacca

SEQ ID NO: 2780692 - DNA, 25 bp, Homo sapien
gagccctcatcgtctcctgtgcaaa

SEQ ID NO: 2780693 - DNA, 25 bp, Homo sapien
tttggtgccaaacgtgagtaaggtg

SEQ ID NO: 2780694 - DNA, 25 bp, Homo sapien
tcctgaataggctcttgtttcctct

SEQ ID NO: 2780695 - DNA, 25 bp, Homo sapien
cattagcctttggtctgccatgact

SEQ ID NO: 2780696 - DNA, 25 bp, Homo sapien
taagtagcagtacagtccattagcc

SEQ ID NO: 2780697 - DNA, 25 bp, Homo sapien
caattgtgctatctcctgcatctca

SEQ ID NO: 2780698 - DNA, 25 bp, Homo sapien
ctctttccttgtgtcaggtaacctg

SEQ ID NO: 2780699 - DNA, 25 bp, Homo sapien
taacctgggcttccatcatattctt

SEQ ID NO: 2780700 - DNA, 25 bp, Homo sapien
tgtgtcaggtaacctgggcttccat

SEQ ID NO: 2780701 - DNA, 25 bp, Homo sapien
cctgggcttccatcatattcttcca

SEQ ID NO: 2780702 - DNA, 25 bp, Homo sapien
ccaccaatattgagaggagtgaaga

SEQ ID NO: 2780703 - DNA, 25 bp, Homo sapien
tgacaaaaggtaagccaattaagga

SEQ ID NO: 2780704 - DNA, 25 bp, Homo sapien
caccaatattgagaggagtgaagat

SEQ ID NO: 2780705 - DNA, 25 bp, Homo sapien
caatattgagaggagtgaagatttc

SEQ ID NO: 2780706 - DNA, 25 bp, Homo sapien
ttcaagttttaatcgaagcttgtat

SEQ ID NO: 2780707 - DNA, 25 bp, Homo sapien
tttaatcgaagcttgtatataagat

SEQ ID NO: 2780708 - DNA, 25 bp, Homo sapien
tgtttcaagttttaatcgaagcttg

SEQ ID NO: 2780709 - DNA, 25 bp, Homo sapien
gttttaatcgaagcttgtatataag

SEQ ID NO: 2780710 - DNA, 25 bp, Homo sapien
tgcccttttcctttcctacttggca

SEQ ID NO: 2780711 - DNA, 25 bp, Homo sapien
tcaattgtttcttccttgtatttgc

SEQ ID NO: 2780712 - DNA, 25 bp, Homo sapien
tattcctgcatcttctcaattgttt

SEQ ID NO: 2780713 - DNA, 25 bp, Homo sapien
attgtttcttccttgtatttgccct

SEQ ID NO: 2780714 - DNA, 25 bp, Homo sapien
aaggatcttttcacagtctttgtcc

SEQ ID NO: 2780715 - DNA, 25 bp, Homo sapien
ctttccgttcaaggatcttttcaca

SEQ ID NO: 2780716 - DNA, 25 bp, Homo sapien
gttcaaggatcttttcacagtcttt

SEQ ID NO: 2780717 - DNA, 25 bp, Homo sapien
tccgttcaaggatcttttcacagtc

SEQ ID NO: 2780718 - DNA, 25 bp, Homo sapien
atagtcttccttcgaatgtgggaag

SEQ ID NO: 2780719 - DNA, 25 bp, Homo sapien
gaagacatagtcttccttcgaatgt

SEQ ID NO: 2780720 - DNA, 25 bp, Homo sapien
cttttgcgattcttgcttcggtcgg

SEQ ID NO: 2780721 - DNA, 25 bp, Homo sapien
cgattcttgcttcggtcggaagtca

SEQ ID NO: 2780722 - DNA, 25 bp, Homo sapien
ggccactcctgcttcggtgatagcc

SEQ ID NO: 2780723 - DNA, 25 bp, Homo sapien
gccactcctgcttcggtgatagccg

SEQ ID NO: 2780724 - DNA, 25 bp, Homo sapien
actcctgcttcggtgatagccgcaa

SEQ ID NO: 2780725 - DNA, 25 bp, Homo sapien
cactcctgcttcggtgatagccgca

SEQ ID NO: 2780726 - DNA, 25 bp, Homo sapien
tccatatctagtggcaagggagact

SEQ ID NO: 2780727 - DNA, 25 bp, Homo sapien
gccattgtgtcttaaatctgccaga

SEQ ID NO: 2780728 - DNA, 25 bp, Homo sapien
tgaggacaccatagcagccatactg

SEQ ID NO: 2780729 - DNA, 25 bp, Homo sapien
caagtgttcttggatgccgatgcta

SEQ ID NO: 2780730 - DNA, 25 bp, Homo sapien
caggtaacacgtccaagggctggaa

SEQ ID NO: 2780731 - DNA, 25 bp, Homo sapien
ggagctgacattcaaacccgggtgc

SEQ ID NO: 2780732 - DNA, 25 bp, Homo sapien
tattattattctgaggctgatgtcc

SEQ ID NO: 2780733 - DNA, 25 bp, Homo sapien
cttaacctgaagctcagggctatta

SEQ ID NO: 2780734 - DNA, 25 bp, Homo sapien
tcagtagcaccgatggttcccggag

SEQ ID NO: 2780735 - DNA, 25 bp, Homo sapien
tctgtactggaattagacggatccc

SEQ ID NO: 2780736 - DNA, 25 bp, Homo sapien
gcttgtgctttggaggcccagcctt

SEQ ID NO: 2780737 - DNA, 25 bp, Homo sapien
gaagctgctagctgtgttggtgccc

SEQ ID NO: 2780738 - DNA, 25 bp, Homo sapien
cactgagtttccatctatttcctgc

SEQ ID NO: 2780739 - DNA, 25 bp, Homo sapien
actgagtttccatctatttcctgca

SEQ ID NO: 2780740 - DNA, 25 bp, Homo sapien
tccactgagtttccatctatttcct

SEQ ID NO: 2780741 - DNA, 25 bp, Homo sapien
ctgagtttccatctatttcctgcat

SEQ ID NO: 2780742 - DNA, 25 bp, Homo sapien
ccagtatgtacatctggaatctgtc

SEQ ID NO: 2780743 - DNA, 25 bp, Homo sapien
ggacttcagctttccccgcaacaga

SEQ ID NO: 2780744 - DNA, 25 bp, Homo sapien
cctgctgcgcttcccagtatgtaca

SEQ ID NO: 2780745 - DNA, 25 bp, Homo sapien
cgcaacagacccctgctgcgcttcc

SEQ ID NO: 2780746 - DNA, 25 bp, Homo sapien
tgccagagatggatgctgacaccca

SEQ ID NO: 2780747 - DNA, 25 bp, Homo sapien
gccagagatggatgctgacacccat

SEQ ID NO: 2780748 - DNA, 25 bp, Homo sapien
ctgccagagatggatgctgacaccc

SEQ ID NO: 2780749 - DNA, 25 bp, Homo sapien
ctaatccgtctccattgcctggtcc

SEQ ID NO: 2780750 - DNA, 25 bp, Homo sapien
aatccgtctccattgcctggtcctt

SEQ ID NO: 2780751 - DNA, 25 bp, Homo sapien
taatccgtctccattgcctggtcct

SEQ ID NO: 2780752 - DNA, 25 bp, Homo sapien
atccgtctccattgcctggtccttg

SEQ ID NO: 2780753 - DNA, 25 bp, Homo sapien
tttcttcatctgcaatgccctcctc

SEQ ID NO: 2780754 - DNA, 25 bp, Homo sapien
ctctgattctttgcttctgccattt

SEQ ID NO: 2780755 - DNA, 25 bp, Homo sapien
tcttcatctgcaatgccctcctcca

SEQ ID NO: 2780756 - DNA, 25 bp, Homo sapien
attttcttcatctgcaatgccctcc

SEQ ID NO: 2780757 - DNA, 25 bp, Homo sapien
cacctggcatcataagtctcaggct

SEQ ID NO: 2780758 - DNA, 25 bp, Homo sapien
ggcacctggcatcataagtctcagg

SEQ ID NO: 2780759 - DNA, 25 bp, Homo sapien
ctggcatcataagtctcaggctcca

SEQ ID NO: 2780760 - DNA, 25 bp, Homo sapien
gcatcataagtctcaggctccatgg

SEQ ID NO: 2780761 - DNA, 25 bp, Homo sapien
tggacatgttcagctgccacagaaa

SEQ ID NO: 2780762 - DNA, 25 bp, Homo sapien
ggtgacattcagagaacatttgctt

SEQ ID NO: 2780763 - DNA, 25 bp, Homo sapien
cacaaaatgtggtctcaaggctaac

SEQ ID NO: 2780764 - DNA, 25 bp, Homo sapien
gcatagtgtgccctactctctccca

SEQ ID NO: 2780765 - DNA, 25 bp, Homo sapien
cagaactagctctgggaggctttgg

SEQ ID NO: 2780766 - DNA, 25 bp, Homo sapien
ggctggaagttcgaaataaatttca

SEQ ID NO: 2780767 - DNA, 25 bp, Homo sapien
caccttgagaaacataaatagttgt

SEQ ID NO: 2780768 - DNA, 25 bp, Homo sapien
cattccttagtcatgtatccaaagg

SEQ ID NO: 2780769 - DNA, 25 bp, Homo sapien
tccctttctatctacaggctgtctg

SEQ ID NO: 2780770 - DNA, 25 bp, Homo sapien
ggtcctgagatggtagaaggagaag

SEQ ID NO: 2780771 - DNA, 25 bp, Homo sapien
gggtcctgagatggtagaaggagaa

SEQ ID NO: 2780772 - DNA, 25 bp, Homo sapien
ggggtcctgagatggtagaaggaga

SEQ ID NO: 2780773 - DNA, 25 bp, Homo sapien
tccccttgggtggaaagcaggtctg

SEQ ID NO: 2780774 - DNA, 25 bp, Homo sapien
ttgccctgcgaaccacatctccagc

SEQ ID NO: 2780775 - DNA, 25 bp, Homo sapien
gtgtgttgagcccttcctctatagg

SEQ ID NO: 2780776 - DNA, 25 bp, Homo sapien
ctctataggaggaaagtcttcaggg

SEQ ID NO: 2780777 - DNA, 25 bp, Homo sapien
atctccagctcggtctctgccattt

SEQ ID NO: 2780778 - DNA, 25 bp, Homo sapien
ctaggccacttacaccaagccaaga

SEQ ID NO: 2780779 - DNA, 25 bp, Homo sapien
taagttactcgcgagctgtagctgg

SEQ ID NO: 2780780 - DNA, 25 bp, Homo sapien
caaaggtcggcattggcctcagagg

SEQ ID NO: 2780781 - DNA, 25 bp, Homo sapien
tccaggtttcaacacgaggtgcccc

SEQ ID NO: 2780782 - DNA, 25 bp, Homo sapien
gaggtgccccttgtcctatttcaga

SEQ ID NO: 2780783 - DNA, 25 bp, Homo sapien
gggataaatgatgattctgaagaca

SEQ ID NO: 2780784 - DNA, 25 bp, Homo sapien
gaagacatctttgctgtcaattaac

SEQ ID NO: 2780785 - DNA, 25 bp, Homo sapien
cttggggataaatgatgattctgaa

SEQ ID NO: 2780786 - DNA, 25 bp, Homo sapien
gatgattctgaagacatctttgctg

SEQ ID NO: 2780787 - DNA, 25 bp, Homo sapien
cttgatatccaattacagcatactc

SEQ ID NO: 2780788 - DNA, 25 bp, Homo sapien
acttcatgtcttgatatccaattac

SEQ ID NO: 2780789 - DNA, 25 bp, Homo sapien
caatcttcacttgtaaacttcatgt

SEQ ID NO: 2780790 - DNA, 25 bp, Homo sapien
tcttcacttgtaaacttcatgtctt

SEQ ID NO: 2780791 - DNA, 25 bp, Homo sapien
gagctatatcttgaatggaaggagg

SEQ ID NO: 2780792 - DNA, 25 bp, Homo sapien
tcaaatctttctggggtccactcag

SEQ ID NO: 2780793 - DNA, 25 bp, Homo sapien
ggtccactcagaatcatgcagtgaa

SEQ ID NO: 2780794 - DNA, 25 bp, Homo sapien
ctttggtggataagaaagagctata

SEQ ID NO: 2780795 - DNA, 25 bp, Homo sapien
ttttctatgcttgtaaaatatcctc

SEQ ID NO: 2780796 - DNA, 25 bp, Homo sapien
atagaagctgaagctactctctcct

SEQ ID NO: 2780797 - DNA, 25 bp, Homo sapien
ccatagaagctgaagctactctctc

SEQ ID NO: 2780798 - DNA, 25 bp, Homo sapien
catagaagctgaagctactctctcc

SEQ ID NO: 2780799 - DNA, 25 bp, Homo sapien
tagaagctgaagctactctctcctt

SEQ ID NO: 2780800 - DNA, 25 bp, Homo sapien
aaagcaccgctcctggagtcagccc

SEQ ID NO: 2780801 - DNA, 25 bp, Homo sapien
tttgccaaagcaccgctcctggagt

SEQ ID NO: 2780802 - DNA, 25 bp, Homo sapien
tgccaaagcaccgctcctggagtca

SEQ ID NO: 2780803 - DNA, 25 bp, Homo sapien
catttgccaaagcaccgctcctgga

SEQ ID NO: 2780804 - DNA, 25 bp, Homo sapien
tctgggcaaggaaagcatgtccatt

SEQ ID NO: 2780805 - DNA, 25 bp, Homo sapien
tccttatcacactttccatctgggc

SEQ ID NO: 2780806 - DNA, 25 bp, Homo sapien
ggcaaggaaagcatgtccattctcc

SEQ ID NO: 2780807 - DNA, 25 bp, Homo sapien
ctgtggcttttccttatcacacttt

SEQ ID NO: 2780808 - DNA, 25 bp, Homo sapien
gctatttgatctttctctccagttt

SEQ ID NO: 2780809 - DNA, 25 bp, Homo sapien
gatctttctctccagtttcttccat

SEQ ID NO: 2780810 - DNA, 25 bp, Homo sapien
tttgatctttctctccagtttcttc

SEQ ID NO: 2780811 - DNA, 25 bp, Homo sapien
ggctatttgatctttctctccagtt

SEQ ID NO: 2780812 - DNA, 25 bp, Homo sapien
tggaaacaatgactcctgttctcca

SEQ ID NO: 2780813 - DNA, 25 bp, Homo sapien
tcttcctgaggcaatttattagtta

SEQ ID NO: 2780814 - DNA, 25 bp, Homo sapien
atctgtgggactataacactgtacc

SEQ ID NO: 2780815 - DNA, 25 bp, Homo sapien
tttcaagaccctcatgcagattttc

SEQ ID NO: 2780816 - DNA, 25 bp, Homo sapien
attcctttggccacgctgatgtctg

SEQ ID NO: 2780817 - DNA, 25 bp, Homo sapien
cattgtacttgtaagccaaccgagg

SEQ ID NO: 2780818 - DNA, 25 bp, Homo sapien
ccaaccgaggtatacagcatctgaa

SEQ ID NO: 2780819 - DNA, 25 bp, Homo sapien
tcaattactgagctgggtacggact

SEQ ID NO: 2780820 - DNA, 25 bp, Homo sapien
gttgcacagagcgagataagcaata

SEQ ID NO: 2780821 - DNA, 25 bp, Homo sapien
gtgccgcctcctcgttaaaggccag

SEQ ID NO: 2780822 - DNA, 25 bp, Homo sapien
taagcaatacgacatttgtagccgt

SEQ ID NO: 2780823 - DNA, 25 bp, Homo sapien
cgttcacatcctgaacgtagagcat

SEQ ID NO: 2780824 - DNA, 25 bp, Homo sapien
gccagagattactgccgtcagagtg

SEQ ID NO: 2780825 - DNA, 25 bp, Homo sapien
gagactcatctgaaatagattttgt

SEQ ID NO: 2780826 - DNA, 25 bp, Homo sapien
ggcagaatgggaacagagactcatc

SEQ ID NO: 2780827 - DNA, 25 bp, Homo sapien
tgcaagttggatagctcaggtcaat

SEQ ID NO: 2780828 - DNA, 25 bp, Homo sapien
tgtaggttctgtgtatgcatccatg

SEQ ID NO: 2780829 - DNA, 25 bp, Homo sapien
tcaacccagtaggggcccaaggcaa

SEQ ID NO: 2780830 - DNA, 25 bp, Homo sapien
caaaggagtcatccctgagatgctc

SEQ ID NO: 2780831 - DNA, 25 bp, Homo sapien
gaaaatgctacaagagcctcgagat

SEQ ID NO: 2780832 - DNA, 25 bp, Homo sapien
agagcctcgagattttctccaaagg

SEQ ID NO: 2780833 - DNA, 25 bp, Homo sapien
tccaggtcaactcagggcttgattt

SEQ ID NO: 2780834 - DNA, 25 bp, Homo sapien
ctaacaccacttcataaatcacagg

SEQ ID NO: 2780835 - DNA, 25 bp, Homo sapien
gtttccatggcctcgatttcagcag

SEQ ID NO: 2780836 - DNA, 25 bp, Homo sapien
cttggacttagaatgcacaagccct

SEQ ID NO: 2780837 - DNA, 25 bp, Homo sapien
ttcagcagggacagatactgcctgg

SEQ ID NO: 2780838 - DNA, 25 bp, Homo sapien
gagcttgccaaccttctgttttaag

SEQ ID NO: 2780839 - DNA, 25 bp, Homo sapien
tggctcaatgtaatcatttcctcaa

SEQ ID NO: 2780840 - DNA, 25 bp, Homo sapien
taaatagctgatcatttgtgaaata

SEQ ID NO: 2780841 - DNA, 25 bp, Homo sapien
ggaacttttccatggctcaatgtaa

SEQ ID NO: 2780842 - DNA, 25 bp, Homo sapien
cactctgatcgtctgatggctgctg

SEQ ID NO: 2780843 - DNA, 25 bp, Homo sapien
gctgcccaatcagctctacttggta

SEQ ID NO: 2780844 - DNA, 25 bp, Homo sapien
tgcccaatcagctctacttggtaga

SEQ ID NO: 2780845 - DNA, 25 bp, Homo sapien
gcccaatcagctctacttggtagaa

SEQ ID NO: 2780846 - DNA, 25 bp, Homo sapien
ctgcccaatcagctctacttggtag

SEQ ID NO: 2780847 - DNA, 25 bp, Homo sapien
ggttccatagggaggcgagagtacc

SEQ ID NO: 2780848 - DNA, 25 bp, Homo sapien
tagggaggcgagagtaccaggactg

SEQ ID NO: 2780849 - DNA, 25 bp, Homo sapien
agaagatgggcacaaattgaaacaa

SEQ ID NO: 2780850 - DNA, 25 bp, Homo sapien
ccaaactgcttgactgaatgctgct

SEQ ID NO: 2780851 - DNA, 25 bp, Homo sapien
aggccaaggagaacccaagctacct

SEQ ID NO: 2780852 - DNA, 25 bp, Homo sapien
ccaaggagaacccaagctacctggg

SEQ ID NO: 2780853 - DNA, 25 bp, Homo sapien
ggaatgccagatgtggcattcccac

SEQ ID NO: 2780854 - DNA, 25 bp, Homo sapien
cattctgtgaaactgcacagggtgg

SEQ ID NO: 2780855 - DNA, 25 bp, Homo sapien
tatagcctgttacccagtccagtca

SEQ ID NO: 2780856 - DNA, 25 bp, Homo sapien
gctgagtggataagtcctgttttca

SEQ ID NO: 2780857 - DNA, 25 bp, Homo sapien
aggagctgagtggataagtcctgtt

SEQ ID NO: 2780858 - DNA, 25 bp, Homo sapien
aagatgcaggtagggattccaatat

SEQ ID NO: 2780859 - DNA, 25 bp, Homo sapien
agctgctctgctgcctttccagccg

SEQ ID NO: 2780860 - DNA, 25 bp, Homo sapien
tgctctgctgcctttccagccgcct

SEQ ID NO: 2780861 - DNA, 25 bp, Homo sapien
cagctgctctgctgcctttccagcc

SEQ ID NO: 2780862 - DNA, 25 bp, Homo sapien
cttttctggagcctcagctgctctg

SEQ ID NO: 2780863 - DNA, 25 bp, Homo sapien
gcaccactaatgtacagccgtattg

SEQ ID NO: 2780864 - DNA, 25 bp, Homo sapien
ttcattccgcaaggcaccactaatg

SEQ ID NO: 2780865 - DNA, 25 bp, Homo sapien
ccgtattgaataggacttacactga

SEQ ID NO: 2780866 - DNA, 25 bp, Homo sapien
ggaaattttggaaaggcactatgca

SEQ ID NO: 2780867 - DNA, 25 bp, Homo sapien
gagcaccccgaacaagagtagagtg

SEQ ID NO: 2780868 - DNA, 25 bp, Homo sapien
gcaccccgaacaagagtagagtgaa

SEQ ID NO: 2780869 - DNA, 25 bp, Homo sapien
cccgaacaagagtagagtgaaagca

SEQ ID NO: 2780870 - DNA, 25 bp, Homo sapien
ccccgaacaagagtagagtgaaagc

SEQ ID NO: 2780871 - DNA, 25 bp, Homo sapien
tttccttcctctatgcccaaatatg

SEQ ID NO: 2780872 - DNA, 25 bp, Homo sapien
tcatccaggttttcccgctgtaaaa

SEQ ID NO: 2780873 - DNA, 25 bp, Homo sapien
tccttcctctatgcccaaatatgtg

SEQ ID NO: 2780874 - DNA, 25 bp, Homo sapien
tgttaactcatccaggttttcccgc

SEQ ID NO: 2780875 - DNA, 25 bp, Homo sapien
cctctcgtgaggcaacctctcccct

SEQ ID NO: 2780876 - DNA, 25 bp, Homo sapien
tatggtccttcaatttccacaggca

SEQ ID NO: 2780877 - DNA, 25 bp, Homo sapien
ggtccttcaatttccacaggcaaat

SEQ ID NO: 2780878 - DNA, 25 bp, Homo sapien
ggtatggtccttcaatttccacagg

SEQ ID NO: 2780879 - DNA, 25 bp, Homo sapien
gtggtatggtccttcaatttccaca

SEQ ID NO: 2780880 - DNA, 25 bp, Homo sapien
agcagccaactccaatgtgcccatt

SEQ ID NO: 2780881 - DNA, 25 bp, Homo sapien
caacttcaagcaccagaggatggtg

SEQ ID NO: 2780882 - DNA, 25 bp, Homo sapien
atggtgcctaggagcaagttgagca

SEQ ID NO: 2780883 - DNA, 25 bp, Homo sapien
caagttgagcacaggaagatgcaaa

SEQ ID NO: 2780884 - DNA, 25 bp, Homo sapien
gagagtagtgagtgttctgttatcc

SEQ ID NO: 2780885 - DNA, 25 bp, Homo sapien
catcctgccaagtgttggagtgcat

SEQ ID NO: 2780886 - DNA, 25 bp, Homo sapien
tggcccctggaatgccagcattccc

SEQ ID NO: 2780887 - DNA, 25 bp, Homo sapien
tccatttatagcaaatccagcacct

SEQ ID NO: 2780888 - DNA, 25 bp, Homo sapien
gctatgaacacctcatcctgccaag

SEQ ID NO: 2780889 - DNA, 25 bp, Homo sapien
tttttggtcattcgatggccatctg

SEQ ID NO: 2780890 - DNA, 25 bp, Homo sapien
ttttggtcattcgatggccatctgt

SEQ ID NO: 2780891 - DNA, 25 bp, Homo sapien
cagcctgggggccggcattgagcat

SEQ ID NO: 2780892 - DNA, 25 bp, Homo sapien
tccatttgccaagtttcatgcatgg

SEQ ID NO: 2780893 - DNA, 25 bp, Homo sapien
tcttctaccactaattcactatcca

SEQ ID NO: 2780894 - DNA, 25 bp, Homo sapien
cactatccatttgccaagtttcatg

SEQ ID NO: 2780895 - DNA, 25 bp, Homo sapien
actaattcactatccatttgccaag

SEQ ID NO: 2780896 - DNA, 25 bp, Homo sapien
gttcacatagtgcacactcatcttg

SEQ ID NO: 2780897 - DNA, 25 bp, Homo sapien
aaggaagtgttcacatagtgcacac

SEQ ID NO: 2780898 - DNA, 25 bp, Homo sapien
gtgcacactcatcttgtgttcgtca

SEQ ID NO: 2780899 - DNA, 25 bp, Homo sapien
cttgtgttcgtcatcctggaccatc

SEQ ID NO: 2780900 - DNA, 25 bp, Homo sapien
gagccagggacaggtaggtactgcc

SEQ ID NO: 2780901 - DNA, 25 bp, Homo sapien
aagagccagggacaggtaggtactg

SEQ ID NO: 2780902 - DNA, 25 bp, Homo sapien
gccagggacaggtaggtactgccct

SEQ ID NO: 2780903 - DNA, 25 bp, Homo sapien
agccagggacaggtaggtactgccc

SEQ ID NO: 2780904 - DNA, 25 bp, Homo sapien
tctctgccaagagggtgggcaccac

SEQ ID NO: 2780905 - DNA, 25 bp, Homo sapien
tctctgctggaaagatatcctggcc

SEQ ID NO: 2780906 - DNA, 25 bp, Homo sapien
gaaggttcaccttgcgatcctgcag

SEQ ID NO: 2780907 - DNA, 25 bp, Homo sapien
tgggacaaggtcacgaacagcaaca

SEQ ID NO: 2780908 - DNA, 25 bp, Homo sapien
tatccaataatgaccctccctctga

SEQ ID NO: 2780909 - DNA, 25 bp, Homo sapien
tacgtgagtaaacagtagatatcca

SEQ ID NO: 2780910 - DNA, 25 bp, Homo sapien
agtagatatccaataatgaccctcc

SEQ ID NO: 2780911 - DNA, 25 bp, Homo sapien
ccaatacgtgagtaaacagtagata

SEQ ID NO: 2780912 - DNA, 25 bp, Homo sapien
agttctctgcgataatatcctgaag

SEQ ID NO: 2780913 - DNA, 25 bp, Homo sapien
tgatgggtttgaacctcttccttta

SEQ ID NO: 2780914 - DNA, 25 bp, Homo sapien
cagagaagtttcttattaccgatcg

SEQ ID NO: 2780915 - DNA, 25 bp, Homo sapien
tcttattaccgatcgtctgaagcct

SEQ ID NO: 2780916 - DNA, 25 bp, Homo sapien
atcaccagccgaggtggccgaacag

SEQ ID NO: 2780917 - DNA, 25 bp, Homo sapien
ctgggtatcaccagccgaggtggcc

SEQ ID NO: 2780918 - DNA, 25 bp, Homo sapien
cgaggtggccgaacagcaaatattg

SEQ ID NO: 2780919 - DNA, 25 bp, Homo sapien
tggcgaatgttgctgcccgatcctt

SEQ ID NO: 2780920 - DNA, 25 bp, Homo sapien
ttacacgtctttcagatagcgaatt

SEQ ID NO: 2780921 - DNA, 25 bp, Homo sapien
gatagcgaattaagatcatgaattg

SEQ ID NO: 2780922 - DNA, 25 bp, Homo sapien
tgattggggtaaacaagctacgctt

SEQ ID NO: 2780923 - DNA, 25 bp, Homo sapien
taaacaagctacgcttgaaaaacca

SEQ ID NO: 2780924 - DNA, 25 bp, Homo sapien
gagaatcccacacatttcagtccaa

SEQ ID NO: 2780925 - DNA, 25 bp, Homo sapien
gaaagtgctgaattactagcctgcc

SEQ ID NO: 2780926 - DNA, 25 bp, Homo sapien
cctgagaatcccacacatttcagtc

SEQ ID NO: 2780927 - DNA, 25 bp, Homo sapien
gaattactagcctgcctgagaatcc

SEQ ID NO: 2780928 - DNA, 25 bp, Homo sapien
ctgaagaagtttggatagggagcca

SEQ ID NO: 2780929 - DNA, 25 bp, Homo sapien
gattttcagaaggtagccaccgagg

SEQ ID NO: 2780930 - DNA, 25 bp, Homo sapien
ggagccagtgtgaacacaagccgag

SEQ ID NO: 2780931 - DNA, 25 bp, Homo sapien
agtgtgaacacaagccgagattttc

SEQ ID NO: 2780932 - DNA, 25 bp, Homo sapien
gttgtggagagcagttgttccaggt

SEQ ID NO: 2780933 - DNA, 25 bp, Homo sapien
gggccaagaagagcacattcaaggg

SEQ ID NO: 2780934 - DNA, 25 bp, Homo sapien
ttccaggtttatggaagggccaaga

SEQ ID NO: 2780935 - DNA, 25 bp, Homo sapien
cagttgttccaggtttatggaaggg

SEQ ID NO: 2780936 - DNA, 25 bp, Homo sapien
tccataattggcgaatagcacagca

SEQ ID NO: 2780937 - DNA, 25 bp, Homo sapien
tagcacagcataccacaatggacag

SEQ ID NO: 2780938 - DNA, 25 bp, Homo sapien
caggcaataggtctgtttaacagtc

SEQ ID NO: 2780939 - DNA, 25 bp, Homo sapien
tgaacgggattagaaaagagtcact

SEQ ID NO: 2780940 - DNA, 25 bp, Homo sapien
gccagaccagatgatgattagcatc

SEQ ID NO: 2780941 - DNA, 25 bp, Homo sapien
catgaataggaatagctgggcctgg

SEQ ID NO: 2780942 - DNA, 25 bp, Homo sapien
cagctccagtatgcgatgggccagg

SEQ ID NO: 2780943 - DNA, 25 bp, Homo sapien
ttagcatctgacacatgaataggaa

SEQ ID NO: 2780944 - DNA, 25 bp, Homo sapien
ggtaagccgattgccttctgcacag

SEQ ID NO: 2780945 - DNA, 25 bp, Homo sapien
tgaaggtgccagtggtaagccgatt

SEQ ID NO: 2780946 - DNA, 25 bp, Homo sapien
cacaaagcttgaaacgtggaagggt

SEQ ID NO: 2780947 - DNA, 25 bp, Homo sapien
acaggcacaaagcttgaaacgtgga

SEQ ID NO: 2780948 - DNA, 25 bp, Homo sapien
cagtgtataatgtgaggcaccttcc

SEQ ID NO: 2780949 - DNA, 25 bp, Homo sapien
ataatgtgaggcaccttccacacag

SEQ ID NO: 2780950 - DNA, 25 bp, Homo sapien
catttctccagtgtataatgtgagg

SEQ ID NO: 2780951 - DNA, 25 bp, Homo sapien
tctccagtgtataatgtgaggcacc

SEQ ID NO: 2780952 - DNA, 25 bp, Homo sapien
taaatctatagacgttcctcctggg

SEQ ID NO: 2780953 - DNA, 25 bp, Homo sapien
tgacattaccgagcacttcctggca

SEQ ID NO: 2780954 - DNA, 25 bp, Homo sapien
caggtacctgaatatgtgcgtgcaa

SEQ ID NO: 2780955 - DNA, 25 bp, Homo sapien
tatatgtggttctgtacgggactgc

SEQ ID NO: 2780956 - DNA, 25 bp, Homo sapien
ttgttatctgtagcacagggacagg

SEQ ID NO: 2780957 - DNA, 25 bp, Homo sapien
tttgttatctgtagcacagggacag

SEQ ID NO: 2780958 - DNA, 25 bp, Homo sapien
ttttgttatctgtagcacagggaca

SEQ ID NO: 2780959 - DNA, 25 bp, Homo sapien
gttttgttatctgtagcacagggac

SEQ ID NO: 2780960 - DNA, 25 bp, Homo sapien
tctttctttcggaaggtgcaactcc

SEQ ID NO: 2780961 - DNA, 25 bp, Homo sapien
tgcgtccccttcaagcaccagaaac

SEQ ID NO: 2780962 - DNA, 25 bp, Homo sapien
acctgcgcgtcggtgggaggctggt

SEQ ID NO: 2780963 - DNA, 25 bp, Homo sapien
agactgtaaaccctctcgcctgcgt

SEQ ID NO: 2780964 - DNA, 25 bp, Homo sapien
ggcgcgtgcagcgcgcagagtcccg

SEQ ID NO: 2780965 - DNA, 25 bp, Homo sapien
gcgcggcgcgtgcagcgcgcagagt

SEQ ID NO: 2780966 - DNA, 25 bp, Homo sapien
gcggcgcggcgcgtgcagcgcgcag

SEQ ID NO: 2780967 - DNA, 25 bp, Homo sapien
gtgcagcgcgcagagtcccgggagc

SEQ ID NO: 2780968 - DNA, 25 bp, Homo sapien
cagtcatcttcttgggttgagggct

SEQ ID NO: 2780969 - DNA, 25 bp, Homo sapien
ttttgcattttgtactccagtcatc

SEQ ID NO: 2780970 - DNA, 25 bp, Homo sapien
ggtagaaagcacctcttttgcattt

SEQ ID NO: 2780971 - DNA, 25 bp, Homo sapien
tcaggtagaaagcacctcttttgca

SEQ ID NO: 2780972 - DNA, 25 bp, Homo sapien
ggaactgagtgagccctaggtaaat

SEQ ID NO: 2780973 - DNA, 25 bp, Homo sapien
tgtatgtactgtgctaggaactgag

SEQ ID NO: 2780974 - DNA, 25 bp, Homo sapien
gtgaaataagttaacgaatgcctgc

SEQ ID NO: 2780975 - DNA, 25 bp, Homo sapien
gatgatatctaaggccagcatctag

SEQ ID NO: 2780976 - DNA, 25 bp, Homo sapien
attaaacagttgaagcctcctttgt

SEQ ID NO: 2780977 - DNA, 25 bp, Homo sapien
ttcatattctagatgttgctagtca

SEQ ID NO: 2780978 - DNA, 25 bp, Homo sapien
tgttgctagtcaacattgttacctt

SEQ ID NO: 2780979 - DNA, 25 bp, Homo sapien
attttattgtacttgctgcagtgca

SEQ ID NO: 2780980 - DNA, 25 bp, Homo sapien
ccatattgagatggcaaagggtatt

SEQ ID NO: 2780981 - DNA, 25 bp, Homo sapien
cattgaagccatattgagatggcaa

SEQ ID NO: 2780982 - DNA, 25 bp, Homo sapien
cgggagagcagctaactgccgtaga

SEQ ID NO: 2780983 - DNA, 25 bp, Homo sapien
atggtggtaggaaattcttcattga

SEQ ID NO: 2780984 - DNA, 25 bp, Homo sapien
agaggtccaggcaagtgcggcttca

SEQ ID NO: 2780985 - DNA, 25 bp, Homo sapien
tgaatcacttagcagctgagtctcc

SEQ ID NO: 2780986 - DNA, 25 bp, Homo sapien
tccccatcaggtcgcacagtgaaat

SEQ ID NO: 2780987 - DNA, 25 bp, Homo sapien
attcaggtggtaaaaccaatcccag

SEQ ID NO: 2780988 - DNA, 25 bp, Homo sapien
gttccttgtgacattctctgaagat

SEQ ID NO: 2780989 - DNA, 25 bp, Homo sapien
tactttgtagatcaccatgcccacc

SEQ ID NO: 2780990 - DNA, 25 bp, Homo sapien
gtctctcatgtgcaagctttaaagg

SEQ ID NO: 2780991 - DNA, 25 bp, Homo sapien
tccagtttctactacctcaggtgtc

SEQ ID NO: 2780992 - DNA, 25 bp, Homo sapien
tccagggcttaagggctaacttcta

SEQ ID NO: 2780993 - DNA, 25 bp, Homo sapien
cagcaaggcttgtggcggacctaag

SEQ ID NO: 2780994 - DNA, 25 bp, Homo sapien
ggctagactactgtcctgtggctga

SEQ ID NO: 2780995 - DNA, 25 bp, Homo sapien
taccatgtcagaatgaaagcccagt

SEQ ID NO: 2780996 - DNA, 25 bp, Homo sapien
tacaagggaggtcatagttaccatg

SEQ ID NO: 2780997 - DNA, 25 bp, Homo sapien
tatatgcacatgagtacctccagag

SEQ ID NO: 2780998 - DNA, 25 bp, Homo sapien
taaaatattcgagttgcctggagga

SEQ ID NO: 2780999 - DNA, 25 bp, Homo sapien
gcctagggtgtcatcaatgttgcca

SEQ ID NO: 2781000 - DNA, 25 bp, Homo sapien
catttagggttgtactcagctgcac

SEQ ID NO: 2781001 - DNA, 25 bp, Homo sapien
tcacgtggttaaagaagcccatccc

SEQ ID NO: 2781002 - DNA, 25 bp, Homo sapien
catgctagggaaacaggagatcagt

SEQ ID NO: 2781003 - DNA, 25 bp, Homo sapien
catcccggctgtgagaatagcgtgc

SEQ ID NO: 2781004 - DNA, 25 bp, Homo sapien
tatcatgactcggaaccgtgaggcg

SEQ ID NO: 2781005 - DNA, 25 bp, Homo sapien
cagctactgagaatgggcatgttca

SEQ ID NO: 2781006 - DNA, 25 bp, Homo sapien
tggaatcactggtcatctaagagga

SEQ ID NO: 2781007 - DNA, 25 bp, Homo sapien
tcaaactgggacaattggaatcact

SEQ ID NO: 2781008 - DNA, 25 bp, Homo sapien
ggcaaacaatctccttggtggtcag

SEQ ID NO: 2781009 - DNA, 25 bp, Homo sapien
tgcaagtcgactgcctcaggataaa

SEQ ID NO: 2781010 - DNA, 25 bp, Homo sapien
ccaattctgtgtaaggtagccctgg

SEQ ID NO: 2781011 - DNA, 25 bp, Homo sapien
gctacattgagcagggatcgggatc

SEQ ID NO: 2781012 - DNA, 25 bp, Homo sapien
gatcgggatcggtacctgtaaacat

SEQ ID NO: 2781013 - DNA, 25 bp, Homo sapien
tagctccgagtgataaaatccagtc

SEQ ID NO: 2781014 - DNA, 25 bp, Homo sapien
ggcacatgattaacttgtccacggg

SEQ ID NO: 2781015 - DNA, 25 bp, Homo sapien
gaaaccattggtctcgttggcagag

SEQ ID NO: 2781016 - DNA, 25 bp, Homo sapien
cattcataaaggattcagggacggc

SEQ ID NO: 2781017 - DNA, 25 bp, Homo sapien
gctcaggccggttagaagttaaggc

SEQ ID NO: 2781018 - DNA, 25 bp, Homo sapien
aaggctgaagcatttaccgtcccac

SEQ ID NO: 2781019 - DNA, 25 bp, Homo sapien
tagctgttgatcaggaataggctca

SEQ ID NO: 2781020 - DNA, 25 bp, Homo sapien
cactggcagtgaaggagttgagaat

SEQ ID NO: 2781021 - DNA, 25 bp, Homo sapien
gtagaatgctacacactcagcaact

SEQ ID NO: 2781022 - DNA, 25 bp, Homo sapien
taactccagggtgatggttatatct

SEQ ID NO: 2781023 - DNA, 25 bp, Homo sapien
tctgttgagcaaagtaatcataacg

SEQ ID NO: 2781024 - DNA, 25 bp, Homo sapien
tttttcccaaatcttgtctgttgag

SEQ ID NO: 2781025 - DNA, 25 bp, Homo sapien
tggaccaacggtctacagcatctgg

SEQ ID NO: 2781026 - DNA, 25 bp, Homo sapien
taagatgacttgctagctaaaggca

SEQ ID NO: 2781027 - DNA, 25 bp, Homo sapien
gattaagaacccttggcaaatggac

SEQ ID NO: 2781028 - DNA, 25 bp, Homo sapien
taaaatttgagcctcaccaccttgg

SEQ ID NO: 2781029 - DNA, 25 bp, Homo sapien
aaaagcatgagtgcatgttcaaagc

SEQ ID NO: 2781030 - DNA, 25 bp, Homo sapien
tcaaagcttcggcattcttcttccg

SEQ ID NO: 2781031 - DNA, 25 bp, Homo sapien
gcatgagtgcatgttcaaagcttcg

SEQ ID NO: 2781032 - DNA, 25 bp, Homo sapien
gtgcatgttcaaagcttcggcattc

SEQ ID NO: 2781033 - DNA, 25 bp, Homo sapien
attgcagcagtatctttcgattgct

SEQ ID NO: 2781034 - DNA, 25 bp, Homo sapien
tgcagcagtatctttcgattgcttc

SEQ ID NO: 2781035 - DNA, 25 bp, Homo sapien
ttgcagcagtatctttcgattgctt

SEQ ID NO: 2781036 - DNA, 25 bp, Homo sapien
aatgaagtctcaacaaggtattcct

SEQ ID NO: 2781037 - DNA, 25 bp, Homo sapien
catcaggacaccaaagtaactggtc

SEQ ID NO: 2781038 - DNA, 25 bp, Homo sapien
ggtattccttaactttgctctccaa

SEQ ID NO: 2781039 - DNA, 25 bp, Homo sapien
cccttgtgtgtgttcctgcagaaat

SEQ ID NO: 2781040 - DNA, 25 bp, Homo sapien
accatcgtactctccaagataaggg

SEQ ID NO: 2781041 - DNA, 25 bp, Homo sapien
tttctcattaccatcgtactctcca

SEQ ID NO: 2781042 - DNA, 25 bp, Homo sapien
tctgcctgatattgtaaaccaatca

SEQ ID NO: 2781043 - DNA, 25 bp, Homo sapien
gggaatctctgcctgatattgtaaa

SEQ ID NO: 2781044 - DNA, 25 bp, Homo sapien
caggtgaattaccactgtctgtttc

SEQ ID NO: 2781045 - DNA, 25 bp, Homo sapien
aacctctgattccttatcaccatca

SEQ ID NO: 2781046 - DNA, 25 bp, Homo sapien
cttatcaccatcacatgcagtattt

SEQ ID NO: 2781047 - DNA, 25 bp, Homo sapien
tgtttcaacatcttcaacctctgat

SEQ ID NO: 2781048 - DNA, 25 bp, Homo sapien
gatggcgtcagatcatccgcagaag

SEQ ID NO: 2781049 - DNA, 25 bp, Homo sapien
tgagtttcctcgtcatcacctgaca

SEQ ID NO: 2781050 - DNA, 25 bp, Homo sapien
cacagatggcgtcagatcatccgca

SEQ ID NO: 2781051 - DNA, 25 bp, Homo sapien
tcgtaaaggcctagggaagaaatca

SEQ ID NO: 2781052 - DNA, 25 bp, Homo sapien
cagtcaatggtaacagaccctgaat

SEQ ID NO: 2781053 - DNA, 25 bp, Homo sapien
taagcacaatgggtcaacaagaagt

SEQ ID NO: 2781054 - DNA, 25 bp, Homo sapien
tagggtgatcaaagccaaacaaagt

SEQ ID NO: 2781055 - DNA, 25 bp, Homo sapien
tattcaggcatgcaaagtaccatga

SEQ ID NO: 2781056 - DNA, 25 bp, Homo sapien
ctagtgtcatgtctggtagttcatc

SEQ ID NO: 2781057 - DNA, 25 bp, Homo sapien
taaatcttctagaggcatggttcct

SEQ ID NO: 2781058 - DNA, 25 bp, Homo sapien
ggaattgtaggttcatagccataga

SEQ ID NO: 2781059 - DNA, 25 bp, Homo sapien
tggaatttgcaactgctggaattgt

SEQ ID NO: 2781060 - DNA, 25 bp, Homo sapien
tactgaactgcaggtaaactgtact

SEQ ID NO: 2781061 - DNA, 25 bp, Homo sapien
ctgttcaagccagggcataaacacg

SEQ ID NO: 2781062 - DNA, 25 bp, Homo sapien
cagcagatgtcacaatactgaactg

SEQ ID NO: 2781063 - DNA, 25 bp, Homo sapien
agggcataaacacggactcagcaga

SEQ ID NO: 2781064 - DNA, 25 bp, Homo sapien
tcaaaacagcagaacaaatcaaagg

SEQ ID NO: 2781065 - DNA, 25 bp, Homo sapien
ttatcaaaacagcagaacaaatcaa

SEQ ID NO: 2781066 - DNA, 25 bp, Homo sapien
gaaagcacattatcaaaacagcaga

SEQ ID NO: 2781067 - DNA, 25 bp, Homo sapien
tatcaaaacagcagaacaaatcaaa

SEQ ID NO: 2781068 - DNA, 25 bp, Homo sapien
tgagggctactagctacttgctact

SEQ ID NO: 2781069 - DNA, 25 bp, Homo sapien
taagtgcttggctgagggctactag

SEQ ID NO: 2781070 - DNA, 25 bp, Homo sapien
gctacttgctactggacatacaaat

SEQ ID NO: 2781071 - DNA, 25 bp, Homo sapien
cttttatgcactgatggtccacctt

SEQ ID NO: 2781072 - DNA, 25 bp, Homo sapien
ctcttcctcttcttgggtattttgt

SEQ ID NO: 2781073 - DNA, 25 bp, Homo sapien
tctcttcctcttcttgggtattttg

SEQ ID NO: 2781074 - DNA, 25 bp, Homo sapien
tcctcttcttgggtattttgttgaa

SEQ ID NO: 2781075 - DNA, 25 bp, Homo sapien
cttcctcttcttgggtattttgttg

SEQ ID NO: 2781076 - DNA, 25 bp, Homo sapien
cttttctaagtcttcaatttctgaa

SEQ ID NO: 2781077 - DNA, 25 bp, Homo sapien
ttctaagtcttcaatttctgaactg

SEQ ID NO: 2781078 - DNA, 25 bp, Homo sapien
ctaagtcttcaatttctgaactgaa

SEQ ID NO: 2781079 - DNA, 25 bp, Homo sapien
ttttctaagtcttcaatttctgaac

SEQ ID NO: 2781080 - DNA, 25 bp, Homo sapien
tcatcatcatagtcatggaccaaca

SEQ ID NO: 2781081 - DNA, 25 bp, Homo sapien
gttctttcatcatcatagtcatgga

SEQ ID NO: 2781082 - DNA, 25 bp, Homo sapien
tcaagagttctttcatcatcatagt

SEQ ID NO: 2781083 - DNA, 25 bp, Homo sapien
catcatcatagtcatggaccaacat

SEQ ID NO: 2781084 - DNA, 25 bp, Homo sapien
ggtcaaaatcatgatcctcagaaga

SEQ ID NO: 2781085 - DNA, 25 bp, Homo sapien
gtcaaaatcatgatcctcagaagac

SEQ ID NO: 2781086 - DNA, 25 bp, Homo sapien
gggtcaaaatcatgatcctcagaag

SEQ ID NO: 2781087 - DNA, 25 bp, Homo sapien
cactgggaaccaccgaagacgtaag

SEQ ID NO: 2781088 - DNA, 25 bp, Homo sapien
ctgggctcgaacttccaaaagaagc

SEQ ID NO: 2781089 - DNA, 25 bp, Homo sapien
cgtaggccagctcgaatcggacact

SEQ ID NO: 2781090 - DNA, 25 bp, Homo sapien
cacccttttctggaacgaactcgcg

SEQ ID NO: 2781091 - DNA, 25 bp, Homo sapien
actccgaagccgatctcttcccctg

SEQ ID NO: 2781092 - DNA, 25 bp, Homo sapien
ttctgagcacctagttcgcccctgg

SEQ ID NO: 2781093 - DNA, 25 bp, Homo sapien
aaagagccccggatcccccaggctg

SEQ ID NO: 2781094 - DNA, 25 bp, Homo sapien
cccaggctggctcgggggtcgcggg

SEQ ID NO: 2781095 - DNA, 25 bp, Homo sapien
gagccgccgggcgcccgctccagcc

SEQ ID NO: 2781096 - DNA, 25 bp, Homo sapien
ccggctgctcctgcccggtttccct

SEQ ID NO: 2781097 - DNA, 25 bp, Homo sapien
cgagcccagtccccggatggggcgc

SEQ ID NO: 2781098 - DNA, 25 bp, Homo sapien
ctttagggcgaacgagcagcgccga

SEQ ID NO: 2781099 - DNA, 25 bp, Homo sapien
agcgccgagcccagtccccggatgg

SEQ ID NO: 2781100 - DNA, 25 bp, Homo sapien
gccgagcccagtccccggatggggc

SEQ ID NO: 2781101 - DNA, 25 bp, Homo sapien
cacggccccttatagggcagggcgg

SEQ ID NO: 2781102 - DNA, 25 bp, Homo sapien
aggcggcacggccccttatagggca

SEQ ID NO: 2781103 - DNA, 25 bp, Homo sapien
gcggcacggccccttatagggcagg

SEQ ID NO: 2781104 - DNA, 25 bp, Homo sapien
ggcggaggcggcacggccccttata

SEQ ID NO: 2781105 - DNA, 25 bp, Homo sapien
tgtctgccacataacctaacaagca

SEQ ID NO: 2781106 - DNA, 25 bp, Homo sapien
caagcaaacgctgtcccttttgtca

SEQ ID NO: 2781107 - DNA, 25 bp, Homo sapien
taaaagctacctgacttgaaagagg

SEQ ID NO: 2781108 - DNA, 25 bp, Homo sapien
ttgtcaaaccaaactgccaagtctg

SEQ ID NO: 2781109 - DNA, 25 bp, Homo sapien
agatggcagacttgaatcttctgta

SEQ ID NO: 2781110 - DNA, 25 bp, Homo sapien
tccaggtttagcatgagatggcaga

SEQ ID NO: 2781111 - DNA, 25 bp, Homo sapien
tggcagacttgaatcttctgtactc

SEQ ID NO: 2781112 - DNA, 25 bp, Homo sapien
attccattcaaaggatatgctccag

SEQ ID NO: 2781113 - DNA, 25 bp, Homo sapien
ctcttctgacttgctctcatcccct

SEQ ID NO: 2781114 - DNA, 25 bp, Homo sapien
tcttctgacttgctctcatcccctt

SEQ ID NO: 2781115 - DNA, 25 bp, Homo sapien
ttctgacttgctctcatccccttct

SEQ ID NO: 2781116 - DNA, 25 bp, Homo sapien
ctgacttgctctcatccccttctcc

SEQ ID NO: 2781117 - DNA, 25 bp, Homo sapien
gctgcaggttttgcttggtccacac

SEQ ID NO: 2781118 - DNA, 25 bp, Homo sapien
tagctgcaggttttgcttggtccac

SEQ ID NO: 2781119 - DNA, 25 bp, Homo sapien
caggttttgcttggtccacacaaga

SEQ ID NO: 2781120 - DNA, 25 bp, Homo sapien
gttttgcttggtccacacaagatcc

SEQ ID NO: 2781121 - DNA, 25 bp, Homo sapien
ccaccactgggtggatttctctcca

SEQ ID NO: 2781122 - DNA, 25 bp, Homo sapien
gaacaggccaatccttcggaagaac

SEQ ID NO: 2781123 - DNA, 25 bp, Homo sapien
caccactgggtggatttctctccaa

SEQ ID NO: 2781124 - DNA, 25 bp, Homo sapien
aagttgtataagaacaggccaatcc

SEQ ID NO: 2781125 - DNA, 25 bp, Homo sapien
gccaaaccatatttacagaaggttc

SEQ ID NO: 2781126 - DNA, 25 bp, Homo sapien
tctgacgaagttgccaaaccatatt

SEQ ID NO: 2781127 - DNA, 25 bp, Homo sapien
tgccaaaccatatttacagaaggtt

SEQ ID NO: 2781128 - DNA, 25 bp, Homo sapien
atctctgacgaagttgccaaaccat

SEQ ID NO: 2781129 - DNA, 25 bp, Homo sapien
atgcttcccaggtacaaaacgtact

SEQ ID NO: 2781130 - DNA, 25 bp, Homo sapien
ccagggaaccgattaaatagcacag

SEQ ID NO: 2781131 - DNA, 25 bp, Homo sapien
gataacatcatctcacgagtctctg

SEQ ID NO: 2781132 - DNA, 25 bp, Homo sapien
aaattcaaccagagcaataccatgc

SEQ ID NO: 2781133 - DNA, 25 bp, Homo sapien
tacttaccacatggccaaactgaga

SEQ ID NO: 2781134 - DNA, 25 bp, Homo sapien
tctttagagccacaatacttaccac

SEQ ID NO: 2781135 - DNA, 25 bp, Homo sapien
catggtctttagagccacaatactt

SEQ ID NO: 2781136 - DNA, 25 bp, Homo sapien
cagagcgtgtgggaatctcttcaat

SEQ ID NO: 2781137 - DNA, 25 bp, Homo sapien
ttttgcagaaactgtggcgtcagac

SEQ ID NO: 2781138 - DNA, 25 bp, Homo sapien
tgctgaagcagacaccactaatggt

SEQ ID NO: 2781139 - DNA, 25 bp, Homo sapien
ggcgtcagacactgcatcagatgca

SEQ ID NO: 2781140 - DNA, 25 bp, Homo sapien
tgtcttccaagagccgattcctgta

SEQ ID NO: 2781141 - DNA, 25 bp, Homo sapien
gggtgaaggtttacagccaggctaa

SEQ ID NO: 2781142 - DNA, 25 bp, Homo sapien
tttacagccaggctaagagttaccg

SEQ ID NO: 2781143 - DNA, 25 bp, Homo sapien
gccaggctaagagttaccgctttct

SEQ ID NO: 2781144 - DNA, 25 bp, Homo sapien
taagagttaccgctttcttcgaata

SEQ ID NO: 2781145 - DNA, 25 bp, Homo sapien
ggcttcccaaattgtcttagcaggc

SEQ ID NO: 2781146 - DNA, 25 bp, Homo sapien
aattgtcttagcaggctcatagtgc

SEQ ID NO: 2781147 - DNA, 25 bp, Homo sapien
cccaaattgtcttagcaggctcata

SEQ ID NO: 2781148 - DNA, 25 bp, Homo sapien
gtcttagcaggctcatagtgccagc

SEQ ID NO: 2781149 - DNA, 25 bp, Homo sapien
catgagcatctggtttcagatgcat

SEQ ID NO: 2781150 - DNA, 25 bp, Homo sapien
attgtactagtttctaagggctgcc

SEQ ID NO: 2781151 - DNA, 25 bp, Homo sapien
ctttctaaactacccattgcggccg

SEQ ID NO: 2781152 - DNA, 25 bp, Homo sapien
tacatgagtatctacaaatctgctc

SEQ ID NO: 2781153 - DNA, 25 bp, Homo sapien
aaagaaagtactcatttgatgtcac

SEQ ID NO: 2781154 - DNA, 25 bp, Homo sapien
aagtatgtagcatgctggctgggtt

SEQ ID NO: 2781155 - DNA, 25 bp, Homo sapien
aaaggcttccaagattcctgaatgt

SEQ ID NO: 2781156 - DNA, 25 bp, Homo sapien
catcaaggactatggaagtatgtag

SEQ ID NO: 2781157 - DNA, 25 bp, Homo sapien
aataaaaggcttccaagattcctga

SEQ ID NO: 2781158 - DNA, 25 bp, Homo sapien
ctcccatccccagacatttatcttt

SEQ ID NO: 2781159 - DNA, 25 bp, Homo sapien
ccatccccagacatttatctttatg

SEQ ID NO: 2781160 - DNA, 25 bp, Homo sapien
tcccatccccagacatttatcttta

SEQ ID NO: 2781161 - DNA, 25 bp, Homo sapien
tccccagacatttatctttatgttt

SEQ ID NO: 2781162 - DNA, 25 bp, Homo sapien
acagcacgtttcatcatttcagtca

SEQ ID NO: 2781163 - DNA, 25 bp, Homo sapien
ttttctcagccgatcttgaattatc

SEQ ID NO: 2781164 - DNA, 25 bp, Homo sapien
tctcagccgatcttgaattatcctg

SEQ ID NO: 2781165 - DNA, 25 bp, Homo sapien
ctaagccacagcacgtttcatcatt

SEQ ID NO: 2781166 - DNA, 25 bp, Homo sapien
cagagttgagtcttcaggtccaaaa

SEQ ID NO: 2781167 - DNA, 25 bp, Homo sapien
gctgtattcaccacaatccagagtt

SEQ ID NO: 2781168 - DNA, 25 bp, Homo sapien
tcaccacaatccagagttgagtctt

SEQ ID NO: 2781169 - DNA, 25 bp, Homo sapien
aatccagagttgagtcttcaggtcc

SEQ ID NO: 2781170 - DNA, 25 bp, Homo sapien
aaaattgaaagaatagtactgcatt

SEQ ID NO: 2781171 - DNA, 25 bp, Homo sapien
aattgaaagaatagtactgcattgc

SEQ ID NO: 2781172 - DNA, 25 bp, Homo sapien
gaaatctacctgtttggaaatacaa

SEQ ID NO: 2781173 - DNA, 25 bp, Homo sapien
ggaaatacaatggtctcttgtcctg

SEQ ID NO: 2781174 - DNA, 25 bp, Homo sapien
cccgaggcagatcccaaaagtgctg

SEQ ID NO: 2781175 - DNA, 25 bp, Homo sapien
ccgaggcagatcccaaaagtgctgg

SEQ ID NO: 2781176 - DNA, 25 bp, Homo sapien
gcccgaggcagatcccaaaagtgct

SEQ ID NO: 2781177 - DNA, 25 bp, Homo sapien
ctttcctcaatggttaaggcagctc

SEQ ID NO: 2781178 - DNA, 25 bp, Homo sapien
gggatcaggtctccaagccacccat

SEQ ID NO: 2781179 - DNA, 25 bp, Homo sapien
ctcaatggttaaggcagctcttggc

SEQ ID NO: 2781180 - DNA, 25 bp, Homo sapien
tgttgaccagcaacccttttaggtc

SEQ ID NO: 2781181 - DNA, 25 bp, Homo sapien
aaatctctaaccagttgtcatcaat

SEQ ID NO: 2781182 - DNA, 25 bp, Homo sapien
aatctctaaccagttgtcatcaatt

SEQ ID NO: 2781183 - DNA, 25 bp, Homo sapien
ggcacagtctgatgggaatagaacc

SEQ ID NO: 2781184 - DNA, 25 bp, Homo sapien
taagggcacagtctgatgggaatag

SEQ ID NO: 2781185 - DNA, 25 bp, Homo sapien
cttcacatggtccttttatctgtgc

SEQ ID NO: 2781186 - DNA, 25 bp, Homo sapien
catcagcagagggttggttgcctct

SEQ ID NO: 2781187 - DNA, 25 bp, Homo sapien
gcacccagtcccctacacgttcttg

SEQ ID NO: 2781188 - DNA, 25 bp, Homo sapien
cctacacgttcttgcttgtatgcca

SEQ ID NO: 2781189 - DNA, 25 bp, Homo sapien
cagtcccctacacgttcttgcttgt

SEQ ID NO: 2781190 - DNA, 25 bp, Homo sapien
cacgttcttgcttgtatgccaagaa

SEQ ID NO: 2781191 - DNA, 25 bp, Homo sapien
taactttgttgtgtaatatcagaaa

SEQ ID NO: 2781192 - DNA, 25 bp, Homo sapien
tatactttggtagtaatactttgtg

SEQ ID NO: 2781193 - DNA, 25 bp, Homo sapien
atcagaaaagctatactttggtagt

SEQ ID NO: 2781194 - DNA, 25 bp, Homo sapien
tgttaactttgttgtgtaatatcag

SEQ ID NO: 2781195 - DNA, 25 bp, Homo sapien
gacttacagctatctggattcccag

SEQ ID NO: 2781196 - DNA, 25 bp, Homo sapien
gaatcctaaatctagagctccaagg

SEQ ID NO: 2781197 - DNA, 25 bp, Homo sapien
ggaaatcttccgtcacagccagtta

SEQ ID NO: 2781198 - DNA, 25 bp, Homo sapien
ggttttaacattctgagccactgtg

SEQ ID NO: 2781199 - DNA, 25 bp, Homo sapien
tcaagatttcagatttggtagccgc

SEQ ID NO: 2781200 - DNA, 25 bp, Homo sapien
ccgctagttggaatagagggatagt

SEQ ID NO: 2781201 - DNA, 25 bp, Homo sapien
gagagagttatgcatacgaatacca

SEQ ID NO: 2781202 - DNA, 25 bp, Homo sapien
cgaataccattatctagtgtggaca

SEQ ID NO: 2781203 - DNA, 25 bp, Homo sapien
tctctgactagcaatgtgacgatgt

SEQ ID NO: 2781204 - DNA, 25 bp, Homo sapien
tttggaccgtggaagaacagcactt

SEQ ID NO: 2781205 - DNA, 25 bp, Homo sapien
tgacgacgatgtgtgaaggatttcc

SEQ ID NO: 2781206 - DNA, 25 bp, Homo sapien
tgatgacacagagacaagtagcagt

SEQ ID NO: 2781207 - DNA, 25 bp, Homo sapien
taaattgctctttagccatttgtag

SEQ ID NO: 2781208 - DNA, 25 bp, Homo sapien
cacctgttgtactattcacctttta

SEQ ID NO: 2781209 - DNA, 25 bp, Homo sapien
aacaatttcctgaactcacctgttg

SEQ ID NO: 2781210 - DNA, 25 bp, Homo sapien
tttgtagtgcagtaaatgttacagg

SEQ ID NO: 2781211 - DNA, 25 bp, Homo sapien
taaagcatgctttgacgaagctatc

SEQ ID NO: 2781212 - DNA, 25 bp, Homo sapien
tttaaagagagcctacaagcacaga

SEQ ID NO: 2781213 - DNA, 25 bp, Homo sapien
tacatttgagatccaccttactgtg

SEQ ID NO: 2781214 - DNA, 25 bp, Homo sapien
cttggtgtctaaataatgggcagct

SEQ ID NO: 2781215 - DNA, 25 bp, Homo sapien
ctttagagccaaggccggccctatt

SEQ ID NO: 2781216 - DNA, 25 bp, Homo sapien
aaatacatgctaccacgttgtacgg

SEQ ID NO: 2781217 - DNA, 25 bp, Homo sapien
taataattgatcacagcggtgccag

SEQ ID NO: 2781218 - DNA, 25 bp, Homo sapien
gacccatatgggttcactgctgcta

SEQ ID NO: 2781219 - DNA, 25 bp, Homo sapien
aacaggcatgtcttaattaataaaa

SEQ ID NO: 2781220 - DNA, 25 bp, Homo sapien
tttaaaagaggccatgacaatttac

SEQ ID NO: 2781221 - DNA, 25 bp, Homo sapien
atccataaaattgttcttgaattcc

SEQ ID NO: 2781222 - DNA, 25 bp, Homo sapien
acagtatattctgtagaattgcctt

SEQ ID NO: 2781223 - DNA, 25 bp, Homo sapien
gtagcttcggacagcaaagattaat

SEQ ID NO: 2781224 - DNA, 25 bp, Homo sapien
tagcttcggacagcaaagattaatg

SEQ ID NO: 2781225 - DNA, 25 bp, Homo sapien
ggtagcttcggacagcaaagattaa

SEQ ID NO: 2781226 - DNA, 25 bp, Homo sapien
tttggaaactccctggcgtcagaga

SEQ ID NO: 2781227 - DNA, 25 bp, Homo sapien
gccaaagagctttccacggtttgga

SEQ ID NO: 2781228 - DNA, 25 bp, Homo sapien
cgtcagagaaagcatcggtatcacc

SEQ ID NO: 2781229 - DNA, 25 bp, Homo sapien
ccctggcgtcagagaaagcatcggt

SEQ ID NO: 2781230 - DNA, 25 bp, Homo sapien
tttggctattgcagtgacagtcaag

SEQ ID NO: 2781231 - DNA, 25 bp, Homo sapien
tctgtgttgataaaaacacccatgc

SEQ ID NO: 2781232 - DNA, 25 bp, Homo sapien
cttactgatcatggtagtggagtgg

SEQ ID NO: 2781233 - DNA, 25 bp, Homo sapien
tgttctaaacaactgtcatacaggg

SEQ ID NO: 2781234 - DNA, 25 bp, Homo sapien
tttcagtttcctccacacgttccga

SEQ ID NO: 2781235 - DNA, 25 bp, Homo sapien
tcagtttcctccacacgttccgata

SEQ ID NO: 2781236 - DNA, 25 bp, Homo sapien
acacgttccgatacctgccatcttc

SEQ ID NO: 2781237 - DNA, 25 bp, Homo sapien
ccacacgttccgatacctgccatct

SEQ ID NO: 2781238 - DNA, 25 bp, Homo sapien
gggaacaggcggcctgaacagctca

SEQ ID NO: 2781239 - DNA, 25 bp, Homo sapien
ctcgtcggggaacaggcggcctgaa

SEQ ID NO: 2781240 - DNA, 25 bp, Homo sapien
aacaggcggcctgaacagctcactt

SEQ ID NO: 2781241 - DNA, 25 bp, Homo sapien
ccgctgggtctctgtattagtctgt

SEQ ID NO: 2781242 - DNA, 25 bp, Homo sapien
ggcgaagcaaacaaatccttcacat

SEQ ID NO: 2781243 - DNA, 25 bp, Homo sapien
gcgaagcaaacaaatccttcacatg

SEQ ID NO: 2781244 - DNA, 25 bp, Homo sapien
gcagaaggcgaagcaaacaaatcct

SEQ ID NO: 2781245 - DNA, 25 bp, Homo sapien
gaaggcgaagcaaacaaatccttca

SEQ ID NO: 2781246 - DNA, 25 bp, Homo sapien
tgaggtgtgggggacttttgcagcc

SEQ ID NO: 2781247 - DNA, 25 bp, Homo sapien
tctgccttacaagagggatgaatac

SEQ ID NO: 2781248 - DNA, 25 bp, Homo sapien
ttgtgttctgccttacaagagggat

SEQ ID NO: 2781249 - DNA, 25 bp, Homo sapien
tgagggtcctcatcatactccccct

SEQ ID NO: 2781250 - DNA, 25 bp, Homo sapien
acttcatgcggccatgggtacctga

SEQ ID NO: 2781251 - DNA, 25 bp, Homo sapien
ggatgtgtcctctgcggctccactt

SEQ ID NO: 2781252 - DNA, 25 bp, Homo sapien
tgtcctctgcggctccactttgttc

SEQ ID NO: 2781253 - DNA, 25 bp, Homo sapien
cggccatgggtacctgaaggctcct

SEQ ID NO: 2781254 - DNA, 25 bp, Homo sapien
ggtgcgtatactgtcaccgccaggg

SEQ ID NO: 2781255 - DNA, 25 bp, Homo sapien
tctacagcggaatatgagctcctcc

SEQ ID NO: 2781256 - DNA, 25 bp, Homo sapien
gaaaggaggatcactcaggacaact

SEQ ID NO: 2781257 - DNA, 25 bp, Homo sapien
tcggaagtgcctggatctacagcgg

SEQ ID NO: 2781258 - DNA, 25 bp, Homo sapien
ctgttcatgaggtagtgaagaaaat

SEQ ID NO: 2781259 - DNA, 25 bp, Homo sapien
aagaaaatgcaatcaagggtgctcc

SEQ ID NO: 2781260 - DNA, 25 bp, Homo sapien
gttcatgaggtagtgaagaaaatgc

SEQ ID NO: 2781261 - DNA, 25 bp, Homo sapien
aaaatgcaatcaagggtgctccttg

SEQ ID NO: 2781262 - DNA, 25 bp, Homo sapien
catgcacagactcccttgtagtcat

SEQ ID NO: 2781263 - DNA, 25 bp, Homo sapien
tatcatcgacagtatccatagcaca

SEQ ID NO: 2781264 - DNA, 25 bp, Homo sapien
gacagtatccatagcacaaatctct

SEQ ID NO: 2781265 - DNA, 25 bp, Homo sapien
tcatcgacagtatccatagcacaaa

SEQ ID NO: 2781266 - DNA, 25 bp, Homo sapien
tatccatagcacaaatctctattgc

SEQ ID NO: 2781267 - DNA, 25 bp, Homo sapien
caccacgtccagtgatatgcagcaa

SEQ ID NO: 2781268 - DNA, 25 bp, Homo sapien
tcaccacgtccagtgatatgcagca

SEQ ID NO: 2781269 - DNA, 25 bp, Homo sapien
aatcaccacgtccagtgatatgcag

SEQ ID NO: 2781270 - DNA, 25 bp, Homo sapien
aaatcaccacgtccagtgatatgca

SEQ ID NO: 2781271 - DNA, 25 bp, Homo sapien
agtgggaggccagataatccctgga

SEQ ID NO: 2781272 - DNA, 25 bp, Homo sapien
ggaggccagataatccctggacagc

SEQ ID NO: 2781273 - DNA, 25 bp, Homo sapien
gggaggccagataatccctggacag

SEQ ID NO: 2781274 - DNA, 25 bp, Homo sapien
ggccagataatccctggacagctag

SEQ ID NO: 2781275 - DNA, 25 bp, Homo sapien
ctaatgaggagagccatccttgcta

SEQ ID NO: 2781276 - DNA, 25 bp, Homo sapien
taatgaggagagccatccttgctac

SEQ ID NO: 2781277 - DNA, 25 bp, Homo sapien
gcggaatgcctctggtctactctgc

SEQ ID NO: 2781278 - DNA, 25 bp, Homo sapien
gactggcggaatgcctctggtctac

SEQ ID NO: 2781279 - DNA, 25 bp, Homo sapien
agctgactggcggaatgcctctggt

SEQ ID NO: 2781280 - DNA, 25 bp, Homo sapien
ttggagctgactggcggaatgcctc

SEQ ID NO: 2781281 - DNA, 25 bp, Homo sapien
gaccccgatgctgcccacttttatg

SEQ ID NO: 2781282 - DNA, 25 bp, Homo sapien
tagggttttcagtgctagatggccc

SEQ ID NO: 2781283 - DNA, 25 bp, Homo sapien
tttcagtgctagatggcccttgcca

SEQ ID NO: 2781284 - DNA, 25 bp, Homo sapien
gatgctgcccacttttatgagcttt

SEQ ID NO: 2781285 - DNA, 25 bp, Homo sapien
tgagtgggctggagtggtgggctgc

SEQ ID NO: 2781286 - DNA, 25 bp, Homo sapien
cttgagtgggctggagtggtgggct

SEQ ID NO: 2781287 - DNA, 25 bp, Homo sapien
agtgggctggagtggtgggctgcca

SEQ ID NO: 2781288 - DNA, 25 bp, Homo sapien
gtgggctggagtggtgggctgccat

SEQ ID NO: 2781289 - DNA, 25 bp, Homo sapien
cattagctgccagggaattggtgag

SEQ ID NO: 2781290 - DNA, 25 bp, Homo sapien
tgaggcaagctgtgtaaaaggcagc

SEQ ID NO: 2781291 - DNA, 25 bp, Homo sapien
tattatcctgtggatgcttgacagc

SEQ ID NO: 2781292 - DNA, 25 bp, Homo sapien
gacagcaaccacatctattggctct

SEQ ID NO: 2781293 - DNA, 25 bp, Homo sapien
gccgtgccataatcacgactcactg

SEQ ID NO: 2781294 - DNA, 25 bp, Homo sapien
ctggagtgccgtgccataatcacga

SEQ ID NO: 2781295 - DNA, 25 bp, Homo sapien
ggagtgccgtgccataatcacgact

SEQ ID NO: 2781296 - DNA, 25 bp, Homo sapien
agtgccgtgccataatcacgactca

SEQ ID NO: 2781297 - DNA, 25 bp, Homo sapien
tcagttttaactcgattttgaaatc

SEQ ID NO: 2781298 - DNA, 25 bp, Homo sapien
ttctctcagttttaactcgattttg

SEQ ID NO: 2781299 - DNA, 25 bp, Homo sapien
gtgggtctgcattagcttgattaaa

SEQ ID NO: 2781300 - DNA, 25 bp, Homo sapien
ttcagtaacttagcagtcagctggc

SEQ ID NO: 2781301 - DNA, 25 bp, Homo sapien
gatctttcagtaacttagcagtcag

SEQ ID NO: 2781302 - DNA, 25 bp, Homo sapien
ttaaagaacaggttgattccagccc

SEQ ID NO: 2781303 - DNA, 25 bp, Homo sapien
taggggtttcttctcgtttcttgca

SEQ ID NO: 2781304 - DNA, 25 bp, Homo sapien
tcttctcgtttcttgcatctggcca

SEQ ID NO: 2781305 - DNA, 25 bp, Homo sapien
gggtttcttctcgtttcttgcatct

SEQ ID NO: 2781306 - DNA, 25 bp, Homo sapien
ttctcgtttcttgcatctggccact

SEQ ID NO: 2781307 - DNA, 25 bp, Homo sapien
tactggagccttcttaaaatggtca

SEQ ID NO: 2781308 - DNA, 25 bp, Homo sapien
gcccctgggactttgtctactggag

SEQ ID NO: 2781309 - DNA, 25 bp, Homo sapien
gaccagtggttgatgcagctcttgc

SEQ ID NO: 2781310 - DNA, 25 bp, Homo sapien
ttctttcaaagctgtgggcccctgg

SEQ ID NO: 2781311 - DNA, 25 bp, Homo sapien
catcctggtattagctctgactttc

SEQ ID NO: 2781312 - DNA, 25 bp, Homo sapien
ttctccataactgtcctgatctggt

SEQ ID NO: 2781313 - DNA, 25 bp, Homo sapien
taactgtcctgatctggttctcttc

SEQ ID NO: 2781314 - DNA, 25 bp, Homo sapien
tcttcctagctctccaggtaccatt

SEQ ID NO: 2781315 - DNA, 25 bp, Homo sapien
tgctgtcttgggcacgggacagcca

SEQ ID NO: 2781316 - DNA, 25 bp, Homo sapien
tgggcacgggacagccataataacc

SEQ ID NO: 2781317 - DNA, 25 bp, Homo sapien
gatatacttctatcaaaggagtcag

SEQ ID NO: 2781318 - DNA, 25 bp, Homo sapien
cataataaccttgcatttggcagtt

SEQ ID NO: 2781319 - DNA, 25 bp, Homo sapien
ctgtcaagttaaattgtagttggca

SEQ ID NO: 2781320 - DNA, 25 bp, Homo sapien
gttgagttcactgtgtcagttgtcc

SEQ ID NO: 2781321 - DNA, 25 bp, Homo sapien
tagagcctcgagatgtgccaactgc

SEQ ID NO: 2781322 - DNA, 25 bp, Homo sapien
tattgtccatttagaagttgagttc

SEQ ID NO: 2781323 - DNA, 25 bp, Homo sapien
aaattaaattgtagagcctcgagat

SEQ ID NO: 2781324 - DNA, 25 bp, Homo sapien
gcagctttgggtgagccttctcacc

SEQ ID NO: 2781325 - DNA, 25 bp, Homo sapien
tccactttgtgaagatctgccaggg

SEQ ID NO: 2781326 - DNA, 25 bp, Homo sapien
cagacactccagctgctagggtctt

SEQ ID NO: 2781327 - DNA, 25 bp, Homo sapien
cctggtttctcaatttgattaggag

SEQ ID NO: 2781328 - DNA, 25 bp, Homo sapien
gatgatgctgtaggttcttactgta

SEQ ID NO: 2781329 - DNA, 25 bp, Homo sapien
ctagcattaatcgtttgatgatgct

SEQ ID NO: 2781330 - DNA, 25 bp, Homo sapien
tgccactccttaacactcaagttac

SEQ ID NO: 2781331 - DNA, 25 bp, Homo sapien
cgtttgatgatgctgtaggttctta

SEQ ID NO: 2781332 - DNA, 25 bp, Homo sapien
gaaagataatatacagttggctcca

SEQ ID NO: 2781333 - DNA, 25 bp, Homo sapien
aaagataatatacagttggctccat

SEQ ID NO: 2781334 - DNA, 25 bp, Homo sapien
tgaaagataatatacagttggctcc

SEQ ID NO: 2781335 - DNA, 25 bp, Homo sapien
ctgaaagataatatacagttggctc

SEQ ID NO: 2781336 - DNA, 25 bp, Homo sapien
tagaagtcttctgtgatactaccag

SEQ ID NO: 2781337 - DNA, 25 bp, Homo sapien
cagaagtcattacactggccctctc

SEQ ID NO: 2781338 - DNA, 25 bp, Homo sapien
ctcgtatagaagtcttctgtgatac

SEQ ID NO: 2781339 - DNA, 25 bp, Homo sapien
tatagaagtcttctgtgatactacc

SEQ ID NO: 2781340 - DNA, 25 bp, Homo sapien
caccttcacttgatggagaaccgga

SEQ ID NO: 2781341 - DNA, 25 bp, Homo sapien
ttgaccagcagaactccactatgag

SEQ ID NO: 2781342 - DNA, 25 bp, Homo sapien
taagagcccaggttacttggatgga

SEQ ID NO: 2781343 - DNA, 25 bp, Homo sapien
gacacggctgctaaatgcatacgca

SEQ ID NO: 2781344 - DNA, 25 bp, Homo sapien
ttttctgtgaacgataggaggacca

SEQ ID NO: 2781345 - DNA, 25 bp, Homo sapien
ctgtgaacgataggaggaccagcct

SEQ ID NO: 2781346 - DNA, 25 bp, Homo sapien
acattttctgtgaacgataggagga

SEQ ID NO: 2781347 - DNA, 25 bp, Homo sapien
ttctgtgaacgataggaggaccagc

SEQ ID NO: 2781348 - DNA, 25 bp, Homo sapien
ggatgctcatctggtgccacacgga

SEQ ID NO: 2781349 - DNA, 25 bp, Homo sapien
taacacggtgttggcatagagatcc

SEQ ID NO: 2781350 - DNA, 25 bp, Homo sapien
caatgcctgggtacatggtgctccc

SEQ ID NO: 2781351 - DNA, 25 bp, Homo sapien
gaagttcatagctccgttccggtga

SEQ ID NO: 2781352 - DNA, 25 bp, Homo sapien
gagtgaacaggacaagtgaatagac

SEQ ID NO: 2781353 - DNA, 25 bp, Homo sapien
cttccagacgagtgaacaggacaag

SEQ ID NO: 2781354 - DNA, 25 bp, Homo sapien
caagtgaatagacagtgagtaagag

SEQ ID NO: 2781355 - DNA, 25 bp, Homo sapien
caggacaagtgaatagacagtgagt

SEQ ID NO: 2781356 - DNA, 25 bp, Homo sapien
tgaacccttgactggtgccctatga

SEQ ID NO: 2781357 - DNA, 25 bp, Homo sapien
aacccttgactggtgccctatgacc

SEQ ID NO: 2781358 - DNA, 25 bp, Homo sapien
ctgaacccttgactggtgccctatg

SEQ ID NO: 2781359 - DNA, 25 bp, Homo sapien
cccttgactggtgccctatgaccat

SEQ ID NO: 2781360 - DNA, 25 bp, Homo sapien
ctgcctgcagtttagctctggggtt

SEQ ID NO: 2781361 - DNA, 25 bp, Homo sapien
tgcctgcagtttagctctggggttt

SEQ ID NO: 2781362 - DNA, 25 bp, Homo sapien
gctgcctgcagtttagctctggggt

SEQ ID NO: 2781363 - DNA, 25 bp, Homo sapien
gccccctgtcccctaatctaccatc

SEQ ID NO: 2781364 - DNA, 25 bp, Homo sapien
atcctctgaaaatgatgatgttgat

SEQ ID NO: 2781365 - DNA, 25 bp, Homo sapien
tcccatcctctgaaaatgatgatgt

SEQ ID NO: 2781366 - DNA, 25 bp, Homo sapien
catcctctgaaaatgatgatgttga

SEQ ID NO: 2781367 - DNA, 25 bp, Homo sapien
cttcccatcctctgaaaatgatgat

SEQ ID NO: 2781368 - DNA, 25 bp, Homo sapien
gacagtaggactgatttacagttcc

SEQ ID NO: 2781369 - DNA, 25 bp, Homo sapien
acttctttgacagtaggactgattt

SEQ ID NO: 2781370 - DNA, 25 bp, Homo sapien
ttgccctccatactcacttctttga

SEQ ID NO: 2781371 - DNA, 25 bp, Homo sapien
taggactgatttacagttccaatca

SEQ ID NO: 2781372 - DNA, 25 bp, Homo sapien
tatccaatcattgtccctcccactg

SEQ ID NO: 2781373 - DNA, 25 bp, Homo sapien
cactgtgctctcaggcaatagatgg

SEQ ID NO: 2781374 - DNA, 25 bp, Homo sapien
actgtgctctcaggcaatagatggt

SEQ ID NO: 2781375 - DNA, 25 bp, Homo sapien
tatatccaatcattgtccctcccac

SEQ ID NO: 2781376 - DNA, 25 bp, Homo sapien
agctctgtgtagtacatgtcagtgg

SEQ ID NO: 2781377 - DNA, 25 bp, Homo sapien
tgtggatagtttgataaagatttct

SEQ ID NO: 2781378 - DNA, 25 bp, Homo sapien
catagatgtcattgtggatagtttg

SEQ ID NO: 2781379 - DNA, 25 bp, Homo sapien
acctcatagtaatctcagtgcagct

SEQ ID NO: 2781380 - DNA, 25 bp, Homo sapien
ttttacattttgacgtacttgctag

SEQ ID NO: 2781381 - DNA, 25 bp, Homo sapien
cctgaatgtaactccataaggtggg

SEQ ID NO: 2781382 - DNA, 25 bp, Homo sapien
tctctaatacctcagtttaaaacag

SEQ ID NO: 2781383 - DNA, 25 bp, Homo sapien
ctagtttgtttgctcattgttggat

SEQ ID NO: 2781384 - DNA, 25 bp, Homo sapien
ttggaaagtagtctgtgagaggctt

SEQ ID NO: 2781385 - DNA, 25 bp, Homo sapien
tagtctgtgagaggcttcttgtgga

SEQ ID NO: 2781386 - DNA, 25 bp, Homo sapien
aaagtagtctgtgagaggcttcttg

SEQ ID NO: 2781387 - DNA, 25 bp, Homo sapien
ggaaagtagtctgtgagaggcttct

SEQ ID NO: 2781388 - DNA, 25 bp, Homo sapien
gagttctagatgttcttgaatcaac

SEQ ID NO: 2781389 - DNA, 25 bp, Homo sapien
tcaacttgggcagcgtttcagtgct

SEQ ID NO: 2781390 - DNA, 25 bp, Homo sapien
gcttttttcataatctccagctggt

SEQ ID NO: 2781391 - DNA, 25 bp, Homo sapien
tctcttaactgtccagttcctgcag

SEQ ID NO: 2781392 - DNA, 25 bp, Homo sapien
tgtggagagcagagcattctgtgtt

SEQ ID NO: 2781393 - DNA, 25 bp, Homo sapien
cttggccactggattgacttggatt

SEQ ID NO: 2781394 - DNA, 25 bp, Homo sapien
gttttaacacatgtgtttatgacag

SEQ ID NO: 2781395 - DNA, 25 bp, Homo sapien
tatgacagaatgtggtaatgttctc

SEQ ID NO: 2781396 - DNA, 25 bp, Homo sapien
acttttgaagtagtatgaacctctc

SEQ ID NO: 2781397 - DNA, 25 bp, Homo sapien
cttttgaagtagtatgaacctctct

SEQ ID NO: 2781398 - DNA, 25 bp, Homo sapien
ctttactttctcgtagctttaatat

SEQ ID NO: 2781399 - DNA, 25 bp, Homo sapien
gggacataacaccaggacagctcac

SEQ ID NO: 2781400 - DNA, 25 bp, Homo sapien
gaacctgggacataacaccaggaca

SEQ ID NO: 2781401 - DNA, 25 bp, Homo sapien
tggagaacctgggacataacaccag

SEQ ID NO: 2781402 - DNA, 25 bp, Homo sapien
cctggagaacctgggacataacacc

SEQ ID NO: 2781403 - DNA, 25 bp, Homo sapien
agttcacagctatcgttacatttct

SEQ ID NO: 2781404 - DNA, 25 bp, Homo sapien
gccagctgccttaactccgtgtttc

SEQ ID NO: 2781405 - DNA, 25 bp, Homo sapien
aaattctgctgctagtgccagctgc

SEQ ID NO: 2781406 - DNA, 25 bp, Homo sapien
tcctttgtaaattctgctgctagtg

SEQ ID NO: 2781407 - DNA, 25 bp, Homo sapien
gatagaacagcttcacagacaactc

SEQ ID NO: 2781408 - DNA, 25 bp, Homo sapien
cttagagcaagacacccaagataga

SEQ ID NO: 2781409 - DNA, 25 bp, Homo sapien
gacacccaagatagaacagcttcac

SEQ ID NO: 2781410 - DNA, 25 bp, Homo sapien
cagacaactctaatctcatttatca

SEQ ID NO: 2781411 - DNA, 25 bp, Homo sapien
ctccacagcactgggctctcatctc

SEQ ID NO: 2781412 - DNA, 25 bp, Homo sapien
actggaagacaggtcgtgcaccttt

SEQ ID NO: 2781413 - DNA, 25 bp, Homo sapien
gagtctattgcccatacttgctcca

SEQ ID NO: 2781414 - DNA, 25 bp, Homo sapien
gcacctttgcgtctcattcttaaca

SEQ ID NO: 2781415 - DNA, 25 bp, Homo sapien
aatcttcggagtatctgtttgggtg

SEQ ID NO: 2781416 - DNA, 25 bp, Homo sapien
aaaatcttcggagtatctgtttggg

SEQ ID NO: 2781417 - DNA, 25 bp, Homo sapien
ggagtatctgtttgggtgggctgaa

SEQ ID NO: 2781418 - DNA, 25 bp, Homo sapien
taaaaatcttcggagtatctgtttg

SEQ ID NO: 2781419 - DNA, 25 bp, Homo sapien
cagtggaaagtgcctgccatccatc

SEQ ID NO: 2781420 - DNA, 25 bp, Homo sapien
cagcagtggaaagtgcctgccatcc

SEQ ID NO: 2781421 - DNA, 25 bp, Homo sapien
agcagtggaaagtgcctgccatcca

SEQ ID NO: 2781422 - DNA, 25 bp, Homo sapien
gcagtggaaagtgcctgccatccat

SEQ ID NO: 2781423 - DNA, 25 bp, Homo sapien
tgtccttaaccacagctttagattg

SEQ ID NO: 2781424 - DNA, 25 bp, Homo sapien
tccttaaccacagctttagattgag

SEQ ID NO: 2781425 - DNA, 25 bp, Homo sapien
tttgtccttaaccacagctttagat

SEQ ID NO: 2781426 - DNA, 25 bp, Homo sapien
gtccttaaccacagctttagattga

SEQ ID NO: 2781427 - DNA, 25 bp, Homo sapien
aatttgtcaataactcttgttgaca

SEQ ID NO: 2781428 - DNA, 25 bp, Homo sapien
cccagtgcttcagaggagtagctgc

SEQ ID NO: 2781429 - DNA, 25 bp, Homo sapien
acccagtgcttcagaggagtagctg

SEQ ID NO: 2781430 - DNA, 25 bp, Homo sapien
ccagtgcttcagaggagtagctgcc

SEQ ID NO: 2781431 - DNA, 25 bp, Homo sapien
cagtgcttcagaggagtagctgcca

SEQ ID NO: 2781432 - DNA, 25 bp, Homo sapien
ctttcattagagctgagaagtttgg

SEQ ID NO: 2781433 - DNA, 25 bp, Homo sapien
cttccccagctcaaatttactgtta

SEQ ID NO: 2781434 - DNA, 25 bp, Homo sapien
atttactgttagaaagggttgcagt

SEQ ID NO: 2781435 - DNA, 25 bp, Homo sapien
ctgagaagtttggacttccccagct

SEQ ID NO: 2781436 - DNA, 25 bp, Homo sapien
ttggctgaagccatgtatgaaggtg

SEQ ID NO: 2781437 - DNA, 25 bp, Homo sapien
gaaatattggctgaagccatgtatg

SEQ ID NO: 2781438 - DNA, 25 bp, Homo sapien
aatattggctgaagccatgtatgaa

SEQ ID NO: 2781439 - DNA, 25 bp, Homo sapien
tatggaagataatcttgaaatgaaa

SEQ ID NO: 2781440 - DNA, 25 bp, Homo sapien
atgaattctgcaaaggcaagggggc

SEQ ID NO: 2781441 - DNA, 25 bp, Homo sapien
catgaagggggtactttcccatggg

SEQ ID NO: 2781442 - DNA, 25 bp, Homo sapien
tggcatgaagggggtactttcccat

SEQ ID NO: 2781443 - DNA, 25 bp, Homo sapien
tgaattctgcaaaggcaagggggcc

SEQ ID NO: 2781444 - DNA, 25 bp, Homo sapien
agctgatgaggagtagcaattggtc

SEQ ID NO: 2781445 - DNA, 25 bp, Homo sapien
gaggagtagcaattggtcagctaaa

SEQ ID NO: 2781446 - DNA, 25 bp, Homo sapien
gagtagcaattggtcagctaaagaa

SEQ ID NO: 2781447 - DNA, 25 bp, Homo sapien
tgatgaggagtagcaattggtcagc

SEQ ID NO: 2781448 - DNA, 25 bp, Homo sapien
tgagcaaatcaagcaggtcttttcc

SEQ ID NO: 2781449 - DNA, 25 bp, Homo sapien
gagcaaatcaagcaggtcttttcct

SEQ ID NO: 2781450 - DNA, 25 bp, Homo sapien
aaaaaagtcagctttggtcacacca

SEQ ID NO: 2781451 - DNA, 25 bp, Homo sapien
gctttggtcacaccaccaagagcat

SEQ ID NO: 2781452 - DNA, 25 bp, Homo sapien
gcctcacaaagattgccagctcaag

SEQ ID NO: 2781453 - DNA, 25 bp, Homo sapien
tatctttttgcctcacaaagattgc

SEQ ID NO: 2781454 - DNA, 25 bp, Homo sapien
tgccagctcaagtttgtaggtgatt

SEQ ID NO: 2781455 - DNA, 25 bp, Homo sapien
ccagctcaagtttgtaggtgatttg

SEQ ID NO: 2781456 - DNA, 25 bp, Homo sapien
tgaatcagcctcttgtgtctctcag

SEQ ID NO: 2781457 - DNA, 25 bp, Homo sapien
gtctctcagctccaacatcataaac

SEQ ID NO: 2781458 - DNA, 25 bp, Homo sapien
cagctccaacatcataaaccatcat

SEQ ID NO: 2781459 - DNA, 25 bp, Homo sapien
gtgtctctcagctccaacatcataa

SEQ ID NO: 2781460 - DNA, 25 bp, Homo sapien
gatttaaggatctgagaactcaggc

SEQ ID NO: 2781461 - DNA, 25 bp, Homo sapien
tgggcagattttgcccaagaaatgg

SEQ ID NO: 2781462 - DNA, 25 bp, Homo sapien
caggaggcagtgtgatggtgacagt

SEQ ID NO: 2781463 - DNA, 25 bp, Homo sapien
gtgatggtgacagtcacaaggagat

SEQ ID NO: 2781464 - DNA, 25 bp, Homo sapien
tgagtgaacctcctgggcaacttcc

SEQ ID NO: 2781465 - DNA, 25 bp, Homo sapien
gagtgaacctcctgggcaacttcct

SEQ ID NO: 2781466 - DNA, 25 bp, Homo sapien
tgtctgaaccaaggcaacaattccc

SEQ ID NO: 2781467 - DNA, 25 bp, Homo sapien
cttgggctagtttacagaagcgaag

SEQ ID NO: 2781468 - DNA, 25 bp, Homo sapien
gagagaaatccacccgttgaatcag

SEQ ID NO: 2781469 - DNA, 25 bp, Homo sapien
gctattgaccccatcattttcttgg

SEQ ID NO: 2781470 - DNA, 25 bp, Homo sapien
tttataatccggttgagttctggtg

SEQ ID NO: 2781471 - DNA, 25 bp, Homo sapien
ggtgtgtagccaagtttatatgtaa

SEQ ID NO: 2781472 - DNA, 25 bp, Homo sapien
taggataaagcatttgtccttgaca

SEQ ID NO: 2781473 - DNA, 25 bp, Homo sapien
tgtctctcaagataacttttaggat

SEQ ID NO: 2781474 - DNA, 25 bp, Homo sapien
cattccacattgcaaatggcactga

SEQ ID NO: 2781475 - DNA, 25 bp, Homo sapien
tgaatgaatgccagtctctgtttcc

SEQ ID NO: 2781476 - DNA, 25 bp, Homo sapien
tcctctctagccttgttctagtcag

SEQ ID NO: 2781477 - DNA, 25 bp, Homo sapien
caggcaagcatgagtcattccacat

SEQ ID NO: 2781478 - DNA, 25 bp, Homo sapien
tggtgtcctctagagcggcagcctt

SEQ ID NO: 2781479 - DNA, 25 bp, Homo sapien
tgattccagtacgtgctttgagcag

SEQ ID NO: 2781480 - DNA, 25 bp, Homo sapien
gggcgatttgattccagtacgtgct

SEQ ID NO: 2781481 - DNA, 25 bp, Homo sapien
tctttttgccagaaatcgtaggggc

SEQ ID NO: 2781482 - DNA, 25 bp, Homo sapien
tcatcagacaaggtgtagggtgtct

SEQ ID NO: 2781483 - DNA, 25 bp, Homo sapien
gaatggttcctttagagactcctcc

SEQ ID NO: 2781484 - DNA, 25 bp, Homo sapien
gtgtactccggcaactctttttctg

SEQ ID NO: 2781485 - DNA, 25 bp, Homo sapien
ggtagacactcctactctttatgaa

SEQ ID NO: 2781486 - DNA, 25 bp, Homo sapien
tcttgtgcctcatagcagaaggtag

SEQ ID NO: 2781487 - DNA, 25 bp, Homo sapien
taggacggtttcaggcactgtcaga

SEQ ID NO: 2781488 - DNA, 25 bp, Homo sapien
tagctgccctcggagacatcttgtg

SEQ ID NO: 2781489 - DNA, 25 bp, Homo sapien
ggttacgtaccatttcctcaagctg

SEQ ID NO: 2781490 - DNA, 25 bp, Homo sapien
cattatgaactacacaggtaaaagg

SEQ ID NO: 2781491 - DNA, 25 bp, Homo sapien
tatgaactacacaggtaaaaggata

SEQ ID NO: 2781492 - DNA, 25 bp, Homo sapien
ttacagttttctcgtgtcaggttta

SEQ ID NO: 2781493 - DNA, 25 bp, Homo sapien
tcgtgtcaggtttacacaaaatcct

SEQ ID NO: 2781494 - DNA, 25 bp, Homo sapien
cccagctttgggattgtttacagtg

SEQ ID NO: 2781495 - DNA, 25 bp, Homo sapien
tgtttttagctccacccttatttgc

SEQ ID NO: 2781496 - DNA, 25 bp, Homo sapien
gacagccagcttcctggaaatatag

SEQ ID NO: 2781497 - DNA, 25 bp, Homo sapien
tacagtgtaaggtctctcgtctgcc

SEQ ID NO: 2781498 - DNA, 25 bp, Homo sapien
gaaagcaactaagtcctttgctggc

SEQ ID NO: 2781499 - DNA, 25 bp, Homo sapien
tgatttggttgcatgactgtccagg

SEQ ID NO: 2781500 - DNA, 25 bp, Homo sapien
gcccttcccttgatgagggctggaa

SEQ ID NO: 2781501 - DNA, 25 bp, Homo sapien
gatgtaatgccaaaacatgcgttca

SEQ ID NO: 2781502 - DNA, 25 bp, Homo sapien
atgatagagccccgcttttgagtgc

SEQ ID NO: 2781503 - DNA, 25 bp, Homo sapien
gagccccgcttttgagtgcatacag

SEQ ID NO: 2781504 - DNA, 25 bp, Homo sapien
cccgcttttgagtgcatacagcttt

SEQ ID NO: 2781505 - DNA, 25 bp, Homo sapien
tagagccccgcttttgagtgcatac

SEQ ID NO: 2781506 - DNA, 25 bp, Homo sapien
gtgcaaggggtggaactctgcttct

SEQ ID NO: 2781507 - DNA, 25 bp, Homo sapien
tctggaaagtgtttcggccgaatgt

SEQ ID NO: 2781508 - DNA, 25 bp, Homo sapien
aaggggtggaactctgcttctctgg

SEQ ID NO: 2781509 - DNA, 25 bp, Homo sapien
gtttcggccgaatgttattccagct

SEQ ID NO: 2781510 - DNA, 25 bp, Homo sapien
ttaacctgtatatcaatgtactcag

SEQ ID NO: 2781511 - DNA, 25 bp, Homo sapien
caggccacgcagatcatacattttt

SEQ ID NO: 2781512 - DNA, 25 bp, Homo sapien
catcctctttaacctgtatatcaat

SEQ ID NO: 2781513 - DNA, 25 bp, Homo sapien
tgtactcagcatcatttccttgccc

SEQ ID NO: 2781514 - DNA, 25 bp, Homo sapien
ctgggccatcagatttggccctgtc

SEQ ID NO: 2781515 - DNA, 25 bp, Homo sapien
ggccctgtcctgcagggtttcgctc

SEQ ID NO: 2781516 - DNA, 25 bp, Homo sapien
gccatcagatttggccctgtcctgc

SEQ ID NO: 2781517 - DNA, 25 bp, Homo sapien
ccctgtcctgcagggtttcgctcat

SEQ ID NO: 2781518 - DNA, 25 bp, Homo sapien
ttaactgcgaggctgctgagactct

SEQ ID NO: 2781519 - DNA, 25 bp, Homo sapien
ccttttgggttaactgcgaggctgc

SEQ ID NO: 2781520 - DNA, 25 bp, Homo sapien
ggttaactgcgaggctgctgagact

SEQ ID NO: 2781521 - DNA, 25 bp, Homo sapien
tttgggttaactgcgaggctgctga

SEQ ID NO: 2781522 - DNA, 25 bp, Homo sapien
ctgaaggtacgataattccatttta

SEQ ID NO: 2781523 - DNA, 25 bp, Homo sapien
tggttctgaaggtacgataattcca

SEQ ID NO: 2781524 - DNA, 25 bp, Homo sapien
tcagccaatgagagttggttctgaa

SEQ ID NO: 2781525 - DNA, 25 bp, Homo sapien
ttctgaaggtacgataattccattt

SEQ ID NO: 2781526 - DNA, 25 bp, Homo sapien
ttcatgtgagtctcatcactgagat

SEQ ID NO: 2781527 - DNA, 25 bp, Homo sapien
gatacaggttaagattaagctgttt

SEQ ID NO: 2781528 - DNA, 25 bp, Homo sapien
ctttcatgtgagtctcatcactgag

SEQ ID NO: 2781529 - DNA, 25 bp, Homo sapien
ggatacaggttaagattaagctgtt

SEQ ID NO: 2781530 - DNA, 25 bp, Homo sapien
agcccaggggttcaagtccagccta

SEQ ID NO: 2781531 - DNA, 25 bp, Homo sapien
gcccaggggttcaagtccagcctaa

SEQ ID NO: 2781532 - DNA, 25 bp, Homo sapien
tccagcctaaccaacatagcaagac

SEQ ID NO: 2781533 - DNA, 25 bp, Homo sapien
ttgagcccaggggttcaagtccagc

SEQ ID NO: 2781534 - DNA, 25 bp, Homo sapien
tgtgctttcacgtagaggccatgac

SEQ ID NO: 2781535 - DNA, 25 bp, Homo sapien
taacacgtaggtaggtaactctcca

SEQ ID NO: 2781536 - DNA, 25 bp, Homo sapien
aatacttggcatccgaagggagaca

SEQ ID NO: 2781537 - DNA, 25 bp, Homo sapien
taaacaggtcggtggcttgccctta

SEQ ID NO: 2781538 - DNA, 25 bp, Homo sapien
tttgtggttgctactaaaaatcctg

SEQ ID NO: 2781539 - DNA, 25 bp, Homo sapien
tccaggctttgtggttgctactaaa

SEQ ID NO: 2781540 - DNA, 25 bp, Homo sapien
gcacgataatggactgttccatcct

SEQ ID NO: 2781541 - DNA, 25 bp, Homo sapien
taaagtgacttcttgagcagcaggc

SEQ ID NO: 2781542 - DNA, 25 bp, Homo sapien
ttcaatgtcattgagatctagagcc

SEQ ID NO: 2781543 - DNA, 25 bp, Homo sapien
catatgttcttcaatgtcattgaga

SEQ ID NO: 2781544 - DNA, 25 bp, Homo sapien
tgtcattgagatctagagcctctgc

SEQ ID NO: 2781545 - DNA, 25 bp, Homo sapien
cattgagatctagagcctctgcccc

SEQ ID NO: 2781546 - DNA, 25 bp, Homo sapien
cctcttttgcaggcctggaggaaat

SEQ ID NO: 2781547 - DNA, 25 bp, Homo sapien
tttcctcttttgcaggcctggagga

SEQ ID NO: 2781548 - DNA, 25 bp, Homo sapien
tcctcttttgcaggcctggaggaaa

SEQ ID NO: 2781549 - DNA, 25 bp, Homo sapien
tcttttgcaggcctggaggaaatgg

SEQ ID NO: 2781550 - DNA, 25 bp, Homo sapien
ggtttatgccttcgtcacgtagttc

SEQ ID NO: 2781551 - DNA, 25 bp, Homo sapien
catcggctactgaggtttatgcctt

SEQ ID NO: 2781552 - DNA, 25 bp, Homo sapien
cgtcttccaacgctgatacactttc

SEQ ID NO: 2781553 - DNA, 25 bp, Homo sapien
ttcgtcttccaacgctgatacactt

SEQ ID NO: 2781554 - DNA, 25 bp, Homo sapien
ggtgcctcagaggaccccattggtt

SEQ ID NO: 2781555 - DNA, 25 bp, Homo sapien
gatctgacagtacaggaggtgcctc

SEQ ID NO: 2781556 - DNA, 25 bp, Homo sapien
tataacagggacaggcatccattct

SEQ ID NO: 2781557 - DNA, 25 bp, Homo sapien
tcagtggacattaggtataacaggg

SEQ ID NO: 2781558 - DNA, 25 bp, Homo sapien
cttgagctagggctttgactgaaaa

SEQ ID NO: 2781559 - DNA, 25 bp, Homo sapien
ctgcattagaaacagcgagagcttg

SEQ ID NO: 2781560 - DNA, 25 bp, Homo sapien
aaggctgcattagaaacagcgagag

SEQ ID NO: 2781561 - DNA, 25 bp, Homo sapien
cagcgagagcttgagctagggcttt

SEQ ID NO: 2781562 - DNA, 25 bp, Homo sapien
tctctttataagcagctctagttgt

SEQ ID NO: 2781563 - DNA, 25 bp, Homo sapien
ttataagcagctctagttgtcttct

SEQ ID NO: 2781564 - DNA, 25 bp, Homo sapien
tgcctttcctttggatttctcttta

SEQ ID NO: 2781565 - DNA, 25 bp, Homo sapien
tcacaattatatttgtgaaaggaag

SEQ ID NO: 2781566 - DNA, 25 bp, Homo sapien
agcgctgaggagtgctctcatcctc

SEQ ID NO: 2781567 - DNA, 25 bp, Homo sapien
ggaagcgctgaggagtgctctcatc

SEQ ID NO: 2781568 - DNA, 25 bp, Homo sapien
gacttctgtagatacccagctcctt

SEQ ID NO: 2781569 - DNA, 25 bp, Homo sapien
gaagcgctgaggagtgctctcatcc

SEQ ID NO: 2781570 - DNA, 25 bp, Homo sapien
tcttccctaatgctgcagtttgaat

SEQ ID NO: 2781571 - DNA, 25 bp, Homo sapien
ctttgcaaacgaggcagattcttcc

SEQ ID NO: 2781572 - DNA, 25 bp, Homo sapien
taatgctgcagtttgaatatcagtc

SEQ ID NO: 2781573 - DNA, 25 bp, Homo sapien
gaggcagattcttccctaatgctgc

SEQ ID NO: 2781574 - DNA, 25 bp, Homo sapien
catctttgagggaattaatctgcat

SEQ ID NO: 2781575 - DNA, 25 bp, Homo sapien
tcatctttgagggaattaatctgca

SEQ ID NO: 2781576 - DNA, 25 bp, Homo sapien
cagaaatgacactgggtagagcaga

SEQ ID NO: 2781577 - DNA, 25 bp, Homo sapien
tatctcctctgtgaacattaagaca

SEQ ID NO: 2781578 - DNA, 25 bp, Homo sapien
gataattagagatagaagacacggt

SEQ ID NO: 2781579 - DNA, 25 bp, Homo sapien
gggaagcccttaatcagtagatggg

SEQ ID NO: 2781580 - DNA, 25 bp, Homo sapien
cctgttgctgcaacacttgaatgcc

SEQ ID NO: 2781581 - DNA, 25 bp, Homo sapien
tgttgctgcaacacttgaatgccta

SEQ ID NO: 2781582 - DNA, 25 bp, Homo sapien
caacacttgaatgcctaatatctgg

SEQ ID NO: 2781583 - DNA, 25 bp, Homo sapien
tgctgcaacacttgaatgcctaata

SEQ ID NO: 2781584 - DNA, 25 bp, Homo sapien
gcctcctgacgaagttggaggccat

SEQ ID NO: 2781585 - DNA, 25 bp, Homo sapien
tggggtttgcctcctgacgaagttg

SEQ ID NO: 2781586 - DNA, 25 bp, Homo sapien
tttgcctcctgacgaagttggaggc

SEQ ID NO: 2781587 - DNA, 25 bp, Homo sapien
gggtttgcctcctgacgaagttgga

SEQ ID NO: 2781588 - DNA, 25 bp, Homo sapien
cactttatgtgtcggtgaccaggag

SEQ ID NO: 2781589 - DNA, 25 bp, Homo sapien
caatagcatcctcagtagttgcgag

SEQ ID NO: 2781590 - DNA, 25 bp, Homo sapien
tagaaaatacttgtgcagcagtctc

SEQ ID NO: 2781591 - DNA, 25 bp, Homo sapien
tatctgggcctggaagtatcttagc

SEQ ID NO: 2781592 - DNA, 25 bp, Homo sapien
tacaaacggcagtgtgcccggaatt

SEQ ID NO: 2781593 - DNA, 25 bp, Homo sapien
catacaaacggcagtgtgcccggaa

SEQ ID NO: 2781594 - DNA, 25 bp, Homo sapien
caaacggcagtgtgcccggaattgg

SEQ ID NO: 2781595 - DNA, 25 bp, Homo sapien
caacatacaaacggcagtgtgcccg

SEQ ID NO: 2781596 - DNA, 25 bp, Homo sapien
aaaatgaggacgtggaccctcgcgg

SEQ ID NO: 2781597 - DNA, 25 bp, Homo sapien
ggcagactcaaaaactcagcaacag

SEQ ID NO: 2781598 - DNA, 25 bp, Homo sapien
cagcaacagcgagatttattacaaa

SEQ ID NO: 2781599 - DNA, 25 bp, Homo sapien
gttcatacacgttcagagtttctta

SEQ ID NO: 2781600 - DNA, 25 bp, Homo sapien
ccagagttacatcaatctgatggtc

SEQ ID NO: 2781601 - DNA, 25 bp, Homo sapien
tcaccacccagagttacatcaatct

SEQ ID NO: 2781602 - DNA, 25 bp, Homo sapien
cacccagagttacatcaatctgatg

SEQ ID NO: 2781603 - DNA, 25 bp, Homo sapien
gagttacatcaatctgatggtctgc

SEQ ID NO: 2781604 - DNA, 25 bp, Homo sapien
agaggtctccatgggcatttattgc

SEQ ID NO: 2781605 - DNA, 25 bp, Homo sapien
tacacgatggccagtaaatgctctg

SEQ ID NO: 2781606 - DNA, 25 bp, Homo sapien
caaggagttaaaggtagctacagca

SEQ ID NO: 2781607 - DNA, 25 bp, Homo sapien
ggccgaagtagtccatctccctagg

SEQ ID NO: 2781608 - DNA, 25 bp, Homo sapien
ccttcttgcaagatcatcagtagat

SEQ ID NO: 2781609 - DNA, 25 bp, Homo sapien
tatccagcattaatacccaggtcag

SEQ ID NO: 2781610 - DNA, 25 bp, Homo sapien
tccatttttgaaaggcggcaagaac

SEQ ID NO: 2781611 - DNA, 25 bp, Homo sapien
tagaaggacgttgctatatccagca

SEQ ID NO: 2781612 - DNA, 25 bp, Homo sapien
ccaagaaggctagtaacaagtgcac

SEQ ID NO: 2781613 - DNA, 25 bp, Homo sapien
cagtgacagtcatcaaatggccttc

SEQ ID NO: 2781614 - DNA, 25 bp, Homo sapien
ggagcccttagcatagatctgtgaa

SEQ ID NO: 2781615 - DNA, 25 bp, Homo sapien
tatcagtgtccccttatctcagagc

SEQ ID NO: 2781616 - DNA, 25 bp, Homo sapien
tttccatctggtccaatgtccaagc

SEQ ID NO: 2781617 - DNA, 25 bp, Homo sapien
gctgctcagccctaatctctctact

SEQ ID NO: 2781618 - DNA, 25 bp, Homo sapien
tggtccaatgtccaagctgctcagc

SEQ ID NO: 2781619 - DNA, 25 bp, Homo sapien
catctggtccaatgtccaagctgct

SEQ ID NO: 2781620 - DNA, 25 bp, Homo sapien
tttcttctacgctgctctgatttga

SEQ ID NO: 2781621 - DNA, 25 bp, Homo sapien
ccttttcttctacgctgctctgatt

SEQ ID NO: 2781622 - DNA, 25 bp, Homo sapien
ttcttctacgctgctctgatttgaa

SEQ ID NO: 2781623 - DNA, 25 bp, Homo sapien
tcttcaagttgtcgccactgtccaa

SEQ ID NO: 2781624 - DNA, 25 bp, Homo sapien
ggagcttcaaaactcttattctgga

SEQ ID NO: 2781625 - DNA, 25 bp, Homo sapien
cagcctggctgcagtataaaatgag

SEQ ID NO: 2781626 - DNA, 25 bp, Homo sapien
cactctgcagctagctgtcttcaag

SEQ ID NO: 2781627 - DNA, 25 bp, Homo sapien
tcattctgtgatctatggcagttat

SEQ ID NO: 2781628 - DNA, 25 bp, Homo sapien
gggctttcattctgtgatctatggc

SEQ ID NO: 2781629 - DNA, 25 bp, Homo sapien
tctgtaaatgttgactcctgttgct

SEQ ID NO: 2781630 - DNA, 25 bp, Homo sapien
gttgatcagttggtagtgccacagt

SEQ ID NO: 2781631 - DNA, 25 bp, Homo sapien
tcctctgaaagattcagttgtgact

SEQ ID NO: 2781632 - DNA, 25 bp, Homo sapien
ctcctctgaaagattcagttgtgac

SEQ ID NO: 2781633 - DNA, 25 bp, Homo sapien
cctctgaaagattcagttgtgacta

SEQ ID NO: 2781634 - DNA, 25 bp, Homo sapien
cctcctctgaaagattcagttgtga

SEQ ID NO: 2781635 - DNA, 25 bp, Homo sapien
gccttgacctctgggttctagcaat

SEQ ID NO: 2781636 - DNA, 25 bp, Homo sapien
gcctttgctatttgtgcaacatggc

SEQ ID NO: 2781637 - DNA, 25 bp, Homo sapien
taactttagacttgtggattaatga

SEQ ID NO: 2781638 - DNA, 25 bp, Homo sapien
caacatggccacattgttttgcagt

SEQ ID NO: 2781639 - DNA, 25 bp, Homo sapien
tttgctggtagtctggacttaagca

SEQ ID NO: 2781640 - DNA, 25 bp, Homo sapien
cctttgctggtagtctggacttaag

SEQ ID NO: 2781641 - DNA, 25 bp, Homo sapien
ctttgctggtagtctggacttaagc

SEQ ID NO: 2781642 - DNA, 25 bp, Homo sapien
caaaaagcttctgctgctgtatgag

SEQ ID NO: 2781643 - DNA, 25 bp, Homo sapien
ctttgtatgagaaacagcgcttgga

SEQ ID NO: 2781644 - DNA, 25 bp, Homo sapien
aaatttgaaggatgccaccatagcc

SEQ ID NO: 2781645 - DNA, 25 bp, Homo sapien
taaacatctggactatctgtgtcaa

SEQ ID NO: 2781646 - DNA, 25 bp, Homo sapien
agattcagtgcgcaatgcctccaga

SEQ ID NO: 2781647 - DNA, 25 bp, Homo sapien
gataggggatcctggagacaattcc

SEQ ID NO: 2781648 - DNA, 25 bp, Homo sapien
gcaagagaatctcgttctgataggg

SEQ ID NO: 2781649 - DNA, 25 bp, Homo sapien
tcttgatcaagaggagtaatggagg

SEQ ID NO: 2781650 - DNA, 25 bp, Homo sapien
cagctagcgctagtgctgcgttcaa

SEQ ID NO: 2781651 - DNA, 25 bp, Homo sapien
gaatctgtgtcagtgcagctagcgc

SEQ ID NO: 2781652 - DNA, 25 bp, Homo sapien
tgtacatgtcacaaagctgaggact

SEQ ID NO: 2781653 - DNA, 25 bp, Homo sapien
tgaggactcccacagtgtttgtaca

SEQ ID NO: 2781654 - DNA, 25 bp, Homo sapien
accaggtgtatccttaatgcctcca

SEQ ID NO: 2781655 - DNA, 25 bp, Homo sapien
catctacaaccaggtgtatccttaa

SEQ ID NO: 2781656 - DNA, 25 bp, Homo sapien
tcatcatcatctacaaccaggtgta

SEQ ID NO: 2781657 - DNA, 25 bp, Homo sapien
tacaaccaggtgtatccttaatgcc

SEQ ID NO: 2781658 - DNA, 25 bp, Homo sapien
aagtcagtgttaggtggagaattac

SEQ ID NO: 2781659 - DNA, 25 bp, Homo sapien
tcagtgttaggtggagaattacaat

SEQ ID NO: 2781660 - DNA, 25 bp, Homo sapien
aaagtcagtgttaggtggagaatta

SEQ ID NO: 2781661 - DNA, 25 bp, Homo sapien
tacaattcacctcctttaccccatg

SEQ ID NO: 2781662 - DNA, 25 bp, Homo sapien
cctaaggtctcatgcagttgtggtg

SEQ ID NO: 2781663 - DNA, 25 bp, Homo sapien
tgtacacgcgtgtaacatgtgcctg

SEQ ID NO: 2781664 - DNA, 25 bp, Homo sapien
tttcaatgctcaagttcaacaggta

SEQ ID NO: 2781665 - DNA, 25 bp, Homo sapien
ggcttgagcaaattagaccattggg

SEQ ID NO: 2781666 - DNA, 25 bp, Homo sapien
ttagatttggacgtgagggtagatg

SEQ ID NO: 2781667 - DNA, 25 bp, Homo sapien
gcagtaacataatccacctctaatt

SEQ ID NO: 2781668 - DNA, 25 bp, Homo sapien
tagatttggacgtgagggtagatgg

SEQ ID NO: 2781669 - DNA, 25 bp, Homo sapien
gtagatggggttggcagtaacataa

SEQ ID NO: 2781670 - DNA, 25 bp, Homo sapien
tgctttgtacttgaaaccgtagaag

SEQ ID NO: 2781671 - DNA, 25 bp, Homo sapien
gctttgtacttgaaaccgtagaaga

SEQ ID NO: 2781672 - DNA, 25 bp, Homo sapien
gctgcctctggtccaaatatctggt

SEQ ID NO: 2781673 - DNA, 25 bp, Homo sapien
agctgcctctggtccaaatatctgg

SEQ ID NO: 2781674 - DNA, 25 bp, Homo sapien
agcctgttcaggagcacactcagat

SEQ ID NO: 2781675 - DNA, 25 bp, Homo sapien
cctgttcaggagcacactcagatgc

SEQ ID NO: 2781676 - DNA, 25 bp, Homo sapien
gcctgttcaggagcacactcagatg

SEQ ID NO: 2781677 - DNA, 25 bp, Homo sapien
ctgttcaggagcacactcagatgct

SEQ ID NO: 2781678 - DNA, 25 bp, Homo sapien
ttgcaattctagattgtgtggccat

SEQ ID NO: 2781679 - DNA, 25 bp, Homo sapien
gctagggtgaagcaatggaagctct

SEQ ID NO: 2781680 - DNA, 25 bp, Homo sapien
gaagctctagggcacttccagtttt

SEQ ID NO: 2781681 - DNA, 25 bp, Homo sapien
tattgtgtcgttaggctgatgatca

SEQ ID NO: 2781682 - DNA, 25 bp, Homo sapien
tgatgatcaaatatggcccagccag

SEQ ID NO: 2781683 - DNA, 25 bp, Homo sapien
cttcaaacaattgcaggttcagcat

SEQ ID NO: 2781684 - DNA, 25 bp, Homo sapien
tccaaaagtagaagggcagacaaag

SEQ ID NO: 2781685 - DNA, 25 bp, Homo sapien
aggaagtggctgttccaaaagtaga

SEQ ID NO: 2781686 - DNA, 25 bp, Homo sapien
caaaagtagaagggcagacaaagcc

SEQ ID NO: 2781687 - DNA, 25 bp, Homo sapien
gttccaaaagtagaagggcagacaa

SEQ ID NO: 2781688 - DNA, 25 bp, Homo sapien
cactcccatccgtagtgtctcggga

SEQ ID NO: 2781689 - DNA, 25 bp, Homo sapien
tgtcccttcaccactcccatccgta

SEQ ID NO: 2781690 - DNA, 25 bp, Homo sapien
catccgtagtgtctcgggaagtgtc

SEQ ID NO: 2781691 - DNA, 25 bp, Homo sapien
gtagtgtctcgggaagtgtctttac

SEQ ID NO: 2781692 - DNA, 25 bp, Homo sapien
caagtaatttgtaataatagttcca

SEQ ID NO: 2781693 - DNA, 25 bp, Homo sapien
taatagttccattttatttggcaaa

SEQ ID NO: 2781694 - DNA, 25 bp, Homo sapien
ctcaagtaatttgtaataatagttc

SEQ ID NO: 2781695 - DNA, 25 bp, Homo sapien
tccattttatttggcaaaagggcat

SEQ ID NO: 2781696 - DNA, 25 bp, Homo sapien
tcataaacaccatgagactcctcca

SEQ ID NO: 2781697 - DNA, 25 bp, Homo sapien
tctcacactgagattcataaacacc

SEQ ID NO: 2781698 - DNA, 25 bp, Homo sapien
gctgggggattattttctcacactg

SEQ ID NO: 2781699 - DNA, 25 bp, Homo sapien
tgagattcataaacaccatgagact

SEQ ID NO: 2781700 - DNA, 25 bp, Homo sapien
tcaccctagatcttccaaaatagca

SEQ ID NO: 2781701 - DNA, 25 bp, Homo sapien
cacaacaacactgatccactcgtag

SEQ ID NO: 2781702 - DNA, 25 bp, Homo sapien
tacttttgaaggttccacaacaaca

SEQ ID NO: 2781703 - DNA, 25 bp, Homo sapien
ggagatgtgacaactggcatctata

SEQ ID NO: 2781704 - DNA, 25 bp, Homo sapien
gatccactcgtagggtcgttaattg

SEQ ID NO: 2781705 - DNA, 25 bp, Homo sapien
cagttgaatatataaccacaggatc

SEQ ID NO: 2781706 - DNA, 25 bp, Homo sapien
tatataaccacaggatcattcaggg

SEQ ID NO: 2781707 - DNA, 25 bp, Homo sapien
tgtgccaaccgaaaagtctttcctg

SEQ ID NO: 2781708 - DNA, 25 bp, Homo sapien
ggatcattcagggtttgtgccaacc

SEQ ID NO: 2781709 - DNA, 25 bp, Homo sapien
taagaagctgagtgtaccagggctg

SEQ ID NO: 2781710 - DNA, 25 bp, Homo sapien
tcccttgcatgccttaagtaagagc

SEQ ID NO: 2781711 - DNA, 25 bp, Homo sapien
ttccatggatgtctcaaatcagtac

SEQ ID NO: 2781712 - DNA, 25 bp, Homo sapien
tcagtacatgtgctccttaaggaac

SEQ ID NO: 2781713 - DNA, 25 bp, Homo sapien
ttagctgattaaacacccaaatgac

SEQ ID NO: 2781714 - DNA, 25 bp, Homo sapien
ggctgggcaattctccctacagtca

SEQ ID NO: 2781715 - DNA, 25 bp, Homo sapien
cctacaaaagggagagcggaaatga

SEQ ID NO: 2781716 - DNA, 25 bp, Homo sapien
gatttttactttagcccatgaatga

SEQ ID NO: 2781717 - DNA, 25 bp, Homo sapien
agatgttatttacttcgtaggaatg

SEQ ID NO: 2781718 - DNA, 25 bp, Homo sapien
tcacaggtaaacgtctagaaacaag

SEQ ID NO: 2781719 - DNA, 25 bp, Homo sapien
tttacttcgtaggaatgtgttccca

SEQ ID NO: 2781720 - DNA, 25 bp, Homo sapien
tcccaatgtcggattcagctgtggc

SEQ ID NO: 2781721 - DNA, 25 bp, Homo sapien
atcctgtactttgttgtccatagag

SEQ ID NO: 2781722 - DNA, 25 bp, Homo sapien
tttctctgtgagcatctctttgttt

SEQ ID NO: 2781723 - DNA, 25 bp, Homo sapien
tcagtcctgagatttctctgtgagc

SEQ ID NO: 2781724 - DNA, 25 bp, Homo sapien
cagtcctgagatttctctgtgagca

SEQ ID NO: 2781725 - DNA, 25 bp, Homo sapien
agatttctctgtgagcatctctttg

SEQ ID NO: 2781726 - DNA, 25 bp, Homo sapien
accagatcccaattcccacactctc

SEQ ID NO: 2781727 - DNA, 25 bp, Homo sapien
cactacatctaaccagatcccaatt

SEQ ID NO: 2781728 - DNA, 25 bp, Homo sapien
actacatctaaccagatcccaattc

SEQ ID NO: 2781729 - DNA, 25 bp, Homo sapien
atctaaccagatcccaattcccaca

SEQ ID NO: 2781730 - DNA, 25 bp, Homo sapien
cattggccaaagactccagtgaccc

SEQ ID NO: 2781731 - DNA, 25 bp, Homo sapien
aaggctggattccagcggagcattg

SEQ ID NO: 2781732 - DNA, 25 bp, Homo sapien
ggattccagcggagcattggccaaa

SEQ ID NO: 2781733 - DNA, 25 bp, Homo sapien
gagcattggccaaagactccagtga

SEQ ID NO: 2781734 - DNA, 25 bp, Homo sapien
tggaatgaatcacatcaagctcctg

SEQ ID NO: 2781735 - DNA, 25 bp, Homo sapien
gaatgaatcacatcaagctcctgca

SEQ ID NO: 2781736 - DNA, 25 bp, Homo sapien
aatgaatcacatcaagctcctgcat

SEQ ID NO: 2781737 - DNA, 25 bp, Homo sapien
ttttggaatgaatcacatcaagctc

SEQ ID NO: 2781738 - DNA, 25 bp, Homo sapien
cggttttttcaatcatatcatttgc

SEQ ID NO: 2781739 - DNA, 25 bp, Homo sapien
tcccccggttttttcaatcatatca

SEQ ID NO: 2781740 - DNA, 25 bp, Homo sapien
caatcatatcatttgcttgtgattc

SEQ ID NO: 2781741 - DNA, 25 bp, Homo sapien
ttgaatatgctgcttcccccggttt

SEQ ID NO: 2781742 - DNA, 25 bp, Homo sapien
cttttatagctttctcacagtaaga

SEQ ID NO: 2781743 - DNA, 25 bp, Homo sapien
agaatggtgcccatttgagttatga

SEQ ID NO: 2781744 - DNA, 25 bp, Homo sapien
aatggtgcccatttgagttatgagt

SEQ ID NO: 2781745 - DNA, 25 bp, Homo sapien
tagctttctcacagtaagaagaatg

SEQ ID NO: 2781746 - DNA, 25 bp, Homo sapien
agcagaggaagataccccggccgat

SEQ ID NO: 2781747 - DNA, 25 bp, Homo sapien
cagaggaagataccccggccgatcc

SEQ ID NO: 2781748 - DNA, 25 bp, Homo sapien
ttttcagtgggcttgttcagctcca

SEQ ID NO: 2781749 - DNA, 25 bp, Homo sapien
cggccgatcccactcttctttttca

SEQ ID NO: 2781750 - DNA, 25 bp, Homo sapien
taatctgattccttcaaccacctgt

SEQ ID NO: 2781751 - DNA, 25 bp, Homo sapien
tctaaagcaaacaaccataaatttc

SEQ ID NO: 2781752 - DNA, 25 bp, Homo sapien
gcaactaactccttattctaaagca

SEQ ID NO: 2781753 - DNA, 25 bp, Homo sapien
tcttggctcagtatccatttcatac

SEQ ID NO: 2781754 - DNA, 25 bp, Homo sapien
atggcttaacgagcccctttcctgt

SEQ ID NO: 2781755 - DNA, 25 bp, Homo sapien
tgaaggctcccccttgggcatggct

SEQ ID NO: 2781756 - DNA, 25 bp, Homo sapien
ctttcctgtacaccctgtccctgag

SEQ ID NO: 2781757 - DNA, 25 bp, Homo sapien
ccccttgggcatggcttaacgagcc

SEQ ID NO: 2781758 - DNA, 25 bp, Homo sapien
gagctacaaaaaacattgtcgctgt

SEQ ID NO: 2781759 - DNA, 25 bp, Homo sapien
gagagctacaaaaaacattgtcgct

SEQ ID NO: 2781760 - DNA, 25 bp, Homo sapien
tgagagctacaaaaaacattgtcgc

SEQ ID NO: 2781761 - DNA, 25 bp, Homo sapien
tgtgagagctacaaaaaacattgtc

SEQ ID NO: 2781762 - DNA, 25 bp, Homo sapien
tctctagctgcccatctgacatctt

SEQ ID NO: 2781763 - DNA, 25 bp, Homo sapien
cactgtgtggtttctctagctgccc

SEQ ID NO: 2781764 - DNA, 25 bp, Homo sapien
tagccaccattcctgtgtggcactg

SEQ ID NO: 2781765 - DNA, 25 bp, Homo sapien
cctgtgtggcactgtgtggtttctc

SEQ ID NO: 2781766 - DNA, 25 bp, Homo sapien
ttttccaagatacatgaaggctcct

SEQ ID NO: 2781767 - DNA, 25 bp, Homo sapien
tttccaagatacatgaaggctcctg

SEQ ID NO: 2781768 - DNA, 25 bp, Homo sapien
cactcaggtaaaataaatcccagca

SEQ ID NO: 2781769 - DNA, 25 bp, Homo sapien
tcactcaggtaaaataaatcccagc

SEQ ID NO: 2781770 - DNA, 25 bp, Homo sapien
cccagcagcaccttccattgtgcat

SEQ ID NO: 2781771 - DNA, 25 bp, Homo sapien
tgttcatgactacgaccatttcggg

SEQ ID NO: 2781772 - DNA, 25 bp, Homo sapien
catgactacgaccatttcggggatt

SEQ ID NO: 2781773 - DNA, 25 bp, Homo sapien
ttcatgactacgaccatttcgggga

SEQ ID NO: 2781774 - DNA, 25 bp, Homo sapien
gctgttcatgactacgaccatttcg

SEQ ID NO: 2781775 - DNA, 25 bp, Homo sapien
cttggcttcacttatgacagccata

SEQ ID NO: 2781776 - DNA, 25 bp, Homo sapien
cttcacttatgacagccataagcat

SEQ ID NO: 2781777 - DNA, 25 bp, Homo sapien
ggcttcacttatgacagccataagc

SEQ ID NO: 2781778 - DNA, 25 bp, Homo sapien
tggcttcacttatgacagccataag

SEQ ID NO: 2781779 - DNA, 25 bp, Homo sapien
gaattccagacattgatgaaccatg

SEQ ID NO: 2781780 - DNA, 25 bp, Homo sapien
catattatcaggctaatcctagagc

SEQ ID NO: 2781781 - DNA, 25 bp, Homo sapien
ccctggcctaggtctgttgtctgat

SEQ ID NO: 2781782 - DNA, 25 bp, Homo sapien
gagaatgtgttccaacttgcatggc

SEQ ID NO: 2781783 - DNA, 25 bp, Homo sapien
tgaaggcttgatgggactaagagat

SEQ ID NO: 2781784 - DNA, 25 bp, Homo sapien
ggactcaagatttgactccaaagct

SEQ ID NO: 2781785 - DNA, 25 bp, Homo sapien
tatgatttccctagctgacatgaga

SEQ ID NO: 2781786 - DNA, 25 bp, Homo sapien
gccacaccaagtttagttgagggta

SEQ ID NO: 2781787 - DNA, 25 bp, Homo sapien
gttcagagtaacaggatgagcagct

SEQ ID NO: 2781788 - DNA, 25 bp, Homo sapien
tcaactaccatgcaccagaaggaaa

SEQ ID NO: 2781789 - DNA, 25 bp, Homo sapien
taatagattaaaagatggaccccaa

SEQ ID NO: 2781790 - DNA, 25 bp, Homo sapien
tatactatgctgtacaggaccacaa

SEQ ID NO: 2781791 - DNA, 25 bp, Homo sapien
tgccaacggtttaaaatggtcaaca

SEQ ID NO: 2781792 - DNA, 25 bp, Homo sapien
tattgccaacggtttaaaatggtca

SEQ ID NO: 2781793 - DNA, 25 bp, Homo sapien
ggaattgttttcgtaccaccacatg

SEQ ID NO: 2781794 - DNA, 25 bp, Homo sapien
tcccatagggtccattcgaaaagtc

SEQ ID NO: 2781795 - DNA, 25 bp, Homo sapien
tatatggccatagttcacagttacg

SEQ ID NO: 2781796 - DNA, 25 bp, Homo sapien
tcaagaactgtatgccttagcctgt

SEQ ID NO: 2781797 - DNA, 25 bp, Homo sapien
atctttgtaagagcatgttcagggc

SEQ ID NO: 2781798 - DNA, 25 bp, Homo sapien
gttgtagatatcctatcctcattga

SEQ ID NO: 2781799 - DNA, 25 bp, Homo sapien
gatgtaggtgagaaggtattcttca

SEQ ID NO: 2781800 - DNA, 25 bp, Homo sapien
gttcagggcatattccattcgattt

SEQ ID NO: 2781801 - DNA, 25 bp, Homo sapien
taaacatagacattagatctctcaa

SEQ ID NO: 2781802 - DNA, 25 bp, Homo sapien
cattagatctctcaaaatattcgag

SEQ ID NO: 2781803 - DNA, 25 bp, Homo sapien
tattcgagaattagaaaagttcagt

SEQ ID NO: 2781804 - DNA, 25 bp, Homo sapien
caatcactaaactgtctaggtacaa

SEQ ID NO: 2781805 - DNA, 25 bp, Homo sapien
tcagtaacactaggcagatctccac

SEQ ID NO: 2781806 - DNA, 25 bp, Homo sapien
cgaggtcttcgaatatcagtaacac

SEQ ID NO: 2781807 - DNA, 25 bp, Homo sapien
tgaaaggtgccatcattaaagagca

SEQ ID NO: 2781808 - DNA, 25 bp, Homo sapien
cattagggccttatcagattttagc

SEQ ID NO: 2781809 - DNA, 25 bp, Homo sapien
aggagagtgagttagtgcctacaaa

SEQ ID NO: 2781810 - DNA, 25 bp, Homo sapien
ttgtagcatgcactctattattatt

SEQ ID NO: 2781811 - DNA, 25 bp, Homo sapien
ctggaagagattaggagagtgagtt

SEQ ID NO: 2781812 - DNA, 25 bp, Homo sapien
tgagcattggccaagctctgcgtaa

SEQ ID NO: 2781813 - DNA, 25 bp, Homo sapien
aaagtatttcagcaccgtcacttga

SEQ ID NO: 2781814 - DNA, 25 bp, Homo sapien
caagctctgcgtaatagtgaactgt

SEQ ID NO: 2781815 - DNA, 25 bp, Homo sapien
cacttgactaataaattgctcagga

SEQ ID NO: 2781816 - DNA, 25 bp, Homo sapien
cattgttgaaaaggacaccgacggt

SEQ ID NO: 2781817 - DNA, 25 bp, Homo sapien
gtgtggtctgagagctggtacccaa

SEQ ID NO: 2781818 - DNA, 25 bp, Homo sapien
ggctcatgtgagcaccattgttgaa

SEQ ID NO: 2781819 - DNA, 25 bp, Homo sapien
caacccatttggtgacccactgaaa

SEQ ID NO: 2781820 - DNA, 25 bp, Homo sapien
acacttcccatggtactgtcttcaa

SEQ ID NO: 2781821 - DNA, 25 bp, Homo sapien
cactgtgtctgcaacacttcccatg

SEQ ID NO: 2781822 - DNA, 25 bp, Homo sapien
cccgaagaacccttgccactgtgtc

SEQ ID NO: 2781823 - DNA, 25 bp, Homo sapien
tgtctgcaacacttcccatggtact

SEQ ID NO: 2781824 - DNA, 25 bp, Homo sapien
tcgaaagacatagaactcaagatta

SEQ ID NO: 2781825 - DNA, 25 bp, Homo sapien
tagatgctaagtttcactccattaa

SEQ ID NO: 2781826 - DNA, 25 bp, Homo sapien
tatgtatttagcactggcatttcga

SEQ ID NO: 2781827 - DNA, 25 bp, Homo sapien
tatttaaaatacgattgacaaccac

SEQ ID NO: 2781828 - DNA, 25 bp, Homo sapien
gcttgttttctactgcgggtgttcc

SEQ ID NO: 2781829 - DNA, 25 bp, Homo sapien
tctgactatcatccgaatagcatcc

SEQ ID NO: 2781830 - DNA, 25 bp, Homo sapien
tttctactgcgggtgttccagacct

SEQ ID NO: 2781831 - DNA, 25 bp, Homo sapien
tcatccgaatagcatccccaatctg

SEQ ID NO: 2781832 - DNA, 25 bp, Homo sapien
ttgctgggaaagctcatcaaaaagc

SEQ ID NO: 2781833 - DNA, 25 bp, Homo sapien
taacgcagtaaactcacttgcatgc

SEQ ID NO: 2781834 - DNA, 25 bp, Homo sapien
tccagattaagatgagagtgaggca

SEQ ID NO: 2781835 - DNA, 25 bp, Homo sapien
caagccagataaaagataacgcagt

SEQ ID NO: 2781836 - DNA, 25 bp, Homo sapien
ttgctgagttattgaagtctttttc

SEQ ID NO: 2781837 - DNA, 25 bp, Homo sapien
tcaaatcatgcctaagcttgtagat

SEQ ID NO: 2781838 - DNA, 25 bp, Homo sapien
ctgggttgctgagttattgaagtct

SEQ ID NO: 2781839 - DNA, 25 bp, Homo sapien
catgcctaagcttgtagatgtcttc

SEQ ID NO: 2781840 - DNA, 25 bp, Homo sapien
atgtgtgtcaatatatcttgctttg

SEQ ID NO: 2781841 - DNA, 25 bp, Homo sapien
tatgtgtgtcaatatatcttgcttt

SEQ ID NO: 2781842 - DNA, 25 bp, Homo sapien
gaaattcttagctgggcttgataag

SEQ ID NO: 2781843 - DNA, 25 bp, Homo sapien
ggcttgataagtggaaatctggaac

SEQ ID NO: 2781844 - DNA, 25 bp, Homo sapien
cagctagaagacagtctgtccggag

SEQ ID NO: 2781845 - DNA, 25 bp, Homo sapien
aaatctggaactgtatgacaacagc

SEQ ID NO: 2781846 - DNA, 25 bp, Homo sapien
actgggatcaataccaggtaattaa

SEQ ID NO: 2781847 - DNA, 25 bp, Homo sapien
taactgggatcaataccaggtaatt

SEQ ID NO: 2781848 - DNA, 25 bp, Homo sapien
tgggatcaataccaggtaattaaaa

SEQ ID NO: 2781849 - DNA, 25 bp, Homo sapien
gtaactgggatcaataccaggtaat

SEQ ID NO: 2781850 - DNA, 25 bp, Homo sapien
aaagtcatgtcgaatgatgtcatcc

SEQ ID NO: 2781851 - DNA, 25 bp, Homo sapien
tagcaattaagtgcttggcaggagc

SEQ ID NO: 2781852 - DNA, 25 bp, Homo sapien
catccaaactgggacgatcctctgg

SEQ ID NO: 2781853 - DNA, 25 bp, Homo sapien
tgaggacggcattgtataccttgct

SEQ ID NO: 2781854 - DNA, 25 bp, Homo sapien
taaagcaactcttttcaagtgttaa

SEQ ID NO: 2781855 - DNA, 25 bp, Homo sapien
agaaacacatctttagcaatggtca

SEQ ID NO: 2781856 - DNA, 25 bp, Homo sapien
gaaacacatctttagcaatggtcat

SEQ ID NO: 2781857 - DNA, 25 bp, Homo sapien
tagcaatggtcataaagcaactctt

SEQ ID NO: 2781858 - DNA, 25 bp, Homo sapien
gataatttggggtaccacatatcgt

SEQ ID NO: 2781859 - DNA, 25 bp, Homo sapien
ccatgtccttgtttgttgaggactt

SEQ ID NO: 2781860 - DNA, 25 bp, Homo sapien
gttgaggacttcaggagagagataa

SEQ ID NO: 2781861 - DNA, 25 bp, Homo sapien
ccagggcccaaatgtctgattcaca

SEQ ID NO: 2781862 - DNA, 25 bp, Homo sapien
tgagatctgaccaaatgagttttgg

SEQ ID NO: 2781863 - DNA, 25 bp, Homo sapien
cttgatgggagacaaaatcttaaac

SEQ ID NO: 2781864 - DNA, 25 bp, Homo sapien
ttctcttgacatgacttgatgggag

SEQ ID NO: 2781865 - DNA, 25 bp, Homo sapien
gagatcgtgttaggaactattccac

SEQ ID NO: 2781866 - DNA, 25 bp, Homo sapien
ttctgtgttccaagggttctagcct

SEQ ID NO: 2781867 - DNA, 25 bp, Homo sapien
ttccaagggttctagcctggctgcc

SEQ ID NO: 2781868 - DNA, 25 bp, Homo sapien
catggcttcattaataaaaaagttc

SEQ ID NO: 2781869 - DNA, 25 bp, Homo sapien
tagcctggctgccagaccgaagtcc

SEQ ID NO: 2781870 - DNA, 25 bp, Homo sapien
tcagcttttggcgtcaatgacttac

SEQ ID NO: 2781871 - DNA, 25 bp, Homo sapien
taacacaaaactcagcttttggcgt

SEQ ID NO: 2781872 - DNA, 25 bp, Homo sapien
atctgcctgaggtagtatcgaactt

SEQ ID NO: 2781873 - DNA, 25 bp, Homo sapien
gcctgaggtagtatcgaacttctgg

SEQ ID NO: 2781874 - DNA, 25 bp, Homo sapien
gtccagacacaatctgcctgaggta

SEQ ID NO: 2781875 - DNA, 25 bp, Homo sapien
tgaaggtatttcagtccagacacaa

SEQ ID NO: 2781876 - DNA, 25 bp, Homo sapien
ttctcaaataggagttgacacttac

SEQ ID NO: 2781877 - DNA, 25 bp, Homo sapien
tctttgaataccatgttaattcggg

SEQ ID NO: 2781878 - DNA, 25 bp, Homo sapien
taattcggggtaagcaaatgttctc

SEQ ID NO: 2781879 - DNA, 25 bp, Homo sapien
gctaaaatcccagataaaatactct

SEQ ID NO: 2781880 - DNA, 25 bp, Homo sapien
tcctcgaagtagtggtaaaactgca

SEQ ID NO: 2781881 - DNA, 25 bp, Homo sapien
tgcactacatgcttatgatgaagaa

SEQ ID NO: 2781882 - DNA, 25 bp, Homo sapien
ccttctactgcagtattccaagaga

SEQ ID NO: 2781883 - DNA, 25 bp, Homo sapien
attccaagagaatgtaaatgttttc

SEQ ID NO: 2781884 - DNA, 25 bp, Homo sapien
aagccagtgattacacatgcagaag

SEQ ID NO: 2781885 - DNA, 25 bp, Homo sapien
gtgattacacatgcagaagacattt

SEQ ID NO: 2781886 - DNA, 25 bp, Homo sapien
tactttactcaagagtcatacgcac

SEQ ID NO: 2781887 - DNA, 25 bp, Homo sapien
aagaaaatactttactcaagagtca

SEQ ID NO: 2781888 - DNA, 25 bp, Homo sapien
ctgtgaggaataatttttgcggcgt

SEQ ID NO: 2781889 - DNA, 25 bp, Homo sapien
tctgtcatctcgtaacattttgcaa

SEQ ID NO: 2781890 - DNA, 25 bp, Homo sapien
atttttgcggcgtagactttgttat

SEQ ID NO: 2781891 - DNA, 25 bp, Homo sapien
ctttgatgaggtttagctactctgc

SEQ ID NO: 2781892 - DNA, 25 bp, Homo sapien
tgaggatggcacaaaaatggacggc

SEQ ID NO: 2781893 - DNA, 25 bp, Homo sapien
gacttcgttaaagctccctcatgaa

SEQ ID NO: 2781894 - DNA, 25 bp, Homo sapien
gaaacaaagccgagacggaattgag

SEQ ID NO: 2781895 - DNA, 25 bp, Homo sapien
caggaaaattccctgggagcagata

SEQ ID NO: 2781896 - DNA, 25 bp, Homo sapien
tgcggcggccgcttcttcttcgagt

SEQ ID NO: 2781897 - DNA, 25 bp, Homo sapien
acgataatccgcgagatctccggcc

SEQ ID NO: 2781898 - DNA, 25 bp, Homo sapien
atctccggccccgagtgcgaatggt

SEQ ID NO: 2781899 - DNA, 25 bp, Homo sapien
cggcagtagcgcttcccagtcgtgg

SEQ ID NO: 2781900 - DNA, 25 bp, Homo sapien
ggccgtggtcctcgcacccttgcct

SEQ ID NO: 2781901 - DNA, 25 bp, Homo sapien
gtcacacgtccgagccggccgtggt

SEQ ID NO: 2781902 - DNA, 25 bp, Homo sapien
caccccggtccacttgtgcgagtga

SEQ ID NO: 2781903 - DNA, 25 bp, Homo sapien
ccacttgtgcgagtgagagcgctcg

SEQ ID NO: 2781904 - DNA, 25 bp, Homo sapien
tatgacagggctcgtctgcagctgc

SEQ ID NO: 2781905 - DNA, 25 bp, Homo sapien
tacaaaacagaatcgcgagggccga

SEQ ID NO: 2781906 - DNA, 25 bp, Homo sapien
ctgtgtcaaggtatcagggtgcccg

SEQ ID NO: 2781907 - DNA, 25 bp, Homo sapien
tgtcccgttcttcgaaggctccgag

SEQ ID NO: 2781908 - DNA, 25 bp, Homo sapien
catcgatgccgattgtgagtttcca

SEQ ID NO: 2781909 - DNA, 25 bp, Homo sapien
cgtgggcctttgacagttactagta

SEQ ID NO: 2781910 - DNA, 25 bp, Homo sapien
gattggaaagcaagggcgccatctt

SEQ ID NO: 2781911 - DNA, 25 bp, Homo sapien
cgcccgtagcccgaagattggaaag

SEQ ID NO: 2781912 - DNA, 25 bp, Homo sapien
gtctccatcagccatccagtgtctg

SEQ ID NO: 2781913 - DNA, 25 bp, Homo sapien
tcagccatccagtgtctggtccaca

SEQ ID NO: 2781914 - DNA, 25 bp, Homo sapien
catccagtgtctggtccacactaca

SEQ ID NO: 2781915 - DNA, 25 bp, Homo sapien
agtgtctggtccacactacagccct

SEQ ID NO: 2781916 - DNA, 25 bp, Homo sapien
tcatcaaagagtggggatcttgcca

SEQ ID NO: 2781917 - DNA, 25 bp, Homo sapien
tggtctcaaagctcagtgtggattc

SEQ ID NO: 2781918 - DNA, 25 bp, Homo sapien
gagcccccctgaatgggctttgtaa

SEQ ID NO: 2781919 - DNA, 25 bp, Homo sapien
tttgtaatttctcaacaagctggtc

SEQ ID NO: 2781920 - DNA, 25 bp, Homo sapien
ttacaacctctcagttacttctttg

SEQ ID NO: 2781921 - DNA, 25 bp, Homo sapien
gaccagggcctgtgggcagattggg

SEQ ID NO: 2781922 - DNA, 25 bp, Homo sapien
ctgtgggcagattgggatactgggc

SEQ ID NO: 2781923 - DNA, 25 bp, Homo sapien
tctcagttacttctttgaccagggc

SEQ ID NO: 2781924 - DNA, 25 bp, Homo sapien
tacaaccttcagtggagtggttctt

SEQ ID NO: 2781925 - DNA, 25 bp, Homo sapien
tggtattgtactcttgctccctctt

SEQ ID NO: 2781926 - DNA, 25 bp, Homo sapien
ctggtattgtactcttgctccctct

SEQ ID NO: 2781927 - DNA, 25 bp, Homo sapien
tctcttgtacaaccttcagtggagt

SEQ ID NO: 2781928 - DNA, 25 bp, Homo sapien
cctgcacattgacatcctgttaaag

SEQ ID NO: 2781929 - DNA, 25 bp, Homo sapien
tcctcttgcaagttctcctgcacat

SEQ ID NO: 2781930 - DNA, 25 bp, Homo sapien
ttgctccccatgactggaccattgt

SEQ ID NO: 2781931 - DNA, 25 bp, Homo sapien
acatcactctcctgttcagttcctt

SEQ ID NO: 2781932 - DNA, 25 bp, Homo sapien
tttccagcgtcttggccacttcttg

SEQ ID NO: 2781933 - DNA, 25 bp, Homo sapien
cagaagccaggattaggatttaaac

SEQ ID NO: 2781934 - DNA, 25 bp, Homo sapien
tgagttgtaagcagtgaactggttc

SEQ ID NO: 2781935 - DNA, 25 bp, Homo sapien
tggccacttcttgttccctgggcag

SEQ ID NO: 2781936 - DNA, 25 bp, Homo sapien
aaattgcttcacttgtggtctcagc

SEQ ID NO: 2781937 - DNA, 25 bp, Homo sapien
cattcgtatgctgtcaaattgcttc

SEQ ID NO: 2781938 - DNA, 25 bp, Homo sapien
ggtctcagcaagattagggctgttt

SEQ ID NO: 2781939 - DNA, 25 bp, Homo sapien
gtctgtaaacctctttgacattcgt

SEQ ID NO: 2781940 - DNA, 25 bp, Homo sapien
aagagcctgagtgggaaagcgctcc

SEQ ID NO: 2781941 - DNA, 25 bp, Homo sapien
caaactggattagtagatttgcaac

SEQ ID NO: 2781942 - DNA, 25 bp, Homo sapien
tcttgtcacgtgctgcatagggatt

SEQ ID NO: 2781943 - DNA, 25 bp, Homo sapien
ctacttgatggtttgctttcttgtc

SEQ ID NO: 2781944 - DNA, 25 bp, Homo sapien
ggcaggtgacaaatatgatgaatcc

SEQ ID NO: 2781945 - DNA, 25 bp, Homo sapien
agcaacagtcttcccagttctgaga

SEQ ID NO: 2781946 - DNA, 25 bp, Homo sapien
tacaaactgggcaactgagtggaga

SEQ ID NO: 2781947 - DNA, 25 bp, Homo sapien
cctccatttgctttacaaactgggc

SEQ ID NO: 2781948 - DNA, 25 bp, Homo sapien
tggcctggaagtgcagtgccttgaa

SEQ ID NO: 2781949 - DNA, 25 bp, Homo sapien
ctgccactctcacactaaccctcat

SEQ ID NO: 2781950 - DNA, 25 bp, Homo sapien
tggcacagctccctagatctacact

SEQ ID NO: 2781951 - DNA, 25 bp, Homo sapien
gatctacacttgcaagtgtggcctg

SEQ ID NO: 2781952 - DNA, 25 bp, Homo sapien
tgcaggagtttgctgtctgctctgt

SEQ ID NO: 2781953 - DNA, 25 bp, Homo sapien
ctgcaggagtttgctgtctgctctg

SEQ ID NO: 2781954 - DNA, 25 bp, Homo sapien
gcaggagtttgctgtctgctctgtt

SEQ ID NO: 2781955 - DNA, 25 bp, Homo sapien
aaattgtagatagagcagagaaagc

SEQ ID NO: 2781956 - DNA, 25 bp, Homo sapien
gatattgtgcccttttcttggaaat

SEQ ID NO: 2781957 - DNA, 25 bp, Homo sapien
ctcactctctctatttctggatagt

SEQ ID NO: 2781958 - DNA, 25 bp, Homo sapien
tgggaggtctcctttaggtcttaga

SEQ ID NO: 2781959 - DNA, 25 bp, Homo sapien
gaagcctgagctgcggtcagggcag

SEQ ID NO: 2781960 - DNA, 25 bp, Homo sapien
tggaagcctgagctgcggtcagggc

SEQ ID NO: 2781961 - DNA, 25 bp, Homo sapien
tccccaggaagaaactgcgacttct

SEQ ID NO: 2781962 - DNA, 25 bp, Homo sapien
cctgagctgcggtcagggcaggaag

SEQ ID NO: 2781963 - DNA, 25 bp, Homo sapien
gcaagttgcagaatagataagagta

SEQ ID NO: 2781964 - DNA, 25 bp, Homo sapien
gatacaaggtgttggcatttttcag

SEQ ID NO: 2781965 - DNA, 25 bp, Homo sapien
taaaatccgactcataaatatttga

SEQ ID NO: 2781966 - DNA, 25 bp, Homo sapien
gaagcagcacaatgatagtacaggc

SEQ ID NO: 2781967 - DNA, 25 bp, Homo sapien
ccatatccacactggttcataggaa

SEQ ID NO: 2781968 - DNA, 25 bp, Homo sapien
cccatatccacactggttcatagga

SEQ ID NO: 2781969 - DNA, 25 bp, Homo sapien
cccccatatccacactggttcatag

SEQ ID NO: 2781970 - DNA, 25 bp, Homo sapien
gacccccatatccacactggttcat

SEQ ID NO: 2781971 - DNA, 25 bp, Homo sapien
taattaatgaaagggcaatgtctgc

SEQ ID NO: 2781972 - DNA, 25 bp, Homo sapien
gaatttagcagctcatataggaggg

SEQ ID NO: 2781973 - DNA, 25 bp, Homo sapien
aatgtctgcaggaatagcactgcca

SEQ ID NO: 2781974 - DNA, 25 bp, Homo sapien
ttcaggcctgtttgaatttagcagc

SEQ ID NO: 2781975 - DNA, 25 bp, Homo sapien
aaaatgtatacccttctctagaggc

SEQ ID NO: 2781976 - DNA, 25 bp, Homo sapien
aaaactggacaggacatggtgtgga

SEQ ID NO: 2781977 - DNA, 25 bp, Homo sapien
tatacctagagttatgcatactggc

SEQ ID NO: 2781978 - DNA, 25 bp, Homo sapien
gcaaaagcccaatgtgtgaagcaat

SEQ ID NO: 2781979 - DNA, 25 bp, Homo sapien
tctttaatcataagtgaatcttcca

SEQ ID NO: 2781980 - DNA, 25 bp, Homo sapien
tttataccatgattcgattagtgtg

SEQ ID NO: 2781981 - DNA, 25 bp, Homo sapien
catgattcgattagtgtgtggaact

SEQ ID NO: 2781982 - DNA, 25 bp, Homo sapien
aatcacatttataccatgattcgat

SEQ ID NO: 2781983 - DNA, 25 bp, Homo sapien
gactggtagtacaatcaaaagagca

SEQ ID NO: 2781984 - DNA, 25 bp, Homo sapien
gatgactgtacgtaacctgatgtgc

SEQ ID NO: 2781985 - DNA, 25 bp, Homo sapien
tgttagggctctctcgctgcatagt

SEQ ID NO: 2781986 - DNA, 25 bp, Homo sapien
aatgctggttcccttatggaggacc

SEQ ID NO: 2781987 - DNA, 25 bp, Homo sapien
gtctccatcctgtgttgggagctca

SEQ ID NO: 2781988 - DNA, 25 bp, Homo sapien
tggttggtctccatcctgtgttggg

SEQ ID NO: 2781989 - DNA, 25 bp, Homo sapien
atcctgtgttgggagctcagccacc

SEQ ID NO: 2781990 - DNA, 25 bp, Homo sapien
ctggttggtctccatcctgtgttgg

SEQ ID NO: 2781991 - DNA, 25 bp, Homo sapien
gtaatcacataccactatgtccgtc

SEQ ID NO: 2781992 - DNA, 25 bp, Homo sapien
cataccactatgtccgtctacagtg

SEQ ID NO: 2781993 - DNA, 25 bp, Homo sapien
tatttatctatgaatagtaatcaca

SEQ ID NO: 2781994 - DNA, 25 bp, Homo sapien
tccgtctacagtgcacattagaaaa

SEQ ID NO: 2781995 - DNA, 25 bp, Homo sapien
actgggtaccttgattgaggctggt

SEQ ID NO: 2781996 - DNA, 25 bp, Homo sapien
tgattgaggctggtactgattcaag

SEQ ID NO: 2781997 - DNA, 25 bp, Homo sapien
tgaggctggtactgattcaagagct

SEQ ID NO: 2781998 - DNA, 25 bp, Homo sapien
ggtaccttgattgaggctggtactg

SEQ ID NO: 2781999 - DNA, 25 bp, Homo sapien
ctgtgttagttggcccaaaagcttc

SEQ ID NO: 2782000 - DNA, 25 bp, Homo sapien
aaagcttcgggcacagggaccccat

SEQ ID NO: 2782001 - DNA, 25 bp, Homo sapien
gaccccatcttcatgatggtcatga

SEQ ID NO: 2782002 - DNA, 25 bp, Homo sapien
gggaccccatcttcatgatggtcat

SEQ ID NO: 2782003 - DNA, 25 bp, Homo sapien
tttaagtagtatctccaaatgtgaa

SEQ ID NO: 2782004 - DNA, 25 bp, Homo sapien
tagttgtctcactttgcaccgaggg

SEQ ID NO: 2782005 - DNA, 25 bp, Homo sapien
gccagtcgtgacctgagaatgcact

SEQ ID NO: 2782006 - DNA, 25 bp, Homo sapien
catgaaggtgcttatcctacaggca

SEQ ID NO: 2782007 - DNA, 25 bp, Homo sapien
caccgagggagcaaagaccaagtat

SEQ ID NO: 2782008 - DNA, 25 bp, Homo sapien
cacgacctcatcaccatgcttgaaa

SEQ ID NO: 2782009 - DNA, 25 bp, Homo sapien
tgagatgcaggtctaagagcagacc

SEQ ID NO: 2782010 - DNA, 25 bp, Homo sapien
aagagtcaatgagcttttcaggatc

SEQ ID NO: 2782011 - DNA, 25 bp, Homo sapien
cttccataggctgtgtgagatgcag

SEQ ID NO: 2782012 - DNA, 25 bp, Homo sapien
cacttataggtgcaatcttggtggg

SEQ ID NO: 2782013 - DNA, 25 bp, Homo sapien
gcacacttataggtgcaatcttggt

SEQ ID NO: 2782014 - DNA, 25 bp, Homo sapien
ctatagttcttgagtccagcgttta

SEQ ID NO: 2782015 - DNA, 25 bp, Homo sapien
agtccagcgtttagggatgcattgg

SEQ ID NO: 2782016 - DNA, 25 bp, Homo sapien
aacagagagcgagagggcaggtgca

SEQ ID NO: 2782017 - DNA, 25 bp, Homo sapien
aagcctgctattagcagtaggtctg

SEQ ID NO: 2782018 - DNA, 25 bp, Homo sapien
ctgctattagcagtaggtctgaaag

SEQ ID NO: 2782019 - DNA, 25 bp, Homo sapien
cctgctattagcagtaggtctgaaa

SEQ ID NO: 2782020 - DNA, 25 bp, Homo sapien
gcctgctattagcagtaggtctgaa

SEQ ID NO: 2782021 - DNA, 25 bp, Homo sapien
aaagttcagggccattagtggctat

SEQ ID NO: 2782022 - DNA, 25 bp, Homo sapien
tgtgcttccctaaagaccttactaa

SEQ ID NO: 2782023 - DNA, 25 bp, Homo sapien
tagctcactgagagagttaatgtgc

SEQ ID NO: 2782024 - DNA, 25 bp, Homo sapien
tgtacttggcaagacatattaactc

SEQ ID NO: 2782025 - DNA, 25 bp, Homo sapien
aaggagctcagtgtgtagtgctgct

SEQ ID NO: 2782026 - DNA, 25 bp, Homo sapien
agcaaggagctcagtgtgtagtgct

SEQ ID NO: 2782027 - DNA, 25 bp, Homo sapien
tagcaaggagctcagtgtgtagtgc

SEQ ID NO: 2782028 - DNA, 25 bp, Homo sapien
caaggagctcagtgtgtagtgctgc

SEQ ID NO: 2782029 - DNA, 25 bp, Homo sapien
tctttaggtaatggcttctcagcaa

SEQ ID NO: 2782030 - DNA, 25 bp, Homo sapien
aactggagctgcctcccgttggaaa

SEQ ID NO: 2782031 - DNA, 25 bp, Homo sapien
gctgcctcccgttggaaaagataaa

SEQ ID NO: 2782032 - DNA, 25 bp, Homo sapien
aagagtcagattggtggagatgtct

SEQ ID NO: 2782033 - DNA, 25 bp, Homo sapien
ggaccagaagtctcaagcagggttc

SEQ ID NO: 2782034 - DNA, 25 bp, Homo sapien
gacagtttctagcaaagatacaagc

SEQ ID NO: 2782035 - DNA, 25 bp, Homo sapien
agggttccaaggattacctctacag

SEQ ID NO: 2782036 - DNA, 25 bp, Homo sapien
caaggattacctctacagtcctgag

SEQ ID NO: 2782037 - DNA, 25 bp, Homo sapien
agcacattatactggcctgccactg

SEQ ID NO: 2782038 - DNA, 25 bp, Homo sapien
gggccttgaagggagctgttgataa

SEQ ID NO: 2782039 - DNA, 25 bp, Homo sapien
gccaagtggagatgactggagatta

SEQ ID NO: 2782040 - DNA, 25 bp, Homo sapien
gccttgaagggagctgttgataaag

SEQ ID NO: 2782041 - DNA, 25 bp, Homo sapien
aagcaaggaatttaatgcagaagcg

SEQ ID NO: 2782042 - DNA, 25 bp, Homo sapien
gaaagcaaggaatttaatgcagaag

SEQ ID NO: 2782043 - DNA, 25 bp, Homo sapien
caaggaatttaatgcagaagcgcat

SEQ ID NO: 2782044 - DNA, 25 bp, Homo sapien
gcaaggaatttaatgcagaagcgca

SEQ ID NO: 2782045 - DNA, 25 bp, Homo sapien
tggctggtgtacggtctcctgtggc

SEQ ID NO: 2782046 - DNA, 25 bp, Homo sapien
gctggtgtacggtctcctgtggcag

SEQ ID NO: 2782047 - DNA, 25 bp, Homo sapien
ctggctggtgtacggtctcctgtgg

SEQ ID NO: 2782048 - DNA, 25 bp, Homo sapien
ggctggtgtacggtctcctgtggca

SEQ ID NO: 2782049 - DNA, 25 bp, Homo sapien
gctggaccacagtgcaaagctcatg

SEQ ID NO: 2782050 - DNA, 25 bp, Homo sapien
ccctttcaggatcaggcatgaggaa

SEQ ID NO: 2782051 - DNA, 25 bp, Homo sapien
tagtgtcccgctgtacctgtagtgg

SEQ ID NO: 2782052 - DNA, 25 bp, Homo sapien
tatttggtccctaacatcaggtgaa

SEQ ID NO: 2782053 - DNA, 25 bp, Homo sapien
gtacaagttagtagttcatgttcca

SEQ ID NO: 2782054 - DNA, 25 bp, Homo sapien
tactagctgagcaacgaaatacttg

SEQ ID NO: 2782055 - DNA, 25 bp, Homo sapien
gcaaattacggagccattttctgcc

SEQ ID NO: 2782056 - DNA, 25 bp, Homo sapien
gaaatacttgagcaaattacggagc

SEQ ID NO: 2782057 - DNA, 25 bp, Homo sapien
aaagcagaacacgagactcaaggaa

SEQ ID NO: 2782058 - DNA, 25 bp, Homo sapien
tatactgcctaacaattatttgaag

SEQ ID NO: 2782059 - DNA, 25 bp, Homo sapien
ctagtgtccccgtgcacacaggcag

SEQ ID NO: 2782060 - DNA, 25 bp, Homo sapien
gcatttgtaaatggtctattagcct

SEQ ID NO: 2782061 - DNA, 25 bp, Homo sapien
tagtgaccgacatttagttgaaaac

SEQ ID NO: 2782062 - DNA, 25 bp, Homo sapien
caaaccatgagagattgtccgacct

SEQ ID NO: 2782063 - DNA, 25 bp, Homo sapien
cagtgactgcactgtggaactcttc

SEQ ID NO: 2782064 - DNA, 25 bp, Homo sapien
catgtttcccataaagggcattgga

SEQ ID NO: 2782065 - DNA, 25 bp, Homo sapien
ggagggaaggtgatcgtgtttctga

SEQ ID NO: 2782066 - DNA, 25 bp, Homo sapien
aggagggaaggtgatcgtgtttctg

SEQ ID NO: 2782067 - DNA, 25 bp, Homo sapien
gggaaggtgatcgtgtttctgaaaa

SEQ ID NO: 2782068 - DNA, 25 bp, Homo sapien
gagggaaggtgatcgtgtttctgaa

SEQ ID NO: 2782069 - DNA, 25 bp, Homo sapien
tcctcgagttctgcctttttattaa

SEQ ID NO: 2782070 - DNA, 25 bp, Homo sapien
tttcctaaaagcaggaactatgtct

SEQ ID NO: 2782071 - DNA, 25 bp, Homo sapien
gatcacatttgtaacctgaacaatg

SEQ ID NO: 2782072 - DNA, 25 bp, Homo sapien
aatggctatcagtacatcttttccc

SEQ ID NO: 2782073 - DNA, 25 bp, Homo sapien
cttccagcatcttcaactgtcaccc

SEQ ID NO: 2782074 - DNA, 25 bp, Homo sapien
cagcatcttcaactgtcaccccaag

SEQ ID NO: 2782075 - DNA, 25 bp, Homo sapien
tcatcatcagactgaagtgtcttac

SEQ ID NO: 2782076 - DNA, 25 bp, Homo sapien
catcagactgaagtgtcttacccat

SEQ ID NO: 2782077 - DNA, 25 bp, Homo sapien
gagagcctatggagcacttcagagc

SEQ ID NO: 2782078 - DNA, 25 bp, Homo sapien
gagccaatgccttcctagaaaacat

SEQ ID NO: 2782079 - DNA, 25 bp, Homo sapien
cctgtgtgcacttgaggaatttgcc

SEQ ID NO: 2782080 - DNA, 25 bp, Homo sapien
catatgagcgaatgcaaggtgacat

SEQ ID NO: 2782081 - DNA, 25 bp, Homo sapien
catctagtgcagtgtctctcaaggt

SEQ ID NO: 2782082 - DNA, 25 bp, Homo sapien
gagtgactcgtatgtgacaggcaca

SEQ ID NO: 2782083 - DNA, 25 bp, Homo sapien
caataacatttgaagaggtgccaga

SEQ ID NO: 2782084 - DNA, 25 bp, Homo sapien
gactcaagtaatcaagacagacctg

SEQ ID NO: 2782085 - DNA, 25 bp, Homo sapien
ccctcgtggagtgatgcggcagaaa

SEQ ID NO: 2782086 - DNA, 25 bp, Homo sapien
catggcaacataagcagggctaaga

SEQ ID NO: 2782087 - DNA, 25 bp, Homo sapien
tgaggatagacaccaccatggcaac

SEQ ID NO: 2782088 - DNA, 25 bp, Homo sapien
gaacagcattattgtgccctcgtgg

SEQ ID NO: 2782089 - DNA, 25 bp, Homo sapien
ccactcctgattgggctaaaggctt

SEQ ID NO: 2782090 - DNA, 25 bp, Homo sapien
gcccaggttcatcctaattgagctg

SEQ ID NO: 2782091 - DNA, 25 bp, Homo sapien
gccacagttcctgcacagctaagtg

SEQ ID NO: 2782092 - DNA, 25 bp, Homo sapien
gccgctgacttctatccctctggat

SEQ ID NO: 2782093 - DNA, 25 bp, Homo sapien
gtttaagggaacagagccgtttgca

SEQ ID NO: 2782094 - DNA, 25 bp, Homo sapien
gaaaaaggctctaaacattgtggca

SEQ ID NO: 2782095 - DNA, 25 bp, Homo sapien
gccgtttgcagagaaacaactctac

SEQ ID NO: 2782096 - DNA, 25 bp, Homo sapien
ggtgctaccaggctcctgcataaaa

SEQ ID NO: 2782097 - DNA, 25 bp, Homo sapien
tggtggacagttccctggactgcag

SEQ ID NO: 2782098 - DNA, 25 bp, Homo sapien
cccaagagtcttctatggtggacag

SEQ ID NO: 2782099 - DNA, 25 bp, Homo sapien
gagtcttctatggtggacagttccc

SEQ ID NO: 2782100 - DNA, 25 bp, Homo sapien
cagacacggcttcaaaaagcacagg

SEQ ID NO: 2782101 - DNA, 25 bp, Homo sapien
gatatctcacacaggatggttagca

SEQ ID NO: 2782102 - DNA, 25 bp, Homo sapien
gttcctgcttatttaccccactgag

SEQ ID NO: 2782103 - DNA, 25 bp, Homo sapien
tgtagtttgcggagtaggtaaccaa

SEQ ID NO: 2782104 - DNA, 25 bp, Homo sapien
gtggccctccggaacagatcaagtt

SEQ ID NO: 2782105 - DNA, 25 bp, Homo sapien
ttcagtatcctaagagacatgctga

SEQ ID NO: 2782106 - DNA, 25 bp, Homo sapien
tgatgtcactatcctttcatttcaa

SEQ ID NO: 2782107 - DNA, 25 bp, Homo sapien
tatgatgtcactatcctttcatttc

SEQ ID NO: 2782108 - DNA, 25 bp, Homo sapien
ttcatttcaaccacgttcagtatcc

SEQ ID NO: 2782109 - DNA, 25 bp, Homo sapien
tatttgtaaaagattgagtcataaa

SEQ ID NO: 2782110 - DNA, 25 bp, Homo sapien
tcttttatttgtaaaagattgagtc

SEQ ID NO: 2782111 - DNA, 25 bp, Homo sapien
cttttatttgtaaaagattgagtca

SEQ ID NO: 2782112 - DNA, 25 bp, Homo sapien
tttatttgtaaaagattgagtcata

SEQ ID NO: 2782113 - DNA, 25 bp, Homo sapien
tactatccccgtgggctgtaagaga

SEQ ID NO: 2782114 - DNA, 25 bp, Homo sapien
tgtacagtactatccccgtgggctg

SEQ ID NO: 2782115 - DNA, 25 bp, Homo sapien
gtattgatgtacagtactatccccg

SEQ ID NO: 2782116 - DNA, 25 bp, Homo sapien
tcatatgaaggtattgatgtacagt

SEQ ID NO: 2782117 - DNA, 25 bp, Homo sapien
catggataaggttcagacacacgct

SEQ ID NO: 2782118 - DNA, 25 bp, Homo sapien
tggatgtaaaatgcccagccctagc

SEQ ID NO: 2782119 - DNA, 25 bp, Homo sapien
cacatgattcaagggctgggcaagt

SEQ ID NO: 2782120 - DNA, 25 bp, Homo sapien
tggttaaagttaaggcacagccctg

SEQ ID NO: 2782121 - DNA, 25 bp, Homo sapien
tacaaaatgtagaggtcagtgcagc

SEQ ID NO: 2782122 - DNA, 25 bp, Homo sapien
tacgatattcctgagcgctggactg

SEQ ID NO: 2782123 - DNA, 25 bp, Homo sapien
ccttgctcggatgacatggaggtga

SEQ ID NO: 2782124 - DNA, 25 bp, Homo sapien
aacgctgttcgtgaagatgtccacc

SEQ ID NO: 2782125 - DNA, 25 bp, Homo sapien
gtgtcaggagaacgatcatctatga

SEQ ID NO: 2782126 - DNA, 25 bp, Homo sapien
atcatctatgacacaggcttcaggc

SEQ ID NO: 2782127 - DNA, 25 bp, Homo sapien
caggagaacgatcatctatgacaca

SEQ ID NO: 2782128 - DNA, 25 bp, Homo sapien
tcatctatgacacaggcttcaggct

SEQ ID NO: 2782129 - DNA, 25 bp, Homo sapien
caaagagtcttggagtcactgcagc

SEQ ID NO: 2782130 - DNA, 25 bp, Homo sapien
ggtggacgaggtctgcccatgtctc

SEQ ID NO: 2782131 - DNA, 25 bp, Homo sapien
ggtaccattcacgattgtcctccaa

SEQ ID NO: 2782132 - DNA, 25 bp, Homo sapien
tccaaaatatcctgggcgtcagggt

SEQ ID NO: 2782133 - DNA, 25 bp, Homo sapien
ctgtgatttttccacggaagcattg

SEQ ID NO: 2782134 - DNA, 25 bp, Homo sapien
tgttgggttgctcagatctgcacag

SEQ ID NO: 2782135 - DNA, 25 bp, Homo sapien
tctgcacagtgcaccatattctgaa

SEQ ID NO: 2782136 - DNA, 25 bp, Homo sapien
tctctcggtctccttggcggaagaa

SEQ ID NO: 2782137 - DNA, 25 bp, Homo sapien
cctatcggaataattatcaagaaga

SEQ ID NO: 2782138 - DNA, 25 bp, Homo sapien
gtcactttcttagtttcaaccatag

SEQ ID NO: 2782139 - DNA, 25 bp, Homo sapien
catagtcttcaaatcagccagtaga

SEQ ID NO: 2782140 - DNA, 25 bp, Homo sapien
ttcaaatcagccagtagattcatgt

SEQ ID NO: 2782141 - DNA, 25 bp, Homo sapien
cagccaaatgatggttctctaagac

SEQ ID NO: 2782142 - DNA, 25 bp, Homo sapien
gaagcaatttaaagcccacagccaa

SEQ ID NO: 2782143 - DNA, 25 bp, Homo sapien
tctaagactgaggaatcattgtaca

SEQ ID NO: 2782144 - DNA, 25 bp, Homo sapien
gatgtcaatgaccattttccttaaa

SEQ ID NO: 2782145 - DNA, 25 bp, Homo sapien
aaaaagacaaaaggccaaagatcag

SEQ ID NO: 2782146 - DNA, 25 bp, Homo sapien
aaagacaaaaggccaaagatcagca

SEQ ID NO: 2782147 - DNA, 25 bp, Homo sapien
gacaaaaggccaaagatcagcaaaa

SEQ ID NO: 2782148 - DNA, 25 bp, Homo sapien
aagacaaaaggccaaagatcagcaa

SEQ ID NO: 2782149 - DNA, 25 bp, Homo sapien
tgacacatggatgctcaagccatcc

SEQ ID NO: 2782150 - DNA, 25 bp, Homo sapien
caaccctgggatactttcctgtaca

SEQ ID NO: 2782151 - DNA, 25 bp, Homo sapien
gctgagaatgtgctggcttgacaca

SEQ ID NO: 2782152 - DNA, 25 bp, Homo sapien
gacaatgctgattcattccctcagg

SEQ ID NO: 2782153 - DNA, 25 bp, Homo sapien
gcaaaaattgctgcaagaatctcca

SEQ ID NO: 2782154 - DNA, 25 bp, Homo sapien
ctacatcatgtattgcactggcaaa

SEQ ID NO: 2782155 - DNA, 25 bp, Homo sapien
aaaaattgctgcaagaatctccaaa

SEQ ID NO: 2782156 - DNA, 25 bp, Homo sapien
caaaaattgctgcaagaatctccaa

SEQ ID NO: 2782157 - DNA, 25 bp, Homo sapien
catggatattgttgtgataggccac

SEQ ID NO: 2782158 - DNA, 25 bp, Homo sapien
gataggccacatcagcatggtaatg

SEQ ID NO: 2782159 - DNA, 25 bp, Homo sapien
acatgagtagactggacaacatctg

SEQ ID NO: 2782160 - DNA, 25 bp, Homo sapien
ccaaagcaggtgtagataatagcac

SEQ ID NO: 2782161 - DNA, 25 bp, Homo sapien
cagacaactctgctattctgaaaac

SEQ ID NO: 2782162 - DNA, 25 bp, Homo sapien
tcaagggccggttaccagacaactc

SEQ ID NO: 2782163 - DNA, 25 bp, Homo sapien
gaaaaatggtgtgcatgataacagt

SEQ ID NO: 2782164 - DNA, 25 bp, Homo sapien
ctctgctattctgaaaacatgaaga

SEQ ID NO: 2782165 - DNA, 25 bp, Homo sapien
cagactagagctgtgcatcaatttc

SEQ ID NO: 2782166 - DNA, 25 bp, Homo sapien
tgaattagtcagactagagctgtgc

SEQ ID NO: 2782167 - DNA, 25 bp, Homo sapien
gactccactgatctgagacattggt

SEQ ID NO: 2782168 - DNA, 25 bp, Homo sapien
ccaaaccttgggatacttgaattag

SEQ ID NO: 2782169 - DNA, 25 bp, Homo sapien
gaatgtgtttgatataaactctgac

SEQ ID NO: 2782170 - DNA, 25 bp, Homo sapien
gctcccgattaagcatccttttaaa

SEQ ID NO: 2782171 - DNA, 25 bp, Homo sapien
gatttccagaccgactcatttcaga

SEQ ID NO: 2782172 - DNA, 25 bp, Homo sapien
gagagatgggtgagctcccgattaa

SEQ ID NO: 2782173 - DNA, 25 bp, Homo sapien
ctggcggataatgagggcttcttat

SEQ ID NO: 2782174 - DNA, 25 bp, Homo sapien
tcagttgtgagctggctaaaagcta

SEQ ID NO: 2782175 - DNA, 25 bp, Homo sapien
ctaaaagctaggagctgaattctgg

SEQ ID NO: 2782176 - DNA, 25 bp, Homo sapien
aatcacagtacaaatgtgaagccct

SEQ ID NO: 2782177 - DNA, 25 bp, Homo sapien
gccccaagacactgacagtaaatag

SEQ ID NO: 2782178 - DNA, 25 bp, Homo sapien
tgacagtaaatagtttgcttcaggc

SEQ ID NO: 2782179 - DNA, 25 bp, Homo sapien
ctttatgtagccccaagacactgac

SEQ ID NO: 2782180 - DNA, 25 bp, Homo sapien
gacagtaaatagtttgcttcaggca

SEQ ID NO: 2782181 - DNA, 25 bp, Homo sapien
cacaagccacgcagagtatgagttt

SEQ ID NO: 2782182 - DNA, 25 bp, Homo sapien
tcgacactttaacaacctccacaag

SEQ ID NO: 2782183 - DNA, 25 bp, Homo sapien
agtatacataagaaagcctcgcatt

SEQ ID NO: 2782184 - DNA, 25 bp, Homo sapien
tagcttcaaaatctcgacactttaa

SEQ ID NO: 2782185 - DNA, 25 bp, Homo sapien
caagatgcttagttgcaagaaaggc

SEQ ID NO: 2782186 - DNA, 25 bp, Homo sapien
caagaaaggctagtcctgtcaaaag

SEQ ID NO: 2782187 - DNA, 25 bp, Homo sapien
tcccgagctccagggcttaatgaat

SEQ ID NO: 2782188 - DNA, 25 bp, Homo sapien
tgtaagactccagaatggcacaaaa

SEQ ID NO: 2782189 - DNA, 25 bp, Homo sapien
tctaggggtgggaccacttgcaatt

SEQ ID NO: 2782190 - DNA, 25 bp, Homo sapien
ttatgtatgacagagttctaaaacc

SEQ ID NO: 2782191 - DNA, 25 bp, Homo sapien
aaatctaggggtgggaccacttgca

SEQ ID NO: 2782192 - DNA, 25 bp, Homo sapien
attgttatgtatgacagagttctaa

SEQ ID NO: 2782193 - DNA, 25 bp, Homo sapien
cacagcaaacctccctggtgaaagg

SEQ ID NO: 2782194 - DNA, 25 bp, Homo sapien
tcactgtcccctgaaatttcctgaa

SEQ ID NO: 2782195 - DNA, 25 bp, Homo sapien
aaaggctgtcccatgtatcccagga

SEQ ID NO: 2782196 - DNA, 25 bp, Homo sapien
aaagtagttgggttctaggctcaga

SEQ ID NO: 2782197 - DNA, 25 bp, Homo sapien
taccatcagagaataacacctctac

SEQ ID NO: 2782198 - DNA, 25 bp, Homo sapien
ggataccaccaccaatcccccagag

SEQ ID NO: 2782199 - DNA, 25 bp, Homo sapien
taccaccaccaatcccccagagata

SEQ ID NO: 2782200 - DNA, 25 bp, Homo sapien
atcagagaataacacctctacacaa

SEQ ID NO: 2782201 - DNA, 25 bp, Homo sapien
taggaatctgctgcctcacggtcag

SEQ ID NO: 2782202 - DNA, 25 bp, Homo sapien
gcaaagggctttaaacatcagagtt

SEQ ID NO: 2782203 - DNA, 25 bp, Homo sapien
gataattctcaaagactcccactgt

SEQ ID NO: 2782204 - DNA, 25 bp, Homo sapien
tcaaggctctgccaggacctgtaat

SEQ ID NO: 2782205 - DNA, 25 bp, Homo sapien
tcattcattaacacacaacaggctt

SEQ ID NO: 2782206 - DNA, 25 bp, Homo sapien
tcatttcacctataagaacctctgg

SEQ ID NO: 2782207 - DNA, 25 bp, Homo sapien
cagtgaaaacctaaagactgggttg

SEQ ID NO: 2782208 - DNA, 25 bp, Homo sapien
gaacctctggagcagatacatgtca

SEQ ID NO: 2782209 - DNA, 25 bp, Homo sapien
taccggctgtggctagcgtcagact

SEQ ID NO: 2782210 - DNA, 25 bp, Homo sapien
caaagtccgactcctctgtaaagtg

SEQ ID NO: 2782211 - DNA, 25 bp, Homo sapien
tgtgcaatgattacagaggcctatg

SEQ ID NO: 2782212 - DNA, 25 bp, Homo sapien
tgaagtgaagacctacaggagaccc

SEQ ID NO: 2782213 - DNA, 25 bp, Homo sapien
gcaaaacgaggtactgtaggattcc

SEQ ID NO: 2782214 - DNA, 25 bp, Homo sapien
catcctgacatgacctagagaacaa

SEQ ID NO: 2782215 - DNA, 25 bp, Homo sapien
atacaaccagaggtcgggcacagtg

SEQ ID NO: 2782216 - DNA, 25 bp, Homo sapien
tcctaggaactagggccaggtcagt

SEQ ID NO: 2782217 - DNA, 25 bp, Homo sapien
taggttagtatctgctggccgtgtc

SEQ ID NO: 2782218 - DNA, 25 bp, Homo sapien
tagaattaagaactcaggcccatgg

SEQ ID NO: 2782219 - DNA, 25 bp, Homo sapien
gaaaaactactgtcgaatcaccttg

SEQ ID NO: 2782220 - DNA, 25 bp, Homo sapien
taaaggtgcctaatgctacagcagg

SEQ ID NO: 2782221 - DNA, 25 bp, Homo sapien
tacgacatgcacaggcaaatagcca

SEQ ID NO: 2782222 - DNA, 25 bp, Homo sapien
catctgcatacgacatgcacaggca

SEQ ID NO: 2782223 - DNA, 25 bp, Homo sapien
ggcaaatagccactaaaaacataca

SEQ ID NO: 2782224 - DNA, 25 bp, Homo sapien
ccttcagccatctgcatacgacatg

SEQ ID NO: 2782225 - DNA, 25 bp, Homo sapien
tatataaaggctcagttcttgcggg

SEQ ID NO: 2782226 - DNA, 25 bp, Homo sapien
cctgcggatatgtatggccaactga

SEQ ID NO: 2782227 - DNA, 25 bp, Homo sapien
gaaggttacttctcagccctcaaaa

SEQ ID NO: 2782228 - DNA, 25 bp, Homo sapien
gggtaccctgacaactagatgaatt

SEQ ID NO: 2782229 - DNA, 25 bp, Homo sapien
tgcaatgcccatggaccctactggg

SEQ ID NO: 2782230 - DNA, 25 bp, Homo sapien
caagggctcagtgttacttaggaac

SEQ ID NO: 2782231 - DNA, 25 bp, Homo sapien
gaacacctttaaacatgcaatgccc

SEQ ID NO: 2782232 - DNA, 25 bp, Homo sapien
gcttttggaaaatgtttatctggcg

SEQ ID NO: 2782233 - DNA, 25 bp, Homo sapien
ctccctctaaggagcagaatagcca

SEQ ID NO: 2782234 - DNA, 25 bp, Homo sapien
tctcaatttatttcccggggctatg

SEQ ID NO: 2782235 - DNA, 25 bp, Homo sapien
ctatgggtaccagtggctcgccggc

SEQ ID NO: 2782236 - DNA, 25 bp, Homo sapien
gcagtaagcctaaaaaacctctcaa

SEQ ID NO: 2782237 - DNA, 25 bp, Homo sapien
ctcactgacggagtgcctggtctgt

SEQ ID NO: 2782238 - DNA, 25 bp, Homo sapien
cagggtctcgctggccagtttctgg

SEQ ID NO: 2782239 - DNA, 25 bp, Homo sapien
cactgacggagtgcctggtctgtag

SEQ ID NO: 2782240 - DNA, 25 bp, Homo sapien
cctccagggtctcgctggccagttt

SEQ ID NO: 2782241 - DNA, 25 bp, Homo sapien
acgggtccgctagcgagttcaaagg

SEQ ID NO: 2782242 - DNA, 25 bp, Homo sapien
tctcaagcgcttcacgggtccgcta

SEQ ID NO: 2782243 - DNA, 25 bp, Homo sapien
actcagttctcaagcgcttcacggg

SEQ ID NO: 2782244 - DNA, 25 bp, Homo sapien
cacgggtccgctagcgagttcaaag

SEQ ID NO: 2782245 - DNA, 25 bp, Homo sapien
gcccggtgccggcacatgagggctg

SEQ ID NO: 2782246 - DNA, 25 bp, Homo sapien
catgctcggatgcccggtgccggca

SEQ ID NO: 2782247 - DNA, 25 bp, Homo sapien
tcggatgcccggtgccggcacatga

SEQ ID NO: 2782248 - DNA, 25 bp, Homo sapien
gctcggatgcccggtgccggcacat

SEQ ID NO: 2782249 - DNA, 25 bp, Homo sapien
aaagagcggcgagccaactttcaca

SEQ ID NO: 2782250 - DNA, 25 bp, Homo sapien
gacgcgagcggaaaaaccactatgc

SEQ ID NO: 2782251 - DNA, 25 bp, Homo sapien
tatgcgacttttcaactgtgcggcg

SEQ ID NO: 2782252 - DNA, 25 bp, Homo sapien
ggaggcacggtctctccagcttggc

SEQ ID NO: 2782253 - DNA, 25 bp, Homo sapien
gggaggagggagtccgctggcattg

SEQ ID NO: 2782254 - DNA, 25 bp, Homo sapien
aacttggatgtaggtcttcaaggaa

SEQ ID NO: 2782255 - DNA, 25 bp, Homo sapien
ggagggagtccgctggcattgtttt

SEQ ID NO: 2782256 - DNA, 25 bp, Homo sapien
agggagtccgctggcattgttttca

SEQ ID NO: 2782257 - DNA, 25 bp, Homo sapien
gctaatttcaattggcatattttgt

SEQ ID NO: 2782258 - DNA, 25 bp, Homo sapien
tgctaatttcaattggcatattttg

SEQ ID NO: 2782259 - DNA, 25 bp, Homo sapien
atgctaatttcaattggcatatttt

SEQ ID NO: 2782260 - DNA, 25 bp, Homo sapien
accttcaaggccaccgctaacaaga

SEQ ID NO: 2782261 - DNA, 25 bp, Homo sapien
ccttcaaggccaccgctaacaagac

SEQ ID NO: 2782262 - DNA, 25 bp, Homo sapien
tatatgatgtgctagaaacttccct

SEQ ID NO: 2782263 - DNA, 25 bp, Homo sapien
ggcagagactgctaaatgtccccta

SEQ ID NO: 2782264 - DNA, 25 bp, Homo sapien
tggagtcggagcagccatattggat

SEQ ID NO: 2782265 - DNA, 25 bp, Homo sapien
tcctttcccaaattgcaggtggaga

SEQ ID NO: 2782266 - DNA, 25 bp, Homo sapien
tggttgtgttgcagggtcagaatga

SEQ ID NO: 2782267 - DNA, 25 bp, Homo sapien
aatagtgaagggatggttgtgttgc

SEQ ID NO: 2782268 - DNA, 25 bp, Homo sapien
ttacccactggttgacactccctcc

SEQ ID NO: 2782269 - DNA, 25 bp, Homo sapien
aagtagagaccttcactgaaatagt

SEQ ID NO: 2782270 - DNA, 25 bp, Homo sapien
tgggttattctaacactcagtgtat

SEQ ID NO: 2782271 - DNA, 25 bp, Homo sapien
gggttattctaacactcagtgtatc

SEQ ID NO: 2782272 - DNA, 25 bp, Homo sapien
gccttctgagcaagccaatttttta

SEQ ID NO: 2782273 - DNA, 25 bp, Homo sapien
gttattctaacactcagtgtatcag

SEQ ID NO: 2782274 - DNA, 25 bp, Homo sapien
gcagtagatatcctcccaattggag

SEQ ID NO: 2782275 - DNA, 25 bp, Homo sapien
cagcatccacttatttggaattggg

SEQ ID NO: 2782276 - DNA, 25 bp, Homo sapien
tggagattccgcaaaattagtactt

SEQ ID NO: 2782277 - DNA, 25 bp, Homo sapien
tctagagagcagtttttaagaacag

SEQ ID NO: 2782278 - DNA, 25 bp, Homo sapien
ttttcaactcttgatcaacctgatg

SEQ ID NO: 2782279 - DNA, 25 bp, Homo sapien
atcaacctgatgagaattctttgaa

SEQ ID NO: 2782280 - DNA, 25 bp, Homo sapien
cctgatgagaattctttgaataaac

SEQ ID NO: 2782281 - DNA, 25 bp, Homo sapien
tgagaattctttgaataaaccagaa

SEQ ID NO: 2782282 - DNA, 25 bp, Homo sapien
tacttcaaaagctccaacaacatag

SEQ ID NO: 2782283 - DNA, 25 bp, Homo sapien
tcaaagcagtaatgtgccccaagct

SEQ ID NO: 2782284 - DNA, 25 bp, Homo sapien
taaaagataccacaattcaaagcag

SEQ ID NO: 2782285 - DNA, 25 bp, Homo sapien
aaaatgtggaatgtgaggaacgccc

SEQ ID NO: 2782286 - DNA, 25 bp, Homo sapien
gatttgtcaagagctcctaatattt

SEQ ID NO: 2782287 - DNA, 25 bp, Homo sapien
ctactctggaggtctgctgcaagga

SEQ ID NO: 2782288 - DNA, 25 bp, Homo sapien
tctcaaacacatcttaggactacca

SEQ ID NO: 2782289 - DNA, 25 bp, Homo sapien
taccatgcatatcagtcagtcagct

SEQ ID NO: 2782290 - DNA, 25 bp, Homo sapien
aattgctaatgctttactctggtct

SEQ ID NO: 2782291 - DNA, 25 bp, Homo sapien
gcatgacctcagaatgtgtcagtgt

SEQ ID NO: 2782292 - DNA, 25 bp, Homo sapien
tccatagtaagacagtagttgcaca

SEQ ID NO: 2782293 - DNA, 25 bp, Homo sapien
tactctggtctatttcctgcatgac

SEQ ID NO: 2782294 - DNA, 25 bp, Homo sapien
aatactggcatttaccctatctgca

SEQ ID NO: 2782295 - DNA, 25 bp, Homo sapien
tacctaccattgtgctgaaaacccc

SEQ ID NO: 2782296 - DNA, 25 bp, Homo sapien
cactgaaaccagaaacccatgtaca

SEQ ID NO: 2782297 - DNA, 25 bp, Homo sapien
tgtagtaggctctgaactggttttc

SEQ ID NO: 2782298 - DNA, 25 bp, Homo sapien
gagaaagatcatcaagtgatgcccc

SEQ ID NO: 2782299 - DNA, 25 bp, Homo sapien
accctaagattaatagtcctgtcct

SEQ ID NO: 2782300 - DNA, 25 bp, Homo sapien
gattaatagtcctgtccttgagaaa

SEQ ID NO: 2782301 - DNA, 25 bp, Homo sapien
gtataaattgtgtcaaaattgaaga

SEQ ID NO: 2782302 - DNA, 25 bp, Homo sapien
tactctaacttatttggcctttggc

SEQ ID NO: 2782303 - DNA, 25 bp, Homo sapien
gatgaattcgcctctcttattgcca

SEQ ID NO: 2782304 - DNA, 25 bp, Homo sapien
tccagtgataagcatatggcaagca

SEQ ID NO: 2782305 - DNA, 25 bp, Homo sapien
gcctttggctccctaaagggtgctc

SEQ ID NO: 2782306 - DNA, 25 bp, Homo sapien
aatgcaatgatcccattatagagcc

SEQ ID NO: 2782307 - DNA, 25 bp, Homo sapien
cagaaagacttactgcttggaggca

SEQ ID NO: 2782308 - DNA, 25 bp, Homo sapien
cagtcagttatatgccccaggcgca

SEQ ID NO: 2782309 - DNA, 25 bp, Homo sapien
taggcactgtagcaaactaggagag

SEQ ID NO: 2782310 - DNA, 25 bp, Homo sapien
tacagttgacgagccctatccatga

SEQ ID NO: 2782311 - DNA, 25 bp, Homo sapien
ttatctcttcttcgattatggccat

SEQ ID NO: 2782312 - DNA, 25 bp, Homo sapien
tcttatctcttcttcgattatggcc

SEQ ID NO: 2782313 - DNA, 25 bp, Homo sapien
cttatctcttcttcgattatggcca

SEQ ID NO: 2782314 - DNA, 25 bp, Homo sapien
gagagttcacatgaggaatccacat

SEQ ID NO: 2782315 - DNA, 25 bp, Homo sapien
gcacagactgcaaaatagaatggtt

SEQ ID NO: 2782316 - DNA, 25 bp, Homo sapien
cctgagttgccagggaagaaattct

SEQ ID NO: 2782317 - DNA, 25 bp, Homo sapien
gaaagcaggtcatctcagctaagcc

SEQ ID NO: 2782318 - DNA, 25 bp, Homo sapien
aagcaatgtgtgtcggaaacacccc

SEQ ID NO: 2782319 - DNA, 25 bp, Homo sapien
caaagcaatgtgtgtcggaaacacc

SEQ ID NO: 2782320 - DNA, 25 bp, Homo sapien
tacaaagcaatgtgtgtcggaaaca

SEQ ID NO: 2782321 - DNA, 25 bp, Homo sapien
attacaaagcaatgtgtgtcggaaa

SEQ ID NO: 2782322 - DNA, 25 bp, Homo sapien
ctctgcacgtactccacggctgcag

SEQ ID NO: 2782323 - DNA, 25 bp, Homo sapien
tctgcacgtactccacggctgcagg

SEQ ID NO: 2782324 - DNA, 25 bp, Homo sapien
aaaggagataccaacccagagctgt

SEQ ID NO: 2782325 - DNA, 25 bp, Homo sapien
aaggagataccaacccagagctgtt

SEQ ID NO: 2782326 - DNA, 25 bp, Homo sapien
aagtagagaaagtgactggaaagct

SEQ ID NO: 2782327 - DNA, 25 bp, Homo sapien
gaagtagagaaagtgactggaaagc

SEQ ID NO: 2782328 - DNA, 25 bp, Homo sapien
gacctctcaaggagttaaattccaa

SEQ ID NO: 2782329 - DNA, 25 bp, Homo sapien
aagtgtaggctccataatagctagc

SEQ ID NO: 2782330 - DNA, 25 bp, Homo sapien
gactaagtaattcatgacctctcaa

SEQ ID NO: 2782331 - DNA, 25 bp, Homo sapien
gagaactggcttgctagcataccac

SEQ ID NO: 2782332 - DNA, 25 bp, Homo sapien
gatgtctcctttgatccagtagcta

SEQ ID NO: 2782333 - DNA, 25 bp, Homo sapien
ttatttagccctgcctctatgcctg

SEQ ID NO: 2782334 - DNA, 25 bp, Homo sapien
tgtcttcagccatgagcaatagtgt

SEQ ID NO: 2782335 - DNA, 25 bp, Homo sapien
ttcatctggaagtcacacatagtct

SEQ ID NO: 2782336 - DNA, 25 bp, Homo sapien
caattcgaatcatagacagggaggg

SEQ ID NO: 2782337 - DNA, 25 bp, Homo sapien
aattagtgtgcagtgaacctgagcc

SEQ ID NO: 2782338 - DNA, 25 bp, Homo sapien
gaagtacagccagaccttagggaaa

SEQ ID NO: 2782339 - DNA, 25 bp, Homo sapien
aatcaatcaattaaggcctgggaag

SEQ ID NO: 2782340 - DNA, 25 bp, Homo sapien
catgcaagcgtccacagtaatgtgc

SEQ ID NO: 2782341 - DNA, 25 bp, Homo sapien
tcaaagacttcgtaacctccaagac

SEQ ID NO: 2782342 - DNA, 25 bp, Homo sapien
ggagggccgtgagcctgccttttta

SEQ ID NO: 2782343 - DNA, 25 bp, Homo sapien
tgaaatcacaacatgcctgcagtgt

SEQ ID NO: 2782344 - DNA, 25 bp, Homo sapien
aagagagaaaaacgccaaccctgag

SEQ ID NO: 2782345 - DNA, 25 bp, Homo sapien
caagagagaaaaacgccaaccctga

SEQ ID NO: 2782346 - DNA, 25 bp, Homo sapien
tatgtgactcagaatactctgctgg

SEQ ID NO: 2782347 - DNA, 25 bp, Homo sapien
tgactcagaatactctgctgggaat

SEQ ID NO: 2782348 - DNA, 25 bp, Homo sapien
gacttcctacagaaagacaacttca

SEQ ID NO: 2782349 - DNA, 25 bp, Homo sapien
caagccatctagtctcttgccttca

SEQ ID NO: 2782350 - DNA, 25 bp, Homo sapien
cttcatttgatattattcacaagcc

SEQ ID NO: 2782351 - DNA, 25 bp, Homo sapien
gattacattgtctaagacttcctac

SEQ ID NO: 2782352 - DNA, 25 bp, Homo sapien
gcatttatgcctagaaacatgtaag

SEQ ID NO: 2782353 - DNA, 25 bp, Homo sapien
gatgttgtcattcttgcatttatgc

SEQ ID NO: 2782354 - DNA, 25 bp, Homo sapien
ctaagtttcataggccttgatgttg

SEQ ID NO: 2782355 - DNA, 25 bp, Homo sapien
atgtaagtctgagatgtaaattgca

SEQ ID NO: 2782356 - DNA, 25 bp, Homo sapien
cctgttgtctctgcacaagcctgaa

SEQ ID NO: 2782357 - DNA, 25 bp, Homo sapien
tgcacaagcctgaaaactcaggtaa

SEQ ID NO: 2782358 - DNA, 25 bp, Homo sapien
aatgaatgaatattaggctgataat

SEQ ID NO: 2782359 - DNA, 25 bp, Homo sapien
tgggaacacaatcttgcaacctggc

SEQ ID NO: 2782360 - DNA, 25 bp, Homo sapien
ctgttgagcagtgcaataggattac

SEQ ID NO: 2782361 - DNA, 25 bp, Homo sapien
taggattacattggtagtataattg

SEQ ID NO: 2782362 - DNA, 25 bp, Homo sapien
tattcaagttagaagtatactcccc

SEQ ID NO: 2782363 - DNA, 25 bp, Homo sapien
gtataattgaataaggctctgtaca

SEQ ID NO: 2782364 - DNA, 25 bp, Homo sapien
tttctggcccatatagcagggatcc

SEQ ID NO: 2782365 - DNA, 25 bp, Homo sapien
gaccactgctgtatagctacaacac

SEQ ID NO: 2782366 - DNA, 25 bp, Homo sapien
ggccaaatcagaacctagagtgagc

SEQ ID NO: 2782367 - DNA, 25 bp, Homo sapien
tacaacactcaagaatacatggcag

SEQ ID NO: 2782368 - DNA, 25 bp, Homo sapien
tatcactaggccttgcaaaggaaca

SEQ ID NO: 2782369 - DNA, 25 bp, Homo sapien
tatttagagtcctgtcatgtgggag

SEQ ID NO: 2782370 - DNA, 25 bp, Homo sapien
tggtaccaagagtgactacaagtga

SEQ ID NO: 2782371 - DNA, 25 bp, Homo sapien
tgggaggtccaaattcagagcctta

SEQ ID NO: 2782372 - DNA, 25 bp, Homo sapien
tcaagagctttgattagggcctggc

SEQ ID NO: 2782373 - DNA, 25 bp, Homo sapien
caattcatgggtttaccagcagcca

SEQ ID NO: 2782374 - DNA, 25 bp, Homo sapien
tgggcaccacttctaccttagggag

SEQ ID NO: 2782375 - DNA, 25 bp, Homo sapien
tggtaaccgagctgatccagtgagg

SEQ ID NO: 2782376 - DNA, 25 bp, Homo sapien
tcgacattcatcacaacaactctct

SEQ ID NO: 2782377 - DNA, 25 bp, Homo sapien
cattcatcacaacaactctctgtgc

SEQ ID NO: 2782378 - DNA, 25 bp, Homo sapien
tctctcgacattcatcacaacaact

SEQ ID NO: 2782379 - DNA, 25 bp, Homo sapien
cacctctctcgacattcatcacaac

SEQ ID NO: 2782380 - DNA, 25 bp, Homo sapien
gcaacagagatcgaccatttaagaa

SEQ ID NO: 2782381 - DNA, 25 bp, Homo sapien
catggatgatgggaaggcttgaaaa

SEQ ID NO: 2782382 - DNA, 25 bp, Homo sapien
taaatttgctggcatcatggaaggc

SEQ ID NO: 2782383 - DNA, 25 bp, Homo sapien
ggctttgggtaccacacgaaagaga

SEQ ID NO: 2782384 - DNA, 25 bp, Homo sapien
ttcaaggtcagccaaatcatctgcc

SEQ ID NO: 2782385 - DNA, 25 bp, Homo sapien
gggttagaatttccaccagtcagca

SEQ ID NO: 2782386 - DNA, 25 bp, Homo sapien
tcaaagtgactaaacagctgtagtt

SEQ ID NO: 2782387 - DNA, 25 bp, Homo sapien
ttaatgacattaatacccaggatgg

SEQ ID NO: 2782388 - DNA, 25 bp, Homo sapien
catgtcaagtaacgtatatgggttc

SEQ ID NO: 2782389 - DNA, 25 bp, Homo sapien
tcacatgtcaagtaacgtatatggg

SEQ ID NO: 2782390 - DNA, 25 bp, Homo sapien
cgtatatgggttcaattccatccag

SEQ ID NO: 2782391 - DNA, 25 bp, Homo sapien
agtaacgtatatgggttcaattcca

SEQ ID NO: 2782392 - DNA, 25 bp, Homo sapien
gtttctgtccctaatattttgttgc

SEQ ID NO: 2782393 - DNA, 25 bp, Homo sapien
tatacaatcgagtccctgaacatgt

SEQ ID NO: 2782394 - DNA, 25 bp, Homo sapien
tcaagtccacatgaagacttctgcc

SEQ ID NO: 2782395 - DNA, 25 bp, Homo sapien
tgctctgggcaaccatcaagtccac

SEQ ID NO: 2782396 - DNA, 25 bp, Homo sapien
ccgggttcaagccattttcgtgcct

SEQ ID NO: 2782397 - DNA, 25 bp, Homo sapien
agtggcatgatctcacctctgcctc

SEQ ID NO: 2782398 - DNA, 25 bp, Homo sapien
gtgccaccatgcctccatgcctggc

SEQ ID NO: 2782399 - DNA, 25 bp, Homo sapien
ggcctcaatcgatccgcctgcctcg

SEQ ID NO: 2782400 - DNA, 25 bp, Homo sapien
ttaatgacaggtaccatctggatct

SEQ ID NO: 2782401 - DNA, 25 bp, Homo sapien
tcagaggaactgagttctcaggata

SEQ ID NO: 2782402 - DNA, 25 bp, Homo sapien
cattaatgacaggtaccatctggat

SEQ ID NO: 2782403 - DNA, 25 bp, Homo sapien
gttctcaggatacattaatgacagg

SEQ ID NO: 2782404 - DNA, 25 bp, Homo sapien
tctctgatccactggtcttagatac

SEQ ID NO: 2782405 - DNA, 25 bp, Homo sapien
ccagtaaagagaaacagcaagggag

SEQ ID NO: 2782406 - DNA, 25 bp, Homo sapien
tcttagatacattggccttctcctt

SEQ ID NO: 2782407 - DNA, 25 bp, Homo sapien
tgatccactggtcttagatacattg

SEQ ID NO: 2782408 - DNA, 25 bp, Homo sapien
gaagattaatattcccagtagttgg

SEQ ID NO: 2782409 - DNA, 25 bp, Homo sapien
cctgccctttcaggccttcgtggta

SEQ ID NO: 2782410 - DNA, 25 bp, Homo sapien
ttcgtggtaagtggtcccagaagca

SEQ ID NO: 2782411 - DNA, 25 bp, Homo sapien
cccagaagcaaggtgagtgctaacg

SEQ ID NO: 2782412 - DNA, 25 bp, Homo sapien
gaaatattgttagggcgggtctcac

SEQ ID NO: 2782413 - DNA, 25 bp, Homo sapien
gggtctcaccagtgccctttctagg

SEQ ID NO: 2782414 - DNA, 25 bp, Homo sapien
taatgctggactgtggaaccataat

SEQ ID NO: 2782415 - DNA, 25 bp, Homo sapien
gctgccctatgtgagagatattatt

SEQ ID NO: 2782416 - DNA, 25 bp, Homo sapien
ccatatataaggtgcatggaaaata

SEQ ID NO: 2782417 - DNA, 25 bp, Homo sapien
taaatttcttgaaccagtagtcaca

SEQ ID NO: 2782418 - DNA, 25 bp, Homo sapien
ttgtaaatttcttgaaccagtagtc

SEQ ID NO: 2782419 - DNA, 25 bp, Homo sapien
acattttacctccagagcgtatgca

SEQ ID NO: 2782420 - DNA, 25 bp, Homo sapien
taggaaatccgacagtcattagatg

SEQ ID NO: 2782421 - DNA, 25 bp, Homo sapien
ctaaaagatcataagtttaactaat

SEQ ID NO: 2782422 - DNA, 25 bp, Homo sapien
cattagatgtattagatgctttatc

SEQ ID NO: 2782423 - DNA, 25 bp, Homo sapien
ctaataaatagtaatactccatgca

SEQ ID NO: 2782424 - DNA, 25 bp, Homo sapien
tttctggactaaaaccacttctgtg

SEQ ID NO: 2782425 - DNA, 25 bp, Homo sapien
tgtcactgcatcatgtgtctccccc

SEQ ID NO: 2782426 - DNA, 25 bp, Homo sapien
cccctacaggtaaagagcaggcagc

SEQ ID NO: 2782427 - DNA, 25 bp, Homo sapien
ggactaaaaccacttctgtgctgtt

SEQ ID NO: 2782428 - DNA, 25 bp, Homo sapien
aaggaaggactgtgctccaagctac

SEQ ID NO: 2782429 - DNA, 25 bp, Homo sapien
aatgggatcactgtcccagtgcagg

SEQ ID NO: 2782430 - DNA, 25 bp, Homo sapien
tgtgctccaagctacatggctgtac

SEQ ID NO: 2782431 - DNA, 25 bp, Homo sapien
tacatggctgtacttcaaaaatggg

SEQ ID NO: 2782432 - DNA, 25 bp, Homo sapien
ctagttctatgtatacagtgggccc

SEQ ID NO: 2782433 - DNA, 25 bp, Homo sapien
tgagactagtgcctttacaaagggc

SEQ ID NO: 2782434 - DNA, 25 bp, Homo sapien
gagggtggagcactcaacactcaca

SEQ ID NO: 2782435 - DNA, 25 bp, Homo sapien
cactgatgcaacctagaagaagact

SEQ ID NO: 2782436 - DNA, 25 bp, Homo sapien
gttccaacttcagggggagtgagcc

SEQ ID NO: 2782437 - DNA, 25 bp, Homo sapien
cagtacagccaggttccaacttcag

SEQ ID NO: 2782438 - DNA, 25 bp, Homo sapien
gactactgccacagtacagccaggt

SEQ ID NO: 2782439 - DNA, 25 bp, Homo sapien
tcccaggactactgccacagtacag

SEQ ID NO: 2782440 - DNA, 25 bp, Homo sapien
tggttggttgcacatgggtgatctt

SEQ ID NO: 2782441 - DNA, 25 bp, Homo sapien
tgttgatggatggttggttgcacat

SEQ ID NO: 2782442 - DNA, 25 bp, Homo sapien
ctttgttgatggatggttggttgca

SEQ ID NO: 2782443 - DNA, 25 bp, Homo sapien
ctgttatggtggctttgttgatgga

SEQ ID NO: 2782444 - DNA, 25 bp, Homo sapien
taaagctgatgtaagtgtcactggg

SEQ ID NO: 2782445 - DNA, 25 bp, Homo sapien
gactttattcgctgaagccagagct

SEQ ID NO: 2782446 - DNA, 25 bp, Homo sapien
gcctaaattctcgtgattgcctgta

SEQ ID NO: 2782447 - DNA, 25 bp, Homo sapien
tataattgtcttccctaatacaggg

SEQ ID NO: 2782448 - DNA, 25 bp, Homo sapien
gttgtttcgtacagttcgcagactg

SEQ ID NO: 2782449 - DNA, 25 bp, Homo sapien
gctaggtgctcgatcttgcaaatta

SEQ ID NO: 2782450 - DNA, 25 bp, Homo sapien
cttgcaaattagttaatgcagcaaa

SEQ ID NO: 2782451 - DNA, 25 bp, Homo sapien
taatgcagcaaagttgtttcgtaca

SEQ ID NO: 2782452 - DNA, 25 bp, Homo sapien
caacggactggaagtgagcctagga

SEQ ID NO: 2782453 - DNA, 25 bp, Homo sapien
ggatagtgatacctacctcgtagaa

SEQ ID NO: 2782454 - DNA, 25 bp, Homo sapien
cttggcatgcacttgggaaatttac

SEQ ID NO: 2782455 - DNA, 25 bp, Homo sapien
caatattagcccatgatggcagcgt

SEQ ID NO: 2782456 - DNA, 25 bp, Homo sapien
ctgtgttagtcttttaagctttcac

SEQ ID NO: 2782457 - DNA, 25 bp, Homo sapien
cagtatgacatgtatgctattggca

SEQ ID NO: 2782458 - DNA, 25 bp, Homo sapien
ggtgttaactattatcttctacagt

SEQ ID NO: 2782459 - DNA, 25 bp, Homo sapien
gggcctcgctgactgactcttggtg

SEQ ID NO: 2782460 - DNA, 25 bp, Homo sapien
tgatgaggccacaagatcgttgctg

SEQ ID NO: 2782461 - DNA, 25 bp, Homo sapien
gaggtgactatcttctttcatagcc

SEQ ID NO: 2782462 - DNA, 25 bp, Homo sapien
gctaaaaatttagcaccgactgaaa

SEQ ID NO: 2782463 - DNA, 25 bp, Homo sapien
tgaggccacaagatcgttgctgctg

SEQ ID NO: 2782464 - DNA, 25 bp, Homo sapien
tgagcaaatggagtcacaatcaagt

SEQ ID NO: 2782465 - DNA, 25 bp, Homo sapien
ctgagcaaatggagtcacaatcaag

SEQ ID NO: 2782466 - DNA, 25 bp, Homo sapien
gagcaaatggagtcacaatcaagtc

SEQ ID NO: 2782467 - DNA, 25 bp, Homo sapien
agcaaatggagtcacaatcaagtca

SEQ ID NO: 2782468 - DNA, 25 bp, Homo sapien
tggcgagccttgtctctcccaaaga

SEQ ID NO: 2782469 - DNA, 25 bp, Homo sapien
cagagtcatcttcactagtcctggc

SEQ ID NO: 2782470 - DNA, 25 bp, Homo sapien
tagtcctggcgagccttgtctctcc

SEQ ID NO: 2782471 - DNA, 25 bp, Homo sapien
tcttcactagtcctggcgagccttg

SEQ ID NO: 2782472 - DNA, 25 bp, Homo sapien
cgcctcgcccgttttgatcatttta

SEQ ID NO: 2782473 - DNA, 25 bp, Homo sapien
acagcgcctcgcccgttttgatcat

SEQ ID NO: 2782474 - DNA, 25 bp, Homo sapien
atccacagcgcctcgcccgttttga

SEQ ID NO: 2782475 - DNA, 25 bp, Homo sapien
ggcatgatccacagcgcctcgcccg

SEQ ID NO: 2782476 - DNA, 25 bp, Homo sapien
atttaaactgtttgctcacatctta

SEQ ID NO: 2782477 - DNA, 25 bp, Homo sapien
actgtttgctcacatcttattaata

SEQ ID NO: 2782478 - DNA, 25 bp, Homo sapien
tttctcaaaacaatggcctgacaca

SEQ ID NO: 2782479 - DNA, 25 bp, Homo sapien
acctgaataggtctttctcaaaaca

SEQ ID NO: 2782480 - DNA, 25 bp, Homo sapien
cacacactagaatcctactcaggct

SEQ ID NO: 2782481 - DNA, 25 bp, Homo sapien
taccatgtgatctcacacatatgtg

SEQ ID NO: 2782482 - DNA, 25 bp, Homo sapien
taaataccatgtgatctcacacata

SEQ ID NO: 2782483 - DNA, 25 bp, Homo sapien
tatccttccatttatgacaatatgg

SEQ ID NO: 2782484 - DNA, 25 bp, Homo sapien
taattctctgtcaggcagccttagt

SEQ ID NO: 2782485 - DNA, 25 bp, Homo sapien
tgaatacaacgcaccactcaactgt

SEQ ID NO: 2782486 - DNA, 25 bp, Homo sapien
tccttactttggctcatgatcatgt

SEQ ID NO: 2782487 - DNA, 25 bp, Homo sapien
gtttttgtcagcaactacagctcca

SEQ ID NO: 2782488 - DNA, 25 bp, Homo sapien
atatcactggcaatggaggagttcc

SEQ ID NO: 2782489 - DNA, 25 bp, Homo sapien
actggcaatggaggagttccgggac

SEQ ID NO: 2782490 - DNA, 25 bp, Homo sapien
tggcaatggaggagttccgggacat

SEQ ID NO: 2782491 - DNA, 25 bp, Homo sapien
atcactggcaatggaggagttccgg

SEQ ID NO: 2782492 - DNA, 25 bp, Homo sapien
gaaggactcccgtcgttgactgtgg

SEQ ID NO: 2782493 - DNA, 25 bp, Homo sapien
gagagaggtcataatcgctgtcgga

SEQ ID NO: 2782494 - DNA, 25 bp, Homo sapien
tgtcggatcgatacaggaaggactc

SEQ ID NO: 2782495 - DNA, 25 bp, Homo sapien
tggtcatgggatccaagggactccg

SEQ ID NO: 2782496 - DNA, 25 bp, Homo sapien
catattgaggcactatctccttctc

SEQ ID NO: 2782497 - DNA, 25 bp, Homo sapien
caactcatattgaggcactatctcc

SEQ ID NO: 2782498 - DNA, 25 bp, Homo sapien
ttcttgctcaactcatattgaggca

SEQ ID NO: 2782499 - DNA, 25 bp, Homo sapien
gctcaactcatattgaggcactatc

SEQ ID NO: 2782500 - DNA, 25 bp, Homo sapien
tatgttcagtagtatgctcaagctc

SEQ ID NO: 2782501 - DNA, 25 bp, Homo sapien
actgtattttccattcgaccatggg

SEQ ID NO: 2782502 - DNA, 25 bp, Homo sapien
gcactttccatgttccaggcgctgt

SEQ ID NO: 2782503 - DNA, 25 bp, Homo sapien
ggagaatggactctgtttacacctc

SEQ ID NO: 2782504 - DNA, 25 bp, Homo sapien
cagacccatccttttctatggaacc

SEQ ID NO: 2782505 - DNA, 25 bp, Homo sapien
cccatccttttctatggaaccagcc

SEQ ID NO: 2782506 - DNA, 25 bp, Homo sapien
ccatccttttctatggaaccagccc

SEQ ID NO: 2782507 - DNA, 25 bp, Homo sapien
tccacagacccatccttttctatgg

SEQ ID NO: 2782508 - DNA, 25 bp, Homo sapien
cttgtaattgtttgtctgctgaagg

SEQ ID NO: 2782509 - DNA, 25 bp, Homo sapien
tgtaattgtttgtctgctgaaggtc

SEQ ID NO: 2782510 - DNA, 25 bp, Homo sapien
gtaattgtttgtctgctgaaggtca

SEQ ID NO: 2782511 - DNA, 25 bp, Homo sapien
taattgtttgtctgctgaaggtcat

SEQ ID NO: 2782512 - DNA, 25 bp, Homo sapien
aaatcacctgaatcagcccttgcaa

SEQ ID NO: 2782513 - DNA, 25 bp, Homo sapien
taactttatttgaacacatggcttt

SEQ ID NO: 2782514 - DNA, 25 bp, Homo sapien
catggctttgggaagaacctaaagg

SEQ ID NO: 2782515 - DNA, 25 bp, Homo sapien
aactgagggccaaatcacctgaatc

SEQ ID NO: 2782516 - DNA, 25 bp, Homo sapien
catacctgtctctcaagatattaca

SEQ ID NO: 2782517 - DNA, 25 bp, Homo sapien
gggtgatcttcaaaccatacctgtc

SEQ ID NO: 2782518 - DNA, 25 bp, Homo sapien
tatttttcccagatcagtgagtgtc

SEQ ID NO: 2782519 - DNA, 25 bp, Homo sapien
gatattgaactcactttgaagaggg

SEQ ID NO: 2782520 - DNA, 25 bp, Homo sapien
taagatgttggatgggctaccacag

SEQ ID NO: 2782521 - DNA, 25 bp, Homo sapien
ttaagatgttggatgggctaccaca

SEQ ID NO: 2782522 - DNA, 25 bp, Homo sapien
ctcagatttagtgtttcctagtagc

SEQ ID NO: 2782523 - DNA, 25 bp, Homo sapien
tgtaaacaaggccatctgtaatgag

SEQ ID NO: 2782524 - DNA, 25 bp, Homo sapien
tcaattcagcaaagatttttctaac

SEQ ID NO: 2782525 - DNA, 25 bp, Homo sapien
gctatacatagtcatgacagaatcc

SEQ ID NO: 2782526 - DNA, 25 bp, Homo sapien
ggaaatcatactgccctcatatagg

SEQ ID NO: 2782527 - DNA, 25 bp, Homo sapien
gctgagatatgaacctagatgctgt

SEQ ID NO: 2782528 - DNA, 25 bp, Homo sapien
tacaagacatcgacaggtgctcagc

SEQ ID NO: 2782529 - DNA, 25 bp, Homo sapien
gcctcatggtctcaaataatggtct

SEQ ID NO: 2782530 - DNA, 25 bp, Homo sapien
tagttgatatctcaggtagaaagtg

SEQ ID NO: 2782531 - DNA, 25 bp, Homo sapien
tagaactatgccttctcctgaagct

SEQ ID NO: 2782532 - DNA, 25 bp, Homo sapien
taactattggtgctgtactgctgtc

SEQ ID NO: 2782533 - DNA, 25 bp, Homo sapien
tgctgtctgttgatagaactatgcc

SEQ ID NO: 2782534 - DNA, 25 bp, Homo sapien
tgagcaacacctgctgcatttgatc

SEQ ID NO: 2782535 - DNA, 25 bp, Homo sapien
gctgcatttgatctcaactcaattt

SEQ ID NO: 2782536 - DNA, 25 bp, Homo sapien
caaattctctgagcaacacctgctg

SEQ ID NO: 2782537 - DNA, 25 bp, Homo sapien
tcaactcaatttcaactccactggg

SEQ ID NO: 2782538 - DNA, 25 bp, Homo sapien
taaaaatgtcaagcgaagaatgcag

SEQ ID NO: 2782539 - DNA, 25 bp, Homo sapien
ttcttaaaaatgtcaagcgaagaat

SEQ ID NO: 2782540 - DNA, 25 bp, Homo sapien
tggggcaaaactaaaatcccagcta

SEQ ID NO: 2782541 - DNA, 25 bp, Homo sapien
aatgtcaagcgaagaatgcagaata

SEQ ID NO: 2782542 - DNA, 25 bp, Homo sapien
gtggcttctcgagtgctctgcagat

SEQ ID NO: 2782543 - DNA, 25 bp, Homo sapien
cagcctcaaagtgggagtctcagag

SEQ ID NO: 2782544 - DNA, 25 bp, Homo sapien
tgttcatggaacgtagggctatgtt

SEQ ID NO: 2782545 - DNA, 25 bp, Homo sapien
gataaacatcaactaccaagcccca

SEQ ID NO: 2782546 - DNA, 25 bp, Homo sapien
cttgaggatgccagagtaagtatct

SEQ ID NO: 2782547 - DNA, 25 bp, Homo sapien
catacagaacatggccatctggcct

SEQ ID NO: 2782548 - DNA, 25 bp, Homo sapien
tgaagttaagcacataaggtctgac

SEQ ID NO: 2782549 - DNA, 25 bp, Homo sapien
tattgttggcaattccaaactgccc

SEQ ID NO: 2782550 - DNA, 25 bp, Homo sapien
ttattaaacagggtagggtgctaga

SEQ ID NO: 2782551 - DNA, 25 bp, Homo sapien
gaccaagaagtcactcactagcagt

SEQ ID NO: 2782552 - DNA, 25 bp, Homo sapien
tagatggtggatgcttagttcaaac

SEQ ID NO: 2782553 - DNA, 25 bp, Homo sapien
gcttttgcccagaggttgccagtgt

SEQ ID NO: 2782554 - DNA, 25 bp, Homo sapien
ctgcatctacaaacctaagtattac

SEQ ID NO: 2782555 - DNA, 25 bp, Homo sapien
tgaaaagtataagtactattacata

SEQ ID NO: 2782556 - DNA, 25 bp, Homo sapien
taaccactaccaaaagcttggacag

SEQ ID NO: 2782557 - DNA, 25 bp, Homo sapien
tacatatacaataaccaattttaaa

SEQ ID NO: 2782558 - DNA, 25 bp, Homo sapien
gaaaatactccttaagggccatgcc

SEQ ID NO: 2782559 - DNA, 25 bp, Homo sapien
gctgcagtgatatacccaagcggtt

SEQ ID NO: 2782560 - DNA, 25 bp, Homo sapien
gaatcccggaggacagtagacagat

SEQ ID NO: 2782561 - DNA, 25 bp, Homo sapien
tggtaaagccagaaagatgtgtccc

SEQ ID NO: 2782562 - DNA, 25 bp, Homo sapien
ttagggaacttgtagatcgggatct

SEQ ID NO: 2782563 - DNA, 25 bp, Homo sapien
agggaacttgtagatcgggatcttg

SEQ ID NO: 2782564 - DNA, 25 bp, Homo sapien
cttgtagatcgggatcttggcttca

SEQ ID NO: 2782565 - DNA, 25 bp, Homo sapien
gaacttgtagatcgggatcttggct

SEQ ID NO: 2782566 - DNA, 25 bp, Homo sapien
tctccgtggagcaaagaagtcagcc

SEQ ID NO: 2782567 - DNA, 25 bp, Homo sapien
gctcatgggcaaggttctaacacgc

SEQ ID NO: 2782568 - DNA, 25 bp, Homo sapien
caatgccaagggaggaactgaattc

SEQ ID NO: 2782569 - DNA, 25 bp, Homo sapien
gtttctgacactcgaagagcgcagg

SEQ ID NO: 2782570 - DNA, 25 bp, Homo sapien
taagaaccttatctggagccactac

SEQ ID NO: 2782571 - DNA, 25 bp, Homo sapien
caggcactgggtaagatgttccaca

SEQ ID NO: 2782572 - DNA, 25 bp, Homo sapien
tggtcaacggtggtagataagccct

SEQ ID NO: 2782573 - DNA, 25 bp, Homo sapien
gatgaaccaggtcagaactcaagcc

SEQ ID NO: 2782574 - DNA, 25 bp, Homo sapien
tcagaagaagggatctagtgtgttc

SEQ ID NO: 2782575 - DNA, 25 bp, Homo sapien
gagtcttaagtatggtgcttggcaa

SEQ ID NO: 2782576 - DNA, 25 bp, Homo sapien
tatgaaaaagttctcccacccaaga

SEQ ID NO: 2782577 - DNA, 25 bp, Homo sapien
tcattccaggcatgcagtgaatgct

SEQ ID NO: 2782578 - DNA, 25 bp, Homo sapien
ccagcatacttggagatacttgtaa

SEQ ID NO: 2782579 - DNA, 25 bp, Homo sapien
taggcctcactacttatatctaaca

SEQ ID NO: 2782580 - DNA, 25 bp, Homo sapien
cccactttccacaacgtagattatt

SEQ ID NO: 2782581 - DNA, 25 bp, Homo sapien
taggtagtaccttaagcaaagatgt

SEQ ID NO: 2782582 - DNA, 25 bp, Homo sapien
taaataggtgacttaacccttcaga

SEQ ID NO: 2782583 - DNA, 25 bp, Homo sapien
tctgtcatgattccaaaaggatcaa

SEQ ID NO: 2782584 - DNA, 25 bp, Homo sapien
taagggctagcaaaatctgtcatga

SEQ ID NO: 2782585 - DNA, 25 bp, Homo sapien
tcacgacagcttcagagttaacatc

SEQ ID NO: 2782586 - DNA, 25 bp, Homo sapien
aacatatttcagttggtggaaacac

SEQ ID NO: 2782587 - DNA, 25 bp, Homo sapien
gtttcctctcaccttgggattccag

SEQ ID NO: 2782588 - DNA, 25 bp, Homo sapien
ctaaatcaagacaaagctcacactg

SEQ ID NO: 2782589 - DNA, 25 bp, Homo sapien
attgttttgcaagttagctccagaa

SEQ ID NO: 2782590 - DNA, 25 bp, Homo sapien
ttgttcttgtttctagatccctgag

SEQ ID NO: 2782591 - DNA, 25 bp, Homo sapien
agctatgcttagccatctcctccag

SEQ ID NO: 2782592 - DNA, 25 bp, Homo sapien
ctgattcctctccaacatttcttcc

SEQ ID NO: 2782593 - DNA, 25 bp, Homo sapien
tagctatgcttagccatctcctcca

SEQ ID NO: 2782594 - DNA, 25 bp, Homo sapien
gctgattcctctccaacatttcttc

SEQ ID NO: 2782595 - DNA, 25 bp, Homo sapien
tccacagccatagatgctaggatag

SEQ ID NO: 2782596 - DNA, 25 bp, Homo sapien
ccagtccacagccatagatgctagg

SEQ ID NO: 2782597 - DNA, 25 bp, Homo sapien
cagccatagatgctaggatagtctt

SEQ ID NO: 2782598 - DNA, 25 bp, Homo sapien
catagatgctaggatagtcttggtc

SEQ ID NO: 2782599 - DNA, 25 bp, Homo sapien
tccccaatagattccaaagccagag

SEQ ID NO: 2782600 - DNA, 25 bp, Homo sapien
gccatatagtctatagagtagcccc

SEQ ID NO: 2782601 - DNA, 25 bp, Homo sapien
gggctgcataagatgattcctaaat

SEQ ID NO: 2782602 - DNA, 25 bp, Homo sapien
gatcttgcttggaaaagacacataa

SEQ ID NO: 2782603 - DNA, 25 bp, Homo sapien
taatagcctcgatggactctacact

SEQ ID NO: 2782604 - DNA, 25 bp, Homo sapien
catatcagaggttggaagtgtcaca

SEQ ID NO: 2782605 - DNA, 25 bp, Homo sapien
aagtgttcagattaggcaggcccaa

SEQ ID NO: 2782606 - DNA, 25 bp, Homo sapien
tcaataattagcaacagagcccagg

SEQ ID NO: 2782607 - DNA, 25 bp, Homo sapien
tctctgaggaatcaagtcaattgaa

SEQ ID NO: 2782608 - DNA, 25 bp, Homo sapien
gaatcaagtcaattgaatacgtgta

SEQ ID NO: 2782609 - DNA, 25 bp, Homo sapien
atacgtgtacttgagaaaaaaggtg

SEQ ID NO: 2782610 - DNA, 25 bp, Homo sapien
caattgaatacgtgtacttgagaaa

SEQ ID NO: 2782611 - DNA, 25 bp, Homo sapien
cagccttgttggattcgggtctacc

SEQ ID NO: 2782612 - DNA, 25 bp, Homo sapien
taaggaatccaagagtgcaaggcag

SEQ ID NO: 2782613 - DNA, 25 bp, Homo sapien
ggtgcctttcacacacagctgttgg

SEQ ID NO: 2782614 - DNA, 25 bp, Homo sapien
cattagtgagatcgtttggacccca

SEQ ID NO: 2782615 - DNA, 25 bp, Homo sapien
gaaaagcagcgcatacaacagaagt

SEQ ID NO: 2782616 - DNA, 25 bp, Homo sapien
cagaagttgcacaaagccgtccttg

SEQ ID NO: 2782617 - DNA, 25 bp, Homo sapien
cagtttacacggatttgctttagga

SEQ ID NO: 2782618 - DNA, 25 bp, Homo sapien
aaaacgtcccaaccagtgagtggca

SEQ ID NO: 2782619 - DNA, 25 bp, Homo sapien
aagtcagttgttaatacccaacagt

SEQ ID NO: 2782620 - DNA, 25 bp, Homo sapien
ttgccaactccacatttagtgacct

SEQ ID NO: 2782621 - DNA, 25 bp, Homo sapien
cttgatgaaagcagagaccgcatcc

SEQ ID NO: 2782622 - DNA, 25 bp, Homo sapien
gaaacactgtatagagtactatgtc

SEQ ID NO: 2782623 - DNA, 25 bp, Homo sapien
tgtcctttgcatttgattggcttaa

SEQ ID NO: 2782624 - DNA, 25 bp, Homo sapien
tatataatttgagccatgtgccatg

SEQ ID NO: 2782625 - DNA, 25 bp, Homo sapien
catacttgtcccctttgaactgtcc

SEQ ID NO: 2782626 - DNA, 25 bp, Homo sapien
ccgggcaaaacagactctaaaatat

SEQ ID NO: 2782627 - DNA, 25 bp, Homo sapien
ccttggcagtttggagtgtcttttc

SEQ ID NO: 2782628 - DNA, 25 bp, Homo sapien
gacaaatggcactcgttgaaaatca

SEQ ID NO: 2782629 - DNA, 25 bp, Homo sapien
ttcatgacttaaggacaaatggcac

SEQ ID NO: 2782630 - DNA, 25 bp, Homo sapien
tattcatacctattacccattcaaa

SEQ ID NO: 2782631 - DNA, 25 bp, Homo sapien
ctgtgctggtccgtagcctgcaggc

SEQ ID NO: 2782632 - DNA, 25 bp, Homo sapien
tttattgcagagtttgtaatctttc

SEQ ID NO: 2782633 - DNA, 25 bp, Homo sapien
agctctgtgctggtccgtagcctgc

SEQ ID NO: 2782634 - DNA, 25 bp, Homo sapien
agcctgcaggccaccttataaaacc

SEQ ID NO: 2782635 - DNA, 25 bp, Homo sapien
tacacgaggtacaagcatgcacata

SEQ ID NO: 2782636 - DNA, 25 bp, Homo sapien
tctcttattggagttgtcagggtcc

SEQ ID NO: 2782637 - DNA, 25 bp, Homo sapien
gagaatttctatcccatgaccccta

SEQ ID NO: 2782638 - DNA, 25 bp, Homo sapien
ggtccacaggcttgctaaatctttg

SEQ ID NO: 2782639 - DNA, 25 bp, Homo sapien
ggctgaatgcgtaatctcctttgga

SEQ ID NO: 2782640 - DNA, 25 bp, Homo sapien
cattgtcgtggctgaatgcgtaatc

SEQ ID NO: 2782641 - DNA, 25 bp, Homo sapien
aatctcctttggatacatgagggac

SEQ ID NO: 2782642 - DNA, 25 bp, Homo sapien
cattattgtcagtacattgtcgtgg

SEQ ID NO: 2782643 - DNA, 25 bp, Homo sapien
tttggctcttgtagatggtcctggc

SEQ ID NO: 2782644 - DNA, 25 bp, Homo sapien
ctgtaggactttgagaaacgcaatc

SEQ ID NO: 2782645 - DNA, 25 bp, Homo sapien
ggctcttgtagatggtcctggcacc

SEQ ID NO: 2782646 - DNA, 25 bp, Homo sapien
ttgagaaacgcaatcttgatttggc

SEQ ID NO: 2782647 - DNA, 25 bp, Homo sapien
aaggacgatgccaagatccccagga

SEQ ID NO: 2782648 - DNA, 25 bp, Homo sapien
atccccaggaaccacgagaagtcag

SEQ ID NO: 2782649 - DNA, 25 bp, Homo sapien
ttttaaggacgatgccaagatcccc

SEQ ID NO: 2782650 - DNA, 25 bp, Homo sapien
gatccccaggaaccacgagaagtca

SEQ ID NO: 2782651 - DNA, 25 bp, Homo sapien
tagccaatacagctataagtagcag

SEQ ID NO: 2782652 - DNA, 25 bp, Homo sapien
taagtagaatctaattactcctgaa

SEQ ID NO: 2782653 - DNA, 25 bp, Homo sapien
gacttcaaacaaaggtcaagagtaa

SEQ ID NO: 2782654 - DNA, 25 bp, Homo sapien
cctgagaagccagataggcatacac

SEQ ID NO: 2782655 - DNA, 25 bp, Homo sapien
caggtgttttccacctttagtgatc

SEQ ID NO: 2782656 - DNA, 25 bp, Homo sapien
ccccttcagttgctaaaatatactg

SEQ ID NO: 2782657 - DNA, 25 bp, Homo sapien
gtgtcgtttgagcagtccaagaccc

SEQ ID NO: 2782658 - DNA, 25 bp, Homo sapien
tactcatttctttcgattgaaggtg

SEQ ID NO: 2782659 - DNA, 25 bp, Homo sapien
gacattagtatcaattcccttagtg

SEQ ID NO: 2782660 - DNA, 25 bp, Homo sapien
caattcccttagtgatatatatgca

SEQ ID NO: 2782661 - DNA, 25 bp, Homo sapien
taatgttaccattaatgcatgcaat

SEQ ID NO: 2782662 - DNA, 25 bp, Homo sapien
gcatgcaatgacattagtatcaatt

SEQ ID NO: 2782663 - DNA, 25 bp, Homo sapien
ggaagcctggcagtcctaagctgaa

SEQ ID NO: 2782664 - DNA, 25 bp, Homo sapien
caggaagcctggcagtcctaagctg

SEQ ID NO: 2782665 - DNA, 25 bp, Homo sapien
gaagcctggcagtcctaagctgaat

SEQ ID NO: 2782666 - DNA, 25 bp, Homo sapien
agcctggcagtcctaagctgaatga

SEQ ID NO: 2782667 - DNA, 25 bp, Homo sapien
ggactcatcatatgggattcccagc

SEQ ID NO: 2782668 - DNA, 25 bp, Homo sapien
gacatagtcacttttaccgtggaga

SEQ ID NO: 2782669 - DNA, 25 bp, Homo sapien
gaatttgcatcggtaagtccttgga

SEQ ID NO: 2782670 - DNA, 25 bp, Homo sapien
catagatccattgcacgtggtggca

SEQ ID NO: 2782671 - DNA, 25 bp, Homo sapien
tttccttagacacctgtaacatcct

SEQ ID NO: 2782672 - DNA, 25 bp, Homo sapien
cttttccttagacacctgtaacatc

SEQ ID NO: 2782673 - DNA, 25 bp, Homo sapien
tccttagacacctgtaacatccttc

SEQ ID NO: 2782674 - DNA, 25 bp, Homo sapien
tgtaacatccttctcatcaaatttc

SEQ ID NO: 2782675 - DNA, 25 bp, Homo sapien
gaagggcctctcatcaaagaaagta

SEQ ID NO: 2782676 - DNA, 25 bp, Homo sapien
gaggaagagtgtacctgcaactgga

SEQ ID NO: 2782677 - DNA, 25 bp, Homo sapien
taaagttagcggttttcaggcaaga

SEQ ID NO: 2782678 - DNA, 25 bp, Homo sapien
tgagtttggcagcactacatagaga

SEQ ID NO: 2782679 - DNA, 25 bp, Homo sapien
tagcagttgtccatttttaaccagg

SEQ ID NO: 2782680 - DNA, 25 bp, Homo sapien
agaggctgtcgtgtgtattatagga

SEQ ID NO: 2782681 - DNA, 25 bp, Homo sapien
gaaagtgttatcttgtgcttaccac

SEQ ID NO: 2782682 - DNA, 25 bp, Homo sapien
cagaagacaggatggtttgaattac

SEQ ID NO: 2782683 - DNA, 25 bp, Homo sapien
ttcctgtcttctggatcttcgtacc

SEQ ID NO: 2782684 - DNA, 25 bp, Homo sapien
tttttctgatcccagcgataatagg

SEQ ID NO: 2782685 - DNA, 25 bp, Homo sapien
tgtcttctggatcttcgtaccctgc

SEQ ID NO: 2782686 - DNA, 25 bp, Homo sapien
gcgataatagggagagcaagcctac

SEQ ID NO: 2782687 - DNA, 25 bp, Homo sapien
attggcatgttgatcgcgtatggtg

SEQ ID NO: 2782688 - DNA, 25 bp, Homo sapien
cctctgtggcttaatatcaattggc

SEQ ID NO: 2782689 - DNA, 25 bp, Homo sapien
acataagcgcttcggaatctagcca

SEQ ID NO: 2782690 - DNA, 25 bp, Homo sapien
gatcgcgtatggtgatccatgaaca

SEQ ID NO: 2782691 - DNA, 25 bp, Homo sapien
cccagagtcaggtactcacagctgc

SEQ ID NO: 2782692 - DNA, 25 bp, Homo sapien
ttccccagagtcaggtactcacagc

SEQ ID NO: 2782693 - DNA, 25 bp, Homo sapien
tccccagagtcaggtactcacagct

SEQ ID NO: 2782694 - DNA, 25 bp, Homo sapien
ccccagagtcaggtactcacagctg

SEQ ID NO: 2782695 - DNA, 25 bp, Homo sapien
tcatcagaatgagagaacactcaat

SEQ ID NO: 2782696 - DNA, 25 bp, Homo sapien
tggatgtaatgcctaatgactgcca

SEQ ID NO: 2782697 - DNA, 25 bp, Homo sapien
tgccaactaattgtgatgtatgact

SEQ ID NO: 2782698 - DNA, 25 bp, Homo sapien
gagagaacactcaatgcaaagttag

SEQ ID NO: 2782699 - DNA, 25 bp, Homo sapien
cacaaatatctttactcatagcatt

SEQ ID NO: 2782700 - DNA, 25 bp, Homo sapien
gccacaaatatctttactcatagca

SEQ ID NO: 2782701 - DNA, 25 bp, Homo sapien
tgccacaaatatctttactcatagc

SEQ ID NO: 2782702 - DNA, 25 bp, Homo sapien
caaatatctttactcatagcattca

SEQ ID NO: 2782703 - DNA, 25 bp, Homo sapien
taattgtttaggagtaccataagcc

SEQ ID NO: 2782704 - DNA, 25 bp, Homo sapien
caagtgaggtgaagagcagcacatc

SEQ ID NO: 2782705 - DNA, 25 bp, Homo sapien
taagatggcaaactcaattaatggg

SEQ ID NO: 2782706 - DNA, 25 bp, Homo sapien
tagtaaggcatgtcaaaagtcaaga

SEQ ID NO: 2782707 - DNA, 25 bp, Homo sapien
cttagctgatacagcagcagttggg

SEQ ID NO: 2782708 - DNA, 25 bp, Homo sapien
gagcagttacttcttatagatgagc

SEQ ID NO: 2782709 - DNA, 25 bp, Homo sapien
caatcagtagccatcaacgtcaagg

SEQ ID NO: 2782710 - DNA, 25 bp, Homo sapien
aacgtcaaggcaagacttcccacca

SEQ ID NO: 2782711 - DNA, 25 bp, Homo sapien
tgattgcttgcacttacatgaaact

SEQ ID NO: 2782712 - DNA, 25 bp, Homo sapien
gaaactttctcatggatattgcagc

SEQ ID NO: 2782713 - DNA, 25 bp, Homo sapien
taacctacaacgatttctggaccag

SEQ ID NO: 2782714 - DNA, 25 bp, Homo sapien
tgttactactctggatctgcaatga

SEQ ID NO: 2782715 - DNA, 25 bp, Homo sapien
aagttgaggtcataagtgtgggccc

SEQ ID NO: 2782716 - DNA, 25 bp, Homo sapien
gaaagaccccgtgaaggaatagaga

SEQ ID NO: 2782717 - DNA, 25 bp, Homo sapien
gagggatgacattctaggacagcag

SEQ ID NO: 2782718 - DNA, 25 bp, Homo sapien
tgtttaaatctcgaaatccacggcc

SEQ ID NO: 2782719 - DNA, 25 bp, Homo sapien
aaaagttccctcagcatgtgcacat

SEQ ID NO: 2782720 - DNA, 25 bp, Homo sapien
agcctgggaatggtgagccagctca

SEQ ID NO: 2782721 - DNA, 25 bp, Homo sapien
tgttcatctaaccaataagcaggtg

SEQ ID NO: 2782722 - DNA, 25 bp, Homo sapien
tgtactgttagtcctctctccaaaa

SEQ ID NO: 2782723 - DNA, 25 bp, Homo sapien
ttttctttcagcattaaggaagaag

SEQ ID NO: 2782724 - DNA, 25 bp, Homo sapien
cattaaggaagaagaataccaaaag

SEQ ID NO: 2782725 - DNA, 25 bp, Homo sapien
ctttcagcattaaggaagaagaata

SEQ ID NO: 2782726 - DNA, 25 bp, Homo sapien
tctttcagcattaaggaagaagaat

SEQ ID NO: 2782727 - DNA, 25 bp, Homo sapien
tatgaggcctcctgcaatatgagac

SEQ ID NO: 2782728 - DNA, 25 bp, Homo sapien
ggcctaacttagagcttcaatgcaa

SEQ ID NO: 2782729 - DNA, 25 bp, Homo sapien
ggaatgactgtagaagttgcaccct

SEQ ID NO: 2782730 - DNA, 25 bp, Homo sapien
taaagcatgtaaagccaccaaggaa

SEQ ID NO: 2782731 - DNA, 25 bp, Homo sapien
catagtcagatgtggcatacaaaag

SEQ ID NO: 2782732 - DNA, 25 bp, Homo sapien
cagtagttttcatcaatgtgccatc

SEQ ID NO: 2782733 - DNA, 25 bp, Homo sapien
tacgatgtctttgactgtctgctgg

SEQ ID NO: 2782734 - DNA, 25 bp, Homo sapien
acagaaagccctctacacaaggaag

SEQ ID NO: 2782735 - DNA, 25 bp, Homo sapien
cagctaatagagctgcctgatctgg

SEQ ID NO: 2782736 - DNA, 25 bp, Homo sapien
tcatttacgaagaggagagaacatc

SEQ ID NO: 2782737 - DNA, 25 bp, Homo sapien
gaacatccacgtgctgatagcagca

SEQ ID NO: 2782738 - DNA, 25 bp, Homo sapien
gaggagagaacatccacgtgctgat

SEQ ID NO: 2782739 - DNA, 25 bp, Homo sapien
tcttggaaatcaagacctttggtca

SEQ ID NO: 2782740 - DNA, 25 bp, Homo sapien
cagtccctttgttgaagccattcat

SEQ ID NO: 2782741 - DNA, 25 bp, Homo sapien
ggtcatttcgttgttcccatcactg

SEQ ID NO: 2782742 - DNA, 25 bp, Homo sapien
acatgaagccttcatgatttgactt

SEQ ID NO: 2782743 - DNA, 25 bp, Homo sapien
gataatctagaccagttaaagcccc

SEQ ID NO: 2782744 - DNA, 25 bp, Homo sapien
tggcagcagcaaacccaaagttact

SEQ ID NO: 2782745 - DNA, 25 bp, Homo sapien
agcaggtgcaatgatgtccgttccc

SEQ ID NO: 2782746 - DNA, 25 bp, Homo sapien
tgcagactacaagttagcagcctgt

SEQ ID NO: 2782747 - DNA, 25 bp, Homo sapien
ggaaaatgtcatctaagctgctgaa

SEQ ID NO: 2782748 - DNA, 25 bp, Homo sapien
cgtatagccattaaacttcctaggc

SEQ ID NO: 2782749 - DNA, 25 bp, Homo sapien
taataaaggcactttctagaagtcg

SEQ ID NO: 2782750 - DNA, 25 bp, Homo sapien
ccacttgtgaatttgcaatgtgtca

SEQ ID NO: 2782751 - DNA, 25 bp, Homo sapien
tcagtgattggtgcggactacaagc

SEQ ID NO: 2782752 - DNA, 25 bp, Homo sapien
cttattcctcacttggagtgttgga

SEQ ID NO: 2782753 - DNA, 25 bp, Homo sapien
cacttggagtgttggaataaatgga

SEQ ID NO: 2782754 - DNA, 25 bp, Homo sapien
cggactacaagctgagcccaaacct

SEQ ID NO: 2782755 - DNA, 25 bp, Homo sapien
ttgtcctgcctttatgatattgtaa

SEQ ID NO: 2782756 - DNA, 25 bp, Homo sapien
ttccttgagtcttgtcctgccttta

SEQ ID NO: 2782757 - DNA, 25 bp, Homo sapien
agtttggccttgacttccccaccag

SEQ ID NO: 2782758 - DNA, 25 bp, Homo sapien
cagtttggccttgacttccccacca

SEQ ID NO: 2782759 - DNA, 25 bp, Homo sapien
ctggatataacttgctcagctcctt

SEQ ID NO: 2782760 - DNA, 25 bp, Homo sapien
gggctttctcctgatggcacactct

SEQ ID NO: 2782761 - DNA, 25 bp, Homo sapien
ctatcagaagtagtctccccacttg

SEQ ID NO: 2782762 - DNA, 25 bp, Homo sapien
gaccacactgaagtcgggctttctc

SEQ ID NO: 2782763 - DNA, 25 bp, Homo sapien
cctgaccttaaggagcttgcaactt

SEQ ID NO: 2782764 - DNA, 25 bp, Homo sapien
gatattacacagcaaatacagcgac

SEQ ID NO: 2782765 - DNA, 25 bp, Homo sapien
cagaagtcctgaatgtgaaatccaa

SEQ ID NO: 2782766 - DNA, 25 bp, Homo sapien
tctgtgctgggatatggagattaca

SEQ ID NO: 2782767 - DNA, 25 bp, Homo sapien
ggagacactacctaactacactggg

SEQ ID NO: 2782768 - DNA, 25 bp, Homo sapien
gaacacctgtggtcaacaaaatacc

SEQ ID NO: 2782769 - DNA, 25 bp, Homo sapien
gctgagctgctaattggaatgtcaa

SEQ ID NO: 2782770 - DNA, 25 bp, Homo sapien
gattaaacttatgtggaacacctgt

SEQ ID NO: 2782771 - DNA, 25 bp, Homo sapien
aaggttaggctacaatattcctgag

SEQ ID NO: 2782772 - DNA, 25 bp, Homo sapien
tcaggaggtccatcatctataacta

SEQ ID NO: 2782773 - DNA, 25 bp, Homo sapien
cataatttaaagagggcttgctgtg

SEQ ID NO: 2782774 - DNA, 25 bp, Homo sapien
gaatctaaagacaagtgtatagcct

SEQ ID NO: 2782775 - DNA, 25 bp, Homo sapien
gaaattcaaaccacaccagagtcca

SEQ ID NO: 2782776 - DNA, 25 bp, Homo sapien
tcagctgtgtagcaccgggattcat

SEQ ID NO: 2782777 - DNA, 25 bp, Homo sapien
cattcctaggaaacatcagctgtgt

SEQ ID NO: 2782778 - DNA, 25 bp, Homo sapien
gtaccaatcaatataaacacgtgct

SEQ ID NO: 2782779 - DNA, 25 bp, Homo sapien
tgagaagagcagattaccagattac

SEQ ID NO: 2782780 - DNA, 25 bp, Homo sapien
cattagattggcctcttgcagtgca

SEQ ID NO: 2782781 - DNA, 25 bp, Homo sapien
gaagctaacctaagggaactgcagc

SEQ ID NO: 2782782 - DNA, 25 bp, Homo sapien
gtagggctgctcattagtcttaaca

SEQ ID NO: 2782783 - DNA, 25 bp, Homo sapien
tatacctaacatatggctcagtagt

SEQ ID NO: 2782784 - DNA, 25 bp, Homo sapien
tctgggaaccgtgagaaagtagaaa

SEQ ID NO: 2782785 - DNA, 25 bp, Homo sapien
gggagatatctgtcatagctcatag

SEQ ID NO: 2782786 - DNA, 25 bp, Homo sapien
gctccattgccctaaagaaacataa

SEQ ID NO: 2782787 - DNA, 25 bp, Homo sapien
gggagtgggaggctgttacaaatta

SEQ ID NO: 2782788 - DNA, 25 bp, Homo sapien
aatttagaatctcggtctaccacct

SEQ ID NO: 2782789 - DNA, 25 bp, Homo sapien
tcaatttagaatctcggtctaccac

SEQ ID NO: 2782790 - DNA, 25 bp, Homo sapien
taccacctcctcttgatagggagtg

SEQ ID NO: 2782791 - DNA, 25 bp, Homo sapien
tagtggctttgaaaactgtttctag

SEQ ID NO: 2782792 - DNA, 25 bp, Homo sapien
ttctcttcattgttcaacagacaaa

SEQ ID NO: 2782793 - DNA, 25 bp, Homo sapien
gattgaactagtgaatcagtgacta

SEQ ID NO: 2782794 - DNA, 25 bp, Homo sapien
aactgtttctaggactgaactactg

SEQ ID NO: 2782795 - DNA, 25 bp, Homo sapien
cattgattaaacatgtagtatagac

SEQ ID NO: 2782796 - DNA, 25 bp, Homo sapien
tcttccaatgtttgaacttaatggt

SEQ ID NO: 2782797 - DNA, 25 bp, Homo sapien
gtagtatagacagggcatctaaccc

SEQ ID NO: 2782798 - DNA, 25 bp, Homo sapien
gcttggctacaaggtcatctcattt

SEQ ID NO: 2782799 - DNA, 25 bp, Homo sapien
acttgggtgctagatcactgtgcac

SEQ ID NO: 2782800 - DNA, 25 bp, Homo sapien
tacctgagctatttagagcagtgcc

SEQ ID NO: 2782801 - DNA, 25 bp, Homo sapien
gctgacttccactaaaatgtgccta

SEQ ID NO: 2782802 - DNA, 25 bp, Homo sapien
tgtgcactaacacccagctcagaca

SEQ ID NO: 2782803 - DNA, 25 bp, Homo sapien
gatgtgaactgcacgcttaaaggta

SEQ ID NO: 2782804 - DNA, 25 bp, Homo sapien
catctgaaccattgtgctaagaaaa

SEQ ID NO: 2782805 - DNA, 25 bp, Homo sapien
catacaatcaccatgagctaggaat

SEQ ID NO: 2782806 - DNA, 25 bp, Homo sapien
tttgttagttgaccatcagccatca

SEQ ID NO: 2782807 - DNA, 25 bp, Homo sapien
tgagacagcctcaaggatctggtgg

SEQ ID NO: 2782808 - DNA, 25 bp, Homo sapien
tctcaggtgagtgtccagggtatac

SEQ ID NO: 2782809 - DNA, 25 bp, Homo sapien
caaggtctgtttcagctgggtctca

SEQ ID NO: 2782810 - DNA, 25 bp, Homo sapien
ccaagaggccttgtgggatgaacct

SEQ ID NO: 2782811 - DNA, 25 bp, Homo sapien
tgctttctcgctctagtgatatgct

SEQ ID NO: 2782812 - DNA, 25 bp, Homo sapien
caccccacctggacgatttctaagg

SEQ ID NO: 2782813 - DNA, 25 bp, Homo sapien
gaaatatcctccctatgttgaaatt

SEQ ID NO: 2782814 - DNA, 25 bp, Homo sapien
tagtaacactggaaatagaatccca

SEQ ID NO: 2782815 - DNA, 25 bp, Homo sapien
gctgaagcagtcatgctagggtaac

SEQ ID NO: 2782816 - DNA, 25 bp, Homo sapien
gtgcatctgataccataaatccagg

SEQ ID NO: 2782817 - DNA, 25 bp, Homo sapien
agtcaaagaagctcttatctcttcg

SEQ ID NO: 2782818 - DNA, 25 bp, Homo sapien
gacaccaggctcacatgttcaattt

SEQ ID NO: 2782819 - DNA, 25 bp, Homo sapien
cttttggcaccatgactgtgagatc

SEQ ID NO: 2782820 - DNA, 25 bp, Homo sapien
tgactgtgagatctggttcttgttc

SEQ ID NO: 2782821 - DNA, 25 bp, Homo sapien
caccatgactgtgagatctggttct

SEQ ID NO: 2782822 - DNA, 25 bp, Homo sapien
tggcaccatgactgtgagatctggt

SEQ ID NO: 2782823 - DNA, 25 bp, Homo sapien
gtcttgttggagagtttgtatttta

SEQ ID NO: 2782824 - DNA, 25 bp, Homo sapien
gctgcgttcctgatggccaaaaggt

SEQ ID NO: 2782825 - DNA, 25 bp, Homo sapien
tcttgttggagagtttgtattttat

SEQ ID NO: 2782826 - DNA, 25 bp, Homo sapien
tgctgcgttcctgatggccaaaagg

SEQ ID NO: 2782827 - DNA, 25 bp, Homo sapien
gactcaggtactgaaaggtcatttc

SEQ ID NO: 2782828 - DNA, 25 bp, Homo sapien
gcagttttggagcacttagcaatga

SEQ ID NO: 2782829 - DNA, 25 bp, Homo sapien
tggtgtgaagactcaggtactgaaa

SEQ ID NO: 2782830 - DNA, 25 bp, Homo sapien
tactgtactcagcagttttggagca

SEQ ID NO: 2782831 - DNA, 25 bp, Homo sapien
gccaactcacctagccagggaaaag

SEQ ID NO: 2782832 - DNA, 25 bp, Homo sapien
tcttagtgccaatataaaacagcca

SEQ ID NO: 2782833 - DNA, 25 bp, Homo sapien
gtagtggtatcaaactcttagtgcc

SEQ ID NO: 2782834 - DNA, 25 bp, Homo sapien
tactcatggccaggtcaaatacttg

SEQ ID NO: 2782835 - DNA, 25 bp, Homo sapien
gaagctttggcattcgtctacatcc

SEQ ID NO: 2782836 - DNA, 25 bp, Homo sapien
ctgacagatcttattgggagcaacc

SEQ ID NO: 2782837 - DNA, 25 bp, Homo sapien
gaaacatttcaagcctagggaagca

SEQ ID NO: 2782838 - DNA, 25 bp, Homo sapien
tagggaagcaatcttgtgagctgac

SEQ ID NO: 2782839 - DNA, 25 bp, Homo sapien
ctttatgcacaacttaggacaaatt

SEQ ID NO: 2782840 - DNA, 25 bp, Homo sapien
gaactttcaaatatactacaatctt

SEQ ID NO: 2782841 - DNA, 25 bp, Homo sapien
tgtatatcattaatctttatgcaca

SEQ ID NO: 2782842 - DNA, 25 bp, Homo sapien
cactaagttgagcagataccatgat

SEQ ID NO: 2782843 - DNA, 25 bp, Homo sapien
ctttccaattccccctagtagctgt

SEQ ID NO: 2782844 - DNA, 25 bp, Homo sapien
tgtttgactgtcttgtactctctct

SEQ ID NO: 2782845 - DNA, 25 bp, Homo sapien
aacttgtttgactgtcttgtactct

SEQ ID NO: 2782846 - DNA, 25 bp, Homo sapien
acttgtttgactgtcttgtactctc

SEQ ID NO: 2782847 - DNA, 25 bp, Homo sapien
tttctgagatgtgatcttgaattcc

SEQ ID NO: 2782848 - DNA, 25 bp, Homo sapien
gagatgtgatcttgaattccattta

SEQ ID NO: 2782849 - DNA, 25 bp, Homo sapien
gatgtgatcttgaattccatttaat

SEQ ID NO: 2782850 - DNA, 25 bp, Homo sapien
tctttctgagatgtgatcttgaatt

SEQ ID NO: 2782851 - DNA, 25 bp, Homo sapien
tataggctggtacttctcaaacaac

SEQ ID NO: 2782852 - DNA, 25 bp, Homo sapien
tataagcagttgcagcagttatggc

SEQ ID NO: 2782853 - DNA, 25 bp, Homo sapien
gccaatagcctgattatgtagactc

SEQ ID NO: 2782854 - DNA, 25 bp, Homo sapien
taaaaaggaacattcgacctatggc

SEQ ID NO: 2782855 - DNA, 25 bp, Homo sapien
ctttgaagatgtaacctcacagcga

SEQ ID NO: 2782856 - DNA, 25 bp, Homo sapien
atttccataagttgtaagcacattg

SEQ ID NO: 2782857 - DNA, 25 bp, Homo sapien
tctatcatagcatacttaatcgaat

SEQ ID NO: 2782858 - DNA, 25 bp, Homo sapien
taacaactttgctcctctatcatag

SEQ ID NO: 2782859 - DNA, 25 bp, Homo sapien
tgactttaacattgagccctaggga

SEQ ID NO: 2782860 - DNA, 25 bp, Homo sapien
taaattgtatttggccccaacagga

SEQ ID NO: 2782861 - DNA, 25 bp, Homo sapien
catactctggaaaatgcacttctgg

SEQ ID NO: 2782862 - DNA, 25 bp, Homo sapien
ccctagggatttgtgaacgagatga

SEQ ID NO: 2782863 - DNA, 25 bp, Homo sapien
taggtcattcatgttagaccctggc

SEQ ID NO: 2782864 - DNA, 25 bp, Homo sapien
aataatcaacacaccagccctaggg

SEQ ID NO: 2782865 - DNA, 25 bp, Homo sapien
agtgtaatggaaagaagccttcgca

SEQ ID NO: 2782866 - DNA, 25 bp, Homo sapien
aaagctgaacatgttagtcacactg

SEQ ID NO: 2782867 - DNA, 25 bp, Homo sapien
tctgatcggtcccttcacgaagaaa

SEQ ID NO: 2782868 - DNA, 25 bp, Homo sapien
tgaagactaccctagacctcctgtg

SEQ ID NO: 2782869 - DNA, 25 bp, Homo sapien
tacagagcctttctagagatgagct

SEQ ID NO: 2782870 - DNA, 25 bp, Homo sapien
gctagggctcgtgaaaccaaagcac

SEQ ID NO: 2782871 - DNA, 25 bp, Homo sapien
taatgaggaccttattgctgatgcc

SEQ ID NO: 2782872 - DNA, 25 bp, Homo sapien
gcaagttctatgagagcctgagcac

SEQ ID NO: 2782873 - DNA, 25 bp, Homo sapien
gatacgccacagcatcgactctgga

SEQ ID NO: 2782874 - DNA, 25 bp, Homo sapien
gaagggttacctaactccaggcaca

SEQ ID NO: 2782875 - DNA, 25 bp, Homo sapien
tccaggaatgccttctaaagggaaa

SEQ ID NO: 2782876 - DNA, 25 bp, Homo sapien
agggaaaattattcacgtgcatcat

SEQ ID NO: 2782877 - DNA, 25 bp, Homo sapien
caggaatgccttctaaagggaaaat

SEQ ID NO: 2782878 - DNA, 25 bp, Homo sapien
catatccaggaatgccttctaaagg

SEQ ID NO: 2782879 - DNA, 25 bp, Homo sapien
cttgtctcctacgttacatgtagtg

SEQ ID NO: 2782880 - DNA, 25 bp, Homo sapien
tctcctacgttacatgtagtgattt

SEQ ID NO: 2782881 - DNA, 25 bp, Homo sapien
tatttttcttgtctcctacgttaca

SEQ ID NO: 2782882 - DNA, 25 bp, Homo sapien
ttttcttgtctcctacgttacatgt

SEQ ID NO: 2782883 - DNA, 25 bp, Homo sapien
tgggcaattattgcaacaagtattg

SEQ ID NO: 2782884 - DNA, 25 bp, Homo sapien
ctatcgtgggcaattattgcaacaa

SEQ ID NO: 2782885 - DNA, 25 bp, Homo sapien
tatcgtgggcaattattgcaacaag

SEQ ID NO: 2782886 - DNA, 25 bp, Homo sapien
cgtgggcaattattgcaacaagtat

SEQ ID NO: 2782887 - DNA, 25 bp, Homo sapien
gaaaccatgtatcaccaaagccaac

SEQ ID NO: 2782888 - DNA, 25 bp, Homo sapien
cgtctgagacgtgtcggacaaaggc

SEQ ID NO: 2782889 - DNA, 25 bp, Homo sapien
gtctgagacgtgtcggacaaaggcc

SEQ ID NO: 2782890 - DNA, 25 bp, Homo sapien
agaggggctagaaaccatgtatcac

SEQ ID NO: 2782891 - DNA, 25 bp, Homo sapien
aagatgctgtcacgatgaaattcat

SEQ ID NO: 2782892 - DNA, 25 bp, Homo sapien
cattaactaccatcatgacttcaga

SEQ ID NO: 2782893 - DNA, 25 bp, Homo sapien
taccatcatgacttcagaagatgct

SEQ ID NO: 2782894 - DNA, 25 bp, Homo sapien
taactaccatcatgacttcagaaga

SEQ ID NO: 2782895 - DNA, 25 bp, Homo sapien
acaatggcaacaggctcctgctgga

SEQ ID NO: 2782896 - DNA, 25 bp, Homo sapien
agcagaacctttggaatcctcgcag

SEQ ID NO: 2782897 - DNA, 25 bp, Homo sapien
gattctcatgcccaagctatacaga

SEQ ID NO: 2782898 - DNA, 25 bp, Homo sapien
tgatcagctcaggacacttgcaggc

SEQ ID NO: 2782899 - DNA, 25 bp, Homo sapien
gaccacatggtgatttttggacagg

SEQ ID NO: 2782900 - DNA, 25 bp, Homo sapien
taaaacgttgcaatccctatcactg

SEQ ID NO: 2782901 - DNA, 25 bp, Homo sapien
catttagctgcagatgaccacatgg

SEQ ID NO: 2782902 - DNA, 25 bp, Homo sapien
aatcctatggaagccggttctgcag

SEQ ID NO: 2782903 - DNA, 25 bp, Homo sapien
ctaataaagaggtgagtgtgccatc

SEQ ID NO: 2782904 - DNA, 25 bp, Homo sapien
tctgaaggcatgctgttctgaacat

SEQ ID NO: 2782905 - DNA, 25 bp, Homo sapien
ggcaagttctagcaaagtctgaagg

SEQ ID NO: 2782906 - DNA, 25 bp, Homo sapien
agaagcctttcatgaagccgcagtt

SEQ ID NO: 2782907 - DNA, 25 bp, Homo sapien
ttgaccaacgcatgaaacctctgtg

SEQ ID NO: 2782908 - DNA, 25 bp, Homo sapien
tccttatccgtagcatggaagtaat

SEQ ID NO: 2782909 - DNA, 25 bp, Homo sapien
aacctctgtgagacacaatttcctt

SEQ ID NO: 2782910 - DNA, 25 bp, Homo sapien
caaatgtgtataccatcttggagtc

SEQ ID NO: 2782911 - DNA, 25 bp, Homo sapien
gacagcctctcttcatagactgcag

SEQ ID NO: 2782912 - DNA, 25 bp, Homo sapien
gcaactgtgatagccccaaatccct

SEQ ID NO: 2782913 - DNA, 25 bp, Homo sapien
tagtgctaaactcccagtccaaggg

SEQ ID NO: 2782914 - DNA, 25 bp, Homo sapien
cagtccatttgagatgaggctgctg

SEQ ID NO: 2782915 - DNA, 25 bp, Homo sapien
gaacatcttatgacttttctgggta

SEQ ID NO: 2782916 - DNA, 25 bp, Homo sapien
gctatccaggctggctagccgttgg

SEQ ID NO: 2782917 - DNA, 25 bp, Homo sapien
ctgggtactgttaggcaatagagac

SEQ ID NO: 2782918 - DNA, 25 bp, Homo sapien
caatagagacctttgcattcatgct

SEQ ID NO: 2782919 - DNA, 25 bp, Homo sapien
tcacatgttggagacctggcagatg

SEQ ID NO: 2782920 - DNA, 25 bp, Homo sapien
ggtcctctggctgcaactcctttga

SEQ ID NO: 2782921 - DNA, 25 bp, Homo sapien
tcttgctcttggagccaaactggct

SEQ ID NO: 2782922 - DNA, 25 bp, Homo sapien
tcctttgactcaagcaagagccttg

SEQ ID NO: 2782923 - DNA, 25 bp, Homo sapien
taggagagacattttggagtacaat

SEQ ID NO: 2782924 - DNA, 25 bp, Homo sapien
catacacagttgttagaaacatgga

SEQ ID NO: 2782925 - DNA, 25 bp, Homo sapien
catgtaacagggttgaaggtgctta

SEQ ID NO: 2782926 - DNA, 25 bp, Homo sapien
tacaaaaatgattgctcaagtgcac

SEQ ID NO: 2782927 - DNA, 25 bp, Homo sapien
gacctttggtttgatatcagctatt

SEQ ID NO: 2782928 - DNA, 25 bp, Homo sapien
aggacctttggtttgatatcagcta

SEQ ID NO: 2782929 - DNA, 25 bp, Homo sapien
gaaggacctttggtttgatatcagc

SEQ ID NO: 2782930 - DNA, 25 bp, Homo sapien
cctttggtttgatatcagctatttt

SEQ ID NO: 2782931 - DNA, 25 bp, Homo sapien
ctctatcatctagacctgagtgcag

SEQ ID NO: 2782932 - DNA, 25 bp, Homo sapien
ctatcatctagacctgagtgcagtg

SEQ ID NO: 2782933 - DNA, 25 bp, Homo sapien
tctatcatctagacctgagtgcagt

SEQ ID NO: 2782934 - DNA, 25 bp, Homo sapien
gtacacagtatgagaataaacagga

SEQ ID NO: 2782935 - DNA, 25 bp, Homo sapien
taagcccattctacaggtttaggca

SEQ ID NO: 2782936 - DNA, 25 bp, Homo sapien
ctggaacatgaggaggagttacctt

SEQ ID NO: 2782937 - DNA, 25 bp, Homo sapien
aaacaggaagccctcttaagcccat

SEQ ID NO: 2782938 - DNA, 25 bp, Homo sapien
tcactttccgccatatgatgtcaca

SEQ ID NO: 2782939 - DNA, 25 bp, Homo sapien
caagaaagccctcgcaagatgctgg

SEQ ID NO: 2782940 - DNA, 25 bp, Homo sapien
cacagactgacttagcttaacctaa

SEQ ID NO: 2782941 - DNA, 25 bp, Homo sapien
aagatgctggcacgttgatattgga

SEQ ID NO: 2782942 - DNA, 25 bp, Homo sapien
tagtttcttagactagggcctgccc

SEQ ID NO: 2782943 - DNA, 25 bp, Homo sapien
taactgatcaggtctattccagagg

SEQ ID NO: 2782944 - DNA, 25 bp, Homo sapien
tcacacttcaggtggctgtcttaga

SEQ ID NO: 2782945 - DNA, 25 bp, Homo sapien
gatgcattgaataggaagccagctg

SEQ ID NO: 2782946 - DNA, 25 bp, Homo sapien
taatttatcaagcattccctggcag

SEQ ID NO: 2782947 - DNA, 25 bp, Homo sapien
gcccaacaactatgtgaaatctgag

SEQ ID NO: 2782948 - DNA, 25 bp, Homo sapien
aataatgattgggtattccctagca

SEQ ID NO: 2782949 - DNA, 25 bp, Homo sapien
tcagaatgtccctaggaagccaggc

SEQ ID NO: 2782950 - DNA, 25 bp, Homo sapien
gactattttagaatgactgacatca

SEQ ID NO: 2782951 - DNA, 25 bp, Homo sapien
caaagcgcatcagcacctgggagac

SEQ ID NO: 2782952 - DNA, 25 bp, Homo sapien
gaagacctactgtagttgccaaagc

SEQ ID NO: 2782953 - DNA, 25 bp, Homo sapien
catgcccaatcttaaggaagaccta

SEQ ID NO: 2782954 - DNA, 25 bp, Homo sapien
caccagtgagacagccattcaatcc

SEQ ID NO: 2782955 - DNA, 25 bp, Homo sapien
tggaacaccagtgagacagccattc

SEQ ID NO: 2782956 - DNA, 25 bp, Homo sapien
gtgagacagccattcaatcccctgg

SEQ ID NO: 2782957 - DNA, 25 bp, Homo sapien
gaacaccagtgagacagccattcaa

SEQ ID NO: 2782958 - DNA, 25 bp, Homo sapien
aaagtcacgggtggcctgaaggctc

SEQ ID NO: 2782959 - DNA, 25 bp, Homo sapien
tgaaggctcctagcgtgaacaactg

SEQ ID NO: 2782960 - DNA, 25 bp, Homo sapien
gaaatggtcaatgggcagtgcacag

SEQ ID NO: 2782961 - DNA, 25 bp, Homo sapien
caaggcatcctagtagaaatggtca

SEQ ID NO: 2782962 - DNA, 25 bp, Homo sapien
tctggagccggagttcttcctctca

SEQ ID NO: 2782963 - DNA, 25 bp, Homo sapien
tgggaaatgcccaaattgaaacttg

SEQ ID NO: 2782964 - DNA, 25 bp, Homo sapien
catcaatgctcccagtgaagaataa

SEQ ID NO: 2782965 - DNA, 25 bp, Homo sapien
taatgccccaaccttaaagaagagc

SEQ ID NO: 2782966 - DNA, 25 bp, Homo sapien
agaacaacaggagcaaatctggtat

SEQ ID NO: 2782967 - DNA, 25 bp, Homo sapien
acagtatgtgggctgcaaatataac

SEQ ID NO: 2782968 - DNA, 25 bp, Homo sapien
taacaaaattagtgcctctatattt

SEQ ID NO: 2782969 - DNA, 25 bp, Homo sapien
agtgcctctatattttgctctgcag

SEQ ID NO: 2782970 - DNA, 25 bp, Homo sapien
tgcttggtatccatcaggaaatgtt

SEQ ID NO: 2782971 - DNA, 25 bp, Homo sapien
agtaaaagaaaagaccatcagttct

SEQ ID NO: 2782972 - DNA, 25 bp, Homo sapien
gcaatgacccaatgtcactgtagtg

SEQ ID NO: 2782973 - DNA, 25 bp, Homo sapien
tacaggcaggctaatattgcaaaca

SEQ ID NO: 2782974 - DNA, 25 bp, Homo sapien
cagaactgcttagacttttgtgtag

SEQ ID NO: 2782975 - DNA, 25 bp, Homo sapien
ttgtggttgcctcagaagctgtgca

SEQ ID NO: 2782976 - DNA, 25 bp, Homo sapien
tcttctcttggaaacctaatctgtg

SEQ ID NO: 2782977 - DNA, 25 bp, Homo sapien
tgtgaagcactcactgagaacactg

SEQ ID NO: 2782978 - DNA, 25 bp, Homo sapien
aagcactcactgagaacactgaaag

SEQ ID NO: 2782979 - DNA, 25 bp, Homo sapien
gcctcttgctaccccatctcttctt

SEQ ID NO: 2782980 - DNA, 25 bp, Homo sapien
taatgagggacaatcaacaaggcta

SEQ ID NO: 2782981 - DNA, 25 bp, Homo sapien
gttcctggaatatgtctgacagtca

SEQ ID NO: 2782982 - DNA, 25 bp, Homo sapien
gctcaaagcaagttatcaccaattc

SEQ ID NO: 2782983 - DNA, 25 bp, Homo sapien
tctggaattcaaacccctgggactg

SEQ ID NO: 2782984 - DNA, 25 bp, Homo sapien
tatctcaagccatataatcaagttg

SEQ ID NO: 2782985 - DNA, 25 bp, Homo sapien
ctagatctgtgatttaccaaggtgc

SEQ ID NO: 2782986 - DNA, 25 bp, Homo sapien
tgtcatgttggtctaggcacctaca

SEQ ID NO: 2782987 - DNA, 25 bp, Homo sapien
ggcacctacaatacaactagatctg

SEQ ID NO: 2782988 - DNA, 25 bp, Homo sapien
taaagttgcaatgtctccagtcaga

SEQ ID NO: 2782989 - DNA, 25 bp, Homo sapien
catgaactgattgtcttcctagggt

SEQ ID NO: 2782990 - DNA, 25 bp, Homo sapien
tgcacattgagttccctccaggtat

SEQ ID NO: 2782991 - DNA, 25 bp, Homo sapien
catagttgctggagtaaggttacaa

SEQ ID NO: 2782992 - DNA, 25 bp, Homo sapien
cactattacaaccagcccatgctaa

SEQ ID NO: 2782993 - DNA, 25 bp, Homo sapien
tacaaccagcccatgctaatgagaa

SEQ ID NO: 2782994 - DNA, 25 bp, Homo sapien
aacaggtatgcactattacaaccag

SEQ ID NO: 2782995 - DNA, 25 bp, Homo sapien
acaacatatacccacacactttcaa

SEQ ID NO: 2782996 - DNA, 25 bp, Homo sapien
tgaggactcccatatgcctttggct

SEQ ID NO: 2782997 - DNA, 25 bp, Homo sapien
gaaacacctgtttgttaggcactga

SEQ ID NO: 2782998 - DNA, 25 bp, Homo sapien
gcaacattttagctaaggccatacc

SEQ ID NO: 2782999 - DNA, 25 bp, Homo sapien
gatcatgctttgacgtttccctcag

SEQ ID NO: 2783000 - DNA, 25 bp, Homo sapien
caacaggaaaagttccagcagcaag

SEQ ID NO: 2783001 - DNA, 25 bp, Homo sapien
ttccagatctctgcttgaataaaat

SEQ ID NO: 2783002 - DNA, 25 bp, Homo sapien
ttttctgaccacgataagcacactg

SEQ ID NO: 2783003 - DNA, 25 bp, Homo sapien
acgataagcacactgtctgatccag

SEQ ID NO: 2783004 - DNA, 25 bp, Homo sapien
ccatctgcacagagtttcaaaaatg

SEQ ID NO: 2783005 - DNA, 25 bp, Homo sapien
gtttcaaaaatggtgatgtacttac

SEQ ID NO: 2783006 - DNA, 25 bp, Homo sapien
acagagtttcaaaaatggtgatgta

SEQ ID NO: 2783007 - DNA, 25 bp, Homo sapien
tctgcacagagtttcaaaaatggtg

SEQ ID NO: 2783008 - DNA, 25 bp, Homo sapien
ggaatgtgcatccagtacatcttct

SEQ ID NO: 2783009 - DNA, 25 bp, Homo sapien
cacattcagagtcccgcatagagat

SEQ ID NO: 2783010 - DNA, 25 bp, Homo sapien
tgaccacattcagagtcccgcatag

SEQ ID NO: 2783011 - DNA, 25 bp, Homo sapien
taagagactcctgatagggaatgtg

SEQ ID NO: 2783012 - DNA, 25 bp, Homo sapien
cttatatctaatcaaggtcagccac

SEQ ID NO: 2783013 - DNA, 25 bp, Homo sapien
tctgtatcaggggacacctttgtca

SEQ ID NO: 2783014 - DNA, 25 bp, Homo sapien
tcattttgtcatccaaattttgagg

SEQ ID NO: 2783015 - DNA, 25 bp, Homo sapien
tctccagcattgactgagaatttaa

SEQ ID NO: 2783016 - DNA, 25 bp, Homo sapien
ttcaattctccagcattgactgaga

SEQ ID NO: 2783017 - DNA, 25 bp, Homo sapien
acttgtttctgacagctcttgttga

SEQ ID NO: 2783018 - DNA, 25 bp, Homo sapien
caaacttgtttctgacagctcttgt

SEQ ID NO: 2783019 - DNA, 25 bp, Homo sapien
gaagctgctctttagtcacaaactt

SEQ ID NO: 2783020 - DNA, 25 bp, Homo sapien
agctgctctttagtcacaaacttgt

SEQ ID NO: 2783021 - DNA, 25 bp, Homo sapien
tcatttaccatgaccatcaggcatc

SEQ ID NO: 2783022 - DNA, 25 bp, Homo sapien
catttaccatgaccatcaggcatct

SEQ ID NO: 2783023 - DNA, 25 bp, Homo sapien
gccttgacctggaaaagctgccacc

SEQ ID NO: 2783024 - DNA, 25 bp, Homo sapien
gggccttgacctggaaaagctgcca

SEQ ID NO: 2783025 - DNA, 25 bp, Homo sapien
gtgtcaaatacagaaggtactgaag

SEQ ID NO: 2783026 - DNA, 25 bp, Homo sapien
tatggagttccgatacgtgcaaagc

SEQ ID NO: 2783027 - DNA, 25 bp, Homo sapien
cgtgcaaagcttcgtagatactaaa

SEQ ID NO: 2783028 - DNA, 25 bp, Homo sapien
gaagcaggtatggagttccgatacg

SEQ ID NO: 2783029 - DNA, 25 bp, Homo sapien
tccgatacgtgcaaagcttcgtaga

SEQ ID NO: 2783030 - DNA, 25 bp, Homo sapien
accagttgtcatgctaatgtgcaca

SEQ ID NO: 2783031 - DNA, 25 bp, Homo sapien
tgctgacagactaaacaaaattgct

SEQ ID NO: 2783032 - DNA, 25 bp, Homo sapien
aagtaaatcccaatcattgccactg

SEQ ID NO: 2783033 - DNA, 25 bp, Homo sapien
ttttccagagtgaatgcatcaagta

SEQ ID NO: 2783034 - DNA, 25 bp, Homo sapien
gtaagtcaattccatgggcccagtg

SEQ ID NO: 2783035 - DNA, 25 bp, Homo sapien
gggcccagtgatggtatccatttaa

SEQ ID NO: 2783036 - DNA, 25 bp, Homo sapien
tcactcacgcacagagagaaaggaa

SEQ ID NO: 2783037 - DNA, 25 bp, Homo sapien
gtaagttgtgaataataaccccatg

SEQ ID NO: 2783038 - DNA, 25 bp, Homo sapien
aaatgggccaccctgtatattctga

SEQ ID NO: 2783039 - DNA, 25 bp, Homo sapien
tttccagtaaagaactgtgttgatg

SEQ ID NO: 2783040 - DNA, 25 bp, Homo sapien
ccagtaaagaactgtgttgatgtaa

SEQ ID NO: 2783041 - DNA, 25 bp, Homo sapien
gccaccctgtatattctgaatgagc

SEQ ID NO: 2783042 - DNA, 25 bp, Homo sapien
gccaattctggacagtgtgttgaaa

SEQ ID NO: 2783043 - DNA, 25 bp, Homo sapien
acagtgtgttgaaatatgcttccca

SEQ ID NO: 2783044 - DNA, 25 bp, Homo sapien
ctacgttggcaagagcgtcatcaga

SEQ ID NO: 2783045 - DNA, 25 bp, Homo sapien
ctgggagtgacaggcatgttctagc

SEQ ID NO: 2783046 - DNA, 25 bp, Homo sapien
gacaggggtgacgtgctgatcagca

SEQ ID NO: 2783047 - DNA, 25 bp, Homo sapien
cttgacaggggtgacgtgctgatca

SEQ ID NO: 2783048 - DNA, 25 bp, Homo sapien
caggggtgacgtgctgatcagcaaa

SEQ ID NO: 2783049 - DNA, 25 bp, Homo sapien
gtcttgacaggggtgacgtgctgat

SEQ ID NO: 2783050 - DNA, 25 bp, Homo sapien
caatcacagcaagagccacataatc

SEQ ID NO: 2783051 - DNA, 25 bp, Homo sapien
cagcaagagccacataatccttaca

SEQ ID NO: 2783052 - DNA, 25 bp, Homo sapien
ttcttgaggagaagccaaccaatca

SEQ ID NO: 2783053 - DNA, 25 bp, Homo sapien
tcttgaggagaagccaaccaatcaa

SEQ ID NO: 2783054 - DNA, 25 bp, Homo sapien
cagtgtgggaaaacagagtaccaac

SEQ ID NO: 2783055 - DNA, 25 bp, Homo sapien
tctgtgcagctaccaggtaagaact

SEQ ID NO: 2783056 - DNA, 25 bp, Homo sapien
tctgcttagggattagcatcaccca

SEQ ID NO: 2783057 - DNA, 25 bp, Homo sapien
tgtttacctgcaactaagggattga

SEQ ID NO: 2783058 - DNA, 25 bp, Homo sapien
ccaatctatgtgcatgtaaacccaa

SEQ ID NO: 2783059 - DNA, 25 bp, Homo sapien
tctagtctggaagggtatggatccc

SEQ ID NO: 2783060 - DNA, 25 bp, Homo sapien
gagtcatggtgacaaagtccacaca

SEQ ID NO: 2783061 - DNA, 25 bp, Homo sapien
tccacacaaatggttaatcattgag

SEQ ID NO: 2783062 - DNA, 25 bp, Homo sapien
agaaagaccatgtcttcttaagaag

SEQ ID NO: 2783063 - DNA, 25 bp, Homo sapien
gaaagaccatgtcttcttaagaaga

SEQ ID NO: 2783064 - DNA, 25 bp, Homo sapien
gctcgtacgaacaggcttcacatct

SEQ ID NO: 2783065 - DNA, 25 bp, Homo sapien
gcacacgtgaataataagctgcaag

SEQ ID NO: 2783066 - DNA, 25 bp, Homo sapien
gctgcaaggttatccaaggttttct

SEQ ID NO: 2783067 - DNA, 25 bp, Homo sapien
catcagtagcaacggcttcagctcg

SEQ ID NO: 2783068 - DNA, 25 bp, Homo sapien
cttaaacatgacaagccaatcggca

SEQ ID NO: 2783069 - DNA, 25 bp, Homo sapien
ttaaacatgacaagccaatcggcat

SEQ ID NO: 2783070 - DNA, 25 bp, Homo sapien
cctcaggtcttttgatttcgtggaa

SEQ ID NO: 2783071 - DNA, 25 bp, Homo sapien
ggaaaatcttcctcaggtcttttga

SEQ ID NO: 2783072 - DNA, 25 bp, Homo sapien
cttttgatttcgtggaaagccaact

SEQ ID NO: 2783073 - DNA, 25 bp, Homo sapien
ttcgtggaaagccaactatgccttt

SEQ ID NO: 2783074 - DNA, 25 bp, Homo sapien
gaacaatgccctcttctagatacct

SEQ ID NO: 2783075 - DNA, 25 bp, Homo sapien
ttacacaaggacaggatcatcagta

SEQ ID NO: 2783076 - DNA, 25 bp, Homo sapien
tagcctaggcttacacaaggacagg

SEQ ID NO: 2783077 - DNA, 25 bp, Homo sapien
tatgagaacaatgccctcttctaga

SEQ ID NO: 2783078 - DNA, 25 bp, Homo sapien
gggttactccaagccacttgcctta

SEQ ID NO: 2783079 - DNA, 25 bp, Homo sapien
gaagcaaggtctttccaatcaacag

SEQ ID NO: 2783080 - DNA, 25 bp, Homo sapien
caaggaggtttgacgagaggttcaa

SEQ ID NO: 2783081 - DNA, 25 bp, Homo sapien
gccctatcaaacaacagaagtgctt

SEQ ID NO: 2783082 - DNA, 25 bp, Homo sapien
gaataaacatgttagactcagtagg

SEQ ID NO: 2783083 - DNA, 25 bp, Homo sapien
tatggaaaacttgagatactctttc

SEQ ID NO: 2783084 - DNA, 25 bp, Homo sapien
gatgcctgtggatattatgaacgtc

SEQ ID NO: 2783085 - DNA, 25 bp, Homo sapien
taagtgtatgcatagcgaatggagg

SEQ ID NO: 2783086 - DNA, 25 bp, Homo sapien
tgtctcactcctcttatggccatta

SEQ ID NO: 2783087 - DNA, 25 bp, Homo sapien
ggccattacatctaccaaactcaga

SEQ ID NO: 2783088 - DNA, 25 bp, Homo sapien
tgccatctaggtgttaaaatcctgg

SEQ ID NO: 2783089 - DNA, 25 bp, Homo sapien
gacaataacactttcccagtcagag

SEQ ID NO: 2783090 - DNA, 25 bp, Homo sapien
atgaatactgtatatcaaagtcagg

SEQ ID NO: 2783091 - DNA, 25 bp, Homo sapien
tgaatactgtatatcaaagtcagga

SEQ ID NO: 2783092 - DNA, 25 bp, Homo sapien
ttatgaatactgtatatcaaagtca

SEQ ID NO: 2783093 - DNA, 25 bp, Homo sapien
gaatactgtatatcaaagtcaggag

SEQ ID NO: 2783094 - DNA, 25 bp, Homo sapien
ggaatcaaagaaacgccactacgta

SEQ ID NO: 2783095 - DNA, 25 bp, Homo sapien
gaatcaaagaaacgccactacgtac

SEQ ID NO: 2783096 - DNA, 25 bp, Homo sapien
aggaatcaaagaaacgccactacgt

SEQ ID NO: 2783097 - DNA, 25 bp, Homo sapien
gtatgggaataaaactgcattctta

SEQ ID NO: 2783098 - DNA, 25 bp, Homo sapien
tatgggaataaaactgcattcttat

SEQ ID NO: 2783099 - DNA, 25 bp, Homo sapien
tagtaccagtctccaggattcttgc

SEQ ID NO: 2783100 - DNA, 25 bp, Homo sapien
cactcctagtaccagtctccaggat

SEQ ID NO: 2783101 - DNA, 25 bp, Homo sapien
tctccaggattcttgccctgacttg

SEQ ID NO: 2783102 - DNA, 25 bp, Homo sapien
cacctcaaccactcctagtaccagt

SEQ ID NO: 2783103 - DNA, 25 bp, Homo sapien
cacaaggtcttcgttcagccacggg

SEQ ID NO: 2783104 - DNA, 25 bp, Homo sapien
caggttttctcgcaaggatttcaca

SEQ ID NO: 2783105 - DNA, 25 bp, Homo sapien
cactggagagagcttgggagaaacc

SEQ ID NO: 2783106 - DNA, 25 bp, Homo sapien
cagccacgggtttggacaatgcgga

SEQ ID NO: 2783107 - DNA, 25 bp, Homo sapien
ttgtacagctggcaagaatccaggg

SEQ ID NO: 2783108 - DNA, 25 bp, Homo sapien
caactttgtacagctggcaagaatc

SEQ ID NO: 2783109 - DNA, 25 bp, Homo sapien
tacagctggcaagaatccagggcaa

SEQ ID NO: 2783110 - DNA, 25 bp, Homo sapien
ctggtcaactttgtacagctggcaa

SEQ ID NO: 2783111 - DNA, 25 bp, Homo sapien
gctgctgttagtgcattcagtcgcc

SEQ ID NO: 2783112 - DNA, 25 bp, Homo sapien
tgagcctgctgctgttagtgcattc

SEQ ID NO: 2783113 - DNA, 25 bp, Homo sapien
ctgttagtgcattcagtcgcctgcc

SEQ ID NO: 2783114 - DNA, 25 bp, Homo sapien
tcgctcacggtcccggaaatgtcca

SEQ ID NO: 2783115 - DNA, 25 bp, Homo sapien
ccagcaattttaacacagcatgttt

SEQ ID NO: 2783116 - DNA, 25 bp, Homo sapien
gaatgccctctctaaatattactct

SEQ ID NO: 2783117 - DNA, 25 bp, Homo sapien
aataagttttgatagccactaaatg

SEQ ID NO: 2783118 - DNA, 25 bp, Homo sapien
tgcaatacaatttaggtaagaacct

SEQ ID NO: 2783119 - DNA, 25 bp, Homo sapien
agagattaatgtttccaggaaccct

SEQ ID NO: 2783120 - DNA, 25 bp, Homo sapien
cagagattaatgtttccaggaaccc

SEQ ID NO: 2783121 - DNA, 25 bp, Homo sapien
gtccagagattaatgtttccaggaa

SEQ ID NO: 2783122 - DNA, 25 bp, Homo sapien
ccagagattaatgtttccaggaacc

SEQ ID NO: 2783123 - DNA, 25 bp, Homo sapien
cctgattttctggagtgcgttcttt

SEQ ID NO: 2783124 - DNA, 25 bp, Homo sapien
gaatgatgacttagttcgggtactg

SEQ ID NO: 2783125 - DNA, 25 bp, Homo sapien
tagttcgggtactggctgccctggt

SEQ ID NO: 2783126 - DNA, 25 bp, Homo sapien
gaatgcttccagcagaatgatgact

SEQ ID NO: 2783127 - DNA, 25 bp, Homo sapien
tattgcctgtccatagattgctcca

SEQ ID NO: 2783128 - DNA, 25 bp, Homo sapien
cctgttgggagactatggacaaact

SEQ ID NO: 2783129 - DNA, 25 bp, Homo sapien
gatgtataaaggcaactgaaggcca

SEQ ID NO: 2783130 - DNA, 25 bp, Homo sapien
cctggagaccatgctaacataaaga

SEQ ID NO: 2783131 - DNA, 25 bp, Homo sapien
ttcctcctccaacttccctttgcat

SEQ ID NO: 2783132 - DNA, 25 bp, Homo sapien
cttcctcctccaacttccctttgca

SEQ ID NO: 2783133 - DNA, 25 bp, Homo sapien
ctcttcctcctccaacttccctttg

SEQ ID NO: 2783134 - DNA, 25 bp, Homo sapien
tcttcctcctccaacttccctttgc

SEQ ID NO: 2783135 - DNA, 25 bp, Homo sapien
aatgtcttatctcttgcctccagcc

SEQ ID NO: 2783136 - DNA, 25 bp, Homo sapien
gacatgttgacatgaattggtctca

SEQ ID NO: 2783137 - DNA, 25 bp, Homo sapien
gctagcctactatatttcacaggga

SEQ ID NO: 2783138 - DNA, 25 bp, Homo sapien
tggtctcatctcacatagatctgag

SEQ ID NO: 2783139 - DNA, 25 bp, Homo sapien
tatttcatggtagataatctgcaca

SEQ ID NO: 2783140 - DNA, 25 bp, Homo sapien
gcacatttcttatgcgccttatacc

SEQ ID NO: 2783141 - DNA, 25 bp, Homo sapien
tataccaaggctttcactaccggat

SEQ ID NO: 2783142 - DNA, 25 bp, Homo sapien
acagctctgtaacttcgtctcaggg

SEQ ID NO: 2783143 - DNA, 25 bp, Homo sapien
cacagagctatagcactgaagataa

SEQ ID NO: 2783144 - DNA, 25 bp, Homo sapien
tctgattttagagtacacagagcta

SEQ ID NO: 2783145 - DNA, 25 bp, Homo sapien
caccattcctgtctactttatgcca

SEQ ID NO: 2783146 - DNA, 25 bp, Homo sapien
ttctgtacgtttctgcacttggtgg

SEQ ID NO: 2783147 - DNA, 25 bp, Homo sapien
tacggagctgctgacgttacttctc

SEQ ID NO: 2783148 - DNA, 25 bp, Homo sapien
tcagaacctacggagctgctgacgt

SEQ ID NO: 2783149 - DNA, 25 bp, Homo sapien
gaacctacggagctgctgacgttac

SEQ ID NO: 2783150 - DNA, 25 bp, Homo sapien
gagctgctgacgttacttctcattt

SEQ ID NO: 2783151 - DNA, 25 bp, Homo sapien
ttattgtttctctaattgagcctaa

SEQ ID NO: 2783152 - DNA, 25 bp, Homo sapien
ctttattgtttctctaattgagcct

SEQ ID NO: 2783153 - DNA, 25 bp, Homo sapien
tattgtttctctaattgagcctaat

SEQ ID NO: 2783154 - DNA, 25 bp, Homo sapien
ttgtttctctaattgagcctaatat

SEQ ID NO: 2783155 - DNA, 25 bp, Homo sapien
tcagacaaccgaaagttcatattca

SEQ ID NO: 2783156 - DNA, 25 bp, Homo sapien
ctttggggtctgttttgatcttgga

SEQ ID NO: 2783157 - DNA, 25 bp, Homo sapien
tcatattcacacacccaagtaacca

SEQ ID NO: 2783158 - DNA, 25 bp, Homo sapien
gaaagttcatattcacacacccaag

SEQ ID NO: 2783159 - DNA, 25 bp, Homo sapien
caccagatccttatggtaaagctaa

SEQ ID NO: 2783160 - DNA, 25 bp, Homo sapien
aagttcatgctttgtgcaacgtgca

SEQ ID NO: 2783161 - DNA, 25 bp, Homo sapien
ccaaaccagtggaatagacacagag

SEQ ID NO: 2783162 - DNA, 25 bp, Homo sapien
cattacaaccagaatgacatggcat

SEQ ID NO: 2783163 - DNA, 25 bp, Homo sapien
ccccatgggcttgtggcttccagtc

SEQ ID NO: 2783164 - DNA, 25 bp, Homo sapien
gtcattgtcctccatagtcattcca

SEQ ID NO: 2783165 - DNA, 25 bp, Homo sapien
tcagataatgctccctcttcaacag

SEQ ID NO: 2783166 - DNA, 25 bp, Homo sapien
tctgattttcctcagcccagtgaca

SEQ ID NO: 2783167 - DNA, 25 bp, Homo sapien
caaaaatatgcaagtctgccacaga

SEQ ID NO: 2783168 - DNA, 25 bp, Homo sapien
ttctttctcactttagctgtgtcct

SEQ ID NO: 2783169 - DNA, 25 bp, Homo sapien
gcaagtctgccacagatttattctt

SEQ ID NO: 2783170 - DNA, 25 bp, Homo sapien
attctttctcactttagctgtgtcc

SEQ ID NO: 2783171 - DNA, 25 bp, Homo sapien
tgtgaaggaaaccacgtggctccgg

SEQ ID NO: 2783172 - DNA, 25 bp, Homo sapien
gagtgactgacctgatgcagaagat

SEQ ID NO: 2783173 - DNA, 25 bp, Homo sapien
catctgtggtgcagagaagacaatt

SEQ ID NO: 2783174 - DNA, 25 bp, Homo sapien
gccagagtgtactggcatctgtggt

SEQ ID NO: 2783175 - DNA, 25 bp, Homo sapien
tttgctttattatccacagctaatg

SEQ ID NO: 2783176 - DNA, 25 bp, Homo sapien
tgctttattatccacagctaatgcc

SEQ ID NO: 2783177 - DNA, 25 bp, Homo sapien
gctttattatccacagctaatgcca

SEQ ID NO: 2783178 - DNA, 25 bp, Homo sapien
ctttattatccacagctaatgccat

SEQ ID NO: 2783179 - DNA, 25 bp, Homo sapien
gaagatggagcttgcaaggctgtct

SEQ ID NO: 2783180 - DNA, 25 bp, Homo sapien
cactgaacgttgagtcagtggaaga

SEQ ID NO: 2783181 - DNA, 25 bp, Homo sapien
tggagagtatcagtgctcccagctt

SEQ ID NO: 2783182 - DNA, 25 bp, Homo sapien
aacacactgaacgttccactgaacg

SEQ ID NO: 2783183 - DNA, 25 bp, Homo sapien
gcttcaaaacctcttcctcttccat

SEQ ID NO: 2783184 - DNA, 25 bp, Homo sapien
aaagtcctcctgcttcaaaacctct

SEQ ID NO: 2783185 - DNA, 25 bp, Homo sapien
tgcttcaaaacctcttcctcttcca

SEQ ID NO: 2783186 - DNA, 25 bp, Homo sapien
gtcctcctgcttcaaaacctcttcc

SEQ ID NO: 2783187 - DNA, 25 bp, Homo sapien
gataaacagcacttggcacctctag

SEQ ID NO: 2783188 - DNA, 25 bp, Homo sapien
taatggatttggcagtaggcaagct

SEQ ID NO: 2783189 - DNA, 25 bp, Homo sapien
ccatccaggaaggagctagattgac

SEQ ID NO: 2783190 - DNA, 25 bp, Homo sapien
ctaagtgaacacctctgaaagttgt

SEQ ID NO: 2783191 - DNA, 25 bp, Homo sapien
ttaccgacacggcatctgctcaatg

SEQ ID NO: 2783192 - DNA, 25 bp, Homo sapien
cctctcatcactgaattttgcattt

SEQ ID NO: 2783193 - DNA, 25 bp, Homo sapien
tcaatgctctgagaccttttcctct

SEQ ID NO: 2783194 - DNA, 25 bp, Homo sapien
taatggatctggctgaactttcaac

SEQ ID NO: 2783195 - DNA, 25 bp, Homo sapien
gctggttgatattgaatagaggctc

SEQ ID NO: 2783196 - DNA, 25 bp, Homo sapien
tccaaaacaactaagaagtgaacat

SEQ ID NO: 2783197 - DNA, 25 bp, Homo sapien
tcacggaggaactactatacgctgg

SEQ ID NO: 2783198 - DNA, 25 bp, Homo sapien
caaagacactaaaagcatctgtttg

SEQ ID NO: 2783199 - DNA, 25 bp, Homo sapien
taattacatggagcaaccattcgaa

SEQ ID NO: 2783200 - DNA, 25 bp, Homo sapien
gaggagtagcgctctacttttcaga

SEQ ID NO: 2783201 - DNA, 25 bp, Homo sapien
tcagcaaagcctaacaaagcctcag

SEQ ID NO: 2783202 - DNA, 25 bp, Homo sapien
gagtttccaagcgaattgttagcca

SEQ ID NO: 2783203 - DNA, 25 bp, Homo sapien
tccataaggctggacgtttcaccag

SEQ ID NO: 2783204 - DNA, 25 bp, Homo sapien
gagtgttaatgcctaactggccgct

SEQ ID NO: 2783205 - DNA, 25 bp, Homo sapien
aatgcagtctccttactcctgagtg

SEQ ID NO: 2783206 - DNA, 25 bp, Homo sapien
tcttccaggacattcccaaggctac

SEQ ID NO: 2783207 - DNA, 25 bp, Homo sapien
ttagggaagattgccctctgagttt

SEQ ID NO: 2783208 - DNA, 25 bp, Homo sapien
tagggaagattgccctctgagtttg

SEQ ID NO: 2783209 - DNA, 25 bp, Homo sapien
ttttggtggtgttatttcctgtgta

SEQ ID NO: 2783210 - DNA, 25 bp, Homo sapien
tggtggtgttatttcctgtgtagct

SEQ ID NO: 2783211 - DNA, 25 bp, Homo sapien
gctggtggcatcaaacatgtgggcc

SEQ ID NO: 2783212 - DNA, 25 bp, Homo sapien
aatcaggctggtggcatcaaacatg

SEQ ID NO: 2783213 - DNA, 25 bp, Homo sapien
caggctggtggcatcaaacatgtgg

SEQ ID NO: 2783214 - DNA, 25 bp, Homo sapien
aaaatcaggctggtggcatcaaaca

SEQ ID NO: 2783215 - DNA, 25 bp, Homo sapien
cacaaaatatctaagggttgtctcc

SEQ ID NO: 2783216 - DNA, 25 bp, Homo sapien
tcccatggacttaaaagaattgacc

SEQ ID NO: 2783217 - DNA, 25 bp, Homo sapien
tgggtttcagtcttagctctagcac

SEQ ID NO: 2783218 - DNA, 25 bp, Homo sapien
gaacaaattgctcgcatcttctggg

SEQ ID NO: 2783219 - DNA, 25 bp, Homo sapien
cacgcctgagttaagaatctggagc

SEQ ID NO: 2783220 - DNA, 25 bp, Homo sapien
catagtgtcgtgctcaaccaaaggg

SEQ ID NO: 2783221 - DNA, 25 bp, Homo sapien
cagggacgactgatacacacacggt

SEQ ID NO: 2783222 - DNA, 25 bp, Homo sapien
tattaagggctcatcatcacacggt

SEQ ID NO: 2783223 - DNA, 25 bp, Homo sapien
ttctccccttttgctattcaattta

SEQ ID NO: 2783224 - DNA, 25 bp, Homo sapien
cttttgctattcaatttacttctcc

SEQ ID NO: 2783225 - DNA, 25 bp, Homo sapien
tttgctattcaatttacttctccac

SEQ ID NO: 2783226 - DNA, 25 bp, Homo sapien
cccttttgctattcaatttacttct

SEQ ID NO: 2783227 - DNA, 25 bp, Homo sapien
gatgctgggtgctttcgctggtcaa

SEQ ID NO: 2783228 - DNA, 25 bp, Homo sapien
ctagaattggtggtgataagccgac

SEQ ID NO: 2783229 - DNA, 25 bp, Homo sapien
tcaataaaggataggcacacccctg

SEQ ID NO: 2783230 - DNA, 25 bp, Homo sapien
cacacggccccagttaacatttatg

SEQ ID NO: 2783231 - DNA, 25 bp, Homo sapien
acaggtagcgctcggtgtccgagta

SEQ ID NO: 2783232 - DNA, 25 bp, Homo sapien
tcggtgtccgagtagccgcgatgcc

SEQ ID NO: 2783233 - DNA, 25 bp, Homo sapien
ggtccatggcgcgacagtacaggta

SEQ ID NO: 2783234 - DNA, 25 bp, Homo sapien
tctccaccgcgtaggaggtgcggtc

SEQ ID NO: 2783235 - DNA, 25 bp, Homo sapien
gcggaactggggctgccggagcggg

SEQ ID NO: 2783236 - DNA, 25 bp, Homo sapien
ctcgaggcgtagcggccgcgggcag

SEQ ID NO: 2783237 - DNA, 25 bp, Homo sapien
ggaactggggctgccggagcgggta

SEQ ID NO: 2783238 - DNA, 25 bp, Homo sapien
cggctgtagcggacactggggctgg

SEQ ID NO: 2783239 - DNA, 25 bp, Homo sapien
tggtggtgctgctcgtgcctccaga

SEQ ID NO: 2783240 - DNA, 25 bp, Homo sapien
tggccccgccggcgctgtcgctgcc

SEQ ID NO: 2783241 - DNA, 25 bp, Homo sapien
cctccagagatgcttgggggctttg

SEQ ID NO: 2783242 - DNA, 25 bp, Homo sapien
tgggggctttgagcgtggccccgcc

SEQ ID NO: 2783243 - DNA, 25 bp, Homo sapien
gcagggattgtcagcaactcgggct

SEQ ID NO: 2783244 - DNA, 25 bp, Homo sapien
cagaggctggtgcttagcttctcac

SEQ ID NO: 2783245 - DNA, 25 bp, Homo sapien
tccaccgaggctatggcagagacac

SEQ ID NO: 2783246 - DNA, 25 bp, Homo sapien
tcaccaagactagggtgcgcggtgc

SEQ ID NO: 2783247 - DNA, 25 bp, Homo sapien
ttcattacacggctggaggtcaaag

SEQ ID NO: 2783248 - DNA, 25 bp, Homo sapien
agaagtctttcattacacggctgga

SEQ ID NO: 2783249 - DNA, 25 bp, Homo sapien
agtctttcattacacggctggaggt

SEQ ID NO: 2783250 - DNA, 25 bp, Homo sapien
tctttcattacacggctggaggtca

SEQ ID NO: 2783251 - DNA, 25 bp, Homo sapien
atttcctgagccagtctaggccccg

SEQ ID NO: 2783252 - DNA, 25 bp, Homo sapien
taatacccagcagatttgaatcagg

SEQ ID NO: 2783253 - DNA, 25 bp, Homo sapien
cagcaagtattgtgtttggccaaag

SEQ ID NO: 2783254 - DNA, 25 bp, Homo sapien
tgcaggtgctaattagtacgaaggc

SEQ ID NO: 2783255 - DNA, 25 bp, Homo sapien
taaacttgtactgagagcagggctc

SEQ ID NO: 2783256 - DNA, 25 bp, Homo sapien
ggttgacccaagacaactgcaggac

SEQ ID NO: 2783257 - DNA, 25 bp, Homo sapien
cacatgatagattaaggaattgaac

SEQ ID NO: 2783258 - DNA, 25 bp, Homo sapien
gactgaagtgctatcaagcttagga

SEQ ID NO: 2783259 - DNA, 25 bp, Homo sapien
tagaaatgcagcacttcatccatgt

SEQ ID NO: 2783260 - DNA, 25 bp, Homo sapien
gaagtttgcatccagaacacatttt

SEQ ID NO: 2783261 - DNA, 25 bp, Homo sapien
tacttaaagagtagtctgaggacca

SEQ ID NO: 2783262 - DNA, 25 bp, Homo sapien
gaccagcagatttagcatcgtttag

SEQ ID NO: 2783263 - DNA, 25 bp, Homo sapien
caattctcctactttagcctcccga

SEQ ID NO: 2783264 - DNA, 25 bp, Homo sapien
gcaatgacccgatctcagctcacca

SEQ ID NO: 2783265 - DNA, 25 bp, Homo sapien
tgcaatgacccgatctcagctcacc

SEQ ID NO: 2783266 - DNA, 25 bp, Homo sapien
acaacctccacctcctgggttcaag

SEQ ID NO: 2783267 - DNA, 25 bp, Homo sapien
aacatatccagtgtttagcataagg

SEQ ID NO: 2783268 - DNA, 25 bp, Homo sapien
ggtctggcacgtgataatgtattat

SEQ ID NO: 2783269 - DNA, 25 bp, Homo sapien
taatggtacctaccgtagcatcatc

SEQ ID NO: 2783270 - DNA, 25 bp, Homo sapien
tcctgagtatgaaacacaatataac

SEQ ID NO: 2783271 - DNA, 25 bp, Homo sapien
tgttagttcctcacaagccaaagtg

SEQ ID NO: 2783272 - DNA, 25 bp, Homo sapien
gccaaagtgagtttgctccccagtg

SEQ ID NO: 2783273 - DNA, 25 bp, Homo sapien
ggtctattttcttgcacgtgcccta

SEQ ID NO: 2783274 - DNA, 25 bp, Homo sapien
ggtcgccagtgcatacctcagtata

SEQ ID NO: 2783275 - DNA, 25 bp, Homo sapien
catgtgtggcaagctagactctcct

SEQ ID NO: 2783276 - DNA, 25 bp, Homo sapien
tattttcccagcataggagttgcag

SEQ ID NO: 2783277 - DNA, 25 bp, Homo sapien
catgtcacaagggaataagttgctc

SEQ ID NO: 2783278 - DNA, 25 bp, Homo sapien
gaatgtaagtcagtgcccaagatag

SEQ ID NO: 2783279 - DNA, 25 bp, Homo sapien
ggtacctaagtgactggcctccagt

SEQ ID NO: 2783280 - DNA, 25 bp, Homo sapien
tctacacagaatgaacggcagcaat

SEQ ID NO: 2783281 - DNA, 25 bp, Homo sapien
ttgtatatcctaggcagagggtacc

SEQ ID NO: 2783282 - DNA, 25 bp, Homo sapien
cctggtaaaggcatccctggtgaac

SEQ ID NO: 2783283 - DNA, 25 bp, Homo sapien
acatatggccaatattaattttcca

SEQ ID NO: 2783284 - DNA, 25 bp, Homo sapien
taaaatgtcttctatcaagtcacat

SEQ ID NO: 2783285 - DNA, 25 bp, Homo sapien
tgtatcactacatggtaatttgtcc

SEQ ID NO: 2783286 - DNA, 25 bp, Homo sapien
cctattgtttctagacatgtatcac

SEQ ID NO: 2783287 - DNA, 25 bp, Homo sapien
aatgtttattagcattcaccaatac

SEQ ID NO: 2783288 - DNA, 25 bp, Homo sapien
tgtttattagcattcaccaatacat

SEQ ID NO: 2783289 - DNA, 25 bp, Homo sapien
atgtttattagcattcaccaataca

SEQ ID NO: 2783290 - DNA, 25 bp, Homo sapien
tcaaaagaccacagacaacaatcac

SEQ ID NO: 2783291 - DNA, 25 bp, Homo sapien
gttctcccactcaaatcaagcaatg

SEQ ID NO: 2783292 - DNA, 25 bp, Homo sapien
aaagaccacagacaacaatcaccat

SEQ ID NO: 2783293 - DNA, 25 bp, Homo sapien
agatatagaaatgtcacctgagaaa

SEQ ID NO: 2783294 - DNA, 25 bp, Homo sapien
gacaagatagggttccattccgcgg

SEQ ID NO: 2783295 - DNA, 25 bp, Homo sapien
tattgcgacatgaaagtctccggac

SEQ ID NO: 2783296 - DNA, 25 bp, Homo sapien
caagtcagcttgttccaactgtctg

SEQ ID NO: 2783297 - DNA, 25 bp, Homo sapien
gcaatcagcggcagaatcttcaggg

SEQ ID NO: 2783298 - DNA, 25 bp, Homo sapien
ttcaagaaagtacatataatcaaca

SEQ ID NO: 2783299 - DNA, 25 bp, Homo sapien
taataattcaagaaagtacatataa

SEQ ID NO: 2783300 - DNA, 25 bp, Homo sapien
ctgaggtaataattcaagaaagtac

SEQ ID NO: 2783301 - DNA, 25 bp, Homo sapien
tcaacaaaaatcacactgtttatca

SEQ ID NO: 2783302 - DNA, 25 bp, Homo sapien
ctgaggaaaacaggtctgcaaacac

SEQ ID NO: 2783303 - DNA, 25 bp, Homo sapien
tgaggaaaacaggtctgcaaacaca

SEQ ID NO: 2783304 - DNA, 25 bp, Homo sapien
aggaaaacaggtctgcaaacacaaa

SEQ ID NO: 2783305 - DNA, 25 bp, Homo sapien
cactgaggaaaacaggtctgcaaac

SEQ ID NO: 2783306 - DNA, 25 bp, Homo sapien
ttgctcatagctgcctgactcaact

SEQ ID NO: 2783307 - DNA, 25 bp, Homo sapien
gctgcctgactcaactcctagcaat

SEQ ID NO: 2783308 - DNA, 25 bp, Homo sapien
cctagcaatttcagttgcattcccc

SEQ ID NO: 2783309 - DNA, 25 bp, Homo sapien
ctcctagcaatttcagttgcattcc

SEQ ID NO: 2783310 - DNA, 25 bp, Homo sapien
ggagtctcactgcattcaatcagtt

SEQ ID NO: 2783311 - DNA, 25 bp, Homo sapien
cacatgggattgtctagttagcaga

SEQ ID NO: 2783312 - DNA, 25 bp, Homo sapien
ttttccctcaaagtcagaacactct

SEQ ID NO: 2783313 - DNA, 25 bp, Homo sapien
gcattagtcacgaaacaaagatcac

SEQ ID NO: 2783314 - DNA, 25 bp, Homo sapien
ctttcttgcatggttgccaatgaga

SEQ ID NO: 2783315 - DNA, 25 bp, Homo sapien
ggtctactggtgacagattcagcct

SEQ ID NO: 2783316 - DNA, 25 bp, Homo sapien
aattcttatccttgtccctccttag

SEQ ID NO: 2783317 - DNA, 25 bp, Homo sapien
tttgaaggatagtttcactgtatcc

SEQ ID NO: 2783318 - DNA, 25 bp, Homo sapien
ggctgtgatatgaatggtcctggac

SEQ ID NO: 2783319 - DNA, 25 bp, Homo sapien
taaatttactgatccaatttcacag

SEQ ID NO: 2783320 - DNA, 25 bp, Homo sapien
gtatatctactagaatttggctgtg

SEQ ID NO: 2783321 - DNA, 25 bp, Homo sapien
tttactgataaatttactgatccaa

SEQ ID NO: 2783322 - DNA, 25 bp, Homo sapien
atatgttgcaccaaggtattgacaa

SEQ ID NO: 2783323 - DNA, 25 bp, Homo sapien
catgtgctcaaagtgaggaggtcca

SEQ ID NO: 2783324 - DNA, 25 bp, Homo sapien
gacaatgcaaggacagctcttcaga

SEQ ID NO: 2783325 - DNA, 25 bp, Homo sapien
aagtgaggaggtccacttggcagaa

SEQ ID NO: 2783326 - DNA, 25 bp, Homo sapien
gctctctcccaggtaggaccagcta

SEQ ID NO: 2783327 - DNA, 25 bp, Homo sapien
gaccagctacatgatgtaagagccc

SEQ ID NO: 2783328 - DNA, 25 bp, Homo sapien
taagagcccatctaggtgtggaacc

SEQ ID NO: 2783329 - DNA, 25 bp, Homo sapien
gtttgtatatccatgaagctgggcc

SEQ ID NO: 2783330 - DNA, 25 bp, Homo sapien
taggtatccacccaatatccattct

SEQ ID NO: 2783331 - DNA, 25 bp, Homo sapien
gtggagtcaaggttccactatattg

SEQ ID NO: 2783332 - DNA, 25 bp, Homo sapien
tcgattcagtctgacaaagactact

SEQ ID NO: 2783333 - DNA, 25 bp, Homo sapien
caaagtgctgggtatcatgttattt

SEQ ID NO: 2783334 - DNA, 25 bp, Homo sapien
tgaattatatacgttctcactgaac

SEQ ID NO: 2783335 - DNA, 25 bp, Homo sapien
tctgaagtgcctacaaatgtgaacc

SEQ ID NO: 2783336 - DNA, 25 bp, Homo sapien
tgtgacttctgtggccactattaaa

SEQ ID NO: 2783337 - DNA, 25 bp, Homo sapien
gaaccaaacttcactaaaccatgct

SEQ ID NO: 2783338 - DNA, 25 bp, Homo sapien
cagccaaagtatttaacgcatcatg

SEQ ID NO: 2783339 - DNA, 25 bp, Homo sapien
tgaaatgtgtttgctactcagccaa

SEQ ID NO: 2783340 - DNA, 25 bp, Homo sapien
tcctcagcacagattagtgacccag

SEQ ID NO: 2783341 - DNA, 25 bp, Homo sapien
aagaatggataatgggtcctcagca

SEQ ID NO: 2783342 - DNA, 25 bp, Homo sapien
tactctctggacgtgcttcacctga

SEQ ID NO: 2783343 - DNA, 25 bp, Homo sapien
tatgttttcacatgggagaggcctt

SEQ ID NO: 2783344 - DNA, 25 bp, Homo sapien
tttaggactcttcggtgagcccagg

SEQ ID NO: 2783345 - DNA, 25 bp, Homo sapien
ccaatccttaggttgcagccacagc

SEQ ID NO: 2783346 - DNA, 25 bp, Homo sapien
ccagagtgagtgattggagaaagag

SEQ ID NO: 2783347 - DNA, 25 bp, Homo sapien
ttgagtgtctttgtgagttgacagc

SEQ ID NO: 2783348 - DNA, 25 bp, Homo sapien
tccatattttaccatgtggccttct

SEQ ID NO: 2783349 - DNA, 25 bp, Homo sapien
gttgttgacttgtctcagttccttg

SEQ ID NO: 2783350 - DNA, 25 bp, Homo sapien
ttcctctccacatctcttacttttt

SEQ ID NO: 2783351 - DNA, 25 bp, Homo sapien
tttccctagtattcctgtcttcctc

SEQ ID NO: 2783352 - DNA, 25 bp, Homo sapien
ctctccacatctcttactttttgtc

SEQ ID NO: 2783353 - DNA, 25 bp, Homo sapien
gtcttcctctccacatctcttactt

SEQ ID NO: 2783354 - DNA, 25 bp, Homo sapien
tgtacctcatgcaacataatgattg

SEQ ID NO: 2783355 - DNA, 25 bp, Homo sapien
agggctgattgtgtatgtctaggta

SEQ ID NO: 2783356 - DNA, 25 bp, Homo sapien
catatttattcatatggctgtacct

SEQ ID NO: 2783357 - DNA, 25 bp, Homo sapien
ctgattgtgtatgtctaggtatgtg

SEQ ID NO: 2783358 - DNA, 25 bp, Homo sapien
agtataccactagagctcttgttgt

SEQ ID NO: 2783359 - DNA, 25 bp, Homo sapien
gtataccactagagctcttgttgtt

SEQ ID NO: 2783360 - DNA, 25 bp, Homo sapien
tcagtataccactagagctcttgtt

SEQ ID NO: 2783361 - DNA, 25 bp, Homo sapien
cagtataccactagagctcttgttg

SEQ ID NO: 2783362 - DNA, 25 bp, Homo sapien
tacaacacaaaagatgtacctccac

SEQ ID NO: 2783363 - DNA, 25 bp, Homo sapien
tagctatccctgaagcatctaggac

SEQ ID NO: 2783364 - DNA, 25 bp, Homo sapien
ccagaatacggataagacagcttgc

SEQ ID NO: 2783365 - DNA, 25 bp, Homo sapien
gtagaaaagcctcactaagcaaaac

SEQ ID NO: 2783366 - DNA, 25 bp, Homo sapien
cagcaatcattgctttcactctgcc

SEQ ID NO: 2783367 - DNA, 25 bp, Homo sapien
cttcctctgcacagttgttccaatt

SEQ ID NO: 2783368 - DNA, 25 bp, Homo sapien
tgttccaattccacagcaatcattg

SEQ ID NO: 2783369 - DNA, 25 bp, Homo sapien
tcctctgcacagttgttccaattcc

SEQ ID NO: 2783370 - DNA, 25 bp, Homo sapien
aagtactgccgctccccaaacttca

SEQ ID NO: 2783371 - DNA, 25 bp, Homo sapien
agtactgccgctccccaaacttcat

SEQ ID NO: 2783372 - DNA, 25 bp, Homo sapien
tgtccaggactcagtaaagttcggt

SEQ ID NO: 2783373 - DNA, 25 bp, Homo sapien
actggttataattcaggaaagtgag

SEQ ID NO: 2783374 - DNA, 25 bp, Homo sapien
gcatgttaccgcctggaactggtta

SEQ ID NO: 2783375 - DNA, 25 bp, Homo sapien
ccacatttggcacaacaattcagag

SEQ ID NO: 2783376 - DNA, 25 bp, Homo sapien
tgacatcttgaatatcttcaaactg

SEQ ID NO: 2783377 - DNA, 25 bp, Homo sapien
acatcttgaatatcttcaaactggt

SEQ ID NO: 2783378 - DNA, 25 bp, Homo sapien
gacatcttgaatatcttcaaactgg

SEQ ID NO: 2783379 - DNA, 25 bp, Homo sapien
gatgacatcttgaatatcttcaaac

SEQ ID NO: 2783380 - DNA, 25 bp, Homo sapien
cgagaaagcaaatcacaggtatttc

SEQ ID NO: 2783381 - DNA, 25 bp, Homo sapien
aatgggaactagtgtttccagtgtc

SEQ ID NO: 2783382 - DNA, 25 bp, Homo sapien
agtgtttccagtgtcaatgatctca

SEQ ID NO: 2783383 - DNA, 25 bp, Homo sapien
actagtgtttccagtgtcaatgatc

SEQ ID NO: 2783384 - DNA, 25 bp, Homo sapien
gaactagtgtttccagtgtcaatga

SEQ ID NO: 2783385 - DNA, 25 bp, Homo sapien
tatccactcaaaagccaactggaat

SEQ ID NO: 2783386 - DNA, 25 bp, Homo sapien
atccactcaaaagccaactggaatg

SEQ ID NO: 2783387 - DNA, 25 bp, Homo sapien
tgcacgtatccactcaaaagccaac

SEQ ID NO: 2783388 - DNA, 25 bp, Homo sapien
acgtatccactcaaaagccaactgg

SEQ ID NO: 2783389 - DNA, 25 bp, Homo sapien
tcattgcgtcttgtttcactgacaa

SEQ ID NO: 2783390 - DNA, 25 bp, Homo sapien
tcactgacaataatcaatagtacct

SEQ ID NO: 2783391 - DNA, 25 bp, Homo sapien
agcaactgcatcattgcgtcttgtt

SEQ ID NO: 2783392 - DNA, 25 bp, Homo sapien
gccaatccaatgactcttcagtaaa

SEQ ID NO: 2783393 - DNA, 25 bp, Homo sapien
atcatcatatctttatcatcatcca

SEQ ID NO: 2783394 - DNA, 25 bp, Homo sapien
catcatcatatctttatcatcatcc

SEQ ID NO: 2783395 - DNA, 25 bp, Homo sapien
tcatcatatctttatcatcatccat

SEQ ID NO: 2783396 - DNA, 25 bp, Homo sapien
tgcccggcctagtgaataaattaaa

SEQ ID NO: 2783397 - DNA, 25 bp, Homo sapien
taatttttctacagcgaacacgtgg

SEQ ID NO: 2783398 - DNA, 25 bp, Homo sapien
aatgcaatggaatgaggctactaca

SEQ ID NO: 2783399 - DNA, 25 bp, Homo sapien
taataaatagctgactgaggagcac

SEQ ID NO: 2783400 - DNA, 25 bp, Homo sapien
atattagattacagcccaggtagtt

SEQ ID NO: 2783401 - DNA, 25 bp, Homo sapien
acaatgtaggggaagatgaccaggt

SEQ ID NO: 2783402 - DNA, 25 bp, Homo sapien
tagattacagcccaggtagttctgg

SEQ ID NO: 2783403 - DNA, 25 bp, Homo sapien
caggtagttctggtaggctacaatg

SEQ ID NO: 2783404 - DNA, 25 bp, Homo sapien
gatgctcttttatggcaggccaggc

SEQ ID NO: 2783405 - DNA, 25 bp, Homo sapien
gtttccatcctaatggtggatgctc

SEQ ID NO: 2783406 - DNA, 25 bp, Homo sapien
gctgagaagcggcacagccacagct

SEQ ID NO: 2783407 - DNA, 25 bp, Homo sapien
aacagctgcgtttccatcctaatgg

SEQ ID NO: 2783408 - DNA, 25 bp, Homo sapien
gaaaccgtcattccggaaacacagc

SEQ ID NO: 2783409 - DNA, 25 bp, Homo sapien
ctgctgaaatgacagaggtgtcctc

SEQ ID NO: 2783410 - DNA, 25 bp, Homo sapien
tcagtagaccaagaacgaaaccgtc

SEQ ID NO: 2783411 - DNA, 25 bp, Homo sapien
gcgctggaatcattgagccctgtca

SEQ ID NO: 2783412 - DNA, 25 bp, Homo sapien
tgaccccgtgaccattcatccttag

SEQ ID NO: 2783413 - DNA, 25 bp, Homo sapien
ttcccattattatccacttccttct

SEQ ID NO: 2783414 - DNA, 25 bp, Homo sapien
tcttctttggttgccataatgctac

SEQ ID NO: 2783415 - DNA, 25 bp, Homo sapien
tagtctcctcaattgtcccttgaat

SEQ ID NO: 2783416 - DNA, 25 bp, Homo sapien
tagaatagagaaaataccatactcc

SEQ ID NO: 2783417 - DNA, 25 bp, Homo sapien
tagagaaaataccatactccaaaca

SEQ ID NO: 2783418 - DNA, 25 bp, Homo sapien
gaaaataccatactccaaacaggag

SEQ ID NO: 2783419 - DNA, 25 bp, Homo sapien
gaatagagaaaataccatactccaa

SEQ ID NO: 2783420 - DNA, 25 bp, Homo sapien
tgacatggaatgactttgtttgcca

SEQ ID NO: 2783421 - DNA, 25 bp, Homo sapien
ttccatgaggttgacatggaatgac

SEQ ID NO: 2783422 - DNA, 25 bp, Homo sapien
acattgcagaaaaaaccttccccat

SEQ ID NO: 2783423 - DNA, 25 bp, Homo sapien
tggaatgactttgtttgccatgcca

SEQ ID NO: 2783424 - DNA, 25 bp, Homo sapien
atttttgttggttgtatatactata

SEQ ID NO: 2783425 - DNA, 25 bp, Homo sapien
tctgtcgattgtttgttcatatctt

SEQ ID NO: 2783426 - DNA, 25 bp, Homo sapien
tgaaagattccttcatacaaaatgc

SEQ ID NO: 2783427 - DNA, 25 bp, Homo sapien
actataaatatctcctattctgaag

SEQ ID NO: 2783428 - DNA, 25 bp, Homo sapien
gctggcattcactgcgcaaagagca

SEQ ID NO: 2783429 - DNA, 25 bp, Homo sapien
catacctgattgaggagcagctggc

SEQ ID NO: 2783430 - DNA, 25 bp, Homo sapien
tacatttgcacttcccatagcctga

SEQ ID NO: 2783431 - DNA, 25 bp, Homo sapien
gtttcttgccaaagactgtaacttg

SEQ ID NO: 2783432 - DNA, 25 bp, Homo sapien
aaaatatggtagtggcaatggcagg

SEQ ID NO: 2783433 - DNA, 25 bp, Homo sapien
catgccacatctcgagggaagagct

SEQ ID NO: 2783434 - DNA, 25 bp, Homo sapien
ttcaaatgcatgataaactagggtc

SEQ ID NO: 2783435 - DNA, 25 bp, Homo sapien
aacattagctatagactcactccag

SEQ ID NO: 2783436 - DNA, 25 bp, Homo sapien
tagggttccacaaatatgaaagagc

SEQ ID NO: 2783437 - DNA, 25 bp, Homo sapien
cccaggcatgctagaagttgttgtt

SEQ ID NO: 2783438 - DNA, 25 bp, Homo sapien
taccaaaaacgcgattattaccagc

SEQ ID NO: 2783439 - DNA, 25 bp, Homo sapien
ttgcaccttgccctagagaatctga

SEQ ID NO: 2783440 - DNA, 25 bp, Homo sapien
gacaagtgtacttctgagcctcggc

SEQ ID NO: 2783441 - DNA, 25 bp, Homo sapien
tcacatgtcagtacttattcagtgg

SEQ ID NO: 2783442 - DNA, 25 bp, Homo sapien
gatcctggtagttcctcacatgtca

SEQ ID NO: 2783443 - DNA, 25 bp, Homo sapien
tgttctgggaccttagacaagtgta

SEQ ID NO: 2783444 - DNA, 25 bp, Homo sapien
ttcacccttgggcagtctgtgcctg

SEQ ID NO: 2783445 - DNA, 25 bp, Homo sapien
catcctattaccattggcagcttct

SEQ ID NO: 2783446 - DNA, 25 bp, Homo sapien
tgcttcacccttgggcagtctgtgc

SEQ ID NO: 2783447 - DNA, 25 bp, Homo sapien
ctttcttggcatcctattaccattg

SEQ ID NO: 2783448 - DNA, 25 bp, Homo sapien
caccattcctaacttctgttctgtt

SEQ ID NO: 2783449 - DNA, 25 bp, Homo sapien
atttcaccattcctaacttctgttc

SEQ ID NO: 2783450 - DNA, 25 bp, Homo sapien
ttcaccattcctaacttctgttctg

SEQ ID NO: 2783451 - DNA, 25 bp, Homo sapien
tcaccattcctaacttctgttctgt

SEQ ID NO: 2783452 - DNA, 25 bp, Homo sapien
tgtaatccttgtgtgagggtcatgc

SEQ ID NO: 2783453 - DNA, 25 bp, Homo sapien
gtaatccttgtgtgagggtcatgct

SEQ ID NO: 2783454 - DNA, 25 bp, Homo sapien
catgtaatccttgtgtgagggtcat

SEQ ID NO: 2783455 - DNA, 25 bp, Homo sapien
atgtaatccttgtgtgagggtcatg

SEQ ID NO: 2783456 - DNA, 25 bp, Homo sapien
caggctggcatgcaatgaagcgatc

SEQ ID NO: 2783457 - DNA, 25 bp, Homo sapien
ctcagcctccccagggccgggatta

SEQ ID NO: 2783458 - DNA, 25 bp, Homo sapien
ctggcatgcaatgaagcgatctcag

SEQ ID NO: 2783459 - DNA, 25 bp, Homo sapien
ggctggcatgcaatgaagcgatctc

SEQ ID NO: 2783460 - DNA, 25 bp, Homo sapien
gtatttgtccaggacttgatccatt

SEQ ID NO: 2783461 - DNA, 25 bp, Homo sapien
ggagggtgtatttgtccaggacttg

SEQ ID NO: 2783462 - DNA, 25 bp, Homo sapien
atttgtccaggacttgatccatttc

SEQ ID NO: 2783463 - DNA, 25 bp, Homo sapien
ggtgtatttgtccaggacttgatcc

SEQ ID NO: 2783464 - DNA, 25 bp, Homo sapien
gtaatttctccgagaaattaagtca

SEQ ID NO: 2783465 - DNA, 25 bp, Homo sapien
tttctccgagaaattaagtcagaac

SEQ ID NO: 2783466 - DNA, 25 bp, Homo sapien
ttctccgagaaattaagtcagaact

SEQ ID NO: 2783467 - DNA, 25 bp, Homo sapien
aatttctccgagaaattaagtcaga

SEQ ID NO: 2783468 - DNA, 25 bp, Homo sapien
tcactggctctgcttattgaacagc

SEQ ID NO: 2783469 - DNA, 25 bp, Homo sapien
tattcaagtgaaccaaaatgagtga

SEQ ID NO: 2783470 - DNA, 25 bp, Homo sapien
catttaaatagactgccttgggctg

SEQ ID NO: 2783471 - DNA, 25 bp, Homo sapien
ggctacaccaatatctacctatgat

SEQ ID NO: 2783472 - DNA, 25 bp, Homo sapien
ttcatcctctcatgcttttgtaaat

SEQ ID NO: 2783473 - DNA, 25 bp, Homo sapien
cacattcatcctctcatgcttttgt

SEQ ID NO: 2783474 - DNA, 25 bp, Homo sapien
ccaacatgacatgctccttcctcac

SEQ ID NO: 2783475 - DNA, 25 bp, Homo sapien
atgacatgctccttcctcacattca

SEQ ID NO: 2783476 - DNA, 25 bp, Homo sapien
gggcacaaggtctcctctatctgtg

SEQ ID NO: 2783477 - DNA, 25 bp, Homo sapien
gcacaaggtctcctctatctgtgac

SEQ ID NO: 2783478 - DNA, 25 bp, Homo sapien
ctagggcacaaggtctcctctatct

SEQ ID NO: 2783479 - DNA, 25 bp, Homo sapien
tagggcacaaggtctcctctatctg

SEQ ID NO: 2783480 - DNA, 25 bp, Homo sapien
tatgtctgatctgttcccatggact

SEQ ID NO: 2783481 - DNA, 25 bp, Homo sapien
ttcccatggactggtgttgatgaaa

SEQ ID NO: 2783482 - DNA, 25 bp, Homo sapien
gatctgttcccatggactggtgttg

SEQ ID NO: 2783483 - DNA, 25 bp, Homo sapien
ggtgttgatgaaattcttttggcca

SEQ ID NO: 2783484 - DNA, 25 bp, Homo sapien
attaacgatgactgctaaaagctgg

SEQ ID NO: 2783485 - DNA, 25 bp, Homo sapien
tcattaacgatgactgctaaaagct

SEQ ID NO: 2783486 - DNA, 25 bp, Homo sapien
tctcattaacgatgactgctaaaag

SEQ ID NO: 2783487 - DNA, 25 bp, Homo sapien
attctcattaacgatgactgctaaa

SEQ ID NO: 2783488 - DNA, 25 bp, Homo sapien
aatggcctttgctgacgtcttctga

SEQ ID NO: 2783489 - DNA, 25 bp, Homo sapien
gccatgcagctgatgtaatattgta

SEQ ID NO: 2783490 - DNA, 25 bp, Homo sapien
caggattagatatagccatgcagct

SEQ ID NO: 2783491 - DNA, 25 bp, Homo sapien
ccttcccaggttgcactacgcgaat

SEQ ID NO: 2783492 - DNA, 25 bp, Homo sapien
gctaatgaagttgagccaccctgct

SEQ ID NO: 2783493 - DNA, 25 bp, Homo sapien
taaaaacggaattgctaggctatag

SEQ ID NO: 2783494 - DNA, 25 bp, Homo sapien
ccagcagtctaggagcataccagct

SEQ ID NO: 2783495 - DNA, 25 bp, Homo sapien
ggatattacataggttcagccttcg

SEQ ID NO: 2783496 - DNA, 25 bp, Homo sapien
gacagacaagctcctgtagtgtgaa

SEQ ID NO: 2783497 - DNA, 25 bp, Homo sapien
tgttcccttgcagcccttatttcat

SEQ ID NO: 2783498 - DNA, 25 bp, Homo sapien
tcttctctaaaacctgtaatcactg

SEQ ID NO: 2783499 - DNA, 25 bp, Homo sapien
tgtgaaacctgcatgttcccttgca

SEQ ID NO: 2783500 - DNA, 25 bp, Homo sapien
tgattaaattcggattctgggaact

SEQ ID NO: 2783501 - DNA, 25 bp, Homo sapien
gcagccctgcgcatgaactttcact

SEQ ID NO: 2783502 - DNA, 25 bp, Homo sapien
tatgcaaatatacccaaacctgaat

SEQ ID NO: 2783503 - DNA, 25 bp, Homo sapien
caaacctgaataatgattaaattcg

SEQ ID NO: 2783504 - DNA, 25 bp, Homo sapien
ggtgtaaactgataccaatctttgc

SEQ ID NO: 2783505 - DNA, 25 bp, Homo sapien
gataccaatctttgcgtgttaccat

SEQ ID NO: 2783506 - DNA, 25 bp, Homo sapien
tgtgttctgttttggtgtaaactga

SEQ ID NO: 2783507 - DNA, 25 bp, Homo sapien
ctttgcgtgttaccatttctcctag

SEQ ID NO: 2783508 - DNA, 25 bp, Homo sapien
gtttccttagtcacaattccctctc

SEQ ID NO: 2783509 - DNA, 25 bp, Homo sapien
taaaatattgaattgggcccaccag

SEQ ID NO: 2783510 - DNA, 25 bp, Homo sapien
cctctgactactgccccttagtttc

SEQ ID NO: 2783511 - DNA, 25 bp, Homo sapien
tctccctattataagatcatctgat

SEQ ID NO: 2783512 - DNA, 25 bp, Homo sapien
tcaaatggctcggtcccaagacctt

SEQ ID NO: 2783513 - DNA, 25 bp, Homo sapien
caaatggctcggtcccaagaccttc

SEQ ID NO: 2783514 - DNA, 25 bp, Homo sapien
cttcaaatggctcggtcccaagacc

SEQ ID NO: 2783515 - DNA, 25 bp, Homo sapien
ttcttcaaatggctcggtcccaaga

SEQ ID NO: 2783516 - DNA, 25 bp, Homo sapien
taagggcacccagttttgaagatca

SEQ ID NO: 2783517 - DNA, 25 bp, Homo sapien
gaagatcacgtttggagcagtcaac

SEQ ID NO: 2783518 - DNA, 25 bp, Homo sapien
tatgggctaggccagttgctccagg

SEQ ID NO: 2783519 - DNA, 25 bp, Homo sapien
tagcttctggcagtccgtggttgca

SEQ ID NO: 2783520 - DNA, 25 bp, Homo sapien
caggtgatcttatgttgatgcttaa

SEQ ID NO: 2783521 - DNA, 25 bp, Homo sapien
gttgatgcttaatatccaggaagac

SEQ ID NO: 2783522 - DNA, 25 bp, Homo sapien
tccaggtgatcttatgttgatgctt

SEQ ID NO: 2783523 - DNA, 25 bp, Homo sapien
cttatgttgatgcttaatatccagg

SEQ ID NO: 2783524 - DNA, 25 bp, Homo sapien
tcattcctcatttaactagtacaca

SEQ ID NO: 2783525 - DNA, 25 bp, Homo sapien
ctatgttgactgcttggataaaaaa

SEQ ID NO: 2783526 - DNA, 25 bp, Homo sapien
taactagtacacaattagtgggtgg

SEQ ID NO: 2783527 - DNA, 25 bp, Homo sapien
gtgggtggtatttaatgaaactatg

SEQ ID NO: 2783528 - DNA, 25 bp, Homo sapien
caaagtgcctcttcgtctctggtat

SEQ ID NO: 2783529 - DNA, 25 bp, Homo sapien
tatctaaggtcataacatccccaaa

SEQ ID NO: 2783530 - DNA, 25 bp, Homo sapien
gcctcttcgtctctggtatacgttt

SEQ ID NO: 2783531 - DNA, 25 bp, Homo sapien
caagaagcacctacccggacaaatt

SEQ ID NO: 2783532 - DNA, 25 bp, Homo sapien
ttgagtcttagggtaatcatttgcc

SEQ ID NO: 2783533 - DNA, 25 bp, Homo sapien
gaaatttgagtcttagggtaatcat

SEQ ID NO: 2783534 - DNA, 25 bp, Homo sapien
gagtcttagggtaatcatttgccat

SEQ ID NO: 2783535 - DNA, 25 bp, Homo sapien
gaaatgaaatttgagtcttagggta

SEQ ID NO: 2783536 - DNA, 25 bp, Homo sapien
tcatttgtactgccagaacagccag

SEQ ID NO: 2783537 - DNA, 25 bp, Homo sapien
ttgtactgccagaacagccagaaca

SEQ ID NO: 2783538 - DNA, 25 bp, Homo sapien
agtagatgtccagactcatttgtac

SEQ ID NO: 2783539 - DNA, 25 bp, Homo sapien
gaagtagatgtccagactcatttgt

SEQ ID NO: 2783540 - DNA, 25 bp, Homo sapien
tacagtatgagacgttgcttattcc

SEQ ID NO: 2783541 - DNA, 25 bp, Homo sapien
tcagggcaagtttccggagctcttt

SEQ ID NO: 2783542 - DNA, 25 bp, Homo sapien
ctggacaaccgaacatggatacagt

SEQ ID NO: 2783543 - DNA, 25 bp, Homo sapien
tgagcctggtatcaaagtgtgcatc

SEQ ID NO: 2783544 - DNA, 25 bp, Homo sapien
cgttgatggcgaatgacccttcttc

SEQ ID NO: 2783545 - DNA, 25 bp, Homo sapien
gttgatggcgaatgacccttcttct

SEQ ID NO: 2783546 - DNA, 25 bp, Homo sapien
ctcgttgatggcgaatgacccttct

SEQ ID NO: 2783547 - DNA, 25 bp, Homo sapien
tgatggcgaatgacccttcttcttc

SEQ ID NO: 2783548 - DNA, 25 bp, Homo sapien
ttattacaacaaccctataaggcag

SEQ ID NO: 2783549 - DNA, 25 bp, Homo sapien
aggagtttacagtccatcaggcaac

SEQ ID NO: 2783550 - DNA, 25 bp, Homo sapien
taaggcagcactatgattatcccca

SEQ ID NO: 2783551 - DNA, 25 bp, Homo sapien
tagaaaagggtattacaggcagagg

SEQ ID NO: 2783552 - DNA, 25 bp, Homo sapien
agagcaggaggcattcttggtttct

SEQ ID NO: 2783553 - DNA, 25 bp, Homo sapien
acttcatcaatgcattcaattgctt

SEQ ID NO: 2783554 - DNA, 25 bp, Homo sapien
aaatcctttccagatgaacatttca

SEQ ID NO: 2783555 - DNA, 25 bp, Homo sapien
cctccagcagggcagacacttgtgg

SEQ ID NO: 2783556 - DNA, 25 bp, Homo sapien
aacccgtgaaacaagagaaccatca

SEQ ID NO: 2783557 - DNA, 25 bp, Homo sapien
tcaccaaagaaagttggatctaggg

SEQ ID NO: 2783558 - DNA, 25 bp, Homo sapien
caaagaaagttggatctagggattc

SEQ ID NO: 2783559 - DNA, 25 bp, Homo sapien
agaaacccctgcaaactcaccaaag

SEQ ID NO: 2783560 - DNA, 25 bp, Homo sapien
ctaacttttcaagccctttcagatt

SEQ ID NO: 2783561 - DNA, 25 bp, Homo sapien
cagtctacatcctaacttttcaagc

SEQ ID NO: 2783562 - DNA, 25 bp, Homo sapien
tctacatcctaacttttcaagccct

SEQ ID NO: 2783563 - DNA, 25 bp, Homo sapien
cctaacttttcaagccctttcagat

SEQ ID NO: 2783564 - DNA, 25 bp, Homo sapien
catgcgaagtcattcagacacactt

SEQ ID NO: 2783565 - DNA, 25 bp, Homo sapien
tttaaaaaacgtgtgctgccagggc

SEQ ID NO: 2783566 - DNA, 25 bp, Homo sapien
cacccaccaaattaggagtttgcag

SEQ ID NO: 2783567 - DNA, 25 bp, Homo sapien
caacaggggaagtcgcagttctggc

SEQ ID NO: 2783568 - DNA, 25 bp, Homo sapien
ttggatacatctttcgtcaaatcca

SEQ ID NO: 2783569 - DNA, 25 bp, Homo sapien
gatacatctttcgtcaaatccatct

SEQ ID NO: 2783570 - DNA, 25 bp, Homo sapien
atctgtctatggcagatatgcatag

SEQ ID NO: 2783571 - DNA, 25 bp, Homo sapien
tgtctatggcagatatgcatagttt

SEQ ID NO: 2783572 - DNA, 25 bp, Homo sapien
actacatatgcattaaggcaggaac

SEQ ID NO: 2783573 - DNA, 25 bp, Homo sapien
ggccgtgtcagaactcaattacgac

SEQ ID NO: 2783574 - DNA, 25 bp, Homo sapien
catccaaggccgtgtcagaactcaa

SEQ ID NO: 2783575 - DNA, 25 bp, Homo sapien
gaactcaattacgactacatatgca

SEQ ID NO: 2783576 - DNA, 25 bp, Homo sapien
tgctggtgcagctacagaatccgac

SEQ ID NO: 2783577 - DNA, 25 bp, Homo sapien
ttattctaatgatcctgctcctggc

SEQ ID NO: 2783578 - DNA, 25 bp, Homo sapien
tacagaatccgacatcaagattccc

SEQ ID NO: 2783579 - DNA, 25 bp, Homo sapien
actcagaggtgggtaattatctccc

SEQ ID NO: 2783580 - DNA, 25 bp, Homo sapien
atggttgcagctgagtatgtctact

SEQ ID NO: 2783581 - DNA, 25 bp, Homo sapien
tcagagaagtgaatcccaaacctga

SEQ ID NO: 2783582 - DNA, 25 bp, Homo sapien
tgctcctgtgagtcttggctatttc

SEQ ID NO: 2783583 - DNA, 25 bp, Homo sapien
tgactggctgttgtgctcctgtgag

SEQ ID NO: 2783584 - DNA, 25 bp, Homo sapien
caaaccgagagggaaactgtagatc

SEQ ID NO: 2783585 - DNA, 25 bp, Homo sapien
tgctttgcacgctcctgagtatagg

SEQ ID NO: 2783586 - DNA, 25 bp, Homo sapien
cataaatgggatggccgttcaggaa

SEQ ID NO: 2783587 - DNA, 25 bp, Homo sapien
ggacaaagcgctgttgtttaagaac

SEQ ID NO: 2783588 - DNA, 25 bp, Homo sapien
tcccagaacttgtacaaatggggcc

SEQ ID NO: 2783589 - DNA, 25 bp, Homo sapien
cagaacttgtacaaatggggcctgg

SEQ ID NO: 2783590 - DNA, 25 bp, Homo sapien
acttgtacaaatggggcctgggcca

SEQ ID NO: 2783591 - DNA, 25 bp, Homo sapien
agtcccagaacttgtacaaatgggg

SEQ ID NO: 2783592 - DNA, 25 bp, Homo sapien
tgcctgtctctagcccagtcaggaa

SEQ ID NO: 2783593 - DNA, 25 bp, Homo sapien
taccagggtggattagaacattcct

SEQ ID NO: 2783594 - DNA, 25 bp, Homo sapien
cagccaacacaatttgcatcttctt

SEQ ID NO: 2783595 - DNA, 25 bp, Homo sapien
gcatactgtctgagatccagatggc

SEQ ID NO: 2783596 - DNA, 25 bp, Homo sapien
aaaaccttctttgactctagtcgat

SEQ ID NO: 2783597 - DNA, 25 bp, Homo sapien
ccaaaaccttctttgactctagtcg

SEQ ID NO: 2783598 - DNA, 25 bp, Homo sapien
caaaaccttctttgactctagtcga

SEQ ID NO: 2783599 - DNA, 25 bp, Homo sapien
aaccttctttgactctagtcgatac

SEQ ID NO: 2783600 - DNA, 25 bp, Homo sapien
tcaggaagggcattagaggcaacat

SEQ ID NO: 2783601 - DNA, 25 bp, Homo sapien
agaactactgggctttagctcagga

SEQ ID NO: 2783602 - DNA, 25 bp, Homo sapien
gctttagctcaggaagggcattaga

SEQ ID NO: 2783603 - DNA, 25 bp, Homo sapien
ttagaggcaacatacattcgctttc

SEQ ID NO: 2783604 - DNA, 25 bp, Homo sapien
aatgataaaggacagctgtctggag

SEQ ID NO: 2783605 - DNA, 25 bp, Homo sapien
atgataaaggacagctgtctggagg

SEQ ID NO: 2783606 - DNA, 25 bp, Homo sapien
tgataaaggacagctgtctggagga

SEQ ID NO: 2783607 - DNA, 25 bp, Homo sapien
gaatgataaaggacagctgtctgga

SEQ ID NO: 2783608 - DNA, 25 bp, Homo sapien
tgtactaatgcacaccaattatttt

SEQ ID NO: 2783609 - DNA, 25 bp, Homo sapien
catagtgtacatgactgatctcaca

SEQ ID NO: 2783610 - DNA, 25 bp, Homo sapien
attattttcatagtgtacatgactg

SEQ ID NO: 2783611 - DNA, 25 bp, Homo sapien
aaatctggcacaaggtgtactaatg

SEQ ID NO: 2783612 - DNA, 25 bp, Homo sapien
ttggaaatcaacttctggagaacat

SEQ ID NO: 2783613 - DNA, 25 bp, Homo sapien
ttatccccattggaaatcaacttct

SEQ ID NO: 2783614 - DNA, 25 bp, Homo sapien
gagaacatttcagctttgtatgctc

SEQ ID NO: 2783615 - DNA, 25 bp, Homo sapien
tctggagaacatttcagctttgtat

SEQ ID NO: 2783616 - DNA, 25 bp, Homo sapien
tttgcttcagtggttagggaccaga

SEQ ID NO: 2783617 - DNA, 25 bp, Homo sapien
tcacatggcagcttattagagatgc

SEQ ID NO: 2783618 - DNA, 25 bp, Homo sapien
gtgtataactgttccctccctgtga

SEQ ID NO: 2783619 - DNA, 25 bp, Homo sapien
cctttagaatctttggtaccagcag

SEQ ID NO: 2783620 - DNA, 25 bp, Homo sapien
gggagaaccgacattgaagcaaaac

SEQ ID NO: 2783621 - DNA, 25 bp, Homo sapien
tgaggctcaccacactacagcaaag

SEQ ID NO: 2783622 - DNA, 25 bp, Homo sapien
tgtcagttgccctcaccaggtgtgg

SEQ ID NO: 2783623 - DNA, 25 bp, Homo sapien
caatttgtttgaagagatgaggctc

SEQ ID NO: 2783624 - DNA, 25 bp, Homo sapien
aggtctgatgtccagaagggtattt

SEQ ID NO: 2783625 - DNA, 25 bp, Homo sapien
tttatctagtccatcactgacggtc

SEQ ID NO: 2783626 - DNA, 25 bp, Homo sapien
ttaggtccctcttgtcaatttgtgg

SEQ ID NO: 2783627 - DNA, 25 bp, Homo sapien
gacggtcatctaagttgagtccatg

SEQ ID NO: 2783628 - DNA, 25 bp, Homo sapien
aaggaccatttattgtgatggatgt

SEQ ID NO: 2783629 - DNA, 25 bp, Homo sapien
catttattgtgatggatgtgttcac

SEQ ID NO: 2783630 - DNA, 25 bp, Homo sapien
ggaagtctggtttatataaatgcaa

SEQ ID NO: 2783631 - DNA, 25 bp, Homo sapien
gatgtgttcactgaatgcaaaagca

SEQ ID NO: 2783632 - DNA, 25 bp, Homo sapien
tacacgtagacatattgctttcctc

SEQ ID NO: 2783633 - DNA, 25 bp, Homo sapien
gcatctgcagtattaaggctctaca

SEQ ID NO: 2783634 - DNA, 25 bp, Homo sapien
tctgtgtaccctgcacactacaggg

SEQ ID NO: 2783635 - DNA, 25 bp, Homo sapien
gatttcatcatctagagttacacgt

SEQ ID NO: 2783636 - DNA, 25 bp, Homo sapien
ctggttaagacaatgaaaatgctgc

SEQ ID NO: 2783637 - DNA, 25 bp, Homo sapien
gatattacacaacctgactgagcct

SEQ ID NO: 2783638 - DNA, 25 bp, Homo sapien
tccatcaccctgctcatacagagtg

SEQ ID NO: 2783639 - DNA, 25 bp, Homo sapien
cttgcaagctgagtaatcttaggga

SEQ ID NO: 2783640 - DNA, 25 bp, Homo sapien
gatttatgccactcctagaatgcaa

SEQ ID NO: 2783641 - DNA, 25 bp, Homo sapien
agatgatgctgctgcgatccccact

SEQ ID NO: 2783642 - DNA, 25 bp, Homo sapien
cacaggcatatctggtttcattgca

SEQ ID NO: 2783643 - DNA, 25 bp, Homo sapien
ccttatctgctagggatatgtcaga

SEQ ID NO: 2783644 - DNA, 25 bp, Homo sapien
tatttacatttcacttactttcaaa

SEQ ID NO: 2783645 - DNA, 25 bp, Homo sapien
tacatttcacttactttcaaaagga

SEQ ID NO: 2783646 - DNA, 25 bp, Homo sapien
atttcacttactttcaaaaggatga

SEQ ID NO: 2783647 - DNA, 25 bp, Homo sapien
tcacttactttcaaaaggatgaaaa

SEQ ID NO: 2783648 - DNA, 25 bp, Homo sapien
taagtcaatagcatcacagtaacag

SEQ ID NO: 2783649 - DNA, 25 bp, Homo sapien
gaaattataccattgcaggcagatg

SEQ ID NO: 2783650 - DNA, 25 bp, Homo sapien
aacaacaacagtggtctctagcacc

SEQ ID NO: 2783651 - DNA, 25 bp, Homo sapien
tagaatcagaggtctaagggtaccc

SEQ ID NO: 2783652 - DNA, 25 bp, Homo sapien
gaagtgctgcactttctggtgtagg

SEQ ID NO: 2783653 - DNA, 25 bp, Homo sapien
agcagctgtggtttcggtttgggtt

SEQ ID NO: 2783654 - DNA, 25 bp, Homo sapien
tggaaaggcttctttagtgcccaca

SEQ ID NO: 2783655 - DNA, 25 bp, Homo sapien
gaaatcgttcttgatagacttcagg

SEQ ID NO: 2783656 - DNA, 25 bp, Homo sapien
tgaatggtccaagaagagtaaaaaa

SEQ ID NO: 2783657 - DNA, 25 bp, Homo sapien
aatgaatggtccaagaagagtaaaa

SEQ ID NO: 2783658 - DNA, 25 bp, Homo sapien
aaatgaatggtccaagaagagtaaa

SEQ ID NO: 2783659 - DNA, 25 bp, Homo sapien
aaaatgaatggtccaagaagagtaa

SEQ ID NO: 2783660 - DNA, 25 bp, Homo sapien
tatgacttcctccaacaaggctgcc

SEQ ID NO: 2783661 - DNA, 25 bp, Homo sapien
tgccagaggttcctgagagccatat

SEQ ID NO: 2783662 - DNA, 25 bp, Homo sapien
tctctttgttggagagtttggcatc

SEQ ID NO: 2783663 - DNA, 25 bp, Homo sapien
tcctctggactaatttgacggcaaa

SEQ ID NO: 2783664 - DNA, 25 bp, Homo sapien
catgctcgtgatggccttgatgccc

SEQ ID NO: 2783665 - DNA, 25 bp, Homo sapien
ttgtgccctcgttgggaacaggccc

SEQ ID NO: 2783666 - DNA, 25 bp, Homo sapien
tccgtttacaggaatgagggcaagg

SEQ ID NO: 2783667 - DNA, 25 bp, Homo sapien
tggaactatccaggcgcattcccac

SEQ ID NO: 2783668 - DNA, 25 bp, Homo sapien
ggtctgcaaggccaaagggactttc

SEQ ID NO: 2783669 - DNA, 25 bp, Homo sapien
tcttcgtagatgagccacacgctcc

SEQ ID NO: 2783670 - DNA, 25 bp, Homo sapien
gaaacgttaccaatctagcagctaa

SEQ ID NO: 2783671 - DNA, 25 bp, Homo sapien
tccttggaacacaagatgcaacggg

SEQ ID NO: 2783672 - DNA, 25 bp, Homo sapien
agtgttcgggtaccaaagccatcac

SEQ ID NO: 2783673 - DNA, 25 bp, Homo sapien
ttcgggtaccaaagccatcacacag

SEQ ID NO: 2783674 - DNA, 25 bp, Homo sapien
cagtgttcgggtaccaaagccatca

SEQ ID NO: 2783675 - DNA, 25 bp, Homo sapien
tgttcgggtaccaaagccatcacac

SEQ ID NO: 2783676 - DNA, 25 bp, Homo sapien
ccatcatcctcatcaatagctgtaa

SEQ ID NO: 2783677 - DNA, 25 bp, Homo sapien
tttgtttaagcaaatccttgccatc

SEQ ID NO: 2783678 - DNA, 25 bp, Homo sapien
tctgaaatgcttcaactgccacttt

SEQ ID NO: 2783679 - DNA, 25 bp, Homo sapien
atcaatagctgtaactttctcctat

SEQ ID NO: 2783680 - DNA, 25 bp, Homo sapien
acactcacgttgttaataagtccaa

SEQ ID NO: 2783681 - DNA, 25 bp, Homo sapien
ggagcagccaggctaacactatcat

SEQ ID NO: 2783682 - DNA, 25 bp, Homo sapien
tccaaaatagcaagaacgtgaacgt

SEQ ID NO: 2783683 - DNA, 25 bp, Homo sapien
ggctaacactatcataaccctcaac

SEQ ID NO: 2783684 - DNA, 25 bp, Homo sapien
tcattatcagcaggctcaccacctt

SEQ ID NO: 2783685 - DNA, 25 bp, Homo sapien
tatttcctcattatcagcaggctca

SEQ ID NO: 2783686 - DNA, 25 bp, Homo sapien
tttcctcattatcagcaggctcacc

SEQ ID NO: 2783687 - DNA, 25 bp, Homo sapien
tatcagcaggctcaccaccttgcat

SEQ ID NO: 2783688 - DNA, 25 bp, Homo sapien
gcagcacaccaagcgtgagccaaag

SEQ ID NO: 2783689 - DNA, 25 bp, Homo sapien
tagccaaacaaaagggagcaataac

SEQ ID NO: 2783690 - DNA, 25 bp, Homo sapien
gaatggtgacgcatcgcctcacctg

SEQ ID NO: 2783691 - DNA, 25 bp, Homo sapien
ccaagcgtgagccaaagaatggtga

SEQ ID NO: 2783692 - DNA, 25 bp, Homo sapien
caggagatctagaatgaacatacag

SEQ ID NO: 2783693 - DNA, 25 bp, Homo sapien
cagcacatgggtgatctatgaggta

SEQ ID NO: 2783694 - DNA, 25 bp, Homo sapien
taacttcttccccattgctggatga

SEQ ID NO: 2783695 - DNA, 25 bp, Homo sapien
tctgaaggacattagcattctatct

SEQ ID NO: 2783696 - DNA, 25 bp, Homo sapien
ggaccattgtttgttcagccagaga

SEQ ID NO: 2783697 - DNA, 25 bp, Homo sapien
gccctttcctgcatagagtctcaaa

SEQ ID NO: 2783698 - DNA, 25 bp, Homo sapien
catgtacaacgtcaagagcaagcta

SEQ ID NO: 2783699 - DNA, 25 bp, Homo sapien
tttgagacggcctggagttccctga

SEQ ID NO: 2783700 - DNA, 25 bp, Homo sapien
tgtgtattgtgcaacataacagtcc

SEQ ID NO: 2783701 - DNA, 25 bp, Homo sapien
ttattagacagactcgccattcccc

SEQ ID NO: 2783702 - DNA, 25 bp, Homo sapien
tgcaacctgtgaacataaatttgag

SEQ ID NO: 2783703 - DNA, 25 bp, Homo sapien
gacagactcgccattccccattttg

SEQ ID NO: 2783704 - DNA, 25 bp, Homo sapien
cattactgggcattggaaaaggtcc

SEQ ID NO: 2783705 - DNA, 25 bp, Homo sapien
tgtaacgacgaagactcatcagctg

SEQ ID NO: 2783706 - DNA, 25 bp, Homo sapien
caatgaatatgattagcccctggac

SEQ ID NO: 2783707 - DNA, 25 bp, Homo sapien
catcatctatgagggcagctgtaac

SEQ ID NO: 2783708 - DNA, 25 bp, Homo sapien
gactgcatgcctgggcactgtgccc

SEQ ID NO: 2783709 - DNA, 25 bp, Homo sapien
taattcactatgagactgcatgcct

SEQ ID NO: 2783710 - DNA, 25 bp, Homo sapien
ctatgagactgcatgcctgggcact

SEQ ID NO: 2783711 - DNA, 25 bp, Homo sapien
ttaattcactatgagactgcatgcc

SEQ ID NO: 2783712 - DNA, 25 bp, Homo sapien
ttggctggagcactccatgcccgtg

SEQ ID NO: 2783713 - DNA, 25 bp, Homo sapien
caggtgctaggatcattgatgccac

SEQ ID NO: 2783714 - DNA, 25 bp, Homo sapien
aaatcggctgccaggcatcatccca

SEQ ID NO: 2783715 - DNA, 25 bp, Homo sapien
gggcactaaaaggccatctgtcggg

SEQ ID NO: 2783716 - DNA, 25 bp, Homo sapien
agagcgccccctctgcgaagtcagg

SEQ ID NO: 2783717 - DNA, 25 bp, Homo sapien
agcggccacacggaactttgcccag

SEQ ID NO: 2783718 - DNA, 25 bp, Homo sapien
cctctgcgaagtcaggcccagcggc

SEQ ID NO: 2783719 - DNA, 25 bp, Homo sapien
gaactttgcccagaatatccagctc

SEQ ID NO: 2783720 - DNA, 25 bp, Homo sapien
ccatagtaatcagctatggttttaa

SEQ ID NO: 2783721 - DNA, 25 bp, Homo sapien
aagacatctttttcaaatcccaagt

SEQ ID NO: 2783722 - DNA, 25 bp, Homo sapien
tttcaaatcccaagtacataggctg

SEQ ID NO: 2783723 - DNA, 25 bp, Homo sapien
tctttcaagtgaccatagtaatcag

SEQ ID NO: 2783724 - DNA, 25 bp, Homo sapien
aacacttcatagctgacagcaccca

SEQ ID NO: 2783725 - DNA, 25 bp, Homo sapien
aaacacttcatagctgacagcaccc

SEQ ID NO: 2783726 - DNA, 25 bp, Homo sapien
ggatgatgaacttcgaattgacaag

SEQ ID NO: 2783727 - DNA, 25 bp, Homo sapien
tcaagaataacaactccctgcttgc

SEQ ID NO: 2783728 - DNA, 25 bp, Homo sapien
ctaaaacttcttctaaggaatccag

SEQ ID NO: 2783729 - DNA, 25 bp, Homo sapien
ccctgcttgctaacactatatacat

SEQ ID NO: 2783730 - DNA, 25 bp, Homo sapien
gcaatactgtgacgcttgtaccaca

SEQ ID NO: 2783731 - DNA, 25 bp, Homo sapien
tggcctctgtcagctgtctgcggtg

SEQ ID NO: 2783732 - DNA, 25 bp, Homo sapien
tctgcggtggacaagacggcaagct

SEQ ID NO: 2783733 - DNA, 25 bp, Homo sapien
cggcaagctggcacctctccaattg

SEQ ID NO: 2783734 - DNA, 25 bp, Homo sapien
cattctggaaatttaataacatcct

SEQ ID NO: 2783735 - DNA, 25 bp, Homo sapien
catcacaactggcctcactgggatg

SEQ ID NO: 2783736 - DNA, 25 bp, Homo sapien
gactcaccaacgagagtactgaagg

SEQ ID NO: 2783737 - DNA, 25 bp, Homo sapien
tgcaaaagcaatgtaagaactctag

SEQ ID NO: 2783738 - DNA, 25 bp, Homo sapien
tatatgaaggtgaatctggagactc

SEQ ID NO: 2783739 - DNA, 25 bp, Homo sapien
taatgttgacataaaaggcagcggg

SEQ ID NO: 2783740 - DNA, 25 bp, Homo sapien
aggtacatcccctctaggctgattt

SEQ ID NO: 2783741 - DNA, 25 bp, Homo sapien
tacatcccctctaggctgattttgc

SEQ ID NO: 2783742 - DNA, 25 bp, Homo sapien
acatcccctctaggctgattttgct

SEQ ID NO: 2783743 - DNA, 25 bp, Homo sapien
ggtacatcccctctaggctgatttt

SEQ ID NO: 2783744 - DNA, 25 bp, Homo sapien
ctgtgcttctaacccagcgaggcgc

SEQ ID NO: 2783745 - DNA, 25 bp, Homo sapien
ttgtttgccactgtcgcagactcgc

SEQ ID NO: 2783746 - DNA, 25 bp, Homo sapien
ccactcctgatagggctagaggcct

SEQ ID NO: 2783747 - DNA, 25 bp, Homo sapien
tccgcgtttgttacagctcgagctg

SEQ ID NO: 2783748 - DNA, 25 bp, Homo sapien
taaatgcttgccacaaaacccatga

SEQ ID NO: 2783749 - DNA, 25 bp, Homo sapien
caactgacaccacctttattggaag

SEQ ID NO: 2783750 - DNA, 25 bp, Homo sapien
tgttcatcaagataccataaagtga

SEQ ID NO: 2783751 - DNA, 25 bp, Homo sapien
ctctgactttgagtaatgaagggac

SEQ ID NO: 2783752 - DNA, 25 bp, Homo sapien
tgtcggtttccactgtagggcacag

SEQ ID NO: 2783753 - DNA, 25 bp, Homo sapien
ccctgtcggtttccactgtagggca

SEQ ID NO: 2783754 - DNA, 25 bp, Homo sapien
cctgtcggtttccactgtagggcac

SEQ ID NO: 2783755 - DNA, 25 bp, Homo sapien
ctgtcggtttccactgtagggcaca

SEQ ID NO: 2783756 - DNA, 25 bp, Homo sapien
cccaggcctggaatgcactggcaca

SEQ ID NO: 2783757 - DNA, 25 bp, Homo sapien
caggcctggaatgcactggcacaat

SEQ ID NO: 2783758 - DNA, 25 bp, Homo sapien
gttgcccaggcctggaatgcactgg

SEQ ID NO: 2783759 - DNA, 25 bp, Homo sapien
tgcgactacaggcgtcagccactgt

SEQ ID NO: 2783760 - DNA, 25 bp, Homo sapien
gcaggtaggacaccaaatgctcttt

SEQ ID NO: 2783761 - DNA, 25 bp, Homo sapien
gaaagcagttaagacacagcaggta

SEQ ID NO: 2783762 - DNA, 25 bp, Homo sapien
tgttttcataacttggcagtagtac

SEQ ID NO: 2783763 - DNA, 25 bp, Homo sapien
gcagtagtactctttgcccaaggaa

SEQ ID NO: 2783764 - DNA, 25 bp, Homo sapien
cgacagcgatgtttccgtaacggca

SEQ ID NO: 2783765 - DNA, 25 bp, Homo sapien
ttagcacgaaaaagctccacggtct

SEQ ID NO: 2783766 - DNA, 25 bp, Homo sapien
gcttcggccgctgtgaaacaatgct

SEQ ID NO: 2783767 - DNA, 25 bp, Homo sapien
gggccgaagttttgactgcacctca

SEQ ID NO: 2783768 - DNA, 25 bp, Homo sapien
ctgcacccggcctcaaaaatagaaa

SEQ ID NO: 2783769 - DNA, 25 bp, Homo sapien
actgcacccggcctcaaaaatagaa

SEQ ID NO: 2783770 - DNA, 25 bp, Homo sapien
ctttctacttcttttgacactgttg

SEQ ID NO: 2783771 - DNA, 25 bp, Homo sapien
tttctacttcttttgacactgttgt

SEQ ID NO: 2783772 - DNA, 25 bp, Homo sapien
tagagtgttcgcaaagatgagtgca

SEQ ID NO: 2783773 - DNA, 25 bp, Homo sapien
tattcttgaccccagatcattctgg

SEQ ID NO: 2783774 - DNA, 25 bp, Homo sapien
tgagtgcaatgattcttcccatcct

SEQ ID NO: 2783775 - DNA, 25 bp, Homo sapien
tagtcacgtcaagaaccacagcctt

SEQ ID NO: 2783776 - DNA, 25 bp, Homo sapien
cagcctggtagctcggtacggcccg

SEQ ID NO: 2783777 - DNA, 25 bp, Homo sapien
agcctggtagctcggtacggcccgg

SEQ ID NO: 2783778 - DNA, 25 bp, Homo sapien
cccgggccccacgatgcgatgctcc

SEQ ID NO: 2783779 - DNA, 25 bp, Homo sapien
cgggccccacgatgcgatgctccat

SEQ ID NO: 2783780 - DNA, 25 bp, Homo sapien
ttgaatcccaagcccgcgggctgcg

SEQ ID NO: 2783781 - DNA, 25 bp, Homo sapien
aatcccaagcccgcgggctgcgggc

SEQ ID NO: 2783782 - DNA, 25 bp, Homo sapien
ggagcagcagtttgaatcccaagcc

SEQ ID NO: 2783783 - DNA, 25 bp, Homo sapien
cgcgccagcgctgatccccgccagc

SEQ ID NO: 2783784 - DNA, 25 bp, Homo sapien
taaaaacgggatagagagcacaagg

SEQ ID NO: 2783785 - DNA, 25 bp, Homo sapien
tttgggccgcgtggataaatacctg

SEQ ID NO: 2783786 - DNA, 25 bp, Homo sapien
aataataggtgttatccagcgaccg

SEQ ID NO: 2783787 - DNA, 25 bp, Homo sapien
cgaggcgacagcttttaccagtgta

SEQ ID NO: 2783788 - DNA, 25 bp, Homo sapien
cactctggccattgcgtggatactg

SEQ ID NO: 2783789 - DNA, 25 bp, Homo sapien
tctaagccgaaagaatgagcagccc

SEQ ID NO: 2783790 - DNA, 25 bp, Homo sapien
ggctttcagaccacattatgggcca

SEQ ID NO: 2783791 - DNA, 25 bp, Homo sapien
tggatactggactcgggtaggcatt

SEQ ID NO: 2783792 - DNA, 25 bp, Homo sapien
tagaaaagacaaccgtgaatcacca

SEQ ID NO: 2783793 - DNA, 25 bp, Homo sapien
gatgaatggtcacagtgctggtgct

SEQ ID NO: 2783794 - DNA, 25 bp, Homo sapien
aatgtagctctcataatagggaaga

SEQ ID NO: 2783795 - DNA, 25 bp, Homo sapien
taaaccatgataatactctgtccca

SEQ ID NO: 2783796 - DNA, 25 bp, Homo sapien
ttcccatcgtgggtctcaatcttct

SEQ ID NO: 2783797 - DNA, 25 bp, Homo sapien
cttgagcaggacgtcagaggactcg

SEQ ID NO: 2783798 - DNA, 25 bp, Homo sapien
ctcaatcttcttcacaatcatggcc

SEQ ID NO: 2783799 - DNA, 25 bp, Homo sapien
caccagcttcccatcgtgggtctca

SEQ ID NO: 2783800 - DNA, 25 bp, Homo sapien
aggagcccgcaccagagccaaaact

SEQ ID NO: 2783801 - DNA, 25 bp, Homo sapien
cggctgaaagcgcaggagcccgcac

SEQ ID NO: 2783802 - DNA, 25 bp, Homo sapien
caggtgcggctgaaagcgcaggagc

SEQ ID NO: 2783803 - DNA, 25 bp, Homo sapien
tgaaagcgcaggagcccgcaccaga

SEQ ID NO: 2783804 - DNA, 25 bp, Homo sapien
cccgtgcttcccagacagcgtctgg

SEQ ID NO: 2783805 - DNA, 25 bp, Homo sapien
gccggcttatgttccagttcatctg

SEQ ID NO: 2783806 - DNA, 25 bp, Homo sapien
cagacagcgtctggagctcctcata

SEQ ID NO: 2783807 - DNA, 25 bp, Homo sapien
cggcttatgttccagttcatctggg

SEQ ID NO: 2783808 - DNA, 25 bp, Homo sapien
gatctcctcagtcagcccttccaga

SEQ ID NO: 2783809 - DNA, 25 bp, Homo sapien
cctcagtcagcccttccagaagaga

SEQ ID NO: 2783810 - DNA, 25 bp, Homo sapien
tctcctcagtcagcccttccagaag

SEQ ID NO: 2783811 - DNA, 25 bp, Homo sapien
agtcagcccttccagaagagactcc

SEQ ID NO: 2783812 - DNA, 25 bp, Homo sapien
ttctccatccctgtacgcttattga

SEQ ID NO: 2783813 - DNA, 25 bp, Homo sapien
ttcattctccatccctgtacgctta

SEQ ID NO: 2783814 - DNA, 25 bp, Homo sapien
atgaggaaaaattcattctccatcc

SEQ ID NO: 2783815 - DNA, 25 bp, Homo sapien
atgttgccaagttccgcctccagct

SEQ ID NO: 2783816 - DNA, 25 bp, Homo sapien
atgttgctccgagccatcttctcct

SEQ ID NO: 2783817 - DNA, 25 bp, Homo sapien
tgttgagtgtcttgatctggttctt

SEQ ID NO: 2783818 - DNA, 25 bp, Homo sapien
ttgagtgtcttgatctggttcttct

SEQ ID NO: 2783819 - DNA, 25 bp, Homo sapien
tgttgttgagtgtcttgatctggtt

SEQ ID NO: 2783820 - DNA, 25 bp, Homo sapien
taagagaagctcgaggagttgatgc

SEQ ID NO: 2783821 - DNA, 25 bp, Homo sapien
ttaagagaagctcgaggagttgatg

SEQ ID NO: 2783822 - DNA, 25 bp, Homo sapien
gacttctgggtcatcctgatggaca

SEQ ID NO: 2783823 - DNA, 25 bp, Homo sapien
cttgtaggacttctgggtcatcctg

SEQ ID NO: 2783824 - DNA, 25 bp, Homo sapien
ttgtaggacttctgggtcatcctga

SEQ ID NO: 2783825 - DNA, 25 bp, Homo sapien
taggacttctgggtcatcctgatgg

SEQ ID NO: 2783826 - DNA, 25 bp, Homo sapien
gacttggctgatggtatcctttttg

SEQ ID NO: 2783827 - DNA, 25 bp, Homo sapien
tttgccacgaatacctcagagtatt

SEQ ID NO: 2783828 - DNA, 25 bp, Homo sapien
gagacaaaacatctggttgtcccac

SEQ ID NO: 2783829 - DNA, 25 bp, Homo sapien
tgggttcagtcatatcagcacaagc

SEQ ID NO: 2783830 - DNA, 25 bp, Homo sapien
tatggaggatacttctagcagctgt

SEQ ID NO: 2783831 - DNA, 25 bp, Homo sapien
tagcacaggttagatatgaagagcc

SEQ ID NO: 2783832 - DNA, 25 bp, Homo sapien
tctctcaaagtagaacagcccttgc

SEQ ID NO: 2783833 - DNA, 25 bp, Homo sapien
gttatctggaagcttcgggctctca

SEQ ID NO: 2783834 - DNA, 25 bp, Homo sapien
ggatggcgacaataacaaactggac

SEQ ID NO: 2783835 - DNA, 25 bp, Homo sapien
gggcaacctctgacctttggtgtaa

SEQ ID NO: 2783836 - DNA, 25 bp, Homo sapien
tgatgcacgcaaagactggaaactg

SEQ ID NO: 2783837 - DNA, 25 bp, Homo sapien
tgtaagcacggtaccaaaaatggag

SEQ ID NO: 2783838 - DNA, 25 bp, Homo sapien
gtccatagtaggaatacatgactac

SEQ ID NO: 2783839 - DNA, 25 bp, Homo sapien
atttagaagggcatggaatgttccc

SEQ ID NO: 2783840 - DNA, 25 bp, Homo sapien
catgactacatgtacagctgtattt

SEQ ID NO: 2783841 - DNA, 25 bp, Homo sapien
gtaggctggccccaatgcagaaagt

SEQ ID NO: 2783842 - DNA, 25 bp, Homo sapien
cacttggctatttttcttgcgcaga

SEQ ID NO: 2783843 - DNA, 25 bp, Homo sapien
ttttcttgcgcagaacaaaaaagat

SEQ ID NO: 2783844 - DNA, 25 bp, Homo sapien
caggtccacggcatgatggtatgat

SEQ ID NO: 2783845 - DNA, 25 bp, Homo sapien
aaccaccaggtccacggcatgatgg

SEQ ID NO: 2783846 - DNA, 25 bp, Homo sapien
aagttcagaggcgatcctcactagg

SEQ ID NO: 2783847 - DNA, 25 bp, Homo sapien
gttcagaggcgatcctcactaggat

SEQ ID NO: 2783848 - DNA, 25 bp, Homo sapien
tcatccaagttcagaggcgatcctc

SEQ ID NO: 2783849 - DNA, 25 bp, Homo sapien
tccaagttcagaggcgatcctcact

SEQ ID NO: 2783850 - DNA, 25 bp, Homo sapien
tatctaatagctcaataaatttgga

SEQ ID NO: 2783851 - DNA, 25 bp, Homo sapien
taataaagccagcaggtacgtgcca

SEQ ID NO: 2783852 - DNA, 25 bp, Homo sapien
gagaagtaataaagccagcaggtac

SEQ ID NO: 2783853 - DNA, 25 bp, Homo sapien
tttggagaagtaataaagccagcag

SEQ ID NO: 2783854 - DNA, 25 bp, Homo sapien
ttttgaggaaccacatgtgaattta

SEQ ID NO: 2783855 - DNA, 25 bp, Homo sapien
tctgcttattctaagtttacgttca

SEQ ID NO: 2783856 - DNA, 25 bp, Homo sapien
tgaggaaccacatgtgaatttattt

SEQ ID NO: 2783857 - DNA, 25 bp, Homo sapien
agtttacgttcagtgttacaaacag

SEQ ID NO: 2783858 - DNA, 25 bp, Homo sapien
aatgaataacctataccccagccag

SEQ ID NO: 2783859 - DNA, 25 bp, Homo sapien
cctcaaagctgtgggtgaccgtgaa

SEQ ID NO: 2783860 - DNA, 25 bp, Homo sapien
gaccgtgaatagtcaacaatgtcac

SEQ ID NO: 2783861 - DNA, 25 bp, Homo sapien
caatgtcacatcgaaatgaataacc

SEQ ID NO: 2783862 - DNA, 25 bp, Homo sapien
tcagctaagtcaatagtcagtgcag

SEQ ID NO: 2783863 - DNA, 25 bp, Homo sapien
ttcccaacagccacaacaaaggtag

SEQ ID NO: 2783864 - DNA, 25 bp, Homo sapien
gcaagagagcacatgcatattaaga

SEQ ID NO: 2783865 - DNA, 25 bp, Homo sapien
ggaaaaggtagctggaacaaataca

SEQ ID NO: 2783866 - DNA, 25 bp, Homo sapien
tcaggcaaaattctcccattaggaa

SEQ ID NO: 2783867 - DNA, 25 bp, Homo sapien
tccatgagctttggtcccaaggaag

SEQ ID NO: 2783868 - DNA, 25 bp, Homo sapien
gcgaggacatgaggagccaatcttc

SEQ ID NO: 2783869 - DNA, 25 bp, Homo sapien
gaaaaaattgtacgttatcattgct

SEQ ID NO: 2783870 - DNA, 25 bp, Homo sapien
caaagggcttgcgattttccatgag

SEQ ID NO: 2783871 - DNA, 25 bp, Homo sapien
gagctatttgggcagtgatcactag

SEQ ID NO: 2783872 - DNA, 25 bp, Homo sapien
ccagatcctactattaactgtgagc

SEQ ID NO: 2783873 - DNA, 25 bp, Homo sapien
gccaaggggtaactaacagcaacca

SEQ ID NO: 2783874 - DNA, 25 bp, Homo sapien
actgagcacccagatcctactatta

SEQ ID NO: 2783875 - DNA, 25 bp, Homo sapien
actattaggtacatactgaaaggaa

SEQ ID NO: 2783876 - DNA, 25 bp, Homo sapien
ccactattaggtacatactgaaagg

SEQ ID NO: 2783877 - DNA, 25 bp, Homo sapien
ttggcaaaggctttatgaccaagtc

SEQ ID NO: 2783878 - DNA, 25 bp, Homo sapien
ttccactattaggtacatactgaaa

SEQ ID NO: 2783879 - DNA, 25 bp, Homo sapien
tattctcttcttaagtagcaggtac

SEQ ID NO: 2783880 - DNA, 25 bp, Homo sapien
aatattaatgggcttttccatcagc

SEQ ID NO: 2783881 - DNA, 25 bp, Homo sapien
agcaggtactggctcaaagagtaca

SEQ ID NO: 2783882 - DNA, 25 bp, Homo sapien
ttaagattccaagtactaatgaaat

SEQ ID NO: 2783883 - DNA, 25 bp, Homo sapien
gtatctttgctgaaatcgttgtaaa

SEQ ID NO: 2783884 - DNA, 25 bp, Homo sapien
aatttggtctttagtagtctgctga

SEQ ID NO: 2783885 - DNA, 25 bp, Homo sapien
tcatctgtggtaggtgccaagaggt

SEQ ID NO: 2783886 - DNA, 25 bp, Homo sapien
ccttcctgaatttggtagacttgca

SEQ ID NO: 2783887 - DNA, 25 bp, Homo sapien
cacagtcctcgatgtaagatcactg

SEQ ID NO: 2783888 - DNA, 25 bp, Homo sapien
tcctcgatgtaagatcactgaaggc

SEQ ID NO: 2783889 - DNA, 25 bp, Homo sapien
caattatcataaagatgcacagtcc

SEQ ID NO: 2783890 - DNA, 25 bp, Homo sapien
tccaattatcataaagatgcacagt

SEQ ID NO: 2783891 - DNA, 25 bp, Homo sapien
tcagtaaaataaaacagaaatgagt

SEQ ID NO: 2783892 - DNA, 25 bp, Homo sapien
cttcagtaaaataaaacagaaatga

SEQ ID NO: 2783893 - DNA, 25 bp, Homo sapien
ttcagtaaaataaaacagaaatgag

SEQ ID NO: 2783894 - DNA, 25 bp, Homo sapien
cagtaaaataaaacagaaatgagtt

SEQ ID NO: 2783895 - DNA, 25 bp, Homo sapien
tggtaacgaagtgacttaatttgcc

SEQ ID NO: 2783896 - DNA, 25 bp, Homo sapien
catgagtactggtgctggtgtttca

SEQ ID NO: 2783897 - DNA, 25 bp, Homo sapien
tgccccatgaatactgctccttgat

SEQ ID NO: 2783898 - DNA, 25 bp, Homo sapien
gacaactcggtcatttggtaacgaa

SEQ ID NO: 2783899 - DNA, 25 bp, Homo sapien
caaaacttatgggatgccacaaaag

SEQ ID NO: 2783900 - DNA, 25 bp, Homo sapien
gccacaaaagcagttctaagaggga

SEQ ID NO: 2783901 - DNA, 25 bp, Homo sapien
atgggatgccacaaaagcagttcta

SEQ ID NO: 2783902 - DNA, 25 bp, Homo sapien
aaacttatgggatgccacaaaagca

SEQ ID NO: 2783903 - DNA, 25 bp, Homo sapien
ttcatttcccattcatgggtgagga

SEQ ID NO: 2783904 - DNA, 25 bp, Homo sapien
aggacatggacactggaatcacata

SEQ ID NO: 2783905 - DNA, 25 bp, Homo sapien
ggtgaggacatggacactggaatca

SEQ ID NO: 2783906 - DNA, 25 bp, Homo sapien
tgaggacatggacactggaatcaca

SEQ ID NO: 2783907 - DNA, 25 bp, Homo sapien
catttatcacaactgcattacctag

SEQ ID NO: 2783908 - DNA, 25 bp, Homo sapien
tactatttcataagcatatcagctg

SEQ ID NO: 2783909 - DNA, 25 bp, Homo sapien
tagattttccccttctatgcttgga

SEQ ID NO: 2783910 - DNA, 25 bp, Homo sapien
tctaaggcaacgtgtagtaagcagc

SEQ ID NO: 2783911 - DNA, 25 bp, Homo sapien
gagatactcaggcagtcacctaatg

SEQ ID NO: 2783912 - DNA, 25 bp, Homo sapien
gataaactcaagtgctaagggcaga

SEQ ID NO: 2783913 - DNA, 25 bp, Homo sapien
ttttataatacatgggcctcaggac

SEQ ID NO: 2783914 - DNA, 25 bp, Homo sapien
taaagtccatggcttgggctaggta

SEQ ID NO: 2783915 - DNA, 25 bp, Homo sapien
gctataaaccatacctagaacttaa

SEQ ID NO: 2783916 - DNA, 25 bp, Homo sapien
tagaacttaatctacaatttccagt

SEQ ID NO: 2783917 - DNA, 25 bp, Homo sapien
aaagacagagtagtcccaagactgt

SEQ ID NO: 2783918 - DNA, 25 bp, Homo sapien
tagtcccaagactgtacttgaggaa

SEQ ID NO: 2783919 - DNA, 25 bp, Homo sapien
taacaaatataactggcactaacat

SEQ ID NO: 2783920 - DNA, 25 bp, Homo sapien
aataacaaatataactggcactaac

SEQ ID NO: 2783921 - DNA, 25 bp, Homo sapien
gtttcataagttcacgcatatctaa

SEQ ID NO: 2783922 - DNA, 25 bp, Homo sapien
aagttcacgcatatctaaattatct

SEQ ID NO: 2783923 - DNA, 25 bp, Homo sapien
ttctgagacataaatctttctgtcc

SEQ ID NO: 2783924 - DNA, 25 bp, Homo sapien
caacattgttcgttggctggtttat

SEQ ID NO: 2783925 - DNA, 25 bp, Homo sapien
aaatctttctgtcctacaggatgca

SEQ ID NO: 2783926 - DNA, 25 bp, Homo sapien
acaggatgcaacacagcactgtctg

SEQ ID NO: 2783927 - DNA, 25 bp, Homo sapien
gacaggtgtaaagacccgctccttc

SEQ ID NO: 2783928 - DNA, 25 bp, Homo sapien
ctacactgggagcaggacaggtgta

SEQ ID NO: 2783929 - DNA, 25 bp, Homo sapien
cgcaccgggtgaagtttgaaacagc

SEQ ID NO: 2783930 - DNA, 25 bp, Homo sapien
agggagctccaaagagcgctctgtc

SEQ ID NO: 2783931 - DNA, 25 bp, Homo sapien
atctccggcacgacctgttccacgg

SEQ ID NO: 2783932 - DNA, 25 bp, Homo sapien
tgtttccatctccggcacgacctgt

SEQ ID NO: 2783933 - DNA, 25 bp, Homo sapien
gccgaagggacagcgccccaagttc

SEQ ID NO: 2783934 - DNA, 25 bp, Homo sapien
gttccacggctctgtattcatcagc

SEQ ID NO: 2783935 - DNA, 25 bp, Homo sapien
ctggccgcgggagcaaaaaaagcgc

SEQ ID NO: 2783936 - DNA, 25 bp, Homo sapien
tggccgcgggagcaaaaaaagcgcc

SEQ ID NO: 2783937 - DNA, 25 bp, Homo sapien
gccgcgggagcaaaaaaagcgccca

SEQ ID NO: 2783938 - DNA, 25 bp, Homo sapien
ggccagcgccgcgcgggaccccagt

SEQ ID NO: 2783939 - DNA, 25 bp, Homo sapien
cgcgtccaaggtcgagcaggtcctt

SEQ ID NO: 2783940 - DNA, 25 bp, Homo sapien
ctcccagtcccgccggcgagcacct

SEQ ID NO: 2783941 - DNA, 25 bp, Homo sapien
ctccgcgtccaaggtcgagcaggtc

SEQ ID NO: 2783942 - DNA, 25 bp, Homo sapien
agcgcgagcgcggagctcctcacag

SEQ ID NO: 2783943 - DNA, 25 bp, Homo sapien
ggagcggagccgaagcgccgggcgc

SEQ ID NO: 2783944 - DNA, 25 bp, Homo sapien
agggcggcgactggcagcgcgagcg

SEQ ID NO: 2783945 - DNA, 25 bp, Homo sapien
ctggcagcgcgagcgcggagctcct

SEQ ID NO: 2783946 - DNA, 25 bp, Homo sapien
caatatagcctgtctacgggagaaa

SEQ ID NO: 2783947 - DNA, 25 bp, Homo sapien
ccactagaaagatgcagggaggatc

SEQ ID NO: 2783948 - DNA, 25 bp, Homo sapien
tattgatcccaaatagggcaggaga

SEQ ID NO: 2783949 - DNA, 25 bp, Homo sapien
cctttgagaataggaccctctgcca

SEQ ID NO: 2783950 - DNA, 25 bp, Homo sapien
gagtgttcactcagtattaagacaa

SEQ ID NO: 2783951 - DNA, 25 bp, Homo sapien
gctttaaaagtgtaattcaggcaaa

SEQ ID NO: 2783952 - DNA, 25 bp, Homo sapien
tataatgacactctacctctgcctt

SEQ ID NO: 2783953 - DNA, 25 bp, Homo sapien
caatgatggctccataataattcac

SEQ ID NO: 2783954 - DNA, 25 bp, Homo sapien
ctctgaattttgcatatatatgtaa

SEQ ID NO: 2783955 - DNA, 25 bp, Homo sapien
gaattttgcatatatatgtaagaaa

SEQ ID NO: 2783956 - DNA, 25 bp, Homo sapien
atcttaccattctttaatgtccata

SEQ ID NO: 2783957 - DNA, 25 bp, Homo sapien
tgtccatagtgatcatcactgagtt

SEQ ID NO: 2783958 - DNA, 25 bp, Homo sapien
cacgagcagcttaatgaacttagtc

SEQ ID NO: 2783959 - DNA, 25 bp, Homo sapien
gggcaacaagacgaaactagttctg

SEQ ID NO: 2783960 - DNA, 25 bp, Homo sapien
tatgcaaccaccattaacaaactgt

SEQ ID NO: 2783961 - DNA, 25 bp, Homo sapien
taactaaccaggttgggacagagac

SEQ ID NO: 2783962 - DNA, 25 bp, Homo sapien
aaggacagccaagacagcgtgaaag

SEQ ID NO: 2783963 - DNA, 25 bp, Homo sapien
aactaggcatttcataggtgtacca

SEQ ID NO: 2783964 - DNA, 25 bp, Homo sapien
taccttaggtgacgaaaggacagcc

SEQ ID NO: 2783965 - DNA, 25 bp, Homo sapien
aagtttcaagtggaagcctcccata

SEQ ID NO: 2783966 - DNA, 25 bp, Homo sapien
agtggctttggaattctcaactgca

SEQ ID NO: 2783967 - DNA, 25 bp, Homo sapien
aataaacatgtagccttgaacaggg

SEQ ID NO: 2783968 - DNA, 25 bp, Homo sapien
tccagctgtaacgaatgaattccct

SEQ ID NO: 2783969 - DNA, 25 bp, Homo sapien
aaagtgggcacaatatctatagacc

SEQ ID NO: 2783970 - DNA, 25 bp, Homo sapien
ccatgtgaggcatatgtcagttagc

SEQ ID NO: 2783971 - DNA, 25 bp, Homo sapien
cctaagcatctgtcaatggttgaat

SEQ ID NO: 2783972 - DNA, 25 bp, Homo sapien
gcaagagacctattgcacaacatag

SEQ ID NO: 2783973 - DNA, 25 bp, Homo sapien
caatcctaatactgggcttatatcc

SEQ ID NO: 2783974 - DNA, 25 bp, Homo sapien
tcttaaaggtggaaacgagcaggct

SEQ ID NO: 2783975 - DNA, 25 bp, Homo sapien
cacaacatctgggatcaaggaacac

SEQ ID NO: 2783976 - DNA, 25 bp, Homo sapien
tgaaggtcacaactgaggtacaacg

SEQ ID NO: 2783977 - DNA, 25 bp, Homo sapien
tagtaggagacattgagccccaaaa

SEQ ID NO: 2783978 - DNA, 25 bp, Homo sapien
cttcaaaggccggatttaattgtga

SEQ ID NO: 2783979 - DNA, 25 bp, Homo sapien
tcaaaggccggatttaattgtgatt

SEQ ID NO: 2783980 - DNA, 25 bp, Homo sapien
tcttcaaaggccggatttaattgtg

SEQ ID NO: 2783981 - DNA, 25 bp, Homo sapien
gcatcttcaaaggccggatttaatt

SEQ ID NO: 2783982 - DNA, 25 bp, Homo sapien
caggaactggttcatataaggatgg

SEQ ID NO: 2783983 - DNA, 25 bp, Homo sapien
ttcatataaggatggaacccaagcc

SEQ ID NO: 2783984 - DNA, 25 bp, Homo sapien
caagccagaatgttgcagtctctgc

SEQ ID NO: 2783985 - DNA, 25 bp, Homo sapien
gaactggttcatataaggatggaac

SEQ ID NO: 2783986 - DNA, 25 bp, Homo sapien
tatggctgaacaatgctcatgcccc

SEQ ID NO: 2783987 - DNA, 25 bp, Homo sapien
gcctaactggctgcaattcaacaga

SEQ ID NO: 2783988 - DNA, 25 bp, Homo sapien
tcagtgaagaaaccatatgagcgtc

SEQ ID NO: 2783989 - DNA, 25 bp, Homo sapien
tatgagcgtctactaaaataggcca

SEQ ID NO: 2783990 - DNA, 25 bp, Homo sapien
aatttataccaatcaagttgcacag

SEQ ID NO: 2783991 - DNA, 25 bp, Homo sapien
gtggattaaaagcataactcctcag

SEQ ID NO: 2783992 - DNA, 25 bp, Homo sapien
gtatgctgtctaacaatctaggctg

SEQ ID NO: 2783993 - DNA, 25 bp, Homo sapien
taactggtctggcaagctagctagc

SEQ ID NO: 2783994 - DNA, 25 bp, Homo sapien
cacagcagtcaacagttttataatg

SEQ ID NO: 2783995 - DNA, 25 bp, Homo sapien
tggtgctaccatatggtacaaaaac

SEQ ID NO: 2783996 - DNA, 25 bp, Homo sapien
caatggtgctaccatatggtacaaa

SEQ ID NO: 2783997 - DNA, 25 bp, Homo sapien
aatgtcccttaagcatagttatctg

SEQ ID NO: 2783998 - DNA, 25 bp, Homo sapien
caggagacagtgaatttcaatcctt

SEQ ID NO: 2783999 - DNA, 25 bp, Homo sapien
acaggagacagtgaatttcaatcct

SEQ ID NO: 2784000 - DNA, 25 bp, Homo sapien
aggagacagtgaatttcaatccttt

SEQ ID NO: 2784001 - DNA, 25 bp, Homo sapien
actatttcactggtaatctcccgtc

SEQ ID NO: 2784002 - DNA, 25 bp, Homo sapien
tgggaggcaaagacacatagttggg

SEQ ID NO: 2784003 - DNA, 25 bp, Homo sapien
taatctcccgtcccactggaactgg

SEQ ID NO: 2784004 - DNA, 25 bp, Homo sapien
aagggtattgggtttgtcagctcca

SEQ ID NO: 2784005 - DNA, 25 bp, Homo sapien
catctccatgatcctctgcagtact

SEQ ID NO: 2784006 - DNA, 25 bp, Homo sapien
tgcagtactgggcagcagtccactg

SEQ ID NO: 2784007 - DNA, 25 bp, Homo sapien
atgctagagcctggccctgttgtag

SEQ ID NO: 2784008 - DNA, 25 bp, Homo sapien
catcagcattgccagagaggtggag

SEQ ID NO: 2784009 - DNA, 25 bp, Homo sapien
ggtggtggtctacattgagtttagc

SEQ ID NO: 2784010 - DNA, 25 bp, Homo sapien
tctccaatcttatatacagtagctt

SEQ ID NO: 2784011 - DNA, 25 bp, Homo sapien
gacttgctcggtatcctcgatgtca

SEQ ID NO: 2784012 - DNA, 25 bp, Homo sapien
tatacagtagctttatcttcaatgg

SEQ ID NO: 2784013 - DNA, 25 bp, Homo sapien
cttcattgacttgctcggtatcctc

SEQ ID NO: 2784014 - DNA, 25 bp, Homo sapien
ggtctatagaagctgatcttcccgc

SEQ ID NO: 2784015 - DNA, 25 bp, Homo sapien
tggtggtggtctatagaagctgatc

SEQ ID NO: 2784016 - DNA, 25 bp, Homo sapien
ggtggtctatagaagctgatcttcc

SEQ ID NO: 2784017 - DNA, 25 bp, Homo sapien
ctatagaagctgatcttcccgctca

SEQ ID NO: 2784018 - DNA, 25 bp, Homo sapien
ctaggacagttttggctgcctgctc

SEQ ID NO: 2784019 - DNA, 25 bp, Homo sapien
gctaggacagttttggctgcctgct

SEQ ID NO: 2784020 - DNA, 25 bp, Homo sapien
ccactgctgtcagaaagtgctcagt

SEQ ID NO: 2784021 - DNA, 25 bp, Homo sapien
tctcttcttccccaaatggtgggcc

SEQ ID NO: 2784022 - DNA, 25 bp, Homo sapien
tgggccactgctgtcagaaagtgct

SEQ ID NO: 2784023 - DNA, 25 bp, Homo sapien
cttcttccccaaatggtgggccact

SEQ ID NO: 2784024 - DNA, 25 bp, Homo sapien
gtaatagttggaaatctcctccagg

SEQ ID NO: 2784025 - DNA, 25 bp, Homo sapien
acccagagagaaggtaatagttgga

SEQ ID NO: 2784026 - DNA, 25 bp, Homo sapien
ctggtacccagagagaaggtaatag

SEQ ID NO: 2784027 - DNA, 25 bp, Homo sapien
ggtaatagttggaaatctcctccag

SEQ ID NO: 2784028 - DNA, 25 bp, Homo sapien
cactggggtcatggggtctgccagt

SEQ ID NO: 2784029 - DNA, 25 bp, Homo sapien
tccactggggtcatggggtctgcca

SEQ ID NO: 2784030 - DNA, 25 bp, Homo sapien
tgcaagatggtctccactggggtca

SEQ ID NO: 2784031 - DNA, 25 bp, Homo sapien
gtctccactggggtcatggggtctg

SEQ ID NO: 2784032 - DNA, 25 bp, Homo sapien
tgtggatgcagttatgcaggatggt

SEQ ID NO: 2784033 - DNA, 25 bp, Homo sapien
atgcagttatgcaggatggtgccca

SEQ ID NO: 2784034 - DNA, 25 bp, Homo sapien
gatgcagttatgcaggatggtgccc

SEQ ID NO: 2784035 - DNA, 25 bp, Homo sapien
ctagatgtggatgcagttatgcagg

SEQ ID NO: 2784036 - DNA, 25 bp, Homo sapien
tgcatgaatttcgtgaccccaggaa

SEQ ID NO: 2784037 - DNA, 25 bp, Homo sapien
tcccaatattgggaaggcctacaat

SEQ ID NO: 2784038 - DNA, 25 bp, Homo sapien
ggaatggctcccacactgcatgcat

SEQ ID NO: 2784039 - DNA, 25 bp, Homo sapien
ccatatggatgtgggtgcgcatttc

SEQ ID NO: 2784040 - DNA, 25 bp, Homo sapien
gttggcaactcattccgaaggtaat

SEQ ID NO: 2784041 - DNA, 25 bp, Homo sapien
gcaactcattccgaaggtaatccag

SEQ ID NO: 2784042 - DNA, 25 bp, Homo sapien
tggcaactcattccgaaggtaatcc

SEQ ID NO: 2784043 - DNA, 25 bp, Homo sapien
actcattccgaaggtaatccagcca

SEQ ID NO: 2784044 - DNA, 25 bp, Homo sapien
ttgttgccttctgcccataggatag

SEQ ID NO: 2784045 - DNA, 25 bp, Homo sapien
tttcaagaccaggaccagcttcttg

SEQ ID NO: 2784046 - DNA, 25 bp, Homo sapien
gaccagcttcttgttgccttctgcc

SEQ ID NO: 2784047 - DNA, 25 bp, Homo sapien
ttcttgttgccttctgcccatagga

SEQ ID NO: 2784048 - DNA, 25 bp, Homo sapien
gcagcagcagcagcctaatgggtct

SEQ ID NO: 2784049 - DNA, 25 bp, Homo sapien
ggcatccaggacttccagaatcaca

SEQ ID NO: 2784050 - DNA, 25 bp, Homo sapien
ccagaatcacatcagagtattctac

SEQ ID NO: 2784051 - DNA, 25 bp, Homo sapien
ttccagaatcacatcagagtattct

SEQ ID NO: 2784052 - DNA, 25 bp, Homo sapien
ggacttccagaatcacatcagagta

SEQ ID NO: 2784053 - DNA, 25 bp, Homo sapien
ttttgcaggcttcttacagcccttg

SEQ ID NO: 2784054 - DNA, 25 bp, Homo sapien
taggatatcctcacagtagctcttg

SEQ ID NO: 2784055 - DNA, 25 bp, Homo sapien
gcaggcttcttacagcccttggaaa

SEQ ID NO: 2784056 - DNA, 25 bp, Homo sapien
gctcttgatagacctgcgtttttgt

SEQ ID NO: 2784057 - DNA, 25 bp, Homo sapien
gaatccgcttgctctcttcctatac

SEQ ID NO: 2784058 - DNA, 25 bp, Homo sapien
tctcttcctatacttccggcgggga

SEQ ID NO: 2784059 - DNA, 25 bp, Homo sapien
cttgaaagcagataggttcgaatcc

SEQ ID NO: 2784060 - DNA, 25 bp, Homo sapien
gataggttcgaatccgcttgctctc

SEQ ID NO: 2784061 - DNA, 25 bp, Homo sapien
gcgcccggctgggaatttatcttaa

SEQ ID NO: 2784062 - DNA, 25 bp, Homo sapien
actgcgcccggctgggaatttatct

SEQ ID NO: 2784063 - DNA, 25 bp, Homo sapien
cgcccggctgggaatttatcttaag

SEQ ID NO: 2784064 - DNA, 25 bp, Homo sapien
tcttaaggaaataattaaatagcaa

SEQ ID NO: 2784065 - DNA, 25 bp, Homo sapien
tattccagagcctcattcgattatc

SEQ ID NO: 2784066 - DNA, 25 bp, Homo sapien
ttttctccattggaactattccaga

SEQ ID NO: 2784067 - DNA, 25 bp, Homo sapien
gcctcattcgattatctgtaccaac

SEQ ID NO: 2784068 - DNA, 25 bp, Homo sapien
aacataagccattaactttcccatt

SEQ ID NO: 2784069 - DNA, 25 bp, Homo sapien
tcaacagcttgtgactttttcccat

SEQ ID NO: 2784070 - DNA, 25 bp, Homo sapien
gagtaatcaaacatcctgatgctct

SEQ ID NO: 2784071 - DNA, 25 bp, Homo sapien
caagagtaatcaaacatcctgatgc

SEQ ID NO: 2784072 - DNA, 25 bp, Homo sapien
ctgattcaacagcttgtgacttttt

SEQ ID NO: 2784073 - DNA, 25 bp, Homo sapien
cattctgccagttattaacagaagc

SEQ ID NO: 2784074 - DNA, 25 bp, Homo sapien
tcagctagccttcttatggctacat

SEQ ID NO: 2784075 - DNA, 25 bp, Homo sapien
gaccttgctgcacttcagaaatcat

SEQ ID NO: 2784076 - DNA, 25 bp, Homo sapien
tatggctacattctagaccttgctg

SEQ ID NO: 2784077 - DNA, 25 bp, Homo sapien
tagtcataacgtggagaccaggaaa

SEQ ID NO: 2784078 - DNA, 25 bp, Homo sapien
tgctgttgccaagatatagtcataa

SEQ ID NO: 2784079 - DNA, 25 bp, Homo sapien
ggaaactgctaatatttcttgtctg

SEQ ID NO: 2784080 - DNA, 25 bp, Homo sapien
aactgctaatatttcttgtctgtga

SEQ ID NO: 2784081 - DNA, 25 bp, Homo sapien
aaatacaactatatgaaaagtcttg

SEQ ID NO: 2784082 - DNA, 25 bp, Homo sapien
ctatatgaaaagtcttgcaagatat

SEQ ID NO: 2784083 - DNA, 25 bp, Homo sapien
aatacaactatatgaaaagtcttgc

SEQ ID NO: 2784084 - DNA, 25 bp, Homo sapien
atacaactatatgaaaagtcttgca

SEQ ID NO: 2784085 - DNA, 25 bp, Homo sapien
tttcattgtttagaattagacaatc

SEQ ID NO: 2784086 - DNA, 25 bp, Homo sapien
tacatatgagacaagtacactgatg

SEQ ID NO: 2784087 - DNA, 25 bp, Homo sapien
atacatatgagacaagtacactgat

SEQ ID NO: 2784088 - DNA, 25 bp, Homo sapien
tgagtctcaacaaccagcacaaagt

SEQ ID NO: 2784089 - DNA, 25 bp, Homo sapien
aagtacattagtcatgtcacttaca

SEQ ID NO: 2784090 - DNA, 25 bp, Homo sapien
gcacagaaggatctttatttccctg

SEQ ID NO: 2784091 - DNA, 25 bp, Homo sapien
ccccaatgatcattgttcatataaa

SEQ ID NO: 2784092 - DNA, 25 bp, Homo sapien
tattgaatcgtttactcaaagtagt

SEQ ID NO: 2784093 - DNA, 25 bp, Homo sapien
tctttttattgaatcgtttactcaa

SEQ ID NO: 2784094 - DNA, 25 bp, Homo sapien
ctcaaagtagttgccgtttgaaata

SEQ ID NO: 2784095 - DNA, 25 bp, Homo sapien
aatcgtttactcaaagtagttgccg

SEQ ID NO: 2784096 - DNA, 25 bp, Homo sapien
ttgtactttgggtcctctagtacca

SEQ ID NO: 2784097 - DNA, 25 bp, Homo sapien
caagtcacaaagttgtactttgggt

SEQ ID NO: 2784098 - DNA, 25 bp, Homo sapien
gagacatatgatgactataaactgt

SEQ ID NO: 2784099 - DNA, 25 bp, Homo sapien
cttcactcctgttatcatagaaaca

SEQ ID NO: 2784100 - DNA, 25 bp, Homo sapien
cctgttatcatagaaacatgattct

SEQ ID NO: 2784101 - DNA, 25 bp, Homo sapien
ttcttcactcctgttatcatagaaa

SEQ ID NO: 2784102 - DNA, 25 bp, Homo sapien
cactcctgttatcatagaaacatga

SEQ ID NO: 2784103 - DNA, 25 bp, Homo sapien
tttgaacttctggattagggacact

SEQ ID NO: 2784104 - DNA, 25 bp, Homo sapien
tattcagtgtagacctcactcctga

SEQ ID NO: 2784105 - DNA, 25 bp, Homo sapien
cccaattgtcaagccagagaacctg

SEQ ID NO: 2784106 - DNA, 25 bp, Homo sapien
gacactcagtacatagtgaggcaca

SEQ ID NO: 2784107 - DNA, 25 bp, Homo sapien
tgcaggattgttaacagaaaggcgt

SEQ ID NO: 2784108 - DNA, 25 bp, Homo sapien
tgcagctacgccagcaggtgtgaaa

SEQ ID NO: 2784109 - DNA, 25 bp, Homo sapien
tacaccttggaacccatacgaagtg

SEQ ID NO: 2784110 - DNA, 25 bp, Homo sapien
tatgacaatgtgaagccaaaggaag

SEQ ID NO: 2784111 - DNA, 25 bp, Homo sapien
caacgcagtatataggccgggcatg

SEQ ID NO: 2784112 - DNA, 25 bp, Homo sapien
tgtaacaacgcagtatataggccgg

SEQ ID NO: 2784113 - DNA, 25 bp, Homo sapien
taacaacgcagtatataggccgggc

SEQ ID NO: 2784114 - DNA, 25 bp, Homo sapien
attgtaacaacgcagtatataggcc

SEQ ID NO: 2784115 - DNA, 25 bp, Homo sapien
tctttgtagcaattgagaatgtagt

SEQ ID NO: 2784116 - DNA, 25 bp, Homo sapien
agttggacttctaggtatttcattc

SEQ ID NO: 2784117 - DNA, 25 bp, Homo sapien
aagttggacttctaggtatttcatt

SEQ ID NO: 2784118 - DNA, 25 bp, Homo sapien
taagttggacttctaggtatttcat

SEQ ID NO: 2784119 - DNA, 25 bp, Homo sapien
tatggtctcgcatagcttggtcagc

SEQ ID NO: 2784120 - DNA, 25 bp, Homo sapien
tgatcttgaccctttaatttctggc

SEQ ID NO: 2784121 - DNA, 25 bp, Homo sapien
tgcctcttagaagctatccaatgcc

SEQ ID NO: 2784122 - DNA, 25 bp, Homo sapien
aattcttctctccagtaccatgtga

SEQ ID NO: 2784123 - DNA, 25 bp, Homo sapien
tgccagtgtcatgaggataccactg

SEQ ID NO: 2784124 - DNA, 25 bp, Homo sapien
tatcaaatgagcttgatgtgaacat

SEQ ID NO: 2784125 - DNA, 25 bp, Homo sapien
tgtatcccatactttcagagtttta

SEQ ID NO: 2784126 - DNA, 25 bp, Homo sapien
gaggataccactgtacagtctccac

SEQ ID NO: 2784127 - DNA, 25 bp, Homo sapien
ctgctttacatgtgtaataagattg

SEQ ID NO: 2784128 - DNA, 25 bp, Homo sapien
cactgctttacatgtgtaataagat

SEQ ID NO: 2784129 - DNA, 25 bp, Homo sapien
tgctttacatgtgtaataagattgt

SEQ ID NO: 2784130 - DNA, 25 bp, Homo sapien
gctttacatgtgtaataagattgtc

SEQ ID NO: 2784131 - DNA, 25 bp, Homo sapien
gggcaagttataccacctgtctaag

SEQ ID NO: 2784132 - DNA, 25 bp, Homo sapien
gggtgacagaaacaagacggcaaaa

SEQ ID NO: 2784133 - DNA, 25 bp, Homo sapien
aacaactgtcaacaaggcaggcatg

SEQ ID NO: 2784134 - DNA, 25 bp, Homo sapien
tattactgacacttgctatttggct

SEQ ID NO: 2784135 - DNA, 25 bp, Homo sapien
tctctggttgattcctaaggaatgg

SEQ ID NO: 2784136 - DNA, 25 bp, Homo sapien
tgtcattctggttgaatgatttcat

SEQ ID NO: 2784137 - DNA, 25 bp, Homo sapien
tgagcatcttggataagaagcttca

SEQ ID NO: 2784138 - DNA, 25 bp, Homo sapien
caatttatccgtcctttttgtatct

SEQ ID NO: 2784139 - DNA, 25 bp, Homo sapien
gcatcttggataagaagcttcattt

SEQ ID NO: 2784140 - DNA, 25 bp, Homo sapien
ttccttgagcatcttggataagaag

SEQ ID NO: 2784141 - DNA, 25 bp, Homo sapien
gaaagatattagagtccagactgct

SEQ ID NO: 2784142 - DNA, 25 bp, Homo sapien
gggcgcactttgactggttagctct

SEQ ID NO: 2784143 - DNA, 25 bp, Homo sapien
gagtttgagcatctcatttctgagg

SEQ ID NO: 2784144 - DNA, 25 bp, Homo sapien
tctgtagcagctttagtccacttct

SEQ ID NO: 2784145 - DNA, 25 bp, Homo sapien
tgcacctggctaattttttctattt

SEQ ID NO: 2784146 - DNA, 25 bp, Homo sapien
gtgagccactgcacccggcctgtca

SEQ ID NO: 2784147 - DNA, 25 bp, Homo sapien
ttacgggcacgcgccactgcacctg

SEQ ID NO: 2784148 - DNA, 25 bp, Homo sapien
ggattacgggcacgcgccactgcac

SEQ ID NO: 2784149 - DNA, 25 bp, Homo sapien
cttcaacaggttcaatgtcaagggt

SEQ ID NO: 2784150 - DNA, 25 bp, Homo sapien
tcaatgtcaagggtgttaattccac

SEQ ID NO: 2784151 - DNA, 25 bp, Homo sapien
caagggtgttaattccaccgccgtg

SEQ ID NO: 2784152 - DNA, 25 bp, Homo sapien
cgccgtggattctttcaacatctct

SEQ ID NO: 2784153 - DNA, 25 bp, Homo sapien
ttctttccccagaccactatgctgt

SEQ ID NO: 2784154 - DNA, 25 bp, Homo sapien
cagctccctcttcctaacagtaaga

SEQ ID NO: 2784155 - DNA, 25 bp, Homo sapien
tatcaatcccctgtatgtaaccaat

SEQ ID NO: 2784156 - DNA, 25 bp, Homo sapien
cattcagccctgaactttgacattc

SEQ ID NO: 2784157 - DNA, 25 bp, Homo sapien
ctctgcccaacataatgacttcagg

SEQ ID NO: 2784158 - DNA, 25 bp, Homo sapien
tgcccaacataatgacttcaggact

SEQ ID NO: 2784159 - DNA, 25 bp, Homo sapien
ccaacataatgacttcaggactgaa

SEQ ID NO: 2784160 - DNA, 25 bp, Homo sapien
cccaacataatgacttcaggactga

SEQ ID NO: 2784161 - DNA, 25 bp, Homo sapien
tattaatagctagcattcacttggc

SEQ ID NO: 2784162 - DNA, 25 bp, Homo sapien
tagacacataaaggagggagggtaa

SEQ ID NO: 2784163 - DNA, 25 bp, Homo sapien
tgcttcttctatggcacatgcttgc

SEQ ID NO: 2784164 - DNA, 25 bp, Homo sapien
taaggacaaaaagcaagccctggtg

SEQ ID NO: 2784165 - DNA, 25 bp, Homo sapien
ctctgggtcccctaagttgtagaag

SEQ ID NO: 2784166 - DNA, 25 bp, Homo sapien
ccagtttctataccttatgatcaaa

SEQ ID NO: 2784167 - DNA, 25 bp, Homo sapien
tgatcaaagaatgtggcctgtaaga

SEQ ID NO: 2784168 - DNA, 25 bp, Homo sapien
cctgtaagatagctacctttttgaa

SEQ ID NO: 2784169 - DNA, 25 bp, Homo sapien
actctgctctccgaaggcgaagagg

SEQ ID NO: 2784170 - DNA, 25 bp, Homo sapien
tgactctgctctccgaaggcgaaga

SEQ ID NO: 2784171 - DNA, 25 bp, Homo sapien
ttgactctgctctccgaaggcgaag

SEQ ID NO: 2784172 - DNA, 25 bp, Homo sapien
ctgctctccgaaggcgaagagggtc

SEQ ID NO: 2784173 - DNA, 25 bp, Homo sapien
tggcgtgcggacaaaaaccccagca

SEQ ID NO: 2784174 - DNA, 25 bp, Homo sapien
ttggcgtgcggacaaaaaccccagc

SEQ ID NO: 2784175 - DNA, 25 bp, Homo sapien
ggcgtgcggacaaaaaccccagcat

SEQ ID NO: 2784176 - DNA, 25 bp, Homo sapien
tcctcacaccggctggagcactgga

SEQ ID NO: 2784177 - DNA, 25 bp, Homo sapien
gagcactggacgtcgccatgacaga

SEQ ID NO: 2784178 - DNA, 25 bp, Homo sapien
gctcaggggcgggactggaacagca

SEQ ID NO: 2784179 - DNA, 25 bp, Homo sapien
atcgtgtcctcacaccggctggagc

SEQ ID NO: 2784180 - DNA, 25 bp, Homo sapien
ccgctgctggcagcgctggaaactg

SEQ ID NO: 2784181 - DNA, 25 bp, Homo sapien
ctggaaactgggtggacggcatggg

SEQ ID NO: 2784182 - DNA, 25 bp, Homo sapien
tttgttccgcgccttgtggagatcg

SEQ ID NO: 2784183 - DNA, 25 bp, Homo sapien
ggagcattacccctactgcgggtcc

SEQ ID NO: 2784184 - DNA, 25 bp, Homo sapien
ttcgggaacaaatactactacatcc

SEQ ID NO: 2784185 - DNA, 25 bp, Homo sapien
caattcgggaacaaatactactaca

SEQ ID NO: 2784186 - DNA, 25 bp, Homo sapien
atactactacatcccgcagtacaag

SEQ ID NO: 2784187 - DNA, 25 bp, Homo sapien
gaacaaatactactacatcccgcag

SEQ ID NO: 2784188 - DNA, 25 bp, Homo sapien
ggcgctggccccatgcgccttcctt

SEQ ID NO: 2784189 - DNA, 25 bp, Homo sapien
atgcgccttccttactaccaagact

SEQ ID NO: 2784190 - DNA, 25 bp, Homo sapien
caagacttgtcagaagtaggtccat

SEQ ID NO: 2784191 - DNA, 25 bp, Homo sapien
tactaccaagacttgtcagaagtag

SEQ ID NO: 2784192 - DNA, 25 bp, Homo sapien
ctgattcctttctcgggagttgaca

SEQ ID NO: 2784193 - DNA, 25 bp, Homo sapien
tgattcctttctcgggagttgacat

SEQ ID NO: 2784194 - DNA, 25 bp, Homo sapien
gctgattcctttctcgggagttgac

SEQ ID NO: 2784195 - DNA, 25 bp, Homo sapien
gccgccgtcgtaacctcttctgtgt

SEQ ID NO: 2784196 - DNA, 25 bp, Homo sapien
tgtagccgccgtcgtaacctcttct

SEQ ID NO: 2784197 - DNA, 25 bp, Homo sapien
tgtgtagccgccgtcgtaacctctt

SEQ ID NO: 2784198 - DNA, 25 bp, Homo sapien
tagccgccgtcgtaacctcttctgt

SEQ ID NO: 2784199 - DNA, 25 bp, Homo sapien
tagctgtaagatagccaaagaccta

SEQ ID NO: 2784200 - DNA, 25 bp, Homo sapien
taggactagttccagctttacaggt

SEQ ID NO: 2784201 - DNA, 25 bp, Homo sapien
gacaaagtagctggtaactaggact

SEQ ID NO: 2784202 - DNA, 25 bp, Homo sapien
tctggtcccaagtcattagctgtaa

SEQ ID NO: 2784203 - DNA, 25 bp, Homo sapien
gaccgataatgagctctaaaactga

SEQ ID NO: 2784204 - DNA, 25 bp, Homo sapien
acattctcccaagactgagccagga

SEQ ID NO: 2784205 - DNA, 25 bp, Homo sapien
gaaagagaatgttaccgctgacccc

SEQ ID NO: 2784206 - DNA, 25 bp, Homo sapien
aagattcttggctgaattccaccag

SEQ ID NO: 2784207 - DNA, 25 bp, Homo sapien
caaacagatctgtcgctgactctca

SEQ ID NO: 2784208 - DNA, 25 bp, Homo sapien
cttcttgaggatctagaggataatc

SEQ ID NO: 2784209 - DNA, 25 bp, Homo sapien
tccttggcttgtgatccctttgtcc

SEQ ID NO: 2784210 - DNA, 25 bp, Homo sapien
actttgtggcatagtattagtttcc

SEQ ID NO: 2784211 - DNA, 25 bp, Homo sapien
cagcatgaagatggacgtctcatga

SEQ ID NO: 2784212 - DNA, 25 bp, Homo sapien
gatggacgtctcatgaaatttgcag

SEQ ID NO: 2784213 - DNA, 25 bp, Homo sapien
tatttccataaaggccatcaacagt

SEQ ID NO: 2784214 - DNA, 25 bp, Homo sapien
atatttccataaaggccatcaacag

SEQ ID NO: 2784215 - DNA, 25 bp, Homo sapien
ctgttcccactagatgcacattgct

SEQ ID NO: 2784216 - DNA, 25 bp, Homo sapien
tggctgttcccactagatgcacatt

SEQ ID NO: 2784217 - DNA, 25 bp, Homo sapien
gccatggctgttcccactagatgca

SEQ ID NO: 2784218 - DNA, 25 bp, Homo sapien
agccatggctgttcccactagatgc

SEQ ID NO: 2784219 - DNA, 25 bp, Homo sapien
ttactttagcctctattgacaacgc

SEQ ID NO: 2784220 - DNA, 25 bp, Homo sapien
caacgcttctaaaggtgtacttgcc

SEQ ID NO: 2784221 - DNA, 25 bp, Homo sapien
ctactggatctggtgatagagtatt

SEQ ID NO: 2784222 - DNA, 25 bp, Homo sapien
ctggatctggtgatagagtatttca

SEQ ID NO: 2784223 - DNA, 25 bp, Homo sapien
ccagggcctggagtctagaacctta

SEQ ID NO: 2784224 - DNA, 25 bp, Homo sapien
taaggcccaagagggttcttccatc

SEQ ID NO: 2784225 - DNA, 25 bp, Homo sapien
ggactcaaagcccagtaatgctctg

SEQ ID NO: 2784226 - DNA, 25 bp, Homo sapien
gcctagaatcaaggaccccaggaga

SEQ ID NO: 2784227 - DNA, 25 bp, Homo sapien
caggcaaagaggtagggttgtctgc

SEQ ID NO: 2784228 - DNA, 25 bp, Homo sapien
gcaaagaggtagggttgtctgcact

SEQ ID NO: 2784229 - DNA, 25 bp, Homo sapien
gatcaggcaaagaggtagggttgtc

SEQ ID NO: 2784230 - DNA, 25 bp, Homo sapien
atcaggcaaagaggtagggttgtct

SEQ ID NO: 2784231 - DNA, 25 bp, Homo sapien
agttctgaagagttaaccttctgag

SEQ ID NO: 2784232 - DNA, 25 bp, Homo sapien
taaccgtagtgcacgttgatcctac

SEQ ID NO: 2784233 - DNA, 25 bp, Homo sapien
tttgtaaccgtagtgcacgttgatc

SEQ ID NO: 2784234 - DNA, 25 bp, Homo sapien
tagtgcacgttgatcctactggcat

SEQ ID NO: 2784235 - DNA, 25 bp, Homo sapien
cgtagtgcacgttgatcctactggc

SEQ ID NO: 2784236 - DNA, 25 bp, Homo sapien
ttccctatggtacctcctttgacca

SEQ ID NO: 2784237 - DNA, 25 bp, Homo sapien
cagctcttccctatggtacctcctt

SEQ ID NO: 2784238 - DNA, 25 bp, Homo sapien
tcttccctatggtacctcctttgac

SEQ ID NO: 2784239 - DNA, 25 bp, Homo sapien
ccagctcttccctatggtacctcct

SEQ ID NO: 2784240 - DNA, 25 bp, Homo sapien
tgggtaacctttgaacctattcaga

SEQ ID NO: 2784241 - DNA, 25 bp, Homo sapien
tggatacctgaggttgaaaactctt

SEQ ID NO: 2784242 - DNA, 25 bp, Homo sapien
tattcagatatctctcagcccttcc

SEQ ID NO: 2784243 - DNA, 25 bp, Homo sapien
tatagactgaggaatgttcactccc

SEQ ID NO: 2784244 - DNA, 25 bp, Homo sapien
gccattgttgatacactgctctata

SEQ ID NO: 2784245 - DNA, 25 bp, Homo sapien
actctcaattgtcaactccatgagg

SEQ ID NO: 2784246 - DNA, 25 bp, Homo sapien
tgcttcaggtggacaagaaggccat

SEQ ID NO: 2784247 - DNA, 25 bp, Homo sapien
aattgtcaactccatgaggttctgc

SEQ ID NO: 2784248 - DNA, 25 bp, Homo sapien
gactagagactttttgttgatggga

SEQ ID NO: 2784249 - DNA, 25 bp, Homo sapien
taaggcagagtgttgctaatttgag

SEQ ID NO: 2784250 - DNA, 25 bp, Homo sapien
atgggaataaggaggtaataaggca

SEQ ID NO: 2784251 - DNA, 25 bp, Homo sapien
catggaagctttggtgactagagac

SEQ ID NO: 2784252 - DNA, 25 bp, Homo sapien
gcagagtgtccaaacctctggtgtt

SEQ ID NO: 2784253 - DNA, 25 bp, Homo sapien
tggcagagtgtccaaacctctggtg

SEQ ID NO: 2784254 - DNA, 25 bp, Homo sapien
agagtgtccaaacctctggtgtttt

SEQ ID NO: 2784255 - DNA, 25 bp, Homo sapien
ctggcagagtgtccaaacctctggt

SEQ ID NO: 2784256 - DNA, 25 bp, Homo sapien
tgttttataactgtactttccaata

SEQ ID NO: 2784257 - DNA, 25 bp, Homo sapien
tagatctagagcagtgcagtccaat

SEQ ID NO: 2784258 - DNA, 25 bp, Homo sapien
caccacgtacggctagaatcttact

SEQ ID NO: 2784259 - DNA, 25 bp, Homo sapien
agttttgttagagtagatctagagc

SEQ ID NO: 2784260 - DNA, 25 bp, Homo sapien
tgaagaagtgaaatattggaagcaa

SEQ ID NO: 2784261 - DNA, 25 bp, Homo sapien
aatgaagaagtgaaatattggaagc

SEQ ID NO: 2784262 - DNA, 25 bp, Homo sapien
ggtacaatactagtgataaaataac

SEQ ID NO: 2784263 - DNA, 25 bp, Homo sapien
aagtaaatcatggtacaatactagt

SEQ ID NO: 2784264 - DNA, 25 bp, Homo sapien
tgtgaagaaagatgcccgttcctgc

SEQ ID NO: 2784265 - DNA, 25 bp, Homo sapien
taaggtctacaattcctatcctgtt

SEQ ID NO: 2784266 - DNA, 25 bp, Homo sapien
tatagggtgatattgttccaaggaa

SEQ ID NO: 2784267 - DNA, 25 bp, Homo sapien
gataaacgtatggagatatagggtg

SEQ ID NO: 2784268 - DNA, 25 bp, Homo sapien
taagactgcaactatagaggtgaca

SEQ ID NO: 2784269 - DNA, 25 bp, Homo sapien
gggcacagcttcaggtgacatgact

SEQ ID NO: 2784270 - DNA, 25 bp, Homo sapien
gagaagtttcattagatgggccctt

SEQ ID NO: 2784271 - DNA, 25 bp, Homo sapien
ttggagcaaccatacagaactcgct

SEQ ID NO: 2784272 - DNA, 25 bp, Homo sapien
gcatttatttttaagatacgtatct

SEQ ID NO: 2784273 - DNA, 25 bp, Homo sapien
ttcaaatattaatatctctgaaact

SEQ ID NO: 2784274 - DNA, 25 bp, Homo sapien
ttaagatacgtatcttttcaaatat

SEQ ID NO: 2784275 - DNA, 25 bp, Homo sapien
tttcaaatattaatatctctgaaac

SEQ ID NO: 2784276 - DNA, 25 bp, Homo sapien
caatgaatgcattatggtcaaatct

SEQ ID NO: 2784277 - DNA, 25 bp, Homo sapien
caggatcctggatgccacgagatgg

SEQ ID NO: 2784278 - DNA, 25 bp, Homo sapien
tcaaactcaaattaaaggccatgcc

SEQ ID NO: 2784279 - DNA, 25 bp, Homo sapien
ctccttagtaaagagaccagtgagg

SEQ ID NO: 2784280 - DNA, 25 bp, Homo sapien
tcagagagaacacgtgttgtttggt

SEQ ID NO: 2784281 - DNA, 25 bp, Homo sapien
cagagagaacacgtgttgtttggtt

SEQ ID NO: 2784282 - DNA, 25 bp, Homo sapien
aatcagagagaacacgtgttgtttg

SEQ ID NO: 2784283 - DNA, 25 bp, Homo sapien
ctaatcagagagaacacgtgttgtt

SEQ ID NO: 2784284 - DNA, 25 bp, Homo sapien
tccagcagccctgttatataatatc

SEQ ID NO: 2784285 - DNA, 25 bp, Homo sapien
gacaaaatcaccacacttaatgaca

SEQ ID NO: 2784286 - DNA, 25 bp, Homo sapien
ggtggcgtgatacctcctgctttat

SEQ ID NO: 2784287 - DNA, 25 bp, Homo sapien
tatgctctgaatatcttggttaagc

SEQ ID NO: 2784288 - DNA, 25 bp, Homo sapien
tagactggattgtagagaaaactgt

SEQ ID NO: 2784289 - DNA, 25 bp, Homo sapien
tcagcatgattctataaccagtagc

SEQ ID NO: 2784290 - DNA, 25 bp, Homo sapien
gacggagtttcatgaccccattcga

SEQ ID NO: 2784291 - DNA, 25 bp, Homo sapien
gcaaatgtttaccatatagtctgtg

SEQ ID NO: 2784292 - DNA, 25 bp, Homo sapien
tatttcaacattaggtttccagccc

SEQ ID NO: 2784293 - DNA, 25 bp, Homo sapien
tctgataactagtaatatgctgaaa

SEQ ID NO: 2784294 - DNA, 25 bp, Homo sapien
gttatcatggatactatggctcaag

SEQ ID NO: 2784295 - DNA, 25 bp, Homo sapien
tgctgaaagttatcatggatactat

SEQ ID NO: 2784296 - DNA, 25 bp, Homo sapien
taggttctgagagatacagtcctga

SEQ ID NO: 2784297 - DNA, 25 bp, Homo sapien
taatgtgttgctcacactggcacca

SEQ ID NO: 2784298 - DNA, 25 bp, Homo sapien
actggcaccaagtagagactgataa

SEQ ID NO: 2784299 - DNA, 25 bp, Homo sapien
cagtactctgttgcagtgagaggtg

SEQ ID NO: 2784300 - DNA, 25 bp, Homo sapien
aaacattaataagctgacagtgaat

SEQ ID NO: 2784301 - DNA, 25 bp, Homo sapien
gtgaataaaattattggaccatgca

SEQ ID NO: 2784302 - DNA, 25 bp, Homo sapien
actgtagctgctagacaattttttg

SEQ ID NO: 2784303 - DNA, 25 bp, Homo sapien
taaaattcattaatgggtacagaaa

SEQ ID NO: 2784304 - DNA, 25 bp, Homo sapien
caaaaattgttctgtccagtaggtg

SEQ ID NO: 2784305 - DNA, 25 bp, Homo sapien
gctaagcggcaaatgactaagtcag

SEQ ID NO: 2784306 - DNA, 25 bp, Homo sapien
ttagcacaagaataaactgggttcc

SEQ ID NO: 2784307 - DNA, 25 bp, Homo sapien
taattaccagctgtctcaaaggctg

SEQ ID NO: 2784308 - DNA, 25 bp, Homo sapien
tccaagacagtacagcacttgctag

SEQ ID NO: 2784309 - DNA, 25 bp, Homo sapien
aataacggttgtaaggaagccatag

SEQ ID NO: 2784310 - DNA, 25 bp, Homo sapien
tcagcccaagcctttatatcaaaca

SEQ ID NO: 2784311 - DNA, 25 bp, Homo sapien
gacagtacagcacttgctaggaaca

SEQ ID NO: 2784312 - DNA, 25 bp, Homo sapien
tcacagcagtcttatgaaaactggg

SEQ ID NO: 2784313 - DNA, 25 bp, Homo sapien
ttcacagcagtcttatgaaaactgg

SEQ ID NO: 2784314 - DNA, 25 bp, Homo sapien
cttcacagcagtcttatgaaaactg

SEQ ID NO: 2784315 - DNA, 25 bp, Homo sapien
cacagcagtcttatgaaaactgggg

SEQ ID NO: 2784316 - DNA, 25 bp, Homo sapien
tttgtcctggtgttattagtgaccc

SEQ ID NO: 2784317 - DNA, 25 bp, Homo sapien
gacccttggtagtctgtcttcttga

SEQ ID NO: 2784318 - DNA, 25 bp, Homo sapien
tatgcttgagtagtgatcccttaac

SEQ ID NO: 2784319 - DNA, 25 bp, Homo sapien
ttagtgacccaatcacgacttcaga

SEQ ID NO: 2784320 - DNA, 25 bp, Homo sapien
tgcagacccacggaggccacgttca

SEQ ID NO: 2784321 - DNA, 25 bp, Homo sapien
actcctgcccgtcggccttggcaag

SEQ ID NO: 2784322 - DNA, 25 bp, Homo sapien
gcgcagagcggagggtcctgggaga

SEQ ID NO: 2784323 - DNA, 25 bp, Homo sapien
aagcgcgggccccttgtcgcgcaga

SEQ ID NO: 2784324 - DNA, 25 bp, Homo sapien
cagccaccaacttcccctacatagc

SEQ ID NO: 2784325 - DNA, 25 bp, Homo sapien
ctacatagccccacgggatcggatc

SEQ ID NO: 2784326 - DNA, 25 bp, Homo sapien
gggatcggatcccactccccactca

SEQ ID NO: 2784327 - DNA, 25 bp, Homo sapien
caacttcccctacatagccccacgg

SEQ ID NO: 2784328 - DNA, 25 bp, Homo sapien
gaatttttgattgccttgtaccaca

SEQ ID NO: 2784329 - DNA, 25 bp, Homo sapien
gatgattgttgggagcttacacaga

SEQ ID NO: 2784330 - DNA, 25 bp, Homo sapien
gaactcaaagctacacatgggccta

SEQ ID NO: 2784331 - DNA, 25 bp, Homo sapien
gtagtaaatagtggccagacatggt

SEQ ID NO: 2784332 - DNA, 25 bp, Homo sapien
tcctggatgtgacagtgaagcactg

SEQ ID NO: 2784333 - DNA, 25 bp, Homo sapien
gaagcactgttcagagcccattttc

SEQ ID NO: 2784334 - DNA, 25 bp, Homo sapien
actgtgtctgctagccatagtcggc

SEQ ID NO: 2784335 - DNA, 25 bp, Homo sapien
gacaaggattctagcaaaactgcaa

SEQ ID NO: 2784336 - DNA, 25 bp, Homo sapien
agaggcttgattcagggagtttttc

SEQ ID NO: 2784337 - DNA, 25 bp, Homo sapien
gcattagtttgccttaacttttaga

SEQ ID NO: 2784338 - DNA, 25 bp, Homo sapien
ctgatttcacagagctaccgcttgt

SEQ ID NO: 2784339 - DNA, 25 bp, Homo sapien
acagcatgaaatctgacttcagtac

SEQ ID NO: 2784340 - DNA, 25 bp, Homo sapien
cctggaagggagccctggctgatca

SEQ ID NO: 2784341 - DNA, 25 bp, Homo sapien
ggtgttaacataataccgtagcttg

SEQ ID NO: 2784342 - DNA, 25 bp, Homo sapien
tcagcccttttgctatagtgttggg

SEQ ID NO: 2784343 - DNA, 25 bp, Homo sapien
taataccgtagcttgtgttcttaaa

SEQ ID NO: 2784344 - DNA, 25 bp, Homo sapien
caccttgtaatcacctactattgga

SEQ ID NO: 2784345 - DNA, 25 bp, Homo sapien
gatgaaaccctgttggtttcacctg

SEQ ID NO: 2784346 - DNA, 25 bp, Homo sapien
tgtaatcacctactattggagtaga

SEQ ID NO: 2784347 - DNA, 25 bp, Homo sapien
caaaagtttatggactcttcagatt

SEQ ID NO: 2784348 - DNA, 25 bp, Homo sapien
gaaagcagacctcctgaaactctgg

SEQ ID NO: 2784349 - DNA, 25 bp, Homo sapien
gagttcagtcaaccagatacctggg

SEQ ID NO: 2784350 - DNA, 25 bp, Homo sapien
ggaggtttccgtgatacaggcttaa

SEQ ID NO: 2784351 - DNA, 25 bp, Homo sapien
caggaggactgcagcatcttgacca

SEQ ID NO: 2784352 - DNA, 25 bp, Homo sapien
cctttcattcagaagatcaacctga

SEQ ID NO: 2784353 - DNA, 25 bp, Homo sapien
tcattcagaagatcaacctgaaata

SEQ ID NO: 2784354 - DNA, 25 bp, Homo sapien
tctcctttcattcagaagatcaacc

SEQ ID NO: 2784355 - DNA, 25 bp, Homo sapien
tttctcctttcattcagaagatcaa

SEQ ID NO: 2784356 - DNA, 25 bp, Homo sapien
aatcttcagaagtaaccccatagga

SEQ ID NO: 2784357 - DNA, 25 bp, Homo sapien
cgttgccttttaatgaaatcttcag

SEQ ID NO: 2784358 - DNA, 25 bp, Homo sapien
cagaagtaaccccataggaaggtgg

SEQ ID NO: 2784359 - DNA, 25 bp, Homo sapien
ccataggaaggtggtattttcctga

SEQ ID NO: 2784360 - DNA, 25 bp, Homo sapien
catccaactggaacggcatttttgg

SEQ ID NO: 2784361 - DNA, 25 bp, Homo sapien
aactggaacggcatttttggcagca

SEQ ID NO: 2784362 - DNA, 25 bp, Homo sapien
tccagccgcggagtcgtggaacatg

SEQ ID NO: 2784363 - DNA, 25 bp, Homo sapien
aacatggcttgccatccaactggaa

SEQ ID NO: 2784364 - DNA, 25 bp, Homo sapien
ggcagtgagaccatccgagatgctt

SEQ ID NO: 2784365 - DNA, 25 bp, Homo sapien
tcccagcaggaagtatgcaagtatg

SEQ ID NO: 2784366 - DNA, 25 bp, Homo sapien
tgcaagtatgcaagaaccagcagct

SEQ ID NO: 2784367 - DNA, 25 bp, Homo sapien
cttcctgcagatgggccgtgatcct

SEQ ID NO: 2784368 - DNA, 25 bp, Homo sapien
ccatggtaattatccaggaaggtgt

SEQ ID NO: 2784369 - DNA, 25 bp, Homo sapien
caggaaggtgtttgaagatatgctc

SEQ ID NO: 2784370 - DNA, 25 bp, Homo sapien
tcactgggccatggtaattatccag

SEQ ID NO: 2784371 - DNA, 25 bp, Homo sapien
ggaaggtgtttgaagatatgctcca

SEQ ID NO: 2784372 - DNA, 25 bp, Homo sapien
gaatagcttgctctgaggcactcct

SEQ ID NO: 2784373 - DNA, 25 bp, Homo sapien
ctgcgatgaatagcttgctctgagg

SEQ ID NO: 2784374 - DNA, 25 bp, Homo sapien
cactcctgttgagttggtgtctctt

SEQ ID NO: 2784375 - DNA, 25 bp, Homo sapien
tctgaggcactcctgttgagttggt

SEQ ID NO: 2784376 - DNA, 25 bp, Homo sapien
acgttcacaatgggctgtcagattt

SEQ ID NO: 2784377 - DNA, 25 bp, Homo sapien
cacgttcacaatgggctgtcagatt

SEQ ID NO: 2784378 - DNA, 25 bp, Homo sapien
ctcccgttctataggttgtgtctgt

SEQ ID NO: 2784379 - DNA, 25 bp, Homo sapien
tcccgttctataggttgtgtctgtt

SEQ ID NO: 2784380 - DNA, 25 bp, Homo sapien
cccgttctataggttgtgtctgttc

SEQ ID NO: 2784381 - DNA, 25 bp, Homo sapien
gaacagggctgtctgtgtatggtct

SEQ ID NO: 2784382 - DNA, 25 bp, Homo sapien
tcctttcttcaatgactgctgccac

SEQ ID NO: 2784383 - DNA, 25 bp, Homo sapien
gaggtcatgccttggtttcttaaag

SEQ ID NO: 2784384 - DNA, 25 bp, Homo sapien
ccgaggccacctccggcaaatcact

SEQ ID NO: 2784385 - DNA, 25 bp, Homo sapien
aaagccccggcatcttgaagcccta

SEQ ID NO: 2784386 - DNA, 25 bp, Homo sapien
aaagctgttataccaaaagactgat

SEQ ID NO: 2784387 - DNA, 25 bp, Homo sapien
gaaaagctgttataccaaaagactg

SEQ ID NO: 2784388 - DNA, 25 bp, Homo sapien
aaaagctgttataccaaaagactga

SEQ ID NO: 2784389 - DNA, 25 bp, Homo sapien
gcaggatagcattctaaatccagga

SEQ ID NO: 2784390 - DNA, 25 bp, Homo sapien
gcattctaaatccaggaatttaacc

SEQ ID NO: 2784391 - DNA, 25 bp, Homo sapien
gcagaaacgtggcaggatagcattc

SEQ ID NO: 2784392 - DNA, 25 bp, Homo sapien
taggatactctgcagaaacgtggca

SEQ ID NO: 2784393 - DNA, 25 bp, Homo sapien
acctggtaatatttggcacattcag

SEQ ID NO: 2784394 - DNA, 25 bp, Homo sapien
tgtgctcgacaaaggagagcttgct

SEQ ID NO: 2784395 - DNA, 25 bp, Homo sapien
cagaaattgcaacctggtaatattt

SEQ ID NO: 2784396 - DNA, 25 bp, Homo sapien
tttcagagccccgtgtgctcgacaa

SEQ ID NO: 2784397 - DNA, 25 bp, Homo sapien
aaaaaacggagtcagcgatgtcatc

SEQ ID NO: 2784398 - DNA, 25 bp, Homo sapien
gaaaaaacggagtcagcgatgtcat

SEQ ID NO: 2784399 - DNA, 25 bp, Homo sapien
ggaaaaaacggagtcagcgatgtca

SEQ ID NO: 2784400 - DNA, 25 bp, Homo sapien
ctttgtgctgcgtctttcccttgca

SEQ ID NO: 2784401 - DNA, 25 bp, Homo sapien
tttgtgctgcgtctttcccttgcaa

SEQ ID NO: 2784402 - DNA, 25 bp, Homo sapien
ccaggtaaatgacaaagatatctca

SEQ ID NO: 2784403 - DNA, 25 bp, Homo sapien
atatctcagtcccttaaaaacacgg

SEQ ID NO: 2784404 - DNA, 25 bp, Homo sapien
tttgcatgattctcatttccgaagc

SEQ ID NO: 2784405 - DNA, 25 bp, Homo sapien
tcccagtggtgaatgatgtccagct

SEQ ID NO: 2784406 - DNA, 25 bp, Homo sapien
ggtaggcatcaagaactgcatccag

SEQ ID NO: 2784407 - DNA, 25 bp, Homo sapien
tgacagtccgtgtgagaaggtgccc

SEQ ID NO: 2784408 - DNA, 25 bp, Homo sapien
gccacaccatgtagatcaagtagag

SEQ ID NO: 2784409 - DNA, 25 bp, Homo sapien
caaatagagtagaccagagatgggc

SEQ ID NO: 2784410 - DNA, 25 bp, Homo sapien
cctggaggcccagcactcttcaacc

SEQ ID NO: 2784411 - DNA, 25 bp, Homo sapien
tctgcagaaatgggggaccctggtg

SEQ ID NO: 2784412 - DNA, 25 bp, Homo sapien
cttttcctcttatccacttcaatct

SEQ ID NO: 2784413 - DNA, 25 bp, Homo sapien
ggaggcccagcactcttcaaccttt

SEQ ID NO: 2784414 - DNA, 25 bp, Homo sapien
tggtctgggtgttgtcagttctttc

SEQ ID NO: 2784415 - DNA, 25 bp, Homo sapien
gctggtctgggtgttgtcagttctt

SEQ ID NO: 2784416 - DNA, 25 bp, Homo sapien
tctgggtgttgtcagttctttccat

SEQ ID NO: 2784417 - DNA, 25 bp, Homo sapien
ggtctgggtgttgtcagttctttcc

SEQ ID NO: 2784418 - DNA, 25 bp, Homo sapien
ttgtttggttgattcacttcaattc

SEQ ID NO: 2784419 - DNA, 25 bp, Homo sapien
gtcaccatcatttctataggaaaat

SEQ ID NO: 2784420 - DNA, 25 bp, Homo sapien
ttgcgtgtggaaaagcaatatgagg

SEQ ID NO: 2784421 - DNA, 25 bp, Homo sapien
aaatattgtttggttgattcacttc

SEQ ID NO: 2784422 - DNA, 25 bp, Homo sapien
tctgatgaactctcctttgaaggcc

SEQ ID NO: 2784423 - DNA, 25 bp, Homo sapien
gaagtagtcacatccaagtagggag

SEQ ID NO: 2784424 - DNA, 25 bp, Homo sapien
caaagactgttgtagtcctcagcca

SEQ ID NO: 2784425 - DNA, 25 bp, Homo sapien
gcaaactctggactggcttggtcac

SEQ ID NO: 2784426 - DNA, 25 bp, Homo sapien
agccataggtaaccagagccagcca

SEQ ID NO: 2784427 - DNA, 25 bp, Homo sapien
gcaaagtctaattgtggtgggttcc

SEQ ID NO: 2784428 - DNA, 25 bp, Homo sapien
tgtgggcagcattaagcgggtaccc

SEQ ID NO: 2784429 - DNA, 25 bp, Homo sapien
ttctgtgcagctcttcgggaagtcc

SEQ ID NO: 2784430 - DNA, 25 bp, Homo sapien
cttcgggaagtcctgttgccagccc

SEQ ID NO: 2784431 - DNA, 25 bp, Homo sapien
tgtaacccgagtgtcacaaagagct

SEQ ID NO: 2784432 - DNA, 25 bp, Homo sapien
tacaccatggttctttgtaacccga

SEQ ID NO: 2784433 - DNA, 25 bp, Homo sapien
tctgaagtgcttgaggttgcctaga

SEQ ID NO: 2784434 - DNA, 25 bp, Homo sapien
tcactacagagctaatagttcctgc

SEQ ID NO: 2784435 - DNA, 25 bp, Homo sapien
ctttaatgtagcagtttggaggtgg

SEQ ID NO: 2784436 - DNA, 25 bp, Homo sapien
tttaatgtagcagtttggaggtgga

SEQ ID NO: 2784437 - DNA, 25 bp, Homo sapien
ccattagagtggatatctccccgct

SEQ ID NO: 2784438 - DNA, 25 bp, Homo sapien
gaagaaaactctagaactccattag

SEQ ID NO: 2784439 - DNA, 25 bp, Homo sapien
gaacaatgcctgatgcattataggc

SEQ ID NO: 2784440 - DNA, 25 bp, Homo sapien
gatttgttgatgacaccgaagccct

SEQ ID NO: 2784441 - DNA, 25 bp, Homo sapien
tccagggtgaactcaagctgtcata

SEQ ID NO: 2784442 - DNA, 25 bp, Homo sapien
taagccgagcaggaggaaactaggc

SEQ ID NO: 2784443 - DNA, 25 bp, Homo sapien
cataggagtgcatggcatacagtcc

SEQ ID NO: 2784444 - DNA, 25 bp, Homo sapien
gagcccctaggagaagtacacgtaa

SEQ ID NO: 2784445 - DNA, 25 bp, Homo sapien
tcagaaagtgagaagcgacattatg

SEQ ID NO: 2784446 - DNA, 25 bp, Homo sapien
taaggttctccgggttcagaggcta

SEQ ID NO: 2784447 - DNA, 25 bp, Homo sapien
tctcattaagaacttcgctgatttt

SEQ ID NO: 2784448 - DNA, 25 bp, Homo sapien
gaagcgacattatgggtggttatat

SEQ ID NO: 2784449 - DNA, 25 bp, Homo sapien
aagatcctccagttttccgcacagg

SEQ ID NO: 2784450 - DNA, 25 bp, Homo sapien
cacaggctttttcctagacatggag

SEQ ID NO: 2784451 - DNA, 25 bp, Homo sapien
tgtgtagctcgaggtttccagggcc

SEQ ID NO: 2784452 - DNA, 25 bp, Homo sapien
tttcctaacaagtaaggcagctgcg

SEQ ID NO: 2784453 - DNA, 25 bp, Homo sapien
aaaggtgtgtctgctaaccccacag

SEQ ID NO: 2784454 - DNA, 25 bp, Homo sapien
tcctcgacttctagcgggcgggtcg

SEQ ID NO: 2784455 - DNA, 25 bp, Homo sapien
agcgctctgcgtgttttcgggcaca

SEQ ID NO: 2784456 - DNA, 25 bp, Homo sapien
gcgttccaccccgagctggagaaac

SEQ ID NO: 2784457 - DNA, 25 bp, Homo sapien
gcaggcgctcgggtttggccgcgcc

SEQ ID NO: 2784458 - DNA, 25 bp, Homo sapien
aaagtgaagtggaaagccgccgccg

SEQ ID NO: 2784459 - DNA, 25 bp, Homo sapien
gggtccatgccgcatttctttgttt

SEQ ID NO: 2784460 - DNA, 25 bp, Homo sapien
tttgttttgaaagcgcctcctccgc

SEQ ID NO: 2784461 - DNA, 25 bp, Homo sapien
atagggtcccggcacttccgctgtc

SEQ ID NO: 2784462 - DNA, 25 bp, Homo sapien
gtcgcgcttcctagtgccgtttata

SEQ ID NO: 2784463 - DNA, 25 bp, Homo sapien
agatggcatcgtggcgtcgcgacgg

SEQ ID NO: 2784464 - DNA, 25 bp, Homo sapien
acggcgtgtgcgtgtcgcgcttcct

SEQ ID NO: 2784465 - DNA, 25 bp, Homo sapien
cccagagccccgagtcgctgctgga

SEQ ID NO: 2784466 - DNA, 25 bp, Homo sapien
cagagccccgagtcgctgctggaca

SEQ ID NO: 2784467 - DNA, 25 bp, Homo sapien
ccagagccccgagtcgctgctggac

SEQ ID NO: 2784468 - DNA, 25 bp, Homo sapien
agagccccgagtcgctgctggacat

SEQ ID NO: 2784469 - DNA, 25 bp, Homo sapien
caagctctgtgcaacatttatggtg

SEQ ID NO: 2784470 - DNA, 25 bp, Homo sapien
tgtcagactcattgaaatgccaagt

SEQ ID NO: 2784471 - DNA, 25 bp, Homo sapien
tggtggcatcaccattggctaggcc

SEQ ID NO: 2784472 - DNA, 25 bp, Homo sapien
tattacgtgttgtgcaagaacagga

SEQ ID NO: 2784473 - DNA, 25 bp, Homo sapien
tgctcagattaactgcctgcgtgtt

SEQ ID NO: 2784474 - DNA, 25 bp, Homo sapien
ttcttgtgacctcattcctgctgcc

SEQ ID NO: 2784475 - DNA, 25 bp, Homo sapien
ccatagttggatctacctgtagcat

SEQ ID NO: 2784476 - DNA, 25 bp, Homo sapien
gccatcgtacttatccctgctcaga

SEQ ID NO: 2784477 - DNA, 25 bp, Homo sapien
tctggtaagcgaaggaacagtccat

SEQ ID NO: 2784478 - DNA, 25 bp, Homo sapien
tttctggtaagcgaaggaacagtcc

SEQ ID NO: 2784479 - DNA, 25 bp, Homo sapien
ttctggtaagcgaaggaacagtcca

SEQ ID NO: 2784480 - DNA, 25 bp, Homo sapien
aagctgtccttggttgttagcgcca

SEQ ID NO: 2784481 - DNA, 25 bp, Homo sapien
ctgttttagccctactcttcctagt

SEQ ID NO: 2784482 - DNA, 25 bp, Homo sapien
tgagttaccaagctgtccttggttg

SEQ ID NO: 2784483 - DNA, 25 bp, Homo sapien
tcttcctagttgatgagttaccaag

SEQ ID NO: 2784484 - DNA, 25 bp, Homo sapien
gtggaagtgagagctcatccaaaaa

SEQ ID NO: 2784485 - DNA, 25 bp, Homo sapien
gaagaaccgttcacataaatcttct

SEQ ID NO: 2784486 - DNA, 25 bp, Homo sapien
ctgaaagctccatgtcagaaactga

SEQ ID NO: 2784487 - DNA, 25 bp, Homo sapien
gaatcagacagtaaggatagtttaa

SEQ ID NO: 2784488 - DNA, 25 bp, Homo sapien
aaagtacatgcttgcctcagtggtg

SEQ ID NO: 2784489 - DNA, 25 bp, Homo sapien
ggtacatctatcctacacaaagctc

SEQ ID NO: 2784490 - DNA, 25 bp, Homo sapien
gagtcattctgggacttacttttta

SEQ ID NO: 2784491 - DNA, 25 bp, Homo sapien
tcaaagtaacattatgtgtgtcatg

SEQ ID NO: 2784492 - DNA, 25 bp, Homo sapien
aattgactagattttaatgatgcca

SEQ ID NO: 2784493 - DNA, 25 bp, Homo sapien
tttaatgatgccaacggttctttct

SEQ ID NO: 2784494 - DNA, 25 bp, Homo sapien
gatgccaacggttctttctttaata

SEQ ID NO: 2784495 - DNA, 25 bp, Homo sapien
gagttacatagcaattagtaataaa

SEQ ID NO: 2784496 - DNA, 25 bp, Homo sapien
aatatttctactgagagtggccggg

SEQ ID NO: 2784497 - DNA, 25 bp, Homo sapien
tatttctactgagagtggccgggcg

SEQ ID NO: 2784498 - DNA, 25 bp, Homo sapien
caaaaaacttatgctaacatcagta

SEQ ID NO: 2784499 - DNA, 25 bp, Homo sapien
ttatacatgctaataccttttggga

SEQ ID NO: 2784500 - DNA, 25 bp, Homo sapien
cctgattggattcgactcatggcca

SEQ ID NO: 2784501 - DNA, 25 bp, Homo sapien
tgatgatgtccactggctctcttgt

SEQ ID NO: 2784502 - DNA, 25 bp, Homo sapien
tgcataatcctgctagccatagtga

SEQ ID NO: 2784503 - DNA, 25 bp, Homo sapien
ttcgaatagaggcaaacaccccaga

SEQ ID NO: 2784504 - DNA, 25 bp, Homo sapien
ggccgccgtttggttggcactggca

SEQ ID NO: 2784505 - DNA, 25 bp, Homo sapien
gaggccgccgtttggttggcactgg

SEQ ID NO: 2784506 - DNA, 25 bp, Homo sapien
cgccgtttggttggcactggcaagg

SEQ ID NO: 2784507 - DNA, 25 bp, Homo sapien
gccgccgtttggttggcactggcaa

SEQ ID NO: 2784508 - DNA, 25 bp, Homo sapien
tgtgaagggtgagcacttgcttctt

SEQ ID NO: 2784509 - DNA, 25 bp, Homo sapien
cttgtgaagggtgagcacttgcttc

SEQ ID NO: 2784510 - DNA, 25 bp, Homo sapien
gtccaccacacagtctttcagcatg

SEQ ID NO: 2784511 - DNA, 25 bp, Homo sapien
ttcttggtgtccaccacacagtctt

SEQ ID NO: 2784512 - DNA, 25 bp, Homo sapien
acaaaggcccccagagggtggcttg

SEQ ID NO: 2784513 - DNA, 25 bp, Homo sapien
aaggcccccagagggtggcttgtca

SEQ ID NO: 2784514 - DNA, 25 bp, Homo sapien
agtggacaaaggcccccagagggtg

SEQ ID NO: 2784515 - DNA, 25 bp, Homo sapien
gcccccagagggtggcttgtcagac

SEQ ID NO: 2784516 - DNA, 25 bp, Homo sapien
tgcatgccacaggtaaggccacagg

SEQ ID NO: 2784517 - DNA, 25 bp, Homo sapien
gatcagtttgctgtccctgacaaag

SEQ ID NO: 2784518 - DNA, 25 bp, Homo sapien
tgctgtgacagtaacctttctgcca

SEQ ID NO: 2784519 - DNA, 25 bp, Homo sapien
gacaaagtatccctggctgatctta

SEQ ID NO: 2784520 - DNA, 25 bp, Homo sapien
caaatcctgccggtagagcaaaaaa

SEQ ID NO: 2784521 - DNA, 25 bp, Homo sapien
tagaaatgtctcttgcatgcatcgc

SEQ ID NO: 2784522 - DNA, 25 bp, Homo sapien
tccagtgggcttgtacgggtctacc

SEQ ID NO: 2784523 - DNA, 25 bp, Homo sapien
atggtgcctccctttacctggatct

SEQ ID NO: 2784524 - DNA, 25 bp, Homo sapien
tcagggtcctaagttataggagtca

SEQ ID NO: 2784525 - DNA, 25 bp, Homo sapien
caaataaggccataaatacgaaggg

SEQ ID NO: 2784526 - DNA, 25 bp, Homo sapien
taccagtagcagaaatggttgggct

SEQ ID NO: 2784527 - DNA, 25 bp, Homo sapien
ggttgggcttacaatatgacaaata

SEQ ID NO: 2784528 - DNA, 25 bp, Homo sapien
cactacagctgagggctttcgaagc

SEQ ID NO: 2784529 - DNA, 25 bp, Homo sapien
cccaccagtgggtttgtctgaactg

SEQ ID NO: 2784530 - DNA, 25 bp, Homo sapien
ctttcgaagcttcccaccagtgggt

SEQ ID NO: 2784531 - DNA, 25 bp, Homo sapien
tctgaactgtttaggaatgcggccg

SEQ ID NO: 2784532 - DNA, 25 bp, Homo sapien
acctctgactccctggttcaggcga

SEQ ID NO: 2784533 - DNA, 25 bp, Homo sapien
tgatccacccaccttggcctcccag

SEQ ID NO: 2784534 - DNA, 25 bp, Homo sapien
cctctgactccctggttcaggcgat

SEQ ID NO: 2784535 - DNA, 25 bp, Homo sapien
tccacccaccttggcctcccagagt

SEQ ID NO: 2784536 - DNA, 25 bp, Homo sapien
gcagacgctgacagataatctcggt

SEQ ID NO: 2784537 - DNA, 25 bp, Homo sapien
tcccagaatctttcgaacctcgaag

SEQ ID NO: 2784538 - DNA, 25 bp, Homo sapien
gaagagcaagcttcacttttgggct

SEQ ID NO: 2784539 - DNA, 25 bp, Homo sapien
cagaccctggtctcgcctagggaga

SEQ ID NO: 2784540 - DNA, 25 bp, Homo sapien
gaatggtgatttgttcaaattcttc

SEQ ID NO: 2784541 - DNA, 25 bp, Homo sapien
caatctggcagtagtaggaaaggta

SEQ ID NO: 2784542 - DNA, 25 bp, Homo sapien
tttcccctccaacaatctggcagta

SEQ ID NO: 2784543 - DNA, 25 bp, Homo sapien
tcttggataatctttcccactcatt

SEQ ID NO: 2784544 - DNA, 25 bp, Homo sapien
ggctgtgggtggtttgttagtgact

SEQ ID NO: 2784545 - DNA, 25 bp, Homo sapien
gaaggcagtgaaaaatagatggctg

SEQ ID NO: 2784546 - DNA, 25 bp, Homo sapien
aaggcagtgaaaaatagatggctgt

SEQ ID NO: 2784547 - DNA, 25 bp, Homo sapien
gctgtgggtggtttgttagtgactc

SEQ ID NO: 2784548 - DNA, 25 bp, Homo sapien
tcttccttgttaatattagcagtag

SEQ ID NO: 2784549 - DNA, 25 bp, Homo sapien
ccagcttcatcttgtagattctttg

SEQ ID NO: 2784550 - DNA, 25 bp, Homo sapien
ctttcttggggagtagtattgagaa

SEQ ID NO: 2784551 - DNA, 25 bp, Homo sapien
aagatgttactacatcatatatttc

SEQ ID NO: 2784552 - DNA, 25 bp, Homo sapien
cagcatagtcttcccttaaggtatc

SEQ ID NO: 2784553 - DNA, 25 bp, Homo sapien
tatagggctgtcattgttacaccag

SEQ ID NO: 2784554 - DNA, 25 bp, Homo sapien
ccaggagagttcaatttcacagaaa

SEQ ID NO: 2784555 - DNA, 25 bp, Homo sapien
tgttttaggagaatcatcaaaggga

SEQ ID NO: 2784556 - DNA, 25 bp, Homo sapien
cattaaatacttgttctttggttct

SEQ ID NO: 2784557 - DNA, 25 bp, Homo sapien
aatacttgttctttggttctttcat

SEQ ID NO: 2784558 - DNA, 25 bp, Homo sapien
tggatgagggatattgatgatgtgg

SEQ ID NO: 2784559 - DNA, 25 bp, Homo sapien
agtggatgagggatattgatgatgt

SEQ ID NO: 2784560 - DNA, 25 bp, Homo sapien
atgagggatattgatgatgtggcat

SEQ ID NO: 2784561 - DNA, 25 bp, Homo sapien
gatgagggatattgatgatgtggca

SEQ ID NO: 2784562 - DNA, 25 bp, Homo sapien
tgtgtaagtttattattcgaattgt

SEQ ID NO: 2784563 - DNA, 25 bp, Homo sapien
ttgtgtaagtttattattcgaattg

SEQ ID NO: 2784564 - DNA, 25 bp, Homo sapien
atgtgttggagtagaaaggttttat

SEQ ID NO: 2784565 - DNA, 25 bp, Homo sapien
tatgtgttggagtagaaaggtttta

SEQ ID NO: 2784566 - DNA, 25 bp, Homo sapien
caactggtatgtagactttgggcca

SEQ ID NO: 2784567 - DNA, 25 bp, Homo sapien
gaattctaatccatcctctcaactg

SEQ ID NO: 2784568 - DNA, 25 bp, Homo sapien
tgcccagtactatcaagaagtaagt

SEQ ID NO: 2784569 - DNA, 25 bp, Homo sapien
gcttgcagtcttatgagtaagtcag

SEQ ID NO: 2784570 - DNA, 25 bp, Homo sapien
cctttcaatactgccacaatggggt

SEQ ID NO: 2784571 - DNA, 25 bp, Homo sapien
atggattaatacattcaccagggca

SEQ ID NO: 2784572 - DNA, 25 bp, Homo sapien
tctccacttgaaccaaaatctgtat

SEQ ID NO: 2784573 - DNA, 25 bp, Homo sapien
tatataatagtgtctgggtatggtg

SEQ ID NO: 2784574 - DNA, 25 bp, Homo sapien
ggtggccaatagagtccagcagctg

SEQ ID NO: 2784575 - DNA, 25 bp, Homo sapien
cagaggaggtctggtgttcatacct

SEQ ID NO: 2784576 - DNA, 25 bp, Homo sapien
tatatctgttggaccgaaaggcacc

SEQ ID NO: 2784577 - DNA, 25 bp, Homo sapien
ttccctgtaaagctcagctggctcc

SEQ ID NO: 2784578 - DNA, 25 bp, Homo sapien
cagcccttgctgaacttgagtagag

SEQ ID NO: 2784579 - DNA, 25 bp, Homo sapien
aaaggtactgtactgtcctgaggcc

SEQ ID NO: 2784580 - DNA, 25 bp, Homo sapien
acattgagtcccagcagtgtgagct

SEQ ID NO: 2784581 - DNA, 25 bp, Homo sapien
ggacatggtcaagaaataactaggg

SEQ ID NO: 2784582 - DNA, 25 bp, Homo sapien
ctgcagcagtagatcagttcagaag

SEQ ID NO: 2784583 - DNA, 25 bp, Homo sapien
ccactgggtgtggtttaggtgatcc

SEQ ID NO: 2784584 - DNA, 25 bp, Homo sapien
tgaggcccttcagctaactatttct

SEQ ID NO: 2784585 - DNA, 25 bp, Homo sapien
ttgtagctggccataagaagatttc

SEQ ID NO: 2784586 - DNA, 25 bp, Homo sapien
tgttcgtccagaagcatggcacacg

SEQ ID NO: 2784587 - DNA, 25 bp, Homo sapien
cttaaagaacagagccacaccggta

SEQ ID NO: 2784588 - DNA, 25 bp, Homo sapien
catgtggaaacttagcgactgtcaa

SEQ ID NO: 2784589 - DNA, 25 bp, Homo sapien
tagtaaaaaggctgacccatgtggc

SEQ ID NO: 2784590 - DNA, 25 bp, Homo sapien
aaagagggacaacaaaatacacagc

SEQ ID NO: 2784591 - DNA, 25 bp, Homo sapien
tacaccacacatgcttataacaggc

SEQ ID NO: 2784592 - DNA, 25 bp, Homo sapien
tataacaggcactagaataaagagg

SEQ ID NO: 2784593 - DNA, 25 bp, Homo sapien
cagagccaccttttggattgcatgg

SEQ ID NO: 2784594 - DNA, 25 bp, Homo sapien
tggtgcaaaagttgtccagtgtctc

SEQ ID NO: 2784595 - DNA, 25 bp, Homo sapien
cactagagaacatgcttagaggtat

SEQ ID NO: 2784596 - DNA, 25 bp, Homo sapien
aaaagcagccttctatcttgccttg

SEQ ID NO: 2784597 - DNA, 25 bp, Homo sapien
tagaagaactatttcatgcgctcca

SEQ ID NO: 2784598 - DNA, 25 bp, Homo sapien
ttgtggatgaaattccccaaatcaa

SEQ ID NO: 2784599 - DNA, 25 bp, Homo sapien
atgatgatgtgtgaaaaacacttcc

SEQ ID NO: 2784600 - DNA, 25 bp, Homo sapien
tcactggcggtgtgacaaagccacc

SEQ ID NO: 2784601 - DNA, 25 bp, Homo sapien
gatttgggggactcagaaccgatga

SEQ ID NO: 2784602 - DNA, 25 bp, Homo sapien
ttgcaaaagccttgtccggggagaa

SEQ ID NO: 2784603 - DNA, 25 bp, Homo sapien
tgcaaaagccttgtccggggagaac

SEQ ID NO: 2784604 - DNA, 25 bp, Homo sapien
acttacatccttgctatctgactcc

SEQ ID NO: 2784605 - DNA, 25 bp, Homo sapien
tgtccaacaggtctcctctggtgtc

SEQ ID NO: 2784606 - DNA, 25 bp, Homo sapien
ttgccagactgagccaactacctgt

SEQ ID NO: 2784607 - DNA, 25 bp, Homo sapien
tcttctcacttacatccttgctatc

SEQ ID NO: 2784608 - DNA, 25 bp, Homo sapien
aagtgccaagcactgtgcaaagtgc

SEQ ID NO: 2784609 - DNA, 25 bp, Homo sapien
gtgccaagcactgtgcaaagtgcat

SEQ ID NO: 2784610 - DNA, 25 bp, Homo sapien
ctaccaagtgccaagcactgtgcaa

SEQ ID NO: 2784611 - DNA, 25 bp, Homo sapien
ccaagtgccaagcactgtgcaaagt

SEQ ID NO: 2784612 - DNA, 25 bp, Homo sapien
cgggcttctcaagcctcccgttaat

SEQ ID NO: 2784613 - DNA, 25 bp, Homo sapien
tgtgctgtagcctccacgggcttct

SEQ ID NO: 2784614 - DNA, 25 bp, Homo sapien
ccacgggcttctcaagcctcccgtt

SEQ ID NO: 2784615 - DNA, 25 bp, Homo sapien
tcctgtgctgtagcctccacgggct

SEQ ID NO: 2784616 - DNA, 25 bp, Homo sapien
atatctcaagttctaccagtgtaag

SEQ ID NO: 2784617 - DNA, 25 bp, Homo sapien
ccagcaagaagaggtgtataataaa

SEQ ID NO: 2784618 - DNA, 25 bp, Homo sapien
gaagaggtgtataataaatatctca

SEQ ID NO: 2784619 - DNA, 25 bp, Homo sapien
ctaccagtgtaaggctcagtatcac

SEQ ID NO: 2784620 - DNA, 25 bp, Homo sapien
ctgggcaggctcctaagtatttgga

SEQ ID NO: 2784621 - DNA, 25 bp, Homo sapien
tgtggctggcccacaagcaggctct

SEQ ID NO: 2784622 - DNA, 25 bp, Homo sapien
cctaagtatttggagagaccacagt

SEQ ID NO: 2784623 - DNA, 25 bp, Homo sapien
tttctgggcaggctcctaagtattt

SEQ ID NO: 2784624 - DNA, 25 bp, Homo sapien
ttgcagtgacttgccgtggcaatga

SEQ ID NO: 2784625 - DNA, 25 bp, Homo sapien
tgatttcttggggtgtttcttacac

SEQ ID NO: 2784626 - DNA, 25 bp, Homo sapien
cattcctctgttggagtctctccct

SEQ ID NO: 2784627 - DNA, 25 bp, Homo sapien
tcctcaggccggctcctttcctggg

SEQ ID NO: 2784628 - DNA, 25 bp, Homo sapien
tgaaccctcactccgaccagttctc

SEQ ID NO: 2784629 - DNA, 25 bp, Homo sapien
ctcttcatgctcctgaaccctcact

SEQ ID NO: 2784630 - DNA, 25 bp, Homo sapien
accctcactccgaccagttctccag

SEQ ID NO: 2784631 - DNA, 25 bp, Homo sapien
ctgaaccctcactccgaccagttct

SEQ ID NO: 2784632 - DNA, 25 bp, Homo sapien
gccgggcctagcagaaatccttcag

SEQ ID NO: 2784633 - DNA, 25 bp, Homo sapien
atttcaaacctgaggcttcggtcac

SEQ ID NO: 2784634 - DNA, 25 bp, Homo sapien
tccttcagggattggaacctgcagt

SEQ ID NO: 2784635 - DNA, 25 bp, Homo sapien
tgcagttccccggagcggaagtatt

SEQ ID NO: 2784636 - DNA, 25 bp, Homo sapien
ttagttccggtaaaatctgcagcat

SEQ ID NO: 2784637 - DNA, 25 bp, Homo sapien
tttagttccggtaaaatctgcagca

SEQ ID NO: 2784638 - DNA, 25 bp, Homo sapien
tagttccggtaaaatctgcagcatt

SEQ ID NO: 2784639 - DNA, 25 bp, Homo sapien
ttttagttccggtaaaatctgcagc

SEQ ID NO: 2784640 - DNA, 25 bp, Homo sapien
tgctcctgtcggatttctgcccaga

SEQ ID NO: 2784641 - DNA, 25 bp, Homo sapien
tcgtcagctcccctgctcgtgggaa

SEQ ID NO: 2784642 - DNA, 25 bp, Homo sapien
gggatgctcctgtcggatttctgcc

SEQ ID NO: 2784643 - DNA, 25 bp, Homo sapien
tcgtgggaatactcctttattcatt

SEQ ID NO: 2784644 - DNA, 25 bp, Homo sapien
gagccttcccctgatgcctttagga

SEQ ID NO: 2784645 - DNA, 25 bp, Homo sapien
ggattgcattcatccactgagtgca

SEQ ID NO: 2784646 - DNA, 25 bp, Homo sapien
ttgcattcatccactgagtgcaggc

SEQ ID NO: 2784647 - DNA, 25 bp, Homo sapien
tcattgatgatacaggacaggggct

SEQ ID NO: 2784648 - DNA, 25 bp, Homo sapien
cctctgagccccttgagtggtctcc

SEQ ID NO: 2784649 - DNA, 25 bp, Homo sapien
ctccctcccgctttgtcccatcact

SEQ ID NO: 2784650 - DNA, 25 bp, Homo sapien
gagtggtctccctcccgctttgtcc

SEQ ID NO: 2784651 - DNA, 25 bp, Homo sapien
tctgagccccttgagtggtctccct

SEQ ID NO: 2784652 - DNA, 25 bp, Homo sapien
tgtggaaatgagactaactttagtg

SEQ ID NO: 2784653 - DNA, 25 bp, Homo sapien
ctaactttagtgaacagtaccgagt

SEQ ID NO: 2784654 - DNA, 25 bp, Homo sapien
actttagtgaacagtaccgagtgct

SEQ ID NO: 2784655 - DNA, 25 bp, Homo sapien
aacagtaccgagtgctgagggctgt

SEQ ID NO: 2784656 - DNA, 25 bp, Homo sapien
tctttcagctaagagcccaagcctg

SEQ ID NO: 2784657 - DNA, 25 bp, Homo sapien
ttagtggtccgtattctcttggtag

SEQ ID NO: 2784658 - DNA, 25 bp, Homo sapien
tctataatcttctatgggaaggcaa

SEQ ID NO: 2784659 - DNA, 25 bp, Homo sapien
gaatatagtgggacaaaaggatgct

SEQ ID NO: 2784660 - DNA, 25 bp, Homo sapien
tctttgtctacagaggtcctcggcc

SEQ ID NO: 2784661 - DNA, 25 bp, Homo sapien
gatccagcgctacagagaaagggca

SEQ ID NO: 2784662 - DNA, 25 bp, Homo sapien
caatcgaggttgttgtcctggcctg

SEQ ID NO: 2784663 - DNA, 25 bp, Homo sapien
ttttctccgggatcagcaaggctac

SEQ ID NO: 2784664 - DNA, 25 bp, Homo sapien
gcctggaagggcagatatcccctgg

SEQ ID NO: 2784665 - DNA, 25 bp, Homo sapien
agtgccatacgggagctctgtgcct

SEQ ID NO: 2784666 - DNA, 25 bp, Homo sapien
agatcactgggtgctcatgggccag

SEQ ID NO: 2784667 - DNA, 25 bp, Homo sapien
ctggtctaacccagacagtccaggg

SEQ ID NO: 2784668 - DNA, 25 bp, Homo sapien
agaagtacaggtaccgtgggctcca

SEQ ID NO: 2784669 - DNA, 25 bp, Homo sapien
tcagcaccatagaatgtcccaaagg

SEQ ID NO: 2784670 - DNA, 25 bp, Homo sapien
gaatgatactgactccagaaaagcc

SEQ ID NO: 2784671 - DNA, 25 bp, Homo sapien
gataatatcctggagccttagcagc

SEQ ID NO: 2784672 - DNA, 25 bp, Homo sapien
gagcccagctttcctaagccgggaa

SEQ ID NO: 2784673 - DNA, 25 bp, Homo sapien
tgtccgagacccctagattggccaa

SEQ ID NO: 2784674 - DNA, 25 bp, Homo sapien
cgtggtcgctgcactttgtccgaga

SEQ ID NO: 2784675 - DNA, 25 bp, Homo sapien
cgggaaccaggcactcgatgcaaat

SEQ ID NO: 2784676 - DNA, 25 bp, Homo sapien
ctgcctctgtccatacctccacttt

SEQ ID NO: 2784677 - DNA, 25 bp, Homo sapien
gagactggacgtgggggccttgcct

SEQ ID NO: 2784678 - DNA, 25 bp, Homo sapien
tggagcttcctcaggcaccggctgc

SEQ ID NO: 2784679 - DNA, 25 bp, Homo sapien
cttcagggcttggaccagtactggg

SEQ ID NO: 2784680 - DNA, 25 bp, Homo sapien
gggcagtccatcacaaagcgtatcc

SEQ ID NO: 2784681 - DNA, 25 bp, Homo sapien
agtccatcacaaagcgtatccacca

SEQ ID NO: 2784682 - DNA, 25 bp, Homo sapien
gcagtccatcacaaagcgtatccac

SEQ ID NO: 2784683 - DNA, 25 bp, Homo sapien
ccatcacaaagcgtatccaccatga

SEQ ID NO: 2784684 - DNA, 25 bp, Homo sapien
agaccaattaggagggtttcctgtg

SEQ ID NO: 2784685 - DNA, 25 bp, Homo sapien
tatcagaccaattaggagggtttcc

SEQ ID NO: 2784686 - DNA, 25 bp, Homo sapien
ttgagtcccagaaagtttatcagac

SEQ ID NO: 2784687 - DNA, 25 bp, Homo sapien
cagaaagtttatcagaccaattagg

SEQ ID NO: 2784688 - DNA, 25 bp, Homo sapien
gaaataactcgggaccaggtctaca

SEQ ID NO: 2784689 - DNA, 25 bp, Homo sapien
cattgtagccataggaaataactcg

SEQ ID NO: 2784690 - DNA, 25 bp, Homo sapien
gaatagtcattgtagccataggaaa

SEQ ID NO: 2784691 - DNA, 25 bp, Homo sapien
tagccataggaaataactcgggacc

SEQ ID NO: 2784692 - DNA, 25 bp, Homo sapien
cagccaaggccaagtggttgtgtaa

SEQ ID NO: 2784693 - DNA, 25 bp, Homo sapien
tagaatcctgaactactagcacatg

SEQ ID NO: 2784694 - DNA, 25 bp, Homo sapien
tgaagggtcttcctaggctcccaca

SEQ ID NO: 2784695 - DNA, 25 bp, Homo sapien
tggttgctgccgtctctgaagggtc

SEQ ID NO: 2784696 - DNA, 25 bp, Homo sapien
tgaatagtccgaatgtctcatctct

SEQ ID NO: 2784697 - DNA, 25 bp, Homo sapien
tggcatgaacggacactgaatagtc

SEQ ID NO: 2784698 - DNA, 25 bp, Homo sapien
gagtatagaaatcatgatcccagca

SEQ ID NO: 2784699 - DNA, 25 bp, Homo sapien
agtattattcatgtaatgtgtgacc

SEQ ID NO: 2784700 - DNA, 25 bp, Homo sapien
tacactctccttgggtagggcggca

SEQ ID NO: 2784701 - DNA, 25 bp, Homo sapien
gtaattcctgtgttggaacagcccc

SEQ ID NO: 2784702 - DNA, 25 bp, Homo sapien
tctgagaagccccagtataggtctg

SEQ ID NO: 2784703 - DNA, 25 bp, Homo sapien
aagtacttaggaagggcagtcaggc

SEQ ID NO: 2784704 - DNA, 25 bp, Homo sapien
aaatacatatgagagctgctgtgga

SEQ ID NO: 2784705 - DNA, 25 bp, Homo sapien
cagggagcctcatacggtttcataa

SEQ ID NO: 2784706 - DNA, 25 bp, Homo sapien
ccgacgcaggcaccggacacaacat

SEQ ID NO: 2784707 - DNA, 25 bp, Homo sapien
gcctcatacggtttcataaatacat

SEQ ID NO: 2784708 - DNA, 25 bp, Homo sapien
gactttgctctcactgggccagaaa

SEQ ID NO: 2784709 - DNA, 25 bp, Homo sapien
aagggagaaagcaatgactttgctc

SEQ ID NO: 2784710 - DNA, 25 bp, Homo sapien
ctgtcaagggagaaagcaatgactt

SEQ ID NO: 2784711 - DNA, 25 bp, Homo sapien
tctcactgggccagaaattccatgg

SEQ ID NO: 2784712 - DNA, 25 bp, Homo sapien
actggtttcatcagctctagactca

SEQ ID NO: 2784713 - DNA, 25 bp, Homo sapien
ccttgtgccgattgcacattctcca

SEQ ID NO: 2784714 - DNA, 25 bp, Homo sapien
gactcagctgtatgcgtcccttttt

SEQ ID NO: 2784715 - DNA, 25 bp, Homo sapien
agcatcaaaatgccctggaatcaga

SEQ ID NO: 2784716 - DNA, 25 bp, Homo sapien
gaggatcgagttgggctcctggtgg

SEQ ID NO: 2784717 - DNA, 25 bp, Homo sapien
gggagtgaggatcgagttgggctcc

SEQ ID NO: 2784718 - DNA, 25 bp, Homo sapien
aagatatgttttgccagagttagag

SEQ ID NO: 2784719 - DNA, 25 bp, Homo sapien
aaagatatgttttgccagagttaga

SEQ ID NO: 2784720 - DNA, 25 bp, Homo sapien
tcttccactcctgaaggacactgtg

SEQ ID NO: 2784721 - DNA, 25 bp, Homo sapien
tggctgcatgcacctctcttctctt

SEQ ID NO: 2784722 - DNA, 25 bp, Homo sapien
tccactcctgaaggacactgtgcca

SEQ ID NO: 2784723 - DNA, 25 bp, Homo sapien
cctgaaggacactgtgccacagaca

SEQ ID NO: 2784724 - DNA, 25 bp, Homo sapien
ttggtaagtaatgactgagcaggct

SEQ ID NO: 2784725 - DNA, 25 bp, Homo sapien
gaaagcattccatcatactgtatag

SEQ ID NO: 2784726 - DNA, 25 bp, Homo sapien
gcaaagttgtagtatggttggtaag

SEQ ID NO: 2784727 - DNA, 25 bp, Homo sapien
tctcctcattttggtctgcctcatt

SEQ ID NO: 2784728 - DNA, 25 bp, Homo sapien
tcgaggaagggctgattgaactgtc

SEQ ID NO: 2784729 - DNA, 25 bp, Homo sapien
cagtcacagattttcttaagggcca

SEQ ID NO: 2784730 - DNA, 25 bp, Homo sapien
cagggatcggatcagtttgcccgga

SEQ ID NO: 2784731 - DNA, 25 bp, Homo sapien
cagccccatgaggttacggataaac

SEQ ID NO: 2784732 - DNA, 25 bp, Homo sapien
tccatccaaacttgataaagaagaa

SEQ ID NO: 2784733 - DNA, 25 bp, Homo sapien
tgttttccatccaaacttgataaag

SEQ ID NO: 2784734 - DNA, 25 bp, Homo sapien
tttccatccaaacttgataaagaag

SEQ ID NO: 2784735 - DNA, 25 bp, Homo sapien
tttgttttccatccaaacttgataa

SEQ ID NO: 2784736 - DNA, 25 bp, Homo sapien
agatgtttgtttcggtggactggca

SEQ ID NO: 2784737 - DNA, 25 bp, Homo sapien
ggcaaatgctagcaagtctggcagt

SEQ ID NO: 2784738 - DNA, 25 bp, Homo sapien
tgggaaactgttcgaccctcattgc

SEQ ID NO: 2784739 - DNA, 25 bp, Homo sapien
caaggaactgtacgatgaaggtgag

SEQ ID NO: 2784740 - DNA, 25 bp, Homo sapien
tgttcagcatgttcggagggcagat

SEQ ID NO: 2784741 - DNA, 25 bp, Homo sapien
tgatttcaatccacaaaccggccgg

SEQ ID NO: 2784742 - DNA, 25 bp, Homo sapien
aaaggtatctgctgacggagggtct

SEQ ID NO: 2784743 - DNA, 25 bp, Homo sapien
taaaacatgcgtggagcgctgaccc

SEQ ID NO: 2784744 - DNA, 25 bp, Homo sapien
tggctgggagaattttctccgagtt

SEQ ID NO: 2784745 - DNA, 25 bp, Homo sapien
tggtcagagtcctctcccattcact

SEQ ID NO: 2784746 - DNA, 25 bp, Homo sapien
tttctccgagtttagattagagcgc

SEQ ID NO: 2784747 - DNA, 25 bp, Homo sapien
ctggtgccgcggaaattctgtgagc

SEQ ID NO: 2784748 - DNA, 25 bp, Homo sapien
ggtccttccactggagttcccactg

SEQ ID NO: 2784749 - DNA, 25 bp, Homo sapien
cccaggattctgcttgggcaaggag

SEQ ID NO: 2784750 - DNA, 25 bp, Homo sapien
caaaaatagatcaacgttaggccaa

SEQ ID NO: 2784751 - DNA, 25 bp, Homo sapien
cagggtattaggttcccaggcttgc

SEQ ID NO: 2784752 - DNA, 25 bp, Homo sapien
gcggcatccttctgtgaggggacat

SEQ ID NO: 2784753 - DNA, 25 bp, Homo sapien
acagcggcatccttctgtgagggga

SEQ ID NO: 2784754 - DNA, 25 bp, Homo sapien
cagcggcatccttctgtgaggggac

SEQ ID NO: 2784755 - DNA, 25 bp, Homo sapien
ccctttgctctgacagcggcatcct

SEQ ID NO: 2784756 - DNA, 25 bp, Homo sapien
gaaatgggggtacagctgtgccctg

SEQ ID NO: 2784757 - DNA, 25 bp, Homo sapien
gggtacagctgtgccctgagccagg

SEQ ID NO: 2784758 - DNA, 25 bp, Homo sapien
gggggtacagctgtgccctgagcca

SEQ ID NO: 2784759 - DNA, 25 bp, Homo sapien
tacagctgtgccctgagccagggtt

SEQ ID NO: 2784760 - DNA, 25 bp, Homo sapien
gaagagaagattgaaagagccctat

SEQ ID NO: 2784761 - DNA, 25 bp, Homo sapien
agcattgaagagaagattgaaagag

SEQ ID NO: 2784762 - DNA, 25 bp, Homo sapien
ttgaagagaagattgaaagagccct

SEQ ID NO: 2784763 - DNA, 25 bp, Homo sapien
gagaagattgaaagagccctatttc

SEQ ID NO: 2784764 - DNA, 25 bp, Homo sapien
ggagtttggggccatgaagcgctca

SEQ ID NO: 2784765 - DNA, 25 bp, Homo sapien
gagtttggggccatgaagcgctcac

SEQ ID NO: 2784766 - DNA, 25 bp, Homo sapien
aggagtttggggccatgaagcgctc

SEQ ID NO: 2784767 - DNA, 25 bp, Homo sapien
tgggtgtctcggtggtcagagcagc

SEQ ID NO: 2784768 - DNA, 25 bp, Homo sapien
tccccacgagcttggttgcgttgct

SEQ ID NO: 2784769 - DNA, 25 bp, Homo sapien
ttgcgttgctcaccctggaaccaag

SEQ ID NO: 2784770 - DNA, 25 bp, Homo sapien
tccctgcggtcacaggaagaggatg

SEQ ID NO: 2784771 - DNA, 25 bp, Homo sapien
aagcccagccacctcttagaaagaa

SEQ ID NO: 2784772 - DNA, 25 bp, Homo sapien
catgagtcccaaattggaatacgct

SEQ ID NO: 2784773 - DNA, 25 bp, Homo sapien
cccttggcatggctgttctacctga

SEQ ID NO: 2784774 - DNA, 25 bp, Homo sapien
gatctttattagttgcagttcatga

SEQ ID NO: 2784775 - DNA, 25 bp, Homo sapien
acttctactttttcgaggctgaaca

SEQ ID NO: 2784776 - DNA, 25 bp, Homo sapien
gacttctactttttcgaggctgaac

SEQ ID NO: 2784777 - DNA, 25 bp, Homo sapien
cttctactttttcgaggctgaacat

SEQ ID NO: 2784778 - DNA, 25 bp, Homo sapien
tgacttctactttttcgaggctgaa

SEQ ID NO: 2784779 - DNA, 25 bp, Homo sapien
caagatttagagtgagcccctcctc

SEQ ID NO: 2784780 - DNA, 25 bp, Homo sapien
tcaagatttagagtgagcccctcct

SEQ ID NO: 2784781 - DNA, 25 bp, Homo sapien
acggttgcagtttgagtctatgtgc

SEQ ID NO: 2784782 - DNA, 25 bp, Homo sapien
aatatgggaaaaatttgcatgttat

SEQ ID NO: 2784783 - DNA, 25 bp, Homo sapien
ttctctgtacggttgcagtttgagt

SEQ ID NO: 2784784 - DNA, 25 bp, Homo sapien
ctctgtacggttgcagtttgagtct

SEQ ID NO: 2784785 - DNA, 25 bp, Homo sapien
ggcatgttctggcactaacggaaca

SEQ ID NO: 2784786 - DNA, 25 bp, Homo sapien
catacaaaacgtagtccttgttctg

SEQ ID NO: 2784787 - DNA, 25 bp, Homo sapien
tcattcacttaacgcttatttactg

SEQ ID NO: 2784788 - DNA, 25 bp, Homo sapien
cttaacgcttatttactgagcaggg

SEQ ID NO: 2784789 - DNA, 25 bp, Homo sapien
tcatgcaagtggctctgattggtgg

SEQ ID NO: 2784790 - DNA, 25 bp, Homo sapien
attggtggaacccaatcccatcagg

SEQ ID NO: 2784791 - DNA, 25 bp, Homo sapien
tggctctcagttgaggtctcatgca

SEQ ID NO: 2784792 - DNA, 25 bp, Homo sapien
tgattggtggaacccaatcccatca

SEQ ID NO: 2784793 - DNA, 25 bp, Homo sapien
tgacattgtcaaacaaaatgacctg

SEQ ID NO: 2784794 - DNA, 25 bp, Homo sapien
tgttcttgtgcgatcaaaatagctc

SEQ ID NO: 2784795 - DNA, 25 bp, Homo sapien
ctttgggaatatttcctccactgtg

SEQ ID NO: 2784796 - DNA, 25 bp, Homo sapien
attgtgaaatgtaaatcgatgtgac

SEQ ID NO: 2784797 - DNA, 25 bp, Homo sapien
ggagaattttgagcagacagcattt

SEQ ID NO: 2784798 - DNA, 25 bp, Homo sapien
ttcttctaccacagcagaattccat

SEQ ID NO: 2784799 - DNA, 25 bp, Homo sapien
agcagaattccattcagtgttgtgt

SEQ ID NO: 2784800 - DNA, 25 bp, Homo sapien
agaattccattcagtgttgtgtttg

SEQ ID NO: 2784801 - DNA, 25 bp, Homo sapien
tgtcagttataccaccacacaagga

SEQ ID NO: 2784802 - DNA, 25 bp, Homo sapien
agcaacaaactgtcatgtcaccctg

SEQ ID NO: 2784803 - DNA, 25 bp, Homo sapien
tcagaatgctcacttatgacatagt

SEQ ID NO: 2784804 - DNA, 25 bp, Homo sapien
tatacttaatatccaatctgctgca

SEQ ID NO: 2784805 - DNA, 25 bp, Homo sapien
ttaccctggttcagattatttgcaa

SEQ ID NO: 2784806 - DNA, 25 bp, Homo sapien
aatacagacatgatgtttgaaggcc

SEQ ID NO: 2784807 - DNA, 25 bp, Homo sapien
cccagtttccgtatttaaatgtctg

SEQ ID NO: 2784808 - DNA, 25 bp, Homo sapien
tgatcaatcattcagttccaataca

SEQ ID NO: 2784809 - DNA, 25 bp, Homo sapien
tgtaggaaaggtatggatttctcat

SEQ ID NO: 2784810 - DNA, 25 bp, Homo sapien
ttatttggttcaggcaggcatgtag

SEQ ID NO: 2784811 - DNA, 25 bp, Homo sapien
gcatgtaggaaaggtatggatttct

SEQ ID NO: 2784812 - DNA, 25 bp, Homo sapien
taggaaaggtatggatttctcattt

SEQ ID NO: 2784813 - DNA, 25 bp, Homo sapien
ggtactccactttacgaggatgatg

SEQ ID NO: 2784814 - DNA, 25 bp, Homo sapien
tgcactaggagaattggtactccac

SEQ ID NO: 2784815 - DNA, 25 bp, Homo sapien
ccataaagcctgcaagagtattgcc

SEQ ID NO: 2784816 - DNA, 25 bp, Homo sapien
ctggttgatcctgtactcttagtag

SEQ ID NO: 2784817 - DNA, 25 bp, Homo sapien
tgtctagtcatgagggtgccaatct

SEQ ID NO: 2784818 - DNA, 25 bp, Homo sapien
catagttccccaagatggtattcac

SEQ ID NO: 2784819 - DNA, 25 bp, Homo sapien
gaccacagggagtatgcatgatcct

SEQ ID NO: 2784820 - DNA, 25 bp, Homo sapien
caaccataggccttcagggaaacct

SEQ ID NO: 2784821 - DNA, 25 bp, Homo sapien
gcaatcctgctcctgtgtgtttacc

SEQ ID NO: 2784822 - DNA, 25 bp, Homo sapien
acccagcaatcctgctcctgtgtgt

SEQ ID NO: 2784823 - DNA, 25 bp, Homo sapien
atgacccagcaatcctgctcctgtg

SEQ ID NO: 2784824 - DNA, 25 bp, Homo sapien
agcaatcctgctcctgtgtgtttac

SEQ ID NO: 2784825 - DNA, 25 bp, Homo sapien
gaacagccaccaaaatctactgggt

SEQ ID NO: 2784826 - DNA, 25 bp, Homo sapien
caggctgtagcgcttcatccaggtc

SEQ ID NO: 2784827 - DNA, 25 bp, Homo sapien
tcagccagttccctcgaaaaacaag

SEQ ID NO: 2784828 - DNA, 25 bp, Homo sapien
gattctgtctcatagtgctcttctg

SEQ ID NO: 2784829 - DNA, 25 bp, Homo sapien
taaccacctcgtgcaaggatgctgg

SEQ ID NO: 2784830 - DNA, 25 bp, Homo sapien
tagaatgtgctatgcgacctggttc

SEQ ID NO: 2784831 - DNA, 25 bp, Homo sapien
gaaatctgcatggtcgctacttcag

SEQ ID NO: 2784832 - DNA, 25 bp, Homo sapien
gatatttcaagactcagccctaaag

SEQ ID NO: 2784833 - DNA, 25 bp, Homo sapien
tctctctcagctagagaaaaccatc

SEQ ID NO: 2784834 - DNA, 25 bp, Homo sapien
atgattacattcattgccacggtgt

SEQ ID NO: 2784835 - DNA, 25 bp, Homo sapien
tctctcagctagagaaaaccatcct

SEQ ID NO: 2784836 - DNA, 25 bp, Homo sapien
gattacattcattgccacggtgtga

SEQ ID NO: 2784837 - DNA, 25 bp, Homo sapien
gagcccacgtgccttctcttggagg

SEQ ID NO: 2784838 - DNA, 25 bp, Homo sapien
ccacgtgccttctcttggagggaga

SEQ ID NO: 2784839 - DNA, 25 bp, Homo sapien
gccttctcttggagggagagcaaac

SEQ ID NO: 2784840 - DNA, 25 bp, Homo sapien
gcagagcccacgtgccttctcttgg

SEQ ID NO: 2784841 - DNA, 25 bp, Homo sapien
agtttggattgccaggccaatcagt

SEQ ID NO: 2784842 - DNA, 25 bp, Homo sapien
tagtgaagtttggattgccaggcca

SEQ ID NO: 2784843 - DNA, 25 bp, Homo sapien
gaagtttggattgccaggccaatca

SEQ ID NO: 2784844 - DNA, 25 bp, Homo sapien
tgaagtttggattgccaggccaatc

SEQ ID NO: 2784845 - DNA, 25 bp, Homo sapien
caataaactggttcctaacaatatg

SEQ ID NO: 2784846 - DNA, 25 bp, Homo sapien
tcactgtctccttaacacacctgac

SEQ ID NO: 2784847 - DNA, 25 bp, Homo sapien
tatgctgcccttaggcgccatttcc

SEQ ID NO: 2784848 - DNA, 25 bp, Homo sapien
ggttcctaacaatatgctgccctta

SEQ ID NO: 2784849 - DNA, 25 bp, Homo sapien
tcaacttgtactccacaaatgccat

SEQ ID NO: 2784850 - DNA, 25 bp, Homo sapien
gaaaattaatcagggactcccatgg

SEQ ID NO: 2784851 - DNA, 25 bp, Homo sapien
ttgcctaacaggaacccaccatggt

SEQ ID NO: 2784852 - DNA, 25 bp, Homo sapien
tatggacccaagaacggagcagaga

SEQ ID NO: 2784853 - DNA, 25 bp, Homo sapien
tatgtgatgaaggtctgcccctgtg

SEQ ID NO: 2784854 - DNA, 25 bp, Homo sapien
tacccgtggattgggcttgtctcag

SEQ ID NO: 2784855 - DNA, 25 bp, Homo sapien
tgccaatacccgtggattgggcttg

SEQ ID NO: 2784856 - DNA, 25 bp, Homo sapien
tagcaggtgtttccttgactcacac

SEQ ID NO: 2784857 - DNA, 25 bp, Homo sapien
ttccttgccaatacccgtggattgg

SEQ ID NO: 2784858 - DNA, 25 bp, Homo sapien
tccatgggagctacaacagcaaagc

SEQ ID NO: 2784859 - DNA, 25 bp, Homo sapien
gagattcctagagtcagcctcctgg

SEQ ID NO: 2784860 - DNA, 25 bp, Homo sapien
tgctcagagcttcaaacgtgtggga

SEQ ID NO: 2784861 - DNA, 25 bp, Homo sapien
tgggaagccacgatcactcctaggg

SEQ ID NO: 2784862 - DNA, 25 bp, Homo sapien
tccttgctgcttgaagagaagaggg

SEQ ID NO: 2784863 - DNA, 25 bp, Homo sapien
catccttgctgcttgaagagaagag

SEQ ID NO: 2784864 - DNA, 25 bp, Homo sapien
cttgctgcttgaagagaagagggga

SEQ ID NO: 2784865 - DNA, 25 bp, Homo sapien
tcatccttgctgcttgaagagaaga

SEQ ID NO: 2784866 - DNA, 25 bp, Homo sapien
aacattgataatggagccaggctgc

SEQ ID NO: 2784867 - DNA, 25 bp, Homo sapien
tcatagggttgataaacagcagacc

SEQ ID NO: 2784868 - DNA, 25 bp, Homo sapien
taatagtgtctacctactgggatgg

SEQ ID NO: 2784869 - DNA, 25 bp, Homo sapien
tatccagtattgcataaaagggcct

SEQ ID NO: 2784870 - DNA, 25 bp, Homo sapien
aatctcatcaatgcttcaaaccgta

SEQ ID NO: 2784871 - DNA, 25 bp, Homo sapien
agggtcacttcccactcgctccagg

SEQ ID NO: 2784872 - DNA, 25 bp, Homo sapien
caaaccgtattcctccagggtcact

SEQ ID NO: 2784873 - DNA, 25 bp, Homo sapien
cccactgcccagatgaagatctgca

SEQ ID NO: 2784874 - DNA, 25 bp, Homo sapien
cagacaaaacggaggctggaattgt

SEQ ID NO: 2784875 - DNA, 25 bp, Homo sapien
caaaacggaggctggaattgtgagg

SEQ ID NO: 2784876 - DNA, 25 bp, Homo sapien
aaacggaggctggaattgtgaggtt

SEQ ID NO: 2784877 - DNA, 25 bp, Homo sapien
gacaaaacggaggctggaattgtga

SEQ ID NO: 2784878 - DNA, 25 bp, Homo sapien
gacagaactcagatgggaattgaag

SEQ ID NO: 2784879 - DNA, 25 bp, Homo sapien
catgaaacatcaaggtaactgacag

SEQ ID NO: 2784880 - DNA, 25 bp, Homo sapien
tccttgcatggagaatgccaagcac

SEQ ID NO: 2784881 - DNA, 25 bp, Homo sapien
ggtcaggagcagtcacctgggtaaa

SEQ ID NO: 2784882 - DNA, 25 bp, Homo sapien
cctgtcatactggtgaatggtccat

SEQ ID NO: 2784883 - DNA, 25 bp, Homo sapien
tactctccggtgcaatgcttctttg

SEQ ID NO: 2784884 - DNA, 25 bp, Homo sapien
gtccatcttgagcatttgaccctga

SEQ ID NO: 2784885 - DNA, 25 bp, Homo sapien
tcccacttatgaccagaaatgggct

SEQ ID NO: 2784886 - DNA, 25 bp, Homo sapien
caacagtacccattaactggagcat

SEQ ID NO: 2784887 - DNA, 25 bp, Homo sapien
ttcttccctgtgaacatcaacagta

SEQ ID NO: 2784888 - DNA, 25 bp, Homo sapien
gttctagtattctgtctttcttccc

SEQ ID NO: 2784889 - DNA, 25 bp, Homo sapien
tgtgatgggcgttgtaatttgaatg

SEQ ID NO: 2784890 - DNA, 25 bp, Homo sapien
tccctgagagcataatttctgtgcc

SEQ ID NO: 2784891 - DNA, 25 bp, Homo sapien
tgtctatctgtggaatctccctgag

SEQ ID NO: 2784892 - DNA, 25 bp, Homo sapien
tctccactatggagcttctcctagt

SEQ ID NO: 2784893 - DNA, 25 bp, Homo sapien
ttctcctagttgacctgcccaaaga

SEQ ID NO: 2784894 - DNA, 25 bp, Homo sapien
ctcagacaagagctcagtggtgagg

SEQ ID NO: 2784895 - DNA, 25 bp, Homo sapien
agagccactcagacaagagctcagt

SEQ ID NO: 2784896 - DNA, 25 bp, Homo sapien
gccactcagacaagagctcagtggt

SEQ ID NO: 2784897 - DNA, 25 bp, Homo sapien
cactcagacaagagctcagtggtga

SEQ ID NO: 2784898 - DNA, 25 bp, Homo sapien
gaaacaaaatcaggtcagagctcca

SEQ ID NO: 2784899 - DNA, 25 bp, Homo sapien
gatgcacgaaatagctcactactgc

SEQ ID NO: 2784900 - DNA, 25 bp, Homo sapien
tctgtgttgtgttaggagtctctcc

SEQ ID NO: 2784901 - DNA, 25 bp, Homo sapien
ggaatctgctacttgcctgatgcaa

SEQ ID NO: 2784902 - DNA, 25 bp, Homo sapien
tatttactcagacaacggtgcaggc

SEQ ID NO: 2784903 - DNA, 25 bp, Homo sapien
aattggagcccgttgaataatcgcg

SEQ ID NO: 2784904 - DNA, 25 bp, Homo sapien
tgactatgagaataaggacccactg

SEQ ID NO: 2784905 - DNA, 25 bp, Homo sapien
gagttagttcagctcggtccaagcc

SEQ ID NO: 2784906 - DNA, 25 bp, Homo sapien
agtgtggccccacgaacaatggtca

SEQ ID NO: 2784907 - DNA, 25 bp, Homo sapien
agctgttgacgagtgtcctgaaggg

SEQ ID NO: 2784908 - DNA, 25 bp, Homo sapien
gagcatcggctccacttggcaagag

SEQ ID NO: 2784909 - DNA, 25 bp, Homo sapien
tgctggtcggtacagctgaccgcag

SEQ ID NO: 2784910 - DNA, 25 bp, Homo sapien
tacagtgtagcaggacgcgatggat

SEQ ID NO: 2784911 - DNA, 25 bp, Homo sapien
tctgcctggaatgcatagcatcgtg

SEQ ID NO: 2784912 - DNA, 25 bp, Homo sapien
caagagctctgcagtgattcaaaca

SEQ ID NO: 2784913 - DNA, 25 bp, Homo sapien
gactctaaagtgaagccggaaggga

SEQ ID NO: 2784914 - DNA, 25 bp, Homo sapien
tagccatctcagttgtaggatttca

SEQ ID NO: 2784915 - DNA, 25 bp, Homo sapien
gatttcattctaagatgcagctcaa

SEQ ID NO: 2784916 - DNA, 25 bp, Homo sapien
tgtaggatttcattctaagatgcag

SEQ ID NO: 2784917 - DNA, 25 bp, Homo sapien
tttttaattcctttagccatctcag

SEQ ID NO: 2784918 - DNA, 25 bp, Homo sapien
caatcaccaatttaatgcatatttt

SEQ ID NO: 2784919 - DNA, 25 bp, Homo sapien
ttgagtttaggaggactccatctca

SEQ ID NO: 2784920 - DNA, 25 bp, Homo sapien
catattttgagtttaggaggactcc

SEQ ID NO: 2784921 - DNA, 25 bp, Homo sapien
taatgcatattttgagtttaggagg

SEQ ID NO: 2784922 - DNA, 25 bp, Homo sapien
cccgttctacggcaggcacagtgct

SEQ ID NO: 2784923 - DNA, 25 bp, Homo sapien
gcacagtgctagtcctgagggtata

SEQ ID NO: 2784924 - DNA, 25 bp, Homo sapien
tctctcatggagattggccaaaagc

SEQ ID NO: 2784925 - DNA, 25 bp, Homo sapien
ggatgacaagtcatgcccttcaaga

SEQ ID NO: 2784926 - DNA, 25 bp, Homo sapien
cttggaggctgggatgcacacttcg

SEQ ID NO: 2784927 - DNA, 25 bp, Homo sapien
cattggcggtttattattgcaaagc

SEQ ID NO: 2784928 - DNA, 25 bp, Homo sapien
gctttgcactttcattggcggttta

SEQ ID NO: 2784929 - DNA, 25 bp, Homo sapien
cgtttttatgcagcttgctttgcac

SEQ ID NO: 2784930 - DNA, 25 bp, Homo sapien
tgacacatgagccatggcttgaaag

SEQ ID NO: 2784931 - DNA, 25 bp, Homo sapien
tgtgcattgacttgtttcctgacac

SEQ ID NO: 2784932 - DNA, 25 bp, Homo sapien
tttgcattgcgcttcaatgtggcct

SEQ ID NO: 2784933 - DNA, 25 bp, Homo sapien
atgagccatggcttgaaaggaattc

SEQ ID NO: 2784934 - DNA, 25 bp, Homo sapien
gatctggcttccacatgcataatct

SEQ ID NO: 2784935 - DNA, 25 bp, Homo sapien
cgaaacaaagaaggcggatctggct

SEQ ID NO: 2784936 - DNA, 25 bp, Homo sapien
ctggcttccacatgcataatctcag

SEQ ID NO: 2784937 - DNA, 25 bp, Homo sapien
caaagaaggcggatctggcttccac

SEQ ID NO: 2784938 - DNA, 25 bp, Homo sapien
tggaaggtgcatgtcccgtttccaa

SEQ ID NO: 2784939 - DNA, 25 bp, Homo sapien
cgggcaacttgtgtgtttcattggg

SEQ ID NO: 2784940 - DNA, 25 bp, Homo sapien
ccacacctccatgtttgcttctcag

SEQ ID NO: 2784941 - DNA, 25 bp, Homo sapien
ttgcttctcagtgaccgatacgggc

SEQ ID NO: 2784942 - DNA, 25 bp, Homo sapien
agcctcctggctggcgttgaggtga

SEQ ID NO: 2784943 - DNA, 25 bp, Homo sapien
aggggtggcactgggaagtcctgag

SEQ ID NO: 2784944 - DNA, 25 bp, Homo sapien
gtggcactgggaagtcctgagctga

SEQ ID NO: 2784945 - DNA, 25 bp, Homo sapien
cctggctggcgttgaggtgagtggg

SEQ ID NO: 2784946 - DNA, 25 bp, Homo sapien
tatcactattgtgtaccgtgccggt

SEQ ID NO: 2784947 - DNA, 25 bp, Homo sapien
ccgtgccggtccagatggaggataa

SEQ ID NO: 2784948 - DNA, 25 bp, Homo sapien
taaaacatgcatgagttgcccgcag

SEQ ID NO: 2784949 - DNA, 25 bp, Homo sapien
cgatgatggcctgtgaacatccaag

SEQ ID NO: 2784950 - DNA, 25 bp, Homo sapien
caagagtgttcaaccagtgagtggg

SEQ ID NO: 2784951 - DNA, 25 bp, Homo sapien
catgagttccgtggaggagtcacac

SEQ ID NO: 2784952 - DNA, 25 bp, Homo sapien
gactgagaagtcgtcactgcggcat

SEQ ID NO: 2784953 - DNA, 25 bp, Homo sapien
taccctagcaggttctaattggtgg

SEQ ID NO: 2784954 - DNA, 25 bp, Homo sapien
ttcctgaattcttccgaagtcacat

SEQ ID NO: 2784955 - DNA, 25 bp, Homo sapien
tcctgaattcttccgaagtcacata

SEQ ID NO: 2784956 - DNA, 25 bp, Homo sapien
ggcaggaatcatgtactcattttca

SEQ ID NO: 2784957 - DNA, 25 bp, Homo sapien
gacagggctgtggacggtgggcaga

SEQ ID NO: 2784958 - DNA, 25 bp, Homo sapien
ttgggttaagggacagggctgtgga

SEQ ID NO: 2784959 - DNA, 25 bp, Homo sapien
actagagccagagccccttgtggca

SEQ ID NO: 2784960 - DNA, 25 bp, Homo sapien
cactggaatcacttgggaacagttt

SEQ ID NO: 2784961 - DNA, 25 bp, Homo sapien
tgcagttcccaccagtattgtcact

SEQ ID NO: 2784962 - DNA, 25 bp, Homo sapien
ccaccagtattgtcactcctgcagg

SEQ ID NO: 2784963 - DNA, 25 bp, Homo sapien
gttcccaccagtattgtcactcctg

SEQ ID NO: 2784964 - DNA, 25 bp, Homo sapien
cagtattgtcactcctgcagggccc

SEQ ID NO: 2784965 - DNA, 25 bp, Homo sapien
ttctggacacacttgtactctaagt

SEQ ID NO: 2784966 - DNA, 25 bp, Homo sapien
tcttctggacacacttgtactctaa

SEQ ID NO: 2784967 - DNA, 25 bp, Homo sapien
cttctggacacacttgtactctaag

SEQ ID NO: 2784968 - DNA, 25 bp, Homo sapien
ctctgcaatgggcccccacctttcc

SEQ ID NO: 2784969 - DNA, 25 bp, Homo sapien
tccaacaaggccttgagctttatga

SEQ ID NO: 2784970 - DNA, 25 bp, Homo sapien
caaggccttgagctttatgatgaaa

SEQ ID NO: 2784971 - DNA, 25 bp, Homo sapien
gccttgagctttatgatgaaaggtg

SEQ ID NO: 2784972 - DNA, 25 bp, Homo sapien
cccattccaacaaggccttgagctt

SEQ ID NO: 2784973 - DNA, 25 bp, Homo sapien
tgcttcagaaaaggcgaatctcctg

SEQ ID NO: 2784974 - DNA, 25 bp, Homo sapien
gcttcagaaaaggcgaatctcctgt

SEQ ID NO: 2784975 - DNA, 25 bp, Homo sapien
tctggagaggactttttcccggtgc

SEQ ID NO: 2784976 - DNA, 25 bp, Homo sapien
acacagtgcgcccttcaaagtccgg

SEQ ID NO: 2784977 - DNA, 25 bp, Homo sapien
tgccccaccacacagtgcgcccttc

SEQ ID NO: 2784978 - DNA, 25 bp, Homo sapien
ccagtttccaaacctctggagagga

SEQ ID NO: 2784979 - DNA, 25 bp, Homo sapien
tctcgtgggtccctgttggacacaa

SEQ ID NO: 2784980 - DNA, 25 bp, Homo sapien
cttatctctcgtgggtccctgttgg

SEQ ID NO: 2784981 - DNA, 25 bp, Homo sapien
tcgtgggtccctgttggacacaatg

SEQ ID NO: 2784982 - DNA, 25 bp, Homo sapien
tatctctcgtgggtccctgttggac

SEQ ID NO: 2784983 - DNA, 25 bp, Homo sapien
ggggtccgacacatcctgcaggcta

SEQ ID NO: 2784984 - DNA, 25 bp, Homo sapien
aggggtccgacacatcctgcaggct

SEQ ID NO: 2784985 - DNA, 25 bp, Homo sapien
caggggtccgacacatcctgcaggc

SEQ ID NO: 2784986 - DNA, 25 bp, Homo sapien
gccaggggtccgacacatcctgcag

SEQ ID NO: 2784987 - DNA, 25 bp, Homo sapien
ccaggccaccaagataaagagagct

SEQ ID NO: 2784988 - DNA, 25 bp, Homo sapien
ccagaaaggcaatccacgttcagtt

SEQ ID NO: 2784989 - DNA, 25 bp, Homo sapien
aagagagcttctccaatgcagcctg

SEQ ID NO: 2784990 - DNA, 25 bp, Homo sapien
tgcagcctgttatcacgaacccaga

SEQ ID NO: 2784991 - DNA, 25 bp, Homo sapien
aagggcccacgcaactgtctgagac

SEQ ID NO: 2784992 - DNA, 25 bp, Homo sapien
ttttaagggcccacgcaactgtctg

SEQ ID NO: 2784993 - DNA, 25 bp, Homo sapien
gcccatcagctttttaagggcccac

SEQ ID NO: 2784994 - DNA, 25 bp, Homo sapien
tcagctttttaagggcccacgcaac

SEQ ID NO: 2784995 - DNA, 25 bp, Homo sapien
gccagtgcaggtgtccagattattc

SEQ ID NO: 2784996 - DNA, 25 bp, Homo sapien
cataacggtgtgtccagcttcgtgg

SEQ ID NO: 2784997 - DNA, 25 bp, Homo sapien
gaggattctagaatatccgactggg

SEQ ID NO: 2784998 - DNA, 25 bp, Homo sapien
ctctggaagataggagaacccagga

SEQ ID NO: 2784999 - DNA, 25 bp, Homo sapien
tctcacaggaggtattttctggtct

SEQ ID NO: 2785000 - DNA, 25 bp, Homo sapien
ctcacaggaggtattttctggtctt

SEQ ID NO: 2785001 - DNA, 25 bp, Homo sapien
acaggaggtattttctggtctttat

SEQ ID NO: 2785002 - DNA, 25 bp, Homo sapien
cacaggaggtattttctggtcttta

SEQ ID NO: 2785003 - DNA, 25 bp, Homo sapien
catgtgtttcaccagcgtaaggcaa

SEQ ID NO: 2785004 - DNA, 25 bp, Homo sapien
gaatcaacggacatgtgtttcacca

SEQ ID NO: 2785005 - DNA, 25 bp, Homo sapien
tcactgtgtagaatgaatcaacgga

SEQ ID NO: 2785006 - DNA, 25 bp, Homo sapien
tgtagaatgaatcaacggacatgtg

SEQ ID NO: 2785007 - DNA, 25 bp, Homo sapien
gggagcccggatatccagttgattt

SEQ ID NO: 2785008 - DNA, 25 bp, Homo sapien
tctcaaatgaaaccagcaaatcggt

SEQ ID NO: 2785009 - DNA, 25 bp, Homo sapien
cagttgatttccagtaagtatctca

SEQ ID NO: 2785010 - DNA, 25 bp, Homo sapien
cgtctagatttctgcttgccatggg

SEQ ID NO: 2785011 - DNA, 25 bp, Homo sapien
ctccaacgaggtcagcccaggagct

SEQ ID NO: 2785012 - DNA, 25 bp, Homo sapien
tccaacgaggtcagcccaggagctc

SEQ ID NO: 2785013 - DNA, 25 bp, Homo sapien
actccaacgaggtcagcccaggagc

SEQ ID NO: 2785014 - DNA, 25 bp, Homo sapien
agccctggactccagccaaaaagcc

SEQ ID NO: 2785015 - DNA, 25 bp, Homo sapien
tacactgagctcaaaagcagagaaa

SEQ ID NO: 2785016 - DNA, 25 bp, Homo sapien
tggctatgtcccctacactgagctc

SEQ ID NO: 2785017 - DNA, 25 bp, Homo sapien
tcccctacactgagctcaaaagcag

SEQ ID NO: 2785018 - DNA, 25 bp, Homo sapien
tatgtcccctacactgagctcaaaa

SEQ ID NO: 2785019 - DNA, 25 bp, Homo sapien
gcgaggccaggataaagccaccaat

SEQ ID NO: 2785020 - DNA, 25 bp, Homo sapien
tggtgatcctgatcctcatggtgct

SEQ ID NO: 2785021 - DNA, 25 bp, Homo sapien
tgatgcccaggtatatgatagtgtc

SEQ ID NO: 2785022 - DNA, 25 bp, Homo sapien
cattccgagtacttgccctcaaggg

SEQ ID NO: 2785023 - DNA, 25 bp, Homo sapien
acaagattccacgcccaggaaggag

SEQ ID NO: 2785024 - DNA, 25 bp, Homo sapien
ctacaagattccacgcccaggaagg

SEQ ID NO: 2785025 - DNA, 25 bp, Homo sapien
tacaagattccacgcccaggaagga

SEQ ID NO: 2785026 - DNA, 25 bp, Homo sapien
aagattccacgcccaggaaggaggg

SEQ ID NO: 2785027 - DNA, 25 bp, Homo sapien
cttgttcggctatggaggtgaagct

SEQ ID NO: 2785028 - DNA, 25 bp, Homo sapien
gtgcatgatttcttgttcggctatg

SEQ ID NO: 2785029 - DNA, 25 bp, Homo sapien
tccttgatgttgtgcatgatttctt

SEQ ID NO: 2785030 - DNA, 25 bp, Homo sapien
cttgctctgtgagggtatttgtagg

SEQ ID NO: 2785031 - DNA, 25 bp, Homo sapien
gctgccagaggcgtgcaataagcac

SEQ ID NO: 2785032 - DNA, 25 bp, Homo sapien
ctgccagaggcgtgcaataagcaca

SEQ ID NO: 2785033 - DNA, 25 bp, Homo sapien
gtgctgccagaggcgtgcaataagc

SEQ ID NO: 2785034 - DNA, 25 bp, Homo sapien
tgcaataagcacaacctggatagcc

SEQ ID NO: 2785035 - DNA, 25 bp, Homo sapien
ggatgttgaaagtctccaacatgat

SEQ ID NO: 2785036 - DNA, 25 bp, Homo sapien
atgttgaaagtctccaacatgatct

SEQ ID NO: 2785037 - DNA, 25 bp, Homo sapien
gatgttgaaagtctccaacatgatc

SEQ ID NO: 2785038 - DNA, 25 bp, Homo sapien
gggaagatcccctagtctggttgta

SEQ ID NO: 2785039 - DNA, 25 bp, Homo sapien
agatgtggccgtgcacactcaacct

SEQ ID NO: 2785040 - DNA, 25 bp, Homo sapien
cacactcaacctgactaaaatgcat

SEQ ID NO: 2785041 - DNA, 25 bp, Homo sapien
gcgttgctattgtccttagggaagc

SEQ ID NO: 2785042 - DNA, 25 bp, Homo sapien
ggcactatgccaattacacgttgaa

SEQ ID NO: 2785043 - DNA, 25 bp, Homo sapien
taaagaatatgtaggactaggaaaa

SEQ ID NO: 2785044 - DNA, 25 bp, Homo sapien
cctacatggattgaattaggtcctg

SEQ ID NO: 2785045 - DNA, 25 bp, Homo sapien
gatagagattcgtctcccatctgaa

SEQ ID NO: 2785046 - DNA, 25 bp, Homo sapien
ttagactggcattatgagttttggg

SEQ ID NO: 2785047 - DNA, 25 bp, Homo sapien
tacacaaggtgaacattgatgttcc

SEQ ID NO: 2785048 - DNA, 25 bp, Homo sapien
caagggtacataccattaacatgaa

SEQ ID NO: 2785049 - DNA, 25 bp, Homo sapien
aggagtatcagtcaggacccaagaa

SEQ ID NO: 2785050 - DNA, 25 bp, Homo sapien
tcctactggagtcatggcaacttcc

SEQ ID NO: 2785051 - DNA, 25 bp, Homo sapien
ctaaagtttaggagagtattgtaca

SEQ ID NO: 2785052 - DNA, 25 bp, Homo sapien
ttcagagattcagtcaggccagtcc

SEQ ID NO: 2785053 - DNA, 25 bp, Homo sapien
aaatgtttctccacttacaggtgga

SEQ ID NO: 2785054 - DNA, 25 bp, Homo sapien
tgttcagtgccctctgaccacagac

SEQ ID NO: 2785055 - DNA, 25 bp, Homo sapien
tgtagctgaagcacccctcttctca

SEQ ID NO: 2785056 - DNA, 25 bp, Homo sapien
gggagtcttagacagctgtagctga

SEQ ID NO: 2785057 - DNA, 25 bp, Homo sapien
atttcctcgcccctgccagtgttca

SEQ ID NO: 2785058 - DNA, 25 bp, Homo sapien
caatatttggcagacacatctccac

SEQ ID NO: 2785059 - DNA, 25 bp, Homo sapien
ccaatatttggcagacacatctcca

SEQ ID NO: 2785060 - DNA, 25 bp, Homo sapien
tccaatatttggcagacacatctcc

SEQ ID NO: 2785061 - DNA, 25 bp, Homo sapien
ctccaatatttggcagacacatctc

SEQ ID NO: 2785062 - DNA, 25 bp, Homo sapien
tatgttccagaaactgtgctgtgca

SEQ ID NO: 2785063 - DNA, 25 bp, Homo sapien
tggacactgcctcataagcagcaag

SEQ ID NO: 2785064 - DNA, 25 bp, Homo sapien
gcaggccaaatagagcattagttcc

SEQ ID NO: 2785065 - DNA, 25 bp, Homo sapien
caactttgggtgaaatccatcagtc

SEQ ID NO: 2785066 - DNA, 25 bp, Homo sapien
cataaaacctttcaccctgtactat

SEQ ID NO: 2785067 - DNA, 25 bp, Homo sapien
ctatggccagagttttacaggaggg

SEQ ID NO: 2785068 - DNA, 25 bp, Homo sapien
tacaggagggtgtattcacagacag

SEQ ID NO: 2785069 - DNA, 25 bp, Homo sapien
catctgaagacaacacacggagagc

SEQ ID NO: 2785070 - DNA, 25 bp, Homo sapien
aaaatcattggaacggatcctcttc

SEQ ID NO: 2785071 - DNA, 25 bp, Homo sapien
ttaggaaaatcattggaacggatcc

SEQ ID NO: 2785072 - DNA, 25 bp, Homo sapien
ggaaaatcattggaacggatcctct

SEQ ID NO: 2785073 - DNA, 25 bp, Homo sapien
acttccattgttttaggaaaatcat

SEQ ID NO: 2785074 - DNA, 25 bp, Homo sapien
gaaagtaaagcaaatatgcacacca

SEQ ID NO: 2785075 - DNA, 25 bp, Homo sapien
ctgaaagtaaagcaaatatgcacac

SEQ ID NO: 2785076 - DNA, 25 bp, Homo sapien
aaagtaaagcaaatatgcacaccat

SEQ ID NO: 2785077 - DNA, 25 bp, Homo sapien
tgaaagtaaagcaaatatgcacacc

SEQ ID NO: 2785078 - DNA, 25 bp, Homo sapien
tataaaccacgttggaaagacacag

SEQ ID NO: 2785079 - DNA, 25 bp, Homo sapien
cctaatgaataaccatggcccttaa

SEQ ID NO: 2785080 - DNA, 25 bp, Homo sapien
gcaaatgttacacttaccagccatg

SEQ ID NO: 2785081 - DNA, 25 bp, Homo sapien
cacagaagatagacagaaatgtcaa

SEQ ID NO: 2785082 - DNA, 25 bp, Homo sapien
caagctgaccatccttgttatggca

SEQ ID NO: 2785083 - DNA, 25 bp, Homo sapien
acatttgcatggacccacagtgcca

SEQ ID NO: 2785084 - DNA, 25 bp, Homo sapien
cattatatcggtcacaagtgtgcag

SEQ ID NO: 2785085 - DNA, 25 bp, Homo sapien
tctcccagggtttggttccaagctg

SEQ ID NO: 2785086 - DNA, 25 bp, Homo sapien
tgtttctaaaggggtcagagctctc

SEQ ID NO: 2785087 - DNA, 25 bp, Homo sapien
acttagagcagctggtttggacacc

SEQ ID NO: 2785088 - DNA, 25 bp, Homo sapien
ttattcataacaccgagtacagtga

SEQ ID NO: 2785089 - DNA, 25 bp, Homo sapien
ccgagtacagtgaagcacacttaga

SEQ ID NO: 2785090 - DNA, 25 bp, Homo sapien
ttggacaccacttgtttgtactggc

SEQ ID NO: 2785091 - DNA, 25 bp, Homo sapien
agggggcttcctcactgtagggaga

SEQ ID NO: 2785092 - DNA, 25 bp, Homo sapien
atcagggggcttcctcactgtaggg

SEQ ID NO: 2785093 - DNA, 25 bp, Homo sapien
tcagggggcttcctcactgtaggga

SEQ ID NO: 2785094 - DNA, 25 bp, Homo sapien
ggggcttcctcactgtagggagatc

SEQ ID NO: 2785095 - DNA, 25 bp, Homo sapien
aggatgaaagctatggtggtcacat

SEQ ID NO: 2785096 - DNA, 25 bp, Homo sapien
gatgaaagctatggtggtcacattg

SEQ ID NO: 2785097 - DNA, 25 bp, Homo sapien
tgaaagctatggtggtcacattggg

SEQ ID NO: 2785098 - DNA, 25 bp, Homo sapien
gaaagctatggtggtcacattgggg

SEQ ID NO: 2785099 - DNA, 25 bp, Homo sapien
gcctcattgctgacctgaatagaat

SEQ ID NO: 2785100 - DNA, 25 bp, Homo sapien
aattgtggcagctgataaggccagg

SEQ ID NO: 2785101 - DNA, 25 bp, Homo sapien
ggtctgcaactggaggctggctagg

SEQ ID NO: 2785102 - DNA, 25 bp, Homo sapien
cctcttgcgaaaatctctccactgg

SEQ ID NO: 2785103 - DNA, 25 bp, Homo sapien
aagaaaacttcaggtttatcatgcc

SEQ ID NO: 2785104 - DNA, 25 bp, Homo sapien
cttcttccacttggcagggtgctac

SEQ ID NO: 2785105 - DNA, 25 bp, Homo sapien
tgccattcacactggggtgctcttc

SEQ ID NO: 2785106 - DNA, 25 bp, Homo sapien
tctgttgcatttcagaggtctggct

SEQ ID NO: 2785107 - DNA, 25 bp, Homo sapien
acttggcagggtgctactttacgtg

SEQ ID NO: 2785108 - DNA, 25 bp, Homo sapien
tctggaagaaatccccttgccttac

SEQ ID NO: 2785109 - DNA, 25 bp, Homo sapien
tccctcattcctactgcactggcca

SEQ ID NO: 2785110 - DNA, 25 bp, Homo sapien
ccctcattcctactgcactggccat

SEQ ID NO: 2785111 - DNA, 25 bp, Homo sapien
tcatgcacattatcataaacaccca

SEQ ID NO: 2785112 - DNA, 25 bp, Homo sapien
taaatccattgttgacactgttttg

SEQ ID NO: 2785113 - DNA, 25 bp, Homo sapien
taagtaaattgtcgttcattaaatc

SEQ ID NO: 2785114 - DNA, 25 bp, Homo sapien
catgcacattatcataaacacccaa

SEQ ID NO: 2785115 - DNA, 25 bp, Homo sapien
gtagtaaatatgagtaccacaagtg

SEQ ID NO: 2785116 - DNA, 25 bp, Homo sapien
tgagcaacatgagggagggacactt

SEQ ID NO: 2785117 - DNA, 25 bp, Homo sapien
tcaaattcatggacattgtagtaag

SEQ ID NO: 2785118 - DNA, 25 bp, Homo sapien
gagtaccacaagtgtgagcaacatg

SEQ ID NO: 2785119 - DNA, 25 bp, Homo sapien
tttaaatggcattttaacaccaatg

SEQ ID NO: 2785120 - DNA, 25 bp, Homo sapien
tgtccccagatagccatggtactcc

SEQ ID NO: 2785121 - DNA, 25 bp, Homo sapien
tcagaaggaacctttaagtctggac

SEQ ID NO: 2785122 - DNA, 25 bp, Homo sapien
tgttgacactcctgaagccgtgctt

SEQ ID NO: 2785123 - DNA, 25 bp, Homo sapien
ggtaactgaatttcttctggagcag

SEQ ID NO: 2785124 - DNA, 25 bp, Homo sapien
tcagggggtaactgaatttcttctg

SEQ ID NO: 2785125 - DNA, 25 bp, Homo sapien
taactgaatttcttctggagcaggt

SEQ ID NO: 2785126 - DNA, 25 bp, Homo sapien
ctgaatttcttctggagcaggtttg

SEQ ID NO: 2785127 - DNA, 25 bp, Homo sapien
ttatgtagagagatatgggtaaggc

SEQ ID NO: 2785128 - DNA, 25 bp, Homo sapien
gagatatgggtaaggcacaagcaag

SEQ ID NO: 2785129 - DNA, 25 bp, Homo sapien
gtagagagatatgggtaaggcacaa

SEQ ID NO: 2785130 - DNA, 25 bp, Homo sapien
gcacaagcaagtgcacatttctctc

SEQ ID NO: 2785131 - DNA, 25 bp, Homo sapien
tgccaatatcactcccactgagaag

SEQ ID NO: 2785132 - DNA, 25 bp, Homo sapien
atgggcaccaggaacgctaaatgta

SEQ ID NO: 2785133 - DNA, 25 bp, Homo sapien
cgctaaatgtatgccctgcttggca

SEQ ID NO: 2785134 - DNA, 25 bp, Homo sapien
caccaggaacgctaaatgtatgccc

SEQ ID NO: 2785135 - DNA, 25 bp, Homo sapien
tgagttggtaaatgatgatgctatc

SEQ ID NO: 2785136 - DNA, 25 bp, Homo sapien
aggaactgggctggttgactttcaa

SEQ ID NO: 2785137 - DNA, 25 bp, Homo sapien
gactttcaacatgaccaagcagata

SEQ ID NO: 2785138 - DNA, 25 bp, Homo sapien
gatttccatttgtagaattgcttct

SEQ ID NO: 2785139 - DNA, 25 bp, Homo sapien
agccttgacctctttggaatcggca

SEQ ID NO: 2785140 - DNA, 25 bp, Homo sapien
gccttgacctctttggaatcggcat

SEQ ID NO: 2785141 - DNA, 25 bp, Homo sapien
ccagccttgacctctttggaatcgg

SEQ ID NO: 2785142 - DNA, 25 bp, Homo sapien
cagccttgacctctttggaatcggc

SEQ ID NO: 2785143 - DNA, 25 bp, Homo sapien
tggccaagttccaacgggtccaagc

SEQ ID NO: 2785144 - DNA, 25 bp, Homo sapien
aaggtgatgccccttcaaacctaga

SEQ ID NO: 2785145 - DNA, 25 bp, Homo sapien
gtggacaggtgaaaaaaggtgatgc

SEQ ID NO: 2785146 - DNA, 25 bp, Homo sapien
gccagacagattcatgtaagtgctg

SEQ ID NO: 2785147 - DNA, 25 bp, Homo sapien
tatctgtctactcctgctaatccta

SEQ ID NO: 2785148 - DNA, 25 bp, Homo sapien
aatatctcatatctgtctactcctg

SEQ ID NO: 2785149 - DNA, 25 bp, Homo sapien
ccatctctgctagtttcctggctct

SEQ ID NO: 2785150 - DNA, 25 bp, Homo sapien
taatcctagaaaagggcttagattg

SEQ ID NO: 2785151 - DNA, 25 bp, Homo sapien
catccccatccccaagaataattgc

SEQ ID NO: 2785152 - DNA, 25 bp, Homo sapien
tggattctcccaagacaagcccatc

SEQ ID NO: 2785153 - DNA, 25 bp, Homo sapien
ctgtggattctcccaagacaagccc

SEQ ID NO: 2785154 - DNA, 25 bp, Homo sapien
ccccatccccaagaataattgcttt

SEQ ID NO: 2785155 - DNA, 25 bp, Homo sapien
catcttggaagttggtctaccatac

SEQ ID NO: 2785156 - DNA, 25 bp, Homo sapien
cataaataccaggaggcgggagtca

SEQ ID NO: 2785157 - DNA, 25 bp, Homo sapien
tagagaaaatccacaagcctccttt

SEQ ID NO: 2785158 - DNA, 25 bp, Homo sapien
tctccaggttattgggctgacagtg

SEQ ID NO: 2785159 - DNA, 25 bp, Homo sapien
gacatattacttatcagactccaag

SEQ ID NO: 2785160 - DNA, 25 bp, Homo sapien
tctgacatattacttatcagactcc

SEQ ID NO: 2785161 - DNA, 25 bp, Homo sapien
agactccaagttccctcaaagaagg

SEQ ID NO: 2785162 - DNA, 25 bp, Homo sapien
gaagggaattaaatagtcagtctct

SEQ ID NO: 2785163 - DNA, 25 bp, Homo sapien
tatgctgtgaggagcaattaagcct

SEQ ID NO: 2785164 - DNA, 25 bp, Homo sapien
cgttcttaattggactatgctgtga

SEQ ID NO: 2785165 - DNA, 25 bp, Homo sapien
ttaagcctaaatggccacttgctga

SEQ ID NO: 2785166 - DNA, 25 bp, Homo sapien
ctgctgatgcccgttcttaattgga

SEQ ID NO: 2785167 - DNA, 25 bp, Homo sapien
tctattctgagaaagatgtctctct

SEQ ID NO: 2785168 - DNA, 25 bp, Homo sapien
tgaatccaatttcctttcacataga

SEQ ID NO: 2785169 - DNA, 25 bp, Homo sapien
actactagctgacaaaaataatgtt

SEQ ID NO: 2785170 - DNA, 25 bp, Homo sapien
gaacatctgcaagagataaaacaac

SEQ ID NO: 2785171 - DNA, 25 bp, Homo sapien
tctgttgaatttcctttccccgata

SEQ ID NO: 2785172 - DNA, 25 bp, Homo sapien
cataatctgttgaatttcctttccc

SEQ ID NO: 2785173 - DNA, 25 bp, Homo sapien
caaccataatctgttgaatttcctt

SEQ ID NO: 2785174 - DNA, 25 bp, Homo sapien
atctgttgaatttcctttccccgat

SEQ ID NO: 2785175 - DNA, 25 bp, Homo sapien
gagctcataatattatccatcatgc

SEQ ID NO: 2785176 - DNA, 25 bp, Homo sapien
catgctatggtagtgtccttggatg

SEQ ID NO: 2785177 - DNA, 25 bp, Homo sapien
aacacaacccatcaaggaactgaga

SEQ ID NO: 2785178 - DNA, 25 bp, Homo sapien
ggaactgagagagctcataatatta

SEQ ID NO: 2785179 - DNA, 25 bp, Homo sapien
tcagtgtatccacatcattttctcc

SEQ ID NO: 2785180 - DNA, 25 bp, Homo sapien
tttctcctgaattatctggattcat

SEQ ID NO: 2785181 - DNA, 25 bp, Homo sapien
cacatcattttctcctgaattatct

SEQ ID NO: 2785182 - DNA, 25 bp, Homo sapien
ttcagtgtatccacatcattttctc

SEQ ID NO: 2785183 - DNA, 25 bp, Homo sapien
agaagaaggtagtcatcaataccag

SEQ ID NO: 2785184 - DNA, 25 bp, Homo sapien
gaaggtagtcatcaataccagctat

SEQ ID NO: 2785185 - DNA, 25 bp, Homo sapien
aagaaggtagtcatcaataccagct

SEQ ID NO: 2785186 - DNA, 25 bp, Homo sapien
aaggtagtcatcaataccagctatg

SEQ ID NO: 2785187 - DNA, 25 bp, Homo sapien
tagttttagcactacccagctgcaa

SEQ ID NO: 2785188 - DNA, 25 bp, Homo sapien
tcagccctatgattactggaaaggt

SEQ ID NO: 2785189 - DNA, 25 bp, Homo sapien
caaaaggagtttccaaatgagccct

SEQ ID NO: 2785190 - DNA, 25 bp, Homo sapien
gcaaagctaaatgtgccgaaaccca

SEQ ID NO: 2785191 - DNA, 25 bp, Homo sapien
gcatctctcggtggccactggaatt

SEQ ID NO: 2785192 - DNA, 25 bp, Homo sapien
ttccagtctccatgccttaaacagc

SEQ ID NO: 2785193 - DNA, 25 bp, Homo sapien
gagaggctaggaactgagattctgc

SEQ ID NO: 2785194 - DNA, 25 bp, Homo sapien
aacagcatgagcatctctcggtggc

SEQ ID NO: 2785195 - DNA, 25 bp, Homo sapien
tctctctacaagattatcagttcca

SEQ ID NO: 2785196 - DNA, 25 bp, Homo sapien
tagaaggtgcatcaggtcactgtcc

SEQ ID NO: 2785197 - DNA, 25 bp, Homo sapien
ccaaacaatggaggagttgttcata

SEQ ID NO: 2785198 - DNA, 25 bp, Homo sapien
tctgctagccaggtcgccatttctc

SEQ ID NO: 2785199 - DNA, 25 bp, Homo sapien
gccgatctgctacttaggctgccag

SEQ ID NO: 2785200 - DNA, 25 bp, Homo sapien
taggctgccagtatggcaactgtga

SEQ ID NO: 2785201 - DNA, 25 bp, Homo sapien
cagggcgccagaggccgatctgcta

SEQ ID NO: 2785202 - DNA, 25 bp, Homo sapien
tacttaggctgccagtatggcaact

SEQ ID NO: 2785203 - DNA, 25 bp, Homo sapien
cttgtatttcaggaatggtggagtc

SEQ ID NO: 2785204 - DNA, 25 bp, Homo sapien
tttcaggaatggtggagtcccgcat

SEQ ID NO: 2785205 - DNA, 25 bp, Homo sapien
tgtatttcaggaatggtggagtccc

SEQ ID NO: 2785206 - DNA, 25 bp, Homo sapien
tatttcaggaatggtggagtcccgc

SEQ ID NO: 2785207 - DNA, 25 bp, Homo sapien
ttttcattaagcttttgcaggtttg

SEQ ID NO: 2785208 - DNA, 25 bp, Homo sapien
ttcattaagcttttgcaggtttgtg

SEQ ID NO: 2785209 - DNA, 25 bp, Homo sapien
cattaagcttttgcaggtttgtgca

SEQ ID NO: 2785210 - DNA, 25 bp, Homo sapien
tccttttcattaagcttttgcaggt

SEQ ID NO: 2785211 - DNA, 25 bp, Homo sapien
tcaaaactgaagagaagtgtgactt

SEQ ID NO: 2785212 - DNA, 25 bp, Homo sapien
cttttcttattcatgagggtaagtt

SEQ ID NO: 2785213 - DNA, 25 bp, Homo sapien
tgacttttcttattcatgagggtaa

SEQ ID NO: 2785214 - DNA, 25 bp, Homo sapien
gacttttcttattcatgagggtaag

SEQ ID NO: 2785215 - DNA, 25 bp, Homo sapien
catttccacacttgaccccagttgg

SEQ ID NO: 2785216 - DNA, 25 bp, Homo sapien
tacttcatcgggctcaacatttcca

SEQ ID NO: 2785217 - DNA, 25 bp, Homo sapien
tcatcgggctcaacatttccacact

SEQ ID NO: 2785218 - DNA, 25 bp, Homo sapien
cacacttgaccccagttggtaccat

SEQ ID NO: 2785219 - DNA, 25 bp, Homo sapien
gtttccaaggtaacagttgtcactg

SEQ ID NO: 2785220 - DNA, 25 bp, Homo sapien
agttgtcactgcaatgcttcactgc

SEQ ID NO: 2785221 - DNA, 25 bp, Homo sapien
cagtttccaaggtaacagttgtcac

SEQ ID NO: 2785222 - DNA, 25 bp, Homo sapien
tttccaaggtaacagttgtcactgc

SEQ ID NO: 2785223 - DNA, 25 bp, Homo sapien
cacttcatgaacaattgggcaccca

SEQ ID NO: 2785224 - DNA, 25 bp, Homo sapien
ttttcggcacaaactgagcgaccac

SEQ ID NO: 2785225 - DNA, 25 bp, Homo sapien
gaaagccgggaatatgtggatgcaa

SEQ ID NO: 2785226 - DNA, 25 bp, Homo sapien
gcaaaagagatcatggaaagccggg

SEQ ID NO: 2785227 - DNA, 25 bp, Homo sapien
gacatggtccctgtcagaaatgtca

SEQ ID NO: 2785228 - DNA, 25 bp, Homo sapien
cttgtcaatgaaggctagatccatg

SEQ ID NO: 2785229 - DNA, 25 bp, Homo sapien
actgttctacgggagttggagccac

SEQ ID NO: 2785230 - DNA, 25 bp, Homo sapien
ggtccctgtcagaaatgtcactcca

SEQ ID NO: 2785231 - DNA, 25 bp, Homo sapien
tggtggtttcaaactgtgtcccata

SEQ ID NO: 2785232 - DNA, 25 bp, Homo sapien
caaggcagagaatgatgtatcatgg

SEQ ID NO: 2785233 - DNA, 25 bp, Homo sapien
ctggagaagtctgagcatgattgct

SEQ ID NO: 2785234 - DNA, 25 bp, Homo sapien
ctgggtttcttagcagtccaaggca

SEQ ID NO: 2785235 - DNA, 25 bp, Homo sapien
gaaggtagaaagctgaacaaccaca

SEQ ID NO: 2785236 - DNA, 25 bp, Homo sapien
ggagaaggtagaaagctgaacaacc

SEQ ID NO: 2785237 - DNA, 25 bp, Homo sapien
ggtagaaagctgaacaaccacaccc

SEQ ID NO: 2785238 - DNA, 25 bp, Homo sapien
agaaagctgaacaaccacacccctt

SEQ ID NO: 2785239 - DNA, 25 bp, Homo sapien
actgtcactggtgccgttcattcca

SEQ ID NO: 2785240 - DNA, 25 bp, Homo sapien
ccaaatctcaatccgtagacactca

SEQ ID NO: 2785241 - DNA, 25 bp, Homo sapien
cactgtcactggtgccgttcattcc

SEQ ID NO: 2785242 - DNA, 25 bp, Homo sapien
attccaaatctcaatccgtagacac

SEQ ID NO: 2785243 - DNA, 25 bp, Homo sapien
caaaggagtgatacaatcttcaggc

SEQ ID NO: 2785244 - DNA, 25 bp, Homo sapien
cagccagagagctagtgaagttgcc

SEQ ID NO: 2785245 - DNA, 25 bp, Homo sapien
cctcaccctccaaaatgtatagctt

SEQ ID NO: 2785246 - DNA, 25 bp, Homo sapien
tttccagtttcaaaggagtgataca

SEQ ID NO: 2785247 - DNA, 25 bp, Homo sapien
cataacaacccgctatatgttggtt

SEQ ID NO: 2785248 - DNA, 25 bp, Homo sapien
tattccagttgccataacaacccgc

SEQ ID NO: 2785249 - DNA, 25 bp, Homo sapien
actctggtattccagttgccataac

SEQ ID NO: 2785250 - DNA, 25 bp, Homo sapien
ccttcagagaatgtgagtgatgttg

SEQ ID NO: 2785251 - DNA, 25 bp, Homo sapien
tgcctgggtcatacatgcccctatg

SEQ ID NO: 2785252 - DNA, 25 bp, Homo sapien
gcccctatgcaaagtgggcccagca

SEQ ID NO: 2785253 - DNA, 25 bp, Homo sapien
ggtttttccgcagagagtcagccct

SEQ ID NO: 2785254 - DNA, 25 bp, Homo sapien
ccctgaggtttttccgcagagagtc

SEQ ID NO: 2785255 - DNA, 25 bp, Homo sapien
ggaatgagccactcccttagagaat

SEQ ID NO: 2785256 - DNA, 25 bp, Homo sapien
cagagccagggtggaaacctgctat

SEQ ID NO: 2785257 - DNA, 25 bp, Homo sapien
gaaccagctaggagccaaaacccat

SEQ ID NO: 2785258 - DNA, 25 bp, Homo sapien
caaaacccatccaagaatagaagtg

SEQ ID NO: 2785259 - DNA, 25 bp, Homo sapien
agacaccccactgcagtgctttcag

SEQ ID NO: 2785260 - DNA, 25 bp, Homo sapien
gccattcagacaccccactgcagtg

SEQ ID NO: 2785261 - DNA, 25 bp, Homo sapien
agtgctttcagcccacaggatagaa

SEQ ID NO: 2785262 - DNA, 25 bp, Homo sapien
ttcagacaccccactgcagtgcttt

SEQ ID NO: 2785263 - DNA, 25 bp, Homo sapien
catagggcgactcagtcctggacac

SEQ ID NO: 2785264 - DNA, 25 bp, Homo sapien
gagtgaagaggagtcatagggcgac

SEQ ID NO: 2785265 - DNA, 25 bp, Homo sapien
acctgccggagaggtggtgccatgt

SEQ ID NO: 2785266 - DNA, 25 bp, Homo sapien
gaattttccagaagggagagtgaag

SEQ ID NO: 2785267 - DNA, 25 bp, Homo sapien
tgtttgactattagaggcttgacaa

SEQ ID NO: 2785268 - DNA, 25 bp, Homo sapien
tttgactattagaggcttgacaagg

SEQ ID NO: 2785269 - DNA, 25 bp, Homo sapien
agaggaatttcagatgtttgactat

SEQ ID NO: 2785270 - DNA, 25 bp, Homo sapien
agatgtttgactattagaggcttga

SEQ ID NO: 2785271 - DNA, 25 bp, Homo sapien
tcaaagtgcacagccatcctttact

SEQ ID NO: 2785272 - DNA, 25 bp, Homo sapien
gtcttcaaagtgcacagccatcctt

SEQ ID NO: 2785273 - DNA, 25 bp, Homo sapien
ccatcctttactgccccgtgcagca

SEQ ID NO: 2785274 - DNA, 25 bp, Homo sapien
tcttcaaagtgcacagccatccttt

SEQ ID NO: 2785275 - DNA, 25 bp, Homo sapien
agactcaaggccacatcggaagagc

SEQ ID NO: 2785276 - DNA, 25 bp, Homo sapien
tcaaggccacatcggaagagcctcg

SEQ ID NO: 2785277 - DNA, 25 bp, Homo sapien
ggccacatcggaagagcctcgatcc

SEQ ID NO: 2785278 - DNA, 25 bp, Homo sapien
ctctgtgtcgagaggagtggtaaga

SEQ ID NO: 2785279 - DNA, 25 bp, Homo sapien
tttatttcttgttccccattgtaga

SEQ ID NO: 2785280 - DNA, 25 bp, Homo sapien
cttgttccccattgtagagaatatc

SEQ ID NO: 2785281 - DNA, 25 bp, Homo sapien
gccaagtcttgccaatcatggcctt

SEQ ID NO: 2785282 - DNA, 25 bp, Homo sapien
caatcatggcctttcctgtagtgtt

SEQ ID NO: 2785283 - DNA, 25 bp, Homo sapien
gcagctgtcggatcactggctctgt

SEQ ID NO: 2785284 - DNA, 25 bp, Homo sapien
actaacaagggaacctccagacatt

SEQ ID NO: 2785285 - DNA, 25 bp, Homo sapien
gcatattttattagggctgccagca

SEQ ID NO: 2785286 - DNA, 25 bp, Homo sapien
cctaaaattagtgccagaattggcc

SEQ ID NO: 2785287 - DNA, 25 bp, Homo sapien
gctgctccagatgaggtgatggcaa

SEQ ID NO: 2785288 - DNA, 25 bp, Homo sapien
tgctgctgctccagatgaggtgatg

SEQ ID NO: 2785289 - DNA, 25 bp, Homo sapien
gcgcggccgcgggcaaccgctcccc

SEQ ID NO: 2785290 - DNA, 25 bp, Homo sapien
ctgctgctccagatgaggtgatggc

SEQ ID NO: 2785291 - DNA, 25 bp, Homo sapien
cgcctcccgtgttgaagctattctt

SEQ ID NO: 2785292 - DNA, 25 bp, Homo sapien
cttgtgcctcagcctcctgagtagc

SEQ ID NO: 2785293 - DNA, 25 bp, Homo sapien
attacaggcgttgtcaccacaccca

SEQ ID NO: 2785294 - DNA, 25 bp, Homo sapien
tcccgtgttgaagctattcttgtgc

SEQ ID NO: 2785295 - DNA, 25 bp, Homo sapien
aggtatgcacaaccatgcctagcta

SEQ ID NO: 2785296 - DNA, 25 bp, Homo sapien
tacaggtatgcacaaccatgcctag

SEQ ID NO: 2785297 - DNA, 25 bp, Homo sapien
cctcaagcaattctccctctttggc

SEQ ID NO: 2785298 - DNA, 25 bp, Homo sapien
gcctcaagcaattctccctctttgg

SEQ ID NO: 2785299 - DNA, 25 bp, Homo sapien
cagtggatgcagctactggtggtta

SEQ ID NO: 2785300 - DNA, 25 bp, Homo sapien
atataaactccttacacattatggc

SEQ ID NO: 2785301 - DNA, 25 bp, Homo sapien
gcagtggatgcagctactggtggtt

SEQ ID NO: 2785302 - DNA, 25 bp, Homo sapien
ggtggttatgtgtaatttggatata

SEQ ID NO: 2785303 - DNA, 25 bp, Homo sapien
cacagggtcgtgtgtggaattttcc

SEQ ID NO: 2785304 - DNA, 25 bp, Homo sapien
ggtggtttataactctggctgctca

SEQ ID NO: 2785305 - DNA, 25 bp, Homo sapien
ttgaccgcaacccatcacagggtcg

SEQ ID NO: 2785306 - DNA, 25 bp, Homo sapien
tggctgctcaatagatcacctgtgg

SEQ ID NO: 2785307 - DNA, 25 bp, Homo sapien
cgcctgccttagcctcccaaagtgc

SEQ ID NO: 2785308 - DNA, 25 bp, Homo sapien
ctatgttgagcaggatggtctcgat

SEQ ID NO: 2785309 - DNA, 25 bp, Homo sapien
gcctgccttagcctcccaaagtgct

SEQ ID NO: 2785310 - DNA, 25 bp, Homo sapien
ttcactatgttgagcaggatggtct

SEQ ID NO: 2785311 - DNA, 25 bp, Homo sapien
gattatatggtaactatacttactt

SEQ ID NO: 2785312 - DNA, 25 bp, Homo sapien
ttagcataatccatactcaagttta

SEQ ID NO: 2785313 - DNA, 25 bp, Homo sapien
atccattaatcgatagacatttggg

SEQ ID NO: 2785314 - DNA, 25 bp, Homo sapien
tggccattatgaataccattcatat

SEQ ID NO: 2785315 - DNA, 25 bp, Homo sapien
tcataactcattgcagccttacctc

SEQ ID NO: 2785316 - DNA, 25 bp, Homo sapien
caggcccaagtgcttctcccatttc

SEQ ID NO: 2785317 - DNA, 25 bp, Homo sapien
ggcccaagtgcttctcccatttcag

SEQ ID NO: 2785318 - DNA, 25 bp, Homo sapien
cccaggcccaagtgcttctcccatt

SEQ ID NO: 2785319 - DNA, 25 bp, Homo sapien
caccatgcccaactgtaaagctttt

SEQ ID NO: 2785320 - DNA, 25 bp, Homo sapien
catgcccaactgtaaagcttttcaa

SEQ ID NO: 2785321 - DNA, 25 bp, Homo sapien
ccatgcccaactgtaaagcttttca

SEQ ID NO: 2785322 - DNA, 25 bp, Homo sapien
cataatcttcctgtacgtagagtgg

SEQ ID NO: 2785323 - DNA, 25 bp, Homo sapien
aaagtagaaatttccacgactcagg

SEQ ID NO: 2785324 - DNA, 25 bp, Homo sapien
aagtagaaatttccacgactcaggg

SEQ ID NO: 2785325 - DNA, 25 bp, Homo sapien
tcttcctgtacgtagagtggagcag

SEQ ID NO: 2785326 - DNA, 25 bp, Homo sapien
tactgttacgcaaattctgaatgaa

SEQ ID NO: 2785327 - DNA, 25 bp, Homo sapien
gaaactacagtgatttaatactctt

SEQ ID NO: 2785328 - DNA, 25 bp, Homo sapien
gccccaaatatgctgaacaacatca

SEQ ID NO: 2785329 - DNA, 25 bp, Homo sapien
tttctaaaaagctgcacaacgggcc

SEQ ID NO: 2785330 - DNA, 25 bp, Homo sapien
gagcctggacttgggtccaggtcat

SEQ ID NO: 2785331 - DNA, 25 bp, Homo sapien
tgggcattagtgagggcctgagcct

SEQ ID NO: 2785332 - DNA, 25 bp, Homo sapien
ggcctgagcctggacttgggtccag

SEQ ID NO: 2785333 - DNA, 25 bp, Homo sapien
ctgggcattagtgagggcctgagcc

SEQ ID NO: 2785334 - DNA, 25 bp, Homo sapien
ggatggctgccaggtcttagcctca

SEQ ID NO: 2785335 - DNA, 25 bp, Homo sapien
tagcctcactactcatgttgtagag

SEQ ID NO: 2785336 - DNA, 25 bp, Homo sapien
cattcccactaccagttaaactcat

SEQ ID NO: 2785337 - DNA, 25 bp, Homo sapien
gtaggctcctcccagattgtgatgg

SEQ ID NO: 2785338 - DNA, 25 bp, Homo sapien
taatgaaagtgtaactgttgaatgg

SEQ ID NO: 2785339 - DNA, 25 bp, Homo sapien
aactgttgaatggatagaaaatgga

SEQ ID NO: 2785340 - DNA, 25 bp, Homo sapien
gtaactgttgaatggatagaaaatg

SEQ ID NO: 2785341 - DNA, 25 bp, Homo sapien
aagtgtaactgttgaatggatagaa

SEQ ID NO: 2785342 - DNA, 25 bp, Homo sapien
tcacttaaccctgaccttgttcctg

SEQ ID NO: 2785343 - DNA, 25 bp, Homo sapien
atcttttcacttaaccctgaccttg

SEQ ID NO: 2785344 - DNA, 25 bp, Homo sapien
cacttaaccctgaccttgttcctga

SEQ ID NO: 2785345 - DNA, 25 bp, Homo sapien
tctggaatcagctagggatttgggc

SEQ ID NO: 2785346 - DNA, 25 bp, Homo sapien
catttctttaccagagagactgcaa

SEQ ID NO: 2785347 - DNA, 25 bp, Homo sapien
gaagggagagtaccacactctctgc

SEQ ID NO: 2785348 - DNA, 25 bp, Homo sapien
agctgctatgaactccactcccaaa

SEQ ID NO: 2785349 - DNA, 25 bp, Homo sapien
ggaagagtgtcacttctgcccacca

SEQ ID NO: 2785350 - DNA, 25 bp, Homo sapien
gttgttgcagaaaagagagactact

SEQ ID NO: 2785351 - DNA, 25 bp, Homo sapien
cagtgttccaggtaaagtaagacag

SEQ ID NO: 2785352 - DNA, 25 bp, Homo sapien
gggaagggtgttatatcaccacctg

SEQ ID NO: 2785353 - DNA, 25 bp, Homo sapien
tcagtgattgtacataccttgccca

SEQ ID NO: 2785354 - DNA, 25 bp, Homo sapien
taagactgtggactcaatccagagc

SEQ ID NO: 2785355 - DNA, 25 bp, Homo sapien
ttctagtccaggaggcacaaccaag

SEQ ID NO: 2785356 - DNA, 25 bp, Homo sapien
tgcgtgcatgcatacctcatcagtg

SEQ ID NO: 2785357 - DNA, 25 bp, Homo sapien
gccagtgtggtattaacaagactaa

SEQ ID NO: 2785358 - DNA, 25 bp, Homo sapien
tgtagacagtacattactcccttga

SEQ ID NO: 2785359 - DNA, 25 bp, Homo sapien
cattgaacggaactaaagtctgtga

SEQ ID NO: 2785360 - DNA, 25 bp, Homo sapien
gttagtttaagccaagtgtagacag

SEQ ID NO: 2785361 - DNA, 25 bp, Homo sapien
ggagaactgttacaattgaccttgc

SEQ ID NO: 2785362 - DNA, 25 bp, Homo sapien
agggaaataacctgagaaagccgag

SEQ ID NO: 2785363 - DNA, 25 bp, Homo sapien
cagtccttcagctttacagatagtg

SEQ ID NO: 2785364 - DNA, 25 bp, Homo sapien
tatgctgccttacactatgatggct

SEQ ID NO: 2785365 - DNA, 25 bp, Homo sapien
aatatgcctggcactgcacggtggc

SEQ ID NO: 2785366 - DNA, 25 bp, Homo sapien
tataggatagcgaaagaggtaggca

SEQ ID NO: 2785367 - DNA, 25 bp, Homo sapien
tcataggaatactgggaacctgtag

SEQ ID NO: 2785368 - DNA, 25 bp, Homo sapien
gaggtaggcaatcgtaacagacact

SEQ ID NO: 2785369 - DNA, 25 bp, Homo sapien
gaaggccttacagtatataacagta

SEQ ID NO: 2785370 - DNA, 25 bp, Homo sapien
gcgtctctgcggctcctgaacttga

SEQ ID NO: 2785371 - DNA, 25 bp, Homo sapien
taagtgtaaagttgtgcgtctctgc

SEQ ID NO: 2785372 - DNA, 25 bp, Homo sapien
tggaggaacagagctaaaggcctaa

SEQ ID NO: 2785373 - DNA, 25 bp, Homo sapien
cttctgcgttgaatccatgtagcaa

SEQ ID NO: 2785374 - DNA, 25 bp, Homo sapien
aaatgaataccttctgcgttgaatc

SEQ ID NO: 2785375 - DNA, 25 bp, Homo sapien
taccttctgcgttgaatccatgtag

SEQ ID NO: 2785376 - DNA, 25 bp, Homo sapien
tgaataccttctgcgttgaatccat

SEQ ID NO: 2785377 - DNA, 25 bp, Homo sapien
tatgcaataactctcccaggtagca

SEQ ID NO: 2785378 - DNA, 25 bp, Homo sapien
tcccaggtagcaccttataccgctt

SEQ ID NO: 2785379 - DNA, 25 bp, Homo sapien
taactctcccaggtagcaccttata

SEQ ID NO: 2785380 - DNA, 25 bp, Homo sapien
tagcaccttataccgcttaaaagcc

SEQ ID NO: 2785381 - DNA, 25 bp, Homo sapien
atctatgtccatggaacgggcccgt

SEQ ID NO: 2785382 - DNA, 25 bp, Homo sapien
tttgtcactaaaacctgtgctggtt

SEQ ID NO: 2785383 - DNA, 25 bp, Homo sapien
gaagtcatctatgtccatggaacgg

SEQ ID NO: 2785384 - DNA, 25 bp, Homo sapien
tcatctatgtccatggaacgggccc

SEQ ID NO: 2785385 - DNA, 25 bp, Homo sapien
tcttcctacagatttgaccttaacc

SEQ ID NO: 2785386 - DNA, 25 bp, Homo sapien
ttggatctctaattaaaagtggctg

SEQ ID NO: 2785387 - DNA, 25 bp, Homo sapien
gttcagtaagtcataaaatagtcac

SEQ ID NO: 2785388 - DNA, 25 bp, Homo sapien
ggaataccttgaattagtaatcctg

SEQ ID NO: 2785389 - DNA, 25 bp, Homo sapien
tgtgcaagctacacatatctacagc

SEQ ID NO: 2785390 - DNA, 25 bp, Homo sapien
caagacgtggtcacaattcagagga

SEQ ID NO: 2785391 - DNA, 25 bp, Homo sapien
aacaactgtcagtagttagaggaca

SEQ ID NO: 2785392 - DNA, 25 bp, Homo sapien
ctatgtgagcaagaaacaagacgtg

SEQ ID NO: 2785393 - DNA, 25 bp, Homo sapien
tctgtttcacaggatacacagcagc

SEQ ID NO: 2785394 - DNA, 25 bp, Homo sapien
tgtttcacaggatacacagcagcac

SEQ ID NO: 2785395 - DNA, 25 bp, Homo sapien
tcatatctgtttcacaggatacaca

SEQ ID NO: 2785396 - DNA, 25 bp, Homo sapien
tatctgtttcacaggatacacagca

SEQ ID NO: 2785397 - DNA, 25 bp, Homo sapien
tcaagtcaaaattgtgctagttata

SEQ ID NO: 2785398 - DNA, 25 bp, Homo sapien
caaaattgtgctagttatacattat

SEQ ID NO: 2785399 - DNA, 25 bp, Homo sapien
gtcaaaattgtgctagttatacatt

SEQ ID NO: 2785400 - DNA, 25 bp, Homo sapien
aagtcaaaattgtgctagttataca

SEQ ID NO: 2785401 - DNA, 25 bp, Homo sapien
tgaacagtgaattctgtagtttttt

SEQ ID NO: 2785402 - DNA, 25 bp, Homo sapien
ggactgaacagtgaattctgtagtt

SEQ ID NO: 2785403 - DNA, 25 bp, Homo sapien
tggactgaacagtgaattctgtagt

SEQ ID NO: 2785404 - DNA, 25 bp, Homo sapien
actgaacagtgaattctgtagtttt

SEQ ID NO: 2785405 - DNA, 25 bp, Homo sapien
ccttgaaccccaaattgatgagctg

SEQ ID NO: 2785406 - DNA, 25 bp, Homo sapien
aatctccaagccctgtaaaactgtg

SEQ ID NO: 2785407 - DNA, 25 bp, Homo sapien
cacatatccttcacaagtgtggaag

SEQ ID NO: 2785408 - DNA, 25 bp, Homo sapien
aactagagcagatatatggtcagag

SEQ ID NO: 2785409 - DNA, 25 bp, Homo sapien
ttatccttactagaccatcccattc

SEQ ID NO: 2785410 - DNA, 25 bp, Homo sapien
caaaggttatccttactagaccatc

SEQ ID NO: 2785411 - DNA, 25 bp, Homo sapien
aggttatccttactagaccatccca

SEQ ID NO: 2785412 - DNA, 25 bp, Homo sapien
acaaaggttatccttactagaccat

SEQ ID NO: 2785413 - DNA, 25 bp, Homo sapien
gattccaccttgggcggtggtctga

SEQ ID NO: 2785414 - DNA, 25 bp, Homo sapien
cttaggttctatccttacaacactg

SEQ ID NO: 2785415 - DNA, 25 bp, Homo sapien
cttgggcggtggtctgaagttattc

SEQ ID NO: 2785416 - DNA, 25 bp, Homo sapien
tggtggtggattcttaggttctatc

SEQ ID NO: 2785417 - DNA, 25 bp, Homo sapien
caaccagtcggagggcaaattctct

SEQ ID NO: 2785418 - DNA, 25 bp, Homo sapien
aacagctgtgtattaattgagagtc

SEQ ID NO: 2785419 - DNA, 25 bp, Homo sapien
taacttatctccaggttttgcaacc

SEQ ID NO: 2785420 - DNA, 25 bp, Homo sapien
gtccacacgtgccaacagctgtgta

SEQ ID NO: 2785421 - DNA, 25 bp, Homo sapien
tacaggtgtgactccataaactttt

SEQ ID NO: 2785422 - DNA, 25 bp, Homo sapien
caggtttcaccataaattggatgtt

SEQ ID NO: 2785423 - DNA, 25 bp, Homo sapien
tcaccattcttccaaccaggtttca

SEQ ID NO: 2785424 - DNA, 25 bp, Homo sapien
aggtgtgactccataaactttttgt

SEQ ID NO: 2785425 - DNA, 25 bp, Homo sapien
gtaactctagtcttttgtcacaaac

SEQ ID NO: 2785426 - DNA, 25 bp, Homo sapien
ttcaccacctgaactgtaagtcttt

SEQ ID NO: 2785427 - DNA, 25 bp, Homo sapien
ttcaaaatttggcagtaactctagt

SEQ ID NO: 2785428 - DNA, 25 bp, Homo sapien
cacctgaactgtaagtctttcaaaa

SEQ ID NO: 2785429 - DNA, 25 bp, Homo sapien
tgtagcaacagcttgaagacaaaag

SEQ ID NO: 2785430 - DNA, 25 bp, Homo sapien
tcgatgtagcaacagcttgaagaca

SEQ ID NO: 2785431 - DNA, 25 bp, Homo sapien
aaaaggtcgatgtagcaacagcttg

SEQ ID NO: 2785432 - DNA, 25 bp, Homo sapien
gcttgaagacaaaaggtgaagagat

SEQ ID NO: 2785433 - DNA, 25 bp, Homo sapien
cacaagtatcaaagaatggcaaatc

SEQ ID NO: 2785434 - DNA, 25 bp, Homo sapien
gccacacaagtatcaaagaatggca

SEQ ID NO: 2785435 - DNA, 25 bp, Homo sapien
agtatcaaagaatggcaaatctgtt

SEQ ID NO: 2785436 - DNA, 25 bp, Homo sapien
cacacaagtatcaaagaatggcaaa

SEQ ID NO: 2785437 - DNA, 25 bp, Homo sapien
tacttgaagtttgctggccacaggc

SEQ ID NO: 2785438 - DNA, 25 bp, Homo sapien
gtacttgaagtttgctggccacagg

SEQ ID NO: 2785439 - DNA, 25 bp, Homo sapien
agtacttgaagtttgctggccacag

SEQ ID NO: 2785440 - DNA, 25 bp, Homo sapien
cagtacttgaagtttgctggccaca

SEQ ID NO: 2785441 - DNA, 25 bp, Homo sapien
gaagttcagctactagccttgggtc

SEQ ID NO: 2785442 - DNA, 25 bp, Homo sapien
tactagccttgggtcaagttcacaa

SEQ ID NO: 2785443 - DNA, 25 bp, Homo sapien
ttgggtcaagttcacaagcaacaac

SEQ ID NO: 2785444 - DNA, 25 bp, Homo sapien
cttttgtgaagttcagctactagcc

SEQ ID NO: 2785445 - DNA, 25 bp, Homo sapien
aaatttccaacaagggatcaggagt

SEQ ID NO: 2785446 - DNA, 25 bp, Homo sapien
caacaagggatcaggagttactact

SEQ ID NO: 2785447 - DNA, 25 bp, Homo sapien
ggatcaggagttactactaaaataa

SEQ ID NO: 2785448 - DNA, 25 bp, Homo sapien
tttccaacaagggatcaggagttac

SEQ ID NO: 2785449 - DNA, 25 bp, Homo sapien
cagcactacatcagttggtcttaag

SEQ ID NO: 2785450 - DNA, 25 bp, Homo sapien
gtccaacttccagcactacatcagt

SEQ ID NO: 2785451 - DNA, 25 bp, Homo sapien
actacatcagttggtcttaaggcag

SEQ ID NO: 2785452 - DNA, 25 bp, Homo sapien
aacttccagcactacatcagttggt

SEQ ID NO: 2785453 - DNA, 25 bp, Homo sapien
caagatcctttaactatgtaatgct

SEQ ID NO: 2785454 - DNA, 25 bp, Homo sapien
tatatgtggtactagcatacaccaa

SEQ ID NO: 2785455 - DNA, 25 bp, Homo sapien
tcatccataaccataagagaacatc

SEQ ID NO: 2785456 - DNA, 25 bp, Homo sapien
ccataagtgtaatctgcaccgtgtg

SEQ ID NO: 2785457 - DNA, 25 bp, Homo sapien
aaatgtgctgcccaatccccgtgtt

SEQ ID NO: 2785458 - DNA, 25 bp, Homo sapien
gctgttaataatgagaggatttttc

SEQ ID NO: 2785459 - DNA, 25 bp, Homo sapien
tcgataatgctgttaataatgagag

SEQ ID NO: 2785460 - DNA, 25 bp, Homo sapien
ccaatccccgtgttgaacatgagtc

SEQ ID NO: 2785461 - DNA, 25 bp, Homo sapien
ccttccgcgctcacgggagcgcgtc

SEQ ID NO: 2785462 - DNA, 25 bp, Homo sapien
cgcgctcacgggagcgcgtcctgac

SEQ ID NO: 2785463 - DNA, 25 bp, Homo sapien
tgccttccgcgctcacgggagcgcg

SEQ ID NO: 2785464 - DNA, 25 bp, Homo sapien
ccctgccttccgcgctcacgggagc

SEQ ID NO: 2785465 - DNA, 25 bp, Homo sapien
cccaggctaggtcctgccggaagac

SEQ ID NO: 2785466 - DNA, 25 bp, Homo sapien
tgccgatcaggtcttggtccgcacc

SEQ ID NO: 2785467 - DNA, 25 bp, Homo sapien
accccaggctaggtcctgccggaag

SEQ ID NO: 2785468 - DNA, 25 bp, Homo sapien
cggcctctgccgatcaggtcttggt

SEQ ID NO: 2785469 - DNA, 25 bp, Homo sapien
cgaccgaccccagcttcctcgcggg

SEQ ID NO: 2785470 - DNA, 25 bp, Homo sapien
cccgaccgaccccagcttcctcgcg

SEQ ID NO: 2785471 - DNA, 25 bp, Homo sapien
cgaccccagcttcctcgcggggatc

SEQ ID NO: 2785472 - DNA, 25 bp, Homo sapien
ctgacccgaccgaccccagcttcct

SEQ ID NO: 2785473 - DNA, 25 bp, Homo sapien
gatggcccccgacttgaccttcggc

SEQ ID NO: 2785474 - DNA, 25 bp, Homo sapien
tggcccccgacttgaccttcggcat

SEQ ID NO: 2785475 - DNA, 25 bp, Homo sapien
ccgatggcccccgacttgaccttcg

SEQ ID NO: 2785476 - DNA, 25 bp, Homo sapien
gcggcggccgatggcccccgacttg

SEQ ID NO: 2785477 - DNA, 25 bp, Homo sapien
ctcggcagaaagcgggcccacaggc

SEQ ID NO: 2785478 - DNA, 25 bp, Homo sapien
cagaaagcgggcccacaggcccggg

SEQ ID NO: 2785479 - DNA, 25 bp, Homo sapien
ccgcaccactctggcccaagcgccg

SEQ ID NO: 2785480 - DNA, 25 bp, Homo sapien
ccactctggcccaagcgccggaggg

SEQ ID NO: 2785481 - DNA, 25 bp, Homo sapien
accacgtggggatcgccgccacgcg

SEQ ID NO: 2785482 - DNA, 25 bp, Homo sapien
ccgcccgcaccactctggcccaagc

SEQ ID NO: 2785483 - DNA, 25 bp, Homo sapien
taccgaggactgcagtctggagttg

SEQ ID NO: 2785484 - DNA, 25 bp, Homo sapien
accgcgggagcctacagatcccaga

SEQ ID NO: 2785485 - DNA, 25 bp, Homo sapien
agttggagcccttgtcccaaccagg

SEQ ID NO: 2785486 - DNA, 25 bp, Homo sapien
gactgccgggaattggagtcacaga

SEQ ID NO: 2785487 - DNA, 25 bp, Homo sapien
gaaacaattgagctccctgggagtc

SEQ ID NO: 2785488 - DNA, 25 bp, Homo sapien
gactcctggctctttatactgcgca

SEQ ID NO: 2785489 - DNA, 25 bp, Homo sapien
cctgggagtcggagaaaccagacct

SEQ ID NO: 2785490 - DNA, 25 bp, Homo sapien
tccatggtgacagatccggctagtc

SEQ ID NO: 2785491 - DNA, 25 bp, Homo sapien
tagaagccgctttcggcatcagtag

SEQ ID NO: 2785492 - DNA, 25 bp, Homo sapien
tttggagctgcgacgccaaacatgg

SEQ ID NO: 2785493 - DNA, 25 bp, Homo sapien
caaacatggcgtgttcctagaagcc

SEQ ID NO: 2785494 - DNA, 25 bp, Homo sapien
tctcctgtgacgtagttttcgcgcg

SEQ ID NO: 2785495 - DNA, 25 bp, Homo sapien
ttgggcacccgagtcccgagaggcg

SEQ ID NO: 2785496 - DNA, 25 bp, Homo sapien
gatgagggataacggtagcgaggca

SEQ ID NO: 2785497 - DNA, 25 bp, Homo sapien
tcgtgttgggaagtgggagcgggag

SEQ ID NO: 2785498 - DNA, 25 bp, Homo sapien
gagagggaccaaccgacgccacttc

SEQ ID NO: 2785499 - DNA, 25 bp, Homo sapien
ggataggtggtgcaaattttgagat

SEQ ID NO: 2785500 - DNA, 25 bp, Homo sapien
tgttactgcgcacgcgaccttgttg

SEQ ID NO: 2785501 - DNA, 25 bp, Homo sapien
aagtggttatctcgagtataagacc

SEQ ID NO: 2785502 - DNA, 25 bp, Homo sapien
taagaccgttgtgcattgttactgc

SEQ ID NO: 2785503 - DNA, 25 bp, Homo sapien
tgtagcgcggtagtgcccttcagat

SEQ ID NO: 2785504 - DNA, 25 bp, Homo sapien
ttaaacgagctcagttgtagcgcgg

SEQ ID NO: 2785505 - DNA, 25 bp, Homo sapien
ggtagtgcccttcagatttcggtta

SEQ ID NO: 2785506 - DNA, 25 bp, Homo sapien
tcccctccataatttaaacgagctc

SEQ ID NO: 2785507 - DNA, 25 bp, Homo sapien
agaaggaagaatagtttgtagccat

SEQ ID NO: 2785508 - DNA, 25 bp, Homo sapien
gaatagtttgtagccataatgcttt

SEQ ID NO: 2785509 - DNA, 25 bp, Homo sapien
gaaggaagaatagtttgtagccata

SEQ ID NO: 2785510 - DNA, 25 bp, Homo sapien
ggaagaatagtttgtagccataatg

SEQ ID NO: 2785511 - DNA, 25 bp, Homo sapien
tcttccccggtcttcacagaaatta

SEQ ID NO: 2785512 - DNA, 25 bp, Homo sapien
gggcagtttaacagtttgcttgtat

SEQ ID NO: 2785513 - DNA, 25 bp, Homo sapien
tttgactctgggcagtttaacagtt

SEQ ID NO: 2785514 - DNA, 25 bp, Homo sapien
tgtctttggcatattgtatttctct

SEQ ID NO: 2785515 - DNA, 25 bp, Homo sapien
gtaatcttagcatcatgtttgtaaa

SEQ ID NO: 2785516 - DNA, 25 bp, Homo sapien
aaatctcttgagtagggccgggtgc

SEQ ID NO: 2785517 - DNA, 25 bp, Homo sapien
gtaaattttaggcatagtataaatc

SEQ ID NO: 2785518 - DNA, 25 bp, Homo sapien
ttctttatgtaatcttagcatcatg

SEQ ID NO: 2785519 - DNA, 25 bp, Homo sapien
catgcaatgtgacacacaatgtctg

SEQ ID NO: 2785520 - DNA, 25 bp, Homo sapien
tgattgcttgtgtcgccacatgctt

SEQ ID NO: 2785521 - DNA, 25 bp, Homo sapien
tgtatgacgtgcacacatgcaatgt

SEQ ID NO: 2785522 - DNA, 25 bp, Homo sapien
tagttagatgtagaggtttagtcac

SEQ ID NO: 2785523 - DNA, 25 bp, Homo sapien
aaatctgtgtaaggcctgtgttccc

SEQ ID NO: 2785524 - DNA, 25 bp, Homo sapien
tggatcaggtgatagcagataccct

SEQ ID NO: 2785525 - DNA, 25 bp, Homo sapien
gaataagtctgttgggacccttgct

SEQ ID NO: 2785526 - DNA, 25 bp, Homo sapien
gattcccaacattaagtcagacaga

SEQ ID NO: 2785527 - DNA, 25 bp, Homo sapien
gatacagagcacatcgtggcttctg

SEQ ID NO: 2785528 - DNA, 25 bp, Homo sapien
aagtcaccatacatacaacacccgg

SEQ ID NO: 2785529 - DNA, 25 bp, Homo sapien
acactcagcttaggctgtgggtcca

SEQ ID NO: 2785530 - DNA, 25 bp, Homo sapien
aacaagaaggcaacataataatgtt

SEQ ID NO: 2785531 - DNA, 25 bp, Homo sapien
gcagcatgacatgtcgatactcaaa

SEQ ID NO: 2785532 - DNA, 25 bp, Homo sapien
cgccggaacagcaagatgtgaggtt

SEQ ID NO: 2785533 - DNA, 25 bp, Homo sapien
ttcagattcagacatcagatgggtt

SEQ ID NO: 2785534 - DNA, 25 bp, Homo sapien
gatactcaaactcctcgtcatcgta

SEQ ID NO: 2785535 - DNA, 25 bp, Homo sapien
ttcagcatgcttagtctccacaacg

SEQ ID NO: 2785536 - DNA, 25 bp, Homo sapien
gcttagtctccacaacgttcagttc

SEQ ID NO: 2785537 - DNA, 25 bp, Homo sapien
tttccacctcaaattcagcatgctt

SEQ ID NO: 2785538 - DNA, 25 bp, Homo sapien
catgcttagtctccacaacgttcag

SEQ ID NO: 2785539 - DNA, 25 bp, Homo sapien
gaatggacaacattacccagcctga

SEQ ID NO: 2785540 - DNA, 25 bp, Homo sapien
ggttgatcgaatggacaacattacc

SEQ ID NO: 2785541 - DNA, 25 bp, Homo sapien
tgaaatgtgggttgatcgaatggac

SEQ ID NO: 2785542 - DNA, 25 bp, Homo sapien
aatatgattgaaatgtgggttgatc

SEQ ID NO: 2785543 - DNA, 25 bp, Homo sapien
gtgcgtaagcacatttattgcccaa

SEQ ID NO: 2785544 - DNA, 25 bp, Homo sapien
ttagttccatcagtgacttttaagg

SEQ ID NO: 2785545 - DNA, 25 bp, Homo sapien
gaagtcatgttccaagcaggcctcg

SEQ ID NO: 2785546 - DNA, 25 bp, Homo sapien
tgtactcacattgttgcactccaac

SEQ ID NO: 2785547 - DNA, 25 bp, Homo sapien
cattcctcccttgtgatcatgctca

SEQ ID NO: 2785548 - DNA, 25 bp, Homo sapien
agcatggccttacagttggacttga

SEQ ID NO: 2785549 - DNA, 25 bp, Homo sapien
caaatctgtatgcacttccacttca

SEQ ID NO: 2785550 - DNA, 25 bp, Homo sapien
cactgaggcctcgaatctgctttgc

SEQ ID NO: 2785551 - DNA, 25 bp, Homo sapien
tgtgtgcctccaagggagtgtgtac

SEQ ID NO: 2785552 - DNA, 25 bp, Homo sapien
ctgtgtgcctccaagggagtgtgta

SEQ ID NO: 2785553 - DNA, 25 bp, Homo sapien
aggtgtctccttggaataaagtact

SEQ ID NO: 2785554 - DNA, 25 bp, Homo sapien
tctcaactgggtactattttgccct

SEQ ID NO: 2785555 - DNA, 25 bp, Homo sapien
cttaacaagagttgatttcatcccc

SEQ ID NO: 2785556 - DNA, 25 bp, Homo sapien
tactgagctgcaagaaacctgatga

SEQ ID NO: 2785557 - DNA, 25 bp, Homo sapien
cagtatgtaactgcgggaaacccac

SEQ ID NO: 2785558 - DNA, 25 bp, Homo sapien
tactgtagtaccacgtgggagacct

SEQ ID NO: 2785559 - DNA, 25 bp, Homo sapien
gatccagcagtaatccccagggtac

SEQ ID NO: 2785560 - DNA, 25 bp, Homo sapien
gacagtcccacgtggctatgacaga

SEQ ID NO: 2785561 - DNA, 25 bp, Homo sapien
ttctgagatcgccaagccctctgtc

SEQ ID NO: 2785562 - DNA, 25 bp, Homo sapien
cagccattgatgtcatcccttttgg

SEQ ID NO: 2785563 - DNA, 25 bp, Homo sapien
gtgtcttctgagatcgccaagccct

SEQ ID NO: 2785564 - DNA, 25 bp, Homo sapien
ccctctgtcctgctaaggcagccat

SEQ ID NO: 2785565 - DNA, 25 bp, Homo sapien
taatgactggagtattctgagccat

SEQ ID NO: 2785566 - DNA, 25 bp, Homo sapien
cctgactggagagtttgaatggaaa

SEQ ID NO: 2785567 - DNA, 25 bp, Homo sapien
cacctctgaagttttgatctcctga

SEQ ID NO: 2785568 - DNA, 25 bp, Homo sapien
gggctcatctgacatcaagggctga

SEQ ID NO: 2785569 - DNA, 25 bp, Homo sapien
cactctctgtgctggaccagttgtt

SEQ ID NO: 2785570 - DNA, 25 bp, Homo sapien
tgtgctggaccagttgttagagatt

SEQ ID NO: 2785571 - DNA, 25 bp, Homo sapien
ttgttagagatttcagttaatgttc

SEQ ID NO: 2785572 - DNA, 25 bp, Homo sapien
agttgttagagatttcagttaatgt

SEQ ID NO: 2785573 - DNA, 25 bp, Homo sapien
gacccctttgttcaccctcatcctg

SEQ ID NO: 2785574 - DNA, 25 bp, Homo sapien
agacagaggttgacccctttgttca

SEQ ID NO: 2785575 - DNA, 25 bp, Homo sapien
gacagaggttgacccctttgttcac

SEQ ID NO: 2785576 - DNA, 25 bp, Homo sapien
gttgacccctttgttcaccctcatc

SEQ ID NO: 2785577 - DNA, 25 bp, Homo sapien
caccatggatggttgttgtgttacc

SEQ ID NO: 2785578 - DNA, 25 bp, Homo sapien
gatgctcatgttccattgttgtggg

SEQ ID NO: 2785579 - DNA, 25 bp, Homo sapien
ttcttggattactgtgtcaccatgg

SEQ ID NO: 2785580 - DNA, 25 bp, Homo sapien
gtgttaccacctcccaagcagaatg

SEQ ID NO: 2785581 - DNA, 25 bp, Homo sapien
ggattattactacccttcacaggaa

SEQ ID NO: 2785582 - DNA, 25 bp, Homo sapien
aacaggttcagtggagtcaagtcac

SEQ ID NO: 2785583 - DNA, 25 bp, Homo sapien
ggtagcaagcagaatatcccgtcct

SEQ ID NO: 2785584 - DNA, 25 bp, Homo sapien
gttttccaggcttgcgttagctcca

SEQ ID NO: 2785585 - DNA, 25 bp, Homo sapien
gtgtacttggagctggcaccaaatg

SEQ ID NO: 2785586 - DNA, 25 bp, Homo sapien
gtttgtgtacttggagctggcacca

SEQ ID NO: 2785587 - DNA, 25 bp, Homo sapien
tgtacttggagctggcaccaaatgc

SEQ ID NO: 2785588 - DNA, 25 bp, Homo sapien
aatccatcagggctacttcctggtg

SEQ ID NO: 2785589 - DNA, 25 bp, Homo sapien
gtggcagcatgacacttgcatgtct

SEQ ID NO: 2785590 - DNA, 25 bp, Homo sapien
tcctcttgatttcaatttccacact

SEQ ID NO: 2785591 - DNA, 25 bp, Homo sapien
gacacttgcatgtcttctgaaggaa

SEQ ID NO: 2785592 - DNA, 25 bp, Homo sapien
cctgcctgggaagtgcggatgcatc

SEQ ID NO: 2785593 - DNA, 25 bp, Homo sapien
ctgtttctggaagagcccccacttg

SEQ ID NO: 2785594 - DNA, 25 bp, Homo sapien
actctctcagatggtgcttttgcca

SEQ ID NO: 2785595 - DNA, 25 bp, Homo sapien
tctgattgacatttatcgccttccc

SEQ ID NO: 2785596 - DNA, 25 bp, Homo sapien
cctcgactctgcttagatctctgaa

SEQ ID NO: 2785597 - DNA, 25 bp, Homo sapien
cctcctcccctcgactctgcttaga

SEQ ID NO: 2785598 - DNA, 25 bp, Homo sapien
tctgcttagatctctgaacatgaat

SEQ ID NO: 2785599 - DNA, 25 bp, Homo sapien
tcctcccctcgactctgcttagatc

SEQ ID NO: 2785600 - DNA, 25 bp, Homo sapien
tccattcgttctgggggcattgaaa

SEQ ID NO: 2785601 - DNA, 25 bp, Homo sapien
atgtgaaagatatgtcaacagtcca

SEQ ID NO: 2785602 - DNA, 25 bp, Homo sapien
ccgtggggtccctgatgtgaaagat

SEQ ID NO: 2785603 - DNA, 25 bp, Homo sapien
agatatgtcaacagtccattcgttc

SEQ ID NO: 2785604 - DNA, 25 bp, Homo sapien
gagccacattcactcaggcccagct

SEQ ID NO: 2785605 - DNA, 25 bp, Homo sapien
aaagcaccttctgccagagccacat

SEQ ID NO: 2785606 - DNA, 25 bp, Homo sapien
agaaagcaccttctgccagagccac

SEQ ID NO: 2785607 - DNA, 25 bp, Homo sapien
ctggaagaaagcaccttctgccaga

SEQ ID NO: 2785608 - DNA, 25 bp, Homo sapien
cctcatgcacggcacaggctgaatc

SEQ ID NO: 2785609 - DNA, 25 bp, Homo sapien
ctcaggctggcctctagaggcacac

SEQ ID NO: 2785610 - DNA, 25 bp, Homo sapien
acgtgttccctcatgcacggcacag

SEQ ID NO: 2785611 - DNA, 25 bp, Homo sapien
agaggcacacctcggcaccagggct

SEQ ID NO: 2785612 - DNA, 25 bp, Homo sapien
tctggtcaggccatctcttagccat

SEQ ID NO: 2785613 - DNA, 25 bp, Homo sapien
tgaagatgtttctggtcaggccatc

SEQ ID NO: 2785614 - DNA, 25 bp, Homo sapien
gatgtttctggtcaggccatctctt

SEQ ID NO: 2785615 - DNA, 25 bp, Homo sapien
tgtttctggtcaggccatctcttag

SEQ ID NO: 2785616 - DNA, 25 bp, Homo sapien
tgaactgtggaggacccatatttgg

SEQ ID NO: 2785617 - DNA, 25 bp, Homo sapien
tcaaagccactagccacattttcat

SEQ ID NO: 2785618 - DNA, 25 bp, Homo sapien
tctagaagtgcctgattcaaagcca

SEQ ID NO: 2785619 - DNA, 25 bp, Homo sapien
gagaaaaaaggcacgatgacaacga

SEQ ID NO: 2785620 - DNA, 25 bp, Homo sapien
gtggctggcattcaagtgttagcaa

SEQ ID NO: 2785621 - DNA, 25 bp, Homo sapien
cctttgttggacacagtcagagtca

SEQ ID NO: 2785622 - DNA, 25 bp, Homo sapien
tctgtcgggtacatgagtggttcct

SEQ ID NO: 2785623 - DNA, 25 bp, Homo sapien
caagcaaggccccagcttgagggat

SEQ ID NO: 2785624 - DNA, 25 bp, Homo sapien
ttagaagggctgctgagaattgtga

SEQ ID NO: 2785625 - DNA, 25 bp, Homo sapien
taataaatcatgtagctgtatatcc

SEQ ID NO: 2785626 - DNA, 25 bp, Homo sapien
ctgagaattgtgacctgctgtgtct

SEQ ID NO: 2785627 - DNA, 25 bp, Homo sapien
tgtagctgtatatcctcattcactc

SEQ ID NO: 2785628 - DNA, 25 bp, Homo sapien
gcctcagtgccagtatgttcaaggg

SEQ ID NO: 2785629 - DNA, 25 bp, Homo sapien
cctgcatggtggtgtacgtcactca

SEQ ID NO: 2785630 - DNA, 25 bp, Homo sapien
tagcctcagtgccagtatgttcaag

SEQ ID NO: 2785631 - DNA, 25 bp, Homo sapien
acaaacccttcttttgctagtcctg

SEQ ID NO: 2785632 - DNA, 25 bp, Homo sapien
gttctgtggctaccttctaataaag

SEQ ID NO: 2785633 - DNA, 25 bp, Homo sapien
taaaggcacctcgtttatgttgggc

SEQ ID NO: 2785634 - DNA, 25 bp, Homo sapien
ggatccaacagctgtgttctgcctg

SEQ ID NO: 2785635 - DNA, 25 bp, Homo sapien
gtttatgttgggcagccagtttcca

SEQ ID NO: 2785636 - DNA, 25 bp, Homo sapien
ttggaatcaatcgcttgttggcttt

SEQ ID NO: 2785637 - DNA, 25 bp, Homo sapien
tggaatcaatcgcttgttggcttta

SEQ ID NO: 2785638 - DNA, 25 bp, Homo sapien
aattataagtggatccaacaatcat

SEQ ID NO: 2785639 - DNA, 25 bp, Homo sapien
gtggatccaacaatcatattattga

SEQ ID NO: 2785640 - DNA, 25 bp, Homo sapien
gaaagaaacaagaggtaattcacat

SEQ ID NO: 2785641 - DNA, 25 bp, Homo sapien
gaaacaagaggtaattcacataaaa

SEQ ID NO: 2785642 - DNA, 25 bp, Homo sapien
ttaaagggtatacaatgaggcagct

SEQ ID NO: 2785643 - DNA, 25 bp, Homo sapien
caggacgtcctgtctcggattttag

SEQ ID NO: 2785644 - DNA, 25 bp, Homo sapien
atgctgagggaagctcaagccattc

SEQ ID NO: 2785645 - DNA, 25 bp, Homo sapien
cccggcctgtagagtcagggtggag

SEQ ID NO: 2785646 - DNA, 25 bp, Homo sapien
gagccccaaagcttccacgagcttt

SEQ ID NO: 2785647 - DNA, 25 bp, Homo sapien
agatgtatcactttattttccagca

SEQ ID NO: 2785648 - DNA, 25 bp, Homo sapien
ttttccagcacgtgacagtcacatg

SEQ ID NO: 2785649 - DNA, 25 bp, Homo sapien
ccaaagcttccacgagctttcctgg

SEQ ID NO: 2785650 - DNA, 25 bp, Homo sapien
aatattaaagctttctccacagcca

SEQ ID NO: 2785651 - DNA, 25 bp, Homo sapien
atattaaagctttctccacagccac

SEQ ID NO: 2785652 - DNA, 25 bp, Homo sapien
tccctttgatgtttgggttattgaa

SEQ ID NO: 2785653 - DNA, 25 bp, Homo sapien
ttgaacacaaactcactggataatt

SEQ ID NO: 2785654 - DNA, 25 bp, Homo sapien
ccatttctgttcctaaaagtgttag

SEQ ID NO: 2785655 - DNA, 25 bp, Homo sapien
tagtccatttctgttcctaaaagtg

SEQ ID NO: 2785656 - DNA, 25 bp, Homo sapien
ctttcttttcgatgaatactctgac

SEQ ID NO: 2785657 - DNA, 25 bp, Homo sapien
tgctttcttttcgatgaatactctg

SEQ ID NO: 2785658 - DNA, 25 bp, Homo sapien
tgtgctttcttttcgatgaatactc

SEQ ID NO: 2785659 - DNA, 25 bp, Homo sapien
ctgtgctttcttttcgatgaatact

SEQ ID NO: 2785660 - DNA, 25 bp, Homo sapien
gccattacagcccctggttcggaca

SEQ ID NO: 2785661 - DNA, 25 bp, Homo sapien
ttacagcccctggttcggacaccaa

SEQ ID NO: 2785662 - DNA, 25 bp, Homo sapien
attacagcccctggttcggacacca

SEQ ID NO: 2785663 - DNA, 25 bp, Homo sapien
aggccattacagcccctggttcgga

SEQ ID NO: 2785664 - DNA, 25 bp, Homo sapien
tggggccggaggttggctgcctcag

SEQ ID NO: 2785665 - DNA, 25 bp, Homo sapien
ggcagcattggacgacatcgtagtt

SEQ ID NO: 2785666 - DNA, 25 bp, Homo sapien
cagcattggacgacatcgtagtttc

SEQ ID NO: 2785667 - DNA, 25 bp, Homo sapien
tgggggcagcattggacgacatcgt

SEQ ID NO: 2785668 - DNA, 25 bp, Homo sapien
gggcagcattggacgacatcgtagt

SEQ ID NO: 2785669 - DNA, 25 bp, Homo sapien
ttaagggagcctgatataaggtgct

SEQ ID NO: 2785670 - DNA, 25 bp, Homo sapien
tgttatttgtgtcccaaggtttgaa

SEQ ID NO: 2785671 - DNA, 25 bp, Homo sapien
ataaggtgctccgtcagtgtcatct

SEQ ID NO: 2785672 - DNA, 25 bp, Homo sapien
atcgccttgcctctgctaatgttat

SEQ ID NO: 2785673 - DNA, 25 bp, Homo sapien
gtggggtaaggccagcatcacttac

SEQ ID NO: 2785674 - DNA, 25 bp, Homo sapien
gtgggtggggtaaggccagcatcac

SEQ ID NO: 2785675 - DNA, 25 bp, Homo sapien
gtgagtgggtggggtaaggccagca

SEQ ID NO: 2785676 - DNA, 25 bp, Homo sapien
ggagtgagtgggtggggtaaggcca

SEQ ID NO: 2785677 - DNA, 25 bp, Homo sapien
tgtgggctattctgggactgccttc

SEQ ID NO: 2785678 - DNA, 25 bp, Homo sapien
ttaatgtgggctattctgggactgc

SEQ ID NO: 2785679 - DNA, 25 bp, Homo sapien
tgggtttccgggctgcttaatgtgg

SEQ ID NO: 2785680 - DNA, 25 bp, Homo sapien
tttccgggctgcttaatgtgggcta

SEQ ID NO: 2785681 - DNA, 25 bp, Homo sapien
gagtatataatgtctctgctggatt

SEQ ID NO: 2785682 - DNA, 25 bp, Homo sapien
tctctgctggattacccaagaccgt

SEQ ID NO: 2785683 - DNA, 25 bp, Homo sapien
caagaccgttctgttcacaaagagc

SEQ ID NO: 2785684 - DNA, 25 bp, Homo sapien
ggattacccaagaccgttctgttca

SEQ ID NO: 2785685 - DNA, 25 bp, Homo sapien
ctttgcacggaaacctttgtcaatc

SEQ ID NO: 2785686 - DNA, 25 bp, Homo sapien
tctttgcacggaaacctttgtcaat

SEQ ID NO: 2785687 - DNA, 25 bp, Homo sapien
ttgcacggaaacctttgtcaatctt

SEQ ID NO: 2785688 - DNA, 25 bp, Homo sapien
tctctttgcacggaaacctttgtca

SEQ ID NO: 2785689 - DNA, 25 bp, Homo sapien
gacagttccaactcctttatcgtct

SEQ ID NO: 2785690 - DNA, 25 bp, Homo sapien
ttgtcttcccagctacatccctctg

SEQ ID NO: 2785691 - DNA, 25 bp, Homo sapien
ctgacagttccaactcctttatcgt

SEQ ID NO: 2785692 - DNA, 25 bp, Homo sapien
cttgtcttcccagctacatccctct

SEQ ID NO: 2785693 - DNA, 25 bp, Homo sapien
cacacaccgatgaacggtctttaaa

SEQ ID NO: 2785694 - DNA, 25 bp, Homo sapien
cttcctcacacaccgatgaacggtc

SEQ ID NO: 2785695 - DNA, 25 bp, Homo sapien
gatgaacggtctttaaatagatcac

SEQ ID NO: 2785696 - DNA, 25 bp, Homo sapien
tccaccaaccatttcagctttgttt

SEQ ID NO: 2785697 - DNA, 25 bp, Homo sapien
gctgacatgtgtcatctggagtgtc

SEQ ID NO: 2785698 - DNA, 25 bp, Homo sapien
agtgaccagaaaattgaagacgttc

SEQ ID NO: 2785699 - DNA, 25 bp, Homo sapien
acgttcagaaagaggagccccagga

SEQ ID NO: 2785700 - DNA, 25 bp, Homo sapien
gaggatctgctttgtcagattgccc

SEQ ID NO: 2785701 - DNA, 25 bp, Homo sapien
actctgtagaaaccctacaggccag

SEQ ID NO: 2785702 - DNA, 25 bp, Homo sapien
gatcactctgtagaaaccctacagg

SEQ ID NO: 2785703 - DNA, 25 bp, Homo sapien
tcactctgtagaaaccctacaggcc

SEQ ID NO: 2785704 - DNA, 25 bp, Homo sapien
ggatcactctgtagaaaccctacag

SEQ ID NO: 2785705 - DNA, 25 bp, Homo sapien
ggagtgttcttccatgaggaaacca

SEQ ID NO: 2785706 - DNA, 25 bp, Homo sapien
aagatagcctatttccaagagttgg

SEQ ID NO: 2785707 - DNA, 25 bp, Homo sapien
tccttggaatagtacaggctctgga

SEQ ID NO: 2785708 - DNA, 25 bp, Homo sapien
aatgcttggtgtggttgctgcatac

SEQ ID NO: 2785709 - DNA, 25 bp, Homo sapien
tagcaggggatttgcagatactacc

SEQ ID NO: 2785710 - DNA, 25 bp, Homo sapien
gcaggggatttgcagatactaccat

SEQ ID NO: 2785711 - DNA, 25 bp, Homo sapien
tttagcaggggatttgcagatacta

SEQ ID NO: 2785712 - DNA, 25 bp, Homo sapien
tttttagcaggggatttgcagatac

SEQ ID NO: 2785713 - DNA, 25 bp, Homo sapien
ggacagctcagggagtggtcctcac

SEQ ID NO: 2785714 - DNA, 25 bp, Homo sapien
gaggatagtggacagctcagggagt

SEQ ID NO: 2785715 - DNA, 25 bp, Homo sapien
cagctcagggagtggtcctcacatt

SEQ ID NO: 2785716 - DNA, 25 bp, Homo sapien
tcagggagtggtcctcacatttcat

SEQ ID NO: 2785717 - DNA, 25 bp, Homo sapien
ttaagccggcatcagcaaaaccagg

SEQ ID NO: 2785718 - DNA, 25 bp, Homo sapien
caaggtcattgaactaaatagggca

SEQ ID NO: 2785719 - DNA, 25 bp, Homo sapien
tagggcagacctggaattcgggact

SEQ ID NO: 2785720 - DNA, 25 bp, Homo sapien
tcctttcagtggaaagcagggaagc

SEQ ID NO: 2785721 - DNA, 25 bp, Homo sapien
ttcggctttttagcccatagaagag

SEQ ID NO: 2785722 - DNA, 25 bp, Homo sapien
gagtatgggcggttcctcttcggct

SEQ ID NO: 2785723 - DNA, 25 bp, Homo sapien
gctgtaggaattgtaaaaaggaaga

SEQ ID NO: 2785724 - DNA, 25 bp, Homo sapien
agaagagcttgttggtcatctgcac

SEQ ID NO: 2785725 - DNA, 25 bp, Homo sapien
cttccagttagagtcagtgccagga

SEQ ID NO: 2785726 - DNA, 25 bp, Homo sapien
tctcttgagccgatcattcaacttc

SEQ ID NO: 2785727 - DNA, 25 bp, Homo sapien
cacccagcagcacacgtgtcagctt

SEQ ID NO: 2785728 - DNA, 25 bp, Homo sapien
caattttctcttgagccgatcattc

SEQ ID NO: 2785729 - DNA, 25 bp, Homo sapien
gccctgcactttgttccatgtagaa

SEQ ID NO: 2785730 - DNA, 25 bp, Homo sapien
ctcccactgggcatgttcacatctg

SEQ ID NO: 2785731 - DNA, 25 bp, Homo sapien
ttcacatctgccaggcaacactgct

SEQ ID NO: 2785732 - DNA, 25 bp, Homo sapien
ctgctgtaccccactggtgccaggc

SEQ ID NO: 2785733 - DNA, 25 bp, Homo sapien
gaccggatgtgtagacgggcatcat

SEQ ID NO: 2785734 - DNA, 25 bp, Homo sapien
aagacatcttccgagttcactggcc

SEQ ID NO: 2785735 - DNA, 25 bp, Homo sapien
tctggactagactaagggaccggat

SEQ ID NO: 2785736 - DNA, 25 bp, Homo sapien
cctgctaagacggattggctgatat

SEQ ID NO: 2785737 - DNA, 25 bp, Homo sapien
taggttctggtctttccagccgtgg

SEQ ID NO: 2785738 - DNA, 25 bp, Homo sapien
tgggattgttgcctgaattactgtg

SEQ ID NO: 2785739 - DNA, 25 bp, Homo sapien
aattactgtgtagtctgattctagg

SEQ ID NO: 2785740 - DNA, 25 bp, Homo sapien
tttcatccacttcttgaactgggat

SEQ ID NO: 2785741 - DNA, 25 bp, Homo sapien
cattctgtgctgcactagttgttgt

SEQ ID NO: 2785742 - DNA, 25 bp, Homo sapien
aagcattctgtgctgcactagttgt

SEQ ID NO: 2785743 - DNA, 25 bp, Homo sapien
ttgttgtacttgaggcagcacttgc

SEQ ID NO: 2785744 - DNA, 25 bp, Homo sapien
tgttgtacttgaggcagcacttgca

SEQ ID NO: 2785745 - DNA, 25 bp, Homo sapien
aaggccccatggactgatttttcag

SEQ ID NO: 2785746 - DNA, 25 bp, Homo sapien
tttctggtggttagggaaatgccca

SEQ ID NO: 2785747 - DNA, 25 bp, Homo sapien
aaggtaatggccactctcagtcttg

SEQ ID NO: 2785748 - DNA, 25 bp, Homo sapien
cagtatgtgctccatggagatattg

SEQ ID NO: 2785749 - DNA, 25 bp, Homo sapien
ctggacacaacctgattgcacttca

SEQ ID NO: 2785750 - DNA, 25 bp, Homo sapien
tcactgccgtagaacaaattctgtg

SEQ ID NO: 2785751 - DNA, 25 bp, Homo sapien
caagatctcatgagcttcacctgga

SEQ ID NO: 2785752 - DNA, 25 bp, Homo sapien
tgcacttcatctcgggctggcgtct

SEQ ID NO: 2785753 - DNA, 25 bp, Homo sapien
ctcatcagtccctccaaaccttaca

SEQ ID NO: 2785754 - DNA, 25 bp, Homo sapien
catcagtccctccaaaccttacaag

SEQ ID NO: 2785755 - DNA, 25 bp, Homo sapien
cctccaaaccttacaagctgagtca

SEQ ID NO: 2785756 - DNA, 25 bp, Homo sapien
tcagtccctccaaaccttacaagct

SEQ ID NO: 2785757 - DNA, 25 bp, Homo sapien
ccccactggactttatgggtgaaca

SEQ ID NO: 2785758 - DNA, 25 bp, Homo sapien
gcagacatcttcaattcctacaagt

SEQ ID NO: 2785759 - DNA, 25 bp, Homo sapien
tggactttatgggtgaacattcacc

SEQ ID NO: 2785760 - DNA, 25 bp, Homo sapien
cagacatcttcaattcctacaagtg

SEQ ID NO: 2785761 - DNA, 25 bp, Homo sapien
gacagccaaggacgtaaccataagg

SEQ ID NO: 2785762 - DNA, 25 bp, Homo sapien
tggaatgtaaggatgctggagcact

SEQ ID NO: 2785763 - DNA, 25 bp, Homo sapien
tgttcggccaaatccactgaggttg

SEQ ID NO: 2785764 - DNA, 25 bp, Homo sapien
cttatagtgtctagtgaggacagcc

SEQ ID NO: 2785765 - DNA, 25 bp, Homo sapien
tgggtcccaatgatcctaggaccct

SEQ ID NO: 2785766 - DNA, 25 bp, Homo sapien
ttttccttccataaactgagtacat

SEQ ID NO: 2785767 - DNA, 25 bp, Homo sapien
cttttccttccataaactgagtaca

SEQ ID NO: 2785768 - DNA, 25 bp, Homo sapien
gggagaataatcaccacatccttgc

SEQ ID NO: 2785769 - DNA, 25 bp, Homo sapien
aatagtccatgccaaacagttctga

SEQ ID NO: 2785770 - DNA, 25 bp, Homo sapien
cattgctgtggctctccgtgaaaga

SEQ ID NO: 2785771 - DNA, 25 bp, Homo sapien
gacgtgagagggaatcaacattgct

SEQ ID NO: 2785772 - DNA, 25 bp, Homo sapien
cactctcttcgggtagagagaaagg

SEQ ID NO: 2785773 - DNA, 25 bp, Homo sapien
actctcttcgggtagagagaaaggc

SEQ ID NO: 2785774 - DNA, 25 bp, Homo sapien
ttgctgattttttctgagtctagtt

SEQ ID NO: 2785775 - DNA, 25 bp, Homo sapien
ctgattttttctgagtctagtttcc

SEQ ID NO: 2785776 - DNA, 25 bp, Homo sapien
tagagattgctgattttttctgagt

SEQ ID NO: 2785777 - DNA, 25 bp, Homo sapien
ttagagattgctgattttttctgag

SEQ ID NO: 2785778 - DNA, 25 bp, Homo sapien
acctcgattgttatatctggctttt

SEQ ID NO: 2785779 - DNA, 25 bp, Homo sapien
tccctgtaattccacctcgattgtt

SEQ ID NO: 2785780 - DNA, 25 bp, Homo sapien
atccctgtaattccacctcgattgt

SEQ ID NO: 2785781 - DNA, 25 bp, Homo sapien
gattgttatatctggctttttgagc

SEQ ID NO: 2785782 - DNA, 25 bp, Homo sapien
ctcgctggctctcgtcttcattatg

SEQ ID NO: 2785783 - DNA, 25 bp, Homo sapien
gctctcgctggctctcgtcttcatt

SEQ ID NO: 2785784 - DNA, 25 bp, Homo sapien
agctctcgctggctctcgtcttcat

SEQ ID NO: 2785785 - DNA, 25 bp, Homo sapien
caaagggcatgagctctcgctggct

SEQ ID NO: 2785786 - DNA, 25 bp, Homo sapien
ccatattcagctaaagatgcatgtt

SEQ ID NO: 2785787 - DNA, 25 bp, Homo sapien
tgtaagccagggacataatctgggt

SEQ ID NO: 2785788 - DNA, 25 bp, Homo sapien
tagcttttaccttgagttctcctcc

SEQ ID NO: 2785789 - DNA, 25 bp, Homo sapien
gagttgtactaataagatgtcacca

SEQ ID NO: 2785790 - DNA, 25 bp, Homo sapien
aaaaattaggcttcagaagaacaat

SEQ ID NO: 2785791 - DNA, 25 bp, Homo sapien
aaaattaggcttcagaagaacaatg

SEQ ID NO: 2785792 - DNA, 25 bp, Homo sapien
cgtgatatccctacttatactctcc

SEQ ID NO: 2785793 - DNA, 25 bp, Homo sapien
gtgatatccctacttatactctcca

SEQ ID NO: 2785794 - DNA, 25 bp, Homo sapien
tgatatccctacttatactctccat

SEQ ID NO: 2785795 - DNA, 25 bp, Homo sapien
tgaacactatggtggaggcacacac

SEQ ID NO: 2785796 - DNA, 25 bp, Homo sapien
aatgaacactatggtggaggcacac

SEQ ID NO: 2785797 - DNA, 25 bp, Homo sapien
ttagaaatgaacactatggtggagg

SEQ ID NO: 2785798 - DNA, 25 bp, Homo sapien
gaaatgaacactatggtggaggcac

SEQ ID NO: 2785799 - DNA, 25 bp, Homo sapien
ttagattgacccaattcacaaatgc

SEQ ID NO: 2785800 - DNA, 25 bp, Homo sapien
accagcagcggtagccttgggcctt

SEQ ID NO: 2785801 - DNA, 25 bp, Homo sapien
aaagagtggccttagtctgatcaac

SEQ ID NO: 2785802 - DNA, 25 bp, Homo sapien
tatctggaagacctgccatctgtgc

SEQ ID NO: 2785803 - DNA, 25 bp, Homo sapien
tcacagtggtttctctcgaggctgc

SEQ ID NO: 2785804 - DNA, 25 bp, Homo sapien
gcataggaagcaccgtctgaattga

SEQ ID NO: 2785805 - DNA, 25 bp, Homo sapien
cctgcaatgcaggtactcagtgctg

SEQ ID NO: 2785806 - DNA, 25 bp, Homo sapien
tgaggttcccatacaatcttttgat

SEQ ID NO: 2785807 - DNA, 25 bp, Homo sapien
gctgtgttgtcatcctttttctcca

SEQ ID NO: 2785808 - DNA, 25 bp, Homo sapien
cagggtagtccagctggtatgccca

SEQ ID NO: 2785809 - DNA, 25 bp, Homo sapien
gggttctgtcccagcatagggcaca

SEQ ID NO: 2785810 - DNA, 25 bp, Homo sapien
cagataactactaggcccttggtgg

SEQ ID NO: 2785811 - DNA, 25 bp, Homo sapien
tactttcattgtggcccttgttggc

SEQ ID NO: 2785812 - DNA, 25 bp, Homo sapien
aaattctgagtctgtttcaaatcct

SEQ ID NO: 2785813 - DNA, 25 bp, Homo sapien
tacagacagatggactatatgtata

SEQ ID NO: 2785814 - DNA, 25 bp, Homo sapien
gaaaccaattaagctcagaaattct

SEQ ID NO: 2785815 - DNA, 25 bp, Homo sapien
caactgttagcagcccagagaacag

SEQ ID NO: 2785816 - DNA, 25 bp, Homo sapien
agacagaagtttgaaatttcgtcct

SEQ ID NO: 2785817 - DNA, 25 bp, Homo sapien
tcaactgttagcagcccagagaaca

SEQ ID NO: 2785818 - DNA, 25 bp, Homo sapien
cagagaacagacagaagtttgaaat

SEQ ID NO: 2785819 - DNA, 25 bp, Homo sapien
tttctggaataaaattctcactaga

SEQ ID NO: 2785820 - DNA, 25 bp, Homo sapien
ctcactagacacatcttctttacag

SEQ ID NO: 2785821 - DNA, 25 bp, Homo sapien
ctccactaggattttgaagtgaatt

SEQ ID NO: 2785822 - DNA, 25 bp, Homo sapien
taaaattctcactagacacatcttc

SEQ ID NO: 2785823 - DNA, 25 bp, Homo sapien
tcacaagtgaacttgtaggcatcta

SEQ ID NO: 2785824 - DNA, 25 bp, Homo sapien
caagtgaacttgtaggcatctactc

SEQ ID NO: 2785825 - DNA, 25 bp, Homo sapien
tgaacttgtaggcatctactctaat

SEQ ID NO: 2785826 - DNA, 25 bp, Homo sapien
gtaggcatctactctaattaaataa

SEQ ID NO: 2785827 - DNA, 25 bp, Homo sapien
gaggccattgcaggattattgattg

SEQ ID NO: 2785828 - DNA, 25 bp, Homo sapien
aagcctgactttggcctatcttggt

SEQ ID NO: 2785829 - DNA, 25 bp, Homo sapien
aacttagtgtttgttgcaggaagcc

SEQ ID NO: 2785830 - DNA, 25 bp, Homo sapien
tttaaagtaagagacttgtgactcc

SEQ ID NO: 2785831 - DNA, 25 bp, Homo sapien
aaggtggctgcgatgggccagggcc

SEQ ID NO: 2785832 - DNA, 25 bp, Homo sapien
aaaggtggctgcgatgggccagggc

SEQ ID NO: 2785833 - DNA, 25 bp, Homo sapien
gcttggtagaatgttcatgatggaa

SEQ ID NO: 2785834 - DNA, 25 bp, Homo sapien
gaatggtgccacgtatgagttctcc

SEQ ID NO: 2785835 - DNA, 25 bp, Homo sapien
ttttataggaatggtgccacgtatg

SEQ ID NO: 2785836 - DNA, 25 bp, Homo sapien
cgtatgagttctcccaaagcggaac

SEQ ID NO: 2785837 - DNA, 25 bp, Homo sapien
gaagcatctggaacaacttggaccc

SEQ ID NO: 2785838 - DNA, 25 bp, Homo sapien
ctttctgtggaaacgcaaactggaa

SEQ ID NO: 2785839 - DNA, 25 bp, Homo sapien
gcaaaactgccccagattagctcta

SEQ ID NO: 2785840 - DNA, 25 bp, Homo sapien
gagtgttgtactcatcctgaagaga

SEQ ID NO: 2785841 - DNA, 25 bp, Homo sapien
tcttctcaatgccaggatggtcaag

SEQ ID NO: 2785842 - DNA, 25 bp, Homo sapien
tcttgagcagaagatcaattctgat

SEQ ID NO: 2785843 - DNA, 25 bp, Homo sapien
gatggtcaagatatgcctgaggctt

SEQ ID NO: 2785844 - DNA, 25 bp, Homo sapien
tgatgacaagtttagcaccagctaa

SEQ ID NO: 2785845 - DNA, 25 bp, Homo sapien
attttcatagtcaggttgcaattct

SEQ ID NO: 2785846 - DNA, 25 bp, Homo sapien
taatgttgacttatgaatgtgaagg

SEQ ID NO: 2785847 - DNA, 25 bp, Homo sapien
tgcaattctaatgttgacttatgaa

SEQ ID NO: 2785848 - DNA, 25 bp, Homo sapien
cttatgaatgtgaaggtcttgcaga

SEQ ID NO: 2785849 - DNA, 25 bp, Homo sapien
cctgctctggagttcgtgggctcat

SEQ ID NO: 2785850 - DNA, 25 bp, Homo sapien
gcaactgttagcattcagggttagc

SEQ ID NO: 2785851 - DNA, 25 bp, Homo sapien
acctgctctggagttcgtgggctca

SEQ ID NO: 2785852 - DNA, 25 bp, Homo sapien
gaagcaactgttagcattcagggtt

SEQ ID NO: 2785853 - DNA, 25 bp, Homo sapien
ttctgctcctattctccagcacatt

SEQ ID NO: 2785854 - DNA, 25 bp, Homo sapien
cttctgctcctattctccagcacat

SEQ ID NO: 2785855 - DNA, 25 bp, Homo sapien
gtttctggtgtcctggttgccatct

SEQ ID NO: 2785856 - DNA, 25 bp, Homo sapien
ggtgtcctggttgccatcttctgct

SEQ ID NO: 2785857 - DNA, 25 bp, Homo sapien
agtatgagagatgagttccgttttg

SEQ ID NO: 2785858 - DNA, 25 bp, Homo sapien
gatgagttccgttttgtattttgga

SEQ ID NO: 2785859 - DNA, 25 bp, Homo sapien
tgcaggaagtatgagagatgagttc

SEQ ID NO: 2785860 - DNA, 25 bp, Homo sapien
aaaacacaaagcgttgcaggaagta

SEQ ID NO: 2785861 - DNA, 25 bp, Homo sapien
taactgctgaaatacccctgatcgt

SEQ ID NO: 2785862 - DNA, 25 bp, Homo sapien
gctgaaatacccctgatcgtaagtt

SEQ ID NO: 2785863 - DNA, 25 bp, Homo sapien
ctgtaactgctgaaatacccctgat

SEQ ID NO: 2785864 - DNA, 25 bp, Homo sapien
actgctgaaatacccctgatcgtaa

SEQ ID NO: 2785865 - DNA, 25 bp, Homo sapien
gataccgcttcataggggtgtctgc

SEQ ID NO: 2785866 - DNA, 25 bp, Homo sapien
tgataccgcttcataggggtgtctg

SEQ ID NO: 2785867 - DNA, 25 bp, Homo sapien
ataccgcttcataggggtgtctgct

SEQ ID NO: 2785868 - DNA, 25 bp, Homo sapien
aaatgctaaaatcctcctcacaggc

SEQ ID NO: 2785869 - DNA, 25 bp, Homo sapien
gctgccccagtccaataaaatcctt

SEQ ID NO: 2785870 - DNA, 25 bp, Homo sapien
aatccttgctatgattggcatcggc

SEQ ID NO: 2785871 - DNA, 25 bp, Homo sapien
actgttttaccctcaatgcaagaca

SEQ ID NO: 2785872 - DNA, 25 bp, Homo sapien
tagaatagagtgtgtctgacagcag

SEQ ID NO: 2785873 - DNA, 25 bp, Homo sapien
caaatcatgtgtatccgattgcccg

SEQ ID NO: 2785874 - DNA, 25 bp, Homo sapien
ttaccagttactagcatgccaggga

SEQ ID NO: 2785875 - DNA, 25 bp, Homo sapien
tcagagcacaatgagtagtgtcccc

SEQ ID NO: 2785876 - DNA, 25 bp, Homo sapien
gccttgctcacagcacagtttggct

SEQ ID NO: 2785877 - DNA, 25 bp, Homo sapien
gaatgtttagatcaagaacctgcat

SEQ ID NO: 2785878 - DNA, 25 bp, Homo sapien
ctaaccacacttctccatacaagca

SEQ ID NO: 2785879 - DNA, 25 bp, Homo sapien
gcacagtttggctctagaatgttta

SEQ ID NO: 2785880 - DNA, 25 bp, Homo sapien
tcaaattcatagaagactcacattc

SEQ ID NO: 2785881 - DNA, 25 bp, Homo sapien
tagtctgagttagtgcgaaagagga

SEQ ID NO: 2785882 - DNA, 25 bp, Homo sapien
cgagggcttatgcatctctacggcc

SEQ ID NO: 2785883 - DNA, 25 bp, Homo sapien
tctttattatgagctgaacaaataa

SEQ ID NO: 2785884 - DNA, 25 bp, Homo sapien
tttcagtctgacatttaactcttta

SEQ ID NO: 2785885 - DNA, 25 bp, Homo sapien
gtaccagtaccgtgctgtttggtta

SEQ ID NO: 2785886 - DNA, 25 bp, Homo sapien
tggttttcagtctgacatttaactc

SEQ ID NO: 2785887 - DNA, 25 bp, Homo sapien
accagtaccgtgctgtttggttact

SEQ ID NO: 2785888 - DNA, 25 bp, Homo sapien
aactatgacatagccgactaaggga

SEQ ID NO: 2785889 - DNA, 25 bp, Homo sapien
tctgcctatgtgtgggagtgcacct

SEQ ID NO: 2785890 - DNA, 25 bp, Homo sapien
gaaagtgggtatgcattccctccat

SEQ ID NO: 2785891 - DNA, 25 bp, Homo sapien
gattagtgaaaactgactgttctgg

SEQ ID NO: 2785892 - DNA, 25 bp, Homo sapien
cattgccaaattggtagtcagcagc

SEQ ID NO: 2785893 - DNA, 25 bp, Homo sapien
ggtaatagagcacagacccagcaag

SEQ ID NO: 2785894 - DNA, 25 bp, Homo sapien
catgaatgtttcctccggcaggaac

SEQ ID NO: 2785895 - DNA, 25 bp, Homo sapien
tcttcacgggcatgtggtggatcca

SEQ ID NO: 2785896 - DNA, 25 bp, Homo sapien
gagtttccaatttactccaagagcg

SEQ ID NO: 2785897 - DNA, 25 bp, Homo sapien
tgtttacttgggacagctagctgca

SEQ ID NO: 2785898 - DNA, 25 bp, Homo sapien
gggtcacttacccaaagcagtacaa

SEQ ID NO: 2785899 - DNA, 25 bp, Homo sapien
acagattagcagcaaagggtctccc

SEQ ID NO: 2785900 - DNA, 25 bp, Homo sapien
aagactacctctttgcgagccgctg

SEQ ID NO: 2785901 - DNA, 25 bp, Homo sapien
gttaccagatttgctcccggacaga

SEQ ID NO: 2785902 - DNA, 25 bp, Homo sapien
cctgtctatgagtgggagtgcacct

SEQ ID NO: 2785903 - DNA, 25 bp, Homo sapien
ccagtaatagagagacgggcagtct

SEQ ID NO: 2785904 - DNA, 25 bp, Homo sapien
ttgttcttccttggaggcaatttcc

SEQ ID NO: 2785905 - DNA, 25 bp, Homo sapien
tggagaggcattggtttctttttgt

SEQ ID NO: 2785906 - DNA, 25 bp, Homo sapien
tcttcttgtttgctaacgagggtta

SEQ ID NO: 2785907 - DNA, 25 bp, Homo sapien
tctagcctcgtgatagcctttggag

SEQ ID NO: 2785908 - DNA, 25 bp, Homo sapien
tggttcttttctcccttctctctgt

SEQ ID NO: 2785909 - DNA, 25 bp, Homo sapien
tcttttctcccttctctctgtttta

SEQ ID NO: 2785910 - DNA, 25 bp, Homo sapien
atggttcttttctcccttctctctg

SEQ ID NO: 2785911 - DNA, 25 bp, Homo sapien
ttatggttcttttctcccttctctc

SEQ ID NO: 2785912 - DNA, 25 bp, Homo sapien
aatttttctgacttacattatagag

SEQ ID NO: 2785913 - DNA, 25 bp, Homo sapien
gcctacagctatgatgtggaaattt

SEQ ID NO: 2785914 - DNA, 25 bp, Homo sapien
gagattgttgaactttgacttaaga

SEQ ID NO: 2785915 - DNA, 25 bp, Homo sapien
agaagtggggagtcgtttgcctaca

SEQ ID NO: 2785916 - DNA, 25 bp, Homo sapien
gctttccactctcaggaagtcaatg

SEQ ID NO: 2785917 - DNA, 25 bp, Homo sapien
gaccctatgctttccactctcagga

SEQ ID NO: 2785918 - DNA, 25 bp, Homo sapien
tatgctttccactctcaggaagtca

SEQ ID NO: 2785919 - DNA, 25 bp, Homo sapien
caggatctgaccctatgctttccac

SEQ ID NO: 2785920 - DNA, 25 bp, Homo sapien
agttccagaatgcagagggctttat

SEQ ID NO: 2785921 - DNA, 25 bp, Homo sapien
ccagaatgcagagggctttatcttc

SEQ ID NO: 2785922 - DNA, 25 bp, Homo sapien
gaatgcagagggctttatcttccat

SEQ ID NO: 2785923 - DNA, 25 bp, Homo sapien
cagttccagaatgcagagggcttta

SEQ ID NO: 2785924 - DNA, 25 bp, Homo sapien
atatgattaaatggcaccaggaaag

SEQ ID NO: 2785925 - DNA, 25 bp, Homo sapien
taatcacgaaattatagcaggtttc

SEQ ID NO: 2785926 - DNA, 25 bp, Homo sapien
caggaaagcctttattgccctacat

SEQ ID NO: 2785927 - DNA, 25 bp, Homo sapien
tgtgtccagccatgaatgactactt

SEQ ID NO: 2785928 - DNA, 25 bp, Homo sapien
tcgctgagcagactgtgtatcagtc

SEQ ID NO: 2785929 - DNA, 25 bp, Homo sapien
tgatctcgctgagcagactgtgtat

SEQ ID NO: 2785930 - DNA, 25 bp, Homo sapien
tttcctatgtgagaagtgattgatc

SEQ ID NO: 2785931 - DNA, 25 bp, Homo sapien
tgagaagtgattgatctcgctgagc

SEQ ID NO: 2785932 - DNA, 25 bp, Homo sapien
tgtagcagcatctcctcactagtac

SEQ ID NO: 2785933 - DNA, 25 bp, Homo sapien
ttccttcatctatgagacttctcca

SEQ ID NO: 2785934 - DNA, 25 bp, Homo sapien
gtagcagcatctcctcactagtacc

SEQ ID NO: 2785935 - DNA, 25 bp, Homo sapien
tagtacccataattccttcatctat

SEQ ID NO: 2785936 - DNA, 25 bp, Homo sapien
tcttctgttgttatgcacttctccc

SEQ ID NO: 2785937 - DNA, 25 bp, Homo sapien
tgtaaaacctggtctcacatcctct

SEQ ID NO: 2785938 - DNA, 25 bp, Homo sapien
ccagtgggactattaccagttgtaa

SEQ ID NO: 2785939 - DNA, 25 bp, Homo sapien
tgagcactattgtacatgattccat

SEQ ID NO: 2785940 - DNA, 25 bp, Homo sapien
catgagtcaagtgtgcaggccattc

SEQ ID NO: 2785941 - DNA, 25 bp, Homo sapien
tgcaggaacaggataagaagtcatg

SEQ ID NO: 2785942 - DNA, 25 bp, Homo sapien
taaccttccttcaagagctactgag

SEQ ID NO: 2785943 - DNA, 25 bp, Homo sapien
gaagccatcgattgtgtatgtccat

SEQ ID NO: 2785944 - DNA, 25 bp, Homo sapien
gctgaacagatttagtagccttttc

SEQ ID NO: 2785945 - DNA, 25 bp, Homo sapien
gggcttctctaagaggacagctcgg

SEQ ID NO: 2785946 - DNA, 25 bp, Homo sapien
caatgtcgatgtgaaaagttttggc

SEQ ID NO: 2785947 - DNA, 25 bp, Homo sapien
tgtttccttgctcctttggtgcctc

SEQ ID NO: 2785948 - DNA, 25 bp, Homo sapien
tattgccttgacaattatgctccag

SEQ ID NO: 2785949 - DNA, 25 bp, Homo sapien
gatgcatcagcactttaccttagta

SEQ ID NO: 2785950 - DNA, 25 bp, Homo sapien
gaaagcatcaggcactcttttgaga

SEQ ID NO: 2785951 - DNA, 25 bp, Homo sapien
tccaaagccgaaagaacaaatgtcc

SEQ ID NO: 2785952 - DNA, 25 bp, Homo sapien
aaggaaagctttgttcagtctgaca

SEQ ID NO: 2785953 - DNA, 25 bp, Homo sapien
tggcttcaactgacagagctgtcct

SEQ ID NO: 2785954 - DNA, 25 bp, Homo sapien
tgtaatacggttctcaaaacagcaa

SEQ ID NO: 2785955 - DNA, 25 bp, Homo sapien
tctaatgtaaaacttgctggccaag

SEQ ID NO: 2785956 - DNA, 25 bp, Homo sapien
agtgctaacctatggactatctggg

SEQ ID NO: 2785957 - DNA, 25 bp, Homo sapien
tggtttccgcagacccttggtacag

SEQ ID NO: 2785958 - DNA, 25 bp, Homo sapien
cctgttgtcacagatagtgctaacc

SEQ ID NO: 2785959 - DNA, 25 bp, Homo sapien
gcagaatggtcacgctagggagcaa

SEQ ID NO: 2785960 - DNA, 25 bp, Homo sapien
caaatgcagcgagtgttgggacacg

SEQ ID NO: 2785961 - DNA, 25 bp, Homo sapien
taatctcaagtctgcgagaagacgg

SEQ ID NO: 2785962 - DNA, 25 bp, Homo sapien
ggcgcctcccgcagtaagtaagtgg

SEQ ID NO: 2785963 - DNA, 25 bp, Homo sapien
cagatcctgtaagtcagcagccggg

SEQ ID NO: 2785964 - DNA, 25 bp, Homo sapien
gatgatacaggcgaagtctgagcca

SEQ ID NO: 2785965 - DNA, 25 bp, Homo sapien
gaggcaattactgggatcaaaactg

SEQ ID NO: 2785966 - DNA, 25 bp, Homo sapien
taagcattaaacatccaccgcaaag

SEQ ID NO: 2785967 - DNA, 25 bp, Homo sapien
gagccaatgtcgcttctcacaaact

SEQ ID NO: 2785968 - DNA, 25 bp, Homo sapien
ctcctccgctgggtctcctttgcac

SEQ ID NO: 2785969 - DNA, 25 bp, Homo sapien
ccgtggagcaggaagtggggagggg

SEQ ID NO: 2785970 - DNA, 25 bp, Homo sapien
cgtggagcaggaagtggggagggga

SEQ ID NO: 2785971 - DNA, 25 bp, Homo sapien
gagcaggaagtggggaggggaccag

SEQ ID NO: 2785972 - DNA, 25 bp, Homo sapien
tggagcaggaagtggggaggggacc

SEQ ID NO: 2785973 - DNA, 25 bp, Homo sapien
agtggcgaattatcttaagtgttga

SEQ ID NO: 2785974 - DNA, 25 bp, Homo sapien
tgtagcctcgactggccggctactc

SEQ ID NO: 2785975 - DNA, 25 bp, Homo sapien
aaagaggagaagtggcgaattatct

SEQ ID NO: 2785976 - DNA, 25 bp, Homo sapien
gaagcatagtgaatgggacggatcc

SEQ ID NO: 2785977 - DNA, 25 bp, Homo sapien
gatcacttggtagctgacggtcacg

SEQ ID NO: 2785978 - DNA, 25 bp, Homo sapien
gaatatgcgcccatagagaaccagc

SEQ ID NO: 2785979 - DNA, 25 bp, Homo sapien
ttaagcagagagttggagtagccca

SEQ ID NO: 2785980 - DNA, 25 bp, Homo sapien
gagataccagtagtgttgccgccgg

SEQ ID NO: 2785981 - DNA, 25 bp, Homo sapien
aaaagcagcgcgaagattcgcctcg

SEQ ID NO: 2785982 - DNA, 25 bp, Homo sapien
gaaaaagcagcgcgaagattcgcct

SEQ ID NO: 2785983 - DNA, 25 bp, Homo sapien
gaagaaaaagcagcgcgaagattcg

SEQ ID NO: 2785984 - DNA, 25 bp, Homo sapien
aagcagcgcgaagattcgcctcgcc

SEQ ID NO: 2785985 - DNA, 25 bp, Homo sapien
ggaatgcagagacccaagcaggaag

SEQ ID NO: 2785986 - DNA, 25 bp, Homo sapien
tatctccgaggagcagctttcaggc

SEQ ID NO: 2785987 - DNA, 25 bp, Homo sapien
gaaatatctagaaccgagaagcccc

SEQ ID NO: 2785988 - DNA, 25 bp, Homo sapien
aagttcttactgcttcggcgaaggg

SEQ ID NO: 2785989 - DNA, 25 bp, Homo sapien
tcaccgtcttctgtgtcaatcatgc

SEQ ID NO: 2785990 - DNA, 25 bp, Homo sapien
aaatcaccgtcttctgtgtcaatca

SEQ ID NO: 2785991 - DNA, 25 bp, Homo sapien
atcaccgtcttctgtgtcaatcatg

SEQ ID NO: 2785992 - DNA, 25 bp, Homo sapien
aatcaccgtcttctgtgtcaatcat

SEQ ID NO: 2785993 - DNA, 25 bp, Homo sapien
ccggctttgtggctgattcattttg

SEQ ID NO: 2785994 - DNA, 25 bp, Homo sapien
gctttgtggctgattcattttgggc

SEQ ID NO: 2785995 - DNA, 25 bp, Homo sapien
tttgtggctgattcattttgggctg

SEQ ID NO: 2785996 - DNA, 25 bp, Homo sapien
ctattccggctttgtggctgattca

SEQ ID NO: 2785997 - DNA, 25 bp, Homo sapien
gctgaatattgagcaggtgctaaat

SEQ ID NO: 2785998 - DNA, 25 bp, Homo sapien
tgagcaggtgctaaatcctcaacaa

SEQ ID NO: 2785999 - DNA, 25 bp, Homo sapien
tatttggcaattgctgaatattgag

SEQ ID NO: 2786000 - DNA, 25 bp, Homo sapien
caattgctgaatattgagcaggtgc

SEQ ID NO: 2786001 - DNA, 25 bp, Homo sapien
ttccttcagactggataaacttggt

SEQ ID NO: 2786002 - DNA, 25 bp, Homo sapien
tagtcttccttcagactggataaac

SEQ ID NO: 2786003 - DNA, 25 bp, Homo sapien
cttcagactggataaacttggttct

SEQ ID NO: 2786004 - DNA, 25 bp, Homo sapien
gtcttccttcagactggataaactt

SEQ ID NO: 2786005 - DNA, 25 bp, Homo sapien
cttcccacttcatttgtatagttca

SEQ ID NO: 2786006 - DNA, 25 bp, Homo sapien
ttcccacttcatttgtatagttcat

SEQ ID NO: 2786007 - DNA, 25 bp, Homo sapien
tcaatccgttcataaggaatgttgc

SEQ ID NO: 2786008 - DNA, 25 bp, Homo sapien
gagccatctctattaattcaatccg

SEQ ID NO: 2786009 - DNA, 25 bp, Homo sapien
gttgctttgtgctctccaggactca

SEQ ID NO: 2786010 - DNA, 25 bp, Homo sapien
actttgctaaagtgggaacaccacg

SEQ ID NO: 2786011 - DNA, 25 bp, Homo sapien
tattgacccctgatactttaggaag

SEQ ID NO: 2786012 - DNA, 25 bp, Homo sapien
ctttctcctttaacaactgcttgcc

SEQ ID NO: 2786013 - DNA, 25 bp, Homo sapien
gcaaccatgttcttgtatattgacc

SEQ ID NO: 2786014 - DNA, 25 bp, Homo sapien
caactgcttgccctgcaaccatgtt

SEQ ID NO: 2786015 - DNA, 25 bp, Homo sapien
gctggcctgcctcacaggctgtcca

SEQ ID NO: 2786016 - DNA, 25 bp, Homo sapien
cccagctggcctgcctcacaggctg

SEQ ID NO: 2786017 - DNA, 25 bp, Homo sapien
tggcctgcctcacaggctgtccaag

SEQ ID NO: 2786018 - DNA, 25 bp, Homo sapien
tgagcagaaacccagctggcctgcc

SEQ ID NO: 2786019 - DNA, 25 bp, Homo sapien
agctgaaagccctggaccatgaggc

SEQ ID NO: 2786020 - DNA, 25 bp, Homo sapien
aagcagcactgaaaaatttctgcat

SEQ ID NO: 2786021 - DNA, 25 bp, Homo sapien
ccatgaggccctggacagtgtggtc

SEQ ID NO: 2786022 - DNA, 25 bp, Homo sapien
cattactggtctgataatgaacagc

SEQ ID NO: 2786023 - DNA, 25 bp, Homo sapien
cacaattacgtactcttgaagatac

SEQ ID NO: 2786024 - DNA, 25 bp, Homo sapien
ttttcacaattacgtactcttgaag

SEQ ID NO: 2786025 - DNA, 25 bp, Homo sapien
tacgtactcttgaagatacctgatg

SEQ ID NO: 2786026 - DNA, 25 bp, Homo sapien
tcttgaagatacctgatgatgagga

SEQ ID NO: 2786027 - DNA, 25 bp, Homo sapien
cttcatccagttatactgcaggaag

SEQ ID NO: 2786028 - DNA, 25 bp, Homo sapien
ttcatccagttatactgcaggaagg

SEQ ID NO: 2786029 - DNA, 25 bp, Homo sapien
taactgtgtcaccaagcagacgaaa

SEQ ID NO: 2786030 - DNA, 25 bp, Homo sapien
ggattacaatccatggcagaaaaga

SEQ ID NO: 2786031 - DNA, 25 bp, Homo sapien
gaagtaaagtacaatccctgccctc

SEQ ID NO: 2786032 - DNA, 25 bp, Homo sapien
gcccagagataagggcttcgcagag

SEQ ID NO: 2786033 - DNA, 25 bp, Homo sapien
ttgcagccttgggtccggagtgtac

SEQ ID NO: 2786034 - DNA, 25 bp, Homo sapien
cggagtgtacgactttctgctaggc

SEQ ID NO: 2786035 - DNA, 25 bp, Homo sapien
tctgctaggcagaggtcataagctc

SEQ ID NO: 2786036 - DNA, 25 bp, Homo sapien
tagcccatttcagtatcggcgtcgc

SEQ ID NO: 2786037 - DNA, 25 bp, Homo sapien
gagtatgtcttgatgcagattccat

SEQ ID NO: 2786038 - DNA, 25 bp, Homo sapien
tgaaggactatatagaacagctgtc

SEQ ID NO: 2786039 - DNA, 25 bp, Homo sapien
cagggagattcatgctgaaggacta

SEQ ID NO: 2786040 - DNA, 25 bp, Homo sapien
ccagaggcatttactgccagatagt

SEQ ID NO: 2786041 - DNA, 25 bp, Homo sapien
aggacaaccaatgatgtttgttgca

SEQ ID NO: 2786042 - DNA, 25 bp, Homo sapien
cttctgctactgtagccggctaaga

SEQ ID NO: 2786043 - DNA, 25 bp, Homo sapien
gggaggacaaccaatgatgtttgtt

SEQ ID NO: 2786044 - DNA, 25 bp, Homo sapien
ctgtagccggctaagatgccagcag

SEQ ID NO: 2786045 - DNA, 25 bp, Homo sapien
ccattttggtctgagcttagtgcta

SEQ ID NO: 2786046 - DNA, 25 bp, Homo sapien
aatagaactaggtgatggcttcagc

SEQ ID NO: 2786047 - DNA, 25 bp, Homo sapien
tcagaatcatcagctagtctcagag

SEQ ID NO: 2786048 - DNA, 25 bp, Homo sapien
gctcttttggccttacgcataggaa

SEQ ID NO: 2786049 - DNA, 25 bp, Homo sapien
ccacaaactaggtgggcagagaggc

SEQ ID NO: 2786050 - DNA, 25 bp, Homo sapien
gatcgtcaaccacggctccctcgct

SEQ ID NO: 2786051 - DNA, 25 bp, Homo sapien
gagatcgtcaaccacggctccctcg

SEQ ID NO: 2786052 - DNA, 25 bp, Homo sapien
ggaggcagcggccacaaactaggtg

SEQ ID NO: 2786053 - DNA, 25 bp, Homo sapien
agcagttataggactgtgtagcaaa

SEQ ID NO: 2786054 - DNA, 25 bp, Homo sapien
gactgtgtagcaaatacaacagcca

SEQ ID NO: 2786055 - DNA, 25 bp, Homo sapien
gggtgacagagttacttcagcactt

SEQ ID NO: 2786056 - DNA, 25 bp, Homo sapien
gagttacttcagcacttttaaccat

SEQ ID NO: 2786057 - DNA, 25 bp, Homo sapien
ttcacagtggaaattgggtgacaga

SEQ ID NO: 2786058 - DNA, 25 bp, Homo sapien
gacagagttacttcagcacttttaa

SEQ ID NO: 2786059 - DNA, 25 bp, Homo sapien
tgtgcctcatagaatactaccgtct

SEQ ID NO: 2786060 - DNA, 25 bp, Homo sapien
tgatagctttgtcattgccagcagc

SEQ ID NO: 2786061 - DNA, 25 bp, Homo sapien
taacatttcccgtgatagctttgtc

SEQ ID NO: 2786062 - DNA, 25 bp, Homo sapien
gatagttttgctctccctaacattt

SEQ ID NO: 2786063 - DNA, 25 bp, Homo sapien
ttatcttcaatttgacagtaatttg

SEQ ID NO: 2786064 - DNA, 25 bp, Homo sapien
tccttttatcttcaatttgacagta

SEQ ID NO: 2786065 - DNA, 25 bp, Homo sapien
ccttttatcttcaatttgacagtaa

SEQ ID NO: 2786066 - DNA, 25 bp, Homo sapien
ttttatcttcaatttgacagtaatt

SEQ ID NO: 2786067 - DNA, 25 bp, Homo sapien
cagggattctggattatatttgctg

SEQ ID NO: 2786068 - DNA, 25 bp, Homo sapien
ttcagggattctggattatatttgc

SEQ ID NO: 2786069 - DNA, 25 bp, Homo sapien
tcagggattctggattatatttgct

SEQ ID NO: 2786070 - DNA, 25 bp, Homo sapien
agggattctggattatatttgctga

SEQ ID NO: 2786071 - DNA, 25 bp, Homo sapien
gggacaacaagtgcccaccaccgca

SEQ ID NO: 2786072 - DNA, 25 bp, Homo sapien
tgggacaacaagtgcccaccaccgc

SEQ ID NO: 2786073 - DNA, 25 bp, Homo sapien
ctgggacaacaagtgcccaccaccg

SEQ ID NO: 2786074 - DNA, 25 bp, Homo sapien
gatatccgatattatgcaagagcca

SEQ ID NO: 2786075 - DNA, 25 bp, Homo sapien
tagtatgatggtacacgtatgcgag

SEQ ID NO: 2786076 - DNA, 25 bp, Homo sapien
tatgcgagagttgcagctgccagag

SEQ ID NO: 2786077 - DNA, 25 bp, Homo sapien
taaacaaaccctcttcaggccaatg

SEQ ID NO: 2786078 - DNA, 25 bp, Homo sapien
gagagagaatgaagctgctaggcat

SEQ ID NO: 2786079 - DNA, 25 bp, Homo sapien
gggagagagaatgaagctgctaggc

SEQ ID NO: 2786080 - DNA, 25 bp, Homo sapien
aagggagagagaatgaagctgctag

SEQ ID NO: 2786081 - DNA, 25 bp, Homo sapien
ttgagggtgcaagggagagagaatg

SEQ ID NO: 2786082 - DNA, 25 bp, Homo sapien
ctcagtaaagtctggcccgctgcct

SEQ ID NO: 2786083 - DNA, 25 bp, Homo sapien
gaagaggcttaattgcagaggacaa

SEQ ID NO: 2786084 - DNA, 25 bp, Homo sapien
gctctcaggagtctgtgaatcacac

SEQ ID NO: 2786085 - DNA, 25 bp, Homo sapien
taaactcacaccaagatactgcaga

SEQ ID NO: 2786086 - DNA, 25 bp, Homo sapien
gtgggacaacctacctgacaatatg

SEQ ID NO: 2786087 - DNA, 25 bp, Homo sapien
tgtgtacactctcagggcagtcctg

SEQ ID NO: 2786088 - DNA, 25 bp, Homo sapien
tacaccgcttggcaagaatagcttg

SEQ ID NO: 2786089 - DNA, 25 bp, Homo sapien
ggcttcggaccgagacatccttgta

SEQ ID NO: 2786090 - DNA, 25 bp, Homo sapien
gtgcattcagggtggaatggccata

SEQ ID NO: 2786091 - DNA, 25 bp, Homo sapien
ggtgcattcagggtggaatggccat

SEQ ID NO: 2786092 - DNA, 25 bp, Homo sapien
ttctgagatcagacaggatcaggtg

SEQ ID NO: 2786093 - DNA, 25 bp, Homo sapien
gatcagacaggatcaggtgcattca

SEQ ID NO: 2786094 - DNA, 25 bp, Homo sapien
tgagacagggcacatgcgaatgctt

SEQ ID NO: 2786095 - DNA, 25 bp, Homo sapien
ccgatagctgttcactaagaaaagc

SEQ ID NO: 2786096 - DNA, 25 bp, Homo sapien
cacatgcgaatgcttggccgatagc

SEQ ID NO: 2786097 - DNA, 25 bp, Homo sapien
agaaaagctgacaaagtacttctac

SEQ ID NO: 2786098 - DNA, 25 bp, Homo sapien
cgtattcgatctgatctgagacggc

SEQ ID NO: 2786099 - DNA, 25 bp, Homo sapien
gaagaatagccaaaagatcatgcaa

SEQ ID NO: 2786100 - DNA, 25 bp, Homo sapien
gatcatgcaaagtgaaattccccgc

SEQ ID NO: 2786101 - DNA, 25 bp, Homo sapien
tgtcactctgacaactaaacctgta

SEQ ID NO: 2786102 - DNA, 25 bp, Homo sapien
tagtgctacatctgcaagagtagct

SEQ ID NO: 2786103 - DNA, 25 bp, Homo sapien
caaatttccaagattgcgctcagat

SEQ ID NO: 2786104 - DNA, 25 bp, Homo sapien
tgcaagagtagcttctaacattgcc

SEQ ID NO: 2786105 - DNA, 25 bp, Homo sapien
tgcatatcagttgggcacagaactt

SEQ ID NO: 2786106 - DNA, 25 bp, Homo sapien
tccattgttaacccagtacttctta

SEQ ID NO: 2786107 - DNA, 25 bp, Homo sapien
gccacgatattaatgtattgtccaa

SEQ ID NO: 2786108 - DNA, 25 bp, Homo sapien
tagtcatatgccacgatattaatgt

SEQ ID NO: 2786109 - DNA, 25 bp, Homo sapien
aataatataagcaatattcatgcac

SEQ ID NO: 2786110 - DNA, 25 bp, Homo sapien
aacatgatcaatctgtactttgcta

SEQ ID NO: 2786111 - DNA, 25 bp, Homo sapien
taaaatcggatccacttttggcaat

SEQ ID NO: 2786112 - DNA, 25 bp, Homo sapien
agtttcattcaccttactgattcca

SEQ ID NO: 2786113 - DNA, 25 bp, Homo sapien
ggcaagccttgtatcatttccccat

SEQ ID NO: 2786114 - DNA, 25 bp, Homo sapien
ggaatcaaactgaccccttctgctc

SEQ ID NO: 2786115 - DNA, 25 bp, Homo sapien
ccccatggtaatgagttccagaatt

SEQ ID NO: 2786116 - DNA, 25 bp, Homo sapien
ttaatccccatggtaatgagttcca

SEQ ID NO: 2786117 - DNA, 25 bp, Homo sapien
tccccatggtaatgagttccagaat

SEQ ID NO: 2786118 - DNA, 25 bp, Homo sapien
aatccccatggtaatgagttccaga

SEQ ID NO: 2786119 - DNA, 25 bp, Homo sapien
tggttcctacatatctttccagttt

SEQ ID NO: 2786120 - DNA, 25 bp, Homo sapien
ctcctcctttaaaatgcgctctact

SEQ ID NO: 2786121 - DNA, 25 bp, Homo sapien
ttaaaatgcgctctactcactggaa

SEQ ID NO: 2786122 - DNA, 25 bp, Homo sapien
ctcctttaaaatgcgctctactcac

SEQ ID NO: 2786123 - DNA, 25 bp, Homo sapien
gggaaaagcctgagatactcaagct

SEQ ID NO: 2786124 - DNA, 25 bp, Homo sapien
tgcagctcctcatttgctctccagc

SEQ ID NO: 2786125 - DNA, 25 bp, Homo sapien
ctctgtggctgtgagtacaaatggg

SEQ ID NO: 2786126 - DNA, 25 bp, Homo sapien
tggagatctgtgtgtgagctaatgc

SEQ ID NO: 2786127 - DNA, 25 bp, Homo sapien
catcttcctgatttgaagaccgaag

SEQ ID NO: 2786128 - DNA, 25 bp, Homo sapien
tcttcctgatttgaagaccgaagat

SEQ ID NO: 2786129 - DNA, 25 bp, Homo sapien
ttcatcttcctgatttgaagaccga

SEQ ID NO: 2786130 - DNA, 25 bp, Homo sapien
cttagacttgttcatcttcctgatt

SEQ ID NO: 2786131 - DNA, 25 bp, Homo sapien
gccccgtagaacaatgaggcttaat

SEQ ID NO: 2786132 - DNA, 25 bp, Homo sapien
gaagagccccgtagaacaatgaggc

SEQ ID NO: 2786133 - DNA, 25 bp, Homo sapien
aaacagaagagccccgtagaacaat

SEQ ID NO: 2786134 - DNA, 25 bp, Homo sapien
cagaagagccccgtagaacaatgag

SEQ ID NO: 2786135 - DNA, 25 bp, Homo sapien
ctgcacagcagtttctctcttccat

SEQ ID NO: 2786136 - DNA, 25 bp, Homo sapien
cctgcacagcagtttctctcttcca

SEQ ID NO: 2786137 - DNA, 25 bp, Homo sapien
gcttaagtccaatgtccaggtataa

SEQ ID NO: 2786138 - DNA, 25 bp, Homo sapien
acagcttaagtccaatgtccaggta

SEQ ID NO: 2786139 - DNA, 25 bp, Homo sapien
ttaacacagcttaagtccaatgtcc

SEQ ID NO: 2786140 - DNA, 25 bp, Homo sapien
cagcttaagtccaatgtccaggtat

SEQ ID NO: 2786141 - DNA, 25 bp, Homo sapien
tgaaggttgagtagggctggagcaa

SEQ ID NO: 2786142 - DNA, 25 bp, Homo sapien
gtgccccaacaaaagtgaaggttga

SEQ ID NO: 2786143 - DNA, 25 bp, Homo sapien
acaaaagtgaaggttgagtagggct

SEQ ID NO: 2786144 - DNA, 25 bp, Homo sapien
aggagctgcataagtggagcaggga

SEQ ID NO: 2786145 - DNA, 25 bp, Homo sapien
cattggctaccacctttccagtaaa

SEQ ID NO: 2786146 - DNA, 25 bp, Homo sapien
tcccatcattggctaccacctttcc

SEQ ID NO: 2786147 - DNA, 25 bp, Homo sapien
catcattggctaccacctttccagt

SEQ ID NO: 2786148 - DNA, 25 bp, Homo sapien
tggctaccacctttccagtaaaaca

SEQ ID NO: 2786149 - DNA, 25 bp, Homo sapien
atgttggggtgctaggtgccttctc

SEQ ID NO: 2786150 - DNA, 25 bp, Homo sapien
gggtgctaggtgccttctcatcttc

SEQ ID NO: 2786151 - DNA, 25 bp, Homo sapien
tggcatgtcaacattattacttatt

SEQ ID NO: 2786152 - DNA, 25 bp, Homo sapien
ttggatgttggggtgctaggtgcct

SEQ ID NO: 2786153 - DNA, 25 bp, Homo sapien
tcagagccccataaggatatccttt

SEQ ID NO: 2786154 - DNA, 25 bp, Homo sapien
aaagggagcactcagagccccataa

SEQ ID NO: 2786155 - DNA, 25 bp, Homo sapien
tgaacgtatcttctattgtttgctc

SEQ ID NO: 2786156 - DNA, 25 bp, Homo sapien
tggcactaccatgaaggctgctact

SEQ ID NO: 2786157 - DNA, 25 bp, Homo sapien
tagttcaccctaatatccaatgtgg

SEQ ID NO: 2786158 - DNA, 25 bp, Homo sapien
caatagaaggatgagctagatgccg

SEQ ID NO: 2786159 - DNA, 25 bp, Homo sapien
ttaccaatacttatgtgcacaggca

SEQ ID NO: 2786160 - DNA, 25 bp, Homo sapien
gcaccagtgtccagtacaatagaag

SEQ ID NO: 2786161 - DNA, 25 bp, Homo sapien
gatatgctggctaccgttcatcttc

SEQ ID NO: 2786162 - DNA, 25 bp, Homo sapien
tgggcatccagaggaagaatgatat

SEQ ID NO: 2786163 - DNA, 25 bp, Homo sapien
gagggacatgaaatttgggcatcca

SEQ ID NO: 2786164 - DNA, 25 bp, Homo sapien
gatgatgttgcaatgtcagagggac

SEQ ID NO: 2786165 - DNA, 25 bp, Homo sapien
ggataaccctacacgctattcaaga

SEQ ID NO: 2786166 - DNA, 25 bp, Homo sapien
tacgcgcatgcaagatataactgga

SEQ ID NO: 2786167 - DNA, 25 bp, Homo sapien
tatgcaggcaaggagtcaagaaaca

SEQ ID NO: 2786168 - DNA, 25 bp, Homo sapien
gaagccctggcaatcactctggata

SEQ ID NO: 2786169 - DNA, 25 bp, Homo sapien
tgcccggccaggagactttgatcag

SEQ ID NO: 2786170 - DNA, 25 bp, Homo sapien
ctgattccaggaacagggacggtat

SEQ ID NO: 2786171 - DNA, 25 bp, Homo sapien
tagtgctggcttgcaagtaaaccct

SEQ ID NO: 2786172 - DNA, 25 bp, Homo sapien
catggcgtaccccacagactagagt

SEQ ID NO: 2786173 - DNA, 25 bp, Homo sapien
tactcgacgtttgggttcagcatga

SEQ ID NO: 2786174 - DNA, 25 bp, Homo sapien
gagaactgcccatactagtgtgtac

SEQ ID NO: 2786175 - DNA, 25 bp, Homo sapien
tgttgctccctgtactgagaactgc

SEQ ID NO: 2786176 - DNA, 25 bp, Homo sapien
aaggaggtggccgttgctaagcaac

SEQ ID NO: 2786177 - DNA, 25 bp, Homo sapien
ttccacctgcaatcctttccccaca

SEQ ID NO: 2786178 - DNA, 25 bp, Homo sapien
acctgcaatcctttccccacataca

SEQ ID NO: 2786179 - DNA, 25 bp, Homo sapien
ttccccttccacctgcaatcctttc

SEQ ID NO: 2786180 - DNA, 25 bp, Homo sapien
acatacacccaaattccagtgccca

SEQ ID NO: 2786181 - DNA, 25 bp, Homo sapien
ttattggctgtatgggttaagcttg

SEQ ID NO: 2786182 - DNA, 25 bp, Homo sapien
accgtgaggacatggtatgaggcca

SEQ ID NO: 2786183 - DNA, 25 bp, Homo sapien
ggctgtatgggttaagcttgattcc

SEQ ID NO: 2786184 - DNA, 25 bp, Homo sapien
taggagccctctacggggaccgtga

SEQ ID NO: 2786185 - DNA, 25 bp, Homo sapien
taaatctcttagaagtcaacccaca

SEQ ID NO: 2786186 - DNA, 25 bp, Homo sapien
tacaggcagttattcttatgagatg

SEQ ID NO: 2786187 - DNA, 25 bp, Homo sapien
gataagcagtcctatctcagtgaag

SEQ ID NO: 2786188 - DNA, 25 bp, Homo sapien
taggtaaatatcaagggaactgtct

SEQ ID NO: 2786189 - DNA, 25 bp, Homo sapien
tttttcttgggcatgcaaagctcag

SEQ ID NO: 2786190 - DNA, 25 bp, Homo sapien
aaatttagttaaggcactggcacca

SEQ ID NO: 2786191 - DNA, 25 bp, Homo sapien
catggccaaggactataaatggcac

SEQ ID NO: 2786192 - DNA, 25 bp, Homo sapien
aaccctatgtggctatactggcacc

SEQ ID NO: 2786193 - DNA, 25 bp, Homo sapien
agtacttagcacagcgtttgccacg

SEQ ID NO: 2786194 - DNA, 25 bp, Homo sapien
ttttggtctcagcactaggatcagc

SEQ ID NO: 2786195 - DNA, 25 bp, Homo sapien
tacagttcaagctcccaaacacgga

SEQ ID NO: 2786196 - DNA, 25 bp, Homo sapien
tagcttatcactaggttacctgagg

SEQ ID NO: 2786197 - DNA, 25 bp, Homo sapien
taatctagttccagatgcaaaccta

SEQ ID NO: 2786198 - DNA, 25 bp, Homo sapien
gaagaaatagggatacctctgagaa

SEQ ID NO: 2786199 - DNA, 25 bp, Homo sapien
cattaggttgtaagaatatgaacca

SEQ ID NO: 2786200 - DNA, 25 bp, Homo sapien
gtggtgagaaggtccatcaacccaa

SEQ ID NO: 2786201 - DNA, 25 bp, Homo sapien
tctggtacatactgcctgggaggga

SEQ ID NO: 2786202 - DNA, 25 bp, Homo sapien
catacaggtagttagaatgaccagg

SEQ ID NO: 2786203 - DNA, 25 bp, Homo sapien
tattgtgtcaccattcagaaaccta

SEQ ID NO: 2786204 - DNA, 25 bp, Homo sapien
gagaggcccaaatgactaaattagg

SEQ ID NO: 2786205 - DNA, 25 bp, Homo sapien
agggttgaaagcgtgagagctctca

SEQ ID NO: 2786206 - DNA, 25 bp, Homo sapien
cgtgagagctctcatggctgcaatg

SEQ ID NO: 2786207 - DNA, 25 bp, Homo sapien
ttatggaagggttgaaagcgtgaga

SEQ ID NO: 2786208 - DNA, 25 bp, Homo sapien
tgaaagcgtgagagctctcatggct

SEQ ID NO: 2786209 - DNA, 25 bp, Homo sapien
aatttctaagcgcaccatagtgagg

SEQ ID NO: 2786210 - DNA, 25 bp, Homo sapien
cactgtaagacatgccaatatggca

SEQ ID NO: 2786211 - DNA, 25 bp, Homo sapien
tactgagggtatccacattgggtgc

SEQ ID NO: 2786212 - DNA, 25 bp, Homo sapien
gaattcacctgcagccgtatctata

SEQ ID NO: 2786213 - DNA, 25 bp, Homo sapien
caaaggaggcaggtactagaaattc

SEQ ID NO: 2786214 - DNA, 25 bp, Homo sapien
tgcatcttctacaacattgaaaaaa

SEQ ID NO: 2786215 - DNA, 25 bp, Homo sapien
tgtgtcaagagcaaaacattacccc

SEQ ID NO: 2786216 - DNA, 25 bp, Homo sapien
tagtcaagaccattaagcagctgca

SEQ ID NO: 2786217 - DNA, 25 bp, Homo sapien
cattaactgctaggtagatgaccca

SEQ ID NO: 2786218 - DNA, 25 bp, Homo sapien
gctaggtagatgacccatgttgatg

SEQ ID NO: 2786219 - DNA, 25 bp, Homo sapien
tagatgacccatgttgatggcagta

SEQ ID NO: 2786220 - DNA, 25 bp, Homo sapien
caatactcattaactgctaggtaga

SEQ ID NO: 2786221 - DNA, 25 bp, Homo sapien
tggtcccaaatacgaaaaatgtcta

SEQ ID NO: 2786222 - DNA, 25 bp, Homo sapien
tgaagtagtaacactagccaaacac

SEQ ID NO: 2786223 - DNA, 25 bp, Homo sapien
aatactttacagttacagcacatta

SEQ ID NO: 2786224 - DNA, 25 bp, Homo sapien
gggcatggctatcaagtaacaagac

SEQ ID NO: 2786225 - DNA, 25 bp, Homo sapien
tttaacggcttaagccaaagtctca

SEQ ID NO: 2786226 - DNA, 25 bp, Homo sapien
atttattgcaaagcataatatatag

SEQ ID NO: 2786227 - DNA, 25 bp, Homo sapien
ttaacggcttaagccaaagtctcag

SEQ ID NO: 2786228 - DNA, 25 bp, Homo sapien
tattgcaaagcataatatatagcaa

SEQ ID NO: 2786229 - DNA, 25 bp, Homo sapien
gaactattaggtgtagaagaatgct

SEQ ID NO: 2786230 - DNA, 25 bp, Homo sapien
agaactattaggtgtagaagaatgc

SEQ ID NO: 2786231 - DNA, 25 bp, Homo sapien
ctttctggagaattcagaactatta

SEQ ID NO: 2786232 - DNA, 25 bp, Homo sapien
cagaactattaggtgtagaagaatg

SEQ ID NO: 2786233 - DNA, 25 bp, Homo sapien
agtgggatttgaactgccttaaatt

SEQ ID NO: 2786234 - DNA, 25 bp, Homo sapien
atactgactgagaattgcatttatg

SEQ ID NO: 2786235 - DNA, 25 bp, Homo sapien
actgactgagaattgcatttatgac

SEQ ID NO: 2786236 - DNA, 25 bp, Homo sapien
tgggatttgaactgccttaaattct

SEQ ID NO: 2786237 - DNA, 25 bp, Homo sapien
tctccagaacagagcatgttaggtg

SEQ ID NO: 2786238 - DNA, 25 bp, Homo sapien
tacagaatatgctgtccaacaccag

SEQ ID NO: 2786239 - DNA, 25 bp, Homo sapien
gaagattggaatcatattgagtatc

SEQ ID NO: 2786240 - DNA, 25 bp, Homo sapien
tatgctgtccaacaccagcagaata

SEQ ID NO: 2786241 - DNA, 25 bp, Homo sapien
gaagtggaaagctattctgactcct

SEQ ID NO: 2786242 - DNA, 25 bp, Homo sapien
cacatctattagctttcaggactgc

SEQ ID NO: 2786243 - DNA, 25 bp, Homo sapien
gacagatgacctgtttaatccctga

SEQ ID NO: 2786244 - DNA, 25 bp, Homo sapien
tcaggactgctttagagaagtggaa

SEQ ID NO: 2786245 - DNA, 25 bp, Homo sapien
ttttcagcttgttctagcaccttac

SEQ ID NO: 2786246 - DNA, 25 bp, Homo sapien
tatatgatatgactcttgtttgccc

SEQ ID NO: 2786247 - DNA, 25 bp, Homo sapien
cagcttgttctagcaccttacattt

SEQ ID NO: 2786248 - DNA, 25 bp, Homo sapien
tgactcttgtttgccctctttggga

SEQ ID NO: 2786249 - DNA, 25 bp, Homo sapien
taagtataatggaaagcatgatata

SEQ ID NO: 2786250 - DNA, 25 bp, Homo sapien
ctatgcagtagctcttacataaact

SEQ ID NO: 2786251 - DNA, 25 bp, Homo sapien
aagagatcttagtaagtataatgga

SEQ ID NO: 2786252 - DNA, 25 bp, Homo sapien
gcagtagctcttacataaactataa

SEQ ID NO: 2786253 - DNA, 25 bp, Homo sapien
tcttcatcgctatcttcactacttg

SEQ ID NO: 2786254 - DNA, 25 bp, Homo sapien
ttagggtctactcggagaaaattgc

SEQ ID NO: 2786255 - DNA, 25 bp, Homo sapien
tactcggagaaaattgcggcattca

SEQ ID NO: 2786256 - DNA, 25 bp, Homo sapien
cctgtaatgcctgcaatttattcag

SEQ ID NO: 2786257 - DNA, 25 bp, Homo sapien
tagcaagagtgaaagtccatccagt

SEQ ID NO: 2786258 - DNA, 25 bp, Homo sapien
ggaggattcacccttctggatttta

SEQ ID NO: 2786259 - DNA, 25 bp, Homo sapien
aagaatgtagttggacccctcacct

SEQ ID NO: 2786260 - DNA, 25 bp, Homo sapien
cccacatatacatagcgaactgagt

SEQ ID NO: 2786261 - DNA, 25 bp, Homo sapien
gattccagtatgaataatgcaaagc

SEQ ID NO: 2786262 - DNA, 25 bp, Homo sapien
tttttacagcctgctctgacactgt

SEQ ID NO: 2786263 - DNA, 25 bp, Homo sapien
ttttttacagcctgctctgacactg

SEQ ID NO: 2786264 - DNA, 25 bp, Homo sapien
attttttacagcctgctctgacact

SEQ ID NO: 2786265 - DNA, 25 bp, Homo sapien
ttttacagcctgctctgacactgtc

SEQ ID NO: 2786266 - DNA, 25 bp, Homo sapien
tatacattattgaggtggggcatca

SEQ ID NO: 2786267 - DNA, 25 bp, Homo sapien
tatatacagtccaaacataaaacag

SEQ ID NO: 2786268 - DNA, 25 bp, Homo sapien
cttgaaatggagatataatcctaac

SEQ ID NO: 2786269 - DNA, 25 bp, Homo sapien
ttcccaaacccttgaaatggagata

SEQ ID NO: 2786270 - DNA, 25 bp, Homo sapien
aaactgcaactcttctgaagctcac

SEQ ID NO: 2786271 - DNA, 25 bp, Homo sapien
cagcaaactccaggtcttttaagag

SEQ ID NO: 2786272 - DNA, 25 bp, Homo sapien
ttgcacagcaaactccaggtctttt

SEQ ID NO: 2786273 - DNA, 25 bp, Homo sapien
agcaaactccaggtcttttaagagg

SEQ ID NO: 2786274 - DNA, 25 bp, Homo sapien
gcacagcaaactccaggtcttttaa

SEQ ID NO: 2786275 - DNA, 25 bp, Homo sapien
ggacttgagtaagagacatgtcact

SEQ ID NO: 2786276 - DNA, 25 bp, Homo sapien
gagtaagagacatgtcactatatac

SEQ ID NO: 2786277 - DNA, 25 bp, Homo sapien
ctctgtaaggatatagattggttac

SEQ ID NO: 2786278 - DNA, 25 bp, Homo sapien
cttgagtaagagacatgtcactata

SEQ ID NO: 2786279 - DNA, 25 bp, Homo sapien
gcagatgtcttaatagtccattaaa

SEQ ID NO: 2786280 - DNA, 25 bp, Homo sapien
gacaaagcagtagaaattagtcatt

SEQ ID NO: 2786281 - DNA, 25 bp, Homo sapien
ggctaaatgagtttctcaatgcaag

SEQ ID NO: 2786282 - DNA, 25 bp, Homo sapien
aaaatgccttcataggccaggtgtg

SEQ ID NO: 2786283 - DNA, 25 bp, Homo sapien
agtaatcaaccctctaattattcat

SEQ ID NO: 2786284 - DNA, 25 bp, Homo sapien
ctgtattagcttaatctgtttagta

SEQ ID NO: 2786285 - DNA, 25 bp, Homo sapien
tgtattagcttaatctgtttagtac

SEQ ID NO: 2786286 - DNA, 25 bp, Homo sapien
cagttttgtgccaattacatcagta

SEQ ID NO: 2786287 - DNA, 25 bp, Homo sapien
agaaaacagttttgtgccaattaca

SEQ ID NO: 2786288 - DNA, 25 bp, Homo sapien
cagtgaaggagataataagaaaaca

SEQ ID NO: 2786289 - DNA, 25 bp, Homo sapien
tcagtgaaggagataataagaaaac

SEQ ID NO: 2786290 - DNA, 25 bp, Homo sapien
tcagctcttcatggagagtggtgaa

SEQ ID NO: 2786291 - DNA, 25 bp, Homo sapien
cagctcttcatggagagtggtgaat

SEQ ID NO: 2786292 - DNA, 25 bp, Homo sapien
gctcttcatggagagtggtgaatca

SEQ ID NO: 2786293 - DNA, 25 bp, Homo sapien
tcttcatggagagtggtgaatcact

SEQ ID NO: 2786294 - DNA, 25 bp, Homo sapien
aaggcgcttgcttcccgccagctgt

SEQ ID NO: 2786295 - DNA, 25 bp, Homo sapien
ggtaactcgagcctctggctttcga

SEQ ID NO: 2786296 - DNA, 25 bp, Homo sapien
agcaccctcgctacggtcgggaagg

SEQ ID NO: 2786297 - DNA, 25 bp, Homo sapien
aacaaggcacagtcaaagcggcgtt

SEQ ID NO: 2786298 - DNA, 25 bp, Homo sapien
ctagcgacggcagaaccagtagatg

SEQ ID NO: 2786299 - DNA, 25 bp, Homo sapien
cggatgcagtttccggacgagtcat

SEQ ID NO: 2786300 - DNA, 25 bp, Homo sapien
cagaaccagtagatgcggatgcagt

SEQ ID NO: 2786301 - DNA, 25 bp, Homo sapien
tagatgcggatgcagtttccggacg

SEQ ID NO: 2786302 - DNA, 25 bp, Homo sapien
tgctcgggtccggtaacaacatggc

SEQ ID NO: 2786303 - DNA, 25 bp, Homo sapien
tactcgtaggcggacagctttagtg

SEQ ID NO: 2786304 - DNA, 25 bp, Homo sapien
tgcaccactggacttaaggaagagt

SEQ ID NO: 2786305 - DNA, 25 bp, Homo sapien
tacattggaataacccttctcaggg

SEQ ID NO: 2786306 - DNA, 25 bp, Homo sapien
tatgaatgctgtagaagctgtctcc

SEQ ID NO: 2786307 - DNA, 25 bp, Homo sapien
tgagaaatttcactggtagcgtagc

SEQ ID NO: 2786308 - DNA, 25 bp, Homo sapien
caagcccaagacgtctcaaaggttg

SEQ ID NO: 2786309 - DNA, 25 bp, Homo sapien
tcccacagggtcctggatagttagg

SEQ ID NO: 2786310 - DNA, 25 bp, Homo sapien
taatgttctgcaatatctgggacct

SEQ ID NO: 2786311 - DNA, 25 bp, Homo sapien
tcctcaaatggttaggagctgccta

SEQ ID NO: 2786312 - DNA, 25 bp, Homo sapien
gagctgcctagaatactccgtggat

SEQ ID NO: 2786313 - DNA, 25 bp, Homo sapien
aacccgtagggtcatatgtctcaag

SEQ ID NO: 2786314 - DNA, 25 bp, Homo sapien
gcatatacccttccctctgtcaaat

SEQ ID NO: 2786315 - DNA, 25 bp, Homo sapien
tgcatatacccttccctctgtcaaa

SEQ ID NO: 2786316 - DNA, 25 bp, Homo sapien
tttgcatatacccttccctctgtca

SEQ ID NO: 2786317 - DNA, 25 bp, Homo sapien
tatacccttccctctgtcaaatttc

SEQ ID NO: 2786318 - DNA, 25 bp, Homo sapien
gaaggtaaagacacaagataaactg

SEQ ID NO: 2786319 - DNA, 25 bp, Homo sapien
gctcggaaaagcattctacggccct

SEQ ID NO: 2786320 - DNA, 25 bp, Homo sapien
cttatggcaaaagttaggtgagccc

SEQ ID NO: 2786321 - DNA, 25 bp, Homo sapien
ggtgagcccagatgtaagacctata

SEQ ID NO: 2786322 - DNA, 25 bp, Homo sapien
ctttctatattcagccagttttccc

SEQ ID NO: 2786323 - DNA, 25 bp, Homo sapien
aggcctgtgttctgttctattgttc

SEQ ID NO: 2786324 - DNA, 25 bp, Homo sapien
gcctgtgttctgttctattgttctg

SEQ ID NO: 2786325 - DNA, 25 bp, Homo sapien
tgaggcctgtgttctgttctattgt

SEQ ID NO: 2786326 - DNA, 25 bp, Homo sapien
ttctctaataactatatgatgggct

SEQ ID NO: 2786327 - DNA, 25 bp, Homo sapien
ggtaggcctctgcatacatattgtg

SEQ ID NO: 2786328 - DNA, 25 bp, Homo sapien
cagtattttgtgatgtccagctctt

SEQ ID NO: 2786329 - DNA, 25 bp, Homo sapien
tgttcttatccaaggtgccatccat

SEQ ID NO: 2786330 - DNA, 25 bp, Homo sapien
acgtccatccctcagtgattccaca

SEQ ID NO: 2786331 - DNA, 25 bp, Homo sapien
ctccacgtccatccctcagtgattc

SEQ ID NO: 2786332 - DNA, 25 bp, Homo sapien
ccacgtccatccctcagtgattcca

SEQ ID NO: 2786333 - DNA, 25 bp, Homo sapien
gtccatccctcagtgattccacatt

SEQ ID NO: 2786334 - DNA, 25 bp, Homo sapien
tctgttaactcatccattgctctaa

SEQ ID NO: 2786335 - DNA, 25 bp, Homo sapien
tccattgctctaactgcatcactca

SEQ ID NO: 2786336 - DNA, 25 bp, Homo sapien
tcacttctgttaactcatccattgc

SEQ ID NO: 2786337 - DNA, 25 bp, Homo sapien
taactcatccattgctctaactgca

SEQ ID NO: 2786338 - DNA, 25 bp, Homo sapien
taacttggctgtaccttagtgctgg

SEQ ID NO: 2786339 - DNA, 25 bp, Homo sapien
tagggttggcaccagttcaagttct

SEQ ID NO: 2786340 - DNA, 25 bp, Homo sapien
tagtgctggtggtgatacttgccca

SEQ ID NO: 2786341 - DNA, 25 bp, Homo sapien
actattcaagcaccaatgagcaggc

SEQ ID NO: 2786342 - DNA, 25 bp, Homo sapien
tatatggcatgcttaatttcagctc

SEQ ID NO: 2786343 - DNA, 25 bp, Homo sapien
tgttatatggcatgcttaatttcag

SEQ ID NO: 2786344 - DNA, 25 bp, Homo sapien
ggcatgcttaatttcagctcattca

SEQ ID NO: 2786345 - DNA, 25 bp, Homo sapien
taatttcagctcattcagcataatg

SEQ ID NO: 2786346 - DNA, 25 bp, Homo sapien
cagaaatatttcctatgggcctccc

SEQ ID NO: 2786347 - DNA, 25 bp, Homo sapien
gaagtatcagacagaaatatttcct

SEQ ID NO: 2786348 - DNA, 25 bp, Homo sapien
gaaaagaagtatcagacagaaatat

SEQ ID NO: 2786349 - DNA, 25 bp, Homo sapien
aagagagaaaagaagtatcagacag

SEQ ID NO: 2786350 - DNA, 25 bp, Homo sapien
tctcgtttacctgctattgccaaat

SEQ ID NO: 2786351 - DNA, 25 bp, Homo sapien
agtgtatgtcttaccctttgtccag

SEQ ID NO: 2786352 - DNA, 25 bp, Homo sapien
tttaatgcccacttatgctgccact

SEQ ID NO: 2786353 - DNA, 25 bp, Homo sapien
cattcagagactttcatgatcagag

SEQ ID NO: 2786354 - DNA, 25 bp, Homo sapien
gcaatttagaccttggattttgtaa

SEQ ID NO: 2786355 - DNA, 25 bp, Homo sapien
taatgcctttttattgcaatttaga

SEQ ID NO: 2786356 - DNA, 25 bp, Homo sapien
tcagatagcatatatagggccctta

SEQ ID NO: 2786357 - DNA, 25 bp, Homo sapien
gtaacctgataagcaacaacatcat

SEQ ID NO: 2786358 - DNA, 25 bp, Homo sapien
cgtgtgaggtacataaacctgttct

SEQ ID NO: 2786359 - DNA, 25 bp, Homo sapien
tgtccttatcaagctgtcactacca

SEQ ID NO: 2786360 - DNA, 25 bp, Homo sapien
aacctgttctgttgtagcactgtgg

SEQ ID NO: 2786361 - DNA, 25 bp, Homo sapien
gttccttgataagatctgacgtgtg

SEQ ID NO: 2786362 - DNA, 25 bp, Homo sapien
agtaatcggtagtgcgtgcaggccc

SEQ ID NO: 2786363 - DNA, 25 bp, Homo sapien
tattttcatgcgtacatttctgtcg

SEQ ID NO: 2786364 - DNA, 25 bp, Homo sapien
tcatcctccaaagggtgctttgtca

SEQ ID NO: 2786365 - DNA, 25 bp, Homo sapien
tgtcgtcatcctccaaagggtgctt

SEQ ID NO: 2786366 - DNA, 25 bp, Homo sapien
aggcttgtggcaggcgacttaatcc

SEQ ID NO: 2786367 - DNA, 25 bp, Homo sapien
ggcttgtggcaggcgacttaatccc

SEQ ID NO: 2786368 - DNA, 25 bp, Homo sapien
tgaaagtggtgcaggaaaccccaaa

SEQ ID NO: 2786369 - DNA, 25 bp, Homo sapien
tcctgggcccactgacaattcaggt

SEQ ID NO: 2786370 - DNA, 25 bp, Homo sapien
catggttctcatagaatcccttaag

SEQ ID NO: 2786371 - DNA, 25 bp, Homo sapien
catagaatcccttaagtcaaagtca

SEQ ID NO: 2786372 - DNA, 25 bp, Homo sapien
gaagtgattgattgatgtgcaagaa

SEQ ID NO: 2786373 - DNA, 25 bp, Homo sapien
cagaagtgattgattgatgtgcaag

SEQ ID NO: 2786374 - DNA, 25 bp, Homo sapien
gtgattgattgatgtgcaagaagca

SEQ ID NO: 2786375 - DNA, 25 bp, Homo sapien
agtgattgattgatgtgcaagaagc

SEQ ID NO: 2786376 - DNA, 25 bp, Homo sapien
catgtacagaccctttcagagtgtc

SEQ ID NO: 2786377 - DNA, 25 bp, Homo sapien
tctgttccatgtacagaccctttca

SEQ ID NO: 2786378 - DNA, 25 bp, Homo sapien
gttccatgtacagaccctttcagag

SEQ ID NO: 2786379 - DNA, 25 bp, Homo sapien
ccaacaatgcccagtctgttccatg

SEQ ID NO: 2786380 - DNA, 25 bp, Homo sapien
catcatccccccatacaaattcatc

SEQ ID NO: 2786381 - DNA, 25 bp, Homo sapien
tcatccccccatacaaattcatcca

SEQ ID NO: 2786382 - DNA, 25 bp, Homo sapien
acacatcatccccccatacaaattc

SEQ ID NO: 2786383 - DNA, 25 bp, Homo sapien
acatcatccccccatacaaattcat

SEQ ID NO: 2786384 - DNA, 25 bp, Homo sapien
tcttgagaaggggaatccatctgct

SEQ ID NO: 2786385 - DNA, 25 bp, Homo sapien
tcattcttgagaaggggaatccatc

SEQ ID NO: 2786386 - DNA, 25 bp, Homo sapien
agtctgttggccaataccagatctg

SEQ ID NO: 2786387 - DNA, 25 bp, Homo sapien
caataccagatctggatctatctct

SEQ ID NO: 2786388 - DNA, 25 bp, Homo sapien
ccatttgcagtagaatgcttcattt

SEQ ID NO: 2786389 - DNA, 25 bp, Homo sapien
catttgcagtagaatgcttcatttc

SEQ ID NO: 2786390 - DNA, 25 bp, Homo sapien
accatttgcagtagaatgcttcatt

SEQ ID NO: 2786391 - DNA, 25 bp, Homo sapien
atttgcagtagaatgcttcatttcc

SEQ ID NO: 2786392 - DNA, 25 bp, Homo sapien
ctgtgcctgggtgtagatgggaata

SEQ ID NO: 2786393 - DNA, 25 bp, Homo sapien
tgtgcctgggtgtagatgggaataa

SEQ ID NO: 2786394 - DNA, 25 bp, Homo sapien
gtgcctgggtgtagatgggaataaa

SEQ ID NO: 2786395 - DNA, 25 bp, Homo sapien
agatactcgtcctggttccgggcca

SEQ ID NO: 2786396 - DNA, 25 bp, Homo sapien
tctagtcagagggtgataacacatc

SEQ ID NO: 2786397 - DNA, 25 bp, Homo sapien
aaacatttggcgttctcaaaggcag

SEQ ID NO: 2786398 - DNA, 25 bp, Homo sapien
ggtttacttacgcaagcttagctgc

SEQ ID NO: 2786399 - DNA, 25 bp, Homo sapien
ttatgtaaacagtagccactaacac

SEQ ID NO: 2786400 - DNA, 25 bp, Homo sapien
tctggatacgaaattgccatttcag

SEQ ID NO: 2786401 - DNA, 25 bp, Homo sapien
attttatcttggtcatgcgcccaat

SEQ ID NO: 2786402 - DNA, 25 bp, Homo sapien
ggctgacagatatgcctgtctggat

SEQ ID NO: 2786403 - DNA, 25 bp, Homo sapien
gccaacgtgccagaagggccaatct

SEQ ID NO: 2786404 - DNA, 25 bp, Homo sapien
tggaggttccgcctgcagagtcatg

SEQ ID NO: 2786405 - DNA, 25 bp, Homo sapien
tgagaggccttgaggatacacagcc

SEQ ID NO: 2786406 - DNA, 25 bp, Homo sapien
catctgatgagtgctaatgggtgac

SEQ ID NO: 2786407 - DNA, 25 bp, Homo sapien
ctgggacatgaaagaacctgcttca

SEQ ID NO: 2786408 - DNA, 25 bp, Homo sapien
cctgcttcagacacccatatagggc

SEQ ID NO: 2786409 - DNA, 25 bp, Homo sapien
gaaagaacctgcttcagacacccat

SEQ ID NO: 2786410 - DNA, 25 bp, Homo sapien
agacacccatatagggcaggcctcc

SEQ ID NO: 2786411 - DNA, 25 bp, Homo sapien
tcatctacaccaaggttccacgcga

SEQ ID NO: 2786412 - DNA, 25 bp, Homo sapien
ggctcatctacaccaaggttccacg

SEQ ID NO: 2786413 - DNA, 25 bp, Homo sapien
ctacaccaaggttccacgcgattag

SEQ ID NO: 2786414 - DNA, 25 bp, Homo sapien
ggaaattccactggctcatctacac

SEQ ID NO: 2786415 - DNA, 25 bp, Homo sapien
catgcgtcccttggttgcaaggcag

SEQ ID NO: 2786416 - DNA, 25 bp, Homo sapien
tgcaaggcaggaaacctaattctgg

SEQ ID NO: 2786417 - DNA, 25 bp, Homo sapien
gcaagaggcctaaaacatgcgtccc

SEQ ID NO: 2786418 - DNA, 25 bp, Homo sapien
gacatttgtatcagaagagtcccgt

SEQ ID NO: 2786419 - DNA, 25 bp, Homo sapien
cataactcaacctctcctcctcaaa

SEQ ID NO: 2786420 - DNA, 25 bp, Homo sapien
tctgaggccactggacacattcaga

SEQ ID NO: 2786421 - DNA, 25 bp, Homo sapien
ttcagaaagtgtgttcaagagtacc

SEQ ID NO: 2786422 - DNA, 25 bp, Homo sapien
tgatgtggtcagtcagaactttctg

SEQ ID NO: 2786423 - DNA, 25 bp, Homo sapien
tcagcctcttctgcatgtgtccctg

SEQ ID NO: 2786424 - DNA, 25 bp, Homo sapien
ttcctctttgctagcctcagcctct

SEQ ID NO: 2786425 - DNA, 25 bp, Homo sapien
gcctcagcctcttctgcatgtgtcc

SEQ ID NO: 2786426 - DNA, 25 bp, Homo sapien
agcctcagcctcttctgcatgtgtc

SEQ ID NO: 2786427 - DNA, 25 bp, Homo sapien
gcagatgatggaagccagtgcagat

SEQ ID NO: 2786428 - DNA, 25 bp, Homo sapien
gatgatggaagccagtgcagatgat

SEQ ID NO: 2786429 - DNA, 25 bp, Homo sapien
atggaagccagtgcagatgatggaa

SEQ ID NO: 2786430 - DNA, 25 bp, Homo sapien
tgcagatgatggaagccagtgcaga

SEQ ID NO: 2786431 - DNA, 25 bp, Homo sapien
cttgccaggatgaatcaggccaacg

SEQ ID NO: 2786432 - DNA, 25 bp, Homo sapien
ttggtagagggccagccaaagcccc

SEQ ID NO: 2786433 - DNA, 25 bp, Homo sapien
cagttgggcggccaatacattctgg

SEQ ID NO: 2786434 - DNA, 25 bp, Homo sapien
gatgaatcaggccaacgcagctgct

SEQ ID NO: 2786435 - DNA, 25 bp, Homo sapien
tgtgcctggcgtggaatttcactcc

SEQ ID NO: 2786436 - DNA, 25 bp, Homo sapien
gggatggccctcacaatggtagttt

SEQ ID NO: 2786437 - DNA, 25 bp, Homo sapien
tcagatctggattgcaaacctatgc

SEQ ID NO: 2786438 - DNA, 25 bp, Homo sapien
gaaaggcactctgatgctgccccgg

SEQ ID NO: 2786439 - DNA, 25 bp, Homo sapien
cagaaactgcccatcttttatttat

SEQ ID NO: 2786440 - DNA, 25 bp, Homo sapien
gccacagaaactgcccatcttttat

SEQ ID NO: 2786441 - DNA, 25 bp, Homo sapien
aaaatgccacagaaactgcccatct

SEQ ID NO: 2786442 - DNA, 25 bp, Homo sapien
aatgccacagaaactgcccatcttt

SEQ ID NO: 2786443 - DNA, 25 bp, Homo sapien
aagggaattcagtgctcgggccata

SEQ ID NO: 2786444 - DNA, 25 bp, Homo sapien
taactgttctttgaaaaggcgcaag

SEQ ID NO: 2786445 - DNA, 25 bp, Homo sapien
ttcactgaatggctaagacggcact

SEQ ID NO: 2786446 - DNA, 25 bp, Homo sapien
cagggcacattagcaccaagttaac

SEQ ID NO: 2786447 - DNA, 25 bp, Homo sapien
gatccgggccctggtgattcctctt

SEQ ID NO: 2786448 - DNA, 25 bp, Homo sapien
cttagatccgggccctggtgattcc

SEQ ID NO: 2786449 - DNA, 25 bp, Homo sapien
tccgggccctggtgattcctcttgt

SEQ ID NO: 2786450 - DNA, 25 bp, Homo sapien
tagatccgggccctggtgattcctc

SEQ ID NO: 2786451 - DNA, 25 bp, Homo sapien
tcaatagctctctctggaaggctca

SEQ ID NO: 2786452 - DNA, 25 bp, Homo sapien
ctggaaggctcagggttgagaactg

SEQ ID NO: 2786453 - DNA, 25 bp, Homo sapien
tctggaaggctcagggttgagaact

SEQ ID NO: 2786454 - DNA, 25 bp, Homo sapien
agagagaaagcaggtaacaagatac

SEQ ID NO: 2786455 - DNA, 25 bp, Homo sapien
tgacttgcccaagaaactgggtttc

SEQ ID NO: 2786456 - DNA, 25 bp, Homo sapien
gaacctgctgcaagctacacgtgtt

SEQ ID NO: 2786457 - DNA, 25 bp, Homo sapien
tgtaatttaagagcaccatgatgga

SEQ ID NO: 2786458 - DNA, 25 bp, Homo sapien
tttggaaaaagcctagtcatctgca

SEQ ID NO: 2786459 - DNA, 25 bp, Homo sapien
cagcaatccaaagggcagaagccgt

SEQ ID NO: 2786460 - DNA, 25 bp, Homo sapien
actaaggcatcctgtgtggtggcag

SEQ ID NO: 2786461 - DNA, 25 bp, Homo sapien
gcaaaagggtctgcctggttaccga

SEQ ID NO: 2786462 - DNA, 25 bp, Homo sapien
tctcagtaagctcaacacacgtgca

SEQ ID NO: 2786463 - DNA, 25 bp, Homo sapien
tctcagctttacttgcacaatggca

SEQ ID NO: 2786464 - DNA, 25 bp, Homo sapien
ctcagctttacttgcacaatggcaa

SEQ ID NO: 2786465 - DNA, 25 bp, Homo sapien
tcagctttacttgcacaatggcaag

SEQ ID NO: 2786466 - DNA, 25 bp, Homo sapien
gctttaaactatgcccctcattatt

SEQ ID NO: 2786467 - DNA, 25 bp, Homo sapien
tgcagtaactgatgcactgctttaa

SEQ ID NO: 2786468 - DNA, 25 bp, Homo sapien
cagaaccaggggattattcctaagg

SEQ ID NO: 2786469 - DNA, 25 bp, Homo sapien
cctaaggaaattaagtggaatgaag

SEQ ID NO: 2786470 - DNA, 25 bp, Homo sapien
gaaatgacaaggcactctctctggc

SEQ ID NO: 2786471 - DNA, 25 bp, Homo sapien
tccacagggtaatgcatttgcaagg

SEQ ID NO: 2786472 - DNA, 25 bp, Homo sapien
gaaagaacacaaacgctccacagta

SEQ ID NO: 2786473 - DNA, 25 bp, Homo sapien
taatggtccaaggaggtaaacaggc

SEQ ID NO: 2786474 - DNA, 25 bp, Homo sapien
cagtgggcaataagccactttattc

SEQ ID NO: 2786475 - DNA, 25 bp, Homo sapien
gtctgaagtatgctcgactgcagaa

SEQ ID NO: 2786476 - DNA, 25 bp, Homo sapien
ttcagcaccagtgggcaataagcca

SEQ ID NO: 2786477 - DNA, 25 bp, Homo sapien
tgctcgactgcagaacttgaacttc

SEQ ID NO: 2786478 - DNA, 25 bp, Homo sapien
tccttgctaaaaggcatttctttcc

SEQ ID NO: 2786479 - DNA, 25 bp, Homo sapien
cgcgcccggcctccaactttcttct

SEQ ID NO: 2786480 - DNA, 25 bp, Homo sapien
cttttccttgctaaaaggcatttct

SEQ ID NO: 2786481 - DNA, 25 bp, Homo sapien
tttgagacagagttttgctcttgtt

SEQ ID NO: 2786482 - DNA, 25 bp, Homo sapien
tacagtagtgggtttactgtgctct

SEQ ID NO: 2786483 - DNA, 25 bp, Homo sapien
ctacactacagtagtgggtttactg

SEQ ID NO: 2786484 - DNA, 25 bp, Homo sapien
ctacagtagtgggtttactgtgctc

SEQ ID NO: 2786485 - DNA, 25 bp, Homo sapien
cactacagtagtgggtttactgtgc

SEQ ID NO: 2786486 - DNA, 25 bp, Homo sapien
ggtcattagaaaccacaggcccctc

SEQ ID NO: 2786487 - DNA, 25 bp, Homo sapien
ggtgggtcattagaaaccacaggcc

SEQ ID NO: 2786488 - DNA, 25 bp, Homo sapien
aaggtgggtcattagaaaccacagg

SEQ ID NO: 2786489 - DNA, 25 bp, Homo sapien
taaaggtgggtcattagaaaccaca

SEQ ID NO: 2786490 - DNA, 25 bp, Homo sapien
cactgctgcattgatggaggccgaa

SEQ ID NO: 2786491 - DNA, 25 bp, Homo sapien
ggaggccgaacagtttctagacagt

SEQ ID NO: 2786492 - DNA, 25 bp, Homo sapien
tctagacagtcactagatgcctgtc

SEQ ID NO: 2786493 - DNA, 25 bp, Homo sapien
tccggtgtaggagagacactgcaca

SEQ ID NO: 2786494 - DNA, 25 bp, Homo sapien
tgctcttgcacagaacaatccgatg

SEQ ID NO: 2786495 - DNA, 25 bp, Homo sapien
gaatgtcttagaaaggtcactgctc

SEQ ID NO: 2786496 - DNA, 25 bp, Homo sapien
ttcctctggacattgtgcagctggg

SEQ ID NO: 2786497 - DNA, 25 bp, Homo sapien
caaactgcagcggatgcggacagga

SEQ ID NO: 2786498 - DNA, 25 bp, Homo sapien
ttctatctcttgaacttgttccact

SEQ ID NO: 2786499 - DNA, 25 bp, Homo sapien
ttgtgtcgagtccatttctatctct

SEQ ID NO: 2786500 - DNA, 25 bp, Homo sapien
ccatttctatctcttgaacttgttc

SEQ ID NO: 2786501 - DNA, 25 bp, Homo sapien
catttctatctcttgaacttgttcc

SEQ ID NO: 2786502 - DNA, 25 bp, Homo sapien
gcagggctctttttcgacaggccgg

SEQ ID NO: 2786503 - DNA, 25 bp, Homo sapien
gacaggccggtgtgttaaacaacca

SEQ ID NO: 2786504 - DNA, 25 bp, Homo sapien
gaaggtccgatcttcctgatgcaga

SEQ ID NO: 2786505 - DNA, 25 bp, Homo sapien
acatgactggttgttgcagggctct

SEQ ID NO: 2786506 - DNA, 25 bp, Homo sapien
ttctccacgtatttgaccctctgat

SEQ ID NO: 2786507 - DNA, 25 bp, Homo sapien
ccacgtatttgaccctctgatggca

SEQ ID NO: 2786508 - DNA, 25 bp, Homo sapien
tccacgtatttgaccctctgatggc

SEQ ID NO: 2786509 - DNA, 25 bp, Homo sapien
cgtatttgaccctctgatggcattc

SEQ ID NO: 2786510 - DNA, 25 bp, Homo sapien
acagtaattgttctggacaatggag

SEQ ID NO: 2786511 - DNA, 25 bp, Homo sapien
caggtggcttactgtcaggatcaca

SEQ ID NO: 2786512 - DNA, 25 bp, Homo sapien
tgtcatccaaccttttacagaccac

SEQ ID NO: 2786513 - DNA, 25 bp, Homo sapien
ctttgattttcaggtggcttactgt

SEQ ID NO: 2786514 - DNA, 25 bp, Homo sapien
tggatcgctgccgtcttatctgttc

SEQ ID NO: 2786515 - DNA, 25 bp, Homo sapien
tcgctgccgtcttatctgttccaca

SEQ ID NO: 2786516 - DNA, 25 bp, Homo sapien
gctgccgtcttatctgttccacatt

SEQ ID NO: 2786517 - DNA, 25 bp, Homo sapien
gatcgctgccgtcttatctgttcca

SEQ ID NO: 2786518 - DNA, 25 bp, Homo sapien
ggagtgcctccgttatcatgttatg

SEQ ID NO: 2786519 - DNA, 25 bp, Homo sapien
tgaaacaggatcattcagtgaaaga

SEQ ID NO: 2786520 - DNA, 25 bp, Homo sapien
gaaactgtcacctaaagagctacac

SEQ ID NO: 2786521 - DNA, 25 bp, Homo sapien
ccaagttcccctaaatcatagaaat

SEQ ID NO: 2786522 - DNA, 25 bp, Homo sapien
taaagactgacagggcaaactatta

SEQ ID NO: 2786523 - DNA, 25 bp, Homo sapien
agggcaaactattaaatccaccaag

SEQ ID NO: 2786524 - DNA, 25 bp, Homo sapien
taaatttaaagactgacagggcaaa

SEQ ID NO: 2786525 - DNA, 25 bp, Homo sapien
aactattaaatccaccaagctcatg

SEQ ID NO: 2786526 - DNA, 25 bp, Homo sapien
caatgaagtttatgtgacgacaaca

SEQ ID NO: 2786527 - DNA, 25 bp, Homo sapien
tcaggcatagttgtgatccattcac

SEQ ID NO: 2786528 - DNA, 25 bp, Homo sapien
aacttactggcaaaatgtcctagag

SEQ ID NO: 2786529 - DNA, 25 bp, Homo sapien
taaacatagtcaaacaacttactgg

SEQ ID NO: 2786530 - DNA, 25 bp, Homo sapien
atgctgcagcgtactatattggcct

SEQ ID NO: 2786531 - DNA, 25 bp, Homo sapien
tgatgctgcagcgtactatattggc

SEQ ID NO: 2786532 - DNA, 25 bp, Homo sapien
aatgatgctgcagcgtactatattg

SEQ ID NO: 2786533 - DNA, 25 bp, Homo sapien
aaatgatgctgcagcgtactatatt

SEQ ID NO: 2786534 - DNA, 25 bp, Homo sapien
gaagtttcattaaggagaagatgac

SEQ ID NO: 2786535 - DNA, 25 bp, Homo sapien
tgaagtttcattaaggagaagatga

SEQ ID NO: 2786536 - DNA, 25 bp, Homo sapien
gactttacttccctcaatcataagc

SEQ ID NO: 2786537 - DNA, 25 bp, Homo sapien
aagggactttacttccctcaatcat

SEQ ID NO: 2786538 - DNA, 25 bp, Homo sapien
gtggaggcgatgcatttagtctcca

SEQ ID NO: 2786539 - DNA, 25 bp, Homo sapien
ttgcctgttaggatcaaggtgtacg

SEQ ID NO: 2786540 - DNA, 25 bp, Homo sapien
caaggtgtacggtggaggcgatgca

SEQ ID NO: 2786541 - DNA, 25 bp, Homo sapien
cctgttaggatcaaggtgtacggtg

SEQ ID NO: 2786542 - DNA, 25 bp, Homo sapien
gccagaggtaaagaattgcattggt

SEQ ID NO: 2786543 - DNA, 25 bp, Homo sapien
tcccagccagaggtaaagaattgca

SEQ ID NO: 2786544 - DNA, 25 bp, Homo sapien
ctctcccagccagaggtaaagaatt

SEQ ID NO: 2786545 - DNA, 25 bp, Homo sapien
ccagccagaggtaaagaattgcatt

SEQ ID NO: 2786546 - DNA, 25 bp, Homo sapien
taccaagaatgtgttcacgaaaggc

SEQ ID NO: 2786547 - DNA, 25 bp, Homo sapien
cagcagagacactcattgtgccaag

SEQ ID NO: 2786548 - DNA, 25 bp, Homo sapien
ggcaaacagcccaccttcaagatag

SEQ ID NO: 2786549 - DNA, 25 bp, Homo sapien
tgaaaaacgcacatgggacaaccaa

SEQ ID NO: 2786550 - DNA, 25 bp, Homo sapien
gtgggctgcctagtgggcatcttac

SEQ ID NO: 2786551 - DNA, 25 bp, Homo sapien
aacctgcaagaaatgtttccaatta

SEQ ID NO: 2786552 - DNA, 25 bp, Homo sapien
tgcaagaaatgtttccaattagctt

SEQ ID NO: 2786553 - DNA, 25 bp, Homo sapien
cctgcaagaaatgtttccaattagc

SEQ ID NO: 2786554 - DNA, 25 bp, Homo sapien
ccagcacaagtagctgagcattctg

SEQ ID NO: 2786555 - DNA, 25 bp, Homo sapien
tccagcacaagtagctgagcattct

SEQ ID NO: 2786556 - DNA, 25 bp, Homo sapien
ctccagcacaagtagctgagcattc

SEQ ID NO: 2786557 - DNA, 25 bp, Homo sapien
cattgaacttatacctaattcccaa

SEQ ID NO: 2786558 - DNA, 25 bp, Homo sapien
cactgccagttcgagtgatgggaac

SEQ ID NO: 2786559 - DNA, 25 bp, Homo sapien
cgagtgatgggaacattgaacttat

SEQ ID NO: 2786560 - DNA, 25 bp, Homo sapien
tatctccactgccagttcgagtgat

SEQ ID NO: 2786561 - DNA, 25 bp, Homo sapien
acaactggtgaagacaattaaaata

SEQ ID NO: 2786562 - DNA, 25 bp, Homo sapien
ttgaaaacaactggtgaagacaatt

SEQ ID NO: 2786563 - DNA, 25 bp, Homo sapien
ctgccattgaaaacaactggtgaag

SEQ ID NO: 2786564 - DNA, 25 bp, Homo sapien
caattaaaatacaatgagccttcat

SEQ ID NO: 2786565 - DNA, 25 bp, Homo sapien
tagtccaggcaccattaatatagta

SEQ ID NO: 2786566 - DNA, 25 bp, Homo sapien
gaggtaggacctagagcttccaagg

SEQ ID NO: 2786567 - DNA, 25 bp, Homo sapien
ctggttcatcagttggtctcttgta

SEQ ID NO: 2786568 - DNA, 25 bp, Homo sapien
tcctaggccagtcaatagtccaggc

SEQ ID NO: 2786569 - DNA, 25 bp, Homo sapien
gagatcagaaactgggaaggctgac

SEQ ID NO: 2786570 - DNA, 25 bp, Homo sapien
caagtgaagaagagagatcagaaac

SEQ ID NO: 2786571 - DNA, 25 bp, Homo sapien
agaagagagatcagaaactgggaag

SEQ ID NO: 2786572 - DNA, 25 bp, Homo sapien
aagagagatcagaaactgggaaggc

SEQ ID NO: 2786573 - DNA, 25 bp, Homo sapien
gcaaactagcataccagtctaacat

SEQ ID NO: 2786574 - DNA, 25 bp, Homo sapien
aaatccagcaaactagcataccagt

SEQ ID NO: 2786575 - DNA, 25 bp, Homo sapien
aaactagcataccagtctaacatac

SEQ ID NO: 2786576 - DNA, 25 bp, Homo sapien
tccagcaaactagcataccagtcta

SEQ ID NO: 2786577 - DNA, 25 bp, Homo sapien
gagcctcttggtatctgcaccactt

SEQ ID NO: 2786578 - DNA, 25 bp, Homo sapien
tctaacttcaatgtgaacagagcct

SEQ ID NO: 2786579 - DNA, 25 bp, Homo sapien
gaacagagcctcttggtatctgcac

SEQ ID NO: 2786580 - DNA, 25 bp, Homo sapien
ttcaatgtgaacagagcctcttggt

SEQ ID NO: 2786581 - DNA, 25 bp, Homo sapien
aatggcatcacatgtgcttccgtcc

SEQ ID NO: 2786582 - DNA, 25 bp, Homo sapien
tgaagaacccttcaatggcatcaca

SEQ ID NO: 2786583 - DNA, 25 bp, Homo sapien
cagactcgacatctatcttccctag

SEQ ID NO: 2786584 - DNA, 25 bp, Homo sapien
ctgggcagtgaatcattgaagaacc

SEQ ID NO: 2786585 - DNA, 25 bp, Homo sapien
ccgcaggagcacgttcagtgtagaa

SEQ ID NO: 2786586 - DNA, 25 bp, Homo sapien
gcagtttaatgcacaaggttttacc

SEQ ID NO: 2786587 - DNA, 25 bp, Homo sapien
tgggtcccatcgatcaccgcaggag

SEQ ID NO: 2786588 - DNA, 25 bp, Homo sapien
tgatgcagatatccagtgaatccgc

SEQ ID NO: 2786589 - DNA, 25 bp, Homo sapien
ggcatattgtcaaagtctgcacact

SEQ ID NO: 2786590 - DNA, 25 bp, Homo sapien
cactgtttctctcgaaaatctcggg

SEQ ID NO: 2786591 - DNA, 25 bp, Homo sapien
tccagtatagggtttccagttataa

SEQ ID NO: 2786592 - DNA, 25 bp, Homo sapien
cagttataatactttcctcggaaag

SEQ ID NO: 2786593 - DNA, 25 bp, Homo sapien
ccacacccacctcccaagggcttca

SEQ ID NO: 2786594 - DNA, 25 bp, Homo sapien
cacacccacctcccaagggcttcat

SEQ ID NO: 2786595 - DNA, 25 bp, Homo sapien
ggagggtagtgagcctctcagctta

SEQ ID NO: 2786596 - DNA, 25 bp, Homo sapien
cagcaagtctcaaagattcatggca

SEQ ID NO: 2786597 - DNA, 25 bp, Homo sapien
tacactttgagcatacattagaaaa

SEQ ID NO: 2786598 - DNA, 25 bp, Homo sapien
agtgagcctctcagcttactgtagc

SEQ ID NO: 2786599 - DNA, 25 bp, Homo sapien
tacattttagtatgacagcagaatt

SEQ ID NO: 2786600 - DNA, 25 bp, Homo sapien
atatagttatgttaactgtatctcc

SEQ ID NO: 2786601 - DNA, 25 bp, Homo sapien
gctagtagagtcaatattaatgaag

SEQ ID NO: 2786602 - DNA, 25 bp, Homo sapien
aattgcctcaagttctgagctagta

SEQ ID NO: 2786603 - DNA, 25 bp, Homo sapien
tgttacaggagcgataccgtttcct

SEQ ID NO: 2786604 - DNA, 25 bp, Homo sapien
tacaggagcgataccgtttcctttc

SEQ ID NO: 2786605 - DNA, 25 bp, Homo sapien
tgtgttacaggagcgataccgtttc

SEQ ID NO: 2786606 - DNA, 25 bp, Homo sapien
atctgtgttacaggagcgataccgt

SEQ ID NO: 2786607 - DNA, 25 bp, Homo sapien
tcagggaggacaagaaagtacaact

SEQ ID NO: 2786608 - DNA, 25 bp, Homo sapien
cagcgttctagacaaaaatgggcac

SEQ ID NO: 2786609 - DNA, 25 bp, Homo sapien
aaccgttcacctgtaatgggcatgg

SEQ ID NO: 2786610 - DNA, 25 bp, Homo sapien
aaatgggcacttgacatgcggcagc

SEQ ID NO: 2786611 - DNA, 25 bp, Homo sapien
catctatgctctggggccaagtgcc

SEQ ID NO: 2786612 - DNA, 25 bp, Homo sapien
gctggactgtcacagtgtcttaggg

SEQ ID NO: 2786613 - DNA, 25 bp, Homo sapien
ctgctgcactctccccatagtgacc

SEQ ID NO: 2786614 - DNA, 25 bp, Homo sapien
gcactctccccatagtgaccaggga

SEQ ID NO: 2786615 - DNA, 25 bp, Homo sapien
aagccagtatttgaagccttctttg

SEQ ID NO: 2786616 - DNA, 25 bp, Homo sapien
ctattggctataagccagtatttga

SEQ ID NO: 2786617 - DNA, 25 bp, Homo sapien
ctttgtggtcaccaacagggattac

SEQ ID NO: 2786618 - DNA, 25 bp, Homo sapien
aaatcaatctattggctataagcca

SEQ ID NO: 2786619 - DNA, 25 bp, Homo sapien
tatttcgtcaattatggcattgctc

SEQ ID NO: 2786620 - DNA, 25 bp, Homo sapien
gattcctgtccaaagggctattgct

SEQ ID NO: 2786621 - DNA, 25 bp, Homo sapien
aacaatgccaacactactatcaaag

SEQ ID NO: 2786622 - DNA, 25 bp, Homo sapien
tatccttaatatcctgttcagtaac

SEQ ID NO: 2786623 - DNA, 25 bp, Homo sapien
cagctgctggaatactgttggtgac

SEQ ID NO: 2786624 - DNA, 25 bp, Homo sapien
tttgacacagtgtcccctcagctgc

SEQ ID NO: 2786625 - DNA, 25 bp, Homo sapien
tcaatattcccagtttgacacagtg

SEQ ID NO: 2786626 - DNA, 25 bp, Homo sapien
tgttggtgacacagcggttgctttt

SEQ ID NO: 2786627 - DNA, 25 bp, Homo sapien
gctgaagcatcgcagttgaggattt

SEQ ID NO: 2786628 - DNA, 25 bp, Homo sapien
tgaagcatcgcagttgaggattttg

SEQ ID NO: 2786629 - DNA, 25 bp, Homo sapien
tgctgctgaagcatcgcagttgagg

SEQ ID NO: 2786630 - DNA, 25 bp, Homo sapien
tttgctgctgaagcatcgcagttga

SEQ ID NO: 2786631 - DNA, 25 bp, Homo sapien
caacagctgcttgcaataaaggatc

SEQ ID NO: 2786632 - DNA, 25 bp, Homo sapien
catttatggttcaggatatatggcc

SEQ ID NO: 2786633 - DNA, 25 bp, Homo sapien
ccatgtattagctcatgtgttccca

SEQ ID NO: 2786634 - DNA, 25 bp, Homo sapien
tactgaaccattaagtgtactggaa

SEQ ID NO: 2786635 - DNA, 25 bp, Homo sapien
tatggcctactgataaaacattctt

SEQ ID NO: 2786636 - DNA, 25 bp, Homo sapien
tcattatcaaggcaagtaccacggc

SEQ ID NO: 2786637 - DNA, 25 bp, Homo sapien
taaagaaagtcacgcttgggaggct

SEQ ID NO: 2786638 - DNA, 25 bp, Homo sapien
tccatactggaaacgacattgctca

SEQ ID NO: 2786639 - DNA, 25 bp, Homo sapien
catatttacattggcgggaggttgc

SEQ ID NO: 2786640 - DNA, 25 bp, Homo sapien
tcacctaagtgacaccagcttttgg

SEQ ID NO: 2786641 - DNA, 25 bp, Homo sapien
caaaaaagtgcaggatatattcacc

SEQ ID NO: 2786642 - DNA, 25 bp, Homo sapien
tactgaagtaggtatccaataggca

SEQ ID NO: 2786643 - DNA, 25 bp, Homo sapien
tattaaggttaatgacaaagaggtc

SEQ ID NO: 2786644 - DNA, 25 bp, Homo sapien
caaagccgtcgccggaaaacatcag

SEQ ID NO: 2786645 - DNA, 25 bp, Homo sapien
gcaaagccgtcgccggaaaacatca

SEQ ID NO: 2786646 - DNA, 25 bp, Homo sapien
ctgcaaagccgtcgccggaaaacat

SEQ ID NO: 2786647 - DNA, 25 bp, Homo sapien
tgcaaagccgtcgccggaaaacatc

SEQ ID NO: 2786648 - DNA, 25 bp, Homo sapien
tattgaatcaccgagtttaagaaat

SEQ ID NO: 2786649 - DNA, 25 bp, Homo sapien
cggcttctgggcgattcatgaacca

SEQ ID NO: 2786650 - DNA, 25 bp, Homo sapien
tattatttaatcaggacggcttctg

SEQ ID NO: 2786651 - DNA, 25 bp, Homo sapien
tgaaccacttattgaatcaccgagt

SEQ ID NO: 2786652 - DNA, 25 bp, Homo sapien
gcttcatgacctttcgtcccacaag

SEQ ID NO: 2786653 - DNA, 25 bp, Homo sapien
gattggtattcgcagtaatgtgagc

SEQ ID NO: 2786654 - DNA, 25 bp, Homo sapien
tagtctcgactgcaagcagaccagg

SEQ ID NO: 2786655 - DNA, 25 bp, Homo sapien
aatgtgagctgccataagttttgct

SEQ ID NO: 2786656 - DNA, 25 bp, Homo sapien
catatgcatttggagttgtcaacac

SEQ ID NO: 2786657 - DNA, 25 bp, Homo sapien
aaagggatctaattgacaatgctag

SEQ ID NO: 2786658 - DNA, 25 bp, Homo sapien
acaagggcagatatacttttcaagg

SEQ ID NO: 2786659 - DNA, 25 bp, Homo sapien
gacaatgctagaataccaggcccaa

SEQ ID NO: 2786660 - DNA, 25 bp, Homo sapien
ctcttggcttaactattgttggtct

SEQ ID NO: 2786661 - DNA, 25 bp, Homo sapien
gaacttccaatactaagctaaacag

SEQ ID NO: 2786662 - DNA, 25 bp, Homo sapien
ctctcttcctattcgaatgccgttt

SEQ ID NO: 2786663 - DNA, 25 bp, Homo sapien
gagagagggcacttttgtcttatgc

SEQ ID NO: 2786664 - DNA, 25 bp, Homo sapien
gccacagtgtctgactacaaattgt

SEQ ID NO: 2786665 - DNA, 25 bp, Homo sapien
tgagttaagccacacctaaacaatg

SEQ ID NO: 2786666 - DNA, 25 bp, Homo sapien
cagtgtctgactacaaattgtaata

SEQ ID NO: 2786667 - DNA, 25 bp, Homo sapien
tagagttaaagttcactcaatcatg

SEQ ID NO: 2786668 - DNA, 25 bp, Homo sapien
ccaatctcatgtgcaatggtaaaag

SEQ ID NO: 2786669 - DNA, 25 bp, Homo sapien
catgtgcaatggtaaaagctgaacc

SEQ ID NO: 2786670 - DNA, 25 bp, Homo sapien
tgcaatggtaaaagctgaacccagg

SEQ ID NO: 2786671 - DNA, 25 bp, Homo sapien
tctcatgtgcaatggtaaaagctga

SEQ ID NO: 2786672 - DNA, 25 bp, Homo sapien
tctattattccatgggttagctttt

SEQ ID NO: 2786673 - DNA, 25 bp, Homo sapien
ttgtgtcgttttttggtatgtgcca

SEQ ID NO: 2786674 - DNA, 25 bp, Homo sapien
ttcccaaaatctattattccatggg

SEQ ID NO: 2786675 - DNA, 25 bp, Homo sapien
tgttgtgtcgttttttggtatgtgc

SEQ ID NO: 2786676 - DNA, 25 bp, Homo sapien
ccagtgttccacagggcttattttt

SEQ ID NO: 2786677 - DNA, 25 bp, Homo sapien
ttatttttataagtgcagatatcat

SEQ ID NO: 2786678 - DNA, 25 bp, Homo sapien
tatttttataagtgcagatatcata

SEQ ID NO: 2786679 - DNA, 25 bp, Homo sapien
atttttataagtgcagatatcatat

SEQ ID NO: 2786680 - DNA, 25 bp, Homo sapien
ctctggctgcaagccaatagaacac

SEQ ID NO: 2786681 - DNA, 25 bp, Homo sapien
cctctggctgcaagccaatagaaca

SEQ ID NO: 2786682 - DNA, 25 bp, Homo sapien
gcctctggctgcaagccaatagaac

SEQ ID NO: 2786683 - DNA, 25 bp, Homo sapien
gtgtccctcactttgcttttcaatg

SEQ ID NO: 2786684 - DNA, 25 bp, Homo sapien
catttgttgcttcaaagtgtccctc

SEQ ID NO: 2786685 - DNA, 25 bp, Homo sapien
ttgttgcttcaaagtgtccctcact

SEQ ID NO: 2786686 - DNA, 25 bp, Homo sapien
gcttcaaagtgtccctcactttgct

SEQ ID NO: 2786687 - DNA, 25 bp, Homo sapien
ctccagtcactagagatttagaagc

SEQ ID NO: 2786688 - DNA, 25 bp, Homo sapien
ctctccagtcactagagatttagaa

SEQ ID NO: 2786689 - DNA, 25 bp, Homo sapien
ccagtcactagagatttagaagcag

SEQ ID NO: 2786690 - DNA, 25 bp, Homo sapien
tccagtcactagagatttagaagca

SEQ ID NO: 2786691 - DNA, 25 bp, Homo sapien
tatactgcttcataggtagtgtaac

SEQ ID NO: 2786692 - DNA, 25 bp, Homo sapien
ttcttgcaaggcagatctattggta

SEQ ID NO: 2786693 - DNA, 25 bp, Homo sapien
taagtggttactctagagtttgcaa

SEQ ID NO: 2786694 - DNA, 25 bp, Homo sapien
tcctggctggcgtacagtgtcatga

SEQ ID NO: 2786695 - DNA, 25 bp, Homo sapien
tactctcttttataccattgcaatt

SEQ ID NO: 2786696 - DNA, 25 bp, Homo sapien
ttcctccaaattgaaattttgtgtc

SEQ ID NO: 2786697 - DNA, 25 bp, Homo sapien
acaagagatctcatgaatttattcc

SEQ ID NO: 2786698 - DNA, 25 bp, Homo sapien
tatagccaccatgatgtacaagaga

SEQ ID NO: 2786699 - DNA, 25 bp, Homo sapien
gcccattctttggaaccatttcaca

SEQ ID NO: 2786700 - DNA, 25 bp, Homo sapien
tagttcactaagaatgacctcatca

SEQ ID NO: 2786701 - DNA, 25 bp, Homo sapien
tctccaggctgcgactactttttct

SEQ ID NO: 2786702 - DNA, 25 bp, Homo sapien
taatagctgctacttcaaaaaacag

SEQ ID NO: 2786703 - DNA, 25 bp, Homo sapien
cagtttacatgctacactcaagttg

SEQ ID NO: 2786704 - DNA, 25 bp, Homo sapien
agtaccttgctgtctggcaatgatg

SEQ ID NO: 2786705 - DNA, 25 bp, Homo sapien
aatggctcctcagtttacatgctac

SEQ ID NO: 2786706 - DNA, 25 bp, Homo sapien
catgctacactcaagttgcttactt

SEQ ID NO: 2786707 - DNA, 25 bp, Homo sapien
aatgaattaatagggatcaaattta

SEQ ID NO: 2786708 - DNA, 25 bp, Homo sapien
cagtgtagtgggcatgatttcggtt

SEQ ID NO: 2786709 - DNA, 25 bp, Homo sapien
tagggatcaaatttatcctgctttc

SEQ ID NO: 2786710 - DNA, 25 bp, Homo sapien
aattactctcaaaagtaagacagaa

SEQ ID NO: 2786711 - DNA, 25 bp, Homo sapien
ccaatgatgccaggtagataaagtc

SEQ ID NO: 2786712 - DNA, 25 bp, Homo sapien
gactatttcacctagccaagagaga

SEQ ID NO: 2786713 - DNA, 25 bp, Homo sapien
agacaggatcaccagaatctgagcc

SEQ ID NO: 2786714 - DNA, 25 bp, Homo sapien
tgtatgactcagttacccgggaact

SEQ ID NO: 2786715 - DNA, 25 bp, Homo sapien
atggaaaaatacttgcaacaaacca

SEQ ID NO: 2786716 - DNA, 25 bp, Homo sapien
gaaaaatacttgcaacaaaccatac

SEQ ID NO: 2786717 - DNA, 25 bp, Homo sapien
tcaatggaaaaatacttgcaacaaa

SEQ ID NO: 2786718 - DNA, 25 bp, Homo sapien
ggaaaaatacttgcaacaaaccata

SEQ ID NO: 2786719 - DNA, 25 bp, Homo sapien
catttacagaagctatcgagggact

SEQ ID NO: 2786720 - DNA, 25 bp, Homo sapien
gcattatcgtggtgggcaatcccat

SEQ ID NO: 2786721 - DNA, 25 bp, Homo sapien
tctgcatggtggtttatctccaagt

SEQ ID NO: 2786722 - DNA, 25 bp, Homo sapien
gtaataagaactgcattatcgtggt

SEQ ID NO: 2786723 - DNA, 25 bp, Homo sapien
gctggaatcacggtaaagtttggca

SEQ ID NO: 2786724 - DNA, 25 bp, Homo sapien
tctgtgagaacaattaagcgggcca

SEQ ID NO: 2786725 - DNA, 25 bp, Homo sapien
cacaacgtttcctaggctggaatca

SEQ ID NO: 2786726 - DNA, 25 bp, Homo sapien
gggccactataatattcacaacgtt

SEQ ID NO: 2786727 - DNA, 25 bp, Homo sapien
aatgttcaatgtctttgcggccatg

SEQ ID NO: 2786728 - DNA, 25 bp, Homo sapien
ttgtctgccactaccaatgtctcca

SEQ ID NO: 2786729 - DNA, 25 bp, Homo sapien
aaaccgttcaatgctcactgatctc

SEQ ID NO: 2786730 - DNA, 25 bp, Homo sapien
ccacaaaccgttcaatgctcactga

SEQ ID NO: 2786731 - DNA, 25 bp, Homo sapien
tatgtgtgttgttaattggtagtga

SEQ ID NO: 2786732 - DNA, 25 bp, Homo sapien
ttaattggtagtgaataagaaacag

SEQ ID NO: 2786733 - DNA, 25 bp, Homo sapien
tgttgttaattggtagtgaataaga

SEQ ID NO: 2786734 - DNA, 25 bp, Homo sapien
tggtggatatgtgtgttgttaattg

SEQ ID NO: 2786735 - DNA, 25 bp, Homo sapien
caaggtttgccacttcttgtgaaat

SEQ ID NO: 2786736 - DNA, 25 bp, Homo sapien
accaaggtttgccacttcttgtgaa

SEQ ID NO: 2786737 - DNA, 25 bp, Homo sapien
ccaaggtttgccacttcttgtgaaa

SEQ ID NO: 2786738 - DNA, 25 bp, Homo sapien
atgtcgttgttgaagggcagacttt

SEQ ID NO: 2786739 - DNA, 25 bp, Homo sapien
tctgtggtattctttaaaggttcga

SEQ ID NO: 2786740 - DNA, 25 bp, Homo sapien
tgtaaataacatgagggtggccatt

SEQ ID NO: 2786741 - DNA, 25 bp, Homo sapien
accccacaatgagagtgatcataca

SEQ ID NO: 2786742 - DNA, 25 bp, Homo sapien
cgttgatcttgcaaatatcctgtgt

SEQ ID NO: 2786743 - DNA, 25 bp, Homo sapien
aatgacagttgtctaaaaaatcatg

SEQ ID NO: 2786744 - DNA, 25 bp, Homo sapien
ccactttagttgtactacgttgatc

SEQ ID NO: 2786745 - DNA, 25 bp, Homo sapien
caaatatcctgtgtaatgacagttg

SEQ ID NO: 2786746 - DNA, 25 bp, Homo sapien
tcaagtttagatgaaagtgcttgcc

SEQ ID NO: 2786747 - DNA, 25 bp, Homo sapien
aagtttagatgaaagtgcttgccat

SEQ ID NO: 2786748 - DNA, 25 bp, Homo sapien
gagagtcaagtttagatgaaagtgc

SEQ ID NO: 2786749 - DNA, 25 bp, Homo sapien
gtgttgagagtcaagtttagatgaa

SEQ ID NO: 2786750 - DNA, 25 bp, Homo sapien
gatcaacccttattggaatagttag

SEQ ID NO: 2786751 - DNA, 25 bp, Homo sapien
ccgtcttctccttgagtgtttatca

SEQ ID NO: 2786752 - DNA, 25 bp, Homo sapien
cctgctgtggatcaatagggtccat

SEQ ID NO: 2786753 - DNA, 25 bp, Homo sapien
aatagggtccatactccgtcttctc

SEQ ID NO: 2786754 - DNA, 25 bp, Homo sapien
ggtagtgttcaagataagtcaggaa

SEQ ID NO: 2786755 - DNA, 25 bp, Homo sapien
tgttcaagataagtcaggaattcct

SEQ ID NO: 2786756 - DNA, 25 bp, Homo sapien
agtgttcaagataagtcaggaattc

SEQ ID NO: 2786757 - DNA, 25 bp, Homo sapien
ctggtagtgttcaagataagtcagg

SEQ ID NO: 2786758 - DNA, 25 bp, Homo sapien
tatgaaagcctgtggtcactatgaa

SEQ ID NO: 2786759 - DNA, 25 bp, Homo sapien
tcaaaatccaggtcaacgtcttcca

SEQ ID NO: 2786760 - DNA, 25 bp, Homo sapien
ctcaaaatccaggtcaacgtcttcc

SEQ ID NO: 2786761 - DNA, 25 bp, Homo sapien
gcactttcttctatatctggattca

SEQ ID NO: 2786762 - DNA, 25 bp, Homo sapien
tgctaaagagtcaataccataccaa

SEQ ID NO: 2786763 - DNA, 25 bp, Homo sapien
tgagggctacctatgtgctaaagag

SEQ ID NO: 2786764 - DNA, 25 bp, Homo sapien
taagagccacttttatccaacatcc

SEQ ID NO: 2786765 - DNA, 25 bp, Homo sapien
tataagtggtattggttagttaatg

SEQ ID NO: 2786766 - DNA, 25 bp, Homo sapien
tgaatagtttttaacaacttcacat

SEQ ID NO: 2786767 - DNA, 25 bp, Homo sapien
cccagtcgatatatttataagtggt

SEQ ID NO: 2786768 - DNA, 25 bp, Homo sapien
agtggtattggttagttaatgtgaa

SEQ ID NO: 2786769 - DNA, 25 bp, Homo sapien
tatttggataaaacgcgtgtgaccc

SEQ ID NO: 2786770 - DNA, 25 bp, Homo sapien
gctgccctggttgagttgatcctaa

SEQ ID NO: 2786771 - DNA, 25 bp, Homo sapien
acagagggtaacagtctgagctgcc

SEQ ID NO: 2786772 - DNA, 25 bp, Homo sapien
gacagcagcgctaaatctatttgga

SEQ ID NO: 2786773 - DNA, 25 bp, Homo sapien
tgcaagtcccagaattctacaaccc

SEQ ID NO: 2786774 - DNA, 25 bp, Homo sapien
tcaagtccacttcacaaaacatgta

SEQ ID NO: 2786775 - DNA, 25 bp, Homo sapien
tactatttggtgatcagttaaaaga

SEQ ID NO: 2786776 - DNA, 25 bp, Homo sapien
gttcagtcaagctcactcattgcca

SEQ ID NO: 2786777 - DNA, 25 bp, Homo sapien
tatggtctggctaacccgggcttta

SEQ ID NO: 2786778 - DNA, 25 bp, Homo sapien
tagagattgcactggacgactcacg

SEQ ID NO: 2786779 - DNA, 25 bp, Homo sapien
tgtgcagagcatcaaaaggtatcag

SEQ ID NO: 2786780 - DNA, 25 bp, Homo sapien
gggctttagagaactgactttccga

SEQ ID NO: 2786781 - DNA, 25 bp, Homo sapien
gtgcgcatgtgtcctgggtcgtcac

SEQ ID NO: 2786782 - DNA, 25 bp, Homo sapien
cgtcgggtgcgcatgtgtcctgggt

SEQ ID NO: 2786783 - DNA, 25 bp, Homo sapien
cctgggctgcgtcgggtgcgcatgt

SEQ ID NO: 2786784 - DNA, 25 bp, Homo sapien
cgcatgtgtcctgggtcgtcacgtg

SEQ ID NO: 2786785 - DNA, 25 bp, Homo sapien
attttcacaagtcaactggcccatg

SEQ ID NO: 2786786 - DNA, 25 bp, Homo sapien
tgacaagtgtccagtctaatgaatt

SEQ ID NO: 2786787 - DNA, 25 bp, Homo sapien
acaagtgtccagtctaatgaatttt

SEQ ID NO: 2786788 - DNA, 25 bp, Homo sapien
aactggcccatgtaaccgccattct

SEQ ID NO: 2786789 - DNA, 25 bp, Homo sapien
tcccctggcatgcaaatgtctcatc

SEQ ID NO: 2786790 - DNA, 25 bp, Homo sapien
gctggagtaacacaccagaatgagg

SEQ ID NO: 2786791 - DNA, 25 bp, Homo sapien
ctgcagaagataggtccttgctcca

SEQ ID NO: 2786792 - DNA, 25 bp, Homo sapien
gaatctgctaggtaatatggcccaa

SEQ ID NO: 2786793 - DNA, 25 bp, Homo sapien
aaaaatctagggtagcctggttcag

SEQ ID NO: 2786794 - DNA, 25 bp, Homo sapien
cagtagtgtgtcactgtagtcctaa

SEQ ID NO: 2786795 - DNA, 25 bp, Homo sapien
gctccatgctagtgctgtccagttg

SEQ ID NO: 2786796 - DNA, 25 bp, Homo sapien
gatagacatgcaaccatagtaagct

SEQ ID NO: 2786797 - DNA, 25 bp, Homo sapien
aatcttgctgccttaggctccttag

SEQ ID NO: 2786798 - DNA, 25 bp, Homo sapien
ttgagaacaggcttcaacctcccta

SEQ ID NO: 2786799 - DNA, 25 bp, Homo sapien
tggcattgatcatggctcacaataa

SEQ ID NO: 2786800 - DNA, 25 bp, Homo sapien
gctgccttaggctccttagtaacta

SEQ ID NO: 2786801 - DNA, 25 bp, Homo sapien
tagttcttcgggcatgtattgtacc

SEQ ID NO: 2786802 - DNA, 25 bp, Homo sapien
cagattttcctagttcttcgggcat

SEQ ID NO: 2786803 - DNA, 25 bp, Homo sapien
ttcctagttcttcgggcatgtattg

SEQ ID NO: 2786804 - DNA, 25 bp, Homo sapien
cgggcatgtattgtaccctggacat

SEQ ID NO: 2786805 - DNA, 25 bp, Homo sapien
gctgccttcgctccacttttcagat

SEQ ID NO: 2786806 - DNA, 25 bp, Homo sapien
tcttctctagcatccagtctggtac

SEQ ID NO: 2786807 - DNA, 25 bp, Homo sapien
tccattggtgttttcaaggttatga

SEQ ID NO: 2786808 - DNA, 25 bp, Homo sapien
gctacaattaacaggaggaatagag

SEQ ID NO: 2786809 - DNA, 25 bp, Homo sapien
cgtgcctgcccaccaatgtaatatt

SEQ ID NO: 2786810 - DNA, 25 bp, Homo sapien
gtgcctgcccaccaatgtaatattt

SEQ ID NO: 2786811 - DNA, 25 bp, Homo sapien
accgtgcctgcccaccaatgtaata

SEQ ID NO: 2786812 - DNA, 25 bp, Homo sapien
gcctgcccaccaatgtaatattttt

SEQ ID NO: 2786813 - DNA, 25 bp, Homo sapien
ttagcaaacaccaaaagtgttttgc

SEQ ID NO: 2786814 - DNA, 25 bp, Homo sapien
agtacttcacggacaacagtactac

SEQ ID NO: 2786815 - DNA, 25 bp, Homo sapien
caccgtgtctggctcaattacatat

SEQ ID NO: 2786816 - DNA, 25 bp, Homo sapien
caccaaaagtgttttgctagtactt

SEQ ID NO: 2786817 - DNA, 25 bp, Homo sapien
gaggtactttatatattatcctccc

SEQ ID NO: 2786818 - DNA, 25 bp, Homo sapien
tgtcagacctacactgccatttctt

SEQ ID NO: 2786819 - DNA, 25 bp, Homo sapien
cttcaaagagtaaaaagttgctcac

SEQ ID NO: 2786820 - DNA, 25 bp, Homo sapien
gaagaattcttgtcagacctacact

SEQ ID NO: 2786821 - DNA, 25 bp, Homo sapien
tttctacagagggatttggtatact

SEQ ID NO: 2786822 - DNA, 25 bp, Homo sapien
ggatttaggattctctagtttagct

SEQ ID NO: 2786823 - DNA, 25 bp, Homo sapien
atgaagtaattaaggtaagccagag

SEQ ID NO: 2786824 - DNA, 25 bp, Homo sapien
taatatacagtagaaagcgctttca

SEQ ID NO: 2786825 - DNA, 25 bp, Homo sapien
tccaaatagtcctgtggttccaata

SEQ ID NO: 2786826 - DNA, 25 bp, Homo sapien
tgaataatagatggcagcacatgcc

SEQ ID NO: 2786827 - DNA, 25 bp, Homo sapien
ccagctggaactcaaaatgcataaa

SEQ ID NO: 2786828 - DNA, 25 bp, Homo sapien
taaaagtaagatggcctatgcgcat

SEQ ID NO: 2786829 - DNA, 25 bp, Homo sapien
tcttattcgggttggatcttctgga

SEQ ID NO: 2786830 - DNA, 25 bp, Homo sapien
gcagcagctcaacataaggtggcca

SEQ ID NO: 2786831 - DNA, 25 bp, Homo sapien
catatggatcatgtggaacatcaaa

SEQ ID NO: 2786832 - DNA, 25 bp, Homo sapien
gtctcaaggcaattccattacgcag

SEQ ID NO: 2786833 - DNA, 25 bp, Homo sapien
tgggtattagctaatgaaaaaagct

SEQ ID NO: 2786834 - DNA, 25 bp, Homo sapien
tgaaaggactatgggtattagctaa

SEQ ID NO: 2786835 - DNA, 25 bp, Homo sapien
gactatgggtattagctaatgaaaa

SEQ ID NO: 2786836 - DNA, 25 bp, Homo sapien
ttttgaaaggactatgggtattagc

SEQ ID NO: 2786837 - DNA, 25 bp, Homo sapien
tcttggattagactccgtatctctg

SEQ ID NO: 2786838 - DNA, 25 bp, Homo sapien
aaattaatccatcaagctctaatct

SEQ ID NO: 2786839 - DNA, 25 bp, Homo sapien
aatttttaactgaaagatgctatta

SEQ ID NO: 2786840 - DNA, 25 bp, Homo sapien
aattgtcaggccaaatttttaactg

SEQ ID NO: 2786841 - DNA, 25 bp, Homo sapien
acatttcatgcagtgttatcaggtt

SEQ ID NO: 2786842 - DNA, 25 bp, Homo sapien
catgcagtgttatcaggtttacaga

SEQ ID NO: 2786843 - DNA, 25 bp, Homo sapien
ctctaacatttcatgcagtgttatc

SEQ ID NO: 2786844 - DNA, 25 bp, Homo sapien
ggtttacagatgattcttgaatgtt

SEQ ID NO: 2786845 - DNA, 25 bp, Homo sapien
aatggtcttctagaaactcgcccaa

SEQ ID NO: 2786846 - DNA, 25 bp, Homo sapien
ttaacacttctatcaggcagaggaa

SEQ ID NO: 2786847 - DNA, 25 bp, Homo sapien
gaaaatggtcttctagaaactcgcc

SEQ ID NO: 2786848 - DNA, 25 bp, Homo sapien
aaggtactcaagagtttctccttat

SEQ ID NO: 2786849 - DNA, 25 bp, Homo sapien
caaaagttagggcaagactcctgat

SEQ ID NO: 2786850 - DNA, 25 bp, Homo sapien
caagtcacccataaaagatcatata

SEQ ID NO: 2786851 - DNA, 25 bp, Homo sapien
cacacatgtaactagttattcatga

SEQ ID NO: 2786852 - DNA, 25 bp, Homo sapien
caaaggtacagtcaagtcaagtcac

SEQ ID NO: 2786853 - DNA, 25 bp, Homo sapien
atctgttgctgttcatccaaccacc

SEQ ID NO: 2786854 - DNA, 25 bp, Homo sapien
tctgttgctgttcatccaaccaccg

SEQ ID NO: 2786855 - DNA, 25 bp, Homo sapien
tacattaagagattccattatctgt

SEQ ID NO: 2786856 - DNA, 25 bp, Homo sapien
tcaattcactgtgtagtacattaag

SEQ ID NO: 2786857 - DNA, 25 bp, Homo sapien
ctttcgacatggaaaaacaatacaa

SEQ ID NO: 2786858 - DNA, 25 bp, Homo sapien
gacatggaaaaacaatacaagcaat

SEQ ID NO: 2786859 - DNA, 25 bp, Homo sapien
tcgacatggaaaaacaatacaagca

SEQ ID NO: 2786860 - DNA, 25 bp, Homo sapien
ttcgacatggaaaaacaatacaagc

SEQ ID NO: 2786861 - DNA, 25 bp, Homo sapien
tctttgactccttagtggacagtac

SEQ ID NO: 2786862 - DNA, 25 bp, Homo sapien
tggacagtaccatttcaagatcttg

SEQ ID NO: 2786863 - DNA, 25 bp, Homo sapien
tttcattctttgactccttagtgga

SEQ ID NO: 2786864 - DNA, 25 bp, Homo sapien
tgactccttagtggacagtaccatt

SEQ ID NO: 2786865 - DNA, 25 bp, Homo sapien
gaaaaggtaaatatacagtaggcgc

SEQ ID NO: 2786866 - DNA, 25 bp, Homo sapien
tcagtaataagagagtaggtacctt

SEQ ID NO: 2786867 - DNA, 25 bp, Homo sapien
catcagtagtgaaaaagcctagcag

SEQ ID NO: 2786868 - DNA, 25 bp, Homo sapien
tacacagtggtccaggatacttcca

SEQ ID NO: 2786869 - DNA, 25 bp, Homo sapien
cacgtcacacatagttgcagggaga

SEQ ID NO: 2786870 - DNA, 25 bp, Homo sapien
gaattaagcgcatccacacaactct

SEQ ID NO: 2786871 - DNA, 25 bp, Homo sapien
caactctactgggaaagaactcttg

SEQ ID NO: 2786872 - DNA, 25 bp, Homo sapien
gttacacaatacctgactgactccc

SEQ ID NO: 2786873 - DNA, 25 bp, Homo sapien
gaaacaagctaaatatacaatcccc

SEQ ID NO: 2786874 - DNA, 25 bp, Homo sapien
ctaagagttgctatgaaagggaaaa

SEQ ID NO: 2786875 - DNA, 25 bp, Homo sapien
ggccactctaagctacagttgctag

SEQ ID NO: 2786876 - DNA, 25 bp, Homo sapien
tcctgtagagctggctcactgaata

SEQ ID NO: 2786877 - DNA, 25 bp, Homo sapien
tgagatgagacagctataatcttac

SEQ ID NO: 2786878 - DNA, 25 bp, Homo sapien
ataatcttactacactccaaccggg

SEQ ID NO: 2786879 - DNA, 25 bp, Homo sapien
aatattctgcaacttataatggtaa

SEQ ID NO: 2786880 - DNA, 25 bp, Homo sapien
taaaatttcataattcgactttagc

SEQ ID NO: 2786881 - DNA, 25 bp, Homo sapien
catgctctacaacttgtaaaagttt

SEQ ID NO: 2786882 - DNA, 25 bp, Homo sapien
tccatgctctacaacttgtaaaagt

SEQ ID NO: 2786883 - DNA, 25 bp, Homo sapien
ctctttccatgctctacaacttgta

SEQ ID NO: 2786884 - DNA, 25 bp, Homo sapien
tttccatgctctacaacttgtaaaa

SEQ ID NO: 2786885 - DNA, 25 bp, Homo sapien
ctttcacaaaacactagggcaggaa

SEQ ID NO: 2786886 - DNA, 25 bp, Homo sapien
gttaagctggtcatcaatggcaaat

SEQ ID NO: 2786887 - DNA, 25 bp, Homo sapien
gaacattaggactttcagcaccacc

SEQ ID NO: 2786888 - DNA, 25 bp, Homo sapien
caagtttctggagagtaccatgtcc

SEQ ID NO: 2786889 - DNA, 25 bp, Homo sapien
aagaggacacccaactggtttgtag

SEQ ID NO: 2786890 - DNA, 25 bp, Homo sapien
gtgaattaagaggacacccaactgg

SEQ ID NO: 2786891 - DNA, 25 bp, Homo sapien
ctccaagtagattatgtcagaactg

SEQ ID NO: 2786892 - DNA, 25 bp, Homo sapien
ccaagtagattatgtcagaactgaa

SEQ ID NO: 2786893 - DNA, 25 bp, Homo sapien
cttttcctaatgttatgagaacgtc

SEQ ID NO: 2786894 - DNA, 25 bp, Homo sapien
ttcctaatgttatgagaacgtcttc

SEQ ID NO: 2786895 - DNA, 25 bp, Homo sapien
gttatgagaacgtcttcagtcaagg

SEQ ID NO: 2786896 - DNA, 25 bp, Homo sapien
taatgttatgagaacgtcttcagtc

SEQ ID NO: 2786897 - DNA, 25 bp, Homo sapien
tgaagacaaaaacatagttggcacc

SEQ ID NO: 2786898 - DNA, 25 bp, Homo sapien
aagaaacaaatcactggcacgccag

SEQ ID NO: 2786899 - DNA, 25 bp, Homo sapien
gtgacacaggctcgccacaaactga

SEQ ID NO: 2786900 - DNA, 25 bp, Homo sapien
ttggcaccagctggacaagacagaa

SEQ ID NO: 2786901 - DNA, 25 bp, Homo sapien
acccgggagatcggggctgcaatga

SEQ ID NO: 2786902 - DNA, 25 bp, Homo sapien
aacccgggagatcggggctgcaatg

SEQ ID NO: 2786903 - DNA, 25 bp, Homo sapien
attttacttgcataattaacaatga

SEQ ID NO: 2786904 - DNA, 25 bp, Homo sapien
cattgactgagttcagcggttaaac

SEQ ID NO: 2786905 - DNA, 25 bp, Homo sapien
tttctgccattgactgagttcagcg

SEQ ID NO: 2786906 - DNA, 25 bp, Homo sapien
tgagttcagcggttaaacattttac

SEQ ID NO: 2786907 - DNA, 25 bp, Homo sapien
gtgtttcagttccaataagtgataa

SEQ ID NO: 2786908 - DNA, 25 bp, Homo sapien
gcatttgaatcggtgagtgtttcag

SEQ ID NO: 2786909 - DNA, 25 bp, Homo sapien
ctgagcatttgaatcggtgagtgtt

SEQ ID NO: 2786910 - DNA, 25 bp, Homo sapien
gtttcagttccaataagtgataatt

SEQ ID NO: 2786911 - DNA, 25 bp, Homo sapien
gtaagacgattaaggcagccaaaca

SEQ ID NO: 2786912 - DNA, 25 bp, Homo sapien
gaatacatcacaagtaaaaagagac

SEQ ID NO: 2786913 - DNA, 25 bp, Homo sapien
taagacgattaaggcagccaaacaa

SEQ ID NO: 2786914 - DNA, 25 bp, Homo sapien
ccaaggtgaatacatcacaagtaaa

SEQ ID NO: 2786915 - DNA, 25 bp, Homo sapien
ctcccacatctgtagtactatccgg

SEQ ID NO: 2786916 - DNA, 25 bp, Homo sapien
atctcccacatctgtagtactatcc

SEQ ID NO: 2786917 - DNA, 25 bp, Homo sapien
atctgtagtactatccggatctaga

SEQ ID NO: 2786918 - DNA, 25 bp, Homo sapien
tagtactatccggatctagatcctc

SEQ ID NO: 2786919 - DNA, 25 bp, Homo sapien
gctttgtgaatttttagccttataa

SEQ ID NO: 2786920 - DNA, 25 bp, Homo sapien
tgtgaatttttagccttataagaaa

SEQ ID NO: 2786921 - DNA, 25 bp, Homo sapien
tgatatatgctttgtgaatttttag

SEQ ID NO: 2786922 - DNA, 25 bp, Homo sapien
gatatatgctttgtgaatttttagc

SEQ ID NO: 2786923 - DNA, 25 bp, Homo sapien
ttacctgccagatactcatctaggg

SEQ ID NO: 2786924 - DNA, 25 bp, Homo sapien
caaatgatttataagtgccatggag

SEQ ID NO: 2786925 - DNA, 25 bp, Homo sapien
cataggaaatgctagggcaaggaca

SEQ ID NO: 2786926 - DNA, 25 bp, Homo sapien
tcattcagcagtattggttgaacac

SEQ ID NO: 2786927 - DNA, 25 bp, Homo sapien
cacagactgcacatataacagtggt

SEQ ID NO: 2786928 - DNA, 25 bp, Homo sapien
tgcacagttatacaacatgtttatg

SEQ ID NO: 2786929 - DNA, 25 bp, Homo sapien
ttgcctactgatgtcttgatgatcc

SEQ ID NO: 2786930 - DNA, 25 bp, Homo sapien
gatcctgaccttgccttaggcctag

SEQ ID NO: 2786931 - DNA, 25 bp, Homo sapien
ctagtacataagtagaggtgttggc

SEQ ID NO: 2786932 - DNA, 25 bp, Homo sapien
gttggcttaagataaatggacatgc

SEQ ID NO: 2786933 - DNA, 25 bp, Homo sapien
ccattttaatgggagggtcatcaga

SEQ ID NO: 2786934 - DNA, 25 bp, Homo sapien
ggtcatcagaatatcaagagtgtag

SEQ ID NO: 2786935 - DNA, 25 bp, Homo sapien
agacccacattgtaaagacgttaat

SEQ ID NO: 2786936 - DNA, 25 bp, Homo sapien
ccccaagttgagctactgaatctta

SEQ ID NO: 2786937 - DNA, 25 bp, Homo sapien
agttctaaggcagacctaaataaat

SEQ ID NO: 2786938 - DNA, 25 bp, Homo sapien
caataacttattaacagagaagttc

SEQ ID NO: 2786939 - DNA, 25 bp, Homo sapien
gcctaagatcctcatgaaaaataag

SEQ ID NO: 2786940 - DNA, 25 bp, Homo sapien
gatgggaggacataccctacactat

SEQ ID NO: 2786941 - DNA, 25 bp, Homo sapien
cactattatggcaatgtagaactgg

SEQ ID NO: 2786942 - DNA, 25 bp, Homo sapien
caaagggccaaaactagcctaagat

SEQ ID NO: 2786943 - DNA, 25 bp, Homo sapien
tagcatgatggtaagggtgttcacc

SEQ ID NO: 2786944 - DNA, 25 bp, Homo sapien
gaactctgcaaccagactatacagg

SEQ ID NO: 2786945 - DNA, 25 bp, Homo sapien
aataagaggcttgcactgttggtgg

SEQ ID NO: 2786946 - DNA, 25 bp, Homo sapien
aagagataatactggcaagcatgtg

SEQ ID NO: 2786947 - DNA, 25 bp, Homo sapien
aaatctcacctgctatacccataag

SEQ ID NO: 2786948 - DNA, 25 bp, Homo sapien
tctggcttggcgatttaatgtggca

SEQ ID NO: 2786949 - DNA, 25 bp, Homo sapien
tactccctagggttatgacaattaa

SEQ ID NO: 2786950 - DNA, 25 bp, Homo sapien
ttgaatgtcaactagtagaaggctg

SEQ ID NO: 2786951 - DNA, 25 bp, Homo sapien
atgcaagatgtaagctgtatgtaac

SEQ ID NO: 2786952 - DNA, 25 bp, Homo sapien
gcttgaggatgcaagatgtaagctg

SEQ ID NO: 2786953 - DNA, 25 bp, Homo sapien
gaggatgcaagatgtaagctgtatg

SEQ ID NO: 2786954 - DNA, 25 bp, Homo sapien
ttgaggatgcaagatgtaagctgta

SEQ ID NO: 2786955 - DNA, 25 bp, Homo sapien
gaagagggtcatcaacagaaccaga

SEQ ID NO: 2786956 - DNA, 25 bp, Homo sapien
cagatcttgaatctccagcctctag

SEQ ID NO: 2786957 - DNA, 25 bp, Homo sapien
ctggaagagggtcatcaacagaacc

SEQ ID NO: 2786958 - DNA, 25 bp, Homo sapien
ccagaaaatgatggcacccagatct

SEQ ID NO: 2786959 - DNA, 25 bp, Homo sapien
agatgactgctaggagatgaaatcc

SEQ ID NO: 2786960 - DNA, 25 bp, Homo sapien
ccccagaaacagtaacaagcactca

SEQ ID NO: 2786961 - DNA, 25 bp, Homo sapien
aagagtgacccgttctgccctaggt

SEQ ID NO: 2786962 - DNA, 25 bp, Homo sapien
gatgaaatcctataccagagagaag

SEQ ID NO: 2786963 - DNA, 25 bp, Homo sapien
ggttatggagcttgcgttggcgcgc

SEQ ID NO: 2786964 - DNA, 25 bp, Homo sapien
ggaagccgagaagaacgggactcaa

SEQ ID NO: 2786965 - DNA, 25 bp, Homo sapien
agtgcatctgaaaggaaacccgcga

SEQ ID NO: 2786966 - DNA, 25 bp, Homo sapien
gtccccacccttccatctttctcta

SEQ ID NO: 2786967 - DNA, 25 bp, Homo sapien
tcgctcggacgctgacagaagactg

SEQ ID NO: 2786968 - DNA, 25 bp, Homo sapien
gacctttacctgtggaggcaacact

SEQ ID NO: 2786969 - DNA, 25 bp, Homo sapien
tttcagcagagacgtagaaggcgcc

SEQ ID NO: 2786970 - DNA, 25 bp, Homo sapien
tctgacgatgcgaacaacatggcgg

SEQ ID NO: 2786971 - DNA, 25 bp, Homo sapien
tttcctcttaatcagttatttattg

SEQ ID NO: 2786972 - DNA, 25 bp, Homo sapien
ttaagacagccaatagttggccggg

SEQ ID NO: 2786973 - DNA, 25 bp, Homo sapien
ttttaagacagccaatagttggccg

SEQ ID NO: 2786974 - DNA, 25 bp, Homo sapien
agacagccaatagttggccgggtgt

SEQ ID NO: 2786975 - DNA, 25 bp, Homo sapien
cataccctaggaatagcaaaggacc

SEQ ID NO: 2786976 - DNA, 25 bp, Homo sapien
gaagcactcatttcttaagtcctgg

SEQ ID NO: 2786977 - DNA, 25 bp, Homo sapien
cagtgcatccatgtatgagcgcagt

SEQ ID NO: 2786978 - DNA, 25 bp, Homo sapien
gaaccaggtagtgtctgagcttccc

SEQ ID NO: 2786979 - DNA, 25 bp, Homo sapien
gcattacttcctgctagacataaaa

SEQ ID NO: 2786980 - DNA, 25 bp, Homo sapien
gcctggttcatgttaaatgttgcca

SEQ ID NO: 2786981 - DNA, 25 bp, Homo sapien
aatgcatgaaaccacagtaagcctt

SEQ ID NO: 2786982 - DNA, 25 bp, Homo sapien
gcagaacagttaacagacatggaat

SEQ ID NO: 2786983 - DNA, 25 bp, Homo sapien
ccaagtttacttgtgtgttgatcaa

SEQ ID NO: 2786984 - DNA, 25 bp, Homo sapien
caaaataagtcattcactgtagctt

SEQ ID NO: 2786985 - DNA, 25 bp, Homo sapien
cattgttacgaattttctttgagtc

SEQ ID NO: 2786986 - DNA, 25 bp, Homo sapien
gagtcttactagtacatattcttaa

SEQ ID NO: 2786987 - DNA, 25 bp, Homo sapien
taaaagtgaactacaagctgggtgc

SEQ ID NO: 2786988 - DNA, 25 bp, Homo sapien
cattatccacaccagcatgggagac

SEQ ID NO: 2786989 - DNA, 25 bp, Homo sapien
tagaaggcataagtcgagagctacc

SEQ ID NO: 2786990 - DNA, 25 bp, Homo sapien
cctaaacgagtttcggacagtgcca

SEQ ID NO: 2786991 - DNA, 25 bp, Homo sapien
tccaacaggtactggtatgggagga

SEQ ID NO: 2786992 - DNA, 25 bp, Homo sapien
tacgacatgacaggccatacacact

SEQ ID NO: 2786993 - DNA, 25 bp, Homo sapien
tacacactcagcatggctaacgcgg

SEQ ID NO: 2786994 - DNA, 25 bp, Homo sapien
gctaacgcgggatcaaatactaatg

SEQ ID NO: 2786995 - DNA, 25 bp, Homo sapien
gaggatctccaacgtcaaagtcaat

SEQ ID NO: 2786996 - DNA, 25 bp, Homo sapien
cccgtgcgatgacaactctattaaa

SEQ ID NO: 2786997 - DNA, 25 bp, Homo sapien
ggtcttagaaggtatcccgtgcgat

SEQ ID NO: 2786998 - DNA, 25 bp, Homo sapien
gactcactgcttcgtttccagaaag

SEQ ID NO: 2786999 - DNA, 25 bp, Homo sapien
tcaagaataatgatgggacttctta

SEQ ID NO: 2787000 - DNA, 25 bp, Homo sapien
ggtagatggttcaagaaagagactt

SEQ ID NO: 2787001 - DNA, 25 bp, Homo sapien
gcaataatattaggtagatggttca

SEQ ID NO: 2787002 - DNA, 25 bp, Homo sapien
tacaactagcaataatattaggtag

SEQ ID NO: 2787003 - DNA, 25 bp, Homo sapien
tacggctatacacttgacatacctg

SEQ ID NO: 2787004 - DNA, 25 bp, Homo sapien
tttagacctaatacagaaattcagc

SEQ ID NO: 2787005 - DNA, 25 bp, Homo sapien
gaagcaagttcaccttagtgttaca

SEQ ID NO: 2787006 - DNA, 25 bp, Homo sapien
tcctgaattatagactacggctata

SEQ ID NO: 2787007 - DNA, 25 bp, Homo sapien
tatgcacacaaactacacctgtaac

SEQ ID NO: 2787008 - DNA, 25 bp, Homo sapien
taattcggaagtattatttatgcac

SEQ ID NO: 2787009 - DNA, 25 bp, Homo sapien
tctcacaagcaatacaacacctttt

SEQ ID NO: 2787010 - DNA, 25 bp, Homo sapien
aaactacacctgtaacagcatgacc

SEQ ID NO: 2787011 - DNA, 25 bp, Homo sapien
gaaggaccaatttagagctctgacc

SEQ ID NO: 2787012 - DNA, 25 bp, Homo sapien
cacagaggtctcattaggcactcaa

SEQ ID NO: 2787013 - DNA, 25 bp, Homo sapien
tactaacctgacaagcctaattggg

SEQ ID NO: 2787014 - DNA, 25 bp, Homo sapien
gctctgacctaggttcagtcctgga

SEQ ID NO: 2787015 - DNA, 25 bp, Homo sapien
tgtgactacctctttcccagtatat

SEQ ID NO: 2787016 - DNA, 25 bp, Homo sapien
tttctctgtgactacctctttccca

SEQ ID NO: 2787017 - DNA, 25 bp, Homo sapien
ctctgtgactacctctttcccagta

SEQ ID NO: 2787018 - DNA, 25 bp, Homo sapien
gactacctctttcccagtatattgg

SEQ ID NO: 2787019 - DNA, 25 bp, Homo sapien
ttcaatctaatctgctcaattagaa

SEQ ID NO: 2787020 - DNA, 25 bp, Homo sapien
tatgcatcctaaattaccatctttt

SEQ ID NO: 2787021 - DNA, 25 bp, Homo sapien
ttaccatcttttgagatgtataatt

SEQ ID NO: 2787022 - DNA, 25 bp, Homo sapien
caatctaatctgctcaattagaaat

SEQ ID NO: 2787023 - DNA, 25 bp, Homo sapien
tactccagcagctacaagttgccgt

SEQ ID NO: 2787024 - DNA, 25 bp, Homo sapien
gagccagtccaacccttcatacagt

SEQ ID NO: 2787025 - DNA, 25 bp, Homo sapien
acaagttgccgtgagagccagtcca

SEQ ID NO: 2787026 - DNA, 25 bp, Homo sapien
caagcaacatccaatactccagcag

SEQ ID NO: 2787027 - DNA, 25 bp, Homo sapien
cacttcgagcatcacagccctgaat

SEQ ID NO: 2787028 - DNA, 25 bp, Homo sapien
acttcgagcatcacagccctgaata

SEQ ID NO: 2787029 - DNA, 25 bp, Homo sapien
tcgagcatcacagccctgaatatac

SEQ ID NO: 2787030 - DNA, 25 bp, Homo sapien
ttcgagcatcacagccctgaatata

SEQ ID NO: 2787031 - DNA, 25 bp, Homo sapien
cagctacggccacagcataatttat

SEQ ID NO: 2787032 - DNA, 25 bp, Homo sapien
gcataatttatggagactgagtagt

SEQ ID NO: 2787033 - DNA, 25 bp, Homo sapien
acagcataatttatggagactgagt

SEQ ID NO: 2787034 - DNA, 25 bp, Homo sapien
ggagactgagtagttcagtgatttc

SEQ ID NO: 2787035 - DNA, 25 bp, Homo sapien
ttgttagcaaaaatcaggagcagag

SEQ ID NO: 2787036 - DNA, 25 bp, Homo sapien
cgctgtgtgcttcactaattctgtc

SEQ ID NO: 2787037 - DNA, 25 bp, Homo sapien
ctgtttgttagcaaaaatcaggagc

SEQ ID NO: 2787038 - DNA, 25 bp, Homo sapien
acaactttgcaagttcgctgtgtgc

SEQ ID NO: 2787039 - DNA, 25 bp, Homo sapien
tttatattctacagtttccacgtta

SEQ ID NO: 2787040 - DNA, 25 bp, Homo sapien
atttttatattctacagtttccacg

SEQ ID NO: 2787041 - DNA, 25 bp, Homo sapien
cttgagtattgaggtaataatgttt

SEQ ID NO: 2787042 - DNA, 25 bp, Homo sapien
ccacaatggtcttaatttgtgtttt

SEQ ID NO: 2787043 - DNA, 25 bp, Homo sapien
catccaatcctaacgtaacgacccg

SEQ ID NO: 2787044 - DNA, 25 bp, Homo sapien
caccatccaatcctaacgtaacgac

SEQ ID NO: 2787045 - DNA, 25 bp, Homo sapien
gaatgggctgcatgaattcatcctg

SEQ ID NO: 2787046 - DNA, 25 bp, Homo sapien
ttggtccaatgtgaactcgattatc

SEQ ID NO: 2787047 - DNA, 25 bp, Homo sapien
attttgatgacaggccaagtggaat

SEQ ID NO: 2787048 - DNA, 25 bp, Homo sapien
aataagcccattagctctcatgaga

SEQ ID NO: 2787049 - DNA, 25 bp, Homo sapien
aaccatatcacacatgcaatggaat

SEQ ID NO: 2787050 - DNA, 25 bp, Homo sapien
tatcctttcagcatcgcctcactct

SEQ ID NO: 2787051 - DNA, 25 bp, Homo sapien
catgctaatcttcttattccaattt

SEQ ID NO: 2787052 - DNA, 25 bp, Homo sapien
taaaaatatggcacacttcacaaat

SEQ ID NO: 2787053 - DNA, 25 bp, Homo sapien
agtatatgtgctgccgaagtgagca

SEQ ID NO: 2787054 - DNA, 25 bp, Homo sapien
ttgtgtgtcatccttgcacaggggc

SEQ ID NO: 2787055 - DNA, 25 bp, Homo sapien
tgaatgtgatctgcaacttctgtaa

SEQ ID NO: 2787056 - DNA, 25 bp, Homo sapien
tgtttctgcaatgtttccagtaacc

SEQ ID NO: 2787057 - DNA, 25 bp, Homo sapien
ctgaatgtgatctgcaacttctgta

SEQ ID NO: 2787058 - DNA, 25 bp, Homo sapien
gaatgtgatctgcaacttctgtaaa

SEQ ID NO: 2787059 - DNA, 25 bp, Homo sapien
attatgttctcagaagtgaagatca

SEQ ID NO: 2787060 - DNA, 25 bp, Homo sapien
gcatatgttagctactcaatacata

SEQ ID NO: 2787061 - DNA, 25 bp, Homo sapien
gatggatgattaaattatgttctca

SEQ ID NO: 2787062 - DNA, 25 bp, Homo sapien
ttttaaatacatggcatatgttagc

SEQ ID NO: 2787063 - DNA, 25 bp, Homo sapien
gaacatgagcatcaacaacacttag

SEQ ID NO: 2787064 - DNA, 25 bp, Homo sapien
gccatttcttcttgacgacacagag

SEQ ID NO: 2787065 - DNA, 25 bp, Homo sapien
tgttgctgcctgagccaaatcaatt

SEQ ID NO: 2787066 - DNA, 25 bp, Homo sapien
gctcgaatacatgaccgggcattct

SEQ ID NO: 2787067 - DNA, 25 bp, Homo sapien
tgaaggtccgtatgcagtgagccat

SEQ ID NO: 2787068 - DNA, 25 bp, Homo sapien
tccttcaatgtgctgcacaattcca

SEQ ID NO: 2787069 - DNA, 25 bp, Homo sapien
gatgctcggatctgattagcttctg

SEQ ID NO: 2787070 - DNA, 25 bp, Homo sapien
ttctgtgtgagccattccaattcca

SEQ ID NO: 2787071 - DNA, 25 bp, Homo sapien
aatatacagaggcaaggtgagcttc

SEQ ID NO: 2787072 - DNA, 25 bp, Homo sapien
gagcacaaatgagttgcacacacag

SEQ ID NO: 2787073 - DNA, 25 bp, Homo sapien
gctagtttgacaaccttcttccaag

SEQ ID NO: 2787074 - DNA, 25 bp, Homo sapien
tatcagctagaggaactcgcctgtg

SEQ ID NO: 2787075 - DNA, 25 bp, Homo sapien
ttcttactattccataatcttcttc

SEQ ID NO: 2787076 - DNA, 25 bp, Homo sapien
tctttctctcattgagttttactgt

SEQ ID NO: 2787077 - DNA, 25 bp, Homo sapien
ctctcattgagttttactgttgact

SEQ ID NO: 2787078 - DNA, 25 bp, Homo sapien
tcttactattccataatcttcttcc

SEQ ID NO: 2787079 - DNA, 25 bp, Homo sapien
agatatcccaatggattcttctgca

SEQ ID NO: 2787080 - DNA, 25 bp, Homo sapien
cttctgcagctccatactgaccaat

SEQ ID NO: 2787081 - DNA, 25 bp, Homo sapien
gaccaataggcccattctgcagtcg

SEQ ID NO: 2787082 - DNA, 25 bp, Homo sapien
ttctgcagtcgttccaaaagctcca

SEQ ID NO: 2787083 - DNA, 25 bp, Homo sapien
ttacttgtcgatcaaatgggcaacg

SEQ ID NO: 2787084 - DNA, 25 bp, Homo sapien
gacagacggtatggccacaaagcaa

SEQ ID NO: 2787085 - DNA, 25 bp, Homo sapien
ctttgtctccttgcaaagaaaagac

SEQ ID NO: 2787086 - DNA, 25 bp, Homo sapien
gcaacggattgctcttccatgaaga

SEQ ID NO: 2787087 - DNA, 25 bp, Homo sapien
aaattcacctaatatattgaatcaa

SEQ ID NO: 2787088 - DNA, 25 bp, Homo sapien
ggtatataagaaaattcacctaata

SEQ ID NO: 2787089 - DNA, 25 bp, Homo sapien
taagaaaattcacctaatatattga

SEQ ID NO: 2787090 - DNA, 25 bp, Homo sapien
ttcacctaatatattgaatcaacat

SEQ ID NO: 2787091 - DNA, 25 bp, Homo sapien
gcatcttatcatggttcaaaagaaa

SEQ ID NO: 2787092 - DNA, 25 bp, Homo sapien
aacttggacttagtgcttgagatgc

SEQ ID NO: 2787093 - DNA, 25 bp, Homo sapien
gaaaagatgttcaatctaactcata

SEQ ID NO: 2787094 - DNA, 25 bp, Homo sapien
ccatacagtgataattcataattgc

SEQ ID NO: 2787095 - DNA, 25 bp, Homo sapien
tgggaaagcagacactctcatacat

SEQ ID NO: 2787096 - DNA, 25 bp, Homo sapien
cattactaattgctatgaaatgttt

SEQ ID NO: 2787097 - DNA, 25 bp, Homo sapien
gagggcaacttgacaatacttacca

SEQ ID NO: 2787098 - DNA, 25 bp, Homo sapien
tacagcttctatggagggcaacttg

SEQ ID NO: 2787099 - DNA, 25 bp, Homo sapien
ggaatttatcctacaagcatactag

SEQ ID NO: 2787100 - DNA, 25 bp, Homo sapien
aatatacatcaatatcagcttggaa

SEQ ID NO: 2787101 - DNA, 25 bp, Homo sapien
ctatataggatagtgagaaagatga

SEQ ID NO: 2787102 - DNA, 25 bp, Homo sapien
gacaaaatctgtatgttactcctta

SEQ ID NO: 2787103 - DNA, 25 bp, Homo sapien
gggaacagctatccacgtataattc

SEQ ID NO: 2787104 - DNA, 25 bp, Homo sapien
tatacacatacttcaatttatccta

SEQ ID NO: 2787105 - DNA, 25 bp, Homo sapien
ccagtaacattggaacactggttcc

SEQ ID NO: 2787106 - DNA, 25 bp, Homo sapien
tggaaggatacataggacaccagta

SEQ ID NO: 2787107 - DNA, 25 bp, Homo sapien
gacaataaactccaaagaaccatat

SEQ ID NO: 2787108 - DNA, 25 bp, Homo sapien
gctgtattatgatactctaataaag

SEQ ID NO: 2787109 - DNA, 25 bp, Homo sapien
caatcctgtatctctgatcccatca

SEQ ID NO: 2787110 - DNA, 25 bp, Homo sapien
gtaaatttatgacaataaactccaa

SEQ ID NO: 2787111 - DNA, 25 bp, Homo sapien
aaatctcagtcacacaacatgccta

SEQ ID NO: 2787112 - DNA, 25 bp, Homo sapien
tctctacttagcaaaagcacaattc

SEQ ID NO: 2787113 - DNA, 25 bp, Homo sapien
caaactgctcttcaagtattctcta

SEQ ID NO: 2787114 - DNA, 25 bp, Homo sapien
catgcctaataatgagggctccttt

SEQ ID NO: 2787115 - DNA, 25 bp, Homo sapien
acttcattagtacctaaaggtcatc

SEQ ID NO: 2787116 - DNA, 25 bp, Homo sapien
tattcactgatactaaattgtggga

SEQ ID NO: 2787117 - DNA, 25 bp, Homo sapien
tcagtaattcataaccctggttgca

SEQ ID NO: 2787118 - DNA, 25 bp, Homo sapien
cataggtgtctacttttcaagatgt

SEQ ID NO: 2787119 - DNA, 25 bp, Homo sapien
catatctttccgtgcacaacagtgg

SEQ ID NO: 2787120 - DNA, 25 bp, Homo sapien
cgttaatgcccagctatgacgatgc

SEQ ID NO: 2787121 - DNA, 25 bp, Homo sapien
gatgctcctgaaggttactctataa

SEQ ID NO: 2787122 - DNA, 25 bp, Homo sapien
taaaccaatgggatcagttctcccc

SEQ ID NO: 2787123 - DNA, 25 bp, Homo sapien
aaaatgggaattcacatctacttca

SEQ ID NO: 2787124 - DNA, 25 bp, Homo sapien
gatattaacgagctaaaacacctaa

SEQ ID NO: 2787125 - DNA, 25 bp, Homo sapien
gccacacactgtttacctaaacctg

SEQ ID NO: 2787126 - DNA, 25 bp, Homo sapien
gtacgtagttacgatgatgatgact

SEQ ID NO: 2787127 - DNA, 25 bp, Homo sapien
gagcagaagaccaggcaatttcagg

SEQ ID NO: 2787128 - DNA, 25 bp, Homo sapien
tcaggccataggagagaaaggatgc

SEQ ID NO: 2787129 - DNA, 25 bp, Homo sapien
gacaggacgagacttgtaatgccaa

SEQ ID NO: 2787130 - DNA, 25 bp, Homo sapien
ttttcacaaatgtcccgatgatgac

SEQ ID NO: 2787131 - DNA, 25 bp, Homo sapien
ctatcgaagcctgggccgcggcgat

SEQ ID NO: 2787132 - DNA, 25 bp, Homo sapien
cgcatcccacctatcgaagcctggg

SEQ ID NO: 2787133 - DNA, 25 bp, Homo sapien
ccgatggtggagaatagagcacgca

SEQ ID NO: 2787134 - DNA, 25 bp, Homo sapien
ggcgatgccgccaggtctccaggat

SEQ ID NO: 2787135 - DNA, 25 bp, Homo sapien
tgccctgccggccactgtctactcc

SEQ ID NO: 2787136 - DNA, 25 bp, Homo sapien
tgtctactcccgctccgagcttgtt

SEQ ID NO: 2787137 - DNA, 25 bp, Homo sapien
gcttgtttacaaccagggtagccat

SEQ ID NO: 2787138 - DNA, 25 bp, Homo sapien
gctccgagcttgtttacaaccaggg

SEQ ID NO: 2787139 - DNA, 25 bp, Homo sapien
tcagagtcctcaactgagaggcggg

SEQ ID NO: 2787140 - DNA, 25 bp, Homo sapien
tcattatgtagtctgcagctgctgg

SEQ ID NO: 2787141 - DNA, 25 bp, Homo sapien
caatcgtcgggtggttagttgcaca

SEQ ID NO: 2787142 - DNA, 25 bp, Homo sapien
ggtgaaaactccagatcctttaatg

SEQ ID NO: 2787143 - DNA, 25 bp, Homo sapien
gaggctgcattgagttttgcctggg

SEQ ID NO: 2787144 - DNA, 25 bp, Homo sapien
ttttgagcactctttgtgttagaaa

SEQ ID NO: 2787145 - DNA, 25 bp, Homo sapien
ggctgcattgagttttgcctgggca

SEQ ID NO: 2787146 - DNA, 25 bp, Homo sapien
caggcagttggcttttgagcactct

SEQ ID NO: 2787147 - DNA, 25 bp, Homo sapien
taatggtagcctctcaaaaaataca

SEQ ID NO: 2787148 - DNA, 25 bp, Homo sapien
tatcacccagtcaagaaataatggt

SEQ ID NO: 2787149 - DNA, 25 bp, Homo sapien
ggaagaatattgcatacctattaga

SEQ ID NO: 2787150 - DNA, 25 bp, Homo sapien
cccatgtaatgtaattatcacccag

SEQ ID NO: 2787151 - DNA, 25 bp, Homo sapien
caagccttcgtgttgttataatcca

SEQ ID NO: 2787152 - DNA, 25 bp, Homo sapien
gaagctacagcatctggaaagtgtc

SEQ ID NO: 2787153 - DNA, 25 bp, Homo sapien
tactgactacttacctgtgagattc

SEQ ID NO: 2787154 - DNA, 25 bp, Homo sapien
catcctcatctgtgcgtcttgtaaa

SEQ ID NO: 2787155 - DNA, 25 bp, Homo sapien
tcacacttagttatgagcaaagcag

SEQ ID NO: 2787156 - DNA, 25 bp, Homo sapien
tgtaagagtgcattaaatcaaatac

SEQ ID NO: 2787157 - DNA, 25 bp, Homo sapien
gcagtgagaaagttgaggtgataaa

SEQ ID NO: 2787158 - DNA, 25 bp, Homo sapien
aaataattcccatcttctgatatga

SEQ ID NO: 2787159 - DNA, 25 bp, Homo sapien
ttcatcacggaagttatctgggcct

SEQ ID NO: 2787160 - DNA, 25 bp, Homo sapien
tatcagaattgaacacgtggccctg

SEQ ID NO: 2787161 - DNA, 25 bp, Homo sapien
tatgaatttaacttctgagggccga

SEQ ID NO: 2787162 - DNA, 25 bp, Homo sapien
tcgttgtagctttgtttggcccagg

SEQ ID NO: 2787163 - DNA, 25 bp, Homo sapien
aagggttctataaggcctaatcatc

SEQ ID NO: 2787164 - DNA, 25 bp, Homo sapien
tagtcttttgataagggttctataa

SEQ ID NO: 2787165 - DNA, 25 bp, Homo sapien
tttgataagggttctataaggccta

SEQ ID NO: 2787166 - DNA, 25 bp, Homo sapien
gataagggttctataaggcctaatc

SEQ ID NO: 2787167 - DNA, 25 bp, Homo sapien
tagcggccaggcacggtggctcacg

SEQ ID NO: 2787168 - DNA, 25 bp, Homo sapien
gcggccaggcacggtggctcacgcc

SEQ ID NO: 2787169 - DNA, 25 bp, Homo sapien
aaacaaaaattagcggccaggcacg

SEQ ID NO: 2787170 - DNA, 25 bp, Homo sapien
ggccaggcacggtggctcacgcctg

SEQ ID NO: 2787171 - DNA, 25 bp, Homo sapien
tgagctgacattgcaacaccactct

SEQ ID NO: 2787172 - DNA, 25 bp, Homo sapien
tgttaattataagactggcatgcca

SEQ ID NO: 2787173 - DNA, 25 bp, Homo sapien
tctcaaccagcataggaaacctttc

SEQ ID NO: 2787174 - DNA, 25 bp, Homo sapien
gctatattggcacgtaacatggcta

SEQ ID NO: 2787175 - DNA, 25 bp, Homo sapien
tgtgataaacctattgtctaaacag

SEQ ID NO: 2787176 - DNA, 25 bp, Homo sapien
ataaaccatttgtatcttgggcttg

SEQ ID NO: 2787177 - DNA, 25 bp, Homo sapien
gggtactatctacaacaaatacttc

SEQ ID NO: 2787178 - DNA, 25 bp, Homo sapien
cattcatagccataaaccatttgta

SEQ ID NO: 2787179 - DNA, 25 bp, Homo sapien
tgctgaatgatctgctccggatgtg

SEQ ID NO: 2787180 - DNA, 25 bp, Homo sapien
ctctataagttcaggattttgttgc

SEQ ID NO: 2787181 - DNA, 25 bp, Homo sapien
tccggatgtgatttctcagttgctc

SEQ ID NO: 2787182 - DNA, 25 bp, Homo sapien
tcaggaatgctcttcagcgctgctg

SEQ ID NO: 2787183 - DNA, 25 bp, Homo sapien
ttgacaggtcagttaggcccccaac

SEQ ID NO: 2787184 - DNA, 25 bp, Homo sapien
aggcttgacaggtcagttaggcccc

SEQ ID NO: 2787185 - DNA, 25 bp, Homo sapien
tgacaggtcagttaggcccccaact

SEQ ID NO: 2787186 - DNA, 25 bp, Homo sapien
atgaggcttgacaggtcagttaggc

SEQ ID NO: 2787187 - DNA, 25 bp, Homo sapien
caagaaatacatcactgggattggt

SEQ ID NO: 2787188 - DNA, 25 bp, Homo sapien
tacatcactgggattggtatatatt

SEQ ID NO: 2787189 - DNA, 25 bp, Homo sapien
gaaatacatcactgggattggtata

SEQ ID NO: 2787190 - DNA, 25 bp, Homo sapien
catcactgggattggtatatattct

SEQ ID NO: 2787191 - DNA, 25 bp, Homo sapien
acttgagggttctgcattaaacttg

SEQ ID NO: 2787192 - DNA, 25 bp, Homo sapien
tgaacttgagggttctgcattaaac

SEQ ID NO: 2787193 - DNA, 25 bp, Homo sapien
gagggttctgcattaaacttgccgc

SEQ ID NO: 2787194 - DNA, 25 bp, Homo sapien
ttgagggttctgcattaaacttgcc

SEQ ID NO: 2787195 - DNA, 25 bp, Homo sapien
ctaatgaaggctggattatttatca

SEQ ID NO: 2787196 - DNA, 25 bp, Homo sapien
ctagccatgtcaaagctcagtccag

SEQ ID NO: 2787197 - DNA, 25 bp, Homo sapien
tttatcaagctagccatgtcaaagc

SEQ ID NO: 2787198 - DNA, 25 bp, Homo sapien
ggattatttatcaagctagccatgt

SEQ ID NO: 2787199 - DNA, 25 bp, Homo sapien
tcagatttgacttataggaatcatt

SEQ ID NO: 2787200 - DNA, 25 bp, Homo sapien
ggatacctctcttaacttctgttct

SEQ ID NO: 2787201 - DNA, 25 bp, Homo sapien
tttcagatttgacttataggaatca

SEQ ID NO: 2787202 - DNA, 25 bp, Homo sapien
aggactggatacctctcttaacttc

SEQ ID NO: 2787203 - DNA, 25 bp, Homo sapien
tgtactttgaatcaattgctattgc

SEQ ID NO: 2787204 - DNA, 25 bp, Homo sapien
ttttcacaatcctttatcgcatctg

SEQ ID NO: 2787205 - DNA, 25 bp, Homo sapien
cataggccttgctgtactttgaatc

SEQ ID NO: 2787206 - DNA, 25 bp, Homo sapien
gtagtgacctaatttgctctgagca

SEQ ID NO: 2787207 - DNA, 25 bp, Homo sapien
cattaggcaaggcaatactatctgc

SEQ ID NO: 2787208 - DNA, 25 bp, Homo sapien
aaatcttgtccagaaacggagcatg

SEQ ID NO: 2787209 - DNA, 25 bp, Homo sapien
tacttgtccgcacatatgcacagaa

SEQ ID NO: 2787210 - DNA, 25 bp, Homo sapien
tatatataataagcagagccactgg

SEQ ID NO: 2787211 - DNA, 25 bp, Homo sapien
acctgccacaatagtgctagtttac

SEQ ID NO: 2787212 - DNA, 25 bp, Homo sapien
ccttcagagctattaatctaaatgt

SEQ ID NO: 2787213 - DNA, 25 bp, Homo sapien
tttaagaattgcaaacctgccacaa

SEQ ID NO: 2787214 - DNA, 25 bp, Homo sapien
attttccttcagagctattaatcta

SEQ ID NO: 2787215 - DNA, 25 bp, Homo sapien
gggatccaattctattgcctgtgtg

SEQ ID NO: 2787216 - DNA, 25 bp, Homo sapien
tgtgtaacaatccactgcagcagca

SEQ ID NO: 2787217 - DNA, 25 bp, Homo sapien
aatagtaaactgcattattgggatc

SEQ ID NO: 2787218 - DNA, 25 bp, Homo sapien
gtaaactgcattattgggatccaat

SEQ ID NO: 2787219 - DNA, 25 bp, Homo sapien
aactataattatatgaaagtcggcc

SEQ ID NO: 2787220 - DNA, 25 bp, Homo sapien
taaaaacatacactcttatagacac

SEQ ID NO: 2787221 - DNA, 25 bp, Homo sapien
gtaaccagtatgtacagtaagtata

SEQ ID NO: 2787222 - DNA, 25 bp, Homo sapien
atagacacattttaatcgtggaaac

SEQ ID NO: 2787223 - DNA, 25 bp, Homo sapien
ctgccccagcccgttccagatgcaa

SEQ ID NO: 2787224 - DNA, 25 bp, Homo sapien
gatgcaacaccctccctaatcacca

SEQ ID NO: 2787225 - DNA, 25 bp, Homo sapien
agcccgttccagatgcaacaccctc

SEQ ID NO: 2787226 - DNA, 25 bp, Homo sapien
gttccagatgcaacaccctccctaa

SEQ ID NO: 2787227 - DNA, 25 bp, Homo sapien
ctcaatctggacctggtcttccact

SEQ ID NO: 2787228 - DNA, 25 bp, Homo sapien
tctggacctggtcttccactctttc

SEQ ID NO: 2787229 - DNA, 25 bp, Homo sapien
aatctggacctggtcttccactctt

SEQ ID NO: 2787230 - DNA, 25 bp, Homo sapien
tcaatctggacctggtcttccactc

SEQ ID NO: 2787231 - DNA, 25 bp, Homo sapien
cttcatcttttaattggtcagcttt

SEQ ID NO: 2787232 - DNA, 25 bp, Homo sapien
ttcatcttttaattggtcagctttt

SEQ ID NO: 2787233 - DNA, 25 bp, Homo sapien
ctgagtttgaaaggggcagaacgtc

SEQ ID NO: 2787234 - DNA, 25 bp, Homo sapien
gagtttgaaaggggcagaacgtcat

SEQ ID NO: 2787235 - DNA, 25 bp, Homo sapien
tgagtttgaaaggggcagaacgtca

SEQ ID NO: 2787236 - DNA, 25 bp, Homo sapien
agtttgaaaggggcagaacgtcatt

SEQ ID NO: 2787237 - DNA, 25 bp, Homo sapien
tctagccactgaaacagggttccct

SEQ ID NO: 2787238 - DNA, 25 bp, Homo sapien
agcccaccatcaccaaagggaagaa

SEQ ID NO: 2787239 - DNA, 25 bp, Homo sapien
gccacaggcccagacaatgaaagaa

SEQ ID NO: 2787240 - DNA, 25 bp, Homo sapien
tgctttagccataaccatatctagc

SEQ ID NO: 2787241 - DNA, 25 bp, Homo sapien
tacagaaggaactggtaaacatttc

SEQ ID NO: 2787242 - DNA, 25 bp, Homo sapien
tgtgaaactgctaggtgtgtatctt

SEQ ID NO: 2787243 - DNA, 25 bp, Homo sapien
taggtgtgtatcttctgggctgatc

SEQ ID NO: 2787244 - DNA, 25 bp, Homo sapien
tgggctgatcttaaaaactgtctcc

SEQ ID NO: 2787245 - DNA, 25 bp, Homo sapien
taaccagactgcaaggaggtttaga

SEQ ID NO: 2787246 - DNA, 25 bp, Homo sapien
agagcaaatgcccaattttcatctc

SEQ ID NO: 2787247 - DNA, 25 bp, Homo sapien
caaggaggtttagagcaaatgccca

SEQ ID NO: 2787248 - DNA, 25 bp, Homo sapien
cctggaaagacatcaactaaccaga

SEQ ID NO: 2787249 - DNA, 25 bp, Homo sapien
ttcccgtaagaaacgaataactgca

SEQ ID NO: 2787250 - DNA, 25 bp, Homo sapien
aactgcataaaccaggtgcttgata

SEQ ID NO: 2787251 - DNA, 25 bp, Homo sapien
actttcttgttcatccgaggtgtaa

SEQ ID NO: 2787252 - DNA, 25 bp, Homo sapien
ccgaggtgtaagtgtccatctgact

SEQ ID NO: 2787253 - DNA, 25 bp, Homo sapien
acgcgagacgactgctgctggcccg

SEQ ID NO: 2787254 - DNA, 25 bp, Homo sapien
caagcaggaggacgcgagacgactg

SEQ ID NO: 2787255 - DNA, 25 bp, Homo sapien
gcactggtcgcggcggcgcaaactt

SEQ ID NO: 2787256 - DNA, 25 bp, Homo sapien
ccggctcgggatcgcagcactggtc

SEQ ID NO: 2787257 - DNA, 25 bp, Homo sapien
cagtcctggattgttaatgaatagt

SEQ ID NO: 2787258 - DNA, 25 bp, Homo sapien
cgtctgattcagatagccaggtgtg

SEQ ID NO: 2787259 - DNA, 25 bp, Homo sapien
actgtcttcatcacacacacagagg

SEQ ID NO: 2787260 - DNA, 25 bp, Homo sapien
caccatattgtgatctcttcgaggc

SEQ ID NO: 2787261 - DNA, 25 bp, Homo sapien
cttgagctgcggcaatcctcctatc

SEQ ID NO: 2787262 - DNA, 25 bp, Homo sapien
gaaagtaagttgaactaagcagaat

SEQ ID NO: 2787263 - DNA, 25 bp, Homo sapien
gctgaactcttgagctgcggcaatc

SEQ ID NO: 2787264 - DNA, 25 bp, Homo sapien
tgaaagtaagttgaactaagcagaa

SEQ ID NO: 2787265 - DNA, 25 bp, Homo sapien
accttgagtcgggaaagagtccagc

SEQ ID NO: 2787266 - DNA, 25 bp, Homo sapien
taatgtgaccctgtttgtccgtgcc

SEQ ID NO: 2787267 - DNA, 25 bp, Homo sapien
gatctcccgcatacctgtcagtgag

SEQ ID NO: 2787268 - DNA, 25 bp, Homo sapien
cagggcaatttcatgagttcagacc

SEQ ID NO: 2787269 - DNA, 25 bp, Homo sapien
cagtagaagttcctagacaggcaac

SEQ ID NO: 2787270 - DNA, 25 bp, Homo sapien
tgaggactcaaatgtaccaagccaa

SEQ ID NO: 2787271 - DNA, 25 bp, Homo sapien
gaaatgttttaatctcgctgcactg

SEQ ID NO: 2787272 - DNA, 25 bp, Homo sapien
caagaactggtttggtacctgccca

SEQ ID NO: 2787273 - DNA, 25 bp, Homo sapien
aattcccatgaattacttgttgatt

SEQ ID NO: 2787274 - DNA, 25 bp, Homo sapien
cttgttgattatccacactgcaggt

SEQ ID NO: 2787275 - DNA, 25 bp, Homo sapien
gaattacttgttgattatccacact

SEQ ID NO: 2787276 - DNA, 25 bp, Homo sapien
ggttatctgcaatacattttctttg

SEQ ID NO: 2787277 - DNA, 25 bp, Homo sapien
tgcgacctgaccgtgccattagagg

SEQ ID NO: 2787278 - DNA, 25 bp, Homo sapien
ttagggccagcgcaattcaacgact

SEQ ID NO: 2787279 - DNA, 25 bp, Homo sapien
gggacccagaggctaattatcatca

SEQ ID NO: 2787280 - DNA, 25 bp, Homo sapien
gcacgatcttgaggccatttcgcgg

SEQ ID NO: 2787281 - DNA, 25 bp, Homo sapien
aaagaaactccatcggccggcgcgg

SEQ ID NO: 2787282 - DNA, 25 bp, Homo sapien
tgggctctctatctctctggctggg

SEQ ID NO: 2787283 - DNA, 25 bp, Homo sapien
aacccctgtgcaccgattactgtcg

SEQ ID NO: 2787284 - DNA, 25 bp, Homo sapien
cagggtcggcgttgccagcgttccc

SEQ ID NO: 2787285 - DNA, 25 bp, Homo sapien
cacccgagagagatattcagctgga

SEQ ID NO: 2787286 - DNA, 25 bp, Homo sapien
cagctggatccaaagtgactgatga

SEQ ID NO: 2787287 - DNA, 25 bp, Homo sapien
tgcaaaactcgagaccaggaagcca

SEQ ID NO: 2787288 - DNA, 25 bp, Homo sapien
tcttctgtgggaggccagtccacat

SEQ ID NO: 2787289 - DNA, 25 bp, Homo sapien
ttttcgtaattgctgcttatccaga

SEQ ID NO: 2787290 - DNA, 25 bp, Homo sapien
cataccctacttggctgcttgcatt

SEQ ID NO: 2787291 - DNA, 25 bp, Homo sapien
tttagtgatgctgggtagcagtttc

SEQ ID NO: 2787292 - DNA, 25 bp, Homo sapien
tccttacataccctacttggctgct

SEQ ID NO: 2787293 - DNA, 25 bp, Homo sapien
gttaatatattttcaatcccagtct

SEQ ID NO: 2787294 - DNA, 25 bp, Homo sapien
cagtttaggagtggaagaatcgtgg

SEQ ID NO: 2787295 - DNA, 25 bp, Homo sapien
cccagtctgttactagatacatgat

SEQ ID NO: 2787296 - DNA, 25 bp, Homo sapien
acctcttagcttaggaagttgtgag

SEQ ID NO: 2787297 - DNA, 25 bp, Homo sapien
tgggtccatgttgcctgccgtattt

SEQ ID NO: 2787298 - DNA, 25 bp, Homo sapien
tgcctgccgtatttcaaacactgca

SEQ ID NO: 2787299 - DNA, 25 bp, Homo sapien
ctcgaatagtggctttggatttata

SEQ ID NO: 2787300 - DNA, 25 bp, Homo sapien
cctcctctctcgaatagtggctttg

SEQ ID NO: 2787301 - DNA, 25 bp, Homo sapien
tgagccactacagtatgcaggaacc

SEQ ID NO: 2787302 - DNA, 25 bp, Homo sapien
gcgtgagccactacagtatgcagga

SEQ ID NO: 2787303 - DNA, 25 bp, Homo sapien
ctacagtatgcaggaacctaaaata

SEQ ID NO: 2787304 - DNA, 25 bp, Homo sapien
gccactacagtatgcaggaacctaa

SEQ ID NO: 2787305 - DNA, 25 bp, Homo sapien
gctgtgctgttacattagaaggtag

SEQ ID NO: 2787306 - DNA, 25 bp, Homo sapien
gagactaaatgctggtgacacgccg

SEQ ID NO: 2787307 - DNA, 25 bp, Homo sapien
tgatcaccaatcaagtgtgtgctgg

SEQ ID NO: 2787308 - DNA, 25 bp, Homo sapien
gccctcagtttaaccccattagtga

SEQ ID NO: 2787309 - DNA, 25 bp, Homo sapien
ccagattgttctcgagagtaataca

SEQ ID NO: 2787310 - DNA, 25 bp, Homo sapien
tctcgagagtaatacattttgaaaa

SEQ ID NO: 2787311 - DNA, 25 bp, Homo sapien
tctcacccccagattgttctcgaga

SEQ ID NO: 2787312 - DNA, 25 bp, Homo sapien
tgttctcgagagtaatacattttga

SEQ ID NO: 2787313 - DNA, 25 bp, Homo sapien
caaaatagatgttagagggccaccc

SEQ ID NO: 2787314 - DNA, 25 bp, Homo sapien
gagggcagtgttacctggtaccaaa

SEQ ID NO: 2787315 - DNA, 25 bp, Homo sapien
gagcaaatgattgactggcttgagt

SEQ ID NO: 2787316 - DNA, 25 bp, Homo sapien
gagaatagctctcacaacagggctt

SEQ ID NO: 2787317 - DNA, 25 bp, Homo sapien
ttgacatttgtggacctgctgcggt

SEQ ID NO: 2787318 - DNA, 25 bp, Homo sapien
gcggtgtccttacactcattgagaa

SEQ ID NO: 2787319 - DNA, 25 bp, Homo sapien
ggacctgctgcggtgtccttacact

SEQ ID NO: 2787320 - DNA, 25 bp, Homo sapien
gtggagctttgacatttgtggacct

SEQ ID NO: 2787321 - DNA, 25 bp, Homo sapien
cgtctgtgcactgggcccgtttccc

SEQ ID NO: 2787322 - DNA, 25 bp, Homo sapien
ctcagatctacactgagggcagttg

SEQ ID NO: 2787323 - DNA, 25 bp, Homo sapien
tcagtcttgtcctgttccactcaga

SEQ ID NO: 2787324 - DNA, 25 bp, Homo sapien
tgggcttcactaggggccccgtctg

SEQ ID NO: 2787325 - DNA, 25 bp, Homo sapien
gtttgtgccattgggctgcagtcta

SEQ ID NO: 2787326 - DNA, 25 bp, Homo sapien
aagactatccactataaagatagcc

SEQ ID NO: 2787327 - DNA, 25 bp, Homo sapien
tataaagatagccatttggctgggt

SEQ ID NO: 2787328 - DNA, 25 bp, Homo sapien
gtttgaggccgcagtcagtcatgtt

SEQ ID NO: 2787329 - DNA, 25 bp, Homo sapien
gcacttctgtggataaattaatgcc

SEQ ID NO: 2787330 - DNA, 25 bp, Homo sapien
gcctggcctgcagtagcacttctgt

SEQ ID NO: 2787331 - DNA, 25 bp, Homo sapien
ggtataattaagactcactggaatc

SEQ ID NO: 2787332 - DNA, 25 bp, Homo sapien
tttagtagcgacaagatctcatgat

SEQ ID NO: 2787333 - DNA, 25 bp, Homo sapien
gacattgtcatactctaggcaacag

SEQ ID NO: 2787334 - DNA, 25 bp, Homo sapien
cagtgactaggtggataatactgcc

SEQ ID NO: 2787335 - DNA, 25 bp, Homo sapien
tctcaaaattgctcctgaaggcttc

SEQ ID NO: 2787336 - DNA, 25 bp, Homo sapien
tagaacacgctggtgaccatgaacc

SEQ ID NO: 2787337 - DNA, 25 bp, Homo sapien
tctcccctcagaaaagtggtccagt

SEQ ID NO: 2787338 - DNA, 25 bp, Homo sapien
ttagtgataatggacctcagcagcc

SEQ ID NO: 2787339 - DNA, 25 bp, Homo sapien
tcagcagccaagtacaaccgttaaa

SEQ ID NO: 2787340 - DNA, 25 bp, Homo sapien
tcaaatcataatcccgaagagccaa

SEQ ID NO: 2787341 - DNA, 25 bp, Homo sapien
gctagtcagagtaagtaggcagcac

SEQ ID NO: 2787342 - DNA, 25 bp, Homo sapien
ttatttggaccagaaaaaagtgcca

SEQ ID NO: 2787343 - DNA, 25 bp, Homo sapien
tggagctaggaaaccaaagcaagct

SEQ ID NO: 2787344 - DNA, 25 bp, Homo sapien
taattgcatttatgagctcggcagg

SEQ ID NO: 2787345 - DNA, 25 bp, Homo sapien
aaggtagcaaaatggagcatgcttc

SEQ ID NO: 2787346 - DNA, 25 bp, Homo sapien
tcaaggtagcaaaatggagcatgct

SEQ ID NO: 2787347 - DNA, 25 bp, Homo sapien
tagcaaaatggagcatgcttcaatc

SEQ ID NO: 2787348 - DNA, 25 bp, Homo sapien
ggtagcaaaatggagcatgcttcaa

SEQ ID NO: 2787349 - DNA, 25 bp, Homo sapien
tcagattagacacccttgactaaca

SEQ ID NO: 2787350 - DNA, 25 bp, Homo sapien
tgtgttacaaggaggaccattgctg

SEQ ID NO: 2787351 - DNA, 25 bp, Homo sapien
ttccatcagacctaacagcatccag

SEQ ID NO: 2787352 - DNA, 25 bp, Homo sapien
tagatttgttagctagaagagcacc

SEQ ID NO: 2787353 - DNA, 25 bp, Homo sapien
ggtggctgcagctagaactatgttc

SEQ ID NO: 2787354 - DNA, 25 bp, Homo sapien
gggtaggagtcacatactgggtggc

SEQ ID NO: 2787355 - DNA, 25 bp, Homo sapien
aggagtcacatactgggtggctgca

SEQ ID NO: 2787356 - DNA, 25 bp, Homo sapien
tggctgcagctagaactatgttcat

SEQ ID NO: 2787357 - DNA, 25 bp, Homo sapien
gagtcctttgggactcaactccctg

SEQ ID NO: 2787358 - DNA, 25 bp, Homo sapien
tgcctcatctggtcagtgaaaatac

SEQ ID NO: 2787359 - DNA, 25 bp, Homo sapien
tctggcactgtctatgtaactggtc

SEQ ID NO: 2787360 - DNA, 25 bp, Homo sapien
gagcttgccttaggacaccgccatt

SEQ ID NO: 2787361 - DNA, 25 bp, Homo sapien
taaggctgccctatagtttggtcaa

SEQ ID NO: 2787362 - DNA, 25 bp, Homo sapien
gaaccgggtagacatgagcacaaga

SEQ ID NO: 2787363 - DNA, 25 bp, Homo sapien
tcaagtgttcttccgtgttgtccaa

SEQ ID NO: 2787364 - DNA, 25 bp, Homo sapien
aaaatccaggcggtgaaacgagcag

SEQ ID NO: 2787365 - DNA, 25 bp, Homo sapien
tgacgaatctgtcgtcggcggtgac

SEQ ID NO: 2787366 - DNA, 25 bp, Homo sapien
cccacgtcggtgattcaggtgacga

SEQ ID NO: 2787367 - DNA, 25 bp, Homo sapien
ggtttgggcttaggcttcggcctca

SEQ ID NO: 2787368 - DNA, 25 bp, Homo sapien
tgaccagcgagcagatgcggacgct

SEQ ID NO: 2787369 - DNA, 25 bp, Homo sapien
gaaatcgaggagctgcggctctacc

SEQ ID NO: 2787370 - DNA, 25 bp, Homo sapien
tctaccccccggagtaagtgctgga

SEQ ID NO: 2787371 - DNA, 25 bp, Homo sapien
atgtcacgtgatcgcgccggcttac

SEQ ID NO: 2787372 - DNA, 25 bp, Homo sapien
gggcgccatagagacctcgggagcc

SEQ ID NO: 2787373 - DNA, 25 bp, Homo sapien
caggacggtcgcacaaacttagcat

SEQ ID NO: 2787374 - DNA, 25 bp, Homo sapien
ggttaactactgcacggagccctta

SEQ ID NO: 2787375 - DNA, 25 bp, Homo sapien
ttttgctgacgagaaagcctgctgc

SEQ ID NO: 2787376 - DNA, 25 bp, Homo sapien
cactctgaaaatcgcggagaccgcg

SEQ ID NO: 2787377 - DNA, 25 bp, Homo sapien
tatttttcagaggttactagcttct

SEQ ID NO: 2787378 - DNA, 25 bp, Homo sapien
tatttgcatgtaggtttttgttagc

SEQ ID NO: 2787379 - DNA, 25 bp, Homo sapien
tactagcttctaaatggattctgag

SEQ ID NO: 2787380 - DNA, 25 bp, Homo sapien
ttatgaagactttttgttgcctatg

SEQ ID NO: 2787381 - DNA, 25 bp, Homo sapien
gccaaatcgtacttatttcagagta

SEQ ID NO: 2787382 - DNA, 25 bp, Homo sapien
tttcctactgagtgttattagatta

SEQ ID NO: 2787383 - DNA, 25 bp, Homo sapien
tgcagtccttatcagaagtaattga

SEQ ID NO: 2787384 - DNA, 25 bp, Homo sapien
tactattgttattaggcaattaaaa

SEQ ID NO: 2787385 - DNA, 25 bp, Homo sapien
gcgtccatgcttgatatcgtttggt

SEQ ID NO: 2787386 - DNA, 25 bp, Homo sapien
cttgatatcgtttggttcatgaaca

SEQ ID NO: 2787387 - DNA, 25 bp, Homo sapien
ggaaagcgtccatgcttgatatcgt

SEQ ID NO: 2787388 - DNA, 25 bp, Homo sapien
tcctgggaaagcgtccatgcttgat

SEQ ID NO: 2787389 - DNA, 25 bp, Homo sapien
agtcatgcagctttgggaccatcag

SEQ ID NO: 2787390 - DNA, 25 bp, Homo sapien
tgcatacccatagagaagtgtgtaa

SEQ ID NO: 2787391 - DNA, 25 bp, Homo sapien
tcagctgtaggtggcaaaggtgccc

SEQ ID NO: 2787392 - DNA, 25 bp, Homo sapien
tacaggtcatccatcattcttaggc

SEQ ID NO: 2787393 - DNA, 25 bp, Homo sapien
gcctgatttgattatgaagctgctt

SEQ ID NO: 2787394 - DNA, 25 bp, Homo sapien
attttaatcattcagccacatacgg

SEQ ID NO: 2787395 - DNA, 25 bp, Homo sapien
ccacatacggttggctggtaaacag

SEQ ID NO: 2787396 - DNA, 25 bp, Homo sapien
gaatggaaagagttgcccttgttgc

SEQ ID NO: 2787397 - DNA, 25 bp, Homo sapien
cagtatctgatttcaactggtgcgt

SEQ ID NO: 2787398 - DNA, 25 bp, Homo sapien
cccttctcaagtgaagatactgtgt

SEQ ID NO: 2787399 - DNA, 25 bp, Homo sapien
tagagccattcccacaaagtaaatg

SEQ ID NO: 2787400 - DNA, 25 bp, Homo sapien
actggtgcgttacgaagtagagcca

SEQ ID NO: 2787401 - DNA, 25 bp, Homo sapien
tgtgtgtgtggcgttctccacagga

SEQ ID NO: 2787402 - DNA, 25 bp, Homo sapien
cccttgccagtagtgggtttgtgtg

SEQ ID NO: 2787403 - DNA, 25 bp, Homo sapien
tagagtaggagctgctttgaacagc

SEQ ID NO: 2787404 - DNA, 25 bp, Homo sapien
tcttgaaagcaatgccagcttagag

SEQ ID NO: 2787405 - DNA, 25 bp, Homo sapien
gatgcagatgcagggtacagtcaca

SEQ ID NO: 2787406 - DNA, 25 bp, Homo sapien
agtaggtccacgctgtctctgaagg

SEQ ID NO: 2787407 - DNA, 25 bp, Homo sapien
gaaatacctttgacacactacctgg

SEQ ID NO: 2787408 - DNA, 25 bp, Homo sapien
gaggtagcatctccggatctcaagg

SEQ ID NO: 2787409 - DNA, 25 bp, Homo sapien
tcccccactatgtgtcctaagcagg

SEQ ID NO: 2787410 - DNA, 25 bp, Homo sapien
gatcaagctcaatggagcagtggcg

SEQ ID NO: 2787411 - DNA, 25 bp, Homo sapien
gtgtcctaagcaggactgtgagtcc

SEQ ID NO: 2787412 - DNA, 25 bp, Homo sapien
aatgactgagtatgctgtctggctc

SEQ ID NO: 2787413 - DNA, 25 bp, Homo sapien
ggttgctttcatagccgcggacaca

SEQ ID NO: 2787414 - DNA, 25 bp, Homo sapien
tcatagccgcggacacaacttgggc

SEQ ID NO: 2787415 - DNA, 25 bp, Homo sapien
cactggcgcccggttgctttcatag

SEQ ID NO: 2787416 - DNA, 25 bp, Homo sapien
gcccggttgctttcatagccgcgga

SEQ ID NO: 2787417 - DNA, 25 bp, Homo sapien
ctaaggcagcaaggagtgcactggt

SEQ ID NO: 2787418 - DNA, 25 bp, Homo sapien
ggaggctcctcccttcactaaggca

SEQ ID NO: 2787419 - DNA, 25 bp, Homo sapien
tgcctccacggtgttcctccaggag

SEQ ID NO: 2787420 - DNA, 25 bp, Homo sapien
aggtaggtattttccagaggcttgg

SEQ ID NO: 2787421 - DNA, 25 bp, Homo sapien
agttcaggtcctcatcagttctcat

SEQ ID NO: 2787422 - DNA, 25 bp, Homo sapien
acgtgagacgtcctcacacgtgaga

SEQ ID NO: 2787423 - DNA, 25 bp, Homo sapien
tcagttctcattccgattcttcctg

SEQ ID NO: 2787424 - DNA, 25 bp, Homo sapien
acgtgagacgtcctcgccactctct

SEQ ID NO: 2787425 - DNA, 25 bp, Homo sapien
gttgcattagaacacccttattaaa

SEQ ID NO: 2787426 - DNA, 25 bp, Homo sapien
tgttccatctaggttttgggcccag

SEQ ID NO: 2787427 - DNA, 25 bp, Homo sapien
aatgagatcaggattggattcctca

SEQ ID NO: 2787428 - DNA, 25 bp, Homo sapien
catagcaatagttggataaaagaag

SEQ ID NO: 2787429 - DNA, 25 bp, Homo sapien
catggtaacaagccttgaaggaggc

SEQ ID NO: 2787430 - DNA, 25 bp, Homo sapien
ttatcatgcttaccaaccacaaaag

SEQ ID NO: 2787431 - DNA, 25 bp, Homo sapien
aaacaatacgtgagccatctgggcc

SEQ ID NO: 2787432 - DNA, 25 bp, Homo sapien
tcgggtcatgaccaaatgaagtgtc

SEQ ID NO: 2787433 - DNA, 25 bp, Homo sapien
agtcagcactaacactcgggtcatg

SEQ ID NO: 2787434 - DNA, 25 bp, Homo sapien
ggagtgactgcttcccgctttaaca

SEQ ID NO: 2787435 - DNA, 25 bp, Homo sapien
ctgcaggacggcattgatcctttca

SEQ ID NO: 2787436 - DNA, 25 bp, Homo sapien
gatcctttcaaaggcgttatgaaga

SEQ ID NO: 2787437 - DNA, 25 bp, Homo sapien
ggcgttatgaagaagcacatcttca

SEQ ID NO: 2787438 - DNA, 25 bp, Homo sapien
ctgtgttttggagaccagtcaacat

SEQ ID NO: 2787439 - DNA, 25 bp, Homo sapien
taaaggctctggacatctagatcag

SEQ ID NO: 2787440 - DNA, 25 bp, Homo sapien
tctgactgtcgcgtgcatgggagcc

SEQ ID NO: 2787441 - DNA, 25 bp, Homo sapien
cctgaccctagatgtgctgaaactg

SEQ ID NO: 2787442 - DNA, 25 bp, Homo sapien
tctgggttaaagtccaagatgctgc

SEQ ID NO: 2787443 - DNA, 25 bp, Homo sapien
cttgtgttggtgtaggggcgccctg

SEQ ID NO: 2787444 - DNA, 25 bp, Homo sapien
ggcgccctggcacggctctttccca

SEQ ID NO: 2787445 - DNA, 25 bp, Homo sapien
gccctggcacggctctttcccacag

SEQ ID NO: 2787446 - DNA, 25 bp, Homo sapien
gcgccctggcacggctctttcccac

SEQ ID NO: 2787447 - DNA, 25 bp, Homo sapien
cagtctggggtcgtatcttgagtcc

SEQ ID NO: 2787448 - DNA, 25 bp, Homo sapien
gagtcccttctatgctgtgagaaaa

SEQ ID NO: 2787449 - DNA, 25 bp, Homo sapien
tgatgatctgaattggtggacaagg

SEQ ID NO: 2787450 - DNA, 25 bp, Homo sapien
ggtcgtatcttgagtcccttctatg

SEQ ID NO: 2787451 - DNA, 25 bp, Homo sapien
gggcctcggtaaacctctgcctcag

SEQ ID NO: 2787452 - DNA, 25 bp, Homo sapien
gctcagttgagttctcagagtgtca

SEQ ID NO: 2787453 - DNA, 25 bp, Homo sapien
gagtgtcagggaaacagtcttgctt

SEQ ID NO: 2787454 - DNA, 25 bp, Homo sapien
gccgaaaagccacctcactgaggct

SEQ ID NO: 2787455 - DNA, 25 bp, Homo sapien
tctgggagtacaggtgagagccatt

SEQ ID NO: 2787456 - DNA, 25 bp, Homo sapien
agccattgtgcccggccaacgggtg

SEQ ID NO: 2787457 - DNA, 25 bp, Homo sapien
gagagccattgtgcccggccaacgg

SEQ ID NO: 2787458 - DNA, 25 bp, Homo sapien
ttctgggagtacaggtgagagccat

SEQ ID NO: 2787459 - DNA, 25 bp, Homo sapien
gttctgccatcagagtcacggaggt

SEQ ID NO: 2787460 - DNA, 25 bp, Homo sapien
catagggctctttctcgttcctgga

SEQ ID NO: 2787461 - DNA, 25 bp, Homo sapien
tgcggcatagggctctttctcgttc

SEQ ID NO: 2787462 - DNA, 25 bp, Homo sapien
cccttgcgttctgccatcagagtca

SEQ ID NO: 2787463 - DNA, 25 bp, Homo sapien
tcttgctgtcagttcaaatttgggc

SEQ ID NO: 2787464 - DNA, 25 bp, Homo sapien
ctgctgctaagacttagcaaccaac

SEQ ID NO: 2787465 - DNA, 25 bp, Homo sapien
tgctgctaagacttagcaaccaact

SEQ ID NO: 2787466 - DNA, 25 bp, Homo sapien
agtctctcttgctgtcagttcaaat

SEQ ID NO: 2787467 - DNA, 25 bp, Homo sapien
aaaggagggagaaccaatacacaag

SEQ ID NO: 2787468 - DNA, 25 bp, Homo sapien
accaatacacaaggatgctttttgg

SEQ ID NO: 2787469 - DNA, 25 bp, Homo sapien
aaggagggagaaccaatacacaagg

SEQ ID NO: 2787470 - DNA, 25 bp, Homo sapien
tttgagcagctgaaacgtccatgga

SEQ ID NO: 2787471 - DNA, 25 bp, Homo sapien
ttgagcagctgaaacgtccatggag

SEQ ID NO: 2787472 - DNA, 25 bp, Homo sapien
gtttgagcagctgaaacgtccatgg

SEQ ID NO: 2787473 - DNA, 25 bp, Homo sapien
ctgttgatgtgccagtcttggtatc

SEQ ID NO: 2787474 - DNA, 25 bp, Homo sapien
ttctgttgatgtgccagtcttggta

SEQ ID NO: 2787475 - DNA, 25 bp, Homo sapien
tgttgatgtgccagtcttggtatca

SEQ ID NO: 2787476 - DNA, 25 bp, Homo sapien
gttgatgtgccagtcttggtatcag

SEQ ID NO: 2787477 - DNA, 25 bp, Homo sapien
acatgcaggcatcattaccgtacag

SEQ ID NO: 2787478 - DNA, 25 bp, Homo sapien
catgcaggcatcattaccgtacagc

SEQ ID NO: 2787479 - DNA, 25 bp, Homo sapien
cacatgcaggcatcattaccgtaca

SEQ ID NO: 2787480 - DNA, 25 bp, Homo sapien
tgcaggcatcattaccgtacagcat

SEQ ID NO: 2787481 - DNA, 25 bp, Homo sapien
gagagctgaatcctccttgtggtat

SEQ ID NO: 2787482 - DNA, 25 bp, Homo sapien
tccttgtggtattcttccacaccca

SEQ ID NO: 2787483 - DNA, 25 bp, Homo sapien
tccacacccatttgggacatgaaag

SEQ ID NO: 2787484 - DNA, 25 bp, Homo sapien
atgatgagagctgaatcctccttgt

SEQ ID NO: 2787485 - DNA, 25 bp, Homo sapien
tcttaggagggtgtatgcattgagg

SEQ ID NO: 2787486 - DNA, 25 bp, Homo sapien
agtcttaggagggtgtatgcattga

SEQ ID NO: 2787487 - DNA, 25 bp, Homo sapien
tagtcttaggagggtgtatgcattg

SEQ ID NO: 2787488 - DNA, 25 bp, Homo sapien
cttaggagggtgtatgcattgagga

SEQ ID NO: 2787489 - DNA, 25 bp, Homo sapien
tggactctgctcttagcagtttctc

SEQ ID NO: 2787490 - DNA, 25 bp, Homo sapien
ctgcttttaactgggctttgtcttt

SEQ ID NO: 2787491 - DNA, 25 bp, Homo sapien
tttggactctgctcttagcagtttc

SEQ ID NO: 2787492 - DNA, 25 bp, Homo sapien
gactctgctcttagcagtttctctt

SEQ ID NO: 2787493 - DNA, 25 bp, Homo sapien
ggccccctagtttgccatcgctcat

SEQ ID NO: 2787494 - DNA, 25 bp, Homo sapien
tggccccctagtttgccatcgctca

SEQ ID NO: 2787495 - DNA, 25 bp, Homo sapien
ctggccccctagtttgccatcgctc

SEQ ID NO: 2787496 - DNA, 25 bp, Homo sapien
ttagcagtttcatcaggtagtagag

SEQ ID NO: 2787497 - DNA, 25 bp, Homo sapien
aatcctgcctgggtgctatgagcct

SEQ ID NO: 2787498 - DNA, 25 bp, Homo sapien
gctgcgtgaccaggaaggatctatg

SEQ ID NO: 2787499 - DNA, 25 bp, Homo sapien
gtagagatttccagcttcattgtcc

SEQ ID NO: 2787500 - DNA, 25 bp, Homo sapien
ccatgacttatgttttgagtgggtc

SEQ ID NO: 2787501 - DNA, 25 bp, Homo sapien
tctgcccacatagatcccagggtta

SEQ ID NO: 2787502 - DNA, 25 bp, Homo sapien
gacactgaagttaggtcttctctag

SEQ ID NO: 2787503 - DNA, 25 bp, Homo sapien
ctgagaccttaggtgtgtgtgcccc

SEQ ID NO: 2787504 - DNA, 25 bp, Homo sapien
ctccaggatcgagaagctggtggtc

SEQ ID NO: 2787505 - DNA, 25 bp, Homo sapien
ctagatgtccagagcctttagtcca

SEQ ID NO: 2787506 - DNA, 25 bp, Homo sapien
gatgtccagagcctttagtccagga

SEQ ID NO: 2787507 - DNA, 25 bp, Homo sapien
cagagcctttagtccaggactttga

SEQ ID NO: 2787508 - DNA, 25 bp, Homo sapien
ccgctcaagtcctgggcctgcggtg

SEQ ID NO: 2787509 - DNA, 25 bp, Homo sapien
tgagtggaaagttctgagagtctgt

SEQ ID NO: 2787510 - DNA, 25 bp, Homo sapien
ctgtgaggtacagtgagtggaaagt

SEQ ID NO: 2787511 - DNA, 25 bp, Homo sapien
aggtacagtgagtggaaagttctga

SEQ ID NO: 2787512 - DNA, 25 bp, Homo sapien
agtgagtggaaagttctgagagtct

SEQ ID NO: 2787513 - DNA, 25 bp, Homo sapien
tgtaggctccttggttccccatggg

SEQ ID NO: 2787514 - DNA, 25 bp, Homo sapien
caggagcgccacgtgcaagttcttg

SEQ ID NO: 2787515 - DNA, 25 bp, Homo sapien
cgtgggcaactgcatcatggcggct

SEQ ID NO: 2787516 - DNA, 25 bp, Homo sapien
cagccgcttgcagacggttgggtaa

SEQ ID NO: 2787517 - DNA, 25 bp, Homo sapien
tgcccaagtctaagatcattcccaa

SEQ ID NO: 2787518 - DNA, 25 bp, Homo sapien
gttctcttagctttcaggttcagtg

SEQ ID NO: 2787519 - DNA, 25 bp, Homo sapien
ttagctttcaggttcagtgtgacag

SEQ ID NO: 2787520 - DNA, 25 bp, Homo sapien
gggcccagacttgcctgtttgtgtt

SEQ ID NO: 2787521 - DNA, 25 bp, Homo sapien
aatgagctcctcttggtgcagatac

SEQ ID NO: 2787522 - DNA, 25 bp, Homo sapien
tgcttctgagcactagagggctctc

SEQ ID NO: 2787523 - DNA, 25 bp, Homo sapien
cagatactgcttctgagcactagag

SEQ ID NO: 2787524 - DNA, 25 bp, Homo sapien
ggatgagatccaggaaaacgtgtcc

SEQ ID NO: 2787525 - DNA, 25 bp, Homo sapien
catatctttgcatgcccttttgaca

SEQ ID NO: 2787526 - DNA, 25 bp, Homo sapien
gatgtaaggatttggggctttatca

SEQ ID NO: 2787527 - DNA, 25 bp, Homo sapien
tctttgcatgcccttttgacattga

SEQ ID NO: 2787528 - DNA, 25 bp, Homo sapien
aatatatttgatgtaaggatttggg

SEQ ID NO: 2787529 - DNA, 25 bp, Homo sapien
gcatattcagcaaacatagacttag

SEQ ID NO: 2787530 - DNA, 25 bp, Homo sapien
gatccatactcacagaatgtttgca

SEQ ID NO: 2787531 - DNA, 25 bp, Homo sapien
ggagctgcctttaacccctggagat

SEQ ID NO: 2787532 - DNA, 25 bp, Homo sapien
ccctggagattcagactccatccag

SEQ ID NO: 2787533 - DNA, 25 bp, Homo sapien
tgggactggcattgtgcccatgtca

SEQ ID NO: 2787534 - DNA, 25 bp, Homo sapien
gggactggcattgtgcccatgtcat

SEQ ID NO: 2787535 - DNA, 25 bp, Homo sapien
cctgccaagtctccctgggactggc

SEQ ID NO: 2787536 - DNA, 25 bp, Homo sapien
tgccaagtctccctgggactggcat

SEQ ID NO: 2787537 - DNA, 25 bp, Homo sapien
ttttagcctacggtagtaggcagaa

SEQ ID NO: 2787538 - DNA, 25 bp, Homo sapien
tctttttagcctacggtagtaggca

SEQ ID NO: 2787539 - DNA, 25 bp, Homo sapien
cctacggtagtaggcagaacggaag

SEQ ID NO: 2787540 - DNA, 25 bp, Homo sapien
tagcctacggtagtaggcagaacgg

SEQ ID NO: 2787541 - DNA, 25 bp, Homo sapien
tagtgtacttggtcccctactttca

SEQ ID NO: 2787542 - DNA, 25 bp, Homo sapien
gctccctctgcctagtgtacttggt

SEQ ID NO: 2787543 - DNA, 25 bp, Homo sapien
gggatgttgtaagtgggaggatctg

SEQ ID NO: 2787544 - DNA, 25 bp, Homo sapien
tctgcctagtgtacttggtccccta

SEQ ID NO: 2787545 - DNA, 25 bp, Homo sapien
gccagagacctgtctctaactctga

SEQ ID NO: 2787546 - DNA, 25 bp, Homo sapien
ggatcccatttgagaaatctaccta

SEQ ID NO: 2787547 - DNA, 25 bp, Homo sapien
aatctacctacatggctcttggctc

SEQ ID NO: 2787548 - DNA, 25 bp, Homo sapien
tggccctgaagtgggcttggatccc

SEQ ID NO: 2787549 - DNA, 25 bp, Homo sapien
gctcagctctactctctgatggaaa

SEQ ID NO: 2787550 - DNA, 25 bp, Homo sapien
gtcaatggaattactggagatggtt

SEQ ID NO: 2787551 - DNA, 25 bp, Homo sapien
aaagagccaggtagtgggtctgctg

SEQ ID NO: 2787552 - DNA, 25 bp, Homo sapien
aaatgtcctgccagtcaatggaatt

SEQ ID NO: 2787553 - DNA, 25 bp, Homo sapien
cactgggctgtgaacccttgcaggg

SEQ ID NO: 2787554 - DNA, 25 bp, Homo sapien
tgtccagcatctggtagggtgccct

SEQ ID NO: 2787555 - DNA, 25 bp, Homo sapien
tccagcatctggtagggtgccctgg

SEQ ID NO: 2787556 - DNA, 25 bp, Homo sapien
cagggaagaactaccatgttgagct

SEQ ID NO: 2787557 - DNA, 25 bp, Homo sapien
gaatggtttgactgttggtttctga

SEQ ID NO: 2787558 - DNA, 25 bp, Homo sapien
gtttctgaatcagatatgggctgta

SEQ ID NO: 2787559 - DNA, 25 bp, Homo sapien
gctttagtctcaggggagaatggtt

SEQ ID NO: 2787560 - DNA, 25 bp, Homo sapien
tttctgaatcagatatgggctgtac

SEQ ID NO: 2787561 - DNA, 25 bp, Homo sapien
tcctgagtgcctccaatttccccag

SEQ ID NO: 2787562 - DNA, 25 bp, Homo sapien
tcatccatacatgaatgcctgtaac

SEQ ID NO: 2787563 - DNA, 25 bp, Homo sapien
ttcctctgtcttttaccttctccag

SEQ ID NO: 2787564 - DNA, 25 bp, Homo sapien
tcttttctgtacctgcctccctact

SEQ ID NO: 2787565 - DNA, 25 bp, Homo sapien
tattaaacacttgtctgcatatggc

SEQ ID NO: 2787566 - DNA, 25 bp, Homo sapien
tgactactgggctatagacctctga

SEQ ID NO: 2787567 - DNA, 25 bp, Homo sapien
catgtgggacctttgatcttattcc

SEQ ID NO: 2787568 - DNA, 25 bp, Homo sapien
attttgtaggtgttaggatctgtgc

SEQ ID NO: 2787569 - DNA, 25 bp, Homo sapien
ttccacatccttcagagcgccttgt

SEQ ID NO: 2787570 - DNA, 25 bp, Homo sapien
tatgggctctaagatgagaatagca

SEQ ID NO: 2787571 - DNA, 25 bp, Homo sapien
gtcatgggcaatgagtacttccaca

SEQ ID NO: 2787572 - DNA, 25 bp, Homo sapien
actgagggggcacgaacgagcttat

SEQ ID NO: 2787573 - DNA, 25 bp, Homo sapien
gatcatcggcttctcgtgaagaccc

SEQ ID NO: 2787574 - DNA, 25 bp, Homo sapien
gggcccacatcttgggaccacactg

SEQ ID NO: 2787575 - DNA, 25 bp, Homo sapien
gttgggcccacatcttgggaccaca

SEQ ID NO: 2787576 - DNA, 25 bp, Homo sapien
tgctgtctggtcttgatcatcggct

SEQ ID NO: 2787577 - DNA, 25 bp, Homo sapien
gctagtagttgagttgggttgatca

SEQ ID NO: 2787578 - DNA, 25 bp, Homo sapien
aatgagagaccaatgttgctttgcc

SEQ ID NO: 2787579 - DNA, 25 bp, Homo sapien
gctttgccttaaatccacgcttggc

SEQ ID NO: 2787580 - DNA, 25 bp, Homo sapien
gggttgatcaagctgagctcttgca

SEQ ID NO: 2787581 - DNA, 25 bp, Homo sapien
ttggtctctctcgctcagcagttcc

SEQ ID NO: 2787582 - DNA, 25 bp, Homo sapien
tcttggtctctctcgctcagcagtt

SEQ ID NO: 2787583 - DNA, 25 bp, Homo sapien
cttggtctctctcgctcagcagttc

SEQ ID NO: 2787584 - DNA, 25 bp, Homo sapien
tcacacgaggtttgccctcccaggg

SEQ ID NO: 2787585 - DNA, 25 bp, Homo sapien
tcacgtgctccttcgtgcagtagca

SEQ ID NO: 2787586 - DNA, 25 bp, Homo sapien
gggtagtcacgtgctccttcgtgca

SEQ ID NO: 2787587 - DNA, 25 bp, Homo sapien
cgtgcagtagcactagggttattgt

SEQ ID NO: 2787588 - DNA, 25 bp, Homo sapien
tgctccttcgtgcagtagcactagg

SEQ ID NO: 2787589 - DNA, 25 bp, Homo sapien
ctttttcccatggtccttagatgtg

SEQ ID NO: 2787590 - DNA, 25 bp, Homo sapien
ggtttgttgtgaacacggtcatcct

SEQ ID NO: 2787591 - DNA, 25 bp, Homo sapien
tctgggctgtgcttgacacatagac

SEQ ID NO: 2787592 - DNA, 25 bp, Homo sapien
agatgtggtgattctctgctgcctc

SEQ ID NO: 2787593 - DNA, 25 bp, Homo sapien
tccctcccataggtgggcaaatagc

SEQ ID NO: 2787594 - DNA, 25 bp, Homo sapien
ctccctcccataggtgggcaaatag

SEQ ID NO: 2787595 - DNA, 25 bp, Homo sapien
aaattttctatccaagtcctctatg

SEQ ID NO: 2787596 - DNA, 25 bp, Homo sapien
aaatctttcttaatgactgtcatat

SEQ ID NO: 2787597 - DNA, 25 bp, Homo sapien
tatattctatcatatgaatgtacca

SEQ ID NO: 2787598 - DNA, 25 bp, Homo sapien
ttatattggacttctttctacatca

SEQ ID NO: 2787599 - DNA, 25 bp, Homo sapien
tccgtgtattcttccacctcatgag

SEQ ID NO: 2787600 - DNA, 25 bp, Homo sapien
tttccgtgtattcttccacctcatg

SEQ ID NO: 2787601 - DNA, 25 bp, Homo sapien
gtgtattcttccacctcatgagtgg

SEQ ID NO: 2787602 - DNA, 25 bp, Homo sapien
tttttccgtgtattcttccacctca

SEQ ID NO: 2787603 - DNA, 25 bp, Homo sapien
ttctacacagccgttggtaactctt

SEQ ID NO: 2787604 - DNA, 25 bp, Homo sapien
tcttgttgatctgttggttgttgtg

SEQ ID NO: 2787605 - DNA, 25 bp, Homo sapien
taactcttgttgatctgttggttgt

SEQ ID NO: 2787606 - DNA, 25 bp, Homo sapien
tacacagccgttggtaactcttgtt

SEQ ID NO: 2787607 - DNA, 25 bp, Homo sapien
tcacaaagggtacaatacatcgata

SEQ ID NO: 2787608 - DNA, 25 bp, Homo sapien
tctcatgttccagcctcagaacatg

SEQ ID NO: 2787609 - DNA, 25 bp, Homo sapien
gataactacagtatatttctctaga

SEQ ID NO: 2787610 - DNA, 25 bp, Homo sapien
gaacatgaagggaaattcacaaagg

SEQ ID NO: 2787611 - DNA, 25 bp, Homo sapien
caacataaagtgtggggtgtcacga

SEQ ID NO: 2787612 - DNA, 25 bp, Homo sapien
ttagagttctaggatgaggtacaat

SEQ ID NO: 2787613 - DNA, 25 bp, Homo sapien
tacaatttggaaaggcctgacttca

SEQ ID NO: 2787614 - DNA, 25 bp, Homo sapien
tggccataattccacatcgccgtcc

SEQ ID NO: 2787615 - DNA, 25 bp, Homo sapien
tggaaacaggctggcttgtgctcct

SEQ ID NO: 2787616 - DNA, 25 bp, Homo sapien
gtgctcctgttctcgcttgatttgc

SEQ ID NO: 2787617 - DNA, 25 bp, Homo sapien
ctgacttgcagcctttagctccaag

SEQ ID NO: 2787618 - DNA, 25 bp, Homo sapien
gcctttagctccaagctgatttctg

SEQ ID NO: 2787619 - DNA, 25 bp, Homo sapien
cccaggaggacaatgaaagctagcg

SEQ ID NO: 2787620 - DNA, 25 bp, Homo sapien
tgaagatagaatgaccaggcctgca

SEQ ID NO: 2787621 - DNA, 25 bp, Homo sapien
taatgccagcgtcggatctttgagc

SEQ ID NO: 2787622 - DNA, 25 bp, Homo sapien
gcttggatgcgagccagaatcaggc

SEQ ID NO: 2787623 - DNA, 25 bp, Homo sapien
ttacaaacgtgaaagcacatttggg

SEQ ID NO: 2787624 - DNA, 25 bp, Homo sapien
ggaagttgggtttgtaagccttgca

SEQ ID NO: 2787625 - DNA, 25 bp, Homo sapien
tattatagtctctctagtttccagg

SEQ ID NO: 2787626 - DNA, 25 bp, Homo sapien
tcaggatgcaacatagagattgaag

SEQ ID NO: 2787627 - DNA, 25 bp, Homo sapien
tttctcatttggtcttgcattgagt

SEQ ID NO: 2787628 - DNA, 25 bp, Homo sapien
gtattagggcaaccaaaacatagac

SEQ ID NO: 2787629 - DNA, 25 bp, Homo sapien
tggtcttgcattgagtattagggca

SEQ ID NO: 2787630 - DNA, 25 bp, Homo sapien
cattgagtattagggcaaccaaaac

SEQ ID NO: 2787631 - DNA, 25 bp, Homo sapien
agagtgccccacgggagtgccaaga

SEQ ID NO: 2787632 - DNA, 25 bp, Homo sapien
agtgccccacgggagtgccaagagc

SEQ ID NO: 2787633 - DNA, 25 bp, Homo sapien
tgccccacgggagtgccaagagcag

SEQ ID NO: 2787634 - DNA, 25 bp, Homo sapien
ggagagtgccccacgggagtgccaa

SEQ ID NO: 2787635 - DNA, 25 bp, Homo sapien
gagatgctgctggaaaccaaagcca

SEQ ID NO: 2787636 - DNA, 25 bp, Homo sapien
tgaaagagatgctgctggaaaccaa

SEQ ID NO: 2787637 - DNA, 25 bp, Homo sapien
agatgctgctggaaaccaaagccat

SEQ ID NO: 2787638 - DNA, 25 bp, Homo sapien
aagagatgctgctggaaaccaaagc

SEQ ID NO: 2787639 - DNA, 25 bp, Homo sapien
atggtaaggttctgcaactgagggc

SEQ ID NO: 2787640 - DNA, 25 bp, Homo sapien
aagccagagcgccacatttctggat

SEQ ID NO: 2787641 - DNA, 25 bp, Homo sapien
gctggaagccagagcgccacatttc

SEQ ID NO: 2787642 - DNA, 25 bp, Homo sapien
agctgcctatggtaaggttctgcaa

SEQ ID NO: 2787643 - DNA, 25 bp, Homo sapien
ccagcattagtaagaatggtggtag

SEQ ID NO: 2787644 - DNA, 25 bp, Homo sapien
tgggctccaccagcattagtaagaa

SEQ ID NO: 2787645 - DNA, 25 bp, Homo sapien
cttctggccgcaggaggaacatcag

SEQ ID NO: 2787646 - DNA, 25 bp, Homo sapien
gtgcctcttctggccgcaggaggaa

SEQ ID NO: 2787647 - DNA, 25 bp, Homo sapien
ttgaaggcagctgatttcagacttt

SEQ ID NO: 2787648 - DNA, 25 bp, Homo sapien
tgaaggcagctgatttcagacttta

SEQ ID NO: 2787649 - DNA, 25 bp, Homo sapien
gaaggcagctgatttcagactttaa

SEQ ID NO: 2787650 - DNA, 25 bp, Homo sapien
aaggcagctgatttcagactttaac

SEQ ID NO: 2787651 - DNA, 25 bp, Homo sapien
tatcaatgtggagcagatagcacag

SEQ ID NO: 2787652 - DNA, 25 bp, Homo sapien
tcaagatgggctactctgggtatca

SEQ ID NO: 2787653 - DNA, 25 bp, Homo sapien
ctctgggtatcaatgtggagcagat

SEQ ID NO: 2787654 - DNA, 25 bp, Homo sapien
gcacaggggagagcaaatgtctgcc

SEQ ID NO: 2787655 - DNA, 25 bp, Homo sapien
tagcttccctcgattttctgaggaa

SEQ ID NO: 2787656 - DNA, 25 bp, Homo sapien
cacatttaggcctagcttccctcga

SEQ ID NO: 2787657 - DNA, 25 bp, Homo sapien
ttgggtaatgccacatttaggccta

SEQ ID NO: 2787658 - DNA, 25 bp, Homo sapien
aggaaagggttctaacccatggcag

SEQ ID NO: 2787659 - DNA, 25 bp, Homo sapien
gactcaaggcagctcggttactcag

SEQ ID NO: 2787660 - DNA, 25 bp, Homo sapien
agctcggttactcagccagctgcag

SEQ ID NO: 2787661 - DNA, 25 bp, Homo sapien
cagctgcagccatgatctttggcat

SEQ ID NO: 2787662 - DNA, 25 bp, Homo sapien
catcataatgcaggttatgtccttt

SEQ ID NO: 2787663 - DNA, 25 bp, Homo sapien
tgagttacagaagttaaaacctctc

SEQ ID NO: 2787664 - DNA, 25 bp, Homo sapien
cacggaagtatggaaacactcacat

SEQ ID NO: 2787665 - DNA, 25 bp, Homo sapien
tcagctaactgaaggcaccaaactc

SEQ ID NO: 2787666 - DNA, 25 bp, Homo sapien
tagactagaagtagactggtcaggc

SEQ ID NO: 2787667 - DNA, 25 bp, Homo sapien
aaacagccgctctgaagcccgaatt

SEQ ID NO: 2787668 - DNA, 25 bp, Homo sapien
gtcatgccaacagattgctcatgtt

SEQ ID NO: 2787669 - DNA, 25 bp, Homo sapien
cggcttctctgacctgtcatgccaa

SEQ ID NO: 2787670 - DNA, 25 bp, Homo sapien
gttggtagagctctgaatcctaaac

SEQ ID NO: 2787671 - DNA, 25 bp, Homo sapien
ataaagtagatttgtcactgggaag

SEQ ID NO: 2787672 - DNA, 25 bp, Homo sapien
aagtagatttgtcactgggaagcag

SEQ ID NO: 2787673 - DNA, 25 bp, Homo sapien
aaagtagatttgtcactgggaagca

SEQ ID NO: 2787674 - DNA, 25 bp, Homo sapien
taaagtagatttgtcactgggaagc

SEQ ID NO: 2787675 - DNA, 25 bp, Homo sapien
tgcttaatcgatgtttgctgatgtt

SEQ ID NO: 2787676 - DNA, 25 bp, Homo sapien
tttgcctgaagtttcatcaaggcaa

SEQ ID NO: 2787677 - DNA, 25 bp, Homo sapien
tgaagtttcatcaaggcaatatgct

SEQ ID NO: 2787678 - DNA, 25 bp, Homo sapien
aggcaatatgcttaatcgatgtttg

SEQ ID NO: 2787679 - DNA, 25 bp, Homo sapien
taatttagtagacaggtgatttttc

SEQ ID NO: 2787680 - DNA, 25 bp, Homo sapien
agtagacaggtgatttttcatggca

SEQ ID NO: 2787681 - DNA, 25 bp, Homo sapien
gttgctttctcccctgtcgctggct

SEQ ID NO: 2787682 - DNA, 25 bp, Homo sapien
ctttctcccctgtcgctggctccat

SEQ ID NO: 2787683 - DNA, 25 bp, Homo sapien
tccactcagagcaaagcgtctaaca

SEQ ID NO: 2787684 - DNA, 25 bp, Homo sapien
agatttctgattaaacttggcattc

SEQ ID NO: 2787685 - DNA, 25 bp, Homo sapien
ggcattcacgttaatttctttggct

SEQ ID NO: 2787686 - DNA, 25 bp, Homo sapien
ttatcacttggaacaatttctttga

SEQ ID NO: 2787687 - DNA, 25 bp, Homo sapien
tgctaataccatggtccaagacatt

SEQ ID NO: 2787688 - DNA, 25 bp, Homo sapien
tcaaagatgatgaaggctttgatgc

SEQ ID NO: 2787689 - DNA, 25 bp, Homo sapien
caaagatgatgaaggctttgatgcc

SEQ ID NO: 2787690 - DNA, 25 bp, Homo sapien
tgctttgtaatagaacactctccaa

SEQ ID NO: 2787691 - DNA, 25 bp, Homo sapien
ttcatcctgaaaacctgcaactcct

SEQ ID NO: 2787692 - DNA, 25 bp, Homo sapien
cctgtgcatctcagtccgtggagat

SEQ ID NO: 2787693 - DNA, 25 bp, Homo sapien
gaaaacctgcaactcctgtgcatct

SEQ ID NO: 2787694 - DNA, 25 bp, Homo sapien
tcagtccgtggagatacagacccat

SEQ ID NO: 2787695 - DNA, 25 bp, Homo sapien
tggcaaaactttgcatccgcacctc

SEQ ID NO: 2787696 - DNA, 25 bp, Homo sapien
gatgccccagcctcgttctgctaaa

SEQ ID NO: 2787697 - DNA, 25 bp, Homo sapien
aaatctcccacccatgacttggcaa

SEQ ID NO: 2787698 - DNA, 25 bp, Homo sapien
tcacatgggtgctgaggtgagggct

SEQ ID NO: 2787699 - DNA, 25 bp, Homo sapien
ggtctggattttgaggccttaggcc

SEQ ID NO: 2787700 - DNA, 25 bp, Homo sapien
ccttaggcccagataactgtttgct

SEQ ID NO: 2787701 - DNA, 25 bp, Homo sapien
gctgtcatgcaaattggattcttgg

SEQ ID NO: 2787702 - DNA, 25 bp, Homo sapien
cccagataactgtttgctgtcatgc

SEQ ID NO: 2787703 - DNA, 25 bp, Homo sapien
ctgtttgttcatctgcaagcttgac

SEQ ID NO: 2787704 - DNA, 25 bp, Homo sapien
cactctgaatcttcaccaagagaag

SEQ ID NO: 2787705 - DNA, 25 bp, Homo sapien
cgtggcaaaacggtaggagttgtct

SEQ ID NO: 2787706 - DNA, 25 bp, Homo sapien
ttggattctgaacactctgaatctt

SEQ ID NO: 2787707 - DNA, 25 bp, Homo sapien
aaatgccgtggcaaaacggtaggag

SEQ ID NO: 2787708 - DNA, 25 bp, Homo sapien
cttgcagacctaccccccatttggt

SEQ ID NO: 2787709 - DNA, 25 bp, Homo sapien
agacctaccccccatttggtatctg

SEQ ID NO: 2787710 - DNA, 25 bp, Homo sapien
taccccccatttggtatctgttgac

SEQ ID NO: 2787711 - DNA, 25 bp, Homo sapien
cccatttggtatctgttgaccttca

SEQ ID NO: 2787712 - DNA, 25 bp, Homo sapien
tgcctcagcaggtcttcatatccct

SEQ ID NO: 2787713 - DNA, 25 bp, Homo sapien
gaataattcagaagcgtcacaatga

SEQ ID NO: 2787714 - DNA, 25 bp, Homo sapien
cacaatgaaagcctgacaaccggag

SEQ ID NO: 2787715 - DNA, 25 bp, Homo sapien
tagctgccactagacttgacctttt

SEQ ID NO: 2787716 - DNA, 25 bp, Homo sapien
caagatagacaaaacgtatttcctt

SEQ ID NO: 2787717 - DNA, 25 bp, Homo sapien
agcaagatagacaaaacgtatttcc

SEQ ID NO: 2787718 - DNA, 25 bp, Homo sapien
gcaagatagacaaaacgtatttcct

SEQ ID NO: 2787719 - DNA, 25 bp, Homo sapien
tttcctgtatcacttatcacagctt

SEQ ID NO: 2787720 - DNA, 25 bp, Homo sapien
ctcttctccctcacacatttttcct

SEQ ID NO: 2787721 - DNA, 25 bp, Homo sapien
tccctcacacatttttcctgtatca

SEQ ID NO: 2787722 - DNA, 25 bp, Homo sapien
cacatttttcctgtatcacttatca

SEQ ID NO: 2787723 - DNA, 25 bp, Homo sapien
attccagtcaccggacaggcagcat

SEQ ID NO: 2787724 - DNA, 25 bp, Homo sapien
tccagtcaccggacaggcagcatcc

SEQ ID NO: 2787725 - DNA, 25 bp, Homo sapien
ggtactctattggtacctttagtga

SEQ ID NO: 2787726 - DNA, 25 bp, Homo sapien
tggcttccaaggaaattccagtcac

SEQ ID NO: 2787727 - DNA, 25 bp, Homo sapien
gagtccgtgtgcgtgggtgactgtg

SEQ ID NO: 2787728 - DNA, 25 bp, Homo sapien
tttggagacaaagtccagttcttct

SEQ ID NO: 2787729 - DNA, 25 bp, Homo sapien
tcctccaacacgctggtgagtccgt

SEQ ID NO: 2787730 - DNA, 25 bp, Homo sapien
tatagagccctccttcttgtccgtt

SEQ ID NO: 2787731 - DNA, 25 bp, Homo sapien
tgacgtcccaaggacggtcagccac

SEQ ID NO: 2787732 - DNA, 25 bp, Homo sapien
acgtcccaaggacggtcagccactc

SEQ ID NO: 2787733 - DNA, 25 bp, Homo sapien
gacgtcccaaggacggtcagccact

SEQ ID NO: 2787734 - DNA, 25 bp, Homo sapien
ctgacgtcccaaggacggtcagcca

SEQ ID NO: 2787735 - DNA, 25 bp, Homo sapien
cacagtggagcgcagatcgcggacc

SEQ ID NO: 2787736 - DNA, 25 bp, Homo sapien
tttgcaaggagaagccgcagtaccc

SEQ ID NO: 2787737 - DNA, 25 bp, Homo sapien
tcactgccatgtagtcgctggcggg

SEQ ID NO: 2787738 - DNA, 25 bp, Homo sapien
tgtgaacttagcagcgggctcctgc

SEQ ID NO: 2787739 - DNA, 25 bp, Homo sapien
gcgttgtttcccaccgaagcgcttg

SEQ ID NO: 2787740 - DNA, 25 bp, Homo sapien
tgggcgttgtttcccaccgaagcgc

SEQ ID NO: 2787741 - DNA, 25 bp, Homo sapien
gattctccaaagtgggcgttgtttc

SEQ ID NO: 2787742 - DNA, 25 bp, Homo sapien
ctctgattctccaaagtgggcgttg

SEQ ID NO: 2787743 - DNA, 25 bp, Homo sapien
ccgcagcgtcggtcctctgggagaa

SEQ ID NO: 2787744 - DNA, 25 bp, Homo sapien
tgtcaccaaaccgagtacagatcgt

SEQ ID NO: 2787745 - DNA, 25 bp, Homo sapien
agctcccgttcagacttgtttccag

SEQ ID NO: 2787746 - DNA, 25 bp, Homo sapien
gcttgtccagatgaacgcttgtcac

SEQ ID NO: 2787747 - DNA, 25 bp, Homo sapien
atgttcctccagaacttgtgggtcg

SEQ ID NO: 2787748 - DNA, 25 bp, Homo sapien
cttgtgggtcgcttcctgacacact

SEQ ID NO: 2787749 - DNA, 25 bp, Homo sapien
agaacttgtgggtcgcttcctgaca

SEQ ID NO: 2787750 - DNA, 25 bp, Homo sapien
gggatctgtatctgcccagtttcct

SEQ ID NO: 2787751 - DNA, 25 bp, Homo sapien
ccttctggctgctctgtccggctta

SEQ ID NO: 2787752 - DNA, 25 bp, Homo sapien
tggtgtccttctggctgctctgtcc

SEQ ID NO: 2787753 - DNA, 25 bp, Homo sapien
ttctggctgctctgtccggcttatt

SEQ ID NO: 2787754 - DNA, 25 bp, Homo sapien
aggactctggtgtccttctggctgc

SEQ ID NO: 2787755 - DNA, 25 bp, Homo sapien
tccactgaacctttcagtccaaatg

SEQ ID NO: 2787756 - DNA, 25 bp, Homo sapien
tcagtccaaatgctttgtaatgata

SEQ ID NO: 2787757 - DNA, 25 bp, Homo sapien
tttcagtccaaatgctttgtaatga

SEQ ID NO: 2787758 - DNA, 25 bp, Homo sapien
ctccactgaacctttcagtccaaat

SEQ ID NO: 2787759 - DNA, 25 bp, Homo sapien
gaaaatgttgactttcccgtcctca

SEQ ID NO: 2787760 - DNA, 25 bp, Homo sapien
aaaatgttgactttcccgtcctcat

SEQ ID NO: 2787761 - DNA, 25 bp, Homo sapien
ccaatccctgcggaggagtttgact

SEQ ID NO: 2787762 - DNA, 25 bp, Homo sapien
caatccctgcggaggagtttgactc

SEQ ID NO: 2787763 - DNA, 25 bp, Homo sapien
ctcccaatccctgcggaggagtttg

SEQ ID NO: 2787764 - DNA, 25 bp, Homo sapien
tcccaatccctgcggaggagtttga

SEQ ID NO: 2787765 - DNA, 25 bp, Homo sapien
tgtggagttagtgcaatttgttctt

SEQ ID NO: 2787766 - DNA, 25 bp, Homo sapien
ttaatgctgcattgtggagttagtg

SEQ ID NO: 2787767 - DNA, 25 bp, Homo sapien
tctcatgagagggttaatgctgcat

SEQ ID NO: 2787768 - DNA, 25 bp, Homo sapien
catgagagggttaatgctgcattgt

SEQ ID NO: 2787769 - DNA, 25 bp, Homo sapien
tgctgggatacatcggaaggtgctc

SEQ ID NO: 2787770 - DNA, 25 bp, Homo sapien
ggtgtaagccattgctgggatacat

SEQ ID NO: 2787771 - DNA, 25 bp, Homo sapien
gatttcataatgagaggtgtaagcc

SEQ ID NO: 2787772 - DNA, 25 bp, Homo sapien
tcggaaggtgctcgctttgtactcc

SEQ ID NO: 2787773 - DNA, 25 bp, Homo sapien
ctgatggatttatctgtaaatcctg

SEQ ID NO: 2787774 - DNA, 25 bp, Homo sapien
tggatttatctgtaaatcctgatgg

SEQ ID NO: 2787775 - DNA, 25 bp, Homo sapien
gatggatttatctgtaaatcctgat

SEQ ID NO: 2787776 - DNA, 25 bp, Homo sapien
atttatctgtaaatcctgatggatt

SEQ ID NO: 2787777 - DNA, 25 bp, Homo sapien
tctcttctggactgacaagttctgt

SEQ ID NO: 2787778 - DNA, 25 bp, Homo sapien
tcctgaacagcagctggccggggcc

SEQ ID NO: 2787779 - DNA, 25 bp, Homo sapien
agttctgtagaacccccaagcagcc

SEQ ID NO: 2787780 - DNA, 25 bp, Homo sapien
cagagtgctggtttaggagggtgaa

SEQ ID NO: 2787781 - DNA, 25 bp, Homo sapien
cacatgcatgctcaccctctctcca

SEQ ID NO: 2787782 - DNA, 25 bp, Homo sapien
gcatgctcaccctctctccacaatc

SEQ ID NO: 2787783 - DNA, 25 bp, Homo sapien
atgcatgctcaccctctctccacaa

SEQ ID NO: 2787784 - DNA, 25 bp, Homo sapien
tccacatgcatgctcaccctctctc

SEQ ID NO: 2787785 - DNA, 25 bp, Homo sapien
aaggccagtgaccattaacaaagta

SEQ ID NO: 2787786 - DNA, 25 bp, Homo sapien
gaaaggccagtgaccattaacaaag

SEQ ID NO: 2787787 - DNA, 25 bp, Homo sapien
aaaggccagtgaccattaacaaagt

SEQ ID NO: 2787788 - DNA, 25 bp, Homo sapien
ggtgctagggcagtatttttggtcc

SEQ ID NO: 2787789 - DNA, 25 bp, Homo sapien
ggccaggaatgcaataagcagaata

SEQ ID NO: 2787790 - DNA, 25 bp, Homo sapien
ggagctttgacatcgtctacactgg

SEQ ID NO: 2787791 - DNA, 25 bp, Homo sapien
taagcagaatatttagcttgtgttc

SEQ ID NO: 2787792 - DNA, 25 bp, Homo sapien
gcttctggatttcgtagcattataa

SEQ ID NO: 2787793 - DNA, 25 bp, Homo sapien
tggatttcgtagcattataacagcc

SEQ ID NO: 2787794 - DNA, 25 bp, Homo sapien
tcgtagcattataacagccttggca

SEQ ID NO: 2787795 - DNA, 25 bp, Homo sapien
gtagcattataacagccttggcaaa

SEQ ID NO: 2787796 - DNA, 25 bp, Homo sapien
tgttgtccacttcatgatattgtca

SEQ ID NO: 2787797 - DNA, 25 bp, Homo sapien
aattgagcctgcattgataatcacc

SEQ ID NO: 2787798 - DNA, 25 bp, Homo sapien
cctgaagaaggcttgttgcaaattc

SEQ ID NO: 2787799 - DNA, 25 bp, Homo sapien
caggctgaggtctttcggaaattga

SEQ ID NO: 2787800 - DNA, 25 bp, Homo sapien
ttaatttgttgattctgatctgcca

SEQ ID NO: 2787801 - DNA, 25 bp, Homo sapien
aatttgttgattctgatctgccatg

SEQ ID NO: 2787802 - DNA, 25 bp, Homo sapien
taatttgttgattctgatctgccat

SEQ ID NO: 2787803 - DNA, 25 bp, Homo sapien
gctgcgatcgatggtaatttctaag

SEQ ID NO: 2787804 - DNA, 25 bp, Homo sapien
gatcgatggtaatttctaagtaggg

SEQ ID NO: 2787805 - DNA, 25 bp, Homo sapien
ctagaaagctgcgatcgatggtaat

SEQ ID NO: 2787806 - DNA, 25 bp, Homo sapien
ctgtgtcctagaaagctgcgatcga

SEQ ID NO: 2787807 - DNA, 25 bp, Homo sapien
cagttactctgtgcggcccaaccag

SEQ ID NO: 2787808 - DNA, 25 bp, Homo sapien
gctgtgtgagaacgttgggctgggc

SEQ ID NO: 2787809 - DNA, 25 bp, Homo sapien
gagtggtggaatcagctgtatctac

SEQ ID NO: 2787810 - DNA, 25 bp, Homo sapien
caggcccaatattctgaagcccagt

SEQ ID NO: 2787811 - DNA, 25 bp, Homo sapien
tctgtgtttcaatatttgaattgtc

SEQ ID NO: 2787812 - DNA, 25 bp, Homo sapien
ctaaatgaaagccttgtcaaatatt

SEQ ID NO: 2787813 - DNA, 25 bp, Homo sapien
tttcttctgtgtttcaatatttgaa

SEQ ID NO: 2787814 - DNA, 25 bp, Homo sapien
taaatgaaagccttgtcaaatattt

SEQ ID NO: 2787815 - DNA, 25 bp, Homo sapien
tgtaatcagtgcctgaacacatgtg

SEQ ID NO: 2787816 - DNA, 25 bp, Homo sapien
aacacatgtgttgggccaggttctg

SEQ ID NO: 2787817 - DNA, 25 bp, Homo sapien
tctctccggtaagtagatgcacagg

SEQ ID NO: 2787818 - DNA, 25 bp, Homo sapien
tgcacaggagtcttctatgagtggc

SEQ ID NO: 2787819 - DNA, 25 bp, Homo sapien
cagccatctgtgatgcctttgatcg

SEQ ID NO: 2787820 - DNA, 25 bp, Homo sapien
tctgtgatgcctttgatcgaatcat

SEQ ID NO: 2787821 - DNA, 25 bp, Homo sapien
acccttttggtgttcacagccatct

SEQ ID NO: 2787822 - DNA, 25 bp, Homo sapien
ggagcagaagtgggccataccctca

SEQ ID NO: 2787823 - DNA, 25 bp, Homo sapien
tgaatcactgtgctcttgatcttta

SEQ ID NO: 2787824 - DNA, 25 bp, Homo sapien
cttgaacatttgaatcactgtgctc

SEQ ID NO: 2787825 - DNA, 25 bp, Homo sapien
tgaacatttgaatcactgtgctctt

SEQ ID NO: 2787826 - DNA, 25 bp, Homo sapien
tttgaatcactgtgctcttgatctt

SEQ ID NO: 2787827 - DNA, 25 bp, Homo sapien
tgtatgtcaatgcctttgtcaggcc

SEQ ID NO: 2787828 - DNA, 25 bp, Homo sapien
gtatgtcaatgcctttgtcaggccc

SEQ ID NO: 2787829 - DNA, 25 bp, Homo sapien
tttgtcaggccccacgcggttctgt

SEQ ID NO: 2787830 - DNA, 25 bp, Homo sapien
gcccagcataagtctggctttctcc

SEQ ID NO: 2787831 - DNA, 25 bp, Homo sapien
caccaaagcccagcataagtctggc

SEQ ID NO: 2787832 - DNA, 25 bp, Homo sapien
ccaaagcccagcataagtctggctt

SEQ ID NO: 2787833 - DNA, 25 bp, Homo sapien
aagcccagcataagtctggctttct

SEQ ID NO: 2787834 - DNA, 25 bp, Homo sapien
tattttgaactttgggcaatccaca

SEQ ID NO: 2787835 - DNA, 25 bp, Homo sapien
ggaagcatgccggatgccttttatt

SEQ ID NO: 2787836 - DNA, 25 bp, Homo sapien
cacttcgtaatatgcttaagagcac

SEQ ID NO: 2787837 - DNA, 25 bp, Homo sapien
tcaaggattttagttctgtagacac

SEQ ID NO: 2787838 - DNA, 25 bp, Homo sapien
ggtaatgatgtttatccctccagac

SEQ ID NO: 2787839 - DNA, 25 bp, Homo sapien
gtctgtgatggtaatgatgtttttc

SEQ ID NO: 2787840 - DNA, 25 bp, Homo sapien
tcttcagaccgctctctgatggtaa

SEQ ID NO: 2787841 - DNA, 25 bp, Homo sapien
tcagctagaagtgtaccattcttgc

SEQ ID NO: 2787842 - DNA, 25 bp, Homo sapien
tgattctctttcatggaacttgtag

SEQ ID NO: 2787843 - DNA, 25 bp, Homo sapien
ttgattctctttcatggaacttgta

SEQ ID NO: 2787844 - DNA, 25 bp, Homo sapien
gattctctttcatggaacttgtagt

SEQ ID NO: 2787845 - DNA, 25 bp, Homo sapien
cacatccaaggctatttgaggatgg

SEQ ID NO: 2787846 - DNA, 25 bp, Homo sapien
tctttgcaacactgcatgggtaaaa

SEQ ID NO: 2787847 - DNA, 25 bp, Homo sapien
ctgcatgggtaaaacacatccaagg

SEQ ID NO: 2787848 - DNA, 25 bp, Homo sapien
catccaaggctatttgaggatggtt

SEQ ID NO: 2787849 - DNA, 25 bp, Homo sapien
agaagtttgtctatttctatttcac

SEQ ID NO: 2787850 - DNA, 25 bp, Homo sapien
caataagaagtttgtctatttctat

SEQ ID NO: 2787851 - DNA, 25 bp, Homo sapien
aataagaagtttgtctatttctatt

SEQ ID NO: 2787852 - DNA, 25 bp, Homo sapien
taagaagtttgtctatttctatttc

SEQ ID NO: 2787853 - DNA, 25 bp, Homo sapien
tgctctaggacattatcgaggatgg

SEQ ID NO: 2787854 - DNA, 25 bp, Homo sapien
gcagttgctctaggacattatcgag

SEQ ID NO: 2787855 - DNA, 25 bp, Homo sapien
taggacattatcgaggatggagacc

SEQ ID NO: 2787856 - DNA, 25 bp, Homo sapien
tggagacctcgtcttcccattcttt

SEQ ID NO: 2787857 - DNA, 25 bp, Homo sapien
gagggtaaacactgccagatatcca

SEQ ID NO: 2787858 - DNA, 25 bp, Homo sapien
aactgtctgagggtaaacactgcca

SEQ ID NO: 2787859 - DNA, 25 bp, Homo sapien
tgaaaaactgtctgagggtaaacac

SEQ ID NO: 2787860 - DNA, 25 bp, Homo sapien
tgtctgagggtaaacactgccagat

SEQ ID NO: 2787861 - DNA, 25 bp, Homo sapien
gaggattcactcgtttgtaatctaa

SEQ ID NO: 2787862 - DNA, 25 bp, Homo sapien
gttgctaaccctgtatctgtgctgt

SEQ ID NO: 2787863 - DNA, 25 bp, Homo sapien
ctaatttactagttcctggctcctt

SEQ ID NO: 2787864 - DNA, 25 bp, Homo sapien
aaaataagggaagagccacgcagca

SEQ ID NO: 2787865 - DNA, 25 bp, Homo sapien
ggtcattgacactcttctgggcaca

SEQ ID NO: 2787866 - DNA, 25 bp, Homo sapien
aagcgcacccgaagacatgcccaag

SEQ ID NO: 2787867 - DNA, 25 bp, Homo sapien
tcattgacactcttctgggcacagt

SEQ ID NO: 2787868 - DNA, 25 bp, Homo sapien
ggctggtcattgacactcttctggg

SEQ ID NO: 2787869 - DNA, 25 bp, Homo sapien
caaaggcccatctttgagaaggctt

SEQ ID NO: 2787870 - DNA, 25 bp, Homo sapien
tcaaaggcccatctttgagaaggct

SEQ ID NO: 2787871 - DNA, 25 bp, Homo sapien
aaaggcccatctttgagaaggcttt

SEQ ID NO: 2787872 - DNA, 25 bp, Homo sapien
ggatagaataaagggcaggcgaagg

SEQ ID NO: 2787873 - DNA, 25 bp, Homo sapien
ctggatagaataaagggcaggcgaa

SEQ ID NO: 2787874 - DNA, 25 bp, Homo sapien
agaataaagggcaggcgaaggggtg

SEQ ID NO: 2787875 - DNA, 25 bp, Homo sapien
atagaataaagggcaggcgaagggg

SEQ ID NO: 2787876 - DNA, 25 bp, Homo sapien
atctttccatccaaatagggcacag

SEQ ID NO: 2787877 - DNA, 25 bp, Homo sapien
tagggcacagatctaactggccctc

SEQ ID NO: 2787878 - DNA, 25 bp, Homo sapien
tccatccaaatagggcacagatcta

SEQ ID NO: 2787879 - DNA, 25 bp, Homo sapien
caaatagggcacagatctaactggc

SEQ ID NO: 2787880 - DNA, 25 bp, Homo sapien
ccaaggttcggaaatagtcattaag

SEQ ID NO: 2787881 - DNA, 25 bp, Homo sapien
ttttgttattcttaggcatgtccaa

SEQ ID NO: 2787882 - DNA, 25 bp, Homo sapien
tcttaggcatgtccaaggttcggaa

SEQ ID NO: 2787883 - DNA, 25 bp, Homo sapien
catgtccaaggttcggaaatagtca

SEQ ID NO: 2787884 - DNA, 25 bp, Homo sapien
gaaattgttgctccacagtcatcca

SEQ ID NO: 2787885 - DNA, 25 bp, Homo sapien
ttccagaaatgtcccgtaagccatc

SEQ ID NO: 2787886 - DNA, 25 bp, Homo sapien
gctgacctagtttttggatggaaat

SEQ ID NO: 2787887 - DNA, 25 bp, Homo sapien
cagtcatccatagttcctctgctga

SEQ ID NO: 2787888 - DNA, 25 bp, Homo sapien
ggagttggtgtgatccatttctgct

SEQ ID NO: 2787889 - DNA, 25 bp, Homo sapien
cctactgacagtgctgcaagtttag

SEQ ID NO: 2787890 - DNA, 25 bp, Homo sapien
aagtgatgtgactgcattgagattc

SEQ ID NO: 2787891 - DNA, 25 bp, Homo sapien
catttctgctttgatcctactgaca

SEQ ID NO: 2787892 - DNA, 25 bp, Homo sapien
caagctgctgtttagtctccggtct

SEQ ID NO: 2787893 - DNA, 25 bp, Homo sapien
ccaagctgctgtttagtctccggtc

SEQ ID NO: 2787894 - DNA, 25 bp, Homo sapien
gctgctgtttagtctccggtctttt

SEQ ID NO: 2787895 - DNA, 25 bp, Homo sapien
gctgtttagtctccggtctttttca

SEQ ID NO: 2787896 - DNA, 25 bp, Homo sapien
agctttggcttctctcacgtacatt

SEQ ID NO: 2787897 - DNA, 25 bp, Homo sapien
gttttgctgggcttgtttggtcctc

SEQ ID NO: 2787898 - DNA, 25 bp, Homo sapien
ggtcctctgccctagtaaagctttg

SEQ ID NO: 2787899 - DNA, 25 bp, Homo sapien
tctgccctagtaaagctttggcttc

SEQ ID NO: 2787900 - DNA, 25 bp, Homo sapien
tggtatttgaatctgtttcccccac

SEQ ID NO: 2787901 - DNA, 25 bp, Homo sapien
agattaggctccctctataggccac

SEQ ID NO: 2787902 - DNA, 25 bp, Homo sapien
aaagattaggctccctctataggcc

SEQ ID NO: 2787903 - DNA, 25 bp, Homo sapien
gattaggctccctctataggccaca

SEQ ID NO: 2787904 - DNA, 25 bp, Homo sapien
ttaggctccctctataggccacagc

SEQ ID NO: 2787905 - DNA, 25 bp, Homo sapien
tgccgatcagtggtaatttaaacag

SEQ ID NO: 2787906 - DNA, 25 bp, Homo sapien
cactcttggtaggttgttcgcattg

SEQ ID NO: 2787907 - DNA, 25 bp, Homo sapien
tcgcattgtgtaaatctcctggtca

SEQ ID NO: 2787908 - DNA, 25 bp, Homo sapien
tgtgatagctcattataagggcatt

SEQ ID NO: 2787909 - DNA, 25 bp, Homo sapien
taagacgaaggtagagtatgaggac

SEQ ID NO: 2787910 - DNA, 25 bp, Homo sapien
ggctctgggtcagtcgctgaattac

SEQ ID NO: 2787911 - DNA, 25 bp, Homo sapien
taaagttggcaatgggtcagtgtca

SEQ ID NO: 2787912 - DNA, 25 bp, Homo sapien
aacgtagtttttctgcagtcctgca

SEQ ID NO: 2787913 - DNA, 25 bp, Homo sapien
gaattccttaggaccgcttgaggca

SEQ ID NO: 2787914 - DNA, 25 bp, Homo sapien
agtaagccactaagtacagcctgca

SEQ ID NO: 2787915 - DNA, 25 bp, Homo sapien
gcctattataagatcaccgcgcctg

SEQ ID NO: 2787916 - DNA, 25 bp, Homo sapien
gcttgtaccctgacctgccatttgg

SEQ ID NO: 2787917 - DNA, 25 bp, Homo sapien
ctgactctgtcccgacttttgccat

SEQ ID NO: 2787918 - DNA, 25 bp, Homo sapien
catgccgtttcggaaatgcagcaac

SEQ ID NO: 2787919 - DNA, 25 bp, Homo sapien
tggaagacagctaaggcgagggagc

SEQ ID NO: 2787920 - DNA, 25 bp, Homo sapien
tccacccatgccgtttcggaaatgc

SEQ ID NO: 2787921 - DNA, 25 bp, Homo sapien
gtttcggaaatgcagcaacccagat

SEQ ID NO: 2787922 - DNA, 25 bp, Homo sapien
gagtcattgcccctctaacaggctc

SEQ ID NO: 2787923 - DNA, 25 bp, Homo sapien
agaaactgccaagtggccaccacct

SEQ ID NO: 2787924 - DNA, 25 bp, Homo sapien
cagcctcttggaagcccaaatctct

SEQ ID NO: 2787925 - DNA, 25 bp, Homo sapien
taacaggctcatatggtggttccca

SEQ ID NO: 2787926 - DNA, 25 bp, Homo sapien
tacttaatcaccacacattgtcagg

SEQ ID NO: 2787927 - DNA, 25 bp, Homo sapien
tccacaggaaaaagagtaggtcaag

SEQ ID NO: 2787928 - DNA, 25 bp, Homo sapien
gaaatgcaaccaaccgggaagttga

SEQ ID NO: 2787929 - DNA, 25 bp, Homo sapien
ctctctaaaattcgggtgttgccag

SEQ ID NO: 2787930 - DNA, 25 bp, Homo sapien
gttttagaaaggtgtagataaggca

SEQ ID NO: 2787931 - DNA, 25 bp, Homo sapien
ttttagaaaggtgtagataaggcag

SEQ ID NO: 2787932 - DNA, 25 bp, Homo sapien
ggaagctgtaattgcccatgaggat

SEQ ID NO: 2787933 - DNA, 25 bp, Homo sapien
gaataagggaagctgtaattgccca

SEQ ID NO: 2787934 - DNA, 25 bp, Homo sapien
gaaaccatgtctctcttgcgggagc

SEQ ID NO: 2787935 - DNA, 25 bp, Homo sapien
tcttgcgggagcacagctgaagatg

SEQ ID NO: 2787936 - DNA, 25 bp, Homo sapien
gatgttgagattccttgtggtacct

SEQ ID NO: 2787937 - DNA, 25 bp, Homo sapien
caacctaggacgtaggagtcctcca

SEQ ID NO: 2787938 - DNA, 25 bp, Homo sapien
gagcctttcccagtccctgttgcct

SEQ ID NO: 2787939 - DNA, 25 bp, Homo sapien
gagttatgcctgctttgttctgccc

SEQ ID NO: 2787940 - DNA, 25 bp, Homo sapien
agtcggcgccctcgctcaccgccag

SEQ ID NO: 2787941 - DNA, 25 bp, Homo sapien
aacctcgtgcgcatgcgcagccagg

SEQ ID NO: 2787942 - DNA, 25 bp, Homo sapien
gccagcctggtgagtgtccgcgggc

SEQ ID NO: 2787943 - DNA, 25 bp, Homo sapien
tctgcagagacgtccaacctcgtgc

SEQ ID NO: 2787944 - DNA, 25 bp, Homo sapien
ttctgttgtattaagagcagcagcc

SEQ ID NO: 2787945 - DNA, 25 bp, Homo sapien
tctgttgtattaagagcagcagcca

SEQ ID NO: 2787946 - DNA, 25 bp, Homo sapien
tcctggaaaggattgggcaccagct

SEQ ID NO: 2787947 - DNA, 25 bp, Homo sapien
tggaaaggattgggcaccagctgga

SEQ ID NO: 2787948 - DNA, 25 bp, Homo sapien
ttctttaggtgttgtccttcctgga

SEQ ID NO: 2787949 - DNA, 25 bp, Homo sapien
cttctttaggtgttgtccttcctgg

SEQ ID NO: 2787950 - DNA, 25 bp, Homo sapien
tcgccctctccctaaactggatgag

SEQ ID NO: 2787951 - DNA, 25 bp, Homo sapien
cagaaagaatgggtccctcaggcag

SEQ ID NO: 2787952 - DNA, 25 bp, Homo sapien
cagctgcttccctaagactgtgccg

SEQ ID NO: 2787953 - DNA, 25 bp, Homo sapien
ggctgcattgatatcaaagccgata

SEQ ID NO: 2787954 - DNA, 25 bp, Homo sapien
ctagatggcagcatccacctccctc

SEQ ID NO: 2787955 - DNA, 25 bp, Homo sapien
cagcatccacctccctctgccttga

SEQ ID NO: 2787956 - DNA, 25 bp, Homo sapien
gcatccacctccctctgccttgagg

SEQ ID NO: 2787957 - DNA, 25 bp, Homo sapien
agatggcagcatccacctccctctg

SEQ ID NO: 2787958 - DNA, 25 bp, Homo sapien
ttggtagtgcctgatcccgtagccc

SEQ ID NO: 2787959 - DNA, 25 bp, Homo sapien
gaaacatcacttgcgttcacagcat

SEQ ID NO: 2787960 - DNA, 25 bp, Homo sapien
ccttttgccctgcatttggtagtgc

SEQ ID NO: 2787961 - DNA, 25 bp, Homo sapien
gccagggcacaagagagtgcttcag

SEQ ID NO: 2787962 - DNA, 25 bp, Homo sapien
cacgggtacagcttcattgccatgg

SEQ ID NO: 2787963 - DNA, 25 bp, Homo sapien
tcattgccatggtcaaatcttggct

SEQ ID NO: 2787964 - DNA, 25 bp, Homo sapien
agagccacacgggtacagcttcatt

SEQ ID NO: 2787965 - DNA, 25 bp, Homo sapien
tggtcaaatcttggctccgatagaa

SEQ ID NO: 2787966 - DNA, 25 bp, Homo sapien
gcagacagtgctgttctgttccttc

SEQ ID NO: 2787967 - DNA, 25 bp, Homo sapien
ctgatccgggggacctgatccgggg

SEQ ID NO: 2787968 - DNA, 25 bp, Homo sapien
agcagacagtgctgttctgttcctt

SEQ ID NO: 2787969 - DNA, 25 bp, Homo sapien
tcattagatgatcctctgaaatata

SEQ ID NO: 2787970 - DNA, 25 bp, Homo sapien
tttgatgggacaggctccgcatttc

SEQ ID NO: 2787971 - DNA, 25 bp, Homo sapien
gacaggctccgcatttctcattaga

SEQ ID NO: 2787972 - DNA, 25 bp, Homo sapien
caaggtgaaatgcactgatgaaggt

SEQ ID NO: 2787973 - DNA, 25 bp, Homo sapien
ctttgcaagggatggaggtaaaaat

SEQ ID NO: 2787974 - DNA, 25 bp, Homo sapien
tttgcaagggatggaggtaaaaata

SEQ ID NO: 2787975 - DNA, 25 bp, Homo sapien
tttgctgtctgacttgggtgttgag

SEQ ID NO: 2787976 - DNA, 25 bp, Homo sapien
aagcagatgcttggtgagatggtaa

SEQ ID NO: 2787977 - DNA, 25 bp, Homo sapien
tgtagtgtgtgttttaggcatgtga

SEQ ID NO: 2787978 - DNA, 25 bp, Homo sapien
agctttgctgtctgacttgggtgtt

SEQ ID NO: 2787979 - DNA, 25 bp, Homo sapien
tctgtcaccgctgatttacttagcc

SEQ ID NO: 2787980 - DNA, 25 bp, Homo sapien
tcagcggctgccttttacagaggtg

SEQ ID NO: 2787981 - DNA, 25 bp, Homo sapien
cgctgatttacttagccactgtgac

SEQ ID NO: 2787982 - DNA, 25 bp, Homo sapien
gaggtgtctgtcaccgctgatttac

SEQ ID NO: 2787983 - DNA, 25 bp, Homo sapien
aaagctactgccgaaagccatttag

SEQ ID NO: 2787984 - DNA, 25 bp, Homo sapien
agctactgccgaaagccatttagtg

SEQ ID NO: 2787985 - DNA, 25 bp, Homo sapien
cccaaagctactgccgaaagccatt

SEQ ID NO: 2787986 - DNA, 25 bp, Homo sapien
gacccaaagctactgccgaaagcca

SEQ ID NO: 2787987 - DNA, 25 bp, Homo sapien
caagcatccgtgatctccgaagttg

SEQ ID NO: 2787988 - DNA, 25 bp, Homo sapien
ccaccgaactgcaagcatccgtgat

SEQ ID NO: 2787989 - DNA, 25 bp, Homo sapien
taaatgcattaggtgtctgagccca

SEQ ID NO: 2787990 - DNA, 25 bp, Homo sapien
tcctccacctggataaatgcattag

SEQ ID NO: 2787991 - DNA, 25 bp, Homo sapien
tgaattagcgtgctgaagtagaggt

SEQ ID NO: 2787992 - DNA, 25 bp, Homo sapien
gagcgtgatgtaagtgtttagcagc

SEQ ID NO: 2787993 - DNA, 25 bp, Homo sapien
tgccgggctctgaattagcgtgctg

SEQ ID NO: 2787994 - DNA, 25 bp, Homo sapien
gctgactccgggctccaatcagcta

SEQ ID NO: 2787995 - DNA, 25 bp, Homo sapien
gttttgtgtcgggatcaacctccgc

SEQ ID NO: 2787996 - DNA, 25 bp, Homo sapien
tcaattctgggaacgcaggactcag

SEQ ID NO: 2787997 - DNA, 25 bp, Homo sapien
tctggcatgccgtcaagtgtctggg

SEQ ID NO: 2787998 - DNA, 25 bp, Homo sapien
tgacagctgatgcactgatctggca

SEQ ID NO: 2787999 - DNA, 25 bp, Homo sapien
atgcacagtgtggttagtcactgct

SEQ ID NO: 2788000 - DNA, 25 bp, Homo sapien
cagtgtggtcattgtttttgaatgc

SEQ ID NO: 2788001 - DNA, 25 bp, Homo sapien
gcacagtgtggttagtcactgctgt

SEQ ID NO: 2788002 - DNA, 25 bp, Homo sapien
taatgaatttcagtgtggtcattgt

SEQ ID NO: 2788003 - DNA, 25 bp, Homo sapien
cccagagcggctgacgatgcctttc

SEQ ID NO: 2788004 - DNA, 25 bp, Homo sapien
cagagcggctgacgatgcctttcct

SEQ ID NO: 2788005 - DNA, 25 bp, Homo sapien
gcggctgacgatgcctttcctgcca

SEQ ID NO: 2788006 - DNA, 25 bp, Homo sapien
gagcggctgacgatgcctttcctgc

SEQ ID NO: 2788007 - DNA, 25 bp, Homo sapien
tctgaagcaggccagactgatggcc

SEQ ID NO: 2788008 - DNA, 25 bp, Homo sapien
ggcccaacttacagttatcatccac

SEQ ID NO: 2788009 - DNA, 25 bp, Homo sapien
ggccagactgatggcccaacttaca

SEQ ID NO: 2788010 - DNA, 25 bp, Homo sapien
gtgacaagttcagtagaagttgtat

SEQ ID NO: 2788011 - DNA, 25 bp, Homo sapien
tgagcagtagctaattgtggaataa

SEQ ID NO: 2788012 - DNA, 25 bp, Homo sapien
gctgtaatcctcaaaatagctaggc

SEQ ID NO: 2788013 - DNA, 25 bp, Homo sapien
actgttttcagacttgctaagtgtg

SEQ ID NO: 2788014 - DNA, 25 bp, Homo sapien
tctggcgaggttatctgacattagc

SEQ ID NO: 2788015 - DNA, 25 bp, Homo sapien
gactagtggacccagctgcttcaaa

SEQ ID NO: 2788016 - DNA, 25 bp, Homo sapien
gaagagccatttcaactcagcccga

SEQ ID NO: 2788017 - DNA, 25 bp, Homo sapien
tcctgttgccctgggcaacgggtgt

SEQ ID NO: 2788018 - DNA, 25 bp, Homo sapien
cccgacatcgccagagactagtgga

SEQ ID NO: 2788019 - DNA, 25 bp, Homo sapien
ttgctggacataaggccatttagca

SEQ ID NO: 2788020 - DNA, 25 bp, Homo sapien
ggaatcctctgacccagttgctgga

SEQ ID NO: 2788021 - DNA, 25 bp, Homo sapien
tgctggacataaggccatttagcaa

SEQ ID NO: 2788022 - DNA, 25 bp, Homo sapien
cctctgacccagttgctggacataa

SEQ ID NO: 2788023 - DNA, 25 bp, Homo sapien
ttaatgtgccgtgtgaattggttca

SEQ ID NO: 2788024 - DNA, 25 bp, Homo sapien
ggttcagcgacattaccaaataggt

SEQ ID NO: 2788025 - DNA, 25 bp, Homo sapien
tgtgaattggttcagcgacattacc

SEQ ID NO: 2788026 - DNA, 25 bp, Homo sapien
tgccgtgtgaattggttcagcgaca

SEQ ID NO: 2788027 - DNA, 25 bp, Homo sapien
ctggcattcgcaactgcttcctctt

SEQ ID NO: 2788028 - DNA, 25 bp, Homo sapien
ctaaagtggagacgagaggtagaaa

SEQ ID NO: 2788029 - DNA, 25 bp, Homo sapien
gtaccaccggcacgggcctggcatt

SEQ ID NO: 2788030 - DNA, 25 bp, Homo sapien
gagaggtagaaatgccttccacaga

SEQ ID NO: 2788031 - DNA, 25 bp, Homo sapien
cctggataatgagaagactctaaaa

SEQ ID NO: 2788032 - DNA, 25 bp, Homo sapien
ttcctggataatgagaagactctaa

SEQ ID NO: 2788033 - DNA, 25 bp, Homo sapien
tttgccactgttccgttgaagaatc

SEQ ID NO: 2788034 - DNA, 25 bp, Homo sapien
aaagcttttgaacattgaagatgtt

SEQ ID NO: 2788035 - DNA, 25 bp, Homo sapien
ttgtgatgaagcttatagacgcagt

SEQ ID NO: 2788036 - DNA, 25 bp, Homo sapien
aactctggtcaattgctgatctcct

SEQ ID NO: 2788037 - DNA, 25 bp, Homo sapien
ctggtcaattgctgatctcctctgg

SEQ ID NO: 2788038 - DNA, 25 bp, Homo sapien
gcttatagacgcagtttatgataaa

SEQ ID NO: 2788039 - DNA, 25 bp, Homo sapien
gatttttcaattgttgttagaatgt

SEQ ID NO: 2788040 - DNA, 25 bp, Homo sapien
ttttcaattgttgttagaatgtaga

SEQ ID NO: 2788041 - DNA, 25 bp, Homo sapien
ttcaattgttgttagaatgtagacc

SEQ ID NO: 2788042 - DNA, 25 bp, Homo sapien
caattgttgttagaatgtagaccat

SEQ ID NO: 2788043 - DNA, 25 bp, Homo sapien
tgatttacagccaagccctgtgtaa

SEQ ID NO: 2788044 - DNA, 25 bp, Homo sapien
ctatggtatgaacttttttgtcctc

SEQ ID NO: 2788045 - DNA, 25 bp, Homo sapien
tgccttctgatgatttacagccaag

SEQ ID NO: 2788046 - DNA, 25 bp, Homo sapien
tctggttctatggtatgaacttttt

SEQ ID NO: 2788047 - DNA, 25 bp, Homo sapien
gcgataaaatgacttgatgccgttc

SEQ ID NO: 2788048 - DNA, 25 bp, Homo sapien
tactgcagggactttggcgataaaa

SEQ ID NO: 2788049 - DNA, 25 bp, Homo sapien
gatgccgttcattgacgtctgacag

SEQ ID NO: 2788050 - DNA, 25 bp, Homo sapien
tgacaggtgcagatttatcagcatg

SEQ ID NO: 2788051 - DNA, 25 bp, Homo sapien
ctttcaaaggatagtgctcaagcac

SEQ ID NO: 2788052 - DNA, 25 bp, Homo sapien
agagtgccttgatggtgtttatacc

SEQ ID NO: 2788053 - DNA, 25 bp, Homo sapien
ctagagtgccttgatggtgtttata

SEQ ID NO: 2788054 - DNA, 25 bp, Homo sapien
tagagtgccttgatggtgtttatac

SEQ ID NO: 2788055 - DNA, 25 bp, Homo sapien
ttcagcaaagtaaaggcaatgtttc

SEQ ID NO: 2788056 - DNA, 25 bp, Homo sapien
aattgcatttgtgagattttcagca

SEQ ID NO: 2788057 - DNA, 25 bp, Homo sapien
ttgaattgcatttgtgagattttca

SEQ ID NO: 2788058 - DNA, 25 bp, Homo sapien
tgtgagattttcagcaaagtaaagg

SEQ ID NO: 2788059 - DNA, 25 bp, Homo sapien
cactggtgtggtgtaatggtcccag

SEQ ID NO: 2788060 - DNA, 25 bp, Homo sapien
gtaactggcagtccccaaatatatt

SEQ ID NO: 2788061 - DNA, 25 bp, Homo sapien
tgcagtaactggcagtccccaaata

SEQ ID NO: 2788062 - DNA, 25 bp, Homo sapien
gactaaagagaatagtgacagccac

SEQ ID NO: 2788063 - DNA, 25 bp, Homo sapien
gtggagaggtaggacttctcttgtg

SEQ ID NO: 2788064 - DNA, 25 bp, Homo sapien
ggttgtgtggtagcaagttgggccc

SEQ ID NO: 2788065 - DNA, 25 bp, Homo sapien
gcaagttgggccctggtagctctaa

SEQ ID NO: 2788066 - DNA, 25 bp, Homo sapien
ttgactcttgagatttaaattcttc

SEQ ID NO: 2788067 - DNA, 25 bp, Homo sapien
gaccagcaccgtaaggaaattctct

SEQ ID NO: 2788068 - DNA, 25 bp, Homo sapien
gggctttcccatgcttaagtacagg

SEQ ID NO: 2788069 - DNA, 25 bp, Homo sapien
taagtacaggaacatgagacaaacc

SEQ ID NO: 2788070 - DNA, 25 bp, Homo sapien
catacttcctcccagtggccgtgtg

SEQ ID NO: 2788071 - DNA, 25 bp, Homo sapien
tgagtgctcgtcttccctgctatca

SEQ ID NO: 2788072 - DNA, 25 bp, Homo sapien
ctgagtgctcgtcttccctgctatc

SEQ ID NO: 2788073 - DNA, 25 bp, Homo sapien
gagtgctcgtcttccctgctatcat

SEQ ID NO: 2788074 - DNA, 25 bp, Homo sapien
attttcatcttctcgggcatccaac

SEQ ID NO: 2788075 - DNA, 25 bp, Homo sapien
cattttcatcttctcgggcatccaa

SEQ ID NO: 2788076 - DNA, 25 bp, Homo sapien
cactttgaagcggattgctccccat

SEQ ID NO: 2788077 - DNA, 25 bp, Homo sapien
tgagcgatctatttcagcaccagaa

SEQ ID NO: 2788078 - DNA, 25 bp, Homo sapien
catttgttagggacactgtgactga

SEQ ID NO: 2788079 - DNA, 25 bp, Homo sapien
tatctcctagatggccaggctcctt

SEQ ID NO: 2788080 - DNA, 25 bp, Homo sapien
gttgcttatcaggaacctaattctt

SEQ ID NO: 2788081 - DNA, 25 bp, Homo sapien
tcttgttgcttatcaggaacctaat

SEQ ID NO: 2788082 - DNA, 25 bp, Homo sapien
tttcttgttgcttatcaggaaccta

SEQ ID NO: 2788083 - DNA, 25 bp, Homo sapien
tctttgttgtgagggtggaatttct

SEQ ID NO: 2788084 - DNA, 25 bp, Homo sapien
aaggtctctgccgtcagtggtaaca

SEQ ID NO: 2788085 - DNA, 25 bp, Homo sapien
agtaaaaaggtctctgccgtcagtg

SEQ ID NO: 2788086 - DNA, 25 bp, Homo sapien
tggcagagaatgttgtcaaaccatg

SEQ ID NO: 2788087 - DNA, 25 bp, Homo sapien
tgtcaaaccatgagctctgatgagt

SEQ ID NO: 2788088 - DNA, 25 bp, Homo sapien
cagtgtcccacttattgccaaagca

SEQ ID NO: 2788089 - DNA, 25 bp, Homo sapien
taaattccctcagctgtcgttctag

SEQ ID NO: 2788090 - DNA, 25 bp, Homo sapien
tcagctcagtactcagtgtcccact

SEQ ID NO: 2788091 - DNA, 25 bp, Homo sapien
ccaaagcacttgtagctgcatttgc

SEQ ID NO: 2788092 - DNA, 25 bp, Homo sapien
ctggaggcaggctgtacagagacat

SEQ ID NO: 2788093 - DNA, 25 bp, Homo sapien
ttgaggtgatgacacacagagtttc

SEQ ID NO: 2788094 - DNA, 25 bp, Homo sapien
tctgggtagtaagaccttgcactgc

SEQ ID NO: 2788095 - DNA, 25 bp, Homo sapien
gagacatgagtcagctctccatctc

SEQ ID NO: 2788096 - DNA, 25 bp, Homo sapien
gagtctcagagtcataaacacacag

SEQ ID NO: 2788097 - DNA, 25 bp, Homo sapien
ggcagtagagaaggtatgctgtttc

SEQ ID NO: 2788098 - DNA, 25 bp, Homo sapien
tgataaccactcaagagcctgctgg

SEQ ID NO: 2788099 - DNA, 25 bp, Homo sapien
cacagtcagctatgccagagttggc

SEQ ID NO: 2788100 - DNA, 25 bp, Homo sapien
atgttccaggcccagacagccattc

SEQ ID NO: 2788101 - DNA, 25 bp, Homo sapien
attccagggccatgttgtttgtcat

SEQ ID NO: 2788102 - DNA, 25 bp, Homo sapien
ccaggcccagacagccattccaggg

SEQ ID NO: 2788103 - DNA, 25 bp, Homo sapien
ccattccagggccatgttgtttgtc

SEQ ID NO: 2788104 - DNA, 25 bp, Homo sapien
taggtttgtgcattccagtggcatc

SEQ ID NO: 2788105 - DNA, 25 bp, Homo sapien
gaacctagaacccagtgatcatcct

SEQ ID NO: 2788106 - DNA, 25 bp, Homo sapien
gtaaaatcagctgcctaaggtactg

SEQ ID NO: 2788107 - DNA, 25 bp, Homo sapien
aaaacagaatcgaaaggctttggca

SEQ ID NO: 2788108 - DNA, 25 bp, Homo sapien
gaggaggaggtagcgaggcatccct

SEQ ID NO: 2788109 - DNA, 25 bp, Homo sapien
aggaggtagcgaggcatcccttgct

SEQ ID NO: 2788110 - DNA, 25 bp, Homo sapien
aggcatcccttgctggggagggcag

SEQ ID NO: 2788111 - DNA, 25 bp, Homo sapien
accaggatgtagaagtttgaaaagt

SEQ ID NO: 2788112 - DNA, 25 bp, Homo sapien
gagaaatggtccctaaagtatggtg

SEQ ID NO: 2788113 - DNA, 25 bp, Homo sapien
acttctctagtaacagactgagaaa

SEQ ID NO: 2788114 - DNA, 25 bp, Homo sapien
tttttaggtgctctgcaggttcaga

SEQ ID NO: 2788115 - DNA, 25 bp, Homo sapien
gactgagaaatggtccctaaagtat

SEQ ID NO: 2788116 - DNA, 25 bp, Homo sapien
gttgatgtagcactcttgattctca

SEQ ID NO: 2788117 - DNA, 25 bp, Homo sapien
actgttgatgtagcactcttgattc

SEQ ID NO: 2788118 - DNA, 25 bp, Homo sapien
agcactgttgatgtagcactcttga

SEQ ID NO: 2788119 - DNA, 25 bp, Homo sapien
gcactgttgatgtagcactcttgat

SEQ ID NO: 2788120 - DNA, 25 bp, Homo sapien
tctgcaggaaaaggtcaggaccact

SEQ ID NO: 2788121 - DNA, 25 bp, Homo sapien
gaaacggtccttgtacttggagagc

SEQ ID NO: 2788122 - DNA, 25 bp, Homo sapien
tgtgtgcaaccattcattccgctga

SEQ ID NO: 2788123 - DNA, 25 bp, Homo sapien
ggtgaccttacagctcatgcttgaa

SEQ ID NO: 2788124 - DNA, 25 bp, Homo sapien
gagtgatatgactgcgtgcacctgt

SEQ ID NO: 2788125 - DNA, 25 bp, Homo sapien
ggagagtgatatgactgcgtgcacc

SEQ ID NO: 2788126 - DNA, 25 bp, Homo sapien
tgatatgactgcgtgcacctgtttg

SEQ ID NO: 2788127 - DNA, 25 bp, Homo sapien
cacctgtttgagctgagcagttttg

SEQ ID NO: 2788128 - DNA, 25 bp, Homo sapien
tattgagtaacttgactggctgttg

SEQ ID NO: 2788129 - DNA, 25 bp, Homo sapien
ctgtcactatattgagtaacttgac

SEQ ID NO: 2788130 - DNA, 25 bp, Homo sapien
ttgagtaacttgactggctgttgtt

SEQ ID NO: 2788131 - DNA, 25 bp, Homo sapien
cactatattgagtaacttgactggc

SEQ ID NO: 2788132 - DNA, 25 bp, Homo sapien
tgaaagttttttgatcaccaggaac

SEQ ID NO: 2788133 - DNA, 25 bp, Homo sapien
ccaggaactttaatatggttgtctt

SEQ ID NO: 2788134 - DNA, 25 bp, Homo sapien
tcctattaactggagtaacttctct

SEQ ID NO: 2788135 - DNA, 25 bp, Homo sapien
attaactggagtaacttctctttga

SEQ ID NO: 2788136 - DNA, 25 bp, Homo sapien
tcaggtcttcaaaccacctacaggt

SEQ ID NO: 2788137 - DNA, 25 bp, Homo sapien
ccttgattactcttctctgtgcggc

SEQ ID NO: 2788138 - DNA, 25 bp, Homo sapien
taggttatgccccaatacatgggct

SEQ ID NO: 2788139 - DNA, 25 bp, Homo sapien
tcataacatatgatgcctgcagatt

SEQ ID NO: 2788140 - DNA, 25 bp, Homo sapien
cataaatgccaggtagtgtctttcc

SEQ ID NO: 2788141 - DNA, 25 bp, Homo sapien
tattacaccagacttaaggcagcta

SEQ ID NO: 2788142 - DNA, 25 bp, Homo sapien
tctgccctttcaaggtctaacgtac

SEQ ID NO: 2788143 - DNA, 25 bp, Homo sapien
ggtatttactgcatggactaagcca

SEQ ID NO: 2788144 - DNA, 25 bp, Homo sapien
tttcctatacaaccagcggcgtcct

SEQ ID NO: 2788145 - DNA, 25 bp, Homo sapien
gcggtgaatcacaggtcggcctcag

SEQ ID NO: 2788146 - DNA, 25 bp, Homo sapien
ctagatctgtagttgccggccatga

SEQ ID NO: 2788147 - DNA, 25 bp, Homo sapien
tgcaccgtggtcattgatggaacag

SEQ ID NO: 2788148 - DNA, 25 bp, Homo sapien
gctgtcccggcaccggctggggtcg

SEQ ID NO: 2788149 - DNA, 25 bp, Homo sapien
ttcccgtgagcccccgctcctcagg

SEQ ID NO: 2788150 - DNA, 25 bp, Homo sapien
tccgggacggatccattccgggctc

SEQ ID NO: 2788151 - DNA, 25 bp, Homo sapien
cggggctgtcccggcaccggctggg

SEQ ID NO: 2788152 - DNA, 25 bp, Homo sapien
tggtggggggtgggggatgcaggaa

SEQ ID NO: 2788153 - DNA, 25 bp, Homo sapien
ctgttttgccatcctcgataagggt

SEQ ID NO: 2788154 - DNA, 25 bp, Homo sapien
ggacctttctgttcgcaagttgttc

SEQ ID NO: 2788155 - DNA, 25 bp, Homo sapien
cctcgataagggtgtccccagtgtc

SEQ ID NO: 2788156 - DNA, 25 bp, Homo sapien
cctttctgttcgcaagttgttctgt

SEQ ID NO: 2788157 - DNA, 25 bp, Homo sapien
ccttaacccttgagatatctctcat

SEQ ID NO: 2788158 - DNA, 25 bp, Homo sapien
atgccttaacccttgagatatctct

SEQ ID NO: 2788159 - DNA, 25 bp, Homo sapien
atcagtcagatatgccttaaccctt

SEQ ID NO: 2788160 - DNA, 25 bp, Homo sapien
catcagtcagatatgccttaaccct

SEQ ID NO: 2788161 - DNA, 25 bp, Homo sapien
atgtgaaggtcagggattccatagc

SEQ ID NO: 2788162 - DNA, 25 bp, Homo sapien
gtgaaggtcagggattccatagctt

SEQ ID NO: 2788163 - DNA, 25 bp, Homo sapien
gaaggtcagggattccatagctttc

SEQ ID NO: 2788164 - DNA, 25 bp, Homo sapien
ccatgtgaaggtcagggattccata

SEQ ID NO: 2788165 - DNA, 25 bp, Homo sapien
ttctgtagtcagcaaggtgcatttc

SEQ ID NO: 2788166 - DNA, 25 bp, Homo sapien
tgtagtcagcaaggtgcatttcttg

SEQ ID NO: 2788167 - DNA, 25 bp, Homo sapien
ccttcccattcttctcggattctgt

SEQ ID NO: 2788168 - DNA, 25 bp, Homo sapien
cattcttctcggattctgtagtcag

SEQ ID NO: 2788169 - DNA, 25 bp, Homo sapien
atgtgctgcttcaactggagaactg

SEQ ID NO: 2788170 - DNA, 25 bp, Homo sapien
actgatagagggtactttgtgggaa

SEQ ID NO: 2788171 - DNA, 25 bp, Homo sapien
caactggagaactgatagagggtac

SEQ ID NO: 2788172 - DNA, 25 bp, Homo sapien
gctgcttcaactggagaactgatag

SEQ ID NO: 2788173 - DNA, 25 bp, Homo sapien
tcttgaccttaaatgcagggctacc

SEQ ID NO: 2788174 - DNA, 25 bp, Homo sapien
tttcaagttgagattgggagttgtc

SEQ ID NO: 2788175 - DNA, 25 bp, Homo sapien
caagttgagattgggagttgtctgt

SEQ ID NO: 2788176 - DNA, 25 bp, Homo sapien
ttgagattgggagttgtctgttata

SEQ ID NO: 2788177 - DNA, 25 bp, Homo sapien
catcctgataacatgcagtgcctct

SEQ ID NO: 2788178 - DNA, 25 bp, Homo sapien
gcagtggaagcctgtcagactttct

SEQ ID NO: 2788179 - DNA, 25 bp, Homo sapien
caaagagtgtcaggcgaggttttct

SEQ ID NO: 2788180 - DNA, 25 bp, Homo sapien
tctatcctgcgttggacaaagagtg

SEQ ID NO: 2788181 - DNA, 25 bp, Homo sapien
tatcagatgtatcagtagagatggg

SEQ ID NO: 2788182 - DNA, 25 bp, Homo sapien
cagtcatcacggacacatcgtttgt

SEQ ID NO: 2788183 - DNA, 25 bp, Homo sapien
ggacacatcgtttgtacctatcaga

SEQ ID NO: 2788184 - DNA, 25 bp, Homo sapien
gagatggggacattaatttgtgtag

SEQ ID NO: 2788185 - DNA, 25 bp, Homo sapien
aaatgggcaaaaggtgcaaatagca

SEQ ID NO: 2788186 - DNA, 25 bp, Homo sapien
caaaaggtgcaaatagcatgacata

SEQ ID NO: 2788187 - DNA, 25 bp, Homo sapien
attgatatgaaatggtgaatgcacc

SEQ ID NO: 2788188 - DNA, 25 bp, Homo sapien
aggtgcaaatagcatgacataagga

SEQ ID NO: 2788189 - DNA, 25 bp, Homo sapien
tggtcacacttgtgattgcagcact

SEQ ID NO: 2788190 - DNA, 25 bp, Homo sapien
accatgggtggaggagatagtatca

SEQ ID NO: 2788191 - DNA, 25 bp, Homo sapien
cccatgatctaagggttgatgtgaa

SEQ ID NO: 2788192 - DNA, 25 bp, Homo sapien
aattcagtgatagcaaagatatggg

SEQ ID NO: 2788193 - DNA, 25 bp, Homo sapien
cataagatgtgagggcatgcccgag

SEQ ID NO: 2788194 - DNA, 25 bp, Homo sapien
catgcttttagtattccaggtctga

SEQ ID NO: 2788195 - DNA, 25 bp, Homo sapien
atgggttagctggttgggcccaaca

SEQ ID NO: 2788196 - DNA, 25 bp, Homo sapien
gcactccgcatttcatcagcatctg

SEQ ID NO: 2788197 - DNA, 25 bp, Homo sapien
tcacatcttgagtaggaatgaatgc

SEQ ID NO: 2788198 - DNA, 25 bp, Homo sapien
cattcacatcttgagtaggaatgaa

SEQ ID NO: 2788199 - DNA, 25 bp, Homo sapien
cttgagtaggaatgaatgctgttac

SEQ ID NO: 2788200 - DNA, 25 bp, Homo sapien
tgatcattcacatcttgagtaggaa

SEQ ID NO: 2788201 - DNA, 25 bp, Homo sapien
gcctgacacaagtgtttgaatgaac

SEQ ID NO: 2788202 - DNA, 25 bp, Homo sapien
tggctttatcgtatgtctacttgaa

SEQ ID NO: 2788203 - DNA, 25 bp, Homo sapien
gacgcaaagtctggtacagagcctg

SEQ ID NO: 2788204 - DNA, 25 bp, Homo sapien
ccagtgaataacagtcagaggttga

SEQ ID NO: 2788205 - DNA, 25 bp, Homo sapien
tggtcagggatggtctgattcagcc

SEQ ID NO: 2788206 - DNA, 25 bp, Homo sapien
gtggtcagggatggtctgattcagc

SEQ ID NO: 2788207 - DNA, 25 bp, Homo sapien
ctgacctgacgtacaaaataattca

SEQ ID NO: 2788208 - DNA, 25 bp, Homo sapien
cctgacgtacaaaataattcaccat

SEQ ID NO: 2788209 - DNA, 25 bp, Homo sapien
tgacctgacgtacaaaataattcac

SEQ ID NO: 2788210 - DNA, 25 bp, Homo sapien
gacctgacgtacaaaataattcacc

SEQ ID NO: 2788211 - DNA, 25 bp, Homo sapien
gcatgtgaaatttgtctgcttcgcc

SEQ ID NO: 2788212 - DNA, 25 bp, Homo sapien
ctgtcagatgcaatccttcaccttc

SEQ ID NO: 2788213 - DNA, 25 bp, Homo sapien
gaaatttgtctgcttcgccctgtca

SEQ ID NO: 2788214 - DNA, 25 bp, Homo sapien
gcttcgccctgtcagatgcaatcct

SEQ ID NO: 2788215 - DNA, 25 bp, Homo sapien
gactggaacagtttgctgagacaga

SEQ ID NO: 2788216 - DNA, 25 bp, Homo sapien
cagtgccatagcaactgctgttagc

SEQ ID NO: 2788217 - DNA, 25 bp, Homo sapien
taatgagtgagtctgctgtgggcca

SEQ ID NO: 2788218 - DNA, 25 bp, Homo sapien
tccaggtggtgcatatgaagtcaaa

SEQ ID NO: 2788219 - DNA, 25 bp, Homo sapien
taaagatgaataaatcctacctgct

SEQ ID NO: 2788220 - DNA, 25 bp, Homo sapien
cagtttccctgcctgacccagagtt

SEQ ID NO: 2788221 - DNA, 25 bp, Homo sapien
gaacgataccaccagtgcaagagag

SEQ ID NO: 2788222 - DNA, 25 bp, Homo sapien
caggagccctggaacagtcatggaa

SEQ ID NO: 2788223 - DNA, 25 bp, Homo sapien
gatgccttcccagttgtaaccggta

SEQ ID NO: 2788224 - DNA, 25 bp, Homo sapien
cagatgccttcccagttgtaaccgg

SEQ ID NO: 2788225 - DNA, 25 bp, Homo sapien
aactgttaccagatagtgtttgtac

SEQ ID NO: 2788226 - DNA, 25 bp, Homo sapien
ccggtaaaactgttaccagatagtg

SEQ ID NO: 2788227 - DNA, 25 bp, Homo sapien
tatatagcatcgtgtttggtttggg

SEQ ID NO: 2788228 - DNA, 25 bp, Homo sapien
tgattgcgtcgtttactacagcttt

SEQ ID NO: 2788229 - DNA, 25 bp, Homo sapien
tacctttacagttgagggttgttga

SEQ ID NO: 2788230 - DNA, 25 bp, Homo sapien
gatgtagagtctatacctggctgct

SEQ ID NO: 2788231 - DNA, 25 bp, Homo sapien
tccattaggaatggccaggacaagt

SEQ ID NO: 2788232 - DNA, 25 bp, Homo sapien
tatatttccagatctaaagcaagaa

SEQ ID NO: 2788233 - DNA, 25 bp, Homo sapien
tctgatagtactgtatctggctacc

SEQ ID NO: 2788234 - DNA, 25 bp, Homo sapien
ctctaagtactgcatttggaatcct

SEQ ID NO: 2788235 - DNA, 25 bp, Homo sapien
tgatctagcacccaaactctcttgg

SEQ ID NO: 2788236 - DNA, 25 bp, Homo sapien
gagactcgctggagctatttggtgc

SEQ ID NO: 2788237 - DNA, 25 bp, Homo sapien
tataagttgcttgggaaccatagca

SEQ ID NO: 2788238 - DNA, 25 bp, Homo sapien
ggcataacttaaccgactgctcagt

SEQ ID NO: 2788239 - DNA, 25 bp, Homo sapien
tacatatctgtgtttggcagttgtc

SEQ ID NO: 2788240 - DNA, 25 bp, Homo sapien
cctacattcagccatcgggacaagt

SEQ ID NO: 2788241 - DNA, 25 bp, Homo sapien
ggcagttgtcataacccaatcctac

SEQ ID NO: 2788242 - DNA, 25 bp, Homo sapien
ctggtctcaacgtttataatacata

SEQ ID NO: 2788243 - DNA, 25 bp, Homo sapien
acactcagggggtcttgattctcct

SEQ ID NO: 2788244 - DNA, 25 bp, Homo sapien
catcttcccacactcagggggtctt

SEQ ID NO: 2788245 - DNA, 25 bp, Homo sapien
cacactcagggggtcttgattctcc

SEQ ID NO: 2788246 - DNA, 25 bp, Homo sapien
ttcccacactcagggggtcttgatt

SEQ ID NO: 2788247 - DNA, 25 bp, Homo sapien
tcctgggttcgtccttggtccctga

SEQ ID NO: 2788248 - DNA, 25 bp, Homo sapien
ctgagcatttcaacttggctcaggc

SEQ ID NO: 2788249 - DNA, 25 bp, Homo sapien
agcatttcaacttggctcaggcacc

SEQ ID NO: 2788250 - DNA, 25 bp, Homo sapien
gagcatttcaacttggctcaggcac

SEQ ID NO: 2788251 - DNA, 25 bp, Homo sapien
acacagcttgacgaaatgtctattg

SEQ ID NO: 2788252 - DNA, 25 bp, Homo sapien
gaaatgtctattgctcttgtaaagc

SEQ ID NO: 2788253 - DNA, 25 bp, Homo sapien
gcttgacgaaatgtctattgctctt

SEQ ID NO: 2788254 - DNA, 25 bp, Homo sapien
gacgaaatgtctattgctcttgtaa

SEQ ID NO: 2788255 - DNA, 25 bp, Homo sapien
gacggtgttcgatgaacttcacgaa

SEQ ID NO: 2788256 - DNA, 25 bp, Homo sapien
attggaggacggtgttcgatgaact

SEQ ID NO: 2788257 - DNA, 25 bp, Homo sapien
tcgatgaacttcacgaacttcactg

SEQ ID NO: 2788258 - DNA, 25 bp, Homo sapien
gggaggattggaggacggtgttcga

SEQ ID NO: 2788259 - DNA, 25 bp, Homo sapien
tggacaaataagaatggcacgacag

SEQ ID NO: 2788260 - DNA, 25 bp, Homo sapien
tcaagggctgtgctgtactaagcag

SEQ ID NO: 2788261 - DNA, 25 bp, Homo sapien
actacactgattggagagttggaca

SEQ ID NO: 2788262 - DNA, 25 bp, Homo sapien
cagatattgcctgtgttcaagggct

SEQ ID NO: 2788263 - DNA, 25 bp, Homo sapien
caagctgcatcgcatggaagggagc

SEQ ID NO: 2788264 - DNA, 25 bp, Homo sapien
tcaatgggttggtgctgtctaagac

SEQ ID NO: 2788265 - DNA, 25 bp, Homo sapien
gattcttagagtttggaccttccac

SEQ ID NO: 2788266 - DNA, 25 bp, Homo sapien
ttagatcagttacggagcagcaagc

SEQ ID NO: 2788267 - DNA, 25 bp, Homo sapien
gaaccggatgcccaaatgagaagag

SEQ ID NO: 2788268 - DNA, 25 bp, Homo sapien
ccggatgcccaaatgagaagagcat

SEQ ID NO: 2788269 - DNA, 25 bp, Homo sapien
ttctaagaaccggatgcccaaatga

SEQ ID NO: 2788270 - DNA, 25 bp, Homo sapien
taagaaccggatgcccaaatgagaa

SEQ ID NO: 2788271 - DNA, 25 bp, Homo sapien
gagtcattcggtgtacttgcctaga

SEQ ID NO: 2788272 - DNA, 25 bp, Homo sapien
gactcacaggagtaagaagctcaga

SEQ ID NO: 2788273 - DNA, 25 bp, Homo sapien
cagcatctgaccctctggactgagt

SEQ ID NO: 2788274 - DNA, 25 bp, Homo sapien
cactcttccacatgcggaaagggct

SEQ ID NO: 2788275 - DNA, 25 bp, Homo sapien
gcagaatagccaacaataatagaaa

SEQ ID NO: 2788276 - DNA, 25 bp, Homo sapien
tagcagaatagccaacaataataga

SEQ ID NO: 2788277 - DNA, 25 bp, Homo sapien
tgcaaaaaatagcagaatagccaac

SEQ ID NO: 2788278 - DNA, 25 bp, Homo sapien
gaatagccaacaataatagaaatac

SEQ ID NO: 2788279 - DNA, 25 bp, Homo sapien
acaggaaagcttgacatcagatagc

SEQ ID NO: 2788280 - DNA, 25 bp, Homo sapien
agaaaatgcctatggctgtaatccc

SEQ ID NO: 2788281 - DNA, 25 bp, Homo sapien
tgacatcagatagcttaactcccct

SEQ ID NO: 2788282 - DNA, 25 bp, Homo sapien
ccccttagagatggcgggtttgcac

SEQ ID NO: 2788283 - DNA, 25 bp, Homo sapien
ggtctcctccgagccttcaagtttg

SEQ ID NO: 2788284 - DNA, 25 bp, Homo sapien
gcagccagattgaggtagattccct

SEQ ID NO: 2788285 - DNA, 25 bp, Homo sapien
aatattcgagcaagtgcagtccagg

SEQ ID NO: 2788286 - DNA, 25 bp, Homo sapien
cgcatgtcaggctgttgtggcttaa

SEQ ID NO: 2788287 - DNA, 25 bp, Homo sapien
tttcccaagctgtggaatgcttgct

SEQ ID NO: 2788288 - DNA, 25 bp, Homo sapien
ttttcccaagctgtggaatgcttgc

SEQ ID NO: 2788289 - DNA, 25 bp, Homo sapien
ctatagagaggagaccacaagagga

SEQ ID NO: 2788290 - DNA, 25 bp, Homo sapien
gagaccacaagaggacaaaatcaga

SEQ ID NO: 2788291 - DNA, 25 bp, Homo sapien
gagaggagaccacaagaggacaaaa

SEQ ID NO: 2788292 - DNA, 25 bp, Homo sapien
agaccacaagaggacaaaatcagaa

SEQ ID NO: 2788293 - DNA, 25 bp, Homo sapien
aaatcgaggagttctagctgaggac

SEQ ID NO: 2788294 - DNA, 25 bp, Homo sapien
taagcgggtaaatgccaaatcgagg

SEQ ID NO: 2788295 - DNA, 25 bp, Homo sapien
ccttttaagttgagatgccggagaa

SEQ ID NO: 2788296 - DNA, 25 bp, Homo sapien
cacagagtcccttgagcatggctga

SEQ ID NO: 2788297 - DNA, 25 bp, Homo sapien
gaatatcaggggatttccagttaac

SEQ ID NO: 2788298 - DNA, 25 bp, Homo sapien
gcttaattgatgatggctttgaaaa

SEQ ID NO: 2788299 - DNA, 25 bp, Homo sapien
aaagtgtcttcatgtatccagttaa

SEQ ID NO: 2788300 - DNA, 25 bp, Homo sapien
gatttccagttaacacaagtgtgct

SEQ ID NO: 2788301 - DNA, 25 bp, Homo sapien
ggttctattgtgaattgtaggcaaa

SEQ ID NO: 2788302 - DNA, 25 bp, Homo sapien
agggatttcactgagacctaaattt

SEQ ID NO: 2788303 - DNA, 25 bp, Homo sapien
aaggtaagattcatgagtctgctga

SEQ ID NO: 2788304 - DNA, 25 bp, Homo sapien
ttctgttgtgtttggtagagtgtca

SEQ ID NO: 2788305 - DNA, 25 bp, Homo sapien
tatatgttttaccttccgagcggca

SEQ ID NO: 2788306 - DNA, 25 bp, Homo sapien
gatgatgaatgcacattgttaactg

SEQ ID NO: 2788307 - DNA, 25 bp, Homo sapien
gcaaaattgacaataaccagactat

SEQ ID NO: 2788308 - DNA, 25 bp, Homo sapien
gagcggcaatcgtacttctagtaat

SEQ ID NO: 2788309 - DNA, 25 bp, Homo sapien
gactttacagccggcagaaaacagc

SEQ ID NO: 2788310 - DNA, 25 bp, Homo sapien
tttacagccggcagaaaacagcacc

SEQ ID NO: 2788311 - DNA, 25 bp, Homo sapien
ctttacagccggcagaaaacagcac

SEQ ID NO: 2788312 - DNA, 25 bp, Homo sapien
gatgactttacagccggcagaaaac

SEQ ID NO: 2788313 - DNA, 25 bp, Homo sapien
tactcagaagggtgatcttggaaca

SEQ ID NO: 2788314 - DNA, 25 bp, Homo sapien
gaacaagaaatgctgttgactgctc

SEQ ID NO: 2788315 - DNA, 25 bp, Homo sapien
ggtttacctaatgcttggagctgag

SEQ ID NO: 2788316 - DNA, 25 bp, Homo sapien
tggaatcaaactgtgaaggccctgg

SEQ ID NO: 2788317 - DNA, 25 bp, Homo sapien
ctctcccctatctgtgcacagagga

SEQ ID NO: 2788318 - DNA, 25 bp, Homo sapien
gagtcttggcatttacaaccacggc

SEQ ID NO: 2788319 - DNA, 25 bp, Homo sapien
acagaggacttggtccgattctacc

SEQ ID NO: 2788320 - DNA, 25 bp, Homo sapien
ttctacctccggaacaatgctcagc

SEQ ID NO: 2788321 - DNA, 25 bp, Homo sapien
gattgctgggccttgttttgaccca

SEQ ID NO: 2788322 - DNA, 25 bp, Homo sapien
tgaaattaggctcctttccccgtga

SEQ ID NO: 2788323 - DNA, 25 bp, Homo sapien
gaaagtttatacgatgggctcagtg

SEQ ID NO: 2788324 - DNA, 25 bp, Homo sapien
aagcctctcagcgaggaacatggaa

SEQ ID NO: 2788325 - DNA, 25 bp, Homo sapien
aaagcaagagactgtctgcatgacc

SEQ ID NO: 2788326 - DNA, 25 bp, Homo sapien
tgggatgctgactcaacgcagctca

SEQ ID NO: 2788327 - DNA, 25 bp, Homo sapien
gcatgaccctttagaaacacccgtg

SEQ ID NO: 2788328 - DNA, 25 bp, Homo sapien
gagaggtttcggacagtggccaaaa

SEQ ID NO: 2788329 - DNA, 25 bp, Homo sapien
tacacattggtaagaaccaggagtg

SEQ ID NO: 2788330 - DNA, 25 bp, Homo sapien
gctgaaccatccaaggtgctggcgt

SEQ ID NO: 2788331 - DNA, 25 bp, Homo sapien
tgtgattctgtctgcgctgaaccat

SEQ ID NO: 2788332 - DNA, 25 bp, Homo sapien
gaaaggtcttgtcgtgcagaatgct

SEQ ID NO: 2788333 - DNA, 25 bp, Homo sapien
tctgactttggcaggcttccagcgc

SEQ ID NO: 2788334 - DNA, 25 bp, Homo sapien
cttcatagtctgattgggagtcaat

SEQ ID NO: 2788335 - DNA, 25 bp, Homo sapien
ggaattcactcctcggtcacagtct

SEQ ID NO: 2788336 - DNA, 25 bp, Homo sapien
gaaagtaatgcaggatcaccaggaa

SEQ ID NO: 2788337 - DNA, 25 bp, Homo sapien
caggtatatagtcccaccaaaacca

SEQ ID NO: 2788338 - DNA, 25 bp, Homo sapien
tatacaggtatatagtcccaccaaa

SEQ ID NO: 2788339 - DNA, 25 bp, Homo sapien
tacaggtatatagtcccaccaaaac

SEQ ID NO: 2788340 - DNA, 25 bp, Homo sapien
atatatacaggtatatagtcccacc

SEQ ID NO: 2788341 - DNA, 25 bp, Homo sapien
aggatcccctctgcgtctggtaaag

SEQ ID NO: 2788342 - DNA, 25 bp, Homo sapien
catctactactgacttattgacctc

SEQ ID NO: 2788343 - DNA, 25 bp, Homo sapien
aatgatctttgagcaggcgaatctt

SEQ ID NO: 2788344 - DNA, 25 bp, Homo sapien
ggcgaatcttttaatacctccagga

SEQ ID NO: 2788345 - DNA, 25 bp, Homo sapien
tctcatcgtttgcttccctactcat

SEQ ID NO: 2788346 - DNA, 25 bp, Homo sapien
catgtgtatctcatcgtttgcttcc

SEQ ID NO: 2788347 - DNA, 25 bp, Homo sapien
cactcagctcagtcatgtgtatctc

SEQ ID NO: 2788348 - DNA, 25 bp, Homo sapien
cagtcatgtgtatctcatcgtttgc

SEQ ID NO: 2788349 - DNA, 25 bp, Homo sapien
gcagcgttgcttctggacagttcca

SEQ ID NO: 2788350 - DNA, 25 bp, Homo sapien
gatgtcgttcacaaagttctttaag

SEQ ID NO: 2788351 - DNA, 25 bp, Homo sapien
gctggaaaagcacattatgtgaaat

SEQ ID NO: 2788352 - DNA, 25 bp, Homo sapien
ggtcacatgctaactggctcaggtg

SEQ ID NO: 2788353 - DNA, 25 bp, Homo sapien
gatgtatcgatgtttaatcctcaag

SEQ ID NO: 2788354 - DNA, 25 bp, Homo sapien
tatttagcaaccagattgcaagtta

SEQ ID NO: 2788355 - DNA, 25 bp, Homo sapien
taatcctcaagttgctatataacat

SEQ ID NO: 2788356 - DNA, 25 bp, Homo sapien
atcccctggatgatgtatcgatgtt

SEQ ID NO: 2788357 - DNA, 25 bp, Homo sapien
tccacacatgatgggctggccaggg

SEQ ID NO: 2788358 - DNA, 25 bp, Homo sapien
ctccacacatgatgggctggccagg

SEQ ID NO: 2788359 - DNA, 25 bp, Homo sapien
cacacatgatgggctggccagggag

SEQ ID NO: 2788360 - DNA, 25 bp, Homo sapien
cctccacacatgatgggctggccag

SEQ ID NO: 2788361 - DNA, 25 bp, Homo sapien
gggcacaaaggcagaccaccagtct

SEQ ID NO: 2788362 - DNA, 25 bp, Homo sapien
ggcacaaaggcagaccaccagtctc

SEQ ID NO: 2788363 - DNA, 25 bp, Homo sapien
gcacaaaggcagaccaccagtctcc

SEQ ID NO: 2788364 - DNA, 25 bp, Homo sapien
agggcacaaaggcagaccaccagtc

SEQ ID NO: 2788365 - DNA, 25 bp, Homo sapien
cgatgatcgccaggttgcacaagat

SEQ ID NO: 2788366 - DNA, 25 bp, Homo sapien
tgcacaagatcactaaggccacgag

SEQ ID NO: 2788367 - DNA, 25 bp, Homo sapien
tctgaatcttatacaggatgcagca

SEQ ID NO: 2788368 - DNA, 25 bp, Homo sapien
gatgcagcaatcatgcgatgatcgc

SEQ ID NO: 2788369 - DNA, 25 bp, Homo sapien
ctggggtatcggcaggcagaaaacc

SEQ ID NO: 2788370 - DNA, 25 bp, Homo sapien
cggcaggcagaaaacctatacatgt

SEQ ID NO: 2788371 - DNA, 25 bp, Homo sapien
gcaggcagaaaacctatacatgtct

SEQ ID NO: 2788372 - DNA, 25 bp, Homo sapien
tatcggcaggcagaaaacctataca

SEQ ID NO: 2788373 - DNA, 25 bp, Homo sapien
caatagctctagaaggtttgaggtg

SEQ ID NO: 2788374 - DNA, 25 bp, Homo sapien
gaccctttttagaggcagtcaccag

SEQ ID NO: 2788375 - DNA, 25 bp, Homo sapien
gtttgaggtgagcagattctatgtc

SEQ ID NO: 2788376 - DNA, 25 bp, Homo sapien
tatagacagacttatctggcagggc

SEQ ID NO: 2788377 - DNA, 25 bp, Homo sapien
gctttattcctggtagtgcctcagc

SEQ ID NO: 2788378 - DNA, 25 bp, Homo sapien
tcctcctactgttgacagaacaatt

SEQ ID NO: 2788379 - DNA, 25 bp, Homo sapien
caattattgatcacccattgggtgt

SEQ ID NO: 2788380 - DNA, 25 bp, Homo sapien
tattcctggtagtgcctcagctttt

SEQ ID NO: 2788381 - DNA, 25 bp, Homo sapien
gggtgcaccgcctgtgtaacttaaa

SEQ ID NO: 2788382 - DNA, 25 bp, Homo sapien
gcatgagccccaagcagttggtgca

SEQ ID NO: 2788383 - DNA, 25 bp, Homo sapien
tgagccccaagcagttggtgcacgg

SEQ ID NO: 2788384 - DNA, 25 bp, Homo sapien
ttaaagagctgacaggtgacacccc

SEQ ID NO: 2788385 - DNA, 25 bp, Homo sapien
ccagatggtggcatgacttccttca

SEQ ID NO: 2788386 - DNA, 25 bp, Homo sapien
catttaggttgcctcgatgggtatc

SEQ ID NO: 2788387 - DNA, 25 bp, Homo sapien
aacactttgcccgaatcattctgcg

SEQ ID NO: 2788388 - DNA, 25 bp, Homo sapien
tcgtatgaaactgtgcaccggtggg

SEQ ID NO: 2788389 - DNA, 25 bp, Homo sapien
gctccggccgtgacgggcctctgtt

SEQ ID NO: 2788390 - DNA, 25 bp, Homo sapien
ctgttgctcctttctagaatatctt

SEQ ID NO: 2788391 - DNA, 25 bp, Homo sapien
acagatggcctcttcagcacagcgc

SEQ ID NO: 2788392 - DNA, 25 bp, Homo sapien
gagcaccttgcattctgggtgtcag

SEQ ID NO: 2788393 - DNA, 25 bp, Homo sapien
tcttgataactgcatcatattgttg

SEQ ID NO: 2788394 - DNA, 25 bp, Homo sapien
gcacatacagaatccattcttgata

SEQ ID NO: 2788395 - DNA, 25 bp, Homo sapien
tctgaaaagcttccgctctccagac

SEQ ID NO: 2788396 - DNA, 25 bp, Homo sapien
ctgcaagatccagttcctgttcctg

SEQ ID NO: 2788397 - DNA, 25 bp, Homo sapien
tcccagcacatttatgattcacttt

SEQ ID NO: 2788398 - DNA, 25 bp, Homo sapien
ttgaaatttccaagccaggtcctct

SEQ ID NO: 2788399 - DNA, 25 bp, Homo sapien
tcaactctggtacccctttacttga

SEQ ID NO: 2788400 - DNA, 25 bp, Homo sapien
gattcactttcggatctcctggtgc

SEQ ID NO: 2788401 - DNA, 25 bp, Homo sapien
gtggcaccatatcactgaggacatc

SEQ ID NO: 2788402 - DNA, 25 bp, Homo sapien
ctgaaggtaacctatggcatagata

SEQ ID NO: 2788403 - DNA, 25 bp, Homo sapien
acctatggcatagatatagtctgac

SEQ ID NO: 2788404 - DNA, 25 bp, Homo sapien
gggtggcaccatatcactgaggaca

SEQ ID NO: 2788405 - DNA, 25 bp, Homo sapien
ctcgtaaggcctcctgtacctcaaa

SEQ ID NO: 2788406 - DNA, 25 bp, Homo sapien
tggatataaggttttgtctgacatg

SEQ ID NO: 2788407 - DNA, 25 bp, Homo sapien
aaagcagaaatggatataaggtttt

SEQ ID NO: 2788408 - DNA, 25 bp, Homo sapien
gtaaggcctcctgtacctcaaagcc

SEQ ID NO: 2788409 - DNA, 25 bp, Homo sapien
acagaaactagtccccggcaggcag

SEQ ID NO: 2788410 - DNA, 25 bp, Homo sapien
ccgtgggttctgttgacagtgattc

SEQ ID NO: 2788411 - DNA, 25 bp, Homo sapien
cttacagaaactagtccccggcagg

SEQ ID NO: 2788412 - DNA, 25 bp, Homo sapien
gcaggcagccgaccctccgtgggtt

SEQ ID NO: 2788413 - DNA, 25 bp, Homo sapien
aacagtttccttggcaccgccactg

SEQ ID NO: 2788414 - DNA, 25 bp, Homo sapien
tcagtagccatctggcatgctgcgt

SEQ ID NO: 2788415 - DNA, 25 bp, Homo sapien
tctctaaaatgactggcaacctcca

SEQ ID NO: 2788416 - DNA, 25 bp, Homo sapien
cagcgacgtgctggaaatagtcaaa

SEQ ID NO: 2788417 - DNA, 25 bp, Homo sapien
aggaattgatggagcccatggagta

SEQ ID NO: 2788418 - DNA, 25 bp, Homo sapien
ttgatggagcccatggagtatccac

SEQ ID NO: 2788419 - DNA, 25 bp, Homo sapien
ccttctggctgtggccgattcttaa

SEQ ID NO: 2788420 - DNA, 25 bp, Homo sapien
ccatggagtatccaccttctggctg

SEQ ID NO: 2788421 - DNA, 25 bp, Homo sapien
cttgaaggtcctactgtaggacctt

SEQ ID NO: 2788422 - DNA, 25 bp, Homo sapien
gacatgtgcagacccagacttgcca

SEQ ID NO: 2788423 - DNA, 25 bp, Homo sapien
acagtgtgtcccacatcgatgagaa

SEQ ID NO: 2788424 - DNA, 25 bp, Homo sapien
ggccattcctgtcctgcagacatgt

SEQ ID NO: 2788425 - DNA, 25 bp, Homo sapien
gcttttgtgctgatgagatttagag

SEQ ID NO: 2788426 - DNA, 25 bp, Homo sapien
tttagagagccctgcacgtcgccca

SEQ ID NO: 2788427 - DNA, 25 bp, Homo sapien
cttttgtgctgatgagatttagaga

SEQ ID NO: 2788428 - DNA, 25 bp, Homo sapien
agccctgcacgtcgcccagcttaga

SEQ ID NO: 2788429 - DNA, 25 bp, Homo sapien
tgtacattggttgaaggattctttc

SEQ ID NO: 2788430 - DNA, 25 bp, Homo sapien
ttagagcaccaactggattcacctg

SEQ ID NO: 2788431 - DNA, 25 bp, Homo sapien
tacattggttgaaggattctttctg

SEQ ID NO: 2788432 - DNA, 25 bp, Homo sapien
tcatgttagagcaccaactggattc

SEQ ID NO: 2788433 - DNA, 25 bp, Homo sapien
cagacatagctgtcattcaaagcaa

SEQ ID NO: 2788434 - DNA, 25 bp, Homo sapien
aggcagcggcaacctggagttcagc

SEQ ID NO: 2788435 - DNA, 25 bp, Homo sapien
agcaggcagcggcaacctggagttc

SEQ ID NO: 2788436 - DNA, 25 bp, Homo sapien
tagctgtcattcaaagcaagaggaa

SEQ ID NO: 2788437 - DNA, 25 bp, Homo sapien
caactgtgccctttcctgcattgaa

SEQ ID NO: 2788438 - DNA, 25 bp, Homo sapien
cctttcctgcattgaattccaccag

SEQ ID NO: 2788439 - DNA, 25 bp, Homo sapien
ggcaactgtgccctttcctgcattg

SEQ ID NO: 2788440 - DNA, 25 bp, Homo sapien
caaatggcaactgtgccctttcctg

SEQ ID NO: 2788441 - DNA, 25 bp, Homo sapien
ctggcataaagccacacaaaggata

SEQ ID NO: 2788442 - DNA, 25 bp, Homo sapien
ccacacaaaggataaaattagccat

SEQ ID NO: 2788443 - DNA, 25 bp, Homo sapien
agccacacaaaggataaaattagcc

SEQ ID NO: 2788444 - DNA, 25 bp, Homo sapien
ggcataaagccacacaaaggataaa

SEQ ID NO: 2788445 - DNA, 25 bp, Homo sapien
catacttgggatcttctcagctgca

SEQ ID NO: 2788446 - DNA, 25 bp, Homo sapien
acttgggatcttctcagctgcattc

SEQ ID NO: 2788447 - DNA, 25 bp, Homo sapien
ctctccatacttgggatcttctcag

SEQ ID NO: 2788448 - DNA, 25 bp, Homo sapien
ttgggatcttctcagctgcattcat

SEQ ID NO: 2788449 - DNA, 25 bp, Homo sapien
cagcacgatataagtagggtgacca

SEQ ID NO: 2788450 - DNA, 25 bp, Homo sapien
tataagtagggtgaccatatgtcat

SEQ ID NO: 2788451 - DNA, 25 bp, Homo sapien
cacgatataagtagggtgaccatat

SEQ ID NO: 2788452 - DNA, 25 bp, Homo sapien
gatataagtagggtgaccatatgtc

SEQ ID NO: 2788453 - DNA, 25 bp, Homo sapien
tttcctgtttatatgaactggggtg

SEQ ID NO: 2788454 - DNA, 25 bp, Homo sapien
tttatatgaactggggtgatccaga

SEQ ID NO: 2788455 - DNA, 25 bp, Homo sapien
cctgtttatatgaactggggtgatc

SEQ ID NO: 2788456 - DNA, 25 bp, Homo sapien
atatgaactggggtgatccagaggc

SEQ ID NO: 2788457 - DNA, 25 bp, Homo sapien
aatcaacataggatatatagtttgc

SEQ ID NO: 2788458 - DNA, 25 bp, Homo sapien
taatcaacataggatatatagtttg

SEQ ID NO: 2788459 - DNA, 25 bp, Homo sapien
tttcaagaaccttacagtactatta

SEQ ID NO: 2788460 - DNA, 25 bp, Homo sapien
cacagcattgtgctcaaggtcagcc

SEQ ID NO: 2788461 - DNA, 25 bp, Homo sapien
gcttttattgattactcgatgtacg

SEQ ID NO: 2788462 - DNA, 25 bp, Homo sapien
gatgtacgaattagacccagcttct

SEQ ID NO: 2788463 - DNA, 25 bp, Homo sapien
ggatggctgctaggatgctactgtc

SEQ ID NO: 2788464 - DNA, 25 bp, Homo sapien
aggatggctgctaggatgctactgt

SEQ ID NO: 2788465 - DNA, 25 bp, Homo sapien
tgtgtatgtatggtcagactggtcc

SEQ ID NO: 2788466 - DNA, 25 bp, Homo sapien
tgtatggtcagactggtcctcttcc

SEQ ID NO: 2788467 - DNA, 25 bp, Homo sapien
ggtcagactggtcctcttcccaaaa

SEQ ID NO: 2788468 - DNA, 25 bp, Homo sapien
agactggtcctcttcccaaaattca

SEQ ID NO: 2788469 - DNA, 25 bp, Homo sapien
ctagggcatctcatcatgacacaat

SEQ ID NO: 2788470 - DNA, 25 bp, Homo sapien
aatgaagtttaagtatggtttctgc

SEQ ID NO: 2788471 - DNA, 25 bp, Homo sapien
tacatcagctctgtagcaggtgcta

SEQ ID NO: 2788472 - DNA, 25 bp, Homo sapien
gtggcccagatccattttgcagtca

SEQ ID NO: 2788473 - DNA, 25 bp, Homo sapien
tcctaagtgcttcccacatataaaa

SEQ ID NO: 2788474 - DNA, 25 bp, Homo sapien
ggaatgctatgattagcatcttgca

SEQ ID NO: 2788475 - DNA, 25 bp, Homo sapien
ttcctaagtgcttcccacatataaa

SEQ ID NO: 2788476 - DNA, 25 bp, Homo sapien
cttacgagacaatttaagatcactt

SEQ ID NO: 2788477 - DNA, 25 bp, Homo sapien
gatcacttaaggaacctatgccttg

SEQ ID NO: 2788478 - DNA, 25 bp, Homo sapien
taagatcacttaaggaacctatgcc

SEQ ID NO: 2788479 - DNA, 25 bp, Homo sapien
tttaagatcacttaaggaacctatg

SEQ ID NO: 2788480 - DNA, 25 bp, Homo sapien
catgctcatgcccattgcttggttg

SEQ ID NO: 2788481 - DNA, 25 bp, Homo sapien
tgcttggttggcaccccacgctgaa

SEQ ID NO: 2788482 - DNA, 25 bp, Homo sapien
acccgagaagaacctgtgcactgtg

SEQ ID NO: 2788483 - DNA, 25 bp, Homo sapien
gatttcttgtggagatacacccgag

SEQ ID NO: 2788484 - DNA, 25 bp, Homo sapien
cttcataatggtagttaaaatctct

SEQ ID NO: 2788485 - DNA, 25 bp, Homo sapien
tactttacaacaggaggcaggcctt

SEQ ID NO: 2788486 - DNA, 25 bp, Homo sapien
gcctttcccttccaaagttgtgctc

SEQ ID NO: 2788487 - DNA, 25 bp, Homo sapien
agtgttttgggatattgtgggtatc

SEQ ID NO: 2788488 - DNA, 25 bp, Homo sapien
tgtagtcagcacagcaaaagagtcc

SEQ ID NO: 2788489 - DNA, 25 bp, Homo sapien
taggcacacaggattctgtagtcag

SEQ ID NO: 2788490 - DNA, 25 bp, Homo sapien
cagcaccagctggtggcactgtcat

SEQ ID NO: 2788491 - DNA, 25 bp, Homo sapien
gcaaaagagtccttgcaggcagcac

SEQ ID NO: 2788492 - DNA, 25 bp, Homo sapien
cattaagatcctggaccactacttc

SEQ ID NO: 2788493 - DNA, 25 bp, Homo sapien
tggctgtattccattaagatcctgg

SEQ ID NO: 2788494 - DNA, 25 bp, Homo sapien
gctgtattccattaagatcctggac

SEQ ID NO: 2788495 - DNA, 25 bp, Homo sapien
tattccattaagatcctggaccact

SEQ ID NO: 2788496 - DNA, 25 bp, Homo sapien
gtctgaccgggacctgccacaacgt

SEQ ID NO: 2788497 - DNA, 25 bp, Homo sapien
tgtgacacattcaactgagcccctg

SEQ ID NO: 2788498 - DNA, 25 bp, Homo sapien
acggaaaagggaagctactagagca

SEQ ID NO: 2788499 - DNA, 25 bp, Homo sapien
tgcatctcccacaatagaacggaaa

SEQ ID NO: 2788500 - DNA, 25 bp, Homo sapien
tctctgtgggcttctcgggaactct

SEQ ID NO: 2788501 - DNA, 25 bp, Homo sapien
tccctcactcaaggatgacctaatg

SEQ ID NO: 2788502 - DNA, 25 bp, Homo sapien
ggaagccttgatgtatctctgtggg

SEQ ID NO: 2788503 - DNA, 25 bp, Homo sapien
gaagagtcctgtgatgaagtacaga

SEQ ID NO: 2788504 - DNA, 25 bp, Homo sapien
tatacaaatcccatttatccttcaa

SEQ ID NO: 2788505 - DNA, 25 bp, Homo sapien
cttcaaaaactggttcgagtttgct

SEQ ID NO: 2788506 - DNA, 25 bp, Homo sapien
aactggttcgagtttgctgcttcta

SEQ ID NO: 2788507 - DNA, 25 bp, Homo sapien
gttcgagtttgctgcttctatgaaa

SEQ ID NO: 2788508 - DNA, 25 bp, Homo sapien
aaatgtgaattaatggctctccctc

SEQ ID NO: 2788509 - DNA, 25 bp, Homo sapien
catcctgaccttgagactgcgcaac

SEQ ID NO: 2788510 - DNA, 25 bp, Homo sapien
actgcgcaacgtgccctggcagatt

SEQ ID NO: 2788511 - DNA, 25 bp, Homo sapien
aagctgtctgatactgtgggtcatc

SEQ ID NO: 2788512 - DNA, 25 bp, Homo sapien
atttccagtgagtaatgggctgagg

SEQ ID NO: 2788513 - DNA, 25 bp, Homo sapien
ccagtgagtaatgggctgaggtcaa

SEQ ID NO: 2788514 - DNA, 25 bp, Homo sapien
ttccagtgagtaatgggctgaggtc

SEQ ID NO: 2788515 - DNA, 25 bp, Homo sapien
ggactcatttccagtgagtaatggg

SEQ ID NO: 2788516 - DNA, 25 bp, Homo sapien
agccccaccagttttgcttggctcg

SEQ ID NO: 2788517 - DNA, 25 bp, Homo sapien
tcgctctcgcacagaccattgttag

SEQ ID NO: 2788518 - DNA, 25 bp, Homo sapien
cagaccattgttagggattttattg

SEQ ID NO: 2788519 - DNA, 25 bp, Homo sapien
tctcgcacagaccattgttagggat

SEQ ID NO: 2788520 - DNA, 25 bp, Homo sapien
caatctcccccttacttagacattt

SEQ ID NO: 2788521 - DNA, 25 bp, Homo sapien
gagctgcttaaaatcagtgattctc

SEQ ID NO: 2788522 - DNA, 25 bp, Homo sapien
taccttgagctgcttaaaatcagtg

SEQ ID NO: 2788523 - DNA, 25 bp, Homo sapien
tttcctaccttgagctgcttaaaat

SEQ ID NO: 2788524 - DNA, 25 bp, Homo sapien
tctaatgacctactcccaagttttg

SEQ ID NO: 2788525 - DNA, 25 bp, Homo sapien
actgtcaccaggtctctggaccaca

SEQ ID NO: 2788526 - DNA, 25 bp, Homo sapien
tgctctgtgaactggtaacaattca

SEQ ID NO: 2788527 - DNA, 25 bp, Homo sapien
cactgtgtgtccctgtttaggccaa

SEQ ID NO: 2788528 - DNA, 25 bp, Homo sapien
attagtatccatgtcctgtgcctgg

SEQ ID NO: 2788529 - DNA, 25 bp, Homo sapien
tcatcatcctcgcaaaggttcatca

SEQ ID NO: 2788530 - DNA, 25 bp, Homo sapien
gccagctgcccgacatgtacttcat

SEQ ID NO: 2788531 - DNA, 25 bp, Homo sapien
gatcgatctttgagggccagctgcc

SEQ ID NO: 2788532 - DNA, 25 bp, Homo sapien
aatagtccaagaccaggcgaggcaa

SEQ ID NO: 2788533 - DNA, 25 bp, Homo sapien
gaccaggcgaggcaacatggactcc

SEQ ID NO: 2788534 - DNA, 25 bp, Homo sapien
tccaagaccaggcgaggcaacatgg

SEQ ID NO: 2788535 - DNA, 25 bp, Homo sapien
agaccaggcgaggcaacatggactc

SEQ ID NO: 2788536 - DNA, 25 bp, Homo sapien
cttcagtcgactgataaaaaataca

SEQ ID NO: 2788537 - DNA, 25 bp, Homo sapien
tctctcagctcgtaagtggcaaggc

SEQ ID NO: 2788538 - DNA, 25 bp, Homo sapien
tgctcttctgagtccaattccttgg

SEQ ID NO: 2788539 - DNA, 25 bp, Homo sapien
gcaaggctgcaatttgtattgctct

SEQ ID NO: 2788540 - DNA, 25 bp, Homo sapien
caataaagctgatttgttcagactt

SEQ ID NO: 2788541 - DNA, 25 bp, Homo sapien
taaagctgaaattaatccaaaccac

SEQ ID NO: 2788542 - DNA, 25 bp, Homo sapien
cttaagcaatcctttagaaatataa

SEQ ID NO: 2788543 - DNA, 25 bp, Homo sapien
ggaattggagagcatcacctcttaa

SEQ ID NO: 2788544 - DNA, 25 bp, Homo sapien
cacggacaagatacgcatggcctgg

SEQ ID NO: 2788545 - DNA, 25 bp, Homo sapien
catggcctggccttccaagttgaga

SEQ ID NO: 2788546 - DNA, 25 bp, Homo sapien
acagggttctgcttgccagctggca

SEQ ID NO: 2788547 - DNA, 25 bp, Homo sapien
gcagttatgggttaaacaatacagc

SEQ ID NO: 2788548 - DNA, 25 bp, Homo sapien
cagctgtggaatatttaatctgaca

SEQ ID NO: 2788549 - DNA, 25 bp, Homo sapien
ttcagctgtggaatatttaatctga

SEQ ID NO: 2788550 - DNA, 25 bp, Homo sapien
tggaatatttaatctgacatttggc

SEQ ID NO: 2788551 - DNA, 25 bp, Homo sapien
gaatatttaatctgacatttggcat

SEQ ID NO: 2788552 - DNA, 25 bp, Homo sapien
ctgctgaccctaattgactgggggc

SEQ ID NO: 2788553 - DNA, 25 bp, Homo sapien
ctgaccctaattgactgggggcagc

SEQ ID NO: 2788554 - DNA, 25 bp, Homo sapien
tgctgaccctaattgactgggggca

SEQ ID NO: 2788555 - DNA, 25 bp, Homo sapien
gctgaccctaattgactgggggcag

SEQ ID NO: 2788556 - DNA, 25 bp, Homo sapien
ggcaaggtcagcagctccaaccgcc

SEQ ID NO: 2788557 - DNA, 25 bp, Homo sapien
caaggtcagcagctccaaccgcctc

SEQ ID NO: 2788558 - DNA, 25 bp, Homo sapien
gcaaggtcagcagctccaaccgcct

SEQ ID NO: 2788559 - DNA, 25 bp, Homo sapien
gcagacattaagaatctgcttgtca

SEQ ID NO: 2788560 - DNA, 25 bp, Homo sapien
cattaagaatctgcttgtcatgagg

SEQ ID NO: 2788561 - DNA, 25 bp, Homo sapien
gacattaagaatctgcttgtcatga

SEQ ID NO: 2788562 - DNA, 25 bp, Homo sapien
cagacattaagaatctgcttgtcat

SEQ ID NO: 2788563 - DNA, 25 bp, Homo sapien
tcaatgaaattacctattctgtgta

SEQ ID NO: 2788564 - DNA, 25 bp, Homo sapien
catataagacttggctggttaggtt

SEQ ID NO: 2788565 - DNA, 25 bp, Homo sapien
acatcaatgaaattacctattctgt

SEQ ID NO: 2788566 - DNA, 25 bp, Homo sapien
ctgttttgtacttgtgttgtaatat

SEQ ID NO: 2788567 - DNA, 25 bp, Homo sapien
taaagcgaattaacagcaaaaccac

SEQ ID NO: 2788568 - DNA, 25 bp, Homo sapien
ttaaagcgaattaacagcaaaacca

SEQ ID NO: 2788569 - DNA, 25 bp, Homo sapien
tgcactaatttaggtattccaaaat

SEQ ID NO: 2788570 - DNA, 25 bp, Homo sapien
gatacatctctttgtcactgtttaa

SEQ ID NO: 2788571 - DNA, 25 bp, Homo sapien
tacgttctgcccgtgtatctcagag

SEQ ID NO: 2788572 - DNA, 25 bp, Homo sapien
taggtattccaaaatgggtgaaaga

SEQ ID NO: 2788573 - DNA, 25 bp, Homo sapien
tcagtgacttctatcacttcttcct

SEQ ID NO: 2788574 - DNA, 25 bp, Homo sapien
ttcagtgacttctatcacttcttcc

SEQ ID NO: 2788575 - DNA, 25 bp, Homo sapien
tatagtgaagttttcagtgacttct

SEQ ID NO: 2788576 - DNA, 25 bp, Homo sapien
ttatatagtgaagttttcagtgact

SEQ ID NO: 2788577 - DNA, 25 bp, Homo sapien
tcgcattgggagcaactggagtcct

SEQ ID NO: 2788578 - DNA, 25 bp, Homo sapien
gagtcctactaccaggtgatcccat

SEQ ID NO: 2788579 - DNA, 25 bp, Homo sapien
caccaaggcaggaagtcgcattggg

SEQ ID NO: 2788580 - DNA, 25 bp, Homo sapien
gagcaactggagtcctactaccagg

SEQ ID NO: 2788581 - DNA, 25 bp, Homo sapien
aaaagattgagtgctctcagttctc

SEQ ID NO: 2788582 - DNA, 25 bp, Homo sapien
ttcttgtctgggtttctctgagaac

SEQ ID NO: 2788583 - DNA, 25 bp, Homo sapien
aaagattgagtgctctcagttctca

SEQ ID NO: 2788584 - DNA, 25 bp, Homo sapien
taaaagattgagtgctctcagttct

SEQ ID NO: 2788585 - DNA, 25 bp, Homo sapien
tcatctcctgagatttgagtcctgc

SEQ ID NO: 2788586 - DNA, 25 bp, Homo sapien
atctcctgagatttgagtcctgctg

SEQ ID NO: 2788587 - DNA, 25 bp, Homo sapien
tcagtggctggcaaaaatttgccaa

SEQ ID NO: 2788588 - DNA, 25 bp, Homo sapien
gctggcaaaaatttgccaaggcagc

SEQ ID NO: 2788589 - DNA, 25 bp, Homo sapien
gataccgataagatacacaattcca

SEQ ID NO: 2788590 - DNA, 25 bp, Homo sapien
cactggagtagagccagtgtctccc

SEQ ID NO: 2788591 - DNA, 25 bp, Homo sapien
tttggaattcactggagtagagcca

SEQ ID NO: 2788592 - DNA, 25 bp, Homo sapien
ctgctagatttcagataccgataag

SEQ ID NO: 2788593 - DNA, 25 bp, Homo sapien
caaaaccttagatagccatgaacac

SEQ ID NO: 2788594 - DNA, 25 bp, Homo sapien
tactttcagccaaaaccttagatag

SEQ ID NO: 2788595 - DNA, 25 bp, Homo sapien
cattagatagcgctgccaggtctcc

SEQ ID NO: 2788596 - DNA, 25 bp, Homo sapien
ttagtgtgcattagatagcgctgcc

SEQ ID NO: 2788597 - DNA, 25 bp, Homo sapien
gcagtatgctctgtttccgagtttg

SEQ ID NO: 2788598 - DNA, 25 bp, Homo sapien
gaacagcagtatgctctgtttccga

SEQ ID NO: 2788599 - DNA, 25 bp, Homo sapien
ttaggcttatactgaagtgtggaac

SEQ ID NO: 2788600 - DNA, 25 bp, Homo sapien
atttcccatattaggcttatactga

SEQ ID NO: 2788601 - DNA, 25 bp, Homo sapien
tgccactcactcttgcaatgtcata

SEQ ID NO: 2788602 - DNA, 25 bp, Homo sapien
actcactcttgcaatgtcatataca

SEQ ID NO: 2788603 - DNA, 25 bp, Homo sapien
agcaccaatggctacctccttcatg

SEQ ID NO: 2788604 - DNA, 25 bp, Homo sapien
cattggccagcaccaatggctacct

SEQ ID NO: 2788605 - DNA, 25 bp, Homo sapien
cactgaacatgagccaacgtgtggg

SEQ ID NO: 2788606 - DNA, 25 bp, Homo sapien
ctgcactgaacatgagccaacgtgt

SEQ ID NO: 2788607 - DNA, 25 bp, Homo sapien
tgcactgaacatgagccaacgtgtg

SEQ ID NO: 2788608 - DNA, 25 bp, Homo sapien
ctgaacatgagccaacgtgtggggt

SEQ ID NO: 2788609 - DNA, 25 bp, Homo sapien
catctaatccacagtcctttcctga

SEQ ID NO: 2788610 - DNA, 25 bp, Homo sapien
ccgtgacaagttaaatggccacctc

SEQ ID NO: 2788611 - DNA, 25 bp, Homo sapien
acgccttccgtgacaagttaaatgg

SEQ ID NO: 2788612 - DNA, 25 bp, Homo sapien
ctggccatctaatccacagtccttt

SEQ ID NO: 2788613 - DNA, 25 bp, Homo sapien
cagagtaggagttgaataacagtaa

SEQ ID NO: 2788614 - DNA, 25 bp, Homo sapien
tttagggggatggaattgacttgta

SEQ ID NO: 2788615 - DNA, 25 bp, Homo sapien
gaattggagacagtttagggggatg

SEQ ID NO: 2788616 - DNA, 25 bp, Homo sapien
ctaacgaggtgatcagagtaggagt

SEQ ID NO: 2788617 - DNA, 25 bp, Homo sapien
aaaaggtgggcgaaggatatgaaga

SEQ ID NO: 2788618 - DNA, 25 bp, Homo sapien
gcaatgtacgcatctgacaaagggt

SEQ ID NO: 2788619 - DNA, 25 bp, Homo sapien
tgtacgcatctgacaaagggttaat

SEQ ID NO: 2788620 - DNA, 25 bp, Homo sapien
aatgtacgcatctgacaaagggtta

SEQ ID NO: 2788621 - DNA, 25 bp, Homo sapien
tgtgtcccagatcaatttcttagca

SEQ ID NO: 2788622 - DNA, 25 bp, Homo sapien
gaaaaactatcctgccctgtctact

SEQ ID NO: 2788623 - DNA, 25 bp, Homo sapien
tcttagcactgcgtttaacttacta

SEQ ID NO: 2788624 - DNA, 25 bp, Homo sapien
tttaagcttcctcaatgcactaatt

SEQ ID NO: 2788625 - DNA, 25 bp, Homo sapien
gaatggctgtattgcacacaatcct

SEQ ID NO: 2788626 - DNA, 25 bp, Homo sapien
tttgatgcagctcagaatggctgta

SEQ ID NO: 2788627 - DNA, 25 bp, Homo sapien
tcagaatggctgtattgcacacaat

SEQ ID NO: 2788628 - DNA, 25 bp, Homo sapien
ttcccttttgatgcagctcagaatg

SEQ ID NO: 2788629 - DNA, 25 bp, Homo sapien
tgaacaagtcgctgagtattggagg

SEQ ID NO: 2788630 - DNA, 25 bp, Homo sapien
tggtcgtcgctcaggaagcctgcat

SEQ ID NO: 2788631 - DNA, 25 bp, Homo sapien
caacaaagagggtgaacaagtcgct

SEQ ID NO: 2788632 - DNA, 25 bp, Homo sapien
catgtaggacttcaagaagagagtc

SEQ ID NO: 2788633 - DNA, 25 bp, Homo sapien
agagttcaggtcatggggccggtgc

SEQ ID NO: 2788634 - DNA, 25 bp, Homo sapien
ccttatgctaggagagttcaggtca

SEQ ID NO: 2788635 - DNA, 25 bp, Homo sapien
gagagttcaggtcatggggccggtg

SEQ ID NO: 2788636 - DNA, 25 bp, Homo sapien
ataccttatgctaggagagttcagg

SEQ ID NO: 2788637 - DNA, 25 bp, Homo sapien
taaatgttgtactaccgcctgaagc

SEQ ID NO: 2788638 - DNA, 25 bp, Homo sapien
aactgcaccgttggctctcctgggt

SEQ ID NO: 2788639 - DNA, 25 bp, Homo sapien
ggatgctccatcaatgccgtctgga

SEQ ID NO: 2788640 - DNA, 25 bp, Homo sapien
gggatcccgtcagtgctttaagcaa

SEQ ID NO: 2788641 - DNA, 25 bp, Homo sapien
gcttcagatgtcatgggtgctccct

SEQ ID NO: 2788642 - DNA, 25 bp, Homo sapien
ttttaatgcactcatgagcctagtg

SEQ ID NO: 2788643 - DNA, 25 bp, Homo sapien
tggccacagagatcctgagaattgt

SEQ ID NO: 2788644 - DNA, 25 bp, Homo sapien
gagcctagtgtgaagcctggccaca

SEQ ID NO: 2788645 - DNA, 25 bp, Homo sapien
gtgaccgggttttgccatactggcc

SEQ ID NO: 2788646 - DNA, 25 bp, Homo sapien
gtagtgaccgggttttgccatactg

SEQ ID NO: 2788647 - DNA, 25 bp, Homo sapien
tagtagtgaccgggttttgccatac

SEQ ID NO: 2788648 - DNA, 25 bp, Homo sapien
tagtgaccgggttttgccatactgg

SEQ ID NO: 2788649 - DNA, 25 bp, Homo sapien
gacaaatacatgcactcagatatct

SEQ ID NO: 2788650 - DNA, 25 bp, Homo sapien
acagctctctaactggtctcactaa

SEQ ID NO: 2788651 - DNA, 25 bp, Homo sapien
cagatatctgtcatctctagcaaga

SEQ ID NO: 2788652 - DNA, 25 bp, Homo sapien
tcttaattggaatactcaacagctc

SEQ ID NO: 2788653 - DNA, 25 bp, Homo sapien
taactttagactcttgaagccaagc

SEQ ID NO: 2788654 - DNA, 25 bp, Homo sapien
tacttgtacatgagaaaagggcttc

SEQ ID NO: 2788655 - DNA, 25 bp, Homo sapien
tgcctttccagtacccatacttgta

SEQ ID NO: 2788656 - DNA, 25 bp, Homo sapien
tataattatccactggaccagaagc

SEQ ID NO: 2788657 - DNA, 25 bp, Homo sapien
tacattaggttcatggccaatgaca

SEQ ID NO: 2788658 - DNA, 25 bp, Homo sapien
ccagttgtacattaggttcatggcc

SEQ ID NO: 2788659 - DNA, 25 bp, Homo sapien
taggttcatggccaatgacaaattc

SEQ ID NO: 2788660 - DNA, 25 bp, Homo sapien
tcatggccaatgacaaattcaatta

SEQ ID NO: 2788661 - DNA, 25 bp, Homo sapien
tggttctctgaccagtcccctgcta

SEQ ID NO: 2788662 - DNA, 25 bp, Homo sapien
gaaagaacacatcaacaacttgtag

SEQ ID NO: 2788663 - DNA, 25 bp, Homo sapien
ctcagtgtccatagctcaagaggaa

SEQ ID NO: 2788664 - DNA, 25 bp, Homo sapien
cttctcagtgtccatagctcaagag

SEQ ID NO: 2788665 - DNA, 25 bp, Homo sapien
caaagatgagcggaggaataagcag

SEQ ID NO: 2788666 - DNA, 25 bp, Homo sapien
ttggaatcagcggagatgcagcaaa

SEQ ID NO: 2788667 - DNA, 25 bp, Homo sapien
gcagctccatggagttgagacttaa

SEQ ID NO: 2788668 - DNA, 25 bp, Homo sapien
tctgcatgtacaaaagtatagaggc

SEQ ID NO: 2788669 - DNA, 25 bp, Homo sapien
gttcaccactgcctaagaacccaat

SEQ ID NO: 2788670 - DNA, 25 bp, Homo sapien
ccagttcaccactgcctaagaaccc

SEQ ID NO: 2788671 - DNA, 25 bp, Homo sapien
agttcaccactgcctaagaacccaa

SEQ ID NO: 2788672 - DNA, 25 bp, Homo sapien
ttcaccactgcctaagaacccaatt

SEQ ID NO: 2788673 - DNA, 25 bp, Homo sapien
ctcttgagtaaaacaagcatattct

SEQ ID NO: 2788674 - DNA, 25 bp, Homo sapien
tcagactcttgagtaaaacaagcat

SEQ ID NO: 2788675 - DNA, 25 bp, Homo sapien
actcttgagtaaaacaagcatattc

SEQ ID NO: 2788676 - DNA, 25 bp, Homo sapien
agactcttgagtaaaacaagcatat

SEQ ID NO: 2788677 - DNA, 25 bp, Homo sapien
ctgaacctgatcctaactttgctcc

SEQ ID NO: 2788678 - DNA, 25 bp, Homo sapien
gaacctgatcctaactttgctccca

SEQ ID NO: 2788679 - DNA, 25 bp, Homo sapien
tgaacctgatcctaactttgctccc

SEQ ID NO: 2788680 - DNA, 25 bp, Homo sapien
ttctggaaagttaatcttgctggag

SEQ ID NO: 2788681 - DNA, 25 bp, Homo sapien
tttctggaaagttaatcttgctgga

SEQ ID NO: 2788682 - DNA, 25 bp, Homo sapien
ttgatggcccaacgtggtccccagg

SEQ ID NO: 2788683 - DNA, 25 bp, Homo sapien
agcagcatgccaattgccaattaag

SEQ ID NO: 2788684 - DNA, 25 bp, Homo sapien
tagattggctcagagactgtcatat

SEQ ID NO: 2788685 - DNA, 25 bp, Homo sapien
tgtcatatgaaactggaggctccaa

SEQ ID NO: 2788686 - DNA, 25 bp, Homo sapien
ttgggcaggagataattcgccgttg

SEQ ID NO: 2788687 - DNA, 25 bp, Homo sapien
agagaaagcctcgctggagtgtcag

SEQ ID NO: 2788688 - DNA, 25 bp, Homo sapien
gataattcgccgttgtgcttggaaa

SEQ ID NO: 2788689 - DNA, 25 bp, Homo sapien
gccgttgtgcttggaaaatcctgca

SEQ ID NO: 2788690 - DNA, 25 bp, Homo sapien
tcttgtctgccatccctaaaaaggg

SEQ ID NO: 2788691 - DNA, 25 bp, Homo sapien
aagggaaacctcattggcagaactg

SEQ ID NO: 2788692 - DNA, 25 bp, Homo sapien
tatcccaccctgcatttggtgccag

SEQ ID NO: 2788693 - DNA, 25 bp, Homo sapien
tgggctgtccaaggccagtgtctct

SEQ ID NO: 2788694 - DNA, 25 bp, Homo sapien
tgtgttttgggttcacccccaagca

SEQ ID NO: 2788695 - DNA, 25 bp, Homo sapien
tcaaatacttccaatgtccattctt

SEQ ID NO: 2788696 - DNA, 25 bp, Homo sapien
cattcttctagcatcccaaagatca

SEQ ID NO: 2788697 - DNA, 25 bp, Homo sapien
gatcattccgcaatttctaaccaat

SEQ ID NO: 2788698 - DNA, 25 bp, Homo sapien
ctaaccaattcctcgtctacaccct

SEQ ID NO: 2788699 - DNA, 25 bp, Homo sapien
ctggaaatgtgaatggacttggcca

SEQ ID NO: 2788700 - DNA, 25 bp, Homo sapien
gaaaaattcagtcactcgtccagat

SEQ ID NO: 2788701 - DNA, 25 bp, Homo sapien
tgaagtttggcctcatggagccata

SEQ ID NO: 2788702 - DNA, 25 bp, Homo sapien
tcatggagccatatgttgagtgtaa

SEQ ID NO: 2788703 - DNA, 25 bp, Homo sapien
tatacacaaaggtggacgaaaagtg

SEQ ID NO: 2788704 - DNA, 25 bp, Homo sapien
cttcttagggatttgtgaacacagc

SEQ ID NO: 2788705 - DNA, 25 bp, Homo sapien
tcagtcgctcccttgaatttccggt

SEQ ID NO: 2788706 - DNA, 25 bp, Homo sapien
taagcatatcccatgatctccaagg

SEQ ID NO: 2788707 - DNA, 25 bp, Homo sapien
ccttcaagattgtgtggcttctggt

SEQ ID NO: 2788708 - DNA, 25 bp, Homo sapien
tgaacagtgctggtatctctaagca

SEQ ID NO: 2788709 - DNA, 25 bp, Homo sapien
tccagggtactctgcaaactctgtg

SEQ ID NO: 2788710 - DNA, 25 bp, Homo sapien
ggtactctgcaaactctgtggtgaa

SEQ ID NO: 2788711 - DNA, 25 bp, Homo sapien
ttttgtctttccagggtactctgca

SEQ ID NO: 2788712 - DNA, 25 bp, Homo sapien
tgctagtcagtcgattttgtctttc

SEQ ID NO: 2788713 - DNA, 25 bp, Homo sapien
gtgtcctcttcaccaagctacatct

SEQ ID NO: 2788714 - DNA, 25 bp, Homo sapien
tgtcctcttcaccaagctacatctt

SEQ ID NO: 2788715 - DNA, 25 bp, Homo sapien
tcctcttcaccaagctacatctttt

SEQ ID NO: 2788716 - DNA, 25 bp, Homo sapien
cctcttcaccaagctacatcttttt

SEQ ID NO: 2788717 - DNA, 25 bp, Homo sapien
gaagtttctctttggaatctttcca

SEQ ID NO: 2788718 - DNA, 25 bp, Homo sapien
catttctgactttatgtacctccat

SEQ ID NO: 2788719 - DNA, 25 bp, Homo sapien
ggaatctttccaagggcatttctga

SEQ ID NO: 2788720 - DNA, 25 bp, Homo sapien
caagggcatttctgactttatgtac

SEQ ID NO: 2788721 - DNA, 25 bp, Homo sapien
cccaacatgtaggtactgagccaac

SEQ ID NO: 2788722 - DNA, 25 bp, Homo sapien
ggtacaagcctattccctcagagga

SEQ ID NO: 2788723 - DNA, 25 bp, Homo sapien
catccctggcatgtggactctgggc

SEQ ID NO: 2788724 - DNA, 25 bp, Homo sapien
tagctatgtcacatgccaagatggc

SEQ ID NO: 2788725 - DNA, 25 bp, Homo sapien
tattgactattacgttgtgcctgct

SEQ ID NO: 2788726 - DNA, 25 bp, Homo sapien
tgcagcatattgactattacgttgt

SEQ ID NO: 2788727 - DNA, 25 bp, Homo sapien
tccatgaagtctagggcagtgcctt

SEQ ID NO: 2788728 - DNA, 25 bp, Homo sapien
tagggcagtgccttgtccaacaggg

SEQ ID NO: 2788729 - DNA, 25 bp, Homo sapien
cagcagatgggcttacacctaaaat

SEQ ID NO: 2788730 - DNA, 25 bp, Homo sapien
agcagatgggcttacacctaaaata

SEQ ID NO: 2788731 - DNA, 25 bp, Homo sapien
ccaaagattggaatatgtccttggg

SEQ ID NO: 2788732 - DNA, 25 bp, Homo sapien
ttctctgtgaagagttacccaaaga

SEQ ID NO: 2788733 - DNA, 25 bp, Homo sapien
ggacaagcctgtaacccagaaactg

SEQ ID NO: 2788734 - DNA, 25 bp, Homo sapien
tggaggtccatgaaaggacaagcct

SEQ ID NO: 2788735 - DNA, 25 bp, Homo sapien
gtcaaagatagaggaagaaccctct

SEQ ID NO: 2788736 - DNA, 25 bp, Homo sapien
tcaaagatagaggaagaaccctctt

SEQ ID NO: 2788737 - DNA, 25 bp, Homo sapien
catcatagtttgaggcaatgtgttc

SEQ ID NO: 2788738 - DNA, 25 bp, Homo sapien
gtttgaggcaatgtgttctatttca

SEQ ID NO: 2788739 - DNA, 25 bp, Homo sapien
agtttgaggcaatgtgttctatttc

SEQ ID NO: 2788740 - DNA, 25 bp, Homo sapien
tgtgcatcatagtttgaggcaatgt

SEQ ID NO: 2788741 - DNA, 25 bp, Homo sapien
gttactgtgcgaccccaggatctct

SEQ ID NO: 2788742 - DNA, 25 bp, Homo sapien
ttcccacagtttcagtccagagttc

SEQ ID NO: 2788743 - DNA, 25 bp, Homo sapien
taggtctggctctgcaagcttacta

SEQ ID NO: 2788744 - DNA, 25 bp, Homo sapien
caatacacattgacctcctgttcct

SEQ ID NO: 2788745 - DNA, 25 bp, Homo sapien
ttgctcagattatcattactaggac

SEQ ID NO: 2788746 - DNA, 25 bp, Homo sapien
cttattggagcaagagaaaatgtct

SEQ ID NO: 2788747 - DNA, 25 bp, Homo sapien
ggacaataattatgaccttcagtct

SEQ ID NO: 2788748 - DNA, 25 bp, Homo sapien
gaaaatgtctaggtttatatatgta

SEQ ID NO: 2788749 - DNA, 25 bp, Homo sapien
aaacaaggcacacacctacaactat

SEQ ID NO: 2788750 - DNA, 25 bp, Homo sapien
gaaacaaggcacacacctacaacta

SEQ ID NO: 2788751 - DNA, 25 bp, Homo sapien
gagccttcaaatctcatggaaaaaa

SEQ ID NO: 2788752 - DNA, 25 bp, Homo sapien
cattatgagccttcaaatctcatgg

SEQ ID NO: 2788753 - DNA, 25 bp, Homo sapien
actgctcacattatgagccttcaaa

SEQ ID NO: 2788754 - DNA, 25 bp, Homo sapien
gaaaactgctcacattatgagcctt

SEQ ID NO: 2788755 - DNA, 25 bp, Homo sapien
ttttatctatcaagcttttatttaa

SEQ ID NO: 2788756 - DNA, 25 bp, Homo sapien
taaatgccataatccaggatggatt

SEQ ID NO: 2788757 - DNA, 25 bp, Homo sapien
tttaaatgccataatccaggatgga

SEQ ID NO: 2788758 - DNA, 25 bp, Homo sapien
ttatttaaatgccataatccaggat

SEQ ID NO: 2788759 - DNA, 25 bp, Homo sapien
tctgctcctccagaatatctgttcc

SEQ ID NO: 2788760 - DNA, 25 bp, Homo sapien
ccatggactgcacatagtcctcaaa

SEQ ID NO: 2788761 - DNA, 25 bp, Homo sapien
tcctccagaatatctgttccaactt

SEQ ID NO: 2788762 - DNA, 25 bp, Homo sapien
atagtcctcaaaagcagtgatctgc

SEQ ID NO: 2788763 - DNA, 25 bp, Homo sapien
tgtatcccactggaactagtttaga

SEQ ID NO: 2788764 - DNA, 25 bp, Homo sapien
tacacactgtatttggtttcttaat

SEQ ID NO: 2788765 - DNA, 25 bp, Homo sapien
ccactggaactagtttagatgagcc

SEQ ID NO: 2788766 - DNA, 25 bp, Homo sapien
tatttggtttcttaattctgtatcc

SEQ ID NO: 2788767 - DNA, 25 bp, Homo sapien
atttcgccagatctgtctccttatc

SEQ ID NO: 2788768 - DNA, 25 bp, Homo sapien
taatttcgccagatctgtctcctta

SEQ ID NO: 2788769 - DNA, 25 bp, Homo sapien
aatttcgccagatctgtctccttat

SEQ ID NO: 2788770 - DNA, 25 bp, Homo sapien
cttttcataagacttgacatgatta

SEQ ID NO: 2788771 - DNA, 25 bp, Homo sapien
ttcctgtagcgtcttccacattggc

SEQ ID NO: 2788772 - DNA, 25 bp, Homo sapien
tccttttcataagacttgacatgat

SEQ ID NO: 2788773 - DNA, 25 bp, Homo sapien
ttcataagacttgacatgattatac

SEQ ID NO: 2788774 - DNA, 25 bp, Homo sapien
gggcatgacacaagccagcaggctg

SEQ ID NO: 2788775 - DNA, 25 bp, Homo sapien
cctggaggcccgcgggacttttcag

SEQ ID NO: 2788776 - DNA, 25 bp, Homo sapien
tacccctcaatgtagctcttgtcca

SEQ ID NO: 2788777 - DNA, 25 bp, Homo sapien
ggacacggcttcaaatattgccaca

SEQ ID NO: 2788778 - DNA, 25 bp, Homo sapien
gagagcgcgcaacttgtgggcaccc

SEQ ID NO: 2788779 - DNA, 25 bp, Homo sapien
gagcgcgcaacttgtgggcaccccg

SEQ ID NO: 2788780 - DNA, 25 bp, Homo sapien
gcagcagaaagagagcgcgcaactt

SEQ ID NO: 2788781 - DNA, 25 bp, Homo sapien
aaagagagcgcgcaacttgtgggca

SEQ ID NO: 2788782 - DNA, 25 bp, Homo sapien
tagagatttcagctgaaagctataa

SEQ ID NO: 2788783 - DNA, 25 bp, Homo sapien
agaggccacggagagctcccaggga

SEQ ID NO: 2788784 - DNA, 25 bp, Homo sapien
tgagaattctcacttagagatttca

SEQ ID NO: 2788785 - DNA, 25 bp, Homo sapien
gggaatgagaattctcacttagaga

SEQ ID NO: 2788786 - DNA, 25 bp, Homo sapien
ttgtctcagcaactgatccagcatc

SEQ ID NO: 2788787 - DNA, 25 bp, Homo sapien
cagcatcccatttggtgtcctgggt

SEQ ID NO: 2788788 - DNA, 25 bp, Homo sapien
aaagggcagggctcgagatgctggt

SEQ ID NO: 2788789 - DNA, 25 bp, Homo sapien
tccagctgaccctttggccattgtc

SEQ ID NO: 2788790 - DNA, 25 bp, Homo sapien
agattgaccctctggctggcgtggc

SEQ ID NO: 2788791 - DNA, 25 bp, Homo sapien
tgagagtacgttcaacctaccagcc

SEQ ID NO: 2788792 - DNA, 25 bp, Homo sapien
gacacacagaaccttggaagggcct

SEQ ID NO: 2788793 - DNA, 25 bp, Homo sapien
taagcggctgtgaaactaaaagctc

SEQ ID NO: 2788794 - DNA, 25 bp, Homo sapien
gtgtcctatacacggtgtactttta

SEQ ID NO: 2788795 - DNA, 25 bp, Homo sapien
cttaatgtagtctaggtgtttataa

SEQ ID NO: 2788796 - DNA, 25 bp, Homo sapien
gttatgaacttaatgtagtctaggt

SEQ ID NO: 2788797 - DNA, 25 bp, Homo sapien
taagtgtcctatacacggtgtactt

SEQ ID NO: 2788798 - DNA, 25 bp, Homo sapien
caactcccaacataccaaccacagt

SEQ ID NO: 2788799 - DNA, 25 bp, Homo sapien
gcaggccacttctggcgacttcctt

SEQ ID NO: 2788800 - DNA, 25 bp, Homo sapien
gtggagcaggccacttctggcgact

SEQ ID NO: 2788801 - DNA, 25 bp, Homo sapien
gccagtacagctgacgtccttgggt

SEQ ID NO: 2788802 - DNA, 25 bp, Homo sapien
aaggactctggactctgcttgtcac

SEQ ID NO: 2788803 - DNA, 25 bp, Homo sapien
ctactgacacaaggactctggactc

SEQ ID NO: 2788804 - DNA, 25 bp, Homo sapien
cacaaggactctggactctgcttgt

SEQ ID NO: 2788805 - DNA, 25 bp, Homo sapien
tgacacaaggactctggactctgct

SEQ ID NO: 2788806 - DNA, 25 bp, Homo sapien
tctgactgttgatggaagtaggaag

SEQ ID NO: 2788807 - DNA, 25 bp, Homo sapien
tcctttttctgactgttgatggaag

SEQ ID NO: 2788808 - DNA, 25 bp, Homo sapien
ttttctgactgttgatggaagtagg

SEQ ID NO: 2788809 - DNA, 25 bp, Homo sapien
ctgactgttgatggaagtaggaaga

SEQ ID NO: 2788810 - DNA, 25 bp, Homo sapien
acagcagcgccggtttgttatctaa

SEQ ID NO: 2788811 - DNA, 25 bp, Homo sapien
cagcgccggtttgttatctaagtga

SEQ ID NO: 2788812 - DNA, 25 bp, Homo sapien
ctgccaacagcagcgccggtttgtt

SEQ ID NO: 2788813 - DNA, 25 bp, Homo sapien
tctgccaacagcagcgccggtttgt

SEQ ID NO: 2788814 - DNA, 25 bp, Homo sapien
ggcccgctctgcgactagaaagcgc

SEQ ID NO: 2788815 - DNA, 25 bp, Homo sapien
agtgccgcttgcccaaatccgacat

SEQ ID NO: 2788816 - DNA, 25 bp, Homo sapien
aagcgcccattgagggcttgcagct

SEQ ID NO: 2788817 - DNA, 25 bp, Homo sapien
tgcgactagaaagcgcccattgagg

SEQ ID NO: 2788818 - DNA, 25 bp, Homo sapien
ggtttgcgggtgaacagaatcccac

SEQ ID NO: 2788819 - DNA, 25 bp, Homo sapien
actgcaaggcaaggtatatcattcc

SEQ ID NO: 2788820 - DNA, 25 bp, Homo sapien
caacgttttacagaggccaagtgct

SEQ ID NO: 2788821 - DNA, 25 bp, Homo sapien
taaacatgatgtgggtagctgcctg

SEQ ID NO: 2788822 - DNA, 25 bp, Homo sapien
tatgtcaaggttagcagtaaatgcc

SEQ ID NO: 2788823 - DNA, 25 bp, Homo sapien
gaattacaaagagacggataaggcc

SEQ ID NO: 2788824 - DNA, 25 bp, Homo sapien
taggacagtgtgacattgcccagag

SEQ ID NO: 2788825 - DNA, 25 bp, Homo sapien
tgttacctgaattccaagggcagag

SEQ ID NO: 2788826 - DNA, 25 bp, Homo sapien
taagaagttttcatgcacgtgtgca

SEQ ID NO: 2788827 - DNA, 25 bp, Homo sapien
gaagagtagacctccagaactgatt

SEQ ID NO: 2788828 - DNA, 25 bp, Homo sapien
taaccgagcctactgaaccatgtcc

SEQ ID NO: 2788829 - DNA, 25 bp, Homo sapien
caagatattagctaccagggaacaa

SEQ ID NO: 2788830 - DNA, 25 bp, Homo sapien
cagtggtgacgttggcctttggtgc

SEQ ID NO: 2788831 - DNA, 25 bp, Homo sapien
ttatttcctgcccaacgggacaggc

SEQ ID NO: 2788832 - DNA, 25 bp, Homo sapien
cctgcccaacgggacaggccagtgg

SEQ ID NO: 2788833 - DNA, 25 bp, Homo sapien
ccagatcatgggcaccatacaaaga

SEQ ID NO: 2788834 - DNA, 25 bp, Homo sapien
ctaaggagcttaggcttcactgcct

SEQ ID NO: 2788835 - DNA, 25 bp, Homo sapien
gggtctaaggagcttaggcttcact

SEQ ID NO: 2788836 - DNA, 25 bp, Homo sapien
tctggggtctaaggagcttaggctt

SEQ ID NO: 2788837 - DNA, 25 bp, Homo sapien
tctaaggagcttaggcttcactgcc

SEQ ID NO: 2788838 - DNA, 25 bp, Homo sapien
gaaacccatgcattgctctctggca

SEQ ID NO: 2788839 - DNA, 25 bp, Homo sapien
gtggaaacccatgcattgctctctg

SEQ ID NO: 2788840 - DNA, 25 bp, Homo sapien
cagtggaaacccatgcattgctctc

SEQ ID NO: 2788841 - DNA, 25 bp, Homo sapien
cccatgcattgctctctggcattgc

SEQ ID NO: 2788842 - DNA, 25 bp, Homo sapien
ctgtgtgcaggagtgactgttcttg

SEQ ID NO: 2788843 - DNA, 25 bp, Homo sapien
ggctgtgtgcaggagtgactgttct

SEQ ID NO: 2788844 - DNA, 25 bp, Homo sapien
tcttggagatgttctggttggatca

SEQ ID NO: 2788845 - DNA, 25 bp, Homo sapien
gttcttggagatgttctggttggat

SEQ ID NO: 2788846 - DNA, 25 bp, Homo sapien
ggaaagcactgcctcaagttcatca

SEQ ID NO: 2788847 - DNA, 25 bp, Homo sapien
tcactacttgctgtcttaagacctt

SEQ ID NO: 2788848 - DNA, 25 bp, Homo sapien
gcaggaatgaggtagaattcactac

SEQ ID NO: 2788849 - DNA, 25 bp, Homo sapien
ctgcctcaagttcatcagcaggaat

SEQ ID NO: 2788850 - DNA, 25 bp, Homo sapien
ctctctcttcatattgctctcaatt

SEQ ID NO: 2788851 - DNA, 25 bp, Homo sapien
tcttcatattgctctcaatttcatg

SEQ ID NO: 2788852 - DNA, 25 bp, Homo sapien
tcatattgctctcaatttcatgatc

SEQ ID NO: 2788853 - DNA, 25 bp, Homo sapien
catattgctctcaatttcatgatct

SEQ ID NO: 2788854 - DNA, 25 bp, Homo sapien
catgacttcctgtaaactcagctgc

SEQ ID NO: 2788855 - DNA, 25 bp, Homo sapien
tgtgggcgttcactaaacaattctt

SEQ ID NO: 2788856 - DNA, 25 bp, Homo sapien
taatcccatcgtgagagcacttgcc

SEQ ID NO: 2788857 - DNA, 25 bp, Homo sapien
tcacattgagggtcagggcgtcaac

SEQ ID NO: 2788858 - DNA, 25 bp, Homo sapien
tctctagtctgccagtagcatcttt

SEQ ID NO: 2788859 - DNA, 25 bp, Homo sapien
gtgtgcgtgcgcccctgtaagcgct

SEQ ID NO: 2788860 - DNA, 25 bp, Homo sapien
gtgcgtgcgcccctgtaagcgctgc

SEQ ID NO: 2788861 - DNA, 25 bp, Homo sapien
ttctgtagtttgtcttggagtacgt

SEQ ID NO: 2788862 - DNA, 25 bp, Homo sapien
tttgtcttggagtacgtgtgtgtgc

SEQ ID NO: 2788863 - DNA, 25 bp, Homo sapien
actctgggctgttacacccgccaca

SEQ ID NO: 2788864 - DNA, 25 bp, Homo sapien
tctccctgagttagtttgccacaga

SEQ ID NO: 2788865 - DNA, 25 bp, Homo sapien
tttgcaccgacggttcccaaatgca

SEQ ID NO: 2788866 - DNA, 25 bp, Homo sapien
agccagactggtttgcaccgacggt

SEQ ID NO: 2788867 - DNA, 25 bp, Homo sapien
gatatgtagcagaaaggcacgtcca

SEQ ID NO: 2788868 - DNA, 25 bp, Homo sapien
gcctgagaaggtttggtccagcctg

SEQ ID NO: 2788869 - DNA, 25 bp, Homo sapien
gatgttgctgtgcacggtggaccca

SEQ ID NO: 2788870 - DNA, 25 bp, Homo sapien
tctctgcgtgcagggacaaagaggc

SEQ ID NO: 2788871 - DNA, 25 bp, Homo sapien
cttatagcaagactgttagccctca

SEQ ID NO: 2788872 - DNA, 25 bp, Homo sapien
catgtttcccatttagggcaggagt

SEQ ID NO: 2788873 - DNA, 25 bp, Homo sapien
caaaagctggtatgttcagtaggaa

SEQ ID NO: 2788874 - DNA, 25 bp, Homo sapien
caaacttgactctactgatctgacc

SEQ ID NO: 2788875 - DNA, 25 bp, Homo sapien
tccaagttagttgaaacgcagacac

SEQ ID NO: 2788876 - DNA, 25 bp, Homo sapien
ttgtcaccatgagatagcattagct

SEQ ID NO: 2788877 - DNA, 25 bp, Homo sapien
tgtttgggaagtcctactgatgttc

SEQ ID NO: 2788878 - DNA, 25 bp, Homo sapien
taaagcacaatgtctcacatgggac

SEQ ID NO: 2788879 - DNA, 25 bp, Homo sapien
gctccagaactctgctcgaggtgca

SEQ ID NO: 2788880 - DNA, 25 bp, Homo sapien
tctagaaaggaggttctgtgatgtt

SEQ ID NO: 2788881 - DNA, 25 bp, Homo sapien
aactctgctcgaggtgcatcttgcc

SEQ ID NO: 2788882 - DNA, 25 bp, Homo sapien
tattgttctagaaaggaggttctgt

SEQ ID NO: 2788883 - DNA, 25 bp, Homo sapien
cacccacttcagcatgccggagaaa

SEQ ID NO: 2788884 - DNA, 25 bp, Homo sapien
gcacccacttcagcatgccggagaa

SEQ ID NO: 2788885 - DNA, 25 bp, Homo sapien
gctcttccaaatggcctttggaaaa

SEQ ID NO: 2788886 - DNA, 25 bp, Homo sapien
ctgctcttccaaatggcctttggaa

SEQ ID NO: 2788887 - DNA, 25 bp, Homo sapien
catcctgctcttccaaatggccttt

SEQ ID NO: 2788888 - DNA, 25 bp, Homo sapien
tcctgctcttccaaatggcctttgg

SEQ ID NO: 2788889 - DNA, 25 bp, Homo sapien
ctgtctttcagccttagccacaccc

SEQ ID NO: 2788890 - DNA, 25 bp, Homo sapien
ctccgggtgcggctgtgggcacctg

SEQ ID NO: 2788891 - DNA, 25 bp, Homo sapien
ttcagccttagccacaccctcttcc

SEQ ID NO: 2788892 - DNA, 25 bp, Homo sapien
tgctgtactgcctccgggtgcggct

SEQ ID NO: 2788893 - DNA, 25 bp, Homo sapien
ctgaagcaagccagcctgaacccat

SEQ ID NO: 2788894 - DNA, 25 bp, Homo sapien
catccatcttagagatcttgctgaa

SEQ ID NO: 2788895 - DNA, 25 bp, Homo sapien
ttctgtgccatccatcttagagatc

SEQ ID NO: 2788896 - DNA, 25 bp, Homo sapien
tatccactgactcacagttgtggtc

SEQ ID NO: 2788897 - DNA, 25 bp, Homo sapien
tcctgagttagtatttgagggatac

SEQ ID NO: 2788898 - DNA, 25 bp, Homo sapien
aattgttcgctacagctcacactag

SEQ ID NO: 2788899 - DNA, 25 bp, Homo sapien
tgttcgctacagctcacactagcag

SEQ ID NO: 2788900 - DNA, 25 bp, Homo sapien
tcgctacagctcacactagcagagt

SEQ ID NO: 2788901 - DNA, 25 bp, Homo sapien
tacagctcacactagcagagtaaca

SEQ ID NO: 2788902 - DNA, 25 bp, Homo sapien
gggaaattcgcactggccggctttg

SEQ ID NO: 2788903 - DNA, 25 bp, Homo sapien
tgcccaaacgcactccactcttctt

SEQ ID NO: 2788904 - DNA, 25 bp, Homo sapien
catagggaaattcgcactggccggc

SEQ ID NO: 2788905 - DNA, 25 bp, Homo sapien
tggacctcacctgctcccctacctg

SEQ ID NO: 2788906 - DNA, 25 bp, Homo sapien
cctagctcctcaggacggtctagat

SEQ ID NO: 2788907 - DNA, 25 bp, Homo sapien
ctcaggacggtctagattcattcca

SEQ ID NO: 2788908 - DNA, 25 bp, Homo sapien
gagtggacttaaatcctagctcctc

SEQ ID NO: 2788909 - DNA, 25 bp, Homo sapien
aagagtggacttaaatcctagctcc

SEQ ID NO: 2788910 - DNA, 25 bp, Homo sapien
tccaaagatctcagactgattggga

SEQ ID NO: 2788911 - DNA, 25 bp, Homo sapien
ccaaagatctcagactgattgggat

SEQ ID NO: 2788912 - DNA, 25 bp, Homo sapien
caaagatctcagactgattgggatc

SEQ ID NO: 2788913 - DNA, 25 bp, Homo sapien
aaaccaaaggaagaagcgtcacagt

SEQ ID NO: 2788914 - DNA, 25 bp, Homo sapien
tgggtatcagcactgagtccatgga

SEQ ID NO: 2788915 - DNA, 25 bp, Homo sapien
gcctgaatacagtgccggataatgt

SEQ ID NO: 2788916 - DNA, 25 bp, Homo sapien
tacaaggtgctatgatgggtatcag

SEQ ID NO: 2788917 - DNA, 25 bp, Homo sapien
tgaagccgagcgtttatgtgggaga

SEQ ID NO: 2788918 - DNA, 25 bp, Homo sapien
tgtgggagagcggtagagcataacg

SEQ ID NO: 2788919 - DNA, 25 bp, Homo sapien
tctgtgcgagctgggctgtgttcta

SEQ ID NO: 2788920 - DNA, 25 bp, Homo sapien
taaggagtcctcatgtctgtgcgag

SEQ ID NO: 2788921 - DNA, 25 bp, Homo sapien
tactggtagatttatggggaggaac

SEQ ID NO: 2788922 - DNA, 25 bp, Homo sapien
gaaagggcatggcttcagttctgat

SEQ ID NO: 2788923 - DNA, 25 bp, Homo sapien
tcctgggaaggtccatgaatatttg

SEQ ID NO: 2788924 - DNA, 25 bp, Homo sapien
tgattctgcacaatttactggtaga

SEQ ID NO: 2788925 - DNA, 25 bp, Homo sapien
ggcactctgggtaagatatgtgtct

SEQ ID NO: 2788926 - DNA, 25 bp, Homo sapien
cactctgggtaagatatgtgtctag

SEQ ID NO: 2788927 - DNA, 25 bp, Homo sapien
tcagccttgattcacggaagtgtcc

SEQ ID NO: 2788928 - DNA, 25 bp, Homo sapien
tgtgtctagaaatagaataagatca

SEQ ID NO: 2788929 - DNA, 25 bp, Homo sapien
aagctccctttccgtttcattgtca

SEQ ID NO: 2788930 - DNA, 25 bp, Homo sapien
caagctccctttccgtttcattgtc

SEQ ID NO: 2788931 - DNA, 25 bp, Homo sapien
tcacaagctccctttccgtttcatt

SEQ ID NO: 2788932 - DNA, 25 bp, Homo sapien
cacaagctccctttccgtttcattg

SEQ ID NO: 2788933 - DNA, 25 bp, Homo sapien
ccacatgcgtttgctgcttgaggag

SEQ ID NO: 2788934 - DNA, 25 bp, Homo sapien
gcttgaggagggacttcccatcttt

SEQ ID NO: 2788935 - DNA, 25 bp, Homo sapien
acacctactgctagggcgcctctga

SEQ ID NO: 2788936 - DNA, 25 bp, Homo sapien
ttgctctcttttcgcacacctactg

SEQ ID NO: 2788937 - DNA, 25 bp, Homo sapien
attttctttcataggatctgaaaat

SEQ ID NO: 2788938 - DNA, 25 bp, Homo sapien
ttctttcataggatctgaaaatggt

SEQ ID NO: 2788939 - DNA, 25 bp, Homo sapien
aaggttgtttctttgttagtctcat

SEQ ID NO: 2788940 - DNA, 25 bp, Homo sapien
gagatcctgagatcctagtcacctg

SEQ ID NO: 2788941 - DNA, 25 bp, Homo sapien
acaagattatccaacctgcagcaag

SEQ ID NO: 2788942 - DNA, 25 bp, Homo sapien
gaacttagagcctgttttgtccaca

SEQ ID NO: 2788943 - DNA, 25 bp, Homo sapien
tcagaccaacataaaaataagactc

SEQ ID NO: 2788944 - DNA, 25 bp, Homo sapien
tcaccacctgctggttgcatgactg

SEQ ID NO: 2788945 - DNA, 25 bp, Homo sapien
ctgggccacaaagcttgatgcttag

SEQ ID NO: 2788946 - DNA, 25 bp, Homo sapien
cttgatgcttaggaggcaggcagct

SEQ ID NO: 2788947 - DNA, 25 bp, Homo sapien
tggaggtgtgtttcaccacctgctg

SEQ ID NO: 2788948 - DNA, 25 bp, Homo sapien
gaagcaagtcgtctatgtcagggaa

SEQ ID NO: 2788949 - DNA, 25 bp, Homo sapien
caagagggcgatgaccaaatttgaa

SEQ ID NO: 2788950 - DNA, 25 bp, Homo sapien
cacacaggaaggcaagagggcgatg

SEQ ID NO: 2788951 - DNA, 25 bp, Homo sapien
aacaggccccggagcacagacagga

SEQ ID NO: 2788952 - DNA, 25 bp, Homo sapien
aacaggaagcatgatcagctggttt

SEQ ID NO: 2788953 - DNA, 25 bp, Homo sapien
gagtcctattttcatgttggtctga

SEQ ID NO: 2788954 - DNA, 25 bp, Homo sapien
cagattggataatcttgtggacaaa

SEQ ID NO: 2788955 - DNA, 25 bp, Homo sapien
cataggctctaagttcaggagtcct

SEQ ID NO: 2788956 - DNA, 25 bp, Homo sapien
tggtatatgcccagctggctaggct

SEQ ID NO: 2788957 - DNA, 25 bp, Homo sapien
tggggccacctgtgacgacatgaat

SEQ ID NO: 2788958 - DNA, 25 bp, Homo sapien
gccacctgtgacgacatgaattgcc

SEQ ID NO: 2788959 - DNA, 25 bp, Homo sapien
gggccacctgtgacgacatgaattg

SEQ ID NO: 2788960 - DNA, 25 bp, Homo sapien
gtggggccacctgtgacgacatgaa

SEQ ID NO: 2788961 - DNA, 25 bp, Homo sapien
tgtttcacatgccagaggccaggtc

SEQ ID NO: 2788962 - DNA, 25 bp, Homo sapien
gatttcttatcaaccctggcagcta

SEQ ID NO: 2788963 - DNA, 25 bp, Homo sapien
gattagagctggaatggtccctgcc

SEQ ID NO: 2788964 - DNA, 25 bp, Homo sapien
tatataggtttgagtgacctgggcc

SEQ ID NO: 2788965 - DNA, 25 bp, Homo sapien
tgtgagcctggagcacattgagcaa

SEQ ID NO: 2788966 - DNA, 25 bp, Homo sapien
aaggagcttgtgagcctggagcaca

SEQ ID NO: 2788967 - DNA, 25 bp, Homo sapien
gaagaaggagcttgtgagcctggag

SEQ ID NO: 2788968 - DNA, 25 bp, Homo sapien
agcttgtgagcctggagcacattga

SEQ ID NO: 2788969 - DNA, 25 bp, Homo sapien
ccctctgtttctatcgaaacttgcc

SEQ ID NO: 2788970 - DNA, 25 bp, Homo sapien
ttcacagaggtgaacgtcttctccc

SEQ ID NO: 2788971 - DNA, 25 bp, Homo sapien
gcttcacagaggtgaacgtcttctc

SEQ ID NO: 2788972 - DNA, 25 bp, Homo sapien
ctatcgaaacttgcccatgggaaag

SEQ ID NO: 2788973 - DNA, 25 bp, Homo sapien
gactatcagacccaaggccattgct

SEQ ID NO: 2788974 - DNA, 25 bp, Homo sapien
cttgaaggacctgggaactatagga

SEQ ID NO: 2788975 - DNA, 25 bp, Homo sapien
gacctgggaactataggactatcag

SEQ ID NO: 2788976 - DNA, 25 bp, Homo sapien
gaactataggactatcagacccaag

SEQ ID NO: 2788977 - DNA, 25 bp, Homo sapien
atcctgtaagtgtgagctatacttc

SEQ ID NO: 2788978 - DNA, 25 bp, Homo sapien
aaatcctgtaagtgtgagctatact

SEQ ID NO: 2788979 - DNA, 25 bp, Homo sapien
ccaaatcctgtaagtgtgagctata

SEQ ID NO: 2788980 - DNA, 25 bp, Homo sapien
cctgtaagtgtgagctatacttcat

SEQ ID NO: 2788981 - DNA, 25 bp, Homo sapien
tgtctgaagggtagcctcccttctt

SEQ ID NO: 2788982 - DNA, 25 bp, Homo sapien
tgaagggtagcctcccttcttgctt

SEQ ID NO: 2788983 - DNA, 25 bp, Homo sapien
ggtagcctcccttcttgctttcaca

SEQ ID NO: 2788984 - DNA, 25 bp, Homo sapien
cactctgtctgaagggtagcctccc

SEQ ID NO: 2788985 - DNA, 25 bp, Homo sapien
tacggcttaatcgtggacacaggaa

SEQ ID NO: 2788986 - DNA, 25 bp, Homo sapien
aatgtgactcataatgaataaacat

SEQ ID NO: 2788987 - DNA, 25 bp, Homo sapien
gagctttctgaaaatcctctcaaat

SEQ ID NO: 2788988 - DNA, 25 bp, Homo sapien
cctcccatattggtaacaggacatt

SEQ ID NO: 2788989 - DNA, 25 bp, Homo sapien
taggagtagtttctagcatggctgg

SEQ ID NO: 2788990 - DNA, 25 bp, Homo sapien
tataggccatgtgaacaactttggg

SEQ ID NO: 2788991 - DNA, 25 bp, Homo sapien
gagagagcttgttcagtggaacccc

SEQ ID NO: 2788992 - DNA, 25 bp, Homo sapien
ttcaggcagtgaaaccagcatttgc

SEQ ID NO: 2788993 - DNA, 25 bp, Homo sapien
ggcttctcattggagcccccacagt

SEQ ID NO: 2788994 - DNA, 25 bp, Homo sapien
ctctcttgtgtaggttgcaatcgtt

SEQ ID NO: 2788995 - DNA, 25 bp, Homo sapien
aataaaacttgtggcacaggcttct

SEQ ID NO: 2788996 - DNA, 25 bp, Homo sapien
ttgtaatgaatgtgcctctcttgtg

SEQ ID NO: 2788997 - DNA, 25 bp, Homo sapien
catgaagaactagaaccggcatcag

SEQ ID NO: 2788998 - DNA, 25 bp, Homo sapien
cagttggacgtagccatatgcaagt

SEQ ID NO: 2788999 - DNA, 25 bp, Homo sapien
tagaaccggcatcagtgaagggcag

SEQ ID NO: 2789000 - DNA, 25 bp, Homo sapien
agagacggacagttggacgtagcca

SEQ ID NO: 2789001 - DNA, 25 bp, Homo sapien
gaggaatagcctgagcaatggtttg

SEQ ID NO: 2789002 - DNA, 25 bp, Homo sapien
gaagctcctgagggaaggttttgag

SEQ ID NO: 2789003 - DNA, 25 bp, Homo sapien
aagaaggaggaatagcctgagcaat

SEQ ID NO: 2789004 - DNA, 25 bp, Homo sapien
ctgagcaatggtttgaagaactggc

SEQ ID NO: 2789005 - DNA, 25 bp, Homo sapien
agcttccggtcccataatatctttc

SEQ ID NO: 2789006 - DNA, 25 bp, Homo sapien
cttccggtcccataatatctttcct

SEQ ID NO: 2789007 - DNA, 25 bp, Homo sapien
tccggtcccataatatctttcctta

SEQ ID NO: 2789008 - DNA, 25 bp, Homo sapien
ctaagcttccggtcccataatatct

SEQ ID NO: 2789009 - DNA, 25 bp, Homo sapien
tactggaaaagctttatcaggactt

SEQ ID NO: 2789010 - DNA, 25 bp, Homo sapien
gaaaagctttatcaggactttctct

SEQ ID NO: 2789011 - DNA, 25 bp, Homo sapien
ctggaaaagctttatcaggactttc

SEQ ID NO: 2789012 - DNA, 25 bp, Homo sapien
aagctttatcaggactttctctttc

SEQ ID NO: 2789013 - DNA, 25 bp, Homo sapien
cattaatgtggacccagccctagaa

SEQ ID NO: 2789014 - DNA, 25 bp, Homo sapien
ccttgtatattgctaaacgcgtgga

SEQ ID NO: 2789015 - DNA, 25 bp, Homo sapien
tagcaatgtgccaagaatgagacca

SEQ ID NO: 2789016 - DNA, 25 bp, Homo sapien
aatatcctccaatctttcgacagtg

SEQ ID NO: 2789017 - DNA, 25 bp, Homo sapien
tccgccaatgtccaaagaagaacat

SEQ ID NO: 2789018 - DNA, 25 bp, Homo sapien
tttgcaattaagaggctgttacatg

SEQ ID NO: 2789019 - DNA, 25 bp, Homo sapien
gggcattccgccaatgtccaaagaa

SEQ ID NO: 2789020 - DNA, 25 bp, Homo sapien
gttacatggcattccccaacttggg

SEQ ID NO: 2789021 - DNA, 25 bp, Homo sapien
cgtctatgtccacttcacagtgtat

SEQ ID NO: 2789022 - DNA, 25 bp, Homo sapien
cagtttcatcgtctatgtccacttc

SEQ ID NO: 2789023 - DNA, 25 bp, Homo sapien
ttcatcgtctatgtccacttcacag

SEQ ID NO: 2789024 - DNA, 25 bp, Homo sapien
catcgtctatgtccacttcacagtg

SEQ ID NO: 2789025 - DNA, 25 bp, Homo sapien
agtagtcacatagaagcccacagga

SEQ ID NO: 2789026 - DNA, 25 bp, Homo sapien
ccagcattagactgagcttgcaagc

SEQ ID NO: 2789027 - DNA, 25 bp, Homo sapien
tagtcacatagaagcccacaggagc

SEQ ID NO: 2789028 - DNA, 25 bp, Homo sapien
ctgagcttgcaagcagaactgttct

SEQ ID NO: 2789029 - DNA, 25 bp, Homo sapien
gagcaatgtgaggtatgacgtgaat

SEQ ID NO: 2789030 - DNA, 25 bp, Homo sapien
ctgaattcaggaaactcgggagcaa

SEQ ID NO: 2789031 - DNA, 25 bp, Homo sapien
attcaggaaactcgggagcaatgtg

SEQ ID NO: 2789032 - DNA, 25 bp, Homo sapien
gacgtgaataatgacggaaaaggtg

SEQ ID NO: 2789033 - DNA, 25 bp, Homo sapien
caggacggagacctcttccgtcatt

SEQ ID NO: 2789034 - DNA, 25 bp, Homo sapien
tccagcaagataactccacaagaag

SEQ ID NO: 2789035 - DNA, 25 bp, Homo sapien
ctgagcctggcaatgatgggacctg

SEQ ID NO: 2789036 - DNA, 25 bp, Homo sapien
ggacctgggtcaagaaggagcacca

SEQ ID NO: 2789037 - DNA, 25 bp, Homo sapien
tctccattctttcactttatttttc

SEQ ID NO: 2789038 - DNA, 25 bp, Homo sapien
tatgtttttctccattctttcactt

SEQ ID NO: 2789039 - DNA, 25 bp, Homo sapien
ttttctcagtcactattacttttac

SEQ ID NO: 2789040 - DNA, 25 bp, Homo sapien
tcactttatttttctcagtcactat

SEQ ID NO: 2789041 - DNA, 25 bp, Homo sapien
aaagccttcattatgctccacatgt

SEQ ID NO: 2789042 - DNA, 25 bp, Homo sapien
tactctgccgcttacttttacctgc

SEQ ID NO: 2789043 - DNA, 25 bp, Homo sapien
tttggtttgtcaaactcttctctct

SEQ ID NO: 2789044 - DNA, 25 bp, Homo sapien
cacatgttcagagacgatataatgc

SEQ ID NO: 2789045 - DNA, 25 bp, Homo sapien
aatatagaaaaggtgattggttgtg

SEQ ID NO: 2789046 - DNA, 25 bp, Homo sapien
tcagctccattatcaccttacagga

SEQ ID NO: 2789047 - DNA, 25 bp, Homo sapien
tatgatgtcgttcagtagtaggaat

SEQ ID NO: 2789048 - DNA, 25 bp, Homo sapien
gactgaatgtcattatgcggcacat

SEQ ID NO: 2789049 - DNA, 25 bp, Homo sapien
aaaccacagagatgtgttaaagtga

SEQ ID NO: 2789050 - DNA, 25 bp, Homo sapien
caatatcaggaaggggttcttcaga

SEQ ID NO: 2789051 - DNA, 25 bp, Homo sapien
agatgtgttaaagtgacaatatcag

SEQ ID NO: 2789052 - DNA, 25 bp, Homo sapien
aaccacagagatgtgttaaagtgac

SEQ ID NO: 2789053 - DNA, 25 bp, Homo sapien
gcttcaaagccttttacaagctgca

SEQ ID NO: 2789054 - DNA, 25 bp, Homo sapien
ctgcaattcattaaacacaataatc

SEQ ID NO: 2789055 - DNA, 25 bp, Homo sapien
aaaaagaatcctcagtgttcaggct

SEQ ID NO: 2789056 - DNA, 25 bp, Homo sapien
tcattagaggccagtggaccgacct

SEQ ID NO: 2789057 - DNA, 25 bp, Homo sapien
tcatttcctaatggtaccgacagct

SEQ ID NO: 2789058 - DNA, 25 bp, Homo sapien
aaacttgtgccaggatcttcatggg

SEQ ID NO: 2789059 - DNA, 25 bp, Homo sapien
gacagctttcgggagtttcatccac

SEQ ID NO: 2789060 - DNA, 25 bp, Homo sapien
gagtttcatccacagaacaacctta

SEQ ID NO: 2789061 - DNA, 25 bp, Homo sapien
aagccctttcttggatccctggagt

SEQ ID NO: 2789062 - DNA, 25 bp, Homo sapien
gtctgggaagccccaccagaacttg

SEQ ID NO: 2789063 - DNA, 25 bp, Homo sapien
gccctttcttggatccctggagtaa

SEQ ID NO: 2789064 - DNA, 25 bp, Homo sapien
ttaagccctttcttggatccctgga

SEQ ID NO: 2789065 - DNA, 25 bp, Homo sapien
gctgggagcacagcatggtccgaac

SEQ ID NO: 2789066 - DNA, 25 bp, Homo sapien
tctcatcccgtacagctttcctgag

SEQ ID NO: 2789067 - DNA, 25 bp, Homo sapien
agctctcgtcctgcacagctctcat

SEQ ID NO: 2789068 - DNA, 25 bp, Homo sapien
gcacagcatggtccgaacaaagtat

SEQ ID NO: 2789069 - DNA, 25 bp, Homo sapien
aaggcagccggtggctggttgttgt

SEQ ID NO: 2789070 - DNA, 25 bp, Homo sapien
tggctggttgttgtcgctgtgtgtc

SEQ ID NO: 2789071 - DNA, 25 bp, Homo sapien
gccggtggctggttgttgtcgctgt

SEQ ID NO: 2789072 - DNA, 25 bp, Homo sapien
gctggttgttgtcgctgtgtgtcca

SEQ ID NO: 2789073 - DNA, 25 bp, Homo sapien
cttggagagcccattagaacaggtg

SEQ ID NO: 2789074 - DNA, 25 bp, Homo sapien
cattagaatccttaacacagtcagt

SEQ ID NO: 2789075 - DNA, 25 bp, Homo sapien
tctttagcagcctgtgtgagtggat

SEQ ID NO: 2789076 - DNA, 25 bp, Homo sapien
tctgtagtgttttagagacttgccc

SEQ ID NO: 2789077 - DNA, 25 bp, Homo sapien
gagacactgagtgaaaaagcagcca

SEQ ID NO: 2789078 - DNA, 25 bp, Homo sapien
actgagtgaaaaagcagccactgca

SEQ ID NO: 2789079 - DNA, 25 bp, Homo sapien
aggagacactgagtgaaaaagcagc

SEQ ID NO: 2789080 - DNA, 25 bp, Homo sapien
ctaggaggagacactgagtgaaaaa

SEQ ID NO: 2789081 - DNA, 25 bp, Homo sapien
tactcagggtgatagttggtataac

SEQ ID NO: 2789082 - DNA, 25 bp, Homo sapien
tataacttggttatgtggaaggaaa

SEQ ID NO: 2789083 - DNA, 25 bp, Homo sapien
tcagctgagatccaccaaattcctg

SEQ ID NO: 2789084 - DNA, 25 bp, Homo sapien
tcagattcaggacagtagtactcag

SEQ ID NO: 2789085 - DNA, 25 bp, Homo sapien
cctgggagtctcgtaacctgggaca

SEQ ID NO: 2789086 - DNA, 25 bp, Homo sapien
tctacaaagcctgtgaaagaggtgg

SEQ ID NO: 2789087 - DNA, 25 bp, Homo sapien
tacaggaacatacagggaaagccga

SEQ ID NO: 2789088 - DNA, 25 bp, Homo sapien
ggaaagccgagagaatctacaaagc

SEQ ID NO: 2789089 - DNA, 25 bp, Homo sapien
ttgaaatgtattcaggtgtacctta

SEQ ID NO: 2789090 - DNA, 25 bp, Homo sapien
aaatgtattcaggtgtaccttatac

SEQ ID NO: 2789091 - DNA, 25 bp, Homo sapien
tataaatgtttcatagatacaaaag

SEQ ID NO: 2789092 - DNA, 25 bp, Homo sapien
cttataccctgaaatttggtcaatt

SEQ ID NO: 2789093 - DNA, 25 bp, Homo sapien
cttgagctgaagtggtactcaagac

SEQ ID NO: 2789094 - DNA, 25 bp, Homo sapien
ctgtttcagaatatgagcaagggct

SEQ ID NO: 2789095 - DNA, 25 bp, Homo sapien
tatgagcaagggcttgagctgaagt

SEQ ID NO: 2789096 - DNA, 25 bp, Homo sapien
caagggcttgagctgaagtggtact

SEQ ID NO: 2789097 - DNA, 25 bp, Homo sapien
tgttttaaagcgcaatccaccctgt

SEQ ID NO: 2789098 - DNA, 25 bp, Homo sapien
tggactgttttaaagcgcaatccac

SEQ ID NO: 2789099 - DNA, 25 bp, Homo sapien
cttaaatggccaagtgatcaattcc

SEQ ID NO: 2789100 - DNA, 25 bp, Homo sapien
tcctttcttagtgtagacatggcag

SEQ ID NO: 2789101 - DNA, 25 bp, Homo sapien
ggtatttgtgtagtctataaactgg

SEQ ID NO: 2789102 - DNA, 25 bp, Homo sapien
caatggaagctccatggaaatgagt

SEQ ID NO: 2789103 - DNA, 25 bp, Homo sapien
cactgtctccctaatgtgactactt

SEQ ID NO: 2789104 - DNA, 25 bp, Homo sapien
aaaaaacagaggcttctttcaatgg

SEQ ID NO: 2789105 - DNA, 25 bp, Homo sapien
tctagaagcacttatggagtgtctg

SEQ ID NO: 2789106 - DNA, 25 bp, Homo sapien
caagaagcttcctgtcaaatgggac

SEQ ID NO: 2789107 - DNA, 25 bp, Homo sapien
tactactggtggtacaagtttcaac

SEQ ID NO: 2789108 - DNA, 25 bp, Homo sapien
cttgtaaacatggttcacatcacca

SEQ ID NO: 2789109 - DNA, 25 bp, Homo sapien
gacgtaaaatctggcctaaagctcc

SEQ ID NO: 2789110 - DNA, 25 bp, Homo sapien
gagtgggaactctgtctatccctga

SEQ ID NO: 2789111 - DNA, 25 bp, Homo sapien
tgagtaatcactgccaagcaatagt

SEQ ID NO: 2789112 - DNA, 25 bp, Homo sapien
gaaaagataagccacccagacgtaa

SEQ ID NO: 2789113 - DNA, 25 bp, Homo sapien
tatagccatggtccttaaagtgaag

SEQ ID NO: 2789114 - DNA, 25 bp, Homo sapien
gagtaatatagccatggtccttaaa

SEQ ID NO: 2789115 - DNA, 25 bp, Homo sapien
taatatagccatggtccttaaagtg

SEQ ID NO: 2789116 - DNA, 25 bp, Homo sapien
tgttaagagtaatatagccatggtc

SEQ ID NO: 2789117 - DNA, 25 bp, Homo sapien
catcaagttctccattatgccatag

SEQ ID NO: 2789118 - DNA, 25 bp, Homo sapien
catttagcatctttcagcctattca

SEQ ID NO: 2789119 - DNA, 25 bp, Homo sapien
gttctccattatgccatagggtcat

SEQ ID NO: 2789120 - DNA, 25 bp, Homo sapien
tctctggaccataattgccagcaat

SEQ ID NO: 2789121 - DNA, 25 bp, Homo sapien
tcacagttctgcaattaataaagaa

SEQ ID NO: 2789122 - DNA, 25 bp, Homo sapien
acagttctgcaattaataaagaagt

SEQ ID NO: 2789123 - DNA, 25 bp, Homo sapien
ttctgcaattaataaagaagtaagt

SEQ ID NO: 2789124 - DNA, 25 bp, Homo sapien
agttctgcaattaataaagaagtaa

SEQ ID NO: 2789125 - DNA, 25 bp, Homo sapien
atggctctgatccccagcactccca

SEQ ID NO: 2789126 - DNA, 25 bp, Homo sapien
tgcctgcacgctgtttctgtaccag

SEQ ID NO: 2789127 - DNA, 25 bp, Homo sapien
gaaacctagaacaggtgttaatgaa

SEQ ID NO: 2789128 - DNA, 25 bp, Homo sapien
gctgtgttgcctgcacgctgtttct

SEQ ID NO: 2789129 - DNA, 25 bp, Homo sapien
ttgtgagaacagtagaaacctgatc

SEQ ID NO: 2789130 - DNA, 25 bp, Homo sapien
ccccagttcccctttagcattcctg

SEQ ID NO: 2789131 - DNA, 25 bp, Homo sapien
cctttagcattcctgctttccaggt

SEQ ID NO: 2789132 - DNA, 25 bp, Homo sapien
atcaccccagttcccctttagcatt

SEQ ID NO: 2789133 - DNA, 25 bp, Homo sapien
gttcccctttagcattcctgctttc

SEQ ID NO: 2789134 - DNA, 25 bp, Homo sapien
gaacggcacagtcatgggcttcatg

SEQ ID NO: 2789135 - DNA, 25 bp, Homo sapien
atggaacggcacagtcatgggcttc

SEQ ID NO: 2789136 - DNA, 25 bp, Homo sapien
tgggagctcagctacggcaggtggc

SEQ ID NO: 2789137 - DNA, 25 bp, Homo sapien
gcttcatggtgctttgttgcttggg

SEQ ID NO: 2789138 - DNA, 25 bp, Homo sapien
aagaactgctgggaaccacagattg

SEQ ID NO: 2789139 - DNA, 25 bp, Homo sapien
ttgtgggccgactgcagtgttccaa

SEQ ID NO: 2789140 - DNA, 25 bp, Homo sapien
tgctgggaaccacagattgaaatct

SEQ ID NO: 2789141 - DNA, 25 bp, Homo sapien
tcagcagtagcgatttttgtgggcc

SEQ ID NO: 2789142 - DNA, 25 bp, Homo sapien
tttgtactcgtgtaactcagatgcc

SEQ ID NO: 2789143 - DNA, 25 bp, Homo sapien
gctttatggacaagctctctgccaa

SEQ ID NO: 2789144 - DNA, 25 bp, Homo sapien
aaaaagcacctgcagtcacgtctgt

SEQ ID NO: 2789145 - DNA, 25 bp, Homo sapien
gacacctttgagtttgttatgcaag

SEQ ID NO: 2789146 - DNA, 25 bp, Homo sapien
aaagctggctgcagcaatagcgctc

SEQ ID NO: 2789147 - DNA, 25 bp, Homo sapien
caaaattccattctaaagtgccata

SEQ ID NO: 2789148 - DNA, 25 bp, Homo sapien
catgtcgtataatctgtcttcccag

SEQ ID NO: 2789149 - DNA, 25 bp, Homo sapien
tatgtcctttttcacggagaagaga

SEQ ID NO: 2789150 - DNA, 25 bp, Homo sapien
caggttgaaactactagtacatccc

SEQ ID NO: 2789151 - DNA, 25 bp, Homo sapien
gaaactactagtacatccctctcac

SEQ ID NO: 2789152 - DNA, 25 bp, Homo sapien
ggttgaaactactagtacatccctc

SEQ ID NO: 2789153 - DNA, 25 bp, Homo sapien
gagacaggttgaaactactagtaca

SEQ ID NO: 2789154 - DNA, 25 bp, Homo sapien
tagcaagcaagtgtggaagagtttc

SEQ ID NO: 2789155 - DNA, 25 bp, Homo sapien
gaagagtttccattacccattgcac

SEQ ID NO: 2789156 - DNA, 25 bp, Homo sapien
caatgaagagccttgactttgtgat

SEQ ID NO: 2789157 - DNA, 25 bp, Homo sapien
tgcacacactgacagtttttctgat

SEQ ID NO: 2789158 - DNA, 25 bp, Homo sapien
ggggacagtatccctctccaaggag

SEQ ID NO: 2789159 - DNA, 25 bp, Homo sapien
cccactgtagatcctgaccctaagt

SEQ ID NO: 2789160 - DNA, 25 bp, Homo sapien
tctcaggaacccctggggcacctcc

SEQ ID NO: 2789161 - DNA, 25 bp, Homo sapien
tgtagatcctgaccctaagtcccct

SEQ ID NO: 2789162 - DNA, 25 bp, Homo sapien
taaacactaactgacctatcttggg

SEQ ID NO: 2789163 - DNA, 25 bp, Homo sapien
gaaccaatcaccgtgaccagaggta

SEQ ID NO: 2789164 - DNA, 25 bp, Homo sapien
gaatctgtagccataaagtgtgagg

SEQ ID NO: 2789165 - DNA, 25 bp, Homo sapien
tggctgcaggcacccttgaaattac

SEQ ID NO: 2789166 - DNA, 25 bp, Homo sapien
taaattctatgccagaggcagtctc

SEQ ID NO: 2789167 - DNA, 25 bp, Homo sapien
tatgccagaggcagtctctaaagaa

SEQ ID NO: 2789168 - DNA, 25 bp, Homo sapien
gccagaggcagtctctaaagaattt

SEQ ID NO: 2789169 - DNA, 25 bp, Homo sapien
cagtctctaaagaatttggttcctg

SEQ ID NO: 2789170 - DNA, 25 bp, Homo sapien
gaagaaaggtagtggtcaaggcttc

SEQ ID NO: 2789171 - DNA, 25 bp, Homo sapien
cagctgacaatgttaagagatggaa

SEQ ID NO: 2789172 - DNA, 25 bp, Homo sapien
acagctgacaatgttaagagatgga

SEQ ID NO: 2789173 - DNA, 25 bp, Homo sapien
ggtagtggtcaaggcttctctgctg

SEQ ID NO: 2789174 - DNA, 25 bp, Homo sapien
gatgtgacctcccatatcaacagta

SEQ ID NO: 2789175 - DNA, 25 bp, Homo sapien
tcccatatcaacagtaacaacaccg

SEQ ID NO: 2789176 - DNA, 25 bp, Homo sapien
caacagtaacaacaccgcttttgtc

SEQ ID NO: 2789177 - DNA, 25 bp, Homo sapien
ccaaagcctgatgtgacctcccata

SEQ ID NO: 2789178 - DNA, 25 bp, Homo sapien
ggacttaaacgtttctgcctgacag

SEQ ID NO: 2789179 - DNA, 25 bp, Homo sapien
gacttactgcctcctaaagtgggtc

SEQ ID NO: 2789180 - DNA, 25 bp, Homo sapien
tctgaaggttgccaacatcaaaaag

SEQ ID NO: 2789181 - DNA, 25 bp, Homo sapien
cacctcatacaggagtggtccggct

SEQ ID NO: 2789182 - DNA, 25 bp, Homo sapien
ccaggtcaatccaagccagaggcta

SEQ ID NO: 2789183 - DNA, 25 bp, Homo sapien
aatgattctgagtgtcacggagctg

SEQ ID NO: 2789184 - DNA, 25 bp, Homo sapien
cacggagctgtgtctgagggcttca

SEQ ID NO: 2789185 - DNA, 25 bp, Homo sapien
gcatcagtacataaaagcaggcgct

SEQ ID NO: 2789186 - DNA, 25 bp, Homo sapien
agaagctgtcagactctggattgac

SEQ ID NO: 2789187 - DNA, 25 bp, Homo sapien
caagaagctgtcagactctggattg

SEQ ID NO: 2789188 - DNA, 25 bp, Homo sapien
aagctgtcagactctggattgacag

SEQ ID NO: 2789189 - DNA, 25 bp, Homo sapien
gctgtcagactctggattgacagca

SEQ ID NO: 2789190 - DNA, 25 bp, Homo sapien
tccctcttgactgcccagaaatctg

SEQ ID NO: 2789191 - DNA, 25 bp, Homo sapien
ctgggatccctcttgactgcccaga

SEQ ID NO: 2789192 - DNA, 25 bp, Homo sapien
ctgaagcaggtgaaactcctgggat

SEQ ID NO: 2789193 - DNA, 25 bp, Homo sapien
tattgcagggcaggcaaaacactcc

SEQ ID NO: 2789194 - DNA, 25 bp, Homo sapien
cattctccagtttcgctgtgctgct

SEQ ID NO: 2789195 - DNA, 25 bp, Homo sapien
tctgcgcaggcagtccatatgaaac

SEQ ID NO: 2789196 - DNA, 25 bp, Homo sapien
cacatgaggcacactctttcgcact

SEQ ID NO: 2789197 - DNA, 25 bp, Homo sapien
agatcaccttgggtcccctgtacca

SEQ ID NO: 2789198 - DNA, 25 bp, Homo sapien
tcttcagaggattagcctggagcca

SEQ ID NO: 2789199 - DNA, 25 bp, Homo sapien
tacagcagcaatcacgtcaatatta

SEQ ID NO: 2789200 - DNA, 25 bp, Homo sapien
acgtcaatattataactactaccat

SEQ ID NO: 2789201 - DNA, 25 bp, Homo sapien
tactaccattactgcagggcccctg

SEQ ID NO: 2789202 - DNA, 25 bp, Homo sapien
taactactaccattactgcagggcc

SEQ ID NO: 2789203 - DNA, 25 bp, Homo sapien
gcccacaccccatgattccccagag

SEQ ID NO: 2789204 - DNA, 25 bp, Homo sapien
ggatgtagcccacaccccatgattc

SEQ ID NO: 2789205 - DNA, 25 bp, Homo sapien
catcttcagtgtcaaagggagccat

SEQ ID NO: 2789206 - DNA, 25 bp, Homo sapien
aaagggagccattcacagccatcac

SEQ ID NO: 2789207 - DNA, 25 bp, Homo sapien
gggcccacgaaaagcacattcattg

SEQ ID NO: 2789208 - DNA, 25 bp, Homo sapien
actgaagggcccacgaaaagcacat

SEQ ID NO: 2789209 - DNA, 25 bp, Homo sapien
tggcccacaacattttgaatcctga

SEQ ID NO: 2789210 - DNA, 25 bp, Homo sapien
gaggttgcacaccaaccctatttgc

SEQ ID NO: 2789211 - DNA, 25 bp, Homo sapien
ccaagccatgtttagggtcctgaaa

SEQ ID NO: 2789212 - DNA, 25 bp, Homo sapien
ttcactctgcccatatgggtgggtg

SEQ ID NO: 2789213 - DNA, 25 bp, Homo sapien
ttagcaaaccgtcaagagacccctc

SEQ ID NO: 2789214 - DNA, 25 bp, Homo sapien
ggtgactggtaagatgctgttgtcc

SEQ ID NO: 2789215 - DNA, 25 bp, Homo sapien
gctcggtcgattgaactgggccact

SEQ ID NO: 2789216 - DNA, 25 bp, Homo sapien
tacagccttcgggtcttctcctgtt

SEQ ID NO: 2789217 - DNA, 25 bp, Homo sapien
gggccacttggacccacatctacag

SEQ ID NO: 2789218 - DNA, 25 bp, Homo sapien
agggcaggtgctcggtcgattgaac

SEQ ID NO: 2789219 - DNA, 25 bp, Homo sapien
ataacaaagataagcagttgggttc

SEQ ID NO: 2789220 - DNA, 25 bp, Homo sapien
aagcagttgggttcaagcagcattt

SEQ ID NO: 2789221 - DNA, 25 bp, Homo sapien
agataagcagttgggttcaagcagc

SEQ ID NO: 2789222 - DNA, 25 bp, Homo sapien
caaagataagcagttgggttcaagc

SEQ ID NO: 2789223 - DNA, 25 bp, Homo sapien
gctcctgtgggtgttcaaaatatcc

SEQ ID NO: 2789224 - DNA, 25 bp, Homo sapien
tatcctgctcgccaaaaatgcctca

SEQ ID NO: 2789225 - DNA, 25 bp, Homo sapien
cctgaggctgcaacaatatggtctt

SEQ ID NO: 2789226 - DNA, 25 bp, Homo sapien
cttgccgactggtagcagcctgact

SEQ ID NO: 2789227 - DNA, 25 bp, Homo sapien
tgttatgccctacttgataaggacg

SEQ ID NO: 2789228 - DNA, 25 bp, Homo sapien
acttcagtgtgtcgccggaggtgca

SEQ ID NO: 2789229 - DNA, 25 bp, Homo sapien
taaggacgtgaagcattctttcccc

SEQ ID NO: 2789230 - DNA, 25 bp, Homo sapien
gaagtaggaacacatctcttgatgc

SEQ ID NO: 2789231 - DNA, 25 bp, Homo sapien
ggaagacgattaactcctttctcca

SEQ ID NO: 2789232 - DNA, 25 bp, Homo sapien
tgggctttgagctagaagcttggac

SEQ ID NO: 2789233 - DNA, 25 bp, Homo sapien
ttgggctttgagctagaagcttgga

SEQ ID NO: 2789234 - DNA, 25 bp, Homo sapien
cttgggctttgagctagaagcttgg

SEQ ID NO: 2789235 - DNA, 25 bp, Homo sapien
ttgttatagtgagcatctccacaac

SEQ ID NO: 2789236 - DNA, 25 bp, Homo sapien
ttatagtgagcatctccacaacaag

SEQ ID NO: 2789237 - DNA, 25 bp, Homo sapien
cagcaagcccatctgaagggactgt

SEQ ID NO: 2789238 - DNA, 25 bp, Homo sapien
ccacaacaagcactgtgggtagcat

SEQ ID NO: 2789239 - DNA, 25 bp, Homo sapien
ccttggcaatcggtaagaccacaga

SEQ ID NO: 2789240 - DNA, 25 bp, Homo sapien
ggcaatcggtaagaccacagaatct

SEQ ID NO: 2789241 - DNA, 25 bp, Homo sapien
atcggtaagaccacagaatcttgac

SEQ ID NO: 2789242 - DNA, 25 bp, Homo sapien
cattccttggcaatcggtaagacca

SEQ ID NO: 2789243 - DNA, 25 bp, Homo sapien
tctgcaaattcccaagaggtttcat

SEQ ID NO: 2789244 - DNA, 25 bp, Homo sapien
tttctgcaaattcccaagaggtttc

SEQ ID NO: 2789245 - DNA, 25 bp, Homo sapien
tgctttctgcaaattcccaagaggt

SEQ ID NO: 2789246 - DNA, 25 bp, Homo sapien
ctgctttctgcaaattcccaagagg

SEQ ID NO: 2789247 - DNA, 25 bp, Homo sapien
tgtagacccacaatattcttttgcc

SEQ ID NO: 2789248 - DNA, 25 bp, Homo sapien
tgctcatgtagacccacaatattct

SEQ ID NO: 2789249 - DNA, 25 bp, Homo sapien
catgctcatgtagacccacaatatt

SEQ ID NO: 2789250 - DNA, 25 bp, Homo sapien
tgcatgctcatgtagacccacaata

SEQ ID NO: 2789251 - DNA, 25 bp, Homo sapien
tctagactgcccaacaatctctgga

SEQ ID NO: 2789252 - DNA, 25 bp, Homo sapien
ctctgtacaacatgtgctggtccac

SEQ ID NO: 2789253 - DNA, 25 bp, Homo sapien
gatagtagctttctgcctctctaga

SEQ ID NO: 2789254 - DNA, 25 bp, Homo sapien
ggcctctctgcctataaagatgtga

SEQ ID NO: 2789255 - DNA, 25 bp, Homo sapien
aatgtttaccaaatattgtgatgcc

SEQ ID NO: 2789256 - DNA, 25 bp, Homo sapien
tacacaggcaaataggaagcagctc

SEQ ID NO: 2789257 - DNA, 25 bp, Homo sapien
cagaaactactgaataagaggaaaa

SEQ ID NO: 2789258 - DNA, 25 bp, Homo sapien
gacatctgcatgagagaatgttaca

SEQ ID NO: 2789259 - DNA, 25 bp, Homo sapien
ttgctgttcacacagttgcgtgatc

SEQ ID NO: 2789260 - DNA, 25 bp, Homo sapien
ttgcgtgatctagatagggcaggca

SEQ ID NO: 2789261 - DNA, 25 bp, Homo sapien
gggtccactgcaggcccgacacatg

SEQ ID NO: 2789262 - DNA, 25 bp, Homo sapien
taacttagggatccccttgctttgc

SEQ ID NO: 2789263 - DNA, 25 bp, Homo sapien
aggttacaataagctatcattgtgt

SEQ ID NO: 2789264 - DNA, 25 bp, Homo sapien
ggttacaataagctatcattgtgtc

SEQ ID NO: 2789265 - DNA, 25 bp, Homo sapien
tgttgatgggtagggccctttgcct

SEQ ID NO: 2789266 - DNA, 25 bp, Homo sapien
caatcacaggtcttttaagcatcga

SEQ ID NO: 2789267 - DNA, 25 bp, Homo sapien
tctaggttcattagccccacactgc

SEQ ID NO: 2789268 - DNA, 25 bp, Homo sapien
taatcacctggtaacacttcagcct

SEQ ID NO: 2789269 - DNA, 25 bp, Homo sapien
tctagcaagcgggcacagctacttg

SEQ ID NO: 2789270 - DNA, 25 bp, Homo sapien
tagcaagcgggcacagctacttgta

SEQ ID NO: 2789271 - DNA, 25 bp, Homo sapien
tgttttcagcgcatgctcagcgtgg

SEQ ID NO: 2789272 - DNA, 25 bp, Homo sapien
tggaagtcatacctgggaactagac

SEQ ID NO: 2789273 - DNA, 25 bp, Homo sapien
gagtaaaatgcccacgcctcagttc

SEQ ID NO: 2789274 - DNA, 25 bp, Homo sapien
gtttggaacccactgatcacacttg

SEQ ID NO: 2789275 - DNA, 25 bp, Homo sapien
taggtaccagcacagtcacagtggg

SEQ ID NO: 2789276 - DNA, 25 bp, Homo sapien
caggccaggcatcattcaccataag

SEQ ID NO: 2789277 - DNA, 25 bp, Homo sapien
tgggatctccaattccaggacttgg

SEQ ID NO: 2789278 - DNA, 25 bp, Homo sapien
ccctgccctaaaggttgagtcccag

SEQ ID NO: 2789279 - DNA, 25 bp, Homo sapien
ggtgcaaaccgtatacagtatgctt

SEQ ID NO: 2789280 - DNA, 25 bp, Homo sapien
tatgtatagaatttgtctggaaggg

SEQ ID NO: 2789281 - DNA, 25 bp, Homo sapien
taaaatactatgtagctcttgggaa

SEQ ID NO: 2789282 - DNA, 25 bp, Homo sapien
tatgcttctgtttgtgagggaaaaa

SEQ ID NO: 2789283 - DNA, 25 bp, Homo sapien
gggtagtatgctatgccgcaataca

SEQ ID NO: 2789284 - DNA, 25 bp, Homo sapien
agaagaatcacccaaccaagcactg

SEQ ID NO: 2789285 - DNA, 25 bp, Homo sapien
tacataaccaagacaccacactatc

SEQ ID NO: 2789286 - DNA, 25 bp, Homo sapien
cctgaccaaggaacttgtgagataa

SEQ ID NO: 2789287 - DNA, 25 bp, Homo sapien
tggaagattcaaaaaacacgtgatg

SEQ ID NO: 2789288 - DNA, 25 bp, Homo sapien
aaggtccaggttgcaccaaggcaag

SEQ ID NO: 2789289 - DNA, 25 bp, Homo sapien
gggttgacacaataatggaagattc

SEQ ID NO: 2789290 - DNA, 25 bp, Homo sapien
agcatgtccagggttgacacaataa

SEQ ID NO: 2789291 - DNA, 25 bp, Homo sapien
gatcccattttctatacccacatca

SEQ ID NO: 2789292 - DNA, 25 bp, Homo sapien
acattttgtcgatcccattttctat

SEQ ID NO: 2789293 - DNA, 25 bp, Homo sapien
gtcgatcccattttctatacccaca

SEQ ID NO: 2789294 - DNA, 25 bp, Homo sapien
tttgtcgatcccattttctataccc

SEQ ID NO: 2789295 - DNA, 25 bp, Homo sapien
actgcttcaacccaaccctgtgcac

SEQ ID NO: 2789296 - DNA, 25 bp, Homo sapien
gagtgacccaacacatctcctgagc

SEQ ID NO: 2789297 - DNA, 25 bp, Homo sapien
caagacatgtgatcttgagtcctcc

SEQ ID NO: 2789298 - DNA, 25 bp, Homo sapien
ccccactgggtggagtgacccaaca

SEQ ID NO: 2789299 - DNA, 25 bp, Homo sapien
tccctgtgaggatgacaatcgagca

SEQ ID NO: 2789300 - DNA, 25 bp, Homo sapien
ggatgacaatcgagcagcccattgc

SEQ ID NO: 2789301 - DNA, 25 bp, Homo sapien
cctttgccgatagagctgtcttctg

SEQ ID NO: 2789302 - DNA, 25 bp, Homo sapien
ggctggctttcgcactgcctttgcc

SEQ ID NO: 2789303 - DNA, 25 bp, Homo sapien
ggcactctaagaggagtatttccta

SEQ ID NO: 2789304 - DNA, 25 bp, Homo sapien
agctgccaaaccagcaggcccaaga

SEQ ID NO: 2789305 - DNA, 25 bp, Homo sapien
tgagatcagaaggagatctaagtgc

SEQ ID NO: 2789306 - DNA, 25 bp, Homo sapien
tctaagtgctggatataaagctgcc

SEQ ID NO: 2789307 - DNA, 25 bp, Homo sapien
tcaaggttctggaaaaatggtcagc

SEQ ID NO: 2789308 - DNA, 25 bp, Homo sapien
cagctcccaaatgtaatgtgccaca

SEQ ID NO: 2789309 - DNA, 25 bp, Homo sapien
gagtgctttgcagaacactggtacc

SEQ ID NO: 2789310 - DNA, 25 bp, Homo sapien
tatgctgagagtggcgtataggaca

SEQ ID NO: 2789311 - DNA, 25 bp, Homo sapien
ggaaatccagaccaggccataacta

SEQ ID NO: 2789312 - DNA, 25 bp, Homo sapien
ggccataactagtcacacaagttaa

SEQ ID NO: 2789313 - DNA, 25 bp, Homo sapien
gaaatccagaccaggccataactag

SEQ ID NO: 2789314 - DNA, 25 bp, Homo sapien
cacacaagttaaatgctcgtgttca

SEQ ID NO: 2789315 - DNA, 25 bp, Homo sapien
tagctcctgcaaataaaccctatgt

SEQ ID NO: 2789316 - DNA, 25 bp, Homo sapien
tctgtgttcagggacttttgatccc

SEQ ID NO: 2789317 - DNA, 25 bp, Homo sapien
agttttctgtcgcttgtaatgcatc

SEQ ID NO: 2789318 - DNA, 25 bp, Homo sapien
taccaagcttcagtaggatgtaagt

SEQ ID NO: 2789319 - DNA, 25 bp, Homo sapien
tttattcaaacagcagatgattttc

SEQ ID NO: 2789320 - DNA, 25 bp, Homo sapien
ccttttcacgactaatttggctttg

SEQ ID NO: 2789321 - DNA, 25 bp, Homo sapien
gacttgctgctcaaaaaaggcactg

SEQ ID NO: 2789322 - DNA, 25 bp, Homo sapien
tattcctcatagctattatcagtgc

SEQ ID NO: 2789323 - DNA, 25 bp, Homo sapien
gcttcagatttacaaggtccctggg

SEQ ID NO: 2789324 - DNA, 25 bp, Homo sapien
gttccagcacaagtttacatcagta

SEQ ID NO: 2789325 - DNA, 25 bp, Homo sapien
gaatacgattgtctccggctgtcct

SEQ ID NO: 2789326 - DNA, 25 bp, Homo sapien
tacatcagtatcgatcaggaatacg

SEQ ID NO: 2789327 - DNA, 25 bp, Homo sapien
caaaaaaaatatgaaaaccagtcag

SEQ ID NO: 2789328 - DNA, 25 bp, Homo sapien
tatgttccttgttctcattcttgac

SEQ ID NO: 2789329 - DNA, 25 bp, Homo sapien
aatatgttccttgttctcattcttg

SEQ ID NO: 2789330 - DNA, 25 bp, Homo sapien
gttccttgttctcattcttgactcc

SEQ ID NO: 2789331 - DNA, 25 bp, Homo sapien
aaattaatatgttccttgttctcat

SEQ ID NO: 2789332 - DNA, 25 bp, Homo sapien
caatactagtttctcctctccaaag

SEQ ID NO: 2789333 - DNA, 25 bp, Homo sapien
catgaagtttcgcacgtggtcactc

SEQ ID NO: 2789334 - DNA, 25 bp, Homo sapien
ggtcactcctagaaaattgccctgg

SEQ ID NO: 2789335 - DNA, 25 bp, Homo sapien
taggttcccttaggagtaggagaga

SEQ ID NO: 2789336 - DNA, 25 bp, Homo sapien
tacttctgacggcccataggtggca

SEQ ID NO: 2789337 - DNA, 25 bp, Homo sapien
tccgctgtacttctgacggcccata

SEQ ID NO: 2789338 - DNA, 25 bp, Homo sapien
cgctgtacttctgacggcccatagg

SEQ ID NO: 2789339 - DNA, 25 bp, Homo sapien
ctgtacttctgacggcccataggtg

SEQ ID NO: 2789340 - DNA, 25 bp, Homo sapien
cagcggcgagacatgaggagacccc

SEQ ID NO: 2789341 - DNA, 25 bp, Homo sapien
cggcagcggcgagacatgaggagac

SEQ ID NO: 2789342 - DNA, 25 bp, Homo sapien
tgcacccgctgttccgcggcagcgg

SEQ ID NO: 2789343 - DNA, 25 bp, Homo sapien
aggagaccccgcgacaggggcagcg

SEQ ID NO: 2789344 - DNA, 25 bp, Homo sapien
tgcccgccagttcacgtgagaggtt

SEQ ID NO: 2789345 - DNA, 25 bp, Homo sapien
ggctcttcgggtgcctgctgcagaa

SEQ ID NO: 2789346 - DNA, 25 bp, Homo sapien
gccgggtcgctcaggatgcactttc

SEQ ID NO: 2789347 - DNA, 25 bp, Homo sapien
tctgggttacaaggcagacagtcag

SEQ ID NO: 2789348 - DNA, 25 bp, Homo sapien
agagacggggcttcattcaccacat

SEQ ID NO: 2789349 - DNA, 25 bp, Homo sapien
attggccagcctggtcttgaactcc

SEQ ID NO: 2789350 - DNA, 25 bp, Homo sapien
gagacggggcttcattcaccacatt

SEQ ID NO: 2789351 - DNA, 25 bp, Homo sapien
ggctgaacaccgtatccttttggaa

SEQ ID NO: 2789352 - DNA, 25 bp, Homo sapien
ttttgacaatgatgatctcatggct

SEQ ID NO: 2789353 - DNA, 25 bp, Homo sapien
gtttcaagtcttgaggaaaactaga

SEQ ID NO: 2789354 - DNA, 25 bp, Homo sapien
gaatagatcagagttgtttcaagtc

SEQ ID NO: 2789355 - DNA, 25 bp, Homo sapien
tattattgctagtactggctttgtg

SEQ ID NO: 2789356 - DNA, 25 bp, Homo sapien
tattgctagtactggctttgtgttg

SEQ ID NO: 2789357 - DNA, 25 bp, Homo sapien
agggtggagtattattgctagtact

SEQ ID NO: 2789358 - DNA, 25 bp, Homo sapien
tggagtattattgctagtactggct

SEQ ID NO: 2789359 - DNA, 25 bp, Homo sapien
tactaagttgtgtccatgttattca

SEQ ID NO: 2789360 - DNA, 25 bp, Homo sapien
gaatagggaagtgtataacatcaca

SEQ ID NO: 2789361 - DNA, 25 bp, Homo sapien
tatttgggagaaacttcaaccactg

SEQ ID NO: 2789362 - DNA, 25 bp, Homo sapien
ccactgatatgagataagcaatgag

SEQ ID NO: 2789363 - DNA, 25 bp, Homo sapien
gagctcctttcctaaatgtgtttgc

SEQ ID NO: 2789364 - DNA, 25 bp, Homo sapien
tggtatgttactcaagaactctgcc

SEQ ID NO: 2789365 - DNA, 25 bp, Homo sapien
aacttgatgtaatcctacttgtaca

SEQ ID NO: 2789366 - DNA, 25 bp, Homo sapien
gcccagtccaatgatcctagagagt

SEQ ID NO: 2789367 - DNA, 25 bp, Homo sapien
ggtggcacgtttcacatgttcacat

SEQ ID NO: 2789368 - DNA, 25 bp, Homo sapien
tggcacgtttcacatgttcacatga

SEQ ID NO: 2789369 - DNA, 25 bp, Homo sapien
gggtggcacgtttcacatgttcaca

SEQ ID NO: 2789370 - DNA, 25 bp, Homo sapien
gagggtggcacgtttcacatgttca

SEQ ID NO: 2789371 - DNA, 25 bp, Homo sapien
cacatcgaagcatgctaagatcagc

SEQ ID NO: 2789372 - DNA, 25 bp, Homo sapien
tgcactagttcaagatttagccaag

SEQ ID NO: 2789373 - DNA, 25 bp, Homo sapien
taagatcagcactctaccacagctg

SEQ ID NO: 2789374 - DNA, 25 bp, Homo sapien
caagaacaagtatgccacatcgaag

SEQ ID NO: 2789375 - DNA, 25 bp, Homo sapien
tcaactttagctagtatcttcaaac

SEQ ID NO: 2789376 - DNA, 25 bp, Homo sapien
gccaagtcatggagaatctgctgca

SEQ ID NO: 2789377 - DNA, 25 bp, Homo sapien
gacatactgcatgtaagccaagtca

SEQ ID NO: 2789378 - DNA, 25 bp, Homo sapien
taatatgagttactgaaggtgatgg

SEQ ID NO: 2789379 - DNA, 25 bp, Homo sapien
taataggcaaggttgtggaattcca

SEQ ID NO: 2789380 - DNA, 25 bp, Homo sapien
aaattttgattccatgctgtgctca

SEQ ID NO: 2789381 - DNA, 25 bp, Homo sapien
agccgcagaccttcgacctttgcag

SEQ ID NO: 2789382 - DNA, 25 bp, Homo sapien
ccttagagatttcctattgtgtccg

SEQ ID NO: 2789383 - DNA, 25 bp, Homo sapien
agcatagaatagaacccatgcccct

SEQ ID NO: 2789384 - DNA, 25 bp, Homo sapien
gcatagaatagaacccatgcccctg

SEQ ID NO: 2789385 - DNA, 25 bp, Homo sapien
cagcttgatgttgggtgttttttta

SEQ ID NO: 2789386 - DNA, 25 bp, Homo sapien
caagtgtgcctggtgatttttaatg

SEQ ID NO: 2789387 - DNA, 25 bp, Homo sapien
accacaccagcggtgtaatcccagt

SEQ ID NO: 2789388 - DNA, 25 bp, Homo sapien
taatgttactgaagatgtggcatgt

SEQ ID NO: 2789389 - DNA, 25 bp, Homo sapien
gtgctttccttggttgataaaccaa

SEQ ID NO: 2789390 - DNA, 25 bp, Homo sapien
cttgtgcggcaaggacagtgtccaa

SEQ ID NO: 2789391 - DNA, 25 bp, Homo sapien
ccaaatgtgagcagtggagacacct

SEQ ID NO: 2789392 - DNA, 25 bp, Homo sapien
taagcaagagcaactttacctggga

SEQ ID NO: 2789393 - DNA, 25 bp, Homo sapien
caaagtgtcctcctcaataagcaag

SEQ ID NO: 2789394 - DNA, 25 bp, Homo sapien
tttctccgccaaacaaagggtatgc

SEQ ID NO: 2789395 - DNA, 25 bp, Homo sapien
tgggctcaggtcaaaaaagtcttct

SEQ ID NO: 2789396 - DNA, 25 bp, Homo sapien
gttattttcaccagtagagcccgga

SEQ ID NO: 2789397 - DNA, 25 bp, Homo sapien
tgtttatctttcacagcctgccggg

SEQ ID NO: 2789398 - DNA, 25 bp, Homo sapien
cggtctccgcctccgtgacgtcccg

SEQ ID NO: 2789399 - DNA, 25 bp, Homo sapien
ccttctcgggggtcatgatgggcag

SEQ ID NO: 2789400 - DNA, 25 bp, Homo sapien
cagctgcccgggactccagtgatcg

SEQ ID NO: 2789401 - DNA, 25 bp, Homo sapien
aggagagcccagtccggtctccgcc

SEQ ID NO: 2789402 - DNA, 25 bp, Homo sapien
catcttgggcggtagggacggtgct

SEQ ID NO: 2789403 - DNA, 25 bp, Homo sapien
ctagtagggtcgttcaggtaaagca

SEQ ID NO: 2789404 - DNA, 25 bp, Homo sapien
atttgtcgcgtttccgcatcttggg

SEQ ID NO: 2789405 - DNA, 25 bp, Homo sapien
tcaggtaaagcaatttgtcgcgttt

SEQ ID NO: 2789406 - DNA, 25 bp, Homo sapien
cggcgcccgcgggtgtgtgtgagga

SEQ ID NO: 2789407 - DNA, 25 bp, Homo sapien
agaggcagagcggtgaccgcgcctc

SEQ ID NO: 2789408 - DNA, 25 bp, Homo sapien
gaccgcgcctctgcggagggccagt

SEQ ID NO: 2789409 - DNA, 25 bp, Homo sapien
ggggagtaaaggcggtggcagaggc

SEQ ID NO: 2789410 - DNA, 25 bp, Homo sapien
gaccgggcagtgaggtgggtccggc

SEQ ID NO: 2789411 - DNA, 25 bp, Homo sapien
ttgcggcaaccgtgcagcatcttgg

SEQ ID NO: 2789412 - DNA, 25 bp, Homo sapien
ggttcgagccttgcggcaaccgtgc

SEQ ID NO: 2789413 - DNA, 25 bp, Homo sapien
ccggcgccgagggttcgagccttgc

SEQ ID NO: 2789414 - DNA, 25 bp, Homo sapien
ccgtctaggattggctgtggtgccc

SEQ ID NO: 2789415 - DNA, 25 bp, Homo sapien
ccttcaaggtctcgggaatggtcgg

SEQ ID NO: 2789416 - DNA, 25 bp, Homo sapien
gaaggaagcgaaccctggatctgac

SEQ ID NO: 2789417 - DNA, 25 bp, Homo sapien
tcagccaatcggaaggaaggcggta

SEQ ID NO: 2789418 - DNA, 25 bp, Homo sapien
ctctgcctccggagtcccggttggt

SEQ ID NO: 2789419 - DNA, 25 bp, Homo sapien
cactcacgcaatctgcctgtctggg

SEQ ID NO: 2789420 - DNA, 25 bp, Homo sapien
tgcactcacgcaatctgcctgtctg

SEQ ID NO: 2789421 - DNA, 25 bp, Homo sapien
ccggagtcccggttggttcaagcag

SEQ ID NO: 2789422 - DNA, 25 bp, Homo sapien
atctcctccattgggttgctttgaa

SEQ ID NO: 2789423 - DNA, 25 bp, Homo sapien
agtgaagtacaccttcgatagtaca

SEQ ID NO: 2789424 - DNA, 25 bp, Homo sapien
tctataagtcatgcaacataaactc

SEQ ID NO: 2789425 - DNA, 25 bp, Homo sapien
ccgggtagacaagttaataattcat

SEQ ID NO: 2789426 - DNA, 25 bp, Homo sapien
agctttgagatcagcagggctacca

SEQ ID NO: 2789427 - DNA, 25 bp, Homo sapien
cacaacattctaaaggaagtaaatc

SEQ ID NO: 2789428 - DNA, 25 bp, Homo sapien
gtatcagaagctttgagatcagcag

SEQ ID NO: 2789429 - DNA, 25 bp, Homo sapien
gcagggctaccatctcactcttctg

SEQ ID NO: 2789430 - DNA, 25 bp, Homo sapien
ttccttttcagcgtggaggtcctga

SEQ ID NO: 2789431 - DNA, 25 bp, Homo sapien
ccttttcagcgtggaggtcctgaat

SEQ ID NO: 2789432 - DNA, 25 bp, Homo sapien
cagcgtggaggtcctgaataaccat

SEQ ID NO: 2789433 - DNA, 25 bp, Homo sapien
tttcagcgtggaggtcctgaataac

SEQ ID NO: 2789434 - DNA, 25 bp, Homo sapien
aatacactgattatcaactcatacg

SEQ ID NO: 2789435 - DNA, 25 bp, Homo sapien
cactgattatcaactcatacgccat

SEQ ID NO: 2789436 - DNA, 25 bp, Homo sapien
gcacgctgtaatacactgattatca

SEQ ID NO: 2789437 - DNA, 25 bp, Homo sapien
gtcagcagcacgctgtaatacactg

SEQ ID NO: 2789438 - DNA, 25 bp, Homo sapien
tttatctcctcccattggaaggcag

SEQ ID NO: 2789439 - DNA, 25 bp, Homo sapien
gtgcttggcacatagataacactca

SEQ ID NO: 2789440 - DNA, 25 bp, Homo sapien
tataatatagtctcccaacagcaag

SEQ ID NO: 2789441 - DNA, 25 bp, Homo sapien
gagtcaggtcatatcacttgtctgc

SEQ ID NO: 2789442 - DNA, 25 bp, Homo sapien
aattagaacgctgaccagttcctgg

SEQ ID NO: 2789443 - DNA, 25 bp, Homo sapien
atggaacaccaaattagaacgctga

SEQ ID NO: 2789444 - DNA, 25 bp, Homo sapien
agaacgctgaccagttcctggtaat

SEQ ID NO: 2789445 - DNA, 25 bp, Homo sapien
caccaaattagaacgctgaccagtt

SEQ ID NO: 2789446 - DNA, 25 bp, Homo sapien
taaattcgtgttgtcctgggagctc

SEQ ID NO: 2789447 - DNA, 25 bp, Homo sapien
tcgggcaaagcgttatgagaagctg

SEQ ID NO: 2789448 - DNA, 25 bp, Homo sapien
ttatgagaagctggacttccttggg

SEQ ID NO: 2789449 - DNA, 25 bp, Homo sapien
ccggatggctctggacgtgaagtct

SEQ ID NO: 2789450 - DNA, 25 bp, Homo sapien
gggaaaccgtccagacgcacttgct

SEQ ID NO: 2789451 - DNA, 25 bp, Homo sapien
gctgctcgttctcgttgggggaaac

SEQ ID NO: 2789452 - DNA, 25 bp, Homo sapien
tgcccattctttacatcctgggggt

SEQ ID NO: 2789453 - DNA, 25 bp, Homo sapien
tgcgggttttcccgtggaggccaga

SEQ ID NO: 2789454 - DNA, 25 bp, Homo sapien
cctttatatgatgtgtgagacttag

SEQ ID NO: 2789455 - DNA, 25 bp, Homo sapien
ttttatacttaagtccaagatctgt

SEQ ID NO: 2789456 - DNA, 25 bp, Homo sapien
gtccaagatctgtttagagtttacc

SEQ ID NO: 2789457 - DNA, 25 bp, Homo sapien
gagtttacctttatatgatgtgtga

SEQ ID NO: 2789458 - DNA, 25 bp, Homo sapien
cctttattgagttccattgatttat

SEQ ID NO: 2789459 - DNA, 25 bp, Homo sapien
tatttgttgaaatgacggtctcttc

SEQ ID NO: 2789460 - DNA, 25 bp, Homo sapien
gttgaaatgacggtctcttcattga

SEQ ID NO: 2789461 - DNA, 25 bp, Homo sapien
ttctaagtcctttattgagttccat

SEQ ID NO: 2789462 - DNA, 25 bp, Homo sapien
aatgctgtctcacccttacgagcag

SEQ ID NO: 2789463 - DNA, 25 bp, Homo sapien
cagcaggagagactaccatgtataa

SEQ ID NO: 2789464 - DNA, 25 bp, Homo sapien
gggactttcccttctagagagcata

SEQ ID NO: 2789465 - DNA, 25 bp, Homo sapien
caaaccgtatcaggtagtcaaggaa

SEQ ID NO: 2789466 - DNA, 25 bp, Homo sapien
ctctctcaggtgtactgtctgttct

SEQ ID NO: 2789467 - DNA, 25 bp, Homo sapien
tcatacacagcagcaattagtagcc

SEQ ID NO: 2789468 - DNA, 25 bp, Homo sapien
ccatttaagatatctgtgcgccagc

SEQ ID NO: 2789469 - DNA, 25 bp, Homo sapien
gactggtctggacttgagattcaga

SEQ ID NO: 2789470 - DNA, 25 bp, Homo sapien
catgccttgccgagtttttgtatag

SEQ ID NO: 2789471 - DNA, 25 bp, Homo sapien
ggatcatcacaaccatctcacagga

SEQ ID NO: 2789472 - DNA, 25 bp, Homo sapien
gttactaccctgacaagaagccatg

SEQ ID NO: 2789473 - DNA, 25 bp, Homo sapien
aaattaacattcagtcagtcctagg

SEQ ID NO: 2789474 - DNA, 25 bp, Homo sapien
tagaaatcaccttggctcaggcagc

SEQ ID NO: 2789475 - DNA, 25 bp, Homo sapien
ttcaaagtatctcgatataaacaac

SEQ ID NO: 2789476 - DNA, 25 bp, Homo sapien
atacctaggaaacatacaacttctc

SEQ ID NO: 2789477 - DNA, 25 bp, Homo sapien
tacctaggaaacatacaacttctca

SEQ ID NO: 2789478 - DNA, 25 bp, Homo sapien
ttttcaaagtatctcgatataaaca

SEQ ID NO: 2789479 - DNA, 25 bp, Homo sapien
aaatatgatacttgatggcaaagaa

SEQ ID NO: 2789480 - DNA, 25 bp, Homo sapien
gtttggatctatttgagagtgctgg

SEQ ID NO: 2789481 - DNA, 25 bp, Homo sapien
tgctggattgaacaaatgcagccca

SEQ ID NO: 2789482 - DNA, 25 bp, Homo sapien
caaagaatgggatcttttaagagtt

SEQ ID NO: 2789483 - DNA, 25 bp, Homo sapien
caaaacagagaattctgaagtctta

SEQ ID NO: 2789484 - DNA, 25 bp, Homo sapien
ccaaaacagagaattctgaagtctt

SEQ ID NO: 2789485 - DNA, 25 bp, Homo sapien
aaaacagagaattctgaagtcttac

SEQ ID NO: 2789486 - DNA, 25 bp, Homo sapien
cgagcaagcatgtagctaacttttc

SEQ ID NO: 2789487 - DNA, 25 bp, Homo sapien
gtctttgtcttccaatgcccgagca

SEQ ID NO: 2789488 - DNA, 25 bp, Homo sapien
ttttctttgatgagccaaagcttct

SEQ ID NO: 2789489 - DNA, 25 bp, Homo sapien
tccaatgcccgagcaagcatgtagc

SEQ ID NO: 2789490 - DNA, 25 bp, Homo sapien
ctgttttctgaagggagcataccca

SEQ ID NO: 2789491 - DNA, 25 bp, Homo sapien
tggtcttccatcctcttagaactgt

SEQ ID NO: 2789492 - DNA, 25 bp, Homo sapien
ggtcttcttactccttggtgatgga

SEQ ID NO: 2789493 - DNA, 25 bp, Homo sapien
tgagcatcttaaggacctcttgagg

SEQ ID NO: 2789494 - DNA, 25 bp, Homo sapien
catcacagtcttcaagagcagccag

SEQ ID NO: 2789495 - DNA, 25 bp, Homo sapien
tccgaaccgcaaagacctggacttg

SEQ ID NO: 2789496 - DNA, 25 bp, Homo sapien
gaatgtagtgagcagagcacagcct

SEQ ID NO: 2789497 - DNA, 25 bp, Homo sapien
taactgtatgacctcgggtgacttt

SEQ ID NO: 2789498 - DNA, 25 bp, Homo sapien
aatattctccaaaagtggtttagtg

SEQ ID NO: 2789499 - DNA, 25 bp, Homo sapien
gacactttgatgagtagatgaatct

SEQ ID NO: 2789500 - DNA, 25 bp, Homo sapien
tatgcctataaactacttccggaaa

SEQ ID NO: 2789501 - DNA, 25 bp, Homo sapien
tgaccccttccacgaggagctgtgg

SEQ ID NO: 2789502 - DNA, 25 bp, Homo sapien
atcctctttaaggtgcttccaattc

SEQ ID NO: 2789503 - DNA, 25 bp, Homo sapien
aatgcaattctgaaagcatctgcca

SEQ ID NO: 2789504 - DNA, 25 bp, Homo sapien
gcatctgccatcacgtaagcttctt

SEQ ID NO: 2789505 - DNA, 25 bp, Homo sapien
tgtgtcaattgtagtgcctggtcat

SEQ ID NO: 2789506 - DNA, 25 bp, Homo sapien
tctcattaattgttgctcaaatgca

SEQ ID NO: 2789507 - DNA, 25 bp, Homo sapien
ctagtaaatggtggagcaaagatgc

SEQ ID NO: 2789508 - DNA, 25 bp, Homo sapien
taatgtctggcatgttcatggtgct

SEQ ID NO: 2789509 - DNA, 25 bp, Homo sapien
tcatccaaggtagttattaccctcc

SEQ ID NO: 2789510 - DNA, 25 bp, Homo sapien
caaacctaggtctggctgggacaaa

SEQ ID NO: 2789511 - DNA, 25 bp, Homo sapien
tctggcacaagaacaggggttccct

SEQ ID NO: 2789512 - DNA, 25 bp, Homo sapien
gaagaagcagtttccgagtggatgc

SEQ ID NO: 2789513 - DNA, 25 bp, Homo sapien
tccgggcccatgacaaaggcaggct

SEQ ID NO: 2789514 - DNA, 25 bp, Homo sapien
gtttccgagtggatgctgccattct

SEQ ID NO: 2789515 - DNA, 25 bp, Homo sapien
ctactcaggcatctgatccaaaaaa

SEQ ID NO: 2789516 - DNA, 25 bp, Homo sapien
tactcaggcatctgatccaaaaaaa

SEQ ID NO: 2789517 - DNA, 25 bp, Homo sapien
gtgaggccccttctgacctcattag

SEQ ID NO: 2789518 - DNA, 25 bp, Homo sapien
gcgcccggccttcttaagttctaca

SEQ ID NO: 2789519 - DNA, 25 bp, Homo sapien
cattgccagccattggcattgcacc

SEQ ID NO: 2789520 - DNA, 25 bp, Homo sapien
gctttaccacagattgaccttgcca

SEQ ID NO: 2789521 - DNA, 25 bp, Homo sapien
tatcacagcacatgttttcctgagc

SEQ ID NO: 2789522 - DNA, 25 bp, Homo sapien
acagcacatgttttcctgagccatc

SEQ ID NO: 2789523 - DNA, 25 bp, Homo sapien
ttttatcacagcacatgttttcctg

SEQ ID NO: 2789524 - DNA, 25 bp, Homo sapien
tcacagcacatgttttcctgagcca

SEQ ID NO: 2789525 - DNA, 25 bp, Homo sapien
gagggcctccaaataccgttgattc

SEQ ID NO: 2789526 - DNA, 25 bp, Homo sapien
ggcgagggcctccaaataccgttga

SEQ ID NO: 2789527 - DNA, 25 bp, Homo sapien
gcgagggcctccaaataccgttgat

SEQ ID NO: 2789528 - DNA, 25 bp, Homo sapien
ggcctccaaataccgttgattcaaa

SEQ ID NO: 2789529 - DNA, 25 bp, Homo sapien
tctttgaggactgcattttcacagt

SEQ ID NO: 2789530 - DNA, 25 bp, Homo sapien
tcaaattctctttgaggactgcatt

SEQ ID NO: 2789531 - DNA, 25 bp, Homo sapien
aattctctttgaggactgcattttc

SEQ ID NO: 2789532 - DNA, 25 bp, Homo sapien
tgtcagacttcagcattttaatttc

SEQ ID NO: 2789533 - DNA, 25 bp, Homo sapien
tgcccggccaggattttaaacatac

SEQ ID NO: 2789534 - DNA, 25 bp, Homo sapien
gtcatgtgatctcgactcagtgcaa

SEQ ID NO: 2789535 - DNA, 25 bp, Homo sapien
gcagtcatgtgatctcgactcagtg

SEQ ID NO: 2789536 - DNA, 25 bp, Homo sapien
atgcccggccaggattttaaacata

SEQ ID NO: 2789537 - DNA, 25 bp, Homo sapien
gaaagccagaggatcgtgaccaact

SEQ ID NO: 2789538 - DNA, 25 bp, Homo sapien
tcaggacccttgttcactggagcaa

SEQ ID NO: 2789539 - DNA, 25 bp, Homo sapien
gattatgtagagagccgaaagccag

SEQ ID NO: 2789540 - DNA, 25 bp, Homo sapien
taaatacgaagggtgctaaaagctc

SEQ ID NO: 2789541 - DNA, 25 bp, Homo sapien
taagatagagtttatactattttgg

SEQ ID NO: 2789542 - DNA, 25 bp, Homo sapien
gagacacggactcactctatcatcc

SEQ ID NO: 2789543 - DNA, 25 bp, Homo sapien
ttctaaaataattcttacactgtat

SEQ ID NO: 2789544 - DNA, 25 bp, Homo sapien
tgcccagcccctcaaaagattttgt

SEQ ID NO: 2789545 - DNA, 25 bp, Homo sapien
actcccaggcccaagtgatcttcac

SEQ ID NO: 2789546 - DNA, 25 bp, Homo sapien
gatcttcacacctcagcttcccatg

SEQ ID NO: 2789547 - DNA, 25 bp, Homo sapien
caggcccaagtgatcttcacacctc

SEQ ID NO: 2789548 - DNA, 25 bp, Homo sapien
tcccaggcccaagtgatcttcacac

SEQ ID NO: 2789549 - DNA, 25 bp, Homo sapien
tccaagattcctctatatttttaaa

SEQ ID NO: 2789550 - DNA, 25 bp, Homo sapien
tggatccaagattcctctatatttt

SEQ ID NO: 2789551 - DNA, 25 bp, Homo sapien
gatccaagattcctctatattttta

SEQ ID NO: 2789552 - DNA, 25 bp, Homo sapien
ggatccaagattcctctatattttt

SEQ ID NO: 2789553 - DNA, 25 bp, Homo sapien
cacctagcagaaggtaggcacaagt

SEQ ID NO: 2789554 - DNA, 25 bp, Homo sapien
catcagaactgaagcacacctagca

SEQ ID NO: 2789555 - DNA, 25 bp, Homo sapien
gaagtaccaatttggcaggcctcct

SEQ ID NO: 2789556 - DNA, 25 bp, Homo sapien
aggcctcctactaccttaacatggg

SEQ ID NO: 2789557 - DNA, 25 bp, Homo sapien
ctgcgtatgacttgtggctttgccc

SEQ ID NO: 2789558 - DNA, 25 bp, Homo sapien
tgcctgcgtatgacttgtggctttg

SEQ ID NO: 2789559 - DNA, 25 bp, Homo sapien
cctgcgtatgacttgtggctttgcc

SEQ ID NO: 2789560 - DNA, 25 bp, Homo sapien
cactgcctgcgtatgacttgtggct

SEQ ID NO: 2789561 - DNA, 25 bp, Homo sapien
ggatttgcatgagcccagtaacccc

SEQ ID NO: 2789562 - DNA, 25 bp, Homo sapien
catggcttacactgtgcacctggga

SEQ ID NO: 2789563 - DNA, 25 bp, Homo sapien
tctgtgaatatagagggtgcaagcc

SEQ ID NO: 2789564 - DNA, 25 bp, Homo sapien
gagtccctactacagcactgcctag

SEQ ID NO: 2789565 - DNA, 25 bp, Homo sapien
gaattttcaatgcttcctctttacc

SEQ ID NO: 2789566 - DNA, 25 bp, Homo sapien
gatgcctcaagttcagtttttaaca

SEQ ID NO: 2789567 - DNA, 25 bp, Homo sapien
ctctgagttgtctttgagatgcctc

SEQ ID NO: 2789568 - DNA, 25 bp, Homo sapien
gctttgaagaattttcaatgcttcc

SEQ ID NO: 2789569 - DNA, 25 bp, Homo sapien
cagaagatcaaaagcagtttcggaa

SEQ ID NO: 2789570 - DNA, 25 bp, Homo sapien
gggtgggaggtctgtttggcaactg

SEQ ID NO: 2789571 - DNA, 25 bp, Homo sapien
gtttcggaaggccagaaccatcagg

SEQ ID NO: 2789572 - DNA, 25 bp, Homo sapien
agcccctcctatctggcaggaaggg

SEQ ID NO: 2789573 - DNA, 25 bp, Homo sapien
gcttgtaattcttgcttgattcctg

SEQ ID NO: 2789574 - DNA, 25 bp, Homo sapien
ggtccttgacctcctcatagtagtt

SEQ ID NO: 2789575 - DNA, 25 bp, Homo sapien
cctcctcatagtagtttgcttgtaa

SEQ ID NO: 2789576 - DNA, 25 bp, Homo sapien
cttcttgttgatggcgtccttggag

SEQ ID NO: 2789577 - DNA, 25 bp, Homo sapien
ctcttaaggggcacagactcagtgg

SEQ ID NO: 2789578 - DNA, 25 bp, Homo sapien
agaagataaacaccaggtcctcctt

SEQ ID NO: 2789579 - DNA, 25 bp, Homo sapien
ggcacagactcagtggcccagaaga

SEQ ID NO: 2789580 - DNA, 25 bp, Homo sapien
gcccagaagataaacaccaggtcct

SEQ ID NO: 2789581 - DNA, 25 bp, Homo sapien
gtcatagagggcgtagaggcaatcc

SEQ ID NO: 2789582 - DNA, 25 bp, Homo sapien
ggcaatccttatccggtagcatctt

SEQ ID NO: 2789583 - DNA, 25 bp, Homo sapien
ttgtcgatggtctggtccacattgc

SEQ ID NO: 2789584 - DNA, 25 bp, Homo sapien
gggttgtcgatggtctggtccacat

SEQ ID NO: 2789585 - DNA, 25 bp, Homo sapien
gtgttgaagacttacacaacttcat

SEQ ID NO: 2789586 - DNA, 25 bp, Homo sapien
tgttgaagacttacacaacttcatg

SEQ ID NO: 2789587 - DNA, 25 bp, Homo sapien
ttgccttaattcttcatttgacaat

SEQ ID NO: 2789588 - DNA, 25 bp, Homo sapien
ctctaaagtttcattaagacattgc

SEQ ID NO: 2789589 - DNA, 25 bp, Homo sapien
aagtttcattaagacattgccttaa

SEQ ID NO: 2789590 - DNA, 25 bp, Homo sapien
tcatttgacaattctgaattcgaat

SEQ ID NO: 2789591 - DNA, 25 bp, Homo sapien
taaaggcatcttagcatcatgctca

SEQ ID NO: 2789592 - DNA, 25 bp, Homo sapien
ttataaaggcatcttagcatcatgc

SEQ ID NO: 2789593 - DNA, 25 bp, Homo sapien
aaggcatcttagcatcatgctcagt

SEQ ID NO: 2789594 - DNA, 25 bp, Homo sapien
tataaaggcatcttagcatcatgct

SEQ ID NO: 2789595 - DNA, 25 bp, Homo sapien
cacagactcccgatcattttggagt

SEQ ID NO: 2789596 - DNA, 25 bp, Homo sapien
tacaggcatgggcttatccacagac

SEQ ID NO: 2789597 - DNA, 25 bp, Homo sapien
gaagaggaagttttacaacatagat

SEQ ID NO: 2789598 - DNA, 25 bp, Homo sapien
tagccagataacagctggtgccatg

SEQ ID NO: 2789599 - DNA, 25 bp, Homo sapien
cttttatactaccaccaatcccaag

SEQ ID NO: 2789600 - DNA, 25 bp, Homo sapien
ggctatcaactacttttatactacc

SEQ ID NO: 2789601 - DNA, 25 bp, Homo sapien
tcaactacttttatactaccaccaa

SEQ ID NO: 2789602 - DNA, 25 bp, Homo sapien
cgcccggctatcaactacttttata

SEQ ID NO: 2789603 - DNA, 25 bp, Homo sapien
agaaaggagaggaaattcagcattc

SEQ ID NO: 2789604 - DNA, 25 bp, Homo sapien
ctatgcacaggagaaagaaaggaga

SEQ ID NO: 2789605 - DNA, 25 bp, Homo sapien
gaaagaaaggagaggaaattcagca

SEQ ID NO: 2789606 - DNA, 25 bp, Homo sapien
gaaaggagaggaaattcagcattct

SEQ ID NO: 2789607 - DNA, 25 bp, Homo sapien
ctttgtcgtctgtaattggaaattc

SEQ ID NO: 2789608 - DNA, 25 bp, Homo sapien
gaatgtatcttgctggctcttatgc

SEQ ID NO: 2789609 - DNA, 25 bp, Homo sapien
ttctggacacttgagggaatgtatc

SEQ ID NO: 2789610 - DNA, 25 bp, Homo sapien
ttgctggctcttatgcttggaatac

SEQ ID NO: 2789611 - DNA, 25 bp, Homo sapien
gctgcacgtctgactcacttgatga

SEQ ID NO: 2789612 - DNA, 25 bp, Homo sapien
caccaggtttccttccgaggccata

SEQ ID NO: 2789613 - DNA, 25 bp, Homo sapien
ctgatctttttctagacctatgtga

SEQ ID NO: 2789614 - DNA, 25 bp, Homo sapien
ggccataccctaaatcaccttctgt

SEQ ID NO: 2789615 - DNA, 25 bp, Homo sapien
agccaaatgccgtctttatcataag

SEQ ID NO: 2789616 - DNA, 25 bp, Homo sapien
gccaaatgccgtctttatcataaga

SEQ ID NO: 2789617 - DNA, 25 bp, Homo sapien
caaatgccgtctttatcataagaaa

SEQ ID NO: 2789618 - DNA, 25 bp, Homo sapien
gagccaaatgccgtctttatcataa

SEQ ID NO: 2789619 - DNA, 25 bp, Homo sapien
cagccgggagaagcagaaatgctca

SEQ ID NO: 2789620 - DNA, 25 bp, Homo sapien
ctggtgacagtgaagcagccgggag

SEQ ID NO: 2789621 - DNA, 25 bp, Homo sapien
gacagtgaagcagccgggagaagca

SEQ ID NO: 2789622 - DNA, 25 bp, Homo sapien
gggagaagcagaaatgctcaacctt

SEQ ID NO: 2789623 - DNA, 25 bp, Homo sapien
ctctcaaggtccgtggcggggaccg

SEQ ID NO: 2789624 - DNA, 25 bp, Homo sapien
agtcccagacaggaaacgccggtga

SEQ ID NO: 2789625 - DNA, 25 bp, Homo sapien
acgtgaccgcgtgggcgcagtccca

SEQ ID NO: 2789626 - DNA, 25 bp, Homo sapien
ttcgcgacctcactgtgttcctgtg

SEQ ID NO: 2789627 - DNA, 25 bp, Homo sapien
catggaggcagctcgcgctactttt

SEQ ID NO: 2789628 - DNA, 25 bp, Homo sapien
tctgatggcccagatggcaaccact

SEQ ID NO: 2789629 - DNA, 25 bp, Homo sapien
gccaggtctgatggcccagatggca

SEQ ID NO: 2789630 - DNA, 25 bp, Homo sapien
tgtagttggctcttctgctgctgcg

SEQ ID NO: 2789631 - DNA, 25 bp, Homo sapien
agcggcacccccatctgtagttggc

SEQ ID NO: 2789632 - DNA, 25 bp, Homo sapien
ggaggaagtaatgctgagcctgcga

SEQ ID NO: 2789633 - DNA, 25 bp, Homo sapien
gagcaagtccctgtagagagtgtcc

SEQ ID NO: 2789634 - DNA, 25 bp, Homo sapien
attagttaacagtgtgcttagagca

SEQ ID NO: 2789635 - DNA, 25 bp, Homo sapien
agccacagggaatacagtgcgaggc

SEQ ID NO: 2789636 - DNA, 25 bp, Homo sapien
atgagccacagggaatacagtgcga

SEQ ID NO: 2789637 - DNA, 25 bp, Homo sapien
ctctaatgcaagaggtggatgcccc

SEQ ID NO: 2789638 - DNA, 25 bp, Homo sapien
gatgccccggagatgtggctgattc

SEQ ID NO: 2789639 - DNA, 25 bp, Homo sapien
aagacacctctaatgcaagaggtgg

SEQ ID NO: 2789640 - DNA, 25 bp, Homo sapien
cctgaagatagagttgaagacacct

SEQ ID NO: 2789641 - DNA, 25 bp, Homo sapien
cagaggaattctggtatcgtcagca

SEQ ID NO: 2789642 - DNA, 25 bp, Homo sapien
gatatgctacaagtctctggagtgg

SEQ ID NO: 2789643 - DNA, 25 bp, Homo sapien
gggtacttcctatgagagatacgag

SEQ ID NO: 2789644 - DNA, 25 bp, Homo sapien
ggtgcttagatgactggaatccttc

SEQ ID NO: 2789645 - DNA, 25 bp, Homo sapien
taggagttccctttatcatcactgc

SEQ ID NO: 2789646 - DNA, 25 bp, Homo sapien
accatacccggttctgattatacac

SEQ ID NO: 2789647 - DNA, 25 bp, Homo sapien
cagggaggtctgtactgagatgata

SEQ ID NO: 2789648 - DNA, 25 bp, Homo sapien
gggagacctaacttttcaacatgct

SEQ ID NO: 2789649 - DNA, 25 bp, Homo sapien
ttattttaagagatcatctgcattt

SEQ ID NO: 2789650 - DNA, 25 bp, Homo sapien
agttttattttaagagatcatctgc

SEQ ID NO: 2789651 - DNA, 25 bp, Homo sapien
ctgtaataaacttaaaagatatcca

SEQ ID NO: 2789652 - DNA, 25 bp, Homo sapien
ttctgtaataaacttaaaagatatc

SEQ ID NO: 2789653 - DNA, 25 bp, Homo sapien
aaacacaggcataaacctatatact

SEQ ID NO: 2789654 - DNA, 25 bp, Homo sapien
ttgaacaatttctatgatgtcggca

SEQ ID NO: 2789655 - DNA, 25 bp, Homo sapien
aacaatttctatgatgtcggcagag

SEQ ID NO: 2789656 - DNA, 25 bp, Homo sapien
taaacctatatactatccacctgct

SEQ ID NO: 2789657 - DNA, 25 bp, Homo sapien
atctttgatccactgctcaatccat

SEQ ID NO: 2789658 - DNA, 25 bp, Homo sapien
actgctcaatccatttcaagatctg

SEQ ID NO: 2789659 - DNA, 25 bp, Homo sapien
gatccactgctcaatccatttcaag

SEQ ID NO: 2789660 - DNA, 25 bp, Homo sapien
gctcaatccatttcaagatctgatc

SEQ ID NO: 2789661 - DNA, 25 bp, Homo sapien
tgggcagctgatgcacgatttcttc

SEQ ID NO: 2789662 - DNA, 25 bp, Homo sapien
tgttagtttcttctcattataaccc

SEQ ID NO: 2789663 - DNA, 25 bp, Homo sapien
aatattgtctgttagtttcttctca

SEQ ID NO: 2789664 - DNA, 25 bp, Homo sapien
cttccttgtaggatgctgtggcttc

SEQ ID NO: 2789665 - DNA, 25 bp, Homo sapien
agtttcagaaacataccagaaactg

SEQ ID NO: 2789666 - DNA, 25 bp, Homo sapien
aataaatggcattaactggagtttc

SEQ ID NO: 2789667 - DNA, 25 bp, Homo sapien
ttcagaaacataccagaaactggac

SEQ ID NO: 2789668 - DNA, 25 bp, Homo sapien
agggaggttaagcaaacaagaagca

SEQ ID NO: 2789669 - DNA, 25 bp, Homo sapien
tcaagtctttcgtacaatacattgg

SEQ ID NO: 2789670 - DNA, 25 bp, Homo sapien
tcagggaagaaatcacaaccatggt

SEQ ID NO: 2789671 - DNA, 25 bp, Homo sapien
aactatatgaaaccagcgttcaggg

SEQ ID NO: 2789672 - DNA, 25 bp, Homo sapien
tttggttatctaactcatcaactac

SEQ ID NO: 2789673 - DNA, 25 bp, Homo sapien
tctgtcttcatctaaaatgggacag

SEQ ID NO: 2789674 - DNA, 25 bp, Homo sapien
aaatgggacagtcatactcttcatc

SEQ ID NO: 2789675 - DNA, 25 bp, Homo sapien
acagtcatactcttcatcatagcca

SEQ ID NO: 2789676 - DNA, 25 bp, Homo sapien
agtcatactcttcatcatagccatc

SEQ ID NO: 2789677 - DNA, 25 bp, Homo sapien
tattccagttagggtgacagtgata

SEQ ID NO: 2789678 - DNA, 25 bp, Homo sapien
attccagttagggtgacagtgatac

SEQ ID NO: 2789679 - DNA, 25 bp, Homo sapien
gtattccagttagggtgacagtgat

SEQ ID NO: 2789680 - DNA, 25 bp, Homo sapien
tgtattccagttagggtgacagtga

SEQ ID NO: 2789681 - DNA, 25 bp, Homo sapien
tcttgatgaaataggggtactgtag

SEQ ID NO: 2789682 - DNA, 25 bp, Homo sapien
ggtcttgatgaaataggggtactgt

SEQ ID NO: 2789683 - DNA, 25 bp, Homo sapien
ggatgtgtcggagaaaccgtcaaga

SEQ ID NO: 2789684 - DNA, 25 bp, Homo sapien
tactgtagggatgtgtcggagaaac

SEQ ID NO: 2789685 - DNA, 25 bp, Homo sapien
tctttagtagaatccctggccatca

SEQ ID NO: 2789686 - DNA, 25 bp, Homo sapien
ctttagtgagcatcggaataagcct

SEQ ID NO: 2789687 - DNA, 25 bp, Homo sapien
aaaatgaggttagttgccccagaat

SEQ ID NO: 2789688 - DNA, 25 bp, Homo sapien
tgcaattccacatgatcaccaggat

SEQ ID NO: 2789689 - DNA, 25 bp, Homo sapien
ttcttacacttttaaggctgatgaa

SEQ ID NO: 2789690 - DNA, 25 bp, Homo sapien
aaagtatggtaactgtgtttactca

SEQ ID NO: 2789691 - DNA, 25 bp, Homo sapien
gtatggtaactgtgtttactcatta

SEQ ID NO: 2789692 - DNA, 25 bp, Homo sapien
tttcttacacttttaaggctgatga

SEQ ID NO: 2789693 - DNA, 25 bp, Homo sapien
tcagtacaatgaattcaagaccaag

SEQ ID NO: 2789694 - DNA, 25 bp, Homo sapien
tcaagaccaagtatacatgttacat

SEQ ID NO: 2789695 - DNA, 25 bp, Homo sapien
caatgaattcaagaccaagtataca

SEQ ID NO: 2789696 - DNA, 25 bp, Homo sapien
tatcagtacaatgaattcaagacca

SEQ ID NO: 2789697 - DNA, 25 bp, Homo sapien
tcatcgtcatcatcatcatcttcac

SEQ ID NO: 2789698 - DNA, 25 bp, Homo sapien
attatcatagtcatcatcatcatca

SEQ ID NO: 2789699 - DNA, 25 bp, Homo sapien
ttacagattatcatagtcatcatca

SEQ ID NO: 2789700 - DNA, 25 bp, Homo sapien
ttgtgatgacatcatattagtggta

SEQ ID NO: 2789701 - DNA, 25 bp, Homo sapien
gtgatgacatcatattagtggtaat

SEQ ID NO: 2789702 - DNA, 25 bp, Homo sapien
cagtattttgtgatgacatcatatt

SEQ ID NO: 2789703 - DNA, 25 bp, Homo sapien
ttttgtgatgacatcatattagtgg

SEQ ID NO: 2789704 - DNA, 25 bp, Homo sapien
gaagtaggcatctgtactgtaaacc

SEQ ID NO: 2789705 - DNA, 25 bp, Homo sapien
ctgtgagggacatgggagtccctac

SEQ ID NO: 2789706 - DNA, 25 bp, Homo sapien
ggtctgtggggttggtgtgcctagt

SEQ ID NO: 2789707 - DNA, 25 bp, Homo sapien
gttggtgtgcctagtgtgggagtac

SEQ ID NO: 2789708 - DNA, 25 bp, Homo sapien
ctgtggggttggtgtgcctagtgtg

SEQ ID NO: 2789709 - DNA, 25 bp, Homo sapien
tggggttggtgtgcctagtgtggga

SEQ ID NO: 2789710 - DNA, 25 bp, Homo sapien
aaagactgatcagcgcggcactgga

SEQ ID NO: 2789711 - DNA, 25 bp, Homo sapien
gactgatcagcgcggcactggattg

SEQ ID NO: 2789712 - DNA, 25 bp, Homo sapien
taaaagactgatcagcgcggcactg

SEQ ID NO: 2789713 - DNA, 25 bp, Homo sapien
tgatcagcgcggcactggattgcca

SEQ ID NO: 2789714 - DNA, 25 bp, Homo sapien
cattagatcaatctgaaatagttac

SEQ ID NO: 2789715 - DNA, 25 bp, Homo sapien
aaaatatgtacattagatcaatctg

SEQ ID NO: 2789716 - DNA, 25 bp, Homo sapien
tgtacattagatcaatctgaaatag

SEQ ID NO: 2789717 - DNA, 25 bp, Homo sapien
aatatgtacattagatcaatctgaa

SEQ ID NO: 2789718 - DNA, 25 bp, Homo sapien
gagaccaatatactcactgtgctca

SEQ ID NO: 2789719 - DNA, 25 bp, Homo sapien
cagtctctttataggagccttccca

SEQ ID NO: 2789720 - DNA, 25 bp, Homo sapien
tatgtttagcagtaccaaacctttg

SEQ ID NO: 2789721 - DNA, 25 bp, Homo sapien
ctaagataccatagcatagtcaggt

SEQ ID NO: 2789722 - DNA, 25 bp, Homo sapien
tttgtaccctatgacaatacccagc

SEQ ID NO: 2789723 - DNA, 25 bp, Homo sapien
taaccaggacatagcattagacact

SEQ ID NO: 2789724 - DNA, 25 bp, Homo sapien
tatttctgtggattccctaacagag

SEQ ID NO: 2789725 - DNA, 25 bp, Homo sapien
ccagccattttgaaggcggaaggga

SEQ ID NO: 2789726 - DNA, 25 bp, Homo sapien
caaatctaacaccaaagtgtccctt

SEQ ID NO: 2789727 - DNA, 25 bp, Homo sapien
acaaatctaacaccaaagtgtccct

SEQ ID NO: 2789728 - DNA, 25 bp, Homo sapien
cattaatgtatttcagtcctgattt

SEQ ID NO: 2789729 - DNA, 25 bp, Homo sapien
agagtctcacctggcctctgccctt

SEQ ID NO: 2789730 - DNA, 25 bp, Homo sapien
ggcctctgcccttaaaagttcttga

SEQ ID NO: 2789731 - DNA, 25 bp, Homo sapien
taaaagttcttgacgactgaaatga

SEQ ID NO: 2789732 - DNA, 25 bp, Homo sapien
tacttatcacactgcggtccacctt

SEQ ID NO: 2789733 - DNA, 25 bp, Homo sapien
gagataaccactgtaaaccagtttc

SEQ ID NO: 2789734 - DNA, 25 bp, Homo sapien
aaattacctctactgaccccttgcg

SEQ ID NO: 2789735 - DNA, 25 bp, Homo sapien
tcagcctgtccggtagctaggacca

SEQ ID NO: 2789736 - DNA, 25 bp, Homo sapien
ttgcgcccttccctagagataacca

SEQ ID NO: 2789737 - DNA, 25 bp, Homo sapien
taaccagggcactatgtttgatcca

SEQ ID NO: 2789738 - DNA, 25 bp, Homo sapien
cactttcaggactaaacggctagca

SEQ ID NO: 2789739 - DNA, 25 bp, Homo sapien
tataatacaccaagtctgaaccctg

SEQ ID NO: 2789740 - DNA, 25 bp, Homo sapien
cagacatgtcttgtgcgctgccaac

SEQ ID NO: 2789741 - DNA, 25 bp, Homo sapien
tacgcgagaaacgacccgaaatgct

SEQ ID NO: 2789742 - DNA, 25 bp, Homo sapien
taccgaaatctaatctgaggcgttt

SEQ ID NO: 2789743 - DNA, 25 bp, Homo sapien
cattaatgactctaccgggaagcag

SEQ ID NO: 2789744 - DNA, 25 bp, Homo sapien
gatatggccttacgttatttcgcta

SEQ ID NO: 2789745 - DNA, 25 bp, Homo sapien
cagaaagactaagcaggttgccaag

SEQ ID NO: 2789746 - DNA, 25 bp, Homo sapien
tcggccggcctctgaagagggcagt

SEQ ID NO: 2789747 - DNA, 25 bp, Homo sapien
caagctggagagctggatctgccga

SEQ ID NO: 2789748 - DNA, 25 bp, Homo sapien
gagcctcaggccaacggaattaacg

SEQ ID NO: 2789749 - DNA, 25 bp, Homo sapien
ggtgagcaggatgttcggaagcaac

SEQ ID NO: 2789750 - DNA, 25 bp, Homo sapien
cggtgagcaggatgttcggaagcaa

SEQ ID NO: 2789751 - DNA, 25 bp, Homo sapien
gtgagcaggatgttcggaagcaaca

SEQ ID NO: 2789752 - DNA, 25 bp, Homo sapien
tgagcaggatgttcggaagcaacat

SEQ ID NO: 2789753 - DNA, 25 bp, Homo sapien
cttcgggcgcctcgctcacgtgccc

SEQ ID NO: 2789754 - DNA, 25 bp, Homo sapien
tccccgccgcgacggcttcgggcgc

SEQ ID NO: 2789755 - DNA, 25 bp, Homo sapien
gggcgggcggcagcaaaagcccacg

SEQ ID NO: 2789756 - DNA, 25 bp, Homo sapien
gcgcctcgctcacgtgccctttgct

SEQ ID NO: 2789757 - DNA, 25 bp, Homo sapien
cagtgcgctggatgcctaagtcaca

SEQ ID NO: 2789758 - DNA, 25 bp, Homo sapien
tgcagctccgggaaagtaaggccgc

SEQ ID NO: 2789759 - DNA, 25 bp, Homo sapien
gacacatttccgtcgcaaagttgga

SEQ ID NO: 2789760 - DNA, 25 bp, Homo sapien
tatgtcttagagacgcgagtctatc

SEQ ID NO: 2789761 - DNA, 25 bp, Homo sapien
tgtttataggctatgtgtgcctcca

SEQ ID NO: 2789762 - DNA, 25 bp, Homo sapien
cacagtctctaatcgtgaacgattt

SEQ ID NO: 2789763 - DNA, 25 bp, Homo sapien
caatgtgttttctagtgtgtcgagg

SEQ ID NO: 2789764 - DNA, 25 bp, Homo sapien
tatttcgagctacaaactatattta

SEQ ID NO: 2789765 - DNA, 25 bp, Homo sapien
ggtcagacagtttcatgcatgcagg

SEQ ID NO: 2789766 - DNA, 25 bp, Homo sapien
caaaggtatcttccacaaaggtatg

SEQ ID NO: 2789767 - DNA, 25 bp, Homo sapien
ttttacagtcccagtcacaaaggct

SEQ ID NO: 2789768 - DNA, 25 bp, Homo sapien
tgtactgcaagtcctaaactacgga

SEQ ID NO: 2789769 - DNA, 25 bp, Homo sapien
gcagaagtatccgaaatctacccgt

SEQ ID NO: 2789770 - DNA, 25 bp, Homo sapien
cattgccgcggctttccaagatgag

SEQ ID NO: 2789771 - DNA, 25 bp, Homo sapien
tgcgggaccagaacgaactctcagt

SEQ ID NO: 2789772 - DNA, 25 bp, Homo sapien
cctgagcaggacaaagacacacgct

SEQ ID NO: 2789773 - DNA, 25 bp, Homo sapien
aagaagggtgacctagtctctcaga

SEQ ID NO: 2789774 - DNA, 25 bp, Homo sapien
tctcagaggccgtcaaaggagtgca

SEQ ID NO: 2789775 - DNA, 25 bp, Homo sapien
aaatcctgacctgtaaggccgggtg

SEQ ID NO: 2789776 - DNA, 25 bp, Homo sapien
gacgccagtaccaggaagcaagaga

SEQ ID NO: 2789777 - DNA, 25 bp, Homo sapien
tgttagtatgaacaatagactgcct

SEQ ID NO: 2789778 - DNA, 25 bp, Homo sapien
taacacctagggaaacatgaggccc

SEQ ID NO: 2789779 - DNA, 25 bp, Homo sapien
cagaagcttagaaagttgtggtcac

SEQ ID NO: 2789780 - DNA, 25 bp, Homo sapien
tggtcactgaatgcactccctggtt

SEQ ID NO: 2789781 - DNA, 25 bp, Homo sapien
atattatacatgtattttacctcaa

SEQ ID NO: 2789782 - DNA, 25 bp, Homo sapien
taaaattggtgccttttactgtaca

SEQ ID NO: 2789783 - DNA, 25 bp, Homo sapien
attggtgccttttactgtacatata

SEQ ID NO: 2789784 - DNA, 25 bp, Homo sapien
tattatacatgtattttacctcaat

SEQ ID NO: 2789785 - DNA, 25 bp, Homo sapien
tttcacataactcatctcaggattg

SEQ ID NO: 2789786 - DNA, 25 bp, Homo sapien
ggattgacagaccttgatagcgcct

SEQ ID NO: 2789787 - DNA, 25 bp, Homo sapien
gacagaccttgatagcgccttaaat

SEQ ID NO: 2789788 - DNA, 25 bp, Homo sapien
tcatctcaggattgacagaccttga

SEQ ID NO: 2789789 - DNA, 25 bp, Homo sapien
tggctgtttttattgaagtggagtt

SEQ ID NO: 2789790 - DNA, 25 bp, Homo sapien
gagttgaaacatagctgcttaacag

SEQ ID NO: 2789791 - DNA, 25 bp, Homo sapien
gctgcttaacagaaattagtagata

SEQ ID NO: 2789792 - DNA, 25 bp, Homo sapien
tattccaaatatccacaagcgtcat

SEQ ID NO: 2789793 - DNA, 25 bp, Homo sapien
tgttgtgcttacatagacattgtac

SEQ ID NO: 2789794 - DNA, 25 bp, Homo sapien
gttgtgcttacatagacattgtaca

SEQ ID NO: 2789795 - DNA, 25 bp, Homo sapien
tcttgttgtgcttacatagacattg

SEQ ID NO: 2789796 - DNA, 25 bp, Homo sapien
tttcttgttgtgcttacatagacat

SEQ ID NO: 2789797 - DNA, 25 bp, Homo sapien
caggcactataccactactgatgat

SEQ ID NO: 2789798 - DNA, 25 bp, Homo sapien
cactataccactactgatgattggc

SEQ ID NO: 2789799 - DNA, 25 bp, Homo sapien
ggcactataccactactgatgattg

SEQ ID NO: 2789800 - DNA, 25 bp, Homo sapien
gcactataccactactgatgattgg

SEQ ID NO: 2789801 - DNA, 25 bp, Homo sapien
aggacacccaatcagcctaggctca

SEQ ID NO: 2789802 - DNA, 25 bp, Homo sapien
gacacccaatcagcctaggctcaag

SEQ ID NO: 2789803 - DNA, 25 bp, Homo sapien
tgaggacacccaatcagcctaggct

SEQ ID NO: 2789804 - DNA, 25 bp, Homo sapien
gtgaggacacccaatcagcctaggc

SEQ ID NO: 2789805 - DNA, 25 bp, Homo sapien
tcaacacagtataagttagggaaaa

SEQ ID NO: 2789806 - DNA, 25 bp, Homo sapien
ccatgcccagtcaacatttctatgg

SEQ ID NO: 2789807 - DNA, 25 bp, Homo sapien
gactatagggatgtgacaccaggcc

SEQ ID NO: 2789808 - DNA, 25 bp, Homo sapien
ttttcaacacagtataagttaggga

SEQ ID NO: 2789809 - DNA, 25 bp, Homo sapien
tgccttccttgcgtttcatctcccc

SEQ ID NO: 2789810 - DNA, 25 bp, Homo sapien
gaatgtccaaagtggtcctagattc

SEQ ID NO: 2789811 - DNA, 25 bp, Homo sapien
attctagccctagaatgttcttgtc

SEQ ID NO: 2789812 - DNA, 25 bp, Homo sapien
gtggtcctagattctagccctagaa

SEQ ID NO: 2789813 - DNA, 25 bp, Homo sapien
cctttgctttgaatgtccaaagtgg

SEQ ID NO: 2789814 - DNA, 25 bp, Homo sapien
tcccatccgagtttcaggtgaattg

SEQ ID NO: 2789815 - DNA, 25 bp, Homo sapien
tcaaagtgctgagtgcctggaccct

SEQ ID NO: 2789816 - DNA, 25 bp, Homo sapien
ccaaggttccatccgaagcaggcgg

SEQ ID NO: 2789817 - DNA, 25 bp, Homo sapien
ggttcctttaacagcgcgctggcag

SEQ ID NO: 2789818 - DNA, 25 bp, Homo sapien
ttttgcaggcagagatatccatggt

SEQ ID NO: 2789819 - DNA, 25 bp, Homo sapien
aacttgaaagcacaagaggttttgc

SEQ ID NO: 2789820 - DNA, 25 bp, Homo sapien
tctgatacttttccgttaccttcaa

SEQ ID NO: 2789821 - DNA, 25 bp, Homo sapien
gagatatccatggtccaatctggtt

SEQ ID NO: 2789822 - DNA, 25 bp, Homo sapien
ccaggtgtggtggtgcatgcctgtt

SEQ ID NO: 2789823 - DNA, 25 bp, Homo sapien
aggtgtggtggtgcatgcctgttat

SEQ ID NO: 2789824 - DNA, 25 bp, Homo sapien
agccaggtgtggtggtgcatgcctg

SEQ ID NO: 2789825 - DNA, 25 bp, Homo sapien
aagggtattacaaaagccaggtgtg

SEQ ID NO: 2789826 - DNA, 25 bp, Homo sapien
tccaagtctgtcagcacatagacct

SEQ ID NO: 2789827 - DNA, 25 bp, Homo sapien
actattacagataacgctgcagtga

SEQ ID NO: 2789828 - DNA, 25 bp, Homo sapien
ccaaaaataggatcataatgtacac

SEQ ID NO: 2789829 - DNA, 25 bp, Homo sapien
catagacctaattgctcttggcagc

SEQ ID NO: 2789830 - DNA, 25 bp, Homo sapien
ttcctgtattgttcaactttatata

SEQ ID NO: 2789831 - DNA, 25 bp, Homo sapien
ggtgctgttcttgcccaaaggccat

SEQ ID NO: 2789832 - DNA, 25 bp, Homo sapien
gggtgctgttcttgcccaaaggcca

SEQ ID NO: 2789833 - DNA, 25 bp, Homo sapien
tattgttcaactttatatatgtgct

SEQ ID NO: 2789834 - DNA, 25 bp, Homo sapien
gctgcttaacagaaattagtagata

SEQ ID NO: 2789835 - DNA, 25 bp, Homo sapien
tggctgtttttattgaagtggagtt

SEQ ID NO: 2789836 - DNA, 25 bp, Homo sapien
tattccaaatatccacaagcgtcat

SEQ ID NO: 2789837 - DNA, 25 bp, Homo sapien
gagttgaaacatagctgcttaacag

SEQ ID NO: 2789838 - DNA, 25 bp, Homo sapien
gttgtgcttacatagacattgtaca

SEQ ID NO: 2789839 - DNA, 25 bp, Homo sapien
tttcttgttgtgcttacatagacat

SEQ ID NO: 2789840 - DNA, 25 bp, Homo sapien
tcttgttgtgcttacatagacattg

SEQ ID NO: 2789841 - DNA, 25 bp, Homo sapien
tgttgtgcttacatagacattgtac

SEQ ID NO: 2789842 - DNA, 25 bp, Homo sapien
caggcactataccactactgatgat

SEQ ID NO: 2789843 - DNA, 25 bp, Homo sapien
ggcactataccactactgatgattg

SEQ ID NO: 2789844 - DNA, 25 bp, Homo sapien
cactataccactactgatgattggc

SEQ ID NO: 2789845 - DNA, 25 bp, Homo sapien
gcactataccactactgatgattgg

SEQ ID NO: 2789846 - DNA, 25 bp, Homo sapien
gacacccaatcagcctaggctcaag

SEQ ID NO: 2789847 - DNA, 25 bp, Homo sapien
aggacacccaatcagcctaggctca

SEQ ID NO: 2789848 - DNA, 25 bp, Homo sapien
tgaggacacccaatcagcctaggct

SEQ ID NO: 2789849 - DNA, 25 bp, Homo sapien
gtgaggacacccaatcagcctaggc

SEQ ID NO: 2789850 - DNA, 25 bp, Homo sapien
tcaacacagtataagttagggaaaa

SEQ ID NO: 2789851 - DNA, 25 bp, Homo sapien
ccatgcccagtcaacatttctatgg

SEQ ID NO: 2789852 - DNA, 25 bp, Homo sapien
ttttcaacacagtataagttaggga

SEQ ID NO: 2789853 - DNA, 25 bp, Homo sapien
gactatagggatgtgacaccaggcc

SEQ ID NO: 2789854 - DNA, 25 bp, Homo sapien
tgccttccttgcgtttcatctcccc

SEQ ID NO: 2789855 - DNA, 25 bp, Homo sapien
gtggtcctagattctagccctagaa

SEQ ID NO: 2789856 - DNA, 25 bp, Homo sapien
gaatgtccaaagtggtcctagattc

SEQ ID NO: 2789857 - DNA, 25 bp, Homo sapien
attctagccctagaatgttcttgtc

SEQ ID NO: 2789858 - DNA, 25 bp, Homo sapien
cctttgctttgaatgtccaaagtgg

SEQ ID NO: 2789859 - DNA, 25 bp, Homo sapien
tcaaagtgctgagtgcctggaccct

SEQ ID NO: 2789860 - DNA, 25 bp, Homo sapien
ggttcctttaacagcgcgctggcag

SEQ ID NO: 2789861 - DNA, 25 bp, Homo sapien
tcccatccgagtttcaggtgaattg

SEQ ID NO: 2789862 - DNA, 25 bp, Homo sapien
ccaaggttccatccgaagcaggcgg

SEQ ID NO: 2789863 - DNA, 25 bp, Homo sapien
ttttgcaggcagagatatccatggt

SEQ ID NO: 2789864 - DNA, 25 bp, Homo sapien
aacttgaaagcacaagaggttttgc

SEQ ID NO: 2789865 - DNA, 25 bp, Homo sapien
gagatatccatggtccaatctggtt

SEQ ID NO: 2789866 - DNA, 25 bp, Homo sapien
tctgatacttttccgttaccttcaa

SEQ ID NO: 2789867 - DNA, 25 bp, Homo sapien
agccaggtgtggtggtgcatgcctg

SEQ ID NO: 2789868 - DNA, 25 bp, Homo sapien
aggtgtggtggtgcatgcctgttat

SEQ ID NO: 2789869 - DNA, 25 bp, Homo sapien
ccaggtgtggtggtgcatgcctgtt

SEQ ID NO: 2789870 - DNA, 25 bp, Homo sapien
aagggtattacaaaagccaggtgtg

SEQ ID NO: 2789871 - DNA, 25 bp, Homo sapien
gggtgctgttcttgcccaaaggcca

SEQ ID NO: 2789872 - DNA, 25 bp, Homo sapien
ggtgctgttcttgcccaaaggccat

SEQ ID NO: 2789873 - DNA, 25 bp, Homo sapien
ttcctgtattgttcaactttatata

SEQ ID NO: 2789874 - DNA, 25 bp, Homo sapien
tattgttcaactttatatatgtgct

SEQ ID NO: 2789875 - DNA, 25 bp, Homo sapien
gggtgggacatttcacacatgcgtg

SEQ ID NO: 2789876 - DNA, 25 bp, Homo sapien
tattgtaacaagatttgagggtggg

SEQ ID NO: 2789877 - DNA, 25 bp, Homo sapien
tgtgccaatattgtaacaagatttg

SEQ ID NO: 2789878 - DNA, 25 bp, Homo sapien
aagatttgagggtgggacatttcac

SEQ ID NO: 2789879 - DNA, 25 bp, Homo sapien
tgctgagagtcagagggtacgtacc

SEQ ID NO: 2789880 - DNA, 25 bp, Homo sapien
tccagagagactgcaccaactgtgt

SEQ ID NO: 2789881 - DNA, 25 bp, Homo sapien
agttgcaaaattgccctccagagag

SEQ ID NO: 2789882 - DNA, 25 bp, Homo sapien
ggtacgtacctttgcaaagttgcaa

SEQ ID NO: 2789883 - DNA, 25 bp, Homo sapien
gttgagactacaggtacccatcacc

SEQ ID NO: 2789884 - DNA, 25 bp, Homo sapien
gtagttgagactacaggtacccatc

SEQ ID NO: 2789885 - DNA, 25 bp, Homo sapien
tagttgagactacaggtacccatca

SEQ ID NO: 2789886 - DNA, 25 bp, Homo sapien
gagtagttgagactacaggtaccca

SEQ ID NO: 2789887 - DNA, 25 bp, Homo sapien
tggctgttgtcacactagcaagtgg

SEQ ID NO: 2789888 - DNA, 25 bp, Homo sapien
tgaaaaggactctcttgatgagcac

SEQ ID NO: 2789889 - DNA, 25 bp, Homo sapien
caacgatcttttgacatgtgaccat

SEQ ID NO: 2789890 - DNA, 25 bp, Homo sapien
tcttggaagtcagttcgtgaaggca

SEQ ID NO: 2789891 - DNA, 25 bp, Homo sapien
ctgcagagccttcgaccttccgaga

SEQ ID NO: 2789892 - DNA, 25 bp, Homo sapien
tgcagcatccggaacgtttcggcgt

SEQ ID NO: 2789893 - DNA, 25 bp, Homo sapien
gagctcctcagaacccaggtcgatg

SEQ ID NO: 2789894 - DNA, 25 bp, Homo sapien
ccttccgagagcgaatggcgatcac

SEQ ID NO: 2789895 - DNA, 25 bp, Homo sapien
ccattctgggtagcgtgatgagatc

SEQ ID NO: 2789896 - DNA, 25 bp, Homo sapien
catcccttggtcctgtagatcctca

SEQ ID NO: 2789897 - DNA, 25 bp, Homo sapien
tatatgctgcccacccatgtaatgg

SEQ ID NO: 2789898 - DNA, 25 bp, Homo sapien
catgtaatggcctaagtcatcagat

SEQ ID NO: 2789899 - DNA, 25 bp, Homo sapien
cattgcttctttatctgaccaggat

SEQ ID NO: 2789900 - DNA, 25 bp, Homo sapien
atctgaccaggatgcaaaaccctct

SEQ ID NO: 2789901 - DNA, 25 bp, Homo sapien
ctgaccaggatgcaaaaccctcttt

SEQ ID NO: 2789902 - DNA, 25 bp, Homo sapien
caggatgcaaaaccctctttcagca

SEQ ID NO: 2789903 - DNA, 25 bp, Homo sapien
tgggcctgaattagtgtcaattata

SEQ ID NO: 2789904 - DNA, 25 bp, Homo sapien
tattccggagaagattgggcctgaa

SEQ ID NO: 2789905 - DNA, 25 bp, Homo sapien
tatttgaacatatcgagaggacagt

SEQ ID NO: 2789906 - DNA, 25 bp, Homo sapien
aactgcagaactcctgatgtatttg

SEQ ID NO: 2789907 - DNA, 25 bp, Homo sapien
tcagattttgttatggatgtcaggg

SEQ ID NO: 2789908 - DNA, 25 bp, Homo sapien
aatggtactataagttttcaacagg

SEQ ID NO: 2789909 - DNA, 25 bp, Homo sapien
caacaggttgttaaagaccaggctc

SEQ ID NO: 2789910 - DNA, 25 bp, Homo sapien
gaccaggctcatatcagtttatttc

SEQ ID NO: 2789911 - DNA, 25 bp, Homo sapien
tgcccggccgaaatttgtgatttta

SEQ ID NO: 2789912 - DNA, 25 bp, Homo sapien
agacaacgtaatcccaccctggaga

SEQ ID NO: 2789913 - DNA, 25 bp, Homo sapien
gacccagtggttctttatgtggaaa

SEQ ID NO: 2789914 - DNA, 25 bp, Homo sapien
ggagatgcctttaatactcagagca

SEQ ID NO: 2789915 - DNA, 25 bp, Homo sapien
gagtactccctaggagttccagcgg

SEQ ID NO: 2789916 - DNA, 25 bp, Homo sapien
cagcggccggtgacattgatctgtt

SEQ ID NO: 2789917 - DNA, 25 bp, Homo sapien
cacctgtacttcatttatggatacg

SEQ ID NO: 2789918 - DNA, 25 bp, Homo sapien
tgtgtttatccccaatggacattgg

SEQ ID NO: 2789919 - DNA, 25 bp, Homo sapien
ggtcttaattagctgaattcgttga

SEQ ID NO: 2789920 - DNA, 25 bp, Homo sapien
cttcaaatgaaagggtgtgtttggt

SEQ ID NO: 2789921 - DNA, 25 bp, Homo sapien
caaatcggttgagctgcacaaaggt

SEQ ID NO: 2789922 - DNA, 25 bp, Homo sapien
gaagatcttcaattagctgcagctt

SEQ ID NO: 2789923 - DNA, 25 bp, Homo sapien
gagctggctcttcctagctggctaa

SEQ ID NO: 2789924 - DNA, 25 bp, Homo sapien
gggaaatcgaatccaaactggctta

SEQ ID NO: 2789925 - DNA, 25 bp, Homo sapien
tttatgaatgaagccacttgcccca

SEQ ID NO: 2789926 - DNA, 25 bp, Homo sapien
tgattaacatgactcaggagaccag

SEQ ID NO: 2789927 - DNA, 25 bp, Homo sapien
gctggactcttttaaggactggccc

SEQ ID NO: 2789928 - DNA, 25 bp, Homo sapien
caggtgagtcagtaggttgtgccca

SEQ ID NO: 2789929 - DNA, 25 bp, Homo sapien
catagactttatgctcctgggctta

SEQ ID NO: 2789930 - DNA, 25 bp, Homo sapien
tgcttacgaagaactacggctggac

SEQ ID NO: 2789931 - DNA, 25 bp, Homo sapien
ggtctggactaacaatgaatacaag

SEQ ID NO: 2789932 - DNA, 25 bp, Homo sapien
caaagtgctcctagaaactgtcaca

SEQ ID NO: 2789933 - DNA, 25 bp, Homo sapien
cagttttctattcctcccttaggtg

SEQ ID NO: 2789934 - DNA, 25 bp, Homo sapien
tgcatcataaatcctctcccagttt

SEQ ID NO: 2789935 - DNA, 25 bp, Homo sapien
caagtgagtggaatgaatgttaacc

SEQ ID NO: 2789936 - DNA, 25 bp, Homo sapien
gacccattagacgatcacaccagat

SEQ ID NO: 2789937 - DNA, 25 bp, Homo sapien
tgccagtggcactgatcaagtttcc

SEQ ID NO: 2789938 - DNA, 25 bp, Homo sapien
ttttaggtataaaggacatcgtcca

SEQ ID NO: 2789939 - DNA, 25 bp, Homo sapien
gccaccatgcacagcaattaaacca

SEQ ID NO: 2789940 - DNA, 25 bp, Homo sapien
aagcagtcttcccatcctggcttcc

SEQ ID NO: 2789941 - DNA, 25 bp, Homo sapien
gctgctctcagacttctaggctcaa

SEQ ID NO: 2789942 - DNA, 25 bp, Homo sapien
ggctgctctcagacttctaggctca

SEQ ID NO: 2789943 - DNA, 25 bp, Homo sapien
tgttgtagcttgcataagtacttcc

SEQ ID NO: 2789944 - DNA, 25 bp, Homo sapien
taaatggaagcataccgtttgacct

SEQ ID NO: 2789945 - DNA, 25 bp, Homo sapien
ttttggctaccatgagtaataccga

SEQ ID NO: 2789946 - DNA, 25 bp, Homo sapien
ccctgggatacaccaacctaattgg

SEQ ID NO: 2789947 - DNA, 25 bp, Homo sapien
cctgctggattatgaacaacttgtc

SEQ ID NO: 2789948 - DNA, 25 bp, Homo sapien
caacttgtcctataatcatcctggg

SEQ ID NO: 2789949 - DNA, 25 bp, Homo sapien
cacttcatcggagttccctgggaaa

SEQ ID NO: 2789950 - DNA, 25 bp, Homo sapien
cactcgctcattttgttggaacact

SEQ ID NO: 2789951 - DNA, 25 bp, Homo sapien
gggacattctacttaattcttggaa

SEQ ID NO: 2789952 - DNA, 25 bp, Homo sapien
tggaaggataagctaggatgcagtc

SEQ ID NO: 2789953 - DNA, 25 bp, Homo sapien
tactctggaatcgatcaactccctt

SEQ ID NO: 2789954 - DNA, 25 bp, Homo sapien
cctgctcatttgtatagtggtaaaa

SEQ ID NO: 2789955 - DNA, 25 bp, Homo sapien
taaaaagcaacctatgaacctccta

SEQ ID NO: 2789956 - DNA, 25 bp, Homo sapien
taaagtcaagaaattggacattatc

SEQ ID NO: 2789957 - DNA, 25 bp, Homo sapien
tcaatgccttaaaagacccctgcgg

SEQ ID NO: 2789958 - DNA, 25 bp, Homo sapien
tatcaatgccttaaaagacccctgc

SEQ ID NO: 2789959 - DNA, 25 bp, Homo sapien
cttgggttcaagcaattctcctgcc

SEQ ID NO: 2789960 - DNA, 25 bp, Homo sapien
ggtcaggttggtctcaaactcctga

SEQ ID NO: 2789961 - DNA, 25 bp, Homo sapien
ttacttcaacttctgcctcttgggt

SEQ ID NO: 2789962 - DNA, 25 bp, Homo sapien
tcggcttacttcaacttctgcctct

SEQ ID NO: 2789963 - DNA, 25 bp, Homo sapien
caacctaagtgccttacctgatgac

SEQ ID NO: 2789964 - DNA, 25 bp, Homo sapien
tcatatacgcactcattccaccaaa

SEQ ID NO: 2789965 - DNA, 25 bp, Homo sapien
gtcatatacgcactcattccaccaa

SEQ ID NO: 2789966 - DNA, 25 bp, Homo sapien
aatgcatacaactatttttataact

SEQ ID NO: 2789967 - DNA, 25 bp, Homo sapien
tccctgcttcaagtgtggcactttg

SEQ ID NO: 2789968 - DNA, 25 bp, Homo sapien
cacacattatgtctaggtccctgct

SEQ ID NO: 2789969 - DNA, 25 bp, Homo sapien
cctgagatgcatggtgcttatgata

SEQ ID NO: 2789970 - DNA, 25 bp, Homo sapien
cctatgagatgatcgcaatgtggga

SEQ ID NO: 2789971 - DNA, 25 bp, Homo sapien
tgagagcagcttataccagcgccag

SEQ ID NO: 2789972 - DNA, 25 bp, Homo sapien
aaactcctctctttgtggcggcgat

SEQ ID NO: 2789973 - DNA, 25 bp, Homo sapien
tccttaaggaacaaagcgacagctg

SEQ ID NO: 2789974 - DNA, 25 bp, Homo sapien
gattgctgtccgtacaaacagggcc

SEQ ID NO: 2789975 - DNA, 25 bp, Homo sapien
cacccatgatgactgtaagcgccta

SEQ ID NO: 2789976 - DNA, 25 bp, Homo sapien
tcattgttgaggagcatccacttcc

SEQ ID NO: 2789977 - DNA, 25 bp, Homo sapien
tacagtactttttcgaccacccaga

SEQ ID NO: 2789978 - DNA, 25 bp, Homo sapien
gaacactgactttgggtgcgcttaa

SEQ ID NO: 2789979 - DNA, 25 bp, Homo sapien
tctgaagagtagcacagggcttccc

SEQ ID NO: 2789980 - DNA, 25 bp, Homo sapien
tctaagggtgtagcctgtatccatg

SEQ ID NO: 2789981 - DNA, 25 bp, Homo sapien
caaactaggtaaggatggcacttta

SEQ ID NO: 2789982 - DNA, 25 bp, Homo sapien
tcctgtgcctgaaagaactgtctgt

SEQ ID NO: 2789983 - DNA, 25 bp, Homo sapien
gtttggtggcgcaatatccactcac

SEQ ID NO: 2789984 - DNA, 25 bp, Homo sapien
ggcctctttgtattcttattgtgta

SEQ ID NO: 2789985 - DNA, 25 bp, Homo sapien
gccacccacgcctggcaaatgtttg

SEQ ID NO: 2789986 - DNA, 25 bp, Homo sapien
tattgtgtaaatgtcatgtacaaac

SEQ ID NO: 2789987 - DNA, 25 bp, Homo sapien
tacccttgcttaccagaacgaagtg

SEQ ID NO: 2789988 - DNA, 25 bp, Homo sapien
taagcgtacataaagattgccagga

SEQ ID NO: 2789989 - DNA, 25 bp, Homo sapien
tgaaggccagcaatttcctgatgag

SEQ ID NO: 2789990 - DNA, 25 bp, Homo sapien
gaacgaagtgatagtcatgctcaac

SEQ ID NO: 2789991 - DNA, 25 bp, Homo sapien
tggagatttaattggcagcctggac

SEQ ID NO: 2789992 - DNA, 25 bp, Homo sapien
gagtggccaaactgatcatccagca

SEQ ID NO: 2789993 - DNA, 25 bp, Homo sapien
ccagggtccttgcaaaattggctga

SEQ ID NO: 2789994 - DNA, 25 bp, Homo sapien
tatatttccatgtgtgaggcctcag

SEQ ID NO: 2789995 - DNA, 25 bp, Homo sapien
catttcaaacagaggtaatcacttg

SEQ ID NO: 2789996 - DNA, 25 bp, Homo sapien
tcatagcctggagttaaagagaacc

SEQ ID NO: 2789997 - DNA, 25 bp, Homo sapien
aagtaaaagcccaattggagaggct

SEQ ID NO: 2789998 - DNA, 25 bp, Homo sapien
gaactgagatttctgtcgagacctg

SEQ ID NO: 2789999 - DNA, 25 bp, Homo sapien
cattccaaagtctagtcagcctgtg

SEQ ID NO: 2790000 - DNA, 25 bp, Homo sapien
tcattgagaacacagggtgtgcccg

SEQ ID NO: 2790001 - DNA, 25 bp, Homo sapien
aatagggcatagcagtggacagtcg

SEQ ID NO: 2790002 - DNA, 25 bp, Homo sapien
gacatggctttaggaatgtcacacc

SEQ ID NO: 2790003 - DNA, 25 bp, Homo sapien
caggtctgccaatctatctaaaagc

SEQ ID NO: 2790004 - DNA, 25 bp, Homo sapien
tccattgtccatggtcaacagggaa

SEQ ID NO: 2790005 - DNA, 25 bp, Homo sapien
catacatggatgaaacgggtttaac

SEQ ID NO: 2790006 - DNA, 25 bp, Homo sapien
tttgaggtccctgagtaatccaccc

SEQ ID NO: 2790007 - DNA, 25 bp, Homo sapien
gatccagacttcgtgtgagaggaca

SEQ ID NO: 2790008 - DNA, 25 bp, Homo sapien
tgaagttaggcaccgcccaagaagt

SEQ ID NO: 2790009 - DNA, 25 bp, Homo sapien
tactgtgcgctgctgaccattgggt

SEQ ID NO: 2790010 - DNA, 25 bp, Homo sapien
tcatgggagaggtatttacagggcc

SEQ ID NO: 2790011 - DNA, 25 bp, Homo sapien
cacaggctgttagtagcagaaggcc

SEQ ID NO: 2790012 - DNA, 25 bp, Homo sapien
gatccctaggacacaagcagaatgc

SEQ ID NO: 2790013 - DNA, 25 bp, Homo sapien
ttctgccacatacgctaggtcatag

SEQ ID NO: 2790014 - DNA, 25 bp, Homo sapien
tatcagcaagtggttgctccacagc

SEQ ID NO: 2790015 - DNA, 25 bp, Homo sapien
tgagctccacattgctaaattggtg

SEQ ID NO: 2790016 - DNA, 25 bp, Homo sapien
cagctcttatgagggtcaccaatga

SEQ ID NO: 2790017 - DNA, 25 bp, Homo sapien
cactttagttgacccattagcagca

SEQ ID NO: 2790018 - DNA, 25 bp, Homo sapien
taaattggtgaatacttctcagtcc

SEQ ID NO: 2790019 - DNA, 25 bp, Homo sapien
tacaactaatgcctaacccgtcatg

SEQ ID NO: 2790020 - DNA, 25 bp, Homo sapien
tagtcctaggtcaaacaccattatg

SEQ ID NO: 2790021 - DNA, 25 bp, Homo sapien
agtctatgctctaagctcacgcttg

SEQ ID NO: 2790022 - DNA, 25 bp, Homo sapien
cccgtcatgatgaattaaagactga

SEQ ID NO: 2790023 - DNA, 25 bp, Homo sapien
aacagtacaatgaacagccatgtcc

SEQ ID NO: 2790024 - DNA, 25 bp, Homo sapien
cccaccccagtcttttacagatggt

SEQ ID NO: 2790025 - DNA, 25 bp, Homo sapien
cttaagtatgcaaattaagacagtc

SEQ ID NO: 2790026 - DNA, 25 bp, Homo sapien
aacattttgccacatacgcctcaca

SEQ ID NO: 2790027 - DNA, 25 bp, Homo sapien
ctttagtggtgtcatttagtgctgc

SEQ ID NO: 2790028 - DNA, 25 bp, Homo sapien
gccagttatcttctataacgcttca

SEQ ID NO: 2790029 - DNA, 25 bp, Homo sapien
tatcttctataacgcttcacattcc

SEQ ID NO: 2790030 - DNA, 25 bp, Homo sapien
tttctttagtggtgtcatttagtgc

SEQ ID NO: 2790031 - DNA, 25 bp, Homo sapien
aaagtctgctggtctgcctactagt

SEQ ID NO: 2790032 - DNA, 25 bp, Homo sapien
aaccagaggcttgacgaattccagt

SEQ ID NO: 2790033 - DNA, 25 bp, Homo sapien
tcatatgtcagagtgtacagtgcag

SEQ ID NO: 2790034 - DNA, 25 bp, Homo sapien
agtgcagtatgcctaggttatccca

SEQ ID NO: 2790035 - DNA, 25 bp, Homo sapien
aagtaagattcactttcataatgct

SEQ ID NO: 2790036 - DNA, 25 bp, Homo sapien
agattcactttcataatgctggcag

SEQ ID NO: 2790037 - DNA, 25 bp, Homo sapien
catttgttttccacaaaccataaag

SEQ ID NO: 2790038 - DNA, 25 bp, Homo sapien
tgattgttttacattaacctttcaa

SEQ ID NO: 2790039 - DNA, 25 bp, Homo sapien
tccttctttttgattttgtctgaaa

SEQ ID NO: 2790040 - DNA, 25 bp, Homo sapien
ttaatttaaggaatgtgagcacctt

SEQ ID NO: 2790041 - DNA, 25 bp, Homo sapien
aatttaaggaatgtgagcaccttcc

SEQ ID NO: 2790042 - DNA, 25 bp, Homo sapien
agcaccttccttctttttgattttg

SEQ ID NO: 2790043 - DNA, 25 bp, Homo sapien
tagtcatttgcattctgcttagatt

SEQ ID NO: 2790044 - DNA, 25 bp, Homo sapien
ttagtcatttgcattctgcttagat

SEQ ID NO: 2790045 - DNA, 25 bp, Homo sapien
agtcatttgcattctgcttagattt

SEQ ID NO: 2790046 - DNA, 25 bp, Homo sapien
taaagagagaagcaagtagtatttt

SEQ ID NO: 2790047 - DNA, 25 bp, Homo sapien
caagagaatctggacatatgggagg

SEQ ID NO: 2790048 - DNA, 25 bp, Homo sapien
cagtatgatagccactcatgtacca

SEQ ID NO: 2790049 - DNA, 25 bp, Homo sapien
tcatcaagagaatctggacatatgg

SEQ ID NO: 2790050 - DNA, 25 bp, Homo sapien
catataatagccagtatgatagcca

SEQ ID NO: 2790051 - DNA, 25 bp, Homo sapien
aaagtctggagatttatattatata

SEQ ID NO: 2790052 - DNA, 25 bp, Homo sapien
gtgaatgctggaaattaattgtatt

SEQ ID NO: 2790053 - DNA, 25 bp, Homo sapien
aagtctggagatttatattatatag

SEQ ID NO: 2790054 - DNA, 25 bp, Homo sapien
tttgcttatataatctcctacttaa

SEQ ID NO: 2790055 - DNA, 25 bp, Homo sapien
agtaaatgtcttgggtagaacacct

SEQ ID NO: 2790056 - DNA, 25 bp, Homo sapien
tccaactatacctagaagggcaaac

SEQ ID NO: 2790057 - DNA, 25 bp, Homo sapien
catcccaatacacagtatgccaaaa

SEQ ID NO: 2790058 - DNA, 25 bp, Homo sapien
catagcatttcgagggcgattttaa

SEQ ID NO: 2790059 - DNA, 25 bp, Homo sapien
gtggtgggccattgaattttagacc

SEQ ID NO: 2790060 - DNA, 25 bp, Homo sapien
gcggtggtgggccattgaattttag

SEQ ID NO: 2790061 - DNA, 25 bp, Homo sapien
aggcagccagcatgatagtaagtgg

SEQ ID NO: 2790062 - DNA, 25 bp, Homo sapien
gtggcggtggtgggccattgaattt

SEQ ID NO: 2790063 - DNA, 25 bp, Homo sapien
ccatggagcagatttgggcttgatg

SEQ ID NO: 2790064 - DNA, 25 bp, Homo sapien
tgttatctgatttatttccaggaga

SEQ ID NO: 2790065 - DNA, 25 bp, Homo sapien
caggagacctggagttctcactttc

SEQ ID NO: 2790066 - DNA, 25 bp, Homo sapien
tcatctgttgaaacttggctttcat

SEQ ID NO: 2790067 - DNA, 25 bp, Homo sapien
caattgaagcaatggtagctgggta

SEQ ID NO: 2790068 - DNA, 25 bp, Homo sapien
attattagctacttcacagattggg

SEQ ID NO: 2790069 - DNA, 25 bp, Homo sapien
aagtagatcggacagattttgctcc

SEQ ID NO: 2790070 - DNA, 25 bp, Homo sapien
atgcaaccgtcttctgaccaaatgg

SEQ ID NO: 2790071 - DNA, 25 bp, Homo sapien
ggaagctgcagtattcttcttttgg

SEQ ID NO: 2790072 - DNA, 25 bp, Homo sapien
tacccgaagtttcacaaatgtcacc

SEQ ID NO: 2790073 - DNA, 25 bp, Homo sapien
cgaagtttcacaaatgtcaccattc

SEQ ID NO: 2790074 - DNA, 25 bp, Homo sapien
gtaaggaagctgcagtattcttctt

SEQ ID NO: 2790075 - DNA, 25 bp, Homo sapien
gcttttatcagtgctgtatcatccc

SEQ ID NO: 2790076 - DNA, 25 bp, Homo sapien
tgtatcatcccaaatgtcagaatca

SEQ ID NO: 2790077 - DNA, 25 bp, Homo sapien
aaatgaagccacagctttatcatat

SEQ ID NO: 2790078 - DNA, 25 bp, Homo sapien
tatcatatgcttttatcagtgctgt

SEQ ID NO: 2790079 - DNA, 25 bp, Homo sapien
cacttcttcatatccacgtggtaaa

SEQ ID NO: 2790080 - DNA, 25 bp, Homo sapien
tccatttactctgtgggtgccctca

SEQ ID NO: 2790081 - DNA, 25 bp, Homo sapien
ggtcaatcattaagagaactccttt

SEQ ID NO: 2790082 - DNA, 25 bp, Homo sapien
tcatgaccacgaatctcaagtaggc

SEQ ID NO: 2790083 - DNA, 25 bp, Homo sapien
tgtgttaactatatagctgtcacca

SEQ ID NO: 2790084 - DNA, 25 bp, Homo sapien
gcccattcacgtatcatagatgtgt

SEQ ID NO: 2790085 - DNA, 25 bp, Homo sapien
gctgtcaccaaaagaaccgctaatg

SEQ ID NO: 2790086 - DNA, 25 bp, Homo sapien
atcctatctgcccattcacgtatca

SEQ ID NO: 2790087 - DNA, 25 bp, Homo sapien
acaactccagtgagcggatcgactt

SEQ ID NO: 2790088 - DNA, 25 bp, Homo sapien
aaggagcccaaactgctcgaggaag

SEQ ID NO: 2790089 - DNA, 25 bp, Homo sapien
ggatcgacttgatgctgtcccgagg

SEQ ID NO: 2790090 - DNA, 25 bp, Homo sapien
ctactgccaagtcgcggcagggcct

SEQ ID NO: 2790091 - DNA, 25 bp, Homo sapien
gggagactgcactggctgcgacctc

SEQ ID NO: 2790092 - DNA, 25 bp, Homo sapien
aagggtgctgagagcgctaataggg

SEQ ID NO: 2790093 - DNA, 25 bp, Homo sapien
agagcgctaatagggagactgcact

SEQ ID NO: 2790094 - DNA, 25 bp, Homo sapien
ctgcggaaggagagttgggccggaa

SEQ ID NO: 2790095 - DNA, 25 bp, Homo sapien
gccggaacagcacggaatcctcctg

SEQ ID NO: 2790096 - DNA, 25 bp, Homo sapien
gcgccggaacagcacggaatcctcc

SEQ ID NO: 2790097 - DNA, 25 bp, Homo sapien
ggaacagcacggaatcctcctgctc

SEQ ID NO: 2790098 - DNA, 25 bp, Homo sapien
ccgcgccggaacagcacggaatcct

SEQ ID NO: 2790099 - DNA, 25 bp, Homo sapien
ttctacgagtggttatcgccctccc

SEQ ID NO: 2790100 - DNA, 25 bp, Homo sapien
tctgggagcggaacagtacggtggc

SEQ ID NO: 2790101 - DNA, 25 bp, Homo sapien
tcttaagagtgacgacttccgccgc

SEQ ID NO: 2790102 - DNA, 25 bp, Homo sapien
ggaccgcttgtagtaacttctcacg

SEQ ID NO: 2790103 - DNA, 25 bp, Homo sapien
gtcacaggcattaagggcacaccag

SEQ ID NO: 2790104 - DNA, 25 bp, Homo sapien
gacctcatttcagacttcccaaata

SEQ ID NO: 2790105 - DNA, 25 bp, Homo sapien
tagctattaagatcagttaccagag

SEQ ID NO: 2790106 - DNA, 25 bp, Homo sapien
tataccaatattcacagaggccaac

SEQ ID NO: 2790107 - DNA, 25 bp, Homo sapien
tccgtttcatctccgtgaggtccag

SEQ ID NO: 2790108 - DNA, 25 bp, Homo sapien
aaggcccccaatccggaagatcagc

SEQ ID NO: 2790109 - DNA, 25 bp, Homo sapien
tggagatcatatcctcgtgcatctt

SEQ ID NO: 2790110 - DNA, 25 bp, Homo sapien
tggagtgactcgcagcagggccacg

SEQ ID NO: 2790111 - DNA, 25 bp, Homo sapien
gttgaatggtggaccccaaaatgat

SEQ ID NO: 2790112 - DNA, 25 bp, Homo sapien
tctgtccatctgatatgcgtgaatg

SEQ ID NO: 2790113 - DNA, 25 bp, Homo sapien
atgtgacctatttgggaaaacagtt

SEQ ID NO: 2790114 - DNA, 25 bp, Homo sapien
agtgctaagttacatctaagtttcc

SEQ ID NO: 2790115 - DNA, 25 bp, Homo sapien
gagttatgctgccataagccaagta

SEQ ID NO: 2790116 - DNA, 25 bp, Homo sapien
aatccaacagcaaaagtcctcataa

SEQ ID NO: 2790117 - DNA, 25 bp, Homo sapien
tatgctgccataagccaagtaatac

SEQ ID NO: 2790118 - DNA, 25 bp, Homo sapien
ctaaatccaacagcaaaagtcctca

SEQ ID NO: 2790119 - DNA, 25 bp, Homo sapien
cttcagagggaggtgtggcccagct

SEQ ID NO: 2790120 - DNA, 25 bp, Homo sapien
tcagagggaggtgtggcccagctga

SEQ ID NO: 2790121 - DNA, 25 bp, Homo sapien
aagaggaaagcaaggattctccctt

SEQ ID NO: 2790122 - DNA, 25 bp, Homo sapien
gaggaaagcaaggattctcccttgg

SEQ ID NO: 2790123 - DNA, 25 bp, Homo sapien
atttatttctttgagatgaagtctt

SEQ ID NO: 2790124 - DNA, 25 bp, Homo sapien
gaaattctcttgcctcagcctccca

SEQ ID NO: 2790125 - DNA, 25 bp, Homo sapien
tttgcctcccagagtcaagaaattc

SEQ ID NO: 2790126 - DNA, 25 bp, Homo sapien
acctttgcctcccagagtcaagaaa

SEQ ID NO: 2790127 - DNA, 25 bp, Homo sapien
tgaagactaaagttaaccaaagatc

SEQ ID NO: 2790128 - DNA, 25 bp, Homo sapien
tatgaagatagaaactcaggctaaa

SEQ ID NO: 2790129 - DNA, 25 bp, Homo sapien
tttgcctttgtgactaccatcatag

SEQ ID NO: 2790130 - DNA, 25 bp, Homo sapien
aaaacttcagccgggtgggatggct

SEQ ID NO: 2790131 - DNA, 25 bp, Homo sapien
tggaccctaacttctattatatatt

SEQ ID NO: 2790132 - DNA, 25 bp, Homo sapien
tatacaaatggaccctaacttctat

SEQ ID NO: 2790133 - DNA, 25 bp, Homo sapien
attatacaaatggaccctaacttct

SEQ ID NO: 2790134 - DNA, 25 bp, Homo sapien
caaatggaccctaacttctattata

SEQ ID NO: 2790135 - DNA, 25 bp, Homo sapien
aagagatcctattatctgatcatat

SEQ ID NO: 2790136 - DNA, 25 bp, Homo sapien
gacaaagattctttattatataaga

SEQ ID NO: 2790137 - DNA, 25 bp, Homo sapien
tatataagagatcctattatctgat

SEQ ID NO: 2790138 - DNA, 25 bp, Homo sapien
ttatctgatcatattacctaataaa

SEQ ID NO: 2790139 - DNA, 25 bp, Homo sapien
acatcgcactaagtaaagctgaaag

SEQ ID NO: 2790140 - DNA, 25 bp, Homo sapien
gactgtccactctacaaaatcttga

SEQ ID NO: 2790141 - DNA, 25 bp, Homo sapien
tataacatatgtaatgactgtccac

SEQ ID NO: 2790142 - DNA, 25 bp, Homo sapien
gaagactgcttctaaaacatcgcac

SEQ ID NO: 2790143 - DNA, 25 bp, Homo sapien
ttctcttgtctgcatagacttcttc

SEQ ID NO: 2790144 - DNA, 25 bp, Homo sapien
tctgcatagacttcttctcattagc

SEQ ID NO: 2790145 - DNA, 25 bp, Homo sapien
cttttcttgcatgatctcagagtcc

SEQ ID NO: 2790146 - DNA, 25 bp, Homo sapien
ctgcttttcttgcatgatctcagag

SEQ ID NO: 2790147 - DNA, 25 bp, Homo sapien
cattttcatggctggagacaaaatg

SEQ ID NO: 2790148 - DNA, 25 bp, Homo sapien
cccattcagtgtattagaagacaat

SEQ ID NO: 2790149 - DNA, 25 bp, Homo sapien
tttcatggctggagacaaaatggaa

SEQ ID NO: 2790150 - DNA, 25 bp, Homo sapien
cacttggtttctacacataacccat

SEQ ID NO: 2790151 - DNA, 25 bp, Homo sapien
gacttattaacctcatgtttcaaac

SEQ ID NO: 2790152 - DNA, 25 bp, Homo sapien
caactctgacttattaacctcatgt

SEQ ID NO: 2790153 - DNA, 25 bp, Homo sapien
tctgacttattaacctcatgtttca

SEQ ID NO: 2790154 - DNA, 25 bp, Homo sapien
ccacaactctgacttattaacctca

SEQ ID NO: 2790155 - DNA, 25 bp, Homo sapien
gattgcgccattgtactccgcctgg

SEQ ID NO: 2790156 - DNA, 25 bp, Homo sapien
attgcgccattgtactccgcctggg

SEQ ID NO: 2790157 - DNA, 25 bp, Homo sapien
ctgagattgcgccattgtactccgc

SEQ ID NO: 2790158 - DNA, 25 bp, Homo sapien
gagattgcgccattgtactccgcct

SEQ ID NO: 2790159 - DNA, 25 bp, Homo sapien
gaaaccaagctctgttgtgcttgct

SEQ ID NO: 2790160 - DNA, 25 bp, Homo sapien
gctgttctgcctataaagtagccaa

SEQ ID NO: 2790161 - DNA, 25 bp, Homo sapien
gaagtacagtggaaaaagaaccatg

SEQ ID NO: 2790162 - DNA, 25 bp, Homo sapien
tgtgcttgctgtgtaactttagtaa

SEQ ID NO: 2790163 - DNA, 25 bp, Homo sapien
ttcagagtagtttgggtaggctgtc

SEQ ID NO: 2790164 - DNA, 25 bp, Homo sapien
gttgtaactctagcacctcacagtg

SEQ ID NO: 2790165 - DNA, 25 bp, Homo sapien
tcagcacagctagctattatgcata

SEQ ID NO: 2790166 - DNA, 25 bp, Homo sapien
taattgagtcccttgtcattcagag

SEQ ID NO: 2790167 - DNA, 25 bp, Homo sapien
cagttctcccgactctcccaaactg

SEQ ID NO: 2790168 - DNA, 25 bp, Homo sapien
gttgcttcaatcacaacgtcagtga

SEQ ID NO: 2790169 - DNA, 25 bp, Homo sapien
cccagcccaaaatgttgcttcaatc

SEQ ID NO: 2790170 - DNA, 25 bp, Homo sapien
cacaacgtcagtgactttagaatta

SEQ ID NO: 2790171 - DNA, 25 bp, Homo sapien
ggcagtcaagctatcctctttcctc

SEQ ID NO: 2790172 - DNA, 25 bp, Homo sapien
ttttctggcgggcaagttctcgttg

SEQ ID NO: 2790173 - DNA, 25 bp, Homo sapien
ggcgggcaagttctcgttgatttcc

SEQ ID NO: 2790174 - DNA, 25 bp, Homo sapien
tcatgtttttctggcgggcaagttc

SEQ ID NO: 2790175 - DNA, 25 bp, Homo sapien
ctacaaagtcaaacagtcatgctct

SEQ ID NO: 2790176 - DNA, 25 bp, Homo sapien
tcatagataaactagcagagtaaca

SEQ ID NO: 2790177 - DNA, 25 bp, Homo sapien
taataattccaataaacaggcctta

SEQ ID NO: 2790178 - DNA, 25 bp, Homo sapien
gcatctttagtttgtgttttcatag

SEQ ID NO: 2790179 - DNA, 25 bp, Homo sapien
ttaccgcacaaactcgcacctgagg

SEQ ID NO: 2790180 - DNA, 25 bp, Homo sapien
gggcggccgtgtccacatctccggg

SEQ ID NO: 2790181 - DNA, 25 bp, Homo sapien
gcaggcacccgtccggcctgaaaag

SEQ ID NO: 2790182 - DNA, 25 bp, Homo sapien
tctctctgccgactgaagcggggat

SEQ ID NO: 2790183 - DNA, 25 bp, Homo sapien
accaccaacggagcctggaagaaga

SEQ ID NO: 2790184 - DNA, 25 bp, Homo sapien
tcggaaaagcaacggttctctggca

SEQ ID NO: 2790185 - DNA, 25 bp, Homo sapien
gtcaccaccgctgaccgggaaggct

SEQ ID NO: 2790186 - DNA, 25 bp, Homo sapien
aagagcaactcggaaaagcaacggt

SEQ ID NO: 2790187 - DNA, 25 bp, Homo sapien
tcataataggaaagtcatgaaatct

SEQ ID NO: 2790188 - DNA, 25 bp, Homo sapien
ttaaaatgggattgacccactgctg

SEQ ID NO: 2790189 - DNA, 25 bp, Homo sapien
tcacaacaattagaaagatcaagag

SEQ ID NO: 2790190 - DNA, 25 bp, Homo sapien
catgaaatctacctcagtgcccatc

SEQ ID NO: 2790191 - DNA, 25 bp, Homo sapien
catctcttagcttggaaatttgcag

SEQ ID NO: 2790192 - DNA, 25 bp, Homo sapien
tcagcaagttttcccgctaaggaaa

SEQ ID NO: 2790193 - DNA, 25 bp, Homo sapien
cagatattggcctcgtgttgtagcc

SEQ ID NO: 2790194 - DNA, 25 bp, Homo sapien
tgcaggcaatcctaaataatcaggt

SEQ ID NO: 2790195 - DNA, 25 bp, Homo sapien
ggtctacacttcaagcaggcattgg

SEQ ID NO: 2790196 - DNA, 25 bp, Homo sapien
gaatggccagctcaagaatcgtagt

SEQ ID NO: 2790197 - DNA, 25 bp, Homo sapien
tgttatgccgactactcagggaagg

SEQ ID NO: 2790198 - DNA, 25 bp, Homo sapien
gaacttataagtacctgagccgact

SEQ ID NO: 2790199 - DNA, 25 bp, Homo sapien
ggcttcgcctctcaatttcactttg

SEQ ID NO: 2790200 - DNA, 25 bp, Homo sapien
tacaatcgtttagctggacagagaa

SEQ ID NO: 2790201 - DNA, 25 bp, Homo sapien
tccaagtctcaccagaccagaagcc

SEQ ID NO: 2790202 - DNA, 25 bp, Homo sapien
ggaccccactcggttgccgttgctg

SEQ ID NO: 2790203 - DNA, 25 bp, Homo sapien
tattggccagacctaagactcttgc

SEQ ID NO: 2790204 - DNA, 25 bp, Homo sapien
ctcagcctgtgggtaagggacaaaa

SEQ ID NO: 2790205 - DNA, 25 bp, Homo sapien
cagagaactatagcacataaccgag

SEQ ID NO: 2790206 - DNA, 25 bp, Homo sapien
taaaaagctgcccatgattattggc

SEQ ID NO: 2790207 - DNA, 25 bp, Homo sapien
taggtagttcaactcctgcaggtgg

SEQ ID NO: 2790208 - DNA, 25 bp, Homo sapien
tcagcccagtgtgaatgagttcttt

SEQ ID NO: 2790209 - DNA, 25 bp, Homo sapien
cacaagattgaaaccaaggtgtcag

SEQ ID NO: 2790210 - DNA, 25 bp, Homo sapien
gtttcctttgttactgccagctgtg

SEQ ID NO: 2790211 - DNA, 25 bp, Homo sapien
gatcagtttcggattctaacccaca

SEQ ID NO: 2790212 - DNA, 25 bp, Homo sapien
ttgagccaagttagcctgcctgtcc

SEQ ID NO: 2790213 - DNA, 25 bp, Homo sapien
taaagccattagaaagttgcctggc

SEQ ID NO: 2790214 - DNA, 25 bp, Homo sapien
ttgcctggcaaaatatagaagcttg

SEQ ID NO: 2790215 - DNA, 25 bp, Homo sapien
cctttttaaactcggagaggcaatg

SEQ ID NO: 2790216 - DNA, 25 bp, Homo sapien
taaatagataaactgctttgtggga

SEQ ID NO: 2790217 - DNA, 25 bp, Homo sapien
caactttgtggctacacttttgtct

SEQ ID NO: 2790218 - DNA, 25 bp, Homo sapien
ccttggtactgcaaaactcaatcgc

SEQ ID NO: 2790219 - DNA, 25 bp, Homo sapien
ttaaaatggctataacgtccgatcc

SEQ ID NO: 2790220 - DNA, 25 bp, Homo sapien
tattaacccaagcatgaagcacagc

SEQ ID NO: 2790221 - DNA, 25 bp, Homo sapien
taaagactcctcaaatatacgcaga

SEQ ID NO: 2790222 - DNA, 25 bp, Homo sapien
tacgcagatgtataggattcttacg

SEQ ID NO: 2790223 - DNA, 25 bp, Homo sapien
cttcttcagatgatgcctttagatc

SEQ ID NO: 2790224 - DNA, 25 bp, Homo sapien
agttgcgattgttgatatctttgtc

SEQ ID NO: 2790225 - DNA, 25 bp, Homo sapien
caaatagttgcgattgttgatatct

SEQ ID NO: 2790226 - DNA, 25 bp, Homo sapien
ttagatccagcattatccctcttgt

SEQ ID NO: 2790227 - DNA, 25 bp, Homo sapien
gaaagcccgccttatgaatggcaaa

SEQ ID NO: 2790228 - DNA, 25 bp, Homo sapien
caaacacagactaatgagagttttc

SEQ ID NO: 2790229 - DNA, 25 bp, Homo sapien
caagaaatcccacagttcacaaaat

SEQ ID NO: 2790230 - DNA, 25 bp, Homo sapien
caggaaactcagagttatctggtat

SEQ ID NO: 2790231 - DNA, 25 bp, Homo sapien
gaggcacacccaggataatgcttga

SEQ ID NO: 2790232 - DNA, 25 bp, Homo sapien
tctagtctaaagacgggcaggctca

SEQ ID NO: 2790233 - DNA, 25 bp, Homo sapien
ttcccacagctattgaatgaggccc

SEQ ID NO: 2790234 - DNA, 25 bp, Homo sapien
gaagagatctctgtcactcacggag

SEQ ID NO: 2790235 - DNA, 25 bp, Homo sapien
tgtacagtgtaccatagtacctatg

SEQ ID NO: 2790236 - DNA, 25 bp, Homo sapien
ccccagaggctaagtcagtgggaaa

SEQ ID NO: 2790237 - DNA, 25 bp, Homo sapien
ggtacagttttacttggacaaggca

SEQ ID NO: 2790238 - DNA, 25 bp, Homo sapien
cacagagaataaacgatggtacagt

SEQ ID NO: 2790239 - DNA, 25 bp, Homo sapien
taagagccatatgtggtaactgtcc

SEQ ID NO: 2790240 - DNA, 25 bp, Homo sapien
aatacactgaattgcaagaattagg

SEQ ID NO: 2790241 - DNA, 25 bp, Homo sapien
tgcctctcgccaggaaatacactga

SEQ ID NO: 2790242 - DNA, 25 bp, Homo sapien
taactgtccagggttgttcatctct

SEQ ID NO: 2790243 - DNA, 25 bp, Homo sapien
catctgagatgacttggaaaacacc

SEQ ID NO: 2790244 - DNA, 25 bp, Homo sapien
tccctgctggaaatagtggtataaa

SEQ ID NO: 2790245 - DNA, 25 bp, Homo sapien
tagtcagcaccgactcagaaacagc

SEQ ID NO: 2790246 - DNA, 25 bp, Homo sapien
caaaacttttaagcgctggaatgaa

SEQ ID NO: 2790247 - DNA, 25 bp, Homo sapien
aaagcagtttcatcgatagagatca

SEQ ID NO: 2790248 - DNA, 25 bp, Homo sapien
taggcaacgagagcgatactccgac

SEQ ID NO: 2790249 - DNA, 25 bp, Homo sapien
atagagatcaatttctggaatcact

SEQ ID NO: 2790250 - DNA, 25 bp, Homo sapien
tagtcttgacagttgcctttttatt

SEQ ID NO: 2790251 - DNA, 25 bp, Homo sapien
gcccaaatggttagaaatgctgcaa

SEQ ID NO: 2790252 - DNA, 25 bp, Homo sapien
gatgctgaaatcaaatggctatacc

SEQ ID NO: 2790253 - DNA, 25 bp, Homo sapien
caaagagcagtgctcatatgcagat

SEQ ID NO: 2790254 - DNA, 25 bp, Homo sapien
tcttttgggtgatctgttgtctgga

SEQ ID NO: 2790255 - DNA, 25 bp, Homo sapien
gcaagcagattaatagacgaatgga

SEQ ID NO: 2790256 - DNA, 25 bp, Homo sapien
gagacctatctgataaggcaagcag

SEQ ID NO: 2790257 - DNA, 25 bp, Homo sapien
tgggttaagagaaggatgaacagaa

SEQ ID NO: 2790258 - DNA, 25 bp, Homo sapien
cagaagaatggatatgagacctatc

SEQ ID NO: 2790259 - DNA, 25 bp, Homo sapien
tgtggatacccaaggctgcaaatct

SEQ ID NO: 2790260 - DNA, 25 bp, Homo sapien
gaaatgccagacagtaattcctaga

SEQ ID NO: 2790261 - DNA, 25 bp, Homo sapien
catagaatccttgcgtgctttaagc

SEQ ID NO: 2790262 - DNA, 25 bp, Homo sapien
cacccaggacatgcgatgaagattg

SEQ ID NO: 2790263 - DNA, 25 bp, Homo sapien
tgagcctccttaatagccagtcatg

SEQ ID NO: 2790264 - DNA, 25 bp, Homo sapien
cacctgagcctccttaatagccagt

SEQ ID NO: 2790265 - DNA, 25 bp, Homo sapien
taatagccagtcatgtgccaccctg

SEQ ID NO: 2790266 - DNA, 25 bp, Homo sapien
tccttaatagccagtcatgtgccac

SEQ ID NO: 2790267 - DNA, 25 bp, Homo sapien
tcagaggttatttaaccagagacta

SEQ ID NO: 2790268 - DNA, 25 bp, Homo sapien
cagaggttatttaaccagagactat

SEQ ID NO: 2790269 - DNA, 25 bp, Homo sapien
agaggttatttaaccagagactatt

SEQ ID NO: 2790270 - DNA, 25 bp, Homo sapien
ttttcaacccactatagcatcagct

SEQ ID NO: 2790271 - DNA, 25 bp, Homo sapien
aattttcaacccactatagcatcag

SEQ ID NO: 2790272 - DNA, 25 bp, Homo sapien
ccaaaattttcaacccactatagca

SEQ ID NO: 2790273 - DNA, 25 bp, Homo sapien
aaattttcaacccactatagcatca

SEQ ID NO: 2790274 - DNA, 25 bp, Homo sapien
cccagtggtaaatgttgcaagtcat

SEQ ID NO: 2790275 - DNA, 25 bp, Homo sapien
actaaaagaatgattggtccaccac

SEQ ID NO: 2790276 - DNA, 25 bp, Homo sapien
catttgattatattcaacgcctgtg

SEQ ID NO: 2790277 - DNA, 25 bp, Homo sapien
tgacctctaggctcttcgttctgcc

SEQ ID NO: 2790278 - DNA, 25 bp, Homo sapien
gaaagctagccagagaaagtctaaa

SEQ ID NO: 2790279 - DNA, 25 bp, Homo sapien
gacatgtgagctcagtatttaccat

SEQ ID NO: 2790280 - DNA, 25 bp, Homo sapien
cattggaaagggtcctcataagagt

SEQ ID NO: 2790281 - DNA, 25 bp, Homo sapien
cactttatgagcagggttattgcaa

SEQ ID NO: 2790282 - DNA, 25 bp, Homo sapien
ttctttggtgtagaggacgccttta

SEQ ID NO: 2790283 - DNA, 25 bp, Homo sapien
acataatgaccttctatcccaattt

SEQ ID NO: 2790284 - DNA, 25 bp, Homo sapien
tctttggtgtagaggacgcctttac

SEQ ID NO: 2790285 - DNA, 25 bp, Homo sapien
aagtgtccactgcacgcagcttggc

SEQ ID NO: 2790286 - DNA, 25 bp, Homo sapien
tgatgtgtggagacaagccgttgat

SEQ ID NO: 2790287 - DNA, 25 bp, Homo sapien
cctgtgccagccgtgaagtgtccac

SEQ ID NO: 2790288 - DNA, 25 bp, Homo sapien
cacaatctgctgagtcgctttaaca

SEQ ID NO: 2790289 - DNA, 25 bp, Homo sapien
tcgaaaccaccaaatgactctaagc

SEQ ID NO: 2790290 - DNA, 25 bp, Homo sapien
tgttttagtagcagcacagcgtgtc

SEQ ID NO: 2790291 - DNA, 25 bp, Homo sapien
cggagttgcttctcggccacagagt

SEQ ID NO: 2790292 - DNA, 25 bp, Homo sapien
gccacagagtggttcacaacattaa

SEQ ID NO: 2790293 - DNA, 25 bp, Homo sapien
tgatcgtgggagagcagttgcacct

SEQ ID NO: 2790294 - DNA, 25 bp, Homo sapien
gaaaataacgtgtgtcccctgagtg

SEQ ID NO: 2790295 - DNA, 25 bp, Homo sapien
caggcaagaggctacattggcccaa

SEQ ID NO: 2790296 - DNA, 25 bp, Homo sapien
tcaggcacagtaattcatcatcagg

SEQ ID NO: 2790297 - DNA, 25 bp, Homo sapien
atttggttgcctcattgcgatataa

SEQ ID NO: 2790298 - DNA, 25 bp, Homo sapien
catcttcattctcaggattcatatt

SEQ ID NO: 2790299 - DNA, 25 bp, Homo sapien
gcctcattgcgatataagtatgttg

SEQ ID NO: 2790300 - DNA, 25 bp, Homo sapien
ttgaaagaacaactcgatattggat

SEQ ID NO: 2790301 - DNA, 25 bp, Homo sapien
ggcactattttcattcccgaccaag

SEQ ID NO: 2790302 - DNA, 25 bp, Homo sapien
gcactattttcattcccgaccaaga

SEQ ID NO: 2790303 - DNA, 25 bp, Homo sapien
acttcctcagaaagtaaaattagag

SEQ ID NO: 2790304 - DNA, 25 bp, Homo sapien
tgtcaattaaactgtcaaccatgtt

SEQ ID NO: 2790305 - DNA, 25 bp, Homo sapien
gaaatatgtcaattaaactgtcaac

SEQ ID NO: 2790306 - DNA, 25 bp, Homo sapien
tgaacatcaaaatagggtgcaattt

SEQ ID NO: 2790307 - DNA, 25 bp, Homo sapien
aaaaatcagagtctacagttttaca

SEQ ID NO: 2790308 - DNA, 25 bp, Homo sapien
ttagagtatacacttctattttccc

SEQ ID NO: 2790309 - DNA, 25 bp, Homo sapien
tctcatcactgcctgttagtcagaa

SEQ ID NO: 2790310 - DNA, 25 bp, Homo sapien
tagaagcaattcactcatatgagta

SEQ ID NO: 2790311 - DNA, 25 bp, Homo sapien
gcttatttagctaaaagccagaatt

SEQ ID NO: 2790312 - DNA, 25 bp, Homo sapien
tcctgagggtaactagtgctaattc

SEQ ID NO: 2790313 - DNA, 25 bp, Homo sapien
tcctaataagtcacctaagaagggc

SEQ ID NO: 2790314 - DNA, 25 bp, Homo sapien
gatgagtttaaataagtgccagcca

SEQ ID NO: 2790315 - DNA, 25 bp, Homo sapien
tctctaatacaacaaaagcaggctt

SEQ ID NO: 2790316 - DNA, 25 bp, Homo sapien
tacctgagcagggttaacatctgca

SEQ ID NO: 2790317 - DNA, 25 bp, Homo sapien
tttggcaccaatttcgtcaaaagct

SEQ ID NO: 2790318 - DNA, 25 bp, Homo sapien
cgtcaaaagctgctctatacctgag

SEQ ID NO: 2790319 - DNA, 25 bp, Homo sapien
acatctgcaagacctgctgaaagca

SEQ ID NO: 2790320 - DNA, 25 bp, Homo sapien
tgcatgaagtaaaaacagacagaac

SEQ ID NO: 2790321 - DNA, 25 bp, Homo sapien
taaaaggttaagctcattagcaatg

SEQ ID NO: 2790322 - DNA, 25 bp, Homo sapien
gctaataccagagaaagtaggattc

SEQ ID NO: 2790323 - DNA, 25 bp, Homo sapien
gaagtaaaactgatgtagctggcta

SEQ ID NO: 2790324 - DNA, 25 bp, Homo sapien
tgggagcctctttgtactctaagaa

SEQ ID NO: 2790325 - DNA, 25 bp, Homo sapien
ccttgtattcagtagagttccttgc

SEQ ID NO: 2790326 - DNA, 25 bp, Homo sapien
tccttgcaacaagcatgagcagtag

SEQ ID NO: 2790327 - DNA, 25 bp, Homo sapien
tgtctatcagactcattcggtggaa

SEQ ID NO: 2790328 - DNA, 25 bp, Homo sapien
gtaatccgcccaccttggcctccca

SEQ ID NO: 2790329 - DNA, 25 bp, Homo sapien
tctccgcctcccaggttcaagtgat

SEQ ID NO: 2790330 - DNA, 25 bp, Homo sapien
cactctgtcgccaggctatagtgca

SEQ ID NO: 2790331 - DNA, 25 bp, Homo sapien
gtggcataatctcagctcactgcaa

SEQ ID NO: 2790332 - DNA, 25 bp, Homo sapien
acagtaaccaagctggcagtcaaat

SEQ ID NO: 2790333 - DNA, 25 bp, Homo sapien
caacagtaaccaagctggcagtcaa

SEQ ID NO: 2790334 - DNA, 25 bp, Homo sapien
aacagtaaccaagctggcagtcaaa

SEQ ID NO: 2790335 - DNA, 25 bp, Homo sapien
attcataaatgggaacttcattagt

SEQ ID NO: 2790336 - DNA, 25 bp, Homo sapien
agcaaaaattcataaatgggaactt

SEQ ID NO: 2790337 - DNA, 25 bp, Homo sapien
caaaaattcataaatgggaacttca

SEQ ID NO: 2790338 - DNA, 25 bp, Homo sapien
gacttagaacaggcaaggatttcat

SEQ ID NO: 2790339 - DNA, 25 bp, Homo sapien
aaaggaaacacacactgttagtggg

SEQ ID NO: 2790340 - DNA, 25 bp, Homo sapien
gctggaggctattatactgggcaaa

SEQ ID NO: 2790341 - DNA, 25 bp, Homo sapien
tgtctaaaatccagcacctataagg

SEQ ID NO: 2790342 - DNA, 25 bp, Homo sapien
tggtatatagacaccatggagctat

SEQ ID NO: 2790343 - DNA, 25 bp, Homo sapien
tgtagagatcggcaaattgcaactg

SEQ ID NO: 2790344 - DNA, 25 bp, Homo sapien
cactgctttaggtctgtctggttca

SEQ ID NO: 2790345 - DNA, 25 bp, Homo sapien
taacacctgggcatacgagtaggac

SEQ ID NO: 2790346 - DNA, 25 bp, Homo sapien
ttttgagattacctgagtcacgcag

SEQ ID NO: 2790347 - DNA, 25 bp, Homo sapien
taaacatctattgtgcacccacaca

SEQ ID NO: 2790348 - DNA, 25 bp, Homo sapien
taactgagcttaatgtggatcaaag

SEQ ID NO: 2790349 - DNA, 25 bp, Homo sapien
tgataggaagtcaattattcagcct

SEQ ID NO: 2790350 - DNA, 25 bp, Homo sapien
gcagcactaacttggtaacttggaa

SEQ ID NO: 2790351 - DNA, 25 bp, Homo sapien
tattcagagccagtataagtgacca

SEQ ID NO: 2790352 - DNA, 25 bp, Homo sapien
tatcagactctcaatcactcctagg

SEQ ID NO: 2790353 - DNA, 25 bp, Homo sapien
caagaggttctgaaagcgtgcccaa

SEQ ID NO: 2790354 - DNA, 25 bp, Homo sapien
ttccaaggagacaaccaactgcagg

SEQ ID NO: 2790355 - DNA, 25 bp, Homo sapien
catctcacagcatgttttctcctag

SEQ ID NO: 2790356 - DNA, 25 bp, Homo sapien
tcctagtacaccctgattgtccaag

SEQ ID NO: 2790357 - DNA, 25 bp, Homo sapien
tattcattcaaacgcttattcaaac

SEQ ID NO: 2790358 - DNA, 25 bp, Homo sapien
tcaaactaccgaatcctccaataac

SEQ ID NO: 2790359 - DNA, 25 bp, Homo sapien
gctgagactgcaccactgcactcca

SEQ ID NO: 2790360 - DNA, 25 bp, Homo sapien
tgcactccagcttggtgaacagagt

SEQ ID NO: 2790361 - DNA, 25 bp, Homo sapien
ctccagcttggtgaacagagtgaga

SEQ ID NO: 2790362 - DNA, 25 bp, Homo sapien
gagggtgaggcagaaattgcagtga

SEQ ID NO: 2790363 - DNA, 25 bp, Homo sapien
cccaggttatgtggtacagcctact

SEQ ID NO: 2790364 - DNA, 25 bp, Homo sapien
tgtggtacagcctactgatcctagg

SEQ ID NO: 2790365 - DNA, 25 bp, Homo sapien
gttatgtggtacagcctactgatcc

SEQ ID NO: 2790366 - DNA, 25 bp, Homo sapien
ccaggttatgtggtacagcctactg

SEQ ID NO: 2790367 - DNA, 25 bp, Homo sapien
ttagtcccacattctatctcctcgt

SEQ ID NO: 2790368 - DNA, 25 bp, Homo sapien
tatgtcttccatctaatttgggaag

SEQ ID NO: 2790369 - DNA, 25 bp, Homo sapien
tcctgtgattatgaatgttagctct

SEQ ID NO: 2790370 - DNA, 25 bp, Homo sapien
cagtaaattctgttggcatgttttc

SEQ ID NO: 2790371 - DNA, 25 bp, Homo sapien
tctctcattcaggttatgatttcct

SEQ ID NO: 2790372 - DNA, 25 bp, Homo sapien
tatgatttcctagttcttttgtctt

SEQ ID NO: 2790373 - DNA, 25 bp, Homo sapien
gttggtgtctgttgtctttctctca

SEQ ID NO: 2790374 - DNA, 25 bp, Homo sapien
ccccttttttatgtctgtgttggtg

SEQ ID NO: 2790375 - DNA, 25 bp, Homo sapien
atatctttgtttcctccaagtgaaa

SEQ ID NO: 2790376 - DNA, 25 bp, Homo sapien
ttacatatctttgtttcctccaagt

SEQ ID NO: 2790377 - DNA, 25 bp, Homo sapien
tacatatctttgtttcctccaagtg

SEQ ID NO: 2790378 - DNA, 25 bp, Homo sapien
catatctttgtttcctccaagtgaa

SEQ ID NO: 2790379 - DNA, 25 bp, Homo sapien
actcataccacttggttgcttccaa

SEQ ID NO: 2790380 - DNA, 25 bp, Homo sapien
caactcataccacttggttgcttcc

SEQ ID NO: 2790381 - DNA, 25 bp, Homo sapien
gagtaggggccaactcataccactt

SEQ ID NO: 2790382 - DNA, 25 bp, Homo sapien
gggccaactcataccacttggttgc

SEQ ID NO: 2790383 - DNA, 25 bp, Homo sapien
tataaagaaatgtgtagactctctg

SEQ ID NO: 2790384 - DNA, 25 bp, Homo sapien
attgaagagaagtcctacaaaatac

SEQ ID NO: 2790385 - DNA, 25 bp, Homo sapien
taaagaaatgtgtagactctctgta

SEQ ID NO: 2790386 - DNA, 25 bp, Homo sapien
ataaagaaatgtgtagactctctgt

SEQ ID NO: 2790387 - DNA, 25 bp, Homo sapien
ccacagtggccttgaatagaaatcc

SEQ ID NO: 2790388 - DNA, 25 bp, Homo sapien
cacataggtgaaaatcaagagcttc

SEQ ID NO: 2790389 - DNA, 25 bp, Homo sapien
tctgagttaaaatggagagtcttcc

SEQ ID NO: 2790390 - DNA, 25 bp, Homo sapien
taggacgtcgacattttagtaagcc

SEQ ID NO: 2790391 - DNA, 25 bp, Homo sapien
cattgtccaaatgtacacgtaagat

SEQ ID NO: 2790392 - DNA, 25 bp, Homo sapien
tgagtttttggaacaagcttaactg

SEQ ID NO: 2790393 - DNA, 25 bp, Homo sapien
gaaacagagatagagacattgtcca

SEQ ID NO: 2790394 - DNA, 25 bp, Homo sapien
tcagatttatactacatgaagcaac

SEQ ID NO: 2790395 - DNA, 25 bp, Homo sapien
taaaaactgcgaaagcatgtccaaa

SEQ ID NO: 2790396 - DNA, 25 bp, Homo sapien
tgttactgtttatcatgagtacgca

SEQ ID NO: 2790397 - DNA, 25 bp, Homo sapien
tcatgagtacgcacaaaaaaccact

SEQ ID NO: 2790398 - DNA, 25 bp, Homo sapien
tgaataggtattcaggttttcagag

SEQ ID NO: 2790399 - DNA, 25 bp, Homo sapien
tgaaactgccattagaggactatgc

SEQ ID NO: 2790400 - DNA, 25 bp, Homo sapien
ggagttgtctcactatcaaaggaac

SEQ ID NO: 2790401 - DNA, 25 bp, Homo sapien
tcattgtttatggatgggcccaaaa

SEQ ID NO: 2790402 - DNA, 25 bp, Homo sapien
tatcaaggatcacatgggtcagcac

SEQ ID NO: 2790403 - DNA, 25 bp, Homo sapien
gaaattttgtgagaatgaactgtac

SEQ ID NO: 2790404 - DNA, 25 bp, Homo sapien
tgagaatgaactgtaccgtgaagct

SEQ ID NO: 2790405 - DNA, 25 bp, Homo sapien
caccattgtattttgagagttcatg

SEQ ID NO: 2790406 - DNA, 25 bp, Homo sapien
ccgtgaagctcacctgcatctgatt

SEQ ID NO: 2790407 - DNA, 25 bp, Homo sapien
tccatagagcccagatcgagttcct

SEQ ID NO: 2790408 - DNA, 25 bp, Homo sapien
gacattttcagcatggaacattcta

SEQ ID NO: 2790409 - DNA, 25 bp, Homo sapien
gagttcctaagttctcactaaggca

SEQ ID NO: 2790410 - DNA, 25 bp, Homo sapien
cactaaggcacatgggtctaattcc

SEQ ID NO: 2790411 - DNA, 25 bp, Homo sapien
ctgactgaaaataagatcaagtcta

SEQ ID NO: 2790412 - DNA, 25 bp, Homo sapien
gtttttaacacttttgtgctcgcaa

SEQ ID NO: 2790413 - DNA, 25 bp, Homo sapien
actgaaaataagatcaagtctacac

SEQ ID NO: 2790414 - DNA, 25 bp, Homo sapien
tttaacacttttgtgctcgcaagat

SEQ ID NO: 2790415 - DNA, 25 bp, Homo sapien
tgtaaggttgcaacagccctctcaa

SEQ ID NO: 2790416 - DNA, 25 bp, Homo sapien
agaaggccctcattacatgctggta

SEQ ID NO: 2790417 - DNA, 25 bp, Homo sapien
tccttgcctacagaactatcagaaa

SEQ ID NO: 2790418 - DNA, 25 bp, Homo sapien
taaactaatgctatctgagagtgca

SEQ ID NO: 2790419 - DNA, 25 bp, Homo sapien
ggcttccagtagattgagactttta

SEQ ID NO: 2790420 - DNA, 25 bp, Homo sapien
gacttttatttctagctgagctgct

SEQ ID NO: 2790421 - DNA, 25 bp, Homo sapien
tgatcatgattgtgtctgtggagac

SEQ ID NO: 2790422 - DNA, 25 bp, Homo sapien
cacgccctgatgatagacacgtttt

SEQ ID NO: 2790423 - DNA, 25 bp, Homo sapien
caggttatgttgtcacccgggtatt

SEQ ID NO: 2790424 - DNA, 25 bp, Homo sapien
gtttaagttcagcagtacacgtgca

SEQ ID NO: 2790425 - DNA, 25 bp, Homo sapien
gttgtacaggttatgttgtcacccg

SEQ ID NO: 2790426 - DNA, 25 bp, Homo sapien
attacgtgtgtgaaacactgcacct

SEQ ID NO: 2790427 - DNA, 25 bp, Homo sapien
aaaggactattaactcacaaacagg

SEQ ID NO: 2790428 - DNA, 25 bp, Homo sapien
gaaacagccatctgcaaagacctca

SEQ ID NO: 2790429 - DNA, 25 bp, Homo sapien
tagttggttgaaggcagaatgccca

SEQ ID NO: 2790430 - DNA, 25 bp, Homo sapien
gacttcgaggatgaagagtcactca

SEQ ID NO: 2790431 - DNA, 25 bp, Homo sapien
tgctagacaaaagtgagctacggat

SEQ ID NO: 2790432 - DNA, 25 bp, Homo sapien
gttgctagacaaaagtgagctacgg

SEQ ID NO: 2790433 - DNA, 25 bp, Homo sapien
ctagacaaaagtgagctacggatca

SEQ ID NO: 2790434 - DNA, 25 bp, Homo sapien
tgttgctagacaaaagtgagctacg

SEQ ID NO: 2790435 - DNA, 25 bp, Homo sapien
tatcgcctcaataatgcatttccct

SEQ ID NO: 2790436 - DNA, 25 bp, Homo sapien
acccagtaatcctatcgcctcaata

SEQ ID NO: 2790437 - DNA, 25 bp, Homo sapien
tatgaatatagaaggagtaatcatc

SEQ ID NO: 2790438 - DNA, 25 bp, Homo sapien
gaaggagtaatcatcgtttagtaaa

SEQ ID NO: 2790439 - DNA, 25 bp, Homo sapien
gaagaagcaagaataggctcaggga

SEQ ID NO: 2790440 - DNA, 25 bp, Homo sapien
gaaagactcagtgctaatctctaca

SEQ ID NO: 2790441 - DNA, 25 bp, Homo sapien
gctacagacgctattttttggttca

SEQ ID NO: 2790442 - DNA, 25 bp, Homo sapien
tttggttcaacatgacctgagcagt

SEQ ID NO: 2790443 - DNA, 25 bp, Homo sapien
ccgatatgtactgccataaacaaga

SEQ ID NO: 2790444 - DNA, 25 bp, Homo sapien
aatcataaccgatatgtactgccat

SEQ ID NO: 2790445 - DNA, 25 bp, Homo sapien
taaccgatatgtactgccataaaca

SEQ ID NO: 2790446 - DNA, 25 bp, Homo sapien
cataaccgatatgtactgccataaa

SEQ ID NO: 2790447 - DNA, 25 bp, Homo sapien
ctaagagaaaagtgtaagacaagtc

SEQ ID NO: 2790448 - DNA, 25 bp, Homo sapien
tgtaagacaagtcctgtggtaaaaa

SEQ ID NO: 2790449 - DNA, 25 bp, Homo sapien
aaagtgtaagacaagtcctgtggta

SEQ ID NO: 2790450 - DNA, 25 bp, Homo sapien
taagagaaaagtgtaagacaagtcc

SEQ ID NO: 2790451 - DNA, 25 bp, Homo sapien
atggaattatctaaagctcatttgg

SEQ ID NO: 2790452 - DNA, 25 bp, Homo sapien
agtaaagatttagtagacccaatgt

SEQ ID NO: 2790453 - DNA, 25 bp, Homo sapien
cagagtaatcattgatcgctttcaa

SEQ ID NO: 2790454 - DNA, 25 bp, Homo sapien
gctcctttctaggtgcaatgaagaa

SEQ ID NO: 2790455 - DNA, 25 bp, Homo sapien
tgctcaccaccatacagggatgttt

SEQ ID NO: 2790456 - DNA, 25 bp, Homo sapien
ccatcctgagtttatggaaagtcca

SEQ ID NO: 2790457 - DNA, 25 bp, Homo sapien
cataaagctttgcacctctccacaa

SEQ ID NO: 2790458 - DNA, 25 bp, Homo sapien
caggtgccacgcagagaagagttgc

SEQ ID NO: 2790459 - DNA, 25 bp, Homo sapien
ctgccatattcaagacgcgttgaaa

SEQ ID NO: 2790460 - DNA, 25 bp, Homo sapien
gcgttgaaactcacctgtattcgat

SEQ ID NO: 2790461 - DNA, 25 bp, Homo sapien
gatgggggtcctgctatgctgaaca

SEQ ID NO: 2790462 - DNA, 25 bp, Homo sapien
ccatgcctggtctgaagacttttaa

SEQ ID NO: 2790463 - DNA, 25 bp, Homo sapien
cttaagcttctcagccttttaccct

SEQ ID NO: 2790464 - DNA, 25 bp, Homo sapien
gtgtatcccaaaagtaaatccataa

SEQ ID NO: 2790465 - DNA, 25 bp, Homo sapien
tccataatgaggtccagtttttcct

SEQ ID NO: 2790466 - DNA, 25 bp, Homo sapien
tttaccctcctctggaataatgagt

SEQ ID NO: 2790467 - DNA, 25 bp, Homo sapien
tcttacagccaaaatgtccagaatg

SEQ ID NO: 2790468 - DNA, 25 bp, Homo sapien
caatattcttacagccaaaatgtcc

SEQ ID NO: 2790469 - DNA, 25 bp, Homo sapien
tattcttacagccaaaatgtccaga

SEQ ID NO: 2790470 - DNA, 25 bp, Homo sapien
tccaatattcttacagccaaaatgt

SEQ ID NO: 2790471 - DNA, 25 bp, Homo sapien
ggtacattatcccatgcgctaaact

SEQ ID NO: 2790472 - DNA, 25 bp, Homo sapien
tacattatcccatgcgctaaactgc

SEQ ID NO: 2790473 - DNA, 25 bp, Homo sapien
cgggtacattatcccatgcgctaaa

SEQ ID NO: 2790474 - DNA, 25 bp, Homo sapien
acgggtacattatcccatgcgctaa

SEQ ID NO: 2790475 - DNA, 25 bp, Homo sapien
tggtactgctctagcagacttttcc

SEQ ID NO: 2790476 - DNA, 25 bp, Homo sapien
gctctagcagacttttccggtcctc

SEQ ID NO: 2790477 - DNA, 25 bp, Homo sapien
tactgctctagcagacttttccggt

SEQ ID NO: 2790478 - DNA, 25 bp, Homo sapien
tagtcatgaaatcggcaaaattcca

SEQ ID NO: 2790479 - DNA, 25 bp, Homo sapien
ataaagatccacttgatggtgacca

SEQ ID NO: 2790480 - DNA, 25 bp, Homo sapien
ttgatggtgaccaaaatatctgtcc

SEQ ID NO: 2790481 - DNA, 25 bp, Homo sapien
aataaagatccacttgatggtgacc

SEQ ID NO: 2790482 - DNA, 25 bp, Homo sapien
cacagtccgatcaaagagagagcca

SEQ ID NO: 2790483 - DNA, 25 bp, Homo sapien
caacaataaataggactcctgtctc

SEQ ID NO: 2790484 - DNA, 25 bp, Homo sapien
ttccggctgcaacagggcagagcac

SEQ ID NO: 2790485 - DNA, 25 bp, Homo sapien
gaaataacaacggtgcctggcgaga

SEQ ID NO: 2790486 - DNA, 25 bp, Homo sapien
taggactttgtcctatgggcctggg

SEQ ID NO: 2790487 - DNA, 25 bp, Homo sapien
tcttttagttggtgattatggtgcc

SEQ ID NO: 2790488 - DNA, 25 bp, Homo sapien
cagtggaaacagatcagtggccagg

SEQ ID NO: 2790489 - DNA, 25 bp, Homo sapien
ggcagaaagaatagctcaagcaaga

SEQ ID NO: 2790490 - DNA, 25 bp, Homo sapien
tgaaaccctacaagcgtttccactc

SEQ ID NO: 2790491 - DNA, 25 bp, Homo sapien
ccctacaagcgtttccactccatac

SEQ ID NO: 2790492 - DNA, 25 bp, Homo sapien
aaccctacaagcgtttccactccat

SEQ ID NO: 2790493 - DNA, 25 bp, Homo sapien
tggtgaaaccctacaagcgtttcca

SEQ ID NO: 2790494 - DNA, 25 bp, Homo sapien
gaataatgggattgtgatgtcttac

SEQ ID NO: 2790495 - DNA, 25 bp, Homo sapien
aataatgggattgtgatgtcttaca

SEQ ID NO: 2790496 - DNA, 25 bp, Homo sapien
ccaattctcaaactgggcggccagc

SEQ ID NO: 2790497 - DNA, 25 bp, Homo sapien
gaatcaactccaggtgcccgtagtt

SEQ ID NO: 2790498 - DNA, 25 bp, Homo sapien
tagttgcgataccaagagtagtagc

SEQ ID NO: 2790499 - DNA, 25 bp, Homo sapien
gagtagtagctgttcacacggatca

SEQ ID NO: 2790500 - DNA, 25 bp, Homo sapien
aaaagcctacaacgggaagagctgc

SEQ ID NO: 2790501 - DNA, 25 bp, Homo sapien
tgtgattgcacactgacgctcacga

SEQ ID NO: 2790502 - DNA, 25 bp, Homo sapien
ccaactgcaccaatttagatcctga

SEQ ID NO: 2790503 - DNA, 25 bp, Homo sapien
tagatcctgaaattaccctgcccca

SEQ ID NO: 2790504 - DNA, 25 bp, Homo sapien
cccttgtctgctgcgtaggtggagt

SEQ ID NO: 2790505 - DNA, 25 bp, Homo sapien
ccccttgtctgctgcgtaggtggag

SEQ ID NO: 2790506 - DNA, 25 bp, Homo sapien
aggtcactggactgaacactgccag

SEQ ID NO: 2790507 - DNA, 25 bp, Homo sapien
accctgccgggtacacagagctgag

SEQ ID NO: 2790508 - DNA, 25 bp, Homo sapien
actgccagaaatgaggttcacttcc

SEQ ID NO: 2790509 - DNA, 25 bp, Homo sapien
gaggcgtagccaccctgccgggtac

SEQ ID NO: 2790510 - DNA, 25 bp, Homo sapien
agccgcacctacgacagccaaagcg

SEQ ID NO: 2790511 - DNA, 25 bp, Homo sapien
acgacagccaaagcgccaggtgtga

SEQ ID NO: 2790512 - DNA, 25 bp, Homo sapien
gggcacagtgcggagccccacaggg

SEQ ID NO: 2790513 - DNA, 25 bp, Homo sapien
tggctctcggtgacgggcacagtgc

SEQ ID NO: 2790514 - DNA, 25 bp, Homo sapien
tctcaattcaccgcggcccctgcct

SEQ ID NO: 2790515 - DNA, 25 bp, Homo sapien
atctcaattcaccgcggcccctgcc

SEQ ID NO: 2790516 - DNA, 25 bp, Homo sapien
tgcccgttcacctgtcctgggctcc

SEQ ID NO: 2790517 - DNA, 25 bp, Homo sapien
ctgctgaagccagggctaccagatg

SEQ ID NO: 2790518 - DNA, 25 bp, Homo sapien
gcaaaagacctcccttacgcaagtc

SEQ ID NO: 2790519 - DNA, 25 bp, Homo sapien
ccagggctaccagatgggggcaaaa

SEQ ID NO: 2790520 - DNA, 25 bp, Homo sapien
tcaggtacggccaccagaggttggc

SEQ ID NO: 2790521 - DNA, 25 bp, Homo sapien
ccacgagtacaggtaggcggggtgt

SEQ ID NO: 2790522 - DNA, 25 bp, Homo sapien
ggtgttcgtgcatcaggtacggcca

SEQ ID NO: 2790523 - DNA, 25 bp, Homo sapien
acggccaccagaggttggcacccag

SEQ ID NO: 2790524 - DNA, 25 bp, Homo sapien
gtccacgactttgttttctgcattc

SEQ ID NO: 2790525 - DNA, 25 bp, Homo sapien
tggttactgcacttgacggagatct

SEQ ID NO: 2790526 - DNA, 25 bp, Homo sapien
aactggttactgcacttgacggaga

SEQ ID NO: 2790527 - DNA, 25 bp, Homo sapien
gtcccagcctggttgtccacgactt

SEQ ID NO: 2790528 - DNA, 25 bp, Homo sapien
caagagagaccagggcttagggagg

SEQ ID NO: 2790529 - DNA, 25 bp, Homo sapien
ggaggcaagagagaccagggcttag

SEQ ID NO: 2790530 - DNA, 25 bp, Homo sapien
gagagaccagggcttagggagggac

SEQ ID NO: 2790531 - DNA, 25 bp, Homo sapien
ggcaagagagaccagggcttaggga

SEQ ID NO: 2790532 - DNA, 25 bp, Homo sapien
acacaaacgggaaggccccacaatg

SEQ ID NO: 2790533 - DNA, 25 bp, Homo sapien
cacaaacgggaaggccccacaatga

SEQ ID NO: 2790534 - DNA, 25 bp, Homo sapien
acgggaaggccccacaatgaccact

SEQ ID NO: 2790535 - DNA, 25 bp, Homo sapien
gtcacacaaacgggaaggccccaca

SEQ ID NO: 2790536 - DNA, 25 bp, Homo sapien
tattattaagaagtcaacgccgggc

SEQ ID NO: 2790537 - DNA, 25 bp, Homo sapien
tggccctctgatcctgtctaagatc

SEQ ID NO: 2790538 - DNA, 25 bp, Homo sapien
ggctattcacaagaacgatcatcgc

SEQ ID NO: 2790539 - DNA, 25 bp, Homo sapien
tctgaagccagatattaaggtactt

SEQ ID NO: 2790540 - DNA, 25 bp, Homo sapien
tctgatcctgtctaagatctgaagc

SEQ ID NO: 2790541 - DNA, 25 bp, Homo sapien
ccaagcctttcaggttctaggtggt

SEQ ID NO: 2790542 - DNA, 25 bp, Homo sapien
tagctctttcgctttggccaatttc

SEQ ID NO: 2790543 - DNA, 25 bp, Homo sapien
gaattaacgttcatgaacctccgcc

SEQ ID NO: 2790544 - DNA, 25 bp, Homo sapien
tctcccatttgaaacgagtgtattt

SEQ ID NO: 2790545 - DNA, 25 bp, Homo sapien
tacctactgcacgaccccccacgtc

SEQ ID NO: 2790546 - DNA, 25 bp, Homo sapien
gatccacgggcaaatatgcagccat

SEQ ID NO: 2790547 - DNA, 25 bp, Homo sapien
tgttcctcccgcgacctttgtgccc

SEQ ID NO: 2790548 - DNA, 25 bp, Homo sapien
tggagactgagttttgcactcgttg

SEQ ID NO: 2790549 - DNA, 25 bp, Homo sapien
gtgcccctcattcctgtttgggcca

SEQ ID NO: 2790550 - DNA, 25 bp, Homo sapien
aaggccgaggacctgcgagtagggc

SEQ ID NO: 2790551 - DNA, 25 bp, Homo sapien
tctgtcactggtgccattatgtgct

SEQ ID NO: 2790552 - DNA, 25 bp, Homo sapien
gtcactggtgccattatgtgctcac

SEQ ID NO: 2790553 - DNA, 25 bp, Homo sapien
agggatgccggcatgagaagaacaa

SEQ ID NO: 2790554 - DNA, 25 bp, Homo sapien
cagggatgccggcatgagaagaaca

SEQ ID NO: 2790555 - DNA, 25 bp, Homo sapien
ccaccctactatcgggtagatccta

SEQ ID NO: 2790556 - DNA, 25 bp, Homo sapien
cttggttgccttaacggatgtagaa

SEQ ID NO: 2790557 - DNA, 25 bp, Homo sapien
ctactgccaccctactatcgggtag

SEQ ID NO: 2790558 - DNA, 25 bp, Homo sapien
ccttggttgccttaacggatgtaga

SEQ ID NO: 2790559 - DNA, 25 bp, Homo sapien
tccatctggtaggaatatatacaat

SEQ ID NO: 2790560 - DNA, 25 bp, Homo sapien
gctgtaattatctccatctggtagg

SEQ ID NO: 2790561 - DNA, 25 bp, Homo sapien
taatgtcaatgtctgaaataaaatg

SEQ ID NO: 2790562 - DNA, 25 bp, Homo sapien
ataaaaatttaatgtcaatgtctga

SEQ ID NO: 2790563 - DNA, 25 bp, Homo sapien
acatgtatccatcaagtatttgaaa

SEQ ID NO: 2790564 - DNA, 25 bp, Homo sapien
tatggctagtgcaactaaagaactt

SEQ ID NO: 2790565 - DNA, 25 bp, Homo sapien
tgttttatatctgtgctatccctta

SEQ ID NO: 2790566 - DNA, 25 bp, Homo sapien
tcccttatgttagccactagccaca

SEQ ID NO: 2790567 - DNA, 25 bp, Homo sapien
tacagctgtagacaatacgaaataa

SEQ ID NO: 2790568 - DNA, 25 bp, Homo sapien
cagctgtagacaatacgaaataaat

SEQ ID NO: 2790569 - DNA, 25 bp, Homo sapien
actacagctgtagacaatacgaaat

SEQ ID NO: 2790570 - DNA, 25 bp, Homo sapien
gctgtagacaatacgaaataaatat

SEQ ID NO: 2790571 - DNA, 25 bp, Homo sapien
gtaatattcttcagagatggcatgg

SEQ ID NO: 2790572 - DNA, 25 bp, Homo sapien
taatattcttcagagatggcatggt

SEQ ID NO: 2790573 - DNA, 25 bp, Homo sapien
tctgtaatattcttcagagatggca

SEQ ID NO: 2790574 - DNA, 25 bp, Homo sapien
tgtaatattcttcagagatggcatg

SEQ ID NO: 2790575 - DNA, 25 bp, Homo sapien
cccagagagaatacacaagcagaaa

SEQ ID NO: 2790576 - DNA, 25 bp, Homo sapien
ctgcccagagagaatacacaagcag

SEQ ID NO: 2790577 - DNA, 25 bp, Homo sapien
tgcccagagagaatacacaagcaga

SEQ ID NO: 2790578 - DNA, 25 bp, Homo sapien
cagagagaatacacaagcagaaagt

SEQ ID NO: 2790579 - DNA, 25 bp, Homo sapien
tgaaaccctacaagcgtttccactc

SEQ ID NO: 2790580 - DNA, 25 bp, Homo sapien
accctacaagcgtttccactccata

SEQ ID NO: 2790581 - DNA, 25 bp, Homo sapien
tggtgaaaccctacaagcgtttcca

SEQ ID NO: 2790582 - DNA, 25 bp, Homo sapien
tacaagcgtttccactccatacgcg

SEQ ID NO: 2790583 - DNA, 25 bp, Homo sapien
gaataatgggattgtgatgtcttac

SEQ ID NO: 2790584 - DNA, 25 bp, Homo sapien
aataatgggattgtgatgtcttaca

SEQ ID NO: 2790585 - DNA, 25 bp, Homo sapien
gaatcaactccaggtgcccgtagtt

SEQ ID NO: 2790586 - DNA, 25 bp, Homo sapien
cacggatcacatccacatacagagc

SEQ ID NO: 2790587 - DNA, 25 bp, Homo sapien
tagttgcgataccaagagtagtagc

SEQ ID NO: 2790588 - DNA, 25 bp, Homo sapien
agtagtagctgttcacacggatcac

SEQ ID NO: 2790589 - DNA, 25 bp, Homo sapien
aaaagcctacaacgggaagagctgc

SEQ ID NO: 2790590 - DNA, 25 bp, Homo sapien
tgtgattgcacactgacgctcacga

SEQ ID NO: 2790591 - DNA, 25 bp, Homo sapien
ccaactgcaccaatttagatcctga

SEQ ID NO: 2790592 - DNA, 25 bp, Homo sapien
tagatcctgaaattaccctgcccca

SEQ ID NO: 2790593 - DNA, 25 bp, Homo sapien
cccttgtctgctgcgtaggtggagt

SEQ ID NO: 2790594 - DNA, 25 bp, Homo sapien
ccccttgtctgctgcgtaggtggag

SEQ ID NO: 2790595 - DNA, 25 bp, Homo sapien
ctagaccgagctctctaacaacact

SEQ ID NO: 2790596 - DNA, 25 bp, Homo sapien
ccaactcccccagaggcgtagccac

SEQ ID NO: 2790597 - DNA, 25 bp, Homo sapien
ccctgaatccaactcccccagaggc

SEQ ID NO: 2790598 - DNA, 25 bp, Homo sapien
gaatccaactcccccagaggcgtag

SEQ ID NO: 2790599 - DNA, 25 bp, Homo sapien
caactcccccagaggcgtagccacc

SEQ ID NO: 2790600 - DNA, 25 bp, Homo sapien
gccgggtacacagagctgaggtcac

SEQ ID NO: 2790601 - DNA, 25 bp, Homo sapien
aggtcactggactgaacactgccag

SEQ ID NO: 2790602 - DNA, 25 bp, Homo sapien
gaacactgccagaaatgaggttcac

SEQ ID NO: 2790603 - DNA, 25 bp, Homo sapien
actgccagaaatgaggttcacttcc

SEQ ID NO: 2790604 - DNA, 25 bp, Homo sapien
agagacaggattcactacctgttga

SEQ ID NO: 2790605 - DNA, 25 bp, Homo sapien
gacaggattcactacctgttgacca

SEQ ID NO: 2790606 - DNA, 25 bp, Homo sapien
gagacaggattcactacctgttgac

SEQ ID NO: 2790607 - DNA, 25 bp, Homo sapien
acaggattcactacctgttgaccag

SEQ ID NO: 2790608 - DNA, 25 bp, Homo sapien
gacagaatagaacctcctagcctca

SEQ ID NO: 2790609 - DNA, 25 bp, Homo sapien
ggaagcttcaaagccttgtgacagc

SEQ ID NO: 2790610 - DNA, 25 bp, Homo sapien
tctccaatagccaggctctcagatg

SEQ ID NO: 2790611 - DNA, 25 bp, Homo sapien
tagcctcaagttccaaacccacact

SEQ ID NO: 2790612 - DNA, 25 bp, Homo sapien
agccgcacctacgacagccaaagcg

SEQ ID NO: 2790613 - DNA, 25 bp, Homo sapien
gggcacagtgcggagccccacaggg

SEQ ID NO: 2790614 - DNA, 25 bp, Homo sapien
acgacagccaaagcgccaggtgtga

SEQ ID NO: 2790615 - DNA, 25 bp, Homo sapien
actggctctcggtgacgggcacagt

SEQ ID NO: 2790616 - DNA, 25 bp, Homo sapien
tgcccgttcacctgtcctgggctcc

SEQ ID NO: 2790617 - DNA, 25 bp, Homo sapien
gcaaaagacctcccttacgcaagtc

SEQ ID NO: 2790618 - DNA, 25 bp, Homo sapien
ctgctgaagccagggctaccagatg

SEQ ID NO: 2790619 - DNA, 25 bp, Homo sapien
ttacgcaagtcccaaaccaccatta

SEQ ID NO: 2790620 - DNA, 25 bp, Homo sapien
gtcccagcctggttgtccacgactt

SEQ ID NO: 2790621 - DNA, 25 bp, Homo sapien
tacggccaccagaggttggcaccca

SEQ ID NO: 2790622 - DNA, 25 bp, Homo sapien
gtccacgactttgttttctgcattc

SEQ ID NO: 2790623 - DNA, 25 bp, Homo sapien
aactggttactgcacttgacggaga

SEQ ID NO: 2790624 - DNA, 25 bp, Homo sapien
ggaggcaagagagaccagggcttag

SEQ ID NO: 2790625 - DNA, 25 bp, Homo sapien
caagagagaccagggcttagggagg

SEQ ID NO: 2790626 - DNA, 25 bp, Homo sapien
ggcaagagagaccagggcttaggga

SEQ ID NO: 2790627 - DNA, 25 bp, Homo sapien
gagagaccagggcttagggagggac

SEQ ID NO: 2790628 - DNA, 25 bp, Homo sapien
caggcactctcatttgcttctgttg

SEQ ID NO: 2790629 - DNA, 25 bp, Homo sapien
tcccaggcactctcatttgcttctg

SEQ ID NO: 2790630 - DNA, 25 bp, Homo sapien
cacaaacgggaaggccccacaatga

SEQ ID NO: 2790631 - DNA, 25 bp, Homo sapien
tcacacaaacgggaaggccccacaa

SEQ ID NO: 2790632 - DNA, 25 bp, Homo sapien
tgcctcccaggttcaagtgattctc

SEQ ID NO: 2790633 - DNA, 25 bp, Homo sapien
gccaccgtgcccggccctgaaccaa

SEQ ID NO: 2790634 - DNA, 25 bp, Homo sapien
atgatctggactcactgaaacctct

SEQ ID NO: 2790635 - DNA, 25 bp, Homo sapien
ctgcctcagcctctggaatagctgg

SEQ ID NO: 2790636 - DNA, 25 bp, Homo sapien
aattactaattactcctgaaatcag

SEQ ID NO: 2790637 - DNA, 25 bp, Homo sapien
cagtatcctatgaaatctactactt

SEQ ID NO: 2790638 - DNA, 25 bp, Homo sapien
gcttcctttaacaccctattcattg

SEQ ID NO: 2790639 - DNA, 25 bp, Homo sapien
catatattattaatgaattgcttcc

SEQ ID NO: 2790640 - DNA, 25 bp, Homo sapien
tttgtatgctggtaactaattttaa

SEQ ID NO: 2790641 - DNA, 25 bp, Homo sapien
aattaattatatttgcatctgggaa

SEQ ID NO: 2790642 - DNA, 25 bp, Homo sapien
ggaaatagagaaagtacatataagc

SEQ ID NO: 2790643 - DNA, 25 bp, Homo sapien
tttatgtagatttctgctattcttg

SEQ ID NO: 2790644 - DNA, 25 bp, Homo sapien
attcacaagaacgatcatcgcacac

SEQ ID NO: 2790645 - DNA, 25 bp, Homo sapien
tcacaagaacgatcatcgcacacta

SEQ ID NO: 2790646 - DNA, 25 bp, Homo sapien
ggctattcacaagaacgatcatcgc

SEQ ID NO: 2790647 - DNA, 25 bp, Homo sapien
ctattcacaagaacgatcatcgcac

SEQ ID NO: 2790648 - DNA, 25 bp, Homo sapien
ccaagcctttcaggttctaggtggt

SEQ ID NO: 2790649 - DNA, 25 bp, Homo sapien
tagctctttcgctttggccaatttc

SEQ ID NO: 2790650 - DNA, 25 bp, Homo sapien
gaattaacgttcatgaacctccgcc

SEQ ID NO: 2790651 - DNA, 25 bp, Homo sapien
tctcccatttgaaacgagtgtattt

SEQ ID NO: 2790652 - DNA, 25 bp, Homo sapien
tacctactgcacgaccccccacgtc

SEQ ID NO: 2790653 - DNA, 25 bp, Homo sapien
gatccacgggcaaatatgcagccat

SEQ ID NO: 2790654 - DNA, 25 bp, Homo sapien
tgttcctcccgcgacctttgtgccc

SEQ ID NO: 2790655 - DNA, 25 bp, Homo sapien
tggagactgagttttgcactcgttg

SEQ ID NO: 2790656 - DNA, 25 bp, Homo sapien
aaggccgaggacctgcgagtagggc

SEQ ID NO: 2790657 - DNA, 25 bp, Homo sapien
gtgcccctcattcctgtttgggcca

SEQ ID NO: 2790658 - DNA, 25 bp, Homo sapien
tctgtcactggtgccattatgtgct

SEQ ID NO: 2790659 - DNA, 25 bp, Homo sapien
gtcactggtgccattatgtgctcac

SEQ ID NO: 2790660 - DNA, 25 bp, Homo sapien
tagacgcaagattcccctgctgcca

SEQ ID NO: 2790661 - DNA, 25 bp, Homo sapien
tcgggtcacacacggtgtgaaaagg

SEQ ID NO: 2790662 - DNA, 25 bp, Homo sapien
ctaggccccgtagacgcaagattcc

SEQ ID NO: 2790663 - DNA, 25 bp, Homo sapien
tccacgggaggcttgccggggctaa

SEQ ID NO: 2790664 - DNA, 25 bp, Homo sapien
agggatgccggcatgagaagaacaa

SEQ ID NO: 2790665 - DNA, 25 bp, Homo sapien
cagggatgccggcatgagaagaaca

SEQ ID NO: 2790666 - DNA, 25 bp, Homo sapien
gaggtctcctctacagctcccgtgt

SEQ ID NO: 2790667 - DNA, 25 bp, Homo sapien
ggtctcctctacagctcccgtgtct

SEQ ID NO: 2790668 - DNA, 25 bp, Homo sapien
tcctctacagctcccgtgtctggga

SEQ ID NO: 2790669 - DNA, 25 bp, Homo sapien
tctcctctacagctcccgtgtctgg

SEQ ID NO: 2790670 - DNA, 25 bp, Homo sapien
tcatgacttcaattccatcagagtt

SEQ ID NO: 2790671 - DNA, 25 bp, Homo sapien
catgacttcaattccatcagagtta

SEQ ID NO: 2790672 - DNA, 25 bp, Homo sapien
agttctggtgtcctattgcatagta

SEQ ID NO: 2790673 - DNA, 25 bp, Homo sapien
catagtaggatgagtatagttaaca

SEQ ID NO: 2790674 - DNA, 25 bp, Homo sapien
cctattgcatagtaggatgagtata

SEQ ID NO: 2790675 - DNA, 25 bp, Homo sapien
tggtgtcctattgcatagtaggatg

SEQ ID NO: 2790676 - DNA, 25 bp, Homo sapien
atgtattgaacactacagctgtaga

SEQ ID NO: 2790677 - DNA, 25 bp, Homo sapien
tgtattgaacactacagctgtagac

SEQ ID NO: 2790678 - DNA, 25 bp, Homo sapien
gctagtggctaatgtattgaacact

SEQ ID NO: 2790679 - DNA, 25 bp, Homo sapien
tgactattcaagtgaactcctaagg

SEQ ID NO: 2790680 - DNA, 25 bp, Homo sapien
cagagatggcatggtaaagtacgat

SEQ ID NO: 2790681 - DNA, 25 bp, Homo sapien
taacagtatgctgtcacaggtgcca

SEQ ID NO: 2790682 - DNA, 25 bp, Homo sapien
taccagtactaaggaagtacagccc

SEQ ID NO: 2790683 - DNA, 25 bp, Homo sapien
tattatgaacagcagtttgagccat

SEQ ID NO: 2790684 - DNA, 25 bp, Homo sapien
ccttgggatgacttataaacacttc

SEQ ID NO: 2790685 - DNA, 25 bp, Homo sapien
aattagcctcctgtttcgcattgga

SEQ ID NO: 2790686 - DNA, 25 bp, Homo sapien
tgatgctaagctccgtaatgttggg

SEQ ID NO: 2790687 - DNA, 25 bp, Homo sapien
tttgggaagcattgcaggctagtcg

SEQ ID NO: 2790688 - DNA, 25 bp, Homo sapien
aggctagtcgtacagttttgttttg

SEQ ID NO: 2790689 - DNA, 25 bp, Homo sapien
tttcagtcattcactaaacctctct

SEQ ID NO: 2790690 - DNA, 25 bp, Homo sapien
agtcattcactaaacctctctcagc

SEQ ID NO: 2790691 - DNA, 25 bp, Homo sapien
cccaatcgtcactgctttcatgtag

SEQ ID NO: 2790692 - DNA, 25 bp, Homo sapien
ccatttttgagacccacttgcttag

SEQ ID NO: 2790693 - DNA, 25 bp, Homo sapien
taatgtgccactaattcccaatcgt

SEQ ID NO: 2790694 - DNA, 25 bp, Homo sapien
ttgacaaatgtccaccggatgggaa

SEQ ID NO: 2790695 - DNA, 25 bp, Homo sapien
tattgtgcgcagctaaagttgggat

SEQ ID NO: 2790696 - DNA, 25 bp, Homo sapien
tataggaagcctgcataataagcat

SEQ ID NO: 2790697 - DNA, 25 bp, Homo sapien
caaggtgatttcatgcttctagcca

SEQ ID NO: 2790698 - DNA, 25 bp, Homo sapien
tgttagtgaaaatgagaccacgaac

SEQ ID NO: 2790699 - DNA, 25 bp, Homo sapien
tagcctatgacctcaacatgttcag

SEQ ID NO: 2790700 - DNA, 25 bp, Homo sapien
taagtctctatggttagcatcagaa

SEQ ID NO: 2790701 - DNA, 25 bp, Homo sapien
taaacctatggaatgttaacaggca

SEQ ID NO: 2790702 - DNA, 25 bp, Homo sapien
gcagataaagatcaaaacgtcacct

SEQ ID NO: 2790703 - DNA, 25 bp, Homo sapien
atagtctaaggctggttttacaggg

SEQ ID NO: 2790704 - DNA, 25 bp, Homo sapien
aatagtctaaggctggttttacagg

SEQ ID NO: 2790705 - DNA, 25 bp, Homo sapien
aaatagtctaaggctggttttacag

SEQ ID NO: 2790706 - DNA, 25 bp, Homo sapien
cattgtgtggagtgcaggccatcat

SEQ ID NO: 2790707 - DNA, 25 bp, Homo sapien
gaagcttcaggactacaccaaagaa

SEQ ID NO: 2790708 - DNA, 25 bp, Homo sapien
ttcttaggaagcttcaggactacac

SEQ ID NO: 2790709 - DNA, 25 bp, Homo sapien
taggaagcttcaggactacaccaaa

SEQ ID NO: 2790710 - DNA, 25 bp, Homo sapien
cctgtccccatgcagtgaatgagta

SEQ ID NO: 2790711 - DNA, 25 bp, Homo sapien
tgtgtgaccttcatgtcccatctgc

SEQ ID NO: 2790712 - DNA, 25 bp, Homo sapien
gattattctagggaaagccttctga

SEQ ID NO: 2790713 - DNA, 25 bp, Homo sapien
tattatgcaggatcaagtaacactc

SEQ ID NO: 2790714 - DNA, 25 bp, Homo sapien
gaaacatctcctcatggagcttgag

SEQ ID NO: 2790715 - DNA, 25 bp, Homo sapien
aacatctcctcatggagcttgagtt

SEQ ID NO: 2790716 - DNA, 25 bp, Homo sapien
acaatgaaacatctcctcatggagc

SEQ ID NO: 2790717 - DNA, 25 bp, Homo sapien
cgacaatgaaacatctcctcatgga

SEQ ID NO: 2790718 - DNA, 25 bp, Homo sapien
tcttgagagaatactgagtaaccaa

SEQ ID NO: 2790719 - DNA, 25 bp, Homo sapien
aattttcttgagagaatactgagta

SEQ ID NO: 2790720 - DNA, 25 bp, Homo sapien
ttttcttgagagaatactgagtaac

SEQ ID NO: 2790721 - DNA, 25 bp, Homo sapien
tgagagaatactgagtaaccaaaag

SEQ ID NO: 2790722 - DNA, 25 bp, Homo sapien
attagtatcctaaacaatgtctgca

SEQ ID NO: 2790723 - DNA, 25 bp, Homo sapien
ccaagtgtctaggaatattagctct

SEQ ID NO: 2790724 - DNA, 25 bp, Homo sapien
catgagttagtaacagctaaaccaa

SEQ ID NO: 2790725 - DNA, 25 bp, Homo sapien
tcgtcaaacttgcatggtctaaggt

SEQ ID NO: 2790726 - DNA, 25 bp, Homo sapien
tatatttcagggagttccactggta

SEQ ID NO: 2790727 - DNA, 25 bp, Homo sapien
caatcagctactcactttgaaagac

SEQ ID NO: 2790728 - DNA, 25 bp, Homo sapien
gtactttcttggcacagggtttcaa

SEQ ID NO: 2790729 - DNA, 25 bp, Homo sapien
taaaatcatgttagttcaggtcatc

SEQ ID NO: 2790730 - DNA, 25 bp, Homo sapien
ttacagctttatcatggtacaaaag

SEQ ID NO: 2790731 - DNA, 25 bp, Homo sapien
tcttgaatgtaacacagatggtccc

SEQ ID NO: 2790732 - DNA, 25 bp, Homo sapien
gatttacaatggtacaactttacag

SEQ ID NO: 2790733 - DNA, 25 bp, Homo sapien
tctgtgtggtgaagcagcaagcaac

SEQ ID NO: 2790734 - DNA, 25 bp, Homo sapien
ggatgtaactcattataagtcgagg

SEQ ID NO: 2790735 - DNA, 25 bp, Homo sapien
caacttatgagtatatccagatcca

SEQ ID NO: 2790736 - DNA, 25 bp, Homo sapien
cataacacatcttggcctgtggtta

SEQ ID NO: 2790737 - DNA, 25 bp, Homo sapien
tattatacaccaaaactagccatct

SEQ ID NO: 2790738 - DNA, 25 bp, Homo sapien
taaagttttgcccagttactgccta

SEQ ID NO: 2790739 - DNA, 25 bp, Homo sapien
ggctaaagacgcatctttcctgcaa

SEQ ID NO: 2790740 - DNA, 25 bp, Homo sapien
tgaatagcttaaaccaagtagaagg

SEQ ID NO: 2790741 - DNA, 25 bp, Homo sapien
tatctagagagtacactgaatagct

SEQ ID NO: 2790742 - DNA, 25 bp, Homo sapien
acaacttccctgatgagttctttgc

SEQ ID NO: 2790743 - DNA, 25 bp, Homo sapien
tgtggtggtatagcctaaagatact

SEQ ID NO: 2790744 - DNA, 25 bp, Homo sapien
taatgattaggtggtgatgctactg

SEQ ID NO: 2790745 - DNA, 25 bp, Homo sapien
atgcaaagaataacctcccacagaa

SEQ ID NO: 2790746 - DNA, 25 bp, Homo sapien
taggtgctgttatggcagacccaac

SEQ ID NO: 2790747 - DNA, 25 bp, Homo sapien
gcttctcttgctcacgtgcctgtag

SEQ ID NO: 2790748 - DNA, 25 bp, Homo sapien
aaagcattgctcctttatgtccgca

SEQ ID NO: 2790749 - DNA, 25 bp, Homo sapien
tagaattggccgttccagtcaagca

SEQ ID NO: 2790750 - DNA, 25 bp, Homo sapien
cagaagaaatgggtccttgggattt

SEQ ID NO: 2790751 - DNA, 25 bp, Homo sapien
cacacaccagatgagtaaattgttg

SEQ ID NO: 2790752 - DNA, 25 bp, Homo sapien
cctaattaagattgaggcagaagaa

SEQ ID NO: 2790753 - DNA, 25 bp, Homo sapien
tagtcatggtgtcagatatagagaa

SEQ ID NO: 2790754 - DNA, 25 bp, Homo sapien
catctgcagtcttcaagagactcac

SEQ ID NO: 2790755 - DNA, 25 bp, Homo sapien
ctggcccaaaataaggggatggaga

SEQ ID NO: 2790756 - DNA, 25 bp, Homo sapien
actggcccaaaataaggggatggag

SEQ ID NO: 2790757 - DNA, 25 bp, Homo sapien
ctaccctgacggcttgaggccagga

SEQ ID NO: 2790758 - DNA, 25 bp, Homo sapien
tcctaactaccctgacggcttgagg

SEQ ID NO: 2790759 - DNA, 25 bp, Homo sapien
tgtagtcctaactaccctgacggct

SEQ ID NO: 2790760 - DNA, 25 bp, Homo sapien
taactaccctgacggcttgaggcca

SEQ ID NO: 2790761 - DNA, 25 bp, Homo sapien
cattccatgtttacagattaaaaga

SEQ ID NO: 2790762 - DNA, 25 bp, Homo sapien
cagagaggcgtcatactacccaatt

SEQ ID NO: 2790763 - DNA, 25 bp, Homo sapien
ggctatctccatgaaactaccaaca

SEQ ID NO: 2790764 - DNA, 25 bp, Homo sapien
ataaagccagagaggcgtcatacta

SEQ ID NO: 2790765 - DNA, 25 bp, Homo sapien
cactgtacaaaagtaacaaatctgc

SEQ ID NO: 2790766 - DNA, 25 bp, Homo sapien
gagcatgggctgaataactacctac

SEQ ID NO: 2790767 - DNA, 25 bp, Homo sapien
caaatctgcatatgcactatctgtg

SEQ ID NO: 2790768 - DNA, 25 bp, Homo sapien
gactttatttgatggactggattag

SEQ ID NO: 2790769 - DNA, 25 bp, Homo sapien
tgacgggaccgggtgccgcgtagca

SEQ ID NO: 2790770 - DNA, 25 bp, Homo sapien
accgggtgccgcgtagcaggaggtg

SEQ ID NO: 2790771 - DNA, 25 bp, Homo sapien
ggtgccgcgtagcaggaggtggcgc

SEQ ID NO: 2790772 - DNA, 25 bp, Homo sapien
acgggaccgggtgccgcgtagcagg

SEQ ID NO: 2790773 - DNA, 25 bp, Homo sapien
cagcgaaaattcgagcgcggcgccg

SEQ ID NO: 2790774 - DNA, 25 bp, Homo sapien
ccagccgaccgctcaagagtgcggg

SEQ ID NO: 2790775 - DNA, 25 bp, Homo sapien
tggctgaggcccagcgaaaattcga

SEQ ID NO: 2790776 - DNA, 25 bp, Homo sapien
tcactgttggaggacccagtgcacc

SEQ ID NO: 2790777 - DNA, 25 bp, Homo sapien
aatatagaaagtcgaaggtttctgg

SEQ ID NO: 2790778 - DNA, 25 bp, Homo sapien
tcagttcggataattaagctgtgta

SEQ ID NO: 2790779 - DNA, 25 bp, Homo sapien
gattcacagtatgcaacaatgatca

SEQ ID NO: 2790780 - DNA, 25 bp, Homo sapien
cagtatgcaacaatgatcatattac

SEQ ID NO: 2790781 - DNA, 25 bp, Homo sapien
tgtaaaaaggcttgcacaagtacct

SEQ ID NO: 2790782 - DNA, 25 bp, Homo sapien
tggcatagatgtcaagaaaccagac

SEQ ID NO: 2790783 - DNA, 25 bp, Homo sapien
gcaactgtccaccaagagcggcgtt

SEQ ID NO: 2790784 - DNA, 25 bp, Homo sapien
tagagtttgcatacatcgacggtgg

SEQ ID NO: 2790785 - DNA, 25 bp, Homo sapien
tgcctcagccaattaaactgtgttg

SEQ ID NO: 2790786 - DNA, 25 bp, Homo sapien
gacctttaagcacaagaacaccttg

SEQ ID NO: 2790787 - DNA, 25 bp, Homo sapien
caattaaactgtgttgtctctgcag

SEQ ID NO: 2790788 - DNA, 25 bp, Homo sapien
tgcagtgcgttttatcacaagaaca

SEQ ID NO: 2790789 - DNA, 25 bp, Homo sapien
gttctagcacaaagaactacctgag

SEQ ID NO: 2790790 - DNA, 25 bp, Homo sapien
cgccagatacttgaaagccttccaa

SEQ ID NO: 2790791 - DNA, 25 bp, Homo sapien
ttaggcaccaaagaagctgagggac

SEQ ID NO: 2790792 - DNA, 25 bp, Homo sapien
tacacatgctatggtggaccttagg

SEQ ID NO: 2790793 - DNA, 25 bp, Homo sapien
gcatggttaatgcagatcatgtgaa

SEQ ID NO: 2790794 - DNA, 25 bp, Homo sapien
gtttataaatccagtgctagacagt

SEQ ID NO: 2790795 - DNA, 25 bp, Homo sapien
caattcgatattgactactggatag

SEQ ID NO: 2790796 - DNA, 25 bp, Homo sapien
caaaacatgaactcttggtagaaaa

SEQ ID NO: 2790797 - DNA, 25 bp, Homo sapien
gactatcagggacatacagagacct

SEQ ID NO: 2790798 - DNA, 25 bp, Homo sapien
tacagagacctgaaaggacctggag

SEQ ID NO: 2790799 - DNA, 25 bp, Homo sapien
gggacatacagagacctgaaaggac

SEQ ID NO: 2790800 - DNA, 25 bp, Homo sapien
tcagagactatcagggacatacaga

SEQ ID NO: 2790801 - DNA, 25 bp, Homo sapien
cagctaaatatgtggttgtccttca

SEQ ID NO: 2790802 - DNA, 25 bp, Homo sapien
agctaaatatgtggttgtccttcat

SEQ ID NO: 2790803 - DNA, 25 bp, Homo sapien
tcagctaaatatgtggttgtccttc

SEQ ID NO: 2790804 - DNA, 25 bp, Homo sapien
gctaaatatgtggttgtccttcatc

SEQ ID NO: 2790805 - DNA, 25 bp, Homo sapien
agaacatgtttcaaggagctggaca

SEQ ID NO: 2790806 - DNA, 25 bp, Homo sapien
tccttaccaggggagactcacactg

SEQ ID NO: 2790807 - DNA, 25 bp, Homo sapien
gagactcacactgcagatcataatt

SEQ ID NO: 2790808 - DNA, 25 bp, Homo sapien
ctctagaacatgtttcaaggagctg

SEQ ID NO: 2790809 - DNA, 25 bp, Homo sapien
ccttagaacctataacagcgtcatt

SEQ ID NO: 2790810 - DNA, 25 bp, Homo sapien
tagaacctataacagcgtcattcat

SEQ ID NO: 2790811 - DNA, 25 bp, Homo sapien
tgccttagaacctataacagcgtca

SEQ ID NO: 2790812 - DNA, 25 bp, Homo sapien
tctgccttagaacctataacagcgt

SEQ ID NO: 2790813 - DNA, 25 bp, Homo sapien
aggtctctgtatgtccctgatagtc

SEQ ID NO: 2790814 - DNA, 25 bp, Homo sapien
tctgtatgtccctgatagtctctga

SEQ ID NO: 2790815 - DNA, 25 bp, Homo sapien
gcaccatttgtagttgactgtcact

SEQ ID NO: 2790816 - DNA, 25 bp, Homo sapien
tccacttatctctgtttatccctgc

SEQ ID NO: 2790817 - DNA, 25 bp, Homo sapien
ttcatttggatcactagtttaccaa

SEQ ID NO: 2790818 - DNA, 25 bp, Homo sapien
tcactagtttaccaacatcactgcc

SEQ ID NO: 2790819 - DNA, 25 bp, Homo sapien
tggatcactagtttaccaacatcac

SEQ ID NO: 2790820 - DNA, 25 bp, Homo sapien
cgtgcccagccgactttcttttcat

SEQ ID NO: 2790821 - DNA, 25 bp, Homo sapien
acaagcacacttgaagcacaataca

SEQ ID NO: 2790822 - DNA, 25 bp, Homo sapien
tacaagcacacttgaagcacaatac

SEQ ID NO: 2790823 - DNA, 25 bp, Homo sapien
gtacaagcacacttgaagcacaata

SEQ ID NO: 2790824 - DNA, 25 bp, Homo sapien
caagcacacttgaagcacaatacat

SEQ ID NO: 2790825 - DNA, 25 bp, Homo sapien
tacaagttgtctttatgctgcgaga

SEQ ID NO: 2790826 - DNA, 25 bp, Homo sapien
tttatgctgcgagataagtcctctc

SEQ ID NO: 2790827 - DNA, 25 bp, Homo sapien
ttgtgatcttcacttgtacaagttg

SEQ ID NO: 2790828 - DNA, 25 bp, Homo sapien
tgagctcccaccttttcagtgaact

SEQ ID NO: 2790829 - DNA, 25 bp, Homo sapien
ttgcccaccctgcctatgtcctgaa

SEQ ID NO: 2790830 - DNA, 25 bp, Homo sapien
gtctttgcccaccctgcctatgtcc

SEQ ID NO: 2790831 - DNA, 25 bp, Homo sapien
tgaagtctttgcccaccctgcctat

SEQ ID NO: 2790832 - DNA, 25 bp, Homo sapien
ttgcaattaaagagccctaagactt

SEQ ID NO: 2790833 - DNA, 25 bp, Homo sapien
caccaacaatatgtgatttgtggga

SEQ ID NO: 2790834 - DNA, 25 bp, Homo sapien
attagaatatcaaaattgcctagca

SEQ ID NO: 2790835 - DNA, 25 bp, Homo sapien
cctaagactttgtattgtttgggct

SEQ ID NO: 2790836 - DNA, 25 bp, Homo sapien
tctgtgaggaatctattataacagg

SEQ ID NO: 2790837 - DNA, 25 bp, Homo sapien
attctgtgaggaatctattataaca

SEQ ID NO: 2790838 - DNA, 25 bp, Homo sapien
atgtgtattttctatgccctgaaga

SEQ ID NO: 2790839 - DNA, 25 bp, Homo sapien
tgtgaggaatctattataacaggta

SEQ ID NO: 2790840 - DNA, 25 bp, Homo sapien
taacatgacccctcaaggtggtgac

SEQ ID NO: 2790841 - DNA, 25 bp, Homo sapien
ggcaaccatttgagcccagacttca

SEQ ID NO: 2790842 - DNA, 25 bp, Homo sapien
tgggcgcttccctgataattatagt

SEQ ID NO: 2790843 - DNA, 25 bp, Homo sapien
tagtctattggatgcagtgtcagag

SEQ ID NO: 2790844 - DNA, 25 bp, Homo sapien
tgcggacataaaggagcaatgcttt

SEQ ID NO: 2790845 - DNA, 25 bp, Homo sapien
tcagtatgcttgactggaacggcca

SEQ ID NO: 2790846 - DNA, 25 bp, Homo sapien
tacaggcacgtgagcaagagaagct

SEQ ID NO: 2790847 - DNA, 25 bp, Homo sapien
tagcctatgttcttgaatgcggaca

SEQ ID NO: 2790848 - DNA, 25 bp, Homo sapien
tgggaagcttatgtactagcaacag

SEQ ID NO: 2790849 - DNA, 25 bp, Homo sapien
gaagcatgaaatcaccttgaaggta

SEQ ID NO: 2790850 - DNA, 25 bp, Homo sapien
cacaagtctagtggcaatgcattac

SEQ ID NO: 2790851 - DNA, 25 bp, Homo sapien
tcctggagtacagacatggtggcta

SEQ ID NO: 2790852 - DNA, 25 bp, Homo sapien
gaatattgtgctgtactgtccttag

SEQ ID NO: 2790853 - DNA, 25 bp, Homo sapien
tgacttcacctgctgaatggaatat

SEQ ID NO: 2790854 - DNA, 25 bp, Homo sapien
aatggaatattgtgctgtactgtcc

SEQ ID NO: 2790855 - DNA, 25 bp, Homo sapien
gctgaatggaatattgtgctgtact

SEQ ID NO: 2790856 - DNA, 25 bp, Homo sapien
tcactcatgttacctgatggaaaat

SEQ ID NO: 2790857 - DNA, 25 bp, Homo sapien
cactcatgttacctgatggaaaatc

SEQ ID NO: 2790858 - DNA, 25 bp, Homo sapien
tctcactcatgttacctgatggaaa

SEQ ID NO: 2790859 - DNA, 25 bp, Homo sapien
ctcactcatgttacctgatggaaaa

SEQ ID NO: 2790860 - DNA, 25 bp, Homo sapien
tgttgattctggcaagtgaaatcat

SEQ ID NO: 2790861 - DNA, 25 bp, Homo sapien
tgtcttgctattgttgattctggca

SEQ ID NO: 2790862 - DNA, 25 bp, Homo sapien
gaagagatcaaagcctgtcttgcta

SEQ ID NO: 2790863 - DNA, 25 bp, Homo sapien
cgattgtttgcatatgaatcagact

SEQ ID NO: 2790864 - DNA, 25 bp, Homo sapien
tactcatcctactatgcaataggac

SEQ ID NO: 2790865 - DNA, 25 bp, Homo sapien
tccgttaaggcaaccaaggattgga

SEQ ID NO: 2790866 - DNA, 25 bp, Homo sapien
gttttaatacatgtactcaatgtgt

SEQ ID NO: 2790867 - DNA, 25 bp, Homo sapien
ccagaacttattcctgggttctaca

SEQ ID NO: 2790868 - DNA, 25 bp, Homo sapien
ttgttctcgagcctataaaaagagc

SEQ ID NO: 2790869 - DNA, 25 bp, Homo sapien
gttgttctcgagcctataaaaagag

SEQ ID NO: 2790870 - DNA, 25 bp, Homo sapien
tgattggtgatgtcttggatattct

SEQ ID NO: 2790871 - DNA, 25 bp, Homo sapien
ttaactgtggcctcctacactgtgt

SEQ ID NO: 2790872 - DNA, 25 bp, Homo sapien
tgttttggatgattggtgatgtctt

SEQ ID NO: 2790873 - DNA, 25 bp, Homo sapien
tggaactttgaatatacaacacttt

SEQ ID NO: 2790874 - DNA, 25 bp, Homo sapien
caaagatgtacagaggaaacaatgc

SEQ ID NO: 2790875 - DNA, 25 bp, Homo sapien
gcaaagatgtacagaggaaacaatg

SEQ ID NO: 2790876 - DNA, 25 bp, Homo sapien
gatggaattgaagtcatgaggcagc

SEQ ID NO: 2790877 - DNA, 25 bp, Homo sapien
tgatggaattgaagtcatgaggcag

SEQ ID NO: 2790878 - DNA, 25 bp, Homo sapien
ctgatggaattgaagtcatgaggca

SEQ ID NO: 2790879 - DNA, 25 bp, Homo sapien
tgaacattcttcttccggtacattt

SEQ ID NO: 2790880 - DNA, 25 bp, Homo sapien
gttaaattattgtttgatggataaa

SEQ ID NO: 2790881 - DNA, 25 bp, Homo sapien
aatgaacattcttcttccggtacat

SEQ ID NO: 2790882 - DNA, 25 bp, Homo sapien
taaattattgtttgatggataaaag

SEQ ID NO: 2790883 - DNA, 25 bp, Homo sapien
tatacacattgacaatgggtaaata

SEQ ID NO: 2790884 - DNA, 25 bp, Homo sapien
tacacattgacaatgggtaaataga

SEQ ID NO: 2790885 - DNA, 25 bp, Homo sapien
atttatacacattgacaatgggtaa

SEQ ID NO: 2790886 - DNA, 25 bp, Homo sapien
tttatacacattgacaatgggtaaa

SEQ ID NO: 2790887 - DNA, 25 bp, Homo sapien
acacgaaacattcttctgatgccgg

SEQ ID NO: 2790888 - DNA, 25 bp, Homo sapien
atttcgaacacgaaacattcttctg

SEQ ID NO: 2790889 - DNA, 25 bp, Homo sapien
cattcttctgatgccggcatccctg

SEQ ID NO: 2790890 - DNA, 25 bp, Homo sapien
ctcaaacaatttcgaacacgaaaca

SEQ ID NO: 2790891 - DNA, 25 bp, Homo sapien
ttcgtttggtgttcgagctcgtcca

SEQ ID NO: 2790892 - DNA, 25 bp, Homo sapien
cgctggaatgccgtctctttttcca

SEQ ID NO: 2790893 - DNA, 25 bp, Homo sapien
gtgttcgagctcgtccaggatgtct

SEQ ID NO: 2790894 - DNA, 25 bp, Homo sapien
gagccacccgttggggcgattgtct

SEQ ID NO: 2790895 - DNA, 25 bp, Homo sapien
agtgatgtcgagtgtgcgggtgttt

SEQ ID NO: 2790896 - DNA, 25 bp, Homo sapien
gtgatgtcgagtgtgcgggtgtttg

SEQ ID NO: 2790897 - DNA, 25 bp, Homo sapien
cagtgatgtcgagtgtgcgggtgtt

SEQ ID NO: 2790898 - DNA, 25 bp, Homo sapien
ccagtgatgtcgagtgtgcgggtgt

SEQ ID NO: 2790899 - DNA, 25 bp, Homo sapien
cacaagcaaagtgaactgggggatg

SEQ ID NO: 2790900 - DNA, 25 bp, Homo sapien
gaactgggggatgggctgaaggggc

SEQ ID NO: 2790901 - DNA, 25 bp, Homo sapien
gcaacggggagatcccacaagcaaa

SEQ ID NO: 2790902 - DNA, 25 bp, Homo sapien
tgaaggggctccaggcaactgagcc

SEQ ID NO: 2790903 - DNA, 25 bp, Homo sapien
tggcccaaacaggaatgaggggcac

SEQ ID NO: 2790904 - DNA, 25 bp, Homo sapien
agcgaccataatggatgaataagcg

SEQ ID NO: 2790905 - DNA, 25 bp, Homo sapien
accataatggatgaataagcgcagc

SEQ ID NO: 2790906 - DNA, 25 bp, Homo sapien
tgacagagcgaccataatggatgaa

SEQ ID NO: 2790907 - DNA, 25 bp, Homo sapien
cataatggatgaataagcgcagcca

SEQ ID NO: 2790908 - DNA, 25 bp, Homo sapien
ggaggcggacgtggggggtcgtgca

SEQ ID NO: 2790909 - DNA, 25 bp, Homo sapien
ggcaatggcaggaggcggacgtggg

SEQ ID NO: 2790910 - DNA, 25 bp, Homo sapien
ccgcgcaaggcacctgctggcaatg

SEQ ID NO: 2790911 - DNA, 25 bp, Homo sapien
cgcaaggcacctgctggcaatggca

SEQ ID NO: 2790912 - DNA, 25 bp, Homo sapien
agggagagacgtgggcacaaaggtc

SEQ ID NO: 2790913 - DNA, 25 bp, Homo sapien
gagggagagacgtgggcacaaaggt

SEQ ID NO: 2790914 - DNA, 25 bp, Homo sapien
ggagggagagacgtgggcacaaagg

SEQ ID NO: 2790915 - DNA, 25 bp, Homo sapien
tggagggagagacgtgggcacaaag

SEQ ID NO: 2790916 - DNA, 25 bp, Homo sapien
tttagtcagacatggtgggcaggag

SEQ ID NO: 2790917 - DNA, 25 bp, Homo sapien
tggccccttttacctatggcaggag

SEQ ID NO: 2790918 - DNA, 25 bp, Homo sapien
ctctgcttggcagtaccccagtggg

SEQ ID NO: 2790919 - DNA, 25 bp, Homo sapien
ggcttaacaccacctagaacctgaa

SEQ ID NO: 2790920 - DNA, 25 bp, Homo sapien
gacttcggtgcatctgcaggcttaa

SEQ ID NO: 2790921 - DNA, 25 bp, Homo sapien
tgctaggttgcatagaggacaaaca

SEQ ID NO: 2790922 - DNA, 25 bp, Homo sapien
cgatgatcgttcttgtgaatagcca

SEQ ID NO: 2790923 - DNA, 25 bp, Homo sapien
tatgctaggctttaggtcaagaagg

SEQ ID NO: 2790924 - DNA, 25 bp, Homo sapien
ggaggtagatcccaccattttatgg

SEQ ID NO: 2790925 - DNA, 25 bp, Homo sapien
tctgttgggagcctcttcccttcat

SEQ ID NO: 2790926 - DNA, 25 bp, Homo sapien
caacagtctgttctgtggaggcctt

SEQ ID NO: 2790927 - DNA, 25 bp, Homo sapien
agcacggactggtccctctgttggg

SEQ ID NO: 2790928 - DNA, 25 bp, Homo sapien
gcctggtcaacaggtagtgaatcct

SEQ ID NO: 2790929 - DNA, 25 bp, Homo sapien
tggctgaggactgcgtgttggcagc

SEQ ID NO: 2790930 - DNA, 25 bp, Homo sapien
tcagttccagtggcgggggccctgg

SEQ ID NO: 2790931 - DNA, 25 bp, Homo sapien
ttggctgaggactgcgtgttggcag

SEQ ID NO: 2790932 - DNA, 25 bp, Homo sapien
catgcggtcttgtggttgctgaacg

SEQ ID NO: 2790933 - DNA, 25 bp, Homo sapien
tactcttggtatcgcaactacgggc

SEQ ID NO: 2790934 - DNA, 25 bp, Homo sapien
gctggccgcccagtttgagaattgg

SEQ ID NO: 2790935 - DNA, 25 bp, Homo sapien
tacgggcacctggagttgattcagc

SEQ ID NO: 2790936 - DNA, 25 bp, Homo sapien
tccgttaaggcaaccaaggattgga

SEQ ID NO: 2790937 - DNA, 25 bp, Homo sapien
tactcatcctactatgcaataggac

SEQ ID NO: 2790938 - DNA, 25 bp, Homo sapien
gttttaatacatgtactcaatgtgt

SEQ ID NO: 2790939 - DNA, 25 bp, Homo sapien
ccagaacttattcctgggttctaca

SEQ ID NO: 2790940 - DNA, 25 bp, Homo sapien
ctacccgatagtagggtggcagtag

SEQ ID NO: 2790941 - DNA, 25 bp, Homo sapien
tgattggtgatgtcttggatattct

SEQ ID NO: 2790942 - DNA, 25 bp, Homo sapien
ttaactgtggcctcctacactgtgt

SEQ ID NO: 2790943 - DNA, 25 bp, Homo sapien
tgttttggatgattggtgatgtctt

SEQ ID NO: 2790944 - DNA, 25 bp, Homo sapien
tggaactttgaatatacaacacttt

SEQ ID NO: 2790945 - DNA, 25 bp, Homo sapien
caaagatgtacagaggaaacaatgc

SEQ ID NO: 2790946 - DNA, 25 bp, Homo sapien
gcaaagatgtacagaggaaacaatg

SEQ ID NO: 2790947 - DNA, 25 bp, Homo sapien
aatgaacattcttcttccggtacat

SEQ ID NO: 2790948 - DNA, 25 bp, Homo sapien
tgaacattcttcttccggtacattt

SEQ ID NO: 2790949 - DNA, 25 bp, Homo sapien
gttaaattattgtttgatggataaa

SEQ ID NO: 2790950 - DNA, 25 bp, Homo sapien
taaattattgtttgatggataaaag

SEQ ID NO: 2790951 - DNA, 25 bp, Homo sapien
tacacattgacaatgggtaaataga

SEQ ID NO: 2790952 - DNA, 25 bp, Homo sapien
tatacacattgacaatgggtaaata

SEQ ID NO: 2790953 - DNA, 25 bp, Homo sapien
tttatacacattgacaatgggtaaa

SEQ ID NO: 2790954 - DNA, 25 bp, Homo sapien
atttatacacattgacaatgggtaa

SEQ ID NO: 2790955 - DNA, 25 bp, Homo sapien
tgtacctgccttgttttcacagcgg

SEQ ID NO: 2790956 - DNA, 25 bp, Homo sapien
tacctgccttcttctcacagcgggt

SEQ ID NO: 2790957 - DNA, 25 bp, Homo sapien
tacctgccttgttttcacagcggtg

SEQ ID NO: 2790958 - DNA, 25 bp, Homo sapien
acctgccttgttttcacagcggtga

SEQ ID NO: 2790959 - DNA, 25 bp, Homo sapien
ctcagagcacacagcactggcttac

SEQ ID NO: 2790960 - DNA, 25 bp, Homo sapien
ctggaactcagagcacacagcactg

SEQ ID NO: 2790961 - DNA, 25 bp, Homo sapien
tggaactcagagcacacagcactgg

SEQ ID NO: 2790962 - DNA, 25 bp, Homo sapien
gaactcagagcacacagcactggct

SEQ ID NO: 2790963 - DNA, 25 bp, Homo sapien
actgatgtcgagtgtgcgggtgttt

SEQ ID NO: 2790964 - DNA, 25 bp, Homo sapien
ggacacaggtcttgcaggatcacgg

SEQ ID NO: 2790965 - DNA, 25 bp, Homo sapien
gtgcagtgaagttgaagacagaatc

SEQ ID NO: 2790966 - DNA, 25 bp, Homo sapien
acagaatcaccaggatgggacacag

SEQ ID NO: 2790967 - DNA, 25 bp, Homo sapien
ggctgaaggggctccaggcaactga

SEQ ID NO: 2790968 - DNA, 25 bp, Homo sapien
gggatgggctgaaggggctccaggc

SEQ ID NO: 2790969 - DNA, 25 bp, Homo sapien
tgggggatgggctgaaggggctcca

SEQ ID NO: 2790970 - DNA, 25 bp, Homo sapien
tgaaggggctccaggcaactgagcc

SEQ ID NO: 2790971 - DNA, 25 bp, Homo sapien
tggcccaaacaggaatgaggggcac

SEQ ID NO: 2790972 - DNA, 25 bp, Homo sapien
tgagcacataatggcaccagtgaca

SEQ ID NO: 2790973 - DNA, 25 bp, Homo sapien
gtgagcacataatggcaccagtgac

SEQ ID NO: 2790974 - DNA, 25 bp, Homo sapien
tttagtcagacatggtgggcaggag

SEQ ID NO: 2790975 - DNA, 25 bp, Homo sapien
ggcttaacaccacctagaacctgaa

SEQ ID NO: 2790976 - DNA, 25 bp, Homo sapien
ctctgcttggcagtaccccagtggg

SEQ ID NO: 2790977 - DNA, 25 bp, Homo sapien
tggccccttttacctatggcaggag

SEQ ID NO: 2790978 - DNA, 25 bp, Homo sapien
gacttcggtgcatctgcaggcttaa

SEQ ID NO: 2790979 - DNA, 25 bp, Homo sapien
tctcgacagcacattaggaaccagt

SEQ ID NO: 2790980 - DNA, 25 bp, Homo sapien
gacttccagggaaactcattcaagg

SEQ ID NO: 2790981 - DNA, 25 bp, Homo sapien
agtgttccaacaaaatgagcgagtg

SEQ ID NO: 2790982 - DNA, 25 bp, Homo sapien
tgaaaatggaccagccgcagtggct

SEQ ID NO: 2790983 - DNA, 25 bp, Homo sapien
tatctggtaggtctgaatgacttaa

SEQ ID NO: 2790984 - DNA, 25 bp, Homo sapien
catttgggataagttgaagatgagc

SEQ ID NO: 2790985 - DNA, 25 bp, Homo sapien
aagatgagctggtgttcgtcttcat

SEQ ID NO: 2790986 - DNA, 25 bp, Homo sapien
aaattaagcagatggctggccgggc

SEQ ID NO: 2790987 - DNA, 25 bp, Homo sapien
taccaacaggacagttattacttcc

SEQ ID NO: 2790988 - DNA, 25 bp, Homo sapien
taaaaatttaccacaagcttcagct

SEQ ID NO: 2790989 - DNA, 25 bp, Homo sapien
ccacatagcatttgtatagtcatga

SEQ ID NO: 2790990 - DNA, 25 bp, Homo sapien
aaataagctaacataccaacaggac

SEQ ID NO: 2790991 - DNA, 25 bp, Homo sapien
gaaaagcactggacgatgtccttta

SEQ ID NO: 2790992 - DNA, 25 bp, Homo sapien
gggaaaacatctggtgtgatcgtct

SEQ ID NO: 2790993 - DNA, 25 bp, Homo sapien
tctaatgggtcatcaccttcctgcc

SEQ ID NO: 2790994 - DNA, 25 bp, Homo sapien
tttctctaaacaccctccacaggaa

SEQ ID NO: 2790995 - DNA, 25 bp, Homo sapien
taaggaaacttgatcagtgccactg

SEQ ID NO: 2790996 - DNA, 25 bp, Homo sapien
aagtaaggaaacttgatcagtgcca

SEQ ID NO: 2790997 - DNA, 25 bp, Homo sapien
aggaaacttgatcagtgccactggc

SEQ ID NO: 2790998 - DNA, 25 bp, Homo sapien
ctaaaagtaaggaaacttgatcagt

SEQ ID NO: 2790999 - DNA, 25 bp, Homo sapien
cagaagttggttaccagtgaggcaa

SEQ ID NO: 2791000 - DNA, 25 bp, Homo sapien
tgcagataataaccaccagacctgt

SEQ ID NO: 2791001 - DNA, 25 bp, Homo sapien
aaagcctattcagtctccagttggg

SEQ ID NO: 2791002 - DNA, 25 bp, Homo sapien
cagttgggttttgtgacagtcagaa

SEQ ID NO: 2791003 - DNA, 25 bp, Homo sapien
agtccttaaaagagtccagccgtag

SEQ ID NO: 2791004 - DNA, 25 bp, Homo sapien
taaaagagtccagccgtagttcttc

SEQ ID NO: 2791005 - DNA, 25 bp, Homo sapien
cagtccttaaaagagtccagccgta

SEQ ID NO: 2791006 - DNA, 25 bp, Homo sapien
gtccagccgtagttcttcgtaagca

SEQ ID NO: 2791007 - DNA, 25 bp, Homo sapien
aattctctctggacccaggaattca

SEQ ID NO: 2791008 - DNA, 25 bp, Homo sapien
ctgatgccataggtaattctctctg

SEQ ID NO: 2791009 - DNA, 25 bp, Homo sapien
aggtaattctctctggacccaggaa

SEQ ID NO: 2791010 - DNA, 25 bp, Homo sapien
cccaggaattcacaaaatgttctcc

SEQ ID NO: 2791011 - DNA, 25 bp, Homo sapien
caagttgttgattatctgacttttt

SEQ ID NO: 2791012 - DNA, 25 bp, Homo sapien
ttcaagttgttgattatctgacttt

SEQ ID NO: 2791013 - DNA, 25 bp, Homo sapien
tcaagttgttgattatctgactttt

SEQ ID NO: 2791014 - DNA, 25 bp, Homo sapien
tgacctcatcatccgtccgtctcgg

SEQ ID NO: 2791015 - DNA, 25 bp, Homo sapien
acccggcccatgttggaggtcttga

SEQ ID NO: 2791016 - DNA, 25 bp, Homo sapien
ctgcacccggcccatgttggaggtc

SEQ ID NO: 2791017 - DNA, 25 bp, Homo sapien
tgcacccggcccatgttggaggtct

SEQ ID NO: 2791018 - DNA, 25 bp, Homo sapien
agttagccagctaggaagagccagc

SEQ ID NO: 2791019 - DNA, 25 bp, Homo sapien
cactgtcaggccatgttctctatag

SEQ ID NO: 2791020 - DNA, 25 bp, Homo sapien
taagccagtttggattcgatttccc

SEQ ID NO: 2791021 - DNA, 25 bp, Homo sapien
tgacagcgcctaggtcaggagatct

SEQ ID NO: 2791022 - DNA, 25 bp, Homo sapien
aatgcctatgcccttctgagtcaga

SEQ ID NO: 2791023 - DNA, 25 bp, Homo sapien
gaaatcaaacccatgacataaaaag

SEQ ID NO: 2791024 - DNA, 25 bp, Homo sapien
cacttacaggtaatccaaaaacttg

SEQ ID NO: 2791025 - DNA, 25 bp, Homo sapien
aaaaggctctaggtcagcaagtgaa

SEQ ID NO: 2791026 - DNA, 25 bp, Homo sapien
ctctgaggatttcttactccgaaga

SEQ ID NO: 2791027 - DNA, 25 bp, Homo sapien
tttcttactccgaagaaattcacat

SEQ ID NO: 2791028 - DNA, 25 bp, Homo sapien
tatgtcaacaaatcccttgtagctt

SEQ ID NO: 2791029 - DNA, 25 bp, Homo sapien
gaatatactgggtaatttcctctga

SEQ ID NO: 2791030 - DNA, 25 bp, Homo sapien
tgccatcagatgatctgcatatttc

SEQ ID NO: 2791031 - DNA, 25 bp, Homo sapien
tggatgccatcagatgatctgcata

SEQ ID NO: 2791032 - DNA, 25 bp, Homo sapien
atcacaggagaacatggatgccatc

SEQ ID NO: 2791033 - DNA, 25 bp, Homo sapien
catggatgccatcagatgatctgca

SEQ ID NO: 2791034 - DNA, 25 bp, Homo sapien
gtttccaaggattgccgtaagtctg

SEQ ID NO: 2791035 - DNA, 25 bp, Homo sapien
ccaaggattgccgtaagtctgcaca

SEQ ID NO: 2791036 - DNA, 25 bp, Homo sapien
ggattgccgtaagtctgcacataac

SEQ ID NO: 2791037 - DNA, 25 bp, Homo sapien
tttccaaggattgccgtaagtctgc

SEQ ID NO: 2791038 - DNA, 25 bp, Homo sapien
gaggagaatgctggccagtggaagg

SEQ ID NO: 2791039 - DNA, 25 bp, Homo sapien
gctggccagtggaaggaaagtatgt

SEQ ID NO: 2791040 - DNA, 25 bp, Homo sapien
ccacagttctagtctaatagaggag

SEQ ID NO: 2791041 - DNA, 25 bp, Homo sapien
cacagttctagtctaatagaggaga

SEQ ID NO: 2791042 - DNA, 25 bp, Homo sapien
gtgagcacaggaccttttgtcttca

SEQ ID NO: 2791043 - DNA, 25 bp, Homo sapien
acacagggcaacgtccagaagggtc

SEQ ID NO: 2791044 - DNA, 25 bp, Homo sapien
cgaaagctctccaaacctgtggttt

SEQ ID NO: 2791045 - DNA, 25 bp, Homo sapien
gcagtttgaggtgcatcgccttctt

SEQ ID NO: 2791046 - DNA, 25 bp, Homo sapien
tagggagtactcactgcaaaggagc

SEQ ID NO: 2791047 - DNA, 25 bp, Homo sapien
aaaacagatcaatgtcaccggccgc

SEQ ID NO: 2791048 - DNA, 25 bp, Homo sapien
accggccgctggaactcctagggag

SEQ ID NO: 2791049 - DNA, 25 bp, Homo sapien
catggaattactcaagatgggagca

SEQ ID NO: 2791050 - DNA, 25 bp, Homo sapien
agagacagagtgatactgcctcaaa

SEQ ID NO: 2791051 - DNA, 25 bp, Homo sapien
gcctgagagacagagtgatactgcc

SEQ ID NO: 2791052 - DNA, 25 bp, Homo sapien
ctgagagacagagtgatactgcctc

SEQ ID NO: 2791053 - DNA, 25 bp, Homo sapien
gagagacagagtgatactgcctcaa

SEQ ID NO: 2791054 - DNA, 25 bp, Homo sapien
ccagggtcctgaggtgtgacgcaaa

SEQ ID NO: 2791055 - DNA, 25 bp, Homo sapien
cgcaaatagcaattcagtcaggtga

SEQ ID NO: 2791056 - DNA, 25 bp, Homo sapien
cacagatgcatgaggttaggtttac

SEQ ID NO: 2791057 - DNA, 25 bp, Homo sapien
tgcctgacccctttagacatctgag

SEQ ID NO: 2791058 - DNA, 25 bp, Homo sapien
ggtgggattacgttgtctttactga

SEQ ID NO: 2791059 - DNA, 25 bp, Homo sapien
ccactgggtccaggctcatggagta

SEQ ID NO: 2791060 - DNA, 25 bp, Homo sapien
gaaactcccgttactctgatcagtg

SEQ ID NO: 2791061 - DNA, 25 bp, Homo sapien
actcctgagagaaactcccgttact

SEQ ID NO: 2791062 - DNA, 25 bp, Homo sapien
aaagcctgatttactcttaactgga

SEQ ID NO: 2791063 - DNA, 25 bp, Homo sapien
caaaaggtttagcatatgagagtga

SEQ ID NO: 2791064 - DNA, 25 bp, Homo sapien
cacaatgatatatctgcattgaatc

SEQ ID NO: 2791065 - DNA, 25 bp, Homo sapien
gacttcatcatacattctcacctaa

SEQ ID NO: 2791066 - DNA, 25 bp, Homo sapien
tgactcttgaaattgacacatccct

SEQ ID NO: 2791067 - DNA, 25 bp, Homo sapien
actcttgaaattgacacatcccttg

SEQ ID NO: 2791068 - DNA, 25 bp, Homo sapien
gtgactcttgaaattgacacatccc

SEQ ID NO: 2791069 - DNA, 25 bp, Homo sapien
tcttgaaattgacacatcccttgtg

SEQ ID NO: 2791070 - DNA, 25 bp, Homo sapien
tattggttccttgatgcctgtggag

SEQ ID NO: 2791071 - DNA, 25 bp, Homo sapien
agtaagcgggtaccaagtatggcca

SEQ ID NO: 2791072 - DNA, 25 bp, Homo sapien
tttaatatccttctgagtaagcggg

SEQ ID NO: 2791073 - DNA, 25 bp, Homo sapien
ggactgctacaaggacttccactgc

SEQ ID NO: 2791074 - DNA, 25 bp, Homo sapien
aatgtaaagtgacttctgttggtca

SEQ ID NO: 2791075 - DNA, 25 bp, Homo sapien
gaatgtttaatgtaaagtgacttct

SEQ ID NO: 2791076 - DNA, 25 bp, Homo sapien
ggcagtcttgtgagtttgaatgttt

SEQ ID NO: 2791077 - DNA, 25 bp, Homo sapien
tcttgtgagtttgaatgtttaatgt

SEQ ID NO: 2791078 - DNA, 25 bp, Homo sapien
ctctggtggatgtagcagtacatca

SEQ ID NO: 2791079 - DNA, 25 bp, Homo sapien
tactaacttgataaacatattccag

SEQ ID NO: 2791080 - DNA, 25 bp, Homo sapien
cctaaaaagacctctctggtggatg

SEQ ID NO: 2791081 - DNA, 25 bp, Homo sapien
caaataatttcagatgtactaactt

SEQ ID NO: 2791082 - DNA, 25 bp, Homo sapien
actttcttcttacactaaattaatg

SEQ ID NO: 2791083 - DNA, 25 bp, Homo sapien
ttacattcagacttaactttcttct

SEQ ID NO: 2791084 - DNA, 25 bp, Homo sapien
gcccagcctaatttcataagtattg

SEQ ID NO: 2791085 - DNA, 25 bp, Homo sapien
cactgaatttacattcagacttaac

SEQ ID NO: 2791086 - DNA, 25 bp, Homo sapien
catactgcataatgactttgaaaac

SEQ ID NO: 2791087 - DNA, 25 bp, Homo sapien
taagtttatacatactgcataatga

SEQ ID NO: 2791088 - DNA, 25 bp, Homo sapien
taagtcagattatcctttcatgttt

SEQ ID NO: 2791089 - DNA, 25 bp, Homo sapien
attaattgaatgaagtactactgaa

SEQ ID NO: 2791090 - DNA, 25 bp, Homo sapien
tattcacagttgcaaatttcttttt

SEQ ID NO: 2791091 - DNA, 25 bp, Homo sapien
ctaaagaagtccttttattcacagt

SEQ ID NO: 2791092 - DNA, 25 bp, Homo sapien
catacaatgtatactacatgctgga

SEQ ID NO: 2791093 - DNA, 25 bp, Homo sapien
tcttctaaagaagtccttttattca

SEQ ID NO: 2791094 - DNA, 25 bp, Homo sapien
aaggagctggaatcttatgaataca

SEQ ID NO: 2791095 - DNA, 25 bp, Homo sapien
cagggcaacagtgtagagaatcatg

SEQ ID NO: 2791096 - DNA, 25 bp, Homo sapien
tgaaggagctggaatcttatgaata

SEQ ID NO: 2791097 - DNA, 25 bp, Homo sapien
caacagtgtagagaatcatgaacaa

SEQ ID NO: 2791098 - DNA, 25 bp, Homo sapien
caaaagttaattacagcacagctag

SEQ ID NO: 2791099 - DNA, 25 bp, Homo sapien
cagctagatgacattcaaggtgtgc

SEQ ID NO: 2791100 - DNA, 25 bp, Homo sapien
actttattacttccaatgtactcta

SEQ ID NO: 2791101 - DNA, 25 bp, Homo sapien
atgacattcaaggtgtgctttgctc

SEQ ID NO: 2791102 - DNA, 25 bp, Homo sapien
ttccccctgacatccataacaaaat

SEQ ID NO: 2791103 - DNA, 25 bp, Homo sapien
gttggtctttcaattccccctgaca

SEQ ID NO: 2791104 - DNA, 25 bp, Homo sapien
tttcaattccccctgacatccataa

SEQ ID NO: 2791105 - DNA, 25 bp, Homo sapien
tggtctttcaattccccctgacatc

SEQ ID NO: 2791106 - DNA, 25 bp, Homo sapien
actggattgtactggatcaaaagga

SEQ ID NO: 2791107 - DNA, 25 bp, Homo sapien
cttattttcagtagtgtgctaggac

SEQ ID NO: 2791108 - DNA, 25 bp, Homo sapien
gagattcagatctatttagcaacga

SEQ ID NO: 2791109 - DNA, 25 bp, Homo sapien
tgttaattgtagctaaaaattggcc

SEQ ID NO: 2791110 - DNA, 25 bp, Homo sapien
atgatggtaagaccgtgccaagtgg

SEQ ID NO: 2791111 - DNA, 25 bp, Homo sapien
tcttgaaaagcatccaaaggaaaca

SEQ ID NO: 2791112 - DNA, 25 bp, Homo sapien
gaaacaaatgatggtaagaccgtgc

SEQ ID NO: 2791113 - DNA, 25 bp, Homo sapien
tggggagcagacaccaaagtaagac

SEQ ID NO: 2791114 - DNA, 25 bp, Homo sapien
cagagagacatgttgagtagtccaa

SEQ ID NO: 2791115 - DNA, 25 bp, Homo sapien
tacctgtggctataacagaagattg

SEQ ID NO: 2791116 - DNA, 25 bp, Homo sapien
taagtgtgtaaccaacctgtctcgg

SEQ ID NO: 2791117 - DNA, 25 bp, Homo sapien
tgaagacaacggctgaaaagccaaa

SEQ ID NO: 2791118 - DNA, 25 bp, Homo sapien
tactttgcccgacactgtgggcaga

SEQ ID NO: 2791119 - DNA, 25 bp, Homo sapien
tgtaagccctggctcagtattgcca

SEQ ID NO: 2791120 - DNA, 25 bp, Homo sapien
ctggctcagtattgccatccaaatg

SEQ ID NO: 2791121 - DNA, 25 bp, Homo sapien
cagaaatagcctcctaatgtaagcc

SEQ ID NO: 2791122 - DNA, 25 bp, Homo sapien
catgcctggtctaaaagtctatttt

SEQ ID NO: 2791123 - DNA, 25 bp, Homo sapien
tctctattactatctttgaattcac

SEQ ID NO: 2791124 - DNA, 25 bp, Homo sapien
tctcatgttctctaacatcctgaac

SEQ ID NO: 2791125 - DNA, 25 bp, Homo sapien
catttataattgttgtcctaacatc

SEQ ID NO: 2791126 - DNA, 25 bp, Homo sapien
gcttttccctacacactcactgagg

SEQ ID NO: 2791127 - DNA, 25 bp, Homo sapien
gatggtatcacctaatgacgcattt

SEQ ID NO: 2791128 - DNA, 25 bp, Homo sapien
taactgcgatgttagtaggctacac

SEQ ID NO: 2791129 - DNA, 25 bp, Homo sapien
cattcagaaaagtctagggtctaac

SEQ ID NO: 2791130 - DNA, 25 bp, Homo sapien
gccatgctgaaagagggttttgcat

SEQ ID NO: 2791131 - DNA, 25 bp, Homo sapien
ccatgctgaaagagggttttgcatc

SEQ ID NO: 2791132 - DNA, 25 bp, Homo sapien
taaagaagcaatggtgtgctgagga

SEQ ID NO: 2791133 - DNA, 25 bp, Homo sapien
tcagataaagaagcaatggtgtgct

SEQ ID NO: 2791134 - DNA, 25 bp, Homo sapien
agaagcaatggtgtgctgaggaaat

SEQ ID NO: 2791135 - DNA, 25 bp, Homo sapien
gataaagaagcaatggtgtgctgag

SEQ ID NO: 2791136 - DNA, 25 bp, Homo sapien
cagcagaattctaggactaagaacc

SEQ ID NO: 2791137 - DNA, 25 bp, Homo sapien
gaaagacctgtctatatatgacctc

SEQ ID NO: 2791138 - DNA, 25 bp, Homo sapien
aaatatcactttactgcctttcaga

SEQ ID NO: 2791139 - DNA, 25 bp, Homo sapien
aaactgaagatatcatagtacacct

SEQ ID NO: 2791140 - DNA, 25 bp, Homo sapien
cacatgagaagaccgtggaaaagag

SEQ ID NO: 2791141 - DNA, 25 bp, Homo sapien
catcgggtgactgagaagggttaac

SEQ ID NO: 2791142 - DNA, 25 bp, Homo sapien
cacaataaggttgatagttactgac

SEQ ID NO: 2791143 - DNA, 25 bp, Homo sapien
tggaaaagagaggtcgactggtaat

SEQ ID NO: 2791144 - DNA, 25 bp, Homo sapien
caccgagcccggcttaatataagta

SEQ ID NO: 2791145 - DNA, 25 bp, Homo sapien
aagccaacagtattttctgggtgac

SEQ ID NO: 2791146 - DNA, 25 bp, Homo sapien
gtgcaaatgaaaatagagagcctag

SEQ ID NO: 2791147 - DNA, 25 bp, Homo sapien
tctgggtgacaggactactggtagt

SEQ ID NO: 2791148 - DNA, 25 bp, Homo sapien
tcatctaaaataacatggtacgtgc

SEQ ID NO: 2791149 - DNA, 25 bp, Homo sapien
gatgtgtgagcaactctttgtaatg

SEQ ID NO: 2791150 - DNA, 25 bp, Homo sapien
ccatacgaataagtgagcattcaga

SEQ ID NO: 2791151 - DNA, 25 bp, Homo sapien
attcagaacttgagctagcaggagg

SEQ ID NO: 2791152 - DNA, 25 bp, Homo sapien
aacaccttcatagacataacgaact

SEQ ID NO: 2791153 - DNA, 25 bp, Homo sapien
ctaaatcaacttctctaggaataac

SEQ ID NO: 2791154 - DNA, 25 bp, Homo sapien
tagacataacgaactgtacgttcta

SEQ ID NO: 2791155 - DNA, 25 bp, Homo sapien
ttcatagacataacgaactgtacgt

SEQ ID NO: 2791156 - DNA, 25 bp, Homo sapien
tgcagacaatccaataacagatact

SEQ ID NO: 2791157 - DNA, 25 bp, Homo sapien
cgcgaacttctgcagacaatccaat

SEQ ID NO: 2791158 - DNA, 25 bp, Homo sapien
cagtttcacgagcaagtacagtgca

SEQ ID NO: 2791159 - DNA, 25 bp, Homo sapien
gtacagtgcaaacgcgaacttctgc

SEQ ID NO: 2791160 - DNA, 25 bp, Homo sapien
catctaccacaaagatgaatcacac

SEQ ID NO: 2791161 - DNA, 25 bp, Homo sapien
aaattcaatacatctaccacaaaga

SEQ ID NO: 2791162 - DNA, 25 bp, Homo sapien
cagaattctctttacagttataact

SEQ ID NO: 2791163 - DNA, 25 bp, Homo sapien
ttgctacagaattctctttacagtt

SEQ ID NO: 2791164 - DNA, 25 bp, Homo sapien
taaatattagatggatcgcaagttg

SEQ ID NO: 2791165 - DNA, 25 bp, Homo sapien
gatgattagtacttctcgacttgta

SEQ ID NO: 2791166 - DNA, 25 bp, Homo sapien
taaggctgctaaagatgattagtac

SEQ ID NO: 2791167 - DNA, 25 bp, Homo sapien
ctcgacttgtatgtccaggcatgtg

SEQ ID NO: 2791168 - DNA, 25 bp, Homo sapien
taggtacaacaaattatactaccaa

SEQ ID NO: 2791169 - DNA, 25 bp, Homo sapien
taaacataggattacacatttagac

SEQ ID NO: 2791170 - DNA, 25 bp, Homo sapien
gaatatctcatttgtttcaacaatg

SEQ ID NO: 2791171 - DNA, 25 bp, Homo sapien
cacatttagactatagaatatctca

SEQ ID NO: 2791172 - DNA, 25 bp, Homo sapien
gagctatgcacttcaaaaaattgtt

SEQ ID NO: 2791173 - DNA, 25 bp, Homo sapien
acaagactgacaatgttcccgacat

SEQ ID NO: 2791174 - DNA, 25 bp, Homo sapien
ttaccaagtactctcaagttctggg

SEQ ID NO: 2791175 - DNA, 25 bp, Homo sapien
tcatatggatcagctttaaagtgca

SEQ ID NO: 2791176 - DNA, 25 bp, Homo sapien
tgctcagatccatctatggcagtca

SEQ ID NO: 2791177 - DNA, 25 bp, Homo sapien
ccaagggttgcagaatgagtgctat

SEQ ID NO: 2791178 - DNA, 25 bp, Homo sapien
ggcagtcacagccttatgatatgta

SEQ ID NO: 2791179 - DNA, 25 bp, Homo sapien
catgcccagccagtgtagatatttt

SEQ ID NO: 2791180 - DNA, 25 bp, Homo sapien
cccagcccctcttacacttttatgt

SEQ ID NO: 2791181 - DNA, 25 bp, Homo sapien
cacagtgtcgtctgggctaaagtgc

SEQ ID NO: 2791182 - DNA, 25 bp, Homo sapien
gtgtcgtctgggctaaagtgcaatg

SEQ ID NO: 2791183 - DNA, 25 bp, Homo sapien
gagtctcacagtgtcgtctgggcta

SEQ ID NO: 2791184 - DNA, 25 bp, Homo sapien
agtcagaacacacgtaacacttatc

SEQ ID NO: 2791185 - DNA, 25 bp, Homo sapien
caattaagtctgttgtcttatatgg

SEQ ID NO: 2791186 - DNA, 25 bp, Homo sapien
cgtaacacttatcaattaagtctgt

SEQ ID NO: 2791187 - DNA, 25 bp, Homo sapien
tgttgtcttatatgggcgcagtttg

SEQ ID NO: 2791188 - DNA, 25 bp, Homo sapien
acagttaatctgatgacttaggcca

SEQ ID NO: 2791189 - DNA, 25 bp, Homo sapien
gaacatttataacaacgtgccggca

SEQ ID NO: 2791190 - DNA, 25 bp, Homo sapien
gggaaggtgtaggatctcatcacgc

SEQ ID NO: 2791191 - DNA, 25 bp, Homo sapien
acttaggccattacatgggtgggca

SEQ ID NO: 2791192 - DNA, 25 bp, Homo sapien
tatgggccccatattaacacatcac

SEQ ID NO: 2791193 - DNA, 25 bp, Homo sapien
tgatactgccgacagttttaaatta

SEQ ID NO: 2791194 - DNA, 25 bp, Homo sapien
tatttttgtactattgatactgccg

SEQ ID NO: 2791195 - DNA, 25 bp, Homo sapien
tactaaccaacaccacactaaacat

SEQ ID NO: 2791196 - DNA, 25 bp, Homo sapien
gggaattataaagagatggctctcc

SEQ ID NO: 2791197 - DNA, 25 bp, Homo sapien
atggctctccatggcaggtcatatc

SEQ ID NO: 2791198 - DNA, 25 bp, Homo sapien
gcttagggaattataaagagatggc

SEQ ID NO: 2791199 - DNA, 25 bp, Homo sapien
gctctccatggcaggtcatatccac

SEQ ID NO: 2791200 - DNA, 25 bp, Homo sapien
gaagctagtatagccaactcatata

SEQ ID NO: 2791201 - DNA, 25 bp, Homo sapien
catgtcaaattaccaagaagctagt

SEQ ID NO: 2791202 - DNA, 25 bp, Homo sapien
ttgagatgtctgtacatgtcaaatt

SEQ ID NO: 2791203 - DNA, 25 bp, Homo sapien
acctggcccccaaatttgagatgtc

SEQ ID NO: 2791204 - DNA, 25 bp, Homo sapien
agcactataaataacagtttctctg

SEQ ID NO: 2791205 - DNA, 25 bp, Homo sapien
tttaatctgtcactattatacataa

SEQ ID NO: 2791206 - DNA, 25 bp, Homo sapien
gaactaatttgtaagactatcagca

SEQ ID NO: 2791207 - DNA, 25 bp, Homo sapien
caaagagtatctttgtagagtgatc

SEQ ID NO: 2791208 - DNA, 25 bp, Homo sapien
ggaattggcccacctttgaacatag

SEQ ID NO: 2791209 - DNA, 25 bp, Homo sapien
caatagaaaactgctggtaactcgg

SEQ ID NO: 2791210 - DNA, 25 bp, Homo sapien
tcatttcccttatgtgtgccggcaa

SEQ ID NO: 2791211 - DNA, 25 bp, Homo sapien
tattttcaggataaggccggatgcg

SEQ ID NO: 2791212 - DNA, 25 bp, Homo sapien
cagctcttttactcttagttacaat

SEQ ID NO: 2791213 - DNA, 25 bp, Homo sapien
ctgaaagttcagtcaatttttcagc

SEQ ID NO: 2791214 - DNA, 25 bp, Homo sapien
tactcttagttacaattattccaat

SEQ ID NO: 2791215 - DNA, 25 bp, Homo sapien
aaagttcagtcaatttttcagctct

SEQ ID NO: 2791216 - DNA, 25 bp, Homo sapien
tcaaaatattcctctacaaagtatt

SEQ ID NO: 2791217 - DNA, 25 bp, Homo sapien
caaaatattcctctacaaagtattc

SEQ ID NO: 2791218 - DNA, 25 bp, Homo sapien
atcaaaatattcctctacaaagtat

SEQ ID NO: 2791219 - DNA, 25 bp, Homo sapien
agtacacgtcagtctattaggcttt

SEQ ID NO: 2791220 - DNA, 25 bp, Homo sapien
catctactaccacataaaggtggcg

SEQ ID NO: 2791221 - DNA, 25 bp, Homo sapien
ctttaaagtacacgtcagtctatta

SEQ ID NO: 2791222 - DNA, 25 bp, Homo sapien
tctactaccacataaaggtggcgca

SEQ ID NO: 2791223 - DNA, 25 bp, Homo sapien
attccaagtcgaacttgtccatggt

SEQ ID NO: 2791224 - DNA, 25 bp, Homo sapien
cattccaagtcgaacttgtccatgg

SEQ ID NO: 2791225 - DNA, 25 bp, Homo sapien
agattcatcttctttaagaatctcc

SEQ ID NO: 2791226 - DNA, 25 bp, Homo sapien
gacagggcaataaagctctccttac

SEQ ID NO: 2791227 - DNA, 25 bp, Homo sapien
gacattgtctaaaagaaaagacagg

SEQ ID NO: 2791228 - DNA, 25 bp, Homo sapien
gaaaagacagggcaataaagctctc

SEQ ID NO: 2791229 - DNA, 25 bp, Homo sapien
aagacattgtctaaaagaaaagaca

SEQ ID NO: 2791230 - DNA, 25 bp, Homo sapien
catagcctccttcccatcgcttagt

SEQ ID NO: 2791231 - DNA, 25 bp, Homo sapien
cttcccatcgcttagttctttcagg

SEQ ID NO: 2791232 - DNA, 25 bp, Homo sapien
tagcctccttcccatcgcttagttc

SEQ ID NO: 2791233 - DNA, 25 bp, Homo sapien
cctccttcccatcgcttagttcttt

SEQ ID NO: 2791234 - DNA, 25 bp, Homo sapien
caaaactgtattttattattcaata

SEQ ID NO: 2791235 - DNA, 25 bp, Homo sapien
ttcaaaactgtattttattattcaa

SEQ ID NO: 2791236 - DNA, 25 bp, Homo sapien
tcaaaactgtattttattattcaat

SEQ ID NO: 2791237 - DNA, 25 bp, Homo sapien
acctgggaggtagacactggagcga

SEQ ID NO: 2791238 - DNA, 25 bp, Homo sapien
gaggtagacactggagcgagccaag

SEQ ID NO: 2791239 - DNA, 25 bp, Homo sapien
agacactggagcgagccaaggttgt

SEQ ID NO: 2791240 - DNA, 25 bp, Homo sapien
ctgggaggtagacactggagcgagc

SEQ ID NO: 2791241 - DNA, 25 bp, Homo sapien
aaaacgctcccagccgcctagctag

SEQ ID NO: 2791242 - DNA, 25 bp, Homo sapien
gccttcacaagctccttcacatcct

SEQ ID NO: 2791243 - DNA, 25 bp, Homo sapien
tccttccctatgagcccaggcaggg

SEQ ID NO: 2791244 - DNA, 25 bp, Homo sapien
caggcagggcaattcaacctccgtt

SEQ ID NO: 2791245 - DNA, 25 bp, Homo sapien
tcacagacttccacacgcggactca

SEQ ID NO: 2791246 - DNA, 25 bp, Homo sapien
cacagacttccacacgcggactcac

SEQ ID NO: 2791247 - DNA, 25 bp, Homo sapien
aggagctcgatcttgtctttctact

SEQ ID NO: 2791248 - DNA, 25 bp, Homo sapien
gaggagctcgatcttgtctttctac

SEQ ID NO: 2791249 - DNA, 25 bp, Homo sapien
ggagctcgatcttgtctttctactt

SEQ ID NO: 2791250 - DNA, 25 bp, Homo sapien
tgaggagctcgatcttgtctttcta

SEQ ID NO: 2791251 - DNA, 25 bp, Homo sapien
tgggagaagtgaacctgtctattcc

SEQ ID NO: 2791252 - DNA, 25 bp, Homo sapien
tagacatggatgttaagattcaact

SEQ ID NO: 2791253 - DNA, 25 bp, Homo sapien
tattccaatagacaggctcccttac

SEQ ID NO: 2791254 - DNA, 25 bp, Homo sapien
tatgcataaatccataatctcttgg

SEQ ID NO: 2791255 - DNA, 25 bp, Homo sapien
cactttatacgcagggaatctttac

SEQ ID NO: 2791256 - DNA, 25 bp, Homo sapien
tacatccagctagttaatgccaacg

SEQ ID NO: 2791257 - DNA, 25 bp, Homo sapien
tgacaaacttgccttcacgaactga

SEQ ID NO: 2791258 - DNA, 25 bp, Homo sapien
caaaatcacatatgtagggcatcac

SEQ ID NO: 2791259 - DNA, 25 bp, Homo sapien
caacagatacaactcctgagtgtgg

SEQ ID NO: 2791260 - DNA, 25 bp, Homo sapien
gggaaacgactaaccagcacagcat

SEQ ID NO: 2791261 - DNA, 25 bp, Homo sapien
aaaagtctaagctgggatgatcaca

SEQ ID NO: 2791262 - DNA, 25 bp, Homo sapien
aaagtgatacaatttaagggcacca

SEQ ID NO: 2791263 - DNA, 25 bp, Homo sapien
cctgtaagatacagttcaagtcaca

SEQ ID NO: 2791264 - DNA, 25 bp, Homo sapien
atatgtatagaaattgaacattcct

SEQ ID NO: 2791265 - DNA, 25 bp, Homo sapien
aatatgtatagaaattgaacattcc

SEQ ID NO: 2791266 - DNA, 25 bp, Homo sapien
tgtaagatacagttcaagtcacaat

SEQ ID NO: 2791267 - DNA, 25 bp, Homo sapien
tctcaaacaacttggcatcagcctt

SEQ ID NO: 2791268 - DNA, 25 bp, Homo sapien
aaccaaaagtgtgtgctaggaaaca

SEQ ID NO: 2791269 - DNA, 25 bp, Homo sapien
tccttaattggagtgttcagcccag

SEQ ID NO: 2791270 - DNA, 25 bp, Homo sapien
tcagagacttcattgcaggaaccca

SEQ ID NO: 2791271 - DNA, 25 bp, Homo sapien
tctgtctatcatagtctccaaccat

SEQ ID NO: 2791272 - DNA, 25 bp, Homo sapien
gcaatgattcttcttacttttgtaa

SEQ ID NO: 2791273 - DNA, 25 bp, Homo sapien
tgtctatcatagtctccaaccatct

SEQ ID NO: 2791274 - DNA, 25 bp, Homo sapien
gtctatcatagtctccaaccatctt

SEQ ID NO: 2791275 - DNA, 25 bp, Homo sapien
cttgcttcagtctattgtattcatc

SEQ ID NO: 2791276 - DNA, 25 bp, Homo sapien
ttcacttgcttcagtctattgtatt

SEQ ID NO: 2791277 - DNA, 25 bp, Homo sapien
cacttgcttcagtctattgtattca

SEQ ID NO: 2791278 - DNA, 25 bp, Homo sapien
ttgcttcagtctattgtattcatca

SEQ ID NO: 2791279 - DNA, 25 bp, Homo sapien
tgtcaaagggacacgggaagcaact

SEQ ID NO: 2791280 - DNA, 25 bp, Homo sapien
tgaaagttcccaacggtcaaagcga

SEQ ID NO: 2791281 - DNA, 25 bp, Homo sapien
tggacaaattctatctcagccaggt

SEQ ID NO: 2791282 - DNA, 25 bp, Homo sapien
agattaatctccctctaaaaggtgg

SEQ ID NO: 2791283 - DNA, 25 bp, Homo sapien
tctttgttgatctgaagtgataggt

SEQ ID NO: 2791284 - DNA, 25 bp, Homo sapien
ttctctatagtcatccaattcttta

SEQ ID NO: 2791285 - DNA, 25 bp, Homo sapien
agctcttgtattcctgtaggccagt

SEQ ID NO: 2791286 - DNA, 25 bp, Homo sapien
caaacgggagagttctttattgatc

SEQ ID NO: 2791287 - DNA, 25 bp, Homo sapien
aatggaagctcctgaaccacttcag

SEQ ID NO: 2791288 - DNA, 25 bp, Homo sapien
tgtctcaaagttaccaccgctgctg

SEQ ID NO: 2791289 - DNA, 25 bp, Homo sapien
tgtgtagtctgtctcatagtgatct

SEQ ID NO: 2791290 - DNA, 25 bp, Homo sapien
gaagtcatccacaggcgaagttaat

SEQ ID NO: 2791291 - DNA, 25 bp, Homo sapien
cagcagacatctgcacgcaggtgca

SEQ ID NO: 2791292 - DNA, 25 bp, Homo sapien
tcagtacactacagccctttgccag

SEQ ID NO: 2791293 - DNA, 25 bp, Homo sapien
ttgccagtgcactgtaatcacagag

SEQ ID NO: 2791294 - DNA, 25 bp, Homo sapien
cactcacgcgaggacttcagatgtt

SEQ ID NO: 2791295 - DNA, 25 bp, Homo sapien
ggataaaaccgcttgtcattcactt

SEQ ID NO: 2791296 - DNA, 25 bp, Homo sapien
cactttgccattggaagagtatgcc

SEQ ID NO: 2791297 - DNA, 25 bp, Homo sapien
agactctggataaaaccgcttgtca

SEQ ID NO: 2791298 - DNA, 25 bp, Homo sapien
ctgtcaactctttccacatagtcag

SEQ ID NO: 2791299 - DNA, 25 bp, Homo sapien
ctgcacctggtcaagtattatggtt

SEQ ID NO: 2791300 - DNA, 25 bp, Homo sapien
gtataaaagggtatgcaggagaaaa

SEQ ID NO: 2791301 - DNA, 25 bp, Homo sapien
ttttaatagtatgcacacatgggac

SEQ ID NO: 2791302 - DNA, 25 bp, Homo sapien
catgggacaaaactcaactggtata

SEQ ID NO: 2791303 - DNA, 25 bp, Homo sapien
tcagttgtacaacatggatgttcaa

SEQ ID NO: 2791304 - DNA, 25 bp, Homo sapien
tgtagctagcaatataagtggtttt

SEQ ID NO: 2791305 - DNA, 25 bp, Homo sapien
ggaacgaaattctggacactgacat

SEQ ID NO: 2791306 - DNA, 25 bp, Homo sapien
aatggttaccacaagcaagctcagt

SEQ ID NO: 2791307 - DNA, 25 bp, Homo sapien
acacaagtatattaaagtgccatcc

SEQ ID NO: 2791308 - DNA, 25 bp, Homo sapien
cacaagtatattaaagtgccatcct

SEQ ID NO: 2791309 - DNA, 25 bp, Homo sapien
aagtatattaaagtgccatccttac

SEQ ID NO: 2791310 - DNA, 25 bp, Homo sapien
gtaaacacaagtatattaaagtgcc

SEQ ID NO: 2791311 - DNA, 25 bp, Homo sapien
aataatttctccatatggtggaagt

SEQ ID NO: 2791312 - DNA, 25 bp, Homo sapien
ggaaggatcatactcagctgaaatt

SEQ ID NO: 2791313 - DNA, 25 bp, Homo sapien
tcagctgaaatttggatcaataatt

SEQ ID NO: 2791314 - DNA, 25 bp, Homo sapien
agtttggaaggatcatactcagctg

SEQ ID NO: 2791315 - DNA, 25 bp, Homo sapien
aacatttatattgccctccagatcc

SEQ ID NO: 2791316 - DNA, 25 bp, Homo sapien
attgccctccagatccacagacagt

SEQ ID NO: 2791317 - DNA, 25 bp, Homo sapien
cttatccagattaggaaagatttgg

SEQ ID NO: 2791318 - DNA, 25 bp, Homo sapien
caggaacttatccagattaggaaag

SEQ ID NO: 2791319 - DNA, 25 bp, Homo sapien
aatataggctacaacatgatgtacc

SEQ ID NO: 2791320 - DNA, 25 bp, Homo sapien
taaaccgatacttataatgccagtg

SEQ ID NO: 2791321 - DNA, 25 bp, Homo sapien
ggtgcagctactgtgcaagttcctc

SEQ ID NO: 2791322 - DNA, 25 bp, Homo sapien
ggaacctttgtacatggatagtggg

SEQ ID NO: 2791323 - DNA, 25 bp, Homo sapien
catggcctcagaagttttcaaccac

SEQ ID NO: 2791324 - DNA, 25 bp, Homo sapien
tacatcagaatagtcatccaaaata

SEQ ID NO: 2791325 - DNA, 25 bp, Homo sapien
caatgagcatgcatgctttcatggc

SEQ ID NO: 2791326 - DNA, 25 bp, Homo sapien
ttatatctgttctatcaatgagcat

SEQ ID NO: 2791327 - DNA, 25 bp, Homo sapien
cacttggtgacagaggccttagaca

SEQ ID NO: 2791328 - DNA, 25 bp, Homo sapien
ggattgtccctgagacttcaagaga

SEQ ID NO: 2791329 - DNA, 25 bp, Homo sapien
cttcaagagattccagggaaggcag

SEQ ID NO: 2791330 - DNA, 25 bp, Homo sapien
gaagcagttcctgttcggctgcgct

SEQ ID NO: 2791331 - DNA, 25 bp, Homo sapien
taaatggagttcgatgcgctgtgaa

SEQ ID NO: 2791332 - DNA, 25 bp, Homo sapien
tttaaatggagttcgatgcgctgtg

SEQ ID NO: 2791333 - DNA, 25 bp, Homo sapien
tggtttaaatggagttcgatgcgct

SEQ ID NO: 2791334 - DNA, 25 bp, Homo sapien
aaatggagttcgatgcgctgtgaag

SEQ ID NO: 2791335 - DNA, 25 bp, Homo sapien
aagtcagtgttctcccttgaaggaa

SEQ ID NO: 2791336 - DNA, 25 bp, Homo sapien
caaatggagaacacgcagcaacagt

SEQ ID NO: 2791337 - DNA, 25 bp, Homo sapien
cattcacatcgacttctagacaggg

SEQ ID NO: 2791338 - DNA, 25 bp, Homo sapien
taagttaagcgcacccaaagtcagt

SEQ ID NO: 2791339 - DNA, 25 bp, Homo sapien
gatcgccgccacaaagagaggagtt

SEQ ID NO: 2791340 - DNA, 25 bp, Homo sapien
taggcgcttacagtcatcatgggtg

SEQ ID NO: 2791341 - DNA, 25 bp, Homo sapien
gatgttcctgcctatctgaatccag

SEQ ID NO: 2791342 - DNA, 25 bp, Homo sapien
gagacacaattttgggccctgcttt

SEQ ID NO: 2791343 - DNA, 25 bp, Homo sapien
ctgcaaactttggttctttccaaag

SEQ ID NO: 2791344 - DNA, 25 bp, Homo sapien
caaagtaaaccataaactttcgcag

SEQ ID NO: 2791345 - DNA, 25 bp, Homo sapien
tagaatggtctctaggtatcggcgg

SEQ ID NO: 2791346 - DNA, 25 bp, Homo sapien
tggtcacagatgatactggccagcc

SEQ ID NO: 2791347 - DNA, 25 bp, Homo sapien
cctggccctgtttgtacggacagca

SEQ ID NO: 2791348 - DNA, 25 bp, Homo sapien
caatcaataggcaggtccgggataa

SEQ ID NO: 2791349 - DNA, 25 bp, Homo sapien
aagggagaggtagaaaaccagctgg

SEQ ID NO: 2791350 - DNA, 25 bp, Homo sapien
gggagaggtagaaaaccagctggaa

SEQ ID NO: 2791351 - DNA, 25 bp, Homo sapien
ggagaggtagaaaaccagctggaac

SEQ ID NO: 2791352 - DNA, 25 bp, Homo sapien
ctaagggagaggtagaaaaccagct

SEQ ID NO: 2791353 - DNA, 25 bp, Homo sapien
ttaacaggggacagcatccagatgc

SEQ ID NO: 2791354 - DNA, 25 bp, Homo sapien
tccacacacatgacagagttcaagt

SEQ ID NO: 2791355 - DNA, 25 bp, Homo sapien
ggaggaccgtctttccacttccagc

SEQ ID NO: 2791356 - DNA, 25 bp, Homo sapien
tgacagagttcaagttgccaaagac

SEQ ID NO: 2791357 - DNA, 25 bp, Homo sapien
atcacagcccagcaagtggtccgtg

SEQ ID NO: 2791358 - DNA, 25 bp, Homo sapien
tgctctcagctgctcattcagattc

SEQ ID NO: 2791359 - DNA, 25 bp, Homo sapien
aactggcgctggtataagctgctct

SEQ ID NO: 2791360 - DNA, 25 bp, Homo sapien
gtggccagatcggaagagatatcaa

SEQ ID NO: 2791361 - DNA, 25 bp, Homo sapien
gattctgcctgtctactacgaatgt

SEQ ID NO: 2791362 - DNA, 25 bp, Homo sapien
atgattctgcctgtctactacgaat

SEQ ID NO: 2791363 - DNA, 25 bp, Homo sapien
attctgcctgtctactacgaatgtg

SEQ ID NO: 2791364 - DNA, 25 bp, Homo sapien
tgattctgcctgtctactacgaatg

SEQ ID NO: 2791365 - DNA, 25 bp, Homo sapien
gcaactgccctgtatacaaatatat

SEQ ID NO: 2791366 - DNA, 25 bp, Homo sapien
ccacgtgctacttcaaagttcttac

SEQ ID NO: 2791367 - DNA, 25 bp, Homo sapien
tggaagctctttggacaattataaa

SEQ ID NO: 2791368 - DNA, 25 bp, Homo sapien
acaaatacatataatcccacgtgct

SEQ ID NO: 2791369 - DNA, 25 bp, Homo sapien
ggcactataggaccaactgctattg

SEQ ID NO: 2791370 - DNA, 25 bp, Homo sapien
ctggcactataggaccaactgctat

SEQ ID NO: 2791371 - DNA, 25 bp, Homo sapien
ctataggaccaactgctattgaatc

SEQ ID NO: 2791372 - DNA, 25 bp, Homo sapien
cactataggaccaactgctattgaa

SEQ ID NO: 2791373 - DNA, 25 bp, Homo sapien
caaacatctgcaggaatgtgtgttc

SEQ ID NO: 2791374 - DNA, 25 bp, Homo sapien
tccaggtaacgagaatcatagtgtc

SEQ ID NO: 2791375 - DNA, 25 bp, Homo sapien
caatccatgggtgatactatccagg

SEQ ID NO: 2791376 - DNA, 25 bp, Homo sapien
tccaaaagtcattaggtgcagcctc

SEQ ID NO: 2791377 - DNA, 25 bp, Homo sapien
agtaattcacaaagttcaccacggc

SEQ ID NO: 2791378 - DNA, 25 bp, Homo sapien
caaagttcaccacggctctgaaggt

SEQ ID NO: 2791379 - DNA, 25 bp, Homo sapien
ctctgaaggtctggagtcacttccg

SEQ ID NO: 2791380 - DNA, 25 bp, Homo sapien
gagtcacttccgcagaggacttcat

SEQ ID NO: 2791381 - DNA, 25 bp, Homo sapien
taaggcacttaggttgtggctctct

SEQ ID NO: 2791382 - DNA, 25 bp, Homo sapien
tgcgtatatgacactcctccatgca

SEQ ID NO: 2791383 - DNA, 25 bp, Homo sapien
gggtatggcaatatataggaactct

SEQ ID NO: 2791384 - DNA, 25 bp, Homo sapien
gaattggtacactgatgattttgac

SEQ ID NO: 2791385 - DNA, 25 bp, Homo sapien
tgagggtagtgacacgaccaaggat

SEQ ID NO: 2791386 - DNA, 25 bp, Homo sapien
tttaacgtttctgtccaaagtcagc

SEQ ID NO: 2791387 - DNA, 25 bp, Homo sapien
tgccttcaggtgacttggcgatgag

SEQ ID NO: 2791388 - DNA, 25 bp, Homo sapien
gaccaaggatcaatgtagcctccaa

SEQ ID NO: 2791389 - DNA, 25 bp, Homo sapien
gaacaagactattctgcaggaaaat

SEQ ID NO: 2791390 - DNA, 25 bp, Homo sapien
tatgaaaataagctcaactgccagg

SEQ ID NO: 2791391 - DNA, 25 bp, Homo sapien
aaaaaatagctaagacacactcttg

SEQ ID NO: 2791392 - DNA, 25 bp, Homo sapien
ccatgcctgcttgggatatttaata

SEQ ID NO: 2791393 - DNA, 25 bp, Homo sapien
agccaggcatggtggggaggtacct

SEQ ID NO: 2791394 - DNA, 25 bp, Homo sapien
aggcatggtggggaggtacctgtaa

SEQ ID NO: 2791395 - DNA, 25 bp, Homo sapien
tcccagctacttgggaagctgaggc

SEQ ID NO: 2791396 - DNA, 25 bp, Homo sapien
aggagaatcgcttgaacccgggagg

SEQ ID NO: 2791397 - DNA, 25 bp, Homo sapien
aaataagctaacataccaacaggac

SEQ ID NO: 2791398 - DNA, 25 bp, Homo sapien
taccaacaggacagttattacttcc

SEQ ID NO: 2791399 - DNA, 25 bp, Homo sapien
ccacatagcatttgtatagtcatga

SEQ ID NO: 2791400 - DNA, 25 bp, Homo sapien
taaaaatttaccacaagcttcagct

SEQ ID NO: 2791401 - DNA, 25 bp, Homo sapien
tttctctaaacaccctccacaggaa

SEQ ID NO: 2791402 - DNA, 25 bp, Homo sapien
gggaaaacatctggtgtgatcgtct

SEQ ID NO: 2791403 - DNA, 25 bp, Homo sapien
gaaaagcactggacgatgtccttta

SEQ ID NO: 2791404 - DNA, 25 bp, Homo sapien
tctaatgggtcatcaccttcctgcc

SEQ ID NO: 2791405 - DNA, 25 bp, Homo sapien
cagaagttggttaccagtgaggcaa

SEQ ID NO: 2791406 - DNA, 25 bp, Homo sapien
cagttgggttttgtgacagtcagaa

SEQ ID NO: 2791407 - DNA, 25 bp, Homo sapien
tgcagataataaccaccagacctgt

SEQ ID NO: 2791408 - DNA, 25 bp, Homo sapien
aaagcctattcagtctccagttggg

SEQ ID NO: 2791409 - DNA, 25 bp, Homo sapien
cagtccttaaaagagtccagccgta

SEQ ID NO: 2791410 - DNA, 25 bp, Homo sapien
agtccttaaaagagtccagccgtag

SEQ ID NO: 2791411 - DNA, 25 bp, Homo sapien
taaaagagtccagccgtagttcttc

SEQ ID NO: 2791412 - DNA, 25 bp, Homo sapien
gtccagccgtagttcttcgtaagca

SEQ ID NO: 2791413 - DNA, 25 bp, Homo sapien
gtgagaccagcaggctttagtcttt

SEQ ID NO: 2791414 - DNA, 25 bp, Homo sapien
aataaaaagcacaaggtgagaccag

SEQ ID NO: 2791415 - DNA, 25 bp, Homo sapien
agaccagcaggctttagtctttttt

SEQ ID NO: 2791416 - DNA, 25 bp, Homo sapien
taaaaagcacaaggtgagaccagca

SEQ ID NO: 2791417 - DNA, 25 bp, Homo sapien
ggtaattctctctggacccaggaat

SEQ ID NO: 2791418 - DNA, 25 bp, Homo sapien
cccaggaattcacaaaatgttctcc

SEQ ID NO: 2791419 - DNA, 25 bp, Homo sapien
aattctctctggacccaggaattca

SEQ ID NO: 2791420 - DNA, 25 bp, Homo sapien
aggtaattctctctggacccaggaa

SEQ ID NO: 2791421 - DNA, 25 bp, Homo sapien
caagttgttgattatctgacttttt

SEQ ID NO: 2791422 - DNA, 25 bp, Homo sapien
ttcaagttgttgattatctgacttt

SEQ ID NO: 2791423 - DNA, 25 bp, Homo sapien
tcaagttgttgattatctgactttt

SEQ ID NO: 2791424 - DNA, 25 bp, Homo sapien
ggagcacagtggcacgaccttggct

SEQ ID NO: 2791425 - DNA, 25 bp, Homo sapien
gaccttggctcactacaagctccgc

SEQ ID NO: 2791426 - DNA, 25 bp, Homo sapien
ccagcctgattgtttgacttatgaa

SEQ ID NO: 2791427 - DNA, 25 bp, Homo sapien
gagtttcactggatggaacggcaga

SEQ ID NO: 2791428 - DNA, 25 bp, Homo sapien
tgaaggaactttaccccagaatgaa

SEQ ID NO: 2791429 - DNA, 25 bp, Homo sapien
ttgacttatgaagtatatacctatc

SEQ ID NO: 2791430 - DNA, 25 bp, Homo sapien
tgacagcgcctaggtcaggagatct

SEQ ID NO: 2791431 - DNA, 25 bp, Homo sapien
agttagccagctaggaagagccagc

SEQ ID NO: 2791432 - DNA, 25 bp, Homo sapien
cactgtcaggccatgttctctatag

SEQ ID NO: 2791433 - DNA, 25 bp, Homo sapien
aatgcctatgcccttctgagtcaga

SEQ ID NO: 2791434 - DNA, 25 bp, Homo sapien
tatgtcaacaaatcccttgtagctt

SEQ ID NO: 2791435 - DNA, 25 bp, Homo sapien
ctctgaggatttcttactccgaaga

SEQ ID NO: 2791436 - DNA, 25 bp, Homo sapien
tttcttactccgaagaaattcacat

SEQ ID NO: 2791437 - DNA, 25 bp, Homo sapien
gaatatactgggtaatttcctctga

SEQ ID NO: 2791438 - DNA, 25 bp, Homo sapien
ttaccccagtactgtgatagagctg

SEQ ID NO: 2791439 - DNA, 25 bp, Homo sapien
taagcagtggtgactaaatctagtc

SEQ ID NO: 2791440 - DNA, 25 bp, Homo sapien
ggttatatgaaagctactggcagta

SEQ ID NO: 2791441 - DNA, 25 bp, Homo sapien
tagagctgtcctatatcacaatgaa

SEQ ID NO: 2791442 - DNA, 25 bp, Homo sapien
tttacaatatccaacaagagccgat

SEQ ID NO: 2791443 - DNA, 25 bp, Homo sapien
ctctaggtaagatcatgatggaaat

SEQ ID NO: 2791444 - DNA, 25 bp, Homo sapien
tgtctatactttaggctaccaccca

SEQ ID NO: 2791445 - DNA, 25 bp, Homo sapien
cacccatctgcctgaattaatcagc

SEQ ID NO: 2791446 - DNA, 25 bp, Homo sapien
ctcctttaaggtattatcatgtaat

SEQ ID NO: 2791447 - DNA, 25 bp, Homo sapien
tctcctttaaggtattatcatgtaa

SEQ ID NO: 2791448 - DNA, 25 bp, Homo sapien
gagttttatagtcatccacttcatt

SEQ ID NO: 2791449 - DNA, 25 bp, Homo sapien
cagaactcattcttaagcaatgatt

SEQ ID NO: 2791450 - DNA, 25 bp, Homo sapien
ttaaagcacgctcttgagcttaaga

SEQ ID NO: 2791451 - DNA, 25 bp, Homo sapien
tgtagccacagttgaacttgtattt

SEQ ID NO: 2791452 - DNA, 25 bp, Homo sapien
tcttaagcaatgatttgcaaagagc

SEQ ID NO: 2791453 - DNA, 25 bp, Homo sapien
gcaagcagattaatagacgaatgga

SEQ ID NO: 2791454 - DNA, 25 bp, Homo sapien
gagacctatctgataaggcaagcag

SEQ ID NO: 2791455 - DNA, 25 bp, Homo sapien
tgggttaagagaaggatgaacagaa

SEQ ID NO: 2791456 - DNA, 25 bp, Homo sapien
cagaagaatggatatgagacctatc

SEQ ID NO: 2791457 - DNA, 25 bp, Homo sapien
atgtatatgtgttcattgcacagtt

SEQ ID NO: 2791458 - DNA, 25 bp, Homo sapien
gcacagttttcaactttttgtgttg

SEQ ID NO: 2791459 - DNA, 25 bp, Homo sapien
tatatgtatatgtgttcattgcaca

SEQ ID NO: 2791460 - DNA, 25 bp, Homo sapien
gaatgtttggatgtatatgtatatg

SEQ ID NO: 2791461 - DNA, 25 bp, Homo sapien
gaaatgccagacagtaattcctaga

SEQ ID NO: 2791462 - DNA, 25 bp, Homo sapien
catagaatccttgcgtgctttaagc

SEQ ID NO: 2791463 - DNA, 25 bp, Homo sapien
gccaagcagcaaatgaataatgtca

SEQ ID NO: 2791464 - DNA, 25 bp, Homo sapien
gatctaaagcatgcatcacatctga

SEQ ID NO: 2791465 - DNA, 25 bp, Homo sapien
cattgggccttcaagacaactccag

SEQ ID NO: 2791466 - DNA, 25 bp, Homo sapien
gacatttcccattgggccttcaaga

SEQ ID NO: 2791467 - DNA, 25 bp, Homo sapien
ggccttcaagacaactccagtaaat

SEQ ID NO: 2791468 - DNA, 25 bp, Homo sapien
cttactgacatttcccattgggcct

SEQ ID NO: 2791469 - DNA, 25 bp, Homo sapien
cacctaaaataaagtagaacactgg

SEQ ID NO: 2791470 - DNA, 25 bp, Homo sapien
ttgcttaaacgaaacctgaaggatg

SEQ ID NO: 2791471 - DNA, 25 bp, Homo sapien
gatacacctaaaataaagtagaaca

SEQ ID NO: 2791472 - DNA, 25 bp, Homo sapien
tcattatgttctattgggtgggcca

SEQ ID NO: 2791473 - DNA, 25 bp, Homo sapien
gaatggctctcccatcttgagtatg

SEQ ID NO: 2791474 - DNA, 25 bp, Homo sapien
cagagactacttgtttcgtggccat

SEQ ID NO: 2791475 - DNA, 25 bp, Homo sapien
tacttacgtttctcataggaatggc

SEQ ID NO: 2791476 - DNA, 25 bp, Homo sapien
cttttagttttggagtacctgtgca

SEQ ID NO: 2791477 - DNA, 25 bp, Homo sapien
tagttttggagtacctgtgcaggat

SEQ ID NO: 2791478 - DNA, 25 bp, Homo sapien
ttagttttggagtacctgtgcagga

SEQ ID NO: 2791479 - DNA, 25 bp, Homo sapien
tttagttttggagtacctgtgcagg

SEQ ID NO: 2791480 - DNA, 25 bp, Homo sapien
actaaaagaatgattggtccaccac

SEQ ID NO: 2791481 - DNA, 25 bp, Homo sapien
tgacctctaggctcttcgttctgcc

SEQ ID NO: 2791482 - DNA, 25 bp, Homo sapien
cccagtggtaaatgttgcaagtcat

SEQ ID NO: 2791483 - DNA, 25 bp, Homo sapien
catttgattatattcaacgcctgtg

SEQ ID NO: 2791484 - DNA, 25 bp, Homo sapien
gaaagctagccagagaaagtctaaa

SEQ ID NO: 2791485 - DNA, 25 bp, Homo sapien
tctttggtgtagaggacgcctttac

SEQ ID NO: 2791486 - DNA, 25 bp, Homo sapien
cattggaaagggtcctcataagagt

SEQ ID NO: 2791487 - DNA, 25 bp, Homo sapien
cactttatgagcagggttattgcaa

SEQ ID NO: 2791488 - DNA, 25 bp, Homo sapien
tgatgtgtggagacaagccgttgat

SEQ ID NO: 2791489 - DNA, 25 bp, Homo sapien
cacaatctgctgagtcgctttaaca

SEQ ID NO: 2791490 - DNA, 25 bp, Homo sapien
aagtgtccactgcacgcagcttggc

SEQ ID NO: 2791491 - DNA, 25 bp, Homo sapien
cctgtgccagccgtgaagtgtccac

SEQ ID NO: 2791492 - DNA, 25 bp, Homo sapien
tgttttagtagcagcacagcgtgtc

SEQ ID NO: 2791493 - DNA, 25 bp, Homo sapien
tcgaaaccaccaaatgactctaagc

SEQ ID NO: 2791494 - DNA, 25 bp, Homo sapien
cggagttgcttctcggccacagagt

SEQ ID NO: 2791495 - DNA, 25 bp, Homo sapien
gccacagagtggttcacaacattaa

SEQ ID NO: 2791496 - DNA, 25 bp, Homo sapien
tgatcgtgggagagcagttgcacct

SEQ ID NO: 2791497 - DNA, 25 bp, Homo sapien
gaaaataacgtgtgtcccctgagtg

SEQ ID NO: 2791498 - DNA, 25 bp, Homo sapien
tcaggcacagtaattcatcatcagg

SEQ ID NO: 2791499 - DNA, 25 bp, Homo sapien
caggcaagaggctacattggcccaa

SEQ ID NO: 2791500 - DNA, 25 bp, Homo sapien
aggtatcacaggttggcactatttt

SEQ ID NO: 2791501 - DNA, 25 bp, Homo sapien
gtgaaggtatcacaggttggcacta

SEQ ID NO: 2791502 - DNA, 25 bp, Homo sapien
attatcaccaaataactattacaga

SEQ ID NO: 2791503 - DNA, 25 bp, Homo sapien
gaaggtatcacaggttggcactatt

SEQ ID NO: 2791504 - DNA, 25 bp, Homo sapien
ttagagtatacacttctattttccc

SEQ ID NO: 2791505 - DNA, 25 bp, Homo sapien
tctcatcactgcctgttagtcagaa

SEQ ID NO: 2791506 - DNA, 25 bp, Homo sapien
tagaagcaattcactcatatgagta

SEQ ID NO: 2791507 - DNA, 25 bp, Homo sapien
gcttatttagctaaaagccagaatt

SEQ ID NO: 2791508 - DNA, 25 bp, Homo sapien
tgtagtggacgtgaaaagtaatgac

SEQ ID NO: 2791509 - DNA, 25 bp, Homo sapien
ggacataagtcatatcagaggcact

SEQ ID NO: 2791510 - DNA, 25 bp, Homo sapien
aatagaattattggagggacttgcc

SEQ ID NO: 2791511 - DNA, 25 bp, Homo sapien
gcactttagtctttggccataatag

SEQ ID NO: 2791512 - DNA, 25 bp, Homo sapien
attttgagccgatgggtgtcatcac

SEQ ID NO: 2791513 - DNA, 25 bp, Homo sapien
ttgacgtctgtttggtctgaaatta

SEQ ID NO: 2791514 - DNA, 25 bp, Homo sapien
gatgggtgtcatcacatgtgagata

SEQ ID NO: 2791515 - DNA, 25 bp, Homo sapien
ttgtttgtttgacgtctgtttggtc

SEQ ID NO: 2791516 - DNA, 25 bp, Homo sapien
gacttagaacaggcaaggatttcat

SEQ ID NO: 2791517 - DNA, 25 bp, Homo sapien
agcaaaaattcataaatgggaactt

SEQ ID NO: 2791518 - DNA, 25 bp, Homo sapien
attcataaatgggaacttcattagt

SEQ ID NO: 2791519 - DNA, 25 bp, Homo sapien
caaaaattcataaatgggaacttca

SEQ ID NO: 2791520 - DNA, 25 bp, Homo sapien
gattaagaccaacttagcttcacaa

SEQ ID NO: 2791521 - DNA, 25 bp, Homo sapien
atttgattaagaccaacttagcttc

SEQ ID NO: 2791522 - DNA, 25 bp, Homo sapien
tagcttcacaaatctctacccgaat

SEQ ID NO: 2791523 - DNA, 25 bp, Homo sapien
gaccaacttagcttcacaaatctct

SEQ ID NO: 2791524 - DNA, 25 bp, Homo sapien
aagctactaagacaagacaaccctc

SEQ ID NO: 2791525 - DNA, 25 bp, Homo sapien
tgataggaagtcaattattcagcct

SEQ ID NO: 2791526 - DNA, 25 bp, Homo sapien
taactgagcttaatgtggatcaaag

SEQ ID NO: 2791527 - DNA, 25 bp, Homo sapien
cacagaacctgaaaatgataggaag

SEQ ID NO: 2791528 - DNA, 25 bp, Homo sapien
tattcagagccagtataagtgacca

SEQ ID NO: 2791529 - DNA, 25 bp, Homo sapien
caagaggttctgaaagcgtgcccaa

SEQ ID NO: 2791530 - DNA, 25 bp, Homo sapien
tatcagactctcaatcactcctagg

SEQ ID NO: 2791531 - DNA, 25 bp, Homo sapien
ttccaaggagacaaccaactgcagg

SEQ ID NO: 2791532 - DNA, 25 bp, Homo sapien
gctcctctaggccaataatgcatat

SEQ ID NO: 2791533 - DNA, 25 bp, Homo sapien
tgaaatgcctcgtgaaggaccactg

SEQ ID NO: 2791534 - DNA, 25 bp, Homo sapien
taatgcatatggatctgtcgacatc

SEQ ID NO: 2791535 - DNA, 25 bp, Homo sapien
caatgccctctgaaatgcctcgtga

SEQ ID NO: 2791536 - DNA, 25 bp, Homo sapien
ctatgtcactttagtgcctgaagaa

SEQ ID NO: 2791537 - DNA, 25 bp, Homo sapien
tgtttgtaaaagctgcaaaccttct

SEQ ID NO: 2791538 - DNA, 25 bp, Homo sapien
gaagaatattattgctgggtattga

SEQ ID NO: 2791539 - DNA, 25 bp, Homo sapien
gttagcaacacattaccttagcatt

SEQ ID NO: 2791540 - DNA, 25 bp, Homo sapien
tcctgtgattatgaatgttagctct

SEQ ID NO: 2791541 - DNA, 25 bp, Homo sapien
ttagtcccacattctatctcctcgt

SEQ ID NO: 2791542 - DNA, 25 bp, Homo sapien
tatgtcttccatctaatttgggaag

SEQ ID NO: 2791543 - DNA, 25 bp, Homo sapien
cagtaaattctgttggcatgttttc

SEQ ID NO: 2791544 - DNA, 25 bp, Homo sapien
tatgatttcctagttcttttgtctt

SEQ ID NO: 2791545 - DNA, 25 bp, Homo sapien
gttggtgtctgttgtctttctctca

SEQ ID NO: 2791546 - DNA, 25 bp, Homo sapien
tctctcattcaggttatgatttcct

SEQ ID NO: 2791547 - DNA, 25 bp, Homo sapien
ccccttttttatgtctgtgttggtg

SEQ ID NO: 2791548 - DNA, 25 bp, Homo sapien
ttacatatctttgtttcctccaagt

SEQ ID NO: 2791549 - DNA, 25 bp, Homo sapien
catatctttgtttcctccaagtgaa

SEQ ID NO: 2791550 - DNA, 25 bp, Homo sapien
atatctttgtttcctccaagtgaaa

SEQ ID NO: 2791551 - DNA, 25 bp, Homo sapien
tacatatctttgtttcctccaagtg

SEQ ID NO: 2791552 - DNA, 25 bp, Homo sapien
gagtaggggccaactcataccactt

SEQ ID NO: 2791553 - DNA, 25 bp, Homo sapien
actcataccacttggttgcttccaa

SEQ ID NO: 2791554 - DNA, 25 bp, Homo sapien
caactcataccacttggttgcttcc

SEQ ID NO: 2791555 - DNA, 25 bp, Homo sapien
gggccaactcataccacttggttgc

SEQ ID NO: 2791556 - DNA, 25 bp, Homo sapien
attgaagagaagtcctacaaaatac

SEQ ID NO: 2791557 - DNA, 25 bp, Homo sapien
tataaagaaatgtgtagactctctg

SEQ ID NO: 2791558 - DNA, 25 bp, Homo sapien
taaagaaatgtgtagactctctgta

SEQ ID NO: 2791559 - DNA, 25 bp, Homo sapien
ataaagaaatgtgtagactctctgt

SEQ ID NO: 2791560 - DNA, 25 bp, Homo sapien
tctgagttaaaatggagagtcttcc

SEQ ID NO: 2791561 - DNA, 25 bp, Homo sapien
cacataggtgaaaatcaagagcttc

SEQ ID NO: 2791562 - DNA, 25 bp, Homo sapien
ccacagtggccttgaatagaaatcc

SEQ ID NO: 2791563 - DNA, 25 bp, Homo sapien
taggacgtcgacattttagtaagcc

SEQ ID NO: 2791564 - DNA, 25 bp, Homo sapien
cattgtccaaatgtacacgtaagat

SEQ ID NO: 2791565 - DNA, 25 bp, Homo sapien
gaaacagagatagagacattgtcca

SEQ ID NO: 2791566 - DNA, 25 bp, Homo sapien
tcagatttatactacatgaagcaac

SEQ ID NO: 2791567 - DNA, 25 bp, Homo sapien
tgagtttttggaacaagcttaactg

SEQ ID NO: 2791568 - DNA, 25 bp, Homo sapien
tcatgagtacgcacaaaaaaccact

SEQ ID NO: 2791569 - DNA, 25 bp, Homo sapien
tgttactgtttatcatgagtacgca

SEQ ID NO: 2791570 - DNA, 25 bp, Homo sapien
tgaataggtattcaggttttcagag

SEQ ID NO: 2791571 - DNA, 25 bp, Homo sapien
taaaaactgcgaaagcatgtccaaa

SEQ ID NO: 2791572 - DNA, 25 bp, Homo sapien
ggagttgtctcactatcaaaggaac

SEQ ID NO: 2791573 - DNA, 25 bp, Homo sapien
tatcaaggatcacatgggtcagcac

SEQ ID NO: 2791574 - DNA, 25 bp, Homo sapien
tcattgtttatggatgggcccaaaa

SEQ ID NO: 2791575 - DNA, 25 bp, Homo sapien
tgaaactgccattagaggactatgc

SEQ ID NO: 2791576 - DNA, 25 bp, Homo sapien
ccgtgaagctcacctgcatctgatt

SEQ ID NO: 2791577 - DNA, 25 bp, Homo sapien
gaaattttgtgagaatgaactgtac

SEQ ID NO: 2791578 - DNA, 25 bp, Homo sapien
caccattgtattttgagagttcatg

SEQ ID NO: 2791579 - DNA, 25 bp, Homo sapien
tgagaatgaactgtaccgtgaagct

SEQ ID NO: 2791580 - DNA, 25 bp, Homo sapien
cactaaggcacatgggtctaattcc

SEQ ID NO: 2791581 - DNA, 25 bp, Homo sapien
tccatagagcccagatcgagttcct

SEQ ID NO: 2791582 - DNA, 25 bp, Homo sapien
gagttcctaagttctcactaaggca

SEQ ID NO: 2791583 - DNA, 25 bp, Homo sapien
gacattttcagcatggaacattcta

SEQ ID NO: 2791584 - DNA, 25 bp, Homo sapien
tccttgcctacagaactatcagaaa

SEQ ID NO: 2791585 - DNA, 25 bp, Homo sapien
taaactaatgctatctgagagtgca

SEQ ID NO: 2791586 - DNA, 25 bp, Homo sapien
agaaggccctcattacatgctggta

SEQ ID NO: 2791587 - DNA, 25 bp, Homo sapien
tgtaaggttgcaacagccctctcaa

SEQ ID NO: 2791588 - DNA, 25 bp, Homo sapien
ccaatatctgtatgtgaaggagaca

SEQ ID NO: 2791589 - DNA, 25 bp, Homo sapien
taagctttacctacaagcaaaacaa

SEQ ID NO: 2791590 - DNA, 25 bp, Homo sapien
tccttggctctatgtatttaattat

SEQ ID NO: 2791591 - DNA, 25 bp, Homo sapien
aaaactacttttggtcatgtagcag

SEQ ID NO: 2791592 - DNA, 25 bp, Homo sapien
agaggaggttttgacatattgtgcc

SEQ ID NO: 2791593 - DNA, 25 bp, Homo sapien
cagttctacatcgttgcaaaaagga

SEQ ID NO: 2791594 - DNA, 25 bp, Homo sapien
gaatacaacagcttaacttatcaca

SEQ ID NO: 2791595 - DNA, 25 bp, Homo sapien
tgtaattcaacaagctcggagcccc

SEQ ID NO: 2791596 - DNA, 25 bp, Homo sapien
gatgttcgtttgtaccagtcctagg

SEQ ID NO: 2791597 - DNA, 25 bp, Homo sapien
aaacaatgaagcctaccttgcaggg

SEQ ID NO: 2791598 - DNA, 25 bp, Homo sapien
tgtgcggtaaagaacacaccccgga

SEQ ID NO: 2791599 - DNA, 25 bp, Homo sapien
ggcctaatgaggaccgggaactcca

SEQ ID NO: 2791600 - DNA, 25 bp, Homo sapien
atgctgagcagactaaaataatata

SEQ ID NO: 2791601 - DNA, 25 bp, Homo sapien
taatccctcttattgaaaagctaag

SEQ ID NO: 2791602 - DNA, 25 bp, Homo sapien
atttgccaggtattgtgatgggtgc

SEQ ID NO: 2791603 - DNA, 25 bp, Homo sapien
tctttgccaaaaggaagggagaatg

SEQ ID NO: 2791604 - DNA, 25 bp, Homo sapien
caggcacgcgctgccacacccaggt

SEQ ID NO: 2791605 - DNA, 25 bp, Homo sapien
cttcctgagtagatgggattacagg

SEQ ID NO: 2791606 - DNA, 25 bp, Homo sapien
gcacgcgctgccacacccaggtaat

SEQ ID NO: 2791607 - DNA, 25 bp, Homo sapien
ttcctgagtagatgggattacaggc

SEQ ID NO: 2791608 - DNA, 25 bp, Homo sapien
gtctgaaatgaggtctcctggccct

SEQ ID NO: 2791609 - DNA, 25 bp, Homo sapien
tcctggccctggtgtgcccttaatg

SEQ ID NO: 2791610 - DNA, 25 bp, Homo sapien
tgcctgtgacagttggcctctgtga

SEQ ID NO: 2791611 - DNA, 25 bp, Homo sapien
gcctctgtgaatattggtataattg

SEQ ID NO: 2791612 - DNA, 25 bp, Homo sapien
taaatatagtaactcaggcctgggc

SEQ ID NO: 2791613 - DNA, 25 bp, Homo sapien
gaggactgcttaagcaaccgagttt

SEQ ID NO: 2791614 - DNA, 25 bp, Homo sapien
ccaggagtcaactgaagagagattt

SEQ ID NO: 2791615 - DNA, 25 bp, Homo sapien
agccaccaccccgacattatttgaa

SEQ ID NO: 2791616 - DNA, 25 bp, Homo sapien
taaatggagggtagagaaattgggc

SEQ ID NO: 2791617 - DNA, 25 bp, Homo sapien
ctcctttggagtcgctgggcctaaa

SEQ ID NO: 2791618 - DNA, 25 bp, Homo sapien
tgagccactgcactaagataggagc

SEQ ID NO: 2791619 - DNA, 25 bp, Homo sapien
ggcatgatcctagcccatggcagcg

SEQ ID NO: 2791620 - DNA, 25 bp, Homo sapien
ggagttctcttaatgattgaccatg

SEQ ID NO: 2791621 - DNA, 25 bp, Homo sapien
tacaaaggagttctcttaatgattg

SEQ ID NO: 2791622 - DNA, 25 bp, Homo sapien
aagtacaaaggagttctcttaatga

SEQ ID NO: 2791623 - DNA, 25 bp, Homo sapien
aaggagttctcttaatgattgacca

SEQ ID NO: 2791624 - DNA, 25 bp, Homo sapien
tagctgaaattacgagcacacgcca

SEQ ID NO: 2791625 - DNA, 25 bp, Homo sapien
caagcttcacatacgtaaggtgggt

SEQ ID NO: 2791626 - DNA, 25 bp, Homo sapien
acatgtataaggaagcagctctggc

SEQ ID NO: 2791627 - DNA, 25 bp, Homo sapien
taagccgatagttagacagagtcct

SEQ ID NO: 2791628 - DNA, 25 bp, Homo sapien
gtccttgggtaccttgtaatcagta

SEQ ID NO: 2791629 - DNA, 25 bp, Homo sapien
ggtgctccttagattttcagtcaga

SEQ ID NO: 2791630 - DNA, 25 bp, Homo sapien
tcagggaccccatttatacatacgt

SEQ ID NO: 2791631 - DNA, 25 bp, Homo sapien
cctggtctggcaataacagttgaga

SEQ ID NO: 2791632 - DNA, 25 bp, Homo sapien
tgcagtttacctttgaaagtataca

SEQ ID NO: 2791633 - DNA, 25 bp, Homo sapien
aattcacatggtgtgcagtttacct

SEQ ID NO: 2791634 - DNA, 25 bp, Homo sapien
tttgaaagtatacaagttggctggg

SEQ ID NO: 2791635 - DNA, 25 bp, Homo sapien
tgaaagtatacaagttggctgggca

SEQ ID NO: 2791636 - DNA, 25 bp, Homo sapien
taactggaattcgtcaagcctctgg

SEQ ID NO: 2791637 - DNA, 25 bp, Homo sapien
tagagcagcactaaatgacaccact

SEQ ID NO: 2791638 - DNA, 25 bp, Homo sapien
tgggataacctaggcatactgcact

SEQ ID NO: 2791639 - DNA, 25 bp, Homo sapien
tagtaggcagaccagcagacttttt

SEQ ID NO: 2791640 - DNA, 25 bp, Homo sapien
gcccggcatggtggcacgccctgta

SEQ ID NO: 2791641 - DNA, 25 bp, Homo sapien
gtcccagctacttgggaggctgagg

SEQ ID NO: 2791642 - DNA, 25 bp, Homo sapien
ttagcccggcatggtggcacgccct

SEQ ID NO: 2791643 - DNA, 25 bp, Homo sapien
agcccggcatggtggcacgccctgt

SEQ ID NO: 2791644 - DNA, 25 bp, Homo sapien
cacgtgcatatatcctgtcagtcaa

SEQ ID NO: 2791645 - DNA, 25 bp, Homo sapien
atacatcacgtgcatatatcctgtc

SEQ ID NO: 2791646 - DNA, 25 bp, Homo sapien
tcctccctaaactcaattatggttg

SEQ ID NO: 2791647 - DNA, 25 bp, Homo sapien
cctaaactcaattatggttgcctgt

SEQ ID NO: 2791648 - DNA, 25 bp, Homo sapien
tattataaatggttaccacaagcaa

SEQ ID NO: 2791649 - DNA, 25 bp, Homo sapien
ttataaatggttaccacaagcaagc

SEQ ID NO: 2791650 - DNA, 25 bp, Homo sapien
tctgatattataaatggttaccaca

SEQ ID NO: 2791651 - DNA, 25 bp, Homo sapien
gatattataaatggttaccacaagc

SEQ ID NO: 2791652 - DNA, 25 bp, Homo sapien
tgtaccaaagctagttcaatataga

SEQ ID NO: 2791653 - DNA, 25 bp, Homo sapien
ggattaaggaacatctcttggccca

SEQ ID NO: 2791654 - DNA, 25 bp, Homo sapien
tacccaagtagagtggattcataag

SEQ ID NO: 2791655 - DNA, 25 bp, Homo sapien
tgtttcctctttatattggcagtgg

SEQ ID NO: 2791656 - DNA, 25 bp, Homo sapien
tgctgtataaacttgattgaagggt

SEQ ID NO: 2791657 - DNA, 25 bp, Homo sapien
tttagatagattggcagacctgtcc

SEQ ID NO: 2791658 - DNA, 25 bp, Homo sapien
cctcaaaggtattggtgatgattta

SEQ ID NO: 2791659 - DNA, 25 bp, Homo sapien
tccctgttgaccatggacaatggag

SEQ ID NO: 2791660 - DNA, 25 bp, Homo sapien
tttacatcctcaatatgccccaaga

SEQ ID NO: 2791661 - DNA, 25 bp, Homo sapien
ttacatcctcaatatgccccaagac

SEQ ID NO: 2791662 - DNA, 25 bp, Homo sapien
caagagccaacttaacatgttcagt

SEQ ID NO: 2791663 - DNA, 25 bp, Homo sapien
taatgagccttggtagtcgtaacac

SEQ ID NO: 2791664 - DNA, 25 bp, Homo sapien
cattgactcaaagacttgactgttg

SEQ ID NO: 2791665 - DNA, 25 bp, Homo sapien
tgttgtccagtgcttgaaagaaatt

SEQ ID NO: 2791666 - DNA, 25 bp, Homo sapien
ccccagtaggaaggatcaattcttc

SEQ ID NO: 2791667 - DNA, 25 bp, Homo sapien
cagtttggccactcgataaattcca

SEQ ID NO: 2791668 - DNA, 25 bp, Homo sapien
tgagaggactcggagacaatgaagc

SEQ ID NO: 2791669 - DNA, 25 bp, Homo sapien
accacgctgtcatcattcaaagtct

SEQ ID NO: 2791670 - DNA, 25 bp, Homo sapien
ggccttcaagatttaatatcttcag

SEQ ID NO: 2791671 - DNA, 25 bp, Homo sapien
caggaaattgctggccttcaagatt

SEQ ID NO: 2791672 - DNA, 25 bp, Homo sapien
gagaaataaaatttggcaaactggc

SEQ ID NO: 2791673 - DNA, 25 bp, Homo sapien
tgtttcctcatcaggaaattgctgg

SEQ ID NO: 2791674 - DNA, 25 bp, Homo sapien
aaaagaagttacacttcagatggaa

SEQ ID NO: 2791675 - DNA, 25 bp, Homo sapien
tgtgagtttcttacaggaaacaagc

SEQ ID NO: 2791676 - DNA, 25 bp, Homo sapien
aacaagcatagtcatgagagaccca

SEQ ID NO: 2791677 - DNA, 25 bp, Homo sapien
caaatgggacggcttgaaaaaatga

SEQ ID NO: 2791678 - DNA, 25 bp, Homo sapien
tggccaacaatgaagcttttgcatg

SEQ ID NO: 2791679 - DNA, 25 bp, Homo sapien
caatgaagcttttgcatgcaagtct

SEQ ID NO: 2791680 - DNA, 25 bp, Homo sapien
cttattgcaagcttgaacttctgga

SEQ ID NO: 2791681 - DNA, 25 bp, Homo sapien
tgctgaactcctgctctcaggcgat

SEQ ID NO: 2791682 - DNA, 25 bp, Homo sapien
aacaagtatattaaagtgccatcct

SEQ ID NO: 2791683 - DNA, 25 bp, Homo sapien
aagtatattaaagtgccatccttac

SEQ ID NO: 2791684 - DNA, 25 bp, Homo sapien
caagtatattaaagtgccatcctta

SEQ ID NO: 2791685 - DNA, 25 bp, Homo sapien
aaaacaagtatattaaagtgccatc

SEQ ID NO: 2791686 - DNA, 25 bp, Homo sapien
aataatttctccatatggtggaagt

SEQ ID NO: 2791687 - DNA, 25 bp, Homo sapien
agtttggaaggatcatactcagctg

SEQ ID NO: 2791688 - DNA, 25 bp, Homo sapien
ggaaggatcatactcagctgaaatt

SEQ ID NO: 2791689 - DNA, 25 bp, Homo sapien
tcagctgaaatttggatcaataatt

SEQ ID NO: 2791690 - DNA, 25 bp, Homo sapien
aacatttatattgccctccagatcc

SEQ ID NO: 2791691 - DNA, 25 bp, Homo sapien
attgccctccagatccacagacagt

SEQ ID NO: 2791692 - DNA, 25 bp, Homo sapien
cttatccagattaggaaagatttgg

SEQ ID NO: 2791693 - DNA, 25 bp, Homo sapien
caggaacttatccagattaggaaag

SEQ ID NO: 2791694 - DNA, 25 bp, Homo sapien
ggtgcagctactgtgcaagttcctc

SEQ ID NO: 2791695 - DNA, 25 bp, Homo sapien
taaaccgatacttataatgccagtg

SEQ ID NO: 2791696 - DNA, 25 bp, Homo sapien
aatataggctacaacatgatgtacc

SEQ ID NO: 2791697 - DNA, 25 bp, Homo sapien
ggaacctttgtacatggatagtggg

SEQ ID NO: 2791698 - DNA, 25 bp, Homo sapien
agaggagttaagacacaaatagatg

SEQ ID NO: 2791699 - DNA, 25 bp, Homo sapien
aagatgggttaagtctacactgaaa

SEQ ID NO: 2791700 - DNA, 25 bp, Homo sapien
ctttcttcctttaggcagctagggt

SEQ ID NO: 2791701 - DNA, 25 bp, Homo sapien
tatcaaatagtgcttagaggagtta

SEQ ID NO: 2791702 - DNA, 25 bp, Homo sapien
aatggagttcgatgcgctgtgaagc

SEQ ID NO: 2791703 - DNA, 25 bp, Homo sapien
ggattgtccctgagacttcaagaga

SEQ ID NO: 2791704 - DNA, 25 bp, Homo sapien
cacttggtgacagaggccttagaca

SEQ ID NO: 2791705 - DNA, 25 bp, Homo sapien
cattcacatcgacttctagacaggg

SEQ ID NO: 2791706 - DNA, 25 bp, Homo sapien
aagtcagtgttctcccttgaaggaa

SEQ ID NO: 2791707 - DNA, 25 bp, Homo sapien
tctgggtggtcgaaaaagtactgta

SEQ ID NO: 2791708 - DNA, 25 bp, Homo sapien
taagttaagcgcacccaaagtcagt

SEQ ID NO: 2791709 - DNA, 25 bp, Homo sapien
caaatggagaacacgcagcaacagt

SEQ ID NO: 2791710 - DNA, 25 bp, Homo sapien
taggcgcttacagtcatcatgggtg

SEQ ID NO: 2791711 - DNA, 25 bp, Homo sapien
gatcgccgccacaaagagaggagtt

SEQ ID NO: 2791712 - DNA, 25 bp, Homo sapien
gagacacaattttgggccctgcttt

SEQ ID NO: 2791713 - DNA, 25 bp, Homo sapien
gatgttcctgcctatctgaatccag

SEQ ID NO: 2791714 - DNA, 25 bp, Homo sapien
caaagtaaaccataaactttcgcag

SEQ ID NO: 2791715 - DNA, 25 bp, Homo sapien
ctgcaaactttggttctttccaaag

SEQ ID NO: 2791716 - DNA, 25 bp, Homo sapien
tagaatggtctctaggtatcggcgg

SEQ ID NO: 2791717 - DNA, 25 bp, Homo sapien
caatcaataggcaggtccgggataa

SEQ ID NO: 2791718 - DNA, 25 bp, Homo sapien
caagtggtccgtggccagatcggaa

SEQ ID NO: 2791719 - DNA, 25 bp, Homo sapien
tctaggagctggtcacagatgatac

SEQ ID NO: 2791720 - DNA, 25 bp, Homo sapien
gattctgcctgtctactatgaatgt

SEQ ID NO: 2791721 - DNA, 25 bp, Homo sapien
cacaacagggattcatagtcacatc

SEQ ID NO: 2791722 - DNA, 25 bp, Homo sapien
gggcacaacagggattcatagtcac

SEQ ID NO: 2791723 - DNA, 25 bp, Homo sapien
tccctcagtctgaacgccatgcctt

SEQ ID NO: 2791724 - DNA, 25 bp, Homo sapien
ctggagaagccacaagaatcttgac

SEQ ID NO: 2791725 - DNA, 25 bp, Homo sapien
gactggtttgcttgtacctgagaca

SEQ ID NO: 2791726 - DNA, 25 bp, Homo sapien
actatcagtttggtcctgcctgcac

SEQ ID NO: 2791727 - DNA, 25 bp, Homo sapien
gacttttgctcatacacgacactgt

SEQ ID NO: 2791728 - DNA, 25 bp, Homo sapien
ctggcactataggaccaactgctat

SEQ ID NO: 2791729 - DNA, 25 bp, Homo sapien
ggcactataggaccaactgctattg

SEQ ID NO: 2791730 - DNA, 25 bp, Homo sapien
cactataggaccaactgctattgaa

SEQ ID NO: 2791731 - DNA, 25 bp, Homo sapien
ctataggaccaactgctattgaatc

SEQ ID NO: 2791732 - DNA, 25 bp, Homo sapien
caaacatctgcaggaatgtgtgttc

SEQ ID NO: 2791733 - DNA, 25 bp, Homo sapien
tccaggtaacgagaatcatagtgtc

SEQ ID NO: 2791734 - DNA, 25 bp, Homo sapien
tccaaaagtcattaggtgcagcctc

SEQ ID NO: 2791735 - DNA, 25 bp, Homo sapien
caatccatgggtgatactatccagg

SEQ ID NO: 2791736 - DNA, 25 bp, Homo sapien
ctctgaaggtctggagtcacttccg

SEQ ID NO: 2791737 - DNA, 25 bp, Homo sapien
tctggagtcacttccgcagaggact

SEQ ID NO: 2791738 - DNA, 25 bp, Homo sapien
gagtcacttccgcagaggacttcat

SEQ ID NO: 2791739 - DNA, 25 bp, Homo sapien
gaaggtctggagtcacttccgcaga

SEQ ID NO: 2791740 - DNA, 25 bp, Homo sapien
taaggcacttaggttgtggctctct

SEQ ID NO: 2791741 - DNA, 25 bp, Homo sapien
aagtaatggtaaaggatatcaaggg

SEQ ID NO: 2791742 - DNA, 25 bp, Homo sapien
gtattagtttgcactttttctgcaa

SEQ ID NO: 2791743 - DNA, 25 bp, Homo sapien
aatatataggaactctttgtattag

SEQ ID NO: 2791744 - DNA, 25 bp, Homo sapien
tgagggtagtgacacgaccaaggat

SEQ ID NO: 2791745 - DNA, 25 bp, Homo sapien
tgccttcaggtgacttggcgatgag

SEQ ID NO: 2791746 - DNA, 25 bp, Homo sapien
gaccaaggatcaatgtagcctccaa

SEQ ID NO: 2791747 - DNA, 25 bp, Homo sapien
tttaacgtttctgtccaaagtcagc

SEQ ID NO: 2791748 - DNA, 25 bp, Homo sapien
tgtagagatcggcaaattgcaactg

SEQ ID NO: 2791749 - DNA, 25 bp, Homo sapien
cactgctttaggtctgtctggttca

SEQ ID NO: 2791750 - DNA, 25 bp, Homo sapien
taacacctgggcatacgagtaggac

SEQ ID NO: 2791751 - DNA, 25 bp, Homo sapien
ttttgagattacctgagtcacgcag

SEQ ID NO: 2791752 - DNA, 25 bp, Homo sapien
gaataaagtcaggataacagttagc

SEQ ID NO: 2791753 - DNA, 25 bp, Homo sapien
taaacatctattgtgcacccacaca

SEQ ID NO: 2791754 - DNA, 25 bp, Homo sapien
gcagcactaacttggtaacttggaa

SEQ ID NO: 2791755 - DNA, 25 bp, Homo sapien
tttcagaggtacatcagttgttcct

SEQ ID NO: 2791756 - DNA, 25 bp, Homo sapien
cctgattagggcacttactataaat

SEQ ID NO: 2791757 - DNA, 25 bp, Homo sapien
catctgcaacacaacggtaaatatt

SEQ ID NO: 2791758 - DNA, 25 bp, Homo sapien
gcctagggcatcattgtacaaaact

SEQ ID NO: 2791759 - DNA, 25 bp, Homo sapien
aagtttgcagggctaggagttgctc

SEQ ID NO: 2791760 - DNA, 25 bp, Homo sapien
tatgtcttccatctaatttgggaag

SEQ ID NO: 2791761 - DNA, 25 bp, Homo sapien
cagtaaattctgttggcatgttttc

SEQ ID NO: 2791762 - DNA, 25 bp, Homo sapien
ttagtcccacattctatctcctcgt

SEQ ID NO: 2791763 - DNA, 25 bp, Homo sapien
tcctgtgattatgaatgttagctct

SEQ ID NO: 2791764 - DNA, 25 bp, Homo sapien
tctctcattcaggttatgatttcct

SEQ ID NO: 2791765 - DNA, 25 bp, Homo sapien
gttggtgtctgttgtctttctctca

SEQ ID NO: 2791766 - DNA, 25 bp, Homo sapien
tatgatttcctagttcttttgtctt

SEQ ID NO: 2791767 - DNA, 25 bp, Homo sapien
ccccttttttatgtctgtgttggtg

SEQ ID NO: 2791768 - DNA, 25 bp, Homo sapien
actcataccacttggttgcttccaa

SEQ ID NO: 2791769 - DNA, 25 bp, Homo sapien
gagtaggggccaactcataccactt

SEQ ID NO: 2791770 - DNA, 25 bp, Homo sapien
caactcataccacttggttgcttcc

SEQ ID NO: 2791771 - DNA, 25 bp, Homo sapien
gggccaactcataccacttggttgc

SEQ ID NO: 2791772 - DNA, 25 bp, Homo sapien
tgactatccatagaatgactattgc

SEQ ID NO: 2791773 - DNA, 25 bp, Homo sapien
tatccatagaatgactattgcacag

SEQ ID NO: 2791774 - DNA, 25 bp, Homo sapien
taaatatgactatccatagaatgac

SEQ ID NO: 2791775 - DNA, 25 bp, Homo sapien
tagaatgactattgcacagtttcat

SEQ ID NO: 2791776 - DNA, 25 bp, Homo sapien
tcattgtttatggatgggcccaaaa

SEQ ID NO: 2791777 - DNA, 25 bp, Homo sapien
ggagttgtctcactatcaaaggaac

SEQ ID NO: 2791778 - DNA, 25 bp, Homo sapien
tatcaaggatcacatgggtcagcac

SEQ ID NO: 2791779 - DNA, 25 bp, Homo sapien
tgaaactgccattagaggactatgc

SEQ ID NO: 2791780 - DNA, 25 bp, Homo sapien
gaaattttgtgagaatgaactgtac

SEQ ID NO: 2791781 - DNA, 25 bp, Homo sapien
ccgtgaagctcacctgcatctgatt

SEQ ID NO: 2791782 - DNA, 25 bp, Homo sapien
tgagaatgaactgtaccgtgaagct

SEQ ID NO: 2791783 - DNA, 25 bp, Homo sapien
caccattgtattttgagagttcatg

SEQ ID NO: 2791784 - DNA, 25 bp, Homo sapien
cacactgactgaaaataagatcaag

SEQ ID NO: 2791785 - DNA, 25 bp, Homo sapien
aatttttgagattactgctcttggt

SEQ ID NO: 2791786 - DNA, 25 bp, Homo sapien
atgttcatcttccatacagaacaca

SEQ ID NO: 2791787 - DNA, 25 bp, Homo sapien
tgagattactgctcttggtataata

SEQ ID NO: 2791788 - DNA, 25 bp, Homo sapien
tccttgcctacagaactatcagaaa

SEQ ID NO: 2791789 - DNA, 25 bp, Homo sapien
agaaggccctcattacatgctggta

SEQ ID NO: 2791790 - DNA, 25 bp, Homo sapien
tgtaaggttgcaacagccctctcaa

SEQ ID NO: 2791791 - DNA, 25 bp, Homo sapien
taaactaatgctatctgagagtgca

SEQ ID NO: 2791792 - DNA, 25 bp, Homo sapien
tcatttgcttctgatgacttagtca

SEQ ID NO: 2791793 - DNA, 25 bp, Homo sapien
ttaatgtttgttggcaacctgcatg

SEQ ID NO: 2791794 - DNA, 25 bp, Homo sapien
ccagccgtatggaactgttagtcca

SEQ ID NO: 2791795 - DNA, 25 bp, Homo sapien
tcatgagggcggttaccctccatgc

SEQ ID NO: 2791796 - DNA, 25 bp, Homo sapien
aaatactactgactattggacattg

SEQ ID NO: 2791797 - DNA, 25 bp, Homo sapien
tcaggatttcatatacactttggga

SEQ ID NO: 2791798 - DNA, 25 bp, Homo sapien
tgaaaaaggtatcctttccacattg

SEQ ID NO: 2791799 - DNA, 25 bp, Homo sapien
tgtgcacgctttgttgaagattagt

SEQ ID NO: 2791800 - DNA, 25 bp, Homo sapien
ggcttccagtagattgagactttta

SEQ ID NO: 2791801 - DNA, 25 bp, Homo sapien
cacgccctgatgatagacacgtttt

SEQ ID NO: 2791802 - DNA, 25 bp, Homo sapien
gacttttatttctagctgagctgct

SEQ ID NO: 2791803 - DNA, 25 bp, Homo sapien
tgatcatgattgtgtctgtggagac

SEQ ID NO: 2791804 - DNA, 25 bp, Homo sapien
caggttatgttgtcacccgggtatt

SEQ ID NO: 2791805 - DNA, 25 bp, Homo sapien
gattacgtgcgtgaaacactgcacc

SEQ ID NO: 2791806 - DNA, 25 bp, Homo sapien
ggattacgtgcgtgaaacactgcac

SEQ ID NO: 2791807 - DNA, 25 bp, Homo sapien
gttgtacaggttatgttgtcacccg

SEQ ID NO: 2791808 - DNA, 25 bp, Homo sapien
aaaggactattaactcacaaacagg

SEQ ID NO: 2791809 - DNA, 25 bp, Homo sapien
gaaacagccatctgcaaagacctca

SEQ ID NO: 2791810 - DNA, 25 bp, Homo sapien
gacttcgaggatgaagagtcactca

SEQ ID NO: 2791811 - DNA, 25 bp, Homo sapien
tagttggttgaaggcagaatgccca

SEQ ID NO: 2791812 - DNA, 25 bp, Homo sapien
gatatctgttatatggctgaactga

SEQ ID NO: 2791813 - DNA, 25 bp, Homo sapien
tcatattcattctaacagaggacat

SEQ ID NO: 2791814 - DNA, 25 bp, Homo sapien
ctcttaagagtccagtcctaaatca

SEQ ID NO: 2791815 - DNA, 25 bp, Homo sapien
gaataggtagcgataaaacactggc

SEQ ID NO: 2791816 - DNA, 25 bp, Homo sapien
taattttaagccatatgcagcccta

SEQ ID NO: 2791817 - DNA, 25 bp, Homo sapien
caatatgagctatgtaggaagtcca

SEQ ID NO: 2791818 - DNA, 25 bp, Homo sapien
tgtatgacttacctatagaaaaccc

SEQ ID NO: 2791819 - DNA, 25 bp, Homo sapien
aatcatcaggattagtccatactga

SEQ ID NO: 2791820 - DNA, 25 bp, Homo sapien
taaccgatatgtactgccataaaca

SEQ ID NO: 2791821 - DNA, 25 bp, Homo sapien
ccgatatgtactgccataaacaaga

SEQ ID NO: 2791822 - DNA, 25 bp, Homo sapien
aatcataaccgatatgtactgccat

SEQ ID NO: 2791823 - DNA, 25 bp, Homo sapien
cataaccgatatgtactgccataaa

SEQ ID NO: 2791824 - DNA, 25 bp, Homo sapien
gtaaaaacagatttattgcctctgc

SEQ ID NO: 2791825 - DNA, 25 bp, Homo sapien
agtgtaagacaagtcctgtggtaaa

SEQ ID NO: 2791826 - DNA, 25 bp, Homo sapien
tgtaagacaagtcctgtggtaaaaa

SEQ ID NO: 2791827 - DNA, 25 bp, Homo sapien
aaagtgtaagacaagtcctgtggta

SEQ ID NO: 2791828 - DNA, 25 bp, Homo sapien
catatattatccattcttcacagca

SEQ ID NO: 2791829 - DNA, 25 bp, Homo sapien
tggctttgccgtggcaaattaaata

SEQ ID NO: 2791830 - DNA, 25 bp, Homo sapien
atttcttcatatattaccattgaca

SEQ ID NO: 2791831 - DNA, 25 bp, Homo sapien
gctctctcacagaattatagcaagt

SEQ ID NO: 2791832 - DNA, 25 bp, Homo sapien
agtaaagatttagtagacccaatgt

SEQ ID NO: 2791833 - DNA, 25 bp, Homo sapien
atggaattatctaaagctcatttgg

SEQ ID NO: 2791834 - DNA, 25 bp, Homo sapien
gctcctttctaggtgcaatgaagaa

SEQ ID NO: 2791835 - DNA, 25 bp, Homo sapien
cagagtaatcattgatcgctttcaa

SEQ ID NO: 2791836 - DNA, 25 bp, Homo sapien
agcctccgcctccgaggtttaagcg

SEQ ID NO: 2791837 - DNA, 25 bp, Homo sapien
ttgcagcctccgcctccgaggttta

SEQ ID NO: 2791838 - DNA, 25 bp, Homo sapien
attgcagcctccgcctccgaggttt

SEQ ID NO: 2791839 - DNA, 25 bp, Homo sapien
gcagcctccgcctccgaggtttaag

SEQ ID NO: 2791840 - DNA, 25 bp, Homo sapien
cgtgagagcacagatcttattgtct

SEQ ID NO: 2791841 - DNA, 25 bp, Homo sapien
gagcacagatcttattgtctttgaa

SEQ ID NO: 2791842 - DNA, 25 bp, Homo sapien
gtgagagcacagatcttattgtctt

SEQ ID NO: 2791843 - DNA, 25 bp, Homo sapien
gagagcacagatcttattgtctttg

SEQ ID NO: 2791844 - DNA, 25 bp, Homo sapien
gtgtatcccaaaagtaaatccataa

SEQ ID NO: 2791845 - DNA, 25 bp, Homo sapien
tccataatgaggtccagtttttcct

SEQ ID NO: 2791846 - DNA, 25 bp, Homo sapien
tttaccctcctctggaataatgagt

SEQ ID NO: 2791847 - DNA, 25 bp, Homo sapien
cttaagcttctcagccttttaccct

SEQ ID NO: 2791848 - DNA, 25 bp, Homo sapien
tctcatgtttgctttttgaccgtac

SEQ ID NO: 2791849 - DNA, 25 bp, Homo sapien
atgtttgctttttgaccgtacgtgg

SEQ ID NO: 2791850 - DNA, 25 bp, Homo sapien
catgtttgctttttgaccgtacgtg

SEQ ID NO: 2791851 - DNA, 25 bp, Homo sapien
tcatgtttgctttttgaccgtacgt

SEQ ID NO: 2791852 - DNA, 25 bp, Homo sapien
caatattcttacagccaaaatgtcc

SEQ ID NO: 2791853 - DNA, 25 bp, Homo sapien
tattcttacagccaaaatgtccaga

SEQ ID NO: 2791854 - DNA, 25 bp, Homo sapien
tccaatattcttacagccaaaatgt

SEQ ID NO: 2791855 - DNA, 25 bp, Homo sapien
tcttacagccaaaatgtccagaatg

SEQ ID NO: 2791856 - DNA, 25 bp, Homo sapien
ggtacattatcccatgcgctaaact

SEQ ID NO: 2791857 - DNA, 25 bp, Homo sapien
tacattatcccatgcgctaaactgc

SEQ ID NO: 2791858 - DNA, 25 bp, Homo sapien
acgggtacattatcccatgcgctaa

SEQ ID NO: 2791859 - DNA, 25 bp, Homo sapien
cgggtacattatcccatgcgctaaa

SEQ ID NO: 2791860 - DNA, 25 bp, Homo sapien
agcagacttttccggtcctcttcac

SEQ ID NO: 2791861 - DNA, 25 bp, Homo sapien
gacttttccggtcctcttcactgaa

SEQ ID NO: 2791862 - DNA, 25 bp, Homo sapien
cactgctctagcagacttttccggt

SEQ ID NO: 2791863 - DNA, 25 bp, Homo sapien
ttttgatccagacccagatggcact

SEQ ID NO: 2791864 - DNA, 25 bp, Homo sapien
ataaagatccacttgatggtgacca

SEQ ID NO: 2791865 - DNA, 25 bp, Homo sapien
aataaagatccacttgatggtgacc

SEQ ID NO: 2791866 - DNA, 25 bp, Homo sapien
ttgatggtgaccaaaatatctgtcc

SEQ ID NO: 2791867 - DNA, 25 bp, Homo sapien
tctgtaagcacgataaatttaaggg

SEQ ID NO: 2791868 - DNA, 25 bp, Homo sapien
tggctgttccctgtgtgtcaacggg

SEQ ID NO: 2791869 - DNA, 25 bp, Homo sapien
cagaacagtgcagtccattgtgggt

SEQ ID NO: 2791870 - DNA, 25 bp, Homo sapien
gcaacatatctttggtgagaaggac

SEQ ID NO: 2791871 - DNA, 25 bp, Homo sapien
tcttttagttggtgattatggtgcc

SEQ ID NO: 2791872 - DNA, 25 bp, Homo sapien
cagtggaaacagatcagtggccagg

SEQ ID NO: 2791873 - DNA, 25 bp, Homo sapien
ggcagaaagaatagctcaagcaaga

SEQ ID NO: 2791874 - DNA, 25 bp, Homo sapien
taggactttgtcctatgggcctggg

SEQ ID NO: 2791875 - DNA, 25 bp, Homo sapien
ctgtctggaaacaaggccagtaagg

SEQ ID NO: 2791876 - DNA, 25 bp, Homo sapien
aggctgtctggaaacaaggccagta

SEQ ID NO: 2791877 - DNA, 25 bp, Homo sapien
ggctgtctggaaacaaggccagtaa

SEQ ID NO: 2791878 - DNA, 25 bp, Homo sapien
aacgtggacagggtagcgggaggtg

SEQ ID NO: 2791879 - DNA, 25 bp, Homo sapien
acagggtagcgggaggtgagcccaa

SEQ ID NO: 2791880 - DNA, 25 bp, Homo sapien
agggtagcgggaggtgagcccaaag

SEQ ID NO: 2791881 - DNA, 25 bp, Homo sapien
gtggacagggtagcgggaggtgagc

SEQ ID NO: 2791882 - DNA, 25 bp, Homo sapien
tgaagccctacaagcgtttccactc

SEQ ID NO: 2791883 - DNA, 25 bp, Homo sapien
gccctacaagcgtttccactccata

SEQ ID NO: 2791884 - DNA, 25 bp, Homo sapien
ctggtgaagccctacaagcgtttcc

SEQ ID NO: 2791885 - DNA, 25 bp, Homo sapien
ggtgaagccctacaagcgtttccac

SEQ ID NO: 2791886 - DNA, 25 bp, Homo sapien
gaataatgggattgtgatgtcttac

SEQ ID NO: 2791887 - DNA, 25 bp, Homo sapien
aataatgggattgtgatgtcttaca

SEQ ID NO: 2791888 - DNA, 25 bp, Homo sapien
gaatcaactccaggtgcccgtagtt

SEQ ID NO: 2791889 - DNA, 25 bp, Homo sapien
gagtagtagctgttcacacggatca

SEQ ID NO: 2791890 - DNA, 25 bp, Homo sapien
tagttgcgataccaagagtagtagc

SEQ ID NO: 2791891 - DNA, 25 bp, Homo sapien
ccaattctcaaactgggcggccagc

SEQ ID NO: 2791892 - DNA, 25 bp, Homo sapien
aaaagcctacaacgggaagagctgc

SEQ ID NO: 2791893 - DNA, 25 bp, Homo sapien
tagatcctgaaattaccctgcccca

SEQ ID NO: 2791894 - DNA, 25 bp, Homo sapien
ccaactgcaccaatttagatcctga

SEQ ID NO: 2791895 - DNA, 25 bp, Homo sapien
tgtgattgcacactgacgctcacga

SEQ ID NO: 2791896 - DNA, 25 bp, Homo sapien
ccccttgtctgctgcgtaggtggag

SEQ ID NO: 2791897 - DNA, 25 bp, Homo sapien
cccttgtctgctgcgtaggtggagt

SEQ ID NO: 2791898 - DNA, 25 bp, Homo sapien
gaggcgtagccaccctgccgggtac

SEQ ID NO: 2791899 - DNA, 25 bp, Homo sapien
accctgccgggtacacagagctgag

SEQ ID NO: 2791900 - DNA, 25 bp, Homo sapien
aggtcactggactgaacactgccag

SEQ ID NO: 2791901 - DNA, 25 bp, Homo sapien
actgccagaaatgaggttcacttcc

SEQ ID NO: 2791902 - DNA, 25 bp, Homo sapien
gggcacagtgcggagccccacaggg

SEQ ID NO: 2791903 - DNA, 25 bp, Homo sapien
acgacagccaaagcgccaggtgtga

SEQ ID NO: 2791904 - DNA, 25 bp, Homo sapien
agccgcacctacgacagccaaagcg

SEQ ID NO: 2791905 - DNA, 25 bp, Homo sapien
tggctctcggtgacgggcacagtgc

SEQ ID NO: 2791906 - DNA, 25 bp, Homo sapien
ctgctgaagccagggctaccagatg

SEQ ID NO: 2791907 - DNA, 25 bp, Homo sapien
ttacgcaagtcccaaaccaccatta

SEQ ID NO: 2791908 - DNA, 25 bp, Homo sapien
tgcccgttcacctgtcctgggctcc

SEQ ID NO: 2791909 - DNA, 25 bp, Homo sapien
gcaaaagacctcccttacgcaagtc

SEQ ID NO: 2791910 - DNA, 25 bp, Homo sapien
acggccaccagaggttggcacccag

SEQ ID NO: 2791911 - DNA, 25 bp, Homo sapien
ctcccacgagtacagggaggcgggg

SEQ ID NO: 2791912 - DNA, 25 bp, Homo sapien
tcaggtacggccaccagaggttggc

SEQ ID NO: 2791913 - DNA, 25 bp, Homo sapien
ggaggcggggtgttcgtgcatcagg

SEQ ID NO: 2791914 - DNA, 25 bp, Homo sapien
gtccacgactttgttttctgcattc

SEQ ID NO: 2791915 - DNA, 25 bp, Homo sapien
gtcccagcctggttgtccacgactt

SEQ ID NO: 2791916 - DNA, 25 bp, Homo sapien
aactggttactgcacttgacggaga

SEQ ID NO: 2791917 - DNA, 25 bp, Homo sapien
tggttactgcacttgacggagatct

SEQ ID NO: 2791918 - DNA, 25 bp, Homo sapien
ggcaagagagaccagggcttaggga

SEQ ID NO: 2791919 - DNA, 25 bp, Homo sapien
caagagagaccagggcttagggagg

SEQ ID NO: 2791920 - DNA, 25 bp, Homo sapien
ggaggcaagagagaccagggcttag

SEQ ID NO: 2791921 - DNA, 25 bp, Homo sapien
gagagaccagggcttagggagggac

SEQ ID NO: 2791922 - DNA, 25 bp, Homo sapien
atgatctggactcactgaaacctct

SEQ ID NO: 2791923 - DNA, 25 bp, Homo sapien
gccaccgtgcccggccctgaaccaa

SEQ ID NO: 2791924 - DNA, 25 bp, Homo sapien
tgcctcccaggttcaagtgattctc

SEQ ID NO: 2791925 - DNA, 25 bp, Homo sapien
ctgcctcagcctctggaatagctgg

SEQ ID NO: 2791926 - DNA, 25 bp, Homo sapien
taagatatgagtaacatttcctaga

SEQ ID NO: 2791927 - DNA, 25 bp, Homo sapien
tgtagtgctgcgatcctgactcgct

SEQ ID NO: 2791928 - DNA, 25 bp, Homo sapien
tgctgcgatcctgactcgctgcaac

SEQ ID NO: 2791929 - DNA, 25 bp, Homo sapien
agagagagaatatttgccaaggagg

SEQ ID NO: 2791930 - DNA, 25 bp, Homo sapien
tcctctatgcaacctagcaatcaag

SEQ ID NO: 2791931 - DNA, 25 bp, Homo sapien
ttccatgtttgtcctctatgcaacc

SEQ ID NO: 2791932 - DNA, 25 bp, Homo sapien
gtttgtcctctatgcaacctagcaa

SEQ ID NO: 2791933 - DNA, 25 bp, Homo sapien
atgtttgtcctctatgcaacctagc

SEQ ID NO: 2791934 - DNA, 25 bp, Homo sapien
ggaaatggagtaaagtcactcttac

SEQ ID NO: 2791935 - DNA, 25 bp, Homo sapien
ttttctcaggagactgggttgtaga

SEQ ID NO: 2791936 - DNA, 25 bp, Homo sapien
ggagactgggttgtagaaatttgca

SEQ ID NO: 2791937 - DNA, 25 bp, Homo sapien
ttagaaacgggcataagataggcgg

SEQ ID NO: 2791938 - DNA, 25 bp, Homo sapien
gacgagctcgagcaccaaacgaaat

SEQ ID NO: 2791939 - DNA, 25 bp, Homo sapien
gagctcgagcaccaaacgaaatgcc

SEQ ID NO: 2791940 - DNA, 25 bp, Homo sapien
gacatcctggacgagctcgagcacc

SEQ ID NO: 2791941 - DNA, 25 bp, Homo sapien
accaaacgaaatgccatctccagct

SEQ ID NO: 2791942 - DNA, 25 bp, Homo sapien
tcgggtcacacacggtgtgaaaagg

SEQ ID NO: 2791943 - DNA, 25 bp, Homo sapien
tccacgggaggcttgccggggctaa

SEQ ID NO: 2791944 - DNA, 25 bp, Homo sapien
tagacgcaagattcccctgctgcca

SEQ ID NO: 2791945 - DNA, 25 bp, Homo sapien
ctaggccccgtagacgcaagattcc

SEQ ID NO: 2791946 - DNA, 25 bp, Homo sapien
cagggatgccggcatgagaagaaca

SEQ ID NO: 2791947 - DNA, 25 bp, Homo sapien
agggatgccggcatgagaagaacaa

SEQ ID NO: 2791948 - DNA, 25 bp, Homo sapien
ctcccgtttctaaagcacccactat

SEQ ID NO: 2791949 - DNA, 25 bp, Homo sapien
cccgtttctaaagcacccactatgg

SEQ ID NO: 2791950 - DNA, 25 bp, Homo sapien
ctaaagcacccactatggatgcaca

SEQ ID NO: 2791951 - DNA, 25 bp, Homo sapien
ttctaaagcacccactatggatgca

SEQ ID NO: 2791952 - DNA, 25 bp, Homo sapien
ggtctcctctacagctcccgtgtct

SEQ ID NO: 2791953 - DNA, 25 bp, Homo sapien
tcctctacagctcccgtgtctggga

SEQ ID NO: 2791954 - DNA, 25 bp, Homo sapien
tctcctctacagctcccgtgtctgg

SEQ ID NO: 2791955 - DNA, 25 bp, Homo sapien
gaggtctcctctacagctcccgtgt

SEQ ID NO: 2791956 - DNA, 25 bp, Homo sapien
aagcattctggctccgttaactatt

SEQ ID NO: 2791957 - DNA, 25 bp, Homo sapien
agcattctggctccgttaactatta

SEQ ID NO: 2791958 - DNA, 25 bp, Homo sapien
cattctggctccgttaactattact

SEQ ID NO: 2791959 - DNA, 25 bp, Homo sapien
caagcattctggctccgttaactat

SEQ ID NO: 2791960 - DNA, 25 bp, Homo sapien
ctactgccaccctactatcgggtag

SEQ ID NO: 2791961 - DNA, 25 bp, Homo sapien
ccaccctactatcgggtagatccta

SEQ ID NO: 2791962 - DNA, 25 bp, Homo sapien
tgccaccctactatcgggtagatcc

SEQ ID NO: 2791963 - DNA, 25 bp, Homo sapien
tactgccaccctactatcgggtaga

SEQ ID NO: 2791964 - DNA, 25 bp, Homo sapien
tgaggatactgggaggcgtggcctt

SEQ ID NO: 2791965 - DNA, 25 bp, Homo sapien
catgagaatagagcccctatggtgg

SEQ ID NO: 2791966 - DNA, 25 bp, Homo sapien
ggtggcattacttcctttataagaa

SEQ ID NO: 2791967 - DNA, 25 bp, Homo sapien
cgtggcctttaggagagaattaggt

SEQ ID NO: 2791968 - DNA, 25 bp, Homo sapien
tgttttatatctgtgctatccctta

SEQ ID NO: 2791969 - DNA, 25 bp, Homo sapien
tatggctagtgcaactaaagaactt

SEQ ID NO: 2791970 - DNA, 25 bp, Homo sapien
acatgtatccatcaagtatttgaaa

SEQ ID NO: 2791971 - DNA, 25 bp, Homo sapien
tcccttatgttagccactagccaca

SEQ ID NO: 2791972 - DNA, 25 bp, Homo sapien
gctagtggctaatgtattgaacact

SEQ ID NO: 2791973 - DNA, 25 bp, Homo sapien
atgtattgaacactacagctgtaga

SEQ ID NO: 2791974 - DNA, 25 bp, Homo sapien
tgtattgaacactacagctgtagac

SEQ ID NO: 2791975 - DNA, 25 bp, Homo sapien
taacagtatgctgtcacaggtgcca

SEQ ID NO: 2791976 - DNA, 25 bp, Homo sapien
cagagatggcatggtaaagtacgat

SEQ ID NO: 2791977 - DNA, 25 bp, Homo sapien
taccagtactaaggaagtacagccc

SEQ ID NO: 2791978 - DNA, 25 bp, Homo sapien
gtccattggataataatgctaccag

SEQ ID NO: 2791979 - DNA, 25 bp, Homo sapien
tattatgaacagcagtttgagccat

SEQ ID NO: 2791980 - DNA, 25 bp, Homo sapien
acccacgttttagcatttagccttg

SEQ ID NO: 2791981 - DNA, 25 bp, Homo sapien
tgcagtatcccttcttaaattagcc

SEQ ID NO: 2791982 - DNA, 25 bp, Homo sapien
aaattagcctcctgtttcgcattgg

SEQ ID NO: 2791983 - DNA, 25 bp, Homo sapien
cccaagacttttaggcaaatgagcc

SEQ ID NO: 2791984 - DNA, 25 bp, Homo sapien
caaatgagcctacaaacacaggtgg

SEQ ID NO: 2791985 - DNA, 25 bp, Homo sapien
cagtgttagaaatgctattacagca

SEQ ID NO: 2791986 - DNA, 25 bp, Homo sapien
tagaaaccaactgcataaacatgtt

SEQ ID NO: 2791987 - DNA, 25 bp, Homo sapien
gattatttagtcttgcagtgtccat

SEQ ID NO: 2791988 - DNA, 25 bp, Homo sapien
cctcgcccggccttgagaaagtgca

SEQ ID NO: 2791989 - DNA, 25 bp, Homo sapien
gaaagtgcatttaagctccttccta

SEQ ID NO: 2791990 - DNA, 25 bp, Homo sapien
tctttaggtcacttacggaagtctc

SEQ ID NO: 2791991 - DNA, 25 bp, Homo sapien
taatgtgccactaattcccaatcgt

SEQ ID NO: 2791992 - DNA, 25 bp, Homo sapien
ccatttttgagacccacttgcttag

SEQ ID NO: 2791993 - DNA, 25 bp, Homo sapien
ttgacaaatgtccaccggatgggaa

SEQ ID NO: 2791994 - DNA, 25 bp, Homo sapien
cccaatcgtcactgctttcatgtag

SEQ ID NO: 2791995 - DNA, 25 bp, Homo sapien
aacatttttcactaacgcgcatagg

SEQ ID NO: 2791996 - DNA, 25 bp, Homo sapien
gagtctcttccggatcatatacata

SEQ ID NO: 2791997 - DNA, 25 bp, Homo sapien
catagttttacagacagccatgttc

SEQ ID NO: 2791998 - DNA, 25 bp, Homo sapien
gcataggcttaatgcctgggtgaca

SEQ ID NO: 2791999 - DNA, 25 bp, Homo sapien
tattgccgttggatagaagacagac

SEQ ID NO: 2792000 - DNA, 25 bp, Homo sapien
aaggagacaggcctacttatatgcc

SEQ ID NO: 2792001 - DNA, 25 bp, Homo sapien
tagctgtccctaaaacataattgag

SEQ ID NO: 2792002 - DNA, 25 bp, Homo sapien
tgagtgtgaactatatagctgtccc

SEQ ID NO: 2792003 - DNA, 25 bp, Homo sapien
tattgtgcgcagctaaagttgggat

SEQ ID NO: 2792004 - DNA, 25 bp, Homo sapien
tataggaagcctgcataataagcat

SEQ ID NO: 2792005 - DNA, 25 bp, Homo sapien
tgttagtgaaaatgagaccacgaac

SEQ ID NO: 2792006 - DNA, 25 bp, Homo sapien
caaggtgatttcatgcttctagcca

SEQ ID NO: 2792007 - DNA, 25 bp, Homo sapien
gattattctagggaaagccttctga

SEQ ID NO: 2792008 - DNA, 25 bp, Homo sapien
cctgtccccatgcagtgaatgagta

SEQ ID NO: 2792009 - DNA, 25 bp, Homo sapien
tgtgtgaccttcatgtcccatctgc

SEQ ID NO: 2792010 - DNA, 25 bp, Homo sapien
tattatgcaggatcaagtaacactc

SEQ ID NO: 2792011 - DNA, 25 bp, Homo sapien
tggttttcatacctggataccttgt

SEQ ID NO: 2792012 - DNA, 25 bp, Homo sapien
ttggttttcatacctggataccttg

SEQ ID NO: 2792013 - DNA, 25 bp, Homo sapien
attggttttcatacctggatacctt

SEQ ID NO: 2792014 - DNA, 25 bp, Homo sapien
taaaatcatgttagttcaggtcatc

SEQ ID NO: 2792015 - DNA, 25 bp, Homo sapien
tatatttcagggagttccactggta

SEQ ID NO: 2792016 - DNA, 25 bp, Homo sapien
caatcagctactcactttgaaagac

SEQ ID NO: 2792017 - DNA, 25 bp, Homo sapien
gtactttcttggcacagggtttcaa

SEQ ID NO: 2792018 - DNA, 25 bp, Homo sapien
ttacagctttatcatggtacaaaag

SEQ ID NO: 2792019 - DNA, 25 bp, Homo sapien
gatttacaatggtacaactttacag

SEQ ID NO: 2792020 - DNA, 25 bp, Homo sapien
tcttgaatgtaacacagatggtccc

SEQ ID NO: 2792021 - DNA, 25 bp, Homo sapien
tctgtgtggtgaagcagcaagcaac

SEQ ID NO: 2792022 - DNA, 25 bp, Homo sapien
tggatcactagtttaccaacatcac

SEQ ID NO: 2792023 - DNA, 25 bp, Homo sapien
ttcatttggatcactagtttaccaa

SEQ ID NO: 2792024 - DNA, 25 bp, Homo sapien
tcactagtttaccaacatcactgcc

SEQ ID NO: 2792025 - DNA, 25 bp, Homo sapien
cgtgcccagccgactttcttttcat

SEQ ID NO: 2792026 - DNA, 25 bp, Homo sapien
caagcacacttgaagcacaatacat

SEQ ID NO: 2792027 - DNA, 25 bp, Homo sapien
acaagcacacttgaagcacaataca

SEQ ID NO: 2792028 - DNA, 25 bp, Homo sapien
tacaagcacacttgaagcacaatac

SEQ ID NO: 2792029 - DNA, 25 bp, Homo sapien
gtacaagcacacttgaagcacaata

SEQ ID NO: 2792030 - DNA, 25 bp, Homo sapien
ttgtgatcttcacttgtacaagttg

SEQ ID NO: 2792031 - DNA, 25 bp, Homo sapien
tgagctcccaccttttcagtgaact

SEQ ID NO: 2792032 - DNA, 25 bp, Homo sapien
tttatgctgcgagataagtcctctc

SEQ ID NO: 2792033 - DNA, 25 bp, Homo sapien
tacaagttgtctttatgctgcgaga

SEQ ID NO: 2792034 - DNA, 25 bp, Homo sapien
gtggctctcgggaaaaacaccaagc

SEQ ID NO: 2792035 - DNA, 25 bp, Homo sapien
aaacaccaagcctggatcatctgtg

SEQ ID NO: 2792036 - DNA, 25 bp, Homo sapien
tggtcaccttatgaaaatgtgtggc

SEQ ID NO: 2792037 - DNA, 25 bp, Homo sapien
gaagtagcctggatgtgcatagtca

SEQ ID NO: 2792038 - DNA, 25 bp, Homo sapien
ttgcccaccctgcctatgtcctgaa

SEQ ID NO: 2792039 - DNA, 25 bp, Homo sapien
gtctttgcccaccctgcctatgtcc

SEQ ID NO: 2792040 - DNA, 25 bp, Homo sapien
tgaagtctttgcccaccctgcctat

SEQ ID NO: 2792041 - DNA, 25 bp, Homo sapien
ttgcaattaaagagccctaagactt

SEQ ID NO: 2792042 - DNA, 25 bp, Homo sapien
caccaacaatatgtgatttgtggga

SEQ ID NO: 2792043 - DNA, 25 bp, Homo sapien
attagaatatcaaaattgcctagca

SEQ ID NO: 2792044 - DNA, 25 bp, Homo sapien
cctaagactttgtattgtttgggct

SEQ ID NO: 2792045 - DNA, 25 bp, Homo sapien
attctgtgaggaatctattataaca

SEQ ID NO: 2792046 - DNA, 25 bp, Homo sapien
atgtgtattttctatgccctgaaga

SEQ ID NO: 2792047 - DNA, 25 bp, Homo sapien
tctgtgaggaatctattataacagg

SEQ ID NO: 2792048 - DNA, 25 bp, Homo sapien
tgtgaggaatctattataacaggta

SEQ ID NO: 2792049 - DNA, 25 bp, Homo sapien
taacatgacccctcaaggtggtgac

SEQ ID NO: 2792050 - DNA, 25 bp, Homo sapien
tagtctattggatgcagtgtcagag

SEQ ID NO: 2792051 - DNA, 25 bp, Homo sapien
ggcaaccatttgagcccagacttca

SEQ ID NO: 2792052 - DNA, 25 bp, Homo sapien
tgggcgcttccctgataattatagt

SEQ ID NO: 2792053 - DNA, 25 bp, Homo sapien
tacaggcacgtgagcaagagaagct

SEQ ID NO: 2792054 - DNA, 25 bp, Homo sapien
tcagtatgcttgactggaacggcca

SEQ ID NO: 2792055 - DNA, 25 bp, Homo sapien
tagcctatgttcttgaatgcggaca

SEQ ID NO: 2792056 - DNA, 25 bp, Homo sapien
tgcggacataaaggagcaatgcttt

SEQ ID NO: 2792057 - DNA, 25 bp, Homo sapien
cacaagtctagtggcaatgcattac

SEQ ID NO: 2792058 - DNA, 25 bp, Homo sapien
gaagcatgaaatcaccttgaaggta

SEQ ID NO: 2792059 - DNA, 25 bp, Homo sapien
tcctggagtacagacatggtggcta

SEQ ID NO: 2792060 - DNA, 25 bp, Homo sapien
tgggaagcttatgtactagcaacag

SEQ ID NO: 2792061 - DNA, 25 bp, Homo sapien
tattaccatccccaaagtgtttgct

SEQ ID NO: 2792062 - DNA, 25 bp, Homo sapien
ctctagagattaggttgagaaccac

SEQ ID NO: 2792063 - DNA, 25 bp, Homo sapien
gaacaagaaggacctcctctagaga

SEQ ID NO: 2792064 - DNA, 25 bp, Homo sapien
caaattttcaagtcgcatgccaaga

SEQ ID NO: 2792065 - DNA, 25 bp, Homo sapien
cactcatgttacctgatggaaaatc

SEQ ID NO: 2792066 - DNA, 25 bp, Homo sapien
ctcactcatgttacctgatggaaaa

SEQ ID NO: 2792067 - DNA, 25 bp, Homo sapien
tctcactcatgttacctgatggaaa

SEQ ID NO: 2792068 - DNA, 25 bp, Homo sapien
tcactcatgttacctgatggaaaat

SEQ ID NO: 2792069 - DNA, 25 bp, Homo sapien
gaagagatcaaagcctgtcttgcta

SEQ ID NO: 2792070 - DNA, 25 bp, Homo sapien
tgttgattctggcaagtgaaatcat

SEQ ID NO: 2792071 - DNA, 25 bp, Homo sapien
tgtcttgctattgttgattctggca

SEQ ID NO: 2792072 - DNA, 25 bp, Homo sapien
cgattgtttgcatatgaatcagact

SEQ ID NO: 2792073 - DNA, 25 bp, Homo sapien
tactcatcctactatgcaataggac

SEQ ID NO: 2792074 - DNA, 25 bp, Homo sapien
gttttaatacatgtactcaatgtgt

SEQ ID NO: 2792075 - DNA, 25 bp, Homo sapien
tccgttaaggcaaccaaggattgga

SEQ ID NO: 2792076 - DNA, 25 bp, Homo sapien
ccagaacttattcctgggttctaca

SEQ ID NO: 2792077 - DNA, 25 bp, Homo sapien
ctacccgatagtagggtggcagtag

SEQ ID NO: 2792078 - DNA, 25 bp, Homo sapien
tgattggtgatgtcttggatattct

SEQ ID NO: 2792079 - DNA, 25 bp, Homo sapien
tgttttggatgattggtgatgtctt

SEQ ID NO: 2792080 - DNA, 25 bp, Homo sapien
ttaactgtggcctcctacactgtgt

SEQ ID NO: 2792081 - DNA, 25 bp, Homo sapien
tggaactttgaatatacaacacttt

SEQ ID NO: 2792082 - DNA, 25 bp, Homo sapien
caaagatgtacagaggaaacaatgc

SEQ ID NO: 2792083 - DNA, 25 bp, Homo sapien
gcaaagatgtacagaggaaacaatg

SEQ ID NO: 2792084 - DNA, 25 bp, Homo sapien
gttaaattattgtttgatggataaa

SEQ ID NO: 2792085 - DNA, 25 bp, Homo sapien
tgaacattcttcttccggtacattt

SEQ ID NO: 2792086 - DNA, 25 bp, Homo sapien
aatgaacattcttcttccggtacat

SEQ ID NO: 2792087 - DNA, 25 bp, Homo sapien
taaattattgtttgatggataaaag

SEQ ID NO: 2792088 - DNA, 25 bp, Homo sapien
gtacctgccttgttttcacagcggt

SEQ ID NO: 2792089 - DNA, 25 bp, Homo sapien
cattcttctgatgccggcatccctg

SEQ ID NO: 2792090 - DNA, 25 bp, Homo sapien
tgtacctgccttgttttcacagcgg

SEQ ID NO: 2792091 - DNA, 25 bp, Homo sapien
tgccttgttttcacagcggtgaccc

SEQ ID NO: 2792092 - DNA, 25 bp, Homo sapien
cagtgatgtcgagtgtgcgggtgtt

SEQ ID NO: 2792093 - DNA, 25 bp, Homo sapien
agtgatgtcgagtgtgcgggtgttt

SEQ ID NO: 2792094 - DNA, 25 bp, Homo sapien
gtgatgtcgagtgtgcgggtgtttg

SEQ ID NO: 2792095 - DNA, 25 bp, Homo sapien
ccagtgatgtcgagtgtgcgggtgt

SEQ ID NO: 2792096 - DNA, 25 bp, Homo sapien
gcaacggggagatcccacaagcaaa

SEQ ID NO: 2792097 - DNA, 25 bp, Homo sapien
cacaagcaaagtgaactgggggatg

SEQ ID NO: 2792098 - DNA, 25 bp, Homo sapien
gaactgggggatgggctgaaggggc

SEQ ID NO: 2792099 - DNA, 25 bp, Homo sapien
tgaaggggctccaggcaactgagcc

SEQ ID NO: 2792100 - DNA, 25 bp, Homo sapien
tggcccaaacaggaatgaggggcac

SEQ ID NO: 2792101 - DNA, 25 bp, Homo sapien
agggagtgggcatgtgagcacataa

SEQ ID NO: 2792102 - DNA, 25 bp, Homo sapien
tgagggagtgggcatgtgagcacat

SEQ ID NO: 2792103 - DNA, 25 bp, Homo sapien
ggagtgggcatgtgagcacataatg

SEQ ID NO: 2792104 - DNA, 25 bp, Homo sapien
ctgagggagtgggcatgtgagcaca

SEQ ID NO: 2792105 - DNA, 25 bp, Homo sapien
tgacagagcgaccataatggatgaa

SEQ ID NO: 2792106 - DNA, 25 bp, Homo sapien
agcgaccataatggatgaataagcg

SEQ ID NO: 2792107 - DNA, 25 bp, Homo sapien
cataatggatgaataagcgcagcca

SEQ ID NO: 2792108 - DNA, 25 bp, Homo sapien
accataatggatgaataagcgcagc

SEQ ID NO: 2792109 - DNA, 25 bp, Homo sapien
agggagagacgtgggcacaaaggtc

SEQ ID NO: 2792110 - DNA, 25 bp, Homo sapien
gagggagagacgtgggcacaaaggt

SEQ ID NO: 2792111 - DNA, 25 bp, Homo sapien
ggagggagagacgtgggcacaaagg

SEQ ID NO: 2792112 - DNA, 25 bp, Homo sapien
tggagggagagacgtgggcacaaag

SEQ ID NO: 2792113 - DNA, 25 bp, Homo sapien
tttagtcagacatggtgggcaggag

SEQ ID NO: 2792114 - DNA, 25 bp, Homo sapien
tgctaggttgcatagaggacaaaca

SEQ ID NO: 2792115 - DNA, 25 bp, Homo sapien
cgatgatcgttcttgtgaatagcca

SEQ ID NO: 2792116 - DNA, 25 bp, Homo sapien
ggaggtagatcccaccattttatgg

SEQ ID NO: 2792117 - DNA, 25 bp, Homo sapien
tatgctaggctttaggtcaagaagg

SEQ ID NO: 2792118 - DNA, 25 bp, Homo sapien
cagagaaggacaatgagatatttaa

SEQ ID NO: 2792119 - DNA, 25 bp, Homo sapien
caggtgagtgttcagatcattattc

SEQ ID NO: 2792120 - DNA, 25 bp, Homo sapien
gagagctataaaagtctgctcagaa

SEQ ID NO: 2792121 - DNA, 25 bp, Homo sapien
tatttaatttgccacggcaaagcca

SEQ ID NO: 2792122 - DNA, 25 bp, Homo sapien
aagcacagtggcatcttcttctgga

SEQ ID NO: 2792123 - DNA, 25 bp, Homo sapien
cagtggcatcttcttctggagaggc

SEQ ID NO: 2792124 - DNA, 25 bp, Homo sapien
cacagtggcatcttcttctggagag

SEQ ID NO: 2792125 - DNA, 25 bp, Homo sapien
tacaggaagcacagtggcatcttct

SEQ ID NO: 2792126 - DNA, 25 bp, Homo sapien
tcttgaaactaatgtccagggtgta

SEQ ID NO: 2792127 - DNA, 25 bp, Homo sapien
tatagaagcatagccatgcctgccc

SEQ ID NO: 2792128 - DNA, 25 bp, Homo sapien
taatgacctacacagggctttctag

SEQ ID NO: 2792129 - DNA, 25 bp, Homo sapien
gcttagataactccacactgtgatg

SEQ ID NO: 2792130 - DNA, 25 bp, Homo sapien
tcctgaaggtcccactactaatacc

SEQ ID NO: 2792131 - DNA, 25 bp, Homo sapien
taaaaattcagtccgtaacattctg

SEQ ID NO: 2792132 - DNA, 25 bp, Homo sapien
tcatgaggcctctactatgacaacc

SEQ ID NO: 2792133 - DNA, 25 bp, Homo sapien
cctcaagtccagtctaaagtccaag

SEQ ID NO: 2792134 - DNA, 25 bp, Homo sapien
agcttcacggtacagttcattctca

SEQ ID NO: 2792135 - DNA, 25 bp, Homo sapien
tcacggtacagttcattctcacaaa

SEQ ID NO: 2792136 - DNA, 25 bp, Homo sapien
gtgagcttcacggtacagttcattc

SEQ ID NO: 2792137 - DNA, 25 bp, Homo sapien
caggtgagcttcacggtacagttca

SEQ ID NO: 2792138 - DNA, 25 bp, Homo sapien
caaatcaacggcttgtctccacaca

SEQ ID NO: 2792139 - DNA, 25 bp, Homo sapien
ttgtgaagcacaagtggaagctgat

SEQ ID NO: 2792140 - DNA, 25 bp, Homo sapien
tccacacatcaaggtaaaggcgtcc

SEQ ID NO: 2792141 - DNA, 25 bp, Homo sapien
aagctgataattggtgtttcttaca

SEQ ID NO: 2792142 - DNA, 25 bp, Homo sapien
tctcttcggatatgagctgcaaact

SEQ ID NO: 2792143 - DNA, 25 bp, Homo sapien
gctgcaaactccttatataaaggct

SEQ ID NO: 2792144 - DNA, 25 bp, Homo sapien
cctaattattctagttggcccaaga

SEQ ID NO: 2792145 - DNA, 25 bp, Homo sapien
tctagttggcccaagaaaaatccta

SEQ ID NO: 2792146 - DNA, 25 bp, Homo sapien
ttccaatactgtagaggcatgtgtg

SEQ ID NO: 2792147 - DNA, 25 bp, Homo sapien
tccaatactgtagaggcatgtgtgt

SEQ ID NO: 2792148 - DNA, 25 bp, Homo sapien
tttccaatactgtagaggcatgtgt

SEQ ID NO: 2792149 - DNA, 25 bp, Homo sapien
cacggtagcgtgcacaatcttcatc

SEQ ID NO: 2792150 - DNA, 25 bp, Homo sapien
ctgcttctgccctcacggtagcgtg

SEQ ID NO: 2792151 - DNA, 25 bp, Homo sapien
gcgtgcacaatcttcatcgcatgtc

SEQ ID NO: 2792152 - DNA, 25 bp, Homo sapien
gccctcacggtagcgtgcacaatct

SEQ ID NO: 2792153 - DNA, 25 bp, Homo sapien
cccctgtggtttcatcaatggtaaa

SEQ ID NO: 2792154 - DNA, 25 bp, Homo sapien
tgtccacagcctgagcacgaagagt

SEQ ID NO: 2792155 - DNA, 25 bp, Homo sapien
taggctccttattgcatgaatgtcc

SEQ ID NO: 2792156 - DNA, 25 bp, Homo sapien
cagcgccatctcctgagagggtgta

SEQ ID NO: 2792157 - DNA, 25 bp, Homo sapien
aaatgacatcggctcttgttggata

SEQ ID NO: 2792158 - DNA, 25 bp, Homo sapien
aaggagatcacattcagtgacctgc

SEQ ID NO: 2792159 - DNA, 25 bp, Homo sapien
tggatgactataaaactcttgagag

SEQ ID NO: 2792160 - DNA, 25 bp, Homo sapien
taattcaggcagatgggtggtagcc

SEQ ID NO: 2792161 - DNA, 25 bp, Homo sapien
gtgttttccaagtcatctcagatgg

SEQ ID NO: 2792162 - DNA, 25 bp, Homo sapien
aaataggcactgtccaggcagttgt

SEQ ID NO: 2792163 - DNA, 25 bp, Homo sapien
gatggtgcgtgaaaatgagatgcca

SEQ ID NO: 2792164 - DNA, 25 bp, Homo sapien
tttactgattgaagcagccaactcc

SEQ ID NO: 2792165 - DNA, 25 bp, Homo sapien
tgcatacctttggactagtcagcct

SEQ ID NO: 2792166 - DNA, 25 bp, Homo sapien
gtcagcctttataattgtgtgagcc

SEQ ID NO: 2792167 - DNA, 25 bp, Homo sapien
ggtcttgagcctgcccgtctttaga

SEQ ID NO: 2792168 - DNA, 25 bp, Homo sapien
gctatcctgggtctacagtttgcca

SEQ ID NO: 2792169 - DNA, 25 bp, Homo sapien
caggttgttacagaggctgccttcc

SEQ ID NO: 2792170 - DNA, 25 bp, Homo sapien
ttccccaaccatgagtcctcaggtt

SEQ ID NO: 2792171 - DNA, 25 bp, Homo sapien
cattgcctctccgagtttaaaaagg

SEQ ID NO: 2792172 - DNA, 25 bp, Homo sapien
gatgcaatgcaatgttttgaccaga

SEQ ID NO: 2792173 - DNA, 25 bp, Homo sapien
ccaatatctgtatgtgaaggagaca

SEQ ID NO: 2792174 - DNA, 25 bp, Homo sapien
taagctttacctacaagcaaaacaa

SEQ ID NO: 2792175 - DNA, 25 bp, Homo sapien
tccttggctctatgtatttaattat

SEQ ID NO: 2792176 - DNA, 25 bp, Homo sapien
aaaactacttttggtcatgtagcag

SEQ ID NO: 2792177 - DNA, 25 bp, Homo sapien
tgaaatgctttctcgggtaatttca

SEQ ID NO: 2792178 - DNA, 25 bp, Homo sapien
atttgaaatgctttctcgggtaatt

SEQ ID NO: 2792179 - DNA, 25 bp, Homo sapien
aatgctttctcgggtaatttcattc

SEQ ID NO: 2792180 - DNA, 25 bp, Homo sapien
atgctttctcgggtaatttcattca

SEQ ID NO: 2792181 - DNA, 25 bp, Homo sapien
tatatttgttggctgtgtcgtgaaa

SEQ ID NO: 2792182 - DNA, 25 bp, Homo sapien
tttgttggctgtgtcgtgaaatgac

SEQ ID NO: 2792183 - DNA, 25 bp, Homo sapien
tgttggctgtgtcgtgaaatgacat

SEQ ID NO: 2792184 - DNA, 25 bp, Homo sapien
tatttgttggctgtgtcgtgaaatg

SEQ ID NO: 2792185 - DNA, 25 bp, Homo sapien
ccagagaaccgttgcttttccgagt

SEQ ID NO: 2792186 - DNA, 25 bp, Homo sapien
tcagccttcccggtcagcggtggtg

SEQ ID NO: 2792187 - DNA, 25 bp, Homo sapien
tccgttggtggtcggcatggcccgt

SEQ ID NO: 2792188 - DNA, 25 bp, Homo sapien
gtggtgacggtatcccagagtgcca

SEQ ID NO: 2792189 - DNA, 25 bp, Homo sapien
ggcctaatgaggaccgggaactcca

SEQ ID NO: 2792190 - DNA, 25 bp, Homo sapien
tgtgcggtaaagaacacaccccgga

SEQ ID NO: 2792191 - DNA, 25 bp, Homo sapien
gatgttcgtttgtaccagtcctagg

SEQ ID NO: 2792192 - DNA, 25 bp, Homo sapien
aaacaatgaagcctaccttgcaggg

SEQ ID NO: 2792193 - DNA, 25 bp, Homo sapien
taatccctcttattgaaaagctaag

SEQ ID NO: 2792194 - DNA, 25 bp, Homo sapien
atgctgagcagactaaaataatata

SEQ ID NO: 2792195 - DNA, 25 bp, Homo sapien
tctttgccaaaaggaagggagaatg

SEQ ID NO: 2792196 - DNA, 25 bp, Homo sapien
atttgccaggtattgtgatgggtgc

SEQ ID NO: 2792197 - DNA, 25 bp, Homo sapien
gcctctgtgaatattggtataattg

SEQ ID NO: 2792198 - DNA, 25 bp, Homo sapien
tgcctgtgacagttggcctctgtga

SEQ ID NO: 2792199 - DNA, 25 bp, Homo sapien
tcctggccctggtgtgcccttaatg

SEQ ID NO: 2792200 - DNA, 25 bp, Homo sapien
gtctgaaatgaggtctcctggccct

SEQ ID NO: 2792201 - DNA, 25 bp, Homo sapien
gaggactgcttaagcaaccgagttt

SEQ ID NO: 2792202 - DNA, 25 bp, Homo sapien
tgcaaaaagactgattccagtacat

SEQ ID NO: 2792203 - DNA, 25 bp, Homo sapien
agccaccaccccgacattatttgaa

SEQ ID NO: 2792204 - DNA, 25 bp, Homo sapien
taaatatagtaactcaggcctgggc

SEQ ID NO: 2792205 - DNA, 25 bp, Homo sapien
ggaaagttgatgtcggaaagaagac

SEQ ID NO: 2792206 - DNA, 25 bp, Homo sapien
gacaatggctagagcaatgtcctag

SEQ ID NO: 2792207 - DNA, 25 bp, Homo sapien
tgtcctagagtaggtaagaagggat

SEQ ID NO: 2792208 - DNA, 25 bp, Homo sapien
cagcatgtttgtgggttgataggaa

SEQ ID NO: 2792209 - DNA, 25 bp, Homo sapien
taagccgatagttagacagagtcct

SEQ ID NO: 2792210 - DNA, 25 bp, Homo sapien
caagcttcacatacgtaaggtgggt

SEQ ID NO: 2792211 - DNA, 25 bp, Homo sapien
acatgtataaggaagcagctctggc

SEQ ID NO: 2792212 - DNA, 25 bp, Homo sapien
tagctgaaattacgagcacacgcca

SEQ ID NO: 2792213 - DNA, 25 bp, Homo sapien
tggatttctaatggtagatttttag

SEQ ID NO: 2792214 - DNA, 25 bp, Homo sapien
ctgtaaactggatttctaatggtag

SEQ ID NO: 2792215 - DNA, 25 bp, Homo sapien
aactggatttctaatggtagatttt

SEQ ID NO: 2792216 - DNA, 25 bp, Homo sapien
taaactggatttctaatggtagatt

SEQ ID NO: 2792217 - DNA, 25 bp, Homo sapien
tgcagtttacctttgaaagtataca

SEQ ID NO: 2792218 - DNA, 25 bp, Homo sapien
tgaaagtatacaagttggctgggca

SEQ ID NO: 2792219 - DNA, 25 bp, Homo sapien
aattcacatggtgtgcagtttacct

SEQ ID NO: 2792220 - DNA, 25 bp, Homo sapien
tttgaaagtatacaagttggctggg

SEQ ID NO: 2792221 - DNA, 25 bp, Homo sapien
tggttttggttttcagttatgcaac

SEQ ID NO: 2792222 - DNA, 25 bp, Homo sapien
aaagaaagtatacaagtcagtggtt

SEQ ID NO: 2792223 - DNA, 25 bp, Homo sapien
ccatcactacaatttaagaacattt

SEQ ID NO: 2792224 - DNA, 25 bp, Homo sapien
ggcaccttttgtcccagctgctcgg

SEQ ID NO: 2792225 - DNA, 25 bp, Homo sapien
taactggaattcgtcaagcctctgg

SEQ ID NO: 2792226 - DNA, 25 bp, Homo sapien
tgggataacctaggcatactgcact

SEQ ID NO: 2792227 - DNA, 25 bp, Homo sapien
tagtaggcagaccagcagacttttt

SEQ ID NO: 2792228 - DNA, 25 bp, Homo sapien
tagagcagcactaaatgacaccact

SEQ ID NO: 2792229 - DNA, 25 bp, Homo sapien
gtataaaagggtatgcaggagaaaa

SEQ ID NO: 2792230 - DNA, 25 bp, Homo sapien
ctgcacctggtcaagtattatggtt

SEQ ID NO: 2792231 - DNA, 25 bp, Homo sapien
ttttaatagtatgcacacatgggac

SEQ ID NO: 2792232 - DNA, 25 bp, Homo sapien
catgggacaaaactcaactggtata

SEQ ID NO: 2792233 - DNA, 25 bp, Homo sapien
gttaaacccgtttcatccatgtatg

SEQ ID NO: 2792234 - DNA, 25 bp, Homo sapien
tccaggcccacttcctagaggtacg

SEQ ID NO: 2792235 - DNA, 25 bp, Homo sapien
agtgattcaaccgttaagttagcca

SEQ ID NO: 2792236 - DNA, 25 bp, Homo sapien
taatgcaggcacgaaagtaaaacaa

SEQ ID NO: 2792237 - DNA, 25 bp, Homo sapien
ttacatcctcaatatgccccaagac

SEQ ID NO: 2792238 - DNA, 25 bp, Homo sapien
tttacatcctcaatatgccccaaga

SEQ ID NO: 2792239 - DNA, 25 bp, Homo sapien
tctggagaatagttaagtacttaga

SEQ ID NO: 2792240 - DNA, 25 bp, Homo sapien
ttaagtacttagattgaggatgtct

SEQ ID NO: 2792241 - DNA, 25 bp, Homo sapien
atttctggagaatagttaagtactt

SEQ ID NO: 2792242 - DNA, 25 bp, Homo sapien
gtacttagattgaggatgtctttct

SEQ ID NO: 2792243 - DNA, 25 bp, Homo sapien
gtctaatgagccttggtagtcgtaa

SEQ ID NO: 2792244 - DNA, 25 bp, Homo sapien
agtcgtaacacacattgactcaaag

SEQ ID NO: 2792245 - DNA, 25 bp, Homo sapien
ttgactcaaagacttgactgttgtg

SEQ ID NO: 2792246 - DNA, 25 bp, Homo sapien
ccttggtagtcgtaacacacattga

SEQ ID NO: 2792247 - DNA, 25 bp, Homo sapien
attgattgaaagctttaggttctca

SEQ ID NO: 2792248 - DNA, 25 bp, Homo sapien
tgttgtccagtgcttgaaagaaatt

SEQ ID NO: 2792249 - DNA, 25 bp, Homo sapien
tgattgattgaaagctttaggttct

SEQ ID NO: 2792250 - DNA, 25 bp, Homo sapien
gattgattgaaagctttaggttctc

SEQ ID NO: 2792251 - DNA, 25 bp, Homo sapien
gattacaagcacgtgtcactgtgcc

SEQ ID NO: 2792252 - DNA, 25 bp, Homo sapien
ccgcgcctggccatcacaggctggt

SEQ ID NO: 2792253 - DNA, 25 bp, Homo sapien
gcgcctggccatcacaggctggtct

SEQ ID NO: 2792254 - DNA, 25 bp, Homo sapien
ttacaagcacgtgtcactgtgccca

SEQ ID NO: 2792255 - DNA, 25 bp, Homo sapien
ccccagtaggaaggatcaattcttc

SEQ ID NO: 2792256 - DNA, 25 bp, Homo sapien
tgagaggactcggagacaatgaagc

SEQ ID NO: 2792257 - DNA, 25 bp, Homo sapien
cagtttggccactcgataaattcca

SEQ ID NO: 2792258 - DNA, 25 bp, Homo sapien
accacgctgtcatcattcaaagtct

SEQ ID NO: 2792259 - DNA, 25 bp, Homo sapien
tgtttcctcatcaggaaattgctgg

SEQ ID NO: 2792260 - DNA, 25 bp, Homo sapien
gagaaataaaatttggcaaactggc

SEQ ID NO: 2792261 - DNA, 25 bp, Homo sapien
ggccttcaagatttaatatcttcag

SEQ ID NO: 2792262 - DNA, 25 bp, Homo sapien
caggaaattgctggccttcaagatt

SEQ ID NO: 2792263 - DNA, 25 bp, Homo sapien
caaatgggacggcttgaaaaaatga

SEQ ID NO: 2792264 - DNA, 25 bp, Homo sapien
aaaagaagttacacttcagatggaa

SEQ ID NO: 2792265 - DNA, 25 bp, Homo sapien
tgtgagtttcttacaggaaacaagc

SEQ ID NO: 2792266 - DNA, 25 bp, Homo sapien
aacaagcatagtcatgagagaccca

SEQ ID NO: 2792267 - DNA, 25 bp, Homo sapien
caatgaagcttttgcatgcaagtct

SEQ ID NO: 2792268 - DNA, 25 bp, Homo sapien
tgctgaactcctgctctcaggcgat

SEQ ID NO: 2792269 - DNA, 25 bp, Homo sapien
tggccaacaatgaagcttttgcatg

SEQ ID NO: 2792270 - DNA, 25 bp, Homo sapien
cttattgcaagcttgaacttctgga

SEQ ID NO: 2792271 - DNA, 25 bp, Homo sapien
aagtatattaaagtgccatccttac

SEQ ID NO: 2792272 - DNA, 25 bp, Homo sapien
aacaagtatattaaagtgccatcct

SEQ ID NO: 2792273 - DNA, 25 bp, Homo sapien
caagtatattaaagtgccatcctta

SEQ ID NO: 2792274 - DNA, 25 bp, Homo sapien
aaaacaagtatattaaagtgccatc

SEQ ID NO: 2792275 - DNA, 25 bp, Homo sapien
aataatttctccatatggtggaagt

SEQ ID NO: 2792276 - DNA, 25 bp, Homo sapien
ggaaggatcatactcagctgaaatt

SEQ ID NO: 2792277 - DNA, 25 bp, Homo sapien
tcagctgaaatttggatcaataatt

SEQ ID NO: 2792278 - DNA, 25 bp, Homo sapien
agtttggaaggatcatactcagctg

SEQ ID NO: 2792279 - DNA, 25 bp, Homo sapien
aacatttatattgccctccagatcc

SEQ ID NO: 2792280 - DNA, 25 bp, Homo sapien
cttatccagattaggaaagatttgg

SEQ ID NO: 2792281 - DNA, 25 bp, Homo sapien
attgccctccagatccacagacagt

SEQ ID NO: 2792282 - DNA, 25 bp, Homo sapien
caggaacttatccagattaggaaag

SEQ ID NO: 2792283 - DNA, 25 bp, Homo sapien
ctgataacaggttgaaatccagaat

SEQ ID NO: 2792284 - DNA, 25 bp, Homo sapien
aaagtaaaatgacaacctatggaat

SEQ ID NO: 2792285 - DNA, 25 bp, Homo sapien
tcacaactactagaatggctttatg

SEQ ID NO: 2792286 - DNA, 25 bp, Homo sapien
aaactttcgtgcacaaaggacatta

SEQ ID NO: 2792287 - DNA, 25 bp, Homo sapien
ggaacctttgtacatggatagtggg

SEQ ID NO: 2792288 - DNA, 25 bp, Homo sapien
ggtgcagctactgtgcaagttcctc

SEQ ID NO: 2792289 - DNA, 25 bp, Homo sapien
aatataggctacaacatgatgtacc

SEQ ID NO: 2792290 - DNA, 25 bp, Homo sapien
taaaccgatacttataatgccagtg

SEQ ID NO: 2792291 - DNA, 25 bp, Homo sapien
caacatagtgaatgcttaatgccac

SEQ ID NO: 2792292 - DNA, 25 bp, Homo sapien
taaatttggtaaatgtcaacccaca

SEQ ID NO: 2792293 - DNA, 25 bp, Homo sapien
cccacacattccaaaaaagttcagt

SEQ ID NO: 2792294 - DNA, 25 bp, Homo sapien
ttcagtgcacctcaagcaagataca

SEQ ID NO: 2792295 - DNA, 25 bp, Homo sapien
gagcatgcatgctttcatggcctca

SEQ ID NO: 2792296 - DNA, 25 bp, Homo sapien
catggcctcagaagttttcaaccac

SEQ ID NO: 2792297 - DNA, 25 bp, Homo sapien
tcttcctttaggcagctagggtgaa

SEQ ID NO: 2792298 - DNA, 25 bp, Homo sapien
aagatgggttaagtctacactgaaa

SEQ ID NO: 2792299 - DNA, 25 bp, Homo sapien
cttcaagagattccagggaaggcag

SEQ ID NO: 2792300 - DNA, 25 bp, Homo sapien
cacttggtgacagaggccttagaca

SEQ ID NO: 2792301 - DNA, 25 bp, Homo sapien
gaagcagttcctgttcggctgcgct

SEQ ID NO: 2792302 - DNA, 25 bp, Homo sapien
ggattgtccctgagacttcaagaga

SEQ ID NO: 2792303 - DNA, 25 bp, Homo sapien
aaatggagttcgatgcgctgtgaag

SEQ ID NO: 2792304 - DNA, 25 bp, Homo sapien
tggtttaaatggagttcgatgcgct

SEQ ID NO: 2792305 - DNA, 25 bp, Homo sapien
tttaaatggagttcgatgcgctgtg

SEQ ID NO: 2792306 - DNA, 25 bp, Homo sapien
taaatggagttcgatgcgctgtgaa

SEQ ID NO: 2792307 - DNA, 25 bp, Homo sapien
caaatggagaacacgcagcaacagt

SEQ ID NO: 2792308 - DNA, 25 bp, Homo sapien
cattcacatcgacttctagacaggg

SEQ ID NO: 2792309 - DNA, 25 bp, Homo sapien
taagttaagcgcacccaaagtcagt

SEQ ID NO: 2792310 - DNA, 25 bp, Homo sapien
aagtcagtgttctcccttgaaggaa

SEQ ID NO: 2792311 - DNA, 25 bp, Homo sapien
taggcgcttacagtcatcatgggtg

SEQ ID NO: 2792312 - DNA, 25 bp, Homo sapien
gatgttcctgcctatctgaatccag

SEQ ID NO: 2792313 - DNA, 25 bp, Homo sapien
gagacacaattttgggccctgcttt

SEQ ID NO: 2792314 - DNA, 25 bp, Homo sapien
gatcgccgccacaaagagaggagtt

SEQ ID NO: 2792315 - DNA, 25 bp, Homo sapien
ctgcaaactttggttctttccaaag

SEQ ID NO: 2792316 - DNA, 25 bp, Homo sapien
caaagtaaaccataaactttcgcag

SEQ ID NO: 2792317 - DNA, 25 bp, Homo sapien
tagaatggtctctaggtatcggcgg

SEQ ID NO: 2792318 - DNA, 25 bp, Homo sapien
tctaggagctggtcacagatgatac

SEQ ID NO: 2792319 - DNA, 25 bp, Homo sapien
caatcaataggcaggtccgggataa

SEQ ID NO: 2792320 - DNA, 25 bp, Homo sapien
caagtggtccgtggccagatcggaa

SEQ ID NO: 2792321 - DNA, 25 bp, Homo sapien
gacttttgctcatacacgacactgt

SEQ ID NO: 2792322 - DNA, 25 bp, Homo sapien
ctggagaagccacaagaatcttgac

SEQ ID NO: 2792323 - DNA, 25 bp, Homo sapien
actatcagtttggtcctgcctgcac

SEQ ID NO: 2792324 - DNA, 25 bp, Homo sapien
gactggtttgcttgtacctgagaca

SEQ ID NO: 2792325 - DNA, 25 bp, Homo sapien
ctggcactataggaccaactgctat

SEQ ID NO: 2792326 - DNA, 25 bp, Homo sapien
ggcactataggaccaactgctattg

SEQ ID NO: 2792327 - DNA, 25 bp, Homo sapien
cactataggaccaactgctattgaa

SEQ ID NO: 2792328 - DNA, 25 bp, Homo sapien
ctataggaccaactgctattgaatc

SEQ ID NO: 2792329 - DNA, 25 bp, Homo sapien
caaacatctgcaggaatgtgtgttc

SEQ ID NO: 2792330 - DNA, 25 bp, Homo sapien
tccaggtaacgagaatcatagtgtc

SEQ ID NO: 2792331 - DNA, 25 bp, Homo sapien
caatccatgggtgatactatccagg

SEQ ID NO: 2792332 - DNA, 25 bp, Homo sapien
tccaaaagtcattaggtgcagcctc

SEQ ID NO: 2792333 - DNA, 25 bp, Homo sapien
gaaggtctggagtcacttccgcaga

SEQ ID NO: 2792334 - DNA, 25 bp, Homo sapien
ctctgaaggtctggagtcacttccg

SEQ ID NO: 2792335 - DNA, 25 bp, Homo sapien
tctggagtcacttccgcagaggact

SEQ ID NO: 2792336 - DNA, 25 bp, Homo sapien
gagtcacttccgcagaggacttcat

SEQ ID NO: 2792337 - DNA, 25 bp, Homo sapien
taaggcacttaggttgtggctctct

SEQ ID NO: 2792338 - DNA, 25 bp, Homo sapien
gggtatggcaatatataggaactct

SEQ ID NO: 2792339 - DNA, 25 bp, Homo sapien
tgcgtatatgacactcctccatgca

SEQ ID NO: 2792340 - DNA, 25 bp, Homo sapien
gaattggtacactgatgattttgac

SEQ ID NO: 2792341 - DNA, 25 bp, Homo sapien
gaccaaggatcaatgtagcctccaa

SEQ ID NO: 2792342 - DNA, 25 bp, Homo sapien
tgagggtagtgacacgaccaaggat

SEQ ID NO: 2792343 - DNA, 25 bp, Homo sapien
tgccttcaggtgacttggcgatgag

SEQ ID NO: 2792344 - DNA, 25 bp, Homo sapien
tttaacgtttctgtccaaagtcagc

SEQ ID NO: 2792345 - DNA, 25 bp, Homo sapien
ctccaacctgggcaagagagagaac

SEQ ID NO: 2792346 - DNA, 25 bp, Homo sapien
attagctgggtgtgaagacatgtgc

SEQ ID NO: 2792347 - DNA, 25 bp, Homo sapien
ggtgtgaagacatgtgcctgtagtc

SEQ ID NO: 2792348 - DNA, 25 bp, Homo sapien
gctgggtgtgaagacatgtgcctgt

SEQ ID NO: 2792349 - DNA, 25 bp, Homo sapien
tccacatagcatttgtatagtcatg

SEQ ID NO: 2792350 - DNA, 25 bp, Homo sapien
cacaagcttcagctccacatagcat

SEQ ID NO: 2792351 - DNA, 25 bp, Homo sapien
taaaaatttaccacaagcttcagct

SEQ ID NO: 2792352 - DNA, 25 bp, Homo sapien
catagcatttgtatagtcatgataa

SEQ ID NO: 2792353 - DNA, 25 bp, Homo sapien
gaaaagcactggacgatgtccttta

SEQ ID NO: 2792354 - DNA, 25 bp, Homo sapien
gggaaaacatctggtgtgatcgtct

SEQ ID NO: 2792355 - DNA, 25 bp, Homo sapien
tttctctaaacaccctccacaggaa

SEQ ID NO: 2792356 - DNA, 25 bp, Homo sapien
tctaatgggtcatcaccttcctgcc

SEQ ID NO: 2792357 - DNA, 25 bp, Homo sapien
tgcagataataaccaccagacctgt

SEQ ID NO: 2792358 - DNA, 25 bp, Homo sapien
cagttgggttttgtgacagtcagaa

SEQ ID NO: 2792359 - DNA, 25 bp, Homo sapien
cagaagttggttaccagtgaggcaa

SEQ ID NO: 2792360 - DNA, 25 bp, Homo sapien
aaagcctattcagtctccagttggg

SEQ ID NO: 2792361 - DNA, 25 bp, Homo sapien
gtccagccgtagttcttcgtaagca

SEQ ID NO: 2792362 - DNA, 25 bp, Homo sapien
taaaagagtccagccgtagttcttc

SEQ ID NO: 2792363 - DNA, 25 bp, Homo sapien
agtccttaaaagagtccagccgtag

SEQ ID NO: 2792364 - DNA, 25 bp, Homo sapien
cagtccttaaaagagtccagccgta

SEQ ID NO: 2792365 - DNA, 25 bp, Homo sapien
cccaggaattcacaaaatgttctcc

SEQ ID NO: 2792366 - DNA, 25 bp, Homo sapien
ctgatgccataggtaattctctctg

SEQ ID NO: 2792367 - DNA, 25 bp, Homo sapien
aattctctctggacccaggaattca

SEQ ID NO: 2792368 - DNA, 25 bp, Homo sapien
aggtaattctctctggacccaggaa

SEQ ID NO: 2792369 - DNA, 25 bp, Homo sapien
caagttgttgattatctgacttttt

SEQ ID NO: 2792370 - DNA, 25 bp, Homo sapien
ttcaagttgttgattatctgacttt

SEQ ID NO: 2792371 - DNA, 25 bp, Homo sapien
tcaagttgttgattatctgactttt

SEQ ID NO: 2792372 - DNA, 25 bp, Homo sapien
tgcacccggcccatgttggaggtct

SEQ ID NO: 2792373 - DNA, 25 bp, Homo sapien
ctgcacccggcccatgttggaggtc

SEQ ID NO: 2792374 - DNA, 25 bp, Homo sapien
acccggcccatgttggaggtcttga

SEQ ID NO: 2792375 - DNA, 25 bp, Homo sapien
tgacctcatcatccgtccgtctcgg

SEQ ID NO: 2792376 - DNA, 25 bp, Homo sapien
tgacagcgcctaggtcaggagatct

SEQ ID NO: 2792377 - DNA, 25 bp, Homo sapien
agttagccagctaggaagagccagc

SEQ ID NO: 2792378 - DNA, 25 bp, Homo sapien
gaagactatcaggaaggcaagcaga

SEQ ID NO: 2792379 - DNA, 25 bp, Homo sapien
cactgtcaggccatgttctctatag

SEQ ID NO: 2792380 - DNA, 25 bp, Homo sapien
aatgcctatgcccttctgagtcaga

SEQ ID NO: 2792381 - DNA, 25 bp, Homo sapien
gaaatcaaacccatgacataaaaag

SEQ ID NO: 2792382 - DNA, 25 bp, Homo sapien
cacttacaggtaatccaaaaacttg

SEQ ID NO: 2792383 - DNA, 25 bp, Homo sapien
aaggctctaggtcagcaagtgaatg

SEQ ID NO: 2792384 - DNA, 25 bp, Homo sapien
ctctgaggatttcttactccgaaga

SEQ ID NO: 2792385 - DNA, 25 bp, Homo sapien
gaatatactgggtaatttcctctga

SEQ ID NO: 2792386 - DNA, 25 bp, Homo sapien
tttcttactccgaagaaattcacat

SEQ ID NO: 2792387 - DNA, 25 bp, Homo sapien
tatgtcaacaaatcccttgtagctt

SEQ ID NO: 2792388 - DNA, 25 bp, Homo sapien
taagcagtggtgactaaatctagtc

SEQ ID NO: 2792389 - DNA, 25 bp, Homo sapien
ggttatatgaaagctactggcagta

SEQ ID NO: 2792390 - DNA, 25 bp, Homo sapien
tagagctgtcctatatcacaatgaa

SEQ ID NO: 2792391 - DNA, 25 bp, Homo sapien
ttaccccagtactgtgatagagctg

SEQ ID NO: 2792392 - DNA, 25 bp, Homo sapien
gccatgattctatgtgataggcagc

SEQ ID NO: 2792393 - DNA, 25 bp, Homo sapien
ggattgccgtaagtctgcacataac

SEQ ID NO: 2792394 - DNA, 25 bp, Homo sapien
atcacaggagaacatggatgccatc

SEQ ID NO: 2792395 - DNA, 25 bp, Homo sapien
catggatgccatcagatgatctgca

SEQ ID NO: 2792396 - DNA, 25 bp, Homo sapien
caggaaaaacactgtaccgtgtcct

SEQ ID NO: 2792397 - DNA, 25 bp, Homo sapien
atttcctaaacatccaccacaggaa

SEQ ID NO: 2792398 - DNA, 25 bp, Homo sapien
ttcctaaacatccaccacaggaaaa

SEQ ID NO: 2792399 - DNA, 25 bp, Homo sapien
ttggggaaccatttggcatgttcct

SEQ ID NO: 2792400 - DNA, 25 bp, Homo sapien
cttgccatgacatttcggtagaaac

SEQ ID NO: 2792401 - DNA, 25 bp, Homo sapien
catgacatttcggtagaaacatagg

SEQ ID NO: 2792402 - DNA, 25 bp, Homo sapien
gacatttcggtagaaacataggcat

SEQ ID NO: 2792403 - DNA, 25 bp, Homo sapien
ttttagccttgccatgacatttcgg

SEQ ID NO: 2792404 - DNA, 25 bp, Homo sapien
gggatatcccttggacataaaatgg

SEQ ID NO: 2792405 - DNA, 25 bp, Homo sapien
cagcctctgagagcacacaagggga

SEQ ID NO: 2792406 - DNA, 25 bp, Homo sapien
tgagagcacacaaggggatatccct

SEQ ID NO: 2792407 - DNA, 25 bp, Homo sapien
gatatcccttggacataaaatggcc

SEQ ID NO: 2792408 - DNA, 25 bp, Homo sapien
cacccttatgtcgtacttggcaatg

SEQ ID NO: 2792409 - DNA, 25 bp, Homo sapien
cactgcgcatttgagagttgtagcc

SEQ ID NO: 2792410 - DNA, 25 bp, Homo sapien
tcctgtggtatccatgagctgtacg

SEQ ID NO: 2792411 - DNA, 25 bp, Homo sapien
taggctacagcagaagcactgaatc

SEQ ID NO: 2792412 - DNA, 25 bp, Homo sapien
tctggcagcaaattgtgatcaaact

SEQ ID NO: 2792413 - DNA, 25 bp, Homo sapien
gatcctctcgtcagaggctttctgc

SEQ ID NO: 2792414 - DNA, 25 bp, Homo sapien
actgaactgcatctaggcccagaag

SEQ ID NO: 2792415 - DNA, 25 bp, Homo sapien
caaactgggagatcctctcgtcaga

SEQ ID NO: 2792416 - DNA, 25 bp, Homo sapien
ctgaaaaggaaaataaagcaggttg

SEQ ID NO: 2792417 - DNA, 25 bp, Homo sapien
tgaaaaggaaaataaagcaggttga

SEQ ID NO: 2792418 - DNA, 25 bp, Homo sapien
aaaggaatgcctggaatttcaacac

SEQ ID NO: 2792419 - DNA, 25 bp, Homo sapien
gggatctagcaaccaacaagacaga

SEQ ID NO: 2792420 - DNA, 25 bp, Homo sapien
gagcatttcccactgtttccgaaga

SEQ ID NO: 2792421 - DNA, 25 bp, Homo sapien
gcacctactatatatcaggtacagt

SEQ ID NO: 2792422 - DNA, 25 bp, Homo sapien
ctgaggtgctatggccccaaagtaa

SEQ ID NO: 2792423 - DNA, 25 bp, Homo sapien
caaagtaatctcttcgaagttccca

SEQ ID NO: 2792424 - DNA, 25 bp, Homo sapien
ggttgctgacattgctaacatcatt

SEQ ID NO: 2792425 - DNA, 25 bp, Homo sapien
ctttggtaagaagctccatcagcgt

SEQ ID NO: 2792426 - DNA, 25 bp, Homo sapien
tgtccgtcctttagtaggaagcagt

SEQ ID NO: 2792427 - DNA, 25 bp, Homo sapien
aatgctctgtccgtcctttagtagg

SEQ ID NO: 2792428 - DNA, 25 bp, Homo sapien
aacaaatgctctgtccgtcctttag

SEQ ID NO: 2792429 - DNA, 25 bp, Homo sapien
gtcctttagtaggaagcagtgagaa

SEQ ID NO: 2792430 - DNA, 25 bp, Homo sapien
gacgaagtccccaatatgaagtggc

SEQ ID NO: 2792431 - DNA, 25 bp, Homo sapien
atgaatgcaccttggaatcccagac

SEQ ID NO: 2792432 - DNA, 25 bp, Homo sapien
tgcaccttggaatcccagacgaagt

SEQ ID NO: 2792433 - DNA, 25 bp, Homo sapien
tggaatcccagacgaagtccccaat

SEQ ID NO: 2792434 - DNA, 25 bp, Homo sapien
gcagtttgaggtgcatcgccttctt

SEQ ID NO: 2792435 - DNA, 25 bp, Homo sapien
gtgagcacaggaccttttgtcttca

SEQ ID NO: 2792436 - DNA, 25 bp, Homo sapien
acacagggcaacgtccagaagggtc

SEQ ID NO: 2792437 - DNA, 25 bp, Homo sapien
cgaaagctctccaaacctgtggttt

SEQ ID NO: 2792438 - DNA, 25 bp, Homo sapien
aaaacagatcaatgtcaccggccgc

SEQ ID NO: 2792439 - DNA, 25 bp, Homo sapien
accggccgctggaactcctagggag

SEQ ID NO: 2792440 - DNA, 25 bp, Homo sapien
catggaattactcaagatgggagca

SEQ ID NO: 2792441 - DNA, 25 bp, Homo sapien
tagggagtactcactgcaaaggagc

SEQ ID NO: 2792442 - DNA, 25 bp, Homo sapien
agagacagagtgatactgcctcaaa

SEQ ID NO: 2792443 - DNA, 25 bp, Homo sapien
gcctgagagacagagtgatactgcc

SEQ ID NO: 2792444 - DNA, 25 bp, Homo sapien
gagagacagagtgatactgcctcaa

SEQ ID NO: 2792445 - DNA, 25 bp, Homo sapien
ctgagagacagagtgatactgcctc

SEQ ID NO: 2792446 - DNA, 25 bp, Homo sapien
ccagggtcctgaggtgtgacgcaaa

SEQ ID NO: 2792447 - DNA, 25 bp, Homo sapien
cgcaaatagcaattcagtcaggtga

SEQ ID NO: 2792448 - DNA, 25 bp, Homo sapien
tgcctgacccctttagacatctgag

SEQ ID NO: 2792449 - DNA, 25 bp, Homo sapien
cacagatgcatgaggttaggtttac

SEQ ID NO: 2792450 - DNA, 25 bp, Homo sapien
tatcaggtcaggagggtaagtctct

SEQ ID NO: 2792451 - DNA, 25 bp, Homo sapien
ctgttaatagagacatgggtatccc

SEQ ID NO: 2792452 - DNA, 25 bp, Homo sapien
tagcagttaccaggttacctatagg

SEQ ID NO: 2792453 - DNA, 25 bp, Homo sapien
tttgttgacagagcacacagaagaa

SEQ ID NO: 2792454 - DNA, 25 bp, Homo sapien
tttaatatccttctgagtaagcggg

SEQ ID NO: 2792455 - DNA, 25 bp, Homo sapien
agtaagcgggtaccaagtatggcca

SEQ ID NO: 2792456 - DNA, 25 bp, Homo sapien
catcccttgtggatacctggaagct

SEQ ID NO: 2792457 - DNA, 25 bp, Homo sapien
ctagtggactgctacaaggacttcc

SEQ ID NO: 2792458 - DNA, 25 bp, Homo sapien
ggcagtcttgtgagtttgaatgttt

SEQ ID NO: 2792459 - DNA, 25 bp, Homo sapien
gaatgtttaatgtaaagtgacttct

SEQ ID NO: 2792460 - DNA, 25 bp, Homo sapien
tcttgtgagtttgaatgtttaatgt

SEQ ID NO: 2792461 - DNA, 25 bp, Homo sapien
aatgtaaagtgacttctgttggtca

SEQ ID NO: 2792462 - DNA, 25 bp, Homo sapien
actttcttcttacactaaattaatg

SEQ ID NO: 2792463 - DNA, 25 bp, Homo sapien
cactgaatttacattcagacttaac

SEQ ID NO: 2792464 - DNA, 25 bp, Homo sapien
ttacattcagacttaactttcttct

SEQ ID NO: 2792465 - DNA, 25 bp, Homo sapien
gcccagcctaatttcataagtattg

SEQ ID NO: 2792466 - DNA, 25 bp, Homo sapien
catactgcataatgactttgaaaac

SEQ ID NO: 2792467 - DNA, 25 bp, Homo sapien
attaattgaatgaagtactactgaa

SEQ ID NO: 2792468 - DNA, 25 bp, Homo sapien
taagtcagattatcctttcatgttt

SEQ ID NO: 2792469 - DNA, 25 bp, Homo sapien
taagtttatacatactgcataatga

SEQ ID NO: 2792470 - DNA, 25 bp, Homo sapien
ctaaagaagtccttttattcacagt

SEQ ID NO: 2792471 - DNA, 25 bp, Homo sapien
tattcacagttgcaaatttcttttt

SEQ ID NO: 2792472 - DNA, 25 bp, Homo sapien
tcttctaaagaagtccttttattca

SEQ ID NO: 2792473 - DNA, 25 bp, Homo sapien
catacaatgtatactacatgctgga

SEQ ID NO: 2792474 - DNA, 25 bp, Homo sapien
aaggagctggaatcttatgaataca

SEQ ID NO: 2792475 - DNA, 25 bp, Homo sapien
tgaaggagctggaatcttatgaata

SEQ ID NO: 2792476 - DNA, 25 bp, Homo sapien
caacagtgtagagaatcatgaacaa

SEQ ID NO: 2792477 - DNA, 25 bp, Homo sapien
cagggcaacagtgtagagaatcatg

SEQ ID NO: 2792478 - DNA, 25 bp, Homo sapien
actttattacttccaatgtactcta

SEQ ID NO: 2792479 - DNA, 25 bp, Homo sapien
caaaagttaattacagcacagctag

SEQ ID NO: 2792480 - DNA, 25 bp, Homo sapien
atgacattcaaggtgtgctttgctc

SEQ ID NO: 2792481 - DNA, 25 bp, Homo sapien
cagctagatgacattcaaggtgtgc

SEQ ID NO: 2792482 - DNA, 25 bp, Homo sapien
gttggtctttcaattccccctgaca

SEQ ID NO: 2792483 - DNA, 25 bp, Homo sapien
tttcaattccccctgacatccataa

SEQ ID NO: 2792484 - DNA, 25 bp, Homo sapien
ttccccctgacatccataacaaaat

SEQ ID NO: 2792485 - DNA, 25 bp, Homo sapien
tggtctttcaattccccctgacatc

SEQ ID NO: 2792486 - DNA, 25 bp, Homo sapien
ttctggataattccaccagtgaata

SEQ ID NO: 2792487 - DNA, 25 bp, Homo sapien
cctctaggaatttaccatgcattta

SEQ ID NO: 2792488 - DNA, 25 bp, Homo sapien
catgtaaaactcttgactcagtaat

SEQ ID NO: 2792489 - DNA, 25 bp, Homo sapien
caactctatcttctatagtactggg

SEQ ID NO: 2792490 - DNA, 25 bp, Homo sapien
actggattgtactggatcaaaagga

SEQ ID NO: 2792491 - DNA, 25 bp, Homo sapien
cttattttcagtagtgtgctaggac

SEQ ID NO: 2792492 - DNA, 25 bp, Homo sapien
gagattcagatctatttagcaacga

SEQ ID NO: 2792493 - DNA, 25 bp, Homo sapien
tgttaattgtagctaaaaattggcc

SEQ ID NO: 2792494 - DNA, 25 bp, Homo sapien
atgatggtaagaccgtgccaagtgg

SEQ ID NO: 2792495 - DNA, 25 bp, Homo sapien
gaaacaaatgatggtaagaccgtgc

SEQ ID NO: 2792496 - DNA, 25 bp, Homo sapien
tggggagcagacaccaaagtaagac

SEQ ID NO: 2792497 - DNA, 25 bp, Homo sapien
tcttgaaaagcatccaaaggaaaca

SEQ ID NO: 2792498 - DNA, 25 bp, Homo sapien
tacctgtggctataacagaagattg

SEQ ID NO: 2792499 - DNA, 25 bp, Homo sapien
cagagagacatgttgagtagtccaa

SEQ ID NO: 2792500 - DNA, 25 bp, Homo sapien
tgaagacaacggctgaaaagccaaa

SEQ ID NO: 2792501 - DNA, 25 bp, Homo sapien
taagtgtgtaaccaacctgtctcgg

SEQ ID NO: 2792502 - DNA, 25 bp, Homo sapien
tactttgcccgacactgtgggcaga

SEQ ID NO: 2792503 - DNA, 25 bp, Homo sapien
ctggctcagtattgccatccaaatg

SEQ ID NO: 2792504 - DNA, 25 bp, Homo sapien
tgtaagccctggctcagtattgcca

SEQ ID NO: 2792505 - DNA, 25 bp, Homo sapien
cagaaatagcctcctaatgtaagcc

SEQ ID NO: 2792506 - DNA, 25 bp, Homo sapien
gaaagcatgctatcttgaccttaaa

SEQ ID NO: 2792507 - DNA, 25 bp, Homo sapien
gaccttaaaatcttgacactattta

SEQ ID NO: 2792508 - DNA, 25 bp, Homo sapien
taatgatctgaaaagttagagcggg

SEQ ID NO: 2792509 - DNA, 25 bp, Homo sapien
agttagagcgggaaagcatgctatc

SEQ ID NO: 2792510 - DNA, 25 bp, Homo sapien
gactatgaattttgctttgccagac

SEQ ID NO: 2792511 - DNA, 25 bp, Homo sapien
cgcacccaaccctttgtctattaat

SEQ ID NO: 2792512 - DNA, 25 bp, Homo sapien
attctaccaactgggttatttctgg

SEQ ID NO: 2792513 - DNA, 25 bp, Homo sapien
ctttgcatccctggtaatttctgcc

SEQ ID NO: 2792514 - DNA, 25 bp, Homo sapien
gagcaagtctatgcagctccccaga

SEQ ID NO: 2792515 - DNA, 25 bp, Homo sapien
taaggtggagtgctcttagggccca

SEQ ID NO: 2792516 - DNA, 25 bp, Homo sapien
caaggcttgctgtccaacgtctgaa

SEQ ID NO: 2792517 - DNA, 25 bp, Homo sapien
cacaaaagggctgatcaacgctcag

SEQ ID NO: 2792518 - DNA, 25 bp, Homo sapien
tcctgaagatcactccatacaagta

SEQ ID NO: 2792519 - DNA, 25 bp, Homo sapien
tacatccacttacatctctactttc

SEQ ID NO: 2792520 - DNA, 25 bp, Homo sapien
cttaggtgattagcagcatactaca

SEQ ID NO: 2792521 - DNA, 25 bp, Homo sapien
actacaaaattctctcaaactactg

SEQ ID NO: 2792522 - DNA, 25 bp, Homo sapien
ggttttgcatcctggtcagataaag

SEQ ID NO: 2792523 - DNA, 25 bp, Homo sapien
tcagataaagaagcaatggtgtgct

SEQ ID NO: 2792524 - DNA, 25 bp, Homo sapien
agaagcaatggtgtgctgaggaaat

SEQ ID NO: 2792525 - DNA, 25 bp, Homo sapien
aagagggttttgcatcctggtcaga

SEQ ID NO: 2792526 - DNA, 25 bp, Homo sapien
tcatctaaaataacatggtacgtgc

SEQ ID NO: 2792527 - DNA, 25 bp, Homo sapien
gatgtgtgagcaactctttgtaatg

SEQ ID NO: 2792528 - DNA, 25 bp, Homo sapien
attcagaacttgagctagcaggagg

SEQ ID NO: 2792529 - DNA, 25 bp, Homo sapien
ccatacgaataagtgagcattcaga

SEQ ID NO: 2792530 - DNA, 25 bp, Homo sapien
tgactgcccatattttagactactt

SEQ ID NO: 2792531 - DNA, 25 bp, Homo sapien
tacctcctctaaatactgacataag

SEQ ID NO: 2792532 - DNA, 25 bp, Homo sapien
gctttccaagagttataatacctcc

SEQ ID NO: 2792533 - DNA, 25 bp, Homo sapien
gaaaactctttgcatttggagatga

SEQ ID NO: 2792534 - DNA, 25 bp, Homo sapien
tgcagacaatccaataacagatact

SEQ ID NO: 2792535 - DNA, 25 bp, Homo sapien
gtacagtgcaaacgcgaacttctgc

SEQ ID NO: 2792536 - DNA, 25 bp, Homo sapien
cgcgaacttctgcagacaatccaat

SEQ ID NO: 2792537 - DNA, 25 bp, Homo sapien
cagtttcacgagcaagtacagtgca

SEQ ID NO: 2792538 - DNA, 25 bp, Homo sapien
taaaatccaagtagatagatagttt

SEQ ID NO: 2792539 - DNA, 25 bp, Homo sapien
ccaagtagatagatagttttaggaa

SEQ ID NO: 2792540 - DNA, 25 bp, Homo sapien
aatccaagtagatagatagttttag

SEQ ID NO: 2792541 - DNA, 25 bp, Homo sapien
agtagatagatagttttaggaaaga

SEQ ID NO: 2792542 - DNA, 25 bp, Homo sapien
taaggctgctaaagatgattagtac

SEQ ID NO: 2792543 - DNA, 25 bp, Homo sapien
ctcgacttgtatgtccaggcatgtg

SEQ ID NO: 2792544 - DNA, 25 bp, Homo sapien
taaatattagatggatcgcaagttg

SEQ ID NO: 2792545 - DNA, 25 bp, Homo sapien
gatgattagtacttctcgacttgta

SEQ ID NO: 2792546 - DNA, 25 bp, Homo sapien
acaagactgacaatgttcccgacat

SEQ ID NO: 2792547 - DNA, 25 bp, Homo sapien
tcatatggatcagctttaaagtgca

SEQ ID NO: 2792548 - DNA, 25 bp, Homo sapien
ttaccaagtactctcaagttctggg

SEQ ID NO: 2792549 - DNA, 25 bp, Homo sapien
gagctatgcacttcaaaaaattgtt

SEQ ID NO: 2792550 - DNA, 25 bp, Homo sapien
ccaagggttgcagaatgagtgctat

SEQ ID NO: 2792551 - DNA, 25 bp, Homo sapien
tgctcagatccatctatggcagtca

SEQ ID NO: 2792552 - DNA, 25 bp, Homo sapien
ggcagtcacagccttatgatatgta

SEQ ID NO: 2792553 - DNA, 25 bp, Homo sapien
catgcccagccagtgtagatatttt

SEQ ID NO: 2792554 - DNA, 25 bp, Homo sapien
cccagcccctcttacacttttatgt

SEQ ID NO: 2792555 - DNA, 25 bp, Homo sapien
gtctcacagtgttgtctgggctaaa

SEQ ID NO: 2792556 - DNA, 25 bp, Homo sapien
gtgttgtctgggctaaagtgcaatg

SEQ ID NO: 2792557 - DNA, 25 bp, Homo sapien
cagcccctcttacacttttatgttt

SEQ ID NO: 2792558 - DNA, 25 bp, Homo sapien
aagagacctagccttcagccagtct

SEQ ID NO: 2792559 - DNA, 25 bp, Homo sapien
gccactggagggttattattggtgt

SEQ ID NO: 2792560 - DNA, 25 bp, Homo sapien
caatgtgactaagtgtttagcacaa

SEQ ID NO: 2792561 - DNA, 25 bp, Homo sapien
ttagcacaagagacctagccttcag

SEQ ID NO: 2792562 - DNA, 25 bp, Homo sapien
tgatactgccgacagttttaaatta

SEQ ID NO: 2792563 - DNA, 25 bp, Homo sapien
tatttttgtactattgatactgccg

SEQ ID NO: 2792564 - DNA, 25 bp, Homo sapien
tatgggccccatattaacacatcac

SEQ ID NO: 2792565 - DNA, 25 bp, Homo sapien
tactaaccaacaccacactaaacat

SEQ ID NO: 2792566 - DNA, 25 bp, Homo sapien
gctctccatggcaggtcatatccac

SEQ ID NO: 2792567 - DNA, 25 bp, Homo sapien
gggaattataaagagatggctctcc

SEQ ID NO: 2792568 - DNA, 25 bp, Homo sapien
gcttagggaattataaagagatggc

SEQ ID NO: 2792569 - DNA, 25 bp, Homo sapien
atggctctccatggcaggtcatatc

SEQ ID NO: 2792570 - DNA, 25 bp, Homo sapien
gaactaatttgtaagactatcagca

SEQ ID NO: 2792571 - DNA, 25 bp, Homo sapien
tttaatctgtcactattatacataa

SEQ ID NO: 2792572 - DNA, 25 bp, Homo sapien
agcactataaataacagtttctctg

SEQ ID NO: 2792573 - DNA, 25 bp, Homo sapien
caaagagtatctttgtagagtgatc

SEQ ID NO: 2792574 - DNA, 25 bp, Homo sapien
tgaaaagtacctcgctaagcagtcc

SEQ ID NO: 2792575 - DNA, 25 bp, Homo sapien
tggagctcccttgagtttttactca

SEQ ID NO: 2792576 - DNA, 25 bp, Homo sapien
tatgcctgcttaactgcaggaccag

SEQ ID NO: 2792577 - DNA, 25 bp, Homo sapien
tgtctattcatcaacttggagctcc

SEQ ID NO: 2792578 - DNA, 25 bp, Homo sapien
cagctcttttactcttagttacaat

SEQ ID NO: 2792579 - DNA, 25 bp, Homo sapien
aaagttcagtcaatttttcagctct

SEQ ID NO: 2792580 - DNA, 25 bp, Homo sapien
ctgaaagttcagtcaatttttcagc

SEQ ID NO: 2792581 - DNA, 25 bp, Homo sapien
tactcttagttacaattattccaat

SEQ ID NO: 2792582 - DNA, 25 bp, Homo sapien
tcaaaatattcctctacaaagtatt

SEQ ID NO: 2792583 - DNA, 25 bp, Homo sapien
caaaatattcctctacaaagtattc

SEQ ID NO: 2792584 - DNA, 25 bp, Homo sapien
atcaaaatattcctctacaaagtat

SEQ ID NO: 2792585 - DNA, 25 bp, Homo sapien
gacagagttaagtaaggcaaaggag

SEQ ID NO: 2792586 - DNA, 25 bp, Homo sapien
gaacatatttgtaatctgaggagac

SEQ ID NO: 2792587 - DNA, 25 bp, Homo sapien
tccctaaataacctggcagtacttc

SEQ ID NO: 2792588 - DNA, 25 bp, Homo sapien
tgataaaccaagatcctgatgtggg

SEQ ID NO: 2792589 - DNA, 25 bp, Homo sapien
agtacacgtcagtctattaggcttt

SEQ ID NO: 2792590 - DNA, 25 bp, Homo sapien
catctactaccacataaaggtggcg

SEQ ID NO: 2792591 - DNA, 25 bp, Homo sapien
ctttaaagtacacgtcagtctatta

SEQ ID NO: 2792592 - DNA, 25 bp, Homo sapien
tctactaccacataaaggtggcgca

SEQ ID NO: 2792593 - DNA, 25 bp, Homo sapien
gcctcaagtgccattttgactagta

SEQ ID NO: 2792594 - DNA, 25 bp, Homo sapien
ctattgttttttctagcaagacaga

SEQ ID NO: 2792595 - DNA, 25 bp, Homo sapien
tctctaacctaaactagttctgtac

SEQ ID NO: 2792596 - DNA, 25 bp, Homo sapien
tattctatgcacgtatttttaacat

SEQ ID NO: 2792597 - DNA, 25 bp, Homo sapien
attccaagtcgaacttgtccatggt

SEQ ID NO: 2792598 - DNA, 25 bp, Homo sapien
cattccaagtcgaacttgtccatgg

SEQ ID NO: 2792599 - DNA, 25 bp, Homo sapien
tcagaaggcaataggtcagttaccc

SEQ ID NO: 2792600 - DNA, 25 bp, Homo sapien
gcaagggtaggtggctagttctttc

SEQ ID NO: 2792601 - DNA, 25 bp, Homo sapien
gttctttccccatagtcagaaggca

SEQ ID NO: 2792602 - DNA, 25 bp, Homo sapien
gacagtctctaaagaccatttcctg

SEQ ID NO: 2792603 - DNA, 25 bp, Homo sapien
agattcatcttctttaagaatctcc

SEQ ID NO: 2792604 - DNA, 25 bp, Homo sapien
aagacattgtctaaaagaaaagaca

SEQ ID NO: 2792605 - DNA, 25 bp, Homo sapien
gacattgtctaaaagaaaagacagg

SEQ ID NO: 2792606 - DNA, 25 bp, Homo sapien
gacagggcaataaagctctccttac

SEQ ID NO: 2792607 - DNA, 25 bp, Homo sapien
gaaaagacagggcaataaagctctc

SEQ ID NO: 2792608 - DNA, 25 bp, Homo sapien
cctccttcccatcgcttagttcttt

SEQ ID NO: 2792609 - DNA, 25 bp, Homo sapien
catagcctccttcccatcgcttagt

SEQ ID NO: 2792610 - DNA, 25 bp, Homo sapien
tagcctccttcccatcgcttagttc

SEQ ID NO: 2792611 - DNA, 25 bp, Homo sapien
cttcccatcgcttagttctttcagg

SEQ ID NO: 2792612 - DNA, 25 bp, Homo sapien
caaaactgtattttattattcaata

SEQ ID NO: 2792613 - DNA, 25 bp, Homo sapien
tcaaaactgtattttattattcaat

SEQ ID NO: 2792614 - DNA, 25 bp, Homo sapien
ttcaaaactgtattttattattcaa

SEQ ID NO: 2792615 - DNA, 25 bp, Homo sapien
ctggcaggtagacactggagcgagc

SEQ ID NO: 2792616 - DNA, 25 bp, Homo sapien
gcaggtagacactggagcgagccaa

SEQ ID NO: 2792617 - DNA, 25 bp, Homo sapien
agacactggagcgagccaaggttgt

SEQ ID NO: 2792618 - DNA, 25 bp, Homo sapien
tgaacctggcaggtagacactggag

SEQ ID NO: 2792619 - DNA, 25 bp, Homo sapien
tctgcggctccccagacgaaagtta

SEQ ID NO: 2792620 - DNA, 25 bp, Homo sapien
aactggcaagggtgattactgtcct

SEQ ID NO: 2792621 - DNA, 25 bp, Homo sapien
tggtcactttctcaagcgggtcaca

SEQ ID NO: 2792622 - DNA, 25 bp, Homo sapien
tcgcgcttttacttagggagagacg

SEQ ID NO: 2792623 - DNA, 25 bp, Homo sapien
aaaacgctcccagccgcctagctag

SEQ ID NO: 2792624 - DNA, 25 bp, Homo sapien
tcacagacttccacacgcggactca

SEQ ID NO: 2792625 - DNA, 25 bp, Homo sapien
tccttccctatgagcccaggcaggg

SEQ ID NO: 2792626 - DNA, 25 bp, Homo sapien
caggcagggcaattcaacctccgtt

SEQ ID NO: 2792627 - DNA, 25 bp, Homo sapien
acgccgaaacgttccggatgctgca

SEQ ID NO: 2792628 - DNA, 25 bp, Homo sapien
cggcgccgctagaaggactctcagc

SEQ ID NO: 2792629 - DNA, 25 bp, Homo sapien
cgacactcctctccgccgctttagg

SEQ ID NO: 2792630 - DNA, 25 bp, Homo sapien
tagaaggactctcagccggaaactc

SEQ ID NO: 2792631 - DNA, 25 bp, Homo sapien
tgcacccagcacagatcaatcatat

SEQ ID NO: 2792632 - DNA, 25 bp, Homo sapien
gctgtaacctaaagaagcatttgtt

SEQ ID NO: 2792633 - DNA, 25 bp, Homo sapien
catatgggattggatgacacatgca

SEQ ID NO: 2792634 - DNA, 25 bp, Homo sapien
tgacaacagtatctaacaatcgtga

SEQ ID NO: 2792635 - DNA, 25 bp, Homo sapien
tgtaggcaataccaagcagttcttg

SEQ ID NO: 2792636 - DNA, 25 bp, Homo sapien
tcctttcacacaagagatggcatgg

SEQ ID NO: 2792637 - DNA, 25 bp, Homo sapien
tccccggagccatgataaaagcact

SEQ ID NO: 2792638 - DNA, 25 bp, Homo sapien
caagtaactgcagaagggcaaagca

SEQ ID NO: 2792639 - DNA, 25 bp, Homo sapien
cacatgtcaaaagatcgttgtgagg

SEQ ID NO: 2792640 - DNA, 25 bp, Homo sapien
tgccacttgctagtgtgacaacagc

SEQ ID NO: 2792641 - DNA, 25 bp, Homo sapien
gatcctaatcccttgttttgccact

SEQ ID NO: 2792642 - DNA, 25 bp, Homo sapien
gacaacagccagttaatctatcata

SEQ ID NO: 2792643 - DNA, 25 bp, Homo sapien
caaaatcacatatgtagggcatcac

SEQ ID NO: 2792644 - DNA, 25 bp, Homo sapien
tgacaaacttgccttcacgaactga

SEQ ID NO: 2792645 - DNA, 25 bp, Homo sapien
tacatccagctagttaatgccaacg

SEQ ID NO: 2792646 - DNA, 25 bp, Homo sapien
cactttatacgcagggaatctttac

SEQ ID NO: 2792647 - DNA, 25 bp, Homo sapien
aaaagtctaagctgggatgatcaca

SEQ ID NO: 2792648 - DNA, 25 bp, Homo sapien
gggaaacgactaaccagcacagcat

SEQ ID NO: 2792649 - DNA, 25 bp, Homo sapien
aaagtgatacaatttaagggcacca

SEQ ID NO: 2792650 - DNA, 25 bp, Homo sapien
caacagatacaactcctgagtgtgg

SEQ ID NO: 2792651 - DNA, 25 bp, Homo sapien
tatttacaatctttaaatttcacac

SEQ ID NO: 2792652 - DNA, 25 bp, Homo sapien
atttacaatctttaaatttcacaca

SEQ ID NO: 2792653 - DNA, 25 bp, Homo sapien
tatatttacaatctttaaatttcac

SEQ ID NO: 2792654 - DNA, 25 bp, Homo sapien
tctcaaacaacttggcatcagcctt

SEQ ID NO: 2792655 - DNA, 25 bp, Homo sapien
tccttaattggagtgttcagcccag

SEQ ID NO: 2792656 - DNA, 25 bp, Homo sapien
tcagagacttcattgcaggaaccca

SEQ ID NO: 2792657 - DNA, 25 bp, Homo sapien
aaccaaaagtgtgtgctaggaaaca

SEQ ID NO: 2792658 - DNA, 25 bp, Homo sapien
gtctatcatagtctccaaccatctt

SEQ ID NO: 2792659 - DNA, 25 bp, Homo sapien
tctgtctatcatagtctccaaccat

SEQ ID NO: 2792660 - DNA, 25 bp, Homo sapien
tgtctatcatagtctccaaccatct

SEQ ID NO: 2792661 - DNA, 25 bp, Homo sapien
gcaatgattcttcttacttttgtaa

SEQ ID NO: 2792662 - DNA, 25 bp, Homo sapien
cacttgcttcagtctattgtattca

SEQ ID NO: 2792663 - DNA, 25 bp, Homo sapien
cttgcttcagtctattgtattcatc

SEQ ID NO: 2792664 - DNA, 25 bp, Homo sapien
ttcacttgcttcagtctattgtatt

SEQ ID NO: 2792665 - DNA, 25 bp, Homo sapien
ttgcttcagtctattgtattcatca

SEQ ID NO: 2792666 - DNA, 25 bp, Homo sapien
tgtcaaagggacacgggaagcaact

SEQ ID NO: 2792667 - DNA, 25 bp, Homo sapien
agattaatctccctctaaaaggtgg

SEQ ID NO: 2792668 - DNA, 25 bp, Homo sapien
tgaaagttcccaacggtcaaagcga

SEQ ID NO: 2792669 - DNA, 25 bp, Homo sapien
tggacaaattctatctcagccaggt

SEQ ID NO: 2792670 - DNA, 25 bp, Homo sapien
tctttgttgatctgaagtgataggt

SEQ ID NO: 2792671 - DNA, 25 bp, Homo sapien
ttctctatagtcatccaattcttta

SEQ ID NO: 2792672 - DNA, 25 bp, Homo sapien
agctcttgtattcctgtaggccagt

SEQ ID NO: 2792673 - DNA, 25 bp, Homo sapien
caaacgggagagttctttattgatc

SEQ ID NO: 2792674 - DNA, 25 bp, Homo sapien
aatggaagctcctgaaccacttcag

SEQ ID NO: 2792675 - DNA, 25 bp, Homo sapien
gaagtcatccacaggcgaagttaat

SEQ ID NO: 2792676 - DNA, 25 bp, Homo sapien
tgtctcaaagttaccaccgctgctg

SEQ ID NO: 2792677 - DNA, 25 bp, Homo sapien
tgtgtagtctgtctcatagtgatct

SEQ ID NO: 2792678 - DNA, 25 bp, Homo sapien
cagcagacatctgcacgcaggtgca

SEQ ID NO: 2792679 - DNA, 25 bp, Homo sapien
ttgccagtgcactgtaatcacagag

SEQ ID NO: 2792680 - DNA, 25 bp, Homo sapien
tcagtacactacagccctttgccag

SEQ ID NO: 2792681 - DNA, 25 bp, Homo sapien
cactcacgcgaggacttcagatgtt

SEQ ID NO: 2792682 - DNA, 25 bp, Homo sapien
agactctggataaaaccgcttgtca

SEQ ID NO: 2792683 - DNA, 25 bp, Homo sapien
ctgtcaactctttccacatagtcag

SEQ ID NO: 2792684 - DNA, 25 bp, Homo sapien
cactttgccattggaagagtatgcc

SEQ ID NO: 2792685 - DNA, 25 bp, Homo sapien
ggataaaaccgcttgtcattcactt

SEQ ID NO: 2792686 - DNA, 25 bp, Homo sapien
ggatttacgatttgattgccttcac

SEQ ID NO: 2792687 - DNA, 25 bp, Homo sapien
cccactatcgcataaaacttgtgaa

SEQ ID NO: 2792688 - DNA, 25 bp, Homo sapien
ttcaagttaggcatccagagctgtc

SEQ ID NO: 2792689 - DNA, 25 bp, Homo sapien
tcagctcttggatgccatgttctgc

SEQ ID NO: 2792690 - DNA, 25 bp, Homo sapien
caattcgatattgactactggatag

SEQ ID NO: 2792691 - DNA, 25 bp, Homo sapien
gtttataaatccagtgctagacagt

SEQ ID NO: 2792692 - DNA, 25 bp, Homo sapien
gcatggttaatgcagatcatgtgaa

SEQ ID NO: 2792693 - DNA, 25 bp, Homo sapien
caaaacatgaactcttggtagaaaa

SEQ ID NO: 2792694 - DNA, 25 bp, Homo sapien
tcacccgtatctctatgatgcaaag

SEQ ID NO: 2792695 - DNA, 25 bp, Homo sapien
gccaagagtatactccaagtaacaa

SEQ ID NO: 2792696 - DNA, 25 bp, Homo sapien
catttctaatagcatggccaagagt

SEQ ID NO: 2792697 - DNA, 25 bp, Homo sapien
acaagtggtcgccaagctggactgc

SEQ ID NO: 2792698 - DNA, 25 bp, Homo sapien
ttgaaggctattagtctgggaaacc

SEQ ID NO: 2792699 - DNA, 25 bp, Homo sapien
tctctctagatctgtgcgccgtaag

SEQ ID NO: 2792700 - DNA, 25 bp, Homo sapien
tgggaaacctacaagaacattgccg

SEQ ID NO: 2792701 - DNA, 25 bp, Homo sapien
cattgccgtagggaagctcaagtat

SEQ ID NO: 2792702 - DNA, 25 bp, Homo sapien
tactcaatgcgccaagaagtgctat

SEQ ID NO: 2792703 - DNA, 25 bp, Homo sapien
cactgatgcggaagacaaactggct

SEQ ID NO: 2792704 - DNA, 25 bp, Homo sapien
cattgcaggtagaggtccgtctcca

SEQ ID NO: 2792705 - DNA, 25 bp, Homo sapien
taagaacccatacagcgtgcattgc

SEQ ID NO: 2792706 - DNA, 25 bp, Homo sapien
gaagactccaagttgctcctgggtg

SEQ ID NO: 2792707 - DNA, 25 bp, Homo sapien
gcaggcaattactctatcagtgaat

SEQ ID NO: 2792708 - DNA, 25 bp, Homo sapien
tagacctgcatagatataagtaccc

SEQ ID NO: 2792709 - DNA, 25 bp, Homo sapien
aaactaatgtgctccgctatgcggc

SEQ ID NO: 2792710 - DNA, 25 bp, Homo sapien
tggtaaggcatctgcaataaccgtc

SEQ ID NO: 2792711 - DNA, 25 bp, Homo sapien
cattagttgaaggagcccaagggtt

SEQ ID NO: 2792712 - DNA, 25 bp, Homo sapien
tttgcaggaagcatgtgcgctggca

SEQ ID NO: 2792713 - DNA, 25 bp, Homo sapien
tatctcaggattttacttggcgtgc

SEQ ID NO: 2792714 - DNA, 25 bp, Homo sapien
caacttgccattacatgaactaagt

SEQ ID NO: 2792715 - DNA, 25 bp, Homo sapien
aggaaatggccctgtgcaaactcac

SEQ ID NO: 2792716 - DNA, 25 bp, Homo sapien
caagaatctttatcacaacagaatg

SEQ ID NO: 2792717 - DNA, 25 bp, Homo sapien
acatctgcattctagtgctacacag

SEQ ID NO: 2792718 - DNA, 25 bp, Homo sapien
tgaatggcatgattctctctcactg

SEQ ID NO: 2792719 - DNA, 25 bp, Homo sapien
tgagcttctactatggtgaattgat

SEQ ID NO: 2792720 - DNA, 25 bp, Homo sapien
aaacttctatttgaatggcatgatt

SEQ ID NO: 2792721 - DNA, 25 bp, Homo sapien
tatggtgaattgatgtgctggatgc

SEQ ID NO: 2792722 - DNA, 25 bp, Homo sapien
gagaagtaaacacaacttcattagg

SEQ ID NO: 2792723 - DNA, 25 bp, Homo sapien
aaacacaacttcattaggagagaag

SEQ ID NO: 2792724 - DNA, 25 bp, Homo sapien
gtaaacacaacttcattaggagaga

SEQ ID NO: 2792725 - DNA, 25 bp, Homo sapien
gaagtaaacacaacttcattaggag

SEQ ID NO: 2792726 - DNA, 25 bp, Homo sapien
tccagctgagaatggggttcaggat

SEQ ID NO: 2792727 - DNA, 25 bp, Homo sapien
gaatggggttcaggataccgaatca

SEQ ID NO: 2792728 - DNA, 25 bp, Homo sapien
tggggttcaggataccgaatcaaca

SEQ ID NO: 2792729 - DNA, 25 bp, Homo sapien
ctgagaatggggttcaggataccga

SEQ ID NO: 2792730 - DNA, 25 bp, Homo sapien
ctcgttctggaattcctctatagcc

SEQ ID NO: 2792731 - DNA, 25 bp, Homo sapien
gcccatccgtactaccaggagactg

SEQ ID NO: 2792732 - DNA, 25 bp, Homo sapien
tggatccgcaaagtagacacttggt

SEQ ID NO: 2792733 - DNA, 25 bp, Homo sapien
gacacttggtctcatgaagccactg

SEQ ID NO: 2792734 - DNA, 25 bp, Homo sapien
acccatgctctgaggctctatgaaa

SEQ ID NO: 2792735 - DNA, 25 bp, Homo sapien
cccatgctctgaggctctatgaaac

SEQ ID NO: 2792736 - DNA, 25 bp, Homo sapien
tagggtcttaaccacattgcttgtt

SEQ ID NO: 2792737 - DNA, 25 bp, Homo sapien
tcccatgtattatctagggtcttaa

SEQ ID NO: 2792738 - DNA, 25 bp, Homo sapien
tgaaaatttctatcccttgaccaac

SEQ ID NO: 2792739 - DNA, 25 bp, Homo sapien
tgagccatctcgtctggccaattat

SEQ ID NO: 2792740 - DNA, 25 bp, Homo sapien
gacctactctctaagctgatttcaa

SEQ ID NO: 2792741 - DNA, 25 bp, Homo sapien
catgctctacgttaggtccccagaa

SEQ ID NO: 2792742 - DNA, 25 bp, Homo sapien
ggttcacctgggtcacaggagtaca

SEQ ID NO: 2792743 - DNA, 25 bp, Homo sapien
tgtaaggtctggttcacctgggtca

SEQ ID NO: 2792744 - DNA, 25 bp, Homo sapien
ggcagtttgtaaggtctggttcacc

SEQ ID NO: 2792745 - DNA, 25 bp, Homo sapien
ctgacaggcagtttgtaaggtctgg

SEQ ID NO: 2792746 - DNA, 25 bp, Homo sapien
tgttccatgaggaaagaagattgaa

SEQ ID NO: 2792747 - DNA, 25 bp, Homo sapien
ctgttccatgaggaaagaagattga

SEQ ID NO: 2792748 - DNA, 25 bp, Homo sapien
gttccatgaggaaagaagattgaac

SEQ ID NO: 2792749 - DNA, 25 bp, Homo sapien
ttcagatgaatttcctctctggcag

SEQ ID NO: 2792750 - DNA, 25 bp, Homo sapien
gacttaatcgctgctggtaaacact

SEQ ID NO: 2792751 - DNA, 25 bp, Homo sapien
gctgctggtaaacactatcactcat

SEQ ID NO: 2792752 - DNA, 25 bp, Homo sapien
gctctctgacttaatcgctgctggt

SEQ ID NO: 2792753 - DNA, 25 bp, Homo sapien
gactgtgttcctccatcgctgcatt

SEQ ID NO: 2792754 - DNA, 25 bp, Homo sapien
caatgaaaggatcaatcagctccgt

SEQ ID NO: 2792755 - DNA, 25 bp, Homo sapien
tcagctccgtaaatcagggtctcag

SEQ ID NO: 2792756 - DNA, 25 bp, Homo sapien
catctggtaggagtgtgttgcgaaa

SEQ ID NO: 2792757 - DNA, 25 bp, Homo sapien
gattgcttctaaatatctgtgagag

SEQ ID NO: 2792758 - DNA, 25 bp, Homo sapien
ctggacccagatgacccaaactgtg

SEQ ID NO: 2792759 - DNA, 25 bp, Homo sapien
cttttgaggattatggttccaggga

SEQ ID NO: 2792760 - DNA, 25 bp, Homo sapien
gaaatactttccagaattattgctg

SEQ ID NO: 2792761 - DNA, 25 bp, Homo sapien
gatcgaagttttcaatcaacaccct

SEQ ID NO: 2792762 - DNA, 25 bp, Homo sapien
gggagatcgaagttttcaatcaaca

SEQ ID NO: 2792763 - DNA, 25 bp, Homo sapien
gagaaatccgtcaaatcaaccgtga

SEQ ID NO: 2792764 - DNA, 25 bp, Homo sapien
attttctctgtgaacgaggtgagaa

SEQ ID NO: 2792765 - DNA, 25 bp, Homo sapien
gagattctccgtgagcgtgctccgt

SEQ ID NO: 2792766 - DNA, 25 bp, Homo sapien
gaaatcctccgaggttcccagtgag

SEQ ID NO: 2792767 - DNA, 25 bp, Homo sapien
gactaagcgatgtttctgaacggga

SEQ ID NO: 2792768 - DNA, 25 bp, Homo sapien
gattagcaagaacgctccgggtgcg

SEQ ID NO: 2792769 - DNA, 25 bp, Homo sapien
caaggtgccttcgtgtaagatatta

SEQ ID NO: 2792770 - DNA, 25 bp, Homo sapien
gacgctcgcctgctacatacttcaa

SEQ ID NO: 2792771 - DNA, 25 bp, Homo sapien
gactgatagagctgacttgtaagac

SEQ ID NO: 2792772 - DNA, 25 bp, Homo sapien
cgtgctagccatcgcaggacttaaa

SEQ ID NO: 2792773 - DNA, 25 bp, Homo sapien
gctggtccccatccgtcatccgctc

SEQ ID NO: 2792774 - DNA, 25 bp, Homo sapien
cccatccgtcatccgctctttctgc

SEQ ID NO: 2792775 - DNA, 25 bp, Homo sapien
tccgtcatccgctctttctgccact

SEQ ID NO: 2792776 - DNA, 25 bp, Homo sapien
ggtccccatccgtcatccgctcttt

SEQ ID NO: 2792777 - DNA, 25 bp, Homo sapien
tttcacatatctccttacagatttt

SEQ ID NO: 2792778 - DNA, 25 bp, Homo sapien
cttttcacatatctccttacagatt

SEQ ID NO: 2792779 - DNA, 25 bp, Homo sapien
tcttttcacatatctccttacagat

SEQ ID NO: 2792780 - DNA, 25 bp, Homo sapien
tcattattcccttgcaaccaatctt

SEQ ID NO: 2792781 - DNA, 25 bp, Homo sapien
tcagagaggaggctatataattcgg

SEQ ID NO: 2792782 - DNA, 25 bp, Homo sapien
tattagagaatcaagtcagccagct

SEQ ID NO: 2792783 - DNA, 25 bp, Homo sapien
tgtcttagcaagtggtcaacatgag

SEQ ID NO: 2792784 - DNA, 25 bp, Homo sapien
tatggcgtaacactttgtcagagag

SEQ ID NO: 2792785 - DNA, 25 bp, Homo sapien
gtgctgacccgagccacaatagagg

SEQ ID NO: 2792786 - DNA, 25 bp, Homo sapien
aacaagtgctgacccgagccacaat

SEQ ID NO: 2792787 - DNA, 25 bp, Homo sapien
aagtgctgacccgagccacaataga

SEQ ID NO: 2792788 - DNA, 25 bp, Homo sapien
ctaacaacaagtgctgacccgagcc

SEQ ID NO: 2792789 - DNA, 25 bp, Homo sapien
tggagaagatggaacggacaagtct

SEQ ID NO: 2792790 - DNA, 25 bp, Homo sapien
cagagggaacggtgcggataaagga

SEQ ID NO: 2792791 - DNA, 25 bp, Homo sapien
caagtctggtcgtggaaagatgccc

SEQ ID NO: 2792792 - DNA, 25 bp, Homo sapien
ggaatgagcaatgcatgggaaggaa

SEQ ID NO: 2792793 - DNA, 25 bp, Homo sapien
gcagtttagctcatgctctcctcca

SEQ ID NO: 2792794 - DNA, 25 bp, Homo sapien
cagtttagctcatgctctcctccat

SEQ ID NO: 2792795 - DNA, 25 bp, Homo sapien
tcttgttttagtataagcaacaagg

SEQ ID NO: 2792796 - DNA, 25 bp, Homo sapien
tagtttgctgtagattgatctttgc

SEQ ID NO: 2792797 - DNA, 25 bp, Homo sapien
tttaggtctcacattacttttgatt

SEQ ID NO: 2792798 - DNA, 25 bp, Homo sapien
taattgagtgatagtctagtttgct

SEQ ID NO: 2792799 - DNA, 25 bp, Homo sapien
tattgttactgtcaggtatgtctca

SEQ ID NO: 2792800 - DNA, 25 bp, Homo sapien
tgcacgttcttactcttgattcaag

SEQ ID NO: 2792801 - DNA, 25 bp, Homo sapien
agtcttagaatcacctcaccttgca

SEQ ID NO: 2792802 - DNA, 25 bp, Homo sapien
ttgcttggaaatgttgcctgtgcct

SEQ ID NO: 2792803 - DNA, 25 bp, Homo sapien
ggtctttgaattcttgctgacagtt

SEQ ID NO: 2792804 - DNA, 25 bp, Homo sapien
ttttgctctctggttgttttcatgg

SEQ ID NO: 2792805 - DNA, 25 bp, Homo sapien
tgctctctggttgttttcatgggac

SEQ ID NO: 2792806 - DNA, 25 bp, Homo sapien
tgaattcttgctgacagttgctttc

SEQ ID NO: 2792807 - DNA, 25 bp, Homo sapien
gaacctctgccggtacattcgaaca

SEQ ID NO: 2792808 - DNA, 25 bp, Homo sapien
gataccttagattggagcctgtgtc

SEQ ID NO: 2792809 - DNA, 25 bp, Homo sapien
tactccagggcataccagtcatact

SEQ ID NO: 2792810 - DNA, 25 bp, Homo sapien
taagtctagcaaccagcccttggag

SEQ ID NO: 2792811 - DNA, 25 bp, Homo sapien
tccctctttctctgctagtggatgg

SEQ ID NO: 2792812 - DNA, 25 bp, Homo sapien
ccacctctccagattccctctttct

SEQ ID NO: 2792813 - DNA, 25 bp, Homo sapien
attccctctttctctgctagtggat

SEQ ID NO: 2792814 - DNA, 25 bp, Homo sapien
ctccacctctccagattccctcttt

SEQ ID NO: 2792815 - DNA, 25 bp, Homo sapien
ctgtgagtcagaggcatctgtatcc

SEQ ID NO: 2792816 - DNA, 25 bp, Homo sapien
ttactgagaatctgtgagtcagagg

SEQ ID NO: 2792817 - DNA, 25 bp, Homo sapien
gggtccctggcacaaccctgattac

SEQ ID NO: 2792818 - DNA, 25 bp, Homo sapien
tggcacaaccctgattactgagaat

SEQ ID NO: 2792819 - DNA, 25 bp, Homo sapien
tgctacactccctactcctcctgtg

SEQ ID NO: 2792820 - DNA, 25 bp, Homo sapien
gcattgctacactccctactcctcc

SEQ ID NO: 2792821 - DNA, 25 bp, Homo sapien
tgctcttggagtattcttgagaact

SEQ ID NO: 2792822 - DNA, 25 bp, Homo sapien
ctcctgtgctcttggagtattcttg

SEQ ID NO: 2792823 - DNA, 25 bp, Homo sapien
tctgttgtccttaagatccacttca

SEQ ID NO: 2792824 - DNA, 25 bp, Homo sapien
ttccttataagagaatatctgttgt

SEQ ID NO: 2792825 - DNA, 25 bp, Homo sapien
tgtccttaagatccacttcaatctc

SEQ ID NO: 2792826 - DNA, 25 bp, Homo sapien
aagagaatatctgttgtccttaaga

SEQ ID NO: 2792827 - DNA, 25 bp, Homo sapien
ccattgatccatatttagggaaaag

SEQ ID NO: 2792828 - DNA, 25 bp, Homo sapien
caaagaagaggccacccattgatcc

SEQ ID NO: 2792829 - DNA, 25 bp, Homo sapien
ttaactagaactgctagggtcctcc

SEQ ID NO: 2792830 - DNA, 25 bp, Homo sapien
tgctagggtcctccaaggagtggat

SEQ ID NO: 2792831 - DNA, 25 bp, Homo sapien
agagcgcccctggtggcgagatccg

SEQ ID NO: 2792832 - DNA, 25 bp, Homo sapien
agcgcccctggtggcgagatccgga

SEQ ID NO: 2792833 - DNA, 25 bp, Homo sapien
gcgcccctggtggcgagatccggag

SEQ ID NO: 2792834 - DNA, 25 bp, Homo sapien
gaagagcgcccctggtggcgagatc

SEQ ID NO: 2792835 - DNA, 25 bp, Homo sapien
gagaaagggcgcaaatcagagccct

SEQ ID NO: 2792836 - DNA, 25 bp, Homo sapien
agggcgcaaatcagagccctcctgg

SEQ ID NO: 2792837 - DNA, 25 bp, Homo sapien
gcgggtgaagggctcggcggtgtct

SEQ ID NO: 2792838 - DNA, 25 bp, Homo sapien
gcggtgtctggcgtatgccaagcca

SEQ ID NO: 2792839 - DNA, 25 bp, Homo sapien
cttgggcaggtttgtgtctccctct

SEQ ID NO: 2792840 - DNA, 25 bp, Homo sapien
tgtgttccttcaatgagcatgtgtg

SEQ ID NO: 2792841 - DNA, 25 bp, Homo sapien
ggaacccaagatgtgttccttcaat

SEQ ID NO: 2792842 - DNA, 25 bp, Homo sapien
ctgttgtgctgtgaccaggtgaggg

SEQ ID NO: 2792843 - DNA, 25 bp, Homo sapien
aggtgaggggtggttggctgcagac

SEQ ID NO: 2792844 - DNA, 25 bp, Homo sapien
gcagacagcgcagtcctggcataca

SEQ ID NO: 2792845 - DNA, 25 bp, Homo sapien
tcctggcatacaggggaggagatgg

SEQ ID NO: 2792846 - DNA, 25 bp, Homo sapien
aagagcagtctaacttgtggtgaga

SEQ ID NO: 2792847 - DNA, 25 bp, Homo sapien
tattactgaagagcagtctaacttg

SEQ ID NO: 2792848 - DNA, 25 bp, Homo sapien
gcttggtgaagagatacagagcaga

SEQ ID NO: 2792849 - DNA, 25 bp, Homo sapien
ccacagatggcttggtgaagagata

SEQ ID NO: 2792850 - DNA, 25 bp, Homo sapien
gatctagctaatctcggtagatgtc

SEQ ID NO: 2792851 - DNA, 25 bp, Homo sapien
tccctggagtttggcttaagcaaca

SEQ ID NO: 2792852 - DNA, 25 bp, Homo sapien
tgtatgtggcatggcagaatgaaaa

SEQ ID NO: 2792853 - DNA, 25 bp, Homo sapien
gacaaactcttgtgtacctttgtgt

SEQ ID NO: 2792854 - DNA, 25 bp, Homo sapien
cattttggatagaccctccagctac

SEQ ID NO: 2792855 - DNA, 25 bp, Homo sapien
ggctctgtgtaggagggacccataa

SEQ ID NO: 2792856 - DNA, 25 bp, Homo sapien
gagaaagattcctactgtggcattg

SEQ ID NO: 2792857 - DNA, 25 bp, Homo sapien
tagtgcagttctcaattttgcccgc

SEQ ID NO: 2792858 - DNA, 25 bp, Homo sapien
ttcatccatctctttatagctctct

SEQ ID NO: 2792859 - DNA, 25 bp, Homo sapien
gttcatccatctctttatagctctc

SEQ ID NO: 2792860 - DNA, 25 bp, Homo sapien
aattggatgatagcatgctgggtgg

SEQ ID NO: 2792861 - DNA, 25 bp, Homo sapien
agttcatccatctctttatagctct

SEQ ID NO: 2792862 - DNA, 25 bp, Homo sapien
ttttattctcatattgctgttgcac

SEQ ID NO: 2792863 - DNA, 25 bp, Homo sapien
tgcatatatcttcctggaatcttac

SEQ ID NO: 2792864 - DNA, 25 bp, Homo sapien
cttgcatatatcttcctggaatctt

SEQ ID NO: 2792865 - DNA, 25 bp, Homo sapien
ttgcatatatcttcctggaatctta

SEQ ID NO: 2792866 - DNA, 25 bp, Homo sapien
gaccacagatagagttgaatgcaac

SEQ ID NO: 2792867 - DNA, 25 bp, Homo sapien
catggtgacataagaactcatgcag

SEQ ID NO: 2792868 - DNA, 25 bp, Homo sapien
gttatggttcgcagcactgactggc

SEQ ID NO: 2792869 - DNA, 25 bp, Homo sapien
ggatttgtcattccttggtctttga

SEQ ID NO: 2792870 - DNA, 25 bp, Homo sapien
tagttatgatcagtgacgatacaac

SEQ ID NO: 2792871 - DNA, 25 bp, Homo sapien
gacgatacaaccgaacgaccttcac

SEQ ID NO: 2792872 - DNA, 25 bp, Homo sapien
cctgtgggtgtctgcatcctctgag

SEQ ID NO: 2792873 - DNA, 25 bp, Homo sapien
ctggagggccacagtgctgacaggc

SEQ ID NO: 2792874 - DNA, 25 bp, Homo sapien
gaaggagcagttattgcagccccac

SEQ ID NO: 2792875 - DNA, 25 bp, Homo sapien
gggtttgttgctgcctgtgactagc

SEQ ID NO: 2792876 - DNA, 25 bp, Homo sapien
gccacttcttgagtgaacgacagaa

SEQ ID NO: 2792877 - DNA, 25 bp, Homo sapien
tacttcctcagaatgtcctgtatca

SEQ ID NO: 2792878 - DNA, 25 bp, Homo sapien
taggaggggtctgatgccatttctg

SEQ ID NO: 2792879 - DNA, 25 bp, Homo sapien
taacaacagcaagagggtagttgct

SEQ ID NO: 2792880 - DNA, 25 bp, Homo sapien
gccatttctgcaaagtatcaactag

SEQ ID NO: 2792881 - DNA, 25 bp, Homo sapien
tcaagatccataggaggggtctgat

SEQ ID NO: 2792882 - DNA, 25 bp, Homo sapien
ttattaccagttaatagcatttgta

SEQ ID NO: 2792883 - DNA, 25 bp, Homo sapien
ttagcttggtggcatggcaccagct

SEQ ID NO: 2792884 - DNA, 25 bp, Homo sapien
cttggtggcatggcaccagctagga

SEQ ID NO: 2792885 - DNA, 25 bp, Homo sapien
agcttggtggcatggcaccagctag

SEQ ID NO: 2792886 - DNA, 25 bp, Homo sapien
ttggtggcatggcaccagctaggaa

SEQ ID NO: 2792887 - DNA, 25 bp, Homo sapien
agtcctcagagcctccttgccttac

SEQ ID NO: 2792888 - DNA, 25 bp, Homo sapien
cagtcctcagagcctccttgcctta

SEQ ID NO: 2792889 - DNA, 25 bp, Homo sapien
tcagtcctcagagcctccttgcctt

SEQ ID NO: 2792890 - DNA, 25 bp, Homo sapien
atgatcaggcagtgtggcagctccc

SEQ ID NO: 2792891 - DNA, 25 bp, Homo sapien
tggccaaaggtgctgccgatctcct

SEQ ID NO: 2792892 - DNA, 25 bp, Homo sapien
cacgcgaatgatcaggcagtgtggc

SEQ ID NO: 2792893 - DNA, 25 bp, Homo sapien
ccgctgctgccacgcgaatgatcag

SEQ ID NO: 2792894 - DNA, 25 bp, Homo sapien
acctggaccagttccagtgccctca

SEQ ID NO: 2792895 - DNA, 25 bp, Homo sapien
ggaccagttccagtgccctcacttg

SEQ ID NO: 2792896 - DNA, 25 bp, Homo sapien
ccagttccagtgccctcacttgctc

SEQ ID NO: 2792897 - DNA, 25 bp, Homo sapien
gttccagtgccctcacttgctccat

SEQ ID NO: 2792898 - DNA, 25 bp, Homo sapien
ttctggcggcatccggtgagctctc

SEQ ID NO: 2792899 - DNA, 25 bp, Homo sapien
gatcccggagaagccggcgggagcc

SEQ ID NO: 2792900 - DNA, 25 bp, Homo sapien
tggcggcatccggtgagctctcgct

SEQ ID NO: 2792901 - DNA, 25 bp, Homo sapien
gaaagcgtcgcggttctggcggcat

SEQ ID NO: 2792902 - DNA, 25 bp, Homo sapien
gataaccagttgcactcatctttca

SEQ ID NO: 2792903 - DNA, 25 bp, Homo sapien
gtgtcttggctgatggataaccagt

SEQ ID NO: 2792904 - DNA, 25 bp, Homo sapien
ttctcttggaaggatctactgaacc

SEQ ID NO: 2792905 - DNA, 25 bp, Homo sapien
ccatggagtgctgttgatattcaat

SEQ ID NO: 2792906 - DNA, 25 bp, Homo sapien
gggacatgctttcccaaatgctagg

SEQ ID NO: 2792907 - DNA, 25 bp, Homo sapien
gattttgccctgagtctcatgagta

SEQ ID NO: 2792908 - DNA, 25 bp, Homo sapien
tgagtaaggtcacattacagtagac

SEQ ID NO: 2792909 - DNA, 25 bp, Homo sapien
tcccaaatgctaggacagattttgc

SEQ ID NO: 2792910 - DNA, 25 bp, Homo sapien
tttggagaatgagatcagtttttat

SEQ ID NO: 2792911 - DNA, 25 bp, Homo sapien
ttggagaatgagatcagtttttata

SEQ ID NO: 2792912 - DNA, 25 bp, Homo sapien
tatctggcatcacccctgttctgct

SEQ ID NO: 2792913 - DNA, 25 bp, Homo sapien
cataacatgtctttccccgtggtgg

SEQ ID NO: 2792914 - DNA, 25 bp, Homo sapien
ccccgtggtggattatctggcatca

SEQ ID NO: 2792915 - DNA, 25 bp, Homo sapien
gaggctcttgatgaccataacatgt

SEQ ID NO: 2792916 - DNA, 25 bp, Homo sapien
tctttatacatcctgggttcagaac

SEQ ID NO: 2792917 - DNA, 25 bp, Homo sapien
tttatacatcctgggttcagaaccc

SEQ ID NO: 2792918 - DNA, 25 bp, Homo sapien
ctgggttcagaacccttgggcgcaa

SEQ ID NO: 2792919 - DNA, 25 bp, Homo sapien
tacatcctgggttcagaacccttgg

SEQ ID NO: 2792920 - DNA, 25 bp, Homo sapien
ttggcagccagtctgagtcatttgc

SEQ ID NO: 2792921 - DNA, 25 bp, Homo sapien
acagccaaagggctgctcacaagat

SEQ ID NO: 2792922 - DNA, 25 bp, Homo sapien
acaggtgactcttggcagccagtct

SEQ ID NO: 2792923 - DNA, 25 bp, Homo sapien
gccaaagggctgctcacaagatgtt

SEQ ID NO: 2792924 - DNA, 25 bp, Homo sapien
cagatatttaagttgctggattcca

SEQ ID NO: 2792925 - DNA, 25 bp, Homo sapien
tgtgcagatatttaagttgctggat

SEQ ID NO: 2792926 - DNA, 25 bp, Homo sapien
gatatttaagttgctggattccaaa

SEQ ID NO: 2792927 - DNA, 25 bp, Homo sapien
ggattccaaagcatccccagggcac

SEQ ID NO: 2792928 - DNA, 25 bp, Homo sapien
ccttggcatagccacgaccctccat

SEQ ID NO: 2792929 - DNA, 25 bp, Homo sapien
gtcctggtggccagatcttttagtc

SEQ ID NO: 2792930 - DNA, 25 bp, Homo sapien
aatttcttcttaggagttctgggtg

SEQ ID NO: 2792931 - DNA, 25 bp, Homo sapien
cagatcttttagtccctccttggca

SEQ ID NO: 2792932 - DNA, 25 bp, Homo sapien
tgcaggcagcaagcacgttctatag

SEQ ID NO: 2792933 - DNA, 25 bp, Homo sapien
tcctctttgtcatcgcctagaggca

SEQ ID NO: 2792934 - DNA, 25 bp, Homo sapien
tgtcatcgcctagaggcatccatct

SEQ ID NO: 2792935 - DNA, 25 bp, Homo sapien
taggagatcggctccttgttcaggg

SEQ ID NO: 2792936 - DNA, 25 bp, Homo sapien
gaagcatgtctattccctggagttc

SEQ ID NO: 2792937 - DNA, 25 bp, Homo sapien
ggaaggaagcatgtctattccctgg

SEQ ID NO: 2792938 - DNA, 25 bp, Homo sapien
catcgcaatgttccctgataggcat

SEQ ID NO: 2792939 - DNA, 25 bp, Homo sapien
tattccctggagttcatcgcaatgt

SEQ ID NO: 2792940 - DNA, 25 bp, Homo sapien
gtgactacggatttggagatttctg

SEQ ID NO: 2792941 - DNA, 25 bp, Homo sapien
tgactacggatttggagatttctgt

SEQ ID NO: 2792942 - DNA, 25 bp, Homo sapien
ggtgactacggatttggagatttct

SEQ ID NO: 2792943 - DNA, 25 bp, Homo sapien
taacatatggcctccagctattgag

SEQ ID NO: 2792944 - DNA, 25 bp, Homo sapien
tctgacagtcctagatgtgaaaagc

SEQ ID NO: 2792945 - DNA, 25 bp, Homo sapien
tctacagggcattgccagccgagca

SEQ ID NO: 2792946 - DNA, 25 bp, Homo sapien
taacgagctttactatgggcactgc

SEQ ID NO: 2792947 - DNA, 25 bp, Homo sapien
ggcctctgaggtgctccttgtgaag

SEQ ID NO: 2792948 - DNA, 25 bp, Homo sapien
caggtctttcccgtgggcctctgag

SEQ ID NO: 2792949 - DNA, 25 bp, Homo sapien
aggtgctccttgtgaaggcagaagt

SEQ ID NO: 2792950 - DNA, 25 bp, Homo sapien
tcccgtgggcctctgaggtgctcct

SEQ ID NO: 2792951 - DNA, 25 bp, Homo sapien
taaatcacacaggattgacttatgt

SEQ ID NO: 2792952 - DNA, 25 bp, Homo sapien
caggattgacttatgtaaggataga

SEQ ID NO: 2792953 - DNA, 25 bp, Homo sapien
ccttggataaatcacacaggattga

SEQ ID NO: 2792954 - DNA, 25 bp, Homo sapien
acaatccttggataaatcacacagg

SEQ ID NO: 2792955 - DNA, 25 bp, Homo sapien
gagggtggctgtcatgtgaagtgct

SEQ ID NO: 2792956 - DNA, 25 bp, Homo sapien
tgtcgtgagatcagatgaaagagga

SEQ ID NO: 2792957 - DNA, 25 bp, Homo sapien
tctgtttacccaggatgcgaatccc

SEQ ID NO: 2792958 - DNA, 25 bp, Homo sapien
tcttctcccagggttgtcgtgagat

SEQ ID NO: 2792959 - DNA, 25 bp, Homo sapien
tggaagaatgatgctccgtgactgg

SEQ ID NO: 2792960 - DNA, 25 bp, Homo sapien
tgatgctccgtgactggcaaaacca

SEQ ID NO: 2792961 - DNA, 25 bp, Homo sapien
taatatactctctgcctagtttctt

SEQ ID NO: 2792962 - DNA, 25 bp, Homo sapien
tttaatatactctctgcctagtttc

SEQ ID NO: 2792963 - DNA, 25 bp, Homo sapien
tggagaccacagtcaggagggaccc

SEQ ID NO: 2792964 - DNA, 25 bp, Homo sapien
tgcacttcctgagagaaactcagcc

SEQ ID NO: 2792965 - DNA, 25 bp, Homo sapien
ctggagaccacagtcaggagggacc

SEQ ID NO: 2792966 - DNA, 25 bp, Homo sapien
aactcagccagacggcaaggctgcc

SEQ ID NO: 2792967 - DNA, 25 bp, Homo sapien
gatagctccacctgtcgcctctgtg

SEQ ID NO: 2792968 - DNA, 25 bp, Homo sapien
cattcactgccccacatcggtggag

SEQ ID NO: 2792969 - DNA, 25 bp, Homo sapien
tcacccatcaggctgccaatggggg

SEQ ID NO: 2792970 - DNA, 25 bp, Homo sapien
tggtttcctctggagctgatagctc

SEQ ID NO: 2792971 - DNA, 25 bp, Homo sapien
ccttcttcctggatctgctgtcttc

SEQ ID NO: 2792972 - DNA, 25 bp, Homo sapien
ttgtccttgtgtttcatgcataatg

SEQ ID NO: 2792973 - DNA, 25 bp, Homo sapien
gaagaaacagccctacattatcacc

SEQ ID NO: 2792974 - DNA, 25 bp, Homo sapien
ccttgtgtttcatgcataatgaaac

SEQ ID NO: 2792975 - DNA, 25 bp, Homo sapien
tgaggtctcgtctgaaagctgagtg

SEQ ID NO: 2792976 - DNA, 25 bp, Homo sapien
cagggatccaggcaggacttaactg

SEQ ID NO: 2792977 - DNA, 25 bp, Homo sapien
caaagtgtcaaccagggctgaggtc

SEQ ID NO: 2792978 - DNA, 25 bp, Homo sapien
tcctgtctatgtgggcctccgagtg

SEQ ID NO: 2792979 - DNA, 25 bp, Homo sapien
catcagatgcacttaaggtaggagc

SEQ ID NO: 2792980 - DNA, 25 bp, Homo sapien
tctgggtccagttgttacaaagact

SEQ ID NO: 2792981 - DNA, 25 bp, Homo sapien
tgcacttaaggtaggagctgtttcc

SEQ ID NO: 2792982 - DNA, 25 bp, Homo sapien
gactcagcctagcacctttacttct

SEQ ID NO: 2792983 - DNA, 25 bp, Homo sapien
tagctggctgctaatctcggcacgc

SEQ ID NO: 2792984 - DNA, 25 bp, Homo sapien
gatgcttggcttaacctctgttggc

SEQ ID NO: 2792985 - DNA, 25 bp, Homo sapien
ctcggcacgcaggtcagattgaact

SEQ ID NO: 2792986 - DNA, 25 bp, Homo sapien
gactcaagcatgatgggaggctcct

SEQ ID NO: 2792987 - DNA, 25 bp, Homo sapien
tgtagcatcctggatgtgactgagc

SEQ ID NO: 2792988 - DNA, 25 bp, Homo sapien
tagcatcctggatgtgactgagctg

SEQ ID NO: 2792989 - DNA, 25 bp, Homo sapien
ccttgtagcatcctggatgtgactg

SEQ ID NO: 2792990 - DNA, 25 bp, Homo sapien
gtgggctcttgggcaagcagcaatt

SEQ ID NO: 2792991 - DNA, 25 bp, Homo sapien
ctagggccttctaggtgggaatcta

SEQ ID NO: 2792992 - DNA, 25 bp, Homo sapien
ggtttcttatttgcaagcctaactg

SEQ ID NO: 2792993 - DNA, 25 bp, Homo sapien
tctagttgtgatgtccctgcttcct

SEQ ID NO: 2792994 - DNA, 25 bp, Homo sapien
ggtgggaatctactccatccctgtt

SEQ ID NO: 2792995 - DNA, 25 bp, Homo sapien
ttgtttgctatcatcaggcaggctg

SEQ ID NO: 2792996 - DNA, 25 bp, Homo sapien
ggcaggctgtccataagcaggtgct

SEQ ID NO: 2792997 - DNA, 25 bp, Homo sapien
aggtgctcagccagtgccccgggat

SEQ ID NO: 2792998 - DNA, 25 bp, Homo sapien
ccagtgccccgggatgagtgtgcat

SEQ ID NO: 2792999 - DNA, 25 bp, Homo sapien
cagcatgcagttccaaagcccctgg

SEQ ID NO: 2793000 - DNA, 25 bp, Homo sapien
tccaaagcccctgggttgggcgcca

SEQ ID NO: 2793001 - DNA, 25 bp, Homo sapien
tgcagttccaaagcccctgggttgg

SEQ ID NO: 2793002 - DNA, 25 bp, Homo sapien
caaagcccctgggttgggcgccaga

SEQ ID NO: 2793003 - DNA, 25 bp, Homo sapien
ggaatcacatgggttgctgtgagcc

SEQ ID NO: 2793004 - DNA, 25 bp, Homo sapien
tatactcgtaacaaagatctcaggg

SEQ ID NO: 2793005 - DNA, 25 bp, Homo sapien
gcagagtggctccttgcaagtatca

SEQ ID NO: 2793006 - DNA, 25 bp, Homo sapien
gcaagtatcacggaatcacatgggt

SEQ ID NO: 2793007 - DNA, 25 bp, Homo sapien
gcgctccagcaaccaggtgtcaggg

SEQ ID NO: 2793008 - DNA, 25 bp, Homo sapien
tgtcagggacataatcgagccagga

SEQ ID NO: 2793009 - DNA, 25 bp, Homo sapien
tagagttagtgcttccagcagtgct

SEQ ID NO: 2793010 - DNA, 25 bp, Homo sapien
taattgctagacgtttcagtctctg

SEQ ID NO: 2793011 - DNA, 25 bp, Homo sapien
tgagatgcccatcacgtgcaggact

SEQ ID NO: 2793012 - DNA, 25 bp, Homo sapien
ctccactgtggtgtcaaggggcctc

SEQ ID NO: 2793013 - DNA, 25 bp, Homo sapien
ggactggcgtattgtaaatgctctg

SEQ ID NO: 2793014 - DNA, 25 bp, Homo sapien
gcccatggagcacagtcttctgaga

SEQ ID NO: 2793015 - DNA, 25 bp, Homo sapien
tctatctctttcaccaagttttggc

SEQ ID NO: 2793016 - DNA, 25 bp, Homo sapien
cctgaggctgggttcatctattcct

SEQ ID NO: 2793017 - DNA, 25 bp, Homo sapien
cagttgctccttggaagggtttttg

SEQ ID NO: 2793018 - DNA, 25 bp, Homo sapien
gttgaggaatgatacagttgctcct

SEQ ID NO: 2793019 - DNA, 25 bp, Homo sapien
atggactcttcccttgcgacctcat

SEQ ID NO: 2793020 - DNA, 25 bp, Homo sapien
gctgagctctctgcggctgagtgca

SEQ ID NO: 2793021 - DNA, 25 bp, Homo sapien
ttcttctctaatttcatggactctt

SEQ ID NO: 2793022 - DNA, 25 bp, Homo sapien
gcgacctcatcgttatcagctgcat

SEQ ID NO: 2793023 - DNA, 25 bp, Homo sapien
gattccacccaaccagggagaggat

SEQ ID NO: 2793024 - DNA, 25 bp, Homo sapien
cagaatcataggaaacctcatcagt

SEQ ID NO: 2793025 - DNA, 25 bp, Homo sapien
ggtcctctgagacttccttaccagc

SEQ ID NO: 2793026 - DNA, 25 bp, Homo sapien
acagaactgtcccatggtcaacgat

SEQ ID NO: 2793027 - DNA, 25 bp, Homo sapien
tcaccaggatcgtgcttttctgaag

SEQ ID NO: 2793028 - DNA, 25 bp, Homo sapien
gagagggtctatattacatagcaca

SEQ ID NO: 2793029 - DNA, 25 bp, Homo sapien
cactacaggcattcgtgaaaaatgt

SEQ ID NO: 2793030 - DNA, 25 bp, Homo sapien
gatgagagcaagagattagggtctc

SEQ ID NO: 2793031 - DNA, 25 bp, Homo sapien
aacacattcgctcatgggatacgtc

SEQ ID NO: 2793032 - DNA, 25 bp, Homo sapien
acgtcagcgttcagaacgtaatagc

SEQ ID NO: 2793033 - DNA, 25 bp, Homo sapien
cagggacatgagaaatggcctgcag

SEQ ID NO: 2793034 - DNA, 25 bp, Homo sapien
agaaatggcctgcagtttgtcaatg

SEQ ID NO: 2793035 - DNA, 25 bp, Homo sapien
aaagctggcagactgaagactaacc

SEQ ID NO: 2793036 - DNA, 25 bp, Homo sapien
gactgaagactaaccccagattgca

SEQ ID NO: 2793037 - DNA, 25 bp, Homo sapien
gagtgtgtttgttgttcccgttatg

SEQ ID NO: 2793038 - DNA, 25 bp, Homo sapien
tgttcccgttatggaacaataatca

SEQ ID NO: 2793039 - DNA, 25 bp, Homo sapien
gttctgcatacctggagcctagagc

SEQ ID NO: 2793040 - DNA, 25 bp, Homo sapien
cactaggtgcttctggtaaagtctt

SEQ ID NO: 2793041 - DNA, 25 bp, Homo sapien
tgggagaagagcaattccggctgct

SEQ ID NO: 2793042 - DNA, 25 bp, Homo sapien
tatattggtgggctttgtagttact

SEQ ID NO: 2793043 - DNA, 25 bp, Homo sapien
cgatgcaggtagcaaaggacagaca

SEQ ID NO: 2793044 - DNA, 25 bp, Homo sapien
agcgatgcaggtagcaaaggacaga

SEQ ID NO: 2793045 - DNA, 25 bp, Homo sapien
gagcgatgcaggtagcaaaggacag

SEQ ID NO: 2793046 - DNA, 25 bp, Homo sapien
gcgatgcaggtagcaaaggacagac

SEQ ID NO: 2793047 - DNA, 25 bp, Homo sapien
agccacttcttgcatcgataacctt

SEQ ID NO: 2793048 - DNA, 25 bp, Homo sapien
cacttcttgcatcgataaccttctg

SEQ ID NO: 2793049 - DNA, 25 bp, Homo sapien
ttcttgcatcgataaccttctgtca

SEQ ID NO: 2793050 - DNA, 25 bp, Homo sapien
cttgcatcgataaccttctgtcata

SEQ ID NO: 2793051 - DNA, 25 bp, Homo sapien
catctgctgctacccaatctagatt

SEQ ID NO: 2793052 - DNA, 25 bp, Homo sapien
ttgatatttcagctgggaatgaggc

SEQ ID NO: 2793053 - DNA, 25 bp, Homo sapien
ttcttgaacaaactgtagtctttga

SEQ ID NO: 2793054 - DNA, 25 bp, Homo sapien
catgaggcttggagtgtagctcttc

SEQ ID NO: 2793055 - DNA, 25 bp, Homo sapien
tctacttgtgtcatccactggtgcc

SEQ ID NO: 2793056 - DNA, 25 bp, Homo sapien
gatgttcccatggtaacaagctgta

SEQ ID NO: 2793057 - DNA, 25 bp, Homo sapien
tggaattccaaagggcccaagtatg

SEQ ID NO: 2793058 - DNA, 25 bp, Homo sapien
taagttcagcaaccattgtatcacg

SEQ ID NO: 2793059 - DNA, 25 bp, Homo sapien
ccatgaagtacctgagagtggctct

SEQ ID NO: 2793060 - DNA, 25 bp, Homo sapien
gctctgcttgggcaggtcttggcat

SEQ ID NO: 2793061 - DNA, 25 bp, Homo sapien
gataaggccttgtgaatccaaatac

SEQ ID NO: 2793062 - DNA, 25 bp, Homo sapien
ggctgaaggtgatgtcctctattcc

SEQ ID NO: 2793063 - DNA, 25 bp, Homo sapien
tgccccccgcagggagataactgag

SEQ ID NO: 2793064 - DNA, 25 bp, Homo sapien
gccccccgcagggagataactgagc

SEQ ID NO: 2793065 - DNA, 25 bp, Homo sapien
ttgccccccgcagggagataactga

SEQ ID NO: 2793066 - DNA, 25 bp, Homo sapien
aattctacattctggacagttcctg

SEQ ID NO: 2793067 - DNA, 25 bp, Homo sapien
aaccccagagcactttccagatcct

SEQ ID NO: 2793068 - DNA, 25 bp, Homo sapien
tgcatctttggctggcaaccccaga

SEQ ID NO: 2793069 - DNA, 25 bp, Homo sapien
tcaccagatctctggccattcctaa

SEQ ID NO: 2793070 - DNA, 25 bp, Homo sapien
cacatttcttgctaaattagtgtgg

SEQ ID NO: 2793071 - DNA, 25 bp, Homo sapien
caggtaggattctgggctcaacagt

SEQ ID NO: 2793072 - DNA, 25 bp, Homo sapien
tcaacagtcacatttcttgctaaat

SEQ ID NO: 2793073 - DNA, 25 bp, Homo sapien
ttgctaaattagtgtggtcccaggg

SEQ ID NO: 2793074 - DNA, 25 bp, Homo sapien
ggaggtaccgctcttttctacgcta

SEQ ID NO: 2793075 - DNA, 25 bp, Homo sapien
tcccagacagtatcagatccagcct

SEQ ID NO: 2793076 - DNA, 25 bp, Homo sapien
cttggctgggacaatctctgttttc

SEQ ID NO: 2793077 - DNA, 25 bp, Homo sapien
tctacgctataaatgactgaccagt

SEQ ID NO: 2793078 - DNA, 25 bp, Homo sapien
caggacttagcgctggctctgaacg

SEQ ID NO: 2793079 - DNA, 25 bp, Homo sapien
gatagcactataaaagggccacagg

SEQ ID NO: 2793080 - DNA, 25 bp, Homo sapien
gctctgaacgtctaccagacagcag

SEQ ID NO: 2793081 - DNA, 25 bp, Homo sapien
cattatcgtgagatgaggccatggc

SEQ ID NO: 2793082 - DNA, 25 bp, Homo sapien
tgagcaacaaaaagatttattttgt

SEQ ID NO: 2793083 - DNA, 25 bp, Homo sapien
tggcagaaagcagtggtagaataac

SEQ ID NO: 2793084 - DNA, 25 bp, Homo sapien
gtttggcagaaagcagtggtagaat

SEQ ID NO: 2793085 - DNA, 25 bp, Homo sapien
gaaagcagtggtagaataaccaatt

SEQ ID NO: 2793086 - DNA, 25 bp, Homo sapien
gaagggtccacaattgtctcctaga

SEQ ID NO: 2793087 - DNA, 25 bp, Homo sapien
gagagaaggaaccaaccgtctttca

SEQ ID NO: 2793088 - DNA, 25 bp, Homo sapien
aatagtcagatccttccagtgggcc

SEQ ID NO: 2793089 - DNA, 25 bp, Homo sapien
cccttggaattggatcatgtgagcc

SEQ ID NO: 2793090 - DNA, 25 bp, Homo sapien
tgccttgctgtaaggtcggctgaat

SEQ ID NO: 2793091 - DNA, 25 bp, Homo sapien
cttgctgtaaggtcggctgaatgga

SEQ ID NO: 2793092 - DNA, 25 bp, Homo sapien
taaggtcggctgaatggaaagagac

SEQ ID NO: 2793093 - DNA, 25 bp, Homo sapien
tgactgccttgctgtaaggtcggct

SEQ ID NO: 2793094 - DNA, 25 bp, Homo sapien
ctccttcccactccccattagccat

SEQ ID NO: 2793095 - DNA, 25 bp, Homo sapien
cctgttgatgcacggcctggttagg

SEQ ID NO: 2793096 - DNA, 25 bp, Homo sapien
gccgctttacattccctgtttgctg

SEQ ID NO: 2793097 - DNA, 25 bp, Homo sapien
acttccttgaaatgggcttcttgaa

SEQ ID NO: 2793098 - DNA, 25 bp, Homo sapien
tgttctagcctctggaaggttgtat

SEQ ID NO: 2793099 - DNA, 25 bp, Homo sapien
aaggcaaatagctctttaactacaa

SEQ ID NO: 2793100 - DNA, 25 bp, Homo sapien
actgagtcatcaggaaaaagctgta

SEQ ID NO: 2793101 - DNA, 25 bp, Homo sapien
gctctttaactacaacgtgaaactg

SEQ ID NO: 2793102 - DNA, 25 bp, Homo sapien
ctacaacgtgaaactgagtcatcag

SEQ ID NO: 2793103 - DNA, 25 bp, Homo sapien
gcacgtagggaacataggcatgaac

SEQ ID NO: 2793104 - DNA, 25 bp, Homo sapien
tctgaaagcacgtagggaacatagg

SEQ ID NO: 2793105 - DNA, 25 bp, Homo sapien
ttctttctgaaagcacgtagggaac

SEQ ID NO: 2793106 - DNA, 25 bp, Homo sapien
aaagcacgtagggaacataggcatg

SEQ ID NO: 2793107 - DNA, 25 bp, Homo sapien
tgcctgcttatagggctctgggaga

SEQ ID NO: 2793108 - DNA, 25 bp, Homo sapien
cctgttctcgggtcacattcagacc

SEQ ID NO: 2793109 - DNA, 25 bp, Homo sapien
ggagaaccttgcctgcttatagggc

SEQ ID NO: 2793110 - DNA, 25 bp, Homo sapien
tcctgttctcgggtcacattcagac

SEQ ID NO: 2793111 - DNA, 25 bp, Homo sapien
ggagatctagatgctggtaaaatgg

SEQ ID NO: 2793112 - DNA, 25 bp, Homo sapien
gaaggagatctagatgctggtaaaa

SEQ ID NO: 2793113 - DNA, 25 bp, Homo sapien
cagaaggagatctagatgctggtaa

SEQ ID NO: 2793114 - DNA, 25 bp, Homo sapien
ctcagaaggagatctagatgctggt

SEQ ID NO: 2793115 - DNA, 25 bp, Homo sapien
tgtatgtgcctggaccatagagaat

SEQ ID NO: 2793116 - DNA, 25 bp, Homo sapien
catagagaatggactaggttggaaa

SEQ ID NO: 2793117 - DNA, 25 bp, Homo sapien
ctgtggcttcgacctgactgtatgt

SEQ ID NO: 2793118 - DNA, 25 bp, Homo sapien
gacctgactgtatgtgcctggacca

SEQ ID NO: 2793119 - DNA, 25 bp, Homo sapien
ctttccattgtgttgggaggcctgg

SEQ ID NO: 2793120 - DNA, 25 bp, Homo sapien
ggcctggttctttgctcaagcttaa

SEQ ID NO: 2793121 - DNA, 25 bp, Homo sapien
taaatgaaggcacaagactattgca

SEQ ID NO: 2793122 - DNA, 25 bp, Homo sapien
tgcccatgcaggagtggccttctgt

SEQ ID NO: 2793123 - DNA, 25 bp, Homo sapien
acagctctccccattagtgttatga

SEQ ID NO: 2793124 - DNA, 25 bp, Homo sapien
agctctccccattagtgttatgaaa

SEQ ID NO: 2793125 - DNA, 25 bp, Homo sapien
cagctctccccattagtgttatgaa

SEQ ID NO: 2793126 - DNA, 25 bp, Homo sapien
caaggccttgccttggtcttcagcc

SEQ ID NO: 2793127 - DNA, 25 bp, Homo sapien
ttggtcttcagccccctgagcttca

SEQ ID NO: 2793128 - DNA, 25 bp, Homo sapien
acctccaaggccttgccttggtctt

SEQ ID NO: 2793129 - DNA, 25 bp, Homo sapien
ctccaaggccttgccttggtcttca

SEQ ID NO: 2793130 - DNA, 25 bp, Homo sapien
cactgatctctatgaacatcagctt

SEQ ID NO: 2793131 - DNA, 25 bp, Homo sapien
gatctctatgaacatcagctttgtg

SEQ ID NO: 2793132 - DNA, 25 bp, Homo sapien
agccactgatctctatgaacatcag

SEQ ID NO: 2793133 - DNA, 25 bp, Homo sapien
tatgaacatcagctttgtgtcgacg

SEQ ID NO: 2793134 - DNA, 25 bp, Homo sapien
ctgccccctgcagtccccggggaca

SEQ ID NO: 2793135 - DNA, 25 bp, Homo sapien
ggctgtctccagcaagctgtccatc

SEQ ID NO: 2793136 - DNA, 25 bp, Homo sapien
agggctgtctccagcaagctgtcca

SEQ ID NO: 2793137 - DNA, 25 bp, Homo sapien
agagctgagcgctgctctgccccct

SEQ ID NO: 2793138 - DNA, 25 bp, Homo sapien
agcttccttgagaaatcggcaggca

SEQ ID NO: 2793139 - DNA, 25 bp, Homo sapien
agcagcttccttgagaaatcggcag

SEQ ID NO: 2793140 - DNA, 25 bp, Homo sapien
cttccttgagaaatcggcaggcacc

SEQ ID NO: 2793141 - DNA, 25 bp, Homo sapien
cagcttccttgagaaatcggcaggc

SEQ ID NO: 2793142 - DNA, 25 bp, Homo sapien
tgggataagttcaccagtgacagtg

SEQ ID NO: 2793143 - DNA, 25 bp, Homo sapien
cttgcaagggtggaagacaagcaca

SEQ ID NO: 2793144 - DNA, 25 bp, Homo sapien
tctcagaagacaccttgcaagggtg

SEQ ID NO: 2793145 - DNA, 25 bp, Homo sapien
tgacagtgtcaagctctcagaagac

SEQ ID NO: 2793146 - DNA, 25 bp, Homo sapien
catatacttaaaaggaagtagattt

SEQ ID NO: 2793147 - DNA, 25 bp, Homo sapien
ttgaagtttcatatacttaaaagga

SEQ ID NO: 2793148 - DNA, 25 bp, Homo sapien
tcatatacttaaaaggaagtagatt

SEQ ID NO: 2793149 - DNA, 25 bp, Homo sapien
tgtgacgagtctggttatcatccca

SEQ ID NO: 2793150 - DNA, 25 bp, Homo sapien
gtttctgaggcctactgcacacagg

SEQ ID NO: 2793151 - DNA, 25 bp, Homo sapien
tccaggttgcgatactctctgtgag

SEQ ID NO: 2793152 - DNA, 25 bp, Homo sapien
tgtgttctggagtgcacaagtgtga

SEQ ID NO: 2793153 - DNA, 25 bp, Homo sapien
tgagggcgtcattccatctaccact

SEQ ID NO: 2793154 - DNA, 25 bp, Homo sapien
cctttgtgcaacctggactgttcag

SEQ ID NO: 2793155 - DNA, 25 bp, Homo sapien
gctcccagctggatgaaactacttg

SEQ ID NO: 2793156 - DNA, 25 bp, Homo sapien
ggcacctggtgacagaatacactca

SEQ ID NO: 2793157 - DNA, 25 bp, Homo sapien
gctattctcacgatagtgagatctc

SEQ ID NO: 2793158 - DNA, 25 bp, Homo sapien
tgtcccaccggcaatctcgtgtcga

SEQ ID NO: 2793159 - DNA, 25 bp, Homo sapien
ggcaatctcgtgtcgaattgtaatc

SEQ ID NO: 2793160 - DNA, 25 bp, Homo sapien
ttggatttgtgtcccaccggcaatc

SEQ ID NO: 2793161 - DNA, 25 bp, Homo sapien
agcccacccatctattactggcaga

SEQ ID NO: 2793162 - DNA, 25 bp, Homo sapien
taggaggcaagtttttaagatcttc

SEQ ID NO: 2793163 - DNA, 25 bp, Homo sapien
tactggcagaagtatatactggtac

SEQ ID NO: 2793164 - DNA, 25 bp, Homo sapien
tactggtacaacacctataggaggc

SEQ ID NO: 2793165 - DNA, 25 bp, Homo sapien
tatgaacctttattgatctcctgag

SEQ ID NO: 2793166 - DNA, 25 bp, Homo sapien
cacatcttgaagagttaagccaata

SEQ ID NO: 2793167 - DNA, 25 bp, Homo sapien
gacacactgagaggaaatatctgca

SEQ ID NO: 2793168 - DNA, 25 bp, Homo sapien
gaatgagagatcctttctaagacag

SEQ ID NO: 2793169 - DNA, 25 bp, Homo sapien
tccagcttccgggccgcgggcgaga

SEQ ID NO: 2793170 - DNA, 25 bp, Homo sapien
tccgggccgcgggcgagatgatttg

SEQ ID NO: 2793171 - DNA, 25 bp, Homo sapien
gcttccgggccgcgggcgagatgat

SEQ ID NO: 2793172 - DNA, 25 bp, Homo sapien
cagcttccgggccgcgggcgagatg

SEQ ID NO: 2793173 - DNA, 25 bp, Homo sapien
ctgcggtctctacggcagcccgagg

SEQ ID NO: 2793174 - DNA, 25 bp, Homo sapien
gcggacaaagggcgttcacgcagcc

SEQ ID NO: 2793175 - DNA, 25 bp, Homo sapien
gtccgcactgcggtctctacggcag

SEQ ID NO: 2793176 - DNA, 25 bp, Homo sapien
tgggcgtggtgcagtccgcactgcg

SEQ ID NO: 2793177 - DNA, 25 bp, Homo sapien
ggactccttagcaaggctgcccact

SEQ ID NO: 2793178 - DNA, 25 bp, Homo sapien
tataagaaggaggttcaggaatccc

SEQ ID NO: 2793179 - DNA, 25 bp, Homo sapien
tcatctagaacctggaagtcaggtt

SEQ ID NO: 2793180 - DNA, 25 bp, Homo sapien
cacttgggagctggcaattttaccc

SEQ ID NO: 2793181 - DNA, 25 bp, Homo sapien
cagctctgttgggatctgaggtgag

SEQ ID NO: 2793182 - DNA, 25 bp, Homo sapien
tctcctctacccccagctctgttgg

SEQ ID NO: 2793183 - DNA, 25 bp, Homo sapien
ctctgttgggatctgaggtgaggcg

SEQ ID NO: 2793184 - DNA, 25 bp, Homo sapien
gagacaactgtccagctcaggctgt

SEQ ID NO: 2793185 - DNA, 25 bp, Homo sapien
tctgataccctgcagtaagcttctt

SEQ ID NO: 2793186 - DNA, 25 bp, Homo sapien
tatctgataccctgcagtaagcttc

SEQ ID NO: 2793187 - DNA, 25 bp, Homo sapien
aggtatctgataccctgcagtaagc

SEQ ID NO: 2793188 - DNA, 25 bp, Homo sapien
aggaggtatctgataccctgcagta

SEQ ID NO: 2793189 - DNA, 25 bp, Homo sapien
gatttcctccttgtggagtagaccc

SEQ ID NO: 2793190 - DNA, 25 bp, Homo sapien
ccttgtggagtagacccagtagcta

SEQ ID NO: 2793191 - DNA, 25 bp, Homo sapien
ccagtagctatgagattgagggtca

SEQ ID NO: 2793192 - DNA, 25 bp, Homo sapien
cacctggattagactggctttggaa

SEQ ID NO: 2793193 - DNA, 25 bp, Homo sapien
cagatcagaccctcttgtgaggtga

SEQ ID NO: 2793194 - DNA, 25 bp, Homo sapien
tctagtttccctggaacagagtcat

SEQ ID NO: 2793195 - DNA, 25 bp, Homo sapien
gaaaggcagctggtgagctatttct

SEQ ID NO: 2793196 - DNA, 25 bp, Homo sapien
ccatatttggatcccagaatgttcc

SEQ ID NO: 2793197 - DNA, 25 bp, Homo sapien
tcacgtggcgtgttctccctgtttg

SEQ ID NO: 2793198 - DNA, 25 bp, Homo sapien
tctgaggtttccacgtggacatttg

SEQ ID NO: 2793199 - DNA, 25 bp, Homo sapien
tcctaggctcaatacttggcgtact

SEQ ID NO: 2793200 - DNA, 25 bp, Homo sapien
tatctacctccagtgtcacgtggcg

SEQ ID NO: 2793201 - DNA, 25 bp, Homo sapien
ctttctcggtaaagctgaatcagaa

SEQ ID NO: 2793202 - DNA, 25 bp, Homo sapien
taagggcagtgtgcagacccctttc

SEQ ID NO: 2793203 - DNA, 25 bp, Homo sapien
caggatcccggtacacgatgggcat

SEQ ID NO: 2793204 - DNA, 25 bp, Homo sapien
tcatgatcgtcaacagaatccaggg

SEQ ID NO: 2793205 - DNA, 25 bp, Homo sapien
gcactgatttcatgatcgtcaacag

SEQ ID NO: 2793206 - DNA, 25 bp, Homo sapien
tgaagaccacttgttgtccagctct

SEQ ID NO: 2793207 - DNA, 25 bp, Homo sapien
tggaccagtggttatcagccttttg

SEQ ID NO: 2793208 - DNA, 25 bp, Homo sapien
agccttttggagctaggattgccca

SEQ ID NO: 2793209 - DNA, 25 bp, Homo sapien
caggtatcattatggtcagagacca

SEQ ID NO: 2793210 - DNA, 25 bp, Homo sapien
tgttttatgactgagggctctgtcc

SEQ ID NO: 2793211 - DNA, 25 bp, Homo sapien
attctgttgtgtagttccaaggatg

SEQ ID NO: 2793212 - DNA, 25 bp, Homo sapien
gcccaattccatctgtctgttttat

SEQ ID NO: 2793213 - DNA, 25 bp, Homo sapien
ccaaggatgtaggagttgttcttcc

SEQ ID NO: 2793214 - DNA, 25 bp, Homo sapien
cacatcgggtggatttctgaagctc

SEQ ID NO: 2793215 - DNA, 25 bp, Homo sapien
catgttacagcggaaaattgcagag

SEQ ID NO: 2793216 - DNA, 25 bp, Homo sapien
ctctcagaatcagtggaagtcccat

SEQ ID NO: 2793217 - DNA, 25 bp, Homo sapien
tatgctcatcaatggcggatcagag

SEQ ID NO: 2793218 - DNA, 25 bp, Homo sapien
gaagtcaccaaaggtcctgccgagt

SEQ ID NO: 2793219 - DNA, 25 bp, Homo sapien
gaagcctacgtcatccagaaggaga

SEQ ID NO: 2793220 - DNA, 25 bp, Homo sapien
taagaagctccctaaagacgcaaag

SEQ ID NO: 2793221 - DNA, 25 bp, Homo sapien
gaactcgaagctgagaggtccctta

SEQ ID NO: 2793222 - DNA, 25 bp, Homo sapien
agttttgtctcctttacgcagcccg

SEQ ID NO: 2793223 - DNA, 25 bp, Homo sapien
ttcagtaagccccatggatgagccc

SEQ ID NO: 2793224 - DNA, 25 bp, Homo sapien
taagtgctgatgacaaggcttctgg

SEQ ID NO: 2793225 - DNA, 25 bp, Homo sapien
gaagaacattgtgctagtcctgagg

SEQ ID NO: 2793226 - DNA, 25 bp, Homo sapien
agctctctccaaaatctgatatctc

SEQ ID NO: 2793227 - DNA, 25 bp, Homo sapien
caccaatagatgcagcatccgcaga

SEQ ID NO: 2793228 - DNA, 25 bp, Homo sapien
tatgtccttatatgcctcactcacc

SEQ ID NO: 2793229 - DNA, 25 bp, Homo sapien
cctttatattcacctactttttcag

SEQ ID NO: 2793230 - DNA, 25 bp, Homo sapien
catggtaggctacttttcagggcct

SEQ ID NO: 2793231 - DNA, 25 bp, Homo sapien
tcagggccttgacaagtacatcacc

SEQ ID NO: 2793232 - DNA, 25 bp, Homo sapien
cataaaagtgctacttgagagtggg

SEQ ID NO: 2793233 - DNA, 25 bp, Homo sapien
gaagttctggcaagattgaagtctg

SEQ ID NO: 2793234 - DNA, 25 bp, Homo sapien
ggtacaagaaattaacacatgatgg

SEQ ID NO: 2793235 - DNA, 25 bp, Homo sapien
gggtacaagaaattaacacatgatg

SEQ ID NO: 2793236 - DNA, 25 bp, Homo sapien
taagggtacaagaaattaacacatg

SEQ ID NO: 2793237 - DNA, 25 bp, Homo sapien
aaattaacacatgatggaaaagtca

SEQ ID NO: 2793238 - DNA, 25 bp, Homo sapien
ctacataatgcgtgggaagaaaacc

SEQ ID NO: 2793239 - DNA, 25 bp, Homo sapien
tataacacaacctaagatactcaag

SEQ ID NO: 2793240 - DNA, 25 bp, Homo sapien
taggagaattatagccagtcttcag

SEQ ID NO: 2793241 - DNA, 25 bp, Homo sapien
ttcttgccaaatccagacctctggt

SEQ ID NO: 2793242 - DNA, 25 bp, Homo sapien
tgagagctaaagatcgacacagact

SEQ ID NO: 2793243 - DNA, 25 bp, Homo sapien
cctttcgagaacaccctgtggcagt

SEQ ID NO: 2793244 - DNA, 25 bp, Homo sapien
cacagagcctgagtataccaagaaa

SEQ ID NO: 2793245 - DNA, 25 bp, Homo sapien
aaagaagtggtcttgagcccagctg

SEQ ID NO: 2793246 - DNA, 25 bp, Homo sapien
taagtatgggatgtgggccaaaaca

SEQ ID NO: 2793247 - DNA, 25 bp, Homo sapien
acgagaaggtcggaaaacaggatgc

SEQ ID NO: 2793248 - DNA, 25 bp, Homo sapien
tacctgattccacagccaacgagaa

SEQ ID NO: 2793249 - DNA, 25 bp, Homo sapien
aacaggatgcaaggctgggtgccaa

SEQ ID NO: 2793250 - DNA, 25 bp, Homo sapien
tagtaacaataatgagtccctctcc

SEQ ID NO: 2793251 - DNA, 25 bp, Homo sapien
agtaacaataatgagtccctctccc

SEQ ID NO: 2793252 - DNA, 25 bp, Homo sapien
tgaatttctcccagtgcaggtccag

SEQ ID NO: 2793253 - DNA, 25 bp, Homo sapien
gcttgcactcagaaaggagactcag

SEQ ID NO: 2793254 - DNA, 25 bp, Homo sapien
cagtgagttcatggccttgagttca

SEQ ID NO: 2793255 - DNA, 25 bp, Homo sapien
aaaatgttaccccaacacgatggag

SEQ ID NO: 2793256 - DNA, 25 bp, Homo sapien
ccacctactaaaggaggccgaggca

SEQ ID NO: 2793257 - DNA, 25 bp, Homo sapien
gcaggagaattgcttgaacctggga

SEQ ID NO: 2793258 - DNA, 25 bp, Homo sapien
aaattagaaaggtgtggtggtatgc

SEQ ID NO: 2793259 - DNA, 25 bp, Homo sapien
cacctgtaatcccacctactaaagg

SEQ ID NO: 2793260 - DNA, 25 bp, Homo sapien
agtactgtcactgggtcttaggaac

SEQ ID NO: 2793261 - DNA, 25 bp, Homo sapien
catgtagggcacatagcctgcttta

SEQ ID NO: 2793262 - DNA, 25 bp, Homo sapien
ggaactccattatgagcctcaagag

SEQ ID NO: 2793263 - DNA, 25 bp, Homo sapien
cctccttaaggtattcagctggtga

SEQ ID NO: 2793264 - DNA, 25 bp, Homo sapien
tctgctcataggtggcgatgtcctc

SEQ ID NO: 2793265 - DNA, 25 bp, Homo sapien
ctgtacaaggtctagatgccactgc

SEQ ID NO: 2793266 - DNA, 25 bp, Homo sapien
ggagagtttttccttgacaagctgg

SEQ ID NO: 2793267 - DNA, 25 bp, Homo sapien
caagctgggtggtcagacttaaaag

SEQ ID NO: 2793268 - DNA, 25 bp, Homo sapien
cattttgggactgctcctctgaagc

SEQ ID NO: 2793269 - DNA, 25 bp, Homo sapien
cctggttgtcttcatcattttggga

SEQ ID NO: 2793270 - DNA, 25 bp, Homo sapien
cttaaatcgttccaggtattgagga

SEQ ID NO: 2793271 - DNA, 25 bp, Homo sapien
cctctgaagccccatcagctgaagt

SEQ ID NO: 2793272 - DNA, 25 bp, Homo sapien
cagaaagagggtcagcaaccaaatg

SEQ ID NO: 2793273 - DNA, 25 bp, Homo sapien
tggagcagaaagagggtcagcaacc

SEQ ID NO: 2793274 - DNA, 25 bp, Homo sapien
gaaagagggtcagcaaccaaatgtt

SEQ ID NO: 2793275 - DNA, 25 bp, Homo sapien
agcagaaagagggtcagcaaccaaa

SEQ ID NO: 2793276 - DNA, 25 bp, Homo sapien
gcattttttcgacttgataaatacc

SEQ ID NO: 2793277 - DNA, 25 bp, Homo sapien
tttctagtgcctttggtcaggagca

SEQ ID NO: 2793278 - DNA, 25 bp, Homo sapien
cactgccttagagctgaagaacata

SEQ ID NO: 2793279 - DNA, 25 bp, Homo sapien
taaagctcaggttatgggaaacaga

SEQ ID NO: 2793280 - DNA, 25 bp, Homo sapien
aaggtagcctggtttccatatcaga

SEQ ID NO: 2793281 - DNA, 25 bp, Homo sapien
gctctgtcaaggtagcctggtttcc

SEQ ID NO: 2793282 - DNA, 25 bp, Homo sapien
tccatcacttgaagggctctgtcaa

SEQ ID NO: 2793283 - DNA, 25 bp, Homo sapien
tctctacacagctttatgtcttctg

SEQ ID NO: 2793284 - DNA, 25 bp, Homo sapien
ggtacacagcccgtagcccttgctg

SEQ ID NO: 2793285 - DNA, 25 bp, Homo sapien
gttgtggtacacagcccgtagccct

SEQ ID NO: 2793286 - DNA, 25 bp, Homo sapien
cagcccgtagcccttgctgcaactc

SEQ ID NO: 2793287 - DNA, 25 bp, Homo sapien
agcccgtagcccttgctgcaactcc

SEQ ID NO: 2793288 - DNA, 25 bp, Homo sapien
cattcggtgacacttcagatggata

SEQ ID NO: 2793289 - DNA, 25 bp, Homo sapien
cagatggataatgacgaatgtggta

SEQ ID NO: 2793290 - DNA, 25 bp, Homo sapien
gacctgaaggcccaagtgaatgttc

SEQ ID NO: 2793291 - DNA, 25 bp, Homo sapien
caacagactcatctcattcggtgac

SEQ ID NO: 2793292 - DNA, 25 bp, Homo sapien
ccagtgatggcaggttttaagaacc

SEQ ID NO: 2793293 - DNA, 25 bp, Homo sapien
gctggactgcagttacattctgggc

SEQ ID NO: 2793294 - DNA, 25 bp, Homo sapien
ttcaatgcaatcagggcacaagagg

SEQ ID NO: 2793295 - DNA, 25 bp, Homo sapien
gagtaactgtaaggccatcaaggtc

SEQ ID NO: 2793296 - DNA, 25 bp, Homo sapien
ctggaagcaaaagggatgcaccaaa

SEQ ID NO: 2793297 - DNA, 25 bp, Homo sapien
tagccatacaactgggaactgaaac

SEQ ID NO: 2793298 - DNA, 25 bp, Homo sapien
gcaaaagggatgcaccaaagttcct

SEQ ID NO: 2793299 - DNA, 25 bp, Homo sapien
caagaagtgcatagccatacaactg

SEQ ID NO: 2793300 - DNA, 25 bp, Homo sapien
tcagcccagggtgcaaaattacgct

SEQ ID NO: 2793301 - DNA, 25 bp, Homo sapien
gtacactttaaaccgacactcgaga

SEQ ID NO: 2793302 - DNA, 25 bp, Homo sapien
ttaggcagtcagaaacagtgatcgc

SEQ ID NO: 2793303 - DNA, 25 bp, Homo sapien
cagtgatcgcttctttcagcccagg

SEQ ID NO: 2793304 - DNA, 25 bp, Homo sapien
taacaacgatgactggaggacttcc

SEQ ID NO: 2793305 - DNA, 25 bp, Homo sapien
catagaacactaagctcaggttgcc

SEQ ID NO: 2793306 - DNA, 25 bp, Homo sapien
tcttggtgccacatgagtacacagt

SEQ ID NO: 2793307 - DNA, 25 bp, Homo sapien
taactctggcttcaaaacatagaac

SEQ ID NO: 2793308 - DNA, 25 bp, Homo sapien
ggctgcagttacaaccacgggcaag

SEQ ID NO: 2793309 - DNA, 25 bp, Homo sapien
gaggcaccccagatgttcataggca

SEQ ID NO: 2793310 - DNA, 25 bp, Homo sapien
taggctttgtgcaatacaagtgtca

SEQ ID NO: 2793311 - DNA, 25 bp, Homo sapien
aagtgtcatttcttgaggctgctcc

SEQ ID NO: 2793312 - DNA, 25 bp, Homo sapien
agagaagttgggtggaaggcacttc

SEQ ID NO: 2793313 - DNA, 25 bp, Homo sapien
agaagttgggtggaaggcacttcaa

SEQ ID NO: 2793314 - DNA, 25 bp, Homo sapien
ctttgccaggcaatgaaataaaaca

SEQ ID NO: 2793315 - DNA, 25 bp, Homo sapien
gaagttgggtggaaggcacttcaaa

SEQ ID NO: 2793316 - DNA, 25 bp, Homo sapien
taaatcaggtgctactgcaccaacg

SEQ ID NO: 2793317 - DNA, 25 bp, Homo sapien
aaatcaggtgctactgcaccaacgt

SEQ ID NO: 2793318 - DNA, 25 bp, Homo sapien
ttctttatgaaagaatccatcagta

SEQ ID NO: 2793319 - DNA, 25 bp, Homo sapien
ctttctttatgaaagaatccatcag

SEQ ID NO: 2793320 - DNA, 25 bp, Homo sapien
catcagtaaattgaatgtaaagtta

SEQ ID NO: 2793321 - DNA, 25 bp, Homo sapien
aattgaatgtaaagttatctggaaa

SEQ ID NO: 2793322 - DNA, 25 bp, Homo sapien
tgcaagcatgcatcttttggtgacc

SEQ ID NO: 2793323 - DNA, 25 bp, Homo sapien
tccacgtgcaagcatgcatcttttg

SEQ ID NO: 2793324 - DNA, 25 bp, Homo sapien
tctggtaatactgtttctgccagcc

SEQ ID NO: 2793325 - DNA, 25 bp, Homo sapien
agcccatctccacgtgcaagcatgc

SEQ ID NO: 2793326 - DNA, 25 bp, Homo sapien
atttacaagggtatatagggctttg

SEQ ID NO: 2793327 - DNA, 25 bp, Homo sapien
tttagacactgcctaatccaggtgt

SEQ ID NO: 2793328 - DNA, 25 bp, Homo sapien
tagggctttgtcttgtgcatcatat

SEQ ID NO: 2793329 - DNA, 25 bp, Homo sapien
cactgcctaatccaggtgtggatag

SEQ ID NO: 2793330 - DNA, 25 bp, Homo sapien
taccagcagttggggctgtgtcgaa

SEQ ID NO: 2793331 - DNA, 25 bp, Homo sapien
gtaccagcagttggggctgtgtcga

SEQ ID NO: 2793332 - DNA, 25 bp, Homo sapien
ccagcagttggggctgtgtcgaaac

SEQ ID NO: 2793333 - DNA, 25 bp, Homo sapien
accagcagttggggctgtgtcgaaa

SEQ ID NO: 2793334 - DNA, 25 bp, Homo sapien
caggtgtactgcttcaacgatggtg

SEQ ID NO: 2793335 - DNA, 25 bp, Homo sapien
cttttcagggcatttagagtctcat

SEQ ID NO: 2793336 - DNA, 25 bp, Homo sapien
gcctgtaagttcctgtgtcagcaga

SEQ ID NO: 2793337 - DNA, 25 bp, Homo sapien
tcctgtactgacacaattcttggcc

SEQ ID NO: 2793338 - DNA, 25 bp, Homo sapien
ccagccttggacattttcaatgaac

SEQ ID NO: 2793339 - DNA, 25 bp, Homo sapien
tataaaatatgctgcccaaaatgca

SEQ ID NO: 2793340 - DNA, 25 bp, Homo sapien
aatgcaattcctgaatttcccagcc

SEQ ID NO: 2793341 - DNA, 25 bp, Homo sapien
gaagcaaatgaactcctttcttggc

SEQ ID NO: 2793342 - DNA, 25 bp, Homo sapien
tctggaatgggcacttgcctggaat

SEQ ID NO: 2793343 - DNA, 25 bp, Homo sapien
taatatgtcaggtgagtgagtctct

SEQ ID NO: 2793344 - DNA, 25 bp, Homo sapien
tttaagcagttcagacaaataaatg

SEQ ID NO: 2793345 - DNA, 25 bp, Homo sapien
taattctgtggattgctggatgagc

SEQ ID NO: 2793346 - DNA, 25 bp, Homo sapien
tattttatcagcctccaaagagcaa

SEQ ID NO: 2793347 - DNA, 25 bp, Homo sapien
tatttacagtcatcactgaggtgcc

SEQ ID NO: 2793348 - DNA, 25 bp, Homo sapien
tctttgtctaaagcctggaacacta

SEQ ID NO: 2793349 - DNA, 25 bp, Homo sapien
catctggagatggtcctaaaagcag

SEQ ID NO: 2793350 - DNA, 25 bp, Homo sapien
cataaatacccatcatgcatgctga

SEQ ID NO: 2793351 - DNA, 25 bp, Homo sapien
tcaagtaggtgcctgataatttggc

SEQ ID NO: 2793352 - DNA, 25 bp, Homo sapien
gactcggcctgctaagactgcataa

SEQ ID NO: 2793353 - DNA, 25 bp, Homo sapien
tgaaaaagttgaatccctaggcatt

SEQ ID NO: 2793354 - DNA, 25 bp, Homo sapien
tgagctttgtgtcagctcagtgccc

SEQ ID NO: 2793355 - DNA, 25 bp, Homo sapien
gcctctggttgaggtagacagctaa

SEQ ID NO: 2793356 - DNA, 25 bp, Homo sapien
tctggttgaggtagacagctaagga

SEQ ID NO: 2793357 - DNA, 25 bp, Homo sapien
gagctttgtgtcagctcagtgccca

SEQ ID NO: 2793358 - DNA, 25 bp, Homo sapien
gattaaaatcctagcctaagagccc

SEQ ID NO: 2793359 - DNA, 25 bp, Homo sapien
taaaatgtgctgagtacttaccatg

SEQ ID NO: 2793360 - DNA, 25 bp, Homo sapien
ggtggcttgcattcagatggcctgc

SEQ ID NO: 2793361 - DNA, 25 bp, Homo sapien
gaaaatcatactgaaggaaggcttc

SEQ ID NO: 2793362 - DNA, 25 bp, Homo sapien
cctacaggcttatgcagaaattgct

SEQ ID NO: 2793363 - DNA, 25 bp, Homo sapien
caaatgggatagcatgcactttaca

SEQ ID NO: 2793364 - DNA, 25 bp, Homo sapien
tgactcagtggcaagacatcctatg

SEQ ID NO: 2793365 - DNA, 25 bp, Homo sapien
tagagccgaaaaggcactctcttca

SEQ ID NO: 2793366 - DNA, 25 bp, Homo sapien
gaaggagaatcaaacctaaggtatc

SEQ ID NO: 2793367 - DNA, 25 bp, Homo sapien
gaagatcttgaacagcttgaacaga

SEQ ID NO: 2793368 - DNA, 25 bp, Homo sapien
tgcctttggagggaccacaagtgct

SEQ ID NO: 2793369 - DNA, 25 bp, Homo sapien
cgtttccagcgctgtaaaatgaggg

SEQ ID NO: 2793370 - DNA, 25 bp, Homo sapien
tgtccagagttgaaagctaactttg

SEQ ID NO: 2793371 - DNA, 25 bp, Homo sapien
gtccagagttgaaagctaactttgt

SEQ ID NO: 2793372 - DNA, 25 bp, Homo sapien
ctgtccagagttgaaagctaacttt

SEQ ID NO: 2793373 - DNA, 25 bp, Homo sapien
tccagagttgaaagctaactttgtt

SEQ ID NO: 2793374 - DNA, 25 bp, Homo sapien
ggctgagttttgtgggtagttcaca

SEQ ID NO: 2793375 - DNA, 25 bp, Homo sapien
cacaatggaattgttagcagctgtg

SEQ ID NO: 2793376 - DNA, 25 bp, Homo sapien
gaaaataggtacataacagttcaca

SEQ ID NO: 2793377 - DNA, 25 bp, Homo sapien
taatgtgcattaggttgtttcagtc

SEQ ID NO: 2793378 - DNA, 25 bp, Homo sapien
aaatcacagagtacatagccaaatc

SEQ ID NO: 2793379 - DNA, 25 bp, Homo sapien
actctctctatactcatatgaaaag

SEQ ID NO: 2793380 - DNA, 25 bp, Homo sapien
ctctatactcatatgaaaagatctt

SEQ ID NO: 2793381 - DNA, 25 bp, Homo sapien
aaactcacagtatggaataaaatgc

SEQ ID NO: 2793382 - DNA, 25 bp, Homo sapien
cccgagaggaaatgttgtctataag

SEQ ID NO: 2793383 - DNA, 25 bp, Homo sapien
gatctatctcttcccgagaggaaat

SEQ ID NO: 2793384 - DNA, 25 bp, Homo sapien
aatactctgcatgatctatctcttc

SEQ ID NO: 2793385 - DNA, 25 bp, Homo sapien
tcttcccgagaggaaatgttgtcta

SEQ ID NO: 2793386 - DNA, 25 bp, Homo sapien
atattgttaaagaactaacaggcaa

SEQ ID NO: 2793387 - DNA, 25 bp, Homo sapien
ctctcaaatgttttatccattaaag

SEQ ID NO: 2793388 - DNA, 25 bp, Homo sapien
tattgttaaagaactaacaggcaac

SEQ ID NO: 2793389 - DNA, 25 bp, Homo sapien
caaatgttttatccattaaagatgc

SEQ ID NO: 2793390 - DNA, 25 bp, Homo sapien
caggttactagcatctgtgcccata

SEQ ID NO: 2793391 - DNA, 25 bp, Homo sapien
tacctacagatggttggctccacat

SEQ ID NO: 2793392 - DNA, 25 bp, Homo sapien
taaacattggagtgcctctaggact

SEQ ID NO: 2793393 - DNA, 25 bp, Homo sapien
tatgctcggtccctaggtgatctca

SEQ ID NO: 2793394 - DNA, 25 bp, Homo sapien
gaatggcctttaacttcgcagaggg

SEQ ID NO: 2793395 - DNA, 25 bp, Homo sapien
gagcacgctaaacaccacaataagg

SEQ ID NO: 2793396 - DNA, 25 bp, Homo sapien
gaaatgacttactgcctgggatctc

SEQ ID NO: 2793397 - DNA, 25 bp, Homo sapien
gggaagcccagtacagaaacaatca

SEQ ID NO: 2793398 - DNA, 25 bp, Homo sapien
aatcagccacgaggacgaagagagg

SEQ ID NO: 2793399 - DNA, 25 bp, Homo sapien
tgggaaactgccctcacgctagggc

SEQ ID NO: 2793400 - DNA, 25 bp, Homo sapien
cgaggagctctctggcacaatcagc

SEQ ID NO: 2793401 - DNA, 25 bp, Homo sapien
agacggcgctctggcacatgaagcc

SEQ ID NO: 2793402 - DNA, 25 bp, Homo sapien
ccctccggctggcggcgcccaatca

SEQ ID NO: 2793403 - DNA, 25 bp, Homo sapien
ctccggctggcggcgcccaatcaca

SEQ ID NO: 2793404 - DNA, 25 bp, Homo sapien
cctccggctggcggcgcccaatcac

SEQ ID NO: 2793405 - DNA, 25 bp, Homo sapien
caggctgcatgaaaaccatatggta

SEQ ID NO: 2793406 - DNA, 25 bp, Homo sapien
gcctgggaagatgttaaccaactat

SEQ ID NO: 2793407 - DNA, 25 bp, Homo sapien
tatatataccaaagggcaggcagta

SEQ ID NO: 2793408 - DNA, 25 bp, Homo sapien
tgccttcaaacctgtcacctggtaa

SEQ ID NO: 2793409 - DNA, 25 bp, Homo sapien
cccatttgtggctgtctacataggc

SEQ ID NO: 2793410 - DNA, 25 bp, Homo sapien
gctgaagaaagcaggtatcttttac

SEQ ID NO: 2793411 - DNA, 25 bp, Homo sapien
tctcttgcttcccatttgtggctgt

SEQ ID NO: 2793412 - DNA, 25 bp, Homo sapien
gtggctgtctacataggctgaagaa

SEQ ID NO: 2793413 - DNA, 25 bp, Homo sapien
ctgatcggcacaggaattttgatgt

SEQ ID NO: 2793414 - DNA, 25 bp, Homo sapien
tgctcctggaacgtcaatcatccta

SEQ ID NO: 2793415 - DNA, 25 bp, Homo sapien
acttgatcggtattgtgcactacag

SEQ ID NO: 2793416 - DNA, 25 bp, Homo sapien
aatcatcctatcgatgccaaactta

SEQ ID NO: 2793417 - DNA, 25 bp, Homo sapien
ggcgtccctagcaatcagattccag

SEQ ID NO: 2793418 - DNA, 25 bp, Homo sapien
cccaaatggcgtccctagcaatcag

SEQ ID NO: 2793419 - DNA, 25 bp, Homo sapien
taatcaggggcctaatgaagctgtc

SEQ ID NO: 2793420 - DNA, 25 bp, Homo sapien
tccagaaacgtttcctctcctcttg

SEQ ID NO: 2793421 - DNA, 25 bp, Homo sapien
caggagagagctgaggaagaaccac

SEQ ID NO: 2793422 - DNA, 25 bp, Homo sapien
ggagagagctgaggaagaaccactt

SEQ ID NO: 2793423 - DNA, 25 bp, Homo sapien
tgcaggagagagctgaggaagaacc

SEQ ID NO: 2793424 - DNA, 25 bp, Homo sapien
gagagagctgaggaagaaccacttg

SEQ ID NO: 2793425 - DNA, 25 bp, Homo sapien
cgcgccaggagcatcccgcgccgca

SEQ ID NO: 2793426 - DNA, 25 bp, Homo sapien
atcccgcgccgcactatggaggcag

SEQ ID NO: 2793427 - DNA, 25 bp, Homo sapien
agcatcccgcgccgcactatggagg

SEQ ID NO: 2793428 - DNA, 25 bp, Homo sapien
aggagcatcccgcgccgcactatgg

SEQ ID NO: 2793429 - DNA, 25 bp, Homo sapien
tgtcgctctcgacgacaggaccgac

SEQ ID NO: 2793430 - DNA, 25 bp, Homo sapien
ggcgcccagaattggacgaatccct

SEQ ID NO: 2793431 - DNA, 25 bp, Homo sapien
tccagtagttggtatggtccgagac

SEQ ID NO: 2793432 - DNA, 25 bp, Homo sapien
cagccaacgggttacggacagagga

SEQ ID NO: 2793433 - DNA, 25 bp, Homo sapien
tctgtccactctgagttgtaatagg

SEQ ID NO: 2793434 - DNA, 25 bp, Homo sapien
tctgagtcataatagtaaaggttgt

SEQ ID NO: 2793435 - DNA, 25 bp, Homo sapien
taggtgtcgtaacaggacagaagag

SEQ ID NO: 2793436 - DNA, 25 bp, Homo sapien
taaaggttgtaacaggactcttctg

SEQ ID NO: 2793437 - DNA, 25 bp, Homo sapien
tctctgttgtgtcccagtacctggc

SEQ ID NO: 2793438 - DNA, 25 bp, Homo sapien
taccaggtaccatgcagagaacaaa

SEQ ID NO: 2793439 - DNA, 25 bp, Homo sapien
aatgattggtgtacttctgcactcc

SEQ ID NO: 2793440 - DNA, 25 bp, Homo sapien
tccagactgtgagaggacttcgttc

SEQ ID NO: 2793441 - DNA, 25 bp, Homo sapien
catatatgtctatgacttgagccct

SEQ ID NO: 2793442 - DNA, 25 bp, Homo sapien
tcttcattcaaggtttagtaggatc

SEQ ID NO: 2793443 - DNA, 25 bp, Homo sapien
aaccagaatttagcctttaggactg

SEQ ID NO: 2793444 - DNA, 25 bp, Homo sapien
taaggttcataaggaaacttgctgg

SEQ ID NO: 2793445 - DNA, 25 bp, Homo sapien
tcttcttaattaggtgatatcaggg

SEQ ID NO: 2793446 - DNA, 25 bp, Homo sapien
agcacagttactagaaggagacaaa

SEQ ID NO: 2793447 - DNA, 25 bp, Homo sapien
tgtagatatctgttgctccagagtc

SEQ ID NO: 2793448 - DNA, 25 bp, Homo sapien
ggcctacttatcctgttaatgaaaa

SEQ ID NO: 2793449 - DNA, 25 bp, Homo sapien
tctgatgtacttgatggcccacatt

SEQ ID NO: 2793450 - DNA, 25 bp, Homo sapien
tgtacttgatggcccacattccaaa

SEQ ID NO: 2793451 - DNA, 25 bp, Homo sapien
gatgtacttgatggcccacattcca

SEQ ID NO: 2793452 - DNA, 25 bp, Homo sapien
ttctgatgtacttgatggcccacat

SEQ ID NO: 2793453 - DNA, 25 bp, Homo sapien
gaggctggaggtcagccatgaaatt

SEQ ID NO: 2793454 - DNA, 25 bp, Homo sapien
ggagaaggggcttcaccaggaagag

SEQ ID NO: 2793455 - DNA, 25 bp, Homo sapien
aggaagaggctggaggtcagccatg

SEQ ID NO: 2793456 - DNA, 25 bp, Homo sapien
aagaggctggaggtcagccatgaaa

SEQ ID NO: 2793457 - DNA, 25 bp, Homo sapien
gacttcaaacctgtgactatccaga

SEQ ID NO: 2793458 - DNA, 25 bp, Homo sapien
ctttctctaggccatggaggctcag

SEQ ID NO: 2793459 - DNA, 25 bp, Homo sapien
gctcagaactggacatagtgcacca

SEQ ID NO: 2793460 - DNA, 25 bp, Homo sapien
gtcaacaaactgtaaggacctgtta

SEQ ID NO: 2793461 - DNA, 25 bp, Homo sapien
tgcctgcatcttatgcttacgtaag

SEQ ID NO: 2793462 - DNA, 25 bp, Homo sapien
taatactgcctgtgattgcattagt

SEQ ID NO: 2793463 - DNA, 25 bp, Homo sapien
tgtttttatattgcatcagccaaag

SEQ ID NO: 2793464 - DNA, 25 bp, Homo sapien
gacacaggactttatagttatccat

SEQ ID NO: 2793465 - DNA, 25 bp, Homo sapien
cagctaagtgagttgagcatcccaa

SEQ ID NO: 2793466 - DNA, 25 bp, Homo sapien
acagctaagtgagttgagcatccca

SEQ ID NO: 2793467 - DNA, 25 bp, Homo sapien
cgctagacttgccacagtttggaag

SEQ ID NO: 2793468 - DNA, 25 bp, Homo sapien
gaatagatcttgcttcatccaaagc

SEQ ID NO: 2793469 - DNA, 25 bp, Homo sapien
tctgacttgaataacttgccactcc

SEQ ID NO: 2793470 - DNA, 25 bp, Homo sapien
gaagaggcaattgactctatgccat

SEQ ID NO: 2793471 - DNA, 25 bp, Homo sapien
tttgacacaaagagagaccaatttc

SEQ ID NO: 2793472 - DNA, 25 bp, Homo sapien
ttgacacaaagagagaccaatttca

SEQ ID NO: 2793473 - DNA, 25 bp, Homo sapien
tgacacaaagagagaccaatttcat

SEQ ID NO: 2793474 - DNA, 25 bp, Homo sapien
ctttgacacaaagagagaccaattt

SEQ ID NO: 2793475 - DNA, 25 bp, Homo sapien
taaatattgtcctgacttggataac

SEQ ID NO: 2793476 - DNA, 25 bp, Homo sapien
ttaaatattgtcctgacttggataa

SEQ ID NO: 2793477 - DNA, 25 bp, Homo sapien
ctgccattccaagtgaaactgtttt

SEQ ID NO: 2793478 - DNA, 25 bp, Homo sapien
tgataaatgacacaacaacagtctg

SEQ ID NO: 2793479 - DNA, 25 bp, Homo sapien
gcaggtggaagatgatgaatagatt

SEQ ID NO: 2793480 - DNA, 25 bp, Homo sapien
taaatgacacaacaacagtctgtgc

SEQ ID NO: 2793481 - DNA, 25 bp, Homo sapien
tatcccctcatttgacacaaggttg

SEQ ID NO: 2793482 - DNA, 25 bp, Homo sapien
cccctcatttgacacaaggttgata

SEQ ID NO: 2793483 - DNA, 25 bp, Homo sapien
tcatttgacacaaggttgataccag

SEQ ID NO: 2793484 - DNA, 25 bp, Homo sapien
cttatctatcccctcatttgacaca

SEQ ID NO: 2793485 - DNA, 25 bp, Homo sapien
cttctaagttttcaatcgagaagag

SEQ ID NO: 2793486 - DNA, 25 bp, Homo sapien
taagttttcaatcgagaagagaagc

SEQ ID NO: 2793487 - DNA, 25 bp, Homo sapien
ttcaatcgagaagagaagcccactg

SEQ ID NO: 2793488 - DNA, 25 bp, Homo sapien
agagaagcccactggaacctgcagg

SEQ ID NO: 2793489 - DNA, 25 bp, Homo sapien
gaaaggtcagccttagtctcatggc

SEQ ID NO: 2793490 - DNA, 25 bp, Homo sapien
gatggcccacatggactctccttca

SEQ ID NO: 2793491 - DNA, 25 bp, Homo sapien
tgtgctcttgcataaagtgtccatg

SEQ ID NO: 2793492 - DNA, 25 bp, Homo sapien
ggttcatcagctcattaggcaaggc

SEQ ID NO: 2793493 - DNA, 25 bp, Homo sapien
tacaggacgtgtggtcaaacacagc

SEQ ID NO: 2793494 - DNA, 25 bp, Homo sapien
ggtgcccttacctcaggacatagta

SEQ ID NO: 2793495 - DNA, 25 bp, Homo sapien
ggttattgctatgggcagtcacacg

SEQ ID NO: 2793496 - DNA, 25 bp, Homo sapien
tgccagtgcctaagtaagtctgacc

SEQ ID NO: 2793497 - DNA, 25 bp, Homo sapien
taggccagtcatgcattttttaaac

SEQ ID NO: 2793498 - DNA, 25 bp, Homo sapien
gaagaaataatgagtcaccataggc

SEQ ID NO: 2793499 - DNA, 25 bp, Homo sapien
tgagtcaccataggccagtcatgca

SEQ ID NO: 2793500 - DNA, 25 bp, Homo sapien
ggttcaagcatctgggaagaaataa

SEQ ID NO: 2793501 - DNA, 25 bp, Homo sapien
aataatgctccaaatgctcaatctg

SEQ ID NO: 2793502 - DNA, 25 bp, Homo sapien
gaatctaagtattctaggtcaccag

SEQ ID NO: 2793503 - DNA, 25 bp, Homo sapien
tgaagacagccgacacagaacaaga

SEQ ID NO: 2793504 - DNA, 25 bp, Homo sapien
gagcaagacagcaatggtctccagg

SEQ ID NO: 2793505 - DNA, 25 bp, Homo sapien
catgtgtgaagggtatcaagggccc

SEQ ID NO: 2793506 - DNA, 25 bp, Homo sapien
aagggccccgtgaatgacctgagaa

SEQ ID NO: 2793507 - DNA, 25 bp, Homo sapien
taaaacgccactgatgaagaccctg

SEQ ID NO: 2793508 - DNA, 25 bp, Homo sapien
tatctgcagcaactactggagagca

SEQ ID NO: 2793509 - DNA, 25 bp, Homo sapien
tcctctccagtaattctttcaaact

SEQ ID NO: 2793510 - DNA, 25 bp, Homo sapien
ccaaggtcacccttgctcctcttct

SEQ ID NO: 2793511 - DNA, 25 bp, Homo sapien
cacctcgggggcgtgctccgacttg

SEQ ID NO: 2793512 - DNA, 25 bp, Homo sapien
tgagacactcatctctgccggcaca

SEQ ID NO: 2793513 - DNA, 25 bp, Homo sapien
actctccccgtctgactggaacacc

SEQ ID NO: 2793514 - DNA, 25 bp, Homo sapien
acctcgtagcagttatcctcctctt

SEQ ID NO: 2793515 - DNA, 25 bp, Homo sapien
tctgactggaacaccggcaccttgg

SEQ ID NO: 2793516 - DNA, 25 bp, Homo sapien
tcctcctcgtggcagtggctgccct

SEQ ID NO: 2793517 - DNA, 25 bp, Homo sapien
aagaattcatgcacctgaggaaatg

SEQ ID NO: 2793518 - DNA, 25 bp, Homo sapien
taagaattcatgcacctgaggaaat

SEQ ID NO: 2793519 - DNA, 25 bp, Homo sapien
gtaagaattcatgcacctgaggaaa

SEQ ID NO: 2793520 - DNA, 25 bp, Homo sapien
tctttaaggctttgacctttgatga

SEQ ID NO: 2793521 - DNA, 25 bp, Homo sapien
gctttgacctttgatgagccaatag

SEQ ID NO: 2793522 - DNA, 25 bp, Homo sapien
gagccaatagtcaggcctccaggga

SEQ ID NO: 2793523 - DNA, 25 bp, Homo sapien
ttcagcatggcagtttcatttgatc

SEQ ID NO: 2793524 - DNA, 25 bp, Homo sapien
gcagggcttcccagaagagtgatta

SEQ ID NO: 2793525 - DNA, 25 bp, Homo sapien
cagggcttcccagaagagtgattac

SEQ ID NO: 2793526 - DNA, 25 bp, Homo sapien
tgcagggcttcccagaagagtgatt

SEQ ID NO: 2793527 - DNA, 25 bp, Homo sapien
ttgcagggcttcccagaagagtgat

SEQ ID NO: 2793528 - DNA, 25 bp, Homo sapien
gcatccggttgaattccttcccaca

SEQ ID NO: 2793529 - DNA, 25 bp, Homo sapien
tttcatgtggcgtgtcaggttcccc

SEQ ID NO: 2793530 - DNA, 25 bp, Homo sapien
tttgcttgggcaatagaggcacttg

SEQ ID NO: 2793531 - DNA, 25 bp, Homo sapien
ggcccatcaggttgtgcatccggtt

SEQ ID NO: 2793532 - DNA, 25 bp, Homo sapien
ctgttgaagatggggatgagaacac

SEQ ID NO: 2793533 - DNA, 25 bp, Homo sapien
ttgaagatggggatgagaacacagg

SEQ ID NO: 2793534 - DNA, 25 bp, Homo sapien
gatggggatgagaacacaggttact

SEQ ID NO: 2793535 - DNA, 25 bp, Homo sapien
gaagatggggatgagaacacaggtt

SEQ ID NO: 2793536 - DNA, 25 bp, Homo sapien
tacagggtggggttccaagctcagc

SEQ ID NO: 2793537 - DNA, 25 bp, Homo sapien
catgaatgaatttggcctacagggt

SEQ ID NO: 2793538 - DNA, 25 bp, Homo sapien
agcatgaatgaatttggcctacagg

SEQ ID NO: 2793539 - DNA, 25 bp, Homo sapien
ctagcatgaatgaatttggcctaca

SEQ ID NO: 2793540 - DNA, 25 bp, Homo sapien
ggttcttatccagaacacttggcct

SEQ ID NO: 2793541 - DNA, 25 bp, Homo sapien
aggttcttatccagaacacttggcc

SEQ ID NO: 2793542 - DNA, 25 bp, Homo sapien
tccaccaagcctttaggttcttatc

SEQ ID NO: 2793543 - DNA, 25 bp, Homo sapien
tcctccctggtccagagcctggagg

SEQ ID NO: 2793544 - DNA, 25 bp, Homo sapien
tctcctccctggtccagagcctgga

SEQ ID NO: 2793545 - DNA, 25 bp, Homo sapien
ttctcctccctggtccagagcctgg

SEQ ID NO: 2793546 - DNA, 25 bp, Homo sapien
ccttctcctccctggtccagagcct

SEQ ID NO: 2793547 - DNA, 25 bp, Homo sapien
ggcacttgccatgaaccccagtggc

SEQ ID NO: 2793548 - DNA, 25 bp, Homo sapien
tcaggcacttgccatgaaccccagt

SEQ ID NO: 2793549 - DNA, 25 bp, Homo sapien
atgaaccccagtggccatgctgaca

SEQ ID NO: 2793550 - DNA, 25 bp, Homo sapien
gccatgaaccccagtggccatgctg

SEQ ID NO: 2793551 - DNA, 25 bp, Homo sapien
gtgatagcagtgggcagccactggg

SEQ ID NO: 2793552 - DNA, 25 bp, Homo sapien
aatttgtcccggaaattctggatgg

SEQ ID NO: 2793553 - DNA, 25 bp, Homo sapien
gattcataacttaggcagctgccgg

SEQ ID NO: 2793554 - DNA, 25 bp, Homo sapien
ctggacaggtttcccgaagacggca

SEQ ID NO: 2793555 - DNA, 25 bp, Homo sapien
gccggcttcacccatctcaaaagag

SEQ ID NO: 2793556 - DNA, 25 bp, Homo sapien
atttgcacaaccctctggttcctct

SEQ ID NO: 2793557 - DNA, 25 bp, Homo sapien
ctggttcctctctagtcccactgcc

SEQ ID NO: 2793558 - DNA, 25 bp, Homo sapien
tctggttcctctctagtcccactgc

SEQ ID NO: 2793559 - DNA, 25 bp, Homo sapien
tggttcctctctagtcccactgccc

SEQ ID NO: 2793560 - DNA, 25 bp, Homo sapien
tgaaaggcttcacgtcagagtggac

SEQ ID NO: 2793561 - DNA, 25 bp, Homo sapien
ggtctgcttctgcacgaagctcttg

SEQ ID NO: 2793562 - DNA, 25 bp, Homo sapien
gatcagcacgtgtcgcttcatgttg

SEQ ID NO: 2793563 - DNA, 25 bp, Homo sapien
gctcttgtagcagaggtgacactgg

SEQ ID NO: 2793564 - DNA, 25 bp, Homo sapien
aagtggtgattgacaggtaacatgc

SEQ ID NO: 2793565 - DNA, 25 bp, Homo sapien
gacaggtaacatgctttcatcagga

SEQ ID NO: 2793566 - DNA, 25 bp, Homo sapien
gattcagaaaagtggtgattgacag

SEQ ID NO: 2793567 - DNA, 25 bp, Homo sapien
ggtgattgacaggtaacatgctttc

SEQ ID NO: 2793568 - DNA, 25 bp, Homo sapien
tgggtcctttgttgatggttcctgc

SEQ ID NO: 2793569 - DNA, 25 bp, Homo sapien
tttcccacatataaaggagcccctg

SEQ ID NO: 2793570 - DNA, 25 bp, Homo sapien
cctgaagttagcgaatggtcccctt

SEQ ID NO: 2793571 - DNA, 25 bp, Homo sapien
ccctttacggctgaatcccagtctg

SEQ ID NO: 2793572 - DNA, 25 bp, Homo sapien
ctacaggtaccttttgtagggcagg

SEQ ID NO: 2793573 - DNA, 25 bp, Homo sapien
acaggtaccttttgtagggcaggag

SEQ ID NO: 2793574 - DNA, 25 bp, Homo sapien
tacaggtaccttttgtagggcagga

SEQ ID NO: 2793575 - DNA, 25 bp, Homo sapien
tctcggaggctcagagcaggttcca

SEQ ID NO: 2793576 - DNA, 25 bp, Homo sapien
taagggtgtgagagtgggagtcagt

SEQ ID NO: 2793577 - DNA, 25 bp, Homo sapien
cggaggctcagagcaggttccatac

SEQ ID NO: 2793578 - DNA, 25 bp, Homo sapien
ccctctcggaggctcagagcaggtt

SEQ ID NO: 2793579 - DNA, 25 bp, Homo sapien
agatttcaggaacaccactagggcc

SEQ ID NO: 2793580 - DNA, 25 bp, Homo sapien
cactagggccttgttttagttcagc

SEQ ID NO: 2793581 - DNA, 25 bp, Homo sapien
tagttcagcctgaatgactccaggg

SEQ ID NO: 2793582 - DNA, 25 bp, Homo sapien
gactccagggctatggttgcaaact

SEQ ID NO: 2793583 - DNA, 25 bp, Homo sapien
gcacgggtccaacgcagggaggtat

SEQ ID NO: 2793584 - DNA, 25 bp, Homo sapien
ttcacccagctaggcacgggtccaa

SEQ ID NO: 2793585 - DNA, 25 bp, Homo sapien
gcacttcacccagctaggcacgggt

SEQ ID NO: 2793586 - DNA, 25 bp, Homo sapien
agggcacttcacccagctaggcacg

SEQ ID NO: 2793587 - DNA, 25 bp, Homo sapien
ctcctcggggtaaggtgcagagcgg

SEQ ID NO: 2793588 - DNA, 25 bp, Homo sapien
gtaaggtgcagagcggcacaggcgt

SEQ ID NO: 2793589 - DNA, 25 bp, Homo sapien
gggtaaggtgcagagcggcacaggc

SEQ ID NO: 2793590 - DNA, 25 bp, Homo sapien
cctcggggtaaggtgcagagcggca

SEQ ID NO: 2793591 - DNA, 25 bp, Homo sapien
cacacgcggcagttgtgcggcttca

SEQ ID NO: 2793592 - DNA, 25 bp, Homo sapien
aagagcttcccgcagtgcgtgcacg

SEQ ID NO: 2793593 - DNA, 25 bp, Homo sapien
cactctgagcagatgtagggccgga

SEQ ID NO: 2793594 - DNA, 25 bp, Homo sapien
gtgaggtgtctcttcagctgggcca

SEQ ID NO: 2793595 - DNA, 25 bp, Homo sapien
gcacaggtcgatcatctgagagtca

SEQ ID NO: 2793596 - DNA, 25 bp, Homo sapien
tgggcttaatgggttcctgcttgac

SEQ ID NO: 2793597 - DNA, 25 bp, Homo sapien
gcggtagaattggaagcccacgttg

SEQ ID NO: 2793598 - DNA, 25 bp, Homo sapien
tgggttcctgcttgacgggcttgcc

SEQ ID NO: 2793599 - DNA, 25 bp, Homo sapien
tcataccgaaactgggaaaatggcc

SEQ ID NO: 2793600 - DNA, 25 bp, Homo sapien
gggcatgctcttccgtttcctagac

SEQ ID NO: 2793601 - DNA, 25 bp, Homo sapien
gaaaatggccctcggagagcttccg

SEQ ID NO: 2793602 - DNA, 25 bp, Homo sapien
tctgcagggtggttatagggcatct

SEQ ID NO: 2793603 - DNA, 25 bp, Homo sapien
tatctctgcctttgagcaccagcac

SEQ ID NO: 2793604 - DNA, 25 bp, Homo sapien
cagcaccaggtgataaggagaagcc

SEQ ID NO: 2793605 - DNA, 25 bp, Homo sapien
atatctctgcctttgagcaccagca

SEQ ID NO: 2793606 - DNA, 25 bp, Homo sapien
agaagcccgaggtggtgaaacaaca

SEQ ID NO: 2793607 - DNA, 25 bp, Homo sapien
aaatgacagcatattcagtctggtg

SEQ ID NO: 2793608 - DNA, 25 bp, Homo sapien
tggtgggctccagaattcagtctgg

SEQ ID NO: 2793609 - DNA, 25 bp, Homo sapien
ggtgggctccagaattcagtctggt

SEQ ID NO: 2793610 - DNA, 25 bp, Homo sapien
cagcatattcagtctggtgggctcc

SEQ ID NO: 2793611 - DNA, 25 bp, Homo sapien
gacatttcattggctgtatccgcca

SEQ ID NO: 2793612 - DNA, 25 bp, Homo sapien
acatttcattggctgtatccgccat

SEQ ID NO: 2793613 - DNA, 25 bp, Homo sapien
ttgatatgaaagatagaatgtcctg

SEQ ID NO: 2793614 - DNA, 25 bp, Homo sapien
gcagggactggggtagtgctcctca

SEQ ID NO: 2793615 - DNA, 25 bp, Homo sapien
ccttggccaatgagtggcatgttcc

SEQ ID NO: 2793616 - DNA, 25 bp, Homo sapien
catggcatagcagggactggggtag

SEQ ID NO: 2793617 - DNA, 25 bp, Homo sapien
cactctggcgtgtcaagggtgagcc

SEQ ID NO: 2793618 - DNA, 25 bp, Homo sapien
gattttggcaatgtaaagtccttcc

SEQ ID NO: 2793619 - DNA, 25 bp, Homo sapien
gccctaatgtagttgagttgcttaa

SEQ ID NO: 2793620 - DNA, 25 bp, Homo sapien
caaatatgattaatccagtttctcc

SEQ ID NO: 2793621 - DNA, 25 bp, Homo sapien
tccttctctgtatggaatcctccac

SEQ ID NO: 2793622 - DNA, 25 bp, Homo sapien
cttctctgtatggaatcctccacat

SEQ ID NO: 2793623 - DNA, 25 bp, Homo sapien
ccttctctgtatggaatcctccaca

SEQ ID NO: 2793624 - DNA, 25 bp, Homo sapien
ggaaagtcagttaaatttgagagtc

SEQ ID NO: 2793625 - DNA, 25 bp, Homo sapien
tggaaagtcagttaaatttgagagt

SEQ ID NO: 2793626 - DNA, 25 bp, Homo sapien
ttggaaagtcagttaaatttgagag

SEQ ID NO: 2793627 - DNA, 25 bp, Homo sapien
tccagtaaatgaggccttctttagc

SEQ ID NO: 2793628 - DNA, 25 bp, Homo sapien
cattccagtaaatgaggccttcttt

SEQ ID NO: 2793629 - DNA, 25 bp, Homo sapien
agtaaatgaggccttctttagctca

SEQ ID NO: 2793630 - DNA, 25 bp, Homo sapien
tctgtctctgaaccaagccaatgct

SEQ ID NO: 2793631 - DNA, 25 bp, Homo sapien
cccactataaaagagctggtatggc

SEQ ID NO: 2793632 - DNA, 25 bp, Homo sapien
tatggctgacctgggtctcaaccac

SEQ ID NO: 2793633 - DNA, 25 bp, Homo sapien
actatacaggttggagattgctccc

SEQ ID NO: 2793634 - DNA, 25 bp, Homo sapien
gattgctcccttatcagaacttata

SEQ ID NO: 2793635 - DNA, 25 bp, Homo sapien
gaggaaattccaccgtgtcgtggga

SEQ ID NO: 2793636 - DNA, 25 bp, Homo sapien
gaggtaggcgttccattaaacagcg

SEQ ID NO: 2793637 - DNA, 25 bp, Homo sapien
taggataatgctagaagacccttct

SEQ ID NO: 2793638 - DNA, 25 bp, Homo sapien
acagcaagaaacaagtggtggacac

SEQ ID NO: 2793639 - DNA, 25 bp, Homo sapien
gccagagggcctcagtcacgggaga

SEQ ID NO: 2793640 - DNA, 25 bp, Homo sapien
gcctcagtcacgggagagatgccat

SEQ ID NO: 2793641 - DNA, 25 bp, Homo sapien
tcagcaaaccagaggcgattccggt

SEQ ID NO: 2793642 - DNA, 25 bp, Homo sapien
gtccaggcttcagcaaaccagaggc

SEQ ID NO: 2793643 - DNA, 25 bp, Homo sapien
tatctaaagttctgaggaggcccca

SEQ ID NO: 2793644 - DNA, 25 bp, Homo sapien
gatttcggctccctcatggcttgcg

SEQ ID NO: 2793645 - DNA, 25 bp, Homo sapien
aataataagcagagccttggtcccc

SEQ ID NO: 2793646 - DNA, 25 bp, Homo sapien
tcatcagattgctcaaccggctagg

SEQ ID NO: 2793647 - DNA, 25 bp, Homo sapien
ggacagtgtttcgaatgacttaaga

SEQ ID NO: 2793648 - DNA, 25 bp, Homo sapien
tttctcttgtgtacagattgcaggg

SEQ ID NO: 2793649 - DNA, 25 bp, Homo sapien
gattgcagggaacttaaagaactcg

SEQ ID NO: 2793650 - DNA, 25 bp, Homo sapien
gaactcgcagggacagtgtttcgaa

SEQ ID NO: 2793651 - DNA, 25 bp, Homo sapien
tcacttgaagaatccattgcagctg

SEQ ID NO: 2793652 - DNA, 25 bp, Homo sapien
gactgtcacgttgaggctgtgttgt

SEQ ID NO: 2793653 - DNA, 25 bp, Homo sapien
ggaaaccgcctctgatcacttgaag

SEQ ID NO: 2793654 - DNA, 25 bp, Homo sapien
tttactcctctttgcaccctcaagg

SEQ ID NO: 2793655 - DNA, 25 bp, Homo sapien
caggctgcacggctttgactgaatg

SEQ ID NO: 2793656 - DNA, 25 bp, Homo sapien
gcatccagtcgggatctgacatcat

SEQ ID NO: 2793657 - DNA, 25 bp, Homo sapien
ggactctcaaggctgccttgtgcca

SEQ ID NO: 2793658 - DNA, 25 bp, Homo sapien
tgtgctgccagtcacctgaacagtc

SEQ ID NO: 2793659 - DNA, 25 bp, Homo sapien
tctgcttgtaggctctcttcaagca

SEQ ID NO: 2793660 - DNA, 25 bp, Homo sapien
gaggttgtaaagccttttcctctgc

SEQ ID NO: 2793661 - DNA, 25 bp, Homo sapien
agtctcctccagagaggttgtaaag

SEQ ID NO: 2793662 - DNA, 25 bp, Homo sapien
aggctctcttcaagcattctaaatg

SEQ ID NO: 2793663 - DNA, 25 bp, Homo sapien
ttcctctgcaaaacgagatcgaagc

SEQ ID NO: 2793664 - DNA, 25 bp, Homo sapien
tgccacacttcttcagtcctaattt

SEQ ID NO: 2793665 - DNA, 25 bp, Homo sapien
gcaaaacgagatcgaagcttccagc

SEQ ID NO: 2793666 - DNA, 25 bp, Homo sapien
gccctggaagtaggcctctgccaca

SEQ ID NO: 2793667 - DNA, 25 bp, Homo sapien
ggaggcgggtcgctgcttgtgagat

SEQ ID NO: 2793668 - DNA, 25 bp, Homo sapien
cgggtcgctgcttgtgagatgcttt

SEQ ID NO: 2793669 - DNA, 25 bp, Homo sapien
ggtcgctgcttgtgagatgctttga

SEQ ID NO: 2793670 - DNA, 25 bp, Homo sapien
aggcgggtcgctgcttgtgagatgc

SEQ ID NO: 2793671 - DNA, 25 bp, Homo sapien
ctgcagacgggctgaaagaccggcc

SEQ ID NO: 2793672 - DNA, 25 bp, Homo sapien
gccattggcggtgagttcaaacaca

SEQ ID NO: 2793673 - DNA, 25 bp, Homo sapien
taggacagccattggcggtgagttc

SEQ ID NO: 2793674 - DNA, 25 bp, Homo sapien
ctttggtaggacagccattggcggt

SEQ ID NO: 2793675 - DNA, 25 bp, Homo sapien
ttttcttggacaaattcaaggtcag

SEQ ID NO: 2793676 - DNA, 25 bp, Homo sapien
tgattagaatcaggaccggcacttg

SEQ ID NO: 2793677 - DNA, 25 bp, Homo sapien
gcctgctggaggagtgaacacatcc

SEQ ID NO: 2793678 - DNA, 25 bp, Homo sapien
ggtactcagtaagcgccaagatttt

SEQ ID NO: 2793679 - DNA, 25 bp, Homo sapien
gaggcgggttttctacgattagcat

SEQ ID NO: 2793680 - DNA, 25 bp, Homo sapien
ggaggcgggttttctacgattagca

SEQ ID NO: 2793681 - DNA, 25 bp, Homo sapien
ttttccctgaaatttagcacaacaa

SEQ ID NO: 2793682 - DNA, 25 bp, Homo sapien
ttccctgaaatttagcacaacaaac

SEQ ID NO: 2793683 - DNA, 25 bp, Homo sapien
gttgacttttccctgaaatttagca

SEQ ID NO: 2793684 - DNA, 25 bp, Homo sapien
gacttttccctgaaatttagcacaa

SEQ ID NO: 2793685 - DNA, 25 bp, Homo sapien
gaaagcgccaccttcagttgtaaga

SEQ ID NO: 2793686 - DNA, 25 bp, Homo sapien
tgaagagcagttcgcggtatccggt

SEQ ID NO: 2793687 - DNA, 25 bp, Homo sapien
taagatctaagggtggactgcgcga

SEQ ID NO: 2793688 - DNA, 25 bp, Homo sapien
tatccggtagataggaagcacaaat

SEQ ID NO: 2793689 - DNA, 25 bp, Homo sapien
tgaagccttttctaaccgctgcggc

SEQ ID NO: 2793690 - DNA, 25 bp, Homo sapien
cagtgctgtctggtcgctttttccc

SEQ ID NO: 2793691 - DNA, 25 bp, Homo sapien
cccacgcctgtgttcctgtaggacg

SEQ ID NO: 2793692 - DNA, 25 bp, Homo sapien
taggacgtttacagttcacacgatg

SEQ ID NO: 2793693 - DNA, 25 bp, Homo sapien
catctattagggcttctggcactgc

SEQ ID NO: 2793694 - DNA, 25 bp, Homo sapien
gctgcttctgctaactgcgctttct

SEQ ID NO: 2793695 - DNA, 25 bp, Homo sapien
tgaggaccagaatccctaggaaggc

SEQ ID NO: 2793696 - DNA, 25 bp, Homo sapien
caggtctgtctctggtcctgggaag

SEQ ID NO: 2793697 - DNA, 25 bp, Homo sapien
aacagctaaatgtctaacccagaga

SEQ ID NO: 2793698 - DNA, 25 bp, Homo sapien
tataatcacacatggaaacagctaa

SEQ ID NO: 2793699 - DNA, 25 bp, Homo sapien
tgtttagaaagtgcaaatacctgag

SEQ ID NO: 2793700 - DNA, 25 bp, Homo sapien
accatgcttcgcaaacagtgtttag

SEQ ID NO: 2793701 - DNA, 25 bp, Homo sapien
tcaatcctcttttgccctatcccca

SEQ ID NO: 2793702 - DNA, 25 bp, Homo sapien
caatcctcttttgccctatccccac

SEQ ID NO: 2793703 - DNA, 25 bp, Homo sapien
tgaggtacgaagtagtgataagtcc

SEQ ID NO: 2793704 - DNA, 25 bp, Homo sapien
gagaaaagaccatgtcctcattcac

SEQ ID NO: 2793705 - DNA, 25 bp, Homo sapien
tgataagtcctgacagtccacaggg

SEQ ID NO: 2793706 - DNA, 25 bp, Homo sapien
gaaggagctcccacaaatgcgttga

SEQ ID NO: 2793707 - DNA, 25 bp, Homo sapien
cctctggataatgactggctaactc

SEQ ID NO: 2793708 - DNA, 25 bp, Homo sapien
gataatgactggctaactctattag

SEQ ID NO: 2793709 - DNA, 25 bp, Homo sapien
tctggataatgactggctaactcta

SEQ ID NO: 2793710 - DNA, 25 bp, Homo sapien
tggataatgactggctaactctatt

SEQ ID NO: 2793711 - DNA, 25 bp, Homo sapien
taaagtagaatcaatgccaggcaac

SEQ ID NO: 2793712 - DNA, 25 bp, Homo sapien
caaatgaccttggaagctgcagtaa

SEQ ID NO: 2793713 - DNA, 25 bp, Homo sapien
tcgagaaggcaaagatggagttcca

SEQ ID NO: 2793714 - DNA, 25 bp, Homo sapien
aagcaagctaacttatcgagaaggc

SEQ ID NO: 2793715 - DNA, 25 bp, Homo sapien
cacatgtttcagaagcggtgacatg

SEQ ID NO: 2793716 - DNA, 25 bp, Homo sapien
gaagcggtgacatggagagaatttt

SEQ ID NO: 2793717 - DNA, 25 bp, Homo sapien
catgaataagataaaaccaatgaaa

SEQ ID NO: 2793718 - DNA, 25 bp, Homo sapien
gccttttaggcaccaaatattaata

SEQ ID NO: 2793719 - DNA, 25 bp, Homo sapien
gaaaagacgggcaggccgctctcca

SEQ ID NO: 2793720 - DNA, 25 bp, Homo sapien
tcctaaatgggtctgtgggcaccat

SEQ ID NO: 2793721 - DNA, 25 bp, Homo sapien
tctgtgggcaccatggaaaagacgg

SEQ ID NO: 2793722 - DNA, 25 bp, Homo sapien
gcaccatggaaaagacgggcaggcc

SEQ ID NO: 2793723 - DNA, 25 bp, Homo sapien
taggatctaacttggttcccaggcc

SEQ ID NO: 2793724 - DNA, 25 bp, Homo sapien
tcttcaaaactccaaactctagggc

SEQ ID NO: 2793725 - DNA, 25 bp, Homo sapien
tgactttgtgaatgaggcgcaggct

SEQ ID NO: 2793726 - DNA, 25 bp, Homo sapien
catcgctggcatgtgctgatgctga

SEQ ID NO: 2793727 - DNA, 25 bp, Homo sapien
aaatggagaggtctgtgagtggcgc

SEQ ID NO: 2793728 - DNA, 25 bp, Homo sapien
gcatcagtgagataaatggagaggt

SEQ ID NO: 2793729 - DNA, 25 bp, Homo sapien
cagtgagataaatggagaggtctgt

SEQ ID NO: 2793730 - DNA, 25 bp, Homo sapien
ggagaggtctgtgagtggcgcgtac

SEQ ID NO: 2793731 - DNA, 25 bp, Homo sapien
cctggaagacgttatcaactaattt

SEQ ID NO: 2793732 - DNA, 25 bp, Homo sapien
ggcaggtatgatctggttcatatca

SEQ ID NO: 2793733 - DNA, 25 bp, Homo sapien
gccgtaggtctcctggaagacgtta

SEQ ID NO: 2793734 - DNA, 25 bp, Homo sapien
tatcagtaggatggccgtaggtctc

SEQ ID NO: 2793735 - DNA, 25 bp, Homo sapien
gattcacagccgaattctaccagag

SEQ ID NO: 2793736 - DNA, 25 bp, Homo sapien
caaggaggaactggtaccattcctt

SEQ ID NO: 2793737 - DNA, 25 bp, Homo sapien
caatcaaaaaaagtcaaggaccaga

SEQ ID NO: 2793738 - DNA, 25 bp, Homo sapien
gtacaaggaggaactggtaccattc

SEQ ID NO: 2793739 - DNA, 25 bp, Homo sapien
aatttgctgaatgatcgaatttgcc

SEQ ID NO: 2793740 - DNA, 25 bp, Homo sapien
caattttaatccaagagtctcctgg

SEQ ID NO: 2793741 - DNA, 25 bp, Homo sapien
gaatgatcgaatttgccaccttctt

SEQ ID NO: 2793742 - DNA, 25 bp, Homo sapien
taatccaagagtctcctggaattat

SEQ ID NO: 2793743 - DNA, 25 bp, Homo sapien
aggctttctctaaattgattccctt

SEQ ID NO: 2793744 - DNA, 25 bp, Homo sapien
tgcatgaggaaagtcacagactcca

SEQ ID NO: 2793745 - DNA, 25 bp, Homo sapien
agcaatttgcatgaggaaagtcaca

SEQ ID NO: 2793746 - DNA, 25 bp, Homo sapien
tgattccctttttgcaaagccaagt

SEQ ID NO: 2793747 - DNA, 25 bp, Homo sapien
tgttccttagttggaggtcacagcc

SEQ ID NO: 2793748 - DNA, 25 bp, Homo sapien
gggaccacaactgaaagcctcagct

SEQ ID NO: 2793749 - DNA, 25 bp, Homo sapien
taaaaattgacagccctggtcagta

SEQ ID NO: 2793750 - DNA, 25 bp, Homo sapien
tgtctgtccttaggaaggctgttcc

SEQ ID NO: 2793751 - DNA, 25 bp, Homo sapien
gtggcctgtacaatggagatttcct

SEQ ID NO: 2793752 - DNA, 25 bp, Homo sapien
cagtggcctgtacaatggagatttc

SEQ ID NO: 2793753 - DNA, 25 bp, Homo sapien
ttccctatgccccttctgcacaaac

SEQ ID NO: 2793754 - DNA, 25 bp, Homo sapien
tccttccctatgccccttctgcaca

SEQ ID NO: 2793755 - DNA, 25 bp, Homo sapien
gcaccatcagtgaagttacgggaag

SEQ ID NO: 2793756 - DNA, 25 bp, Homo sapien
tacgggaaggaaggtgcacccgatc

SEQ ID NO: 2793757 - DNA, 25 bp, Homo sapien
gaaggaaggtgcacccgatcgtgct

SEQ ID NO: 2793758 - DNA, 25 bp, Homo sapien
ccgatcgtgctgctgtagacatggg

SEQ ID NO: 2793759 - DNA, 25 bp, Homo sapien
ggctgcctcaggaaattgaaacgta

SEQ ID NO: 2793760 - DNA, 25 bp, Homo sapien
taggcaccctcttgagtttaggcag

SEQ ID NO: 2793761 - DNA, 25 bp, Homo sapien
taagaggaccactttaaagggcaga

SEQ ID NO: 2793762 - DNA, 25 bp, Homo sapien
taccgccgtatcaagcagtcatggg

SEQ ID NO: 2793763 - DNA, 25 bp, Homo sapien
tacatggaccgtgcactttgcatga

SEQ ID NO: 2793764 - DNA, 25 bp, Homo sapien
caactgcgtaaagagaacattccca

SEQ ID NO: 2793765 - DNA, 25 bp, Homo sapien
aatgcacacttccacgtacatggac

SEQ ID NO: 2793766 - DNA, 25 bp, Homo sapien
gacacctccataacacaaggctgaa

SEQ ID NO: 2793767 - DNA, 25 bp, Homo sapien
ctacagaggactttagcttccagtg

SEQ ID NO: 2793768 - DNA, 25 bp, Homo sapien
cagagcaactcatggcctggctctt

SEQ ID NO: 2793769 - DNA, 25 bp, Homo sapien
agtgagatcaaagctcgcccttctt

SEQ ID NO: 2793770 - DNA, 25 bp, Homo sapien
ttcttcagagcaactcatggcctgg

SEQ ID NO: 2793771 - DNA, 25 bp, Homo sapien
gctgtatgcttcatatgtgggcagt

SEQ ID NO: 2793772 - DNA, 25 bp, Homo sapien
ttcttttgctgtatgcttcatatgt

SEQ ID NO: 2793773 - DNA, 25 bp, Homo sapien
ttttcccagtagcatgcccttttct

SEQ ID NO: 2793774 - DNA, 25 bp, Homo sapien
tttgttccatgagattttatcttga

SEQ ID NO: 2793775 - DNA, 25 bp, Homo sapien
cttttgttccatgagattttatctt

SEQ ID NO: 2793776 - DNA, 25 bp, Homo sapien
gttccatgagattttatcttgattc

SEQ ID NO: 2793777 - DNA, 25 bp, Homo sapien
gcacagagcacatagagatactgga

SEQ ID NO: 2793778 - DNA, 25 bp, Homo sapien
gatagctgctgagtttgtggttttg

SEQ ID NO: 2793779 - DNA, 25 bp, Homo sapien
tagctgctgagtttgtggttttgtt

SEQ ID NO: 2793780 - DNA, 25 bp, Homo sapien
tgaggatagctgctgagtttgtggt

SEQ ID NO: 2793781 - DNA, 25 bp, Homo sapien
aggatagctgctgagtttgtggttt

SEQ ID NO: 2793782 - DNA, 25 bp, Homo sapien
tgaggtcaggatcaacgggctgttc

SEQ ID NO: 2793783 - DNA, 25 bp, Homo sapien
catcatctctgctgaatctatagtc

SEQ ID NO: 2793784 - DNA, 25 bp, Homo sapien
taaacaggcttaacctagacgacat

SEQ ID NO: 2793785 - DNA, 25 bp, Homo sapien
gagcttcttagtaaacaggcttaac

SEQ ID NO: 2793786 - DNA, 25 bp, Homo sapien
agcctgagctcatagccactactga

SEQ ID NO: 2793787 - DNA, 25 bp, Homo sapien
agctccatggccctgtcttgtgagg

SEQ ID NO: 2793788 - DNA, 25 bp, Homo sapien
ccactactgatgagtcctggagatc

SEQ ID NO: 2793789 - DNA, 25 bp, Homo sapien
tcacagaggcctagaaaagtaacag

SEQ ID NO: 2793790 - DNA, 25 bp, Homo sapien
gacctggtactatctctgctcagca

SEQ ID NO: 2793791 - DNA, 25 bp, Homo sapien
ttgaagctaagcctttgccagacct

SEQ ID NO: 2793792 - DNA, 25 bp, Homo sapien
accaccaccgttgaagctaagcctt

SEQ ID NO: 2793793 - DNA, 25 bp, Homo sapien
tcagcatccaaacgatacccacagt

SEQ ID NO: 2793794 - DNA, 25 bp, Homo sapien
gaatcagcgtcagcgctcatttcac

SEQ ID NO: 2793795 - DNA, 25 bp, Homo sapien
tcagaatcagcgtcagcgctcattt

SEQ ID NO: 2793796 - DNA, 25 bp, Homo sapien
gtctcagaatcagcgtcagcgctca

SEQ ID NO: 2793797 - DNA, 25 bp, Homo sapien
aacagtctcagaatcagcgtcagcg

SEQ ID NO: 2793798 - DNA, 25 bp, Homo sapien
tgtttgacttcatatcccatcactg

SEQ ID NO: 2793799 - DNA, 25 bp, Homo sapien
attttgcaacaggatagcttgcttt

SEQ ID NO: 2793800 - DNA, 25 bp, Homo sapien
tcatatcccatcactgcttcttagc

SEQ ID NO: 2793801 - DNA, 25 bp, Homo sapien
tgcaacaggatagcttgcttttaag

SEQ ID NO: 2793802 - DNA, 25 bp, Homo sapien
tcaccaccagaatggcttcctgcca

SEQ ID NO: 2793803 - DNA, 25 bp, Homo sapien
tgtcctccttctcaccaccagaatg

SEQ ID NO: 2793804 - DNA, 25 bp, Homo sapien
tcctttcttcccgttcctgagtgtc

SEQ ID NO: 2793805 - DNA, 25 bp, Homo sapien
tttcttcccgttcctgagtgtcctc

SEQ ID NO: 2793806 - DNA, 25 bp, Homo sapien
gccagagtcaacagattttccaggt

SEQ ID NO: 2793807 - DNA, 25 bp, Homo sapien
ccagagtcaacagattttccaggtg

SEQ ID NO: 2793808 - DNA, 25 bp, Homo sapien
agccagagtcaacagattttccagg

SEQ ID NO: 2793809 - DNA, 25 bp, Homo sapien
aattctcatgtctagggtttcattt

SEQ ID NO: 2793810 - DNA, 25 bp, Homo sapien
aatccttcagtgtatgtatgccgaa

SEQ ID NO: 2793811 - DNA, 25 bp, Homo sapien
cagtgtatgtatgccgaaacaaaaa

SEQ ID NO: 2793812 - DNA, 25 bp, Homo sapien
tcatgtctagggtttcatttgccat

SEQ ID NO: 2793813 - DNA, 25 bp, Homo sapien
agtttgaaactgagccaaggtgtgc

SEQ ID NO: 2793814 - DNA, 25 bp, Homo sapien
tacttctggttagagtgccaaacag

SEQ ID NO: 2793815 - DNA, 25 bp, Homo sapien
tagacacctctgtagcccctgggtt

SEQ ID NO: 2793816 - DNA, 25 bp, Homo sapien
accacgcgaagacccactgtttgag

SEQ ID NO: 2793817 - DNA, 25 bp, Homo sapien
actgattgctccagaggttcttctt

SEQ ID NO: 2793818 - DNA, 25 bp, Homo sapien
gactgattgctccagaggttcttct

SEQ ID NO: 2793819 - DNA, 25 bp, Homo sapien
gggagactccaccttcctcaacatg

SEQ ID NO: 2793820 - DNA, 25 bp, Homo sapien
ttatctctaatccaagactgtggct

SEQ ID NO: 2793821 - DNA, 25 bp, Homo sapien
tctttagcaacttttcatcttgaaa

SEQ ID NO: 2793822 - DNA, 25 bp, Homo sapien
tactggagcaaaccgcttccctttc

SEQ ID NO: 2793823 - DNA, 25 bp, Homo sapien
agcttttaccccataccagcagggc

SEQ ID NO: 2793824 - DNA, 25 bp, Homo sapien
gcttcagccagcttttaccccatac

SEQ ID NO: 2793825 - DNA, 25 bp, Homo sapien
gcagggcatcattgtcttcgagata

SEQ ID NO: 2793826 - DNA, 25 bp, Homo sapien
gggcatcattgtcttcgagatacag

SEQ ID NO: 2793827 - DNA, 25 bp, Homo sapien
tctgtaggacttgaagcaaatcaca

SEQ ID NO: 2793828 - DNA, 25 bp, Homo sapien
tgcatgtactggctctggactagac

SEQ ID NO: 2793829 - DNA, 25 bp, Homo sapien
ggtgcctagccctatactaaaagat

SEQ ID NO: 2793830 - DNA, 25 bp, Homo sapien
tcaaacacttactaaggtgcctagc

SEQ ID NO: 2793831 - DNA, 25 bp, Homo sapien
caatatatttagcttcactgtgcct

SEQ ID NO: 2793832 - DNA, 25 bp, Homo sapien
ccaatatatttagcttcactgtgcc

SEQ ID NO: 2793833 - DNA, 25 bp, Homo sapien
gccaatatatttagcttcactgtgc

SEQ ID NO: 2793834 - DNA, 25 bp, Homo sapien
gatttattattaggaattggcttac

SEQ ID NO: 2793835 - DNA, 25 bp, Homo sapien
gagaaagagatttattattaggaat

SEQ ID NO: 2793836 - DNA, 25 bp, Homo sapien
gagagagaaagagatttattattag

SEQ ID NO: 2793837 - DNA, 25 bp, Homo sapien
gagagaaagagatttattattagga

SEQ ID NO: 2793838 - DNA, 25 bp, Homo sapien
cacccatattggagagagccatcta

SEQ ID NO: 2793839 - DNA, 25 bp, Homo sapien
aaagtaccgtgatccaccatctgca

SEQ ID NO: 2793840 - DNA, 25 bp, Homo sapien
gaaggtgagatgcaatgtcccagcc

SEQ ID NO: 2793841 - DNA, 25 bp, Homo sapien
tatgatggaggctaaaaagtaccgt

SEQ ID NO: 2793842 - DNA, 25 bp, Homo sapien
tttaagtaccctagagaagaccaca

SEQ ID NO: 2793843 - DNA, 25 bp, Homo sapien
catgagggtttagccataatgaaca

SEQ ID NO: 2793844 - DNA, 25 bp, Homo sapien
ctgaaaccctataccctgccatggt

SEQ ID NO: 2793845 - DNA, 25 bp, Homo sapien
tcggactggtggatttataagacaa

SEQ ID NO: 2793846 - DNA, 25 bp, Homo sapien
tactccccaatgtggcaactttgag

SEQ ID NO: 2793847 - DNA, 25 bp, Homo sapien
atcttggccaagttagttatcctct

SEQ ID NO: 2793848 - DNA, 25 bp, Homo sapien
caagttagttatcctcttagagttc

SEQ ID NO: 2793849 - DNA, 25 bp, Homo sapien
aaatgaggttactgcattagatttg

SEQ ID NO: 2793850 - DNA, 25 bp, Homo sapien
gcattagatttgtcgatgcctccag

SEQ ID NO: 2793851 - DNA, 25 bp, Homo sapien
tctcgagattcgagcagggaggcac

SEQ ID NO: 2793852 - DNA, 25 bp, Homo sapien
tgtctttgcgataaggcaggagcct

SEQ ID NO: 2793853 - DNA, 25 bp, Homo sapien
ccaagcccgtgtgtgatctgattct

SEQ ID NO: 2793854 - DNA, 25 bp, Homo sapien
tggcaatcaatggagaccctgggct

SEQ ID NO: 2793855 - DNA, 25 bp, Homo sapien
taagaataatctgagggaaggaaac

SEQ ID NO: 2793856 - DNA, 25 bp, Homo sapien
aaaggcttgttatttctaagagcaa

SEQ ID NO: 2793857 - DNA, 25 bp, Homo sapien
tctcattacccttgttgcagttggg

SEQ ID NO: 2793858 - DNA, 25 bp, Homo sapien
aatttctcatgatggcaggttaggg

SEQ ID NO: 2793859 - DNA, 25 bp, Homo sapien
tatgctggggtacagaagttaggct

SEQ ID NO: 2793860 - DNA, 25 bp, Homo sapien
ccagcgacgctggaacagtgttatt

SEQ ID NO: 2793861 - DNA, 25 bp, Homo sapien
cccagggcacggctgttactttgga

SEQ ID NO: 2793862 - DNA, 25 bp, Homo sapien
cagtgttattgtgggatatgttcag

SEQ ID NO: 2793863 - DNA, 25 bp, Homo sapien
ttagaaagcacggccgcgcgctgtc

SEQ ID NO: 2793864 - DNA, 25 bp, Homo sapien
gctgtcggacgcaggcccacaggcc

SEQ ID NO: 2793865 - DNA, 25 bp, Homo sapien
cgcgcgctgtcggacgcaggcccac

SEQ ID NO: 2793866 - DNA, 25 bp, Homo sapien
tagaaagcacggccgcgcgctgtcg

SEQ ID NO: 2793867 - DNA, 25 bp, Homo sapien
ccgccgaatgttcccgccgcgggct

SEQ ID NO: 2793868 - DNA, 25 bp, Homo sapien
accggcgctcggtgaagcccagatt

SEQ ID NO: 2793869 - DNA, 25 bp, Homo sapien
ttgccaaggcgaccgccgccgaatg

SEQ ID NO: 2793870 - DNA, 25 bp, Homo sapien
tctttgttccgcagccatttcaggc

SEQ ID NO: 2793871 - DNA, 25 bp, Homo sapien
ccgaaggcccgagcgcccgaggcgt

SEQ ID NO: 2793872 - DNA, 25 bp, Homo sapien
gccgaaggcccgagcgcccgaggcg

SEQ ID NO: 2793873 - DNA, 25 bp, Homo sapien
ccgggtaggtggcgtgagggtgcgc

SEQ ID NO: 2793874 - DNA, 25 bp, Homo sapien
cgggtaggtggcgtgagggtgcgcg

SEQ ID NO: 2793875 - DNA, 25 bp, Homo sapien
gaccgggtaggtggcgtgagggtgc

SEQ ID NO: 2793876 - DNA, 25 bp, Homo sapien
gggtaggtggcgtgagggtgcgcgg

SEQ ID NO: 2793877 - DNA, 25 bp, Homo sapien
tgcgtacaagcaacagggaacagct

SEQ ID NO: 2793878 - DNA, 25 bp, Homo sapien
catcgtccttacatgcagcttgccg

SEQ ID NO: 2793879 - DNA, 25 bp, Homo sapien
ctttcactggttctgggcgctggcc

SEQ ID NO: 2793880 - DNA, 25 bp, Homo sapien
gtttgcctcgcctgttaagctgtgg

SEQ ID NO: 2793881 - DNA, 25 bp, Homo sapien
ccacaatcaagctattttcggaatg

SEQ ID NO: 2793882 - DNA, 25 bp, Homo sapien
caatcaagctattttcggaatgact

SEQ ID NO: 2793883 - DNA, 25 bp, Homo sapien
cacaatcaagctattttcggaatga

SEQ ID NO: 2793884 - DNA, 25 bp, Homo sapien
atcaagctattttcggaatgacttt

SEQ ID NO: 2793885 - DNA, 25 bp, Homo sapien
ggctgttagctctagacaggttgtg

SEQ ID NO: 2793886 - DNA, 25 bp, Homo sapien
tgggctgttagctctagacaggttg

SEQ ID NO: 2793887 - DNA, 25 bp, Homo sapien
cctgggctgttagctctagacaggt

SEQ ID NO: 2793888 - DNA, 25 bp, Homo sapien
gggctgttagctctagacaggttgt

SEQ ID NO: 2793889 - DNA, 25 bp, Homo sapien
gccagattgcaaattcgcggtgact

SEQ ID NO: 2793890 - DNA, 25 bp, Homo sapien
gcccttaagtcagtagtaatctgga

SEQ ID NO: 2793891 - DNA, 25 bp, Homo sapien
tatacccaaaacagatctcttcagg

SEQ ID NO: 2793892 - DNA, 25 bp, Homo sapien
agaaaactgcgtggcactaggaccc

SEQ ID NO: 2793893 - DNA, 25 bp, Homo sapien
gcaggtccgcggcgtttggggagcg

SEQ ID NO: 2793894 - DNA, 25 bp, Homo sapien
caggtccgcggcgtttggggagcgc

SEQ ID NO: 2793895 - DNA, 25 bp, Homo sapien
ctgggcctgtgcaccgggagtaaca

SEQ ID NO: 2793896 - DNA, 25 bp, Homo sapien
gaaacctgacgagcaagggcttcag

SEQ ID NO: 2793897 - DNA, 25 bp, Homo sapien
gtaacagttgctccgtctcttcctg

SEQ ID NO: 2793898 - DNA, 25 bp, Homo sapien
cagcaaaccaagatggagtatgagt

SEQ ID NO: 2793899 - DNA, 25 bp, Homo sapien
accaccatccagagaaccgtgcaac

SEQ ID NO: 2793900 - DNA, 25 bp, Homo sapien
caccatccagagaaccgtgcaacaa

SEQ ID NO: 2793901 - DNA, 25 bp, Homo sapien
agacaccaccatccagagaaccgtg

SEQ ID NO: 2793902 - DNA, 25 bp, Homo sapien
acaccaccatccagagaaccgtgca

SEQ ID NO: 2793903 - DNA, 25 bp, Homo sapien
gaagggataatgatttagatctgct

SEQ ID NO: 2793904 - DNA, 25 bp, Homo sapien
gggataatgatttagatctgcttgg

SEQ ID NO: 2793905 - DNA, 25 bp, Homo sapien
agggataatgatttagatctgcttg

SEQ ID NO: 2793906 - DNA, 25 bp, Homo sapien
ggaagggataatgatttagatctgc

SEQ ID NO: 2793907 - DNA, 25 bp, Homo sapien
gaacaacttaatcagtatccagact

SEQ ID NO: 2793908 - DNA, 25 bp, Homo sapien
aactggaacaacttaatcagtatcc

SEQ ID NO: 2793909 - DNA, 25 bp, Homo sapien
tatccagactttaacaactacttga

SEQ ID NO: 2793910 - DNA, 25 bp, Homo sapien
tcagtatccagactttaacaactac

SEQ ID NO: 2793911 - DNA, 25 bp, Homo sapien
cattgagtggtcttatcttgaagaa

SEQ ID NO: 2793912 - DNA, 25 bp, Homo sapien
atgaacccacaagatcattgagtgg

SEQ ID NO: 2793913 - DNA, 25 bp, Homo sapien
actttcagaacttcccaaatggtgt

SEQ ID NO: 2793914 - DNA, 25 bp, Homo sapien
aataatattggtgactcctctcctc

SEQ ID NO: 2793915 - DNA, 25 bp, Homo sapien
tgtctctagaccatgccacgtgttg

SEQ ID NO: 2793916 - DNA, 25 bp, Homo sapien
taccctgctgtagcaaccaaaaatg

SEQ ID NO: 2793917 - DNA, 25 bp, Homo sapien
cactacaggatgttaatcagcacac

SEQ ID NO: 2793918 - DNA, 25 bp, Homo sapien
gtaggactctgttcctctagaccag

SEQ ID NO: 2793919 - DNA, 25 bp, Homo sapien
tgagtgtttactagatgccaggcat

SEQ ID NO: 2793920 - DNA, 25 bp, Homo sapien
gaaagactaatttgcaggaacgatc

SEQ ID NO: 2793921 - DNA, 25 bp, Homo sapien
ttaataggtgttgccaagcacactg

SEQ ID NO: 2793922 - DNA, 25 bp, Homo sapien
tggagaataaatttgccgggagctt

SEQ ID NO: 2793923 - DNA, 25 bp, Homo sapien
tggattctgaagattataatacctg

SEQ ID NO: 2793924 - DNA, 25 bp, Homo sapien
gattctgaagattataatacctgtg

SEQ ID NO: 2793925 - DNA, 25 bp, Homo sapien
gaattggcctgacctcttaccaaaa

SEQ ID NO: 2793926 - DNA, 25 bp, Homo sapien
agggagaattgcagaattggcctga

SEQ ID NO: 2793927 - DNA, 25 bp, Homo sapien
gtcctctcaacatcatgattcccaa

SEQ ID NO: 2793928 - DNA, 25 bp, Homo sapien
cagtgatgttttagatcgtcctctc

SEQ ID NO: 2793929 - DNA, 25 bp, Homo sapien
agaagatttgtgaagattctgctga

SEQ ID NO: 2793930 - DNA, 25 bp, Homo sapien
tttacagttcttcaagcatagtagt

SEQ ID NO: 2793931 - DNA, 25 bp, Homo sapien
ttttagaggccttgaacatattaca

SEQ ID NO: 2793932 - DNA, 25 bp, Homo sapien
caggcacttacttggtcttatgata

SEQ ID NO: 2793933 - DNA, 25 bp, Homo sapien
aatgtaagtcctaactgttcccaag

SEQ ID NO: 2793934 - DNA, 25 bp, Homo sapien
ttccaaagaaagcacgtcacactgt

SEQ ID NO: 2793935 - DNA, 25 bp, Homo sapien
tatcatcagtaggactcaagctcta

SEQ ID NO: 2793936 - DNA, 25 bp, Homo sapien
gttgcatgtgtcaatcagtttatca

SEQ ID NO: 2793937 - DNA, 25 bp, Homo sapien
caagctctaatgttgcacattgatt

SEQ ID NO: 2793938 - DNA, 25 bp, Homo sapien
gttgcacattgattcttttattgag

SEQ ID NO: 2793939 - DNA, 25 bp, Homo sapien
cagaggtacggaaaaatgtgtgccg

SEQ ID NO: 2793940 - DNA, 25 bp, Homo sapien
tcgaagttcgaatggatcgcctgct

SEQ ID NO: 2793941 - DNA, 25 bp, Homo sapien
ttgcattagctggtgatgaagaacc

SEQ ID NO: 2793942 - DNA, 25 bp, Homo sapien
gtgtgccgagcacttgtgatgttgc

SEQ ID NO: 2793943 - DNA, 25 bp, Homo sapien
tacatgctacagaggactcaagatc

SEQ ID NO: 2793944 - DNA, 25 bp, Homo sapien
tgtgaattttggctaactttagctg

SEQ ID NO: 2793945 - DNA, 25 bp, Homo sapien
gctgaacagccaatatgcaaagatg

SEQ ID NO: 2793946 - DNA, 25 bp, Homo sapien
gatgtactcgtaaggcatcttccta

SEQ ID NO: 2793947 - DNA, 25 bp, Homo sapien
agtgaatggcatgaagtactcagac

SEQ ID NO: 2793948 - DNA, 25 bp, Homo sapien
tactcagacatagatattatcctac

SEQ ID NO: 2793949 - DNA, 25 bp, Homo sapien
gttgattcctgtgttagtgaatggc

SEQ ID NO: 2793950 - DNA, 25 bp, Homo sapien
gaagtactcagacatagatattatc

SEQ ID NO: 2793951 - DNA, 25 bp, Homo sapien
tgatagtgaacaggatatacggcca

SEQ ID NO: 2793952 - DNA, 25 bp, Homo sapien
tgttgaagaagacgaaacgattcct

SEQ ID NO: 2793953 - DNA, 25 bp, Homo sapien
tatacggccacgttttcaccgatcg

SEQ ID NO: 2793954 - DNA, 25 bp, Homo sapien
caccgatcgaggacggtggctcagc

SEQ ID NO: 2793955 - DNA, 25 bp, Homo sapien
taatcatctcttgataggccccacc

SEQ ID NO: 2793956 - DNA, 25 bp, Homo sapien
aggaacacgttcctacccataacag

SEQ ID NO: 2793957 - DNA, 25 bp, Homo sapien
ccatcttcgttgctttagggattag

SEQ ID NO: 2793958 - DNA, 25 bp, Homo sapien
tgacagaaggacacacttaagagct

SEQ ID NO: 2793959 - DNA, 25 bp, Homo sapien
tgagcccagtgcctaggactatatt

SEQ ID NO: 2793960 - DNA, 25 bp, Homo sapien
cagtgcctaggactatattttaaaa

SEQ ID NO: 2793961 - DNA, 25 bp, Homo sapien
gccactgagcccagtgcctaggact

SEQ ID NO: 2793962 - DNA, 25 bp, Homo sapien
cccagtgcctaggactatattttaa

SEQ ID NO: 2793963 - DNA, 25 bp, Homo sapien
cacacagggtgcaagttaaaagcta

SEQ ID NO: 2793964 - DNA, 25 bp, Homo sapien
taaaagtcagcttgccttcccgtag

SEQ ID NO: 2793965 - DNA, 25 bp, Homo sapien
tggtaaaagatctgtaaaaggctgc

SEQ ID NO: 2793966 - DNA, 25 bp, Homo sapien
cagtttaaggttcaggcatgcattc

SEQ ID NO: 2793967 - DNA, 25 bp, Homo sapien
tatgttgtaggaacctcaggaggtc

SEQ ID NO: 2793968 - DNA, 25 bp, Homo sapien
ggtaaatatgactggcaacctgaat

SEQ ID NO: 2793969 - DNA, 25 bp, Homo sapien
tcttggcatgcttaaagcacggctt

SEQ ID NO: 2793970 - DNA, 25 bp, Homo sapien
cagaaatagccgctgctaagtgatg

SEQ ID NO: 2793971 - DNA, 25 bp, Homo sapien
ctttgaaggattctaacagaacaaa

SEQ ID NO: 2793972 - DNA, 25 bp, Homo sapien
ttgaaggattctaacagaacaaagc

SEQ ID NO: 2793973 - DNA, 25 bp, Homo sapien
gaaggattctaacagaacaaagctg

SEQ ID NO: 2793974 - DNA, 25 bp, Homo sapien
aaggattctaacagaacaaagctgc

SEQ ID NO: 2793975 - DNA, 25 bp, Homo sapien
tccattagcgagtgaacttagtgcc

SEQ ID NO: 2793976 - DNA, 25 bp, Homo sapien
agttccatgttacagtccattagcg

SEQ ID NO: 2793977 - DNA, 25 bp, Homo sapien
acttagtgccacaggtattcattta

SEQ ID NO: 2793978 - DNA, 25 bp, Homo sapien
taaatgcatgtttggcagttccatg

SEQ ID NO: 2793979 - DNA, 25 bp, Homo sapien
tcttcagatagttaagggcttggga

SEQ ID NO: 2793980 - DNA, 25 bp, Homo sapien
tagcgttgtataccaacttagtgca

SEQ ID NO: 2793981 - DNA, 25 bp, Homo sapien
cacccattagcattacttacgtaga

SEQ ID NO: 2793982 - DNA, 25 bp, Homo sapien
gaagagtgtatcatgcataactgca

SEQ ID NO: 2793983 - DNA, 25 bp, Homo sapien
gatgtttcctgtacctgccacacta

SEQ ID NO: 2793984 - DNA, 25 bp, Homo sapien
tataacatggttagcctataaggca

SEQ ID NO: 2793985 - DNA, 25 bp, Homo sapien
aatataactggatctttctgctgac

SEQ ID NO: 2793986 - DNA, 25 bp, Homo sapien
gggttccactgtactttccgcatat

SEQ ID NO: 2793987 - DNA, 25 bp, Homo sapien
ttcatatccagcaccaactccagtg

SEQ ID NO: 2793988 - DNA, 25 bp, Homo sapien
ctttcagttaaattgtactcatttt

SEQ ID NO: 2793989 - DNA, 25 bp, Homo sapien
cagcaccaactccagtggattctgt

SEQ ID NO: 2793990 - DNA, 25 bp, Homo sapien
ttaaattgtactcattttcatatcc

SEQ ID NO: 2793991 - DNA, 25 bp, Homo sapien
cacatctagtagaatgggaaccaga

SEQ ID NO: 2793992 - DNA, 25 bp, Homo sapien
caaggtatctaggtcgaaggcccag

SEQ ID NO: 2793993 - DNA, 25 bp, Homo sapien
gcttttgctgactatggatcccctg

SEQ ID NO: 2793994 - DNA, 25 bp, Homo sapien
taacagcaggccctagtacaagctc

SEQ ID NO: 2793995 - DNA, 25 bp, Homo sapien
tccaagagaactgtacgtatattgc

SEQ ID NO: 2793996 - DNA, 25 bp, Homo sapien
ttgtagtcacaattctgcccagcat

SEQ ID NO: 2793997 - DNA, 25 bp, Homo sapien
ggacctagcctcaaaagccatatag

SEQ ID NO: 2793998 - DNA, 25 bp, Homo sapien
cttctttacagcgtggtggtcggat

SEQ ID NO: 2793999 - DNA, 25 bp, Homo sapien
taagaagagacgttacctacagagt

SEQ ID NO: 2794000 - DNA, 25 bp, Homo sapien
gaaatgctgcaaactaggacttccc

SEQ ID NO: 2794001 - DNA, 25 bp, Homo sapien
gagacagctgctatgaaacacaacc

SEQ ID NO: 2794002 - DNA, 25 bp, Homo sapien
tgaggaaatgcgtccagctatgaat

SEQ ID NO: 2794003 - DNA, 25 bp, Homo sapien
ttattgctataattgccatgatctc

SEQ ID NO: 2794004 - DNA, 25 bp, Homo sapien
gactgtgaatttctcaaaggcagag

SEQ ID NO: 2794005 - DNA, 25 bp, Homo sapien
tattgcttgccaactatgcgtcagg

SEQ ID NO: 2794006 - DNA, 25 bp, Homo sapien
catcatacgtctatattagactgtg

SEQ ID NO: 2794007 - DNA, 25 bp, Homo sapien
tttgaagcattgttgggttccctgt

SEQ ID NO: 2794008 - DNA, 25 bp, Homo sapien
cattgttgggttccctgtggtcact

SEQ ID NO: 2794009 - DNA, 25 bp, Homo sapien
ttttgaagcattgttgggttccctg

SEQ ID NO: 2794010 - DNA, 25 bp, Homo sapien
aagcattgttgggttccctgtggtc

SEQ ID NO: 2794011 - DNA, 25 bp, Homo sapien
tcaatcccaggtgcacttaggagag

SEQ ID NO: 2794012 - DNA, 25 bp, Homo sapien
tccacctggtaagccgctctgaaat

SEQ ID NO: 2794013 - DNA, 25 bp, Homo sapien
agaaagaatactgcacctgaccggg

SEQ ID NO: 2794014 - DNA, 25 bp, Homo sapien
aacaagagcgtaccagacttcaggg

SEQ ID NO: 2794015 - DNA, 25 bp, Homo sapien
taacgcatataagctcggtggctca

SEQ ID NO: 2794016 - DNA, 25 bp, Homo sapien
cagaagaatgcgaatgaaggccagt

SEQ ID NO: 2794017 - DNA, 25 bp, Homo sapien
gaatgtatgttcatccctggaaacc

SEQ ID NO: 2794018 - DNA, 25 bp, Homo sapien
tacaggatatggtgtttcggcccta

SEQ ID NO: 2794019 - DNA, 25 bp, Homo sapien
gactatagtccgttcgagatcctcg

SEQ ID NO: 2794020 - DNA, 25 bp, Homo sapien
gaaaggcgccctgttgaccaaaggc

SEQ ID NO: 2794021 - DNA, 25 bp, Homo sapien
tgttcccggcgtgttagaggtcaga

SEQ ID NO: 2794022 - DNA, 25 bp, Homo sapien
ggctctcaggcgacactgggcgttt

SEQ ID NO: 2794023 - DNA, 25 bp, Homo sapien
gatgccctcaggttcaccgctgatg

SEQ ID NO: 2794024 - DNA, 25 bp, Homo sapien
taagacgagatactacggacagcac

SEQ ID NO: 2794025 - DNA, 25 bp, Homo sapien
tgagccgcaaccttcaccagtatag

SEQ ID NO: 2794026 - DNA, 25 bp, Homo sapien
tgggcagctacatcaaggacctctc

SEQ ID NO: 2794027 - DNA, 25 bp, Homo sapien
gatgccctgtccaatgtgaggactg

SEQ ID NO: 2794028 - DNA, 25 bp, Homo sapien
gataccgtttgatgccctgtccaat

SEQ ID NO: 2794029 - DNA, 25 bp, Homo sapien
gcgagcccttgggataccgtttgat

SEQ ID NO: 2794030 - DNA, 25 bp, Homo sapien
gccctgtccaatgtgaggactgcct

SEQ ID NO: 2794031 - DNA, 25 bp, Homo sapien
tagaatgtacttatgcctggccagg

SEQ ID NO: 2794032 - DNA, 25 bp, Homo sapien
gacttgctaatatgttgaaatcctg

SEQ ID NO: 2794033 - DNA, 25 bp, Homo sapien
agatttgttaagcagtaccctcaga

SEQ ID NO: 2794034 - DNA, 25 bp, Homo sapien
gtagccctgtgtcgcttaacaacag

SEQ ID NO: 2794035 - DNA, 25 bp, Homo sapien
actagaccgcaaggaacagtttggt

SEQ ID NO: 2794036 - DNA, 25 bp, Homo sapien
tactagaccgcaaggaacagtttgg

SEQ ID NO: 2794037 - DNA, 25 bp, Homo sapien
ctagaccgcaaggaacagtttggtc

SEQ ID NO: 2794038 - DNA, 25 bp, Homo sapien
agaccgcaaggaacagtttggtctc

SEQ ID NO: 2794039 - DNA, 25 bp, Homo sapien
ttagtgaagaaattggatgctcatt

SEQ ID NO: 2794040 - DNA, 25 bp, Homo sapien
aagaaattggatgctcattttctgt

SEQ ID NO: 2794041 - DNA, 25 bp, Homo sapien
gaaattggatgctcattttctgttc

SEQ ID NO: 2794042 - DNA, 25 bp, Homo sapien
tggatgctcattttctgttctacat

SEQ ID NO: 2794043 - DNA, 25 bp, Homo sapien
tcaccacgggagagcttatcatctt

SEQ ID NO: 2794044 - DNA, 25 bp, Homo sapien
gtgtagcacctgtatcagctcacca

SEQ ID NO: 2794045 - DNA, 25 bp, Homo sapien
ctgaccattaagtgtagcacctgta

SEQ ID NO: 2794046 - DNA, 25 bp, Homo sapien
gcttatcatctttatcgaaatcata

SEQ ID NO: 2794047 - DNA, 25 bp, Homo sapien
ggggtggaaatgagccaaagttcac

SEQ ID NO: 2794048 - DNA, 25 bp, Homo sapien
ctcaatggggtggaaatgagccaaa

SEQ ID NO: 2794049 - DNA, 25 bp, Homo sapien
atggggtggaaatgagccaaagttc

SEQ ID NO: 2794050 - DNA, 25 bp, Homo sapien
caatggggtggaaatgagccaaagt

SEQ ID NO: 2794051 - DNA, 25 bp, Homo sapien
ggaaatcttcatggctgagaatgcc

SEQ ID NO: 2794052 - DNA, 25 bp, Homo sapien
gatgacaagttctggaatcctcagg

SEQ ID NO: 2794053 - DNA, 25 bp, Homo sapien
agaagacattgatgattcggtcccc

SEQ ID NO: 2794054 - DNA, 25 bp, Homo sapien
tgagaatgccatctctcctttgtcc

SEQ ID NO: 2794055 - DNA, 25 bp, Homo sapien
gaactgcttgctgtttcacatacat

SEQ ID NO: 2794056 - DNA, 25 bp, Homo sapien
ctgaactgcttgctgtttcacatac

SEQ ID NO: 2794057 - DNA, 25 bp, Homo sapien
tgaactgcttgctgtttcacataca

SEQ ID NO: 2794058 - DNA, 25 bp, Homo sapien
ccggaggagatctcagtctctctca

SEQ ID NO: 2794059 - DNA, 25 bp, Homo sapien
tcgtccccggaggagatctcagtct

SEQ ID NO: 2794060 - DNA, 25 bp, Homo sapien
cgttgctagatcattgcattcgtcc

SEQ ID NO: 2794061 - DNA, 25 bp, Homo sapien
gatcattgcattcgtccccggagga

SEQ ID NO: 2794062 - DNA, 25 bp, Homo sapien
tttgaatcattgacctcttagagct

SEQ ID NO: 2794063 - DNA, 25 bp, Homo sapien
taatgtgtaaaagagcatcaggaga

SEQ ID NO: 2794064 - DNA, 25 bp, Homo sapien
tacaaactaaattgcccttgtgacc

SEQ ID NO: 2794065 - DNA, 25 bp, Homo sapien
tattcctacctgatgattaaagcat

SEQ ID NO: 2794066 - DNA, 25 bp, Homo sapien
gaagaaccagtaacaaaatcctcta

SEQ ID NO: 2794067 - DNA, 25 bp, Homo sapien
tgacagcttagtgggagataatttt

SEQ ID NO: 2794068 - DNA, 25 bp, Homo sapien
gttttgctactttctcacactgcca

SEQ ID NO: 2794069 - DNA, 25 bp, Homo sapien
tatggcaattaaggctagtctgagc

SEQ ID NO: 2794070 - DNA, 25 bp, Homo sapien
ttaaggaagcgctggaatcatgcgg

SEQ ID NO: 2794071 - DNA, 25 bp, Homo sapien
ggtaactttgttaggagtgccacac

SEQ ID NO: 2794072 - DNA, 25 bp, Homo sapien
gggacttcagaattgccatccagta

SEQ ID NO: 2794073 - DNA, 25 bp, Homo sapien
tttcattagtcaaaaagcaggcacc

SEQ ID NO: 2794074 - DNA, 25 bp, Homo sapien
cttgaaacccagtcagattctgagt

SEQ ID NO: 2794075 - DNA, 25 bp, Homo sapien
tctgagtctagaaagtccatcacca

SEQ ID NO: 2794076 - DNA, 25 bp, Homo sapien
tgcctgggtgtgtgataattgaaaa

SEQ ID NO: 2794077 - DNA, 25 bp, Homo sapien
cagcaccactcgagagcacagataa

SEQ ID NO: 2794078 - DNA, 25 bp, Homo sapien
ccactaatggtgtaaaagagaccag

SEQ ID NO: 2794079 - DNA, 25 bp, Homo sapien
tatagtgataaactttgtagctgcc

SEQ ID NO: 2794080 - DNA, 25 bp, Homo sapien
tgggaaatgtacctagcaagctggt

SEQ ID NO: 2794081 - DNA, 25 bp, Homo sapien
gaacaatgcacatctgtcttccaag

SEQ ID NO: 2794082 - DNA, 25 bp, Homo sapien
tctagggccctgaaggaagaactca

SEQ ID NO: 2794083 - DNA, 25 bp, Homo sapien
agcttagaacactgacctgggtcca

SEQ ID NO: 2794084 - DNA, 25 bp, Homo sapien
tgttactgtgaggagatgacctgcc

SEQ ID NO: 2794085 - DNA, 25 bp, Homo sapien
tatgtacagatcaccatgtggcctc

SEQ ID NO: 2794086 - DNA, 25 bp, Homo sapien
gatgcgatgcacacctttaagaact

SEQ ID NO: 2794087 - DNA, 25 bp, Homo sapien
gatcaacagggcagataacacaagt

SEQ ID NO: 2794088 - DNA, 25 bp, Homo sapien
gaggctgcagaccttgggaaaacaa

SEQ ID NO: 2794089 - DNA, 25 bp, Homo sapien
taactgagagatgcgctatagggag

SEQ ID NO: 2794090 - DNA, 25 bp, Homo sapien
aggccatgagggcgttttctgggtt

SEQ ID NO: 2794091 - DNA, 25 bp, Homo sapien
ccatgagggcgttttctgggttcac

SEQ ID NO: 2794092 - DNA, 25 bp, Homo sapien
gccatgagggcgttttctgggttca

SEQ ID NO: 2794093 - DNA, 25 bp, Homo sapien
catgagggcgttttctgggttcaca

SEQ ID NO: 2794094 - DNA, 25 bp, Homo sapien
aatggtcagcgcatctgcatctggc

SEQ ID NO: 2794095 - DNA, 25 bp, Homo sapien
tcaggccttctctgcatgtcaacca

SEQ ID NO: 2794096 - DNA, 25 bp, Homo sapien
agaaacactgaatggtcagcgcatc

SEQ ID NO: 2794097 - DNA, 25 bp, Homo sapien
caggccttctctgcatgtcaaccag

SEQ ID NO: 2794098 - DNA, 25 bp, Homo sapien
gctggagagatgtagcaaagaacca

SEQ ID NO: 2794099 - DNA, 25 bp, Homo sapien
ggtcgtgagtgttggcattgttcat

SEQ ID NO: 2794100 - DNA, 25 bp, Homo sapien
aaccacaaagcaaggggtcgtgagt

SEQ ID NO: 2794101 - DNA, 25 bp, Homo sapien
ttgttcatttcgacagtaatcaggg

SEQ ID NO: 2794102 - DNA, 25 bp, Homo sapien
ggctgctgggtgtagtcgccccgga

SEQ ID NO: 2794103 - DNA, 25 bp, Homo sapien
atattcgatggggagctcgcagcga

SEQ ID NO: 2794104 - DNA, 25 bp, Homo sapien
gcagcgagtcgcttccctctgtaac

SEQ ID NO: 2794105 - DNA, 25 bp, Homo sapien
tctccagagcagtaggagggccaca

SEQ ID NO: 2794106 - DNA, 25 bp, Homo sapien
gctcgggctccctaaaagccgcaaa

SEQ ID NO: 2794107 - DNA, 25 bp, Homo sapien
tccggctgttgcttgcgctcgggct

SEQ ID NO: 2794108 - DNA, 25 bp, Homo sapien
ggcatttgcctctcgtttcgttccc

SEQ ID NO: 2794109 - DNA, 25 bp, Homo sapien
cgcaaaccgatttcgcacagaaggc

SEQ ID NO: 2794110 - DNA, 25 bp, Homo sapien
gggtcctggtaaaatatcccattca

SEQ ID NO: 2794111 - DNA, 25 bp, Homo sapien
ggtcctggtaaaatatcccattcat

SEQ ID NO: 2794112 - DNA, 25 bp, Homo sapien
ttacaaagttgttgtcctatgcaaa

SEQ ID NO: 2794113 - DNA, 25 bp, Homo sapien
ctgccgaaaggtgggtgtttgcaaa

SEQ ID NO: 2794114 - DNA, 25 bp, Homo sapien
cagggtgggagcaagcctgaacagc

SEQ ID NO: 2794115 - DNA, 25 bp, Homo sapien
tcccatctgccgaaaggtgggtgtt

SEQ ID NO: 2794116 - DNA, 25 bp, Homo sapien
tcacatagcttctacatgatgggct

SEQ ID NO: 2794117 - DNA, 25 bp, Homo sapien
caaccctgggtggtaggtgagatta

SEQ ID NO: 2794118 - DNA, 25 bp, Homo sapien
tatacacttggacctacaaccctgg

SEQ ID NO: 2794119 - DNA, 25 bp, Homo sapien
tcagaggcctaccagcagcaatggt

SEQ ID NO: 2794120 - DNA, 25 bp, Homo sapien
tctcatttagttgtatctcctggca

SEQ ID NO: 2794121 - DNA, 25 bp, Homo sapien
tagagaagtctcaatcctatccctg

SEQ ID NO: 2794122 - DNA, 25 bp, Homo sapien
acacactaatatatgcggccctgca

SEQ ID NO: 2794123 - DNA, 25 bp, Homo sapien
ggcaatcactccatatatagcgagg

SEQ ID NO: 2794124 - DNA, 25 bp, Homo sapien
actgagggcaagttggaccacatcg

SEQ ID NO: 2794125 - DNA, 25 bp, Homo sapien
caagttggaccacatcgctgtatcc

SEQ ID NO: 2794126 - DNA, 25 bp, Homo sapien
actgtgcttcggtgtcacccaccaa

SEQ ID NO: 2794127 - DNA, 25 bp, Homo sapien
cctgttgagcactcatagcaccaca

SEQ ID NO: 2794128 - DNA, 25 bp, Homo sapien
tgaatcccaggtagatcagactcgg

SEQ ID NO: 2794129 - DNA, 25 bp, Homo sapien
caaatggtggtagactcatgcacta

SEQ ID NO: 2794130 - DNA, 25 bp, Homo sapien
tcagactcggcgaaagaaaccacag

SEQ ID NO: 2794131 - DNA, 25 bp, Homo sapien
actcagcaatgaaaggagccaccca

SEQ ID NO: 2794132 - DNA, 25 bp, Homo sapien
agtaaagccacgctgcgatgggacg

SEQ ID NO: 2794133 - DNA, 25 bp, Homo sapien
aacagcaatgccaacgttagcagta

SEQ ID NO: 2794134 - DNA, 25 bp, Homo sapien
tggttggagcttggttggccttcca

SEQ ID NO: 2794135 - DNA, 25 bp, Homo sapien
aagacatggttgcagtcataatttc

SEQ ID NO: 2794136 - DNA, 25 bp, Homo sapien
cttggagataatgtgggaaggacaa

SEQ ID NO: 2794137 - DNA, 25 bp, Homo sapien
tgttactccgggacagtacccagag

SEQ ID NO: 2794138 - DNA, 25 bp, Homo sapien
tgggaaggcgaggtcttggagataa

SEQ ID NO: 2794139 - DNA, 25 bp, Homo sapien
gtacccagagcctcggacagatgag

SEQ ID NO: 2794140 - DNA, 25 bp, Homo sapien
agagggctgagttcaaggagaacat

SEQ ID NO: 2794141 - DNA, 25 bp, Homo sapien
gaacatgtggccgatggtgtgggaa

SEQ ID NO: 2794142 - DNA, 25 bp, Homo sapien
cactgggtttggccgctttgtgggc

SEQ ID NO: 2794143 - DNA, 25 bp, Homo sapien
tgtggccgatggtgtgggaagttac

SEQ ID NO: 2794144 - DNA, 25 bp, Homo sapien
cacctggcacatggcggtgtcaatg

SEQ ID NO: 2794145 - DNA, 25 bp, Homo sapien
gcggtgtcaatgaggtaaacagagt

SEQ ID NO: 2794146 - DNA, 25 bp, Homo sapien
gcacatggcggtgtcaatgaggtaa

SEQ ID NO: 2794147 - DNA, 25 bp, Homo sapien
gtcaatgaggtaaacagagttcctg

SEQ ID NO: 2794148 - DNA, 25 bp, Homo sapien
ctcagccagctctcgagtgagaact

SEQ ID NO: 2794149 - DNA, 25 bp, Homo sapien
ttagggtcgaggttccgcgtctgct

SEQ ID NO: 2794150 - DNA, 25 bp, Homo sapien
agggtcgaggttccgcgtctgctcc

SEQ ID NO: 2794151 - DNA, 25 bp, Homo sapien
tccttactgtgcaaggatcctcttg

SEQ ID NO: 2794152 - DNA, 25 bp, Homo sapien
gtctgctccatccaggtccttactg

SEQ ID NO: 2794153 - DNA, 25 bp, Homo sapien
tgttgatcatctcaggattgccagg

SEQ ID NO: 2794154 - DNA, 25 bp, Homo sapien
cactgacagggtcctacagtgcaga

SEQ ID NO: 2794155 - DNA, 25 bp, Homo sapien
catctcaggattgccaggtagtggt

SEQ ID NO: 2794156 - DNA, 25 bp, Homo sapien
gtccaggtcccttcttgtggcttct

SEQ ID NO: 2794157 - DNA, 25 bp, Homo sapien
tgtggtgcaccagcgtaggggaggc

SEQ ID NO: 2794158 - DNA, 25 bp, Homo sapien
tgcaccagcgtaggggaggccacat

SEQ ID NO: 2794159 - DNA, 25 bp, Homo sapien
gtgcaccagcgtaggggaggccaca

SEQ ID NO: 2794160 - DNA, 25 bp, Homo sapien
tggtgcaccagcgtaggggaggcca

SEQ ID NO: 2794161 - DNA, 25 bp, Homo sapien
ggatcaaataccaaggtgtctccca

SEQ ID NO: 2794162 - DNA, 25 bp, Homo sapien
gacatccaggtgtccgatgatgaca

SEQ ID NO: 2794163 - DNA, 25 bp, Homo sapien
tgtgtgcaagttcaaaatgctctcc

SEQ ID NO: 2794164 - DNA, 25 bp, Homo sapien
tctcctgccagttgtgcaaagaaag

SEQ ID NO: 2794165 - DNA, 25 bp, Homo sapien
gaccgaaaaggttgagaactgcagt

SEQ ID NO: 2794166 - DNA, 25 bp, Homo sapien
cctacatggagaacgaatggctggg

SEQ ID NO: 2794167 - DNA, 25 bp, Homo sapien
taacagagtcagtgtagaagcagat

SEQ ID NO: 2794168 - DNA, 25 bp, Homo sapien
gatataaaagagtctggctgtctcc

SEQ ID NO: 2794169 - DNA, 25 bp, Homo sapien
tgctattggcatgcagtgagccagg

SEQ ID NO: 2794170 - DNA, 25 bp, Homo sapien
ttccatgtcttaatgtgtgatactg

SEQ ID NO: 2794171 - DNA, 25 bp, Homo sapien
catttcgggatctcatgctattggc

SEQ ID NO: 2794172 - DNA, 25 bp, Homo sapien
aaacattattcttcaggattagtaa

SEQ ID NO: 2794173 - DNA, 25 bp, Homo sapien
caaaggaggcacttagcagcgcttt

SEQ ID NO: 2794174 - DNA, 25 bp, Homo sapien
cacttagcagcgctttgtggaacaa

SEQ ID NO: 2794175 - DNA, 25 bp, Homo sapien
atggccgtctgatctccaccaaagg

SEQ ID NO: 2794176 - DNA, 25 bp, Homo sapien
gggccccaggtcaaatggccgtctg

SEQ ID NO: 2794177 - DNA, 25 bp, Homo sapien
gcgttggcaaaccatgcaggcagcc

SEQ ID NO: 2794178 - DNA, 25 bp, Homo sapien
tgcgttggcaaaccatgcaggcagc

SEQ ID NO: 2794179 - DNA, 25 bp, Homo sapien
cgttggcaaaccatgcaggcagcca

SEQ ID NO: 2794180 - DNA, 25 bp, Homo sapien
ctgcgttggcaaaccatgcaggcag

SEQ ID NO: 2794181 - DNA, 25 bp, Homo sapien
tctcagtgagtgtcaggatgtaccc

SEQ ID NO: 2794182 - DNA, 25 bp, Homo sapien
gaagcacagctagtggccctggatg

SEQ ID NO: 2794183 - DNA, 25 bp, Homo sapien
gaattctgcctccaacgcttgctag

SEQ ID NO: 2794184 - DNA, 25 bp, Homo sapien
taatgagctttctaggtagcacgag

SEQ ID NO: 2794185 - DNA, 25 bp, Homo sapien
caagtcctccatgttagctgcagca

SEQ ID NO: 2794186 - DNA, 25 bp, Homo sapien
ggtagtgacttagcctgtgttcatc

SEQ ID NO: 2794187 - DNA, 25 bp, Homo sapien
tgtcctccaggtagtgacttagcct

SEQ ID NO: 2794188 - DNA, 25 bp, Homo sapien
ttcatgcagtccactgcgatccagg

SEQ ID NO: 2794189 - DNA, 25 bp, Homo sapien
catcagacctggtggattcttttgg

SEQ ID NO: 2794190 - DNA, 25 bp, Homo sapien
tgcccatcagacctggtggattctt

SEQ ID NO: 2794191 - DNA, 25 bp, Homo sapien
agacctggtggattcttttggttct

SEQ ID NO: 2794192 - DNA, 25 bp, Homo sapien
aatgcccagacaccctgctgcaaag

SEQ ID NO: 2794193 - DNA, 25 bp, Homo sapien
tcagggtccctctcggcctcgtctt

SEQ ID NO: 2794194 - DNA, 25 bp, Homo sapien
tccctctcggcctcgtctttccctc

SEQ ID NO: 2794195 - DNA, 25 bp, Homo sapien
ctcggcctcgtctttccctctcccg

SEQ ID NO: 2794196 - DNA, 25 bp, Homo sapien
cagggtccctctcggcctcgtcttt

SEQ ID NO: 2794197 - DNA, 25 bp, Homo sapien
gacttcccgcgaaactgcagcggct

SEQ ID NO: 2794198 - DNA, 25 bp, Homo sapien
tctgcagaagttcgccctttgctgg

SEQ ID NO: 2794199 - DNA, 25 bp, Homo sapien
cctagggctggatagtcctcgtctg

SEQ ID NO: 2794200 - DNA, 25 bp, Homo sapien
tcgctggcccacgtgatcctttcct

SEQ ID NO: 2794201 - DNA, 25 bp, Homo sapien
tggcctgccctgagagaatgtcctt

SEQ ID NO: 2794202 - DNA, 25 bp, Homo sapien
gtggcctgccctgagagaatgtcct

SEQ ID NO: 2794203 - DNA, 25 bp, Homo sapien
tgtgcctgttggtggcctgccctga

SEQ ID NO: 2794204 - DNA, 25 bp, Homo sapien
cctgccctgagagaatgtccttcat

SEQ ID NO: 2794205 - DNA, 25 bp, Homo sapien
aagaccatctacaccatgaagaaat

SEQ ID NO: 2794206 - DNA, 25 bp, Homo sapien
caaggagtgcctagggctaccagga

SEQ ID NO: 2794207 - DNA, 25 bp, Homo sapien
ttcctgcgtgctacccaaggagtgc

SEQ ID NO: 2794208 - DNA, 25 bp, Homo sapien
tttcttccccgagaggaccactgct

SEQ ID NO: 2794209 - DNA, 25 bp, Homo sapien
taagggctctgaaccttcctgcgtg

SEQ ID NO: 2794210 - DNA, 25 bp, Homo sapien
cacaaaaaagtgggcgtccagccat

SEQ ID NO: 2794211 - DNA, 25 bp, Homo sapien
cgtccgtgcataaccacgttctcgt

SEQ ID NO: 2794212 - DNA, 25 bp, Homo sapien
ctccttgtccgcacttctgggtcaa

SEQ ID NO: 2794213 - DNA, 25 bp, Homo sapien
gttctcgttcacgaagcggccagcc

SEQ ID NO: 2794214 - DNA, 25 bp, Homo sapien
ttgtccgcacttctgggtcaacagc

SEQ ID NO: 2794215 - DNA, 25 bp, Homo sapien
gaatcagccggaaagtcactccaac

SEQ ID NO: 2794216 - DNA, 25 bp, Homo sapien
agaaaggtggcgagcttctccctgc

SEQ ID NO: 2794217 - DNA, 25 bp, Homo sapien
ctccagggaattccgctccgggaag

SEQ ID NO: 2794218 - DNA, 25 bp, Homo sapien
ccagcgagtggagtgcccaagaatt

SEQ ID NO: 2794219 - DNA, 25 bp, Homo sapien
tttgggactccattcttctgtgaag

SEQ ID NO: 2794220 - DNA, 25 bp, Homo sapien
tcagttcctgaagctgtttctttgg

SEQ ID NO: 2794221 - DNA, 25 bp, Homo sapien
tttctttgggactccattcttctgt

SEQ ID NO: 2794222 - DNA, 25 bp, Homo sapien
ttctgtgaagtcctttgtcctccag

SEQ ID NO: 2794223 - DNA, 25 bp, Homo sapien
ttgtcacatgactaaaaccctccat

SEQ ID NO: 2794224 - DNA, 25 bp, Homo sapien
tctggtggttggcccccattgtcac

SEQ ID NO: 2794225 - DNA, 25 bp, Homo sapien
cccattgtcacatgactaaaaccct

SEQ ID NO: 2794226 - DNA, 25 bp, Homo sapien
ggttggcccccattgtcacatgact

SEQ ID NO: 2794227 - DNA, 25 bp, Homo sapien
tacaaggttctcctggccaataggc

SEQ ID NO: 2794228 - DNA, 25 bp, Homo sapien
tggccaataggcagcaattctgcct

SEQ ID NO: 2794229 - DNA, 25 bp, Homo sapien
ctggcagcaggttacaaggttctcc

SEQ ID NO: 2794230 - DNA, 25 bp, Homo sapien
gtaggaatgaagtggcagtgatggg

SEQ ID NO: 2794231 - DNA, 25 bp, Homo sapien
tctcgaaagtccaaagtttgcattc

SEQ ID NO: 2794232 - DNA, 25 bp, Homo sapien
gccagtctgatctcctcgttgcttg

SEQ ID NO: 2794233 - DNA, 25 bp, Homo sapien
tgccaatgctacaccctcgtctttg

SEQ ID NO: 2794234 - DNA, 25 bp, Homo sapien
gatctcctcgttgcttgccaatgct

SEQ ID NO: 2794235 - DNA, 25 bp, Homo sapien
tgctcatttagatgaacagcttctg

SEQ ID NO: 2794236 - DNA, 25 bp, Homo sapien
gctctcctcggattctctttcatca

SEQ ID NO: 2794237 - DNA, 25 bp, Homo sapien
gcttctggcatgtgctcacatttag

SEQ ID NO: 2794238 - DNA, 25 bp, Homo sapien
tcatcaggcctattcccagaaagca

SEQ ID NO: 2794239 - DNA, 25 bp, Homo sapien
cctcggtggacaggcattgtttctc

SEQ ID NO: 2794240 - DNA, 25 bp, Homo sapien
gtgtagaatgttgttggtcttctgc

SEQ ID NO: 2794241 - DNA, 25 bp, Homo sapien
ccttgtgtgtagaatgttgttggtc

SEQ ID NO: 2794242 - DNA, 25 bp, Homo sapien
tctcccttcagttactgggccccag

SEQ ID NO: 2794243 - DNA, 25 bp, Homo sapien
ggtggccgcagattctgcaccaaca

SEQ ID NO: 2794244 - DNA, 25 bp, Homo sapien
taacgctgtaatcccatacatggaa

SEQ ID NO: 2794245 - DNA, 25 bp, Homo sapien
cttgctttgggacgcctttttctgt

SEQ ID NO: 2794246 - DNA, 25 bp, Homo sapien
ggtgcctccaatccccttgctttgg

SEQ ID NO: 2794247 - DNA, 25 bp, Homo sapien
ccgttgaccccgaagaagctctgat

SEQ ID NO: 2794248 - DNA, 25 bp, Homo sapien
ggccgcgggataggagtttctacaa

SEQ ID NO: 2794249 - DNA, 25 bp, Homo sapien
gtggagtaacaaagacgctgccgcg

SEQ ID NO: 2794250 - DNA, 25 bp, Homo sapien
ccaagccgttggagaggcagaaaca

SEQ ID NO: 2794251 - DNA, 25 bp, Homo sapien
cagagtcccgaaagattttggaagc

SEQ ID NO: 2794252 - DNA, 25 bp, Homo sapien
cactggagccccgtggatgaagagt

SEQ ID NO: 2794253 - DNA, 25 bp, Homo sapien
ttctagtcctgaacacagagtcccg

SEQ ID NO: 2794254 - DNA, 25 bp, Homo sapien
cagaaaccgggtcctggacgctggt

SEQ ID NO: 2794255 - DNA, 25 bp, Homo sapien
ttctcgtggacgtgctgcgcgcacc

SEQ ID NO: 2794256 - DNA, 25 bp, Homo sapien
gcttctcgtggacgtgctgcgcgca

SEQ ID NO: 2794257 - DNA, 25 bp, Homo sapien
gctggcttcagagtgcgcttctcgt

SEQ ID NO: 2794258 - DNA, 25 bp, Homo sapien
cagagtgcgcttctcgtggacgtgc

SEQ ID NO: 2794259 - DNA, 25 bp, Homo sapien
ctgccactggaacgcggtctcgcgg

SEQ ID NO: 2794260 - DNA, 25 bp, Homo sapien
ggtgcggctgtgagccgtcccacaa

SEQ ID NO: 2794261 - DNA, 25 bp, Homo sapien
ctcgctgcagcacgcaggacgaagg

SEQ ID NO: 2794262 - DNA, 25 bp, Homo sapien
aggacaatggaacttttatttctgg

SEQ ID NO: 2794263 - DNA, 25 bp, Homo sapien
taagggatgtcaaacaagaagcaga

SEQ ID NO: 2794264 - DNA, 25 bp, Homo sapien
taaactgagcatgatgtgtgttaaa

SEQ ID NO: 2794265 - DNA, 25 bp, Homo sapien
gcagaagccttacagacactaggtg

SEQ ID NO: 2794266 - DNA, 25 bp, Homo sapien
tgctggcaggtttcaagggtcccct

SEQ ID NO: 2794267 - DNA, 25 bp, Homo sapien
tttcttttgtgcatttttctctgtc

SEQ ID NO: 2794268 - DNA, 25 bp, Homo sapien
tcttttgtgcatttttctctgtcct

SEQ ID NO: 2794269 - DNA, 25 bp, Homo sapien
ttttcttttgtgcatttttctctgt

SEQ ID NO: 2794270 - DNA, 25 bp, Homo sapien
ttcttttgtgcatttttctctgtcc

SEQ ID NO: 2794271 - DNA, 25 bp, Homo sapien
gaagcaacctgaggccctcctcaat

SEQ ID NO: 2794272 - DNA, 25 bp, Homo sapien
tgacatctggaagcaacctgaggcc

SEQ ID NO: 2794273 - DNA, 25 bp, Homo sapien
caactccaacattaatcaacttgac

SEQ ID NO: 2794274 - DNA, 25 bp, Homo sapien
taatcaacttgacatctggaagcaa

SEQ ID NO: 2794275 - DNA, 25 bp, Homo sapien
cttcaggtgatgtgtgcgcattttc

SEQ ID NO: 2794276 - DNA, 25 bp, Homo sapien
cagtggtaccagagagagttacaga

SEQ ID NO: 2794277 - DNA, 25 bp, Homo sapien
tgatgcaggcataaccagtggtacc

SEQ ID NO: 2794278 - DNA, 25 bp, Homo sapien
ttaaagagggatcttaaggttgatg

SEQ ID NO: 2794279 - DNA, 25 bp, Homo sapien
cttttctactgtgtggtaaataatt

SEQ ID NO: 2794280 - DNA, 25 bp, Homo sapien
ttttctactgtgtggtaaataattc

SEQ ID NO: 2794281 - DNA, 25 bp, Homo sapien
cgggcgcacaaaggcctcccgggtg

SEQ ID NO: 2794282 - DNA, 25 bp, Homo sapien
tgaccccgggcgcacaaaggcctcc

SEQ ID NO: 2794283 - DNA, 25 bp, Homo sapien
ctgaccccgggcgcacaaaggcctc

SEQ ID NO: 2794284 - DNA, 25 bp, Homo sapien
ggcgcacaaaggcctcccgggtgcg

SEQ ID NO: 2794285 - DNA, 25 bp, Homo sapien
cagagaatggtggttggctccttcc

SEQ ID NO: 2794286 - DNA, 25 bp, Homo sapien
gggctcaagttcgtgttcctgggaa

SEQ ID NO: 2794287 - DNA, 25 bp, Homo sapien
ttgaccacaaagaatccaggagcct

SEQ ID NO: 2794288 - DNA, 25 bp, Homo sapien
gagcctcccagtgagtgtgtaccaa

SEQ ID NO: 2794289 - DNA, 25 bp, Homo sapien
tttgctcatcaatttcccttgcctg

SEQ ID NO: 2794290 - DNA, 25 bp, Homo sapien
tggactccacagaggccctcccact

SEQ ID NO: 2794291 - DNA, 25 bp, Homo sapien
atcaatttcccttgcctggactcca

SEQ ID NO: 2794292 - DNA, 25 bp, Homo sapien
gtcctgtgggcacttccaactcttg

SEQ ID NO: 2794293 - DNA, 25 bp, Homo sapien
ctggctgccctctctgagcccacat

SEQ ID NO: 2794294 - DNA, 25 bp, Homo sapien
tcctctgaaatctcgatgttcttag

SEQ ID NO: 2794295 - DNA, 25 bp, Homo sapien
cagggtgaagttggcttatgatgcc

SEQ ID NO: 2794296 - DNA, 25 bp, Homo sapien
tcttacagggtgaagttggcttatg

SEQ ID NO: 2794297 - DNA, 25 bp, Homo sapien
gaaggtgaagttggcttctctgaaa

SEQ ID NO: 2794298 - DNA, 25 bp, Homo sapien
catatgttagataattgtgcccaga

SEQ ID NO: 2794299 - DNA, 25 bp, Homo sapien
tatgttagataattgtgcccagagg

SEQ ID NO: 2794300 - DNA, 25 bp, Homo sapien
gttagataattgtgcccagaggaat

SEQ ID NO: 2794301 - DNA, 25 bp, Homo sapien
caccatatgttagataattgtgccc

SEQ ID NO: 2794302 - DNA, 25 bp, Homo sapien
acgcccagcgcgccgacgtcccgcc

SEQ ID NO: 2794303 - DNA, 25 bp, Homo sapien
cacgcccagcgcgccgacgtcccgc

SEQ ID NO: 2794304 - DNA, 25 bp, Homo sapien
ctgttaacaattgtctgcccatatc

SEQ ID NO: 2794305 - DNA, 25 bp, Homo sapien
tgattttggtagtccattgaagaag

SEQ ID NO: 2794306 - DNA, 25 bp, Homo sapien
attttggtagtccattgaagaaggg

SEQ ID NO: 2794307 - DNA, 25 bp, Homo sapien
gttaacaattgtctgcccatatcct

SEQ ID NO: 2794308 - DNA, 25 bp, Homo sapien
gctcagaggttccagtgtaagcaca

SEQ ID NO: 2794309 - DNA, 25 bp, Homo sapien
gcttattgaatctgcgggccggaga

SEQ ID NO: 2794310 - DNA, 25 bp, Homo sapien
gaaacgtccctgacctgagaaagga

SEQ ID NO: 2794311 - DNA, 25 bp, Homo sapien
ggagacttcccgagcaacaatatgg

SEQ ID NO: 2794312 - DNA, 25 bp, Homo sapien
tttaccgtagtaaagatgttgagtc

SEQ ID NO: 2794313 - DNA, 25 bp, Homo sapien
ctcaacacatcgcttcatcgtgcta

SEQ ID NO: 2794314 - DNA, 25 bp, Homo sapien
tcgcttcatcgtgctaagctttttc

SEQ ID NO: 2794315 - DNA, 25 bp, Homo sapien
cctcccaatatccacccaagaaaga

SEQ ID NO: 2794316 - DNA, 25 bp, Homo sapien
catcgcattgagtgtacagtatttc

SEQ ID NO: 2794317 - DNA, 25 bp, Homo sapien
cagtatttctctttgggtgcaagag

SEQ ID NO: 2794318 - DNA, 25 bp, Homo sapien
gtttgtaagaacatgaaagttgcca

SEQ ID NO: 2794319 - DNA, 25 bp, Homo sapien
caaagcaaacacgttggagggaagt

SEQ ID NO: 2794320 - DNA, 25 bp, Homo sapien
aggaggactaatgttgggctgcact

SEQ ID NO: 2794321 - DNA, 25 bp, Homo sapien
gagggaaggaggactaatgttgggc

SEQ ID NO: 2794322 - DNA, 25 bp, Homo sapien
cactcgcagcataaattctactgtg

SEQ ID NO: 2794323 - DNA, 25 bp, Homo sapien
gttgcctctggttggtcactcgcag

SEQ ID NO: 2794324 - DNA, 25 bp, Homo sapien
aggagctggtaagtatgtgagaaat

SEQ ID NO: 2794325 - DNA, 25 bp, Homo sapien
tatgtgagaaatacggaagacagat

SEQ ID NO: 2794326 - DNA, 25 bp, Homo sapien
ccatgttgctaaaagtgaggacgag

SEQ ID NO: 2794327 - DNA, 25 bp, Homo sapien
cagatggagaggaaaatgtgtagcc

SEQ ID NO: 2794328 - DNA, 25 bp, Homo sapien
cagtagcgcacagaactagtgtctg

SEQ ID NO: 2794329 - DNA, 25 bp, Homo sapien
tgggaaagcaaggaccgggcaacag

SEQ ID NO: 2794330 - DNA, 25 bp, Homo sapien
cgtctgggctgtgcgttgtaacgca

SEQ ID NO: 2794331 - DNA, 25 bp, Homo sapien
aaaaggatgctttccaagacagaag

SEQ ID NO: 2794332 - DNA, 25 bp, Homo sapien
gcggcgtagcggccggacccctggc

SEQ ID NO: 2794333 - DNA, 25 bp, Homo sapien
tggcctccgcgtcgggctgcgccac

SEQ ID NO: 2794334 - DNA, 25 bp, Homo sapien
gacccctggcctccgcgtcgggctg

SEQ ID NO: 2794335 - DNA, 25 bp, Homo sapien
gaaaatcgtggggaggcgcggcgta

SEQ ID NO: 2794336 - DNA, 25 bp, Homo sapien
tccacaaaaggaatccgatttttca

SEQ ID NO: 2794337 - DNA, 25 bp, Homo sapien
ttaactgcaattccctcccgactga

SEQ ID NO: 2794338 - DNA, 25 bp, Homo sapien
gacaccatgtgtggtacaaggagca

SEQ ID NO: 2794339 - DNA, 25 bp, Homo sapien
caaggaacgatctaaggtcatgaca

SEQ ID NO: 2794340 - DNA, 25 bp, Homo sapien
cagattaaatctccgcgcacaacag

SEQ ID NO: 2794341 - DNA, 25 bp, Homo sapien
ggttaatgagttgtagcaaatccac

SEQ ID NO: 2794342 - DNA, 25 bp, Homo sapien
tgagttgtagcaaatccacactttg

SEQ ID NO: 2794343 - DNA, 25 bp, Homo sapien
tccacactttgtagttgggaggagg

SEQ ID NO: 2794344 - DNA, 25 bp, Homo sapien
aaagcgtcgggttaatgagttgtag

SEQ ID NO: 2794345 - DNA, 25 bp, Homo sapien
gaaggcttgttcaagcaggcttcgt

SEQ ID NO: 2794346 - DNA, 25 bp, Homo sapien
ttatttttcgagacccagcctattg

SEQ ID NO: 2794347 - DNA, 25 bp, Homo sapien
agcaggcttcgttcctacaaacaca

SEQ ID NO: 2794348 - DNA, 25 bp, Homo sapien
cagcctattgaggaaggcttgttca

SEQ ID NO: 2794349 - DNA, 25 bp, Homo sapien
gtccttgcccatcaaaggccgcggt

SEQ ID NO: 2794350 - DNA, 25 bp, Homo sapien
cccgcagcctttgttccagcacctg

SEQ ID NO: 2794351 - DNA, 25 bp, Homo sapien
agccccaggaggagacgtccttgcc

SEQ ID NO: 2794352 - DNA, 25 bp, Homo sapien
gatttgcatgcgaatgaggagcccc

SEQ ID NO: 2794353 - DNA, 25 bp, Homo sapien
ggcccacacctctcgcagctcatac

SEQ ID NO: 2794354 - DNA, 25 bp, Homo sapien
tgccccgcggcccacacctctcgca

SEQ ID NO: 2794355 - DNA, 25 bp, Homo sapien
cccgcggcccacacctctcgcagct

SEQ ID NO: 2794356 - DNA, 25 bp, Homo sapien
gcggcccacacctctcgcagctcat

SEQ ID NO: 2794357 - DNA, 25 bp, Homo sapien
aatcgaggcggcttgggtttacacg

SEQ ID NO: 2794358 - DNA, 25 bp, Homo sapien
gcaggacgcaaaactcggaatcgag

SEQ ID NO: 2794359 - DNA, 25 bp, Homo sapien
tttacacgttcctttagctctgggc

SEQ ID NO: 2794360 - DNA, 25 bp, Homo sapien
tgtttaaaaacaggcttgcggtctc

SEQ ID NO: 2794361 - DNA, 25 bp, Homo sapien
catttgagcccgtgagagtccgttt

SEQ ID NO: 2794362 - DNA, 25 bp, Homo sapien
gacgttctcgggttcaatgactcct

SEQ ID NO: 2794363 - DNA, 25 bp, Homo sapien
tgcgttacagaaggctaccaggcgc

SEQ ID NO: 2794364 - DNA, 25 bp, Homo sapien
taaatttcagatgcgtgcgttacag

SEQ ID NO: 2794365 - DNA, 25 bp, Homo sapien
gcaacatattgaccctataatgcag

SEQ ID NO: 2794366 - DNA, 25 bp, Homo sapien
gcctaggttttatttggagcgcaca

SEQ ID NO: 2794367 - DNA, 25 bp, Homo sapien
gacagggcgtcatgaatgagtatca

SEQ ID NO: 2794368 - DNA, 25 bp, Homo sapien
ccttccatctgcaacatagtagctg

SEQ ID NO: 2794369 - DNA, 25 bp, Homo sapien
tcatctgccaaacgtcaagggagcc

SEQ ID NO: 2794370 - DNA, 25 bp, Homo sapien
cataaatagagggacccgcagagcc

SEQ ID NO: 2794371 - DNA, 25 bp, Homo sapien
ttttgtccgagaattcgcagcggcg

SEQ ID NO: 2794372 - DNA, 25 bp, Homo sapien
ctggaggagcgaacaaaacaccgaa

SEQ ID NO: 2794373 - DNA, 25 bp, Homo sapien
tcttcctcgagcgcgctaacatagc

SEQ ID NO: 2794374 - DNA, 25 bp, Homo sapien
ttcctcgagcgcgctaacatagcgt

SEQ ID NO: 2794375 - DNA, 25 bp, Homo sapien
cttcttcctcgagcgcgctaacata

SEQ ID NO: 2794376 - DNA, 25 bp, Homo sapien
cctcgagcgcgctaacatagcgtta

SEQ ID NO: 2794377 - DNA, 25 bp, Homo sapien
tcctccgctggatccgggagctggc

SEQ ID NO: 2794378 - DNA, 25 bp, Homo sapien
ccccgatgatgctctcgatggagaa

SEQ ID NO: 2794379 - DNA, 25 bp, Homo sapien
agcagtaaagttctcgacactggac

SEQ ID NO: 2794380 - DNA, 25 bp, Homo sapien
acagggcagtcccttggtgcagagt

SEQ ID NO: 2794381 - DNA, 25 bp, Homo sapien
tcgctcagcgtcagccgcttcttgg

SEQ ID NO: 2794382 - DNA, 25 bp, Homo sapien
gggaagcggccgctgatgaactcac

SEQ ID NO: 2794383 - DNA, 25 bp, Homo sapien
cgctcagcgtcagccgcttcttggg

SEQ ID NO: 2794384 - DNA, 25 bp, Homo sapien
atgaactcacagatctcgctcagcg

SEQ ID NO: 2794385 - DNA, 25 bp, Homo sapien
cttggcgccgctacccgcgctcccg

SEQ ID NO: 2794386 - DNA, 25 bp, Homo sapien
gtcctccccggcgtacgagcgccgc

SEQ ID NO: 2794387 - DNA, 25 bp, Homo sapien
ttggcgccgctacccgcgctcccgc

SEQ ID NO: 2794388 - DNA, 25 bp, Homo sapien
ccagctcgtcctccccggcgtacga

SEQ ID NO: 2794389 - DNA, 25 bp, Homo sapien
gccagaggcatcggacatctcagtg

SEQ ID NO: 2794390 - DNA, 25 bp, Homo sapien
tgtctgtttcctcggcgaggccaga

SEQ ID NO: 2794391 - DNA, 25 bp, Homo sapien
tttcctcggcgaggccagaggcatc

SEQ ID NO: 2794392 - DNA, 25 bp, Homo sapien
ctgtttcctcggcgaggccagaggc

SEQ ID NO: 2794393 - DNA, 25 bp, Homo sapien
aaattcacccgtaggagggaggcag

SEQ ID NO: 2794394 - DNA, 25 bp, Homo sapien
cacatggtgtgcacgtcagagcgct

SEQ ID NO: 2794395 - DNA, 25 bp, Homo sapien
gcttttgccccgtcagctgaggagg

SEQ ID NO: 2794396 - DNA, 25 bp, Homo sapien
gagggccgctgcacgagttagactt

SEQ ID NO: 2794397 - DNA, 25 bp, Homo sapien
gaagaatttgttcgcagaccattaa

SEQ ID NO: 2794398 - DNA, 25 bp, Homo sapien
gaccattaatgactttagatgaccg

SEQ ID NO: 2794399 - DNA, 25 bp, Homo sapien
gactttagatgaccggttacagcca

SEQ ID NO: 2794400 - DNA, 25 bp, Homo sapien
tgaccggttacagccatcattccgt

SEQ ID NO: 2794401 - DNA, 25 bp, Homo sapien
tctctgcttgggaacgacagggctc

SEQ ID NO: 2794402 - DNA, 25 bp, Homo sapien
tctctaaagtaactctagggatgca

SEQ ID NO: 2794403 - DNA, 25 bp, Homo sapien
ggaacgacagggctctctaaagtaa

SEQ ID NO: 2794404 - DNA, 25 bp, Homo sapien
gacagggctctctaaagtaactcta

SEQ ID NO: 2794405 - DNA, 25 bp, Homo sapien
tcagcattctcaaaacctaacccag

SEQ ID NO: 2794406 - DNA, 25 bp, Homo sapien
ctgctaaagtgtgatctatttgaag

SEQ ID NO: 2794407 - DNA, 25 bp, Homo sapien
ctcaaaacctaacccagtgatacag

SEQ ID NO: 2794408 - DNA, 25 bp, Homo sapien
ctcctctgctaaagtgtgatctatt

SEQ ID NO: 2794409 - DNA, 25 bp, Homo sapien
tgattcgtgctctcactgttaccct

SEQ ID NO: 2794410 - DNA, 25 bp, Homo sapien
tgtttctgctactgcattgcctttc

SEQ ID NO: 2794411 - DNA, 25 bp, Homo sapien
ccattcagcgtgctgaacaaactgc

SEQ ID NO: 2794412 - DNA, 25 bp, Homo sapien
aaccccacaggtgataaactttgat

SEQ ID NO: 2794413 - DNA, 25 bp, Homo sapien
atacaggggtggtcccgtggcctgt

SEQ ID NO: 2794414 - DNA, 25 bp, Homo sapien
gacttacacacagggtcggtcctgt

SEQ ID NO: 2794415 - DNA, 25 bp, Homo sapien
ttacacacagggtcggtcctgtggc

SEQ ID NO: 2794416 - DNA, 25 bp, Homo sapien
tacaggggtggtcccgtggcctgtg

SEQ ID NO: 2794417 - DNA, 25 bp, Homo sapien
cttagcctccagagctcatgctgga

SEQ ID NO: 2794418 - DNA, 25 bp, Homo sapien
ctggaccagctggaggatgtgaaaa

SEQ ID NO: 2794419 - DNA, 25 bp, Homo sapien
tgctggaccagctggaggatgtgaa

SEQ ID NO: 2794420 - DNA, 25 bp, Homo sapien
tagcctccagagctcatgctggacc

SEQ ID NO: 2794421 - DNA, 25 bp, Homo sapien
tagatgcactatgtttatggaggtg

SEQ ID NO: 2794422 - DNA, 25 bp, Homo sapien
cgggaatccatctattaaagaatgc

SEQ ID NO: 2794423 - DNA, 25 bp, Homo sapien
ggtaaggtagattggtactcagatc

SEQ ID NO: 2794424 - DNA, 25 bp, Homo sapien
aatcgacaactagatcaactcaggg

SEQ ID NO: 2794425 - DNA, 25 bp, Homo sapien
aattccagttgtagggtcctgattc

SEQ ID NO: 2794426 - DNA, 25 bp, Homo sapien
tctatcctcctaatgggtgaaaaca

SEQ ID NO: 2794427 - DNA, 25 bp, Homo sapien
gtgcattcttaacatcaataattcc

SEQ ID NO: 2794428 - DNA, 25 bp, Homo sapien
ttgcagcaggtcctatgacagccca

SEQ ID NO: 2794429 - DNA, 25 bp, Homo sapien
tatcttaggactcacttctgacagc

SEQ ID NO: 2794430 - DNA, 25 bp, Homo sapien
catagaatatctgcaaatctgtcag

SEQ ID NO: 2794431 - DNA, 25 bp, Homo sapien
tagccagatttcctacaagtgaatg

SEQ ID NO: 2794432 - DNA, 25 bp, Homo sapien
tgtacatactggttgagcagcccta

SEQ ID NO: 2794433 - DNA, 25 bp, Homo sapien
gaaattctgaacctcggtcccgcaa

SEQ ID NO: 2794434 - DNA, 25 bp, Homo sapien
tgccaattcggtacctaggagtcaa

SEQ ID NO: 2794435 - DNA, 25 bp, Homo sapien
aaattggctgaaatgcggattaccc

SEQ ID NO: 2794436 - DNA, 25 bp, Homo sapien
taaagtctgcttaaccgtgaatcgc

SEQ ID NO: 2794437 - DNA, 25 bp, Homo sapien
attcgggccgagagggaaattctgc

SEQ ID NO: 2794438 - DNA, 25 bp, Homo sapien
cattcgggccgagagggaaattctg

SEQ ID NO: 2794439 - DNA, 25 bp, Homo sapien
tcattcgggccgagagggaaattct

SEQ ID NO: 2794440 - DNA, 25 bp, Homo sapien
gaacttcaggatcagggcccaatgg

SEQ ID NO: 2794441 - DNA, 25 bp, Homo sapien
caatggagactgagcggacttaacc

SEQ ID NO: 2794442 - DNA, 25 bp, Homo sapien
tctccaggaaacgtgaataggccct

SEQ ID NO: 2794443 - DNA, 25 bp, Homo sapien
tcttcggagggcacagaacttcagg

SEQ ID NO: 2794444 - DNA, 25 bp, Homo sapien
tgtgtgcgcctaatctcaggtggtc

SEQ ID NO: 2794445 - DNA, 25 bp, Homo sapien
gtacaaaaaggctctggacggcggc

SEQ ID NO: 2794446 - DNA, 25 bp, Homo sapien
agttcgcggcgaagtcagtttcctg

SEQ ID NO: 2794447 - DNA, 25 bp, Homo sapien
tattcgctccgacaaggtacaaaaa

SEQ ID NO: 2794448 - DNA, 25 bp, Homo sapien
ttgaagatacgggtacattttggag

SEQ ID NO: 2794449 - DNA, 25 bp, Homo sapien
cattttggagtttaagagcagtgac

SEQ ID NO: 2794450 - DNA, 25 bp, Homo sapien
catttcagttagatcgttgtgcaca

SEQ ID NO: 2794451 - DNA, 25 bp, Homo sapien
catacccttgacttgttttggcctg

SEQ ID NO: 2794452 - DNA, 25 bp, Homo sapien
tgccttcagtgagctagatactgtt

SEQ ID NO: 2794453 - DNA, 25 bp, Homo sapien
tcaaaatctagagatgggaatgatt

SEQ ID NO: 2794454 - DNA, 25 bp, Homo sapien
aacaggaggtaatgacttgaataag

SEQ ID NO: 2794455 - DNA, 25 bp, Homo sapien
gcttacattctagggagaggagatg

SEQ ID NO: 2794456 - DNA, 25 bp, Homo sapien
gctaattaagccgaagaagcctggg

SEQ ID NO: 2794457 - DNA, 25 bp, Homo sapien
gtttttgcttatacacaattcattc

SEQ ID NO: 2794458 - DNA, 25 bp, Homo sapien
tttgcagctaattaagccgaagaag

SEQ ID NO: 2794459 - DNA, 25 bp, Homo sapien
attaagccgaagaagcctgggaatc

SEQ ID NO: 2794460 - DNA, 25 bp, Homo sapien
aaacagtatcacatctccagcctga

SEQ ID NO: 2794461 - DNA, 25 bp, Homo sapien
tcacataagttttcatcgctccaat

SEQ ID NO: 2794462 - DNA, 25 bp, Homo sapien
ttcatcgctccaatcagcacagtct

SEQ ID NO: 2794463 - DNA, 25 bp, Homo sapien
tttttgcagcgagttctgggaatgc

SEQ ID NO: 2794464 - DNA, 25 bp, Homo sapien
gggacacttgaatatcaagttttgt

SEQ ID NO: 2794465 - DNA, 25 bp, Homo sapien
gatttatctgagcaatcaccacagt

SEQ ID NO: 2794466 - DNA, 25 bp, Homo sapien
ccaagtcttctggttgggacacttg

SEQ ID NO: 2794467 - DNA, 25 bp, Homo sapien
tgtgggagactgttgggcatttgac

SEQ ID NO: 2794468 - DNA, 25 bp, Homo sapien
tagagtgggtagcaggttcgtcttc

SEQ ID NO: 2794469 - DNA, 25 bp, Homo sapien
tgactgcaatccaacttgccattac

SEQ ID NO: 2794470 - DNA, 25 bp, Homo sapien
tcgtcttccccttgactgcaatcca

SEQ ID NO: 2794471 - DNA, 25 bp, Homo sapien
gagtgggtagcaggttcgtcttccc

SEQ ID NO: 2794472 - DNA, 25 bp, Homo sapien
gggagggtggcaagcaagtgctgag

SEQ ID NO: 2794473 - DNA, 25 bp, Homo sapien
tgaagctgtcttacattgtcgatgt

SEQ ID NO: 2794474 - DNA, 25 bp, Homo sapien
gaggtcctcgcacaagaagcccagt

SEQ ID NO: 2794475 - DNA, 25 bp, Homo sapien
gctgtcttacattgtcgatgtggta

SEQ ID NO: 2794476 - DNA, 25 bp, Homo sapien
cattcgtgaccatgaacatcagctt

SEQ ID NO: 2794477 - DNA, 25 bp, Homo sapien
ttgacacatgcattcgtgaccatga

SEQ ID NO: 2794478 - DNA, 25 bp, Homo sapien
ggaagatttataagacaagtattaa

SEQ ID NO: 2794479 - DNA, 25 bp, Homo sapien
catgcattcgtgaccatgaacatca

SEQ ID NO: 2794480 - DNA, 25 bp, Homo sapien
tagctgtaaccattgttcttttgcc

SEQ ID NO: 2794481 - DNA, 25 bp, Homo sapien
tttagctgtaaccattgttcttttg

SEQ ID NO: 2794482 - DNA, 25 bp, Homo sapien
agctttagctgtaaccattgttctt

SEQ ID NO: 2794483 - DNA, 25 bp, Homo sapien
agctgtaaccattgttcttttgccc

SEQ ID NO: 2794484 - DNA, 25 bp, Homo sapien
ggtgatcacacccagtacaaggact

SEQ ID NO: 2794485 - DNA, 25 bp, Homo sapien
ggtattccaaaggtgatcccaagac

SEQ ID NO: 2794486 - DNA, 25 bp, Homo sapien
aatcagaagacattgcctggtggga

SEQ ID NO: 2794487 - DNA, 25 bp, Homo sapien
caagaccagtcacagcggtgatcac

SEQ ID NO: 2794488 - DNA, 25 bp, Homo sapien
cttcagcacacgggccaataaccac

SEQ ID NO: 2794489 - DNA, 25 bp, Homo sapien
gctgcttgctcggagcatcgtggac

SEQ ID NO: 2794490 - DNA, 25 bp, Homo sapien
cttgctcggagcatcgtggacccaa

SEQ ID NO: 2794491 - DNA, 25 bp, Homo sapien
gctcggagcatcgtggacccaaggt

SEQ ID NO: 2794492 - DNA, 25 bp, Homo sapien
caagtgcgaatatgagagggagaac

SEQ ID NO: 2794493 - DNA, 25 bp, Homo sapien
gtcagctttgttagtgaggcactca

SEQ ID NO: 2794494 - DNA, 25 bp, Homo sapien
aagctccagatatactacaagtgcg

SEQ ID NO: 2794495 - DNA, 25 bp, Homo sapien
ggaattagtatcagccattcacatg

SEQ ID NO: 2794496 - DNA, 25 bp, Homo sapien
ttccatagagcataaaatccccagc

SEQ ID NO: 2794497 - DNA, 25 bp, Homo sapien
tgcttccaggtagcgacatggcata

SEQ ID NO: 2794498 - DNA, 25 bp, Homo sapien
gagaggagaacccagtaggcaatga

SEQ ID NO: 2794499 - DNA, 25 bp, Homo sapien
gatcgcattcctgtgcacgcaattg

SEQ ID NO: 2794500 - DNA, 25 bp, Homo sapien
actccaacaggaagggctttactat

SEQ ID NO: 2794501 - DNA, 25 bp, Homo sapien
caatgtagaaagttactgctactag

SEQ ID NO: 2794502 - DNA, 25 bp, Homo sapien
gaggaaaatgtatacgaaagacaga

SEQ ID NO: 2794503 - DNA, 25 bp, Homo sapien
tcctgtttaaatgcacgcctagaaa

SEQ ID NO: 2794504 - DNA, 25 bp, Homo sapien
tacacatacggtaaaagtttctaga

SEQ ID NO: 2794505 - DNA, 25 bp, Homo sapien
gctcccagcctcacatactatttaa

SEQ ID NO: 2794506 - DNA, 25 bp, Homo sapien
tgcttttcctttaggcagcctttgc

SEQ ID NO: 2794507 - DNA, 25 bp, Homo sapien
tattgttaatcagccatcccttcac

SEQ ID NO: 2794508 - DNA, 25 bp, Homo sapien
tcaccacgcttaacagggttctgcc

SEQ ID NO: 2794509 - DNA, 25 bp, Homo sapien
tcacttatattgaagaattgacttc

SEQ ID NO: 2794510 - DNA, 25 bp, Homo sapien
cacttatattgaagaattgacttct

SEQ ID NO: 2794511 - DNA, 25 bp, Homo sapien
catatattgtttgatctaatgaagt

SEQ ID NO: 2794512 - DNA, 25 bp, Homo sapien
taatgaagtgttacggcaggacaga

SEQ ID NO: 2794513 - DNA, 25 bp, Homo sapien
gatctaatgaagtgttacggcagga

SEQ ID NO: 2794514 - DNA, 25 bp, Homo sapien
tgtttgatctaatgaagtgttacgg

SEQ ID NO: 2794515 - DNA, 25 bp, Homo sapien
gcacttgatacaaagactgatgata

SEQ ID NO: 2794516 - DNA, 25 bp, Homo sapien
ttatagcaaaccctatataaagtga

SEQ ID NO: 2794517 - DNA, 25 bp, Homo sapien
taaaaatttacatgccacgaaaaca

SEQ ID NO: 2794518 - DNA, 25 bp, Homo sapien
cacgagtgaagatgactagggtaga

SEQ ID NO: 2794519 - DNA, 25 bp, Homo sapien
aactatcatttataaggaccaagaa

SEQ ID NO: 2794520 - DNA, 25 bp, Homo sapien
actatcatttataaggaccaagaag

SEQ ID NO: 2794521 - DNA, 25 bp, Homo sapien
atcatttataaggaccaagaagtaa

SEQ ID NO: 2794522 - DNA, 25 bp, Homo sapien
ctatcatttataaggaccaagaagt

SEQ ID NO: 2794523 - DNA, 25 bp, Homo sapien
tgatattttgaagcagcttcaacaa

SEQ ID NO: 2794524 - DNA, 25 bp, Homo sapien
tgaagcagcttcaacaaatgtgact

SEQ ID NO: 2794525 - DNA, 25 bp, Homo sapien
ttttgaagcagcttcaacaaatgtg

SEQ ID NO: 2794526 - DNA, 25 bp, Homo sapien
gcttcaacaaatgtgactcaataac

SEQ ID NO: 2794527 - DNA, 25 bp, Homo sapien
tccaagttactggacgttgtgtctt

SEQ ID NO: 2794528 - DNA, 25 bp, Homo sapien
aacttagtctgtcactgagtaactg

SEQ ID NO: 2794529 - DNA, 25 bp, Homo sapien
taatcaagattacagcacagtgact

SEQ ID NO: 2794530 - DNA, 25 bp, Homo sapien
catagcctgagggcaataatacaat

SEQ ID NO: 2794531 - DNA, 25 bp, Homo sapien
caaggttatcctaaggttgccctat

SEQ ID NO: 2794532 - DNA, 25 bp, Homo sapien
aaacaggtatgcacttatcctccag

SEQ ID NO: 2794533 - DNA, 25 bp, Homo sapien
tatcctccagtaaccaattatttgg

SEQ ID NO: 2794534 - DNA, 25 bp, Homo sapien
gacacaggagttctaacatacttac

SEQ ID NO: 2794535 - DNA, 25 bp, Homo sapien
tatccagagtcagtttcaattgttg

SEQ ID NO: 2794536 - DNA, 25 bp, Homo sapien
ccatagaattatatccagagtcagt

SEQ ID NO: 2794537 - DNA, 25 bp, Homo sapien
cacttctatagcctagggctacagc

SEQ ID NO: 2794538 - DNA, 25 bp, Homo sapien
gggctacagctagatccatagaatt

SEQ ID NO: 2794539 - DNA, 25 bp, Homo sapien
taaagctcacgcataaagacactgt

SEQ ID NO: 2794540 - DNA, 25 bp, Homo sapien
caaggataaaaggtccaattgcagg

SEQ ID NO: 2794541 - DNA, 25 bp, Homo sapien
acatagtggattcacatgtgacccc

SEQ ID NO: 2794542 - DNA, 25 bp, Homo sapien
catcctttagagcagctgaaactca

SEQ ID NO: 2794543 - DNA, 25 bp, Homo sapien
catgatttccatgtacagcataaag

SEQ ID NO: 2794544 - DNA, 25 bp, Homo sapien
ttccatgtacagcataaagcagagg

SEQ ID NO: 2794545 - DNA, 25 bp, Homo sapien
tccatgtacagcataaagcagaggt

SEQ ID NO: 2794546 - DNA, 25 bp, Homo sapien
catttcacatgatttccatgtacag

SEQ ID NO: 2794547 - DNA, 25 bp, Homo sapien
tgcactttctcgaccttttcctaaa

SEQ ID NO: 2794548 - DNA, 25 bp, Homo sapien
ttgacaatatctgtgtagcctttac

SEQ ID NO: 2794549 - DNA, 25 bp, Homo sapien
ggccaacgacagtgcactttctcga

SEQ ID NO: 2794550 - DNA, 25 bp, Homo sapien
tattcatttacatcaactccacaat

SEQ ID NO: 2794551 - DNA, 25 bp, Homo sapien
tgttctgggcttaataaagaaataa

SEQ ID NO: 2794552 - DNA, 25 bp, Homo sapien
tcaatcctaattatcctttcactct

SEQ ID NO: 2794553 - DNA, 25 bp, Homo sapien
ttcctccgtcctgtatcaatcctaa

SEQ ID NO: 2794554 - DNA, 25 bp, Homo sapien
tagttcaacactaggcctggtaatg

SEQ ID NO: 2794555 - DNA, 25 bp, Homo sapien
ctctaccattatatctagctggctg

SEQ ID NO: 2794556 - DNA, 25 bp, Homo sapien
taccattatatctagctggctggat

SEQ ID NO: 2794557 - DNA, 25 bp, Homo sapien
gatatataaaaactctactaaagac

SEQ ID NO: 2794558 - DNA, 25 bp, Homo sapien
tctagctggctggatatataaaaac

SEQ ID NO: 2794559 - DNA, 25 bp, Homo sapien
tctgaagtaggaactctaccacagc

SEQ ID NO: 2794560 - DNA, 25 bp, Homo sapien
ccacagctatttgcccgtgtgctgc

SEQ ID NO: 2794561 - DNA, 25 bp, Homo sapien
aatccttcttcatccgtgtgattga

SEQ ID NO: 2794562 - DNA, 25 bp, Homo sapien
tcatccgtgtgattgataacatttt

SEQ ID NO: 2794563 - DNA, 25 bp, Homo sapien
cataatgtcgggtacaaggcagtca

SEQ ID NO: 2794564 - DNA, 25 bp, Homo sapien
tatgcctcaatgtacatagccgggt

SEQ ID NO: 2794565 - DNA, 25 bp, Homo sapien
taaagtataaactaccagacatgac

SEQ ID NO: 2794566 - DNA, 25 bp, Homo sapien
actttgtgctgactttatgttggtg

SEQ ID NO: 2794567 - DNA, 25 bp, Homo sapien
tctaataaatcctattgaatttgtt

SEQ ID NO: 2794568 - DNA, 25 bp, Homo sapien
gcctggtgagtttatgtaactattt

SEQ ID NO: 2794569 - DNA, 25 bp, Homo sapien
atctaataaatcctattgaatttgt

SEQ ID NO: 2794570 - DNA, 25 bp, Homo sapien
ctgcctggtgagtttatgtaactat

SEQ ID NO: 2794571 - DNA, 25 bp, Homo sapien
cttgttcgatacgagtagccagata

SEQ ID NO: 2794572 - DNA, 25 bp, Homo sapien
tacgagtagccagatagagcatctc

SEQ ID NO: 2794573 - DNA, 25 bp, Homo sapien
tagccagatagagcatctctccctg

SEQ ID NO: 2794574 - DNA, 25 bp, Homo sapien
tcgatacgagtagccagatagagca

SEQ ID NO: 2794575 - DNA, 25 bp, Homo sapien
gagtatcataaaatgcttcatgaat

SEQ ID NO: 2794576 - DNA, 25 bp, Homo sapien
tatcataaaatgcttcatgaattat

SEQ ID NO: 2794577 - DNA, 25 bp, Homo sapien
ctgaaagagtatcataaaatgcttc

SEQ ID NO: 2794578 - DNA, 25 bp, Homo sapien
agagtatcataaaatgcttcatgaa

SEQ ID NO: 2794579 - DNA, 25 bp, Homo sapien
aaattacagtgcaaatcactcagct

SEQ ID NO: 2794580 - DNA, 25 bp, Homo sapien
gaagccttgaactctaagaagatga

SEQ ID NO: 2794581 - DNA, 25 bp, Homo sapien
taatctgtatttgctctcaacagag

SEQ ID NO: 2794582 - DNA, 25 bp, Homo sapien
tgtggattcaaggtgttaaaatagg

SEQ ID NO: 2794583 - DNA, 25 bp, Homo sapien
tgctaacagaggtgtggtagagacc

SEQ ID NO: 2794584 - DNA, 25 bp, Homo sapien
gaattcccggagaaggagatgtatg

SEQ ID NO: 2794585 - DNA, 25 bp, Homo sapien
gggtgtagacatgccttacttgaat

SEQ ID NO: 2794586 - DNA, 25 bp, Homo sapien
ggagatgtatggatattgcattcag

SEQ ID NO: 2794587 - DNA, 25 bp, Homo sapien
atttcagtaagagttctatgtcaat

SEQ ID NO: 2794588 - DNA, 25 bp, Homo sapien
ttcagtaagagttctatgtcaatgt

SEQ ID NO: 2794589 - DNA, 25 bp, Homo sapien
tttcagtaagagttctatgtcaatg

SEQ ID NO: 2794590 - DNA, 25 bp, Homo sapien
catttcagtaagagttctatgtcaa

SEQ ID NO: 2794591 - DNA, 25 bp, Homo sapien
tatcattaaagtccatacttccttg

SEQ ID NO: 2794592 - DNA, 25 bp, Homo sapien
aaatacatgaggtgtaatagcttca

SEQ ID NO: 2794593 - DNA, 25 bp, Homo sapien
ttatcaagtgatactaaattgtttt

SEQ ID NO: 2794594 - DNA, 25 bp, Homo sapien
ccttgtttgcataatggttagtcaa

SEQ ID NO: 2794595 - DNA, 25 bp, Homo sapien
aaatgacttctaaactgtcttccca

SEQ ID NO: 2794596 - DNA, 25 bp, Homo sapien
aatctcatgattgggaaaataaccc

SEQ ID NO: 2794597 - DNA, 25 bp, Homo sapien
atagggaacttcattagggaatttg

SEQ ID NO: 2794598 - DNA, 25 bp, Homo sapien
aaatcaacatgtacttcctttaaat

SEQ ID NO: 2794599 - DNA, 25 bp, Homo sapien
ggacttcacaaatcgagaacacaca

SEQ ID NO: 2794600 - DNA, 25 bp, Homo sapien
taagtgctgggacactcttccacga

SEQ ID NO: 2794601 - DNA, 25 bp, Homo sapien
cacattcatatcaaatcggttaggc

SEQ ID NO: 2794602 - DNA, 25 bp, Homo sapien
tctggcatgccagttaggctataag

SEQ ID NO: 2794603 - DNA, 25 bp, Homo sapien
tcttggttttgtaagagcagtatcc

SEQ ID NO: 2794604 - DNA, 25 bp, Homo sapien
cttggttttgtaagagcagtatcca

SEQ ID NO: 2794605 - DNA, 25 bp, Homo sapien
ttggttttgtaagagcagtatccag

SEQ ID NO: 2794606 - DNA, 25 bp, Homo sapien
gttttgtaagagcagtatccagtgt

SEQ ID NO: 2794607 - DNA, 25 bp, Homo sapien
tagttcctgtggatgctaataacag

SEQ ID NO: 2794608 - DNA, 25 bp, Homo sapien
aagtgggcagctatgctagttcctg

SEQ ID NO: 2794609 - DNA, 25 bp, Homo sapien
gataaagtgggcagctatgctagtt

SEQ ID NO: 2794610 - DNA, 25 bp, Homo sapien
ctaataacaggagcccctcgtttct

SEQ ID NO: 2794611 - DNA, 25 bp, Homo sapien
ggctaaaaaacgttccgcagcaatg

SEQ ID NO: 2794612 - DNA, 25 bp, Homo sapien
tgtgcccgaaaagtcccaggaagaa

SEQ ID NO: 2794613 - DNA, 25 bp, Homo sapien
ccggagtactacacagacagggtca

SEQ ID NO: 2794614 - DNA, 25 bp, Homo sapien
aagaaagtccgttctgtcgccaccg

SEQ ID NO: 2794615 - DNA, 25 bp, Homo sapien
cgtgagtctcatgagcgtgctctgg

SEQ ID NO: 2794616 - DNA, 25 bp, Homo sapien
agtctcatgagcgtgctctggtacg

SEQ ID NO: 2794617 - DNA, 25 bp, Homo sapien
gctgcgtgagtctcatgagcgtgct

SEQ ID NO: 2794618 - DNA, 25 bp, Homo sapien
tcatgagcgtgctctggtacgtcat

SEQ ID NO: 2794619 - DNA, 25 bp, Homo sapien
tcaattgtcttagtcacagagtagg

SEQ ID NO: 2794620 - DNA, 25 bp, Homo sapien
tcaaatatgaatcctctctggagag

SEQ ID NO: 2794621 - DNA, 25 bp, Homo sapien
tctggagagggtccaactgggaatc

SEQ ID NO: 2794622 - DNA, 25 bp, Homo sapien
ggaatcctgctaaaggagcaaagcc

SEQ ID NO: 2794623 - DNA, 25 bp, Homo sapien
tgtcttgagctagaagaacccatag

SEQ ID NO: 2794624 - DNA, 25 bp, Homo sapien
tggctagtaactcctagtacactgg

SEQ ID NO: 2794625 - DNA, 25 bp, Homo sapien
ttgtatttcggaaccccaatgcaga

SEQ ID NO: 2794626 - DNA, 25 bp, Homo sapien
gaacccatagaggaagattttgtaa

SEQ ID NO: 2794627 - DNA, 25 bp, Homo sapien
tacaggtatgcttggaaatagggcg

SEQ ID NO: 2794628 - DNA, 25 bp, Homo sapien
cacagtggcttataaggaaccagca

SEQ ID NO: 2794629 - DNA, 25 bp, Homo sapien
aattgatttcgtacagcacagtggc

SEQ ID NO: 2794630 - DNA, 25 bp, Homo sapien
gaaccagcagtgtttttccctgagt

SEQ ID NO: 2794631 - DNA, 25 bp, Homo sapien
tctgataatttgcatagtagtaaaa

SEQ ID NO: 2794632 - DNA, 25 bp, Homo sapien
agttgaaattctacctaaagctgta

SEQ ID NO: 2794633 - DNA, 25 bp, Homo sapien
tgtgtaacatgtgacaaaggttttc

SEQ ID NO: 2794634 - DNA, 25 bp, Homo sapien
taaagctgtagttgccgtcaattgt

SEQ ID NO: 2794635 - DNA, 25 bp, Homo sapien
ttccctttaacaaagcttcactgag

SEQ ID NO: 2794636 - DNA, 25 bp, Homo sapien
tcttcatcctagcactgtgaagtgg

SEQ ID NO: 2794637 - DNA, 25 bp, Homo sapien
caggttaggaagcaattcccatagc

SEQ ID NO: 2794638 - DNA, 25 bp, Homo sapien
ttgattcactctcgaagtccctgag

SEQ ID NO: 2794639 - DNA, 25 bp, Homo sapien
attgagacaacactaccttcaatcc

SEQ ID NO: 2794640 - DNA, 25 bp, Homo sapien
tgagacaacactaccttcaatccag

SEQ ID NO: 2794641 - DNA, 25 bp, Homo sapien
agacaacactaccttcaatccagcc

SEQ ID NO: 2794642 - DNA, 25 bp, Homo sapien
gagacaacactaccttcaatccagc

SEQ ID NO: 2794643 - DNA, 25 bp, Homo sapien
ggaaccacacaatcagattaatgag

SEQ ID NO: 2794644 - DNA, 25 bp, Homo sapien
cattgaaggttcaaggctcactgca

SEQ ID NO: 2794645 - DNA, 25 bp, Homo sapien
aggatattacagtggctcacagaat

SEQ ID NO: 2794646 - DNA, 25 bp, Homo sapien
tacaggtgtacatgaccagaccagc

SEQ ID NO: 2794647 - DNA, 25 bp, Homo sapien
ttcacctgttataataggtttccca

SEQ ID NO: 2794648 - DNA, 25 bp, Homo sapien
ataggtttcccaccaataagtccag

SEQ ID NO: 2794649 - DNA, 25 bp, Homo sapien
gaagggttttcatctgtcacatgtc

SEQ ID NO: 2794650 - DNA, 25 bp, Homo sapien
tgaagggttttcatctgtcacatgt

SEQ ID NO: 2794651 - DNA, 25 bp, Homo sapien
taccaccgagcgctggtcactattg

SEQ ID NO: 2794652 - DNA, 25 bp, Homo sapien
tattggctctccgtgtgggtctgcc

SEQ ID NO: 2794653 - DNA, 25 bp, Homo sapien
cgcacaatttggcaggaagccgtac

SEQ ID NO: 2794654 - DNA, 25 bp, Homo sapien
aatttggcaggaagccgtaccaccg

SEQ ID NO: 2794655 - DNA, 25 bp, Homo sapien
gggccatcgctccaggtaaatgctc

SEQ ID NO: 2794656 - DNA, 25 bp, Homo sapien
agctctgggcggaaaagtttgtcca

SEQ ID NO: 2794657 - DNA, 25 bp, Homo sapien
gtttgtccacctgagttcgcatccg

SEQ ID NO: 2794658 - DNA, 25 bp, Homo sapien
tttgggactccatcgtctgcgtttc

SEQ ID NO: 2794659 - DNA, 25 bp, Homo sapien
cttcgggagacagggaaataaacag

SEQ ID NO: 2794660 - DNA, 25 bp, Homo sapien
agccccgccagtgtccttcgggaga

SEQ ID NO: 2794661 - DNA, 25 bp, Homo sapien
ggctgggcgggtgaaagccccgcca

SEQ ID NO: 2794662 - DNA, 25 bp, Homo sapien
gggtcgctcgggcgcactgagagcc

SEQ ID NO: 2794663 - DNA, 25 bp, Homo sapien
acgtcgagagttggtgtccgccctt

SEQ ID NO: 2794664 - DNA, 25 bp, Homo sapien
cggtggagaagggagaacgtcgaga

SEQ ID NO: 2794665 - DNA, 25 bp, Homo sapien
gagagttggtgtccgcccttcccat

SEQ ID NO: 2794666 - DNA, 25 bp, Homo sapien
agaacgtcgagagttggtgtccgcc

SEQ ID NO: 2794667 - DNA, 25 bp, Homo sapien
gcatctgctgtgtttcaaaaggcat

SEQ ID NO: 2794668 - DNA, 25 bp, Homo sapien
gtggaagcatctgctgtgtttcaaa

SEQ ID NO: 2794669 - DNA, 25 bp, Homo sapien
gaagcatctgctgtgtttcaaaagg

SEQ ID NO: 2794670 - DNA, 25 bp, Homo sapien
tcgtgtggaagcatctgctgtgttt

SEQ ID NO: 2794671 - DNA, 25 bp, Homo sapien
gtttcccagagaccagttagatttc

SEQ ID NO: 2794672 - DNA, 25 bp, Homo sapien
gacaggccggtgtttggccaagaaa

SEQ ID NO: 2794673 - DNA, 25 bp, Homo sapien
gaaagcaccatttgggtcgagggct

SEQ ID NO: 2794674 - DNA, 25 bp, Homo sapien
caacatctgtgtttgtgcggcttct

SEQ ID NO: 2794675 - DNA, 25 bp, Homo sapien
gtctttcacggagttgtcaactttg

SEQ ID NO: 2794676 - DNA, 25 bp, Homo sapien
gcagttatcacagcccctagagatg

SEQ ID NO: 2794677 - DNA, 25 bp, Homo sapien
catctaatgtaagtgttgtctttca

SEQ ID NO: 2794678 - DNA, 25 bp, Homo sapien
tcaactttgcaacttgtcaaaaact

SEQ ID NO: 2794679 - DNA, 25 bp, Homo sapien
tggcagctcatgttattgttgtcag

SEQ ID NO: 2794680 - DNA, 25 bp, Homo sapien
cctgtcatggcagctcatgttattg

SEQ ID NO: 2794681 - DNA, 25 bp, Homo sapien
gcagctcatgttattgttgtcagaa

SEQ ID NO: 2794682 - DNA, 25 bp, Homo sapien
tgtcatggcagctcatgttattgtt

SEQ ID NO: 2794683 - DNA, 25 bp, Homo sapien
gtctgcaggcatagacggtacgttg

SEQ ID NO: 2794684 - DNA, 25 bp, Homo sapien
agacggtacgttggtctctttcagc

SEQ ID NO: 2794685 - DNA, 25 bp, Homo sapien
agatgtgttcctgagctgaccttga

SEQ ID NO: 2794686 - DNA, 25 bp, Homo sapien
tgtgttcctgagctgaccttgaccc

SEQ ID NO: 2794687 - DNA, 25 bp, Homo sapien
gtcagggtcaattgttaaactagca

SEQ ID NO: 2794688 - DNA, 25 bp, Homo sapien
taacaataaaattcctgtcagggtc

SEQ ID NO: 2794689 - DNA, 25 bp, Homo sapien
agtatgtaacttgtgcagtttcccc

SEQ ID NO: 2794690 - DNA, 25 bp, Homo sapien
tcaaggtgactgacttgggcagtat

SEQ ID NO: 2794691 - DNA, 25 bp, Homo sapien
tactggacagcaagtttgaaataac

SEQ ID NO: 2794692 - DNA, 25 bp, Homo sapien
aaatgtcagctttgttactctgcca

SEQ ID NO: 2794693 - DNA, 25 bp, Homo sapien
tactctgccataaagctctgtactg

SEQ ID NO: 2794694 - DNA, 25 bp, Homo sapien
gctctgtactggacagcaagtttga

SEQ ID NO: 2794695 - DNA, 25 bp, Homo sapien
tctagtctcaccagaatatcccttg

SEQ ID NO: 2794696 - DNA, 25 bp, Homo sapien
ctcttctagtctcaccagaatatcc

SEQ ID NO: 2794697 - DNA, 25 bp, Homo sapien
accagaatatcccttgttgattgtg

SEQ ID NO: 2794698 - DNA, 25 bp, Homo sapien
ccagaatatcccttgttgattgtgc

SEQ ID NO: 2794699 - DNA, 25 bp, Homo sapien
aggtgaaggaaaggatgaaatcatc

SEQ ID NO: 2794700 - DNA, 25 bp, Homo sapien
ggtgaaggaaaggatgaaatcatcc

SEQ ID NO: 2794701 - DNA, 25 bp, Homo sapien
gtgaaggaaaggatgaaatcatcca

SEQ ID NO: 2794702 - DNA, 25 bp, Homo sapien
tgaaggaaaggatgaaatcatccat

SEQ ID NO: 2794703 - DNA, 25 bp, Homo sapien
cttcaaagggccatctgcgaggcat

SEQ ID NO: 2794704 - DNA, 25 bp, Homo sapien
gctgtaggcgaatggccagtttcct

SEQ ID NO: 2794705 - DNA, 25 bp, Homo sapien
gacttccaatgcagacttcaaaggg

SEQ ID NO: 2794706 - DNA, 25 bp, Homo sapien
gactttggacacaagacactggctt

SEQ ID NO: 2794707 - DNA, 25 bp, Homo sapien
tccagtatatacagaatgagggtct

SEQ ID NO: 2794708 - DNA, 25 bp, Homo sapien
tcagaagagatgctcagacagcggc

SEQ ID NO: 2794709 - DNA, 25 bp, Homo sapien
gttttgccagcatcagttccatggg

SEQ ID NO: 2794710 - DNA, 25 bp, Homo sapien
gtggtttctcaccaaagcaccaagt

SEQ ID NO: 2794711 - DNA, 25 bp, Homo sapien
tgggcattgcttagttatctgtagt

SEQ ID NO: 2794712 - DNA, 25 bp, Homo sapien
caaggggacatgtttagtctccggg

SEQ ID NO: 2794713 - DNA, 25 bp, Homo sapien
ctccaaggggacatgtttagtctcc

SEQ ID NO: 2794714 - DNA, 25 bp, Homo sapien
gtttgggcattgcttagttatctgt

SEQ ID NO: 2794715 - DNA, 25 bp, Homo sapien
tcactaccccttaatatggacctgc

SEQ ID NO: 2794716 - DNA, 25 bp, Homo sapien
ccccttaatatggacctgccctggt

SEQ ID NO: 2794717 - DNA, 25 bp, Homo sapien
atctcatcactaccccttaatatgg

SEQ ID NO: 2794718 - DNA, 25 bp, Homo sapien
ggccatctcatcactaccccttaat

SEQ ID NO: 2794719 - DNA, 25 bp, Homo sapien
tcacattttcactggctgtggggaa

SEQ ID NO: 2794720 - DNA, 25 bp, Homo sapien
cacattttcactggctgtggggaat

SEQ ID NO: 2794721 - DNA, 25 bp, Homo sapien
tattcctgagaaccttctgcttggt

SEQ ID NO: 2794722 - DNA, 25 bp, Homo sapien
tctttctggcgtcaagattttcggt

SEQ ID NO: 2794723 - DNA, 25 bp, Homo sapien
atgcatgatattcctgagaaccttc

SEQ ID NO: 2794724 - DNA, 25 bp, Homo sapien
caagattttcggttctctttctggt

SEQ ID NO: 2794725 - DNA, 25 bp, Homo sapien
tgaagtgtgtggtgaagccggccag

SEQ ID NO: 2794726 - DNA, 25 bp, Homo sapien
cagtccgttgaagtgtgtggtgaag

SEQ ID NO: 2794727 - DNA, 25 bp, Homo sapien
aagcccctgggtcctcggacagcat

SEQ ID NO: 2794728 - DNA, 25 bp, Homo sapien
caaatgaagtatactgtttgtttcc

SEQ ID NO: 2794729 - DNA, 25 bp, Homo sapien
aaggaaatagggattggaacatgtg

SEQ ID NO: 2794730 - DNA, 25 bp, Homo sapien
cttctccccataaattatcttccac

SEQ ID NO: 2794731 - DNA, 25 bp, Homo sapien
gctctcaccggctcaaagtggcttc

SEQ ID NO: 2794732 - DNA, 25 bp, Homo sapien
gtggaggcagccgctctcaccggct

SEQ ID NO: 2794733 - DNA, 25 bp, Homo sapien
gatctatttagcgtctggactgctc

SEQ ID NO: 2794734 - DNA, 25 bp, Homo sapien
gactgctcgtctagagttctctcag

SEQ ID NO: 2794735 - DNA, 25 bp, Homo sapien
tacccctatagagcagaggactgat

SEQ ID NO: 2794736 - DNA, 25 bp, Homo sapien
gcccaagccgtcagaactcaggtga

SEQ ID NO: 2794737 - DNA, 25 bp, Homo sapien
agctaatggggtgtttgaagataca

SEQ ID NO: 2794738 - DNA, 25 bp, Homo sapien
ggtgaatagagcataatgaagctaa

SEQ ID NO: 2794739 - DNA, 25 bp, Homo sapien
aatagagcataatgaagctaatggg

SEQ ID NO: 2794740 - DNA, 25 bp, Homo sapien
ttagaggtgaatagagcataatgaa

SEQ ID NO: 2794741 - DNA, 25 bp, Homo sapien
cagaggctgagtttgggcacctgga

SEQ ID NO: 2794742 - DNA, 25 bp, Homo sapien
agacctctggggctgacaagtgaga

SEQ ID NO: 2794743 - DNA, 25 bp, Homo sapien
gatgagcacgaaccactccagttgg

SEQ ID NO: 2794744 - DNA, 25 bp, Homo sapien
agtgagaggcagatgagcacgaacc

SEQ ID NO: 2794745 - DNA, 25 bp, Homo sapien
tgtggttggtatgctgtgccaacac

SEQ ID NO: 2794746 - DNA, 25 bp, Homo sapien
agtgtggttggtatgctgtgccaac

SEQ ID NO: 2794747 - DNA, 25 bp, Homo sapien
tggttggtatgctgtgccaacacac

SEQ ID NO: 2794748 - DNA, 25 bp, Homo sapien
accgtgagcctacacgtgcatgggg

SEQ ID NO: 2794749 - DNA, 25 bp, Homo sapien
aaatcatgctgtgtagagcagagca

SEQ ID NO: 2794750 - DNA, 25 bp, Homo sapien
gcagttacaaccattcggaaatcat

SEQ ID NO: 2794751 - DNA, 25 bp, Homo sapien
tgttgctagtagcttggccacatgc

SEQ ID NO: 2794752 - DNA, 25 bp, Homo sapien
gcaaggaggaagcacccttggtgtt

SEQ ID NO: 2794753 - DNA, 25 bp, Homo sapien
actggcaagctcatccaagccggtg

SEQ ID NO: 2794754 - DNA, 25 bp, Homo sapien
gaaccagctccgcaaggagctgaca

SEQ ID NO: 2794755 - DNA, 25 bp, Homo sapien
ggagctgacatctatgtctaatgca

SEQ ID NO: 2794756 - DNA, 25 bp, Homo sapien
atgtcttgggtgagtaacaactggc

SEQ ID NO: 2794757 - DNA, 25 bp, Homo sapien
gcctgtggcttagatttgtagtccc

SEQ ID NO: 2794758 - DNA, 25 bp, Homo sapien
tagtccctaatgttgtccacgaaga

SEQ ID NO: 2794759 - DNA, 25 bp, Homo sapien
gctttcagcagaagtttactctcca

SEQ ID NO: 2794760 - DNA, 25 bp, Homo sapien
agcaggtcctccagatgcctgtggc

SEQ ID NO: 2794761 - DNA, 25 bp, Homo sapien
accaagtttcttgttaaatgccact

SEQ ID NO: 2794762 - DNA, 25 bp, Homo sapien
ccaagtttcttgttaaatgccactg

SEQ ID NO: 2794763 - DNA, 25 bp, Homo sapien
cgaatgacagaggagaacttgaaga

SEQ ID NO: 2794764 - DNA, 25 bp, Homo sapien
aatgacagaggagaacttgaagagc

SEQ ID NO: 2794765 - DNA, 25 bp, Homo sapien
atgacagaggagaacttgaagagcc

SEQ ID NO: 2794766 - DNA, 25 bp, Homo sapien
tgacagaggagaacttgaagagcct

SEQ ID NO: 2794767 - DNA, 25 bp, Homo sapien
gttgcctatgcaagataaatccaaa

SEQ ID NO: 2794768 - DNA, 25 bp, Homo sapien
ttattcagaacaactgagcaaattt

SEQ ID NO: 2794769 - DNA, 25 bp, Homo sapien
gatttattattcagaacaactgagc

SEQ ID NO: 2794770 - DNA, 25 bp, Homo sapien
atccactatctgtgttgcctatgca

SEQ ID NO: 2794771 - DNA, 25 bp, Homo sapien
tcattttgagagaataaagtccgtg

SEQ ID NO: 2794772 - DNA, 25 bp, Homo sapien
aataaagtccgtgagtgagtgggac

SEQ ID NO: 2794773 - DNA, 25 bp, Homo sapien
taaagtccgtgagtgagtgggacac

SEQ ID NO: 2794774 - DNA, 25 bp, Homo sapien
tgagagaataaagtccgtgagtgag

SEQ ID NO: 2794775 - DNA, 25 bp, Homo sapien
tcaccgggtgcctggccatagttag

SEQ ID NO: 2794776 - DNA, 25 bp, Homo sapien
tgaaagccacccatttcaccgggtg

SEQ ID NO: 2794777 - DNA, 25 bp, Homo sapien
cagcgtcttggcacaagggtaagag

SEQ ID NO: 2794778 - DNA, 25 bp, Homo sapien
tctgtacaacatagcctccctgtga

SEQ ID NO: 2794779 - DNA, 25 bp, Homo sapien
tggtgaggttagtactaactcaaac

SEQ ID NO: 2794780 - DNA, 25 bp, Homo sapien
tagtactaactcaaaccagcttttg

SEQ ID NO: 2794781 - DNA, 25 bp, Homo sapien
gaggttagtactaactcaaaccagc

SEQ ID NO: 2794782 - DNA, 25 bp, Homo sapien
acagaagtggtgaggttagtactaa

SEQ ID NO: 2794783 - DNA, 25 bp, Homo sapien
gcttgggaagcagaccagtgtgcaa

SEQ ID NO: 2794784 - DNA, 25 bp, Homo sapien
tacagcttatcggagccaccaagag

SEQ ID NO: 2794785 - DNA, 25 bp, Homo sapien
tgtatcaggatagatctgccagccc

SEQ ID NO: 2794786 - DNA, 25 bp, Homo sapien
tgtaacaagcctgcctaagaccctt

SEQ ID NO: 2794787 - DNA, 25 bp, Homo sapien
tactgagtctaggaggaatctcttg

SEQ ID NO: 2794788 - DNA, 25 bp, Homo sapien
agtgggtccctacaagacagttttg

SEQ ID NO: 2794789 - DNA, 25 bp, Homo sapien
gcagagcccaaacctacaaaatgtg

SEQ ID NO: 2794790 - DNA, 25 bp, Homo sapien
tgtttttataaaggactcagctgga

SEQ ID NO: 2794791 - DNA, 25 bp, Homo sapien
caaggaggaacgcaataactggatg

SEQ ID NO: 2794792 - DNA, 25 bp, Homo sapien
tacggagccttactttagctaggat

SEQ ID NO: 2794793 - DNA, 25 bp, Homo sapien
gctggtcctgagatgtatgaaattc

SEQ ID NO: 2794794 - DNA, 25 bp, Homo sapien
accaattcttaaggatgagcatgcc

SEQ ID NO: 2794795 - DNA, 25 bp, Homo sapien
gaaccattgagaggctctttagagg

SEQ ID NO: 2794796 - DNA, 25 bp, Homo sapien
ctcttcagttctgggtcagactgga

SEQ ID NO: 2794797 - DNA, 25 bp, Homo sapien
gaaggtctccttgtctgtatccaca

SEQ ID NO: 2794798 - DNA, 25 bp, Homo sapien
aagggacacccgtggcatttgccag

SEQ ID NO: 2794799 - DNA, 25 bp, Homo sapien
tacagaagcagtggagtgtggatgg

SEQ ID NO: 2794800 - DNA, 25 bp, Homo sapien
gagtgtggatgggccacgacagagc

SEQ ID NO: 2794801 - DNA, 25 bp, Homo sapien
gaagagcagcgagaacgccaaccat

SEQ ID NO: 2794802 - DNA, 25 bp, Homo sapien
agccagaagagcagcgagaacgcca

SEQ ID NO: 2794803 - DNA, 25 bp, Homo sapien
ccacgtgtgcccttaatgtgtgctg

SEQ ID NO: 2794804 - DNA, 25 bp, Homo sapien
tctccctaaagaacagacggtctcc

SEQ ID NO: 2794805 - DNA, 25 bp, Homo sapien
tctactatggcagtcactggtctgg

SEQ ID NO: 2794806 - DNA, 25 bp, Homo sapien
tatggccaccgtctgagtctggttt

SEQ ID NO: 2794807 - DNA, 25 bp, Homo sapien
tgtagattcaaggttcggaaaagct

SEQ ID NO: 2794808 - DNA, 25 bp, Homo sapien
ggaaaagctggatcacctgaatgac

SEQ ID NO: 2794809 - DNA, 25 bp, Homo sapien
cttttcaaccctgaatgcagccctg

SEQ ID NO: 2794810 - DNA, 25 bp, Homo sapien
tgttgccggatgaaaacactcacaa

SEQ ID NO: 2794811 - DNA, 25 bp, Homo sapien
tctctggaacgccaaaaaccttgcc

SEQ ID NO: 2794812 - DNA, 25 bp, Homo sapien
tgtgtttcgaggtagttccaaccga

SEQ ID NO: 2794813 - DNA, 25 bp, Homo sapien
ccttgcaggaccagaagtctcgcga

SEQ ID NO: 2794814 - DNA, 25 bp, Homo sapien
taagagaagtgaattcgggcctgcg

SEQ ID NO: 2794815 - DNA, 25 bp, Homo sapien
tctcagccttcgaatgtcagtcaca

SEQ ID NO: 2794816 - DNA, 25 bp, Homo sapien
gaacatcaagtagacctcaaggtgg

SEQ ID NO: 2794817 - DNA, 25 bp, Homo sapien
gaataaatcggtactgatgagctgg

SEQ ID NO: 2794818 - DNA, 25 bp, Homo sapien
gacttggtgaggactagtgaacatc

SEQ ID NO: 2794819 - DNA, 25 bp, Homo sapien
tttctattgacttgtgcttcaaagt

SEQ ID NO: 2794820 - DNA, 25 bp, Homo sapien
tttgccctaatggagagcatctctt

SEQ ID NO: 2794821 - DNA, 25 bp, Homo sapien
gaatccagtgctgtcgctgtaggaa

SEQ ID NO: 2794822 - DNA, 25 bp, Homo sapien
taaaatgctttatggtaccctgagc

SEQ ID NO: 2794823 - DNA, 25 bp, Homo sapien
cccatatggccatgcataggagatg

SEQ ID NO: 2794824 - DNA, 25 bp, Homo sapien
gactgtggactggaaccacatctac

SEQ ID NO: 2794825 - DNA, 25 bp, Homo sapien
ttgtacgttgacatctcccccggga

SEQ ID NO: 2794826 - DNA, 25 bp, Homo sapien
ccgggactgtggactggaaccacat

SEQ ID NO: 2794827 - DNA, 25 bp, Homo sapien
acgttgacatctcccccgggactgt

SEQ ID NO: 2794828 - DNA, 25 bp, Homo sapien
ggtgacctgttcagtctgccagtgt

SEQ ID NO: 2794829 - DNA, 25 bp, Homo sapien
cctcaatgtagtaatttttgtgctc

SEQ ID NO: 2794830 - DNA, 25 bp, Homo sapien
tcaatgtagtaatttttgtgctctg

SEQ ID NO: 2794831 - DNA, 25 bp, Homo sapien
aatgtagtaatttttgtgctctggc

SEQ ID NO: 2794832 - DNA, 25 bp, Homo sapien
cctccattgacccacctcctactgg

SEQ ID NO: 2794833 - DNA, 25 bp, Homo sapien
cctgccttgagggtcctcctttgct

SEQ ID NO: 2794834 - DNA, 25 bp, Homo sapien
aagatgggatgaaatgaggtgtggc

SEQ ID NO: 2794835 - DNA, 25 bp, Homo sapien
tcctcctccattgacccacctccta

SEQ ID NO: 2794836 - DNA, 25 bp, Homo sapien
aagatggagccttctgggaagagtt

SEQ ID NO: 2794837 - DNA, 25 bp, Homo sapien
caaagatggagccttctgggaagag

SEQ ID NO: 2794838 - DNA, 25 bp, Homo sapien
gatggagccttctgggaagagtttt

SEQ ID NO: 2794839 - DNA, 25 bp, Homo sapien
tccccaaagatggagccttctggga

SEQ ID NO: 2794840 - DNA, 25 bp, Homo sapien
ggcgtttataacagaagcaaagcta

SEQ ID NO: 2794841 - DNA, 25 bp, Homo sapien
caaggacaatgaccagacaagatgg

SEQ ID NO: 2794842 - DNA, 25 bp, Homo sapien
tttgtctccattccttatgtatgtg

SEQ ID NO: 2794843 - DNA, 25 bp, Homo sapien
gcaaagctaaatctaccgacaagga

SEQ ID NO: 2794844 - DNA, 25 bp, Homo sapien
gcattggccacggagctaaaacagg

SEQ ID NO: 2794845 - DNA, 25 bp, Homo sapien
tgaacgacagcatctgcattggcca

SEQ ID NO: 2794846 - DNA, 25 bp, Homo sapien
tgtgcttgacatttcccgtggcagc

SEQ ID NO: 2794847 - DNA, 25 bp, Homo sapien
caaacatagccagcatgaacgacag

SEQ ID NO: 2794848 - DNA, 25 bp, Homo sapien
ctctaaggagtcaggcacatccaca

SEQ ID NO: 2794849 - DNA, 25 bp, Homo sapien
gacataagttttcccagtcttgcca

SEQ ID NO: 2794850 - DNA, 25 bp, Homo sapien
cagacataagttttcccagtcttgc

SEQ ID NO: 2794851 - DNA, 25 bp, Homo sapien
caggcacatccacagacataagttt

SEQ ID NO: 2794852 - DNA, 25 bp, Homo sapien
tgccagccttgtgtagcccactggg

SEQ ID NO: 2794853 - DNA, 25 bp, Homo sapien
aactgtaggaactgtgctaattgcc

SEQ ID NO: 2794854 - DNA, 25 bp, Homo sapien
actgtaggaactgtgctaattgcca

SEQ ID NO: 2794855 - DNA, 25 bp, Homo sapien
cagccttgtgtagcccactgggcac

SEQ ID NO: 2794856 - DNA, 25 bp, Homo sapien
ttaagccagtgattccaatagaatg

SEQ ID NO: 2794857 - DNA, 25 bp, Homo sapien
tagaatgatccccttttgttatagg

SEQ ID NO: 2794858 - DNA, 25 bp, Homo sapien
gttatagggtccaaatatctcattc

SEQ ID NO: 2794859 - DNA, 25 bp, Homo sapien
aaatgcaattgccccgtggcccttg

SEQ ID NO: 2794860 - DNA, 25 bp, Homo sapien
ctactcagagaagcgactgctagga

SEQ ID NO: 2794861 - DNA, 25 bp, Homo sapien
cagagaagcgactgctaggaggaat

SEQ ID NO: 2794862 - DNA, 25 bp, Homo sapien
ccactgctcggtcaatgcagttcct

SEQ ID NO: 2794863 - DNA, 25 bp, Homo sapien
tcctgccactgctcggtcaatgcag

SEQ ID NO: 2794864 - DNA, 25 bp, Homo sapien
cagctcctggttccttaatacttcc

SEQ ID NO: 2794865 - DNA, 25 bp, Homo sapien
tgccagcgccttcttaattccctaa

SEQ ID NO: 2794866 - DNA, 25 bp, Homo sapien
tttctacttgcatctgccagcgcct

SEQ ID NO: 2794867 - DNA, 25 bp, Homo sapien
gatctttttaaccccatgtaatcca

SEQ ID NO: 2794868 - DNA, 25 bp, Homo sapien
ttttaagaggggagggagtgtgtga

SEQ ID NO: 2794869 - DNA, 25 bp, Homo sapien
ctggagtttatttcatctctgcagc

SEQ ID NO: 2794870 - DNA, 25 bp, Homo sapien
gaccataagagacgacccacgccct

SEQ ID NO: 2794871 - DNA, 25 bp, Homo sapien
tctctgcagcctcgaccataagaga

SEQ ID NO: 2794872 - DNA, 25 bp, Homo sapien
gaagcctaacctaggccagtgggag

SEQ ID NO: 2794873 - DNA, 25 bp, Homo sapien
cagagactgagtactgatgccagca

SEQ ID NO: 2794874 - DNA, 25 bp, Homo sapien
taaagaggtcatctggaagcctaac

SEQ ID NO: 2794875 - DNA, 25 bp, Homo sapien
gaatgggaagacgatttggtccaca

SEQ ID NO: 2794876 - DNA, 25 bp, Homo sapien
tgagggtaaacaggctccaaggtcc

SEQ ID NO: 2794877 - DNA, 25 bp, Homo sapien
gaaagctaggagacgaatgttccca

SEQ ID NO: 2794878 - DNA, 25 bp, Homo sapien
aactctttggcagcgtcttagcctg

SEQ ID NO: 2794879 - DNA, 25 bp, Homo sapien
tgggataacccagcactcctgaagg

SEQ ID NO: 2794880 - DNA, 25 bp, Homo sapien
tgatgctgcaggaacaaatcgccca

SEQ ID NO: 2794881 - DNA, 25 bp, Homo sapien
cttccaaatgccctgtgagtgagtc

SEQ ID NO: 2794882 - DNA, 25 bp, Homo sapien
tggcacggcagcattggaggctaca

SEQ ID NO: 2794883 - DNA, 25 bp, Homo sapien
ggaatggacaatagcctctgctgat

SEQ ID NO: 2794884 - DNA, 25 bp, Homo sapien
ctgcgtggtccccagaccctaatat

SEQ ID NO: 2794885 - DNA, 25 bp, Homo sapien
gtggtccccagaccctaatatgccc

SEQ ID NO: 2794886 - DNA, 25 bp, Homo sapien
gcgtggtccccagaccctaatatgc

SEQ ID NO: 2794887 - DNA, 25 bp, Homo sapien
ggtccccagaccctaatatgcccat

SEQ ID NO: 2794888 - DNA, 25 bp, Homo sapien
atgtggtcataggtggcagggaggg

SEQ ID NO: 2794889 - DNA, 25 bp, Homo sapien
aggtggcagggagggagaacactgc

SEQ ID NO: 2794890 - DNA, 25 bp, Homo sapien
ctatgtggtcataggtggcagggag

SEQ ID NO: 2794891 - DNA, 25 bp, Homo sapien
gtggcagggagggagaacactgcac

SEQ ID NO: 2794892 - DNA, 25 bp, Homo sapien
gtttctggtgcccatatcctacaga

SEQ ID NO: 2794893 - DNA, 25 bp, Homo sapien
agagttgttggaaatctgtagcttt

SEQ ID NO: 2794894 - DNA, 25 bp, Homo sapien
tggtgcccatatcctacagagttgt

SEQ ID NO: 2794895 - DNA, 25 bp, Homo sapien
tctggtgcccatatcctacagagtt

SEQ ID NO: 2794896 - DNA, 25 bp, Homo sapien
ctaaaggtgcacccaggggcttgag

SEQ ID NO: 2794897 - DNA, 25 bp, Homo sapien
gagaggaaggattctatgtagaacc

SEQ ID NO: 2794898 - DNA, 25 bp, Homo sapien
ggaaggattctatgtagaacctcat

SEQ ID NO: 2794899 - DNA, 25 bp, Homo sapien
gaggaaggattctatgtagaacctc

SEQ ID NO: 2794900 - DNA, 25 bp, Homo sapien
aggaaggattctatgtagaacctca

SEQ ID NO: 2794901 - DNA, 25 bp, Homo sapien
ggagttgatgtaaccagggagatgc

SEQ ID NO: 2794902 - DNA, 25 bp, Homo sapien
atctctcaatctctcatcctcatag

SEQ ID NO: 2794903 - DNA, 25 bp, Homo sapien
ctcaatctctcatcctcatagatgc

SEQ ID NO: 2794904 - DNA, 25 bp, Homo sapien
aggagttgatgtaaccagggagatg

SEQ ID NO: 2794905 - DNA, 25 bp, Homo sapien
gccgacgtagatttggtatcaatac

SEQ ID NO: 2794906 - DNA, 25 bp, Homo sapien
acatgaatctggcaaacagctggga

SEQ ID NO: 2794907 - DNA, 25 bp, Homo sapien
aattcctagagcagtttcagtcccc

SEQ ID NO: 2794908 - DNA, 25 bp, Homo sapien
gctgggaattactgccctccaaagt

SEQ ID NO: 2794909 - DNA, 25 bp, Homo sapien
ccaccaactcagtggtcctccaggg

SEQ ID NO: 2794910 - DNA, 25 bp, Homo sapien
cggtggtcttcaatggatttccagt

SEQ ID NO: 2794911 - DNA, 25 bp, Homo sapien
tacccaccaactcagtggtcctcca

SEQ ID NO: 2794912 - DNA, 25 bp, Homo sapien
ttggctcccccggtggtcttcaatg

SEQ ID NO: 2794913 - DNA, 25 bp, Homo sapien
ttgtgctgtgccttctgagagtttg

SEQ ID NO: 2794914 - DNA, 25 bp, Homo sapien
gtttccctcaggacatcgtccatgc

SEQ ID NO: 2794915 - DNA, 25 bp, Homo sapien
ttttgtttccctcaggacatcgtcc

SEQ ID NO: 2794916 - DNA, 25 bp, Homo sapien
tgagagtttgccagattttaacacc

SEQ ID NO: 2794917 - DNA, 25 bp, Homo sapien
ccttgaatggcgcacatatttcaca

SEQ ID NO: 2794918 - DNA, 25 bp, Homo sapien
cttcccttgaatggcgcacatattt

SEQ ID NO: 2794919 - DNA, 25 bp, Homo sapien
catcttcccttgaatggcgcacata

SEQ ID NO: 2794920 - DNA, 25 bp, Homo sapien
gggtcatcttcccttgaatggcgca

SEQ ID NO: 2794921 - DNA, 25 bp, Homo sapien
tggggatttgaggaacagatttcag

SEQ ID NO: 2794922 - DNA, 25 bp, Homo sapien
attcccaagggtttacatatgttct

SEQ ID NO: 2794923 - DNA, 25 bp, Homo sapien
ataatcatgtttggggtcatttcat

SEQ ID NO: 2794924 - DNA, 25 bp, Homo sapien
gttctttgtctgtatccctacagat

SEQ ID NO: 2794925 - DNA, 25 bp, Homo sapien
ggccatcttcaaagccctgctgttg

SEQ ID NO: 2794926 - DNA, 25 bp, Homo sapien
atataaaaatgtgaaggccatcttc

SEQ ID NO: 2794927 - DNA, 25 bp, Homo sapien
tgctgttggatctgaggcctttgct

SEQ ID NO: 2794928 - DNA, 25 bp, Homo sapien
gcttttctggcttgtggtcgttacc

SEQ ID NO: 2794929 - DNA, 25 bp, Homo sapien
ctggcagctgctgtttttggaacct

SEQ ID NO: 2794930 - DNA, 25 bp, Homo sapien
cctcttggctttttcctgatgctgt

SEQ ID NO: 2794931 - DNA, 25 bp, Homo sapien
gggctgcttcatgcagagcttcctg

SEQ ID NO: 2794932 - DNA, 25 bp, Homo sapien
tggctttttcctgatgctgtgggtg

SEQ ID NO: 2794933 - DNA, 25 bp, Homo sapien
cagttgtctctgaaagcgctcacca

SEQ ID NO: 2794934 - DNA, 25 bp, Homo sapien
caggaaaccacagggactcttgttg

SEQ ID NO: 2794935 - DNA, 25 bp, Homo sapien
tcttacagagattgccgcagtgccc

SEQ ID NO: 2794936 - DNA, 25 bp, Homo sapien
gcgtctgtccacttactcaggcagt

SEQ ID NO: 2794937 - DNA, 25 bp, Homo sapien
ccctgcaggattgctcctgtttgtg

SEQ ID NO: 2794938 - DNA, 25 bp, Homo sapien
gaacattcctgccacctggagtcat

SEQ ID NO: 2794939 - DNA, 25 bp, Homo sapien
ctgtttgtgcaggaacattcctgcc

SEQ ID NO: 2794940 - DNA, 25 bp, Homo sapien
tgctcctgtttgtgcaggaacattc

SEQ ID NO: 2794941 - DNA, 25 bp, Homo sapien
catgacgaactccagttgatggatt

SEQ ID NO: 2794942 - DNA, 25 bp, Homo sapien
aagattgagagtatggtcctttgca

SEQ ID NO: 2794943 - DNA, 25 bp, Homo sapien
gattgattgccaatgactgcctaag

SEQ ID NO: 2794944 - DNA, 25 bp, Homo sapien
actgggacccagtgtcatgacgaac

SEQ ID NO: 2794945 - DNA, 25 bp, Homo sapien
ttgtttacagaactaccttcatttc

SEQ ID NO: 2794946 - DNA, 25 bp, Homo sapien
gctttgtttacagaactaccttcat

SEQ ID NO: 2794947 - DNA, 25 bp, Homo sapien
ctttgtttacagaactaccttcatt

SEQ ID NO: 2794948 - DNA, 25 bp, Homo sapien
gtggtccaccacgtttcagctgttc

SEQ ID NO: 2794949 - DNA, 25 bp, Homo sapien
gctccgtggagcacaatacaggtaa

SEQ ID NO: 2794950 - DNA, 25 bp, Homo sapien
gctcttgggctgacaaaaggccatg

SEQ ID NO: 2794951 - DNA, 25 bp, Homo sapien
tacaggtaacgtagctttggctcca

SEQ ID NO: 2794952 - DNA, 25 bp, Homo sapien
ctgctgaagcctgtgtccagggctc

SEQ ID NO: 2794953 - DNA, 25 bp, Homo sapien
tctgctgaagcctgtgtccagggct

SEQ ID NO: 2794954 - DNA, 25 bp, Homo sapien
tgctgaagcctgtgtccagggctct

SEQ ID NO: 2794955 - DNA, 25 bp, Homo sapien
gtgtcctccaccaataagcacagca

SEQ ID NO: 2794956 - DNA, 25 bp, Homo sapien
actgttggtatcctctgccaccttg

SEQ ID NO: 2794957 - DNA, 25 bp, Homo sapien
tggtgtcctccaccaataagcacag

SEQ ID NO: 2794958 - DNA, 25 bp, Homo sapien
tgccaccttgcactctggtgtcctc

SEQ ID NO: 2794959 - DNA, 25 bp, Homo sapien
tatgcgtgaatctccacgtcctgca

SEQ ID NO: 2794960 - DNA, 25 bp, Homo sapien
tcagctgtcctatgcgtgaatctcc

SEQ ID NO: 2794961 - DNA, 25 bp, Homo sapien
atctccacgtcctgcaaaagtgctg

SEQ ID NO: 2794962 - DNA, 25 bp, Homo sapien
cttgaatgcccagccggcctttggg

SEQ ID NO: 2794963 - DNA, 25 bp, Homo sapien
tacacattcactccatttttaccca

SEQ ID NO: 2794964 - DNA, 25 bp, Homo sapien
cgattttgtaaagtctcctctgcct

SEQ ID NO: 2794965 - DNA, 25 bp, Homo sapien
cccctccccacgtatactcaacata

SEQ ID NO: 2794966 - DNA, 25 bp, Homo sapien
tcattcttgctttcgattttgtaaa

SEQ ID NO: 2794967 - DNA, 25 bp, Homo sapien
ggcataggactgtcattacatccct

SEQ ID NO: 2794968 - DNA, 25 bp, Homo sapien
gaaaaacacggctggcataggactg

SEQ ID NO: 2794969 - DNA, 25 bp, Homo sapien
gaataggacaccttgtgagaaaaac

SEQ ID NO: 2794970 - DNA, 25 bp, Homo sapien
agtgcttagctatattaacaaatga

SEQ ID NO: 2794971 - DNA, 25 bp, Homo sapien
gcacttgggtgcaatttgaaagacc

SEQ ID NO: 2794972 - DNA, 25 bp, Homo sapien
tctggcagttggcaacgcacttggg

SEQ ID NO: 2794973 - DNA, 25 bp, Homo sapien
catcacaattttgcacctgctcatc

SEQ ID NO: 2794974 - DNA, 25 bp, Homo sapien
catctgctcaggcagtacttctggc

SEQ ID NO: 2794975 - DNA, 25 bp, Homo sapien
tgtgccggctttgttttggaactcc

SEQ ID NO: 2794976 - DNA, 25 bp, Homo sapien
cagaaaatcagccacgccctagatg

SEQ ID NO: 2794977 - DNA, 25 bp, Homo sapien
tggaactcctttcagaaccgaatgg

SEQ ID NO: 2794978 - DNA, 25 bp, Homo sapien
tgtcaaattaggaggaatctgaggg

SEQ ID NO: 2794979 - DNA, 25 bp, Homo sapien
ttcttacagcagatgctgggtttca

SEQ ID NO: 2794980 - DNA, 25 bp, Homo sapien
gtttcagtccagatgccttagacat

SEQ ID NO: 2794981 - DNA, 25 bp, Homo sapien
tgggtttcagtccagatgccttaga

SEQ ID NO: 2794982 - DNA, 25 bp, Homo sapien
tcttacagcagatgctgggtttcag

SEQ ID NO: 2794983 - DNA, 25 bp, Homo sapien
caaactcccattagtacccatgagc

SEQ ID NO: 2794984 - DNA, 25 bp, Homo sapien
agccagataagcttggtaaccaaac

SEQ ID NO: 2794985 - DNA, 25 bp, Homo sapien
ccaagcccaggactgagccagataa

SEQ ID NO: 2794986 - DNA, 25 bp, Homo sapien
ggctgtatagcttatgttcaccaag

SEQ ID NO: 2794987 - DNA, 25 bp, Homo sapien
ctgtaagaggaaggaacagagtccc

SEQ ID NO: 2794988 - DNA, 25 bp, Homo sapien
tgtaagaggaaggaacagagtccca

SEQ ID NO: 2794989 - DNA, 25 bp, Homo sapien
ctgcactcactaatggcaatgccag

SEQ ID NO: 2794990 - DNA, 25 bp, Homo sapien
agcaccatcttctaataagtcagac

SEQ ID NO: 2794991 - DNA, 25 bp, Homo sapien
catcttctaataagtcagacagcat

SEQ ID NO: 2794992 - DNA, 25 bp, Homo sapien
tcactaatggcaatgccagtagcac

SEQ ID NO: 2794993 - DNA, 25 bp, Homo sapien
tgtgtgaactattcagagcccagac

SEQ ID NO: 2794994 - DNA, 25 bp, Homo sapien
gagaagctccctaatccatagaagt

SEQ ID NO: 2794995 - DNA, 25 bp, Homo sapien
cacagaattcaatgtatgcccaggc

SEQ ID NO: 2794996 - DNA, 25 bp, Homo sapien
tatttaccatgcacagactgagcaa

SEQ ID NO: 2794997 - DNA, 25 bp, Homo sapien
tttctgatctgggcaggttcgttca

SEQ ID NO: 2794998 - DNA, 25 bp, Homo sapien
gatctgggcaggttcgttcacccct

SEQ ID NO: 2794999 - DNA, 25 bp, Homo sapien
ctgatctgggcaggttcgttcaccc

SEQ ID NO: 2795000 - DNA, 25 bp, Homo sapien
tctgatctgggcaggttcgttcacc

SEQ ID NO: 2795001 - DNA, 25 bp, Homo sapien
catagtacggcacccctttcagaaa

SEQ ID NO: 2795002 - DNA, 25 bp, Homo sapien
gaagctccacagatctaagtacata

SEQ ID NO: 2795003 - DNA, 25 bp, Homo sapien
aagttgcccattcttgcgctaaact

SEQ ID NO: 2795004 - DNA, 25 bp, Homo sapien
cttgcgctaaactaagagtcagcat

SEQ ID NO: 2795005 - DNA, 25 bp, Homo sapien
gcttttataaccaagacctcatcgt

SEQ ID NO: 2795006 - DNA, 25 bp, Homo sapien
agcaaccaggttcattgtgattgca

SEQ ID NO: 2795007 - DNA, 25 bp, Homo sapien
caggttcattgtgattgcacttggc

SEQ ID NO: 2795008 - DNA, 25 bp, Homo sapien
catcgttagcctggtctgccttctc

SEQ ID NO: 2795009 - DNA, 25 bp, Homo sapien
ttaacacacaggaaactttgatata

SEQ ID NO: 2795010 - DNA, 25 bp, Homo sapien
tgcaggaaggcaacatacgtccagg

SEQ ID NO: 2795011 - DNA, 25 bp, Homo sapien
gaaactttgatataagaagagggaa

SEQ ID NO: 2795012 - DNA, 25 bp, Homo sapien
cagcaggggcataggcaccttcctg

SEQ ID NO: 2795013 - DNA, 25 bp, Homo sapien
gaagaacttacccaattggtgagaa

SEQ ID NO: 2795014 - DNA, 25 bp, Homo sapien
gatagtctccccatagagtgcttag

SEQ ID NO: 2795015 - DNA, 25 bp, Homo sapien
tacagcccagtgtggctaagcacgc

SEQ ID NO: 2795016 - DNA, 25 bp, Homo sapien
caagtatgtgtatctggcctcagag

SEQ ID NO: 2795017 - DNA, 25 bp, Homo sapien
tgaatatctaaatatcagtgcaaca

SEQ ID NO: 2795018 - DNA, 25 bp, Homo sapien
atatctaaatatcagtgcaacacat

SEQ ID NO: 2795019 - DNA, 25 bp, Homo sapien
cacaatatatctctgtggccatatc

SEQ ID NO: 2795020 - DNA, 25 bp, Homo sapien
tggccatatctactatggggatcca

SEQ ID NO: 2795021 - DNA, 25 bp, Homo sapien
gctcttctcatcactcacatattca

SEQ ID NO: 2795022 - DNA, 25 bp, Homo sapien
tctcgatgcaaacccaatgagatga

SEQ ID NO: 2795023 - DNA, 25 bp, Homo sapien
tgcctgtgcacatacatctcgatgc

SEQ ID NO: 2795024 - DNA, 25 bp, Homo sapien
tgaagaagtcatgcaacctggtatc

SEQ ID NO: 2795025 - DNA, 25 bp, Homo sapien
acagtgtttgttcctctgggcattg

SEQ ID NO: 2795026 - DNA, 25 bp, Homo sapien
cagtgtttgttcctctgggcattgc

SEQ ID NO: 2795027 - DNA, 25 bp, Homo sapien
agccacccctctttggccgttccag

SEQ ID NO: 2795028 - DNA, 25 bp, Homo sapien
gaagtgaatgttcgtgcctgcttca

SEQ ID NO: 2795029 - DNA, 25 bp, Homo sapien
aattagccttatccccgaatggtgg

SEQ ID NO: 2795030 - DNA, 25 bp, Homo sapien
gaatgggaacgattcttcctctgaa

SEQ ID NO: 2795031 - DNA, 25 bp, Homo sapien
tgatgtttctctgggcatcgaggga

SEQ ID NO: 2795032 - DNA, 25 bp, Homo sapien
gatcttcatggggatttccactgga

SEQ ID NO: 2795033 - DNA, 25 bp, Homo sapien
gtttcagcagacagatggaagagag

SEQ ID NO: 2795034 - DNA, 25 bp, Homo sapien
ctcatgggagtatctgaatgctttc

SEQ ID NO: 2795035 - DNA, 25 bp, Homo sapien
ttatttctcatgggagtatctgaat

SEQ ID NO: 2795036 - DNA, 25 bp, Homo sapien
tctcatgggagtatctgaatgcttt

SEQ ID NO: 2795037 - DNA, 25 bp, Homo sapien
tttctcatgggagtatctgaatgct

SEQ ID NO: 2795038 - DNA, 25 bp, Homo sapien
tcaaatttcccaagcctggcatgtt

SEQ ID NO: 2795039 - DNA, 25 bp, Homo sapien
atgtttacaccccagcatgtgcagt

SEQ ID NO: 2795040 - DNA, 25 bp, Homo sapien
gcctggcatgtttacaccccagcat

SEQ ID NO: 2795041 - DNA, 25 bp, Homo sapien
caccccagcatgtgcagtccatctg

SEQ ID NO: 2795042 - DNA, 25 bp, Homo sapien
tgtgcaatgaacatgggcattctcc

SEQ ID NO: 2795043 - DNA, 25 bp, Homo sapien
agtcaatggtaggacagcgggctaa

SEQ ID NO: 2795044 - DNA, 25 bp, Homo sapien
cctctttagaagcagtaggaaatat

SEQ ID NO: 2795045 - DNA, 25 bp, Homo sapien
gaaggagtgtgactcacacgctgct

SEQ ID NO: 2795046 - DNA, 25 bp, Homo sapien
gagtggatgtctcccctctgtgttc

SEQ ID NO: 2795047 - DNA, 25 bp, Homo sapien
atttcagagtggatgtctcccctct

SEQ ID NO: 2795048 - DNA, 25 bp, Homo sapien
ctacaatctagcagcgacactgtca

SEQ ID NO: 2795049 - DNA, 25 bp, Homo sapien
ctagcagcgacactgtcagatttca

SEQ ID NO: 2795050 - DNA, 25 bp, Homo sapien
caattctaaaattttcacgtgattc

SEQ ID NO: 2795051 - DNA, 25 bp, Homo sapien
aattccaatatatgcgacatctcag

SEQ ID NO: 2795052 - DNA, 25 bp, Homo sapien
tctttaagttcatagattcttgcct

SEQ ID NO: 2795053 - DNA, 25 bp, Homo sapien
agcacattcataactgcttgtgaaa

SEQ ID NO: 2795054 - DNA, 25 bp, Homo sapien
ccttgtcaaagacacccactgatgg

SEQ ID NO: 2795055 - DNA, 25 bp, Homo sapien
ccattgcttttggttcccagtgccc

SEQ ID NO: 2795056 - DNA, 25 bp, Homo sapien
gatggctgcaatccctctatgccca

SEQ ID NO: 2795057 - DNA, 25 bp, Homo sapien
gctgaccttggggacccattgcttt

SEQ ID NO: 2795058 - DNA, 25 bp, Homo sapien
tgctcgccgtctgtcaaggcgatga

SEQ ID NO: 2795059 - DNA, 25 bp, Homo sapien
taagtcaacaaatggcctagcttgt

SEQ ID NO: 2795060 - DNA, 25 bp, Homo sapien
cgatgacacgaacaagggcaaataa

SEQ ID NO: 2795061 - DNA, 25 bp, Homo sapien
tatttgttgaccaccacattgctcg

SEQ ID NO: 2795062 - DNA, 25 bp, Homo sapien
tctctctgacggaaaagacagcctt

SEQ ID NO: 2795063 - DNA, 25 bp, Homo sapien
ccttgaatattgttgccctttagca

SEQ ID NO: 2795064 - DNA, 25 bp, Homo sapien
gattatatttatccctgttcctcta

SEQ ID NO: 2795065 - DNA, 25 bp, Homo sapien
aagaactcccatgtgtaacaatgcg

SEQ ID NO: 2795066 - DNA, 25 bp, Homo sapien
tagcattaacatttgtgtagtattt

SEQ ID NO: 2795067 - DNA, 25 bp, Homo sapien
cttagcattaacatttgtgtagtat

SEQ ID NO: 2795068 - DNA, 25 bp, Homo sapien
gcattaacatttgtgtagtatttac

SEQ ID NO: 2795069 - DNA, 25 bp, Homo sapien
caagccagccttagcattaacattt

SEQ ID NO: 2795070 - DNA, 25 bp, Homo sapien
tcctccgcatacactatctttgcag

SEQ ID NO: 2795071 - DNA, 25 bp, Homo sapien
tacactatctttgcagctgctaggg

SEQ ID NO: 2795072 - DNA, 25 bp, Homo sapien
cagttcacgaagtcctccgcataca

SEQ ID NO: 2795073 - DNA, 25 bp, Homo sapien
tcacgaagtcctccgcatacactat

SEQ ID NO: 2795074 - DNA, 25 bp, Homo sapien
tcataggcttcatcaggcatattca

SEQ ID NO: 2795075 - DNA, 25 bp, Homo sapien
actcatcttcataggcttcatcagg

SEQ ID NO: 2795076 - DNA, 25 bp, Homo sapien
cagacactcatcttcataggcttca

SEQ ID NO: 2795077 - DNA, 25 bp, Homo sapien
cataggcttcatcaggcatattcat

SEQ ID NO: 2795078 - DNA, 25 bp, Homo sapien
tgaggccacactgcctaatacgggc

SEQ ID NO: 2795079 - DNA, 25 bp, Homo sapien
cgtggcttaatttgagaggctttga

SEQ ID NO: 2795080 - DNA, 25 bp, Homo sapien
cactgcctaatacgggctcttcgtg

SEQ ID NO: 2795081 - DNA, 25 bp, Homo sapien
tacgggctcttcgtggcttaatttg

SEQ ID NO: 2795082 - DNA, 25 bp, Homo sapien
ttcccaccgcttgacagcttgtttc

SEQ ID NO: 2795083 - DNA, 25 bp, Homo sapien
ccttcccaccgcttgacagcttgtt

SEQ ID NO: 2795084 - DNA, 25 bp, Homo sapien
gttcccttcccaccgcttgacagct

SEQ ID NO: 2795085 - DNA, 25 bp, Homo sapien
tcccttcccaccgcttgacagcttg

SEQ ID NO: 2795086 - DNA, 25 bp, Homo sapien
agtggaaacttctgagatcttcacc

SEQ ID NO: 2795087 - DNA, 25 bp, Homo sapien
taatatgtcttcatgatggtcctca

SEQ ID NO: 2795088 - DNA, 25 bp, Homo sapien
gagctttgagaaagcatgcatctcc

SEQ ID NO: 2795089 - DNA, 25 bp, Homo sapien
ggtttgtatgctggatcctttctcc

SEQ ID NO: 2795090 - DNA, 25 bp, Homo sapien
ttctcctggcttcacggcagatttg

SEQ ID NO: 2795091 - DNA, 25 bp, Homo sapien
tctgacatcatatacactgattggc

SEQ ID NO: 2795092 - DNA, 25 bp, Homo sapien
caaaacatgatctaggactgctaaa

SEQ ID NO: 2795093 - DNA, 25 bp, Homo sapien
gacaaacagtgagcattctgacatc

SEQ ID NO: 2795094 - DNA, 25 bp, Homo sapien
gttctgacaaaagcactttagtggg

SEQ ID NO: 2795095 - DNA, 25 bp, Homo sapien
ttccacgaactttcatcctagctgg

SEQ ID NO: 2795096 - DNA, 25 bp, Homo sapien
aacctcaataccctttacgagcaga

SEQ ID NO: 2795097 - DNA, 25 bp, Homo sapien
cattgcaccgggtctaacctcaata

SEQ ID NO: 2795098 - DNA, 25 bp, Homo sapien
tataagaattcctcttgaatcattg

SEQ ID NO: 2795099 - DNA, 25 bp, Homo sapien
gctatcaactccttcttggtagggt

SEQ ID NO: 2795100 - DNA, 25 bp, Homo sapien
cccttgtttatagctgattccccag

SEQ ID NO: 2795101 - DNA, 25 bp, Homo sapien
ggagggcttcggcttgccaattaga

SEQ ID NO: 2795102 - DNA, 25 bp, Homo sapien
taaaagtgtactccttcttagtagc

SEQ ID NO: 2795103 - DNA, 25 bp, Homo sapien
tcaggacagtacactgagaagagac

SEQ ID NO: 2795104 - DNA, 25 bp, Homo sapien
tgcagtccacttgctagaggaaggc

SEQ ID NO: 2795105 - DNA, 25 bp, Homo sapien
tagtggtgacccagtattcctctca

SEQ ID NO: 2795106 - DNA, 25 bp, Homo sapien
tattggatgagagctagtagacctg

SEQ ID NO: 2795107 - DNA, 25 bp, Homo sapien
tctcacccaggacaggatcgaagtg

SEQ ID NO: 2795108 - DNA, 25 bp, Homo sapien
tcacccaggacaggatcgaagtgtt

SEQ ID NO: 2795109 - DNA, 25 bp, Homo sapien
ctctcacccaggacaggatcgaagt

SEQ ID NO: 2795110 - DNA, 25 bp, Homo sapien
acccaggacaggatcgaagtgttgg

SEQ ID NO: 2795111 - DNA, 25 bp, Homo sapien
gctttcaagctgaaaatgtgaagat

SEQ ID NO: 2795112 - DNA, 25 bp, Homo sapien
gcattgtcacagtaaaacgccttaa

SEQ ID NO: 2795113 - DNA, 25 bp, Homo sapien
gctttgccgtagaaagcattgtcac

SEQ ID NO: 2795114 - DNA, 25 bp, Homo sapien
tgtcacagtaaaacgccttaagagt

SEQ ID NO: 2795115 - DNA, 25 bp, Homo sapien
gaactataacgaagttggcccacca

SEQ ID NO: 2795116 - DNA, 25 bp, Homo sapien
gtccctcagtagaactataacgaag

SEQ ID NO: 2795117 - DNA, 25 bp, Homo sapien
tcagtagaactataacgaagttggc

SEQ ID NO: 2795118 - DNA, 25 bp, Homo sapien
gtacagtgtccctcagtagaactat

SEQ ID NO: 2795119 - DNA, 25 bp, Homo sapien
tgtgttccagaacccagctacctga

SEQ ID NO: 2795120 - DNA, 25 bp, Homo sapien
aaagaatgatttctcccggctgtca

SEQ ID NO: 2795121 - DNA, 25 bp, Homo sapien
catgatctgggagtagccatttaac

SEQ ID NO: 2795122 - DNA, 25 bp, Homo sapien
gaaaactgggttcagggatgacaac

SEQ ID NO: 2795123 - DNA, 25 bp, Homo sapien
gctgcaactggatatggtgcccctt

SEQ ID NO: 2795124 - DNA, 25 bp, Homo sapien
gctctagggtccgtgatatgcttca

SEQ ID NO: 2795125 - DNA, 25 bp, Homo sapien
ctctgtgtatgaaacagctgccggg

SEQ ID NO: 2795126 - DNA, 25 bp, Homo sapien
aaatgagtctgatatccctggcgcc

SEQ ID NO: 2795127 - DNA, 25 bp, Homo sapien
gaactgacgcgggaggcattgaaat

SEQ ID NO: 2795128 - DNA, 25 bp, Homo sapien
cccactgaagacagagggcatgtgc

SEQ ID NO: 2795129 - DNA, 25 bp, Homo sapien
tggttcctgtggttaaacctgtctc

SEQ ID NO: 2795130 - DNA, 25 bp, Homo sapien
tttgcaccccatgccatgtctgctg

SEQ ID NO: 2795131 - DNA, 25 bp, Homo sapien
aacgagtaagtgtaaccagaagcgg

SEQ ID NO: 2795132 - DNA, 25 bp, Homo sapien
cccatggagccgcacactgttgaaa

SEQ ID NO: 2795133 - DNA, 25 bp, Homo sapien
tgtgctcatccccagctcggctgtg

SEQ ID NO: 2795134 - DNA, 25 bp, Homo sapien
ccagaagcggttgttccatgtgctc

SEQ ID NO: 2795135 - DNA, 25 bp, Homo sapien
ctcctgccccacattctggaagccc

SEQ ID NO: 2795136 - DNA, 25 bp, Homo sapien
tgccccacattctggaagccctctc

SEQ ID NO: 2795137 - DNA, 25 bp, Homo sapien
ccacattctggaagccctctcccaa

SEQ ID NO: 2795138 - DNA, 25 bp, Homo sapien
cacattctggaagccctctcccaag

SEQ ID NO: 2795139 - DNA, 25 bp, Homo sapien
gatggcaaaagtcctcagtacagtg

SEQ ID NO: 2795140 - DNA, 25 bp, Homo sapien
tccaaagggacgttagttccagcca

SEQ ID NO: 2795141 - DNA, 25 bp, Homo sapien
gataatagagtgacatgtgggccca

SEQ ID NO: 2795142 - DNA, 25 bp, Homo sapien
catttagagaattgcctgtccccag

SEQ ID NO: 2795143 - DNA, 25 bp, Homo sapien
caaatgtcactaccagagttaggcc

SEQ ID NO: 2795144 - DNA, 25 bp, Homo sapien
aatggcctagatgcaagttcccctc

SEQ ID NO: 2795145 - DNA, 25 bp, Homo sapien
catctggcaaagtatggcaggcccc

SEQ ID NO: 2795146 - DNA, 25 bp, Homo sapien
cagtgatagggcaagaatctgagcc

SEQ ID NO: 2795147 - DNA, 25 bp, Homo sapien
gcagccagacacagttcctgcttac

SEQ ID NO: 2795148 - DNA, 25 bp, Homo sapien
ggcttcagttccctgccagaccaag

SEQ ID NO: 2795149 - DNA, 25 bp, Homo sapien
agttcctgcttacccctgagcagtg

SEQ ID NO: 2795150 - DNA, 25 bp, Homo sapien
tcctgatgctacaaagcttgcctct

SEQ ID NO: 2795151 - DNA, 25 bp, Homo sapien
tgaaggctgattctgcttgttcaga

SEQ ID NO: 2795152 - DNA, 25 bp, Homo sapien
ggtattaacaagtctcctccaagag

SEQ ID NO: 2795153 - DNA, 25 bp, Homo sapien
caagacctggtctcctttggtagtt

SEQ ID NO: 2795154 - DNA, 25 bp, Homo sapien
tggtagttaagagcctttcaggtat

SEQ ID NO: 2795155 - DNA, 25 bp, Homo sapien
tagggaaacgtgtctgcagtgacac

SEQ ID NO: 2795156 - DNA, 25 bp, Homo sapien
gaagctccacgaagactttggaaga

SEQ ID NO: 2795157 - DNA, 25 bp, Homo sapien
catctggatccacttttacactcac

SEQ ID NO: 2795158 - DNA, 25 bp, Homo sapien
cattttgtgaaatggcttggacttg

SEQ ID NO: 2795159 - DNA, 25 bp, Homo sapien
tggataaaagagcacagtcctggac

SEQ ID NO: 2795160 - DNA, 25 bp, Homo sapien
ctgggatacaggagggaaccgggtg

SEQ ID NO: 2795161 - DNA, 25 bp, Homo sapien
caaagtgacagcaatcagctgtgga

SEQ ID NO: 2795162 - DNA, 25 bp, Homo sapien
ggagggaaccgggtgcatgaggaca

SEQ ID NO: 2795163 - DNA, 25 bp, Homo sapien
ccattccaggacaaattcccaagga

SEQ ID NO: 2795164 - DNA, 25 bp, Homo sapien
acctttcaacggttccagcttgatg

SEQ ID NO: 2795165 - DNA, 25 bp, Homo sapien
tcccaaggatgttgcattatccgcc

SEQ ID NO: 2795166 - DNA, 25 bp, Homo sapien
tcccacaagactcagaccattccag

SEQ ID NO: 2795167 - DNA, 25 bp, Homo sapien
acacaagaaaaaggagctgctggcc

SEQ ID NO: 2795168 - DNA, 25 bp, Homo sapien
tggcccatttgtgatgcaaagcagc

SEQ ID NO: 2795169 - DNA, 25 bp, Homo sapien
agctctgaagatctggcccatttgt

SEQ ID NO: 2795170 - DNA, 25 bp, Homo sapien
gcaaagcagcttatttctaactgca

SEQ ID NO: 2795171 - DNA, 25 bp, Homo sapien
gaggagccttgggagaattgtccta

SEQ ID NO: 2795172 - DNA, 25 bp, Homo sapien
attgtcctagactggccaatggtgg

SEQ ID NO: 2795173 - DNA, 25 bp, Homo sapien
ccatgaacaactgttggaggctgat

SEQ ID NO: 2795174 - DNA, 25 bp, Homo sapien
ctggtgtcaccaagggccaagcaag

SEQ ID NO: 2795175 - DNA, 25 bp, Homo sapien
ccaccctgagttccaatgggaggcc

SEQ ID NO: 2795176 - DNA, 25 bp, Homo sapien
caccctgagttccaatgggaggccc

SEQ ID NO: 2795177 - DNA, 25 bp, Homo sapien
gccacaatagctggtcgagcttccc

SEQ ID NO: 2795178 - DNA, 25 bp, Homo sapien
ggggccacaatagctggtcgagctt

SEQ ID NO: 2795179 - DNA, 25 bp, Homo sapien
tgaggcaaacgacatccaagctatg

SEQ ID NO: 2795180 - DNA, 25 bp, Homo sapien
caagctatgattagcagcctgaagg

SEQ ID NO: 2795181 - DNA, 25 bp, Homo sapien
tcaacagaatctgagttcttaatcc

SEQ ID NO: 2795182 - DNA, 25 bp, Homo sapien
gagttcttaatccaatgccatgccc

SEQ ID NO: 2795183 - DNA, 25 bp, Homo sapien
tctcccaggtccactcatgatatgt

SEQ ID NO: 2795184 - DNA, 25 bp, Homo sapien
caagggtgctatcaagatgttggct

SEQ ID NO: 2795185 - DNA, 25 bp, Homo sapien
tgggtcttgagatcctcttcaaagc

SEQ ID NO: 2795186 - DNA, 25 bp, Homo sapien
tagcttggtcctctgctcggagtct

SEQ ID NO: 2795187 - DNA, 25 bp, Homo sapien
tttttcctgtcattactccataccg

SEQ ID NO: 2795188 - DNA, 25 bp, Homo sapien
ttcacagtaaaaatggacagcattc

SEQ ID NO: 2795189 - DNA, 25 bp, Homo sapien
tgtatatctttctgaaatagggagt

SEQ ID NO: 2795190 - DNA, 25 bp, Homo sapien
cacaaccctaatgtatatctttctg

SEQ ID NO: 2795191 - DNA, 25 bp, Homo sapien
cttgcaaaacgagaccacacagcat

SEQ ID NO: 2795192 - DNA, 25 bp, Homo sapien
tgagggagatgtcttgcaaaacgag

SEQ ID NO: 2795193 - DNA, 25 bp, Homo sapien
taaacagcaggtgatacagaaactg

SEQ ID NO: 2795194 - DNA, 25 bp, Homo sapien
gccagcaggtggaggtatagacccc

SEQ ID NO: 2795195 - DNA, 25 bp, Homo sapien
gtacagcctgccttgccgcatctct

SEQ ID NO: 2795196 - DNA, 25 bp, Homo sapien
aaatctacagtcaactttgcagaac

SEQ ID NO: 2795197 - DNA, 25 bp, Homo sapien
cagaacctgctgtaaaaaatgctcc

SEQ ID NO: 2795198 - DNA, 25 bp, Homo sapien
tcagataggatgtaaaggttgcttt

SEQ ID NO: 2795199 - DNA, 25 bp, Homo sapien
gctgtgaattctaacgaatattgga

SEQ ID NO: 2795200 - DNA, 25 bp, Homo sapien
caatcaaaggtgtctcttggtacag

SEQ ID NO: 2795201 - DNA, 25 bp, Homo sapien
gagtatccttctggtctagagccat

SEQ ID NO: 2795202 - DNA, 25 bp, Homo sapien
ctagagccattttatagccaggcaa

SEQ ID NO: 2795203 - DNA, 25 bp, Homo sapien
ctctctgcctagcacggcctttgtg

SEQ ID NO: 2795204 - DNA, 25 bp, Homo sapien
gtgcactttacaatatttatacctc

SEQ ID NO: 2795205 - DNA, 25 bp, Homo sapien
cagcatctttacgtctgctcgttgt

SEQ ID NO: 2795206 - DNA, 25 bp, Homo sapien
tacgtctgctcgttgtccctctctg

SEQ ID NO: 2795207 - DNA, 25 bp, Homo sapien
ggtgctgcctgggaaatatcatcaa

SEQ ID NO: 2795208 - DNA, 25 bp, Homo sapien
tgagcacgtgcctaattgcccgact

SEQ ID NO: 2795209 - DNA, 25 bp, Homo sapien
cctggactcccttggaaatataatt

SEQ ID NO: 2795210 - DNA, 25 bp, Homo sapien
aatggagaataacagttcagcttgc

SEQ ID NO: 2795211 - DNA, 25 bp, Homo sapien
cctcagtttatcttttaacagggat

SEQ ID NO: 2795212 - DNA, 25 bp, Homo sapien
gctgggctaatagatataacttagt

SEQ ID NO: 2795213 - DNA, 25 bp, Homo sapien
caaatgctactagaggagtttttca

SEQ ID NO: 2795214 - DNA, 25 bp, Homo sapien
cttagtaccatgattgatatttagc

SEQ ID NO: 2795215 - DNA, 25 bp, Homo sapien
cctttgatccatgtgatccttttca

SEQ ID NO: 2795216 - DNA, 25 bp, Homo sapien
gggagcagcagacacgattcccttt

SEQ ID NO: 2795217 - DNA, 25 bp, Homo sapien
gcagacacgattccctttgatccat

SEQ ID NO: 2795218 - DNA, 25 bp, Homo sapien
gattccctttgatccatgtgatcct

SEQ ID NO: 2795219 - DNA, 25 bp, Homo sapien
acagctttcttaagtctgtctccat

SEQ ID NO: 2795220 - DNA, 25 bp, Homo sapien
gagtccacttggacagattctaagt

SEQ ID NO: 2795221 - DNA, 25 bp, Homo sapien
catttattgaaagaggcgagtccac

SEQ ID NO: 2795222 - DNA, 25 bp, Homo sapien
ggagcctctccttgttagtttgcag

SEQ ID NO: 2795223 - DNA, 25 bp, Homo sapien
tccctcacaggccaacgaaactcac

SEQ ID NO: 2795224 - DNA, 25 bp, Homo sapien
gaacccaggagatgcactaaatccc

SEQ ID NO: 2795225 - DNA, 25 bp, Homo sapien
gatgcactaaatcccgtattccagg

SEQ ID NO: 2795226 - DNA, 25 bp, Homo sapien
acaggccaacgaaactcacactcaa

SEQ ID NO: 2795227 - DNA, 25 bp, Homo sapien
cagcagtcagactacacaggagtcc

SEQ ID NO: 2795228 - DNA, 25 bp, Homo sapien
gtcagactacacaggagtcctatgg

SEQ ID NO: 2795229 - DNA, 25 bp, Homo sapien
tggtcagttatccagctcagtctct

SEQ ID NO: 2795230 - DNA, 25 bp, Homo sapien
gactacacaggagtcctatggatga

SEQ ID NO: 2795231 - DNA, 25 bp, Homo sapien
gcatctgaccatgagtagcaaccaa

SEQ ID NO: 2795232 - DNA, 25 bp, Homo sapien
tgtcgtacactctcagccttccagg

SEQ ID NO: 2795233 - DNA, 25 bp, Homo sapien
ttagatgtcgtacactctcagcctt

SEQ ID NO: 2795234 - DNA, 25 bp, Homo sapien
cgtgaaagggcatctgaccatgagt

SEQ ID NO: 2795235 - DNA, 25 bp, Homo sapien
cagcacactccttgcatgagaggtt

SEQ ID NO: 2795236 - DNA, 25 bp, Homo sapien
agaggttcactcagaggtaggcaca

SEQ ID NO: 2795237 - DNA, 25 bp, Homo sapien
tcctagttggatcaggctcagtaga

SEQ ID NO: 2795238 - DNA, 25 bp, Homo sapien
gaagaatcagctagactcctagttg

SEQ ID NO: 2795239 - DNA, 25 bp, Homo sapien
caaaatttacttgtaagcgactcat

SEQ ID NO: 2795240 - DNA, 25 bp, Homo sapien
cccgaaattcaatgtcaaagaaaca

SEQ ID NO: 2795241 - DNA, 25 bp, Homo sapien
ccagatcaatctcccgaaattcaat

SEQ ID NO: 2795242 - DNA, 25 bp, Homo sapien
caggatgtcaaaatttacttgtaag

SEQ ID NO: 2795243 - DNA, 25 bp, Homo sapien
gccagcccacgaaaaaggccaggaa

SEQ ID NO: 2795244 - DNA, 25 bp, Homo sapien
ggagactattaacttcccgcagtgt

SEQ ID NO: 2795245 - DNA, 25 bp, Homo sapien
cacattgaaacaattgttgttgctc

SEQ ID NO: 2795246 - DNA, 25 bp, Homo sapien
tcagcatcttgagaatgtcctttcc

SEQ ID NO: 2795247 - DNA, 25 bp, Homo sapien
cacttagtgctaagatggcaatgat

SEQ ID NO: 2795248 - DNA, 25 bp, Homo sapien
ctgagtccagtgaaacacttagtgc

SEQ ID NO: 2795249 - DNA, 25 bp, Homo sapien
gtgacactctccctgactgaccgtg

SEQ ID NO: 2795250 - DNA, 25 bp, Homo sapien
gagctgctctcaaacataggtgtgg

SEQ ID NO: 2795251 - DNA, 25 bp, Homo sapien
tcctggtacggagaagtcagaacta

SEQ ID NO: 2795252 - DNA, 25 bp, Homo sapien
tcagaactaggtaagggatacagat

SEQ ID NO: 2795253 - DNA, 25 bp, Homo sapien
cttaagtttgaataggtgagggcct

SEQ ID NO: 2795254 - DNA, 25 bp, Homo sapien
ggaagtgttagatccctgaatatgc

SEQ ID NO: 2795255 - DNA, 25 bp, Homo sapien
ctaaatctgtaatatctgaatatca

SEQ ID NO: 2795256 - DNA, 25 bp, Homo sapien
tcagggccaccaacataaaaccaag

SEQ ID NO: 2795257 - DNA, 25 bp, Homo sapien
tatcatcgtaagataaaagttcagg

SEQ ID NO: 2795258 - DNA, 25 bp, Homo sapien
acataaaaccaagttgtggactggg

SEQ ID NO: 2795259 - DNA, 25 bp, Homo sapien
ttagtgcctctggcccaaatgccca

SEQ ID NO: 2795260 - DNA, 25 bp, Homo sapien
aatgcccagttaactgtggcccagt

SEQ ID NO: 2795261 - DNA, 25 bp, Homo sapien
tccctgggtgttggctgagtgttta

SEQ ID NO: 2795262 - DNA, 25 bp, Homo sapien
ttccctgggtgttggctgagtgttt

SEQ ID NO: 2795263 - DNA, 25 bp, Homo sapien
gctttggtatatacaggaatttgac

SEQ ID NO: 2795264 - DNA, 25 bp, Homo sapien
agaacaatgcagttcccaatttcct

SEQ ID NO: 2795265 - DNA, 25 bp, Homo sapien
gaaaggatttcactgagtggcgtac

SEQ ID NO: 2795266 - DNA, 25 bp, Homo sapien
ttttcatttgggtagatggcctcag

SEQ ID NO: 2795267 - DNA, 25 bp, Homo sapien
catttgggtagatggcctcagaaca

SEQ ID NO: 2795268 - DNA, 25 bp, Homo sapien
agtctttcctccaaactttccatgg

SEQ ID NO: 2795269 - DNA, 25 bp, Homo sapien
tctatacttgtgagaacctcctggg

SEQ ID NO: 2795270 - DNA, 25 bp, Homo sapien
tttcctccaaactttccatggcaaa

SEQ ID NO: 2795271 - DNA, 25 bp, Homo sapien
ggcaaacacagtgttgatctatact

SEQ ID NO: 2795272 - DNA, 25 bp, Homo sapien
ctgccaagttgcctcttgtgggact

SEQ ID NO: 2795273 - DNA, 25 bp, Homo sapien
tcactgtccgaactgggagcacagg

SEQ ID NO: 2795274 - DNA, 25 bp, Homo sapien
tgtcactgtccgaactgggagcaca

SEQ ID NO: 2795275 - DNA, 25 bp, Homo sapien
ttatgtcactgtccgaactgggagc

SEQ ID NO: 2795276 - DNA, 25 bp, Homo sapien
tttatgtcactgtccgaactgggag

SEQ ID NO: 2795277 - DNA, 25 bp, Homo sapien
tctgctggcgcctgaagcctcttcc

SEQ ID NO: 2795278 - DNA, 25 bp, Homo sapien
gctggcgcctgaagcctcttccagt

SEQ ID NO: 2795279 - DNA, 25 bp, Homo sapien
gcaggctctgctggcgcctgaagcc

SEQ ID NO: 2795280 - DNA, 25 bp, Homo sapien
gctctgctggcgcctgaagcctctt

SEQ ID NO: 2795281 - DNA, 25 bp, Homo sapien
ctctcatattccgttgggccaaaca

SEQ ID NO: 2795282 - DNA, 25 bp, Homo sapien
tttctctcatattccgttgggccaa

SEQ ID NO: 2795283 - DNA, 25 bp, Homo sapien
tcatattccgttgggccaaacagaa

SEQ ID NO: 2795284 - DNA, 25 bp, Homo sapien
tctcatattccgttgggccaaacag

SEQ ID NO: 2795285 - DNA, 25 bp, Homo sapien
gttttggagggcaatatcattcgtg

SEQ ID NO: 2795286 - DNA, 25 bp, Homo sapien
gggttgggccatagaacttggtgca

SEQ ID NO: 2795287 - DNA, 25 bp, Homo sapien
tttggagggcaatatcattcgtggc

SEQ ID NO: 2795288 - DNA, 25 bp, Homo sapien
tggaaagcccacgggttgggccata

SEQ ID NO: 2795289 - DNA, 25 bp, Homo sapien
ttgttattccttgatgctatgctaa

SEQ ID NO: 2795290 - DNA, 25 bp, Homo sapien
gactacttcttagacagagcagccc

SEQ ID NO: 2795291 - DNA, 25 bp, Homo sapien
tgactacttcttagacagagcagcc

SEQ ID NO: 2795292 - DNA, 25 bp, Homo sapien
tttattgttattccttgatgctatg

SEQ ID NO: 2795293 - DNA, 25 bp, Homo sapien
tctatagcttttccgtttcagcgac

SEQ ID NO: 2795294 - DNA, 25 bp, Homo sapien
ccgtttcagcgacaagatgattatc

SEQ ID NO: 2795295 - DNA, 25 bp, Homo sapien
gatgcctgcaacttctatagctttt

SEQ ID NO: 2795296 - DNA, 25 bp, Homo sapien
tcagcgacaagatgattatctcagc

SEQ ID NO: 2795297 - DNA, 25 bp, Homo sapien
catcgccatcttgcttttggtgggt

SEQ ID NO: 2795298 - DNA, 25 bp, Homo sapien
aggtcactctcatcgccatcttgct

SEQ ID NO: 2795299 - DNA, 25 bp, Homo sapien
cactctcatcgccatcttgcttttg

SEQ ID NO: 2795300 - DNA, 25 bp, Homo sapien
gtcactctcatcgccatcttgcttt

SEQ ID NO: 2795301 - DNA, 25 bp, Homo sapien
tcctgtggattatctttgcccctga

SEQ ID NO: 2795302 - DNA, 25 bp, Homo sapien
tcaaactgcccagcgattaattgtt

SEQ ID NO: 2795303 - DNA, 25 bp, Homo sapien
ctgatgagacccatggaaacaagac

SEQ ID NO: 2795304 - DNA, 25 bp, Homo sapien
gaaacaagacctatggagtccagct

SEQ ID NO: 2795305 - DNA, 25 bp, Homo sapien
gaatttcctgcatatttccctgctc

SEQ ID NO: 2795306 - DNA, 25 bp, Homo sapien
ttaactcgcccacctttcctgacca

SEQ ID NO: 2795307 - DNA, 25 bp, Homo sapien
gggagccgatgcagaacagcaccac

SEQ ID NO: 2795308 - DNA, 25 bp, Homo sapien
tctggctagtctcctgccatgggag

SEQ ID NO: 2795309 - DNA, 25 bp, Homo sapien
tatggtacagcaagggaaaaggtcc

SEQ ID NO: 2795310 - DNA, 25 bp, Homo sapien
aaagagatttgcctacgggtgagca

SEQ ID NO: 2795311 - DNA, 25 bp, Homo sapien
gagcagaccccttagagattaacgg

SEQ ID NO: 2795312 - DNA, 25 bp, Homo sapien
cacaattataccagaagtggagggc

SEQ ID NO: 2795313 - DNA, 25 bp, Homo sapien
ctagatgctattaggagttgccatc

SEQ ID NO: 2795314 - DNA, 25 bp, Homo sapien
cagtggtgtctaaagaaggaccttc

SEQ ID NO: 2795315 - DNA, 25 bp, Homo sapien
catgcagatggctggcctgacaaaa

SEQ ID NO: 2795316 - DNA, 25 bp, Homo sapien
ggagctggacaatattgcttccaaa

SEQ ID NO: 2795317 - DNA, 25 bp, Homo sapien
ccagcgaccggaagggtatgattca

SEQ ID NO: 2795318 - DNA, 25 bp, Homo sapien
gattcagttcaaacacccagggtag

SEQ ID NO: 2795319 - DNA, 25 bp, Homo sapien
ctaagttaggttgaggccacacggc

SEQ ID NO: 2795320 - DNA, 25 bp, Homo sapien
gactctctcactggtagcgccaagg

SEQ ID NO: 2795321 - DNA, 25 bp, Homo sapien
tgctcactctctttagaatgtactg

SEQ ID NO: 2795322 - DNA, 25 bp, Homo sapien
ctcatgctcactctctttagaatgt

SEQ ID NO: 2795323 - DNA, 25 bp, Homo sapien
catgctcactctctttagaatgtac

SEQ ID NO: 2795324 - DNA, 25 bp, Homo sapien
tcactctctttagaatgtactgcat

SEQ ID NO: 2795325 - DNA, 25 bp, Homo sapien
ttggtccactggtaagtctcactgt

SEQ ID NO: 2795326 - DNA, 25 bp, Homo sapien
cgctgaatgccaaagtatcctccaa

SEQ ID NO: 2795327 - DNA, 25 bp, Homo sapien
gacaaatgcagtaggaatcagcgag

SEQ ID NO: 2795328 - DNA, 25 bp, Homo sapien
gatcgtagcagtccaaagtcttgca

SEQ ID NO: 2795329 - DNA, 25 bp, Homo sapien
cagttctgggaggtagcaatagcgc

SEQ ID NO: 2795330 - DNA, 25 bp, Homo sapien
catggccagttttccgaggtcgggc

SEQ ID NO: 2795331 - DNA, 25 bp, Homo sapien
tgactgacactggtacctccgaaag

SEQ ID NO: 2795332 - DNA, 25 bp, Homo sapien
ggttaccacaccgtcattctgcagg

SEQ ID NO: 2795333 - DNA, 25 bp, Homo sapien
tcaaagtagcgactgcatgcagcca

SEQ ID NO: 2795334 - DNA, 25 bp, Homo sapien
gaaggtcctatttccggcatggaga

SEQ ID NO: 2795335 - DNA, 25 bp, Homo sapien
gaggagtacgcatagtcaagcagca

SEQ ID NO: 2795336 - DNA, 25 bp, Homo sapien
tcttcattgatgatgacccgggagg

SEQ ID NO: 2795337 - DNA, 25 bp, Homo sapien
tagatgttaatggagccgctgctgg

SEQ ID NO: 2795338 - DNA, 25 bp, Homo sapien
tggcgtaaaagattcaggtgagtga

SEQ ID NO: 2795339 - DNA, 25 bp, Homo sapien
acgctgtcagcgtaggaggacttgt

SEQ ID NO: 2795340 - DNA, 25 bp, Homo sapien
cctggacttgcggttctcatgcaca

SEQ ID NO: 2795341 - DNA, 25 bp, Homo sapien
caccaactacctgtcttgctcggga

SEQ ID NO: 2795342 - DNA, 25 bp, Homo sapien
gactgttcctgtatacctgcaaatg

SEQ ID NO: 2795343 - DNA, 25 bp, Homo sapien
gatcagcaagcctttagtcaaagca

SEQ ID NO: 2795344 - DNA, 25 bp, Homo sapien
tgcaagaacaaaagatccatccgtc

SEQ ID NO: 2795345 - DNA, 25 bp, Homo sapien
tacattcaatctggagtatctggag

SEQ ID NO: 2795346 - DNA, 25 bp, Homo sapien
catatgaacctatgggaatgcatca

SEQ ID NO: 2795347 - DNA, 25 bp, Homo sapien
taggaagactttacaaagcacccag

SEQ ID NO: 2795348 - DNA, 25 bp, Homo sapien
gcaacaaagtcctagagctccagtg

SEQ ID NO: 2795349 - DNA, 25 bp, Homo sapien
taacaaaagtagcttcttgccagag

SEQ ID NO: 2795350 - DNA, 25 bp, Homo sapien
tgtgtgacaccaaaccgcatgtgga

SEQ ID NO: 2795351 - DNA, 25 bp, Homo sapien
aaagcgctgctttccgcagaggaga

SEQ ID NO: 2795352 - DNA, 25 bp, Homo sapien
tatttaacaagctggccatgcctgt

SEQ ID NO: 2795353 - DNA, 25 bp, Homo sapien
tggccgcaacgcacaactgagttct

SEQ ID NO: 2795354 - DNA, 25 bp, Homo sapien
caaggaggcgacgaaccggtcgtct

SEQ ID NO: 2795355 - DNA, 25 bp, Homo sapien
agcagtggcgactggccgcaacgca

SEQ ID NO: 2795356 - DNA, 25 bp, Homo sapien
ttctagcgacggtcacgggcaagga

SEQ ID NO: 2795357 - DNA, 25 bp, Homo sapien
cgaacgatggctcgcggaccggcta

SEQ ID NO: 2795358 - DNA, 25 bp, Homo sapien
agcgcgtcacggtagggcagagcaa

SEQ ID NO: 2795359 - DNA, 25 bp, Homo sapien
gatggcgttcgcctccgtctgtcgt

SEQ ID NO: 2795360 - DNA, 25 bp, Homo sapien
gacccggtgtccaggacccgcagag

SEQ ID NO: 2795361 - DNA, 25 bp, Homo sapien
ttttcccgggttcgagtgtctgcgc

SEQ ID NO: 2795362 - DNA, 25 bp, Homo sapien
caatggacgggcaaaagtctggaca

SEQ ID NO: 2795363 - DNA, 25 bp, Homo sapien
tagacagcgccttgggtaggacacc

SEQ ID NO: 2795364 - DNA, 25 bp, Homo sapien
tggttaatggacagccccggatctg

SEQ ID NO: 2795365 - DNA, 25 bp, Homo sapien
atctcgccccggagaacttctacat

SEQ ID NO: 2795366 - DNA, 25 bp, Homo sapien
aagatgaccccgaacctgctgcatc

SEQ ID NO: 2795367 - DNA, 25 bp, Homo sapien
ggcgacactgctggcggcgatgttg

SEQ ID NO: 2795368 - DNA, 25 bp, Homo sapien
gaagcgtttcgacggtgagcgctcc

SEQ ID NO: 2795369 - DNA, 25 bp, Homo sapien
ttggtttctacaagtggcatcatga

SEQ ID NO: 2795370 - DNA, 25 bp, Homo sapien
atttttggtttctacaagtggcatc

SEQ ID NO: 2795371 - DNA, 25 bp, Homo sapien
gtctcaatcacccttcagtcagagt

SEQ ID NO: 2795372 - DNA, 25 bp, Homo sapien
cacccttcagtcagagtgtgatgct

SEQ ID NO: 2795373 - DNA, 25 bp, Homo sapien
ggttagccagtaatcccctcatttc

SEQ ID NO: 2795374 - DNA, 25 bp, Homo sapien
cctctacaacaaggatataaatata

SEQ ID NO: 2795375 - DNA, 25 bp, Homo sapien
tttctgagcaatctacaattcccta

SEQ ID NO: 2795376 - DNA, 25 bp, Homo sapien
actttagtgtatcaaacctattagg

SEQ ID NO: 2795377 - DNA, 25 bp, Homo sapien
ggtcgagtaagaaatctattaagtc

SEQ ID NO: 2795378 - DNA, 25 bp, Homo sapien
acaaggcaccgctgcaggatggtcg

SEQ ID NO: 2795379 - DNA, 25 bp, Homo sapien
cagagatatggatgacgcctatgac

SEQ ID NO: 2795380 - DNA, 25 bp, Homo sapien
ctatgacagactgacaaggcaccgc

SEQ ID NO: 2795381 - DNA, 25 bp, Homo sapien
ctacaatcaactttattttgaaatc

SEQ ID NO: 2795382 - DNA, 25 bp, Homo sapien
ttttgaaatcatgtaaaataagata

SEQ ID NO: 2795383 - DNA, 25 bp, Homo sapien
gaaatcatgtaaaataagatattag

SEQ ID NO: 2795384 - DNA, 25 bp, Homo sapien
aatcatgtaaaataagatattagac

SEQ ID NO: 2795385 - DNA, 25 bp, Homo sapien
tcttgtgagacaagcttaaggacac

SEQ ID NO: 2795386 - DNA, 25 bp, Homo sapien
catgattcaggtacagtggctttaa

SEQ ID NO: 2795387 - DNA, 25 bp, Homo sapien
aatgaagtagctaggtgctcctgaa

SEQ ID NO: 2795388 - DNA, 25 bp, Homo sapien
attaaaacgggtggctccagtgcca

SEQ ID NO: 2795389 - DNA, 25 bp, Homo sapien
tgttagcgttcgaagcacagttgaa

SEQ ID NO: 2795390 - DNA, 25 bp, Homo sapien
aaggcaaaagtagctgagcctgatg

SEQ ID NO: 2795391 - DNA, 25 bp, Homo sapien
tccggttgagcagtgtattttgatc

SEQ ID NO: 2795392 - DNA, 25 bp, Homo sapien
gaggattcatggcttgataagtaga

SEQ ID NO: 2795393 - DNA, 25 bp, Homo sapien
tcctgctggttgaaacgaaacttaa

SEQ ID NO: 2795394 - DNA, 25 bp, Homo sapien
cccttgtagtgctataatccctgga

SEQ ID NO: 2795395 - DNA, 25 bp, Homo sapien
tattagggaaaagtgatgttgccac

SEQ ID NO: 2795396 - DNA, 25 bp, Homo sapien
tatttgttagatggctttgccggca

SEQ ID NO: 2795397 - DNA, 25 bp, Homo sapien
tctctagctactgtaacctcaagat

SEQ ID NO: 2795398 - DNA, 25 bp, Homo sapien
gctgagataatctctagctactgta

SEQ ID NO: 2795399 - DNA, 25 bp, Homo sapien
actttgttgtcctggcgagtctgaa

SEQ ID NO: 2795400 - DNA, 25 bp, Homo sapien
tctgctaagggaacaaatccaataa

SEQ ID NO: 2795401 - DNA, 25 bp, Homo sapien
caaaaacgttaaatcctatgcagcc

SEQ ID NO: 2795402 - DNA, 25 bp, Homo sapien
caatattacctatctggagagcttc

SEQ ID NO: 2795403 - DNA, 25 bp, Homo sapien
caaaaacgacttcaacatggcttcc

SEQ ID NO: 2795404 - DNA, 25 bp, Homo sapien
gatagtgtctgaatatccggcagct

SEQ ID NO: 2795405 - DNA, 25 bp, Homo sapien
tgctggcatcctaggtcaaacttag

SEQ ID NO: 2795406 - DNA, 25 bp, Homo sapien
cagtagtcttcagttcacctttgac

SEQ ID NO: 2795407 - DNA, 25 bp, Homo sapien
gaaacctttaaattatgctccacca

SEQ ID NO: 2795408 - DNA, 25 bp, Homo sapien
tactacagttaaaaggactcttatc

SEQ ID NO: 2795409 - DNA, 25 bp, Homo sapien
acttaactggtttcaatggtccttg

SEQ ID NO: 2795410 - DNA, 25 bp, Homo sapien
gacccattgcttgatgctttgagaa

SEQ ID NO: 2795411 - DNA, 25 bp, Homo sapien
gcattcagcataccacactcctggg

SEQ ID NO: 2795412 - DNA, 25 bp, Homo sapien
cgacacttaaggacaaactccccag

SEQ ID NO: 2795413 - DNA, 25 bp, Homo sapien
gaaatatatggaactctataagaat

SEQ ID NO: 2795414 - DNA, 25 bp, Homo sapien
catgtcatccttgtgcagggccatg

SEQ ID NO: 2795415 - DNA, 25 bp, Homo sapien
atatatggaactctataagaatttg

SEQ ID NO: 2795416 - DNA, 25 bp, Homo sapien
ctaatcttctctgtatcgttccaat

SEQ ID NO: 2795417 - DNA, 25 bp, Homo sapien
aaatcatagttgtggaggtgccagg

SEQ ID NO: 2795418 - DNA, 25 bp, Homo sapien
ttttgcacgcatcttgagacacagg

SEQ ID NO: 2795419 - DNA, 25 bp, Homo sapien
gatgaattgtcagggaatgtaaagt

SEQ ID NO: 2795420 - DNA, 25 bp, Homo sapien
gagacacaggcagaaatcatagttg

SEQ ID NO: 2795421 - DNA, 25 bp, Homo sapien
tgaattggggatccaagcaatggtc

SEQ ID NO: 2795422 - DNA, 25 bp, Homo sapien
ctgaattggggatccaagcaatggt

SEQ ID NO: 2795423 - DNA, 25 bp, Homo sapien
cagatgatgtttcaattggccttgc

SEQ ID NO: 2795424 - DNA, 25 bp, Homo sapien
tcaaactcaatcacaggcataacag

SEQ ID NO: 2795425 - DNA, 25 bp, Homo sapien
ggagacatgcgctgtgaattccatt

SEQ ID NO: 2795426 - DNA, 25 bp, Homo sapien
aaggccttcattgatactttcagca

SEQ ID NO: 2795427 - DNA, 25 bp, Homo sapien
tatgttgaggcacatgttacgaaga

SEQ ID NO: 2795428 - DNA, 25 bp, Homo sapien
tgtgagggaccatgtaatgcagtga

SEQ ID NO: 2795429 - DNA, 25 bp, Homo sapien
gactttaaatcctgacaacccacaa

SEQ ID NO: 2795430 - DNA, 25 bp, Homo sapien
gagtaaagagctctaccaacaaagc

SEQ ID NO: 2795431 - DNA, 25 bp, Homo sapien
gaagcctttgctggtatgactacct

SEQ ID NO: 2795432 - DNA, 25 bp, Homo sapien
aactgaagcctttgctggtatgact

SEQ ID NO: 2795433 - DNA, 25 bp, Homo sapien
gtatgactacctattgtttctattg

SEQ ID NO: 2795434 - DNA, 25 bp, Homo sapien
ctgaagcctttgctggtatgactac

SEQ ID NO: 2795435 - DNA, 25 bp, Homo sapien
actgcaacttcgcctctgggattca

SEQ ID NO: 2795436 - DNA, 25 bp, Homo sapien
tgcaacttcgcctctgggattcaag

SEQ ID NO: 2795437 - DNA, 25 bp, Homo sapien
caacttcgcctctgggattcaagca

SEQ ID NO: 2795438 - DNA, 25 bp, Homo sapien
agaaacggggtcaccatattggcca

SEQ ID NO: 2795439 - DNA, 25 bp, Homo sapien
ccatgaggatatggctctcaagcac

SEQ ID NO: 2795440 - DNA, 25 bp, Homo sapien
gggatactaccaagccatgagcact

SEQ ID NO: 2795441 - DNA, 25 bp, Homo sapien
ggactgggacaagccatcgacttca

SEQ ID NO: 2795442 - DNA, 25 bp, Homo sapien
aacagtccagaaagagaacgcctca

SEQ ID NO: 2795443 - DNA, 25 bp, Homo sapien
gatggtctctcgatatgccacctgg

SEQ ID NO: 2795444 - DNA, 25 bp, Homo sapien
gaataatctctatatgtaactcccc

SEQ ID NO: 2795445 - DNA, 25 bp, Homo sapien
ctgtggcacgaactgagtttaggat

SEQ ID NO: 2795446 - DNA, 25 bp, Homo sapien
gagaggcccgagataggtctccagt

SEQ ID NO: 2795447 - DNA, 25 bp, Homo sapien
ccttcttctttgatagttgaattat

SEQ ID NO: 2795448 - DNA, 25 bp, Homo sapien
catttcccaatcatccagggcactt

SEQ ID NO: 2795449 - DNA, 25 bp, Homo sapien
cttaacgaaaatgtaggcaactgtc

SEQ ID NO: 2795450 - DNA, 25 bp, Homo sapien
atgacacatcagaatgagggctata

SEQ ID NO: 2795451 - DNA, 25 bp, Homo sapien
caaaaccttcagactagcttgaacc

SEQ ID NO: 2795452 - DNA, 25 bp, Homo sapien
tgtcctcctaaaaagaggatgcaga

SEQ ID NO: 2795453 - DNA, 25 bp, Homo sapien
tgcttttccaggttaactaaatcag

SEQ ID NO: 2795454 - DNA, 25 bp, Homo sapien
tgggaaaacaaagtactccatgctt

SEQ ID NO: 2795455 - DNA, 25 bp, Homo sapien
tatgtaaacattaccctgtcctcct

SEQ ID NO: 2795456 - DNA, 25 bp, Homo sapien
aatttgcttatttagcttgatagtc

SEQ ID NO: 2795457 - DNA, 25 bp, Homo sapien
cacagacttaatgttttagacacac

SEQ ID NO: 2795458 - DNA, 25 bp, Homo sapien
gcttatttagcttgatagtcaacat

SEQ ID NO: 2795459 - DNA, 25 bp, Homo sapien
acagacttaatgttttagacacaca

SEQ ID NO: 2795460 - DNA, 25 bp, Homo sapien
cttctggagtttagcaataatatac

SEQ ID NO: 2795461 - DNA, 25 bp, Homo sapien
tggagtttagcaataatatacctac

SEQ ID NO: 2795462 - DNA, 25 bp, Homo sapien
tctggagtttagcaataatatacct

SEQ ID NO: 2795463 - DNA, 25 bp, Homo sapien
ttctggagtttagcaataatatacc

SEQ ID NO: 2795464 - DNA, 25 bp, Homo sapien
cagagtcaggatctagcctcacttt

SEQ ID NO: 2795465 - DNA, 25 bp, Homo sapien
ctagcctcactttcaaactgggatc

SEQ ID NO: 2795466 - DNA, 25 bp, Homo sapien
tcactttcaaactgggatcttcacg

SEQ ID NO: 2795467 - DNA, 25 bp, Homo sapien
ttgtccagagtcaggatctagcctc

SEQ ID NO: 2795468 - DNA, 25 bp, Homo sapien
tgaagacatttcaacgcatgttcca

SEQ ID NO: 2795469 - DNA, 25 bp, Homo sapien
agacatttcaacgcatgttccaaat

SEQ ID NO: 2795470 - DNA, 25 bp, Homo sapien
ctgaagacatttcaacgcatgttcc

SEQ ID NO: 2795471 - DNA, 25 bp, Homo sapien
gaagacatttcaacgcatgttccaa

SEQ ID NO: 2795472 - DNA, 25 bp, Homo sapien
aaataatttattatatgttctagtg

SEQ ID NO: 2795473 - DNA, 25 bp, Homo sapien
atgggataaacaactgttatcttta

SEQ ID NO: 2795474 - DNA, 25 bp, Homo sapien
ctatgggataaacaactgttatctt

SEQ ID NO: 2795475 - DNA, 25 bp, Homo sapien
ataatttattatatgttctagtggg

SEQ ID NO: 2795476 - DNA, 25 bp, Homo sapien
gatagcactacaagagtaaggaaga

SEQ ID NO: 2795477 - DNA, 25 bp, Homo sapien
tactagaagggcagttctaaggcca

SEQ ID NO: 2795478 - DNA, 25 bp, Homo sapien
tacatgatgatgacaaactgaattg

SEQ ID NO: 2795479 - DNA, 25 bp, Homo sapien
tacttagaatcccatagatagcact

SEQ ID NO: 2795480 - DNA, 25 bp, Homo sapien
taattagttgacacactaagaccat

SEQ ID NO: 2795481 - DNA, 25 bp, Homo sapien
ttagttgacacactaagaccattta

SEQ ID NO: 2795482 - DNA, 25 bp, Homo sapien
attagttgacacactaagaccattt

SEQ ID NO: 2795483 - DNA, 25 bp, Homo sapien
ctaattagttgacacactaagacca

SEQ ID NO: 2795484 - DNA, 25 bp, Homo sapien
tctacgagctgcagctaatgcactg

SEQ ID NO: 2795485 - DNA, 25 bp, Homo sapien
tcccgttcggctctacgagctgcag

SEQ ID NO: 2795486 - DNA, 25 bp, Homo sapien
ccagccaataaaagtctctctgctt

SEQ ID NO: 2795487 - DNA, 25 bp, Homo sapien
gacttggatgagacaatggtgtctc

SEQ ID NO: 2795488 - DNA, 25 bp, Homo sapien
gaagtccattagagtgttctaccac

SEQ ID NO: 2795489 - DNA, 25 bp, Homo sapien
caagatgacttggaacgaaagtggc

SEQ ID NO: 2795490 - DNA, 25 bp, Homo sapien
tcaatcatgacaagacaggttaggg

SEQ ID NO: 2795491 - DNA, 25 bp, Homo sapien
aagtggcatttagcaagcgctcatc

SEQ ID NO: 2795492 - DNA, 25 bp, Homo sapien
tacatgttggtcagcaaacggcaaa

SEQ ID NO: 2795493 - DNA, 25 bp, Homo sapien
caacagtcaaagcaatgttaccagc

SEQ ID NO: 2795494 - DNA, 25 bp, Homo sapien
tgttaccagcagtcaatgaagggat

SEQ ID NO: 2795495 - DNA, 25 bp, Homo sapien
gcaaaagcagacgacttattctctc

SEQ ID NO: 2795496 - DNA, 25 bp, Homo sapien
tgccaatgcacataagtcatcctta

SEQ ID NO: 2795497 - DNA, 25 bp, Homo sapien
tggagaactttaaatgccaatgcac

SEQ ID NO: 2795498 - DNA, 25 bp, Homo sapien
cagtggtcctcgctgcttgtcatgg

SEQ ID NO: 2795499 - DNA, 25 bp, Homo sapien
aatgcgcataaaaaccagtggtcct

SEQ ID NO: 2795500 - DNA, 25 bp, Homo sapien
actgctgtctgagctagtgtcactc

SEQ ID NO: 2795501 - DNA, 25 bp, Homo sapien
aattcatagttacgctcttcaggtg

SEQ ID NO: 2795502 - DNA, 25 bp, Homo sapien
tcactctatgtattgcagtctgtag

SEQ ID NO: 2795503 - DNA, 25 bp, Homo sapien
tcttcaggtgaaggtaagtacatag

SEQ ID NO: 2795504 - DNA, 25 bp, Homo sapien
tttcagctggtaacaaatcaaaatt

SEQ ID NO: 2795505 - DNA, 25 bp, Homo sapien
tagagttctataacttgcatttact

SEQ ID NO: 2795506 - DNA, 25 bp, Homo sapien
ttcaagacagctaccttacctaggc

SEQ ID NO: 2795507 - DNA, 25 bp, Homo sapien
taatttgtccaaacaccataaacag

SEQ ID NO: 2795508 - DNA, 25 bp, Homo sapien
ctaaagatactattaggagtttcct

SEQ ID NO: 2795509 - DNA, 25 bp, Homo sapien
gaaatgtacctaaccatccttctgg

SEQ ID NO: 2795510 - DNA, 25 bp, Homo sapien
cagtacaagggagcaaaacgttcaa

SEQ ID NO: 2795511 - DNA, 25 bp, Homo sapien
tgttgctgtaatcccgcactgaaga

SEQ ID NO: 2795512 - DNA, 25 bp, Homo sapien
tgaccatccgactatacgaaatggg

SEQ ID NO: 2795513 - DNA, 25 bp, Homo sapien
tgaggcccagagctatataccaact

SEQ ID NO: 2795514 - DNA, 25 bp, Homo sapien
tgcccatgtgcacaagtagatacaa

SEQ ID NO: 2795515 - DNA, 25 bp, Homo sapien
ccaatccccgagagatgctaaagta

SEQ ID NO: 2795516 - DNA, 25 bp, Homo sapien
tattttaagataagtggtgcacaca

SEQ ID NO: 2795517 - DNA, 25 bp, Homo sapien
cagttgtttccttcagcaattcagg

SEQ ID NO: 2795518 - DNA, 25 bp, Homo sapien
agcaattcaggatcattcatttcca

SEQ ID NO: 2795519 - DNA, 25 bp, Homo sapien
tcaattaaggcattccttgcttcag

SEQ ID NO: 2795520 - DNA, 25 bp, Homo sapien
gcattccttgcttcagttgtttcct

SEQ ID NO: 2795521 - DNA, 25 bp, Homo sapien
ttttctttcattactacatccacca

SEQ ID NO: 2795522 - DNA, 25 bp, Homo sapien
tctgatgctttcaactgcatactta

SEQ ID NO: 2795523 - DNA, 25 bp, Homo sapien
tctctgatgctttcaactgcatact

SEQ ID NO: 2795524 - DNA, 25 bp, Homo sapien
gatgctttcaactgcatacttaaag

SEQ ID NO: 2795525 - DNA, 25 bp, Homo sapien
agcaaaggctttgcctttaacttct

SEQ ID NO: 2795526 - DNA, 25 bp, Homo sapien
cagcaatatagggactatacctgtg

SEQ ID NO: 2795527 - DNA, 25 bp, Homo sapien
gaacaccttcaaatgcaggaaacag

SEQ ID NO: 2795528 - DNA, 25 bp, Homo sapien
tctctatctttagcgatgatgggaa

SEQ ID NO: 2795529 - DNA, 25 bp, Homo sapien
gatgggaagcgccataccttcagca

SEQ ID NO: 2795530 - DNA, 25 bp, Homo sapien
cgaggtatattgtgtttatcagctt

SEQ ID NO: 2795531 - DNA, 25 bp, Homo sapien
tcagcttgcctccatactgtgagag

SEQ ID NO: 2795532 - DNA, 25 bp, Homo sapien
taaaaaacagattcgaggtatattg

SEQ ID NO: 2795533 - DNA, 25 bp, Homo sapien
agcttgcctccatactgtgagagtc

SEQ ID NO: 2795534 - DNA, 25 bp, Homo sapien
atccaacactcttaggcaccgctca

SEQ ID NO: 2795535 - DNA, 25 bp, Homo sapien
gcaccgctcaacctccaaggtaaag

SEQ ID NO: 2795536 - DNA, 25 bp, Homo sapien
tcaacctccaaggtaaagtccacat

SEQ ID NO: 2795537 - DNA, 25 bp, Homo sapien
ttaggcaccgctcaacctccaaggt

SEQ ID NO: 2795538 - DNA, 25 bp, Homo sapien
taacagcagctgattgaatagtaat

SEQ ID NO: 2795539 - DNA, 25 bp, Homo sapien
ttagattgactctataacctttcca

SEQ ID NO: 2795540 - DNA, 25 bp, Homo sapien
ctggtgtatcaattagattgactct

SEQ ID NO: 2795541 - DNA, 25 bp, Homo sapien
gtaatgcctctttctcgctcttggg

SEQ ID NO: 2795542 - DNA, 25 bp, Homo sapien
tatgagagcaagatcttgatattct

SEQ ID NO: 2795543 - DNA, 25 bp, Homo sapien
gagcaagatcttgatattctctttt

SEQ ID NO: 2795544 - DNA, 25 bp, Homo sapien
tttaactgtaaataagttattgcca

SEQ ID NO: 2795545 - DNA, 25 bp, Homo sapien
ttaactgtaaataagttattgccat

SEQ ID NO: 2795546 - DNA, 25 bp, Homo sapien
tataaaaggaatcttcacttgagcc

SEQ ID NO: 2795547 - DNA, 25 bp, Homo sapien
aaaaggaatcttcacttgagcccag

SEQ ID NO: 2795548 - DNA, 25 bp, Homo sapien
taataaactgcattagtttgaaata

SEQ ID NO: 2795549 - DNA, 25 bp, Homo sapien
caatattctttctgtggtggtagtt

SEQ ID NO: 2795550 - DNA, 25 bp, Homo sapien
tatatccggaatagtacaatattct

SEQ ID NO: 2795551 - DNA, 25 bp, Homo sapien
tgagccataattccaatattacgga

SEQ ID NO: 2795552 - DNA, 25 bp, Homo sapien
tggtagttttgcctgcatcaatatg

SEQ ID NO: 2795553 - DNA, 25 bp, Homo sapien
gatggaatgaagggatttgatatca

SEQ ID NO: 2795554 - DNA, 25 bp, Homo sapien
gaatgaagggatttgatatcatttc

SEQ ID NO: 2795555 - DNA, 25 bp, Homo sapien
gctatgggaggattgatgatggaat

SEQ ID NO: 2795556 - DNA, 25 bp, Homo sapien
ttagctatgggaggattgatgatgg

SEQ ID NO: 2795557 - DNA, 25 bp, Homo sapien
aatttcttccaagcggcacatgtgg

SEQ ID NO: 2795558 - DNA, 25 bp, Homo sapien
aaacttgctcttattttatagcagc

SEQ ID NO: 2795559 - DNA, 25 bp, Homo sapien
tcttccaagcggcacatgtggcttt

SEQ ID NO: 2795560 - DNA, 25 bp, Homo sapien
tgcaatttcttccaagcggcacatg

SEQ ID NO: 2795561 - DNA, 25 bp, Homo sapien
atacacactgggtattgtctgatga

SEQ ID NO: 2795562 - DNA, 25 bp, Homo sapien
gcaaatatcctcaagttggtcaaca

SEQ ID NO: 2795563 - DNA, 25 bp, Homo sapien
ttgcaaatatcctcaagttggtcaa

SEQ ID NO: 2795564 - DNA, 25 bp, Homo sapien
gggtattgtctgatgactcattgca

SEQ ID NO: 2795565 - DNA, 25 bp, Homo sapien
ctgaaaaaataaatatacaaaatca

SEQ ID NO: 2795566 - DNA, 25 bp, Homo sapien
ggtcttgccctgtcaccaagcctgg

SEQ ID NO: 2795567 - DNA, 25 bp, Homo sapien
agggtcttgccctgtcaccaagcct

SEQ ID NO: 2795568 - DNA, 25 bp, Homo sapien
cgccatgttagccagactggtcgtg

SEQ ID NO: 2795569 - DNA, 25 bp, Homo sapien
cttgccctgtcaccaagcctggagt

SEQ ID NO: 2795570 - DNA, 25 bp, Homo sapien
tggccttgaatccattcccttttca

SEQ ID NO: 2795571 - DNA, 25 bp, Homo sapien
agggcctcatagtctctccacagtt

SEQ ID NO: 2795572 - DNA, 25 bp, Homo sapien
ttttcattggtaacgccaaagttca

SEQ ID NO: 2795573 - DNA, 25 bp, Homo sapien
tggtaacgccaaagttcagggcctc

SEQ ID NO: 2795574 - DNA, 25 bp, Homo sapien
cagtagttccatttttctgtacact

SEQ ID NO: 2795575 - DNA, 25 bp, Homo sapien
cagctgcaaagccccagtagttcca

SEQ ID NO: 2795576 - DNA, 25 bp, Homo sapien
gctgcaaagccccagtagttccatt

SEQ ID NO: 2795577 - DNA, 25 bp, Homo sapien
tgcaaagccccagtagttccatttt

SEQ ID NO: 2795578 - DNA, 25 bp, Homo sapien
tcgccgaatgatagagaaaaacttc

SEQ ID NO: 2795579 - DNA, 25 bp, Homo sapien
cttccatactgagcgaacaccgagg

SEQ ID NO: 2795580 - DNA, 25 bp, Homo sapien
caaagatgagtcgacttcgccgaat

SEQ ID NO: 2795581 - DNA, 25 bp, Homo sapien
tgcacacattacacagagtgaccgg

SEQ ID NO: 2795582 - DNA, 25 bp, Homo sapien
aaaggtcagcggtacccagcgctgt

SEQ ID NO: 2795583 - DNA, 25 bp, Homo sapien
ggtacccagcgctgtgacagggtca

SEQ ID NO: 2795584 - DNA, 25 bp, Homo sapien
tctcacagctcggagcagtactcac

SEQ ID NO: 2795585 - DNA, 25 bp, Homo sapien
tcacaggcgcgcgatgtctcacagc

SEQ ID NO: 2795586 - DNA, 25 bp, Homo sapien
caaagtctgcaacggcctcaagtct

SEQ ID NO: 2795587 - DNA, 25 bp, Homo sapien
ttccggcggtgtaccggccaaatgc

SEQ ID NO: 2795588 - DNA, 25 bp, Homo sapien
gcattaggccgcgtgccgcaggcca

SEQ ID NO: 2795589 - DNA, 25 bp, Homo sapien
ctcaccgctgggctcttgaagcagg

SEQ ID NO: 2795590 - DNA, 25 bp, Homo sapien
agagcgttttcgcactccagcggct

SEQ ID NO: 2795591 - DNA, 25 bp, Homo sapien
ggttcttgctcttcactcggccgtt

SEQ ID NO: 2795592 - DNA, 25 bp, Homo sapien
tctttgagacccgaaaattgagagc

SEQ ID NO: 2795593 - DNA, 25 bp, Homo sapien
taaaagcggaaaacagaggctcgga

SEQ ID NO: 2795594 - DNA, 25 bp, Homo sapien
aactagtgatctacaatatgcctga

SEQ ID NO: 2795595 - DNA, 25 bp, Homo sapien
tgtctttgacagcagttcgaaaact

SEQ ID NO: 2795596 - DNA, 25 bp, Homo sapien
tgatattgtctaggtctcaaaacac

SEQ ID NO: 2795597 - DNA, 25 bp, Homo sapien
tgagtaggactgttttataagagtc

SEQ ID NO: 2795598 - DNA, 25 bp, Homo sapien
aaaacactatttgtatgaaaattgt

SEQ ID NO: 2795599 - DNA, 25 bp, Homo sapien
aatctcatttatcctttatggttca

SEQ ID NO: 2795600 - DNA, 25 bp, Homo sapien
catggagctggccattatttgcaaa

SEQ ID NO: 2795601 - DNA, 25 bp, Homo sapien
agaactcaaatttgtccttaaatga

SEQ ID NO: 2795602 - DNA, 25 bp, Homo sapien
tgaagaaactgccattactgtgatg

SEQ ID NO: 2795603 - DNA, 25 bp, Homo sapien
gaagaaactgccattactgtgatgt

SEQ ID NO: 2795604 - DNA, 25 bp, Homo sapien
aagaaactgccattactgtgatgtt

SEQ ID NO: 2795605 - DNA, 25 bp, Homo sapien
ttaaggatggcgtatattacattaa

SEQ ID NO: 2795606 - DNA, 25 bp, Homo sapien
taaggatggcgtatattacattaat

SEQ ID NO: 2795607 - DNA, 25 bp, Homo sapien
aattgtgcctttaacaaagtcattc

SEQ ID NO: 2795608 - DNA, 25 bp, Homo sapien
gtcttcagagtacaaccaatgtgat

SEQ ID NO: 2795609 - DNA, 25 bp, Homo sapien
taacaaagtcattcaatgtctaaac

SEQ ID NO: 2795610 - DNA, 25 bp, Homo sapien
tacaaccaatgtgattaattgtgcc

SEQ ID NO: 2795611 - DNA, 25 bp, Homo sapien
tgattgaagcccttgtaaccacagc

SEQ ID NO: 2795612 - DNA, 25 bp, Homo sapien
taacaggccagcttgcaaccagtac

SEQ ID NO: 2795613 - DNA, 25 bp, Homo sapien
gacattcaacaactagactagccgg

SEQ ID NO: 2795614 - DNA, 25 bp, Homo sapien
tgaaagacgactagatgacacctga

SEQ ID NO: 2795615 - DNA, 25 bp, Homo sapien
cattgtctgaactcccaagatgtgc

SEQ ID NO: 2795616 - DNA, 25 bp, Homo sapien
tccagttgctcggaagatgcttcag

SEQ ID NO: 2795617 - DNA, 25 bp, Homo sapien
aaattctcagagaccggttcttcgg

SEQ ID NO: 2795618 - DNA, 25 bp, Homo sapien
cacagagtttggaaaaccaccatca

SEQ ID NO: 2795619 - DNA, 25 bp, Homo sapien
taaaacttcactagtggagtcttcc

SEQ ID NO: 2795620 - DNA, 25 bp, Homo sapien
gagtcttcactggaattaaaaggct

SEQ ID NO: 2795621 - DNA, 25 bp, Homo sapien
aagtgaggtcttaagagaatcgtcc

SEQ ID NO: 2795622 - DNA, 25 bp, Homo sapien
taccaccagtggaacaagatttgta

SEQ ID NO: 2795623 - DNA, 25 bp, Homo sapien
tatttgtcatgcatgacgggtccct

SEQ ID NO: 2795624 - DNA, 25 bp, Homo sapien
gaagcactaccagtcttatgggaag

SEQ ID NO: 2795625 - DNA, 25 bp, Homo sapien
cttagagggcaatcagggaaagaac

SEQ ID NO: 2795626 - DNA, 25 bp, Homo sapien
cacacagtatgggtcggagattcaa

SEQ ID NO: 2795627 - DNA, 25 bp, Homo sapien
tctgatgggcgtgcagtagactcca

SEQ ID NO: 2795628 - DNA, 25 bp, Homo sapien
ccatcttgcttctcttgctgtggct

SEQ ID NO: 2795629 - DNA, 25 bp, Homo sapien
ccagtgctggccgtgcatctctatc

SEQ ID NO: 2795630 - DNA, 25 bp, Homo sapien
atctctatcactgctttcatcctca

SEQ ID NO: 2795631 - DNA, 25 bp, Homo sapien
tacttctccccaattcagcttcaga

SEQ ID NO: 2795632 - DNA, 25 bp, Homo sapien
tgtacttctccccaattcagcttca

SEQ ID NO: 2795633 - DNA, 25 bp, Homo sapien
cactgtacttctccccaattcagct

SEQ ID NO: 2795634 - DNA, 25 bp, Homo sapien
ggaccactgtacttctccccaattc

SEQ ID NO: 2795635 - DNA, 25 bp, Homo sapien
agtctgggaggtcttttcatcttca

SEQ ID NO: 2795636 - DNA, 25 bp, Homo sapien
ctgaaaccgctttccaatctttggc

SEQ ID NO: 2795637 - DNA, 25 bp, Homo sapien
ttattgaagctgtaagtgaagtctg

SEQ ID NO: 2795638 - DNA, 25 bp, Homo sapien
gattaccacttcgagtatgagtgga

SEQ ID NO: 2795639 - DNA, 25 bp, Homo sapien
aagtgcttgcaaaggcatcttttag

SEQ ID NO: 2795640 - DNA, 25 bp, Homo sapien
cggaagtgcttgcaaaggcatcttt

SEQ ID NO: 2795641 - DNA, 25 bp, Homo sapien
gcaaaggcatcttttagagaatcaa

SEQ ID NO: 2795642 - DNA, 25 bp, Homo sapien
cttcggaagtgcttgcaaaggcatc

SEQ ID NO: 2795643 - DNA, 25 bp, Homo sapien
ttcttgcttcgtattctggaacaga

SEQ ID NO: 2795644 - DNA, 25 bp, Homo sapien
acagatgcaggaccatattctccag

SEQ ID NO: 2795645 - DNA, 25 bp, Homo sapien
tccagacataggtcttttaggttca

SEQ ID NO: 2795646 - DNA, 25 bp, Homo sapien
gttagctgcatctcactagactgat

SEQ ID NO: 2795647 - DNA, 25 bp, Homo sapien
tcgctggtaccagtgtccaacacct

SEQ ID NO: 2795648 - DNA, 25 bp, Homo sapien
ctctttgtaatgctctggtgactgg

SEQ ID NO: 2795649 - DNA, 25 bp, Homo sapien
tctggtgactggtattcgctggtac

SEQ ID NO: 2795650 - DNA, 25 bp, Homo sapien
catggtctcctggatacttctcaaa

SEQ ID NO: 2795651 - DNA, 25 bp, Homo sapien
gcgcctgtagtccaaacagcttggg

SEQ ID NO: 2795652 - DNA, 25 bp, Homo sapien
catatttatactaacgggaatgcga

SEQ ID NO: 2795653 - DNA, 25 bp, Homo sapien
taaagaactcataactcggccaggt

SEQ ID NO: 2795654 - DNA, 25 bp, Homo sapien
tgagtacacagagcaaccagaactt

SEQ ID NO: 2795655 - DNA, 25 bp, Homo sapien
atgagagaagacagtggataccgca

SEQ ID NO: 2795656 - DNA, 25 bp, Homo sapien
tggataccgcaagccaagcgcatct

SEQ ID NO: 2795657 - DNA, 25 bp, Homo sapien
tgtaaaggaatcaacaaagtcctcc

SEQ ID NO: 2795658 - DNA, 25 bp, Homo sapien
aaggaatcaacaaagtcctccagca

SEQ ID NO: 2795659 - DNA, 25 bp, Homo sapien
aagcccaaaatctttacctctgtat

SEQ ID NO: 2795660 - DNA, 25 bp, Homo sapien
ctctgtatttctttcttagaaacat

SEQ ID NO: 2795661 - DNA, 25 bp, Homo sapien
cctctgtatttctttcttagaaaca

SEQ ID NO: 2795662 - DNA, 25 bp, Homo sapien
gtgaagcccaaaatctttacctctg

SEQ ID NO: 2795663 - DNA, 25 bp, Homo sapien
gtaagaaaagaggcacatatgcttc

SEQ ID NO: 2795664 - DNA, 25 bp, Homo sapien
agaactggcaattggtaactttggg

SEQ ID NO: 2795665 - DNA, 25 bp, Homo sapien
caagaactggcaattggtaactttg

SEQ ID NO: 2795666 - DNA, 25 bp, Homo sapien
aagaactggcaattggtaactttgg

SEQ ID NO: 2795667 - DNA, 25 bp, Homo sapien
ctcccagaagtagctagtgttataa

SEQ ID NO: 2795668 - DNA, 25 bp, Homo sapien
aaatataaatgtggtgcttcctgcc

SEQ ID NO: 2795669 - DNA, 25 bp, Homo sapien
ctgtgctgcattagggaaggaactt

SEQ ID NO: 2795670 - DNA, 25 bp, Homo sapien
caactccagattagcaagataaagg

SEQ ID NO: 2795671 - DNA, 25 bp, Homo sapien
aagaagcccgacaggcgtggtgact

SEQ ID NO: 2795672 - DNA, 25 bp, Homo sapien
ttgtgaatgcaagtcaccacgcagg

SEQ ID NO: 2795673 - DNA, 25 bp, Homo sapien
catgaagtactcaaacggaacgact

SEQ ID NO: 2795674 - DNA, 25 bp, Homo sapien
tgctaagcccgtgttttatgaatta

SEQ ID NO: 2795675 - DNA, 25 bp, Homo sapien
tagagcttaagcacagatttgaacc

SEQ ID NO: 2795676 - DNA, 25 bp, Homo sapien
gaggagtgtggtatacgtcaagtta

SEQ ID NO: 2795677 - DNA, 25 bp, Homo sapien
ggtatacgtcaagttataaatcatt

SEQ ID NO: 2795678 - DNA, 25 bp, Homo sapien
tcactgtcctcgacttgtgaggagt

SEQ ID NO: 2795679 - DNA, 25 bp, Homo sapien
tggatgtgaccagaagaactaagtt

SEQ ID NO: 2795680 - DNA, 25 bp, Homo sapien
aggatctttagactggatgtgacca

SEQ ID NO: 2795681 - DNA, 25 bp, Homo sapien
cagtgaatttggtaggatctttaga

SEQ ID NO: 2795682 - DNA, 25 bp, Homo sapien
ttagactggatgtgaccagaagaac

SEQ ID NO: 2795683 - DNA, 25 bp, Homo sapien
tgctatgacacaggaatgggatctc

SEQ ID NO: 2795684 - DNA, 25 bp, Homo sapien
taactgaataaaacccaatggcctc

SEQ ID NO: 2795685 - DNA, 25 bp, Homo sapien
ttcagaacatacagaaccactctct

SEQ ID NO: 2795686 - DNA, 25 bp, Homo sapien
agaatcttagcataatcagtactgc

SEQ ID NO: 2795687 - DNA, 25 bp, Homo sapien
tacacacagggctacatggtcacag

SEQ ID NO: 2795688 - DNA, 25 bp, Homo sapien
tgttcctgatacacaggccagtacg

SEQ ID NO: 2795689 - DNA, 25 bp, Homo sapien
ccaggtatggctgagcacacctgta

SEQ ID NO: 2795690 - DNA, 25 bp, Homo sapien
catacttagggcagtaatagaacag

SEQ ID NO: 2795691 - DNA, 25 bp, Homo sapien
aatatcatcaatagcccaccactga

SEQ ID NO: 2795692 - DNA, 25 bp, Homo sapien
caccactgatcagcaaggtaaagtg

SEQ ID NO: 2795693 - DNA, 25 bp, Homo sapien
tgatcagcaaggtaaagtgccacag

SEQ ID NO: 2795694 - DNA, 25 bp, Homo sapien
acaatatcatcaatagcccaccact

SEQ ID NO: 2795695 - DNA, 25 bp, Homo sapien
gaggtacaaagcctacatttgacag

SEQ ID NO: 2795696 - DNA, 25 bp, Homo sapien
gatctccaccataaagaggtacaaa

SEQ ID NO: 2795697 - DNA, 25 bp, Homo sapien
ctacatttgacaggctaataggaat

SEQ ID NO: 2795698 - DNA, 25 bp, Homo sapien
ctgggtctgatctccaccataaaga

SEQ ID NO: 2795699 - DNA, 25 bp, Homo sapien
tctggattttcagggtccccacacc

SEQ ID NO: 2795700 - DNA, 25 bp, Homo sapien
cccacaccttaaatctgacatgtaa

SEQ ID NO: 2795701 - DNA, 25 bp, Homo sapien
tcagggtccccacaccttaaatctg

SEQ ID NO: 2795702 - DNA, 25 bp, Homo sapien
actctggattttcagggtccccaca

SEQ ID NO: 2795703 - DNA, 25 bp, Homo sapien
ctattaagacttgcatgtgggtaca

SEQ ID NO: 2795704 - DNA, 25 bp, Homo sapien
caaatcgccagtagtatgtcagcac

SEQ ID NO: 2795705 - DNA, 25 bp, Homo sapien
cacactactacagatcaaaggcaag

SEQ ID NO: 2795706 - DNA, 25 bp, Homo sapien
aatacaaaacaaccctgtgtcccag

SEQ ID NO: 2795707 - DNA, 25 bp, Homo sapien
tactatagtttagagaggcagcgga

SEQ ID NO: 2795708 - DNA, 25 bp, Homo sapien
gatgcaactggacaggataatccta

SEQ ID NO: 2795709 - DNA, 25 bp, Homo sapien
tctcattggtaacgtgatgcaactg

SEQ ID NO: 2795710 - DNA, 25 bp, Homo sapien
taaattgcaagcctaacagtggttc

SEQ ID NO: 2795711 - DNA, 25 bp, Homo sapien
gctctatttctaaattgtgaggaac

SEQ ID NO: 2795712 - DNA, 25 bp, Homo sapien
tgtgaggaacctttaaactgttctc

SEQ ID NO: 2795713 - DNA, 25 bp, Homo sapien
tctatttctaaattgtgaggaacct

SEQ ID NO: 2795714 - DNA, 25 bp, Homo sapien
atggtagctctatttctaaattgtg

SEQ ID NO: 2795715 - DNA, 25 bp, Homo sapien
agaggttgcagggaggtagaggctg

SEQ ID NO: 2795716 - DNA, 25 bp, Homo sapien
gagggagaatggcttgagtccggga

SEQ ID NO: 2795717 - DNA, 25 bp, Homo sapien
gcagtgagtcaagactagactgcac

SEQ ID NO: 2795718 - DNA, 25 bp, Homo sapien
gctgagggagaatggcttgagtccg

SEQ ID NO: 2795719 - DNA, 25 bp, Homo sapien
cacctggtcgggtgaaccgagtcta

SEQ ID NO: 2795720 - DNA, 25 bp, Homo sapien
gagtctaaacgctgaagttccacac

SEQ ID NO: 2795721 - DNA, 25 bp, Homo sapien
taaaggaaggcggtcagagcatctc

SEQ ID NO: 2795722 - DNA, 25 bp, Homo sapien
caagccaaagcaatcagctcgcacg

SEQ ID NO: 2795723 - DNA, 25 bp, Homo sapien
cagacgcgccccgggagccgctgga

SEQ ID NO: 2795724 - DNA, 25 bp, Homo sapien
gacgcgccccgggagccgctggaag

SEQ ID NO: 2795725 - DNA, 25 bp, Homo sapien
ctcagacgcgccccgggagccgctg

SEQ ID NO: 2795726 - DNA, 25 bp, Homo sapien
cgcgccccgggagccgctggaagag

SEQ ID NO: 2795727 - DNA, 25 bp, Homo sapien
cttcgcaggattctgttcgcatagc

SEQ ID NO: 2795728 - DNA, 25 bp, Homo sapien
cagccccgcgtaggccctcctgaaa

SEQ ID NO: 2795729 - DNA, 25 bp, Homo sapien
tctgttcgcatagcccggtggagtt

SEQ ID NO: 2795730 - DNA, 25 bp, Homo sapien
cgcatagcccggtggagttctccag

SEQ ID NO: 2795731 - DNA, 25 bp, Homo sapien
cccggcctcgggacaggggtgcaga

SEQ ID NO: 2795732 - DNA, 25 bp, Homo sapien
gagggcacgggcgaggaccgccggc

SEQ ID NO: 2795733 - DNA, 25 bp, Homo sapien
cctaaacctactgccacttaggtgc

SEQ ID NO: 2795734 - DNA, 25 bp, Homo sapien
caccactttcatcctaaacctactg

SEQ ID NO: 2795735 - DNA, 25 bp, Homo sapien
cataagcctttgtatacaagttaaa

SEQ ID NO: 2795736 - DNA, 25 bp, Homo sapien
ccataagcctttgtatacaagttaa

SEQ ID NO: 2795737 - DNA, 25 bp, Homo sapien
taaaataatgcgtgcagtcccattc

SEQ ID NO: 2795738 - DNA, 25 bp, Homo sapien
gcagtaaggtctgcactaccagacc

SEQ ID NO: 2795739 - DNA, 25 bp, Homo sapien
taaggtctgcactaccagaccctgg

SEQ ID NO: 2795740 - DNA, 25 bp, Homo sapien
gagataaaataatgcgtgcagtccc

SEQ ID NO: 2795741 - DNA, 25 bp, Homo sapien
actgtgggttaggattccagcatga

SEQ ID NO: 2795742 - DNA, 25 bp, Homo sapien
ggcaggctccatcgggaaactcatt

SEQ ID NO: 2795743 - DNA, 25 bp, Homo sapien
taatcatcatatcttcagtacagtc

SEQ ID NO: 2795744 - DNA, 25 bp, Homo sapien
agtacagtcctatcctgagacactg

SEQ ID NO: 2795745 - DNA, 25 bp, Homo sapien
tcccttgtgggctgcgcatgatgtc

SEQ ID NO: 2795746 - DNA, 25 bp, Homo sapien
cacagtaggatgtagtcatgggtca

SEQ ID NO: 2795747 - DNA, 25 bp, Homo sapien
tatatatgctaggatggatgtcaca

SEQ ID NO: 2795748 - DNA, 25 bp, Homo sapien
tgtctcctaacaaggcaaagccgtc

SEQ ID NO: 2795749 - DNA, 25 bp, Homo sapien
gtatttgactaacactgactcccca

SEQ ID NO: 2795750 - DNA, 25 bp, Homo sapien
gaccagccatgaagaagcttgtctc

SEQ ID NO: 2795751 - DNA, 25 bp, Homo sapien
aaatttcagttgcattggagaaaat

SEQ ID NO: 2795752 - DNA, 25 bp, Homo sapien
gaaataaaggagagcatgttagatg

SEQ ID NO: 2795753 - DNA, 25 bp, Homo sapien
cgtggtgtgtacttgactgtgcttc

SEQ ID NO: 2795754 - DNA, 25 bp, Homo sapien
gccatcgtggtgtgtacttgactgt

SEQ ID NO: 2795755 - DNA, 25 bp, Homo sapien
ggtgtgtacttgactgtgcttctca

SEQ ID NO: 2795756 - DNA, 25 bp, Homo sapien
catcgtggtgtgtacttgactgtgc

SEQ ID NO: 2795757 - DNA, 25 bp, Homo sapien
atgtctgtggaggatgctgcaagct

SEQ ID NO: 2795758 - DNA, 25 bp, Homo sapien
caagcttgccctttgtttgaagggt

SEQ ID NO: 2795759 - DNA, 25 bp, Homo sapien
tttccgaatgcttgagcttcctctg

SEQ ID NO: 2795760 - DNA, 25 bp, Homo sapien
tctgaaaccctgaactttttagatc

SEQ ID NO: 2795761 - DNA, 25 bp, Homo sapien
tgttgcggcctagtgctagagctca

SEQ ID NO: 2795762 - DNA, 25 bp, Homo sapien
tacagtgcaggcctattgaccttct

SEQ ID NO: 2795763 - DNA, 25 bp, Homo sapien
ccagaattcaatcatgtgccccgat

SEQ ID NO: 2795764 - DNA, 25 bp, Homo sapien
cattattatgccaactcaggtagac

SEQ ID NO: 2795765 - DNA, 25 bp, Homo sapien
tacgctgagtttctgggaagacatt

SEQ ID NO: 2795766 - DNA, 25 bp, Homo sapien
tccctcacaccttcttttctgatgg

SEQ ID NO: 2795767 - DNA, 25 bp, Homo sapien
gacatacgctgagtttctgggaaga

SEQ ID NO: 2795768 - DNA, 25 bp, Homo sapien
ctgagacatacgctgagtttctggg

SEQ ID NO: 2795769 - DNA, 25 bp, Homo sapien
ctccctccatgtggcttcaagccac

SEQ ID NO: 2795770 - DNA, 25 bp, Homo sapien
ttttcagcagcatttgcccatgtct

SEQ ID NO: 2795771 - DNA, 25 bp, Homo sapien
cccaatagcgccacatcaatgatgg

SEQ ID NO: 2795772 - DNA, 25 bp, Homo sapien
tagtagcccaatagcgccacatcaa

SEQ ID NO: 2795773 - DNA, 25 bp, Homo sapien
tttgtagtagcccaatagcgccaca

SEQ ID NO: 2795774 - DNA, 25 bp, Homo sapien
tgtgccaccagcattaccgtggcct

SEQ ID NO: 2795775 - DNA, 25 bp, Homo sapien
gtgtgccaccagcattaccgtggcc

SEQ ID NO: 2795776 - DNA, 25 bp, Homo sapien
tcccttatagggtcatggctgtgga

SEQ ID NO: 2795777 - DNA, 25 bp, Homo sapien
cttcccttatagggtcatggctgtg

SEQ ID NO: 2795778 - DNA, 25 bp, Homo sapien
ccttatagggtcatggctgtggatc

SEQ ID NO: 2795779 - DNA, 25 bp, Homo sapien
cttatagggtcatggctgtggatca

SEQ ID NO: 2795780 - DNA, 25 bp, Homo sapien
ctgaagtttccgggtcttcctcagt

SEQ ID NO: 2795781 - DNA, 25 bp, Homo sapien
cctgaagtttccgggtcttcctcag

SEQ ID NO: 2795782 - DNA, 25 bp, Homo sapien
tgtctccaattttcagagtgaggtt

SEQ ID NO: 2795783 - DNA, 25 bp, Homo sapien
tactcttggtaagttgggatcctct

SEQ ID NO: 2795784 - DNA, 25 bp, Homo sapien
gtctccaattttcagagtgaggttt

SEQ ID NO: 2795785 - DNA, 25 bp, Homo sapien
tctccaattttcagagtgaggtttg

SEQ ID NO: 2795786 - DNA, 25 bp, Homo sapien
gttgtgcctgctgtgagtcaccggg

SEQ ID NO: 2795787 - DNA, 25 bp, Homo sapien
ctcagcatagatgttgtgcctgctg

SEQ ID NO: 2795788 - DNA, 25 bp, Homo sapien
ctgctgtgagtcaccgggggtaaca

SEQ ID NO: 2795789 - DNA, 25 bp, Homo sapien
actcagcatagatgttgtgcctgct

SEQ ID NO: 2795790 - DNA, 25 bp, Homo sapien
tgcatgattcaaccgagggtgctcc

SEQ ID NO: 2795791 - DNA, 25 bp, Homo sapien
tgtcttatgcatgattcaaccgagg

SEQ ID NO: 2795792 - DNA, 25 bp, Homo sapien
ctgtttgtcttatgcatgattcaac

SEQ ID NO: 2795793 - DNA, 25 bp, Homo sapien
tatgcatgattcaaccgagggtgct

SEQ ID NO: 2795794 - DNA, 25 bp, Homo sapien
aaaaggtgtgatctgacaagctccc

SEQ ID NO: 2795795 - DNA, 25 bp, Homo sapien
gaatgtctcgaaggcactttctccg

SEQ ID NO: 2795796 - DNA, 25 bp, Homo sapien
gaatcatttctcaccaggaggcaag

SEQ ID NO: 2795797 - DNA, 25 bp, Homo sapien
tgcaggacattatcaagaccaggga

SEQ ID NO: 2795798 - DNA, 25 bp, Homo sapien
ttgaccaagtaatgcaccaaaaggc

SEQ ID NO: 2795799 - DNA, 25 bp, Homo sapien
gattccagttggacagttgccagag

SEQ ID NO: 2795800 - DNA, 25 bp, Homo sapien
tgatgaggataagccgcagtctcta

SEQ ID NO: 2795801 - DNA, 25 bp, Homo sapien
gatcagacgattaccacaaacttca

SEQ ID NO: 2795802 - DNA, 25 bp, Homo sapien
catgatgtggtagtgagatttctat

SEQ ID NO: 2795803 - DNA, 25 bp, Homo sapien
tcatgatgtggtagtgagatttcta

SEQ ID NO: 2795804 - DNA, 25 bp, Homo sapien
tcaagatagggtccaccttagaatc

SEQ ID NO: 2795805 - DNA, 25 bp, Homo sapien
aatttattagcaaaccaatgtccat

SEQ ID NO: 2795806 - DNA, 25 bp, Homo sapien
catttaatcaagatagggtccacct

SEQ ID NO: 2795807 - DNA, 25 bp, Homo sapien
tcaaatttattagcaaaccaatgtc

SEQ ID NO: 2795808 - DNA, 25 bp, Homo sapien
taaggcacccgtctaagttcatgat

SEQ ID NO: 2795809 - DNA, 25 bp, Homo sapien
tacacacgcttcgaaggtgagatcc

SEQ ID NO: 2795810 - DNA, 25 bp, Homo sapien
tgcagatcagacacatcctgggctg

SEQ ID NO: 2795811 - DNA, 25 bp, Homo sapien
tcctggaacccgaatcaaggtagcc

SEQ ID NO: 2795812 - DNA, 25 bp, Homo sapien
ttttgcggaaagagtcgtctcacat

SEQ ID NO: 2795813 - DNA, 25 bp, Homo sapien
tttttgcggaaagagtcgtctcaca

SEQ ID NO: 2795814 - DNA, 25 bp, Homo sapien
ttgcggaaagagtcgtctcacattt

SEQ ID NO: 2795815 - DNA, 25 bp, Homo sapien
ctttttgcggaaagagtcgtctcac

SEQ ID NO: 2795816 - DNA, 25 bp, Homo sapien
tgctgtagggtatgtttaaaataac

SEQ ID NO: 2795817 - DNA, 25 bp, Homo sapien
cagccatagggttaaaaacaggatg

SEQ ID NO: 2795818 - DNA, 25 bp, Homo sapien
agcagccatagggttaaaaacagga

SEQ ID NO: 2795819 - DNA, 25 bp, Homo sapien
aaactttctgctgtagggtatgttt

SEQ ID NO: 2795820 - DNA, 25 bp, Homo sapien
tactgggcgcctaccacatactagg

SEQ ID NO: 2795821 - DNA, 25 bp, Homo sapien
gatcccgtgtgtgtgcaaagtcaag

SEQ ID NO: 2795822 - DNA, 25 bp, Homo sapien
caaatgctgccccaaagatgaatga

SEQ ID NO: 2795823 - DNA, 25 bp, Homo sapien
gatgtcatcaacagggcctcagaga

SEQ ID NO: 2795824 - DNA, 25 bp, Homo sapien
ggctctgtgggccatattgtctcag

SEQ ID NO: 2795825 - DNA, 25 bp, Homo sapien
ctgtgggccatattgtctcagtcac

SEQ ID NO: 2795826 - DNA, 25 bp, Homo sapien
gctctgtgggccatattgtctcagt

SEQ ID NO: 2795827 - DNA, 25 bp, Homo sapien
tctgtgggccatattgtctcagtca

SEQ ID NO: 2795828 - DNA, 25 bp, Homo sapien
aatgattccagaaagctctccaaca

SEQ ID NO: 2795829 - DNA, 25 bp, Homo sapien
gattccagaaagctctccaacagcc

SEQ ID NO: 2795830 - DNA, 25 bp, Homo sapien
agtcaaatctagaaatgattccaga

SEQ ID NO: 2795831 - DNA, 25 bp, Homo sapien
aagtcaaatctagaaatgattccag

SEQ ID NO: 2795832 - DNA, 25 bp, Homo sapien
tctatatttagaggcagatggaggc

SEQ ID NO: 2795833 - DNA, 25 bp, Homo sapien
tgttgcacccaccttgagaccatga

SEQ ID NO: 2795834 - DNA, 25 bp, Homo sapien
gcactttgaaagatgaccgtaggaa

SEQ ID NO: 2795835 - DNA, 25 bp, Homo sapien
tatgatggctagaattgttgcaccc

SEQ ID NO: 2795836 - DNA, 25 bp, Homo sapien
tcagcttcagcgtgctgcatgcact

SEQ ID NO: 2795837 - DNA, 25 bp, Homo sapien
agcttcagcgtgctgcatgcactcc

SEQ ID NO: 2795838 - DNA, 25 bp, Homo sapien
agcgtgctgcatgcactcccgcacc

SEQ ID NO: 2795839 - DNA, 25 bp, Homo sapien
gctgcatgcactcccgcacccagac

SEQ ID NO: 2795840 - DNA, 25 bp, Homo sapien
cctatactttccaagtattacctgg

SEQ ID NO: 2795841 - DNA, 25 bp, Homo sapien
ggcaacacagttttagtagcacagt

SEQ ID NO: 2795842 - DNA, 25 bp, Homo sapien
aagtctctgccccatattaggattc

SEQ ID NO: 2795843 - DNA, 25 bp, Homo sapien
taggtctagtgtcattgctgtcttc

SEQ ID NO: 2795844 - DNA, 25 bp, Homo sapien
ttgctggaaaggctaaaggaagaag

SEQ ID NO: 2795845 - DNA, 25 bp, Homo sapien
gagggttgctggaaaggctaaagga

SEQ ID NO: 2795846 - DNA, 25 bp, Homo sapien
agaagagggcaggagggttgctgga

SEQ ID NO: 2795847 - DNA, 25 bp, Homo sapien
aggagggttgctggaaaggctaaag

SEQ ID NO: 2795848 - DNA, 25 bp, Homo sapien
caggaactccgctaggtgttgttcc

SEQ ID NO: 2795849 - DNA, 25 bp, Homo sapien
aggagccttggcaaccacaggaact

SEQ ID NO: 2795850 - DNA, 25 bp, Homo sapien
tccttgttccactgaggtagaatgt

SEQ ID NO: 2795851 - DNA, 25 bp, Homo sapien
ttctggtcctgggccgaactgtccc

SEQ ID NO: 2795852 - DNA, 25 bp, Homo sapien
gctgcccagacccaataaaaccaaa

SEQ ID NO: 2795853 - DNA, 25 bp, Homo sapien
agcgagtgcactatgtggccactag

SEQ ID NO: 2795854 - DNA, 25 bp, Homo sapien
cttaggagcctcgaaagctgcccag

SEQ ID NO: 2795855 - DNA, 25 bp, Homo sapien
tggccactagggaagccattccact

SEQ ID NO: 2795856 - DNA, 25 bp, Homo sapien
gctgtgataagccccaggtcaccag

SEQ ID NO: 2795857 - DNA, 25 bp, Homo sapien
tcccagcacccgtgggtcaaggatg

SEQ ID NO: 2795858 - DNA, 25 bp, Homo sapien
gaaacagcaccgtcaggtacagggc

SEQ ID NO: 2795859 - DNA, 25 bp, Homo sapien
ctctcctatgtggtgctgtgataag

SEQ ID NO: 2795860 - DNA, 25 bp, Homo sapien
ccgactatgccattcaccccaccta

SEQ ID NO: 2795861 - DNA, 25 bp, Homo sapien
tgctaactctgactgcccgactatg

SEQ ID NO: 2795862 - DNA, 25 bp, Homo sapien
aagtgctaactctgactgcccgact

SEQ ID NO: 2795863 - DNA, 25 bp, Homo sapien
tggccaggtgccataaagtgctaac

SEQ ID NO: 2795864 - DNA, 25 bp, Homo sapien
tatattagccccaactctgttaatc

SEQ ID NO: 2795865 - DNA, 25 bp, Homo sapien
aactctgttaatcttctggtttgtt

SEQ ID NO: 2795866 - DNA, 25 bp, Homo sapien
tagccccaactctgttaatcttctg

SEQ ID NO: 2795867 - DNA, 25 bp, Homo sapien
cccaactctgttaatcttctggttt

SEQ ID NO: 2795868 - DNA, 25 bp, Homo sapien
agaagctcccgacccgctgtggtag

SEQ ID NO: 2795869 - DNA, 25 bp, Homo sapien
tgcaaatggactcgagcgtcccgtt

SEQ ID NO: 2795870 - DNA, 25 bp, Homo sapien
cgtttcctacgtgaagactgcaaat

SEQ ID NO: 2795871 - DNA, 25 bp, Homo sapien
tgtggtaggcaccgccacctcgcag

SEQ ID NO: 2795872 - DNA, 25 bp, Homo sapien
ggtagcagtcctttcaggcgccccg

SEQ ID NO: 2795873 - DNA, 25 bp, Homo sapien
ttgccctggcgcagaagccgcggta

SEQ ID NO: 2795874 - DNA, 25 bp, Homo sapien
gggctcgggcagcatcgcttgtccc

SEQ ID NO: 2795875 - DNA, 25 bp, Homo sapien
ggcagcatcgcttgtcccctctggt

SEQ ID NO: 2795876 - DNA, 25 bp, Homo sapien
cagccccgaacgcggggtccgtgcg

SEQ ID NO: 2795877 - DNA, 25 bp, Homo sapien
ccgagggttgcgctctgggttccca

SEQ ID NO: 2795878 - DNA, 25 bp, Homo sapien
ggcgggggccgagggttgcgctctg

SEQ ID NO: 2795879 - DNA, 25 bp, Homo sapien
gggtccgtgcggctgcggaggccgc

SEQ ID NO: 2795880 - DNA, 25 bp, Homo sapien
gcccccgtgacgtgcggagaaagta

SEQ ID NO: 2795881 - DNA, 25 bp, Homo sapien
gagaaagtaggagcgcctccgcgct

SEQ ID NO: 2795882 - DNA, 25 bp, Homo sapien
ggccgcgcttcggacaaagttctca

SEQ ID NO: 2795883 - DNA, 25 bp, Homo sapien
acaaagttctcaggcgcgcgcggtg

SEQ ID NO: 2795884 - DNA, 25 bp, Homo sapien
tcgggatcaccgaataagtgcagtg

SEQ ID NO: 2795885 - DNA, 25 bp, Homo sapien
ccaattggccgacatcaaggacttg

SEQ ID NO: 2795886 - DNA, 25 bp, Homo sapien
cagggagtggcaccagacaagtcaa

SEQ ID NO: 2795887 - DNA, 25 bp, Homo sapien
taactttgtaaagcgggcgcaccac

SEQ ID NO: 2795888 - DNA, 25 bp, Homo sapien
ctgcagtagtctggaagtaaacctg

SEQ ID NO: 2795889 - DNA, 25 bp, Homo sapien
aaatcacgtgactccctttagttga

SEQ ID NO: 2795890 - DNA, 25 bp, Homo sapien
aagggataaataaggccatggagcc

SEQ ID NO: 2795891 - DNA, 25 bp, Homo sapien
caaaaagattacaacctgcggaagg

SEQ ID NO: 2795892 - DNA, 25 bp, Homo sapien
tagcaactcataaagtgtatgttaa

SEQ ID NO: 2795893 - DNA, 25 bp, Homo sapien
tgttgaacagttacatacatcttaa

SEQ ID NO: 2795894 - DNA, 25 bp, Homo sapien
tatggtctagttcaaatgtgccttt

SEQ ID NO: 2795895 - DNA, 25 bp, Homo sapien
tgtatgttaaaataggcccaccaga

SEQ ID NO: 2795896 - DNA, 25 bp, Homo sapien
cttgatcactgattaatagtatttc

SEQ ID NO: 2795897 - DNA, 25 bp, Homo sapien
tgtagataacgtgggctgctttgca

SEQ ID NO: 2795898 - DNA, 25 bp, Homo sapien
tccaatgctgatccattatgtggca

SEQ ID NO: 2795899 - DNA, 25 bp, Homo sapien
tggcatgggagaaattcttgatcac

SEQ ID NO: 2795900 - DNA, 25 bp, Homo sapien
tactgggtcatctaaacaagcaact

SEQ ID NO: 2795901 - DNA, 25 bp, Homo sapien
tggttcctgtactgggtcatctaaa

SEQ ID NO: 2795902 - DNA, 25 bp, Homo sapien
tgtttggttcctgtactgggtcatc

SEQ ID NO: 2795903 - DNA, 25 bp, Homo sapien
tcctgtactgggtcatctaaacaag

SEQ ID NO: 2795904 - DNA, 25 bp, Homo sapien
ctaaaaagtatggtcatcaaaaagc

SEQ ID NO: 2795905 - DNA, 25 bp, Homo sapien
aatggctcttcctacttccccttat

SEQ ID NO: 2795906 - DNA, 25 bp, Homo sapien
ttctaaaaagtatggtcatcaaaaa

SEQ ID NO: 2795907 - DNA, 25 bp, Homo sapien
tatggtcatcaaaaagcataagaga

SEQ ID NO: 2795908 - DNA, 25 bp, Homo sapien
gagccatgatttccatgatgatatt

SEQ ID NO: 2795909 - DNA, 25 bp, Homo sapien
gatgatatttcgatatgcagaagag

SEQ ID NO: 2795910 - DNA, 25 bp, Homo sapien
tttctgtcaggtaccacaaaaccag

SEQ ID NO: 2795911 - DNA, 25 bp, Homo sapien
gagttttgcattgtcctaacttgcc

SEQ ID NO: 2795912 - DNA, 25 bp, Homo sapien
gaagctggttggcacactgctacct

SEQ ID NO: 2795913 - DNA, 25 bp, Homo sapien
tagattcttaggtccagaccaaggt

SEQ ID NO: 2795914 - DNA, 25 bp, Homo sapien
ccaaggtagcaagaagctggttggc

SEQ ID NO: 2795915 - DNA, 25 bp, Homo sapien
tctgcctatagattcttaggtccag

SEQ ID NO: 2795916 - DNA, 25 bp, Homo sapien
actgagtttggttctggaagtatgg

SEQ ID NO: 2795917 - DNA, 25 bp, Homo sapien
tattgctgaggtactgagtttggtt

SEQ ID NO: 2795918 - DNA, 25 bp, Homo sapien
agacaaggttgatattgctgaggta

SEQ ID NO: 2795919 - DNA, 25 bp, Homo sapien
ggaagacaaggttgatattgctgag

SEQ ID NO: 2795920 - DNA, 25 bp, Homo sapien
tctaccttaagtttaccattcaata

SEQ ID NO: 2795921 - DNA, 25 bp, Homo sapien
aattccaggtcacataactgttgcc

SEQ ID NO: 2795922 - DNA, 25 bp, Homo sapien
tcccagaagatccttgagccaggtg

SEQ ID NO: 2795923 - DNA, 25 bp, Homo sapien
tgttgcctcccagaagatccttgag

SEQ ID NO: 2795924 - DNA, 25 bp, Homo sapien
gacagcaatcccttgatgtgccaga

SEQ ID NO: 2795925 - DNA, 25 bp, Homo sapien
cataattggaaaggtcctgatcaca

SEQ ID NO: 2795926 - DNA, 25 bp, Homo sapien
ccagactagtgagctcttggctgtc

SEQ ID NO: 2795927 - DNA, 25 bp, Homo sapien
agagattctgatgcccctgtaggtg

SEQ ID NO: 2795928 - DNA, 25 bp, Homo sapien
ctcagggctccatgcttaaatgact

SEQ ID NO: 2795929 - DNA, 25 bp, Homo sapien
caagttggccaattgttctctcagg

SEQ ID NO: 2795930 - DNA, 25 bp, Homo sapien
aagttggccaattgttctctcaggg

SEQ ID NO: 2795931 - DNA, 25 bp, Homo sapien
ggctccatgcttaaatgactctatg

SEQ ID NO: 2795932 - DNA, 25 bp, Homo sapien
ggcaagcacattatccataatcttt

SEQ ID NO: 2795933 - DNA, 25 bp, Homo sapien
gcttggcaagcacattatccataat

SEQ ID NO: 2795934 - DNA, 25 bp, Homo sapien
ctttctgcttggcaagcacattatc

SEQ ID NO: 2795935 - DNA, 25 bp, Homo sapien
tattttttagccagatcatcccttt

SEQ ID NO: 2795936 - DNA, 25 bp, Homo sapien
caagggcttgcatatattcactgaa

SEQ ID NO: 2795937 - DNA, 25 bp, Homo sapien
ccaggacgaaaagtagaatgtgcaa

SEQ ID NO: 2795938 - DNA, 25 bp, Homo sapien
cacgtaccatgttaggccaggacga

SEQ ID NO: 2795939 - DNA, 25 bp, Homo sapien
catcttggatgcaaaagacattaca

SEQ ID NO: 2795940 - DNA, 25 bp, Homo sapien
tcagggtttcttatttcaaactcta

SEQ ID NO: 2795941 - DNA, 25 bp, Homo sapien
ctatatcttgtagaatggcactgag

SEQ ID NO: 2795942 - DNA, 25 bp, Homo sapien
ttcttctatatcttgtagaatggca

SEQ ID NO: 2795943 - DNA, 25 bp, Homo sapien
ttctatatcttgtagaatggcactg

SEQ ID NO: 2795944 - DNA, 25 bp, Homo sapien
cttttagaccggacagcaggaattt

SEQ ID NO: 2795945 - DNA, 25 bp, Homo sapien
gtttatgtcttttagaccggacagc

SEQ ID NO: 2795946 - DNA, 25 bp, Homo sapien
cttgatctttcttggtgtgaaaggg

SEQ ID NO: 2795947 - DNA, 25 bp, Homo sapien
aacactgtttatgtcttttagaccg

SEQ ID NO: 2795948 - DNA, 25 bp, Homo sapien
tctctattaacagtctcaatagcac

SEQ ID NO: 2795949 - DNA, 25 bp, Homo sapien
atctctattaacagtctcaatagca

SEQ ID NO: 2795950 - DNA, 25 bp, Homo sapien
cataagatcttagtaattctttcat

SEQ ID NO: 2795951 - DNA, 25 bp, Homo sapien
tgcttcatccaaagcactcttctgt

SEQ ID NO: 2795952 - DNA, 25 bp, Homo sapien
tagggtttgctccattttgtagtag

SEQ ID NO: 2795953 - DNA, 25 bp, Homo sapien
agctcattccatgaagccagtatca

SEQ ID NO: 2795954 - DNA, 25 bp, Homo sapien
agtatcaccctgacaccaaagtctg

SEQ ID NO: 2795955 - DNA, 25 bp, Homo sapien
aaactgagcaggagagaatcctccc

SEQ ID NO: 2795956 - DNA, 25 bp, Homo sapien
gcctaggtcaagatgaactcacagt

SEQ ID NO: 2795957 - DNA, 25 bp, Homo sapien
taaatgattgtttgcaacagcatca

SEQ ID NO: 2795958 - DNA, 25 bp, Homo sapien
acagcatcatgtaagggcagaattc

SEQ ID NO: 2795959 - DNA, 25 bp, Homo sapien
tattttcacaattaaccttagcacc

SEQ ID NO: 2795960 - DNA, 25 bp, Homo sapien
caattaaccttagcaccagctttta

SEQ ID NO: 2795961 - DNA, 25 bp, Homo sapien
caatagatccttcattagatgcctc

SEQ ID NO: 2795962 - DNA, 25 bp, Homo sapien
attatatcaatagatccttcattag

SEQ ID NO: 2795963 - DNA, 25 bp, Homo sapien
atcaatagatccttcattagatgcc

SEQ ID NO: 2795964 - DNA, 25 bp, Homo sapien
tcaatagatccttcattagatgcct

SEQ ID NO: 2795965 - DNA, 25 bp, Homo sapien
tcactaggggcagatttcctcttct

SEQ ID NO: 2795966 - DNA, 25 bp, Homo sapien
gctaaatgaagctggctttcccctc

SEQ ID NO: 2795967 - DNA, 25 bp, Homo sapien
gctccagattctatcagggctttca

SEQ ID NO: 2795968 - DNA, 25 bp, Homo sapien
attcctcttgttgatcctacctgct

SEQ ID NO: 2795969 - DNA, 25 bp, Homo sapien
tctgccaaatgctgattgttataaa

SEQ ID NO: 2795970 - DNA, 25 bp, Homo sapien
ccaaatgctgattgttataaaggat

SEQ ID NO: 2795971 - DNA, 25 bp, Homo sapien
gctgattgttataaaggatcttaga

SEQ ID NO: 2795972 - DNA, 25 bp, Homo sapien
gaaaatacataacaacttcctcaaa

SEQ ID NO: 2795973 - DNA, 25 bp, Homo sapien
tgaaattctgaactgttttgtgttc

SEQ ID NO: 2795974 - DNA, 25 bp, Homo sapien
ttcttggctattagtaggcatgtga

SEQ ID NO: 2795975 - DNA, 25 bp, Homo sapien
tttcttatagttatttcatctccac

SEQ ID NO: 2795976 - DNA, 25 bp, Homo sapien
ctccactgatgttattagttaattc

SEQ ID NO: 2795977 - DNA, 25 bp, Homo sapien
tctttgacgttatggagattgccct

SEQ ID NO: 2795978 - DNA, 25 bp, Homo sapien
aatccatttctcaggcttgacagag

SEQ ID NO: 2795979 - DNA, 25 bp, Homo sapien
tcaaaagtgttctcatacaagccag

SEQ ID NO: 2795980 - DNA, 25 bp, Homo sapien
tacaagccagggaattttgctcagg

SEQ ID NO: 2795981 - DNA, 25 bp, Homo sapien
tgtgacttttagaactgaactttgg

SEQ ID NO: 2795982 - DNA, 25 bp, Homo sapien
ctgtagagtatatctggtcaagagt

SEQ ID NO: 2795983 - DNA, 25 bp, Homo sapien
ttcctttattgacttttacatgttc

SEQ ID NO: 2795984 - DNA, 25 bp, Homo sapien
tataaataaactcgctttgcttcct

SEQ ID NO: 2795985 - DNA, 25 bp, Homo sapien
tgtctagtgggtcaatgctactcct

SEQ ID NO: 2795986 - DNA, 25 bp, Homo sapien
tcctctatgtctagtgggtcaatgc

SEQ ID NO: 2795987 - DNA, 25 bp, Homo sapien
ttggtacacatcctctatgtctagt

SEQ ID NO: 2795988 - DNA, 25 bp, Homo sapien
agtgggtcaatgctactcctttgag

SEQ ID NO: 2795989 - DNA, 25 bp, Homo sapien
caaggagacgcttcatacataaatc

SEQ ID NO: 2795990 - DNA, 25 bp, Homo sapien
tagggatatatctctcaaggagacg

SEQ ID NO: 2795991 - DNA, 25 bp, Homo sapien
tggatcagctccattcagaagaagt

SEQ ID NO: 2795992 - DNA, 25 bp, Homo sapien
tcatacataaatccttggcctcatc

SEQ ID NO: 2795993 - DNA, 25 bp, Homo sapien
ggagtaatctggtataatcctttga

SEQ ID NO: 2795994 - DNA, 25 bp, Homo sapien
ccattcatcactgcatcatgtaggg

SEQ ID NO: 2795995 - DNA, 25 bp, Homo sapien
aaatcctcctacactagcttcatga

SEQ ID NO: 2795996 - DNA, 25 bp, Homo sapien
taatagttcacttgctgtccgataa

SEQ ID NO: 2795997 - DNA, 25 bp, Homo sapien
gcagccttatatactaagttctctc

SEQ ID NO: 2795998 - DNA, 25 bp, Homo sapien
gcataacttggctgattaacatttc

SEQ ID NO: 2795999 - DNA, 25 bp, Homo sapien
tgtttctccggttaatgctatgaag

SEQ ID NO: 2796000 - DNA, 25 bp, Homo sapien
tgatgaacaagatcagcatcatcgt

SEQ ID NO: 2796001 - DNA, 25 bp, Homo sapien
gtttgactcccttgattcagtccca

SEQ ID NO: 2796002 - DNA, 25 bp, Homo sapien
gctttcttaatggacgacatatcaa

SEQ ID NO: 2796003 - DNA, 25 bp, Homo sapien
actgccttgccgtttgactcccttg

SEQ ID NO: 2796004 - DNA, 25 bp, Homo sapien
ggacgacatatcaactgccttgccg

SEQ ID NO: 2796005 - DNA, 25 bp, Homo sapien
gaaccttgctgaatgcatattcttc

SEQ ID NO: 2796006 - DNA, 25 bp, Homo sapien
tcaatcattaaagccggatcctgca

SEQ ID NO: 2796007 - DNA, 25 bp, Homo sapien
ttcttgaaccttgctgaatgcatat

SEQ ID NO: 2796008 - DNA, 25 bp, Homo sapien
tctttaccatcaatcattaaagccg

SEQ ID NO: 2796009 - DNA, 25 bp, Homo sapien
gagccaaagtttgcaatccagatgg

SEQ ID NO: 2796010 - DNA, 25 bp, Homo sapien
tgatctcctcaacacacacgcagtt

SEQ ID NO: 2796011 - DNA, 25 bp, Homo sapien
tatttgttaggtcctcacagccaag

SEQ ID NO: 2796012 - DNA, 25 bp, Homo sapien
tacttagtggctcacaagaagtgat

SEQ ID NO: 2796013 - DNA, 25 bp, Homo sapien
aaccatgttcaaatggtggagtaga

SEQ ID NO: 2796014 - DNA, 25 bp, Homo sapien
ctatagctcagctaacttggaacca

SEQ ID NO: 2796015 - DNA, 25 bp, Homo sapien
tagctcagctaacttggaaccatgt

SEQ ID NO: 2796016 - DNA, 25 bp, Homo sapien
cagctaacttggaaccatgttcaaa

SEQ ID NO: 2796017 - DNA, 25 bp, Homo sapien
caatcttcattggtctgagacgtat

SEQ ID NO: 2796018 - DNA, 25 bp, Homo sapien
ctgctatttgtgtacaatcttcatt

SEQ ID NO: 2796019 - DNA, 25 bp, Homo sapien
tattgaactccacttctaaacattc

SEQ ID NO: 2796020 - DNA, 25 bp, Homo sapien
tgagacgtattgaactccacttcta

SEQ ID NO: 2796021 - DNA, 25 bp, Homo sapien
tcagggcttccaataactcagctgg

SEQ ID NO: 2796022 - DNA, 25 bp, Homo sapien
gaaggctaacttcaggagaatctct

SEQ ID NO: 2796023 - DNA, 25 bp, Homo sapien
aaatctctatgacatgccgaccagg

SEQ ID NO: 2796024 - DNA, 25 bp, Homo sapien
gatatggaactaagagagtcactca

SEQ ID NO: 2796025 - DNA, 25 bp, Homo sapien
ttttctatgtgtggcaaaacttcag

SEQ ID NO: 2796026 - DNA, 25 bp, Homo sapien
tttctatgtgtggcaaaacttcagg

SEQ ID NO: 2796027 - DNA, 25 bp, Homo sapien
cttttctatgtgtggcaaaacttca

SEQ ID NO: 2796028 - DNA, 25 bp, Homo sapien
ttctatgtgtggcaaaacttcagga

SEQ ID NO: 2796029 - DNA, 25 bp, Homo sapien
gaaagtccagactggcgaaacgacc

SEQ ID NO: 2796030 - DNA, 25 bp, Homo sapien
tggttcaatgaaagtccagactggc

SEQ ID NO: 2796031 - DNA, 25 bp, Homo sapien
tattttggtggttcaatgaaagtcc

SEQ ID NO: 2796032 - DNA, 25 bp, Homo sapien
ggcgaaacgacccaatgaacattga

SEQ ID NO: 2796033 - DNA, 25 bp, Homo sapien
taacagagcttgatttcgttctgtt

SEQ ID NO: 2796034 - DNA, 25 bp, Homo sapien
gagcttgatttcgttctgtttcatc

SEQ ID NO: 2796035 - DNA, 25 bp, Homo sapien
cagagcttgatttcgttctgtttca

SEQ ID NO: 2796036 - DNA, 25 bp, Homo sapien
tgtaacagagcttgatttcgttctg

SEQ ID NO: 2796037 - DNA, 25 bp, Homo sapien
tcgctaagaacaggcatcatcttat

SEQ ID NO: 2796038 - DNA, 25 bp, Homo sapien
tgtaatattgtatcctcgctaagaa

SEQ ID NO: 2796039 - DNA, 25 bp, Homo sapien
tgtatcctcgctaagaacaggcatc

SEQ ID NO: 2796040 - DNA, 25 bp, Homo sapien
aatattgtatcctcgctaagaacag

SEQ ID NO: 2796041 - DNA, 25 bp, Homo sapien
tgaactcagatttaagagatgcgtc

SEQ ID NO: 2796042 - DNA, 25 bp, Homo sapien
gagatgcgtcttgatcaaacagcaa

SEQ ID NO: 2796043 - DNA, 25 bp, Homo sapien
tatcaggatgcagactgaactcaga

SEQ ID NO: 2796044 - DNA, 25 bp, Homo sapien
ctttgcacattcctcttgtatcagg

SEQ ID NO: 2796045 - DNA, 25 bp, Homo sapien
gagtgcagtgatataatcgcagctt

SEQ ID NO: 2796046 - DNA, 25 bp, Homo sapien
gcagtgatataatcgcagcttactg

SEQ ID NO: 2796047 - DNA, 25 bp, Homo sapien
gcatcagctaccatgcccaaccagg

SEQ ID NO: 2796048 - DNA, 25 bp, Homo sapien
atcagctaccatgcccaaccaggtt

SEQ ID NO: 2796049 - DNA, 25 bp, Homo sapien
caaggaaaatgacccctgcatgcca

SEQ ID NO: 2796050 - DNA, 25 bp, Homo sapien
cctgaaaagtgtggacagaatcccc

SEQ ID NO: 2796051 - DNA, 25 bp, Homo sapien
tcagctttgaaccatccagtgggca

SEQ ID NO: 2796052 - DNA, 25 bp, Homo sapien
tgccagaaggtataggacaaagccc

SEQ ID NO: 2796053 - DNA, 25 bp, Homo sapien
tccttttcttccaggtcgctctccg

SEQ ID NO: 2796054 - DNA, 25 bp, Homo sapien
tcgctctccgtcactgaaccctcta

SEQ ID NO: 2796055 - DNA, 25 bp, Homo sapien
ttttcttccaggtcgctctccgtca

SEQ ID NO: 2796056 - DNA, 25 bp, Homo sapien
ttccaggtcgctctccgtcactgaa

SEQ ID NO: 2796057 - DNA, 25 bp, Homo sapien
caggagccgggacttgtcgcagggc

SEQ ID NO: 2796058 - DNA, 25 bp, Homo sapien
ggacttgtcgcagggctgctgagga

SEQ ID NO: 2796059 - DNA, 25 bp, Homo sapien
taactccctcttgcccgcaaacaaa

SEQ ID NO: 2796060 - DNA, 25 bp, Homo sapien
ataatataatcgcagcaggagccgg

SEQ ID NO: 2796061 - DNA, 25 bp, Homo sapien
tagggtaacacctagtgcctctgca

SEQ ID NO: 2796062 - DNA, 25 bp, Homo sapien
gcctacggacatagccacaagctgt

SEQ ID NO: 2796063 - DNA, 25 bp, Homo sapien
tatccagttgtgtgggacaaccaac

SEQ ID NO: 2796064 - DNA, 25 bp, Homo sapien
ttatcagggcacttagccagcagcg

SEQ ID NO: 2796065 - DNA, 25 bp, Homo sapien
caaaagggtgctctaaatccctgcc

SEQ ID NO: 2796066 - DNA, 25 bp, Homo sapien
tacttccaaaagggtgctctaaatc

SEQ ID NO: 2796067 - DNA, 25 bp, Homo sapien
tccaaaagggtgctctaaatccctg

SEQ ID NO: 2796068 - DNA, 25 bp, Homo sapien
gggtgctctaaatccctgccttctt

SEQ ID NO: 2796069 - DNA, 25 bp, Homo sapien
cagatcacctccataattcaggtca

SEQ ID NO: 2796070 - DNA, 25 bp, Homo sapien
cacctccataattcaggtcacttcc

SEQ ID NO: 2796071 - DNA, 25 bp, Homo sapien
ttcagatcacctccataattcaggt

SEQ ID NO: 2796072 - DNA, 25 bp, Homo sapien
gatcacctccataattcaggtcact

SEQ ID NO: 2796073 - DNA, 25 bp, Homo sapien
gcgaacatcgcgctggcctaatgca

SEQ ID NO: 2796074 - DNA, 25 bp, Homo sapien
catgagcgaacatcgcgctggccta

SEQ ID NO: 2796075 - DNA, 25 bp, Homo sapien
gcgctggcctaatgcaggtggaaac

SEQ ID NO: 2796076 - DNA, 25 bp, Homo sapien
ctttggttcatgagcgaacatcgcg

SEQ ID NO: 2796077 - DNA, 25 bp, Homo sapien
attaccactttctctgactcactct

SEQ ID NO: 2796078 - DNA, 25 bp, Homo sapien
tgactcactcttccaaatcaaggct

SEQ ID NO: 2796079 - DNA, 25 bp, Homo sapien
gctcctatcctctggctgagtaagc

SEQ ID NO: 2796080 - DNA, 25 bp, Homo sapien
ctctgctgtcgcagtgggaggcctc

SEQ ID NO: 2796081 - DNA, 25 bp, Homo sapien
tgctgggactcgaacggctattggt

SEQ ID NO: 2796082 - DNA, 25 bp, Homo sapien
taaggcgaccgttcgtgacgtagcg

SEQ ID NO: 2796083 - DNA, 25 bp, Homo sapien
cgactgcgttaactggagccaggct

SEQ ID NO: 2796084 - DNA, 25 bp, Homo sapien
tctcttattggtcgaaggctcgtcc

SEQ ID NO: 2796085 - DNA, 25 bp, Homo sapien
tgaggcgggcggtgaccgagaagag

SEQ ID NO: 2796086 - DNA, 25 bp, Homo sapien
tgttggtggcaattctggagcttcc

SEQ ID NO: 2796087 - DNA, 25 bp, Homo sapien
gtgaggcgggcggtgaccgagaaga

SEQ ID NO: 2796088 - DNA, 25 bp, Homo sapien
aggcgggcggtgaccgagaagaggg

SEQ ID NO: 2796089 - DNA, 25 bp, Homo sapien
ctttgtcggtgtggcagctcggacc

SEQ ID NO: 2796090 - DNA, 25 bp, Homo sapien
caaggaatgtccttgaggcccggca

SEQ ID NO: 2796091 - DNA, 25 bp, Homo sapien
gccggcatcagtgccggagtaaccc

SEQ ID NO: 2796092 - DNA, 25 bp, Homo sapien
gcctcttcgtgactgcggtcatcat

SEQ ID NO: 2796093 - DNA, 25 bp, Homo sapien
ggaaaccctggcttgcttgccgagc

SEQ ID NO: 2796094 - DNA, 25 bp, Homo sapien
ttgatggacccacgaacgctcttag

SEQ ID NO: 2796095 - DNA, 25 bp, Homo sapien
gaggttggtgactgaaacattcaca

SEQ ID NO: 2796096 - DNA, 25 bp, Homo sapien
cgtgaatggccctagaactgtgcct

SEQ ID NO: 2796097 - DNA, 25 bp, Homo sapien
ccaacaaaacagtgatagttatatt

SEQ ID NO: 2796098 - DNA, 25 bp, Homo sapien
gcagtgaatccaaagctcgctttat

SEQ ID NO: 2796099 - DNA, 25 bp, Homo sapien
tttgtagtagtgttttatgactcag

SEQ ID NO: 2796100 - DNA, 25 bp, Homo sapien
tgaatccaaagctcgctttatttcc

SEQ ID NO: 2796101 - DNA, 25 bp, Homo sapien
gaagcacctccatttatgatgtggc

SEQ ID NO: 2796102 - DNA, 25 bp, Homo sapien
gctacatactgataagccccactgt

SEQ ID NO: 2796103 - DNA, 25 bp, Homo sapien
taagacacatcgttataaaagcccc

SEQ ID NO: 2796104 - DNA, 25 bp, Homo sapien
gctatgtgctgataagcccactgca

SEQ ID NO: 2796105 - DNA, 25 bp, Homo sapien
tgtactgtatttgtagtgctttgca

SEQ ID NO: 2796106 - DNA, 25 bp, Homo sapien
gctttgcataaagtcgaacaatcat

SEQ ID NO: 2796107 - DNA, 25 bp, Homo sapien
atatatgactggtttatcggaacgc

SEQ ID NO: 2796108 - DNA, 25 bp, Homo sapien
cagccccatggtaagttggagtgta

SEQ ID NO: 2796109 - DNA, 25 bp, Homo sapien
tcagggaatcagtaggtttgtaacc

SEQ ID NO: 2796110 - DNA, 25 bp, Homo sapien
agacacggcggagataccctcacac

SEQ ID NO: 2796111 - DNA, 25 bp, Homo sapien
cacctccacaggactgttgagtggg

SEQ ID NO: 2796112 - DNA, 25 bp, Homo sapien
agtcagaaaaggcatagtgccggta

SEQ ID NO: 2796113 - DNA, 25 bp, Homo sapien
gggtggtaccaccaatcaccgctac

SEQ ID NO: 2796114 - DNA, 25 bp, Homo sapien
ggtgacaggaaaatcctggtttggc

SEQ ID NO: 2796115 - DNA, 25 bp, Homo sapien
tgggtgacaggaaaatcctggtttg

SEQ ID NO: 2796116 - DNA, 25 bp, Homo sapien
ctgggtgacaggaaaatcctggttt

SEQ ID NO: 2796117 - DNA, 25 bp, Homo sapien
tgacaggaaaatcctggtttggcat

SEQ ID NO: 2796118 - DNA, 25 bp, Homo sapien
tatggcttctctaccaatcttttaa

SEQ ID NO: 2796119 - DNA, 25 bp, Homo sapien
aaataagtgtgtatcattcaccagc

SEQ ID NO: 2796120 - DNA, 25 bp, Homo sapien
tttaaaacttctggatgtgatccac

SEQ ID NO: 2796121 - DNA, 25 bp, Homo sapien
aactgtaacccattacacacgtatg

SEQ ID NO: 2796122 - DNA, 25 bp, Homo sapien
ctttggtttagctacccctgtggca

SEQ ID NO: 2796123 - DNA, 25 bp, Homo sapien
tactctcttgtcctgtacagtgggc

SEQ ID NO: 2796124 - DNA, 25 bp, Homo sapien
tacaactcggactaaatactggtga

SEQ ID NO: 2796125 - DNA, 25 bp, Homo sapien
gaagttactctacacactcccaagg

SEQ ID NO: 2796126 - DNA, 25 bp, Homo sapien
ttatggagcatgaaatccgcgtgca

SEQ ID NO: 2796127 - DNA, 25 bp, Homo sapien
gaaccaaggttcttcatgggagtaa

SEQ ID NO: 2796128 - DNA, 25 bp, Homo sapien
tgtggaatccttaccgctctgctga

SEQ ID NO: 2796129 - DNA, 25 bp, Homo sapien
tatcagcggctatggtgaataaacc

SEQ ID NO: 2796130 - DNA, 25 bp, Homo sapien
ccagatatttggtgcacagaaagca

SEQ ID NO: 2796131 - DNA, 25 bp, Homo sapien
ttttgtacacaaggccaaggtcttg

SEQ ID NO: 2796132 - DNA, 25 bp, Homo sapien
tacgttccagcttagagcattcagc

SEQ ID NO: 2796133 - DNA, 25 bp, Homo sapien
caaggctatagatcctacgttccag

SEQ ID NO: 2796134 - DNA, 25 bp, Homo sapien
acagtcctctctacagtccaggcct

SEQ ID NO: 2796135 - DNA, 25 bp, Homo sapien
agtcctctctacagtccaggcctcc

SEQ ID NO: 2796136 - DNA, 25 bp, Homo sapien
cagtcctctctacagtccaggcctc

SEQ ID NO: 2796137 - DNA, 25 bp, Homo sapien
gaaaagaaggaacaatggttgtgcc

SEQ ID NO: 2796138 - DNA, 25 bp, Homo sapien
aatggttgtgccaaaaagggccaca

SEQ ID NO: 2796139 - DNA, 25 bp, Homo sapien
gaacaatggttgtgccaaaaagggc

SEQ ID NO: 2796140 - DNA, 25 bp, Homo sapien
agaaggaacaatggttgtgccaaaa

SEQ ID NO: 2796141 - DNA, 25 bp, Homo sapien
atttgaaacacagtgaaggtcgcag

SEQ ID NO: 2796142 - DNA, 25 bp, Homo sapien
cagtgaaggtcgcagcagtcaggga

SEQ ID NO: 2796143 - DNA, 25 bp, Homo sapien
tgaaacacagtgaaggtcgcagcag

SEQ ID NO: 2796144 - DNA, 25 bp, Homo sapien
tttgaaacacagtgaaggtcgcagc

SEQ ID NO: 2796145 - DNA, 25 bp, Homo sapien
ctttgatgtctatgtgcttcccaag

SEQ ID NO: 2796146 - DNA, 25 bp, Homo sapien
tggcctcacaatttgcatagttgtg

SEQ ID NO: 2796147 - DNA, 25 bp, Homo sapien
aattgtttgcagtcacatccttggc

SEQ ID NO: 2796148 - DNA, 25 bp, Homo sapien
atccttggcctcacaatttgcatag

SEQ ID NO: 2796149 - DNA, 25 bp, Homo sapien
tgtgtaaaataaagggggcacaggc

SEQ ID NO: 2796150 - DNA, 25 bp, Homo sapien
tagcagggccagtagtaccacatct

SEQ ID NO: 2796151 - DNA, 25 bp, Homo sapien
taaagcaggcttaaactcagtcata

SEQ ID NO: 2796152 - DNA, 25 bp, Homo sapien
gaaactgtaatattcgccaatgcag

SEQ ID NO: 2796153 - DNA, 25 bp, Homo sapien
attatgcacaaacccctagcagggc

SEQ ID NO: 2796154 - DNA, 25 bp, Homo sapien
acagacattacctgtccaggctgga

SEQ ID NO: 2796155 - DNA, 25 bp, Homo sapien
catgttaacgtatcacttactttaa

SEQ ID NO: 2796156 - DNA, 25 bp, Homo sapien
ttaatcatgttaacgtatcacttac

SEQ ID NO: 2796157 - DNA, 25 bp, Homo sapien
gtacctaggactatacatgtatacc

SEQ ID NO: 2796158 - DNA, 25 bp, Homo sapien
gaagtttgcacttctacaattctac

SEQ ID NO: 2796159 - DNA, 25 bp, Homo sapien
ggaagtttgcacttctacaattcta

SEQ ID NO: 2796160 - DNA, 25 bp, Homo sapien
caggaagtttgcacttctacaattc

SEQ ID NO: 2796161 - DNA, 25 bp, Homo sapien
aagtttgcacttctacaattctaca

SEQ ID NO: 2796162 - DNA, 25 bp, Homo sapien
ctaaattttagtattgacagtcata

SEQ ID NO: 2796163 - DNA, 25 bp, Homo sapien
aactaaattttagtattgacagtca

SEQ ID NO: 2796164 - DNA, 25 bp, Homo sapien
cgaaacaatactctataggggaaca

SEQ ID NO: 2796165 - DNA, 25 bp, Homo sapien
ctctataggggaacatcaaaaaaca

SEQ ID NO: 2796166 - DNA, 25 bp, Homo sapien
tagaaatttaggatactctcgcttt

SEQ ID NO: 2796167 - DNA, 25 bp, Homo sapien
aatttaggatactctcgctttgcca

SEQ ID NO: 2796168 - DNA, 25 bp, Homo sapien
ttttagaaatttaggatactctcgc

SEQ ID NO: 2796169 - DNA, 25 bp, Homo sapien
aggatactctcgctttgccactgcc

SEQ ID NO: 2796170 - DNA, 25 bp, Homo sapien
tacccagctggaccaattatgatct

SEQ ID NO: 2796171 - DNA, 25 bp, Homo sapien
actgtacccagctggaccaattatg

SEQ ID NO: 2796172 - DNA, 25 bp, Homo sapien
cccagctggaccaattatgatcttt

SEQ ID NO: 2796173 - DNA, 25 bp, Homo sapien
tgtacccagctggaccaattatgat

SEQ ID NO: 2796174 - DNA, 25 bp, Homo sapien
aatcttgcatagaatgttgtccctg

SEQ ID NO: 2796175 - DNA, 25 bp, Homo sapien
gctacatatgtaatcttgcatagaa

SEQ ID NO: 2796176 - DNA, 25 bp, Homo sapien
cattagctacatatgtaatcttgca

SEQ ID NO: 2796177 - DNA, 25 bp, Homo sapien
atgttgtccctgctaatttcctggt

SEQ ID NO: 2796178 - DNA, 25 bp, Homo sapien
catttattttggcacggacacatcg

SEQ ID NO: 2796179 - DNA, 25 bp, Homo sapien
caaggtttgacaaatcatagcaaca

SEQ ID NO: 2796180 - DNA, 25 bp, Homo sapien
ggtttgacaaatcatagcaacattt

SEQ ID NO: 2796181 - DNA, 25 bp, Homo sapien
tggcacggacacatcggttgtttag

SEQ ID NO: 2796182 - DNA, 25 bp, Homo sapien
gacagaaagatataatacgtctcgc

SEQ ID NO: 2796183 - DNA, 25 bp, Homo sapien
aggctggtatctttcgaatgacaga

SEQ ID NO: 2796184 - DNA, 25 bp, Homo sapien
tcgaatgacagaaagatataatacg

SEQ ID NO: 2796185 - DNA, 25 bp, Homo sapien
gatataatacgtctcgctgagaagc

SEQ ID NO: 2796186 - DNA, 25 bp, Homo sapien
tcagctaatgtttccaccacatgaa

SEQ ID NO: 2796187 - DNA, 25 bp, Homo sapien
cttgtgtgtttgataaatgatgatt

SEQ ID NO: 2796188 - DNA, 25 bp, Homo sapien
tgatgattgcattatcagctaatgt

SEQ ID NO: 2796189 - DNA, 25 bp, Homo sapien
gtgtgtttgataaatgatgattgca

SEQ ID NO: 2796190 - DNA, 25 bp, Homo sapien
tccagaaataattgcagacttcatg

SEQ ID NO: 2796191 - DNA, 25 bp, Homo sapien
ctgtgacgcctttaactgcatgggt

SEQ ID NO: 2796192 - DNA, 25 bp, Homo sapien
cttcatgtcctgtgacgcctttaac

SEQ ID NO: 2796193 - DNA, 25 bp, Homo sapien
tttcccagtcattgcgaacgtcaac

SEQ ID NO: 2796194 - DNA, 25 bp, Homo sapien
tccgcctacatcctgtaatgagtaa

SEQ ID NO: 2796195 - DNA, 25 bp, Homo sapien
tgccaattggcatctccgcctacat

SEQ ID NO: 2796196 - DNA, 25 bp, Homo sapien
ttcttctacaaccaactgccaattg

SEQ ID NO: 2796197 - DNA, 25 bp, Homo sapien
taatgagtaagtcatgtggttctgc

SEQ ID NO: 2796198 - DNA, 25 bp, Homo sapien
tggccttaagtgtctcctgatctgt

SEQ ID NO: 2796199 - DNA, 25 bp, Homo sapien
ccaaaggatatgttatatgtgatag

SEQ ID NO: 2796200 - DNA, 25 bp, Homo sapien
tgttctgctacctcaagtttctgga

SEQ ID NO: 2796201 - DNA, 25 bp, Homo sapien
attactgaaagcaggtatggcctta

SEQ ID NO: 2796202 - DNA, 25 bp, Homo sapien
ggttacctatgaaagaagaatgtga

SEQ ID NO: 2796203 - DNA, 25 bp, Homo sapien
tagggatttcaaatgcctaagaaat

SEQ ID NO: 2796204 - DNA, 25 bp, Homo sapien
taaacgcgtagtaggtagcacaagt

SEQ ID NO: 2796205 - DNA, 25 bp, Homo sapien
ccctactttcaataggttacctatg

SEQ ID NO: 2796206 - DNA, 25 bp, Homo sapien
aggcactgactagatcaatggaaga

SEQ ID NO: 2796207 - DNA, 25 bp, Homo sapien
catcagaggcactgactagatcaat

SEQ ID NO: 2796208 - DNA, 25 bp, Homo sapien
cagaggcactgactagatcaatgga

SEQ ID NO: 2796209 - DNA, 25 bp, Homo sapien
gacatggaggaagagcgactatagg

SEQ ID NO: 2796210 - DNA, 25 bp, Homo sapien
gccaatgtaatctcaccttttcact

SEQ ID NO: 2796211 - DNA, 25 bp, Homo sapien
gatgtaggccaatgtaatctcacct

SEQ ID NO: 2796212 - DNA, 25 bp, Homo sapien
aaggatgtaggccaatgtaatctca

SEQ ID NO: 2796213 - DNA, 25 bp, Homo sapien
taggccaatgtaatctcaccttttc

SEQ ID NO: 2796214 - DNA, 25 bp, Homo sapien
tcttcttcattaatcagactgttag

SEQ ID NO: 2796215 - DNA, 25 bp, Homo sapien
tattttatcttgtctgtcaagagca

SEQ ID NO: 2796216 - DNA, 25 bp, Homo sapien
aagagcagcttcaacagcatcaaag

SEQ ID NO: 2796217 - DNA, 25 bp, Homo sapien
cattaatcagactgttagggccttc

SEQ ID NO: 2796218 - DNA, 25 bp, Homo sapien
tcactatttgggtaaggggcacact

SEQ ID NO: 2796219 - DNA, 25 bp, Homo sapien
tgccagtacacaatatactcatgta

SEQ ID NO: 2796220 - DNA, 25 bp, Homo sapien
tagaagcccaatctctgccagtaca

SEQ ID NO: 2796221 - DNA, 25 bp, Homo sapien
gtaaatgcatgtacctagcacaagg

SEQ ID NO: 2796222 - DNA, 25 bp, Homo sapien
cttgtgatccccccgcctcagcctc

SEQ ID NO: 2796223 - DNA, 25 bp, Homo sapien
ctgggacaacaggcactcacaacca

SEQ ID NO: 2796224 - DNA, 25 bp, Homo sapien
ggacaacaggcactcacaaccacgc

SEQ ID NO: 2796225 - DNA, 25 bp, Homo sapien
ttgtgatccccccgcctcagcctcc

SEQ ID NO: 2796226 - DNA, 25 bp, Homo sapien
ttattttatagagatgaagtcttgc

SEQ ID NO: 2796227 - DNA, 25 bp, Homo sapien
tgcagtcttgggctcctcagtagct

SEQ ID NO: 2796228 - DNA, 25 bp, Homo sapien
ctcactgcagtcttgggctcctcag

SEQ ID NO: 2796229 - DNA, 25 bp, Homo sapien
gggactacaggcatgtgccactata

SEQ ID NO: 2796230 - DNA, 25 bp, Homo sapien
ataatctggtcctccaaagtgggat

SEQ ID NO: 2796231 - DNA, 25 bp, Homo sapien
aatctggtcctccaaagtgggattt

SEQ ID NO: 2796232 - DNA, 25 bp, Homo sapien
taatctggtcctccaaagtgggatt

SEQ ID NO: 2796233 - DNA, 25 bp, Homo sapien
atctggtcctccaaagtgggatttt

SEQ ID NO: 2796234 - DNA, 25 bp, Homo sapien
ctctgttcttcttttcttctcagtt

SEQ ID NO: 2796235 - DNA, 25 bp, Homo sapien
ctgttcttcttttcttctcagtttc

SEQ ID NO: 2796236 - DNA, 25 bp, Homo sapien
tctgttcttcttttcttctcagttt

SEQ ID NO: 2796237 - DNA, 25 bp, Homo sapien
gttcaatacaatgagaaagtgttgc

SEQ ID NO: 2796238 - DNA, 25 bp, Homo sapien
aaagtgttgcaaggattccagcagt

SEQ ID NO: 2796239 - DNA, 25 bp, Homo sapien
cacgtttaaccattagttcaataca

SEQ ID NO: 2796240 - DNA, 25 bp, Homo sapien
tgccagctgtcctcacgtttaacca

SEQ ID NO: 2796241 - DNA, 25 bp, Homo sapien
cgttggtactatgcaagaagtcacc

SEQ ID NO: 2796242 - DNA, 25 bp, Homo sapien
tcaccatcagaacgcgttgtaggaa

SEQ ID NO: 2796243 - DNA, 25 bp, Homo sapien
ttctttattgccgttggtactatgc

SEQ ID NO: 2796244 - DNA, 25 bp, Homo sapien
gcgttgtaggaaagtcatcttcatc

SEQ ID NO: 2796245 - DNA, 25 bp, Homo sapien
tacttctgtagcgtgtcaacttgtc

SEQ ID NO: 2796246 - DNA, 25 bp, Homo sapien
caggcatcaaagtacttctgtagcg

SEQ ID NO: 2796247 - DNA, 25 bp, Homo sapien
aacttgtctacataagatgtctcta

SEQ ID NO: 2796248 - DNA, 25 bp, Homo sapien
caacttctcacgtaaactgtggcct

SEQ ID NO: 2796249 - DNA, 25 bp, Homo sapien
cttgaatgaagaggtggatgttgca

SEQ ID NO: 2796250 - DNA, 25 bp, Homo sapien
tgagccatgtcgacgcaagctggat

SEQ ID NO: 2796251 - DNA, 25 bp, Homo sapien
catgtcgacgcaagctggattcaga

SEQ ID NO: 2796252 - DNA, 25 bp, Homo sapien
cattgagccatgtcgacgcaagctg

SEQ ID NO: 2796253 - DNA, 25 bp, Homo sapien
ggacaccattgagccatgtcgacgc

SEQ ID NO: 2796254 - DNA, 25 bp, Homo sapien
ctcactctttttgcccagtctagtc

SEQ ID NO: 2796255 - DNA, 25 bp, Homo sapien
agtgcatgccactacacccaggtaa

SEQ ID NO: 2796256 - DNA, 25 bp, Homo sapien
tctttttgcccagtctagtctccaa

SEQ ID NO: 2796257 - DNA, 25 bp, Homo sapien
caggtaattttttgatttgttgtag

SEQ ID NO: 2796258 - DNA, 25 bp, Homo sapien
cattagtagtctagctagaagtcta

SEQ ID NO: 2796259 - DNA, 25 bp, Homo sapien
ggtgttttgacgtgctgctgtattc

SEQ ID NO: 2796260 - DNA, 25 bp, Homo sapien
aatagagctatgaatccatgtggtc

SEQ ID NO: 2796261 - DNA, 25 bp, Homo sapien
tgtggtccacggctttttctgattg

SEQ ID NO: 2796262 - DNA, 25 bp, Homo sapien
tatgtcatctttcaacccttggact

SEQ ID NO: 2796263 - DNA, 25 bp, Homo sapien
tgtcatctttcaacccttggactgt

SEQ ID NO: 2796264 - DNA, 25 bp, Homo sapien
ctgtctgtctgcactgattcaaagg

SEQ ID NO: 2796265 - DNA, 25 bp, Homo sapien
catctttcaacccttggactgttta

SEQ ID NO: 2796266 - DNA, 25 bp, Homo sapien
tatactattaatttgactctgtcac

SEQ ID NO: 2796267 - DNA, 25 bp, Homo sapien
ttacattcctatcaacagggcacaa

SEQ ID NO: 2796268 - DNA, 25 bp, Homo sapien
tactattaatttgactctgtcactc

SEQ ID NO: 2796269 - DNA, 25 bp, Homo sapien
ctatcaacagggcacaagggttcca

SEQ ID NO: 2796270 - DNA, 25 bp, Homo sapien
ccttgtgaataaggtaggactgcta

SEQ ID NO: 2796271 - DNA, 25 bp, Homo sapien
ggactgctataacatccctacgtta

SEQ ID NO: 2796272 - DNA, 25 bp, Homo sapien
catatagagctcagtaccatctgtg

SEQ ID NO: 2796273 - DNA, 25 bp, Homo sapien
ggaacatatacccttgtgaataagg

SEQ ID NO: 2796274 - DNA, 25 bp, Homo sapien
ggaggtctgtcagatgtgtcccata

SEQ ID NO: 2796275 - DNA, 25 bp, Homo sapien
tgtcgtaggctatttctgtgccaag

SEQ ID NO: 2796276 - DNA, 25 bp, Homo sapien
cctggcactctcaaaatgtataggg

SEQ ID NO: 2796277 - DNA, 25 bp, Homo sapien
tttgagtatcattaaggtagctgct

SEQ ID NO: 2796278 - DNA, 25 bp, Homo sapien
ccaggctaacgtgcaataatgtgat

SEQ ID NO: 2796279 - DNA, 25 bp, Homo sapien
aaaaaccatggttgaggagtcaata

SEQ ID NO: 2796280 - DNA, 25 bp, Homo sapien
tgttagagctaactgtatgagtatt

SEQ ID NO: 2796281 - DNA, 25 bp, Homo sapien
ggttgaggagtcaataacatttatg

SEQ ID NO: 2796282 - DNA, 25 bp, Homo sapien
taatgtcctaatactcagcaagcaa

SEQ ID NO: 2796283 - DNA, 25 bp, Homo sapien
cagttctgtgttgactttaggaaac

SEQ ID NO: 2796284 - DNA, 25 bp, Homo sapien
accacattagggcattgtacagaaa

SEQ ID NO: 2796285 - DNA, 25 bp, Homo sapien
tgtcaatatgtataagccatgtctc

SEQ ID NO: 2796286 - DNA, 25 bp, Homo sapien
tatagaggatcaagacgataatgca

SEQ ID NO: 2796287 - DNA, 25 bp, Homo sapien
tactaaacttagcttccacaatcaa

SEQ ID NO: 2796288 - DNA, 25 bp, Homo sapien
ctgaagaatgaatcaagaaacatct

SEQ ID NO: 2796289 - DNA, 25 bp, Homo sapien
tagccctggtctatgggaggaaaaa

SEQ ID NO: 2796290 - DNA, 25 bp, Homo sapien
tatcatagcaaatacccttagtaca

SEQ ID NO: 2796291 - DNA, 25 bp, Homo sapien
gcccagccgagtaatatttatcata

SEQ ID NO: 2796292 - DNA, 25 bp, Homo sapien
atgcccagccgagtaatatttatca

SEQ ID NO: 2796293 - DNA, 25 bp, Homo sapien
gacaggtaaacattagggatcttac

SEQ ID NO: 2796294 - DNA, 25 bp, Homo sapien
ctagtcctccatggacaggtaaaca

SEQ ID NO: 2796295 - DNA, 25 bp, Homo sapien
catggacaggtaaacattagggatc

SEQ ID NO: 2796296 - DNA, 25 bp, Homo sapien
gtcctccatggacaggtaaacatta

SEQ ID NO: 2796297 - DNA, 25 bp, Homo sapien
tctggatcctgagcacgaagatacc

SEQ ID NO: 2796298 - DNA, 25 bp, Homo sapien
tgtgctgttcaatggcatctatcca

SEQ ID NO: 2796299 - DNA, 25 bp, Homo sapien
tacactaatatcaaatcgacattca

SEQ ID NO: 2796300 - DNA, 25 bp, Homo sapien
tggcatctatccattgctgtctatg

SEQ ID NO: 2796301 - DNA, 25 bp, Homo sapien
tctttgatagtaacaaccaggagca

SEQ ID NO: 2796302 - DNA, 25 bp, Homo sapien
tttgatagtaacaaccaggagcact

SEQ ID NO: 2796303 - DNA, 25 bp, Homo sapien
atagtaacaaccaggagcacttcca

SEQ ID NO: 2796304 - DNA, 25 bp, Homo sapien
tgatagtaacaaccaggagcacttc

SEQ ID NO: 2796305 - DNA, 25 bp, Homo sapien
gatccataacatcaagggtacagct

SEQ ID NO: 2796306 - DNA, 25 bp, Homo sapien
ccataacatcaagggtacagctggg

SEQ ID NO: 2796307 - DNA, 25 bp, Homo sapien
tccataacatcaagggtacagctgg

SEQ ID NO: 2796308 - DNA, 25 bp, Homo sapien
ctctgatccataacatcaagggtac

SEQ ID NO: 2796309 - DNA, 25 bp, Homo sapien
ataagttcatagaaggtcacttcaa

SEQ ID NO: 2796310 - DNA, 25 bp, Homo sapien
aagttcatagaaggtcacttcaatg

SEQ ID NO: 2796311 - DNA, 25 bp, Homo sapien
gttcatagaaggtcacttcaatgag

SEQ ID NO: 2796312 - DNA, 25 bp, Homo sapien
taagttcatagaaggtcacttcaat

SEQ ID NO: 2796313 - DNA, 25 bp, Homo sapien
ccttaccttctagtttcaaggagat

SEQ ID NO: 2796314 - DNA, 25 bp, Homo sapien
tattccatggaccttaccttctagt

SEQ ID NO: 2796315 - DNA, 25 bp, Homo sapien
gtcttaacatatattccatggacct

SEQ ID NO: 2796316 - DNA, 25 bp, Homo sapien
atggtatcttattgtttacacagtc

SEQ ID NO: 2796317 - DNA, 25 bp, Homo sapien
tatctcatctaccccattaatacct

SEQ ID NO: 2796318 - DNA, 25 bp, Homo sapien
aaatgaattcttgccaattcaagtc

SEQ ID NO: 2796319 - DNA, 25 bp, Homo sapien
gctgcatttaccacgatgtgattat

SEQ ID NO: 2796320 - DNA, 25 bp, Homo sapien
ttgccaattcaagtcttctaaacaa

SEQ ID NO: 2796321 - DNA, 25 bp, Homo sapien
atttctctctccctaatcattttca

SEQ ID NO: 2796322 - DNA, 25 bp, Homo sapien
tttatttctctctccctaatcattt

SEQ ID NO: 2796323 - DNA, 25 bp, Homo sapien
tctctctccctaatcattttcacct

SEQ ID NO: 2796324 - DNA, 25 bp, Homo sapien
ctctccctaatcattttcacctttt

SEQ ID NO: 2796325 - DNA, 25 bp, Homo sapien
aatctgatagtaatggccaggtgca

SEQ ID NO: 2796326 - DNA, 25 bp, Homo sapien
aaaaaatctgatagtaatggccagg

SEQ ID NO: 2796327 - DNA, 25 bp, Homo sapien
taaaaaatctgatagtaatggccag

SEQ ID NO: 2796328 - DNA, 25 bp, Homo sapien
aaaatctgatagtaatggccaggtg

SEQ ID NO: 2796329 - DNA, 25 bp, Homo sapien
tgtcaaggtgccagttagacaagca

SEQ ID NO: 2796330 - DNA, 25 bp, Homo sapien
caagcagccaggttggtataaggca

SEQ ID NO: 2796331 - DNA, 25 bp, Homo sapien
gacaggcttttgataccagaggagg

SEQ ID NO: 2796332 - DNA, 25 bp, Homo sapien
gacggcagcattaggccctgtttaa

SEQ ID NO: 2796333 - DNA, 25 bp, Homo sapien
ggtacttctgttctcactagttggg

SEQ ID NO: 2796334 - DNA, 25 bp, Homo sapien
gttacatgcttaacaagtcagttgg

SEQ ID NO: 2796335 - DNA, 25 bp, Homo sapien
gcaaaaaggaacagttgtttctata

SEQ ID NO: 2796336 - DNA, 25 bp, Homo sapien
catgtctaatgactacgagtgcaaa

SEQ ID NO: 2796337 - DNA, 25 bp, Homo sapien
gggtgttgaattggagaaaagtgat

SEQ ID NO: 2796338 - DNA, 25 bp, Homo sapien
aagggtgttgaattggagaaaagtg

SEQ ID NO: 2796339 - DNA, 25 bp, Homo sapien
agggtgttgaattggagaaaagtga

SEQ ID NO: 2796340 - DNA, 25 bp, Homo sapien
ccttgctaagacagatggatcctct

SEQ ID NO: 2796341 - DNA, 25 bp, Homo sapien
tgtgatgacagccttgctaagacag

SEQ ID NO: 2796342 - DNA, 25 bp, Homo sapien
cagccttgctaagacagatggatcc

SEQ ID NO: 2796343 - DNA, 25 bp, Homo sapien
gatgacagccttgctaagacagatg

SEQ ID NO: 2796344 - DNA, 25 bp, Homo sapien
tttcaaaactacccaacgatcctgc

SEQ ID NO: 2796345 - DNA, 25 bp, Homo sapien
ctacccaacgatcctgccacccatg

SEQ ID NO: 2796346 - DNA, 25 bp, Homo sapien
ttcatcttcagatttgtagtaactc

SEQ ID NO: 2796347 - DNA, 25 bp, Homo sapien
catcttcagatttgtagtaactcag

SEQ ID NO: 2796348 - DNA, 25 bp, Homo sapien
gatcgtattgagtctctagctccaa

SEQ ID NO: 2796349 - DNA, 25 bp, Homo sapien
acagtgcctggacatagtattttct

SEQ ID NO: 2796350 - DNA, 25 bp, Homo sapien
acaagaatagacttagaacagtgcc

SEQ ID NO: 2796351 - DNA, 25 bp, Homo sapien
tacatggacaacttcccactgactg

SEQ ID NO: 2796352 - DNA, 25 bp, Homo sapien
gatcctcctccgagcccgacgagtt

SEQ ID NO: 2796353 - DNA, 25 bp, Homo sapien
cgagcccgacgagttccagctctga

SEQ ID NO: 2796354 - DNA, 25 bp, Homo sapien
ggcggcccagactccgtctctggat

SEQ ID NO: 2796355 - DNA, 25 bp, Homo sapien
gagttccagctctgattatccgaca

SEQ ID NO: 2796356 - DNA, 25 bp, Homo sapien
ggctcgacaaccgagcaggagaccg

SEQ ID NO: 2796357 - DNA, 25 bp, Homo sapien
ggaggctcgacaaccgagcaggaga

SEQ ID NO: 2796358 - DNA, 25 bp, Homo sapien
accggcccccgctccctcagctgcg

SEQ ID NO: 2796359 - DNA, 25 bp, Homo sapien
ggagaccggcccccgctccctcagc

SEQ ID NO: 2796360 - DNA, 25 bp, Homo sapien
gaggcgcccagtcctcggggtgaag

SEQ ID NO: 2796361 - DNA, 25 bp, Homo sapien
aggcgcccagtcctcggggtgaagg

SEQ ID NO: 2796362 - DNA, 25 bp, Homo sapien
ggaggcgcccagtcctcggggtgaa

SEQ ID NO: 2796363 - DNA, 25 bp, Homo sapien
gagggacgaagtccgcccgccgcgc

SEQ ID NO: 2796364 - DNA, 25 bp, Homo sapien
gggagcaggaggagggacgaagtcc

SEQ ID NO: 2796365 - DNA, 25 bp, Homo sapien
gcaggaggagggacgaagtccgccc

SEQ ID NO: 2796366 - DNA, 25 bp, Homo sapien
agcaggaggagggacgaagtccgcc

SEQ ID NO: 2796367 - DNA, 25 bp, Homo sapien
ccgtcgccgtgacccctgcgttgcg

SEQ ID NO: 2796368 - DNA, 25 bp, Homo sapien
cgaggaaggaggacgagcggtgaag

SEQ ID NO: 2796369 - DNA, 25 bp, Homo sapien
tgacaccgagcggagcgaggaagga

SEQ ID NO: 2796370 - DNA, 25 bp, Homo sapien
tgaaggaagcctacccttccagccg

SEQ ID NO: 2796371 - DNA, 25 bp, Homo sapien
gcgtccactcacacctccgctaccg

SEQ ID NO: 2796372 - DNA, 25 bp, Homo sapien
aagagaaaatccggccgctgagtcc

SEQ ID NO: 2796373 - DNA, 25 bp, Homo sapien
aaaatccggccgctgagtcccgcgt

SEQ ID NO: 2796374 - DNA, 25 bp, Homo sapien
tgagtcccgcgtccactcacacctc

SEQ ID NO: 2796375 - DNA, 25 bp, Homo sapien
gctctcccgggtgacgacgggtaga

SEQ ID NO: 2796376 - DNA, 25 bp, Homo sapien
cattctgggaagggcgttggtccgt

SEQ ID NO: 2796377 - DNA, 25 bp, Homo sapien
gttggtccgtcgctcgcgcagcctc

SEQ ID NO: 2796378 - DNA, 25 bp, Homo sapien
ggcggggtagggatgcagctgtgct

SEQ ID NO: 2796379 - DNA, 25 bp, Homo sapien
tgtgtttatgacgaaccctccgggc

SEQ ID NO: 2796380 - DNA, 25 bp, Homo sapien
ttccgctgaagatgacgggcctgct

SEQ ID NO: 2796381 - DNA, 25 bp, Homo sapien
ttccagggcggcttgtcgaaagccc

SEQ ID NO: 2796382 - DNA, 25 bp, Homo sapien
tcgtttgacagttgcgtgaccagcc

SEQ ID NO: 2796383 - DNA, 25 bp, Homo sapien
agtggggcgatctcattcagcttac

SEQ ID NO: 2796384 - DNA, 25 bp, Homo sapien
gacccatatctggagtctgtgatga

SEQ ID NO: 2796385 - DNA, 25 bp, Homo sapien
tacagcctatgtcaagaactttgca

SEQ ID NO: 2796386 - DNA, 25 bp, Homo sapien
gaactttgcagtgagcttgctcagg

SEQ ID NO: 2796387 - DNA, 25 bp, Homo sapien
taaagcggaagagcaatacagccta

SEQ ID NO: 2796388 - DNA, 25 bp, Homo sapien
tttgtaagggctctcaaagattcac

SEQ ID NO: 2796389 - DNA, 25 bp, Homo sapien
ctttgttggcattgatcctagtgtc

SEQ ID NO: 2796390 - DNA, 25 bp, Homo sapien
taatacaggacttttaaatggcagt

SEQ ID NO: 2796391 - DNA, 25 bp, Homo sapien
gcaagtgcaataatccttcctcaga

SEQ ID NO: 2796392 - DNA, 25 bp, Homo sapien
ttattatttaattgcaacatgaagt

SEQ ID NO: 2796393 - DNA, 25 bp, Homo sapien
ttatttaattgcaacatgaagttgg

SEQ ID NO: 2796394 - DNA, 25 bp, Homo sapien
tgttacttctttaaggagctaaatc

SEQ ID NO: 2796395 - DNA, 25 bp, Homo sapien
tttaattgcaacatgaagttggaag

SEQ ID NO: 2796396 - DNA, 25 bp, Homo sapien
gaggatgggctatgcgttttgaata

SEQ ID NO: 2796397 - DNA, 25 bp, Homo sapien
tggtatccgcaaggtcagtgtcccc

SEQ ID NO: 2796398 - DNA, 25 bp, Homo sapien
gcatcaacatgggtaatggaagcca

SEQ ID NO: 2796399 - DNA, 25 bp, Homo sapien
tgcagagacacttcaaattcgtaac

SEQ ID NO: 2796400 - DNA, 25 bp, Homo sapien
cataggataatagtggagagaagat

SEQ ID NO: 2796401 - DNA, 25 bp, Homo sapien
gagaagatcagcagataaacacgtg

SEQ ID NO: 2796402 - DNA, 25 bp, Homo sapien
ggataatagtggagagaagatcagc

SEQ ID NO: 2796403 - DNA, 25 bp, Homo sapien
gagagaagatcagcagataaacacg

SEQ ID NO: 2796404 - DNA, 25 bp, Homo sapien
atttggtataatatcaccaccatcc

SEQ ID NO: 2796405 - DNA, 25 bp, Homo sapien
tcatttggtataatatcaccaccat

SEQ ID NO: 2796406 - DNA, 25 bp, Homo sapien
catttggtataatatcaccaccatc

SEQ ID NO: 2796407 - DNA, 25 bp, Homo sapien
aaaagattatagattcgtatggtcc

SEQ ID NO: 2796408 - DNA, 25 bp, Homo sapien
tactaccccgcttatatatatccat

SEQ ID NO: 2796409 - DNA, 25 bp, Homo sapien
gagctatgtcagtaaaaatttttac

SEQ ID NO: 2796410 - DNA, 25 bp, Homo sapien
cctacttgtctggttaccatactac

SEQ ID NO: 2796411 - DNA, 25 bp, Homo sapien
catttatattggtgggaatcgcact

SEQ ID NO: 2796412 - DNA, 25 bp, Homo sapien
tagaggcttgctaaatgcctgcaaa

SEQ ID NO: 2796413 - DNA, 25 bp, Homo sapien
tggcctgaggtgtcaaaaagctctc

SEQ ID NO: 2796414 - DNA, 25 bp, Homo sapien
tgtagacagcatacaattagaggct

SEQ ID NO: 2796415 - DNA, 25 bp, Homo sapien
tatattacttaggaaagaccagaag

SEQ ID NO: 2796416 - DNA, 25 bp, Homo sapien
aaatctcttggtgatgtaattacag

SEQ ID NO: 2796417 - DNA, 25 bp, Homo sapien
ggaaaatgcctgtgtagcctcacgc

SEQ ID NO: 2796418 - DNA, 25 bp, Homo sapien
tgtctatttaatccatagggttgga

SEQ ID NO: 2796419 - DNA, 25 bp, Homo sapien
gattcacatgattccaaaacgtttt

SEQ ID NO: 2796420 - DNA, 25 bp, Homo sapien
taaatggcccacttaatcttatgaa

SEQ ID NO: 2796421 - DNA, 25 bp, Homo sapien
tgagaagaagtattgtcccatctgt

SEQ ID NO: 2796422 - DNA, 25 bp, Homo sapien
catctgttcttcagtatggccagtt

SEQ ID NO: 2796423 - DNA, 25 bp, Homo sapien
actttttcagaagtgtacatccggg

SEQ ID NO: 2796424 - DNA, 25 bp, Homo sapien
aactttttcagaagtgtacatccgg

SEQ ID NO: 2796425 - DNA, 25 bp, Homo sapien
tcagaagtgtacatccggggaagga

SEQ ID NO: 2796426 - DNA, 25 bp, Homo sapien
ttttcagaagtgtacatccggggaa

SEQ ID NO: 2796427 - DNA, 25 bp, Homo sapien
gaagaggcttcagatgattaactcc

SEQ ID NO: 2796428 - DNA, 25 bp, Homo sapien
gaaaggccttaggattctatttgcc

SEQ ID NO: 2796429 - DNA, 25 bp, Homo sapien
tgtcctgtgaacaatgtgaggcagc

SEQ ID NO: 2796430 - DNA, 25 bp, Homo sapien
tgtttaccacaatggtagctgggcc

SEQ ID NO: 2796431 - DNA, 25 bp, Homo sapien
gattcatttaattgtctggcccaca

SEQ ID NO: 2796432 - DNA, 25 bp, Homo sapien
tgcccaggcctaggtttgctgagtt

SEQ ID NO: 2796433 - DNA, 25 bp, Homo sapien
acctaaatcagttctgcccagatgg

SEQ ID NO: 2796434 - DNA, 25 bp, Homo sapien
ggctacgccaccacagaacagtgtt

SEQ ID NO: 2796435 - DNA, 25 bp, Homo sapien
gatacttctgtaactctagtgctag

SEQ ID NO: 2796436 - DNA, 25 bp, Homo sapien
tgaagactaacatgttaaagccaca

SEQ ID NO: 2796437 - DNA, 25 bp, Homo sapien
ttcataggtgttgccgtttccgtct

SEQ ID NO: 2796438 - DNA, 25 bp, Homo sapien
tcaactgttgttagagtcctggaaa

SEQ ID NO: 2796439 - DNA, 25 bp, Homo sapien
tatagttacaaagcatggtagagct

SEQ ID NO: 2796440 - DNA, 25 bp, Homo sapien
cttctaacccttggtaagaccagag

SEQ ID NO: 2796441 - DNA, 25 bp, Homo sapien
tttgatgctgtaatcagcaacaggc

SEQ ID NO: 2796442 - DNA, 25 bp, Homo sapien
agagggattaaaagaccccactatg

SEQ ID NO: 2796443 - DNA, 25 bp, Homo sapien
tgtgagctgatctggttccaagtga

SEQ ID NO: 2796444 - DNA, 25 bp, Homo sapien
ctgcagttgcttgaggaatggtttg

SEQ ID NO: 2796445 - DNA, 25 bp, Homo sapien
tctggaagctgaggtactactttca

SEQ ID NO: 2796446 - DNA, 25 bp, Homo sapien
tatggaatgaacacttgtgagagac

SEQ ID NO: 2796447 - DNA, 25 bp, Homo sapien
taaataggagatactcttgcaacag

SEQ ID NO: 2796448 - DNA, 25 bp, Homo sapien
cactgactaggacatgtcaatttct

SEQ ID NO: 2796449 - DNA, 25 bp, Homo sapien
taagaaattttagttgccagtcacc

SEQ ID NO: 2796450 - DNA, 25 bp, Homo sapien
gccagcagtgggatttgttatcaag

SEQ ID NO: 2796451 - DNA, 25 bp, Homo sapien
tgctacatgagcagctagtgagtga

SEQ ID NO: 2796452 - DNA, 25 bp, Homo sapien
gcaaagctgaagcactaactcgggt

SEQ ID NO: 2796453 - DNA, 25 bp, Homo sapien
ttcccaacagcagaaacgtagattt

SEQ ID NO: 2796454 - DNA, 25 bp, Homo sapien
aaaggcagaacaagtaccagtcatc

SEQ ID NO: 2796455 - DNA, 25 bp, Homo sapien
cccattatagctaaactgctgctaa

SEQ ID NO: 2796456 - DNA, 25 bp, Homo sapien
ctgtgatccgggctgtaatagttct

SEQ ID NO: 2796457 - DNA, 25 bp, Homo sapien
gtgactggatgatgtttttccacaa

SEQ ID NO: 2796458 - DNA, 25 bp, Homo sapien
gcagaggttacaactcttggcacat

SEQ ID NO: 2796459 - DNA, 25 bp, Homo sapien
aaattatgaagaatacacaggcact

SEQ ID NO: 2796460 - DNA, 25 bp, Homo sapien
tatccctttaacctgagtatgccaa

SEQ ID NO: 2796461 - DNA, 25 bp, Homo sapien
aatcacaagacgaaaagcaaaacaa

SEQ ID NO: 2796462 - DNA, 25 bp, Homo sapien
gaaaatccacagcaaaatctattga

SEQ ID NO: 2796463 - DNA, 25 bp, Homo sapien
tcctattcccaacaatgatggtttc

SEQ ID NO: 2796464 - DNA, 25 bp, Homo sapien
gaatgttcataggaagcctctgtga

SEQ ID NO: 2796465 - DNA, 25 bp, Homo sapien
ggacctatctccttttagctactgg

SEQ ID NO: 2796466 - DNA, 25 bp, Homo sapien
gaaagataaccaagccaggattgca

SEQ ID NO: 2796467 - DNA, 25 bp, Homo sapien
ttacaatttaatgctctagtcactt

SEQ ID NO: 2796468 - DNA, 25 bp, Homo sapien
ctactatgacagcactttcaggtat

SEQ ID NO: 2796469 - DNA, 25 bp, Homo sapien
gcgcccggctcctacataatttttg

SEQ ID NO: 2796470 - DNA, 25 bp, Homo sapien
ttaattatcactactatgacagcac

SEQ ID NO: 2796471 - DNA, 25 bp, Homo sapien
cagaagatgcggaagcagccctggt

SEQ ID NO: 2796472 - DNA, 25 bp, Homo sapien
tgatgtaactggtaagggcatcgga

SEQ ID NO: 2796473 - DNA, 25 bp, Homo sapien
tcatcgaagcagctgagggaacggc

SEQ ID NO: 2796474 - DNA, 25 bp, Homo sapien
gagcagaaacaggaacgtgaacaga

SEQ ID NO: 2796475 - DNA, 25 bp, Homo sapien
ttgaacaccaggaccatactcttcc

SEQ ID NO: 2796476 - DNA, 25 bp, Homo sapien
aacaccaggaccatactcttccttt

SEQ ID NO: 2796477 - DNA, 25 bp, Homo sapien
ccttgaacaccaggaccatactctt

SEQ ID NO: 2796478 - DNA, 25 bp, Homo sapien
tgaacaccaggaccatactcttcct

SEQ ID NO: 2796479 - DNA, 25 bp, Homo sapien
gacagatgcattaggaactttacat

SEQ ID NO: 2796480 - DNA, 25 bp, Homo sapien
cagatgcattaggaactttacatta

SEQ ID NO: 2796481 - DNA, 25 bp, Homo sapien
aagacagatgcattaggaactttac

SEQ ID NO: 2796482 - DNA, 25 bp, Homo sapien
tgcattaggaactttacattattaa

SEQ ID NO: 2796483 - DNA, 25 bp, Homo sapien
tcatgttgtgtaattagcagaagac

SEQ ID NO: 2796484 - DNA, 25 bp, Homo sapien
cacacaacttgctgatacttagaac

SEQ ID NO: 2796485 - DNA, 25 bp, Homo sapien
tggtagctctaccaacattattgct

SEQ ID NO: 2796486 - DNA, 25 bp, Homo sapien
tatcacaaagcagatccactgaatt

SEQ ID NO: 2796487 - DNA, 25 bp, Homo sapien
aatgcacatacacccctcatgaaag

SEQ ID NO: 2796488 - DNA, 25 bp, Homo sapien
ttttcatggaatcttcaaagtgctc

SEQ ID NO: 2796489 - DNA, 25 bp, Homo sapien
tagtcatggcttcaagatttaatgc

SEQ ID NO: 2796490 - DNA, 25 bp, Homo sapien
tacacccctcatgaaagcttttttc

SEQ ID NO: 2796491 - DNA, 25 bp, Homo sapien
aagttctctggtagtactggtcagc

SEQ ID NO: 2796492 - DNA, 25 bp, Homo sapien
actgcttttgcactacggaacgcca

SEQ ID NO: 2796493 - DNA, 25 bp, Homo sapien
cttcagctcttgcttgacaagctct

SEQ ID NO: 2796494 - DNA, 25 bp, Homo sapien
gcttcataatcattggaaatctgga

SEQ ID NO: 2796495 - DNA, 25 bp, Homo sapien
tctgacatggccgattcgccagtgg

SEQ ID NO: 2796496 - DNA, 25 bp, Homo sapien
ttctcatcaactctatcttttcctt

SEQ ID NO: 2796497 - DNA, 25 bp, Homo sapien
cttgcctatggcatgagacaagcta

SEQ ID NO: 2796498 - DNA, 25 bp, Homo sapien
ccgattcgccagtggaagaatgttc

SEQ ID NO: 2796499 - DNA, 25 bp, Homo sapien
agctccttcaattcattgatctgat

SEQ ID NO: 2796500 - DNA, 25 bp, Homo sapien
catttccattcggtgccagtcaata

SEQ ID NO: 2796501 - DNA, 25 bp, Homo sapien
ttttctcccaatggagatttcaaag

SEQ ID NO: 2796502 - DNA, 25 bp, Homo sapien
taagtctccatttacttagttcaga

SEQ ID NO: 2796503 - DNA, 25 bp, Homo sapien
ccacgaagtctcactgattactagc

SEQ ID NO: 2796504 - DNA, 25 bp, Homo sapien
tacgcccacgaagtctcactgatta

SEQ ID NO: 2796505 - DNA, 25 bp, Homo sapien
cacgaagtctcactgattactagca

SEQ ID NO: 2796506 - DNA, 25 bp, Homo sapien
gcccacgaagtctcactgattacta

SEQ ID NO: 2796507 - DNA, 25 bp, Homo sapien
tatgactagaatttgttgctggtga

SEQ ID NO: 2796508 - DNA, 25 bp, Homo sapien
gaaacaagaaaatcgctcacaagta

SEQ ID NO: 2796509 - DNA, 25 bp, Homo sapien
tcatgggcatctgtatgactagaat

SEQ ID NO: 2796510 - DNA, 25 bp, Homo sapien
ctaaaagatgtgaactgaaaaaatc

SEQ ID NO: 2796511 - DNA, 25 bp, Homo sapien
cttggcgataacactggtgatgact

SEQ ID NO: 2796512 - DNA, 25 bp, Homo sapien
gcttccttggcgataacactggtga

SEQ ID NO: 2796513 - DNA, 25 bp, Homo sapien
tccttggcgataacactggtgatga

SEQ ID NO: 2796514 - DNA, 25 bp, Homo sapien
gaaggcttccttggcgataacactg

SEQ ID NO: 2796515 - DNA, 25 bp, Homo sapien
ctaaatgatggcgtaacaggtggca

SEQ ID NO: 2796516 - DNA, 25 bp, Homo sapien
tgaaaatccttacactggtacgcaa

SEQ ID NO: 2796517 - DNA, 25 bp, Homo sapien
tggtacgcaaatgcctgaaagttgg

SEQ ID NO: 2796518 - DNA, 25 bp, Homo sapien
tagaggcattacttacgtggtgaca

SEQ ID NO: 2796519 - DNA, 25 bp, Homo sapien
aattattcctcttactacatagata

SEQ ID NO: 2796520 - DNA, 25 bp, Homo sapien
ttattcctcttactacatagataat

SEQ ID NO: 2796521 - DNA, 25 bp, Homo sapien
gaaattattcctcttactacataga

SEQ ID NO: 2796522 - DNA, 25 bp, Homo sapien
tattcctcttactacatagataata

SEQ ID NO: 2796523 - DNA, 25 bp, Homo sapien
ttgcagtttctcttacttcagagtt

SEQ ID NO: 2796524 - DNA, 25 bp, Homo sapien
attgcagtttctcttacttcagagt

SEQ ID NO: 2796525 - DNA, 25 bp, Homo sapien
tattgcagtttctcttacttcagag

SEQ ID NO: 2796526 - DNA, 25 bp, Homo sapien
gacactagagctatgacttagcaga

SEQ ID NO: 2796527 - DNA, 25 bp, Homo sapien
tataggctgctctgcccggctaatt

SEQ ID NO: 2796528 - DNA, 25 bp, Homo sapien
actgcaacaggccaaagacagagga

SEQ ID NO: 2796529 - DNA, 25 bp, Homo sapien
cagtgaaaaatccacgtctacagag

SEQ ID NO: 2796530 - DNA, 25 bp, Homo sapien
tgggttcaccttgtgataattattc

SEQ ID NO: 2796531 - DNA, 25 bp, Homo sapien
gtccacagatgggttcaccttgtga

SEQ ID NO: 2796532 - DNA, 25 bp, Homo sapien
cacagatgggttcaccttgtgataa

SEQ ID NO: 2796533 - DNA, 25 bp, Homo sapien
gttgctgacatggtccacagatggg

SEQ ID NO: 2796534 - DNA, 25 bp, Homo sapien
cacataaatggttgagaagaatcac

SEQ ID NO: 2796535 - DNA, 25 bp, Homo sapien
tgcagttgccatagcattgcttcaa

SEQ ID NO: 2796536 - DNA, 25 bp, Homo sapien
ggcattttcacaatcctgtcagtat

SEQ ID NO: 2796537 - DNA, 25 bp, Homo sapien
caagctgtcacacgagagtcaggaa

SEQ ID NO: 2796538 - DNA, 25 bp, Homo sapien
ttaggatgagatgactgtgaagcac

SEQ ID NO: 2796539 - DNA, 25 bp, Homo sapien
attgtagaaattctgacatctggca

SEQ ID NO: 2796540 - DNA, 25 bp, Homo sapien
catctggcaccaattctcccttagg

SEQ ID NO: 2796541 - DNA, 25 bp, Homo sapien
tgaagaatatcatgaattgtagaaa

SEQ ID NO: 2796542 - DNA, 25 bp, Homo sapien
taagagaggccaataatcaataatg

SEQ ID NO: 2796543 - DNA, 25 bp, Homo sapien
taattaccataatagagtcccatgc

SEQ ID NO: 2796544 - DNA, 25 bp, Homo sapien
agttcctcgagtgcttcttgtgtga

SEQ ID NO: 2796545 - DNA, 25 bp, Homo sapien
ttatgattaacagtttgaagagggc

SEQ ID NO: 2796546 - DNA, 25 bp, Homo sapien
gctaattttctgtgtggctccagtt

SEQ ID NO: 2796547 - DNA, 25 bp, Homo sapien
gggtccatgctaattttctgtgtgg

SEQ ID NO: 2796548 - DNA, 25 bp, Homo sapien
ccatgctaattttctgtgtggctcc

SEQ ID NO: 2796549 - DNA, 25 bp, Homo sapien
ttctgtgtggctccagttttagtat

SEQ ID NO: 2796550 - DNA, 25 bp, Homo sapien
ctactccagaaatctaaatccatat

SEQ ID NO: 2796551 - DNA, 25 bp, Homo sapien
tactccagaaatctaaatccatatt

SEQ ID NO: 2796552 - DNA, 25 bp, Homo sapien
tttatctgtcaatgtccaggtcctg

SEQ ID NO: 2796553 - DNA, 25 bp, Homo sapien
ccaggtcctgggcagcagattgtac

SEQ ID NO: 2796554 - DNA, 25 bp, Homo sapien
caggtcctgggcagcagattgtact

SEQ ID NO: 2796555 - DNA, 25 bp, Homo sapien
atctgtcaatgtccaggtcctgggc

SEQ ID NO: 2796556 - DNA, 25 bp, Homo sapien
gcctttgtacagagtgtatgaagag

SEQ ID NO: 2796557 - DNA, 25 bp, Homo sapien
tacagagtgtatgaagagttcatca

SEQ ID NO: 2796558 - DNA, 25 bp, Homo sapien
aagcctttgtacagagtgtatgaag

SEQ ID NO: 2796559 - DNA, 25 bp, Homo sapien
gagtgtatgaagagttcatcaatat

SEQ ID NO: 2796560 - DNA, 25 bp, Homo sapien
gaagtgagtatttctcctcatctga

SEQ ID NO: 2796561 - DNA, 25 bp, Homo sapien
ctgcctcgactggagtcattttgca

SEQ ID NO: 2796562 - DNA, 25 bp, Homo sapien
cattttgcacaactggaagtgagta

SEQ ID NO: 2796563 - DNA, 25 bp, Homo sapien
gagtcattttgcacaactggaagtg

SEQ ID NO: 2796564 - DNA, 25 bp, Homo sapien
tgagtgccatatcagatgagctggg

SEQ ID NO: 2796565 - DNA, 25 bp, Homo sapien
actagggtaaagctgcaagtatgca

SEQ ID NO: 2796566 - DNA, 25 bp, Homo sapien
tgtgaggatgcctctgaggcactag

SEQ ID NO: 2796567 - DNA, 25 bp, Homo sapien
gaggaaggacaatgagtgccatatc

SEQ ID NO: 2796568 - DNA, 25 bp, Homo sapien
tgagaagagggttaaagccagaacc

SEQ ID NO: 2796569 - DNA, 25 bp, Homo sapien
tagagttaaggactacgactgtgaa

SEQ ID NO: 2796570 - DNA, 25 bp, Homo sapien
ggaccatagccctaatagagttaag

SEQ ID NO: 2796571 - DNA, 25 bp, Homo sapien
gaagatctttcgctttaaatatgcg

SEQ ID NO: 2796572 - DNA, 25 bp, Homo sapien
cagcatccctcactcctgctcactt

SEQ ID NO: 2796573 - DNA, 25 bp, Homo sapien
gcatccctcactcctgctcacttcc

SEQ ID NO: 2796574 - DNA, 25 bp, Homo sapien
atccctcactcctgctcacttcctc

SEQ ID NO: 2796575 - DNA, 25 bp, Homo sapien
tcagcatccctcactcctgctcact

SEQ ID NO: 2796576 - DNA, 25 bp, Homo sapien
cactactttcgccagggatgcaggg

SEQ ID NO: 2796577 - DNA, 25 bp, Homo sapien
gggatgcagggacgcaggatctgcc

SEQ ID NO: 2796578 - DNA, 25 bp, Homo sapien
aggatctgcccggagcgctgctacc

SEQ ID NO: 2796579 - DNA, 25 bp, Homo sapien
ccctccactactttcgccagggatg

SEQ ID NO: 2796580 - DNA, 25 bp, Homo sapien
tcagcaagcacaaccgctacctaga

SEQ ID NO: 2796581 - DNA, 25 bp, Homo sapien
ggcaacctgacagtttcaaactgca

SEQ ID NO: 2796582 - DNA, 25 bp, Homo sapien
tcttagccgcgtcgcagctgcagtg

SEQ ID NO: 2796583 - DNA, 25 bp, Homo sapien
ctgcagggaggaattaaggaccgcc

SEQ ID NO: 2796584 - DNA, 25 bp, Homo sapien
aaaacatatactcagagctggcaag

SEQ ID NO: 2796585 - DNA, 25 bp, Homo sapien
gataaccatactttgccagtcagtg

SEQ ID NO: 2796586 - DNA, 25 bp, Homo sapien
tttgcacctgcaatagaaaggcttc

SEQ ID NO: 2796587 - DNA, 25 bp, Homo sapien
tatgacacaactggcaacaaacact

SEQ ID NO: 2796588 - DNA, 25 bp, Homo sapien
cacggataccaaagtagggagcttg

SEQ ID NO: 2796589 - DNA, 25 bp, Homo sapien
tgataataccccacactgacacgtt

SEQ ID NO: 2796590 - DNA, 25 bp, Homo sapien
cagttactgaggcttctagattccc

SEQ ID NO: 2796591 - DNA, 25 bp, Homo sapien
gatgttagcattcttgggatctgga

SEQ ID NO: 2796592 - DNA, 25 bp, Homo sapien
ctagtccttgcatagcttatctgcg

SEQ ID NO: 2796593 - DNA, 25 bp, Homo sapien
tctgcggtgatctgcttgctggcat

SEQ ID NO: 2796594 - DNA, 25 bp, Homo sapien
ggtgatctgcttgctggcatgctgc

SEQ ID NO: 2796595 - DNA, 25 bp, Homo sapien
cttatctgcggtgatctgcttgctg

SEQ ID NO: 2796596 - DNA, 25 bp, Homo sapien
cttgacccacttgatgggcactgct

SEQ ID NO: 2796597 - DNA, 25 bp, Homo sapien
agcttgacccacttgatgggcactg

SEQ ID NO: 2796598 - DNA, 25 bp, Homo sapien
agccacgccacctgccagaaagtcc

SEQ ID NO: 2796599 - DNA, 25 bp, Homo sapien
tcttggatatggccgcagccacgcc

SEQ ID NO: 2796600 - DNA, 25 bp, Homo sapien
gctggcaactgtgagatgggactgg

SEQ ID NO: 2796601 - DNA, 25 bp, Homo sapien
ctggcaactgtgagatgggactggg

SEQ ID NO: 2796602 - DNA, 25 bp, Homo sapien
ggcaactgtgagatgggactgggct

SEQ ID NO: 2796603 - DNA, 25 bp, Homo sapien
tggcaactgtgagatgggactgggc

SEQ ID NO: 2796604 - DNA, 25 bp, Homo sapien
ctctagggatcatgtgtggtaatat

SEQ ID NO: 2796605 - DNA, 25 bp, Homo sapien
tagggatcatgtgtggtaatatcaa

SEQ ID NO: 2796606 - DNA, 25 bp, Homo sapien
ggaacatccgttgtgagactacttt

SEQ ID NO: 2796607 - DNA, 25 bp, Homo sapien
tccattaaagaggatggaacatccg

SEQ ID NO: 2796608 - DNA, 25 bp, Homo sapien
tcctcccagttcttgctaaatcagt

SEQ ID NO: 2796609 - DNA, 25 bp, Homo sapien
ggaactgattctgtgcaatctcctc

SEQ ID NO: 2796610 - DNA, 25 bp, Homo sapien
tcctttcacatatccctgtatctct

SEQ ID NO: 2796611 - DNA, 25 bp, Homo sapien
ctaaatcagtcagcaaaggtgggag

SEQ ID NO: 2796612 - DNA, 25 bp, Homo sapien
aagtcaaaggtggagcatggaatgt

SEQ ID NO: 2796613 - DNA, 25 bp, Homo sapien
gaagtcaaaggtggagcatggaatg

SEQ ID NO: 2796614 - DNA, 25 bp, Homo sapien
tggctgtggggtgaagtcaaaggtg

SEQ ID NO: 2796615 - DNA, 25 bp, Homo sapien
gccatgcagaccatgaatgccattg

SEQ ID NO: 2796616 - DNA, 25 bp, Homo sapien
ccatgcagaccatgaatgccattgg

SEQ ID NO: 2796617 - DNA, 25 bp, Homo sapien
ttttacatcgtggtcttttcatcaa

SEQ ID NO: 2796618 - DNA, 25 bp, Homo sapien
cacttcaccttttttacatcgtggt

SEQ ID NO: 2796619 - DNA, 25 bp, Homo sapien
gcacttcaccttttttacatcgtgg

SEQ ID NO: 2796620 - DNA, 25 bp, Homo sapien
agcacttcaccttttttacatcgtg

SEQ ID NO: 2796621 - DNA, 25 bp, Homo sapien
actcttctaatccacgagcaaggaa

SEQ ID NO: 2796622 - DNA, 25 bp, Homo sapien
ctcttctaatccacgagcaaggaat

SEQ ID NO: 2796623 - DNA, 25 bp, Homo sapien
cactcttctaatccacgagcaagga

SEQ ID NO: 2796624 - DNA, 25 bp, Homo sapien
ggagcttggctattttttgctaagc

SEQ ID NO: 2796625 - DNA, 25 bp, Homo sapien
tggtctaggacttggctcagtaaag

SEQ ID NO: 2796626 - DNA, 25 bp, Homo sapien
taaattcacaatcttggtctaggac

SEQ ID NO: 2796627 - DNA, 25 bp, Homo sapien
ttggctcagtaaagttagactctca

SEQ ID NO: 2796628 - DNA, 25 bp, Homo sapien
cccaccgagttgttctatcagaaaa

SEQ ID NO: 2796629 - DNA, 25 bp, Homo sapien
tcccaccgagttgttctatcagaaa

SEQ ID NO: 2796630 - DNA, 25 bp, Homo sapien
caccgagttgttctatcagaaaaca

SEQ ID NO: 2796631 - DNA, 25 bp, Homo sapien
ctgacagttctcatgcagttgtaaa

SEQ ID NO: 2796632 - DNA, 25 bp, Homo sapien
gagattacatcgaggatgatgagaa

SEQ ID NO: 2796633 - DNA, 25 bp, Homo sapien
ctggaggatgcaagagattacatcg

SEQ ID NO: 2796634 - DNA, 25 bp, Homo sapien
tgcaagagattacatcgaggatgat

SEQ ID NO: 2796635 - DNA, 25 bp, Homo sapien
ttacatcgaggatgatgagaacaat

SEQ ID NO: 2796636 - DNA, 25 bp, Homo sapien
gatcaacttatccacggtgacccac

SEQ ID NO: 2796637 - DNA, 25 bp, Homo sapien
accccagagtggaggatcaacttat

SEQ ID NO: 2796638 - DNA, 25 bp, Homo sapien
tggaggatcaacttatccacggtga

SEQ ID NO: 2796639 - DNA, 25 bp, Homo sapien
ggcaatgagcagatttgccagtggc

SEQ ID NO: 2796640 - DNA, 25 bp, Homo sapien
attgcaaagttagccaccgtccaga

SEQ ID NO: 2796641 - DNA, 25 bp, Homo sapien
caagacgttgtaggcaagcagctgc

SEQ ID NO: 2796642 - DNA, 25 bp, Homo sapien
cacgggaggcaagacgttgtaggca

SEQ ID NO: 2796643 - DNA, 25 bp, Homo sapien
agacgttgtaggcaagcagctgctg

SEQ ID NO: 2796644 - DNA, 25 bp, Homo sapien
aggcaagacgttgtaggcaagcagc

SEQ ID NO: 2796645 - DNA, 25 bp, Homo sapien
cagcacgttcagcatgcccgcgtca

SEQ ID NO: 2796646 - DNA, 25 bp, Homo sapien
aggacttgttgtgctgcaggaactg

SEQ ID NO: 2796647 - DNA, 25 bp, Homo sapien
tggaggacttgttgtgctgcaggaa

SEQ ID NO: 2796648 - DNA, 25 bp, Homo sapien
gcagcacgttcagcatgcccgcgtc

SEQ ID NO: 2796649 - DNA, 25 bp, Homo sapien
cctgtgataatgttccccatggtac

SEQ ID NO: 2796650 - DNA, 25 bp, Homo sapien
gcctgtgataatgttccccatggta

SEQ ID NO: 2796651 - DNA, 25 bp, Homo sapien
tgcctgtgataatgttccccatggt

SEQ ID NO: 2796652 - DNA, 25 bp, Homo sapien
gtgcctgtgataatgttccccatgg

SEQ ID NO: 2796653 - DNA, 25 bp, Homo sapien
gggagagaaggggtccagacattga

SEQ ID NO: 2796654 - DNA, 25 bp, Homo sapien
gagggctactagcctgagcaggacc

SEQ ID NO: 2796655 - DNA, 25 bp, Homo sapien
gagatggtcatgagggctactagcc

SEQ ID NO: 2796656 - DNA, 25 bp, Homo sapien
ctgagatggtcatgagggctactag

SEQ ID NO: 2796657 - DNA, 25 bp, Homo sapien
gggctactagcctgagcaggacccc

SEQ ID NO: 2796658 - DNA, 25 bp, Homo sapien
agtgagagggcacgcagcatctgct

SEQ ID NO: 2796659 - DNA, 25 bp, Homo sapien
tctgagagaacctcgctgtggtggc

SEQ ID NO: 2796660 - DNA, 25 bp, Homo sapien
gccgatgagctctttgcagccgtag

SEQ ID NO: 2796661 - DNA, 25 bp, Homo sapien
taggttcgaccaggtccacgtgatg

SEQ ID NO: 2796662 - DNA, 25 bp, Homo sapien
atctgctcggaagtccctgaagcaa

SEQ ID NO: 2796663 - DNA, 25 bp, Homo sapien
gctcaaatctgctcggaagtccctg

SEQ ID NO: 2796664 - DNA, 25 bp, Homo sapien
cacggctcaaatctgctcggaagtc

SEQ ID NO: 2796665 - DNA, 25 bp, Homo sapien
ttctaccacggctcaaatctgctcg

SEQ ID NO: 2796666 - DNA, 25 bp, Homo sapien
gggtggcctggaaacgtgggactga

SEQ ID NO: 2796667 - DNA, 25 bp, Homo sapien
tggaaacgtgggactgaatctgagc

SEQ ID NO: 2796668 - DNA, 25 bp, Homo sapien
cgtgggactgaatctgagctattca

SEQ ID NO: 2796669 - DNA, 25 bp, Homo sapien
tggcctggaaacgtgggactgaatc

SEQ ID NO: 2796670 - DNA, 25 bp, Homo sapien
ctaataaccgtaccaaagatataat

SEQ ID NO: 2796671 - DNA, 25 bp, Homo sapien
taataaccgtaccaaagatataatg

SEQ ID NO: 2796672 - DNA, 25 bp, Homo sapien
taaccgtaccaaagatataatggat

SEQ ID NO: 2796673 - DNA, 25 bp, Homo sapien
aataaccgtaccaaagatataatgg

SEQ ID NO: 2796674 - DNA, 25 bp, Homo sapien
catgctccctgggtgtgagcatcaa

SEQ ID NO: 2796675 - DNA, 25 bp, Homo sapien
cctggtcagccagttgctcctcgta

SEQ ID NO: 2796676 - DNA, 25 bp, Homo sapien
gtcagccagttgctcctcgtagtct

SEQ ID NO: 2796677 - DNA, 25 bp, Homo sapien
tggtcagccagttgctcctcgtagt

SEQ ID NO: 2796678 - DNA, 25 bp, Homo sapien
cagccagttgctcctcgtagtcttc

SEQ ID NO: 2796679 - DNA, 25 bp, Homo sapien
cactgctgtagatttcctgcagggt

SEQ ID NO: 2796680 - DNA, 25 bp, Homo sapien
cattattccctacgatggccttcag

SEQ ID NO: 2796681 - DNA, 25 bp, Homo sapien
catgactatcccactcactgctgta

SEQ ID NO: 2796682 - DNA, 25 bp, Homo sapien
tgatactctttttgaactttcatgc

SEQ ID NO: 2796683 - DNA, 25 bp, Homo sapien
gaggtccttgtatagcttgtggtct

SEQ ID NO: 2796684 - DNA, 25 bp, Homo sapien
tcttgaggtccttgtatagcttgtg

SEQ ID NO: 2796685 - DNA, 25 bp, Homo sapien
cacttcagctgcactaaggaagttc

SEQ ID NO: 2796686 - DNA, 25 bp, Homo sapien
tcagctgcactaaggaagttcttga

SEQ ID NO: 2796687 - DNA, 25 bp, Homo sapien
gggaaatgagcaagctgaactgcaa

SEQ ID NO: 2796688 - DNA, 25 bp, Homo sapien
gctgaactgcaatctctatgagatg

SEQ ID NO: 2796689 - DNA, 25 bp, Homo sapien
tcatgttggctgctatgtgaccatc

SEQ ID NO: 2796690 - DNA, 25 bp, Homo sapien
tttgagggatgtcttctacagggaa

SEQ ID NO: 2796691 - DNA, 25 bp, Homo sapien
ccatggctggctggattggatcctc

SEQ ID NO: 2796692 - DNA, 25 bp, Homo sapien
ttcagtcaccaatcaaataatcagg

SEQ ID NO: 2796693 - DNA, 25 bp, Homo sapien
tcctctgatagtgcatgtggacctg

SEQ ID NO: 2796694 - DNA, 25 bp, Homo sapien
tcaccaatcaaataatcaggcagga

SEQ ID NO: 2796695 - DNA, 25 bp, Homo sapien
cactgccggtgtggaaccactcaat

SEQ ID NO: 2796696 - DNA, 25 bp, Homo sapien
ggcactgccggtgtggaaccactca

SEQ ID NO: 2796697 - DNA, 25 bp, Homo sapien
actgccggtgtggaaccactcaatc

SEQ ID NO: 2796698 - DNA, 25 bp, Homo sapien
tgagggcactgccggtgtggaacca

SEQ ID NO: 2796699 - DNA, 25 bp, Homo sapien
tattgtaatgggctgggtcagcgaa

SEQ ID NO: 2796700 - DNA, 25 bp, Homo sapien
cttgccaggcgagacgttcttcagg

SEQ ID NO: 2796701 - DNA, 25 bp, Homo sapien
agggacttgccaggcgagacgttct

SEQ ID NO: 2796702 - DNA, 25 bp, Homo sapien
gaatcttattgtaatgggctgggtc

SEQ ID NO: 2796703 - DNA, 25 bp, Homo sapien
tgtgtgctccccgtgcgagtcctcg

SEQ ID NO: 2796704 - DNA, 25 bp, Homo sapien
cgtgcgagtcctcgcggtagttctc

SEQ ID NO: 2796705 - DNA, 25 bp, Homo sapien
agtgctgtgtgctccccgtgcgagt

SEQ ID NO: 2796706 - DNA, 25 bp, Homo sapien
gtcctcgcggtagttctcatcccta

SEQ ID NO: 2796707 - DNA, 25 bp, Homo sapien
ggtgagggcattgtgcacggagttg

SEQ ID NO: 2796708 - DNA, 25 bp, Homo sapien
gggtgagggcattgtgcacggagtt

SEQ ID NO: 2796709 - DNA, 25 bp, Homo sapien
aagttgttggagatgtactccaagt

SEQ ID NO: 2796710 - DNA, 25 bp, Homo sapien
tggagatgtactccaagtgcccgtg

SEQ ID NO: 2796711 - DNA, 25 bp, Homo sapien
tcttggggtttgtgtcattgcggcc

SEQ ID NO: 2796712 - DNA, 25 bp, Homo sapien
cccataaggcagtcggtctctgggt

SEQ ID NO: 2796713 - DNA, 25 bp, Homo sapien
gaagctcatattgcgtctggagcct

SEQ ID NO: 2796714 - DNA, 25 bp, Homo sapien
aacttagggttcttgcaatggccag

SEQ ID NO: 2796715 - DNA, 25 bp, Homo sapien
cactgtatctagcttcaggaaaggc

SEQ ID NO: 2796716 - DNA, 25 bp, Homo sapien
cctttggggataccctctcactgta

SEQ ID NO: 2796717 - DNA, 25 bp, Homo sapien
ccctacactttcatagccctttggg

SEQ ID NO: 2796718 - DNA, 25 bp, Homo sapien
tttgctttcaccactgtatctagct

SEQ ID NO: 2796719 - DNA, 25 bp, Homo sapien
tttatcttctgtcagtccaaaggta

SEQ ID NO: 2796720 - DNA, 25 bp, Homo sapien
catttatcttctgtcagtccaaagg

SEQ ID NO: 2796721 - DNA, 25 bp, Homo sapien
atcttctgtcagtccaaaggtagaa

SEQ ID NO: 2796722 - DNA, 25 bp, Homo sapien
cacatttatcttctgtcagtccaaa

SEQ ID NO: 2796723 - DNA, 25 bp, Homo sapien
gtttgtcacaacaagaggctttact

SEQ ID NO: 2796724 - DNA, 25 bp, Homo sapien
agtttgtcacaacaagaggctttac

SEQ ID NO: 2796725 - DNA, 25 bp, Homo sapien
tttgtcacaacaagaggctttactc

SEQ ID NO: 2796726 - DNA, 25 bp, Homo sapien
ggaatgaccgttcttctcatttgtc

SEQ ID NO: 2796727 - DNA, 25 bp, Homo sapien
cactacccatgagtcctcagagaga

SEQ ID NO: 2796728 - DNA, 25 bp, Homo sapien
ataacagtcactacccatgagtcct

SEQ ID NO: 2796729 - DNA, 25 bp, Homo sapien
tcatcaaatggaatgaccgttcttc

SEQ ID NO: 2796730 - DNA, 25 bp, Homo sapien
tgggatattccccacgtgatttttc

SEQ ID NO: 2796731 - DNA, 25 bp, Homo sapien
ctgggatattccccacgtgattttt

SEQ ID NO: 2796732 - DNA, 25 bp, Homo sapien
tcagggaaggggctactgcctaaat

SEQ ID NO: 2796733 - DNA, 25 bp, Homo sapien
acagagacagcgtctgtttcctcaa

SEQ ID NO: 2796734 - DNA, 25 bp, Homo sapien
gcctaaatatctataacctctcagt

SEQ ID NO: 2796735 - DNA, 25 bp, Homo sapien
cctctcagtggctcataatgattga

SEQ ID NO: 2796736 - DNA, 25 bp, Homo sapien
tcagctcttagctttaccttcagca

SEQ ID NO: 2796737 - DNA, 25 bp, Homo sapien
ttcatcagctcttagctttaccttc

SEQ ID NO: 2796738 - DNA, 25 bp, Homo sapien
tgacatttgccctgggcaatattca

SEQ ID NO: 2796739 - DNA, 25 bp, Homo sapien
gccctgggcaatattcattgtctct

SEQ ID NO: 2796740 - DNA, 25 bp, Homo sapien
ttcaggatcatcaggcttagcctct

SEQ ID NO: 2796741 - DNA, 25 bp, Homo sapien
cacttcaggatcatcaggcttagcc

SEQ ID NO: 2796742 - DNA, 25 bp, Homo sapien
catgctgctccgtattttcttttcc

SEQ ID NO: 2796743 - DNA, 25 bp, Homo sapien
ctgacccatgctgctccgtattttc

SEQ ID NO: 2796744 - DNA, 25 bp, Homo sapien
cctggagattgttcacagaaagagc

SEQ ID NO: 2796745 - DNA, 25 bp, Homo sapien
cagtctaattgatgtactcaggcaa

SEQ ID NO: 2796746 - DNA, 25 bp, Homo sapien
actagagagctagacgtaggaagcc

SEQ ID NO: 2796747 - DNA, 25 bp, Homo sapien
taatggttgatccttaccctctgga

SEQ ID NO: 2796748 - DNA, 25 bp, Homo sapien
aactgatcatcatttggtccctggc

SEQ ID NO: 2796749 - DNA, 25 bp, Homo sapien
cagccagtgtcagtgggcatgttgc

SEQ ID NO: 2796750 - DNA, 25 bp, Homo sapien
cacagtttggtgaagggattgcatc

SEQ ID NO: 2796751 - DNA, 25 bp, Homo sapien
tgtcacacggcaatgctggctgtcg

SEQ ID NO: 2796752 - DNA, 25 bp, Homo sapien
aggcccgatgtttgcccaggctcct

SEQ ID NO: 2796753 - DNA, 25 bp, Homo sapien
tcttgtctgtccctgagatgacttt

SEQ ID NO: 2796754 - DNA, 25 bp, Homo sapien
catacatccctgcaagtgactcaca

SEQ ID NO: 2796755 - DNA, 25 bp, Homo sapien
ctgtccctgagatgactttcttgtt

SEQ ID NO: 2796756 - DNA, 25 bp, Homo sapien
agtaattttcatacatccctgcaag

SEQ ID NO: 2796757 - DNA, 25 bp, Homo sapien
cggagagatgtgtgtgtttgagttc

SEQ ID NO: 2796758 - DNA, 25 bp, Homo sapien
agagatgtgtgtgtttgagttccaa

SEQ ID NO: 2796759 - DNA, 25 bp, Homo sapien
cacattcgcggagagatgtgtgtgt

SEQ ID NO: 2796760 - DNA, 25 bp, Homo sapien
acacattcgcggagagatgtgtgtg

SEQ ID NO: 2796761 - DNA, 25 bp, Homo sapien
ggacgtgaggatgccctacttcccg

SEQ ID NO: 2796762 - DNA, 25 bp, Homo sapien
acttcccgcagcatccggatggcag

SEQ ID NO: 2796763 - DNA, 25 bp, Homo sapien
actccacttgggttccgtgagcgcg

SEQ ID NO: 2796764 - DNA, 25 bp, Homo sapien
ccaccacaggagcaacgatttcggg

SEQ ID NO: 2796765 - DNA, 25 bp, Homo sapien
ggcctcacgggagcgagtttctctc

SEQ ID NO: 2796766 - DNA, 25 bp, Homo sapien
gtggcctcacgggagcgagtttctc

SEQ ID NO: 2796767 - DNA, 25 bp, Homo sapien
cctggcccaccgctttggaacagtg

SEQ ID NO: 2796768 - DNA, 25 bp, Homo sapien
tttggaacagtgaagctcgagttgg

SEQ ID NO: 2796769 - DNA, 25 bp, Homo sapien
ccgcgcgccgtgactccctgcgcac

SEQ ID NO: 2796770 - DNA, 25 bp, Homo sapien
agcagcgcctcagcaccgcgacttg

SEQ ID NO: 2796771 - DNA, 25 bp, Homo sapien
cgcgacttgccggagcaccgcgagt

SEQ ID NO: 2796772 - DNA, 25 bp, Homo sapien
ctcagcaccgcgacttgccggagca

SEQ ID NO: 2796773 - DNA, 25 bp, Homo sapien
cgcagcgtgcaagccgggagccact

SEQ ID NO: 2796774 - DNA, 25 bp, Homo sapien
aggaccgcagcgtgcaagccgggag

SEQ ID NO: 2796775 - DNA, 25 bp, Homo sapien
gaggaggaccgcagcgtgcaagccg

SEQ ID NO: 2796776 - DNA, 25 bp, Homo sapien
accgcagcgtgcaagccgggagcca

SEQ ID NO: 2796777 - DNA, 25 bp, Homo sapien
tgctgacaccactcagggcaagggt

SEQ ID NO: 2796778 - DNA, 25 bp, Homo sapien
gaagtttttgcagcctttcggaagc

SEQ ID NO: 2796779 - DNA, 25 bp, Homo sapien
ggactgggtcgcactttatctggga

SEQ ID NO: 2796780 - DNA, 25 bp, Homo sapien
gaccggcagggataggcagattcaa

SEQ ID NO: 2796781 - DNA, 25 bp, Homo sapien
ctgccttaggctcaacttttcggcg

SEQ ID NO: 2796782 - DNA, 25 bp, Homo sapien
agacgtgcaggtggcgggagagcag

SEQ ID NO: 2796783 - DNA, 25 bp, Homo sapien
gatccctctgcagacgtgcaggtgg

SEQ ID NO: 2796784 - DNA, 25 bp, Homo sapien
tgccttaggctcaacttttcggcgg

SEQ ID NO: 2796785 - DNA, 25 bp, Homo sapien
catgaattttcaaactctcccacat

SEQ ID NO: 2796786 - DNA, 25 bp, Homo sapien
agaaacaccatgaattttcaaactc

SEQ ID NO: 2796787 - DNA, 25 bp, Homo sapien
ctgagagagcctgaaagaaacacca

SEQ ID NO: 2796788 - DNA, 25 bp, Homo sapien
gagagagcctgaaagaaacaccatg

SEQ ID NO: 2796789 - DNA, 25 bp, Homo sapien
gagagcaggggagcccgcggggctg

SEQ ID NO: 2796790 - DNA, 25 bp, Homo sapien
gctggagagcaggggagcccgcggg

SEQ ID NO: 2796791 - DNA, 25 bp, Homo sapien
tggagagcaggggagcccgcggggc

SEQ ID NO: 2796792 - DNA, 25 bp, Homo sapien
agcaagagagggctggagagcaggg

SEQ ID NO: 2796793 - DNA, 25 bp, Homo sapien
cctgggttctagaactgggaagact

SEQ ID NO: 2796794 - DNA, 25 bp, Homo sapien
gactgcggaatacggggatgaactt

SEQ ID NO: 2796795 - DNA, 25 bp, Homo sapien
accccacggcagatgaacaatcggg

SEQ ID NO: 2796796 - DNA, 25 bp, Homo sapien
ggcagatgaacaatcgggagcagat

SEQ ID NO: 2796797 - DNA, 25 bp, Homo sapien
gaccgggatgccgtgatggtctcct

SEQ ID NO: 2796798 - DNA, 25 bp, Homo sapien
gtgatggtctcctctcccgctgaac

SEQ ID NO: 2796799 - DNA, 25 bp, Homo sapien
ggagatgaggcgtcttttaaggctc

SEQ ID NO: 2796800 - DNA, 25 bp, Homo sapien
aggctcatgagagccttaaggagat

SEQ ID NO: 2796801 - DNA, 25 bp, Homo sapien
ggttctcgtctgaccccaattgtgg

SEQ ID NO: 2796802 - DNA, 25 bp, Homo sapien
cacttctgtggttctcgtctgaccc

SEQ ID NO: 2796803 - DNA, 25 bp, Homo sapien
gcattccccgcctgcttcaaagatt

SEQ ID NO: 2796804 - DNA, 25 bp, Homo sapien
caattgtggcattccccgcctgctt

SEQ ID NO: 2796805 - DNA, 25 bp, Homo sapien
gatgctgccctgtgctgttgatgtc

SEQ ID NO: 2796806 - DNA, 25 bp, Homo sapien
ggtccctgcagcaacatcaccacag

SEQ ID NO: 2796807 - DNA, 25 bp, Homo sapien
ccagtgttgtggaatctgctgatgc

SEQ ID NO: 2796808 - DNA, 25 bp, Homo sapien
cccagaatgccttggttccagtgtt

SEQ ID NO: 2796809 - DNA, 25 bp, Homo sapien
tttagagaatctgtgaatgtatgag

SEQ ID NO: 2796810 - DNA, 25 bp, Homo sapien
ggagagtttagagaatctgtgaatg

SEQ ID NO: 2796811 - DNA, 25 bp, Homo sapien
tagagaatctgtgaatgtatgaggc

SEQ ID NO: 2796812 - DNA, 25 bp, Homo sapien
ctggagagtttagagaatctgtgaa

SEQ ID NO: 2796813 - DNA, 25 bp, Homo sapien
ggtcttccactcaagtactaatcag

SEQ ID NO: 2796814 - DNA, 25 bp, Homo sapien
gtggtcttccactcaagtactaatc

SEQ ID NO: 2796815 - DNA, 25 bp, Homo sapien
gcctacagctcatgttcccaggtgg

SEQ ID NO: 2796816 - DNA, 25 bp, Homo sapien
aagcctacagctcatgttcccaggt

SEQ ID NO: 2796817 - DNA, 25 bp, Homo sapien
ctggagtattgataaaggcatcaca

SEQ ID NO: 2796818 - DNA, 25 bp, Homo sapien
gctggagtattgataaaggcatcac

SEQ ID NO: 2796819 - DNA, 25 bp, Homo sapien
tcttcatccgagctgaatttctcat

SEQ ID NO: 2796820 - DNA, 25 bp, Homo sapien
tccttctcttcatccgagctgaatt

SEQ ID NO: 2796821 - DNA, 25 bp, Homo sapien
tctcttcatccgagctgaatttctc

SEQ ID NO: 2796822 - DNA, 25 bp, Homo sapien
cttcatccgagctgaatttctcatc

SEQ ID NO: 2796823 - DNA, 25 bp, Homo sapien
gtctatcagccctgtgcaacagagt

SEQ ID NO: 2796824 - DNA, 25 bp, Homo sapien
acaagttgtctatcagccctgtgca

SEQ ID NO: 2796825 - DNA, 25 bp, Homo sapien
tgtctatcagccctgtgcaacagag

SEQ ID NO: 2796826 - DNA, 25 bp, Homo sapien
agttgtctatcagccctgtgcaaca

SEQ ID NO: 2796827 - DNA, 25 bp, Homo sapien
tgctggcaagggctgtacctttagt

SEQ ID NO: 2796828 - DNA, 25 bp, Homo sapien
taaacggaagatacgttgctggcaa

SEQ ID NO: 2796829 - DNA, 25 bp, Homo sapien
tataattgtctgtttgtctgctggg

SEQ ID NO: 2796830 - DNA, 25 bp, Homo sapien
ggtttacacccttctgtggagcagg

SEQ ID NO: 2796831 - DNA, 25 bp, Homo sapien
atatggagaggaaaagtgagctagg

SEQ ID NO: 2796832 - DNA, 25 bp, Homo sapien
cgagatgggtccagatctacagaag

SEQ ID NO: 2796833 - DNA, 25 bp, Homo sapien
ccgagatgggtccagatctacagaa

SEQ ID NO: 2796834 - DNA, 25 bp, Homo sapien
aggatatggagaggaaaagtgagct

SEQ ID NO: 2796835 - DNA, 25 bp, Homo sapien
gatgatcaactttagacagtgggga

SEQ ID NO: 2796836 - DNA, 25 bp, Homo sapien
acttgatgatcaactttagacagtg

SEQ ID NO: 2796837 - DNA, 25 bp, Homo sapien
ttgatgatcaactttagacagtggg

SEQ ID NO: 2796838 - DNA, 25 bp, Homo sapien
tgatcaactttagacagtggggaac

SEQ ID NO: 2796839 - DNA, 25 bp, Homo sapien
agggaaagcttggacaagagcagcc

SEQ ID NO: 2796840 - DNA, 25 bp, Homo sapien
tctcctgcctcttaagtcgaccagg

SEQ ID NO: 2796841 - DNA, 25 bp, Homo sapien
gcctcttaagtcgaccagggaaagc

SEQ ID NO: 2796842 - DNA, 25 bp, Homo sapien
ttaagtcgaccagggaaagcttgga

SEQ ID NO: 2796843 - DNA, 25 bp, Homo sapien
tatgtagaggcagatatgtcctaac

SEQ ID NO: 2796844 - DNA, 25 bp, Homo sapien
gaatcaggatgcatatgtggtccca

SEQ ID NO: 2796845 - DNA, 25 bp, Homo sapien
gcacttcagcatggagtttgccaca

SEQ ID NO: 2796846 - DNA, 25 bp, Homo sapien
ggtcccaattctgtgtctgtgccag

SEQ ID NO: 2796847 - DNA, 25 bp, Homo sapien
tgttgttggagagcttgaaatgaat

SEQ ID NO: 2796848 - DNA, 25 bp, Homo sapien
gttggagagcttgaaatgaattcat

SEQ ID NO: 2796849 - DNA, 25 bp, Homo sapien
ttgttggagagcttgaaatgaattc

SEQ ID NO: 2796850 - DNA, 25 bp, Homo sapien
ctgttgttggagagcttgaaatgaa

SEQ ID NO: 2796851 - DNA, 25 bp, Homo sapien
cctggatggatcactctgaagcctg

SEQ ID NO: 2796852 - DNA, 25 bp, Homo sapien
gatcactctgaagcctgaagcccaa

SEQ ID NO: 2796853 - DNA, 25 bp, Homo sapien
tactgccaaattctctccagcctgg

SEQ ID NO: 2796854 - DNA, 25 bp, Homo sapien
tgaagcccaagggagaacccaggaa

SEQ ID NO: 2796855 - DNA, 25 bp, Homo sapien
aaatgccccaagatggtcggctccg

SEQ ID NO: 2796856 - DNA, 25 bp, Homo sapien
caaaaacagtagcagaaaatgtgct

SEQ ID NO: 2796857 - DNA, 25 bp, Homo sapien
ctccttttggagatgatgtcgtgaa

SEQ ID NO: 2796858 - DNA, 25 bp, Homo sapien
tatgccgcgttgctctctctccgtt

SEQ ID NO: 2796859 - DNA, 25 bp, Homo sapien
tcacagtgagaatctacagctgcag

SEQ ID NO: 2796860 - DNA, 25 bp, Homo sapien
tctcaaccaaaacgttacacatgtg

SEQ ID NO: 2796861 - DNA, 25 bp, Homo sapien
cacagtactcgtccaccatttaaca

SEQ ID NO: 2796862 - DNA, 25 bp, Homo sapien
cacttatgcatgagcaagcaaggga

SEQ ID NO: 2796863 - DNA, 25 bp, Homo sapien
tcccaacagatattaaaggcaacgt

SEQ ID NO: 2796864 - DNA, 25 bp, Homo sapien
aaggcaacgtctttaatctaagaca

SEQ ID NO: 2796865 - DNA, 25 bp, Homo sapien
taatctaagacattatactgaaagg

SEQ ID NO: 2796866 - DNA, 25 bp, Homo sapien
caacagatattaaaggcaacgtctt

SEQ ID NO: 2796867 - DNA, 25 bp, Homo sapien
gaagcgaagttatctggagtagtct

SEQ ID NO: 2796868 - DNA, 25 bp, Homo sapien
cagtaatactggatgtagcctctgg

SEQ ID NO: 2796869 - DNA, 25 bp, Homo sapien
tgtactctccaatacaaagtatggg

SEQ ID NO: 2796870 - DNA, 25 bp, Homo sapien
gctttcatccgcctcttaaagggta

SEQ ID NO: 2796871 - DNA, 25 bp, Homo sapien
ttctgttaatttgccgcactaggtc

SEQ ID NO: 2796872 - DNA, 25 bp, Homo sapien
taatttgccgcactaggtcataaaa

SEQ ID NO: 2796873 - DNA, 25 bp, Homo sapien
gttaatttgccgcactaggtcataa

SEQ ID NO: 2796874 - DNA, 25 bp, Homo sapien
ctgttaatttgccgcactaggtcat

SEQ ID NO: 2796875 - DNA, 25 bp, Homo sapien
tcaggtcttgtaaatcgttaaatgt

SEQ ID NO: 2796876 - DNA, 25 bp, Homo sapien
ctcaggtcttgtaaatcgttaaatg

SEQ ID NO: 2796877 - DNA, 25 bp, Homo sapien
ggtcttgtaaatcgttaaatgtgga

SEQ ID NO: 2796878 - DNA, 25 bp, Homo sapien
caggtcttgtaaatcgttaaatgtg

SEQ ID NO: 2796879 - DNA, 25 bp, Homo sapien
aagaatcttctatcgtaggatcgta

SEQ ID NO: 2796880 - DNA, 25 bp, Homo sapien
gaatcttctatcgtaggatcgtatt

SEQ ID NO: 2796881 - DNA, 25 bp, Homo sapien
taagaatcttctatcgtaggatcgt

SEQ ID NO: 2796882 - DNA, 25 bp, Homo sapien
tcttctatcgtaggatcgtattttt

SEQ ID NO: 2796883 - DNA, 25 bp, Homo sapien
aagcagactttccaacgcctcgtga

SEQ ID NO: 2796884 - DNA, 25 bp, Homo sapien
cgcctcgtgagccaagaacgactag

SEQ ID NO: 2796885 - DNA, 25 bp, Homo sapien
gaacgactagcttatactcacgcat

SEQ ID NO: 2796886 - DNA, 25 bp, Homo sapien
ttccaacgcctcgtgagccaagaac

SEQ ID NO: 2796887 - DNA, 25 bp, Homo sapien
aaacctagtactctgcgaacctctc

SEQ ID NO: 2796888 - DNA, 25 bp, Homo sapien
aacctagtactctgcgaacctctca

SEQ ID NO: 2796889 - DNA, 25 bp, Homo sapien
gtcaggagatcgagaccatcctggc

SEQ ID NO: 2796890 - DNA, 25 bp, Homo sapien
tagccgagcacggtggcgggcgtct

SEQ ID NO: 2796891 - DNA, 25 bp, Homo sapien
gagaacgaggtggatggatcacaag

SEQ ID NO: 2796892 - DNA, 25 bp, Homo sapien
gggagaacgaggtggatggatcaca

SEQ ID NO: 2796893 - DNA, 25 bp, Homo sapien
cgaggagccctcgtgtgatgcttca

SEQ ID NO: 2796894 - DNA, 25 bp, Homo sapien
taggtcagcacctgaatatctgggt

SEQ ID NO: 2796895 - DNA, 25 bp, Homo sapien
tcctaaaatgccgaagagtgcttct

SEQ ID NO: 2796896 - DNA, 25 bp, Homo sapien
taagtaacagcttcagtactgtagg

SEQ ID NO: 2796897 - DNA, 25 bp, Homo sapien
gctctgggctgacaacttaggtgtc

SEQ ID NO: 2796898 - DNA, 25 bp, Homo sapien
ctctgggctgacaacttaggtgtct

SEQ ID NO: 2796899 - DNA, 25 bp, Homo sapien
tgctctgggctgacaacttaggtgt

SEQ ID NO: 2796900 - DNA, 25 bp, Homo sapien
tccttcttgccgtctaaatgtcacc

SEQ ID NO: 2796901 - DNA, 25 bp, Homo sapien
cttttccttcttgccgtctaaatgt

SEQ ID NO: 2796902 - DNA, 25 bp, Homo sapien
tttccttcttgccgtctaaatgtca

SEQ ID NO: 2796903 - DNA, 25 bp, Homo sapien
cttcttgccgtctaaatgtcaccat

SEQ ID NO: 2796904 - DNA, 25 bp, Homo sapien
tcatacttgaggcctttgtgtcatc

SEQ ID NO: 2796905 - DNA, 25 bp, Homo sapien
gaagtcatacttgaggcctttgtgt

SEQ ID NO: 2796906 - DNA, 25 bp, Homo sapien
catacttgaggcctttgtgtcatct

SEQ ID NO: 2796907 - DNA, 25 bp, Homo sapien
agtcatacttgaggcctttgtgtca

SEQ ID NO: 2796908 - DNA, 25 bp, Homo sapien
ttctgacttctgacaactgttttct

SEQ ID NO: 2796909 - DNA, 25 bp, Homo sapien
caagttctgacttctgacaactgtt

SEQ ID NO: 2796910 - DNA, 25 bp, Homo sapien
tcaagttctgacttctgacaactgt

SEQ ID NO: 2796911 - DNA, 25 bp, Homo sapien
tgacttctgacaactgttttcttac

SEQ ID NO: 2796912 - DNA, 25 bp, Homo sapien
taaaatgagaggctttggatgaaga

SEQ ID NO: 2796913 - DNA, 25 bp, Homo sapien
ttgtaaaatgagaggctttggatga

SEQ ID NO: 2796914 - DNA, 25 bp, Homo sapien
aaatgagaggctttggatgaagata

SEQ ID NO: 2796915 - DNA, 25 bp, Homo sapien
aatgagaggctttggatgaagatac

SEQ ID NO: 2796916 - DNA, 25 bp, Homo sapien
tggagattgtctagagcttgatgtc

SEQ ID NO: 2796917 - DNA, 25 bp, Homo sapien
gctctgagttttcaaggactccccg

SEQ ID NO: 2796918 - DNA, 25 bp, Homo sapien
tgcccgtctgcagcatctcaaggca

SEQ ID NO: 2796919 - DNA, 25 bp, Homo sapien
cttttaagtctgcccgtctgcagca

SEQ ID NO: 2796920 - DNA, 25 bp, Homo sapien
tattttatagtaatgtgtttattct

SEQ ID NO: 2796921 - DNA, 25 bp, Homo sapien
gagttttgtgggatccagcggctga

SEQ ID NO: 2796922 - DNA, 25 bp, Homo sapien
cagagttttgtgggatccagcggct

SEQ ID NO: 2796923 - DNA, 25 bp, Homo sapien
ctgcagagttttgtgggatccagcg

SEQ ID NO: 2796924 - DNA, 25 bp, Homo sapien
ttttgtgggatccagcggctgacag

SEQ ID NO: 2796925 - DNA, 25 bp, Homo sapien
tttgcctgaaacagcgtacatcagt

SEQ ID NO: 2796926 - DNA, 25 bp, Homo sapien
tgaaacagcgtacatcagtgtgatg

SEQ ID NO: 2796927 - DNA, 25 bp, Homo sapien
caacaaacataatccccactgggtt

SEQ ID NO: 2796928 - DNA, 25 bp, Homo sapien
cagtgtgatgaagcacagcaacaaa

SEQ ID NO: 2796929 - DNA, 25 bp, Homo sapien
cccaatgaggtttgtgcatacagga

SEQ ID NO: 2796930 - DNA, 25 bp, Homo sapien
aagacgaggcgtggctgtgaaattc

SEQ ID NO: 2796931 - DNA, 25 bp, Homo sapien
tcccagtttcccaatgaggtttgtg

SEQ ID NO: 2796932 - DNA, 25 bp, Homo sapien
taagacgaggcgtggctgtgaaatt

SEQ ID NO: 2796933 - DNA, 25 bp, Homo sapien
gtcttccacttgaaattatagccac

SEQ ID NO: 2796934 - DNA, 25 bp, Homo sapien
cagtcttccacttgaaattatagcc

SEQ ID NO: 2796935 - DNA, 25 bp, Homo sapien
acagtcttccacttgaaattatagc

SEQ ID NO: 2796936 - DNA, 25 bp, Homo sapien
ctacagtcttccacttgaaattata

SEQ ID NO: 2796937 - DNA, 25 bp, Homo sapien
tccacaccctgatttcatgtattct

SEQ ID NO: 2796938 - DNA, 25 bp, Homo sapien
gtccacaccctgatttcatgtattc

SEQ ID NO: 2796939 - DNA, 25 bp, Homo sapien
gcatgttctggatgatcggtggcat

SEQ ID NO: 2796940 - DNA, 25 bp, Homo sapien
tgttctcgtactttgctgaagtcct

SEQ ID NO: 2796941 - DNA, 25 bp, Homo sapien
gaaaagcggggcgaacacttgagct

SEQ ID NO: 2796942 - DNA, 25 bp, Homo sapien
gagccatacccactgtgttctcgta

SEQ ID NO: 2796943 - DNA, 25 bp, Homo sapien
ttgcttcaggctccattcccatctt

SEQ ID NO: 2796944 - DNA, 25 bp, Homo sapien
acggtaagaggctggccttgcccca

SEQ ID NO: 2796945 - DNA, 25 bp, Homo sapien
tacggtaagaggctggccttgcccc

SEQ ID NO: 2796946 - DNA, 25 bp, Homo sapien
ctacggtaagaggctggccttgccc

SEQ ID NO: 2796947 - DNA, 25 bp, Homo sapien
tgctctgtcctctttcactgaggag

SEQ ID NO: 2796948 - DNA, 25 bp, Homo sapien
cacagtccacagaaacaagagcggg

SEQ ID NO: 2796949 - DNA, 25 bp, Homo sapien
aggaggcctttgagtgcccaccact

SEQ ID NO: 2796950 - DNA, 25 bp, Homo sapien
tctgcgttgtataaatgatgccaca

SEQ ID NO: 2796951 - DNA, 25 bp, Homo sapien
aggaacttctgggccatctgtgtct

SEQ ID NO: 2796952 - DNA, 25 bp, Homo sapien
accactccattcaggaacttctggg

SEQ ID NO: 2796953 - DNA, 25 bp, Homo sapien
ctgccaccactccattcaggaactt

SEQ ID NO: 2796954 - DNA, 25 bp, Homo sapien
ccattcaggaacttctgggccatct

SEQ ID NO: 2796955 - DNA, 25 bp, Homo sapien
cgctgtgtttctaaattaactttca

SEQ ID NO: 2796956 - DNA, 25 bp, Homo sapien
gctgtgtttctaaattaactttcac

SEQ ID NO: 2796957 - DNA, 25 bp, Homo sapien
tatctttataacctccgtggcactg

SEQ ID NO: 2796958 - DNA, 25 bp, Homo sapien
ttttgctgacttgagtcacagagcc

SEQ ID NO: 2796959 - DNA, 25 bp, Homo sapien
aatgcatgagccagataagcccacg

SEQ ID NO: 2796960 - DNA, 25 bp, Homo sapien
cccacggtgagtgttttgctgactt

SEQ ID NO: 2796961 - DNA, 25 bp, Homo sapien
ctgcctatgtctgccaggctgagga

SEQ ID NO: 2796962 - DNA, 25 bp, Homo sapien
tgtctgccaggctgaggatcctcac

SEQ ID NO: 2796963 - DNA, 25 bp, Homo sapien
cctatgtctgccaggctgaggatcc

SEQ ID NO: 2796964 - DNA, 25 bp, Homo sapien
cactctgctgcctatgtctgccagg

SEQ ID NO: 2796965 - DNA, 25 bp, Homo sapien
ttcctacccccatccaactttgcag

SEQ ID NO: 2796966 - DNA, 25 bp, Homo sapien
gatttgctctcaggtttcacattgc

SEQ ID NO: 2796967 - DNA, 25 bp, Homo sapien
cagagcttgaggatctctggacaga

SEQ ID NO: 2796968 - DNA, 25 bp, Homo sapien
ccatccaactttgcagtgctgttgg

SEQ ID NO: 2796969 - DNA, 25 bp, Homo sapien
tccataatctagaaacagaaccact

SEQ ID NO: 2796970 - DNA, 25 bp, Homo sapien
gaagatccataatctagaaacagaa

SEQ ID NO: 2796971 - DNA, 25 bp, Homo sapien
tgaagatccataatctagaaacaga

SEQ ID NO: 2796972 - DNA, 25 bp, Homo sapien
ataatctagaaacagaaccactgct

SEQ ID NO: 2796973 - DNA, 25 bp, Homo sapien
cagaagtacacagttatcaaaaatg

SEQ ID NO: 2796974 - DNA, 25 bp, Homo sapien
acacagttatcaaaaatgcacacac

SEQ ID NO: 2796975 - DNA, 25 bp, Homo sapien
agtacacagttatcaaaaatgcaca

SEQ ID NO: 2796976 - DNA, 25 bp, Homo sapien
gaagtacacagttatcaaaaatgca

SEQ ID NO: 2796977 - DNA, 25 bp, Homo sapien
tctccatttcctgcagggttatttc

SEQ ID NO: 2796978 - DNA, 25 bp, Homo sapien
cagctttctgcgcctggtctgtttt

SEQ ID NO: 2796979 - DNA, 25 bp, Homo sapien
tcctgcagggttatttccctccttg

SEQ ID NO: 2796980 - DNA, 25 bp, Homo sapien
ccatttcctgcagggttatttccct

SEQ ID NO: 2796981 - DNA, 25 bp, Homo sapien
aggggccttttaggcgtgggctctg

SEQ ID NO: 2796982 - DNA, 25 bp, Homo sapien
tgcaggggccttttaggcgtgggct

SEQ ID NO: 2796983 - DNA, 25 bp, Homo sapien
ttgcaggggccttttaggcgtgggc

SEQ ID NO: 2796984 - DNA, 25 bp, Homo sapien
gcaggggccttttaggcgtgggctc

SEQ ID NO: 2796985 - DNA, 25 bp, Homo sapien
cggcagcgacggcagcgggacatag

SEQ ID NO: 2796986 - DNA, 25 bp, Homo sapien
gcagcgacggcagcgggacataggt

SEQ ID NO: 2796987 - DNA, 25 bp, Homo sapien
cagcgacggcagcgggacataggtg

SEQ ID NO: 2796988 - DNA, 25 bp, Homo sapien
tggcggcagcgacggcagcgggaca

SEQ ID NO: 2796989 - DNA, 25 bp, Homo sapien
agcggcgcgcgggctttggtcggac

SEQ ID NO: 2796990 - DNA, 25 bp, Homo sapien
ctggacgcgggacgcagcggcgcgc

SEQ ID NO: 2796991 - DNA, 25 bp, Homo sapien
gcagcggcgcgcgggctttggtcgg

SEQ ID NO: 2796992 - DNA, 25 bp, Homo sapien
cggcgcgcgggctttggtcggaccg

SEQ ID NO: 2796993 - DNA, 25 bp, Homo sapien
tctgagggtttttcagctgagtgca

SEQ ID NO: 2796994 - DNA, 25 bp, Homo sapien
gaacgctctcagattagttctacag

SEQ ID NO: 2796995 - DNA, 25 bp, Homo sapien
aagtaaaggattccacaagaacgct

SEQ ID NO: 2796996 - DNA, 25 bp, Homo sapien
tacagtcaacaaatgcgtattgagg

SEQ ID NO: 2796997 - DNA, 25 bp, Homo sapien
tctgggcttgccataatgcttttga

SEQ ID NO: 2796998 - DNA, 25 bp, Homo sapien
gatctgaaaactaccaggtagaccc

SEQ ID NO: 2796999 - DNA, 25 bp, Homo sapien
tagaccccacacctccattcctggg

SEQ ID NO: 2797000 - DNA, 25 bp, Homo sapien
cagcatgtgcatcaggagcatttcc

SEQ ID NO: 2797001 - DNA, 25 bp, Homo sapien
tcctattgtttccccgacccactgc

SEQ ID NO: 2797002 - DNA, 25 bp, Homo sapien
aaacattgtagggttccccacacat

SEQ ID NO: 2797003 - DNA, 25 bp, Homo sapien
gagaaacattgtagggttccccaca

SEQ ID NO: 2797004 - DNA, 25 bp, Homo sapien
tctgagaaacattgtagggttcccc

SEQ ID NO: 2797005 - DNA, 25 bp, Homo sapien
cattgtagggttccccacacataaa

SEQ ID NO: 2797006 - DNA, 25 bp, Homo sapien
caagtgttggctagggttaatcaca

SEQ ID NO: 2797007 - DNA, 25 bp, Homo sapien
tcttgtgaacccagggtgccctcaa

SEQ ID NO: 2797008 - DNA, 25 bp, Homo sapien
taatcacaagccgctgtttctgaga

SEQ ID NO: 2797009 - DNA, 25 bp, Homo sapien
aagaggcttttaatagcgcagcgtc

SEQ ID NO: 2797010 - DNA, 25 bp, Homo sapien
gtggggtgtgcccggaaggactcta

SEQ ID NO: 2797011 - DNA, 25 bp, Homo sapien
tggggtgtgcccggaaggactctac

SEQ ID NO: 2797012 - DNA, 25 bp, Homo sapien
tagtctgcaattggtactcgagcct

SEQ ID NO: 2797013 - DNA, 25 bp, Homo sapien
gttctgggaactagcattctggtca

SEQ ID NO: 2797014 - DNA, 25 bp, Homo sapien
gccagagggagcatcaatctgccta

SEQ ID NO: 2797015 - DNA, 25 bp, Homo sapien
tacccgtgtccctgctgtagtctgc

SEQ ID NO: 2797016 - DNA, 25 bp, Homo sapien
ttctgaaaagttcccctcattcact

SEQ ID NO: 2797017 - DNA, 25 bp, Homo sapien
agttcccctcattcactctttgcat

SEQ ID NO: 2797018 - DNA, 25 bp, Homo sapien
atgttggccccaggaaccctttctg

SEQ ID NO: 2797019 - DNA, 25 bp, Homo sapien
tgttggccccaggaaccctttctga

SEQ ID NO: 2797020 - DNA, 25 bp, Homo sapien
taggccttaggtgccacgatgagac

SEQ ID NO: 2797021 - DNA, 25 bp, Homo sapien
gagacacccttaagcgaatcctgga

SEQ ID NO: 2797022 - DNA, 25 bp, Homo sapien
tatcctttctcatgcgtggctgggc

SEQ ID NO: 2797023 - DNA, 25 bp, Homo sapien
aatcctggaaggtacgaagcctgca

SEQ ID NO: 2797024 - DNA, 25 bp, Homo sapien
ccagtgctgtggtacgtctgccaca

SEQ ID NO: 2797025 - DNA, 25 bp, Homo sapien
cagtggtcgatgcagtgcccttctc

SEQ ID NO: 2797026 - DNA, 25 bp, Homo sapien
taatagcctgagattcttgccaagg

SEQ ID NO: 2797027 - DNA, 25 bp, Homo sapien
tcttaggcgtagacttgaagaagcc

SEQ ID NO: 2797028 - DNA, 25 bp, Homo sapien
atgagtgaggtgaagcgggaagacg

SEQ ID NO: 2797029 - DNA, 25 bp, Homo sapien
tgagtgaggtgaagcgggaagacgg

SEQ ID NO: 2797030 - DNA, 25 bp, Homo sapien
gagtgaggtgaagcgggaagacgga

SEQ ID NO: 2797031 - DNA, 25 bp, Homo sapien
agtgaggtgaagcgggaagacggaa

SEQ ID NO: 2797032 - DNA, 25 bp, Homo sapien
cttgtgagatgcagcccacgctctc

SEQ ID NO: 2797033 - DNA, 25 bp, Homo sapien
tgagatgcagcccacgctctcaggg

SEQ ID NO: 2797034 - DNA, 25 bp, Homo sapien
gctctcagggccgtcctgcaactct

SEQ ID NO: 2797035 - DNA, 25 bp, Homo sapien
tgtctcatggtgtcgtttggccgca

SEQ ID NO: 2797036 - DNA, 25 bp, Homo sapien
tagacttgcagccaatgaccagaag

SEQ ID NO: 2797037 - DNA, 25 bp, Homo sapien
ctccctgtggttgtttgactgctca

SEQ ID NO: 2797038 - DNA, 25 bp, Homo sapien
tggcccgcagttgacattcagcttc

SEQ ID NO: 2797039 - DNA, 25 bp, Homo sapien
aaagaggtcagccaggacattccca

SEQ ID NO: 2797040 - DNA, 25 bp, Homo sapien
tcagggctagaacatcaggaaaacc

SEQ ID NO: 2797041 - DNA, 25 bp, Homo sapien
ctgtgatcagggctagaacatcagg

SEQ ID NO: 2797042 - DNA, 25 bp, Homo sapien
tagaacatcaggaaaacccgaacca

SEQ ID NO: 2797043 - DNA, 25 bp, Homo sapien
ggctagaacatcaggaaaacccgaa

SEQ ID NO: 2797044 - DNA, 25 bp, Homo sapien
gattccctctgccaatcaaaataga

SEQ ID NO: 2797045 - DNA, 25 bp, Homo sapien
tccaaagcagtccaggggaatactt

SEQ ID NO: 2797046 - DNA, 25 bp, Homo sapien
cctctgccaatcaaaatagatagaa

SEQ ID NO: 2797047 - DNA, 25 bp, Homo sapien
tccaggggaatactttctgattccc

SEQ ID NO: 2797048 - DNA, 25 bp, Homo sapien
gttcatgcactaaaggctctggagc

SEQ ID NO: 2797049 - DNA, 25 bp, Homo sapien
tgatctgttcatgcactaaaggctc

SEQ ID NO: 2797050 - DNA, 25 bp, Homo sapien
taatatacctgatctgttcatgcac

SEQ ID NO: 2797051 - DNA, 25 bp, Homo sapien
ttcttcagtaatatacctgatctgt

SEQ ID NO: 2797052 - DNA, 25 bp, Homo sapien
ctaagcctaaaaacaccagtattgc

SEQ ID NO: 2797053 - DNA, 25 bp, Homo sapien
catatcggctgtatgttaggttttc

SEQ ID NO: 2797054 - DNA, 25 bp, Homo sapien
tgaaactctgaagtggactatatgt

SEQ ID NO: 2797055 - DNA, 25 bp, Homo sapien
tcacatcgtgccaaacttagtctgg

SEQ ID NO: 2797056 - DNA, 25 bp, Homo sapien
tgggtgagtcaattatctttgcaga

SEQ ID NO: 2797057 - DNA, 25 bp, Homo sapien
ttgcagacatcctaaagcagcttcc

SEQ ID NO: 2797058 - DNA, 25 bp, Homo sapien
atctttgcagacatcctaaagcagc

SEQ ID NO: 2797059 - DNA, 25 bp, Homo sapien
gattttgaagatttgtgggtgagtc

SEQ ID NO: 2797060 - DNA, 25 bp, Homo sapien
ttcagtttaaaactggtgcgtgttg

SEQ ID NO: 2797061 - DNA, 25 bp, Homo sapien
gtgcgtgttgttgcaagtgtcttga

SEQ ID NO: 2797062 - DNA, 25 bp, Homo sapien
ttgttgcaagtgtcttgaagttgca

SEQ ID NO: 2797063 - DNA, 25 bp, Homo sapien
cagtttaaaactggtgcgtgttgtt

SEQ ID NO: 2797064 - DNA, 25 bp, Homo sapien
cagagcagaaagagggtagttgtca

SEQ ID NO: 2797065 - DNA, 25 bp, Homo sapien
tagttgtcagtgaccctctaccctc

SEQ ID NO: 2797066 - DNA, 25 bp, Homo sapien
cagtgaccctctaccctcctctgag

SEQ ID NO: 2797067 - DNA, 25 bp, Homo sapien
cagaaagagggtagttgtcagtgac

SEQ ID NO: 2797068 - DNA, 25 bp, Homo sapien
tgcacagatgtccagctccatggga

SEQ ID NO: 2797069 - DNA, 25 bp, Homo sapien
ccaaaccctgctgtgattctgcttc

SEQ ID NO: 2797070 - DNA, 25 bp, Homo sapien
cccttctcagtgcacagatgtccag

SEQ ID NO: 2797071 - DNA, 25 bp, Homo sapien
ttctgcttcccacaaaagcagcctg

SEQ ID NO: 2797072 - DNA, 25 bp, Homo sapien
gtcttctctgtaccaatgagcttag

SEQ ID NO: 2797073 - DNA, 25 bp, Homo sapien
tgacagtctgcatggccaacttttc

SEQ ID NO: 2797074 - DNA, 25 bp, Homo sapien
tgagcttagccagtgtgacagtctg

SEQ ID NO: 2797075 - DNA, 25 bp, Homo sapien
ggaagacattcagaccacggtaggt

SEQ ID NO: 2797076 - DNA, 25 bp, Homo sapien
catgaccactgccacgctttgaagg

SEQ ID NO: 2797077 - DNA, 25 bp, Homo sapien
ctgcttcctggaatgagcaaggcca

SEQ ID NO: 2797078 - DNA, 25 bp, Homo sapien
gaaagtgggattgcatagatttccc

SEQ ID NO: 2797079 - DNA, 25 bp, Homo sapien
tgccacgctttgaagggaaactgct

SEQ ID NO: 2797080 - DNA, 25 bp, Homo sapien
gccagcacagcccagtccctgggag

SEQ ID NO: 2797081 - DNA, 25 bp, Homo sapien
ctgtgcaggtgccttccccacggga

SEQ ID NO: 2797082 - DNA, 25 bp, Homo sapien
tgataacttccacccctgtgcaggt

SEQ ID NO: 2797083 - DNA, 25 bp, Homo sapien
caagggccacgctggtcctcgggct

SEQ ID NO: 2797084 - DNA, 25 bp, Homo sapien
agacttgaccagacagataaggata

SEQ ID NO: 2797085 - DNA, 25 bp, Homo sapien
tatgaggggtcctgccatgatgcca

SEQ ID NO: 2797086 - DNA, 25 bp, Homo sapien
gcccactcggcccagaaagacttga

SEQ ID NO: 2797087 - DNA, 25 bp, Homo sapien
tccccagtgataagacctcctgcct

SEQ ID NO: 2797088 - DNA, 25 bp, Homo sapien
gtggtcaggaagcacttggcctgtt

SEQ ID NO: 2797089 - DNA, 25 bp, Homo sapien
caggtttaaccctgcctgctccaat

SEQ ID NO: 2797090 - DNA, 25 bp, Homo sapien
tcaccaccaggtttaaccctgcctg

SEQ ID NO: 2797091 - DNA, 25 bp, Homo sapien
tgcctgctccaatgtagtggtgtgg

SEQ ID NO: 2797092 - DNA, 25 bp, Homo sapien
ctgtgagtccatgtgtgtagacggt

SEQ ID NO: 2797093 - DNA, 25 bp, Homo sapien
gacggtgataatatttggtgtgact

SEQ ID NO: 2797094 - DNA, 25 bp, Homo sapien
gtgtgtagacggtgataatatttgg

SEQ ID NO: 2797095 - DNA, 25 bp, Homo sapien
gactgtgagtccatgtgtgtagacg

SEQ ID NO: 2797096 - DNA, 25 bp, Homo sapien
ggagccacatctttccctaagcaat

SEQ ID NO: 2797097 - DNA, 25 bp, Homo sapien
ctggcgccccattggcatcaggtgg

SEQ ID NO: 2797098 - DNA, 25 bp, Homo sapien
gcactttgccggaaggcctggcgcc

SEQ ID NO: 2797099 - DNA, 25 bp, Homo sapien
tgatgcacttcttcgtgtgctccag

SEQ ID NO: 2797100 - DNA, 25 bp, Homo sapien
aaaaaggctagcacatctcccaggc

SEQ ID NO: 2797101 - DNA, 25 bp, Homo sapien
tctcccaggctgacacaataggcag

SEQ ID NO: 2797102 - DNA, 25 bp, Homo sapien
acatctcccaggctgacacaatagg

SEQ ID NO: 2797103 - DNA, 25 bp, Homo sapien
tctcaaaaaggctagcacatctccc

SEQ ID NO: 2797104 - DNA, 25 bp, Homo sapien
tgtcttccggtctaaaatttgcact

SEQ ID NO: 2797105 - DNA, 25 bp, Homo sapien
actaccatacgctttccagtaggtc

SEQ ID NO: 2797106 - DNA, 25 bp, Homo sapien
aaaatttgcactaccatacgctttc

SEQ ID NO: 2797107 - DNA, 25 bp, Homo sapien
ccaggcctgtcttccggtctaaaat

SEQ ID NO: 2797108 - DNA, 25 bp, Homo sapien
ccacaattgtcaaataggtgagggc

SEQ ID NO: 2797109 - DNA, 25 bp, Homo sapien
cgcattccctccagattttatcacg

SEQ ID NO: 2797110 - DNA, 25 bp, Homo sapien
ttttcctgttatcgggtcacccaca

SEQ ID NO: 2797111 - DNA, 25 bp, Homo sapien
acaggtacggaagcgtcccgcattc

SEQ ID NO: 2797112 - DNA, 25 bp, Homo sapien
tcttgcacttctccgcgttggttca

SEQ ID NO: 2797113 - DNA, 25 bp, Homo sapien
tcaacgtgaaatctccccagaggaa

SEQ ID NO: 2797114 - DNA, 25 bp, Homo sapien
tctccagaagcgagaaataaggcgg

SEQ ID NO: 2797115 - DNA, 25 bp, Homo sapien
ggaaccgcgctgtttgtccctcagt

SEQ ID NO: 2797116 - DNA, 25 bp, Homo sapien
gagtgggtcgcagatcttcgggcgg

SEQ ID NO: 2797117 - DNA, 25 bp, Homo sapien
ggcgaccggccagggagcgagggag

SEQ ID NO: 2797118 - DNA, 25 bp, Homo sapien
ttttacttcagtgtcagcgcgcggc

SEQ ID NO: 2797119 - DNA, 25 bp, Homo sapien
gctggctctggcgagagagcaccga

SEQ ID NO: 2797120 - DNA, 25 bp, Homo sapien
ggagacgcgcaggatgccacacgaa

SEQ ID NO: 2797121 - DNA, 25 bp, Homo sapien
gcctggccagcgagggtagccgcgg

SEQ ID NO: 2797122 - DNA, 25 bp, Homo sapien
aagagctgccgtcgctgcagagacc

SEQ ID NO: 2797123 - DNA, 25 bp, Homo sapien
aaatcggcgagaggcgggatccgag

SEQ ID NO: 2797124 - DNA, 25 bp, Homo sapien
caaaggctactcaacgtctgatttg

SEQ ID NO: 2797125 - DNA, 25 bp, Homo sapien
caacgtctgatttgatagggtcagg

SEQ ID NO: 2797126 - DNA, 25 bp, Homo sapien
tctgatttgatagggtcaggtaagt

SEQ ID NO: 2797127 - DNA, 25 bp, Homo sapien
acaaaggctactcaacgtctgattt

SEQ ID NO: 2797128 - DNA, 25 bp, Homo sapien
tctgggtgacaagtaaaaatgctta

SEQ ID NO: 2797129 - DNA, 25 bp, Homo sapien
atctgggtgacaagtaaaaatgctt

SEQ ID NO: 2797130 - DNA, 25 bp, Homo sapien
ctgggtgacaagtaaaaatgcttat

SEQ ID NO: 2797131 - DNA, 25 bp, Homo sapien
tgagctccataacaccactgtgcct

SEQ ID NO: 2797132 - DNA, 25 bp, Homo sapien
gcgtgcataccacacagaaatgtga

SEQ ID NO: 2797133 - DNA, 25 bp, Homo sapien
actgtgcctcatgggtcagtgcgtg

SEQ ID NO: 2797134 - DNA, 25 bp, Homo sapien
tcatgggtcagtgcgtgcataccac

SEQ ID NO: 2797135 - DNA, 25 bp, Homo sapien
tctgtgccacttagaggaagccaaa

SEQ ID NO: 2797136 - DNA, 25 bp, Homo sapien
aggagatggatgagaggaggcggca

SEQ ID NO: 2797137 - DNA, 25 bp, Homo sapien
ttgtggacgatgaaaggctctctgc

SEQ ID NO: 2797138 - DNA, 25 bp, Homo sapien
ctattgtggacgatgaaaggctctc

SEQ ID NO: 2797139 - DNA, 25 bp, Homo sapien
ctatattggtgagtctgggacagtt

SEQ ID NO: 2797140 - DNA, 25 bp, Homo sapien
agtctgggacagttatatatgtgcc

SEQ ID NO: 2797141 - DNA, 25 bp, Homo sapien
tctcccttccctcccttgttctctc

SEQ ID NO: 2797142 - DNA, 25 bp, Homo sapien
tgttctctccctggctctgacctca

SEQ ID NO: 2797143 - DNA, 25 bp, Homo sapien
tccctcccttgttctctccctggct

SEQ ID NO: 2797144 - DNA, 25 bp, Homo sapien
tcatgtttccactgtaactctccat

SEQ ID NO: 2797145 - DNA, 25 bp, Homo sapien
ccacggggagcaagatgaactgctt

SEQ ID NO: 2797146 - DNA, 25 bp, Homo sapien
ggagcaagatgaactgcttggttgt

SEQ ID NO: 2797147 - DNA, 25 bp, Homo sapien
gggagcaagatgaactgcttggttg

SEQ ID NO: 2797148 - DNA, 25 bp, Homo sapien
gctttccacggggagcaagatgaac

SEQ ID NO: 2797149 - DNA, 25 bp, Homo sapien
ctgctttccaaccagcttgcctcag

SEQ ID NO: 2797150 - DNA, 25 bp, Homo sapien
ggctgctttccaaccagcttgcctc

SEQ ID NO: 2797151 - DNA, 25 bp, Homo sapien
tcgcaagtctggcacctggttgagg

SEQ ID NO: 2797152 - DNA, 25 bp, Homo sapien
agcagggaccccctcgcaagtctgg

SEQ ID NO: 2797153 - DNA, 25 bp, Homo sapien
tagttggggcctcagagaggtgttg

SEQ ID NO: 2797154 - DNA, 25 bp, Homo sapien
ccagctggcggtgaccagggattat

SEQ ID NO: 2797155 - DNA, 25 bp, Homo sapien
tgagggccagctggcggtgaccagg

SEQ ID NO: 2797156 - DNA, 25 bp, Homo sapien
aagtagtgcttgtagttggggcctc

SEQ ID NO: 2797157 - DNA, 25 bp, Homo sapien
tccaggtagtgataacgtgcaaggt

SEQ ID NO: 2797158 - DNA, 25 bp, Homo sapien
gcctgtgtgtggttggagtgtagtg

SEQ ID NO: 2797159 - DNA, 25 bp, Homo sapien
tgataacgtgcaaggtgtggtgcct

SEQ ID NO: 2797160 - DNA, 25 bp, Homo sapien
aggtggagtatttccaggtagtgat

SEQ ID NO: 2797161 - DNA, 25 bp, Homo sapien
ggatcatggaagggcacctcctgag

SEQ ID NO: 2797162 - DNA, 25 bp, Homo sapien
aggatcatggaagggcacctcctga

SEQ ID NO: 2797163 - DNA, 25 bp, Homo sapien
tacaccgcctccgccttcccgccat

SEQ ID NO: 2797164 - DNA, 25 bp, Homo sapien
ttacaccgcctccgccttcccgcca

SEQ ID NO: 2797165 - DNA, 25 bp, Homo sapien
tcccagggtgagtggatgatagcgt

SEQ ID NO: 2797166 - DNA, 25 bp, Homo sapien
cttttcccagggtgagtggatgata

SEQ ID NO: 2797167 - DNA, 25 bp, Homo sapien
cagggtgagtggatgatagcgtggc

SEQ ID NO: 2797168 - DNA, 25 bp, Homo sapien
tttcccagggtgagtggatgatagc

SEQ ID NO: 2797169 - DNA, 25 bp, Homo sapien
cttctgatagcctcttgctttgttc

SEQ ID NO: 2797170 - DNA, 25 bp, Homo sapien
aggaagagcttgtagagaagaaatg

SEQ ID NO: 2797171 - DNA, 25 bp, Homo sapien
gaagagcttgtagagaagaaatggt

SEQ ID NO: 2797172 - DNA, 25 bp, Homo sapien
tgcttctgatagcctcttgctttgt

SEQ ID NO: 2797173 - DNA, 25 bp, Homo sapien
tgatagccgtcagcaaatacctggc

SEQ ID NO: 2797174 - DNA, 25 bp, Homo sapien
cacctggccgatatgcaggatttct

SEQ ID NO: 2797175 - DNA, 25 bp, Homo sapien
tgtttgagaggtatgcaggatttct

SEQ ID NO: 2797176 - DNA, 25 bp, Homo sapien
cctgacatgtgcttttagcctctga

SEQ ID NO: 2797177 - DNA, 25 bp, Homo sapien
gcccagggaggtgactacttctact

SEQ ID NO: 2797178 - DNA, 25 bp, Homo sapien
tgcatctcccgtggtgctcatctgg

SEQ ID NO: 2797179 - DNA, 25 bp, Homo sapien
ggacccagacagtgtgccatcgatg

SEQ ID NO: 2797180 - DNA, 25 bp, Homo sapien
gctggaccccgccaaggtatagagt

SEQ ID NO: 2797181 - DNA, 25 bp, Homo sapien
ctccaagagcccagaagacacacct

SEQ ID NO: 2797182 - DNA, 25 bp, Homo sapien
cagacttgcagtaaccacctccttg

SEQ ID NO: 2797183 - DNA, 25 bp, Homo sapien
gaagggatagcagggatgcattctc

SEQ ID NO: 2797184 - DNA, 25 bp, Homo sapien
tccagaagggatagcagggatgcat

SEQ ID NO: 2797185 - DNA, 25 bp, Homo sapien
cgcgcccggcgcattatagtaagtc

SEQ ID NO: 2797186 - DNA, 25 bp, Homo sapien
atcactttgagaagtgacaactgtg

SEQ ID NO: 2797187 - DNA, 25 bp, Homo sapien
caactgtgttagatcttcaagtcca

SEQ ID NO: 2797188 - DNA, 25 bp, Homo sapien
tcaagtccatgaacatcataggtct

SEQ ID NO: 2797189 - DNA, 25 bp, Homo sapien
gagaatcagttagtaccgatccgat

SEQ ID NO: 2797190 - DNA, 25 bp, Homo sapien
ccgatccagtgatatataagcaaaa

SEQ ID NO: 2797191 - DNA, 25 bp, Homo sapien
gactgtagtagggttcctgttgcca

SEQ ID NO: 2797192 - DNA, 25 bp, Homo sapien
tgtagtagggttcctgttgccactg

SEQ ID NO: 2797193 - DNA, 25 bp, Homo sapien
tctttccaaatctcctaatgttaca

SEQ ID NO: 2797194 - DNA, 25 bp, Homo sapien
tctcctaatgttacatccagttcat

SEQ ID NO: 2797195 - DNA, 25 bp, Homo sapien
caaatctcctaatgttacatccagt

SEQ ID NO: 2797196 - DNA, 25 bp, Homo sapien
tccaaatctcctaatgttacatcca

SEQ ID NO: 2797197 - DNA, 25 bp, Homo sapien
tttgtgtcggatttgatcagtaggc

SEQ ID NO: 2797198 - DNA, 25 bp, Homo sapien
tcggatttgatcagtaggcttaaaa

SEQ ID NO: 2797199 - DNA, 25 bp, Homo sapien
tggcatttgtgtcggatttgatcag

SEQ ID NO: 2797200 - DNA, 25 bp, Homo sapien
tgtcggatttgatcagtaggcttaa

SEQ ID NO: 2797201 - DNA, 25 bp, Homo sapien
ccagaacaccctcgcagcatgattt

SEQ ID NO: 2797202 - DNA, 25 bp, Homo sapien
tggaggcattgtgaaacccaagccg

SEQ ID NO: 2797203 - DNA, 25 bp, Homo sapien
gatttgttattgcacagagctggct

SEQ ID NO: 2797204 - DNA, 25 bp, Homo sapien
tgtagggtgaagctgcgtcacagcc

SEQ ID NO: 2797205 - DNA, 25 bp, Homo sapien
tagagttctcttataaccagctcct

SEQ ID NO: 2797206 - DNA, 25 bp, Homo sapien
aacgccagagtggaatagagttctc

SEQ ID NO: 2797207 - DNA, 25 bp, Homo sapien
tttcagcccgtctctctgtgtggtc

SEQ ID NO: 2797208 - DNA, 25 bp, Homo sapien
aaccttcgcatgacaccccttgtgg

SEQ ID NO: 2797209 - DNA, 25 bp, Homo sapien
gggtgtgccgcagaaagaagttttc

SEQ ID NO: 2797210 - DNA, 25 bp, Homo sapien
tagcagttaagatgccccattcctg

SEQ ID NO: 2797211 - DNA, 25 bp, Homo sapien
taggcatcactttctagccagtcca

SEQ ID NO: 2797212 - DNA, 25 bp, Homo sapien
tgtctggaaactcctaagcgcctgc

SEQ ID NO: 2797213 - DNA, 25 bp, Homo sapien
caccccagctcatggttatcttgta

SEQ ID NO: 2797214 - DNA, 25 bp, Homo sapien
aaggtgctttgcactgcaaacagac

SEQ ID NO: 2797215 - DNA, 25 bp, Homo sapien
tccggaatggagtttaccttgcaaa

SEQ ID NO: 2797216 - DNA, 25 bp, Homo sapien
tctttgccccgaaaatggtatcaga

SEQ ID NO: 2797217 - DNA, 25 bp, Homo sapien
gaattgccaccaaccactgaattgg

SEQ ID NO: 2797218 - DNA, 25 bp, Homo sapien
actgaattggaagaagggctccgga

SEQ ID NO: 2797219 - DNA, 25 bp, Homo sapien
cagtggttaagagcgatggagtcta

SEQ ID NO: 2797220 - DNA, 25 bp, Homo sapien
cgacacacagataataccgtccagt

SEQ ID NO: 2797221 - DNA, 25 bp, Homo sapien
ttaagagcgatggagtctattggtc

SEQ ID NO: 2797222 - DNA, 25 bp, Homo sapien
gataataccgtccagtggttaagag

SEQ ID NO: 2797223 - DNA, 25 bp, Homo sapien
aacataccaagaatgatatattgca

SEQ ID NO: 2797224 - DNA, 25 bp, Homo sapien
agaaacaacagatgtctatgatcgg

SEQ ID NO: 2797225 - DNA, 25 bp, Homo sapien
tctatgatcggaaaaacataccaag

SEQ ID NO: 2797226 - DNA, 25 bp, Homo sapien
tgatatattgcattcacgcactgag

SEQ ID NO: 2797227 - DNA, 25 bp, Homo sapien
agccaggtggctgtcttgcttacca

SEQ ID NO: 2797228 - DNA, 25 bp, Homo sapien
gttcaccagccgtccaggtactctg

SEQ ID NO: 2797229 - DNA, 25 bp, Homo sapien
tagagtttgtctagccagctcccac

SEQ ID NO: 2797230 - DNA, 25 bp, Homo sapien
tcaggtgcaatggtgatgccatggc

SEQ ID NO: 2797231 - DNA, 25 bp, Homo sapien
tatcttgcctgttaaattctgttta

SEQ ID NO: 2797232 - DNA, 25 bp, Homo sapien
taaatgatggcttgatctccattca

SEQ ID NO: 2797233 - DNA, 25 bp, Homo sapien
ttcttttgcagtttatcttgcctgt

SEQ ID NO: 2797234 - DNA, 25 bp, Homo sapien
aatgatggcttgatctccattcacc

SEQ ID NO: 2797235 - DNA, 25 bp, Homo sapien
gcgtgacactccacttagttgtcca

SEQ ID NO: 2797236 - DNA, 25 bp, Homo sapien
agttgtccatacaaccatctggaag

SEQ ID NO: 2797237 - DNA, 25 bp, Homo sapien
gctcttcagtgggagcctgcgtgac

SEQ ID NO: 2797238 - DNA, 25 bp, Homo sapien
gatagccagcatgctggcaggtgtt

SEQ ID NO: 2797239 - DNA, 25 bp, Homo sapien
tttgtatctgttcaaactaggaata

SEQ ID NO: 2797240 - DNA, 25 bp, Homo sapien
ccagatccaggatttgttgggcaaa

SEQ ID NO: 2797241 - DNA, 25 bp, Homo sapien
ccccagatccaggatttgttgggca

SEQ ID NO: 2797242 - DNA, 25 bp, Homo sapien
caccccagatccaggatttgttggg

SEQ ID NO: 2797243 - DNA, 25 bp, Homo sapien
tcagcaaaataggtggtattctggc

SEQ ID NO: 2797244 - DNA, 25 bp, Homo sapien
ccaatgaactgtccgtggatgaagc

SEQ ID NO: 2797245 - DNA, 25 bp, Homo sapien
gaactgtccgtggatgaagctgcat

SEQ ID NO: 2797246 - DNA, 25 bp, Homo sapien
tctttcagcaaaataggtggtattc

SEQ ID NO: 2797247 - DNA, 25 bp, Homo sapien
tacatgctgcagttatagccattaa

SEQ ID NO: 2797248 - DNA, 25 bp, Homo sapien
tgtaacactaagaaacccaaatgcg

SEQ ID NO: 2797249 - DNA, 25 bp, Homo sapien
atagcagagcaaaccgttgtaacac

SEQ ID NO: 2797250 - DNA, 25 bp, Homo sapien
tagtggatgacaaccttgcaccaga

SEQ ID NO: 2797251 - DNA, 25 bp, Homo sapien
tatggttgtctcagatgttgcagca

SEQ ID NO: 2797252 - DNA, 25 bp, Homo sapien
tctagtcacgaattaggcagacagg

SEQ ID NO: 2797253 - DNA, 25 bp, Homo sapien
gcaaaactctgcaatctctgtctga

SEQ ID NO: 2797254 - DNA, 25 bp, Homo sapien
gaatcttagctgcaatctagtcacg

SEQ ID NO: 2797255 - DNA, 25 bp, Homo sapien
tctctgcggtgagacggcttgctca

SEQ ID NO: 2797256 - DNA, 25 bp, Homo sapien
tccaagctcgcggatagagtgggca

SEQ ID NO: 2797257 - DNA, 25 bp, Homo sapien
taaatttctttcgagacggcacagc

SEQ ID NO: 2797258 - DNA, 25 bp, Homo sapien
tagtgtcccgctacagagctcagtc

SEQ ID NO: 2797259 - DNA, 25 bp, Homo sapien
taaaagaacgcccactctcttgtgg

SEQ ID NO: 2797260 - DNA, 25 bp, Homo sapien
gcctcaaatacatgaactctaaaag

SEQ ID NO: 2797261 - DNA, 25 bp, Homo sapien
gactagaatgttatagtaacatgtg

SEQ ID NO: 2797262 - DNA, 25 bp, Homo sapien
cactctcttgtggactagaatgtta

SEQ ID NO: 2797263 - DNA, 25 bp, Homo sapien
tgccaaaggctacagccattaaagg

SEQ ID NO: 2797264 - DNA, 25 bp, Homo sapien
tgattcctagaagtttccagttgtg

SEQ ID NO: 2797265 - DNA, 25 bp, Homo sapien
ggtaacatcttcatagaatggctgc

SEQ ID NO: 2797266 - DNA, 25 bp, Homo sapien
gggtcctctttagcagtatgtcaag

SEQ ID NO: 2797267 - DNA, 25 bp, Homo sapien
tttacttaagtctgatgaaatagaa

SEQ ID NO: 2797268 - DNA, 25 bp, Homo sapien
tttttacttaagtctgatgaaatag

SEQ ID NO: 2797269 - DNA, 25 bp, Homo sapien
tacttaagtctgatgaaatagaaaa

SEQ ID NO: 2797270 - DNA, 25 bp, Homo sapien
gatgaaatagaaaactgtgtacatt

SEQ ID NO: 2797271 - DNA, 25 bp, Homo sapien
gacttgtaaagtcatctcaggaatc

SEQ ID NO: 2797272 - DNA, 25 bp, Homo sapien
cctgtctaatcactgagttaaggga

SEQ ID NO: 2797273 - DNA, 25 bp, Homo sapien
taccactaatatcttccctgctgtc

SEQ ID NO: 2797274 - DNA, 25 bp, Homo sapien
cagtcaaggcagattcgtacagact

SEQ ID NO: 2797275 - DNA, 25 bp, Homo sapien
taaggcaaagacgttaggactagct

SEQ ID NO: 2797276 - DNA, 25 bp, Homo sapien
gaagcatatttcttaggagctcgga

SEQ ID NO: 2797277 - DNA, 25 bp, Homo sapien
cacttcagccaggtgacgaagcgag

SEQ ID NO: 2797278 - DNA, 25 bp, Homo sapien
aaagacttgggcctggcatcaccca

SEQ ID NO: 2797279 - DNA, 25 bp, Homo sapien
cagtggagtgatttctggtttttga

SEQ ID NO: 2797280 - DNA, 25 bp, Homo sapien
taagccatcagtgttgttgtagtag

SEQ ID NO: 2797281 - DNA, 25 bp, Homo sapien
ggcacaaagctatgagatatataaa

SEQ ID NO: 2797282 - DNA, 25 bp, Homo sapien
gaataatattgcttggagcaaagca

SEQ ID NO: 2797283 - DNA, 25 bp, Homo sapien
taagcaactattaagactacccagg

SEQ ID NO: 2797284 - DNA, 25 bp, Homo sapien
tgatcgtatgcattaagtgtccgga

SEQ ID NO: 2797285 - DNA, 25 bp, Homo sapien
acagggtcacagcattggccgggac

SEQ ID NO: 2797286 - DNA, 25 bp, Homo sapien
tccacatgttaccaaggcataggtg

SEQ ID NO: 2797287 - DNA, 25 bp, Homo sapien
tacagtaatcgtggctcctgtccag

SEQ ID NO: 2797288 - DNA, 25 bp, Homo sapien
tcttaatgggtaaggttggctttgc

SEQ ID NO: 2797289 - DNA, 25 bp, Homo sapien
taatgggtaaggttggctttgccaa

SEQ ID NO: 2797290 - DNA, 25 bp, Homo sapien
agaatttgggggagctccacgaaag

SEQ ID NO: 2797291 - DNA, 25 bp, Homo sapien
gctccacgaaaggtcttaatgggta

SEQ ID NO: 2797292 - DNA, 25 bp, Homo sapien
tagacttctatgccaaatataaacc

SEQ ID NO: 2797293 - DNA, 25 bp, Homo sapien
aatataaacctcattcttatcgatt

SEQ ID NO: 2797294 - DNA, 25 bp, Homo sapien
tataaacctcattcttatcgattta

SEQ ID NO: 2797295 - DNA, 25 bp, Homo sapien
gatagacttctatgccaaatataaa

SEQ ID NO: 2797296 - DNA, 25 bp, Homo sapien
gtttctagttgagccagtaaagccc

SEQ ID NO: 2797297 - DNA, 25 bp, Homo sapien
caaaaccacaacgaaataaggcagg

SEQ ID NO: 2797298 - DNA, 25 bp, Homo sapien
tattagcgtcttgaaggaaccaccc

SEQ ID NO: 2797299 - DNA, 25 bp, Homo sapien
agagaatgaactccggcctctcagg

SEQ ID NO: 2797300 - DNA, 25 bp, Homo sapien
gcagctgcaaagatgagggctttca

SEQ ID NO: 2797301 - DNA, 25 bp, Homo sapien
cagctgcaaagatgagggctttcat

SEQ ID NO: 2797302 - DNA, 25 bp, Homo sapien
cactctgacaaaaagtgggcaacag

SEQ ID NO: 2797303 - DNA, 25 bp, Homo sapien
tagaagtttgctctcctgtgccgtg

SEQ ID NO: 2797304 - DNA, 25 bp, Homo sapien
tgccgtgcaggcaggaaacttgccc

SEQ ID NO: 2797305 - DNA, 25 bp, Homo sapien
tccgcagggaaaggatgtaatccac

SEQ ID NO: 2797306 - DNA, 25 bp, Homo sapien
tcatggagcacaatttcacctcagt

SEQ ID NO: 2797307 - DNA, 25 bp, Homo sapien
tgggcagcacagctttaacgaccat

SEQ ID NO: 2797308 - DNA, 25 bp, Homo sapien
taacgaccatgtgagtgcttaccat

SEQ ID NO: 2797309 - DNA, 25 bp, Homo sapien
tataacttgcacaaatccacatggc

SEQ ID NO: 2797310 - DNA, 25 bp, Homo sapien
tgtactagccatgtctcaagtgctc

SEQ ID NO: 2797311 - DNA, 25 bp, Homo sapien
agacagcctgtaaatccccagcagc

SEQ ID NO: 2797312 - DNA, 25 bp, Homo sapien
aaggatacattgctttctcagccac

SEQ ID NO: 2797313 - DNA, 25 bp, Homo sapien
cacagccgctttaggaaacatgcca

SEQ ID NO: 2797314 - DNA, 25 bp, Homo sapien
gctgtaattagctgtgggcccacct

SEQ ID NO: 2797315 - DNA, 25 bp, Homo sapien
gagtccactgagtcaaagcatcatt

SEQ ID NO: 2797316 - DNA, 25 bp, Homo sapien
aagcatcattatgttagcgtaagtg

SEQ ID NO: 2797317 - DNA, 25 bp, Homo sapien
catctttgaaaatacgtcattgttc

SEQ ID NO: 2797318 - DNA, 25 bp, Homo sapien
aatgcttcagaagcaaatgttgagt

SEQ ID NO: 2797319 - DNA, 25 bp, Homo sapien
tctgttagtagattcttaggttgat

SEQ ID NO: 2797320 - DNA, 25 bp, Homo sapien
gatttcataacttagctaacgtgtg

SEQ ID NO: 2797321 - DNA, 25 bp, Homo sapien
gagtaaacacccagaagttggattg

SEQ ID NO: 2797322 - DNA, 25 bp, Homo sapien
gatttcacatcttggagtaaacacc

SEQ ID NO: 2797323 - DNA, 25 bp, Homo sapien
aactgttctgaagaatgtacccagg

SEQ ID NO: 2797324 - DNA, 25 bp, Homo sapien
gaattatttagacagttctaagccc

SEQ ID NO: 2797325 - DNA, 25 bp, Homo sapien
ggacatcctgtgatctgttttaaag

SEQ ID NO: 2797326 - DNA, 25 bp, Homo sapien
tgactagggacaaacatgtaaacct

SEQ ID NO: 2797327 - DNA, 25 bp, Homo sapien
ctggcgtactctgggaagggcttcc

SEQ ID NO: 2797328 - DNA, 25 bp, Homo sapien
catctgggctttggccatcgcaggg

SEQ ID NO: 2797329 - DNA, 25 bp, Homo sapien
tgtgctcaatgaaaccctgctcgaa

SEQ ID NO: 2797330 - DNA, 25 bp, Homo sapien
tcataagcattgaccggtttctggc

SEQ ID NO: 2797331 - DNA, 25 bp, Homo sapien
tggctgagaggaagctaagaatgtc

SEQ ID NO: 2797332 - DNA, 25 bp, Homo sapien
taagaatgtcggcagctccaggtgc

SEQ ID NO: 2797333 - DNA, 25 bp, Homo sapien
ggatgactcccaagcaagggcattg

SEQ ID NO: 2797334 - DNA, 25 bp, Homo sapien
gtgacattgtcagcacctttgagag

SEQ ID NO: 2797335 - DNA, 25 bp, Homo sapien
tcagaagatgtaaacaccagagtgg

SEQ ID NO: 2797336 - DNA, 25 bp, Homo sapien
agttctctaggccaaggcccaagcc

SEQ ID NO: 2797337 - DNA, 25 bp, Homo sapien
gaagacttgaatggggcccgtttca

SEQ ID NO: 2797338 - DNA, 25 bp, Homo sapien
tggggcccgtttcacaacagcaaca

SEQ ID NO: 2797339 - DNA, 25 bp, Homo sapien
caagagtgtgggagaccaaggacaa

SEQ ID NO: 2797340 - DNA, 25 bp, Homo sapien
tacttggcccacacctgaaactgga

SEQ ID NO: 2797341 - DNA, 25 bp, Homo sapien
caaggacaaggcgatacttggccca

SEQ ID NO: 2797342 - DNA, 25 bp, Homo sapien
ccttcggccaagtcaataagagctg

SEQ ID NO: 2797343 - DNA, 25 bp, Homo sapien
acaagccagctgtagctttgaagac

SEQ ID NO: 2797344 - DNA, 25 bp, Homo sapien
gctgggcactgagtaataagcaatt

SEQ ID NO: 2797345 - DNA, 25 bp, Homo sapien
tagctttgaagactgtttagggagc

SEQ ID NO: 2797346 - DNA, 25 bp, Homo sapien
tgaagactgtttagggagcctgctg

SEQ ID NO: 2797347 - DNA, 25 bp, Homo sapien
gctcatccaccgctaacttagtctt

SEQ ID NO: 2797348 - DNA, 25 bp, Homo sapien
tctttgatgcttttactttgacccc

SEQ ID NO: 2797349 - DNA, 25 bp, Homo sapien
gctaacttagtctttgatgctttta

SEQ ID NO: 2797350 - DNA, 25 bp, Homo sapien
caccgctaacttagtctttgatgct

SEQ ID NO: 2797351 - DNA, 25 bp, Homo sapien
ttggagtgagcaggtcggttttctt

SEQ ID NO: 2797352 - DNA, 25 bp, Homo sapien
ttttctttgagctgtgcagcagcag

SEQ ID NO: 2797353 - DNA, 25 bp, Homo sapien
cttggctaaactcaatccagcacag

SEQ ID NO: 2797354 - DNA, 25 bp, Homo sapien
gcagcagtctccttggctaaactca

SEQ ID NO: 2797355 - DNA, 25 bp, Homo sapien
gattccaggcaaacaacagcgtctg

SEQ ID NO: 2797356 - DNA, 25 bp, Homo sapien
tccaggcaaacaacagcgtctgacc

SEQ ID NO: 2797357 - DNA, 25 bp, Homo sapien
gccccagggattccaggcaaacaac

SEQ ID NO: 2797358 - DNA, 25 bp, Homo sapien
ccagggattccaggcaaacaacagc

SEQ ID NO: 2797359 - DNA, 25 bp, Homo sapien
gagaggtactagtatcattcccaga

SEQ ID NO: 2797360 - DNA, 25 bp, Homo sapien
gaggaagattccaccttaaaggcag

SEQ ID NO: 2797361 - DNA, 25 bp, Homo sapien
aatttaaatcgaaagcagctggacc

SEQ ID NO: 2797362 - DNA, 25 bp, Homo sapien
tgatccctatcaggagagctgtccg

SEQ ID NO: 2797363 - DNA, 25 bp, Homo sapien
gcctctgcctatgtgctgatgatca

SEQ ID NO: 2797364 - DNA, 25 bp, Homo sapien
taacagctgcatcgacccctttgtc

SEQ ID NO: 2797365 - DNA, 25 bp, Homo sapien
cagaggtattgggtcatcgtgaacc

SEQ ID NO: 2797366 - DNA, 25 bp, Homo sapien
tattttctgattaagagccagggcc

SEQ ID NO: 2797367 - DNA, 25 bp, Homo sapien
tgcacacagagatttgagaaccatt

SEQ ID NO: 2797368 - DNA, 25 bp, Homo sapien
ggaatctgtgtggtacaaacctgca

SEQ ID NO: 2797369 - DNA, 25 bp, Homo sapien
aaacctgcatggtgtttatgcacac

SEQ ID NO: 2797370 - DNA, 25 bp, Homo sapien
gattgttttgccacttagaatagca

SEQ ID NO: 2797371 - DNA, 25 bp, Homo sapien
tagctcgggcctacaggaacatgcc

SEQ ID NO: 2797372 - DNA, 25 bp, Homo sapien
cagggtgtcggtctattacccaggc

SEQ ID NO: 2797373 - DNA, 25 bp, Homo sapien
cttcagcctccgtattagctcgggc

SEQ ID NO: 2797374 - DNA, 25 bp, Homo sapien
tccgtattagctcgggcctacagga

SEQ ID NO: 2797375 - DNA, 25 bp, Homo sapien
tgatgaagaaacgtgcctgcagtgt

SEQ ID NO: 2797376 - DNA, 25 bp, Homo sapien
ctgggaggaaaacggcttgctaatc

SEQ ID NO: 2797377 - DNA, 25 bp, Homo sapien
aacagcactactcacagcagggcct

SEQ ID NO: 2797378 - DNA, 25 bp, Homo sapien
tctggaccacgcagactcagaacag

SEQ ID NO: 2797379 - DNA, 25 bp, Homo sapien
gagagagggagagagcagcctgatc

SEQ ID NO: 2797380 - DNA, 25 bp, Homo sapien
gagagggagagagcagcctgatcat

SEQ ID NO: 2797381 - DNA, 25 bp, Homo sapien
agagagggagagagcagcctgatca

SEQ ID NO: 2797382 - DNA, 25 bp, Homo sapien
agtgctgggcatgcctggacaatca

SEQ ID NO: 2797383 - DNA, 25 bp, Homo sapien
gaaccttcaaggtgaggcttggccc

SEQ ID NO: 2797384 - DNA, 25 bp, Homo sapien
tggccccttagatccacgccgtgat

SEQ ID NO: 2797385 - DNA, 25 bp, Homo sapien
gacaatcagccctggaatggctgct

SEQ ID NO: 2797386 - DNA, 25 bp, Homo sapien
ctctctgcaactgagttcaaatgat

SEQ ID NO: 2797387 - DNA, 25 bp, Homo sapien
agctctctgcaactgagttcaaatg

SEQ ID NO: 2797388 - DNA, 25 bp, Homo sapien
tcagctctctgcaactgagttcaaa

SEQ ID NO: 2797389 - DNA, 25 bp, Homo sapien
gctctctgcaactgagttcaaatga

SEQ ID NO: 2797390 - DNA, 25 bp, Homo sapien
tacagcatacagtcccgtgtctcgg

SEQ ID NO: 2797391 - DNA, 25 bp, Homo sapien
cagaagctggtgtgaccaaggaact

SEQ ID NO: 2797392 - DNA, 25 bp, Homo sapien
gatgagttttgcttaggtcccgtga

SEQ ID NO: 2797393 - DNA, 25 bp, Homo sapien
tcggctgagtcatcgcattccttaa

SEQ ID NO: 2797394 - DNA, 25 bp, Homo sapien
agccattgcccccgccaaatttcct

SEQ ID NO: 2797395 - DNA, 25 bp, Homo sapien
tatatgtctatcctttcctgatacc

SEQ ID NO: 2797396 - DNA, 25 bp, Homo sapien
tcctttcctgataccatatagtctt

SEQ ID NO: 2797397 - DNA, 25 bp, Homo sapien
cctgataccatatagtcttgatgac

SEQ ID NO: 2797398 - DNA, 25 bp, Homo sapien
agtcttgatgactattgctttgtag

SEQ ID NO: 2797399 - DNA, 25 bp, Homo sapien
cttcagccccgtagcgtggttgaac

SEQ ID NO: 2797400 - DNA, 25 bp, Homo sapien
tggttgaaccttggtggggatggag

SEQ ID NO: 2797401 - DNA, 25 bp, Homo sapien
agccccgtagcgtggttgaaccttg

SEQ ID NO: 2797402 - DNA, 25 bp, Homo sapien
cagccccgtagcgtggttgaacctt

SEQ ID NO: 2797403 - DNA, 25 bp, Homo sapien
tctggtgatgtgtggaacagatgtt

SEQ ID NO: 2797404 - DNA, 25 bp, Homo sapien
ggtgatgtgtggaacagatgtttta

SEQ ID NO: 2797405 - DNA, 25 bp, Homo sapien
aatctggtgatgtgtggaacagatg

SEQ ID NO: 2797406 - DNA, 25 bp, Homo sapien
tgaaatctggtgatgtgtggaacag

SEQ ID NO: 2797407 - DNA, 25 bp, Homo sapien
tgggacacgtaaatggtcttcagtt

SEQ ID NO: 2797408 - DNA, 25 bp, Homo sapien
ccctgggacacgtaaatggtcttca

SEQ ID NO: 2797409 - DNA, 25 bp, Homo sapien
ctgggacacgtaaatggtcttcagt

SEQ ID NO: 2797410 - DNA, 25 bp, Homo sapien
cctgggacacgtaaatggtcttcag

SEQ ID NO: 2797411 - DNA, 25 bp, Homo sapien
gaggaactggattggacccttccaa

SEQ ID NO: 2797412 - DNA, 25 bp, Homo sapien
ggaataggagactttgtggagctgc

SEQ ID NO: 2797413 - DNA, 25 bp, Homo sapien
gacgcctttagctgatctctgctac

SEQ ID NO: 2797414 - DNA, 25 bp, Homo sapien
cctcagcaggttgcgagggaatagg

SEQ ID NO: 2797415 - DNA, 25 bp, Homo sapien
caacactgtggtgcgcatggtctcc

SEQ ID NO: 2797416 - DNA, 25 bp, Homo sapien
acttttgagtatcgtcagctggagc

SEQ ID NO: 2797417 - DNA, 25 bp, Homo sapien
tggagccgtacgagctggaaaaccc

SEQ ID NO: 2797418 - DNA, 25 bp, Homo sapien
gtcagtattcccagccttgagcgca

SEQ ID NO: 2797419 - DNA, 25 bp, Homo sapien
catcattaaggttggcagtctgttc

SEQ ID NO: 2797420 - DNA, 25 bp, Homo sapien
gtagatatgtacagctctgcaggga

SEQ ID NO: 2797421 - DNA, 25 bp, Homo sapien
cccgtagaactagttacatcccgag

SEQ ID NO: 2797422 - DNA, 25 bp, Homo sapien
tacatagatggcttaaccacctccc

SEQ ID NO: 2797423 - DNA, 25 bp, Homo sapien
tgcacattagaatcctcagacacac

SEQ ID NO: 2797424 - DNA, 25 bp, Homo sapien
cccatttacaggtaaggacatatgg

SEQ ID NO: 2797425 - DNA, 25 bp, Homo sapien
gggaaaccaagacatacagcaagtg

SEQ ID NO: 2797426 - DNA, 25 bp, Homo sapien
ataggatcgattatatacagcaggg

SEQ ID NO: 2797427 - DNA, 25 bp, Homo sapien
cctttggcctgagggactgtttgtg

SEQ ID NO: 2797428 - DNA, 25 bp, Homo sapien
tcctttgcattggaagcacttttac

SEQ ID NO: 2797429 - DNA, 25 bp, Homo sapien
aaatggtactatattctaaagatgc

SEQ ID NO: 2797430 - DNA, 25 bp, Homo sapien
taaagatgcacttagcagcaatttc

SEQ ID NO: 2797431 - DNA, 25 bp, Homo sapien
ggtttgtctgtctgcctgttacaaa

SEQ ID NO: 2797432 - DNA, 25 bp, Homo sapien
ttgtctgtctgcctgttacaaatat

SEQ ID NO: 2797433 - DNA, 25 bp, Homo sapien
ctctgtggggggtttgtctgtctgc

SEQ ID NO: 2797434 - DNA, 25 bp, Homo sapien
tctgtctgcctgttacaaatatcac

SEQ ID NO: 2797435 - DNA, 25 bp, Homo sapien
tccagtacgggctcctgatgaacag

SEQ ID NO: 2797436 - DNA, 25 bp, Homo sapien
ctgagtcagtagggccaaatttgat

SEQ ID NO: 2797437 - DNA, 25 bp, Homo sapien
tgaagtaacctgaatcctgagtcag

SEQ ID NO: 2797438 - DNA, 25 bp, Homo sapien
caaatttgataggatgattggctcc

SEQ ID NO: 2797439 - DNA, 25 bp, Homo sapien
gagaaagaattaatataatgtccat

SEQ ID NO: 2797440 - DNA, 25 bp, Homo sapien
gagagaaagaattaatataatgtcc

SEQ ID NO: 2797441 - DNA, 25 bp, Homo sapien
tataatgtccatcccttttcttcat

SEQ ID NO: 2797442 - DNA, 25 bp, Homo sapien
gaggagagaaagaattaatataatg

SEQ ID NO: 2797443 - DNA, 25 bp, Homo sapien
agttttccggtttgcaggccgcgca

SEQ ID NO: 2797444 - DNA, 25 bp, Homo sapien
cggcgtccgtttcggcctgaacgca

SEQ ID NO: 2797445 - DNA, 25 bp, Homo sapien
cccgttcggctacaagtgagtttca

SEQ ID NO: 2797446 - DNA, 25 bp, Homo sapien
tggttttccgactgcttatccgacg

SEQ ID NO: 2797447 - DNA, 25 bp, Homo sapien
acaagcagctgtgattgcaggggcc

SEQ ID NO: 2797448 - DNA, 25 bp, Homo sapien
tagagacaaggttcacagcgttggc

SEQ ID NO: 2797449 - DNA, 25 bp, Homo sapien
cagcctgacaagcagctgtgattgc

SEQ ID NO: 2797450 - DNA, 25 bp, Homo sapien
agtagagacaaggttcacagcgttg

SEQ ID NO: 2797451 - DNA, 25 bp, Homo sapien
ggaaattatcagtaaccccagaagc

SEQ ID NO: 2797452 - DNA, 25 bp, Homo sapien
cctaacagcaatagattaatttcac

SEQ ID NO: 2797453 - DNA, 25 bp, Homo sapien
gaaaggtaatcaccatcctaacagc

SEQ ID NO: 2797454 - DNA, 25 bp, Homo sapien
tatagctcaatgatacatcataaga

SEQ ID NO: 2797455 - DNA, 25 bp, Homo sapien
agaacaaggattttgtagtcagacc

SEQ ID NO: 2797456 - DNA, 25 bp, Homo sapien
gtaacctgactgtagaactttctgg

SEQ ID NO: 2797457 - DNA, 25 bp, Homo sapien
cagacctaggttagaatatgtgctc

SEQ ID NO: 2797458 - DNA, 25 bp, Homo sapien
cagtgtgagtatataccagctttct

SEQ ID NO: 2797459 - DNA, 25 bp, Homo sapien
caagaccaatttatgagccacacta

SEQ ID NO: 2797460 - DNA, 25 bp, Homo sapien
aagaatgtgctagggactcatggcc

SEQ ID NO: 2797461 - DNA, 25 bp, Homo sapien
gactcccagtgctacctgaattcat

SEQ ID NO: 2797462 - DNA, 25 bp, Homo sapien
aagaggagtatttgccaactcaagg

SEQ ID NO: 2797463 - DNA, 25 bp, Homo sapien
tcaccatctcctgacagtggacaag

SEQ ID NO: 2797464 - DNA, 25 bp, Homo sapien
tggagtcagatgacgcgccacagtc

SEQ ID NO: 2797465 - DNA, 25 bp, Homo sapien
ggtgttctcaggaatcctcccaggg

SEQ ID NO: 2797466 - DNA, 25 bp, Homo sapien
caggagcccttaaggccaaagagac

SEQ ID NO: 2797467 - DNA, 25 bp, Homo sapien
tctctgtctcctgaacaggacattc

SEQ ID NO: 2797468 - DNA, 25 bp, Homo sapien
caggctcgcactagccatctttgag

SEQ ID NO: 2797469 - DNA, 25 bp, Homo sapien
ctttgagggagtagttaagattcta

SEQ ID NO: 2797470 - DNA, 25 bp, Homo sapien
gcactcaggttaattgttctctgtc

SEQ ID NO: 2797471 - DNA, 25 bp, Homo sapien
tgttaattaatagcagttttacaga

SEQ ID NO: 2797472 - DNA, 25 bp, Homo sapien
gttgattggcttcaaaccaaacagt

SEQ ID NO: 2797473 - DNA, 25 bp, Homo sapien
aaagtagatttacataccagaatgg

SEQ ID NO: 2797474 - DNA, 25 bp, Homo sapien
ccttgactgaggcaatacattttgt

SEQ ID NO: 2797475 - DNA, 25 bp, Homo sapien
tctttattgactaaacagcttaaaa

SEQ ID NO: 2797476 - DNA, 25 bp, Homo sapien
tgacgcattaaatctttattgacta

SEQ ID NO: 2797477 - DNA, 25 bp, Homo sapien
aatctttattgactaaacagcttaa

SEQ ID NO: 2797478 - DNA, 25 bp, Homo sapien
taaatctttattgactaaacagctt

SEQ ID NO: 2797479 - DNA, 25 bp, Homo sapien
gacatttgctaagacagctggcctg

SEQ ID NO: 2797480 - DNA, 25 bp, Homo sapien
tctgcagggatatgagccacgagtg

SEQ ID NO: 2797481 - DNA, 25 bp, Homo sapien
taaagccagcgcaatgttaccatgg

SEQ ID NO: 2797482 - DNA, 25 bp, Homo sapien
gaaatagacttagcagagcaggcgc

SEQ ID NO: 2797483 - DNA, 25 bp, Homo sapien
tatgggcagtaaaaaagcgggctct

SEQ ID NO: 2797484 - DNA, 25 bp, Homo sapien
cagatgtgaggcctgaaagtggaca

SEQ ID NO: 2797485 - DNA, 25 bp, Homo sapien
gatgcgggtctacagcagtcatgga

SEQ ID NO: 2797486 - DNA, 25 bp, Homo sapien
ggttcccagccctaagtggccatgg

SEQ ID NO: 2797487 - DNA, 25 bp, Homo sapien
cttagggtgtggaagatcctacagt

SEQ ID NO: 2797488 - DNA, 25 bp, Homo sapien
cattggcattggacggagaagcgct

SEQ ID NO: 2797489 - DNA, 25 bp, Homo sapien
tgcgggcctggcttcggttacggct

SEQ ID NO: 2797490 - DNA, 25 bp, Homo sapien
tagctggagcttccgagtgagtagc

SEQ ID NO: 2797491 - DNA, 25 bp, Homo sapien
acggcggctcacatcccgcagccgc

SEQ ID NO: 2797492 - DNA, 25 bp, Homo sapien
tcaccctcggggtcgtccttgagcg

SEQ ID NO: 2797493 - DNA, 25 bp, Homo sapien
cccagggcgccctcacggcggctca

SEQ ID NO: 2797494 - DNA, 25 bp, Homo sapien
tgtgatgacgcagccgtccctgtca

SEQ ID NO: 2797495 - DNA, 25 bp, Homo sapien
ctgttccagcaggcgcgcccagtcg

SEQ ID NO: 2797496 - DNA, 25 bp, Homo sapien
caggtgcctccacaacgccgaggtc

SEQ ID NO: 2797497 - DNA, 25 bp, Homo sapien
caacgccgaggtccccgcgtggaag

SEQ ID NO: 2797498 - DNA, 25 bp, Homo sapien
gccggtgcgcgctcctcaggtgcct

SEQ ID NO: 2797499 - DNA, 25 bp, Homo sapien
ccaggcggccgggaggcgtcggcgt

SEQ ID NO: 2797500 - DNA, 25 bp, Homo sapien
gccgggaggcgtcggcgtcggcgcc

SEQ ID NO: 2797501 - DNA, 25 bp, Homo sapien
aggcctcggagtatggcgcccccag

SEQ ID NO: 2797502 - DNA, 25 bp, Homo sapien
caggtggaagtagccccaggcctcg

SEQ ID NO: 2797503 - DNA, 25 bp, Homo sapien
gtgcaggccggctcgccactcctca

SEQ ID NO: 2797504 - DNA, 25 bp, Homo sapien
tgcaggccggctcgccactcctcat

SEQ ID NO: 2797505 - DNA, 25 bp, Homo sapien
ggtgcaggccggctcgccactcctc

SEQ ID NO: 2797506 - DNA, 25 bp, Homo sapien
gcaacacgattcctgagttctgaag

SEQ ID NO: 2797507 - DNA, 25 bp, Homo sapien
caatgcatgcaacacgattcctgag

SEQ ID NO: 2797508 - DNA, 25 bp, Homo sapien
gggtagaaacaatgcatgcaacacg

SEQ ID NO: 2797509 - DNA, 25 bp, Homo sapien
gagttctgaagaaccatcagcagtg

SEQ ID NO: 2797510 - DNA, 25 bp, Homo sapien
caaaggtgccaatgaatttgagtat

SEQ ID NO: 2797511 - DNA, 25 bp, Homo sapien
tgagcatacccaatgagaatgcatg

SEQ ID NO: 2797512 - DNA, 25 bp, Homo sapien
tgaaaagtaagagatccctcaattt

SEQ ID NO: 2797513 - DNA, 25 bp, Homo sapien
gaatgcatgtcattaattctgtggt

SEQ ID NO: 2797514 - DNA, 25 bp, Homo sapien
tggctcattagaaattcgactagtg

SEQ ID NO: 2797515 - DNA, 25 bp, Homo sapien
tcgggcatttggttcgtgcaagaaa

SEQ ID NO: 2797516 - DNA, 25 bp, Homo sapien
ccctaattaggtcaatgtattaagc

SEQ ID NO: 2797517 - DNA, 25 bp, Homo sapien
tttgctttgctaagcctcgggcatt

SEQ ID NO: 2797518 - DNA, 25 bp, Homo sapien
tgctttctcacagtcgcgacagccg

SEQ ID NO: 2797519 - DNA, 25 bp, Homo sapien
caagcttgtcgaaagaggagtgcag

SEQ ID NO: 2797520 - DNA, 25 bp, Homo sapien
actgctccagcggactccgaaagga

SEQ ID NO: 2797521 - DNA, 25 bp, Homo sapien
cgaaagtgggcgacatcaagcaagt

SEQ ID NO: 2797522 - DNA, 25 bp, Homo sapien
ccgcctcgccaccgagtctggaagc

SEQ ID NO: 2797523 - DNA, 25 bp, Homo sapien
gcccgcctcgccaccgagtctggaa

SEQ ID NO: 2797524 - DNA, 25 bp, Homo sapien
cccgcctcgccaccgagtctggaag

SEQ ID NO: 2797525 - DNA, 25 bp, Homo sapien
tcgggagtccgagatggtagatccc

SEQ ID NO: 2797526 - DNA, 25 bp, Homo sapien
aagacacagcgctgcattcacacgt

SEQ ID NO: 2797527 - DNA, 25 bp, Homo sapien
gcgcgtgccccttaaagacacagcg

SEQ ID NO: 2797528 - DNA, 25 bp, Homo sapien
cgctgacattttgtcccggacggaa

SEQ ID NO: 2797529 - DNA, 25 bp, Homo sapien
cacccagccgaagagaagatttttt

SEQ ID NO: 2797530 - DNA, 25 bp, Homo sapien
ctgggactaagggaactacaggcgc

SEQ ID NO: 2797531 - DNA, 25 bp, Homo sapien
cgcacccagccgaagagaagatttt

SEQ ID NO: 2797532 - DNA, 25 bp, Homo sapien
cctcccgggagcttgtgtggagcta

SEQ ID NO: 2797533 - DNA, 25 bp, Homo sapien
tttctgttaacatgcatacagttga

SEQ ID NO: 2797534 - DNA, 25 bp, Homo sapien
gtctacttcacttagctccgcattt

SEQ ID NO: 2797535 - DNA, 25 bp, Homo sapien
tcataaaggcccgtagtgtactttc

SEQ ID NO: 2797536 - DNA, 25 bp, Homo sapien
cacttagctccgcatttgcaatttc

SEQ ID NO: 2797537 - DNA, 25 bp, Homo sapien
ctgtatcccaggcttcccgtagagg

SEQ ID NO: 2797538 - DNA, 25 bp, Homo sapien
ttatgtggggcctatcgctcttcca

SEQ ID NO: 2797539 - DNA, 25 bp, Homo sapien
tcgctcttccacacagtaaggaacc

SEQ ID NO: 2797540 - DNA, 25 bp, Homo sapien
accacgtgaaggcttgggagctgaa

SEQ ID NO: 2797541 - DNA, 25 bp, Homo sapien
agtctaggctgctcactgttttcca

SEQ ID NO: 2797542 - DNA, 25 bp, Homo sapien
tcagtctaggctgctcactgttttc

SEQ ID NO: 2797543 - DNA, 25 bp, Homo sapien
tccatcagtctaggctgctcactgt

SEQ ID NO: 2797544 - DNA, 25 bp, Homo sapien
catcagtctaggctgctcactgttt

SEQ ID NO: 2797545 - DNA, 25 bp, Homo sapien
tgaacttctggcctgcaacggtccc

SEQ ID NO: 2797546 - DNA, 25 bp, Homo sapien
gaacttctggcctgcaacggtccct

SEQ ID NO: 2797547 - DNA, 25 bp, Homo sapien
gaatctcaactgtatccaagtcaga

SEQ ID NO: 2797548 - DNA, 25 bp, Homo sapien
tctgcaggatacataatagcaccac

SEQ ID NO: 2797549 - DNA, 25 bp, Homo sapien
gggaggtcatctgctttgaatctca

SEQ ID NO: 2797550 - DNA, 25 bp, Homo sapien
gcagtccatggatccttgaaacagg

SEQ ID NO: 2797551 - DNA, 25 bp, Homo sapien
cacccttgtgggatctcgccatgag

SEQ ID NO: 2797552 - DNA, 25 bp, Homo sapien
taagattctgagtacattgagctgc

SEQ ID NO: 2797553 - DNA, 25 bp, Homo sapien
ggagcctcatgcatacctggacctg

SEQ ID NO: 2797554 - DNA, 25 bp, Homo sapien
tgagaggaactacgctcaaggagcc

SEQ ID NO: 2797555 - DNA, 25 bp, Homo sapien
tacatggggatggtagattttttat

SEQ ID NO: 2797556 - DNA, 25 bp, Homo sapien
atacatggggatggtagatttttta

SEQ ID NO: 2797557 - DNA, 25 bp, Homo sapien
tatacatggggatggtagatttttt

SEQ ID NO: 2797558 - DNA, 25 bp, Homo sapien
tcttcttctttgtactctgctgtcc

SEQ ID NO: 2797559 - DNA, 25 bp, Homo sapien
ggacactgaaggccaacctctaatc

SEQ ID NO: 2797560 - DNA, 25 bp, Homo sapien
gaccccatggccttgttgtcttctt

SEQ ID NO: 2797561 - DNA, 25 bp, Homo sapien
tgaaggccaacctctaatcttactt

SEQ ID NO: 2797562 - DNA, 25 bp, Homo sapien
cttgcttccgtaccagttcagctgg

SEQ ID NO: 2797563 - DNA, 25 bp, Homo sapien
tcagctggtaccctgatgagtaagt

SEQ ID NO: 2797564 - DNA, 25 bp, Homo sapien
gtggacaaggctctgtgtctgctcc

SEQ ID NO: 2797565 - DNA, 25 bp, Homo sapien
ctgctccaaatgctgaatgggtgac

SEQ ID NO: 2797566 - DNA, 25 bp, Homo sapien
tcagcccattggtcgggcttgccac

SEQ ID NO: 2797567 - DNA, 25 bp, Homo sapien
catcagcccattggtcgggcttgcc

SEQ ID NO: 2797568 - DNA, 25 bp, Homo sapien
ttggtcgggcttgccacctggtgcc

SEQ ID NO: 2797569 - DNA, 25 bp, Homo sapien
ccattggtcgggcttgccacctggt

SEQ ID NO: 2797570 - DNA, 25 bp, Homo sapien
tcttgagtgccaaaatgccctttgg

SEQ ID NO: 2797571 - DNA, 25 bp, Homo sapien
taacatgccatggtcaaaataaagg

SEQ ID NO: 2797572 - DNA, 25 bp, Homo sapien
ttatcaagggtgattgtggtctggc

SEQ ID NO: 2797573 - DNA, 25 bp, Homo sapien
ttccagggagttctaaggccagtcc

SEQ ID NO: 2797574 - DNA, 25 bp, Homo sapien
tgggcagcggtagcagcgcgggttc

SEQ ID NO: 2797575 - DNA, 25 bp, Homo sapien
tctactgccgggactcggacgagtc

SEQ ID NO: 2797576 - DNA, 25 bp, Homo sapien
cagcatccatgtctcgcagagcggc

SEQ ID NO: 2797577 - DNA, 25 bp, Homo sapien
tcgcagagcggcgtgatctactgcc

SEQ ID NO: 2797578 - DNA, 25 bp, Homo sapien
ttcctgttcagagctttcattcttg

SEQ ID NO: 2797579 - DNA, 25 bp, Homo sapien
gccttatcagctgtcaaggccattt

SEQ ID NO: 2797580 - DNA, 25 bp, Homo sapien
tgaagcatgccacttaagaagcact

SEQ ID NO: 2797581 - DNA, 25 bp, Homo sapien
gccatttgctcttgtttacctgaag

SEQ ID NO: 2797582 - DNA, 25 bp, Homo sapien
gcatgccacttaagaagcacttcat

SEQ ID NO: 2797583 - DNA, 25 bp, Homo sapien
tctccctctatgatgattccaggaa

SEQ ID NO: 2797584 - DNA, 25 bp, Homo sapien
actcagaaatccttgccgtcgctgc

SEQ ID NO: 2797585 - DNA, 25 bp, Homo sapien
taatggaatccagttactcccttcc

SEQ ID NO: 2797586 - DNA, 25 bp, Homo sapien
tctctttggaacttggggattgaaa

SEQ ID NO: 2797587 - DNA, 25 bp, Homo sapien
agacatgtttcctgggccgccaagg

SEQ ID NO: 2797588 - DNA, 25 bp, Homo sapien
tactccaggagacatagcatgattc

SEQ ID NO: 2797589 - DNA, 25 bp, Homo sapien
gcccagtgatagttccctttgcagg

SEQ ID NO: 2797590 - DNA, 25 bp, Homo sapien
caaggtccctcttctcagatgtgag

SEQ ID NO: 2797591 - DNA, 25 bp, Homo sapien
ctaagtgccagtaagtagtggttgt

SEQ ID NO: 2797592 - DNA, 25 bp, Homo sapien
cagtaagtagtggttgttggatata

SEQ ID NO: 2797593 - DNA, 25 bp, Homo sapien
gtcaacaaagaggacatatccaatt

SEQ ID NO: 2797594 - DNA, 25 bp, Homo sapien
gttggatatagtcaacaaagaggac

SEQ ID NO: 2797595 - DNA, 25 bp, Homo sapien
tttcaaaggatcaagcacatattta

SEQ ID NO: 2797596 - DNA, 25 bp, Homo sapien
gtttcaaaggatcaagcacatattt

SEQ ID NO: 2797597 - DNA, 25 bp, Homo sapien
ttcaaaggatcaagcacatatttat

SEQ ID NO: 2797598 - DNA, 25 bp, Homo sapien
gaagctccagcgtgctgcctggctt

SEQ ID NO: 2797599 - DNA, 25 bp, Homo sapien
tctcttgggttgttccctgctcttg

SEQ ID NO: 2797600 - DNA, 25 bp, Homo sapien
gatcctaatcagtgcgtgtttctca

SEQ ID NO: 2797601 - DNA, 25 bp, Homo sapien
aatcagtgcgtgtttctcacaagcc

SEQ ID NO: 2797602 - DNA, 25 bp, Homo sapien
tgggttgttccctgctcttgatcct

SEQ ID NO: 2797603 - DNA, 25 bp, Homo sapien
ccttgtgggagaagatccaagtact

SEQ ID NO: 2797604 - DNA, 25 bp, Homo sapien
gatattcctgctccaaaacgaggag

SEQ ID NO: 2797605 - DNA, 25 bp, Homo sapien
tagccaatagcaagagtccgacagg

SEQ ID NO: 2797606 - DNA, 25 bp, Homo sapien
tcaatcagccccagtatgcatggct

SEQ ID NO: 2797607 - DNA, 25 bp, Homo sapien
cagtgtatggttggaacaacgccat

SEQ ID NO: 2797608 - DNA, 25 bp, Homo sapien
tgtaggcctggttggaatcatcacg

SEQ ID NO: 2797609 - DNA, 25 bp, Homo sapien
caaggttctggaggacaacaagctg

SEQ ID NO: 2797610 - DNA, 25 bp, Homo sapien
tgccttctgaaagacctggccatgc

SEQ ID NO: 2797611 - DNA, 25 bp, Homo sapien
tgtagaaccgacaattgtgacaggt

SEQ ID NO: 2797612 - DNA, 25 bp, Homo sapien
ggtcttgcccacgatgcatccattg

SEQ ID NO: 2797613 - DNA, 25 bp, Homo sapien
tggcttggacctaaaggatcagact

SEQ ID NO: 2797614 - DNA, 25 bp, Homo sapien
aaatgtcaacattccaacaagtggg

SEQ ID NO: 2797615 - DNA, 25 bp, Homo sapien
tcctctggcccaaggaatcaagttt

SEQ ID NO: 2797616 - DNA, 25 bp, Homo sapien
ttcctctggcccaaggaatcaagtt

SEQ ID NO: 2797617 - DNA, 25 bp, Homo sapien
tgctggaaagcacatcactgtgtct

SEQ ID NO: 2797618 - DNA, 25 bp, Homo sapien
gcaaagctctctgagtctagtagta

SEQ ID NO: 2797619 - DNA, 25 bp, Homo sapien
tctccattatactgtgccagccaag

SEQ ID NO: 2797620 - DNA, 25 bp, Homo sapien
ttcagagttagcaagacgatggcct

SEQ ID NO: 2797621 - DNA, 25 bp, Homo sapien
tccactctggcaggctttttggacc

SEQ ID NO: 2797622 - DNA, 25 bp, Homo sapien
ggctccactctggcaggctttttgg

SEQ ID NO: 2797623 - DNA, 25 bp, Homo sapien
ggaggctcttctccacccgtgggcc

SEQ ID NO: 2797624 - DNA, 25 bp, Homo sapien
actctggcaggctttttggaccctg

SEQ ID NO: 2797625 - DNA, 25 bp, Homo sapien
gcattggacccgttgttgaggtcat

SEQ ID NO: 2797626 - DNA, 25 bp, Homo sapien
ttgggggcattggacccgttgttga

SEQ ID NO: 2797627 - DNA, 25 bp, Homo sapien
gggcattggacccgttgttgaggtc

SEQ ID NO: 2797628 - DNA, 25 bp, Homo sapien
tgggggcattggacccgttgttgag

SEQ ID NO: 2797629 - DNA, 25 bp, Homo sapien
taaggcttgccgtcagcaaagatcc

SEQ ID NO: 2797630 - DNA, 25 bp, Homo sapien
gctgcagcgaatggcaatgggatct

SEQ ID NO: 2797631 - DNA, 25 bp, Homo sapien
gtttagccctgatgtcaaaatcggc

SEQ ID NO: 2797632 - DNA, 25 bp, Homo sapien
taacaaggtgtgacgtggtaagcca

SEQ ID NO: 2797633 - DNA, 25 bp, Homo sapien
cagcatgtcacagaggagactgccc

SEQ ID NO: 2797634 - DNA, 25 bp, Homo sapien
acagaggagactgccccacagttct

SEQ ID NO: 2797635 - DNA, 25 bp, Homo sapien
tgtcacagaggagactgccccacag

SEQ ID NO: 2797636 - DNA, 25 bp, Homo sapien
agcatgtcacagaggagactgcccc

SEQ ID NO: 2797637 - DNA, 25 bp, Homo sapien
gagatgtgtgcggtctgagtgtgac

SEQ ID NO: 2797638 - DNA, 25 bp, Homo sapien
tgctccaccaagcaccgttggtcga

SEQ ID NO: 2797639 - DNA, 25 bp, Homo sapien
atgtgtgcggtctgagtgtgaccaa

SEQ ID NO: 2797640 - DNA, 25 bp, Homo sapien
caagcaccgttggtcgatttctttt

SEQ ID NO: 2797641 - DNA, 25 bp, Homo sapien
cattctggttcccaccgccaggcca

SEQ ID NO: 2797642 - DNA, 25 bp, Homo sapien
accttcatggaccatcctctcaatg

SEQ ID NO: 2797643 - DNA, 25 bp, Homo sapien
ctgcctgcaacccttggtggcccat

SEQ ID NO: 2797644 - DNA, 25 bp, Homo sapien
catcctctcaatgggtttctgctgc

SEQ ID NO: 2797645 - DNA, 25 bp, Homo sapien
ctaggggtggtgtggccgatgggcc

SEQ ID NO: 2797646 - DNA, 25 bp, Homo sapien
tggtgtggccgatgggccttctcat

SEQ ID NO: 2797647 - DNA, 25 bp, Homo sapien
ctttctaggggtggtgtggccgatg

SEQ ID NO: 2797648 - DNA, 25 bp, Homo sapien
ggtggtgtggccgatgggccttctc

SEQ ID NO: 2797649 - DNA, 25 bp, Homo sapien
agcttttgaatttgtttgctcttct

SEQ ID NO: 2797650 - DNA, 25 bp, Homo sapien
tttgaatttgtttgctcttctctag

SEQ ID NO: 2797651 - DNA, 25 bp, Homo sapien
cttttgaatttgtttgctcttctct

SEQ ID NO: 2797652 - DNA, 25 bp, Homo sapien
gtttttcgtgtttctatcttcttca

SEQ ID NO: 2797653 - DNA, 25 bp, Homo sapien
ttgtcgtctctttggagggactcca

SEQ ID NO: 2797654 - DNA, 25 bp, Homo sapien
cctgcaaggcaggatttagcaaaac

SEQ ID NO: 2797655 - DNA, 25 bp, Homo sapien
ttttagtagctgaacaaggtcactc

SEQ ID NO: 2797656 - DNA, 25 bp, Homo sapien
ttttgagttccatcagccaggccta

SEQ ID NO: 2797657 - DNA, 25 bp, Homo sapien
tatggccaagcattggaatttcgtc

SEQ ID NO: 2797658 - DNA, 25 bp, Homo sapien
gatctagatgattgaggtactcaga

SEQ ID NO: 2797659 - DNA, 25 bp, Homo sapien
gactagttcaagagccaggatatgg

SEQ ID NO: 2797660 - DNA, 25 bp, Homo sapien
ttaacgctgcatctccaaggacctc

SEQ ID NO: 2797661 - DNA, 25 bp, Homo sapien
tggacatttcctcctcgacgtaggg

SEQ ID NO: 2797662 - DNA, 25 bp, Homo sapien
tctactcctactggttaaagaggga

SEQ ID NO: 2797663 - DNA, 25 bp, Homo sapien
gtaactgcacctccacgggactgga

SEQ ID NO: 2797664 - DNA, 25 bp, Homo sapien
taaactgcaggacccattattggta

SEQ ID NO: 2797665 - DNA, 25 bp, Homo sapien
gagaacatggagctcactcgggcct

SEQ ID NO: 2797666 - DNA, 25 bp, Homo sapien
ccagccccgcattctctgatgagag

SEQ ID NO: 2797667 - DNA, 25 bp, Homo sapien
tcatgagtaggtcccacagagcggg

SEQ ID NO: 2797668 - DNA, 25 bp, Homo sapien
tcttgaagttagaaaacgacgacag

SEQ ID NO: 2797669 - DNA, 25 bp, Homo sapien
cagaagacttacaggagcaaggatc

SEQ ID NO: 2797670 - DNA, 25 bp, Homo sapien
ccagtctggatggagtgacagtgtc

SEQ ID NO: 2797671 - DNA, 25 bp, Homo sapien
ggaaggtcatccactcatgtaagcc

SEQ ID NO: 2797672 - DNA, 25 bp, Homo sapien
gaactgtgtaggacccatcccatga

SEQ ID NO: 2797673 - DNA, 25 bp, Homo sapien
tctggaagaacaaagcattctgagc

SEQ ID NO: 2797674 - DNA, 25 bp, Homo sapien
taagtgctacagacgttcagagaga

SEQ ID NO: 2797675 - DNA, 25 bp, Homo sapien
tgtgtgggtgacaaacaagcagcca

SEQ ID NO: 2797676 - DNA, 25 bp, Homo sapien
gactctaagcactgatgggtgtgtg

SEQ ID NO: 2797677 - DNA, 25 bp, Homo sapien
cctgaaatgagcaagccaagccaaa

SEQ ID NO: 2797678 - DNA, 25 bp, Homo sapien
aatgactccttgaacaccagtggat

SEQ ID NO: 2797679 - DNA, 25 bp, Homo sapien
taaggctgcttgatcgactgacctg

SEQ ID NO: 2797680 - DNA, 25 bp, Homo sapien
ctaatgttcataagccagggtgacc

SEQ ID NO: 2797681 - DNA, 25 bp, Homo sapien
ggctcaatgcagactcaaaactcca

SEQ ID NO: 2797682 - DNA, 25 bp, Homo sapien
cattgaacagagctttgactttgca

SEQ ID NO: 2797683 - DNA, 25 bp, Homo sapien
aagtctgaggaccttgctgagccta

SEQ ID NO: 2797684 - DNA, 25 bp, Homo sapien
ttgcaatgataaaagcagatcccag

SEQ ID NO: 2797685 - DNA, 25 bp, Homo sapien
gatagctggataaacgagtctctgc

SEQ ID NO: 2797686 - DNA, 25 bp, Homo sapien
gacacgctgccaaagcttactgcag

SEQ ID NO: 2797687 - DNA, 25 bp, Homo sapien
gatttttgatagctggataaacgag

SEQ ID NO: 2797688 - DNA, 25 bp, Homo sapien
cctcttcaaaggacacgctgccaaa

SEQ ID NO: 2797689 - DNA, 25 bp, Homo sapien
tgtcctcatgcttcgcccagggtgt

SEQ ID NO: 2797690 - DNA, 25 bp, Homo sapien
ttcaaaaaggacctgtttgcatttc

SEQ ID NO: 2797691 - DNA, 25 bp, Homo sapien
gaaactagtgtttaatgacttgtcc

SEQ ID NO: 2797692 - DNA, 25 bp, Homo sapien
tctaattctgatcccaaacttgtcc

SEQ ID NO: 2797693 - DNA, 25 bp, Homo sapien
cagtagcgtaaacgagaggccttcc

SEQ ID NO: 2797694 - DNA, 25 bp, Homo sapien
tcttgaccgacaaaggacactgtga

SEQ ID NO: 2797695 - DNA, 25 bp, Homo sapien
cactggaagacactagatgacctaa

SEQ ID NO: 2797696 - DNA, 25 bp, Homo sapien
aaagtttgaggcttccatctgacag

SEQ ID NO: 2797697 - DNA, 25 bp, Homo sapien
tcccaggatggtgactaagtagctt

SEQ ID NO: 2797698 - DNA, 25 bp, Homo sapien
ctgtaactagcaggccacaggaagc

SEQ ID NO: 2797699 - DNA, 25 bp, Homo sapien
ccatggagctggttcactgtaacta

SEQ ID NO: 2797700 - DNA, 25 bp, Homo sapien
gctgtcatcctgtgtacccttgtca

SEQ ID NO: 2797701 - DNA, 25 bp, Homo sapien
tcatcattgctgtttagcttgactg

SEQ ID NO: 2797702 - DNA, 25 bp, Homo sapien
cataaggagcttatctgaacagatt

SEQ ID NO: 2797703 - DNA, 25 bp, Homo sapien
caagaacatcgatctgaaggattca

SEQ ID NO: 2797704 - DNA, 25 bp, Homo sapien
tgctgtttagcttgactgttttcct

SEQ ID NO: 2797705 - DNA, 25 bp, Homo sapien
tgttgtgccatgcaccatctatacg

SEQ ID NO: 2797706 - DNA, 25 bp, Homo sapien
tgctcttttcacaactccctgtgat

SEQ ID NO: 2797707 - DNA, 25 bp, Homo sapien
taagcccatgcagtatgttgtgcca

SEQ ID NO: 2797708 - DNA, 25 bp, Homo sapien
aatcatgccattagctttaacaatg

SEQ ID NO: 2797709 - DNA, 25 bp, Homo sapien
tggaatgcagaatacttggaacttg

SEQ ID NO: 2797710 - DNA, 25 bp, Homo sapien
tattagactccgtaaacaaacttca

SEQ ID NO: 2797711 - DNA, 25 bp, Homo sapien
aaaggtataaacaaacagagactga

SEQ ID NO: 2797712 - DNA, 25 bp, Homo sapien
gacaattccatgcaaagaaatgtat

SEQ ID NO: 2797713 - DNA, 25 bp, Homo sapien
tacggtataatcttctggcctgcga

SEQ ID NO: 2797714 - DNA, 25 bp, Homo sapien
tagtccctagggttggagactgccc

SEQ ID NO: 2797715 - DNA, 25 bp, Homo sapien
gatcttgtgcccttgcgctatgtga

SEQ ID NO: 2797716 - DNA, 25 bp, Homo sapien
gctggaccagaatgaccctataatt

SEQ ID NO: 2797717 - DNA, 25 bp, Homo sapien
caatgccagcgagtgtagttggtgc

SEQ ID NO: 2797718 - DNA, 25 bp, Homo sapien
gggagaagaagttcaatgccagcga

SEQ ID NO: 2797719 - DNA, 25 bp, Homo sapien
gaagttcaatgccagcgagtgtagt

SEQ ID NO: 2797720 - DNA, 25 bp, Homo sapien
gccagcgagtgtagttggtgccttt

SEQ ID NO: 2797721 - DNA, 25 bp, Homo sapien
gctaccacaacatctatgctgcagt

SEQ ID NO: 2797722 - DNA, 25 bp, Homo sapien
tgtagctgccctaactagtgattcc

SEQ ID NO: 2797723 - DNA, 25 bp, Homo sapien
ggaggttcatgttgtcttcgtgcca

SEQ ID NO: 2797724 - DNA, 25 bp, Homo sapien
taagcctatggttgagacctgctca

SEQ ID NO: 2797725 - DNA, 25 bp, Homo sapien
gaatttgctgtggtacttacggtac

SEQ ID NO: 2797726 - DNA, 25 bp, Homo sapien
gatgtggtctgaaacctaacctgta

SEQ ID NO: 2797727 - DNA, 25 bp, Homo sapien
ctttacaaatgtatgggccaatgca

SEQ ID NO: 2797728 - DNA, 25 bp, Homo sapien
tgaggtacgcctgtataatgaccag

SEQ ID NO: 2797729 - DNA, 25 bp, Homo sapien
tatgccactggtctactcagatgac

SEQ ID NO: 2797730 - DNA, 25 bp, Homo sapien
gaagggtcagtctgctaacatctgt

SEQ ID NO: 2797731 - DNA, 25 bp, Homo sapien
ggtgatactgggcactacagattta

SEQ ID NO: 2797732 - DNA, 25 bp, Homo sapien
catctgtcacgttgccctttcttca

SEQ ID NO: 2797733 - DNA, 25 bp, Homo sapien
cactgtgcctctcaaatgatctaga

SEQ ID NO: 2797734 - DNA, 25 bp, Homo sapien
cagttcgtatttgagtcagtggtca

SEQ ID NO: 2797735 - DNA, 25 bp, Homo sapien
tcttcaagccaattcacactgggaa

SEQ ID NO: 2797736 - DNA, 25 bp, Homo sapien
taaaagaagtctgtctcaagcagtt

SEQ ID NO: 2797737 - DNA, 25 bp, Homo sapien
ttcagagtagtacccgatatttgat

SEQ ID NO: 2797738 - DNA, 25 bp, Homo sapien
catgtagaattttatggactgacaa

SEQ ID NO: 2797739 - DNA, 25 bp, Homo sapien
tattaatggttttcagagtagtacc

SEQ ID NO: 2797740 - DNA, 25 bp, Homo sapien
gaggatatactaggacctgagaagc

SEQ ID NO: 2797741 - DNA, 25 bp, Homo sapien
gcatgtgtatttttaattccttaaa

SEQ ID NO: 2797742 - DNA, 25 bp, Homo sapien
catgcatgtgtatttttaattcctt

SEQ ID NO: 2797743 - DNA, 25 bp, Homo sapien
tgcatgtgtatttttaattccttaa

SEQ ID NO: 2797744 - DNA, 25 bp, Homo sapien
atgcatgtgtatttttaattcctta

SEQ ID NO: 2797745 - DNA, 25 bp, Homo sapien
aatgagatgatcagcggagcacgtc

SEQ ID NO: 2797746 - DNA, 25 bp, Homo sapien
gtccatgatcttcaaagtatagaaa

SEQ ID NO: 2797747 - DNA, 25 bp, Homo sapien
aataatcttaaactgcgcaatccag

SEQ ID NO: 2797748 - DNA, 25 bp, Homo sapien
gcaatccagattctcgctctccatt

SEQ ID NO: 2797749 - DNA, 25 bp, Homo sapien
aagcaggagttgcttggacattctg

SEQ ID NO: 2797750 - DNA, 25 bp, Homo sapien
aatgcaaaagcaggagttgcttgga

SEQ ID NO: 2797751 - DNA, 25 bp, Homo sapien
caaaagcaggagttgcttggacatt

SEQ ID NO: 2797752 - DNA, 25 bp, Homo sapien
aggagttgcttggacattctgtggc

SEQ ID NO: 2797753 - DNA, 25 bp, Homo sapien
gtgtccaatcaaatctccaataagc

SEQ ID NO: 2797754 - DNA, 25 bp, Homo sapien
tgaacatgaagtagcattttcttgc

SEQ ID NO: 2797755 - DNA, 25 bp, Homo sapien
tcaaatctccaataagctccagtga

SEQ ID NO: 2797756 - DNA, 25 bp, Homo sapien
taagctccagtgaacatgaagtagc

SEQ ID NO: 2797757 - DNA, 25 bp, Homo sapien
taactcccaaatgcgtacactgcca

SEQ ID NO: 2797758 - DNA, 25 bp, Homo sapien
ctcccaaatgcgtacactgccatct

SEQ ID NO: 2797759 - DNA, 25 bp, Homo sapien
ccaaatgcgtacactgccatcttct

SEQ ID NO: 2797760 - DNA, 25 bp, Homo sapien
cttaactcccaaatgcgtacactgc

SEQ ID NO: 2797761 - DNA, 25 bp, Homo sapien
gctatacacgtataaaccccttcca

SEQ ID NO: 2797762 - DNA, 25 bp, Homo sapien
cagttttctggcaggcaatcacacg

SEQ ID NO: 2797763 - DNA, 25 bp, Homo sapien
ggcaatcacacgcttcatttgaagg

SEQ ID NO: 2797764 - DNA, 25 bp, Homo sapien
tgtttggaagtctggcaacgtgcag

SEQ ID NO: 2797765 - DNA, 25 bp, Homo sapien
ccagttgtggagatgggtcccagaa

SEQ ID NO: 2797766 - DNA, 25 bp, Homo sapien
ttatttcttgttgggtgtccagttg

SEQ ID NO: 2797767 - DNA, 25 bp, Homo sapien
tgtccagttgtggagatgggtccca

SEQ ID NO: 2797768 - DNA, 25 bp, Homo sapien
agaagttgcgttcataggcctgcat

SEQ ID NO: 2797769 - DNA, 25 bp, Homo sapien
ccagggcatcccagatgatcagctc

SEQ ID NO: 2797770 - DNA, 25 bp, Homo sapien
cagatgatcagctctccgacgtggg

SEQ ID NO: 2797771 - DNA, 25 bp, Homo sapien
cgtgggagccggtgacaaaactcaa

SEQ ID NO: 2797772 - DNA, 25 bp, Homo sapien
ctccgacgtgggagccggtgacaaa

SEQ ID NO: 2797773 - DNA, 25 bp, Homo sapien
atatgcctcattatcgatcatttta

SEQ ID NO: 2797774 - DNA, 25 bp, Homo sapien
atgcctcattatcgatcattttatc

SEQ ID NO: 2797775 - DNA, 25 bp, Homo sapien
ctaggcaaagttcacatatgcctca

SEQ ID NO: 2797776 - DNA, 25 bp, Homo sapien
gcaaagttcacatatgcctcattat

SEQ ID NO: 2797777 - DNA, 25 bp, Homo sapien
gaagataactacacatcgaattgag

SEQ ID NO: 2797778 - DNA, 25 bp, Homo sapien
aatcacctagaaagatgtggactgg

SEQ ID NO: 2797779 - DNA, 25 bp, Homo sapien
gtacacacatacataggcccagaaa

SEQ ID NO: 2797780 - DNA, 25 bp, Homo sapien
ggaaaatacccaacacagtactggc

SEQ ID NO: 2797781 - DNA, 25 bp, Homo sapien
tcatcctgtgtcaaaagccacttag

SEQ ID NO: 2797782 - DNA, 25 bp, Homo sapien
tatccatccctcacaagtactagta

SEQ ID NO: 2797783 - DNA, 25 bp, Homo sapien
ttcatgattaccaaaagatgctggc

SEQ ID NO: 2797784 - DNA, 25 bp, Homo sapien
gtatgaaaatctcacctggtatctg

SEQ ID NO: 2797785 - DNA, 25 bp, Homo sapien
cattgacattaatcaatgagagaat

SEQ ID NO: 2797786 - DNA, 25 bp, Homo sapien
gaatattatcctggtgatcaaggag

SEQ ID NO: 2797787 - DNA, 25 bp, Homo sapien
tcaaggaggcgcttaacttcaagaa

SEQ ID NO: 2797788 - DNA, 25 bp, Homo sapien
gaatatcccattctagtgatccttc

SEQ ID NO: 2797789 - DNA, 25 bp, Homo sapien
gctgccacaacacagttcttaggta

SEQ ID NO: 2797790 - DNA, 25 bp, Homo sapien
caacacagttcttaggtatttcaac

SEQ ID NO: 2797791 - DNA, 25 bp, Homo sapien
cacagttcttaggtatttcaaccaa

SEQ ID NO: 2797792 - DNA, 25 bp, Homo sapien
ttgccaactgctgccacaacacagt

SEQ ID NO: 2797793 - DNA, 25 bp, Homo sapien
cagtcagcagctaagaaagcagcct

SEQ ID NO: 2797794 - DNA, 25 bp, Homo sapien
caagcagggcttatgaaaggacatc

SEQ ID NO: 2797795 - DNA, 25 bp, Homo sapien
tattactggaaaggacacggatgcc

SEQ ID NO: 2797796 - DNA, 25 bp, Homo sapien
gaatgaactagccaacagtcagcag

SEQ ID NO: 2797797 - DNA, 25 bp, Homo sapien
ttcccatagataccctcaaagcctt

SEQ ID NO: 2797798 - DNA, 25 bp, Homo sapien
ccatagataccctcaaagccttctg

SEQ ID NO: 2797799 - DNA, 25 bp, Homo sapien
aaggctttcccatagataccctcaa

SEQ ID NO: 2797800 - DNA, 25 bp, Homo sapien
ggctttcccatagataccctcaaag

SEQ ID NO: 2797801 - DNA, 25 bp, Homo sapien
acaaagggagactgcaataagaggt

SEQ ID NO: 2797802 - DNA, 25 bp, Homo sapien
ctgataaatggcagtattgtaatga

SEQ ID NO: 2797803 - DNA, 25 bp, Homo sapien
gagactgcaataagaggtggctatt

SEQ ID NO: 2797804 - DNA, 25 bp, Homo sapien
tatatagtacttaaacataacttgc

SEQ ID NO: 2797805 - DNA, 25 bp, Homo sapien
tatcagcgtgctcaccaaacacagt

SEQ ID NO: 2797806 - DNA, 25 bp, Homo sapien
ctgtaaagtcgtaagggtctgcttc

SEQ ID NO: 2797807 - DNA, 25 bp, Homo sapien
tgcttctaggtatcagcgtgctcac

SEQ ID NO: 2797808 - DNA, 25 bp, Homo sapien
taagggtctgcttctaggtatcagc

SEQ ID NO: 2797809 - DNA, 25 bp, Homo sapien
aaaggtggctagtcttacacaggag

SEQ ID NO: 2797810 - DNA, 25 bp, Homo sapien
cttacacaggagatctaattttcgg

SEQ ID NO: 2797811 - DNA, 25 bp, Homo sapien
tcattcccaccagaaagccaaacat

SEQ ID NO: 2797812 - DNA, 25 bp, Homo sapien
gagatctaattttcggttccacaca

SEQ ID NO: 2797813 - DNA, 25 bp, Homo sapien
gactctgagtcagacaagggcaaga

SEQ ID NO: 2797814 - DNA, 25 bp, Homo sapien
tgccaagcacgtaggtgagcctcct

SEQ ID NO: 2797815 - DNA, 25 bp, Homo sapien
cacgtgctctaaggtgaagacacta

SEQ ID NO: 2797816 - DNA, 25 bp, Homo sapien
ccttcagatagcaggagcctcagga

SEQ ID NO: 2797817 - DNA, 25 bp, Homo sapien
catatttaagacacctagcccaagg

SEQ ID NO: 2797818 - DNA, 25 bp, Homo sapien
taattcggttccattgatctgcatg

SEQ ID NO: 2797819 - DNA, 25 bp, Homo sapien
tcagttggctatgtgagactttact

SEQ ID NO: 2797820 - DNA, 25 bp, Homo sapien
caaggtcacagagatgtacgcctat

SEQ ID NO: 2797821 - DNA, 25 bp, Homo sapien
actagcctcaatagtttggttgtgg

SEQ ID NO: 2797822 - DNA, 25 bp, Homo sapien
ttggttgtggacttaggattttcta

SEQ ID NO: 2797823 - DNA, 25 bp, Homo sapien
tacacaagatcatgttatttgggaa

SEQ ID NO: 2797824 - DNA, 25 bp, Homo sapien
tgtgttgatattatatcctgaaacc

SEQ ID NO: 2797825 - DNA, 25 bp, Homo sapien
aaaatctgatcttacacgaagcaaa

SEQ ID NO: 2797826 - DNA, 25 bp, Homo sapien
taattcataagacccacaaaagtaa

SEQ ID NO: 2797827 - DNA, 25 bp, Homo sapien
aatgactacaagtgtgtggaaagaa

SEQ ID NO: 2797828 - DNA, 25 bp, Homo sapien
caaaaatagattgtcataaaaactc

SEQ ID NO: 2797829 - DNA, 25 bp, Homo sapien
tctgaacttgtctggtagtatcacc

SEQ ID NO: 2797830 - DNA, 25 bp, Homo sapien
tgtctggtagtatcaccatcccaca

SEQ ID NO: 2797831 - DNA, 25 bp, Homo sapien
gaagcatgatattctctgaacttgt

SEQ ID NO: 2797832 - DNA, 25 bp, Homo sapien
gatattctctgaacttgtctggtag

SEQ ID NO: 2797833 - DNA, 25 bp, Homo sapien
cagcaatagtcacggagtttccatc

SEQ ID NO: 2797834 - DNA, 25 bp, Homo sapien
tatacaacctgatagagtaactctg

SEQ ID NO: 2797835 - DNA, 25 bp, Homo sapien
gacaagaccctatcagctaaagact

SEQ ID NO: 2797836 - DNA, 25 bp, Homo sapien
tagtgtatgtagtggctccttaggc

SEQ ID NO: 2797837 - DNA, 25 bp, Homo sapien
gcagaggctgtcaagatgagttgat

SEQ ID NO: 2797838 - DNA, 25 bp, Homo sapien
cagaggctgtcaagatgagttgatt

SEQ ID NO: 2797839 - DNA, 25 bp, Homo sapien
agcagaggctgtcaagatgagttga

SEQ ID NO: 2797840 - DNA, 25 bp, Homo sapien
gaatacatactcaactacatcatca

SEQ ID NO: 2797841 - DNA, 25 bp, Homo sapien
catactcaactacatcatcatatct

SEQ ID NO: 2797842 - DNA, 25 bp, Homo sapien
atcatatctttatcacacaatccac

SEQ ID NO: 2797843 - DNA, 25 bp, Homo sapien
tacatactcaactacatcatcatat

SEQ ID NO: 2797844 - DNA, 25 bp, Homo sapien
ttccacacaactacaattccatcat

SEQ ID NO: 2797845 - DNA, 25 bp, Homo sapien
gcattccacacaactacaattccat

SEQ ID NO: 2797846 - DNA, 25 bp, Homo sapien
gggcattccacacaactacaattcc

SEQ ID NO: 2797847 - DNA, 25 bp, Homo sapien
ctgggcattccacacaactacaatt

SEQ ID NO: 2797848 - DNA, 25 bp, Homo sapien
tccagcttctgtaccaggtatggaa

SEQ ID NO: 2797849 - DNA, 25 bp, Homo sapien
gatattctaggaagtgattacgatg

SEQ ID NO: 2797850 - DNA, 25 bp, Homo sapien
tatttatgaaacacattccagcttc

SEQ ID NO: 2797851 - DNA, 25 bp, Homo sapien
gctgacaagtgccttcagtgacagg

SEQ ID NO: 2797852 - DNA, 25 bp, Homo sapien
ttaagctattctatccaatggaaga

SEQ ID NO: 2797853 - DNA, 25 bp, Homo sapien
gaaatgtttctttaccgattagcaa

SEQ ID NO: 2797854 - DNA, 25 bp, Homo sapien
taattgtaaggtatagtgtaactgc

SEQ ID NO: 2797855 - DNA, 25 bp, Homo sapien
taaatcctagtcagtcaagcataca

SEQ ID NO: 2797856 - DNA, 25 bp, Homo sapien
tatctttataacatggcacttgcca

SEQ ID NO: 2797857 - DNA, 25 bp, Homo sapien
gatgtgtccaaattttagagatgtc

SEQ ID NO: 2797858 - DNA, 25 bp, Homo sapien
tctggcaggttttaagtgctaaaga

SEQ ID NO: 2797859 - DNA, 25 bp, Homo sapien
caaacatttaagtgttcaagggctc

SEQ ID NO: 2797860 - DNA, 25 bp, Homo sapien
catgatcaccatcctacataacctt

SEQ ID NO: 2797861 - DNA, 25 bp, Homo sapien
tcaccatcctacataaccttgtctg

SEQ ID NO: 2797862 - DNA, 25 bp, Homo sapien
tttccagtcatgatcaccatcctac

SEQ ID NO: 2797863 - DNA, 25 bp, Homo sapien
catcctacataaccttgtctgtttc

SEQ ID NO: 2797864 - DNA, 25 bp, Homo sapien
cagttcagtgtagggattctgggtt

SEQ ID NO: 2797865 - DNA, 25 bp, Homo sapien
catgatgagccttcagtactagcag

SEQ ID NO: 2797866 - DNA, 25 bp, Homo sapien
catctaactgtaccagaaatcgtac

SEQ ID NO: 2797867 - DNA, 25 bp, Homo sapien
aaatcgtacaatatcatgatgagcc

SEQ ID NO: 2797868 - DNA, 25 bp, Homo sapien
tcccaataggactgctgaccagctg

SEQ ID NO: 2797869 - DNA, 25 bp, Homo sapien
agatagtttcggtagccagaagccc

SEQ ID NO: 2797870 - DNA, 25 bp, Homo sapien
tggaaagctgcggtcacaactcgtt

SEQ ID NO: 2797871 - DNA, 25 bp, Homo sapien
gaccaagtatcagtagacgccagga

SEQ ID NO: 2797872 - DNA, 25 bp, Homo sapien
ctcggccagtccctgcggttctcgg

SEQ ID NO: 2797873 - DNA, 25 bp, Homo sapien
ctcccccgatcagccatcgcaacat

SEQ ID NO: 2797874 - DNA, 25 bp, Homo sapien
ggttctcggcctcccccgatcagcc

SEQ ID NO: 2797875 - DNA, 25 bp, Homo sapien
cggccagtccctgcggttctcggcc

SEQ ID NO: 2797876 - DNA, 25 bp, Homo sapien
cccagtcagcccaaactccgcccca

SEQ ID NO: 2797877 - DNA, 25 bp, Homo sapien
cggcggcgtcttgcccggtccagcc

SEQ ID NO: 2797878 - DNA, 25 bp, Homo sapien
agcggcggcgtcttgcccggtccag

SEQ ID NO: 2797879 - DNA, 25 bp, Homo sapien
gtcagcccaaactccgccccaggct

SEQ ID NO: 2797880 - DNA, 25 bp, Homo sapien
aactgagacgctaatacttcccgcc

SEQ ID NO: 2797881 - DNA, 25 bp, Homo sapien
gcagaccacagttgagggagaattt

SEQ ID NO: 2797882 - DNA, 25 bp, Homo sapien
gaggcttagtttgggcagtcgcttg

SEQ ID NO: 2797883 - DNA, 25 bp, Homo sapien
cccagatcagcccacgggccgaagg

SEQ ID NO: 2797884 - DNA, 25 bp, Homo sapien
cctctggaactcggatctcctataa

SEQ ID NO: 2797885 - DNA, 25 bp, Homo sapien
tggaactcggatctcctataattca

SEQ ID NO: 2797886 - DNA, 25 bp, Homo sapien
ggaactcggatctcctataattcat

SEQ ID NO: 2797887 - DNA, 25 bp, Homo sapien
tctggaactcggatctcctataatt

SEQ ID NO: 2797888 - DNA, 25 bp, Homo sapien
caagaacacactcccaaggatcagg

SEQ ID NO: 2797889 - DNA, 25 bp, Homo sapien
gcaagaacacactcccaaggatcag

SEQ ID NO: 2797890 - DNA, 25 bp, Homo sapien
gagtgcactcggcaagaacacactc

SEQ ID NO: 2797891 - DNA, 25 bp, Homo sapien
ttccttttgagtgcactcggcaaga

SEQ ID NO: 2797892 - DNA, 25 bp, Homo sapien
tttctcacaaatctgcaggctgaga

SEQ ID NO: 2797893 - DNA, 25 bp, Homo sapien
gtctaagattaaggtaccagcctgg

SEQ ID NO: 2797894 - DNA, 25 bp, Homo sapien
agattaaggtaccagcctggtaggg

SEQ ID NO: 2797895 - DNA, 25 bp, Homo sapien
accagcctggtaggggctctcttcc

SEQ ID NO: 2797896 - DNA, 25 bp, Homo sapien
tcacatgattctcaggcaacatggt

SEQ ID NO: 2797897 - DNA, 25 bp, Homo sapien
ggatcacatgattctcaggcaacat

SEQ ID NO: 2797898 - DNA, 25 bp, Homo sapien
gggaggatcacatgattctcaggca

SEQ ID NO: 2797899 - DNA, 25 bp, Homo sapien
gaggatcacatgattctcaggcaac

SEQ ID NO: 2797900 - DNA, 25 bp, Homo sapien
tagaaaaccaactctggtaatatga

SEQ ID NO: 2797901 - DNA, 25 bp, Homo sapien
actagctcaccagcaatggacccaa

SEQ ID NO: 2797902 - DNA, 25 bp, Homo sapien
tctttaacacctccaaaaaatcaca

SEQ ID NO: 2797903 - DNA, 25 bp, Homo sapien
cccaaactaagaagaaatccctgat

SEQ ID NO: 2797904 - DNA, 25 bp, Homo sapien
tgctgatgtattgatctcggacttc

SEQ ID NO: 2797905 - DNA, 25 bp, Homo sapien
tctgctgatgtattgatctcggact

SEQ ID NO: 2797906 - DNA, 25 bp, Homo sapien
ctgctgatgtattgatctcggactt

SEQ ID NO: 2797907 - DNA, 25 bp, Homo sapien
catgaaatgtttgtcacctattgta

SEQ ID NO: 2797908 - DNA, 25 bp, Homo sapien
tgtcacctattgtaagttgtgaaaa

SEQ ID NO: 2797909 - DNA, 25 bp, Homo sapien
cccctgtatccaatgtgttttgttt

SEQ ID NO: 2797910 - DNA, 25 bp, Homo sapien
ttgtttggattgagatggcatgcag

SEQ ID NO: 2797911 - DNA, 25 bp, Homo sapien
taaggtatggcactataagcagcat

SEQ ID NO: 2797912 - DNA, 25 bp, Homo sapien
aatttagaactatgtgggattggcc

SEQ ID NO: 2797913 - DNA, 25 bp, Homo sapien
gacttattatttgtgtcggcagatc

SEQ ID NO: 2797914 - DNA, 25 bp, Homo sapien
gataatatctgggtctaaatctccc

SEQ ID NO: 2797915 - DNA, 25 bp, Homo sapien
cttgcggatcatggcattctccttc

SEQ ID NO: 2797916 - DNA, 25 bp, Homo sapien
gaagtgatgtcttctacatggccta

SEQ ID NO: 2797917 - DNA, 25 bp, Homo sapien
cctccagatacagctgaagtgatgt

SEQ ID NO: 2797918 - DNA, 25 bp, Homo sapien
gtaacattctcttgcggatcatggc

SEQ ID NO: 2797919 - DNA, 25 bp, Homo sapien
tttctcagctagttctggtgcttta

SEQ ID NO: 2797920 - DNA, 25 bp, Homo sapien
gtaataaactaagaaatgatctctg

SEQ ID NO: 2797921 - DNA, 25 bp, Homo sapien
cagctagttctggtgctttacatgc

SEQ ID NO: 2797922 - DNA, 25 bp, Homo sapien
gttctggtgctttacatgctcagag

SEQ ID NO: 2797923 - DNA, 25 bp, Homo sapien
aaaatgctactgattgaaccagccc

SEQ ID NO: 2797924 - DNA, 25 bp, Homo sapien
gatcctcgtctgacctggacagttt

SEQ ID NO: 2797925 - DNA, 25 bp, Homo sapien
tgatgaagattgtccttgggatcct

SEQ ID NO: 2797926 - DNA, 25 bp, Homo sapien
gctactgattgaaccagccctaaat

SEQ ID NO: 2797927 - DNA, 25 bp, Homo sapien
gaatccacaaccatgatctgcatta

SEQ ID NO: 2797928 - DNA, 25 bp, Homo sapien
tttctttgtgcacatggaaagcctg

SEQ ID NO: 2797929 - DNA, 25 bp, Homo sapien
ccacagagtcttgatgtataaccag

SEQ ID NO: 2797930 - DNA, 25 bp, Homo sapien
agatctgcagggaactaaggatgcc

SEQ ID NO: 2797931 - DNA, 25 bp, Homo sapien
aaggtgcttgagcaacgtgtccagc

SEQ ID NO: 2797932 - DNA, 25 bp, Homo sapien
cttctccccagacctgaccccaagt

SEQ ID NO: 2797933 - DNA, 25 bp, Homo sapien
attatctgaaaggtgcttgagcaac

SEQ ID NO: 2797934 - DNA, 25 bp, Homo sapien
tctgaaaggtgcttgagcaacgtgt

SEQ ID NO: 2797935 - DNA, 25 bp, Homo sapien
gctgtgaggcaatcaatccctcggg

SEQ ID NO: 2797936 - DNA, 25 bp, Homo sapien
aaacagaggtgacttcggagcccag

SEQ ID NO: 2797937 - DNA, 25 bp, Homo sapien
gagcccagggcttcgcataggagaa

SEQ ID NO: 2797938 - DNA, 25 bp, Homo sapien
gcaatgccaaaaggtgcctctgtat

SEQ ID NO: 2797939 - DNA, 25 bp, Homo sapien
tgaacaattagcttcatgcatacat

SEQ ID NO: 2797940 - DNA, 25 bp, Homo sapien
cttgaacaattagcttcatgcatac

SEQ ID NO: 2797941 - DNA, 25 bp, Homo sapien
gacttgaacaattagcttcatgcat

SEQ ID NO: 2797942 - DNA, 25 bp, Homo sapien
ggacttgaacaattagcttcatgca

SEQ ID NO: 2797943 - DNA, 25 bp, Homo sapien
tggctgaaatatcttgaattaacct

SEQ ID NO: 2797944 - DNA, 25 bp, Homo sapien
tctcggtggctgaaatatcttgaat

SEQ ID NO: 2797945 - DNA, 25 bp, Homo sapien
cggattaagagccttctcggtggct

SEQ ID NO: 2797946 - DNA, 25 bp, Homo sapien
cggtggctgaaatatcttgaattaa

SEQ ID NO: 2797947 - DNA, 25 bp, Homo sapien
agagggtgaggttccgtaggacagg

SEQ ID NO: 2797948 - DNA, 25 bp, Homo sapien
aagagggtgaggttccgtaggacag

SEQ ID NO: 2797949 - DNA, 25 bp, Homo sapien
gagggtgaggttccgtaggacagga

SEQ ID NO: 2797950 - DNA, 25 bp, Homo sapien
aggttagtacgcagccagcagggac

SEQ ID NO: 2797951 - DNA, 25 bp, Homo sapien
cctcggccgaccgaagaaacggcat

SEQ ID NO: 2797952 - DNA, 25 bp, Homo sapien
gggcagtcccctgagcacgtgcctg

SEQ ID NO: 2797953 - DNA, 25 bp, Homo sapien
cacgtgcctgaagtcgaggttagta

SEQ ID NO: 2797954 - DNA, 25 bp, Homo sapien
taggtgctggtcgtcccggacacgc

SEQ ID NO: 2797955 - DNA, 25 bp, Homo sapien
ctggagaagcgcgtttgtcccttac

SEQ ID NO: 2797956 - DNA, 25 bp, Homo sapien
ccctggtaggtgctggtcgtcccgg

SEQ ID NO: 2797957 - DNA, 25 bp, Homo sapien
ccggacacgcctcttctggagaagc

SEQ ID NO: 2797958 - DNA, 25 bp, Homo sapien
ggaggtcccgggtatctgaagcgga

SEQ ID NO: 2797959 - DNA, 25 bp, Homo sapien
gtcccgggtatctgaagcggatccc

SEQ ID NO: 2797960 - DNA, 25 bp, Homo sapien
aggtcccgggtatctgaagcggatc

SEQ ID NO: 2797961 - DNA, 25 bp, Homo sapien
cccgggtatctgaagcggatcccgg

SEQ ID NO: 2797962 - DNA, 25 bp, Homo sapien
gggccagacacggctggggcggcgc

SEQ ID NO: 2797963 - DNA, 25 bp, Homo sapien
ggccagacacggctggggcggcgcc

SEQ ID NO: 2797964 - DNA, 25 bp, Homo sapien
tggggccagacacggctggggcggc

SEQ ID NO: 2797965 - DNA, 25 bp, Homo sapien
ggggccagacacggctggggcggcg

SEQ ID NO: 2797966 - DNA, 25 bp, Homo sapien
gggtgcgaattgtggtcccctccca

SEQ ID NO: 2797967 - DNA, 25 bp, Homo sapien
gccctgcgtttcgtgccgacagcga

SEQ ID NO: 2797968 - DNA, 25 bp, Homo sapien
ctgaggaactctcgcgccctgcgtt

SEQ ID NO: 2797969 - DNA, 25 bp, Homo sapien
cagggacaccgttcatctgaggaac

SEQ ID NO: 2797970 - DNA, 25 bp, Homo sapien
gaggctcagagcttgcgtgaggcgc

SEQ ID NO: 2797971 - DNA, 25 bp, Homo sapien
ctcagagcttgcgtgaggcgctcgc

SEQ ID NO: 2797972 - DNA, 25 bp, Homo sapien
cgggaggctcagagcttgcgtgagg

SEQ ID NO: 2797973 - DNA, 25 bp, Homo sapien
gcccggaaacctcgggaggctcaga

SEQ ID NO: 2797974 - DNA, 25 bp, Homo sapien
tgatataaacttgtccggaaaagtc

SEQ ID NO: 2797975 - DNA, 25 bp, Homo sapien
gatataaacttgtccggaaaagtca

SEQ ID NO: 2797976 - DNA, 25 bp, Homo sapien
gctgtcccttgaacacgtccgtgtg

SEQ ID NO: 2797977 - DNA, 25 bp, Homo sapien
ggtttggatttgaccagcacatgca

SEQ ID NO: 2797978 - DNA, 25 bp, Homo sapien
tcgactccctggtacgtaaaatggc

SEQ ID NO: 2797979 - DNA, 25 bp, Homo sapien
taaaagcgttatcttgcaagccaag

SEQ ID NO: 2797980 - DNA, 25 bp, Homo sapien
gaacacgttggtcgtctttttgcgc

SEQ ID NO: 2797981 - DNA, 25 bp, Homo sapien
aggcagctgtgacacgccaggcatg

SEQ ID NO: 2797982 - DNA, 25 bp, Homo sapien
tagagactgtgtgctctagcgcctt

SEQ ID NO: 2797983 - DNA, 25 bp, Homo sapien
ttggaacccgccaggctgttggaca

SEQ ID NO: 2797984 - DNA, 25 bp, Homo sapien
gacagacagggagctattagccggc

SEQ ID NO: 2797985 - DNA, 25 bp, Homo sapien
ctaagagctcgtgccccgaagagtt

SEQ ID NO: 2797986 - DNA, 25 bp, Homo sapien
tgccctgggaggaacaagtgccgta

SEQ ID NO: 2797987 - DNA, 25 bp, Homo sapien
ccgaagagtttacgcactgtgcaaa

SEQ ID NO: 2797988 - DNA, 25 bp, Homo sapien
gtatggacatacctgccctcggtct

SEQ ID NO: 2797989 - DNA, 25 bp, Homo sapien
tgttcagcggtgtgttcatgcccag

SEQ ID NO: 2797990 - DNA, 25 bp, Homo sapien
tagacgcactctacgcttaccagtg

SEQ ID NO: 2797991 - DNA, 25 bp, Homo sapien
gaatttggccaacgcaatttgacca

SEQ ID NO: 2797992 - DNA, 25 bp, Homo sapien
ggaacaattagagtactttgtctct

SEQ ID NO: 2797993 - DNA, 25 bp, Homo sapien
aaagaataactgtcattaacctttg

SEQ ID NO: 2797994 - DNA, 25 bp, Homo sapien
ttatgctggaacaattagagtactt

SEQ ID NO: 2797995 - DNA, 25 bp, Homo sapien
gctggaacaattagagtactttgtc

SEQ ID NO: 2797996 - DNA, 25 bp, Homo sapien
cacgccgtgaaacctgggtgtagca

SEQ ID NO: 2797997 - DNA, 25 bp, Homo sapien
ttaaggtaataaagccacgccgtga

SEQ ID NO: 2797998 - DNA, 25 bp, Homo sapien
gaatatttcgcctgagtgcagaggg

SEQ ID NO: 2797999 - DNA, 25 bp, Homo sapien
caacgccgggcttcgattttgagga

SEQ ID NO: 2798000 - DNA, 25 bp, Homo sapien
cgggtagagaaggagataactcgat

SEQ ID NO: 2798001 - DNA, 25 bp, Homo sapien
gaaggagataactcgatacaggaac

SEQ ID NO: 2798002 - DNA, 25 bp, Homo sapien
actcgatacaggaacgcacaggcag

SEQ ID NO: 2798003 - DNA, 25 bp, Homo sapien
gataactcgatacaggaacgcacag

SEQ ID NO: 2798004 - DNA, 25 bp, Homo sapien
gaagggaagaccctgctccctttgc

SEQ ID NO: 2798005 - DNA, 25 bp, Homo sapien
tttgcccaaatcctcccgccctgtc

SEQ ID NO: 2798006 - DNA, 25 bp, Homo sapien
agcccaggatctcgacaggggaagg

SEQ ID NO: 2798007 - DNA, 25 bp, Homo sapien
cccaggatctcgacaggggaaggga

SEQ ID NO: 2798008 - DNA, 25 bp, Homo sapien
gctcctcacgcataaagatgtcggg

SEQ ID NO: 2798009 - DNA, 25 bp, Homo sapien
tctccaactcgttgagctgtgcggg

SEQ ID NO: 2798010 - DNA, 25 bp, Homo sapien
gcttgtccgggtctttggcgctcac

SEQ ID NO: 2798011 - DNA, 25 bp, Homo sapien
ggcccagaagctcggcggcatcttt

SEQ ID NO: 2798012 - DNA, 25 bp, Homo sapien
ggaggcaaggggatcgcggtcacta

SEQ ID NO: 2798013 - DNA, 25 bp, Homo sapien
ctgaggaggcaaggggatcgcggtc

SEQ ID NO: 2798014 - DNA, 25 bp, Homo sapien
aggaggcaaggggatcgcggtcact

SEQ ID NO: 2798015 - DNA, 25 bp, Homo sapien
tgaggaggcaaggggatcgcggtca

SEQ ID NO: 2798016 - DNA, 25 bp, Homo sapien
cctggcgtccaggaggtcggcatga

SEQ ID NO: 2798017 - DNA, 25 bp, Homo sapien
ctagcctggcgtccaggaggtcggc

SEQ ID NO: 2798018 - DNA, 25 bp, Homo sapien
gcgtccaggaggtcggcatgagaca

SEQ ID NO: 2798019 - DNA, 25 bp, Homo sapien
ccaggaggtcggcatgagacagcat

SEQ ID NO: 2798020 - DNA, 25 bp, Homo sapien
cgcaccgctccagggcgaaagctgt

SEQ ID NO: 2798021 - DNA, 25 bp, Homo sapien
taagctataagctatacgatataga

SEQ ID NO: 2798022 - DNA, 25 bp, Homo sapien
tatatagatcacctaaatgaaagaa

SEQ ID NO: 2798023 - DNA, 25 bp, Homo sapien
tagatatatatagatcacctaaatg

SEQ ID NO: 2798024 - DNA, 25 bp, Homo sapien
tgaatgaacccgtgagcagctcggc

SEQ ID NO: 2798025 - DNA, 25 bp, Homo sapien
agcctgcaaatgtcagcgcccggag

SEQ ID NO: 2798026 - DNA, 25 bp, Homo sapien
ctgcaaatgtcagcgcccggagagt

SEQ ID NO: 2798027 - DNA, 25 bp, Homo sapien
gggaggtgcttaacagttgaatgaa

SEQ ID NO: 2798028 - DNA, 25 bp, Homo sapien
gagccagccaacaacaaagtttaga

SEQ ID NO: 2798029 - DNA, 25 bp, Homo sapien
tcaaagtttctaagttcagctcggc

SEQ ID NO: 2798030 - DNA, 25 bp, Homo sapien
gccttcagacaacgcctggacttcg

SEQ ID NO: 2798031 - DNA, 25 bp, Homo sapien
gctttgcacaagtgaagcgaaccat

SEQ ID NO: 2798032 - DNA, 25 bp, Homo sapien
agctccgggccggactgggtttcag

SEQ ID NO: 2798033 - DNA, 25 bp, Homo sapien
tgtgaatgcagggtattggccacac

SEQ ID NO: 2798034 - DNA, 25 bp, Homo sapien
tttcttctgagctgcggagaccgct

SEQ ID NO: 2798035 - DNA, 25 bp, Homo sapien
ctgctgcagctgctaccaacgcggc

SEQ ID NO: 2798036 - DNA, 25 bp, Homo sapien
cacaccggaacgcagggtcagaagt

SEQ ID NO: 2798037 - DNA, 25 bp, Homo sapien
gcaggaggtttctgcccacctgggt

SEQ ID NO: 2798038 - DNA, 25 bp, Homo sapien
ggcttgcagggtgtccacaccggaa

SEQ ID NO: 2798039 - DNA, 25 bp, Homo sapien
ctcccagaaataggcaggtccgcca

SEQ ID NO: 2798040 - DNA, 25 bp, Homo sapien
tgcacacaagcgctagtgtccccat

SEQ ID NO: 2798041 - DNA, 25 bp, Homo sapien
cgcgcgtctccacgtgcgtgcacac

SEQ ID NO: 2798042 - DNA, 25 bp, Homo sapien
acgtgcgtgcacacaagcgctagtg

SEQ ID NO: 2798043 - DNA, 25 bp, Homo sapien
ccgcgacctggggagacaaggataa

SEQ ID NO: 2798044 - DNA, 25 bp, Homo sapien
agaggagaactacccttaactggct

SEQ ID NO: 2798045 - DNA, 25 bp, Homo sapien
gcttctgggatgtctatctctgtct

SEQ ID NO: 2798046 - DNA, 25 bp, Homo sapien
ctggatattcagaggagaactaccc

SEQ ID NO: 2798047 - DNA, 25 bp, Homo sapien
atgtgaaggctggatattcagagga

SEQ ID NO: 2798048 - DNA, 25 bp, Homo sapien
cagcatgaaccagatgaaccgggca

SEQ ID NO: 2798049 - DNA, 25 bp, Homo sapien
taaacgaaattgtgctctgcccaga

SEQ ID NO: 2798050 - DNA, 25 bp, Homo sapien
cggccaaggccaagttacagtgtct

SEQ ID NO: 2798051 - DNA, 25 bp, Homo sapien
cagtggtgttagctgccctgcctgg

SEQ ID NO: 2798052 - DNA, 25 bp, Homo sapien
ttgccttccataattacaccccgcc

SEQ ID NO: 2798053 - DNA, 25 bp, Homo sapien
gccttccataattacaccccgccat

SEQ ID NO: 2798054 - DNA, 25 bp, Homo sapien
tgccttccataattacaccccgcca

SEQ ID NO: 2798055 - DNA, 25 bp, Homo sapien
cattaggctggtgatataaggctca

SEQ ID NO: 2798056 - DNA, 25 bp, Homo sapien
ggtaacagggtcacaattgtactgg

SEQ ID NO: 2798057 - DNA, 25 bp, Homo sapien
gataatcaagattggctacagccaa

SEQ ID NO: 2798058 - DNA, 25 bp, Homo sapien
agccaaattatggtggagctggccc

SEQ ID NO: 2798059 - DNA, 25 bp, Homo sapien
aatatatatgtaaccagataaaaac

SEQ ID NO: 2798060 - DNA, 25 bp, Homo sapien
ataatggattgtaaaatggacccca

SEQ ID NO: 2798061 - DNA, 25 bp, Homo sapien
atgtaaccagataaaaacaatcaca

SEQ ID NO: 2798062 - DNA, 25 bp, Homo sapien
aatggaccccaggatttaatgcaaa

SEQ ID NO: 2798063 - DNA, 25 bp, Homo sapien
ttcactgaatccagtactaaacgtg

SEQ ID NO: 2798064 - DNA, 25 bp, Homo sapien
caggcttctaacttcactgaatcca

SEQ ID NO: 2798065 - DNA, 25 bp, Homo sapien
gaatccagtactaaacgtgcttctt

SEQ ID NO: 2798066 - DNA, 25 bp, Homo sapien
ctaaacgtgcttctttatattcctc

SEQ ID NO: 2798067 - DNA, 25 bp, Homo sapien
aagtgaataacagtcttctaaagct

SEQ ID NO: 2798068 - DNA, 25 bp, Homo sapien
gtttcagtactttgttatttactca

SEQ ID NO: 2798069 - DNA, 25 bp, Homo sapien
ttctaaagctaccagcattaattaa

SEQ ID NO: 2798070 - DNA, 25 bp, Homo sapien
atatattgtaattccacaggtttcc

SEQ ID NO: 2798071 - DNA, 25 bp, Homo sapien
gcattcaggccaaaataatccactg

SEQ ID NO: 2798072 - DNA, 25 bp, Homo sapien
tagtaaatacaagctcttcaagggc

SEQ ID NO: 2798073 - DNA, 25 bp, Homo sapien
caaagaaggcttctgatgtcacaac

SEQ ID NO: 2798074 - DNA, 25 bp, Homo sapien
gcctgcttgctaatgggtattacat

SEQ ID NO: 2798075 - DNA, 25 bp, Homo sapien
ttactggaggcataattcaaaacac

SEQ ID NO: 2798076 - DNA, 25 bp, Homo sapien
tatagcggtataaagggcaagtgaa

SEQ ID NO: 2798077 - DNA, 25 bp, Homo sapien
tattcagctccaagttagtatgagg

SEQ ID NO: 2798078 - DNA, 25 bp, Homo sapien
tatctaccttctgtatcacaaggca

SEQ ID NO: 2798079 - DNA, 25 bp, Homo sapien
tccaacctgcgctggcaatctggga

SEQ ID NO: 2798080 - DNA, 25 bp, Homo sapien
cttccaacctgcgctggcaatctgg

SEQ ID NO: 2798081 - DNA, 25 bp, Homo sapien
ttccaacctgcgctggcaatctggg

SEQ ID NO: 2798082 - DNA, 25 bp, Homo sapien
atatttttgatgcttatcatgcata

SEQ ID NO: 2798083 - DNA, 25 bp, Homo sapien
catatttttgatgcttatcatgcat

SEQ ID NO: 2798084 - DNA, 25 bp, Homo sapien
tcaaatcaatgacagggaaacccaa

SEQ ID NO: 2798085 - DNA, 25 bp, Homo sapien
tattcctcctgatgacagacactac

SEQ ID NO: 2798086 - DNA, 25 bp, Homo sapien
aaattaccaatgtggcacccctctg

SEQ ID NO: 2798087 - DNA, 25 bp, Homo sapien
gattattctccccatgcaatgtgag

SEQ ID NO: 2798088 - DNA, 25 bp, Homo sapien
gactgggagatgcaaagaaccttag

SEQ ID NO: 2798089 - DNA, 25 bp, Homo sapien
gcttaattcaggatcttggcacaga

SEQ ID NO: 2798090 - DNA, 25 bp, Homo sapien
ggaaaggatataccccaattggcag

SEQ ID NO: 2798091 - DNA, 25 bp, Homo sapien
taatctggccaatgtcaatcaagct

SEQ ID NO: 2798092 - DNA, 25 bp, Homo sapien
gcttatcatcccaggactctgagag

SEQ ID NO: 2798093 - DNA, 25 bp, Homo sapien
tggggtgggaggatcactggaggcc

SEQ ID NO: 2798094 - DNA, 25 bp, Homo sapien
ctggaggccaggagttgaagaccag

SEQ ID NO: 2798095 - DNA, 25 bp, Homo sapien
cttatcatcccaggactctgagagg

SEQ ID NO: 2798096 - DNA, 25 bp, Homo sapien
aatgtcataattttcaccgtcttca

SEQ ID NO: 2798097 - DNA, 25 bp, Homo sapien
tttaatgtcataattttcaccgtct

SEQ ID NO: 2798098 - DNA, 25 bp, Homo sapien
cgtcttcagctctcattttttcaat

SEQ ID NO: 2798099 - DNA, 25 bp, Homo sapien
accgtcttcagctctcattttttca

SEQ ID NO: 2798100 - DNA, 25 bp, Homo sapien
cctgcctaacgtaagtgcaatctat

SEQ ID NO: 2798101 - DNA, 25 bp, Homo sapien
taagcatgatcctcatgctcttaag

SEQ ID NO: 2798102 - DNA, 25 bp, Homo sapien
aatagtttagtcataaatataagca

SEQ ID NO: 2798103 - DNA, 25 bp, Homo sapien
taccaaagtagatatactagatggg

SEQ ID NO: 2798104 - DNA, 25 bp, Homo sapien
taacactgtgctataggcctgaaaa

SEQ ID NO: 2798105 - DNA, 25 bp, Homo sapien
gttgatctactatgtcacctgagaa

SEQ ID NO: 2798106 - DNA, 25 bp, Homo sapien
taaatgaggatcttagtgtgagctc

SEQ ID NO: 2798107 - DNA, 25 bp, Homo sapien
taatgtactccagcaaattgaagac

SEQ ID NO: 2798108 - DNA, 25 bp, Homo sapien
actcagttcccaccaccggaagcaa

SEQ ID NO: 2798109 - DNA, 25 bp, Homo sapien
ctgaccccagccactcagttcccac

SEQ ID NO: 2798110 - DNA, 25 bp, Homo sapien
cagttcccaccaccggaagcaacat

SEQ ID NO: 2798111 - DNA, 25 bp, Homo sapien
agccactcagttcccaccaccggaa

SEQ ID NO: 2798112 - DNA, 25 bp, Homo sapien
ccactgttcgttgaattctatttca

SEQ ID NO: 2798113 - DNA, 25 bp, Homo sapien
tggaatggaggccactgttcgttga

SEQ ID NO: 2798114 - DNA, 25 bp, Homo sapien
gaggccactgttcgttgaattctat

SEQ ID NO: 2798115 - DNA, 25 bp, Homo sapien
aaggtcacactttagtaaatgtgca

SEQ ID NO: 2798116 - DNA, 25 bp, Homo sapien
tacatgtatgcccttgcctgcagat

SEQ ID NO: 2798117 - DNA, 25 bp, Homo sapien
caagtggccttctacgaatgtccta

SEQ ID NO: 2798118 - DNA, 25 bp, Homo sapien
tattcaccaacagtgagaagcgagc

SEQ ID NO: 2798119 - DNA, 25 bp, Homo sapien
tatgcccattgtataggtgactaat

SEQ ID NO: 2798120 - DNA, 25 bp, Homo sapien
agttctaattgccttattatctgct

SEQ ID NO: 2798121 - DNA, 25 bp, Homo sapien
tcaatttaacagttctaattgcctt

SEQ ID NO: 2798122 - DNA, 25 bp, Homo sapien
taacagttctaattgccttattatc

SEQ ID NO: 2798123 - DNA, 25 bp, Homo sapien
ggtgtttcatcaatttaacagttct

SEQ ID NO: 2798124 - DNA, 25 bp, Homo sapien
ccactgcacccagcctcttattcac

SEQ ID NO: 2798125 - DNA, 25 bp, Homo sapien
agccactgcacccagcctcttattc

SEQ ID NO: 2798126 - DNA, 25 bp, Homo sapien
acaggcatccaccactatgcacggc

SEQ ID NO: 2798127 - DNA, 25 bp, Homo sapien
cacactggaggacagtggcgcgatc

SEQ ID NO: 2798128 - DNA, 25 bp, Homo sapien
tatcataatatgaggaagacactag

SEQ ID NO: 2798129 - DNA, 25 bp, Homo sapien
tcacaactttatcataatatgagga

SEQ ID NO: 2798130 - DNA, 25 bp, Homo sapien
ctttatcataatatgaggaagacac

SEQ ID NO: 2798131 - DNA, 25 bp, Homo sapien
tagtaacaattacaagtatcacaaa

SEQ ID NO: 2798132 - DNA, 25 bp, Homo sapien
attgttgaactctgtttattggaaa

SEQ ID NO: 2798133 - DNA, 25 bp, Homo sapien
aaattgttgaactctgtttattgga

SEQ ID NO: 2798134 - DNA, 25 bp, Homo sapien
tgttgaactctgtttattggaaaag

SEQ ID NO: 2798135 - DNA, 25 bp, Homo sapien
aattgttgaactctgtttattggaa

SEQ ID NO: 2798136 - DNA, 25 bp, Homo sapien
gagttccagactagactgggcaaca

SEQ ID NO: 2798137 - DNA, 25 bp, Homo sapien
ccagactagactgggcaacatattg

SEQ ID NO: 2798138 - DNA, 25 bp, Homo sapien
gttccagactagactgggcaacata

SEQ ID NO: 2798139 - DNA, 25 bp, Homo sapien
tccagactagactgggcaacatatt

SEQ ID NO: 2798140 - DNA, 25 bp, Homo sapien
tattagcaatgagctagcaaggtgc

SEQ ID NO: 2798141 - DNA, 25 bp, Homo sapien
gatatggcaagcgtctataactgct

SEQ ID NO: 2798142 - DNA, 25 bp, Homo sapien
tactctaatgtggagggagtcagca

SEQ ID NO: 2798143 - DNA, 25 bp, Homo sapien
taacagcttaaaacagggcacagta

SEQ ID NO: 2798144 - DNA, 25 bp, Homo sapien
taatgaagcctgtctgactcccagt

SEQ ID NO: 2798145 - DNA, 25 bp, Homo sapien
aataatgatgttcgctccaggaggg

SEQ ID NO: 2798146 - DNA, 25 bp, Homo sapien
tctgggtggtaccaagatcatctgg

SEQ ID NO: 2798147 - DNA, 25 bp, Homo sapien
taagccggcaattgcacttgtagga

SEQ ID NO: 2798148 - DNA, 25 bp, Homo sapien
tgatccagccgtccaacagatgttt

SEQ ID NO: 2798149 - DNA, 25 bp, Homo sapien
ccaaggccagatgctctagtgctaa

SEQ ID NO: 2798150 - DNA, 25 bp, Homo sapien
cacagtcctggaaacaggtagggct

SEQ ID NO: 2798151 - DNA, 25 bp, Homo sapien
tataatacaagctacctcccaaggc

SEQ ID NO: 2798152 - DNA, 25 bp, Homo sapien
ccagttttagcagtgaagtgttcca

SEQ ID NO: 2798153 - DNA, 25 bp, Homo sapien
tataataacccacctagggccaggc

SEQ ID NO: 2798154 - DNA, 25 bp, Homo sapien
tatcaataggtctagcaatctgctg

SEQ ID NO: 2798155 - DNA, 25 bp, Homo sapien
gagctgccagattagttgtgaccct

SEQ ID NO: 2798156 - DNA, 25 bp, Homo sapien
gccagtcacgccagccatgttaggt

SEQ ID NO: 2798157 - DNA, 25 bp, Homo sapien
catgttaggtcacacggctccacta

SEQ ID NO: 2798158 - DNA, 25 bp, Homo sapien
tatggcatcacaggacagatagcgg

SEQ ID NO: 2798159 - DNA, 25 bp, Homo sapien
gaagttcaggcccagttctcaaagc

SEQ ID NO: 2798160 - DNA, 25 bp, Homo sapien
ggccgccatgaggtgacgaagagga

SEQ ID NO: 2798161 - DNA, 25 bp, Homo sapien
gggtgcggcctggagttcggagccc

SEQ ID NO: 2798162 - DNA, 25 bp, Homo sapien
gactcttccggcaaatcagagcggc

SEQ ID NO: 2798163 - DNA, 25 bp, Homo sapien
tcaagcccatttgagagcacagctg

SEQ ID NO: 2798164 - DNA, 25 bp, Homo sapien
atcttgatctgtctcacgcgaggat

SEQ ID NO: 2798165 - DNA, 25 bp, Homo sapien
tctgtctcacgcgaggatcggccat

SEQ ID NO: 2798166 - DNA, 25 bp, Homo sapien
ttgatctgtctcacgcgaggatcgg

SEQ ID NO: 2798167 - DNA, 25 bp, Homo sapien
tgatctgtctcacgcgaggatcggc

SEQ ID NO: 2798168 - DNA, 25 bp, Homo sapien
gggtaaccgtggagggcgacgcgca

SEQ ID NO: 2798169 - DNA, 25 bp, Homo sapien
cagaggctgcggctatttaggcgtg

SEQ ID NO: 2798170 - DNA, 25 bp, Homo sapien
gaggctgcggctatttaggcgtggt

SEQ ID NO: 2798171 - DNA, 25 bp, Homo sapien
cgtggagggcgacgcgcagaggctg

SEQ ID NO: 2798172 - DNA, 25 bp, Homo sapien
ttatctgcttaatggacggagtgac

SEQ ID NO: 2798173 - DNA, 25 bp, Homo sapien
cagagtgatgcatgtgtagtgaaac

SEQ ID NO: 2798174 - DNA, 25 bp, Homo sapien
ttcgatgtcgttatctggtgtcaga

SEQ ID NO: 2798175 - DNA, 25 bp, Homo sapien
catcatgcacgcagtcaagaaaatc

SEQ ID NO: 2798176 - DNA, 25 bp, Homo sapien
tgtattaagggtattttcgatgtcg

SEQ ID NO: 2798177 - DNA, 25 bp, Homo sapien
cagacaaaccggcttacaatcgagg

SEQ ID NO: 2798178 - DNA, 25 bp, Homo sapien
ctgtttagccttgcagctgatcagt

SEQ ID NO: 2798179 - DNA, 25 bp, Homo sapien
tattagctagacaacactgatacgt

SEQ ID NO: 2798180 - DNA, 25 bp, Homo sapien
gcacacaaaaccttgggcttcctaa

SEQ ID NO: 2798181 - DNA, 25 bp, Homo sapien
ttgttcagcttcgtagttataaatc

SEQ ID NO: 2798182 - DNA, 25 bp, Homo sapien
gctttggagtcacccagtagtcatc

SEQ ID NO: 2798183 - DNA, 25 bp, Homo sapien
tcaaattattgtttggtccttcgta

SEQ ID NO: 2798184 - DNA, 25 bp, Homo sapien
gttttgttcagcttcgtagttataa

SEQ ID NO: 2798185 - DNA, 25 bp, Homo sapien
tctttcgggtctggactctgaggag

SEQ ID NO: 2798186 - DNA, 25 bp, Homo sapien
gctcgtcattgacaacggctccggc

SEQ ID NO: 2798187 - DNA, 25 bp, Homo sapien
gtgcaaggccagcttcacgggcgac

SEQ ID NO: 2798188 - DNA, 25 bp, Homo sapien
gatgatgatatcaccgcgctcgtca

SEQ ID NO: 2798189 - DNA, 25 bp, Homo sapien
agaaggattcctatgtgggcgacga

SEQ ID NO: 2798190 - DNA, 25 bp, Homo sapien
tccttgcttccattgcagggccaac

SEQ ID NO: 2798191 - DNA, 25 bp, Homo sapien
tgatgaaagggacgaataccaggag

SEQ ID NO: 2798192 - DNA, 25 bp, Homo sapien
gtatccaggtgcataattctgggca

SEQ ID NO: 2798193 - DNA, 25 bp, Homo sapien
ctttccgtagctagaggtatccagg

SEQ ID NO: 2798194 - DNA, 25 bp, Homo sapien
tggctcatcagggtgtgtcccctct

SEQ ID NO: 2798195 - DNA, 25 bp, Homo sapien
gctgggccttcagaaatgactccca

SEQ ID NO: 2798196 - DNA, 25 bp, Homo sapien
atgactcccaaaacaacctgctgag

SEQ ID NO: 2798197 - DNA, 25 bp, Homo sapien
ctgagctggctcatcagggtgtgtc

SEQ ID NO: 2798198 - DNA, 25 bp, Homo sapien
ctctttcacaggaagtcctttcgga

SEQ ID NO: 2798199 - DNA, 25 bp, Homo sapien
cctttcggagtaagagctggagctc

SEQ ID NO: 2798200 - DNA, 25 bp, Homo sapien
agctcccagatacattcccctctgt

SEQ ID NO: 2798201 - DNA, 25 bp, Homo sapien
tcacaggaagtcctttcggagtaag

SEQ ID NO: 2798202 - DNA, 25 bp, Homo sapien
gctcctgcaggtctgagagcctgac

SEQ ID NO: 2798203 - DNA, 25 bp, Homo sapien
aaggctcctgcaggtctgagagcct

SEQ ID NO: 2798204 - DNA, 25 bp, Homo sapien
tcctgcaggtctgagagcctgactc

SEQ ID NO: 2798205 - DNA, 25 bp, Homo sapien
agcagagaaggctcctgcaggtctg

SEQ ID NO: 2798206 - DNA, 25 bp, Homo sapien
caaagtttgtccaaagggtgccttg

SEQ ID NO: 2798207 - DNA, 25 bp, Homo sapien
taagcagtcactgcaggatcacctt

SEQ ID NO: 2798208 - DNA, 25 bp, Homo sapien
tctctcgaccaataagcacataagc

SEQ ID NO: 2798209 - DNA, 25 bp, Homo sapien
tgtgatcactaaacctgaaagagcc

SEQ ID NO: 2798210 - DNA, 25 bp, Homo sapien
tccaaactaataagtgccactatca

SEQ ID NO: 2798211 - DNA, 25 bp, Homo sapien
taattgatattgaacgagctgctgg

SEQ ID NO: 2798212 - DNA, 25 bp, Homo sapien
cagggccgctgctggataatttgca

SEQ ID NO: 2798213 - DNA, 25 bp, Homo sapien
caggctttgccgctcggccttaatt

SEQ ID NO: 2798214 - DNA, 25 bp, Homo sapien
caaagagaaacgtgcaggctccagc

SEQ ID NO: 2798215 - DNA, 25 bp, Homo sapien
cgtctgtcagagtccggtgataatt

SEQ ID NO: 2798216 - DNA, 25 bp, Homo sapien
tgcatgggctgtgcgcaactttgct

SEQ ID NO: 2798217 - DNA, 25 bp, Homo sapien
ttgtggtgattagcgcaaactggat

SEQ ID NO: 2798218 - DNA, 25 bp, Homo sapien
cctggttccagaccgcctctctcag

SEQ ID NO: 2798219 - DNA, 25 bp, Homo sapien
ctcggctccccgctttacccacgcg

SEQ ID NO: 2798220 - DNA, 25 bp, Homo sapien
acatcgcgccctccccgagaccctc

SEQ ID NO: 2798221 - DNA, 25 bp, Homo sapien
ggggagggggcacatcgcgccctcc

SEQ ID NO: 2798222 - DNA, 25 bp, Homo sapien
ctaaaaatcatagggccattactgt

SEQ ID NO: 2798223 - DNA, 25 bp, Homo sapien
aaatcatagggccattactgtccat

SEQ ID NO: 2798224 - DNA, 25 bp, Homo sapien
tggcaataaacatggtagtcatttt

SEQ ID NO: 2798225 - DNA, 25 bp, Homo sapien
cattttggaacaatagctaaaaatc

SEQ ID NO: 2798226 - DNA, 25 bp, Homo sapien
cagttctgcgccagattagccccat

SEQ ID NO: 2798227 - DNA, 25 bp, Homo sapien
gaagccgccagttctgcgccagatt

SEQ ID NO: 2798228 - DNA, 25 bp, Homo sapien
tgtagcctctgcgaagccgccagtt

SEQ ID NO: 2798229 - DNA, 25 bp, Homo sapien
ctattttcgacctgtagcctctgcg

SEQ ID NO: 2798230 - DNA, 25 bp, Homo sapien
tgttttatagagtcacttaatatcc

SEQ ID NO: 2798231 - DNA, 25 bp, Homo sapien
gtcctccatcaatcacacaattgtg

SEQ ID NO: 2798232 - DNA, 25 bp, Homo sapien
cacacaattgtgtccgggatgtttt

SEQ ID NO: 2798233 - DNA, 25 bp, Homo sapien
tgggtttctcgcattgacaaggctg

SEQ ID NO: 2798234 - DNA, 25 bp, Homo sapien
tgtggtttaacatctcaactctctg

SEQ ID NO: 2798235 - DNA, 25 bp, Homo sapien
taacatctcaactctctgacacaag

SEQ ID NO: 2798236 - DNA, 25 bp, Homo sapien
ttttaaagtttcatggttgctgtgg

SEQ ID NO: 2798237 - DNA, 25 bp, Homo sapien
catggttgctgtggtttaacatctc

SEQ ID NO: 2798238 - DNA, 25 bp, Homo sapien
gaaatcccaagctctttttgccgca

SEQ ID NO: 2798239 - DNA, 25 bp, Homo sapien
ctgccttgaaatcccaagctctttt

SEQ ID NO: 2798240 - DNA, 25 bp, Homo sapien
gcctggttctccgtcccgctgaggg

SEQ ID NO: 2798241 - DNA, 25 bp, Homo sapien
agctctttttgccgcaaccgcctgg

SEQ ID NO: 2798242 - DNA, 25 bp, Homo sapien
ccatttacatctgatcttccacaga

SEQ ID NO: 2798243 - DNA, 25 bp, Homo sapien
aatgatgctaccatttcatgggata

SEQ ID NO: 2798244 - DNA, 25 bp, Homo sapien
ttagtgaaattagcttccatgccac

SEQ ID NO: 2798245 - DNA, 25 bp, Homo sapien
taatgatgataatcctcccatttac

SEQ ID NO: 2798246 - DNA, 25 bp, Homo sapien
tgtatccttgatggtgttctcatca

SEQ ID NO: 2798247 - DNA, 25 bp, Homo sapien
cagatgtgtttgatacaaatagtca

SEQ ID NO: 2798248 - DNA, 25 bp, Homo sapien
cagtggatgagtgcagatgtgtttg

SEQ ID NO: 2798249 - DNA, 25 bp, Homo sapien
tgcagatgtgtttgatacaaatagt

SEQ ID NO: 2798250 - DNA, 25 bp, Homo sapien
ctcagtggatgagtgcagatgtgtt

SEQ ID NO: 2798251 - DNA, 25 bp, Homo sapien
tgctatcaccaaacctcagggctaa

SEQ ID NO: 2798252 - DNA, 25 bp, Homo sapien
tttccgaaggtgcatgctggctcca

SEQ ID NO: 2798253 - DNA, 25 bp, Homo sapien
tttcttcaagatacaagaggtcccc

SEQ ID NO: 2798254 - DNA, 25 bp, Homo sapien
atttattgctctgggactggcttct

SEQ ID NO: 2798255 - DNA, 25 bp, Homo sapien
ttctgtgagaggcactgtaaccacg

SEQ ID NO: 2798256 - DNA, 25 bp, Homo sapien
aagataggacctgttcagaggctcc

SEQ ID NO: 2798257 - DNA, 25 bp, Homo sapien
cactgtaaccacgtgtgagtttgaa

SEQ ID NO: 2798258 - DNA, 25 bp, Homo sapien
tctccttctgcgctcatgggcagtg

SEQ ID NO: 2798259 - DNA, 25 bp, Homo sapien
tcacaaacactactctgcaccttgg

SEQ ID NO: 2798260 - DNA, 25 bp, Homo sapien
cacaaacactactctgcaccttggt

SEQ ID NO: 2798261 - DNA, 25 bp, Homo sapien
acaaacactactctgcaccttggtc

SEQ ID NO: 2798262 - DNA, 25 bp, Homo sapien
gtcacaaacactactctgcaccttg

SEQ ID NO: 2798263 - DNA, 25 bp, Homo sapien
ctctccgatactgcaccagaacaaa

SEQ ID NO: 2798264 - DNA, 25 bp, Homo sapien
tccgatactgcaccagaacaaattt

SEQ ID NO: 2798265 - DNA, 25 bp, Homo sapien
ccgatactgcaccagaacaaattta

SEQ ID NO: 2798266 - DNA, 25 bp, Homo sapien
gatactgcaccagaacaaatttatt

SEQ ID NO: 2798267 - DNA, 25 bp, Homo sapien
gatgcgggtcctcgtggaaacagac

SEQ ID NO: 2798268 - DNA, 25 bp, Homo sapien
caggtcccacatgcttgggaacagg

SEQ ID NO: 2798269 - DNA, 25 bp, Homo sapien
tgaaagccaacagcgcagagaggat

SEQ ID NO: 2798270 - DNA, 25 bp, Homo sapien
gtctgtggggtcatctccagtgaaa

SEQ ID NO: 2798271 - DNA, 25 bp, Homo sapien
ggaagctggctagagtccaccagct

SEQ ID NO: 2798272 - DNA, 25 bp, Homo sapien
gaatgtgtcaaagattccatgtcac

SEQ ID NO: 2798273 - DNA, 25 bp, Homo sapien
ttgttaactcgctttgacaaaggcc

SEQ ID NO: 2798274 - DNA, 25 bp, Homo sapien
aatgtgcctcacatacaggtgttgc

SEQ ID NO: 2798275 - DNA, 25 bp, Homo sapien
gcagctcagagtttactcgtcaatg

SEQ ID NO: 2798276 - DNA, 25 bp, Homo sapien
atgagctatggcaagagcattttcc

SEQ ID NO: 2798277 - DNA, 25 bp, Homo sapien
tgagctatggcaagagcattttccc

SEQ ID NO: 2798278 - DNA, 25 bp, Homo sapien
aatgagctatggcaagagcattttc

SEQ ID NO: 2798279 - DNA, 25 bp, Homo sapien
tcaatgagctatggcaagagcattt

SEQ ID NO: 2798280 - DNA, 25 bp, Homo sapien
gcatttcctaggttactctcatcaa

SEQ ID NO: 2798281 - DNA, 25 bp, Homo sapien
tagttgtaactgcttcactatggta

SEQ ID NO: 2798282 - DNA, 25 bp, Homo sapien
tatggtaaaagggtaaggctctgtc

SEQ ID NO: 2798283 - DNA, 25 bp, Homo sapien
gcactcctcaaatgcaattgcccac

SEQ ID NO: 2798284 - DNA, 25 bp, Homo sapien
caagtttggtgggtccttaagctca

SEQ ID NO: 2798285 - DNA, 25 bp, Homo sapien
aaaagagatctgactaatgggccac

SEQ ID NO: 2798286 - DNA, 25 bp, Homo sapien
tagtgcagagtaagccttggtagcc

SEQ ID NO: 2798287 - DNA, 25 bp, Homo sapien
gggccactcctgcataaagtcttga

SEQ ID NO: 2798288 - DNA, 25 bp, Homo sapien
ttaacacagaggaccgctagggagt

SEQ ID NO: 2798289 - DNA, 25 bp, Homo sapien
aagcgcttctggcaattatttccaa

SEQ ID NO: 2798290 - DNA, 25 bp, Homo sapien
aaatggactgtcctgttacatcttg

SEQ ID NO: 2798291 - DNA, 25 bp, Homo sapien
tttgacaaccgtaaagcgcttctgg

SEQ ID NO: 2798292 - DNA, 25 bp, Homo sapien
aaatccacatttctcgaaagcagag

SEQ ID NO: 2798293 - DNA, 25 bp, Homo sapien
aatccacatttctcgaaagcagaga

SEQ ID NO: 2798294 - DNA, 25 bp, Homo sapien
atccacatttctcgaaagcagagat

SEQ ID NO: 2798295 - DNA, 25 bp, Homo sapien
tccacatttctcgaaagcagagatc

SEQ ID NO: 2798296 - DNA, 25 bp, Homo sapien
gagtgggtgggcttgagaaaagagg

SEQ ID NO: 2798297 - DNA, 25 bp, Homo sapien
ggagtgggtgggcttgagaaaagag

SEQ ID NO: 2798298 - DNA, 25 bp, Homo sapien
agtgggtgggcttgagaaaagaggg

SEQ ID NO: 2798299 - DNA, 25 bp, Homo sapien
tgggtgggcttgagaaaagagggag

SEQ ID NO: 2798300 - DNA, 25 bp, Homo sapien
ttatcctctccaaccagtgcactcc

SEQ ID NO: 2798301 - DNA, 25 bp, Homo sapien
tctccaaccagtgcactcccttctt

SEQ ID NO: 2798302 - DNA, 25 bp, Homo sapien
ctctccaaccagtgcactcccttct

SEQ ID NO: 2798303 - DNA, 25 bp, Homo sapien
tcctctccaaccagtgcactccctt

SEQ ID NO: 2798304 - DNA, 25 bp, Homo sapien
gctaggcagtttgtgctgggactca

SEQ ID NO: 2798305 - DNA, 25 bp, Homo sapien
ttttctaacctagccgcggaagtca

SEQ ID NO: 2798306 - DNA, 25 bp, Homo sapien
tgacagctgagacttctgcctaggc

SEQ ID NO: 2798307 - DNA, 25 bp, Homo sapien
gagcaagcatcccaaaagagagtac

SEQ ID NO: 2798308 - DNA, 25 bp, Homo sapien
tgaaaatatgccagctctgtctctt

SEQ ID NO: 2798309 - DNA, 25 bp, Homo sapien
taagagcagtcacactatccttcct

SEQ ID NO: 2798310 - DNA, 25 bp, Homo sapien
tgttgctaagtttccaagagtctgc

SEQ ID NO: 2798311 - DNA, 25 bp, Homo sapien
gagtctgcccttcgcttactccaga

SEQ ID NO: 2798312 - DNA, 25 bp, Homo sapien
gagggcagttggtggcggcgtggcc

SEQ ID NO: 2798313 - DNA, 25 bp, Homo sapien
ccgtcagcccgaggcggcgctggtg

SEQ ID NO: 2798314 - DNA, 25 bp, Homo sapien
tggcctctttgtccccgtcagcccg

SEQ ID NO: 2798315 - DNA, 25 bp, Homo sapien
tggtggcggcgtggcctctttgtcc

SEQ ID NO: 2798316 - DNA, 25 bp, Homo sapien
cgcctccgccccgggcagcgcgcat

SEQ ID NO: 2798317 - DNA, 25 bp, Homo sapien
cccgcgcctccgccccgggcagcgc

SEQ ID NO: 2798318 - DNA, 25 bp, Homo sapien
gcctccccgtggcccagccccgcgc

SEQ ID NO: 2798319 - DNA, 25 bp, Homo sapien
cgcgcctccgccccgggcagcgcgc

SEQ ID NO: 2798320 - DNA, 25 bp, Homo sapien
aaatgccactctctccaagggaaca

SEQ ID NO: 2798321 - DNA, 25 bp, Homo sapien
aaaactgccgtatgatccatgctcc

SEQ ID NO: 2798322 - DNA, 25 bp, Homo sapien
gactccctgtggctttgactagctt

SEQ ID NO: 2798323 - DNA, 25 bp, Homo sapien
tttggccttacaaggactccctgtg

SEQ ID NO: 2798324 - DNA, 25 bp, Homo sapien
agtcagaaacaccagaggccctact

SEQ ID NO: 2798325 - DNA, 25 bp, Homo sapien
ccaaggtgtgcttcctaacagtgaa

SEQ ID NO: 2798326 - DNA, 25 bp, Homo sapien
tgtggtatttccaaggtgtgcttcc

SEQ ID NO: 2798327 - DNA, 25 bp, Homo sapien
gaagcctccagagttgtccattgca

SEQ ID NO: 2798328 - DNA, 25 bp, Homo sapien
cgttatctctaacgttggctttctg

SEQ ID NO: 2798329 - DNA, 25 bp, Homo sapien
tccgcaaagtccgataatatatttt

SEQ ID NO: 2798330 - DNA, 25 bp, Homo sapien
agtccgataatatattttgtcccca

SEQ ID NO: 2798331 - DNA, 25 bp, Homo sapien
cttaaaatgcattgccacgttatct

SEQ ID NO: 2798332 - DNA, 25 bp, Homo sapien
tagcaataaagtaactccagagaac

SEQ ID NO: 2798333 - DNA, 25 bp, Homo sapien
catggttgtcttgagatagcttaac

SEQ ID NO: 2798334 - DNA, 25 bp, Homo sapien
ctgtctggtgtctcataacgccccg

SEQ ID NO: 2798335 - DNA, 25 bp, Homo sapien
taatactcccttttgctgccgtgtc

SEQ ID NO: 2798336 - DNA, 25 bp, Homo sapien
gactcttcaggttggtctataccca

SEQ ID NO: 2798337 - DNA, 25 bp, Homo sapien
aaacttatcaccaaatatggaagac

SEQ ID NO: 2798338 - DNA, 25 bp, Homo sapien
aaatatggaagactcttcaggttgg

SEQ ID NO: 2798339 - DNA, 25 bp, Homo sapien
tctgaaagtcaagcacagtaaactt

SEQ ID NO: 2798340 - DNA, 25 bp, Homo sapien
tttcagagaggagacggtgccccca

SEQ ID NO: 2798341 - DNA, 25 bp, Homo sapien
gagaggagacggtgcccccagccat

SEQ ID NO: 2798342 - DNA, 25 bp, Homo sapien
tcagagaggagacggtgcccccagc

SEQ ID NO: 2798343 - DNA, 25 bp, Homo sapien
ttttcagagaggagacggtgccccc

SEQ ID NO: 2798344 - DNA, 25 bp, Homo sapien
aaactgttcattagctgagaatggg

SEQ ID NO: 2798345 - DNA, 25 bp, Homo sapien
ttctcgtattgctgatattgtttca

SEQ ID NO: 2798346 - DNA, 25 bp, Homo sapien
tcctcatctgcacacttaaactgtt

SEQ ID NO: 2798347 - DNA, 25 bp, Homo sapien
caggcagcttctcgtattgctgata

SEQ ID NO: 2798348 - DNA, 25 bp, Homo sapien
cagggggctccattgatctgtcaga

SEQ ID NO: 2798349 - DNA, 25 bp, Homo sapien
gctccattgatctgtcagatattgg

SEQ ID NO: 2798350 - DNA, 25 bp, Homo sapien
gggctccattgatctgtcagatatt

SEQ ID NO: 2798351 - DNA, 25 bp, Homo sapien
ccattgatctgtcagatattggcat

SEQ ID NO: 2798352 - DNA, 25 bp, Homo sapien
gcgagtctctgccatggcccatggc

SEQ ID NO: 2798353 - DNA, 25 bp, Homo sapien
gtatccagtggtgcgagtctctgcc

SEQ ID NO: 2798354 - DNA, 25 bp, Homo sapien
tgggtatccagtggtgcgagtctct

SEQ ID NO: 2798355 - DNA, 25 bp, Homo sapien
agtggtgcgagtctctgccatggcc

SEQ ID NO: 2798356 - DNA, 25 bp, Homo sapien
caccgaaggatgctggcgtcccgtg

SEQ ID NO: 2798357 - DNA, 25 bp, Homo sapien
cccggatttaaacatataggaagag

SEQ ID NO: 2798358 - DNA, 25 bp, Homo sapien
ggaggacctgcttcgccctgatttc

SEQ ID NO: 2798359 - DNA, 25 bp, Homo sapien
agaggacgaaggctaccaagggtgt

SEQ ID NO: 2798360 - DNA, 25 bp, Homo sapien
tcctttggctccttcgttaaggtga

SEQ ID NO: 2798361 - DNA, 25 bp, Homo sapien
ctttggctccttcgttaaggtgact

SEQ ID NO: 2798362 - DNA, 25 bp, Homo sapien
tggctccttcgttaaggtgactgaa

SEQ ID NO: 2798363 - DNA, 25 bp, Homo sapien
gtgactgaacattcaatgttctttt

SEQ ID NO: 2798364 - DNA, 25 bp, Homo sapien
tgcaggccgaggcagcactggcaca

SEQ ID NO: 2798365 - DNA, 25 bp, Homo sapien
aaatctgtcttcaaaataggtgggc

SEQ ID NO: 2798366 - DNA, 25 bp, Homo sapien
ctgctgggagagtgaaaagatttgc

SEQ ID NO: 2798367 - DNA, 25 bp, Homo sapien
gcagaccaatagctttggaattcct

SEQ ID NO: 2798368 - DNA, 25 bp, Homo sapien
ggctgaaccttacatctgactttga

SEQ ID NO: 2798369 - DNA, 25 bp, Homo sapien
ggagcaacgtgaggctgaaccttac

SEQ ID NO: 2798370 - DNA, 25 bp, Homo sapien
cttgtggagcaacgtgaggctgaac

SEQ ID NO: 2798371 - DNA, 25 bp, Homo sapien
taaaagtaggtagagcttgtggagc

SEQ ID NO: 2798372 - DNA, 25 bp, Homo sapien
gactcaacacactaatcttacagat

SEQ ID NO: 2798373 - DNA, 25 bp, Homo sapien
tccttgataactttctgcgtttgaa

SEQ ID NO: 2798374 - DNA, 25 bp, Homo sapien
aaataagtaagctaccaagaagatg

SEQ ID NO: 2798375 - DNA, 25 bp, Homo sapien
taaggagagtcaaaggcagaaatat

SEQ ID NO: 2798376 - DNA, 25 bp, Homo sapien
aaattgctctctgcggatttcctca

SEQ ID NO: 2798377 - DNA, 25 bp, Homo sapien
gattttgtaggttgccagataaaca

SEQ ID NO: 2798378 - DNA, 25 bp, Homo sapien
gagaaagcccgatttatgacttggc

SEQ ID NO: 2798379 - DNA, 25 bp, Homo sapien
tctgggcttctactggagaagggct

SEQ ID NO: 2798380 - DNA, 25 bp, Homo sapien
atctgggccgcaccacagcatggcg

SEQ ID NO: 2798381 - DNA, 25 bp, Homo sapien
agcagtcccatggaggcccatctgg

SEQ ID NO: 2798382 - DNA, 25 bp, Homo sapien
tgagaaaacgtgttctcagatcccc

SEQ ID NO: 2798383 - DNA, 25 bp, Homo sapien
ggccgtgatcccacgggtagcagca

SEQ ID NO: 2798384 - DNA, 25 bp, Homo sapien
ctgccaacgggagatggcatcactg

SEQ ID NO: 2798385 - DNA, 25 bp, Homo sapien
aacgggagatggcatcactggtcat

SEQ ID NO: 2798386 - DNA, 25 bp, Homo sapien
gccaacgggagatggcatcactggt

SEQ ID NO: 2798387 - DNA, 25 bp, Homo sapien
ccaacgggagatggcatcactggtc

SEQ ID NO: 2798388 - DNA, 25 bp, Homo sapien
tctctcattctctctcagggagcgt

SEQ ID NO: 2798389 - DNA, 25 bp, Homo sapien
gtagtgtcttagtgagtcgggcccc

SEQ ID NO: 2798390 - DNA, 25 bp, Homo sapien
attagcccagagttccatttccaga

SEQ ID NO: 2798391 - DNA, 25 bp, Homo sapien
gaaggaaaaacattgccgagctgag

SEQ ID NO: 2798392 - DNA, 25 bp, Homo sapien
catttccagatagtggagtttgcac

SEQ ID NO: 2798393 - DNA, 25 bp, Homo sapien
ggttcggaaacgcacggaagagcaa

SEQ ID NO: 2798394 - DNA, 25 bp, Homo sapien
ggaaacgcacggaagagcaaagcct

SEQ ID NO: 2798395 - DNA, 25 bp, Homo sapien
gcagcagcgtcaatattctccctct

SEQ ID NO: 2798396 - DNA, 25 bp, Homo sapien
ttcggaaacgcacggaagagcaaag

SEQ ID NO: 2798397 - DNA, 25 bp, Homo sapien
agagcagccaacatcttccgagagg

SEQ ID NO: 2798398 - DNA, 25 bp, Homo sapien
taattagacctttgcaatacgcgag

SEQ ID NO: 2798399 - DNA, 25 bp, Homo sapien
gataggttcctcgagcggcaacttg

SEQ ID NO: 2798400 - DNA, 25 bp, Homo sapien
tcagcaggcataggagataggttcc

SEQ ID NO: 2798401 - DNA, 25 bp, Homo sapien
cccagggtgcagtgataaagccaca

SEQ ID NO: 2798402 - DNA, 25 bp, Homo sapien
tcaagggcaaacaatgggaccggct

SEQ ID NO: 2798403 - DNA, 25 bp, Homo sapien
taaaaaagtctaagaggagcctgca

SEQ ID NO: 2798404 - DNA, 25 bp, Homo sapien
taataagaagtgctctgtgccgtca

SEQ ID NO: 2798405 - DNA, 25 bp, Homo sapien
tggcctgggctaacatttgccttgg

SEQ ID NO: 2798406 - DNA, 25 bp, Homo sapien
tgggctaacatttgccttggccaag

SEQ ID NO: 2798407 - DNA, 25 bp, Homo sapien
gcctgggctaacatttgccttggcc

SEQ ID NO: 2798408 - DNA, 25 bp, Homo sapien
cctgggctaacatttgccttggcca

SEQ ID NO: 2798409 - DNA, 25 bp, Homo sapien
gaaatttggccaagtagtgaaatct

SEQ ID NO: 2798410 - DNA, 25 bp, Homo sapien
ccagttaagtctgaaagacatgtca

SEQ ID NO: 2798411 - DNA, 25 bp, Homo sapien
ggaccatttccatgcctagggctga

SEQ ID NO: 2798412 - DNA, 25 bp, Homo sapien
gacatgtcatctcatctaaaaggaa

SEQ ID NO: 2798413 - DNA, 25 bp, Homo sapien
tggttgaccctatcatgacataaaa

SEQ ID NO: 2798414 - DNA, 25 bp, Homo sapien
agttggttgaccctatcatgacata

SEQ ID NO: 2798415 - DNA, 25 bp, Homo sapien
catccatggagttggttgaccctat

SEQ ID NO: 2798416 - DNA, 25 bp, Homo sapien
atggagttggttgaccctatcatga

SEQ ID NO: 2798417 - DNA, 25 bp, Homo sapien
agaatcattttagaacctgcaaagg

SEQ ID NO: 2798418 - DNA, 25 bp, Homo sapien
tctatctagttcaaggttttcccaa

SEQ ID NO: 2798419 - DNA, 25 bp, Homo sapien
taacataaacaatgctggcttctcc

SEQ ID NO: 2798420 - DNA, 25 bp, Homo sapien
ggcctttaagcagaagagtaacata

SEQ ID NO: 2798421 - DNA, 25 bp, Homo sapien
cacaggccattgaggtggagacatg

SEQ ID NO: 2798422 - DNA, 25 bp, Homo sapien
tatcacatagtggttagcttcccag

SEQ ID NO: 2798423 - DNA, 25 bp, Homo sapien
gaactagctagtttcattgcctcag

SEQ ID NO: 2798424 - DNA, 25 bp, Homo sapien
catcgctttcttaggtgtggccagt

SEQ ID NO: 2798425 - DNA, 25 bp, Homo sapien
aaggaggccatggaggtgaaaagct

SEQ ID NO: 2798426 - DNA, 25 bp, Homo sapien
gaggccatggaggtgaaaagctggg

SEQ ID NO: 2798427 - DNA, 25 bp, Homo sapien
gccatggaggtgaaaagctggggcc

SEQ ID NO: 2798428 - DNA, 25 bp, Homo sapien
aggaggccatggaggtgaaaagctg

SEQ ID NO: 2798429 - DNA, 25 bp, Homo sapien
gcaaaccagggctcactaacttagg

SEQ ID NO: 2798430 - DNA, 25 bp, Homo sapien
tagggaggtccacatggtcattcct

SEQ ID NO: 2798431 - DNA, 25 bp, Homo sapien
gccaattagattgtacgttttttga

SEQ ID NO: 2798432 - DNA, 25 bp, Homo sapien
aagcaacacttatttgcaaaccagg

SEQ ID NO: 2798433 - DNA, 25 bp, Homo sapien
agtctggattcttatcttgtctaac

SEQ ID NO: 2798434 - DNA, 25 bp, Homo sapien
caagtcaggggaaagatcttaggtt

SEQ ID NO: 2798435 - DNA, 25 bp, Homo sapien
cacagctggcaaacatagtgctctt

SEQ ID NO: 2798436 - DNA, 25 bp, Homo sapien
cagtctggattcttatcttgtctaa

SEQ ID NO: 2798437 - DNA, 25 bp, Homo sapien
cacatggtacggaattggcacaaaa

SEQ ID NO: 2798438 - DNA, 25 bp, Homo sapien
gaactcgtggcttccatacattggt

SEQ ID NO: 2798439 - DNA, 25 bp, Homo sapien
aaatggtttcaactggtagcgcaca

SEQ ID NO: 2798440 - DNA, 25 bp, Homo sapien
tatggaaatgccaacgacctgcgat

SEQ ID NO: 2798441 - DNA, 25 bp, Homo sapien
gatacacactagcattctaaagcag

SEQ ID NO: 2798442 - DNA, 25 bp, Homo sapien
tctaaagcaggagacaagaatgtca

SEQ ID NO: 2798443 - DNA, 25 bp, Homo sapien
tctaccattgtcgaaaaagagaagg

SEQ ID NO: 2798444 - DNA, 25 bp, Homo sapien
gattctaaagtccagatgtaagcag

SEQ ID NO: 2798445 - DNA, 25 bp, Homo sapien
ctcagtgtttatgataagctgggct

SEQ ID NO: 2798446 - DNA, 25 bp, Homo sapien
ccactgtgactagcatcaatgaccc

SEQ ID NO: 2798447 - DNA, 25 bp, Homo sapien
actgtgcacagttttagctgcaaac

SEQ ID NO: 2798448 - DNA, 25 bp, Homo sapien
ttatgataagctgggctgtagagcc

SEQ ID NO: 2798449 - DNA, 25 bp, Homo sapien
tcaccatgcatagggacattttaaa

SEQ ID NO: 2798450 - DNA, 25 bp, Homo sapien
taaacaatagatgcatgtgaataat

SEQ ID NO: 2798451 - DNA, 25 bp, Homo sapien
taacatttcaccatgcatagggaca

SEQ ID NO: 2798452 - DNA, 25 bp, Homo sapien
aacaatagatgcatgtgaataattc

SEQ ID NO: 2798453 - DNA, 25 bp, Homo sapien
gccttttaagcactgcaattgactg

SEQ ID NO: 2798454 - DNA, 25 bp, Homo sapien
cttttaagcactgcaattgactgaa

SEQ ID NO: 2798455 - DNA, 25 bp, Homo sapien
tttaagcactgcaattgactgaaaa

SEQ ID NO: 2798456 - DNA, 25 bp, Homo sapien
ccttttaagcactgcaattgactga

SEQ ID NO: 2798457 - DNA, 25 bp, Homo sapien
tctgcatgcacagttgagcctcagg

SEQ ID NO: 2798458 - DNA, 25 bp, Homo sapien
acactaacaagtgtagagcaggtct

SEQ ID NO: 2798459 - DNA, 25 bp, Homo sapien
cttgcccctttctatatgacacgtg

SEQ ID NO: 2798460 - DNA, 25 bp, Homo sapien
gacacgtgtctgaatctgagccatc

SEQ ID NO: 2798461 - DNA, 25 bp, Homo sapien
aaatcatgaactaggttgtccaaca

SEQ ID NO: 2798462 - DNA, 25 bp, Homo sapien
gaaaatcttcctaggcatttgcttg

SEQ ID NO: 2798463 - DNA, 25 bp, Homo sapien
gacagagcagtattcctactgagag

SEQ ID NO: 2798464 - DNA, 25 bp, Homo sapien
aaacttgcaaggaatctgacagagc

SEQ ID NO: 2798465 - DNA, 25 bp, Homo sapien
caaagcgtgcggacttgattcctca

SEQ ID NO: 2798466 - DNA, 25 bp, Homo sapien
gggagaccaatcaacctcgaaaagc

SEQ ID NO: 2798467 - DNA, 25 bp, Homo sapien
tattgcctgtgtatgacgggctcca

SEQ ID NO: 2798468 - DNA, 25 bp, Homo sapien
tagtaatgcgtaattcaaagcgtgc

SEQ ID NO: 2798469 - DNA, 25 bp, Homo sapien
tagtgatttggagcgctatctgcca

SEQ ID NO: 2798470 - DNA, 25 bp, Homo sapien
gacgatcacaagatgcagtgccctg

SEQ ID NO: 2798471 - DNA, 25 bp, Homo sapien
gcgtcagtctccagggtagtcacaa

SEQ ID NO: 2798472 - DNA, 25 bp, Homo sapien
taccagaagctgtgacaatgaccca

SEQ ID NO: 2798473 - DNA, 25 bp, Homo sapien
aattattccccacactatcaggcca

SEQ ID NO: 2798474 - DNA, 25 bp, Homo sapien
tattgtagaaaagacctgagcctga

SEQ ID NO: 2798475 - DNA, 25 bp, Homo sapien
ggcctgcagagttcaaagcagtcag

SEQ ID NO: 2798476 - DNA, 25 bp, Homo sapien
cagggcttatacaattagggcaaca

SEQ ID NO: 2798477 - DNA, 25 bp, Homo sapien
ttattccgccgtgattagtacagtg

SEQ ID NO: 2798478 - DNA, 25 bp, Homo sapien
taggcaactacggatacagtaatgg

SEQ ID NO: 2798479 - DNA, 25 bp, Homo sapien
gattaccaagcccattagtggcaga

SEQ ID NO: 2798480 - DNA, 25 bp, Homo sapien
cagtaatggcaggtcagctcttctg

SEQ ID NO: 2798481 - DNA, 25 bp, Homo sapien
gaaagacagccttaatgcaaagcaa

SEQ ID NO: 2798482 - DNA, 25 bp, Homo sapien
tctggtgaaataagataaactctca

SEQ ID NO: 2798483 - DNA, 25 bp, Homo sapien
gaccatgccagtatgataaggatgc

SEQ ID NO: 2798484 - DNA, 25 bp, Homo sapien
tattactggtctaagaaacagaagc

SEQ ID NO: 2798485 - DNA, 25 bp, Homo sapien
gggactgcacctacattggctacat

SEQ ID NO: 2798486 - DNA, 25 bp, Homo sapien
cagcaatgattacagcagaagtttc

SEQ ID NO: 2798487 - DNA, 25 bp, Homo sapien
tacaaccttctgaaagatcacagag

SEQ ID NO: 2798488 - DNA, 25 bp, Homo sapien
gatcacagagggagtgaaattctgt

SEQ ID NO: 2798489 - DNA, 25 bp, Homo sapien
aacttagaatcacacatatgaaata

SEQ ID NO: 2798490 - DNA, 25 bp, Homo sapien
aaaatcctcattgtataggaaaatg

SEQ ID NO: 2798491 - DNA, 25 bp, Homo sapien
caaaatgcaattgtttcgaagtttt

SEQ ID NO: 2798492 - DNA, 25 bp, Homo sapien
tgataggataaaaacttagaatcac

SEQ ID NO: 2798493 - DNA, 25 bp, Homo sapien
ggttgacaagcaacaactctcagca

SEQ ID NO: 2798494 - DNA, 25 bp, Homo sapien
caattatagtggtaggacatcggta

SEQ ID NO: 2798495 - DNA, 25 bp, Homo sapien
caaaacccattagtatatcatcagg

SEQ ID NO: 2798496 - DNA, 25 bp, Homo sapien
ttagagactgtacaggaataagcac

SEQ ID NO: 2798497 - DNA, 25 bp, Homo sapien
tctgacatggccacaggtaaaagca

SEQ ID NO: 2798498 - DNA, 25 bp, Homo sapien
attaacattgaagcaatcatccttg

SEQ ID NO: 2798499 - DNA, 25 bp, Homo sapien
aacaggtggctgaatattaacattg

SEQ ID NO: 2798500 - DNA, 25 bp, Homo sapien
ggtaaaagcagttctccaacaggtg

SEQ ID NO: 2798501 - DNA, 25 bp, Homo sapien
tgattatggctttgacaatttctcc

SEQ ID NO: 2798502 - DNA, 25 bp, Homo sapien
cattctctcttagggaggtttctca

SEQ ID NO: 2798503 - DNA, 25 bp, Homo sapien
taaccttactctctgatttgtccat

SEQ ID NO: 2798504 - DNA, 25 bp, Homo sapien
tgtccatttctgatgtgcatgttaa

SEQ ID NO: 2798505 - DNA, 25 bp, Homo sapien
taaactaatttttgccatcgatcaa

SEQ ID NO: 2798506 - DNA, 25 bp, Homo sapien
gacataacaagaaccctagtatacc

SEQ ID NO: 2798507 - DNA, 25 bp, Homo sapien
tagtataccatcactcctccttgca

SEQ ID NO: 2798508 - DNA, 25 bp, Homo sapien
caccacacgcagctctgatcaggtt

SEQ ID NO: 2798509 - DNA, 25 bp, Homo sapien
agcctgttgttcagtaatattgatc

SEQ ID NO: 2798510 - DNA, 25 bp, Homo sapien
ggtgtcagaggcaaatctatttaga

SEQ ID NO: 2798511 - DNA, 25 bp, Homo sapien
aatgaatatacctctggtgtcagag

SEQ ID NO: 2798512 - DNA, 25 bp, Homo sapien
aatctatttagagtgatgttactca

SEQ ID NO: 2798513 - DNA, 25 bp, Homo sapien
ggaaactggcagtctgagtagaatc

SEQ ID NO: 2798514 - DNA, 25 bp, Homo sapien
aatggatccctcaggctcaagagag

SEQ ID NO: 2798515 - DNA, 25 bp, Homo sapien
caaaagtcaatacccattgaaactg

SEQ ID NO: 2798516 - DNA, 25 bp, Homo sapien
actggaaactggcagtctgagtaga

SEQ ID NO: 2798517 - DNA, 25 bp, Homo sapien
tagagctttgtcagtcacacgctgc

SEQ ID NO: 2798518 - DNA, 25 bp, Homo sapien
cacgctgctccaggctattcttgag

SEQ ID NO: 2798519 - DNA, 25 bp, Homo sapien
aagtgacagctctcaagatgccttg

SEQ ID NO: 2798520 - DNA, 25 bp, Homo sapien
gatagcactctttgacactgtttga

SEQ ID NO: 2798521 - DNA, 25 bp, Homo sapien
cagcacgtgagttttcgttggtaca

SEQ ID NO: 2798522 - DNA, 25 bp, Homo sapien
actcattcgatgaagcagcacgtga

SEQ ID NO: 2798523 - DNA, 25 bp, Homo sapien
gggcagctagtccttttccactcat

SEQ ID NO: 2798524 - DNA, 25 bp, Homo sapien
cgttggtacaaatgcaggagtactg

SEQ ID NO: 2798525 - DNA, 25 bp, Homo sapien
ttctgcacttgctccacaaacacag

SEQ ID NO: 2798526 - DNA, 25 bp, Homo sapien
catcagtgggcttggctgtatatac

SEQ ID NO: 2798527 - DNA, 25 bp, Homo sapien
tatactaattcaaagccccacttct

SEQ ID NO: 2798528 - DNA, 25 bp, Homo sapien
gcacgcagtactcatcagtgggctt

SEQ ID NO: 2798529 - DNA, 25 bp, Homo sapien
cagtgatgctatagatggatttctg

SEQ ID NO: 2798530 - DNA, 25 bp, Homo sapien
gatgctatagatggatttctgtgcc

SEQ ID NO: 2798531 - DNA, 25 bp, Homo sapien
gcctctttcatgcaggagacatatt

SEQ ID NO: 2798532 - DNA, 25 bp, Homo sapien
gtgatgctatagatggatttctgtg

SEQ ID NO: 2798533 - DNA, 25 bp, Homo sapien
cccacccacatcttcttcaatcttg

SEQ ID NO: 2798534 - DNA, 25 bp, Homo sapien
tctcatcatctctatctgccttttt

SEQ ID NO: 2798535 - DNA, 25 bp, Homo sapien
cctcttcatctgaacccacccacat

SEQ ID NO: 2798536 - DNA, 25 bp, Homo sapien
gagatggtgtaacactctgtcgtcc

SEQ ID NO: 2798537 - DNA, 25 bp, Homo sapien
ctgccaatgggctctccatggtcag

SEQ ID NO: 2798538 - DNA, 25 bp, Homo sapien
aatgggctctccatggtcagcacat

SEQ ID NO: 2798539 - DNA, 25 bp, Homo sapien
gtgaaggaacccccagcagagactc

SEQ ID NO: 2798540 - DNA, 25 bp, Homo sapien
cagcacatacagtgaaggaaccccc

SEQ ID NO: 2798541 - DNA, 25 bp, Homo sapien
tgttgtgctttgtgatcacaactac

SEQ ID NO: 2798542 - DNA, 25 bp, Homo sapien
ccaggcatactcttcatcattgttg

SEQ ID NO: 2798543 - DNA, 25 bp, Homo sapien
cacaactactttctctgccacaagg

SEQ ID NO: 2798544 - DNA, 25 bp, Homo sapien
gcagcaccaaactgcccaatcatgg

SEQ ID NO: 2798545 - DNA, 25 bp, Homo sapien
tttagtaccagggaatacaccctga

SEQ ID NO: 2798546 - DNA, 25 bp, Homo sapien
cataaatcctttagtaccagggaat

SEQ ID NO: 2798547 - DNA, 25 bp, Homo sapien
ctttagtaccagggaatacaccctg

SEQ ID NO: 2798548 - DNA, 25 bp, Homo sapien
gctccacgtgcactttctcaggcat

SEQ ID NO: 2798549 - DNA, 25 bp, Homo sapien
cctgaaaggcaagtttccagctcct

SEQ ID NO: 2798550 - DNA, 25 bp, Homo sapien
cagctcctccgctccacgtgcactt

SEQ ID NO: 2798551 - DNA, 25 bp, Homo sapien
ctgcctgaaaggcaagtttccagct

SEQ ID NO: 2798552 - DNA, 25 bp, Homo sapien
caataacaacaaagtacggctttgc

SEQ ID NO: 2798553 - DNA, 25 bp, Homo sapien
tctttgtcctctgaccctatgtctc

SEQ ID NO: 2798554 - DNA, 25 bp, Homo sapien
tctgtattgcggttagagagcaagg

SEQ ID NO: 2798555 - DNA, 25 bp, Homo sapien
tctgaccctatgtctcccttgggca

SEQ ID NO: 2798556 - DNA, 25 bp, Homo sapien
aatcctgctgacagtttaacactca

SEQ ID NO: 2798557 - DNA, 25 bp, Homo sapien
gaaaatcctgctgacagtttaacac

SEQ ID NO: 2798558 - DNA, 25 bp, Homo sapien
aaatcctgctgacagtttaacactc

SEQ ID NO: 2798559 - DNA, 25 bp, Homo sapien
cctgaaaatcctgctgacagtttaa

SEQ ID NO: 2798560 - DNA, 25 bp, Homo sapien
gtgagtggcagttcagggtttttga

SEQ ID NO: 2798561 - DNA, 25 bp, Homo sapien
aaaccaatcttttggtgagtggcag

SEQ ID NO: 2798562 - DNA, 25 bp, Homo sapien
aaaaccaatcttttggtgagtggca

SEQ ID NO: 2798563 - DNA, 25 bp, Homo sapien
acattttcatcagaacaaataaagg

SEQ ID NO: 2798564 - DNA, 25 bp, Homo sapien
tgtgagcagacctgatgaagtatca

SEQ ID NO: 2798565 - DNA, 25 bp, Homo sapien
tctctttgatacacctgtgagcaga

SEQ ID NO: 2798566 - DNA, 25 bp, Homo sapien
tattattggccagacttgggagcat

SEQ ID NO: 2798567 - DNA, 25 bp, Homo sapien
aatacaaatggatggccctaagatc

SEQ ID NO: 2798568 - DNA, 25 bp, Homo sapien
tgtgacccaaatatacaaagtaatt

SEQ ID NO: 2798569 - DNA, 25 bp, Homo sapien
aataccagaggtgaacaagttattc

SEQ ID NO: 2798570 - DNA, 25 bp, Homo sapien
acaacagatcaaagtttcactcaac

SEQ ID NO: 2798571 - DNA, 25 bp, Homo sapien
agtttcactcaacatttctaatacc

SEQ ID NO: 2798572 - DNA, 25 bp, Homo sapien
taaaaggataggaacaaatagtgac

SEQ ID NO: 2798573 - DNA, 25 bp, Homo sapien
ccatcttaggttcatacacacatag

SEQ ID NO: 2798574 - DNA, 25 bp, Homo sapien
tagaaagacagatatcagatgggtc

SEQ ID NO: 2798575 - DNA, 25 bp, Homo sapien
tagagctatctgttggccaatggcc

SEQ ID NO: 2798576 - DNA, 25 bp, Homo sapien
tctcctacgagtaagcactattctg

SEQ ID NO: 2798577 - DNA, 25 bp, Homo sapien
gaaaccattccatctaaagtaactg

SEQ ID NO: 2798578 - DNA, 25 bp, Homo sapien
gcaccccagaagctactcttgtatt

SEQ ID NO: 2798579 - DNA, 25 bp, Homo sapien
ctgttaaccatggtgaacgtgacat

SEQ ID NO: 2798580 - DNA, 25 bp, Homo sapien
tgagttctatatacgagtgccagca

SEQ ID NO: 2798581 - DNA, 25 bp, Homo sapien
tgagatctcacagcattatatggga

SEQ ID NO: 2798582 - DNA, 25 bp, Homo sapien
tctagtgtagtcatggtcaaacagt

SEQ ID NO: 2798583 - DNA, 25 bp, Homo sapien
aacccgtagcatttgcgttgccgaa

SEQ ID NO: 2798584 - DNA, 25 bp, Homo sapien
tggttgtcattctttttagcgctac

SEQ ID NO: 2798585 - DNA, 25 bp, Homo sapien
caactggcggtcattttttgcccaa

SEQ ID NO: 2798586 - DNA, 25 bp, Homo sapien
tttgcccaactttagatggagtgct

SEQ ID NO: 2798587 - DNA, 25 bp, Homo sapien
tgtggtcctgcttcactcagccgtg

SEQ ID NO: 2798588 - DNA, 25 bp, Homo sapien
cagttcaggtatatgtactgcgtca

SEQ ID NO: 2798589 - DNA, 25 bp, Homo sapien
gataattaagtgtggacaacaaggg

SEQ ID NO: 2798590 - DNA, 25 bp, Homo sapien
tactgcgtcaatgtggtgaagaacc

SEQ ID NO: 2798591 - DNA, 25 bp, Homo sapien
cgattacggaaatgaaagtctgtta

SEQ ID NO: 2798592 - DNA, 25 bp, Homo sapien
gttgacaagtgtaaaccttcaagat

SEQ ID NO: 2798593 - DNA, 25 bp, Homo sapien
gcaactggagtggatactgggttaa

SEQ ID NO: 2798594 - DNA, 25 bp, Homo sapien
gagctggtgtgggaagtgcaactgg

SEQ ID NO: 2798595 - DNA, 25 bp, Homo sapien
acaagtgtaaaccttcaagatcagc

SEQ ID NO: 2798596 - DNA, 25 bp, Homo sapien
caatgaatatggtcctgcaggatgg

SEQ ID NO: 2798597 - DNA, 25 bp, Homo sapien
ggttaatcagatggcagtacaatgc

SEQ ID NO: 2798598 - DNA, 25 bp, Homo sapien
cagtcaaaaatcgatcaaacagagg

SEQ ID NO: 2798599 - DNA, 25 bp, Homo sapien
tttagcaagtgtcacagagtcaggg

SEQ ID NO: 2798600 - DNA, 25 bp, Homo sapien
ggtacaaggaatatagcaccctcat

SEQ ID NO: 2798601 - DNA, 25 bp, Homo sapien
caaaatctagcattggtgaaggtac

SEQ ID NO: 2798602 - DNA, 25 bp, Homo sapien
aattctgaggctaggtgactgtgct

SEQ ID NO: 2798603 - DNA, 25 bp, Homo sapien
gaagaaacttcacaccacaagcaag

SEQ ID NO: 2798604 - DNA, 25 bp, Homo sapien
gcaccagcatcatcactaaacccag

SEQ ID NO: 2798605 - DNA, 25 bp, Homo sapien
cagtaatgcctatcatgtgttaggc

SEQ ID NO: 2798606 - DNA, 25 bp, Homo sapien
ttcaattattcttctgatcaaagct

SEQ ID NO: 2798607 - DNA, 25 bp, Homo sapien
aaatgcttttacgtatatcaagtca

SEQ ID NO: 2798608 - DNA, 25 bp, Homo sapien
ggattaagggcggtgcaagatgtgc

SEQ ID NO: 2798609 - DNA, 25 bp, Homo sapien
cccaaccctgtgctctctgaaacat

SEQ ID NO: 2798610 - DNA, 25 bp, Homo sapien
tcctgttgatcctgtgaccttaccc

SEQ ID NO: 2798611 - DNA, 25 bp, Homo sapien
gtgctgtgtccactcagggttaaat

SEQ ID NO: 2798612 - DNA, 25 bp, Homo sapien
tggtaagaggagttctatcttgctt

SEQ ID NO: 2798613 - DNA, 25 bp, Homo sapien
tccagatctagaagtgaaacatctt

SEQ ID NO: 2798614 - DNA, 25 bp, Homo sapien
aatcatccagatctagaagtgaaac

SEQ ID NO: 2798615 - DNA, 25 bp, Homo sapien
aagtgaaacatctttggtaagagga

SEQ ID NO: 2798616 - DNA, 25 bp, Homo sapien
gagaatttcacaccgcagcatgagc

SEQ ID NO: 2798617 - DNA, 25 bp, Homo sapien
ggtaaatgcatataggacttgaggc

SEQ ID NO: 2798618 - DNA, 25 bp, Homo sapien
gcataattcatgtgctccgcctgca

SEQ ID NO: 2798619 - DNA, 25 bp, Homo sapien
ggagatttttcttgctcaatgcata

SEQ ID NO: 2798620 - DNA, 25 bp, Homo sapien
ggtcgcattttcatgctcagtgccc

SEQ ID NO: 2798621 - DNA, 25 bp, Homo sapien
ctaggtcgcattttcatgctcagtg

SEQ ID NO: 2798622 - DNA, 25 bp, Homo sapien
gctcagtgccctcaaaacacattgt

SEQ ID NO: 2798623 - DNA, 25 bp, Homo sapien
cgcattttcatgctcagtgccctca

SEQ ID NO: 2798624 - DNA, 25 bp, Homo sapien
gattcagaatcggaagaactgtctt

SEQ ID NO: 2798625 - DNA, 25 bp, Homo sapien
gaactgtcttctattgaactagatt

SEQ ID NO: 2798626 - DNA, 25 bp, Homo sapien
tgaactagattcgtcatttgaagaa

SEQ ID NO: 2798627 - DNA, 25 bp, Homo sapien
gactcttctggattcagattcactt

SEQ ID NO: 2798628 - DNA, 25 bp, Homo sapien
ctttggcttttgagttcctcttggc

SEQ ID NO: 2798629 - DNA, 25 bp, Homo sapien
tcactgtcctgctcactggaggagt

SEQ ID NO: 2798630 - DNA, 25 bp, Homo sapien
gactcccgtccactctcactgtcct

SEQ ID NO: 2798631 - DNA, 25 bp, Homo sapien
tcttttgttttctaggcctgactcc

SEQ ID NO: 2798632 - DNA, 25 bp, Homo sapien
aacttcttagcagaattctcttgct

SEQ ID NO: 2798633 - DNA, 25 bp, Homo sapien
tcactgctactatcagaagagtcct

SEQ ID NO: 2798634 - DNA, 25 bp, Homo sapien
tcagattcagaataaaacttcttag

SEQ ID NO: 2798635 - DNA, 25 bp, Homo sapien
tcctcttcctcagattcagaataaa

SEQ ID NO: 2798636 - DNA, 25 bp, Homo sapien
aagaaaggccaacattcggattcag

SEQ ID NO: 2798637 - DNA, 25 bp, Homo sapien
agcaagaaaggccaacattcggatt

SEQ ID NO: 2798638 - DNA, 25 bp, Homo sapien
caagaaaggccaacattcggattca

SEQ ID NO: 2798639 - DNA, 25 bp, Homo sapien
gcaagaaaggccaacattcggattc

SEQ ID NO: 2798640 - DNA, 25 bp, Homo sapien
ggtgccaagctggaaatgatctcta

SEQ ID NO: 2798641 - DNA, 25 bp, Homo sapien
tttcgaactgatgggtcgggcgcca

SEQ ID NO: 2798642 - DNA, 25 bp, Homo sapien
gggcgccacctctggccaattagat

SEQ ID NO: 2798643 - DNA, 25 bp, Homo sapien
tagataattccaggtacccagtagc

SEQ ID NO: 2798644 - DNA, 25 bp, Homo sapien
aaaggagactcaagcagtggtgcag

SEQ ID NO: 2798645 - DNA, 25 bp, Homo sapien
gtggtgcaggcttttgtgctaggaa

SEQ ID NO: 2798646 - DNA, 25 bp, Homo sapien
caagcagtggtgcaggcttttgtgc

SEQ ID NO: 2798647 - DNA, 25 bp, Homo sapien
ctttaaaaggagactcaagcagtgg

SEQ ID NO: 2798648 - DNA, 25 bp, Homo sapien
taaagctccactctttacattcgga

SEQ ID NO: 2798649 - DNA, 25 bp, Homo sapien
tcggaacaataagctgcctaataaa

SEQ ID NO: 2798650 - DNA, 25 bp, Homo sapien
cctaataaatcttgtacggtctctg

SEQ ID NO: 2798651 - DNA, 25 bp, Homo sapien
acggtctctgatgtcgtagttttga

SEQ ID NO: 2798652 - DNA, 25 bp, Homo sapien
gcagccatgtgctagattattaaac

SEQ ID NO: 2798653 - DNA, 25 bp, Homo sapien
gggaatacacatttctaatgctgca

SEQ ID NO: 2798654 - DNA, 25 bp, Homo sapien
cacatgtcctcttctgtactgggta

SEQ ID NO: 2798655 - DNA, 25 bp, Homo sapien
catatatggcaaacccgctgaaggg

SEQ ID NO: 2798656 - DNA, 25 bp, Homo sapien
aatacaattttgctcccagatttaa

SEQ ID NO: 2798657 - DNA, 25 bp, Homo sapien
tacaattttgctcccagatttaata

SEQ ID NO: 2798658 - DNA, 25 bp, Homo sapien
ttaaatacaattttgctcccagatt

SEQ ID NO: 2798659 - DNA, 25 bp, Homo sapien
caattttgctcccagatttaatatc

SEQ ID NO: 2798660 - DNA, 25 bp, Homo sapien
caaagaatacttgctctagcaacag

SEQ ID NO: 2798661 - DNA, 25 bp, Homo sapien
acatcaggggcaattttaggaactc

SEQ ID NO: 2798662 - DNA, 25 bp, Homo sapien
acagttttctccaattagccaaaga

SEQ ID NO: 2798663 - DNA, 25 bp, Homo sapien
ttaggaactcgttcacagttttctc

SEQ ID NO: 2798664 - DNA, 25 bp, Homo sapien
tacaggcctcatacactgttacagg

SEQ ID NO: 2798665 - DNA, 25 bp, Homo sapien
cctttctaaacaggaccagaacgag

SEQ ID NO: 2798666 - DNA, 25 bp, Homo sapien
ccagaacgagtttactagcacaagt

SEQ ID NO: 2798667 - DNA, 25 bp, Homo sapien
gaaagcctagggtttgccagataca

SEQ ID NO: 2798668 - DNA, 25 bp, Homo sapien
tgtccaggagtttggccatatgttt

SEQ ID NO: 2798669 - DNA, 25 bp, Homo sapien
agtgatactgtccaggagtttggcc

SEQ ID NO: 2798670 - DNA, 25 bp, Homo sapien
gagtttggccatatgtttaataatt

SEQ ID NO: 2798671 - DNA, 25 bp, Homo sapien
gtgatactgtccaggagtttggcca

SEQ ID NO: 2798672 - DNA, 25 bp, Homo sapien
tataacaaccacactttcagcaaca

SEQ ID NO: 2798673 - DNA, 25 bp, Homo sapien
taacaaccacactttcagcaacaac

SEQ ID NO: 2798674 - DNA, 25 bp, Homo sapien
ataacaaccacactttcagcaacaa

SEQ ID NO: 2798675 - DNA, 25 bp, Homo sapien
gccattgaggcacgtgtcagtgact

SEQ ID NO: 2798676 - DNA, 25 bp, Homo sapien
tggttgcacatctgcctatagtctg

SEQ ID NO: 2798677 - DNA, 25 bp, Homo sapien
cagcagacagaccaagccattgagg

SEQ ID NO: 2798678 - DNA, 25 bp, Homo sapien
tgacttccaagatgttggttgcaca

SEQ ID NO: 2798679 - DNA, 25 bp, Homo sapien
ctgaaattctcgaagaagagttgat

SEQ ID NO: 2798680 - DNA, 25 bp, Homo sapien
tgaaattctcgaagaagagttgata

SEQ ID NO: 2798681 - DNA, 25 bp, Homo sapien
aattctcgaagaagagttgatatgt

SEQ ID NO: 2798682 - DNA, 25 bp, Homo sapien
gaaattctcgaagaagagttgatat

SEQ ID NO: 2798683 - DNA, 25 bp, Homo sapien
tatattcctaactgcactctatgcc

SEQ ID NO: 2798684 - DNA, 25 bp, Homo sapien
tcccttgtgttagcatgaattatgt

SEQ ID NO: 2798685 - DNA, 25 bp, Homo sapien
caatcaacctgccaaccaagaaaaa

SEQ ID NO: 2798686 - DNA, 25 bp, Homo sapien
taaacctctcatagaattagctcca

SEQ ID NO: 2798687 - DNA, 25 bp, Homo sapien
ttgcactgtgctgtgagagtttgtt

SEQ ID NO: 2798688 - DNA, 25 bp, Homo sapien
tgcactgtgctgtgagagtttgttg

SEQ ID NO: 2798689 - DNA, 25 bp, Homo sapien
cactgtgctgtgagagtttgttgtg

SEQ ID NO: 2798690 - DNA, 25 bp, Homo sapien
attgcactgtgctgtgagagtttgt

SEQ ID NO: 2798691 - DNA, 25 bp, Homo sapien
gttggatcagttgacctaacataga

SEQ ID NO: 2798692 - DNA, 25 bp, Homo sapien
cttgatcatagttggatcagttgac

SEQ ID NO: 2798693 - DNA, 25 bp, Homo sapien
tgacctaacatagaaactcttcaga

SEQ ID NO: 2798694 - DNA, 25 bp, Homo sapien
cagtgtcttgatcatagttggatca

SEQ ID NO: 2798695 - DNA, 25 bp, Homo sapien
tctttgaattgacatagttgctata

SEQ ID NO: 2798696 - DNA, 25 bp, Homo sapien
catagttgctatattttgtaggaca

SEQ ID NO: 2798697 - DNA, 25 bp, Homo sapien
ttgtaggacaatatactgcacctcc

SEQ ID NO: 2798698 - DNA, 25 bp, Homo sapien
tattttgtaggacaatatactgcac

SEQ ID NO: 2798699 - DNA, 25 bp, Homo sapien
tttagaaattatgccagcttcagat

SEQ ID NO: 2798700 - DNA, 25 bp, Homo sapien
tatgtgccaatacagctgagcaact

SEQ ID NO: 2798701 - DNA, 25 bp, Homo sapien
tcagattttggtgatatgtgccaat

SEQ ID NO: 2798702 - DNA, 25 bp, Homo sapien
gatttagaaattatgccagcttcag

SEQ ID NO: 2798703 - DNA, 25 bp, Homo sapien
tagaatagcctcctaacattccgct

SEQ ID NO: 2798704 - DNA, 25 bp, Homo sapien
tagaccttctacagttacatcatgc

SEQ ID NO: 2798705 - DNA, 25 bp, Homo sapien
cctgttcataataaagcgcatccta

SEQ ID NO: 2798706 - DNA, 25 bp, Homo sapien
tgaaagtcgctttgatacccagatt

SEQ ID NO: 2798707 - DNA, 25 bp, Homo sapien
tgtatttctaattaagagtctatga

SEQ ID NO: 2798708 - DNA, 25 bp, Homo sapien
tatttctaattaagagtctatgatc

SEQ ID NO: 2798709 - DNA, 25 bp, Homo sapien
gtatttctaattaagagtctatgat

SEQ ID NO: 2798710 - DNA, 25 bp, Homo sapien
atcatcatcagattcgtagaaattc

SEQ ID NO: 2798711 - DNA, 25 bp, Homo sapien
gatcatcatcagattcgtagaaatt

SEQ ID NO: 2798712 - DNA, 25 bp, Homo sapien
tctgtccgggcatacttcttcaaaa

SEQ ID NO: 2798713 - DNA, 25 bp, Homo sapien
tcttcaaaagccatcacaacactgc

SEQ ID NO: 2798714 - DNA, 25 bp, Homo sapien
cgagcatatcgagttagcatgtgga

SEQ ID NO: 2798715 - DNA, 25 bp, Homo sapien
catgtggattatgacaacctgcccc

SEQ ID NO: 2798716 - DNA, 25 bp, Homo sapien
ggctggaaggaactctgtgctatac

SEQ ID NO: 2798717 - DNA, 25 bp, Homo sapien
ctcacaaagggtaggccaccaaagc

SEQ ID NO: 2798718 - DNA, 25 bp, Homo sapien
catgaacaatggtgcgtggccagag

SEQ ID NO: 2798719 - DNA, 25 bp, Homo sapien
taacactttaggaaaaatgagtgcc

SEQ ID NO: 2798720 - DNA, 25 bp, Homo sapien
tcaattacttcaattaacatttcct

SEQ ID NO: 2798721 - DNA, 25 bp, Homo sapien
tgtgcttttatctttcagaagtttt

SEQ ID NO: 2798722 - DNA, 25 bp, Homo sapien
acttcaattaacatttccttctgct

SEQ ID NO: 2798723 - DNA, 25 bp, Homo sapien
tatctttcagaagtttttcaattac

SEQ ID NO: 2798724 - DNA, 25 bp, Homo sapien
ggtgataagtcagcagaagcttcct

SEQ ID NO: 2798725 - DNA, 25 bp, Homo sapien
caaagcgcttgcacgaattagttgg

SEQ ID NO: 2798726 - DNA, 25 bp, Homo sapien
taattggcactctaatacttgacag

SEQ ID NO: 2798727 - DNA, 25 bp, Homo sapien
taatagcaagcatcatgataggtac

SEQ ID NO: 2798728 - DNA, 25 bp, Homo sapien
tcttcagcatatcgaaccaggtaaa

SEQ ID NO: 2798729 - DNA, 25 bp, Homo sapien
gagtgcaagatcctgctgttcttca

SEQ ID NO: 2798730 - DNA, 25 bp, Homo sapien
cttcagagctcgctgaaaagtgctt

SEQ ID NO: 2798731 - DNA, 25 bp, Homo sapien
cgaaccaggtaaacatataccaact

SEQ ID NO: 2798732 - DNA, 25 bp, Homo sapien
gcaagaatgcttgtgcactttctct

SEQ ID NO: 2798733 - DNA, 25 bp, Homo sapien
gctctcacacttgcccgtgcaagaa

SEQ ID NO: 2798734 - DNA, 25 bp, Homo sapien
gcccgtgcaagaatgcttgtgcact

SEQ ID NO: 2798735 - DNA, 25 bp, Homo sapien
tcacacttgcccgtgcaagaatgct

SEQ ID NO: 2798736 - DNA, 25 bp, Homo sapien
aacagttcagatgcatttttccctt

SEQ ID NO: 2798737 - DNA, 25 bp, Homo sapien
ttcacaacagcaggaaacagttcag

SEQ ID NO: 2798738 - DNA, 25 bp, Homo sapien
acagcaggaaacagttcagatgcat

SEQ ID NO: 2798739 - DNA, 25 bp, Homo sapien
gcaggaaacagttcagatgcatttt

SEQ ID NO: 2798740 - DNA, 25 bp, Homo sapien
tccaaaattgaagtaaatgagtatt

SEQ ID NO: 2798741 - DNA, 25 bp, Homo sapien
tttccaaaattgaagtaaatgagta

SEQ ID NO: 2798742 - DNA, 25 bp, Homo sapien
caaaattgaagtaaatgagtatttt

SEQ ID NO: 2798743 - DNA, 25 bp, Homo sapien
tcactgcttgtccatttttccaaaa

SEQ ID NO: 2798744 - DNA, 25 bp, Homo sapien
catagcatccagtttagcagaatct

SEQ ID NO: 2798745 - DNA, 25 bp, Homo sapien
gcagaatctttgttgctctctaaca

SEQ ID NO: 2798746 - DNA, 25 bp, Homo sapien
caacaatccgcttcatagcatccag

SEQ ID NO: 2798747 - DNA, 25 bp, Homo sapien
tctttgttgctctctaacatttgct

SEQ ID NO: 2798748 - DNA, 25 bp, Homo sapien
cagattattcctctgtacttgtgag

SEQ ID NO: 2798749 - DNA, 25 bp, Homo sapien
tcacacagggtaacaaacaacgtct

SEQ ID NO: 2798750 - DNA, 25 bp, Homo sapien
cagacccttcctcaactcttggtaa

SEQ ID NO: 2798751 - DNA, 25 bp, Homo sapien
tccaaggtaaaatctcatgaatagt

SEQ ID NO: 2798752 - DNA, 25 bp, Homo sapien
tcctcatcagtgctactatctaaca

SEQ ID NO: 2798753 - DNA, 25 bp, Homo sapien
taaggtccattctacataagatact

SEQ ID NO: 2798754 - DNA, 25 bp, Homo sapien
ctgtctgcctggtatacacaggtat

SEQ ID NO: 2798755 - DNA, 25 bp, Homo sapien
tgtaggtagtaattaataaggtcca

SEQ ID NO: 2798756 - DNA, 25 bp, Homo sapien
taaatccaacctgttaggtcacctc

SEQ ID NO: 2798757 - DNA, 25 bp, Homo sapien
tgtaaagtggtgtgcacaaatactc

SEQ ID NO: 2798758 - DNA, 25 bp, Homo sapien
tacctggtaataacctgcagggttg

SEQ ID NO: 2798759 - DNA, 25 bp, Homo sapien
cactggtcacagagtcaaagccgta

SEQ ID NO: 2798760 - DNA, 25 bp, Homo sapien
cccactcctccgagtccgcagctcc

SEQ ID NO: 2798761 - DNA, 25 bp, Homo sapien
cgggacacgttaccgccctgccctg

SEQ ID NO: 2798762 - DNA, 25 bp, Homo sapien
gcccactcctccgagtccgcagctc

SEQ ID NO: 2798763 - DNA, 25 bp, Homo sapien
ggcgcccactcctccgagtccgcag

SEQ ID NO: 2798764 - DNA, 25 bp, Homo sapien
aatggttgaggtcgcctcctgaccc

SEQ ID NO: 2798765 - DNA, 25 bp, Homo sapien
ggaaatggttgaggtcgcctcctga

SEQ ID NO: 2798766 - DNA, 25 bp, Homo sapien
cctcctccggactgctcattgtaag

SEQ ID NO: 2798767 - DNA, 25 bp, Homo sapien
tgtaaggaaaactattgctggacat

SEQ ID NO: 2798768 - DNA, 25 bp, Homo sapien
ccagagggcacggaacaaaactagt

SEQ ID NO: 2798769 - DNA, 25 bp, Homo sapien
gttctctccaaaaggttccagtcca

SEQ ID NO: 2798770 - DNA, 25 bp, Homo sapien
ttccagtccagagggcacggaacaa

SEQ ID NO: 2798771 - DNA, 25 bp, Homo sapien
caaaactagttctcgtacggaggag

SEQ ID NO: 2798772 - DNA, 25 bp, Homo sapien
aggcctgctagattaccacccgggc

SEQ ID NO: 2798773 - DNA, 25 bp, Homo sapien
tcctgctccgggctttagaggtagc

SEQ ID NO: 2798774 - DNA, 25 bp, Homo sapien
gcatgcgcagtgtgcaggcctgcta

SEQ ID NO: 2798775 - DNA, 25 bp, Homo sapien
atccaggcctgcgcggactttcctg

SEQ ID NO: 2798776 - DNA, 25 bp, Homo sapien
cctccggagagccaatgatgagcac

SEQ ID NO: 2798777 - DNA, 25 bp, Homo sapien
taattcagctgttagaatactcctc

SEQ ID NO: 2798778 - DNA, 25 bp, Homo sapien
cctccaaacttgatcgtctggtcaa

SEQ ID NO: 2798779 - DNA, 25 bp, Homo sapien
cttgatcgtctggtcaaatattggc

SEQ ID NO: 2798780 - DNA, 25 bp, Homo sapien
ctactttcacctgagctacataaaa

SEQ ID NO: 2798781 - DNA, 25 bp, Homo sapien
tactttcacctgagctacataaaat

SEQ ID NO: 2798782 - DNA, 25 bp, Homo sapien
tctgtatcatcccagtttttttagt

SEQ ID NO: 2798783 - DNA, 25 bp, Homo sapien
ctctgtatcatcccagtttttttag

SEQ ID NO: 2798784 - DNA, 25 bp, Homo sapien
gtatatgtgctgccaaagccagcac

SEQ ID NO: 2798785 - DNA, 25 bp, Homo sapien
ttagtatatgtgctgccaaagccag

SEQ ID NO: 2798786 - DNA, 25 bp, Homo sapien
attgtggtgacaatagctcttagag

SEQ ID NO: 2798787 - DNA, 25 bp, Homo sapien
caatagctcttagagaagcacagcg

SEQ ID NO: 2798788 - DNA, 25 bp, Homo sapien
gaagcacagcgtgtagccagtaaag

SEQ ID NO: 2798789 - DNA, 25 bp, Homo sapien
agccagtaaagatctttctgaggtg

SEQ ID NO: 2798790 - DNA, 25 bp, Homo sapien
atgcacacagccgtaggaagaggaa

SEQ ID NO: 2798791 - DNA, 25 bp, Homo sapien
cattgccgggcatcaagtccttgaa

SEQ ID NO: 2798792 - DNA, 25 bp, Homo sapien
gttttgggcaaagcagttctctgga

SEQ ID NO: 2798793 - DNA, 25 bp, Homo sapien
cactaaagacatctgctgactgcct

SEQ ID NO: 2798794 - DNA, 25 bp, Homo sapien
gaaggcggtaagcagcttttgcatg

SEQ ID NO: 2798795 - DNA, 25 bp, Homo sapien
gaattcagccaaccgaggctcagca

SEQ ID NO: 2798796 - DNA, 25 bp, Homo sapien
tctggacaaccaagccactagagaa

SEQ ID NO: 2798797 - DNA, 25 bp, Homo sapien
cagtgcaactggtgcctcagggaaa

SEQ ID NO: 2798798 - DNA, 25 bp, Homo sapien
gcgtcgagggtatcagcagacacag

SEQ ID NO: 2798799 - DNA, 25 bp, Homo sapien
gagactagacccactgtaagagatg

SEQ ID NO: 2798800 - DNA, 25 bp, Homo sapien
tatttggcctaccacacaatgcctg

SEQ ID NO: 2798801 - DNA, 25 bp, Homo sapien
tcaaggactcgtgattacattgggc

SEQ ID NO: 2798802 - DNA, 25 bp, Homo sapien
tctagaccctgctcaataggttcac

SEQ ID NO: 2798803 - DNA, 25 bp, Homo sapien
tcagactctagaccctgctcaatag

SEQ ID NO: 2798804 - DNA, 25 bp, Homo sapien
tgctcaataggttcaccaattaaaa

SEQ ID NO: 2798805 - DNA, 25 bp, Homo sapien
ggaattcagactctagaccctgctc

SEQ ID NO: 2798806 - DNA, 25 bp, Homo sapien
agtgtgatcagccaccaccaaagtc

SEQ ID NO: 2798807 - DNA, 25 bp, Homo sapien
aaaagtgtgatcagccaccaccaaa

SEQ ID NO: 2798808 - DNA, 25 bp, Homo sapien
aaagtgtgatcagccaccaccaaag

SEQ ID NO: 2798809 - DNA, 25 bp, Homo sapien
tgtgatcagccaccaccaaagtcat

SEQ ID NO: 2798810 - DNA, 25 bp, Homo sapien
tctttcaataagttcggcagggtgg

SEQ ID NO: 2798811 - DNA, 25 bp, Homo sapien
cgatggtgagtacaacagactgctt

SEQ ID NO: 2798812 - DNA, 25 bp, Homo sapien
ccttggatcaagttgggaccggcag

SEQ ID NO: 2798813 - DNA, 25 bp, Homo sapien
tatctagaatcgtacagctctgctg

SEQ ID NO: 2798814 - DNA, 25 bp, Homo sapien
accacttccctaagtgacgctgggc

SEQ ID NO: 2798815 - DNA, 25 bp, Homo sapien
gtgttcagaagaccgagcccggctg

SEQ ID NO: 2798816 - DNA, 25 bp, Homo sapien
aagggttccatactctccgaggatc

SEQ ID NO: 2798817 - DNA, 25 bp, Homo sapien
gctcgtggcgtgtggaacgcttttc

SEQ ID NO: 2798818 - DNA, 25 bp, Homo sapien
aatcccttcaaggtgagcttcggcc

SEQ ID NO: 2798819 - DNA, 25 bp, Homo sapien
gcgacgcgtcgttgtttgtgaaaac

SEQ ID NO: 2798820 - DNA, 25 bp, Homo sapien
tgaaaacggacgagttccttcgcgc

SEQ ID NO: 2798821 - DNA, 25 bp, Homo sapien
agccagagagatgtcggatttcgac

SEQ ID NO: 2798822 - DNA, 25 bp, Homo sapien
aatcgatgttgatggagctctcata

SEQ ID NO: 2798823 - DNA, 25 bp, Homo sapien
gaaatcgatgttgatggagctctca

SEQ ID NO: 2798824 - DNA, 25 bp, Homo sapien
ttcagggaaatcgatgttgatggag

SEQ ID NO: 2798825 - DNA, 25 bp, Homo sapien
gatgttgatggagctctcataagtg

SEQ ID NO: 2798826 - DNA, 25 bp, Homo sapien
ggttttgtagatgatggtgagggta

SEQ ID NO: 2798827 - DNA, 25 bp, Homo sapien
tttgtagatgatggtgagggtaggc

SEQ ID NO: 2798828 - DNA, 25 bp, Homo sapien
tgtagatgatggtgagggtaggcat

SEQ ID NO: 2798829 - DNA, 25 bp, Homo sapien
ttttgtagatgatggtgagggtagg

SEQ ID NO: 2798830 - DNA, 25 bp, Homo sapien
gatacagcattacttactgggtcct

SEQ ID NO: 2798831 - DNA, 25 bp, Homo sapien
tatatcctggtggtcgtatgactga

SEQ ID NO: 2798832 - DNA, 25 bp, Homo sapien
actgtgggtgatcataaggcttggc

SEQ ID NO: 2798833 - DNA, 25 bp, Homo sapien
cataaacttagctgtggctcaggag

SEQ ID NO: 2798834 - DNA, 25 bp, Homo sapien
cccaggtacagccaaagtagtggca

SEQ ID NO: 2798835 - DNA, 25 bp, Homo sapien
tttgattctgcctccggggtcagtt

SEQ ID NO: 2798836 - DNA, 25 bp, Homo sapien
gatgaggatatacagccttgctctg

SEQ ID NO: 2798837 - DNA, 25 bp, Homo sapien
tcatccatccatgggatgaggatat

SEQ ID NO: 2798838 - DNA, 25 bp, Homo sapien
agtgaatccaattgcattgctctgg

SEQ ID NO: 2798839 - DNA, 25 bp, Homo sapien
tgatctgtagtaatatggcgtttgc

SEQ ID NO: 2798840 - DNA, 25 bp, Homo sapien
cacttcattttctaggatccagtca

SEQ ID NO: 2798841 - DNA, 25 bp, Homo sapien
cttgtaccgtgatagattttcatgc

SEQ ID NO: 2798842 - DNA, 25 bp, Homo sapien
taatcagcgataatttctacctatg

SEQ ID NO: 2798843 - DNA, 25 bp, Homo sapien
tcagagcctgtagtcttattggaaa

SEQ ID NO: 2798844 - DNA, 25 bp, Homo sapien
tagcaaagaataattagaacccaca

SEQ ID NO: 2798845 - DNA, 25 bp, Homo sapien
tacagcaagtgcacctatattcacc

SEQ ID NO: 2798846 - DNA, 25 bp, Homo sapien
tgaacaccggaaagtcattactcag

SEQ ID NO: 2798847 - DNA, 25 bp, Homo sapien
catcatggtgactgtcatggttcta

SEQ ID NO: 2798848 - DNA, 25 bp, Homo sapien
cagcagtcatccgtgtcatttatca

SEQ ID NO: 2798849 - DNA, 25 bp, Homo sapien
ctaatactgcgctgccatcatggtg

SEQ ID NO: 2798850 - DNA, 25 bp, Homo sapien
taaaaatgggtgtctctgtactagt

SEQ ID NO: 2798851 - DNA, 25 bp, Homo sapien
ggaaaacctattcatggctcagatt

SEQ ID NO: 2798852 - DNA, 25 bp, Homo sapien
gacctttacaggtaatggaacatga

SEQ ID NO: 2798853 - DNA, 25 bp, Homo sapien
ggaacatgagcttcacccatattaa

SEQ ID NO: 2798854 - DNA, 25 bp, Homo sapien
ggtattgccactaacctgtcttata

SEQ ID NO: 2798855 - DNA, 25 bp, Homo sapien
tatcacagtatgtagagagctagaa

SEQ ID NO: 2798856 - DNA, 25 bp, Homo sapien
gaaactttctaagccaggtattgcc

SEQ ID NO: 2798857 - DNA, 25 bp, Homo sapien
tgtcttatataagcagatacctctt

SEQ ID NO: 2798858 - DNA, 25 bp, Homo sapien
ttctgggcttgacatggctgatggt

SEQ ID NO: 2798859 - DNA, 25 bp, Homo sapien
tgcacaaaaactgaacccactgggc

SEQ ID NO: 2798860 - DNA, 25 bp, Homo sapien
tacagtattctagtctcctgcacaa

SEQ ID NO: 2798861 - DNA, 25 bp, Homo sapien
gatggtgtagctgaaaccctcctaa

SEQ ID NO: 2798862 - DNA, 25 bp, Homo sapien
ccatgaggaaggaatcaccaagaaa

SEQ ID NO: 2798863 - DNA, 25 bp, Homo sapien
ttggaacataagaggtagccatttt

SEQ ID NO: 2798864 - DNA, 25 bp, Homo sapien
acataagaggtagccattttctgcc

SEQ ID NO: 2798865 - DNA, 25 bp, Homo sapien
gaattggaacataagaggtagccat

SEQ ID NO: 2798866 - DNA, 25 bp, Homo sapien
tagctgaatgctctgttataacagg

SEQ ID NO: 2798867 - DNA, 25 bp, Homo sapien
gagtaactgagtaccctgcatccac

SEQ ID NO: 2798868 - DNA, 25 bp, Homo sapien
tgctcacccaatgctaccggtttgt

SEQ ID NO: 2798869 - DNA, 25 bp, Homo sapien
catcagcaatgtacggaaaggcctc

SEQ ID NO: 2798870 - DNA, 25 bp, Homo sapien
cccagggtagggacatatatgttac

SEQ ID NO: 2798871 - DNA, 25 bp, Homo sapien
ttgacgttaaagaaagatagcccag

SEQ ID NO: 2798872 - DNA, 25 bp, Homo sapien
ggaagaaatacatacttgacgttaa

SEQ ID NO: 2798873 - DNA, 25 bp, Homo sapien
tcctatttacaattgtgttgatgct

SEQ ID NO: 2798874 - DNA, 25 bp, Homo sapien
ggcgtgcgggcttaactttgacata

SEQ ID NO: 2798875 - DNA, 25 bp, Homo sapien
gaaagactagcattaactgggcctg

SEQ ID NO: 2798876 - DNA, 25 bp, Homo sapien
gagttcattgagaagcgcagcccat

SEQ ID NO: 2798877 - DNA, 25 bp, Homo sapien
gaatatcaagtggtgccgagtccct

SEQ ID NO: 2798878 - DNA, 25 bp, Homo sapien
cacagctagcttggagacctcagtc

SEQ ID NO: 2798879 - DNA, 25 bp, Homo sapien
tataatgtgcactgcagaccgcatg

SEQ ID NO: 2798880 - DNA, 25 bp, Homo sapien
gaacttggcaactccaggtctagga

SEQ ID NO: 2798881 - DNA, 25 bp, Homo sapien
gaatgccattctgctactgtcggga

SEQ ID NO: 2798882 - DNA, 25 bp, Homo sapien
ctaaaggaggcagatcagatttttc

SEQ ID NO: 2798883 - DNA, 25 bp, Homo sapien
aaaggaggcagatcagatttttccc

SEQ ID NO: 2798884 - DNA, 25 bp, Homo sapien
aggaggcagatcagatttttcccct

SEQ ID NO: 2798885 - DNA, 25 bp, Homo sapien
taaaggaggcagatcagatttttcc

SEQ ID NO: 2798886 - DNA, 25 bp, Homo sapien
tgtcactagaggttgcaatttctgc

SEQ ID NO: 2798887 - DNA, 25 bp, Homo sapien
taggcagatgcataatgtccacagt

SEQ ID NO: 2798888 - DNA, 25 bp, Homo sapien
ggagcagtctccaggtttgtaggca

SEQ ID NO: 2798889 - DNA, 25 bp, Homo sapien
gcagggtagagtatcaaaccgagga

SEQ ID NO: 2798890 - DNA, 25 bp, Homo sapien
agggtgagccacaaaaggagtcgct

SEQ ID NO: 2798891 - DNA, 25 bp, Homo sapien
tgagccacaaaaggagtcgcttgct

SEQ ID NO: 2798892 - DNA, 25 bp, Homo sapien
gtgagccacaaaaggagtcgcttgc

SEQ ID NO: 2798893 - DNA, 25 bp, Homo sapien
ggtgagccacaaaaggagtcgcttg

SEQ ID NO: 2798894 - DNA, 25 bp, Homo sapien
cacatgacagtagctcctcccaaaa

SEQ ID NO: 2798895 - DNA, 25 bp, Homo sapien
agctcctcccaaaaaagccagaggc

SEQ ID NO: 2798896 - DNA, 25 bp, Homo sapien
gtccctctgtggtgaatgccacacg

SEQ ID NO: 2798897 - DNA, 25 bp, Homo sapien
gggaagcaaagctacctgtctgagc

SEQ ID NO: 2798898 - DNA, 25 bp, Homo sapien
tgggccctgacaagcatccctcagg

SEQ ID NO: 2798899 - DNA, 25 bp, Homo sapien
caggcacagacttcatcctagcagt

SEQ ID NO: 2798900 - DNA, 25 bp, Homo sapien
tcatgactgggtcgcagcaagccca

SEQ ID NO: 2798901 - DNA, 25 bp, Homo sapien
ctgattcatgactgggtcgcagcaa

SEQ ID NO: 2798902 - DNA, 25 bp, Homo sapien
attcatgactgggtcgcagcaagcc

SEQ ID NO: 2798903 - DNA, 25 bp, Homo sapien
tgattcatgactgggtcgcagcaag

SEQ ID NO: 2798904 - DNA, 25 bp, Homo sapien
ggacagcttcacaaagtactgatgg

SEQ ID NO: 2798905 - DNA, 25 bp, Homo sapien
gacagcttcacaaagtactgatggt

SEQ ID NO: 2798906 - DNA, 25 bp, Homo sapien
tccatatgacacagcttagacagca

SEQ ID NO: 2798907 - DNA, 25 bp, Homo sapien
cctgtgttccatatgacacagctta

SEQ ID NO: 2798908 - DNA, 25 bp, Homo sapien
tgaagtgaatacatcggcttgatga

SEQ ID NO: 2798909 - DNA, 25 bp, Homo sapien
aataaatgacatttctttgaagtga

SEQ ID NO: 2798910 - DNA, 25 bp, Homo sapien
gaagtgaatacatcggcttgatgaa

SEQ ID NO: 2798911 - DNA, 25 bp, Homo sapien
gaagggtgaaggatgtaattggaaa

SEQ ID NO: 2798912 - DNA, 25 bp, Homo sapien
ttagcacagagtggaccagcactcg

SEQ ID NO: 2798913 - DNA, 25 bp, Homo sapien
tttgccgtgaaatgggagaagcctt

SEQ ID NO: 2798914 - DNA, 25 bp, Homo sapien
cagcactcgttcaaaggaagcaact

SEQ ID NO: 2798915 - DNA, 25 bp, Homo sapien
taaacttccttgattttgccgtgaa

SEQ ID NO: 2798916 - DNA, 25 bp, Homo sapien
actgtgttgtcgaggctagcatgca

SEQ ID NO: 2798917 - DNA, 25 bp, Homo sapien
gatgcggacccctttctaagaagcc

SEQ ID NO: 2798918 - DNA, 25 bp, Homo sapien
gctaaaccaggcttaacgtcgacat

SEQ ID NO: 2798919 - DNA, 25 bp, Homo sapien
tagagggtacctgcgttaagatgcg

SEQ ID NO: 2798920 - DNA, 25 bp, Homo sapien
caaatcctggagagtgatcagctgc

SEQ ID NO: 2798921 - DNA, 25 bp, Homo sapien
tacttccatgcatcagatttatgac

SEQ ID NO: 2798922 - DNA, 25 bp, Homo sapien
gatcagctgcatttcgtatgcccac

SEQ ID NO: 2798923 - DNA, 25 bp, Homo sapien
ttcatgttgtcctctttcaccctca

SEQ ID NO: 2798924 - DNA, 25 bp, Homo sapien
tcccacgaccacacacccttcaccc

SEQ ID NO: 2798925 - DNA, 25 bp, Homo sapien
ctgagcctgcatacaccaggccctt

SEQ ID NO: 2798926 - DNA, 25 bp, Homo sapien
aaggctgagcctgcatacaccaggc

SEQ ID NO: 2798927 - DNA, 25 bp, Homo sapien
ccacgaccacacacccttcacccca

SEQ ID NO: 2798928 - DNA, 25 bp, Homo sapien
gccccagggcaatctatctggtcag

SEQ ID NO: 2798929 - DNA, 25 bp, Homo sapien
cagggcaatctatctggtcagactg

SEQ ID NO: 2798930 - DNA, 25 bp, Homo sapien
ggcaatctatctggtcagactggtg

SEQ ID NO: 2798931 - DNA, 25 bp, Homo sapien
tcagccccagggcaatctatctggt

SEQ ID NO: 2798932 - DNA, 25 bp, Homo sapien
tttgtttcagtgttgaagagatcca

SEQ ID NO: 2798933 - DNA, 25 bp, Homo sapien
tgtttcagtgttgaagagatccagg

SEQ ID NO: 2798934 - DNA, 25 bp, Homo sapien
gtttcagtgttgaagagatccaggg

SEQ ID NO: 2798935 - DNA, 25 bp, Homo sapien
catttgtttcagtgttgaagagatc

SEQ ID NO: 2798936 - DNA, 25 bp, Homo sapien
ttcctcttagcataaagtgcttgct

SEQ ID NO: 2798937 - DNA, 25 bp, Homo sapien
tgcaggtgggactcacgctctccat

SEQ ID NO: 2798938 - DNA, 25 bp, Homo sapien
ctcttagcataaagtgcttgctgca

SEQ ID NO: 2798939 - DNA, 25 bp, Homo sapien
cataattcctcagggagttgcactg

SEQ ID NO: 2798940 - DNA, 25 bp, Homo sapien
caaggccaccatgcagagaataaag

SEQ ID NO: 2798941 - DNA, 25 bp, Homo sapien
gagaataaagattcccacagccagg

SEQ ID NO: 2798942 - DNA, 25 bp, Homo sapien
tacacacatggtgaagacggacacc

SEQ ID NO: 2798943 - DNA, 25 bp, Homo sapien
agcgtgtcccgctggaagtgctgca

SEQ ID NO: 2798944 - DNA, 25 bp, Homo sapien
gttccggatgcagcgggcgtagatg

SEQ ID NO: 2798945 - DNA, 25 bp, Homo sapien
gcagcgggcgtagatgcccagggtg

SEQ ID NO: 2798946 - DNA, 25 bp, Homo sapien
gatgcagcgggcgtagatgcccagg

SEQ ID NO: 2798947 - DNA, 25 bp, Homo sapien
ctgggttccggatgcagcgggcgta

SEQ ID NO: 2798948 - DNA, 25 bp, Homo sapien
caaggtccagagcatcgagcgacag

SEQ ID NO: 2798949 - DNA, 25 bp, Homo sapien
catgaaggcaatgagctcggcaaaa

SEQ ID NO: 2798950 - DNA, 25 bp, Homo sapien
gcatcgagcgacaggtgacaatgac

SEQ ID NO: 2798951 - DNA, 25 bp, Homo sapien
tcgctttcccgatcagccagtctgc

SEQ ID NO: 2798952 - DNA, 25 bp, Homo sapien
gtccacggagttaatcaaaacaaga

SEQ ID NO: 2798953 - DNA, 25 bp, Homo sapien
gatgttccgggcgaagaaagagtca

SEQ ID NO: 2798954 - DNA, 25 bp, Homo sapien
ggaaggaagtcgcagctgcagtcat

SEQ ID NO: 2798955 - DNA, 25 bp, Homo sapien
gcgaagaaagagtcaggagtccacg

SEQ ID NO: 2798956 - DNA, 25 bp, Homo sapien
ccggccgcgttcatgctggggacag

SEQ ID NO: 2798957 - DNA, 25 bp, Homo sapien
agcgctcccggacccagagcaccgc

SEQ ID NO: 2798958 - DNA, 25 bp, Homo sapien
ccgccgccggccgcgttcatgctgg

SEQ ID NO: 2798959 - DNA, 25 bp, Homo sapien
tggggacagcgctcccggacccaga

SEQ ID NO: 2798960 - DNA, 25 bp, Homo sapien
aagagaagcggagaaataaggaagc

SEQ ID NO: 2798961 - DNA, 25 bp, Homo sapien
catggccctgctctgaatgattaga

SEQ ID NO: 2798962 - DNA, 25 bp, Homo sapien
gaggtcaaatcaactccatgagaac

SEQ ID NO: 2798963 - DNA, 25 bp, Homo sapien
gattagatctcattaaccgaggtca

SEQ ID NO: 2798964 - DNA, 25 bp, Homo sapien
tgctactatcagaggaacagtggtg

SEQ ID NO: 2798965 - DNA, 25 bp, Homo sapien
gctgactaaaatcgaggcttcctgg

SEQ ID NO: 2798966 - DNA, 25 bp, Homo sapien
gcaggattacttaaggacccacatg

SEQ ID NO: 2798967 - DNA, 25 bp, Homo sapien
tacaagattggctgggataagggct

SEQ ID NO: 2798968 - DNA, 25 bp, Homo sapien
ggtaaggaaagtcgctgccacgctt

SEQ ID NO: 2798969 - DNA, 25 bp, Homo sapien
taaacgtcacctctctaaggacagt

SEQ ID NO: 2798970 - DNA, 25 bp, Homo sapien
tgtgtctttgggcaataaacgtcac

SEQ ID NO: 2798971 - DNA, 25 bp, Homo sapien
taaaccacgctctagcattaactag

SEQ ID NO: 2798972 - DNA, 25 bp, Homo sapien
cccacaggttaccaggaatggcaac

SEQ ID NO: 2798973 - DNA, 25 bp, Homo sapien
tccataggacctgctcctctggaga

SEQ ID NO: 2798974 - DNA, 25 bp, Homo sapien
aatggcaacggacagccgtggctga

SEQ ID NO: 2798975 - DNA, 25 bp, Homo sapien
ggctccataggacctgctcctctgg

SEQ ID NO: 2798976 - DNA, 25 bp, Homo sapien
aaggtactgctgtggtttagaccca

SEQ ID NO: 2798977 - DNA, 25 bp, Homo sapien
tcagtcgtggccaaaaacaatgtct

SEQ ID NO: 2798978 - DNA, 25 bp, Homo sapien
aatgctgactataggacacactggc

SEQ ID NO: 2798979 - DNA, 25 bp, Homo sapien
tatatgccagtagcgcgctctcagt

SEQ ID NO: 2798980 - DNA, 25 bp, Homo sapien
tgataaaaatcaagttgttttcatc

SEQ ID NO: 2798981 - DNA, 25 bp, Homo sapien
gataaaaatcaagttgttttcatcc

SEQ ID NO: 2798982 - DNA, 25 bp, Homo sapien
cttgataaaaatcaagttgttttca

SEQ ID NO: 2798983 - DNA, 25 bp, Homo sapien
ttgataaaaatcaagttgttttcat

SEQ ID NO: 2798984 - DNA, 25 bp, Homo sapien
atccacctgccttggcctcctaaag

SEQ ID NO: 2798985 - DNA, 25 bp, Homo sapien
catgttgcccaagctcatctcgaac

SEQ ID NO: 2798986 - DNA, 25 bp, Homo sapien
ccacctgccttggcctcctaaagtc

SEQ ID NO: 2798987 - DNA, 25 bp, Homo sapien
tgccatgttgcccaagctcatctcg

SEQ ID NO: 2798988 - DNA, 25 bp, Homo sapien
acaacaacaaggctggacccactgc

SEQ ID NO: 2798989 - DNA, 25 bp, Homo sapien
ctctcaggagccgtaggtcgagaga

SEQ ID NO: 2798990 - DNA, 25 bp, Homo sapien
caccatgacgccgagagggagaaat

SEQ ID NO: 2798991 - DNA, 25 bp, Homo sapien
gagaggagggatatgacaacaacaa

SEQ ID NO: 2798992 - DNA, 25 bp, Homo sapien
tcagacatcaaggagtggtgtcgcc

SEQ ID NO: 2798993 - DNA, 25 bp, Homo sapien
cagtcctgaactggcactacgctga

SEQ ID NO: 2798994 - DNA, 25 bp, Homo sapien
gcactacgctgagcgcccacgtagg

SEQ ID NO: 2798995 - DNA, 25 bp, Homo sapien
gtggtgtcgccagagcaggccattt

SEQ ID NO: 2798996 - DNA, 25 bp, Homo sapien
tgaatgtgtgactataccacaggag

SEQ ID NO: 2798997 - DNA, 25 bp, Homo sapien
aatgtgtgactataccacaggagag

SEQ ID NO: 2798998 - DNA, 25 bp, Homo sapien
ctgaatgtgtgactataccacagga

SEQ ID NO: 2798999 - DNA, 25 bp, Homo sapien
gaatgtgtgactataccacaggaga

SEQ ID NO: 2799000 - DNA, 25 bp, Homo sapien
actttctccatatgatccctgtgtg

SEQ ID NO: 2799001 - DNA, 25 bp, Homo sapien
tgcttattctttccactgactctga

SEQ ID NO: 2799002 - DNA, 25 bp, Homo sapien
gggacaggagcacccacagtataag

SEQ ID NO: 2799003 - DNA, 25 bp, Homo sapien
aggtgagaagccacacctgcacggg

SEQ ID NO: 2799004 - DNA, 25 bp, Homo sapien
taaatcctccgccttgaaagaagtc

SEQ ID NO: 2799005 - DNA, 25 bp, Homo sapien
gatgtatcaccattgagtcagcagc

SEQ ID NO: 2799006 - DNA, 25 bp, Homo sapien
gaaagaagtctaagaagacctccac

SEQ ID NO: 2799007 - DNA, 25 bp, Homo sapien
gaagacctccactagcccgagtgaa

SEQ ID NO: 2799008 - DNA, 25 bp, Homo sapien
tgggggaggtaagacatttgggcaa

SEQ ID NO: 2799009 - DNA, 25 bp, Homo sapien
ctgggggaggtaagacatttgggca

SEQ ID NO: 2799010 - DNA, 25 bp, Homo sapien
gagccttccccctgatctgggcagt

SEQ ID NO: 2799011 - DNA, 25 bp, Homo sapien
catccaagcgcccttgtccctttgt

SEQ ID NO: 2799012 - DNA, 25 bp, Homo sapien
tgtcgaatccacaagcaaaggctgc

SEQ ID NO: 2799013 - DNA, 25 bp, Homo sapien
gacttccaggaatcaccctagtggg

SEQ ID NO: 2799014 - DNA, 25 bp, Homo sapien
agcatggtccaagccttcaatgaaa

SEQ ID NO: 2799015 - DNA, 25 bp, Homo sapien
gcaaagtcaccattgtctgctatag

SEQ ID NO: 2799016 - DNA, 25 bp, Homo sapien
ggaggcaacaccgaaggctctatct

SEQ ID NO: 2799017 - DNA, 25 bp, Homo sapien
gaaaacactactttcaggaagagag

SEQ ID NO: 2799018 - DNA, 25 bp, Homo sapien
ttgctccatgagacgaactcactac

SEQ ID NO: 2799019 - DNA, 25 bp, Homo sapien
gagacgaactcactacagcgttcat

SEQ ID NO: 2799020 - DNA, 25 bp, Homo sapien
catgagacgaactcactacagcgtt

SEQ ID NO: 2799021 - DNA, 25 bp, Homo sapien
tccatgagacgaactcactacagcg

SEQ ID NO: 2799022 - DNA, 25 bp, Homo sapien
tctgctcagacttggctggccacag

SEQ ID NO: 2799023 - DNA, 25 bp, Homo sapien
caaggacactttggtactgttgctc

SEQ ID NO: 2799024 - DNA, 25 bp, Homo sapien
tagaaaacacacagcgcagaaggat

SEQ ID NO: 2799025 - DNA, 25 bp, Homo sapien
tgcttgtcctctcatggctgggttg

SEQ ID NO: 2799026 - DNA, 25 bp, Homo sapien
tatctgtaggaatgctgggaagtct

SEQ ID NO: 2799027 - DNA, 25 bp, Homo sapien
tctgtaggaatgctgggaagtctta

SEQ ID NO: 2799028 - DNA, 25 bp, Homo sapien
ggaatgctgggaagtcttaatgaac

SEQ ID NO: 2799029 - DNA, 25 bp, Homo sapien
taggaatgctgggaagtcttaatga

SEQ ID NO: 2799030 - DNA, 25 bp, Homo sapien
caaaacccctgaggtagctaccagt

SEQ ID NO: 2799031 - DNA, 25 bp, Homo sapien
taccaaaagttacatggcttgcaag

SEQ ID NO: 2799032 - DNA, 25 bp, Homo sapien
ttcaaatccgtatacatgatcacat

SEQ ID NO: 2799033 - DNA, 25 bp, Homo sapien
aagttaatatatcaggactgtcagg

SEQ ID NO: 2799034 - DNA, 25 bp, Homo sapien
aacatgacagcaggaattccggcat

SEQ ID NO: 2799035 - DNA, 25 bp, Homo sapien
gcaaggaggaatcgcaggcagcaat

SEQ ID NO: 2799036 - DNA, 25 bp, Homo sapien
gggatcctccagtgggtgtgtttcc

SEQ ID NO: 2799037 - DNA, 25 bp, Homo sapien
ttccggcatgagaagaaagcgcagg

SEQ ID NO: 2799038 - DNA, 25 bp, Homo sapien
cccagctcatctgtcctggagtttg

SEQ ID NO: 2799039 - DNA, 25 bp, Homo sapien
cagctcatctgtcctggagtttgct

SEQ ID NO: 2799040 - DNA, 25 bp, Homo sapien
tctgtcctggagtttgctgcacact

SEQ ID NO: 2799041 - DNA, 25 bp, Homo sapien
ggagtttgctgcacactgcccatca

SEQ ID NO: 2799042 - DNA, 25 bp, Homo sapien
tgtgtggaccctgaactcgatgctg

SEQ ID NO: 2799043 - DNA, 25 bp, Homo sapien
cctgtgtggaccctgaactcgatgc

SEQ ID NO: 2799044 - DNA, 25 bp, Homo sapien
ctgtgtggaccctgaactcgatgct

SEQ ID NO: 2799045 - DNA, 25 bp, Homo sapien
gtgtggaccctgaactcgatgctgc

SEQ ID NO: 2799046 - DNA, 25 bp, Homo sapien
gatctatcagcaacgtaggtgagca

SEQ ID NO: 2799047 - DNA, 25 bp, Homo sapien
cctagaagttacaatccagtggcag

SEQ ID NO: 2799048 - DNA, 25 bp, Homo sapien
gtacaatggccacgtgatctatcag

SEQ ID NO: 2799049 - DNA, 25 bp, Homo sapien
gagcatctattcaccaagagctgtg

SEQ ID NO: 2799050 - DNA, 25 bp, Homo sapien
tttttcaagccattctgtttcaatg

SEQ ID NO: 2799051 - DNA, 25 bp, Homo sapien
ttttcaagccattctgtttcaatgt

SEQ ID NO: 2799052 - DNA, 25 bp, Homo sapien
ctttttcaagccattctgtttcaat

SEQ ID NO: 2799053 - DNA, 25 bp, Homo sapien
tttcaagccattctgtttcaatgtg

SEQ ID NO: 2799054 - DNA, 25 bp, Homo sapien
cttctcatccccatgggaatcagga

SEQ ID NO: 2799055 - DNA, 25 bp, Homo sapien
tcaagtaagacatctaggttcctgg

SEQ ID NO: 2799056 - DNA, 25 bp, Homo sapien
cttgttttcgattgaggaagacagc

SEQ ID NO: 2799057 - DNA, 25 bp, Homo sapien
gaaagatttcacagccctcaagtaa

SEQ ID NO: 2799058 - DNA, 25 bp, Homo sapien
tgctgctgtcagtaggaaggagtca

SEQ ID NO: 2799059 - DNA, 25 bp, Homo sapien
gctgtggtcaccacatccctagtta

SEQ ID NO: 2799060 - DNA, 25 bp, Homo sapien
tgctgtcagtaggaaggagtcaatg

SEQ ID NO: 2799061 - DNA, 25 bp, Homo sapien
acatccctagttaaacactgctcca

SEQ ID NO: 2799062 - DNA, 25 bp, Homo sapien
gatgggtggttccatggagcaggca

SEQ ID NO: 2799063 - DNA, 25 bp, Homo sapien
gaatgccaataagcccttttccagg

SEQ ID NO: 2799064 - DNA, 25 bp, Homo sapien
aagaatgccaataagcccttttcca

SEQ ID NO: 2799065 - DNA, 25 bp, Homo sapien
cgtgcatagctggtgatcttgaagt

SEQ ID NO: 2799066 - DNA, 25 bp, Homo sapien
cctacggcagctgatgaacaggccc

SEQ ID NO: 2799067 - DNA, 25 bp, Homo sapien
taatgcctgctcactgatgttaaat

SEQ ID NO: 2799068 - DNA, 25 bp, Homo sapien
gaacaggcccctagaaataatgcct

SEQ ID NO: 2799069 - DNA, 25 bp, Homo sapien
actgatgttaaatttggcgccgatg

SEQ ID NO: 2799070 - DNA, 25 bp, Homo sapien
ctgcttgtaggcacacagacatcca

SEQ ID NO: 2799071 - DNA, 25 bp, Homo sapien
cacagacatccatctgtgcacccat

SEQ ID NO: 2799072 - DNA, 25 bp, Homo sapien
gcacacagacatccatctgtgcacc

SEQ ID NO: 2799073 - DNA, 25 bp, Homo sapien
tgcttgtaggcacacagacatccat

SEQ ID NO: 2799074 - DNA, 25 bp, Homo sapien
gcagctgggaggtgcttctgttcca

SEQ ID NO: 2799075 - DNA, 25 bp, Homo sapien
cctagaagtcagtccggtgacacgt

SEQ ID NO: 2799076 - DNA, 25 bp, Homo sapien
ggctgggtccagataagaacatcca

SEQ ID NO: 2799077 - DNA, 25 bp, Homo sapien
agttggacttacgaagcggagctca

SEQ ID NO: 2799078 - DNA, 25 bp, Homo sapien
tctttcagtgctgtcgtctggcaga

SEQ ID NO: 2799079 - DNA, 25 bp, Homo sapien
gattcagtattcagtggttcccaaa

SEQ ID NO: 2799080 - DNA, 25 bp, Homo sapien
tgctctggtcctccgtttcttaaga

SEQ ID NO: 2799081 - DNA, 25 bp, Homo sapien
tatgcatggatgcaggcaaacccca

SEQ ID NO: 2799082 - DNA, 25 bp, Homo sapien
gaagactaagccctggagagaagaa

SEQ ID NO: 2799083 - DNA, 25 bp, Homo sapien
ggcttcaaaagcgacagggtggcac

SEQ ID NO: 2799084 - DNA, 25 bp, Homo sapien
tattacgatagcagcgccaatgact

SEQ ID NO: 2799085 - DNA, 25 bp, Homo sapien
agggtggcaccagcacttacatgca

SEQ ID NO: 2799086 - DNA, 25 bp, Homo sapien
agcttatctcttgacccaccgggag

SEQ ID NO: 2799087 - DNA, 25 bp, Homo sapien
gagagcctgccagctttagatcaat

SEQ ID NO: 2799088 - DNA, 25 bp, Homo sapien
gaacagaagccacaacccaactgat

SEQ ID NO: 2799089 - DNA, 25 bp, Homo sapien
caactggctcaactcattgctggcc

SEQ ID NO: 2799090 - DNA, 25 bp, Homo sapien
gctgcaaaacgagggtaggctccta

SEQ ID NO: 2799091 - DNA, 25 bp, Homo sapien
tagacatataggtcgggttgcggcc

SEQ ID NO: 2799092 - DNA, 25 bp, Homo sapien
taagtgcagcccactgtaagacctg

SEQ ID NO: 2799093 - DNA, 25 bp, Homo sapien
tcttgcatccgcgtagagaagggca

SEQ ID NO: 2799094 - DNA, 25 bp, Homo sapien
ctccgaataatgctcaactcaaagg

SEQ ID NO: 2799095 - DNA, 25 bp, Homo sapien
cactccgaataatgctcaactcaaa

SEQ ID NO: 2799096 - DNA, 25 bp, Homo sapien
tgacactccgaataatgctcaactc

SEQ ID NO: 2799097 - DNA, 25 bp, Homo sapien
cgaataatgctcaactcaaaggaat

SEQ ID NO: 2799098 - DNA, 25 bp, Homo sapien
ctctcactgtggcaggagacaccat

SEQ ID NO: 2799099 - DNA, 25 bp, Homo sapien
ctgaagggttactgtgcctcccggc

SEQ ID NO: 2799100 - DNA, 25 bp, Homo sapien
tgccctgaagggttactgtgcctcc

SEQ ID NO: 2799101 - DNA, 25 bp, Homo sapien
ccctgaagggttactgtgcctcccg

SEQ ID NO: 2799102 - DNA, 25 bp, Homo sapien
acagtgccctgaagggttactgtgc

SEQ ID NO: 2799103 - DNA, 25 bp, Homo sapien
aggagagacgtggacaggccctgtg

SEQ ID NO: 2799104 - DNA, 25 bp, Homo sapien
caggagagacgtggacaggccctgt

SEQ ID NO: 2799105 - DNA, 25 bp, Homo sapien
ggagagacgtggacaggccctgtgt

SEQ ID NO: 2799106 - DNA, 25 bp, Homo sapien
gtggggtcacaatcagttcaatctt

SEQ ID NO: 2799107 - DNA, 25 bp, Homo sapien
ccaatgggattagtaattgctggct

SEQ ID NO: 2799108 - DNA, 25 bp, Homo sapien
aggccaatgggattagtaattgctg

SEQ ID NO: 2799109 - DNA, 25 bp, Homo sapien
gccaatgggattagtaattgctggc

SEQ ID NO: 2799110 - DNA, 25 bp, Homo sapien
caactcaagagtctgattcccaact

SEQ ID NO: 2799111 - DNA, 25 bp, Homo sapien
catgaggtgcttcttaacaaaatgc

SEQ ID NO: 2799112 - DNA, 25 bp, Homo sapien
aaatgcagaaaccataggccagctg

SEQ ID NO: 2799113 - DNA, 25 bp, Homo sapien
caggtccctcgcttgcatgaggtgc

SEQ ID NO: 2799114 - DNA, 25 bp, Homo sapien
ggcccaggagccataaagtaattca

SEQ ID NO: 2799115 - DNA, 25 bp, Homo sapien
aggcccaggagccataaagtaattc

SEQ ID NO: 2799116 - DNA, 25 bp, Homo sapien
gatcgtaaatcagcagagacaatcc

SEQ ID NO: 2799117 - DNA, 25 bp, Homo sapien
ggcaggactatagacctcgtgatcg

SEQ ID NO: 2799118 - DNA, 25 bp, Homo sapien
gaggtcacgggtatgattagcttcc

SEQ ID NO: 2799119 - DNA, 25 bp, Homo sapien
gacgcacccttggttactaagagga

SEQ ID NO: 2799120 - DNA, 25 bp, Homo sapien
gcagacagacagtcgcctttttgct

SEQ ID NO: 2799121 - DNA, 25 bp, Homo sapien
acagacagtcgcctttttgctgcat

SEQ ID NO: 2799122 - DNA, 25 bp, Homo sapien
gcttgcagacagacagtcgcctttt

SEQ ID NO: 2799123 - DNA, 25 bp, Homo sapien
tgcagacagacagtcgcctttttgc

SEQ ID NO: 2799124 - DNA, 25 bp, Homo sapien
ttgggcgacactcagaatagaacaa

SEQ ID NO: 2799125 - DNA, 25 bp, Homo sapien
aatggtaggccgggatgttctgctt

SEQ ID NO: 2799126 - DNA, 25 bp, Homo sapien
caatggtaggccgggatgttctgct

SEQ ID NO: 2799127 - DNA, 25 bp, Homo sapien
atggtaggccgggatgttctgcttt

SEQ ID NO: 2799128 - DNA, 25 bp, Homo sapien
caggcactctccctaaattagcaga

SEQ ID NO: 2799129 - DNA, 25 bp, Homo sapien
taaatgaaggaacaaacaggcactc

SEQ ID NO: 2799130 - DNA, 25 bp, Homo sapien
tgctgtgttaccagagcccagaaca

SEQ ID NO: 2799131 - DNA, 25 bp, Homo sapien
gagtggctccctaggtatttgctga

SEQ ID NO: 2799132 - DNA, 25 bp, Homo sapien
gagcccgcagccttccccaagtcag

SEQ ID NO: 2799133 - DNA, 25 bp, Homo sapien
gcagccttccccaagtcagggcttt

SEQ ID NO: 2799134 - DNA, 25 bp, Homo sapien
ctcctcgcagccacctcgctcttgc

SEQ ID NO: 2799135 - DNA, 25 bp, Homo sapien
gggctttcagtgacgcctcctcgca

SEQ ID NO: 2799136 - DNA, 25 bp, Homo sapien
aatattgattgtacccatcatgagc

SEQ ID NO: 2799137 - DNA, 25 bp, Homo sapien
tctatgtgcctatatttgcaccagt

SEQ ID NO: 2799138 - DNA, 25 bp, Homo sapien
ttgattgtacccatcatgagcatgg

SEQ ID NO: 2799139 - DNA, 25 bp, Homo sapien
ctatgtgcctatatttgcaccagta

SEQ ID NO: 2799140 - DNA, 25 bp, Homo sapien
aggtgagaaggcctgaaccatagcc

SEQ ID NO: 2799141 - DNA, 25 bp, Homo sapien
ctctgtccaaactctaacaatctaa

SEQ ID NO: 2799142 - DNA, 25 bp, Homo sapien
taacaatctaaacagcatggctctc

SEQ ID NO: 2799143 - DNA, 25 bp, Homo sapien
gcatggctctcccatggcttttctt

SEQ ID NO: 2799144 - DNA, 25 bp, Homo sapien
ggaagtgactcagatgtggcaaaga

SEQ ID NO: 2799145 - DNA, 25 bp, Homo sapien
ccatgttgttgaagaacatcccggg

SEQ ID NO: 2799146 - DNA, 25 bp, Homo sapien
tctgagggtttctcacagacaaaca

SEQ ID NO: 2799147 - DNA, 25 bp, Homo sapien
aaatccaggcatgagatcatttggc

SEQ ID NO: 2799148 - DNA, 25 bp, Homo sapien
gaagaattagacttcctccacaata

SEQ ID NO: 2799149 - DNA, 25 bp, Homo sapien
cacaatacagacaggaccagtacct

SEQ ID NO: 2799150 - DNA, 25 bp, Homo sapien
tagaagcttcggctgactgtctggc

SEQ ID NO: 2799151 - DNA, 25 bp, Homo sapien
tggaggtgttcctcaacagttgagg

SEQ ID NO: 2799152 - DNA, 25 bp, Homo sapien
gaactactgcattcaccatgaagct

SEQ ID NO: 2799153 - DNA, 25 bp, Homo sapien
ccagaactactgcattcaccatgaa

SEQ ID NO: 2799154 - DNA, 25 bp, Homo sapien
tggttcaactttagcacctgtctcg

SEQ ID NO: 2799155 - DNA, 25 bp, Homo sapien
cttttccagaactactgcattcacc

SEQ ID NO: 2799156 - DNA, 25 bp, Homo sapien
gtcttctaacgaagacatcatggag

SEQ ID NO: 2799157 - DNA, 25 bp, Homo sapien
ttagtcttctaacgaagacatcatg

SEQ ID NO: 2799158 - DNA, 25 bp, Homo sapien
agtcttctaacgaagacatcatgga

SEQ ID NO: 2799159 - DNA, 25 bp, Homo sapien
ttttagtcttctaacgaagacatca

SEQ ID NO: 2799160 - DNA, 25 bp, Homo sapien
tcaatttattgaccacttctttcaa

SEQ ID NO: 2799161 - DNA, 25 bp, Homo sapien
ctgtgtcttttcaatgctgtctgga

SEQ ID NO: 2799162 - DNA, 25 bp, Homo sapien
atttattgaccacttctttcaagtc

SEQ ID NO: 2799163 - DNA, 25 bp, Homo sapien
gctgtctggaatcaatttattgacc

SEQ ID NO: 2799164 - DNA, 25 bp, Homo sapien
ccgcgcagtggtagtcttgacatgg

SEQ ID NO: 2799165 - DNA, 25 bp, Homo sapien
tgagccaccgcgcagtggtagtctt

SEQ ID NO: 2799166 - DNA, 25 bp, Homo sapien
cgcagtggtagtcttgacatggaca

SEQ ID NO: 2799167 - DNA, 25 bp, Homo sapien
tggtagtcttgacatggacatgacc

SEQ ID NO: 2799168 - DNA, 25 bp, Homo sapien
ttatgcagtttttgcccaaatatct

SEQ ID NO: 2799169 - DNA, 25 bp, Homo sapien
cagtttttgcccaaatatcttcaaa

SEQ ID NO: 2799170 - DNA, 25 bp, Homo sapien
tatcttcaaaaatcagcttaaattt

SEQ ID NO: 2799171 - DNA, 25 bp, Homo sapien
tgcagtttttgcccaaatatcttca

SEQ ID NO: 2799172 - DNA, 25 bp, Homo sapien
tcaaacatgtgacccttgaggccat

SEQ ID NO: 2799173 - DNA, 25 bp, Homo sapien
tgggtcctggtgactagggtctttc

SEQ ID NO: 2799174 - DNA, 25 bp, Homo sapien
acagcaggggctttcacatcatgcc

SEQ ID NO: 2799175 - DNA, 25 bp, Homo sapien
acacagcaggggctttcacatcatg

SEQ ID NO: 2799176 - DNA, 25 bp, Homo sapien
tgccaacaagtcttttatggtaaaa

SEQ ID NO: 2799177 - DNA, 25 bp, Homo sapien
ttcaggagtcggttgacctcttttc

SEQ ID NO: 2799178 - DNA, 25 bp, Homo sapien
aggagtcggttgacctcttttctgc

SEQ ID NO: 2799179 - DNA, 25 bp, Homo sapien
tcaggagtcggttgacctcttttct

SEQ ID NO: 2799180 - DNA, 25 bp, Homo sapien
cttcaggagtcggttgacctctttt

SEQ ID NO: 2799181 - DNA, 25 bp, Homo sapien
gagagcttgcccacactatcagtgt

SEQ ID NO: 2799182 - DNA, 25 bp, Homo sapien
taacatagccgtggcagctaagcag

SEQ ID NO: 2799183 - DNA, 25 bp, Homo sapien
ccactgagagccctttggcaaagct

SEQ ID NO: 2799184 - DNA, 25 bp, Homo sapien
taagcagacacttgtcttaaaatcc

SEQ ID NO: 2799185 - DNA, 25 bp, Homo sapien
agggaatggaatagggcagtaattt

SEQ ID NO: 2799186 - DNA, 25 bp, Homo sapien
tatgcctatcatcaaagtatccagg

SEQ ID NO: 2799187 - DNA, 25 bp, Homo sapien
agcaataaagttatgcctatcatca

SEQ ID NO: 2799188 - DNA, 25 bp, Homo sapien
ctatcatcaaagtatccaggatcca

SEQ ID NO: 2799189 - DNA, 25 bp, Homo sapien
taacctctaggcccatctgccttgg

SEQ ID NO: 2799190 - DNA, 25 bp, Homo sapien
tctgccttggccagctgggccccac

SEQ ID NO: 2799191 - DNA, 25 bp, Homo sapien
ccttggccagctgggccccactcac

SEQ ID NO: 2799192 - DNA, 25 bp, Homo sapien
ttaacctctaggcccatctgccttg

SEQ ID NO: 2799193 - DNA, 25 bp, Homo sapien
gcctgtacagatggtggggactttt

SEQ ID NO: 2799194 - DNA, 25 bp, Homo sapien
tgtacagatggtggggactttttct

SEQ ID NO: 2799195 - DNA, 25 bp, Homo sapien
cagatggtggggactttttctctaa

SEQ ID NO: 2799196 - DNA, 25 bp, Homo sapien
tgggcctgtacagatggtggggact

SEQ ID NO: 2799197 - DNA, 25 bp, Homo sapien
aagctgttgtaagctgactggtagc

SEQ ID NO: 2799198 - DNA, 25 bp, Homo sapien
tgactggtagcggagatcctggtac

SEQ ID NO: 2799199 - DNA, 25 bp, Homo sapien
taagctgactggtagcggagatcct

SEQ ID NO: 2799200 - DNA, 25 bp, Homo sapien
cggagatcctggtacagtaggaagt

SEQ ID NO: 2799201 - DNA, 25 bp, Homo sapien
atattttggcacttggaggagagga

SEQ ID NO: 2799202 - DNA, 25 bp, Homo sapien
ggaaggagaaggatattttggcact

SEQ ID NO: 2799203 - DNA, 25 bp, Homo sapien
ttggcacttggaggagaggaaattc

SEQ ID NO: 2799204 - DNA, 25 bp, Homo sapien
ggaaattcaggaaggagaaatctgg

SEQ ID NO: 2799205 - DNA, 25 bp, Homo sapien
ctagtaagggtaagtcctctatggt

SEQ ID NO: 2799206 - DNA, 25 bp, Homo sapien
tagtaagggtaagtcctctatggtc

SEQ ID NO: 2799207 - DNA, 25 bp, Homo sapien
tcctagtaagggtaagtcctctatg

SEQ ID NO: 2799208 - DNA, 25 bp, Homo sapien
cctagtaagggtaagtcctctatgg

SEQ ID NO: 2799209 - DNA, 25 bp, Homo sapien
caaatccatccttctttaccttgta

SEQ ID NO: 2799210 - DNA, 25 bp, Homo sapien
gctacacggataggtaagttttgga

SEQ ID NO: 2799211 - DNA, 25 bp, Homo sapien
ctgggagatataacttggtgggcac

SEQ ID NO: 2799212 - DNA, 25 bp, Homo sapien
gtcacgaaaacatgggctacacgga

SEQ ID NO: 2799213 - DNA, 25 bp, Homo sapien
tgtcaggaacaaagcaattaactga

SEQ ID NO: 2799214 - DNA, 25 bp, Homo sapien
caatgtagcgctgatgccctccagt

SEQ ID NO: 2799215 - DNA, 25 bp, Homo sapien
taagttggccggacaagtgaagtga

SEQ ID NO: 2799216 - DNA, 25 bp, Homo sapien
tttgaaccttgtcaggaacaaagca

SEQ ID NO: 2799217 - DNA, 25 bp, Homo sapien
tgctgaggtcacaaacaagccacac

SEQ ID NO: 2799218 - DNA, 25 bp, Homo sapien
ttttccttggcagcccatctgctga

SEQ ID NO: 2799219 - DNA, 25 bp, Homo sapien
gaatctaaggaccaaagagatggcc

SEQ ID NO: 2799220 - DNA, 25 bp, Homo sapien
agctccccagagcattgtggaagcc

SEQ ID NO: 2799221 - DNA, 25 bp, Homo sapien
tcttgtgagactgatgatcggcatc

SEQ ID NO: 2799222 - DNA, 25 bp, Homo sapien
cctaggcccaaaacggtgtgttgtg

SEQ ID NO: 2799223 - DNA, 25 bp, Homo sapien
tatagacgatgagagttactggttg

SEQ ID NO: 2799224 - DNA, 25 bp, Homo sapien
tggccagcccgggagttatagacga

SEQ ID NO: 2799225 - DNA, 25 bp, Homo sapien
cccgggagttatagacgatgagagt

SEQ ID NO: 2799226 - DNA, 25 bp, Homo sapien
gttatagacgatgagagttactggt

SEQ ID NO: 2799227 - DNA, 25 bp, Homo sapien
ttgagggagttccagtattgtagag

SEQ ID NO: 2799228 - DNA, 25 bp, Homo sapien
agtttgagggagttccagtattgta

SEQ ID NO: 2799229 - DNA, 25 bp, Homo sapien
tttgagggagttccagtattgtaga

SEQ ID NO: 2799230 - DNA, 25 bp, Homo sapien
ttagtttgagggagttccagtattg

SEQ ID NO: 2799231 - DNA, 25 bp, Homo sapien
cctctttaagggataaaacagagct

SEQ ID NO: 2799232 - DNA, 25 bp, Homo sapien
tctttaagggataaaacagagctga

SEQ ID NO: 2799233 - DNA, 25 bp, Homo sapien
ctttaagggataaaacagagctgag

SEQ ID NO: 2799234 - DNA, 25 bp, Homo sapien
cttgcctctttaagggataaaacag

SEQ ID NO: 2799235 - DNA, 25 bp, Homo sapien
gcactatgcgggctgaaatgttttc

SEQ ID NO: 2799236 - DNA, 25 bp, Homo sapien
agacctttggcattcgcaactctgg

SEQ ID NO: 2799237 - DNA, 25 bp, Homo sapien
ttgcaaggatctccctaaacccgag

SEQ ID NO: 2799238 - DNA, 25 bp, Homo sapien
gcaactctggtagtagcactatgcg

SEQ ID NO: 2799239 - DNA, 25 bp, Homo sapien
aattttccctctgttagctgctcta

SEQ ID NO: 2799240 - DNA, 25 bp, Homo sapien
gagtagttctctaacttcactgccc

SEQ ID NO: 2799241 - DNA, 25 bp, Homo sapien
ggcttacccatgattgagtagttct

SEQ ID NO: 2799242 - DNA, 25 bp, Homo sapien
cttctttgtccatgggcttacccat

SEQ ID NO: 2799243 - DNA, 25 bp, Homo sapien
tcctcggcatttgcaagactaatct

SEQ ID NO: 2799244 - DNA, 25 bp, Homo sapien
tcggcatttgcaagactaatctcag

SEQ ID NO: 2799245 - DNA, 25 bp, Homo sapien
ctgccctttgtaactagtcctcggc

SEQ ID NO: 2799246 - DNA, 25 bp, Homo sapien
gtaactagtcctcggcatttgcaag

SEQ ID NO: 2799247 - DNA, 25 bp, Homo sapien
gaaactgggattattcatactggaa

SEQ ID NO: 2799248 - DNA, 25 bp, Homo sapien
gactggaagagctgaaggaggttca

SEQ ID NO: 2799249 - DNA, 25 bp, Homo sapien
taagcccagaatcacgagggtgctg

SEQ ID NO: 2799250 - DNA, 25 bp, Homo sapien
ctgtgttaagcccagaatcacgagg

SEQ ID NO: 2799251 - DNA, 25 bp, Homo sapien
gaacaggaggactggtagccagcct

SEQ ID NO: 2799252 - DNA, 25 bp, Homo sapien
tgggacgagggttcaggttcaaaca

SEQ ID NO: 2799253 - DNA, 25 bp, Homo sapien
tgctccctctactatggggcccagg

SEQ ID NO: 2799254 - DNA, 25 bp, Homo sapien
ctggtcaggccactcaggaaagagc

SEQ ID NO: 2799255 - DNA, 25 bp, Homo sapien
gctgttggttttgtctgcaagttca

SEQ ID NO: 2799256 - DNA, 25 bp, Homo sapien
gttcttcatatcagcattgtgctgt

SEQ ID NO: 2799257 - DNA, 25 bp, Homo sapien
gttggttttgtctgcaagttcactg

SEQ ID NO: 2799258 - DNA, 25 bp, Homo sapien
tcatatcagcattgtgctgttggtt

SEQ ID NO: 2799259 - DNA, 25 bp, Homo sapien
tcctgtccaagcctcacgtttgtgc

SEQ ID NO: 2799260 - DNA, 25 bp, Homo sapien
attcctctgactggtgagcccctct

SEQ ID NO: 2799261 - DNA, 25 bp, Homo sapien
gcattcctctgactggtgagcccct

SEQ ID NO: 2799262 - DNA, 25 bp, Homo sapien
gtccaagcctcacgtttgtgctccg

SEQ ID NO: 2799263 - DNA, 25 bp, Homo sapien
tagaggcagagtcccttccttgctg

SEQ ID NO: 2799264 - DNA, 25 bp, Homo sapien
tctggtctgcactagaggcagagtc

SEQ ID NO: 2799265 - DNA, 25 bp, Homo sapien
gctggcctgaatgatcacacactgg

SEQ ID NO: 2799266 - DNA, 25 bp, Homo sapien
aaggaggagcgtgcgtgtttatctc

SEQ ID NO: 2799267 - DNA, 25 bp, Homo sapien
accacggccctttggagtcaatatc

SEQ ID NO: 2799268 - DNA, 25 bp, Homo sapien
ggtgtgagtgtgaaaccacggccct

SEQ ID NO: 2799269 - DNA, 25 bp, Homo sapien
ctgaggcccgtggaggagagtgagc

SEQ ID NO: 2799270 - DNA, 25 bp, Homo sapien
agtgtgaaaccacggccctttggag

SEQ ID NO: 2799271 - DNA, 25 bp, Homo sapien
gctcagcagcgttccagaaatcagg

SEQ ID NO: 2799272 - DNA, 25 bp, Homo sapien
tagattatgctcctaccccaggagg

SEQ ID NO: 2799273 - DNA, 25 bp, Homo sapien
taggtgccctgtagcgatggcctcc

SEQ ID NO: 2799274 - DNA, 25 bp, Homo sapien
ctcaggtagagaagcaaagtggcct

SEQ ID NO: 2799275 - DNA, 25 bp, Homo sapien
ttaaaagccacagtcatggtgcagg

SEQ ID NO: 2799276 - DNA, 25 bp, Homo sapien
ttttaaaagccacagtcatggtgca

SEQ ID NO: 2799277 - DNA, 25 bp, Homo sapien
tattttaaaagccacagtcatggtg

SEQ ID NO: 2799278 - DNA, 25 bp, Homo sapien
aaaagccacagtcatggtgcaggca

SEQ ID NO: 2799279 - DNA, 25 bp, Homo sapien
gacacctcggtgtggtttaagagca

SEQ ID NO: 2799280 - DNA, 25 bp, Homo sapien
gacttgtgagtctaaaagagccagc

SEQ ID NO: 2799281 - DNA, 25 bp, Homo sapien
gccaagtgaacccaggttgggataa

SEQ ID NO: 2799282 - DNA, 25 bp, Homo sapien
ttcaccgacagggagaagccttggc

SEQ ID NO: 2799283 - DNA, 25 bp, Homo sapien
ttatggtagaactgtaggcgggaca

SEQ ID NO: 2799284 - DNA, 25 bp, Homo sapien
gacgatgtgaggatattctctggac

SEQ ID NO: 2799285 - DNA, 25 bp, Homo sapien
gatcaatatcaaagagccagagggt

SEQ ID NO: 2799286 - DNA, 25 bp, Homo sapien
gaaacattgtattgagacggtggag

SEQ ID NO: 2799287 - DNA, 25 bp, Homo sapien
tgggtagcccgtgaggagtttccaa

SEQ ID NO: 2799288 - DNA, 25 bp, Homo sapien
atttccatgtctaattgcagcatgg

SEQ ID NO: 2799289 - DNA, 25 bp, Homo sapien
catggacagatgtgttaaaggctga

SEQ ID NO: 2799290 - DNA, 25 bp, Homo sapien
tctaattgcagcatggacagatgtg

SEQ ID NO: 2799291 - DNA, 25 bp, Homo sapien
aattggacagcaaaaagggtctcgg

SEQ ID NO: 2799292 - DNA, 25 bp, Homo sapien
tcttgggatcacttcgaaaggttgc

SEQ ID NO: 2799293 - DNA, 25 bp, Homo sapien
gaaaggttgctgaaccaccagccta

SEQ ID NO: 2799294 - DNA, 25 bp, Homo sapien
cgataatagactttgagagagccct

SEQ ID NO: 2799295 - DNA, 25 bp, Homo sapien
cagaagttgtcttgaaataggatgg

SEQ ID NO: 2799296 - DNA, 25 bp, Homo sapien
caaagtaggttctggaagtaactca

SEQ ID NO: 2799297 - DNA, 25 bp, Homo sapien
gaactgtgttctccagacccaaagt

SEQ ID NO: 2799298 - DNA, 25 bp, Homo sapien
tgagcaacccctagaaattgggagt

SEQ ID NO: 2799299 - DNA, 25 bp, Homo sapien
caggagtgttgggaaaaatatgcca

SEQ ID NO: 2799300 - DNA, 25 bp, Homo sapien
gtctgtccttggagaaattcttaca

SEQ ID NO: 2799301 - DNA, 25 bp, Homo sapien
aattcttacaacacgaaacaggagt

SEQ ID NO: 2799302 - DNA, 25 bp, Homo sapien
tagaatcctgtctgtccttggagaa

SEQ ID NO: 2799303 - DNA, 25 bp, Homo sapien
agaaaaaggtgaggaggaatattgc

SEQ ID NO: 2799304 - DNA, 25 bp, Homo sapien
aaaaaggtgaggaggaatattgcag

SEQ ID NO: 2799305 - DNA, 25 bp, Homo sapien
atcagaaaaaggtgaggaggaatat

SEQ ID NO: 2799306 - DNA, 25 bp, Homo sapien
aaaggtgaggaggaatattgcagat

SEQ ID NO: 2799307 - DNA, 25 bp, Homo sapien
ggaacaggacatcccaggcagagtg

SEQ ID NO: 2799308 - DNA, 25 bp, Homo sapien
tgaaggcttgcactaaaacatcagt

SEQ ID NO: 2799309 - DNA, 25 bp, Homo sapien
tgaagagtaagcactacagaactcc

SEQ ID NO: 2799310 - DNA, 25 bp, Homo sapien
gaagagtacaaggtgagaattcacc

SEQ ID NO: 2799311 - DNA, 25 bp, Homo sapien
aagaaaccaattgaagagcctagtc

SEQ ID NO: 2799312 - DNA, 25 bp, Homo sapien
ttgaagagcctagtcggggaagtac

SEQ ID NO: 2799313 - DNA, 25 bp, Homo sapien
aaaccaattgaagagcctagtcggg

SEQ ID NO: 2799314 - DNA, 25 bp, Homo sapien
tgaagagcctagtcggggaagtact

SEQ ID NO: 2799315 - DNA, 25 bp, Homo sapien
taagtgtgtgctgctttccgactgc

SEQ ID NO: 2799316 - DNA, 25 bp, Homo sapien
gccaaagggagcagacagagccctg

SEQ ID NO: 2799317 - DNA, 25 bp, Homo sapien
gctttcctagtcgatccagcccaga

SEQ ID NO: 2799318 - DNA, 25 bp, Homo sapien
gcaccactcttgcaagcttccatga

SEQ ID NO: 2799319 - DNA, 25 bp, Homo sapien
ggtcaatgtcatcacataagcctct

SEQ ID NO: 2799320 - DNA, 25 bp, Homo sapien
tggtcaatgtcatcacataagcctc

SEQ ID NO: 2799321 - DNA, 25 bp, Homo sapien
ttggtcaatgtcatcacataagcct

SEQ ID NO: 2799322 - DNA, 25 bp, Homo sapien
cgctgagggaatgggcaaatgctgc

SEQ ID NO: 2799323 - DNA, 25 bp, Homo sapien
tgggcaaatgctgccccgtgctcca

SEQ ID NO: 2799324 - DNA, 25 bp, Homo sapien
ctgtgcacgctgagggaatgggcaa

SEQ ID NO: 2799325 - DNA, 25 bp, Homo sapien
aaatgctgccccgtgctccatgcat

SEQ ID NO: 2799326 - DNA, 25 bp, Homo sapien
ggattccaacttcatcgtctccata

SEQ ID NO: 2799327 - DNA, 25 bp, Homo sapien
tattagatttgcctcattatgctcc

SEQ ID NO: 2799328 - DNA, 25 bp, Homo sapien
cgtctccatactcacgattactcat

SEQ ID NO: 2799329 - DNA, 25 bp, Homo sapien
tgacattctggcctattagatttgc

SEQ ID NO: 2799330 - DNA, 25 bp, Homo sapien
tgtttttgccatgagagctcgtttt

SEQ ID NO: 2799331 - DNA, 25 bp, Homo sapien
gacagttagtttggcagggggtaga

SEQ ID NO: 2799332 - DNA, 25 bp, Homo sapien
tgctgacagttagtttggcaggggg

SEQ ID NO: 2799333 - DNA, 25 bp, Homo sapien
tctgtttttgccatgagagctcgtt

SEQ ID NO: 2799334 - DNA, 25 bp, Homo sapien
tgcccctgtgcagttagcaacctgt

SEQ ID NO: 2799335 - DNA, 25 bp, Homo sapien
tctctgtgccagaaagtgtgacttg

SEQ ID NO: 2799336 - DNA, 25 bp, Homo sapien
gagcaggccacaaagacaaattaga

SEQ ID NO: 2799337 - DNA, 25 bp, Homo sapien
tcactgggatgctcaaaagtaagct

SEQ ID NO: 2799338 - DNA, 25 bp, Homo sapien
tggttgatctaagtaagacagcctc

SEQ ID NO: 2799339 - DNA, 25 bp, Homo sapien
tatgatgccaggttcctagttcccg

SEQ ID NO: 2799340 - DNA, 25 bp, Homo sapien
taagaaatgacccatctgtggtagt

SEQ ID NO: 2799341 - DNA, 25 bp, Homo sapien
caaagaactttggtctatgaaggac

SEQ ID NO: 2799342 - DNA, 25 bp, Homo sapien
ctacaacagcagcgagcactcaggc

SEQ ID NO: 2799343 - DNA, 25 bp, Homo sapien
aacagcagcgagcactcaggccagt

SEQ ID NO: 2799344 - DNA, 25 bp, Homo sapien
tacaacagcagcgagcactcaggcc

SEQ ID NO: 2799345 - DNA, 25 bp, Homo sapien
acaacagcagcgagcactcaggcca

SEQ ID NO: 2799346 - DNA, 25 bp, Homo sapien
aggtcaggtggaaccaagggctcca

SEQ ID NO: 2799347 - DNA, 25 bp, Homo sapien
tccaaggtcaggtggaaccaagggc

SEQ ID NO: 2799348 - DNA, 25 bp, Homo sapien
ggtcaggtggaaccaagggctccat

SEQ ID NO: 2799349 - DNA, 25 bp, Homo sapien
caaggtcaggtggaaccaagggctc

SEQ ID NO: 2799350 - DNA, 25 bp, Homo sapien
gtttcaggtaggtgcttaagatccc

SEQ ID NO: 2799351 - DNA, 25 bp, Homo sapien
caggcggcagttgccactcagtctg

SEQ ID NO: 2799352 - DNA, 25 bp, Homo sapien
ccattgatctttacacttccctggg

SEQ ID NO: 2799353 - DNA, 25 bp, Homo sapien
gagcagtgaatacccgttgaaggag

SEQ ID NO: 2799354 - DNA, 25 bp, Homo sapien
tactgaacggtgaaatgttgaaagc

SEQ ID NO: 2799355 - DNA, 25 bp, Homo sapien
aatctgcaatcgatatcatactgaa

SEQ ID NO: 2799356 - DNA, 25 bp, Homo sapien
agcatctatataaccacctgtggaa

SEQ ID NO: 2799357 - DNA, 25 bp, Homo sapien
caatgcttatttctgggtagcagaa

SEQ ID NO: 2799358 - DNA, 25 bp, Homo sapien
cgggatttgccatttctgcgtagcc

SEQ ID NO: 2799359 - DNA, 25 bp, Homo sapien
gactttagtgctccccaaagcggag

SEQ ID NO: 2799360 - DNA, 25 bp, Homo sapien
ttctcgggatgaaagccaggatgcc

SEQ ID NO: 2799361 - DNA, 25 bp, Homo sapien
gatgccagcaccaagtgttaacagt

SEQ ID NO: 2799362 - DNA, 25 bp, Homo sapien
gatctggaagcactacatgcatgcc

SEQ ID NO: 2799363 - DNA, 25 bp, Homo sapien
atttatacaggcctattacagtccg

SEQ ID NO: 2799364 - DNA, 25 bp, Homo sapien
ggcattagggccactcgcatggtat

SEQ ID NO: 2799365 - DNA, 25 bp, Homo sapien
tacagtccgttgtgatctggaagca

SEQ ID NO: 2799366 - DNA, 25 bp, Homo sapien
acggtgaagagtccacgaagttcgg

SEQ ID NO: 2799367 - DNA, 25 bp, Homo sapien
cacgaagttcgggtcaatattatgc

SEQ ID NO: 2799368 - DNA, 25 bp, Homo sapien
ggtcaatattatgcagcagctcaat

SEQ ID NO: 2799369 - DNA, 25 bp, Homo sapien
gaagagtccacgaagttcgggtcaa

SEQ ID NO: 2799370 - DNA, 25 bp, Homo sapien
tgttgatggcgttgttttttctcgt

SEQ ID NO: 2799371 - DNA, 25 bp, Homo sapien
ttgttgatggcgttgttttttctcg

SEQ ID NO: 2799372 - DNA, 25 bp, Homo sapien
gttgatggcgttgttttttctcgta

SEQ ID NO: 2799373 - DNA, 25 bp, Homo sapien
ggaagtgtgcaggacgagagtggct

SEQ ID NO: 2799374 - DNA, 25 bp, Homo sapien
agtgtgcaggacgagagtggctgcc

SEQ ID NO: 2799375 - DNA, 25 bp, Homo sapien
agtagcttggataaggaagtgtgca

SEQ ID NO: 2799376 - DNA, 25 bp, Homo sapien
caaggaagtagcttggataaggaag

SEQ ID NO: 2799377 - DNA, 25 bp, Homo sapien
tgctttggaaaagacacaacagacg

SEQ ID NO: 2799378 - DNA, 25 bp, Homo sapien
caaatgttctgccaccgattccgaa

SEQ ID NO: 2799379 - DNA, 25 bp, Homo sapien
aaaagtttcagacctctgggcacag

SEQ ID NO: 2799380 - DNA, 25 bp, Homo sapien
caacagacgtcaatgtgactgggcg

SEQ ID NO: 2799381 - DNA, 25 bp, Homo sapien
tgctaaccccaaacagagctgtaac

SEQ ID NO: 2799382 - DNA, 25 bp, Homo sapien
tgtgtatttcctataactagagacc

SEQ ID NO: 2799383 - DNA, 25 bp, Homo sapien
cattgcactaggtcattccacccgt

SEQ ID NO: 2799384 - DNA, 25 bp, Homo sapien
gctgtaacaccaaacagaggttgaa

SEQ ID NO: 2799385 - DNA, 25 bp, Homo sapien
caaatctgagtctgggtcctgttcc

SEQ ID NO: 2799386 - DNA, 25 bp, Homo sapien
tggcacttatcacaactggcagtca

SEQ ID NO: 2799387 - DNA, 25 bp, Homo sapien
taaggcatgtgcctcccaaccttgg

SEQ ID NO: 2799388 - DNA, 25 bp, Homo sapien
ggaacatcttgcaacctctaaggca

SEQ ID NO: 2799389 - DNA, 25 bp, Homo sapien
tcaggctgctcttggagtttctgtc

SEQ ID NO: 2799390 - DNA, 25 bp, Homo sapien
tgatggttttccacacgtcgaagcc

SEQ ID NO: 2799391 - DNA, 25 bp, Homo sapien
ccagcttcacgagtgttggcagcca

SEQ ID NO: 2799392 - DNA, 25 bp, Homo sapien
tgtggatgagctcccggttcttcac

SEQ ID NO: 2799393 - DNA, 25 bp, Homo sapien
tttgtgccattggtgtgtcccctgg

SEQ ID NO: 2799394 - DNA, 25 bp, Homo sapien
aggtcttggcatgaggatgatgtta

SEQ ID NO: 2799395 - DNA, 25 bp, Homo sapien
gaaacacagtaaggtcttggcatga

SEQ ID NO: 2799396 - DNA, 25 bp, Homo sapien
cacagtaaggtcttggcatgaggat

SEQ ID NO: 2799397 - DNA, 25 bp, Homo sapien
cagtaaggtcttggcatgaggatga

SEQ ID NO: 2799398 - DNA, 25 bp, Homo sapien
tgtggacagtggctctaatgtcagt

SEQ ID NO: 2799399 - DNA, 25 bp, Homo sapien
cacatggcagttgagttttcgaagc

SEQ ID NO: 2799400 - DNA, 25 bp, Homo sapien
ttgggtttgcccagcgcatgtgcca

SEQ ID NO: 2799401 - DNA, 25 bp, Homo sapien
taatctaggacctgggcagtggttc

SEQ ID NO: 2799402 - DNA, 25 bp, Homo sapien
cagctagaccttgatggagaagaca

SEQ ID NO: 2799403 - DNA, 25 bp, Homo sapien
caaggcactttccatcagagggcaa

SEQ ID NO: 2799404 - DNA, 25 bp, Homo sapien
tcgccttctctcaacgtggtggaaa

SEQ ID NO: 2799405 - DNA, 25 bp, Homo sapien
tgctttcgagggaggcaacatccac

SEQ ID NO: 2799406 - DNA, 25 bp, Homo sapien
tagagcggttgcacagatggcaagt

SEQ ID NO: 2799407 - DNA, 25 bp, Homo sapien
gctcctgttagaagacaaccacaaa

SEQ ID NO: 2799408 - DNA, 25 bp, Homo sapien
gcaagtgtaagcaaatagcggccaa

SEQ ID NO: 2799409 - DNA, 25 bp, Homo sapien
tcaggaaggctttgcgtggactgct

SEQ ID NO: 2799410 - DNA, 25 bp, Homo sapien
tgctggtgactcaatgtctttggat

SEQ ID NO: 2799411 - DNA, 25 bp, Homo sapien
tggatttctagctttaaattacagc

SEQ ID NO: 2799412 - DNA, 25 bp, Homo sapien
gttaccatacactgcactacagaag

SEQ ID NO: 2799413 - DNA, 25 bp, Homo sapien
ggtaatcagggcatcaagcatggta

SEQ ID NO: 2799414 - DNA, 25 bp, Homo sapien
aatagaaatttagctcccttccagt

SEQ ID NO: 2799415 - DNA, 25 bp, Homo sapien
atagaaatttagctcccttccagtg

SEQ ID NO: 2799416 - DNA, 25 bp, Homo sapien
ggaaggcagtttcaggcagcctggc

SEQ ID NO: 2799417 - DNA, 25 bp, Homo sapien
tgcagccaatgaaaacgggcaggct

SEQ ID NO: 2799418 - DNA, 25 bp, Homo sapien
aacaatagcgctgtgaagtggagca

SEQ ID NO: 2799419 - DNA, 25 bp, Homo sapien
aatgaaaacgggcaggctctgtgcg

SEQ ID NO: 2799420 - DNA, 25 bp, Homo sapien
ttatgaatccagcaaggcccacaga

SEQ ID NO: 2799421 - DNA, 25 bp, Homo sapien
cagttaatggcttgagtgtcagggc

SEQ ID NO: 2799422 - DNA, 25 bp, Homo sapien
tgctcccaaccagcaaggactggag

SEQ ID NO: 2799423 - DNA, 25 bp, Homo sapien
caacttgacagaggtgagagggctt

SEQ ID NO: 2799424 - DNA, 25 bp, Homo sapien
aaggtaaaattgtcctgactcaagg

SEQ ID NO: 2799425 - DNA, 25 bp, Homo sapien
tctagacctgataccagtggttctc

SEQ ID NO: 2799426 - DNA, 25 bp, Homo sapien
cattatagaattacttgggcacact

SEQ ID NO: 2799427 - DNA, 25 bp, Homo sapien
taatgagtccctgggtctagacctg

SEQ ID NO: 2799428 - DNA, 25 bp, Homo sapien
gctgtagtcacctcaataatgattt

SEQ ID NO: 2799429 - DNA, 25 bp, Homo sapien
tttttagacaagataccactttatc

SEQ ID NO: 2799430 - DNA, 25 bp, Homo sapien
aagatgactgctattgttaaaactc

SEQ ID NO: 2799431 - DNA, 25 bp, Homo sapien
cctctttatacctttcaataccatg

SEQ ID NO: 2799432 - DNA, 25 bp, Homo sapien
aaggctctcagcaggcggtctatga

SEQ ID NO: 2799433 - DNA, 25 bp, Homo sapien
gcaggcggtctatgacagcttccca

SEQ ID NO: 2799434 - DNA, 25 bp, Homo sapien
tctcagcaggcggtctatgacagct

SEQ ID NO: 2799435 - DNA, 25 bp, Homo sapien
cttttaaggctctcagcaggcggtc

SEQ ID NO: 2799436 - DNA, 25 bp, Homo sapien
gataagagacaaagctgtggccagg

SEQ ID NO: 2799437 - DNA, 25 bp, Homo sapien
ctaaggcaagataagagacaaagct

SEQ ID NO: 2799438 - DNA, 25 bp, Homo sapien
aagagacaaagctgtggccaggtgc

SEQ ID NO: 2799439 - DNA, 25 bp, Homo sapien
aggcaagataagagacaaagctgtg

SEQ ID NO: 2799440 - DNA, 25 bp, Homo sapien
tcaagggctttccaataaggcaaac

SEQ ID NO: 2799441 - DNA, 25 bp, Homo sapien
agggctttccaataaggcaaacaca

SEQ ID NO: 2799442 - DNA, 25 bp, Homo sapien
gctctcatctgaattcagagcactg

SEQ ID NO: 2799443 - DNA, 25 bp, Homo sapien
agtgcccagactcctgtttggcaag

SEQ ID NO: 2799444 - DNA, 25 bp, Homo sapien
atgcccaaaacgtcctgctctccgt

SEQ ID NO: 2799445 - DNA, 25 bp, Homo sapien
catgcccaaaacgtcctgctctccg

SEQ ID NO: 2799446 - DNA, 25 bp, Homo sapien
tgcccaaaacgtcctgctctccgtg

SEQ ID NO: 2799447 - DNA, 25 bp, Homo sapien
tattttccgctcattcatgaatgca

SEQ ID NO: 2799448 - DNA, 25 bp, Homo sapien
tcatgaatgcatattcctcacttag

SEQ ID NO: 2799449 - DNA, 25 bp, Homo sapien
catgaatgcatattcctcacttagt

SEQ ID NO: 2799450 - DNA, 25 bp, Homo sapien
cagcatctattttccgctcattcat

SEQ ID NO: 2799451 - DNA, 25 bp, Homo sapien
aattgcaaaagtgtctaaactggta

SEQ ID NO: 2799452 - DNA, 25 bp, Homo sapien
ttaaggtgtaggattaaaattgcaa

SEQ ID NO: 2799453 - DNA, 25 bp, Homo sapien
caaaagtgtctaaactggtaatgca

SEQ ID NO: 2799454 - DNA, 25 bp, Homo sapien
aggtgtaggattaaaattgcaaaag

SEQ ID NO: 2799455 - DNA, 25 bp, Homo sapien
tgtagagagagctgggaacaagcca

SEQ ID NO: 2799456 - DNA, 25 bp, Homo sapien
gagttgtgaccatagaggatgtctg

SEQ ID NO: 2799457 - DNA, 25 bp, Homo sapien
ccttctagttggtgggagttgtgac

SEQ ID NO: 2799458 - DNA, 25 bp, Homo sapien
ctttgcagtgatacagagacccttc

SEQ ID NO: 2799459 - DNA, 25 bp, Homo sapien
gaacaccgtgttgttccagagccca

SEQ ID NO: 2799460 - DNA, 25 bp, Homo sapien
gggacaccattcctgcatagtgatg

SEQ ID NO: 2799461 - DNA, 25 bp, Homo sapien
taaagctgcagtgacatttcctact

SEQ ID NO: 2799462 - DNA, 25 bp, Homo sapien
cctactgcttcatccataagggaca

SEQ ID NO: 2799463 - DNA, 25 bp, Homo sapien
ctggagagcaaggtagagaaacaga

SEQ ID NO: 2799464 - DNA, 25 bp, Homo sapien
tggagagcaaggtagagaaacagag

SEQ ID NO: 2799465 - DNA, 25 bp, Homo sapien
ggagagcaaggtagagaaacagagg

SEQ ID NO: 2799466 - DNA, 25 bp, Homo sapien
ggtactatagcccatttcaagaggt

SEQ ID NO: 2799467 - DNA, 25 bp, Homo sapien
gaggccatccttaaactctgtactt

SEQ ID NO: 2799468 - DNA, 25 bp, Homo sapien
taagaaactataccagtccatgtcg

SEQ ID NO: 2799469 - DNA, 25 bp, Homo sapien
tattttaagttgacactcttgaggg

SEQ ID NO: 2799470 - DNA, 25 bp, Homo sapien
ttcagagcgtcaattaatgtacagc

SEQ ID NO: 2799471 - DNA, 25 bp, Homo sapien
tctcgaaaatcaagagcacatcgtg

SEQ ID NO: 2799472 - DNA, 25 bp, Homo sapien
gcacatcgtgtgacattcagagcgt

SEQ ID NO: 2799473 - DNA, 25 bp, Homo sapien
tggttagttatgagggctatagccc

SEQ ID NO: 2799474 - DNA, 25 bp, Homo sapien
tgtcaggcctaagagccagaaaatg

SEQ ID NO: 2799475 - DNA, 25 bp, Homo sapien
aaggagaaatttctgtcaggcctaa

SEQ ID NO: 2799476 - DNA, 25 bp, Homo sapien
gaaatttctgtcaggcctaagagcc

SEQ ID NO: 2799477 - DNA, 25 bp, Homo sapien
tttctgtcaggcctaagagccagaa

SEQ ID NO: 2799478 - DNA, 25 bp, Homo sapien
atgtaactcttatagtcttttcctt

SEQ ID NO: 2799479 - DNA, 25 bp, Homo sapien
ttttccgaccatatgggtagtataa

SEQ ID NO: 2799480 - DNA, 25 bp, Homo sapien
gcattctttccggtacattcccagg

SEQ ID NO: 2799481 - DNA, 25 bp, Homo sapien
tcggcgggttggaaggcattctttc

SEQ ID NO: 2799482 - DNA, 25 bp, Homo sapien
caaagtaggtatcaaatcctcggcg

SEQ ID NO: 2799483 - DNA, 25 bp, Homo sapien
tttggtgctgtaaacctgtacggat

SEQ ID NO: 2799484 - DNA, 25 bp, Homo sapien
tgacagggccagattatttggtgct

SEQ ID NO: 2799485 - DNA, 25 bp, Homo sapien
ccagattatttggtgctgtaaacct

SEQ ID NO: 2799486 - DNA, 25 bp, Homo sapien
gattatttggtgctgtaaacctgta

SEQ ID NO: 2799487 - DNA, 25 bp, Homo sapien
tgagacatgcactttccccaatccc

SEQ ID NO: 2799488 - DNA, 25 bp, Homo sapien
agacatgcactttccccaatccctg

SEQ ID NO: 2799489 - DNA, 25 bp, Homo sapien
gacatgcactttccccaatccctgc

SEQ ID NO: 2799490 - DNA, 25 bp, Homo sapien
cttgagacatgcactttccccaatc

SEQ ID NO: 2799491 - DNA, 25 bp, Homo sapien
accactggcaggagtccactgagag

SEQ ID NO: 2799492 - DNA, 25 bp, Homo sapien
agctctgcactctcctgtgccccac

SEQ ID NO: 2799493 - DNA, 25 bp, Homo sapien
agaggcgaccactggcaggagtcca

SEQ ID NO: 2799494 - DNA, 25 bp, Homo sapien
ccagggagaggcgaccactggcagg

SEQ ID NO: 2799495 - DNA, 25 bp, Homo sapien
ctaccagtagatggggttagtatga

SEQ ID NO: 2799496 - DNA, 25 bp, Homo sapien
tatgataatgtgcatttgccaagtt

SEQ ID NO: 2799497 - DNA, 25 bp, Homo sapien
ggttagtatgataggtatgataatg

SEQ ID NO: 2799498 - DNA, 25 bp, Homo sapien
agtatgataggtatgataatgtgca

SEQ ID NO: 2799499 - DNA, 25 bp, Homo sapien
gcagaaccctttgggcaaacctcac

SEQ ID NO: 2799500 - DNA, 25 bp, Homo sapien
cttcaaagcaaatgcagaacccttt

SEQ ID NO: 2799501 - DNA, 25 bp, Homo sapien
aaagcaaatgcagaaccctttgggc

SEQ ID NO: 2799502 - DNA, 25 bp, Homo sapien
aatgcagaaccctttgggcaaacct

SEQ ID NO: 2799503 - DNA, 25 bp, Homo sapien
ctggcacatccctttactcccacaa

SEQ ID NO: 2799504 - DNA, 25 bp, Homo sapien
tcttcttctttactggcacatccct

SEQ ID NO: 2799505 - DNA, 25 bp, Homo sapien
gcgtgtagtagttgtccaggagcac

SEQ ID NO: 2799506 - DNA, 25 bp, Homo sapien
tgcacagcggctgcgtgtagtagtt

SEQ ID NO: 2799507 - DNA, 25 bp, Homo sapien
tccaggtgcggcgtgcggatgcggg

SEQ ID NO: 2799508 - DNA, 25 bp, Homo sapien
aagccgacgtcgttccagcctaggt

SEQ ID NO: 2799509 - DNA, 25 bp, Homo sapien
ccggggcctcggggcaagctcgccg

SEQ ID NO: 2799510 - DNA, 25 bp, Homo sapien
ccgagcccggcggcgccaacaacag

SEQ ID NO: 2799511 - DNA, 25 bp, Homo sapien
cctcggggcaagctcgccgcgccgc

SEQ ID NO: 2799512 - DNA, 25 bp, Homo sapien
cagccgccgaggtccggggcctcgg

SEQ ID NO: 2799513 - DNA, 25 bp, Homo sapien
aggagccagagacgaacccgcgggc

SEQ ID NO: 2799514 - DNA, 25 bp, Homo sapien
ccccttgtaccgctgatagaatgag

SEQ ID NO: 2799515 - DNA, 25 bp, Homo sapien
ccgtgggcttgcgaggccgggcgct

SEQ ID NO: 2799516 - DNA, 25 bp, Homo sapien
actcagctgacgcttggagggcacc

SEQ ID NO: 2799517 - DNA, 25 bp, Homo sapien
tcttccccggcaattaaatttgcac

SEQ ID NO: 2799518 - DNA, 25 bp, Homo sapien
atcttccccggcaattaaatttgca

SEQ ID NO: 2799519 - DNA, 25 bp, Homo sapien
tatcttccccggcaattaaatttgc

SEQ ID NO: 2799520 - DNA, 25 bp, Homo sapien
tcatttctagcacaagagcccagcc

SEQ ID NO: 2799521 - DNA, 25 bp, Homo sapien
gtagtgtacacccatgaagccgctt

SEQ ID NO: 2799522 - DNA, 25 bp, Homo sapien
cctgtaaagcctgcaacaactctga

SEQ ID NO: 2799523 - DNA, 25 bp, Homo sapien
tgaaccatgatgtctagctagcaag

SEQ ID NO: 2799524 - DNA, 25 bp, Homo sapien
gcttgtccggatatgaccccactca

SEQ ID NO: 2799525 - DNA, 25 bp, Homo sapien
tatccagcggagtagcaatccttcc

SEQ ID NO: 2799526 - DNA, 25 bp, Homo sapien
gaaaacagtttcacctccgcttgca

SEQ ID NO: 2799527 - DNA, 25 bp, Homo sapien
tagccgtatgaccagtagattcccg

SEQ ID NO: 2799528 - DNA, 25 bp, Homo sapien
agcccagtagcttttgtatcaccca

SEQ ID NO: 2799529 - DNA, 25 bp, Homo sapien
taagaggtatctaggtcatggcctt

SEQ ID NO: 2799530 - DNA, 25 bp, Homo sapien
actgtgcttggttggtggcagacct

SEQ ID NO: 2799531 - DNA, 25 bp, Homo sapien
gacttcattcctcagtgtggcagtg

SEQ ID NO: 2799532 - DNA, 25 bp, Homo sapien
atcttatcatgcttcacattctgtt

SEQ ID NO: 2799533 - DNA, 25 bp, Homo sapien
gaaaacttctataaatgtgtaacaa

SEQ ID NO: 2799534 - DNA, 25 bp, Homo sapien
tcttatcatgcttcacattctgttt

SEQ ID NO: 2799535 - DNA, 25 bp, Homo sapien
ttatttattccatcaactacaccca

SEQ ID NO: 2799536 - DNA, 25 bp, Homo sapien
tagcgctaaggaaaacctgtcagct

SEQ ID NO: 2799537 - DNA, 25 bp, Homo sapien
caataataatgtcctataaagctcc

SEQ ID NO: 2799538 - DNA, 25 bp, Homo sapien
cagaacagcaccatgtgatgtcaac

SEQ ID NO: 2799539 - DNA, 25 bp, Homo sapien
ttctcaaagaagtaaatccataaac

SEQ ID NO: 2799540 - DNA, 25 bp, Homo sapien
atttattcatctaaggaaagatttc

SEQ ID NO: 2799541 - DNA, 25 bp, Homo sapien
tcaaagaagtaaatccataaacaat

SEQ ID NO: 2799542 - DNA, 25 bp, Homo sapien
ttattcatctaaggaaagatttctc

SEQ ID NO: 2799543 - DNA, 25 bp, Homo sapien
tcagctgtcaagaaccgaatgcatt

SEQ ID NO: 2799544 - DNA, 25 bp, Homo sapien
tcaaggacagtcattagcaactcta

SEQ ID NO: 2799545 - DNA, 25 bp, Homo sapien
gtcttgcttagaaaacacttaacag

SEQ ID NO: 2799546 - DNA, 25 bp, Homo sapien
tggtttcctctattcccctgggagc

SEQ ID NO: 2799547 - DNA, 25 bp, Homo sapien
gggacatatgcgaaagccagactct

SEQ ID NO: 2799548 - DNA, 25 bp, Homo sapien
tctgaagccggtttctggttggttc

SEQ ID NO: 2799549 - DNA, 25 bp, Homo sapien
tatagcttccagatgtcgtgttgcc

SEQ ID NO: 2799550 - DNA, 25 bp, Homo sapien
caaaggttcttgtatgatgactgct

SEQ ID NO: 2799551 - DNA, 25 bp, Homo sapien
tggcacagttatgtttaaagtgatc

SEQ ID NO: 2799552 - DNA, 25 bp, Homo sapien
tttctggcacagttatgtttaaagt

SEQ ID NO: 2799553 - DNA, 25 bp, Homo sapien
accgaactttctggctgacatgcaa

SEQ ID NO: 2799554 - DNA, 25 bp, Homo sapien
tatcaaaatccagtgctgtcaccga

SEQ ID NO: 2799555 - DNA, 25 bp, Homo sapien
tgtttgggacaaactactggatcaa

SEQ ID NO: 2799556 - DNA, 25 bp, Homo sapien
agtacttattcggtctgtaacagaa

SEQ ID NO: 2799557 - DNA, 25 bp, Homo sapien
tgtattggaacatctcttattttct

SEQ ID NO: 2799558 - DNA, 25 bp, Homo sapien
tttgtattggaacatctcttatttt

SEQ ID NO: 2799559 - DNA, 25 bp, Homo sapien
ctgaggtttttgtattggaacatct

SEQ ID NO: 2799560 - DNA, 25 bp, Homo sapien
gaggtttttgtattggaacatctct

SEQ ID NO: 2799561 - DNA, 25 bp, Homo sapien
gcattcaactgatagacaggtggag

SEQ ID NO: 2799562 - DNA, 25 bp, Homo sapien
gagcattcaactgatagacaggtgg

SEQ ID NO: 2799563 - DNA, 25 bp, Homo sapien
agcattcaactgatagacaggtgga

SEQ ID NO: 2799564 - DNA, 25 bp, Homo sapien
caccattcctcgccatcaatggcta

SEQ ID NO: 2799565 - DNA, 25 bp, Homo sapien
tgcctttggttactccctgcgtccc

SEQ ID NO: 2799566 - DNA, 25 bp, Homo sapien
accattcctcgccatcaatggctac

SEQ ID NO: 2799567 - DNA, 25 bp, Homo sapien
atcctgcctttggttactccctgcg

SEQ ID NO: 2799568 - DNA, 25 bp, Homo sapien
gaggcagaccagtcttcgtttcagc

SEQ ID NO: 2799569 - DNA, 25 bp, Homo sapien
atcatccgttgccaaggtgaggcag

SEQ ID NO: 2799570 - DNA, 25 bp, Homo sapien
caaggtgaggcagaccagtcttcgt

SEQ ID NO: 2799571 - DNA, 25 bp, Homo sapien
cagtcttcgtttcagccccttggct

SEQ ID NO: 2799572 - DNA, 25 bp, Homo sapien
catccgtgggaggttagtatgagac

SEQ ID NO: 2799573 - DNA, 25 bp, Homo sapien
gacaagcatctcttatgtgaaggaa

SEQ ID NO: 2799574 - DNA, 25 bp, Homo sapien
gagacttctgcatactctgcctaga

SEQ ID NO: 2799575 - DNA, 25 bp, Homo sapien
tcaaccaaatgccaggagacacatg

SEQ ID NO: 2799576 - DNA, 25 bp, Homo sapien
ttcatgcctaagatgtcctccaccg

SEQ ID NO: 2799577 - DNA, 25 bp, Homo sapien
ttagccgaggttaaaataatgtgca

SEQ ID NO: 2799578 - DNA, 25 bp, Homo sapien
tagagaaagtttccattagccgagg

SEQ ID NO: 2799579 - DNA, 25 bp, Homo sapien
tagtttagaacctctaggatgaacc

SEQ ID NO: 2799580 - DNA, 25 bp, Homo sapien
tacagtattcgtgggatttgaaacc

SEQ ID NO: 2799581 - DNA, 25 bp, Homo sapien
tacacggtgtgatttatggaatgcc

SEQ ID NO: 2799582 - DNA, 25 bp, Homo sapien
ccactttaagctgtggaggtccact

SEQ ID NO: 2799583 - DNA, 25 bp, Homo sapien
cacaggaagagcttgattcatttga

SEQ ID NO: 2799584 - DNA, 25 bp, Homo sapien
tctgaacagccctaatggagccact

SEQ ID NO: 2799585 - DNA, 25 bp, Homo sapien
aatatctgctacacctctggaggcg

SEQ ID NO: 2799586 - DNA, 25 bp, Homo sapien
gaaccaagatctcaggaggcctagc

SEQ ID NO: 2799587 - DNA, 25 bp, Homo sapien
tgcattaactcagtcaaagacaggc

SEQ ID NO: 2799588 - DNA, 25 bp, Homo sapien
gaagcaagatgtgggcatctgcttt

SEQ ID NO: 2799589 - DNA, 25 bp, Homo sapien
tcccacacacaggtagttttcattc

SEQ ID NO: 2799590 - DNA, 25 bp, Homo sapien
gaaatagacctacaaacaaatggac

SEQ ID NO: 2799591 - DNA, 25 bp, Homo sapien
tactgacgaagatataaaggcaatg

SEQ ID NO: 2799592 - DNA, 25 bp, Homo sapien
cagatatacagaatacaacagagtc

SEQ ID NO: 2799593 - DNA, 25 bp, Homo sapien
caagacactgtagtattggcatttg

SEQ ID NO: 2799594 - DNA, 25 bp, Homo sapien
gccggacttcaagcaaattttggta

SEQ ID NO: 2799595 - DNA, 25 bp, Homo sapien
gtttccacagacaaactgccggact

SEQ ID NO: 2799596 - DNA, 25 bp, Homo sapien
gcagtcatagaaccaatcctccagg

SEQ ID NO: 2799597 - DNA, 25 bp, Homo sapien
ggaatactacctgctataaaaggga

SEQ ID NO: 2799598 - DNA, 25 bp, Homo sapien
tccaaatttgaaagcagtcagctaa

SEQ ID NO: 2799599 - DNA, 25 bp, Homo sapien
cctgggtttccatggatatccaaat

SEQ ID NO: 2799600 - DNA, 25 bp, Homo sapien
tcttcactgcggtgatggtttcact

SEQ ID NO: 2799601 - DNA, 25 bp, Homo sapien
tgcaaaataacctatagtctcagac

SEQ ID NO: 2799602 - DNA, 25 bp, Homo sapien
tcctgaagtggctctacggagcact

SEQ ID NO: 2799603 - DNA, 25 bp, Homo sapien
taccgcagctttggtcaaggcttcc

SEQ ID NO: 2799604 - DNA, 25 bp, Homo sapien
tcaccctaataaggcctgatggccc

SEQ ID NO: 2799605 - DNA, 25 bp, Homo sapien
tccaggttcatgagatctgagagcc

SEQ ID NO: 2799606 - DNA, 25 bp, Homo sapien
taacttcacaaaatattccagtcca

SEQ ID NO: 2799607 - DNA, 25 bp, Homo sapien
aacttcacaaaatattccagtccag

SEQ ID NO: 2799608 - DNA, 25 bp, Homo sapien
acttcacaaaatattccagtccagc

SEQ ID NO: 2799609 - DNA, 25 bp, Homo sapien
taaggcattcatggcataggttcca

SEQ ID NO: 2799610 - DNA, 25 bp, Homo sapien
aaggctttctccaggcgtaaggcat

SEQ ID NO: 2799611 - DNA, 25 bp, Homo sapien
catacagcgccacagaatcttctct

SEQ ID NO: 2799612 - DNA, 25 bp, Homo sapien
ggcctgcattcatgatagcgtcata

SEQ ID NO: 2799613 - DNA, 25 bp, Homo sapien
acatcatcactaagatcttcagagg

SEQ ID NO: 2799614 - DNA, 25 bp, Homo sapien
tatcctaatagcagtgacaggaatg

SEQ ID NO: 2799615 - DNA, 25 bp, Homo sapien
catatccacctttgactgcttcttc

SEQ ID NO: 2799616 - DNA, 25 bp, Homo sapien
aagaactccaagctcatcagttatg

SEQ ID NO: 2799617 - DNA, 25 bp, Homo sapien
agaaactccccaggagattggtgag

SEQ ID NO: 2799618 - DNA, 25 bp, Homo sapien
cccttgggtgttaacatgtgactta

SEQ ID NO: 2799619 - DNA, 25 bp, Homo sapien
tcagcatacactcgacccttgggtg

SEQ ID NO: 2799620 - DNA, 25 bp, Homo sapien
gattggtgagaaacagtcagctcag

SEQ ID NO: 2799621 - DNA, 25 bp, Homo sapien
tcaaaccagtttgtgcggcgaaaac

SEQ ID NO: 2799622 - DNA, 25 bp, Homo sapien
tgccaaatggtgataggtcagttac

SEQ ID NO: 2799623 - DNA, 25 bp, Homo sapien
tcttggcctttgatgttaaacttgc

SEQ ID NO: 2799624 - DNA, 25 bp, Homo sapien
taccgctactctttgcataacctgt

SEQ ID NO: 2799625 - DNA, 25 bp, Homo sapien
tttaggagccaactgaagccaggtg

SEQ ID NO: 2799626 - DNA, 25 bp, Homo sapien
tggctataggactctcagggtcacg

SEQ ID NO: 2799627 - DNA, 25 bp, Homo sapien
gagggcggtcgcaagtttcttccga

SEQ ID NO: 2799628 - DNA, 25 bp, Homo sapien
caagaggcttcaccaaggctggcta

SEQ ID NO: 2799629 - DNA, 25 bp, Homo sapien
ttgtagaaccagtgcggctgctccc

SEQ ID NO: 2799630 - DNA, 25 bp, Homo sapien
tggaaccccatggaacacttagact

SEQ ID NO: 2799631 - DNA, 25 bp, Homo sapien
gcctttgatagagcccactgactcg

SEQ ID NO: 2799632 - DNA, 25 bp, Homo sapien
actgactcgttgagtcggcctccca

SEQ ID NO: 2799633 - DNA, 25 bp, Homo sapien
ccatttgccatagcgattaggatcc

SEQ ID NO: 2799634 - DNA, 25 bp, Homo sapien
tatcagatcaaaaggaggttctcca

SEQ ID NO: 2799635 - DNA, 25 bp, Homo sapien
cctcagtgtactgggttgttgtcca

SEQ ID NO: 2799636 - DNA, 25 bp, Homo sapien
tccatgcaggatccagtcactgaga

SEQ ID NO: 2799637 - DNA, 25 bp, Homo sapien
ggcagaatgtcaggagaatacgtga

SEQ ID NO: 2799638 - DNA, 25 bp, Homo sapien
tctagatcagactcaaagagttcct

SEQ ID NO: 2799639 - DNA, 25 bp, Homo sapien
gataggaccattgacaacattgatg

SEQ ID NO: 2799640 - DNA, 25 bp, Homo sapien
gatgtgttccatgattcgatctaga

SEQ ID NO: 2799641 - DNA, 25 bp, Homo sapien
agcacaggcagttctcgtttcaaag

SEQ ID NO: 2799642 - DNA, 25 bp, Homo sapien
gaggaactccattggtgacccagga

SEQ ID NO: 2799643 - DNA, 25 bp, Homo sapien
ttcatatggaccaaacaaaagccca

SEQ ID NO: 2799644 - DNA, 25 bp, Homo sapien
gagataatatgatccttccaggtca

SEQ ID NO: 2799645 - DNA, 25 bp, Homo sapien
gaaaggagttgagcagtcttaagtc

SEQ ID NO: 2799646 - DNA, 25 bp, Homo sapien
gattctgcacccactctgctagtaa

SEQ ID NO: 2799647 - DNA, 25 bp, Homo sapien
ttaagtctggtaccaagaagctatc

SEQ ID NO: 2799648 - DNA, 25 bp, Homo sapien
ctgctagtaaattggaaaagaaagg

SEQ ID NO: 2799649 - DNA, 25 bp, Homo sapien
tgatgacttctgcagatagttgctt

SEQ ID NO: 2799650 - DNA, 25 bp, Homo sapien
taaaactggtctttgctagcttcag

SEQ ID NO: 2799651 - DNA, 25 bp, Homo sapien
cctggtcacactgagaaactgtggg

SEQ ID NO: 2799652 - DNA, 25 bp, Homo sapien
tgttcataaaactggtctttgctag

SEQ ID NO: 2799653 - DNA, 25 bp, Homo sapien
tatgattgcctaaagtactgtgttg

SEQ ID NO: 2799654 - DNA, 25 bp, Homo sapien
tgagtgcagcgattaattagcaatg

SEQ ID NO: 2799655 - DNA, 25 bp, Homo sapien
tttttagggcctgaattcatgagac

SEQ ID NO: 2799656 - DNA, 25 bp, Homo sapien
gaatttagaccagagattcctaagg

SEQ ID NO: 2799657 - DNA, 25 bp, Homo sapien
tagacccctgtggtgtttcaacgtc

SEQ ID NO: 2799658 - DNA, 25 bp, Homo sapien
gccagtgccatagttagagaataag

SEQ ID NO: 2799659 - DNA, 25 bp, Homo sapien
gaagttactggtgcaggatatttta

SEQ ID NO: 2799660 - DNA, 25 bp, Homo sapien
ccatgttccatctgacctggctttc

SEQ ID NO: 2799661 - DNA, 25 bp, Homo sapien
agcctgccccatactattattgtga

SEQ ID NO: 2799662 - DNA, 25 bp, Homo sapien
ctaggactacagacggaatcctact

SEQ ID NO: 2799663 - DNA, 25 bp, Homo sapien
tcctactaccccacactcagttaat

SEQ ID NO: 2799664 - DNA, 25 bp, Homo sapien
agtgtgtgagacgaggtctcagtat

SEQ ID NO: 2799665 - DNA, 25 bp, Homo sapien
aatgtgtgtaccaagttttctgttt

SEQ ID NO: 2799666 - DNA, 25 bp, Homo sapien
aaatgtgtgtaccaagttttctgtt

SEQ ID NO: 2799667 - DNA, 25 bp, Homo sapien
caaatggtaaaaatgcccttaagat

SEQ ID NO: 2799668 - DNA, 25 bp, Homo sapien
atttaaattcatctacccttacagg

SEQ ID NO: 2799669 - DNA, 25 bp, Homo sapien
gccagccagtccgagtcatttgata

SEQ ID NO: 2799670 - DNA, 25 bp, Homo sapien
gtagcaagtctgatactacctggct

SEQ ID NO: 2799671 - DNA, 25 bp, Homo sapien
gttgagtaaagggaacatctcttga

SEQ ID NO: 2799672 - DNA, 25 bp, Homo sapien
gaataatatactttgagaaattaag

SEQ ID NO: 2799673 - DNA, 25 bp, Homo sapien
tctactacattaagcactccacacg

SEQ ID NO: 2799674 - DNA, 25 bp, Homo sapien
gcactccacacggtcatacacaatg

SEQ ID NO: 2799675 - DNA, 25 bp, Homo sapien
tagaggttcttaccttaaactctca

SEQ ID NO: 2799676 - DNA, 25 bp, Homo sapien
tttctgagaagccgacctaacagac

SEQ ID NO: 2799677 - DNA, 25 bp, Homo sapien
tctgagaagccgacctaacagacag

SEQ ID NO: 2799678 - DNA, 25 bp, Homo sapien
cagacagtttcaagttaaatgcctt

SEQ ID NO: 2799679 - DNA, 25 bp, Homo sapien
tgagaagccgacctaacagacagtt

SEQ ID NO: 2799680 - DNA, 25 bp, Homo sapien
tctcataaagtttgatgctatcata

SEQ ID NO: 2799681 - DNA, 25 bp, Homo sapien
gtttctcataaagtttgatgctatc

SEQ ID NO: 2799682 - DNA, 25 bp, Homo sapien
tttctcataaagtttgatgctatca

SEQ ID NO: 2799683 - DNA, 25 bp, Homo sapien
gatgaaagtaagttgttaaacctgc

SEQ ID NO: 2799684 - DNA, 25 bp, Homo sapien
tgagaacacatcagcaccagtttga

SEQ ID NO: 2799685 - DNA, 25 bp, Homo sapien
tatgtgagtaaagtgagagccagcc

SEQ ID NO: 2799686 - DNA, 25 bp, Homo sapien
catggatagcgttgtacagagattc

SEQ ID NO: 2799687 - DNA, 25 bp, Homo sapien
gtttgagcacaccagagcataaggc

SEQ ID NO: 2799688 - DNA, 25 bp, Homo sapien
tacaatgcacctgtaagccaaactc

SEQ ID NO: 2799689 - DNA, 25 bp, Homo sapien
ttggtatccagtgtgcatgcaaact

SEQ ID NO: 2799690 - DNA, 25 bp, Homo sapien
ctgctgctttaacatgttggtatcc

SEQ ID NO: 2799691 - DNA, 25 bp, Homo sapien
ttcaggtatctgctagtgaccccca

SEQ ID NO: 2799692 - DNA, 25 bp, Homo sapien
tccagacacttctctcatggagcac

SEQ ID NO: 2799693 - DNA, 25 bp, Homo sapien
ccagacacttctctcatggagcaca

SEQ ID NO: 2799694 - DNA, 25 bp, Homo sapien
caggtgataagccagactcacacca

SEQ ID NO: 2799695 - DNA, 25 bp, Homo sapien
tgccaggtagatccagccgtgagct

SEQ ID NO: 2799696 - DNA, 25 bp, Homo sapien
tgcgtgccaggtagatccagccgtg

SEQ ID NO: 2799697 - DNA, 25 bp, Homo sapien
acagccacctccaattatcactgtt

SEQ ID NO: 2799698 - DNA, 25 bp, Homo sapien
ctgcagataagggtggtttttcctc

SEQ ID NO: 2799699 - DNA, 25 bp, Homo sapien
tgcagataagggtggtttttcctct

SEQ ID NO: 2799700 - DNA, 25 bp, Homo sapien
aggccccgcagcagctgcgcgccgg

SEQ ID NO: 2799701 - DNA, 25 bp, Homo sapien
ccggccgcagacagagcgcgggcgc

SEQ ID NO: 2799702 - DNA, 25 bp, Homo sapien
gaggccccgcagcagctgcgcgccg

SEQ ID NO: 2799703 - DNA, 25 bp, Homo sapien
cggccgcagacagagcgcgggcgcc

SEQ ID NO: 2799704 - DNA, 25 bp, Homo sapien
ggtgagtttcgtcccctcgatcctc

SEQ ID NO: 2799705 - DNA, 25 bp, Homo sapien
tgggctgcgagcgactccgttcaca

SEQ ID NO: 2799706 - DNA, 25 bp, Homo sapien
atcctcgcggagctcctggccgctg

SEQ ID NO: 2799707 - DNA, 25 bp, Homo sapien
caagaaggtgagtttcgtcccctcg

SEQ ID NO: 2799708 - DNA, 25 bp, Homo sapien
tggtctgaaactagtcctgggcaag

SEQ ID NO: 2799709 - DNA, 25 bp, Homo sapien
gatcagaagtctagctttcggacgc

SEQ ID NO: 2799710 - DNA, 25 bp, Homo sapien
gctctttgggctaatccgtccggga

SEQ ID NO: 2799711 - DNA, 25 bp, Homo sapien
gagtcaggcgactagctcagggtca

SEQ ID NO: 2799712 - DNA, 25 bp, Homo sapien
gatggcagctttctcattactctgg

SEQ ID NO: 2799713 - DNA, 25 bp, Homo sapien
gttgtgattggagatggcagctttc

SEQ ID NO: 2799714 - DNA, 25 bp, Homo sapien
gaagagaggctatgtgaaggctggg

SEQ ID NO: 2799715 - DNA, 25 bp, Homo sapien
gcagtgatagaacacccagacgcag

SEQ ID NO: 2799716 - DNA, 25 bp, Homo sapien
catggaattcttgagagcaggatca

SEQ ID NO: 2799717 - DNA, 25 bp, Homo sapien
caggatcaaatgtcatgcagacttt

SEQ ID NO: 2799718 - DNA, 25 bp, Homo sapien
tgccagtgaggacaatatggaaagc

SEQ ID NO: 2799719 - DNA, 25 bp, Homo sapien
cgtcaacttcacatggaattcttga

SEQ ID NO: 2799720 - DNA, 25 bp, Homo sapien
caaggtcaagtatgggaggcaaaca

SEQ ID NO: 2799721 - DNA, 25 bp, Homo sapien
ccctatctggaggtgcaaggtcaag

SEQ ID NO: 2799722 - DNA, 25 bp, Homo sapien
tgtgtaagacacctacctgcattga

SEQ ID NO: 2799723 - DNA, 25 bp, Homo sapien
acgggtttgatatccagcattgcca

SEQ ID NO: 2799724 - DNA, 25 bp, Homo sapien
tgtttcagagattaccccagtttta

SEQ ID NO: 2799725 - DNA, 25 bp, Homo sapien
ggtgcttcccttcctactttatgga

SEQ ID NO: 2799726 - DNA, 25 bp, Homo sapien
accgtgatacacagctcagttgttg

SEQ ID NO: 2799727 - DNA, 25 bp, Homo sapien
tgtttggaccagtagaaaaagtgac

SEQ ID NO: 2799728 - DNA, 25 bp, Homo sapien
tacttgaggatgatagagcaacact

SEQ ID NO: 2799729 - DNA, 25 bp, Homo sapien
gaaaaagttgccctcaagcctgacc

SEQ ID NO: 2799730 - DNA, 25 bp, Homo sapien
gatattaggtctggccaggcgaagt

SEQ ID NO: 2799731 - DNA, 25 bp, Homo sapien
gaacttactgtccaatcatgctgtg

SEQ ID NO: 2799732 - DNA, 25 bp, Homo sapien
tgtgtcttcataatcataggtagct

SEQ ID NO: 2799733 - DNA, 25 bp, Homo sapien
taaagacaagatcacgtgataagct

SEQ ID NO: 2799734 - DNA, 25 bp, Homo sapien
tttcaaaagtcagagtttaggccag

SEQ ID NO: 2799735 - DNA, 25 bp, Homo sapien
gacatactaataggtgcacagtgaa

SEQ ID NO: 2799736 - DNA, 25 bp, Homo sapien
attttggtcttatatcttcttatgt

SEQ ID NO: 2799737 - DNA, 25 bp, Homo sapien
ttttggtcttatatcttcttatgtt

SEQ ID NO: 2799738 - DNA, 25 bp, Homo sapien
tactctactagtcgtctgggagaca

SEQ ID NO: 2799739 - DNA, 25 bp, Homo sapien
tcctagcctgtcatatagttgctcc

SEQ ID NO: 2799740 - DNA, 25 bp, Homo sapien
tatagactcatctccagcgttagcg

SEQ ID NO: 2799741 - DNA, 25 bp, Homo sapien
gacctttggatttcataaacctctg

SEQ ID NO: 2799742 - DNA, 25 bp, Homo sapien
gctttggtagcaggaggagtgagtc

SEQ ID NO: 2799743 - DNA, 25 bp, Homo sapien
aatgaagctgcttgcgacatcgccc

SEQ ID NO: 2799744 - DNA, 25 bp, Homo sapien
gatgtctcatatactcacccatttt

SEQ ID NO: 2799745 - DNA, 25 bp, Homo sapien
ccgacaagtggctgatgaaggagat

SEQ ID NO: 2799746 - DNA, 25 bp, Homo sapien
tccggtaaacctgtggcagcaacca

SEQ ID NO: 2799747 - DNA, 25 bp, Homo sapien
gcagcaaccatgtgcattggcccag

SEQ ID NO: 2799748 - DNA, 25 bp, Homo sapien
tccagtattttgaacacgttgaaga

SEQ ID NO: 2799749 - DNA, 25 bp, Homo sapien
gcagttgaaaccttgatagcatccg

SEQ ID NO: 2799750 - DNA, 25 bp, Homo sapien
gaagtggtttggacatgcacaccaa

SEQ ID NO: 2799751 - DNA, 25 bp, Homo sapien
tattcaaaaatacgccagagaggcc

SEQ ID NO: 2799752 - DNA, 25 bp, Homo sapien
tgaggccatttagaagactgcagca

SEQ ID NO: 2799753 - DNA, 25 bp, Homo sapien
ggtgctgtggatttgagccctacca

SEQ ID NO: 2799754 - DNA, 25 bp, Homo sapien
ggttcactaagcacccaccctgtga

SEQ ID NO: 2799755 - DNA, 25 bp, Homo sapien
gaatcttcggatagcctcaggccgg

SEQ ID NO: 2799756 - DNA, 25 bp, Homo sapien
gagtgaccaaaggaacagccgagct

SEQ ID NO: 2799757 - DNA, 25 bp, Homo sapien
ggccggccatacaacccttcaatgt

SEQ ID NO: 2799758 - DNA, 25 bp, Homo sapien
agagttcttctgtttcgtgacccac

SEQ ID NO: 2799759 - DNA, 25 bp, Homo sapien
tctgggccataaggctgagcagagt

SEQ ID NO: 2799760 - DNA, 25 bp, Homo sapien
tattagaagaaacatgactaccctc

SEQ ID NO: 2799761 - DNA, 25 bp, Homo sapien
tagcctggtttcctagattgagaac

SEQ ID NO: 2799762 - DNA, 25 bp, Homo sapien
aagacggctttagcttagccttttg

SEQ ID NO: 2799763 - DNA, 25 bp, Homo sapien
caagaaagacggctttagcttagcc

SEQ ID NO: 2799764 - DNA, 25 bp, Homo sapien
ctttagcttagccttttgtaggaag

SEQ ID NO: 2799765 - DNA, 25 bp, Homo sapien
aaggctgtcaagaaagacggcttta

SEQ ID NO: 2799766 - DNA, 25 bp, Homo sapien
ggataagacagccaagccaacgcag

SEQ ID NO: 2799767 - DNA, 25 bp, Homo sapien
ataagacagccaagccaacgcagac

SEQ ID NO: 2799768 - DNA, 25 bp, Homo sapien
actctgacacttctacacactgtag

SEQ ID NO: 2799769 - DNA, 25 bp, Homo sapien
taaataaactgtttgcagtttgtac

SEQ ID NO: 2799770 - DNA, 25 bp, Homo sapien
ctcttccatgctcccactgcaactt

SEQ ID NO: 2799771 - DNA, 25 bp, Homo sapien
cacaggcaaaggagttggctgcagc

SEQ ID NO: 2799772 - DNA, 25 bp, Homo sapien
ttctccaaaactccccacaggcaaa

SEQ ID NO: 2799773 - DNA, 25 bp, Homo sapien
gctgcagctcttccatgctcccact

SEQ ID NO: 2799774 - DNA, 25 bp, Homo sapien
atcaaggaaggaacgccaagacttt

SEQ ID NO: 2799775 - DNA, 25 bp, Homo sapien
gactgatgtctgttgattctctgga

SEQ ID NO: 2799776 - DNA, 25 bp, Homo sapien
aaagaccagtcagacaagtttccag

SEQ ID NO: 2799777 - DNA, 25 bp, Homo sapien
acttagttagtcatttgggcagtca

SEQ ID NO: 2799778 - DNA, 25 bp, Homo sapien
cagccacacgcaataggaacttttt

SEQ ID NO: 2799779 - DNA, 25 bp, Homo sapien
cgcagttatgtgaagtttgatccca

SEQ ID NO: 2799780 - DNA, 25 bp, Homo sapien
tgcctacgcaataccttaaagttgg

SEQ ID NO: 2799781 - DNA, 25 bp, Homo sapien
tccagctggccaagctatcagtgtg

SEQ ID NO: 2799782 - DNA, 25 bp, Homo sapien
tcctgtgctgtactcagcgccgaag

SEQ ID NO: 2799783 - DNA, 25 bp, Homo sapien
tctccaggttgtatgaacgacaaca

SEQ ID NO: 2799784 - DNA, 25 bp, Homo sapien
ctccaggttgtatgaacgacaacat

SEQ ID NO: 2799785 - DNA, 25 bp, Homo sapien
gtgctgtactcagcgccgaaggagt

SEQ ID NO: 2799786 - DNA, 25 bp, Homo sapien
gcaataagcccatttccggaacaca

SEQ ID NO: 2799787 - DNA, 25 bp, Homo sapien
ggtcaaattcaacagtcagtgcccc

SEQ ID NO: 2799788 - DNA, 25 bp, Homo sapien
caactagtctttatgaggcagacaa

SEQ ID NO: 2799789 - DNA, 25 bp, Homo sapien
tttccaggattacaaagctcaggtc

SEQ ID NO: 2799790 - DNA, 25 bp, Homo sapien
ggaaactcctcatagactaactctg

SEQ ID NO: 2799791 - DNA, 25 bp, Homo sapien
ggttttgctttactcacaggactat

SEQ ID NO: 2799792 - DNA, 25 bp, Homo sapien
tccataggtgaattttgaagcctcc

SEQ ID NO: 2799793 - DNA, 25 bp, Homo sapien
tgaagcctccgtgaatatatccata

SEQ ID NO: 2799794 - DNA, 25 bp, Homo sapien
tatgaaccttatggcagacatggag

SEQ ID NO: 2799795 - DNA, 25 bp, Homo sapien
tgtcagtgtacaacgttcatccagc

SEQ ID NO: 2799796 - DNA, 25 bp, Homo sapien
gcacggaagcaccagacacatgagt

SEQ ID NO: 2799797 - DNA, 25 bp, Homo sapien
tggagaggcatagcccagatcttct

SEQ ID NO: 2799798 - DNA, 25 bp, Homo sapien
gacatgagaccaaccacatgggaga

SEQ ID NO: 2799799 - DNA, 25 bp, Homo sapien
taaaatgaattcactgcagtagagc

SEQ ID NO: 2799800 - DNA, 25 bp, Homo sapien
gatggaaatcataggcgtttggaaa

SEQ ID NO: 2799801 - DNA, 25 bp, Homo sapien
tctgtaattgccagatgggttcttc

SEQ ID NO: 2799802 - DNA, 25 bp, Homo sapien
cacgtctcctaaagtggtgccaggg

SEQ ID NO: 2799803 - DNA, 25 bp, Homo sapien
cctgaagggctggatgaggcaacat

SEQ ID NO: 2799804 - DNA, 25 bp, Homo sapien
gatgagggtttcttcgtgctgccca

SEQ ID NO: 2799805 - DNA, 25 bp, Homo sapien
catggaagcgtgaactccctgtggg

SEQ ID NO: 2799806 - DNA, 25 bp, Homo sapien
gaaatagacctgatcacagctgcct

SEQ ID NO: 2799807 - DNA, 25 bp, Homo sapien
gagggatttactccaacattccagg

SEQ ID NO: 2799808 - DNA, 25 bp, Homo sapien
tctcattgggattgacactgtggca

SEQ ID NO: 2799809 - DNA, 25 bp, Homo sapien
aagatgcaggcatgctggtccctaa

SEQ ID NO: 2799810 - DNA, 25 bp, Homo sapien
tgacaaaacacagtggccagtgtat

SEQ ID NO: 2799811 - DNA, 25 bp, Homo sapien
ttttactcttaacaccacttgacga

SEQ ID NO: 2799812 - DNA, 25 bp, Homo sapien
ggataacagttactaacatagcacg

SEQ ID NO: 2799813 - DNA, 25 bp, Homo sapien
catagcacgaacaagaaacactgaa

SEQ ID NO: 2799814 - DNA, 25 bp, Homo sapien
ctgccactctcatcgccctcggagc

SEQ ID NO: 2799815 - DNA, 25 bp, Homo sapien
gaggccacctgtgcagcagggcaca

SEQ ID NO: 2799816 - DNA, 25 bp, Homo sapien
tcccgggttcggaggccacctgtgc

SEQ ID NO: 2799817 - DNA, 25 bp, Homo sapien
aaacgtctcagttcctccgccttag

SEQ ID NO: 2799818 - DNA, 25 bp, Homo sapien
ggtgaccatgtgaactacctgctcc

SEQ ID NO: 2799819 - DNA, 25 bp, Homo sapien
cccatgtgttcgacgagcgcgagaa

SEQ ID NO: 2799820 - DNA, 25 bp, Homo sapien
caccatgtcgttcgcgctggaggag

SEQ ID NO: 2799821 - DNA, 25 bp, Homo sapien
cggccggcgcactaagatggctgaa

SEQ ID NO: 2799822 - DNA, 25 bp, Homo sapien
gctcaggtgattctttcacctcaac

SEQ ID NO: 2799823 - DNA, 25 bp, Homo sapien
gcccagggtagagtacagtgatgtg

SEQ ID NO: 2799824 - DNA, 25 bp, Homo sapien
gcagcctggccctcccgggctcagg

SEQ ID NO: 2799825 - DNA, 25 bp, Homo sapien
tctcactctggttgcccagggtaga

SEQ ID NO: 2799826 - DNA, 25 bp, Homo sapien
aatagcactttttatttgccactat

SEQ ID NO: 2799827 - DNA, 25 bp, Homo sapien
ttttatttgccactatttgaagtct

SEQ ID NO: 2799828 - DNA, 25 bp, Homo sapien
aaatagcactttttatttgccacta

SEQ ID NO: 2799829 - DNA, 25 bp, Homo sapien
tttgccactatttgaagtctgaact

SEQ ID NO: 2799830 - DNA, 25 bp, Homo sapien
ctggtggttcaaaaccatcagctcg

SEQ ID NO: 2799831 - DNA, 25 bp, Homo sapien
tggttcaaaaccatcagctcgttca

SEQ ID NO: 2799832 - DNA, 25 bp, Homo sapien
ttggactggtggttcaaaaccatca

SEQ ID NO: 2799833 - DNA, 25 bp, Homo sapien
gttcaactttagcacctctctcgtc

SEQ ID NO: 2799834 - DNA, 25 bp, Homo sapien
gcatttgtctgcacctctcgggtca

SEQ ID NO: 2799835 - DNA, 25 bp, Homo sapien
aggcatttgtctgcacctctcgggt

SEQ ID NO: 2799836 - DNA, 25 bp, Homo sapien
gaagacatcatggagaggatagatt

SEQ ID NO: 2799837 - DNA, 25 bp, Homo sapien
acatcatggagaggatagattggca

SEQ ID NO: 2799838 - DNA, 25 bp, Homo sapien
aacagacgaagcaagtaaccatcaa

SEQ ID NO: 2799839 - DNA, 25 bp, Homo sapien
gacgaagcaagtaaccatcaatagt

SEQ ID NO: 2799840 - DNA, 25 bp, Homo sapien
acgaagcaagtaaccatcaatagtc

SEQ ID NO: 2799841 - DNA, 25 bp, Homo sapien
cagacgaagcaagtaaccatcaata

SEQ ID NO: 2799842 - DNA, 25 bp, Homo sapien
ctgacgtcaacgtgagcttcaatca

SEQ ID NO: 2799843 - DNA, 25 bp, Homo sapien
tgacgtcaacgtgagcttcaatcat

SEQ ID NO: 2799844 - DNA, 25 bp, Homo sapien
gacgtcaacgtgagcttcaatcatt

SEQ ID NO: 2799845 - DNA, 25 bp, Homo sapien
cgtcaacgtgagcttcaatcattgt

SEQ ID NO: 2799846 - DNA, 25 bp, Homo sapien
catggaacacattttgtcacaggta

SEQ ID NO: 2799847 - DNA, 25 bp, Homo sapien
ggaacacattttgtcacaggtaaga

SEQ ID NO: 2799848 - DNA, 25 bp, Homo sapien
acattttgtcacaggtaagatccat

SEQ ID NO: 2799849 - DNA, 25 bp, Homo sapien
aacacattttgtcacaggtaagatc

SEQ ID NO: 2799850 - DNA, 25 bp, Homo sapien
gccatggaagttaggcagtttttac

SEQ ID NO: 2799851 - DNA, 25 bp, Homo sapien
tcagcttgaattttctaagtgcaac

SEQ ID NO: 2799852 - DNA, 25 bp, Homo sapien
gaattttctaagtgcaacttcatca

SEQ ID NO: 2799853 - DNA, 25 bp, Homo sapien
ttctaagtgcaacttcatcattctg

SEQ ID NO: 2799854 - DNA, 25 bp, Homo sapien
taagtgcaacttcatcattctgcaa

SEQ ID NO: 2799855 - DNA, 25 bp, Homo sapien
tgggtcctggtgatgagcatctttc

SEQ ID NO: 2799856 - DNA, 25 bp, Homo sapien
cttcttggccccctttttgctgcct

SEQ ID NO: 2799857 - DNA, 25 bp, Homo sapien
ggtgatgagcatctttccaatattt

SEQ ID NO: 2799858 - DNA, 25 bp, Homo sapien
cctttttgctgcctttcgtaaggtg

SEQ ID NO: 2799859 - DNA, 25 bp, Homo sapien
ggcctcaagagacccctcatgtcat

SEQ ID NO: 2799860 - DNA, 25 bp, Homo sapien
gcgtctggcgctgagtcttaattat

SEQ ID NO: 2799861 - DNA, 25 bp, Homo sapien
gtgtttttagcccaatacctgtgaa

SEQ ID NO: 2799862 - DNA, 25 bp, Homo sapien
tatgacaaccctgtactcagagtaa

SEQ ID NO: 2799863 - DNA, 25 bp, Homo sapien
taacaaagtccaatttaccagcact

SEQ ID NO: 2799864 - DNA, 25 bp, Homo sapien
atcagctagatttgctcctatgtta

SEQ ID NO: 2799865 - DNA, 25 bp, Homo sapien
taccagcactttctatcatggttca

SEQ ID NO: 2799866 - DNA, 25 bp, Homo sapien
aagtcattgccagtccccaaatcag

SEQ ID NO: 2799867 - DNA, 25 bp, Homo sapien
cacagttgcgaacggtagaggttat

SEQ ID NO: 2799868 - DNA, 25 bp, Homo sapien
cactctgaatttgggtggagcaact

SEQ ID NO: 2799869 - DNA, 25 bp, Homo sapien
aggtgctagcctccttgaagcgtgg

SEQ ID NO: 2799870 - DNA, 25 bp, Homo sapien
gagcaactgcaatatggaaatcctt

SEQ ID NO: 2799871 - DNA, 25 bp, Homo sapien
taaaatgcccgggtgaagtatccat

SEQ ID NO: 2799872 - DNA, 25 bp, Homo sapien
tgcagtggcgccgtatttggctcgc

SEQ ID NO: 2799873 - DNA, 25 bp, Homo sapien
tgtgctaggcccctgtaggagtctt

SEQ ID NO: 2799874 - DNA, 25 bp, Homo sapien
gggtacgccccatagatcttaagca

SEQ ID NO: 2799875 - DNA, 25 bp, Homo sapien
tacattaaatggacagtgtgcacag

SEQ ID NO: 2799876 - DNA, 25 bp, Homo sapien
aaagtctgcataatcactaggtggc

SEQ ID NO: 2799877 - DNA, 25 bp, Homo sapien
ccattagggctaaggagactgacat

SEQ ID NO: 2799878 - DNA, 25 bp, Homo sapien
tctatgggtagctatcaaagggtgt

SEQ ID NO: 2799879 - DNA, 25 bp, Homo sapien
tctgcaactgatttccgggaaatct

SEQ ID NO: 2799880 - DNA, 25 bp, Homo sapien
atgggggttgactgtcttacaacct

SEQ ID NO: 2799881 - DNA, 25 bp, Homo sapien
catctggttgtccacgagatctaga

SEQ ID NO: 2799882 - DNA, 25 bp, Homo sapien
ttaaataccatcacctcgagacgcg

SEQ ID NO: 2799883 - DNA, 25 bp, Homo sapien
tccacttggatattcgataggcatg

SEQ ID NO: 2799884 - DNA, 25 bp, Homo sapien
gggtttctgaaactccactcaaggc

SEQ ID NO: 2799885 - DNA, 25 bp, Homo sapien
ggcagtgtagtgctgactgagtttt

SEQ ID NO: 2799886 - DNA, 25 bp, Homo sapien
gtaaggtgaatgacacatcctttcc

SEQ ID NO: 2799887 - DNA, 25 bp, Homo sapien
tatttgcgtgacatctatatatcag

SEQ ID NO: 2799888 - DNA, 25 bp, Homo sapien
aaaaacacactttcgcaatttggag

SEQ ID NO: 2799889 - DNA, 25 bp, Homo sapien
ggagatcttctatagagacaaggag

SEQ ID NO: 2799890 - DNA, 25 bp, Homo sapien
caaggagagatgcaacttcgtgagc

SEQ ID NO: 2799891 - DNA, 25 bp, Homo sapien
ttcccaacagttcaatgacagcaga

SEQ ID NO: 2799892 - DNA, 25 bp, Homo sapien
tgcaaaatccagtagcacctgaaag

SEQ ID NO: 2799893 - DNA, 25 bp, Homo sapien
gggaatttaaaggtgcagccctcaa

SEQ ID NO: 2799894 - DNA, 25 bp, Homo sapien
taggctctattggacaagaaaaaca

SEQ ID NO: 2799895 - DNA, 25 bp, Homo sapien
tattgaatcacacatatgtcccaca

SEQ ID NO: 2799896 - DNA, 25 bp, Homo sapien
gtcccacattatcaatacaattcaa

SEQ ID NO: 2799897 - DNA, 25 bp, Homo sapien
tcatactaaactccctgatccctag

SEQ ID NO: 2799898 - DNA, 25 bp, Homo sapien
taacgtacatgatgttacagcacat

SEQ ID NO: 2799899 - DNA, 25 bp, Homo sapien
gctctgagcatgtgtatctaaatta

SEQ ID NO: 2799900 - DNA, 25 bp, Homo sapien
ctaaaatagatggaggtaacgtaca

SEQ ID NO: 2799901 - DNA, 25 bp, Homo sapien
tcttgatgcagagcctaaacagtcc

SEQ ID NO: 2799902 - DNA, 25 bp, Homo sapien
tttttccccaactagctacaagctg

SEQ ID NO: 2799903 - DNA, 25 bp, Homo sapien
gctagaccagcctgtcaatgacggg

SEQ ID NO: 2799904 - DNA, 25 bp, Homo sapien
catcacaggcattgtacagcaagaa

SEQ ID NO: 2799905 - DNA, 25 bp, Homo sapien
taagtcagacagttgtccctccagg

SEQ ID NO: 2799906 - DNA, 25 bp, Homo sapien
tcttcaggttattgcgaaaagcttc

SEQ ID NO: 2799907 - DNA, 25 bp, Homo sapien
tagctgcattctagtagcttggcca

SEQ ID NO: 2799908 - DNA, 25 bp, Homo sapien
gcttggccaagttatctcgtaattc

SEQ ID NO: 2799909 - DNA, 25 bp, Homo sapien
ttcatcacttagaaaacaatacaac

SEQ ID NO: 2799910 - DNA, 25 bp, Homo sapien
gttattaccaatattgcggtaatca

SEQ ID NO: 2799911 - DNA, 25 bp, Homo sapien
acaatacaactctctgttattacca

SEQ ID NO: 2799912 - DNA, 25 bp, Homo sapien
tattgcggtaatcaatgcagtttga

SEQ ID NO: 2799913 - DNA, 25 bp, Homo sapien
tgagagaaactaagtgactgacaca

SEQ ID NO: 2799914 - DNA, 25 bp, Homo sapien
tatatatccgttctggaaagctcac

SEQ ID NO: 2799915 - DNA, 25 bp, Homo sapien
tagttacacaacatgatagcctcag

SEQ ID NO: 2799916 - DNA, 25 bp, Homo sapien
tatatgggacaacgaaaatatcttg

SEQ ID NO: 2799917 - DNA, 25 bp, Homo sapien
gagtcaaagaatccctctgttcttg

SEQ ID NO: 2799918 - DNA, 25 bp, Homo sapien
agtcaaagaatccctctgttcttgt

SEQ ID NO: 2799919 - DNA, 25 bp, Homo sapien
tgagtcaaagaatccctctgttctt

SEQ ID NO: 2799920 - DNA, 25 bp, Homo sapien
tcttatgagtatgtactgcatttgc

SEQ ID NO: 2799921 - DNA, 25 bp, Homo sapien
tgtattgtctgatttaattctgtct

SEQ ID NO: 2799922 - DNA, 25 bp, Homo sapien
aattctgtcttatgagtatgtactg

SEQ ID NO: 2799923 - DNA, 25 bp, Homo sapien
tgagtatgtactgcatttgcttggc

SEQ ID NO: 2799924 - DNA, 25 bp, Homo sapien
catttccaacatgtaagagaatctg

SEQ ID NO: 2799925 - DNA, 25 bp, Homo sapien
gattaatgacagtagagaatcccta

SEQ ID NO: 2799926 - DNA, 25 bp, Homo sapien
aaatattaagacactcaaggtagag

SEQ ID NO: 2799927 - DNA, 25 bp, Homo sapien
catcaacagtgtctcttacgggtaa

SEQ ID NO: 2799928 - DNA, 25 bp, Homo sapien
atagaataacatttactcaagtttc

SEQ ID NO: 2799929 - DNA, 25 bp, Homo sapien
ataacatttactcaagtttctaaca

SEQ ID NO: 2799930 - DNA, 25 bp, Homo sapien
taacatttactcaagtttctaacat

SEQ ID NO: 2799931 - DNA, 25 bp, Homo sapien
gaataacatttactcaagtttctaa

SEQ ID NO: 2799932 - DNA, 25 bp, Homo sapien
cattgagacagtgcaattacacggc

SEQ ID NO: 2799933 - DNA, 25 bp, Homo sapien
tttgactcagtgcaactacatgcca

SEQ ID NO: 2799934 - DNA, 25 bp, Homo sapien
ggcgtgtgtccccatgcttggttaa

SEQ ID NO: 2799935 - DNA, 25 bp, Homo sapien
cttggcctgagagcattaaaacact

SEQ ID NO: 2799936 - DNA, 25 bp, Homo sapien
tctgatcaagaaaacctgttagccc

SEQ ID NO: 2799937 - DNA, 25 bp, Homo sapien
taaatccctatagacatcagccctg

SEQ ID NO: 2799938 - DNA, 25 bp, Homo sapien
gatatccctgtgctgaatctacatg

SEQ ID NO: 2799939 - DNA, 25 bp, Homo sapien
tgctagtccccatggataatatggg

SEQ ID NO: 2799940 - DNA, 25 bp, Homo sapien
ttggcagtggactccagcagggctg

SEQ ID NO: 2799941 - DNA, 25 bp, Homo sapien
ttgagggtagccagttcagcctccc

SEQ ID NO: 2799942 - DNA, 25 bp, Homo sapien
ggcattatttcctttgagggtagcc

SEQ ID NO: 2799943 - DNA, 25 bp, Homo sapien
gcttgtgcagacgttctgcttcctc

SEQ ID NO: 2799944 - DNA, 25 bp, Homo sapien
aaaattctatccattacaccaacta

SEQ ID NO: 2799945 - DNA, 25 bp, Homo sapien
aaattctatccattacaccaactac

SEQ ID NO: 2799946 - DNA, 25 bp, Homo sapien
ttctatccattacaccaactactgt

SEQ ID NO: 2799947 - DNA, 25 bp, Homo sapien
attctatccattacaccaactactg

SEQ ID NO: 2799948 - DNA, 25 bp, Homo sapien
ttaataccttaggattaattctgac

SEQ ID NO: 2799949 - DNA, 25 bp, Homo sapien
taccttaggattaattctgacacca

SEQ ID NO: 2799950 - DNA, 25 bp, Homo sapien
aataccttaggattaattctgacac

SEQ ID NO: 2799951 - DNA, 25 bp, Homo sapien
ccttaggattaattctgacaccaaa

SEQ ID NO: 2799952 - DNA, 25 bp, Homo sapien
tctctgcctaacatccaccaccttt

SEQ ID NO: 2799953 - DNA, 25 bp, Homo sapien
tccttctctgcctaacatccaccac

SEQ ID NO: 2799954 - DNA, 25 bp, Homo sapien
cttctctgcctaacatccaccacct

SEQ ID NO: 2799955 - DNA, 25 bp, Homo sapien
ttctctgcctaacatccaccacctt

SEQ ID NO: 2799956 - DNA, 25 bp, Homo sapien
aagatgatcagagaaatcatccacc

SEQ ID NO: 2799957 - DNA, 25 bp, Homo sapien
aattaggaaaaattgtagatcctct

SEQ ID NO: 2799958 - DNA, 25 bp, Homo sapien
aaactggctgtctccggagtaggaa

SEQ ID NO: 2799959 - DNA, 25 bp, Homo sapien
caagaaatggtgactccactaagtt

SEQ ID NO: 2799960 - DNA, 25 bp, Homo sapien
caatgaaatccccatgtagcaggct

SEQ ID NO: 2799961 - DNA, 25 bp, Homo sapien
gaggaagggtctaatcgccattgga

SEQ ID NO: 2799962 - DNA, 25 bp, Homo sapien
attgtaacagtaaggcagaggtaga

SEQ ID NO: 2799963 - DNA, 25 bp, Homo sapien
tttaaagccctccacaagaaagaga

SEQ ID NO: 2799964 - DNA, 25 bp, Homo sapien
tagaagcaccatgagaacacgttat

SEQ ID NO: 2799965 - DNA, 25 bp, Homo sapien
cataatgtggcagaaaacaatctct

SEQ ID NO: 2799966 - DNA, 25 bp, Homo sapien
tagaaggtacatgcaatatccccaa

SEQ ID NO: 2799967 - DNA, 25 bp, Homo sapien
taaaagagcccattttctatcaagg

SEQ ID NO: 2799968 - DNA, 25 bp, Homo sapien
aaaatcgtagagaagaccaattcca

SEQ ID NO: 2799969 - DNA, 25 bp, Homo sapien
cttattagactcttgagaacagaga

SEQ ID NO: 2799970 - DNA, 25 bp, Homo sapien
aattccagtagtcaaagcagctatg

SEQ ID NO: 2799971 - DNA, 25 bp, Homo sapien
caagtcaaagtaactcttattagac

SEQ ID NO: 2799972 - DNA, 25 bp, Homo sapien
taatttcagagtggaaagcctactt

SEQ ID NO: 2799973 - DNA, 25 bp, Homo sapien
aatgttcactgcagtccatctatgc

SEQ ID NO: 2799974 - DNA, 25 bp, Homo sapien
gattgcaattgcacagacctcctta

SEQ ID NO: 2799975 - DNA, 25 bp, Homo sapien
tatctcctgttagttggtgtgcaaa

SEQ ID NO: 2799976 - DNA, 25 bp, Homo sapien
tcaaagcttgtaactacaagggttc

SEQ ID NO: 2799977 - DNA, 25 bp, Homo sapien
gcttgtaactacaagggttcctgaa

SEQ ID NO: 2799978 - DNA, 25 bp, Homo sapien
aagcttgtaactacaagggttcctg

SEQ ID NO: 2799979 - DNA, 25 bp, Homo sapien
gttttcactcaaagcttgtaactac

SEQ ID NO: 2799980 - DNA, 25 bp, Homo sapien
aatcataattgctgaattgaatctg

SEQ ID NO: 2799981 - DNA, 25 bp, Homo sapien
tcataattgctgaattgaatctgta

SEQ ID NO: 2799982 - DNA, 25 bp, Homo sapien
ttaatcataattgctgaattgaatc

SEQ ID NO: 2799983 - DNA, 25 bp, Homo sapien
cataattgctgaattgaatctgtac

SEQ ID NO: 2799984 - DNA, 25 bp, Homo sapien
tgatactttccggtgttaaaggaga

SEQ ID NO: 2799985 - DNA, 25 bp, Homo sapien
tctttcatcatctgtcccgttgata

SEQ ID NO: 2799986 - DNA, 25 bp, Homo sapien
aaaatggcaatgcattctgagttgg

SEQ ID NO: 2799987 - DNA, 25 bp, Homo sapien
tctgagttggttcagcccttggctc

SEQ ID NO: 2799988 - DNA, 25 bp, Homo sapien
tttcctttgctagtcgagcagcttc

SEQ ID NO: 2799989 - DNA, 25 bp, Homo sapien
gaaggtgtactggtaagttccatct

SEQ ID NO: 2799990 - DNA, 25 bp, Homo sapien
tgtgaaggtgtactggtaagttcca

SEQ ID NO: 2799991 - DNA, 25 bp, Homo sapien
ctttgctagtcgagcagcttcttta

SEQ ID NO: 2799992 - DNA, 25 bp, Homo sapien
taaacggtgtttgcccggctatcag

SEQ ID NO: 2799993 - DNA, 25 bp, Homo sapien
tgttttagtaaatgtcatgtttggg

SEQ ID NO: 2799994 - DNA, 25 bp, Homo sapien
gaggagaatcccaatccataaacgg

SEQ ID NO: 2799995 - DNA, 25 bp, Homo sapien
ccaatccataaacggtgtttgcccg

SEQ ID NO: 2799996 - DNA, 25 bp, Homo sapien
gcccggccgacactgattttctaaa

SEQ ID NO: 2799997 - DNA, 25 bp, Homo sapien
actgccttagatttgctggtcctga

SEQ ID NO: 2799998 - DNA, 25 bp, Homo sapien
taagtactataaagaccaggatgtg

SEQ ID NO: 2799999 - DNA, 25 bp, Homo sapien
cgcaagaaatcaagactggtaggca

SEQ ID NO: 2800000 - DNA, 25 bp, Homo sapien
tgagtaccttttaaatgccaagcac

SEQ ID NO: 2800001 - DNA, 25 bp, Homo sapien
ctttgagccatctaaactgattatc

SEQ ID NO: 2800002 - DNA, 25 bp, Homo sapien
tcgagtgctgaagataggttgttcc

SEQ ID NO: 2800003 - DNA, 25 bp, Homo sapien
tacacatttcttgtgctgtcataga

SEQ ID NO: 2800004 - DNA, 25 bp, Homo sapien
cacagtaactgcatgcttgctggtg

SEQ ID NO: 2800005 - DNA, 25 bp, Homo sapien
atgaaaactgcaaggatgattctgc

SEQ ID NO: 2800006 - DNA, 25 bp, Homo sapien
tgattctgcttaatcaacaatttcc

SEQ ID NO: 2800007 - DNA, 25 bp, Homo sapien
tggactgaaagcagccagttttatt

SEQ ID NO: 2800008 - DNA, 25 bp, Homo sapien
gatggactgaaagcagccagtttta

SEQ ID NO: 2800009 - DNA, 25 bp, Homo sapien
aaatttgcatattctaagtattcag

SEQ ID NO: 2800010 - DNA, 25 bp, Homo sapien
agtaagagaaactttcaaatttgca

SEQ ID NO: 2800011 - DNA, 25 bp, Homo sapien
ctgaaagtaagagaaactttcaaat

SEQ ID NO: 2800012 - DNA, 25 bp, Homo sapien
ctttcaaatttgcatattctaagta

SEQ ID NO: 2800013 - DNA, 25 bp, Homo sapien
tttgccaagaaactcagttagattg

SEQ ID NO: 2800014 - DNA, 25 bp, Homo sapien
aagactacaactcaatacactcctc

SEQ ID NO: 2800015 - DNA, 25 bp, Homo sapien
taatgacagtgctaggcaaaaaaat

SEQ ID NO: 2800016 - DNA, 25 bp, Homo sapien
aaatcatctgtttgctattacaccc

SEQ ID NO: 2800017 - DNA, 25 bp, Homo sapien
catctgcattgatggcactgctcat

SEQ ID NO: 2800018 - DNA, 25 bp, Homo sapien
aaatctttgttagtgtcatgctggc

SEQ ID NO: 2800019 - DNA, 25 bp, Homo sapien
taagacagccatatgcccatgtaag

SEQ ID NO: 2800020 - DNA, 25 bp, Homo sapien
tggtcaaaggtcacagctagtactg

SEQ ID NO: 2800021 - DNA, 25 bp, Homo sapien
gccaactgggtatcttcgactgcac

SEQ ID NO: 2800022 - DNA, 25 bp, Homo sapien
tctctgagaggcaggaaacaacctt

SEQ ID NO: 2800023 - DNA, 25 bp, Homo sapien
gcacaataaatagcatggcaccgtg

SEQ ID NO: 2800024 - DNA, 25 bp, Homo sapien
cagttatctctcctcacgacacgtg

SEQ ID NO: 2800025 - DNA, 25 bp, Homo sapien
tactgggcagcactttcagagtctc

SEQ ID NO: 2800026 - DNA, 25 bp, Homo sapien
tatgacctctggtaccgctctacaa

SEQ ID NO: 2800027 - DNA, 25 bp, Homo sapien
cagattcgaagctgtgttaagcaca

SEQ ID NO: 2800028 - DNA, 25 bp, Homo sapien
tctctttgaaagataaccgtcagca

SEQ ID NO: 2800029 - DNA, 25 bp, Homo sapien
taaagtatgaccagcttagcaaggt

SEQ ID NO: 2800030 - DNA, 25 bp, Homo sapien
caaaacgttcaaacagaggcggcat

SEQ ID NO: 2800031 - DNA, 25 bp, Homo sapien
gaaatgcagaatccggcttcaccga

SEQ ID NO: 2800032 - DNA, 25 bp, Homo sapien
taaggctgcgggttcaaatttctcc

SEQ ID NO: 2800033 - DNA, 25 bp, Homo sapien
cccgtcggcggagaatgaatgaatc

SEQ ID NO: 2800034 - DNA, 25 bp, Homo sapien
ccggcggcctgaagcctgccgctgc

SEQ ID NO: 2800035 - DNA, 25 bp, Homo sapien
cccggcggcctgaagcctgccgctg

SEQ ID NO: 2800036 - DNA, 25 bp, Homo sapien
tgaccaaggctagctttgttatttc

SEQ ID NO: 2800037 - DNA, 25 bp, Homo sapien
cacgaaaggtagtactggtaatgac

SEQ ID NO: 2800038 - DNA, 25 bp, Homo sapien
tagtactggtaatgaccaaggctag

SEQ ID NO: 2800039 - DNA, 25 bp, Homo sapien
tcaacttggacttgcacgaaaggta

SEQ ID NO: 2800040 - DNA, 25 bp, Homo sapien
tcttagacgggaattctgagggtca

SEQ ID NO: 2800041 - DNA, 25 bp, Homo sapien
gccgcagtgagagcatacacacatg

SEQ ID NO: 2800042 - DNA, 25 bp, Homo sapien
ctgccgcagtgagagcatacacaca

SEQ ID NO: 2800043 - DNA, 25 bp, Homo sapien
acacacatgctctgatagcacttct

SEQ ID NO: 2800044 - DNA, 25 bp, Homo sapien
tctgtaataggttgtgatcaattac

SEQ ID NO: 2800045 - DNA, 25 bp, Homo sapien
ctgtaataggttgtgatcaattact

SEQ ID NO: 2800046 - DNA, 25 bp, Homo sapien
aatctgtaataggttgtgatcaatt

SEQ ID NO: 2800047 - DNA, 25 bp, Homo sapien
gaaatctgtaataggttgtgatcaa

SEQ ID NO: 2800048 - DNA, 25 bp, Homo sapien
taccttgtctcatgtaaacctgtgt

SEQ ID NO: 2800049 - DNA, 25 bp, Homo sapien
taatctactcttttactaccttgtc

SEQ ID NO: 2800050 - DNA, 25 bp, Homo sapien
tactaccttgtctcatgtaaacctg

SEQ ID NO: 2800051 - DNA, 25 bp, Homo sapien
tgtgcccggccgaattaatctactc

SEQ ID NO: 2800052 - DNA, 25 bp, Homo sapien
tgagacgaagtctcgttttttcgcc

SEQ ID NO: 2800053 - DNA, 25 bp, Homo sapien
tgggacttcagatgcagaccaccac

SEQ ID NO: 2800054 - DNA, 25 bp, Homo sapien
gacttcagatgcagaccaccacacc

SEQ ID NO: 2800055 - DNA, 25 bp, Homo sapien
gcacagtctcctcggctcactccaa

SEQ ID NO: 2800056 - DNA, 25 bp, Homo sapien
tataggcgtgcagcctaattttgta

SEQ ID NO: 2800057 - DNA, 25 bp, Homo sapien
gattataggcgtgcagcctaatttt

SEQ ID NO: 2800058 - DNA, 25 bp, Homo sapien
gagcaactgcccagcccaggattat

SEQ ID NO: 2800059 - DNA, 25 bp, Homo sapien
aactgcccagcccaggattattgta

SEQ ID NO: 2800060 - DNA, 25 bp, Homo sapien
aaaccattgggttcgattgagaaga

SEQ ID NO: 2800061 - DNA, 25 bp, Homo sapien
tacaatatcgacattttaggccagc

SEQ ID NO: 2800062 - DNA, 25 bp, Homo sapien
tctacagctggtggcctcatttgct

SEQ ID NO: 2800063 - DNA, 25 bp, Homo sapien
caaaatgcctatggacattgccagt

SEQ ID NO: 2800064 - DNA, 25 bp, Homo sapien
tattgtctgtagaaatgttaccctg

SEQ ID NO: 2800065 - DNA, 25 bp, Homo sapien
ctggtgtgctttattgtctgtagaa

SEQ ID NO: 2800066 - DNA, 25 bp, Homo sapien
agaaatgttaccctgcagcctgggc

SEQ ID NO: 2800067 - DNA, 25 bp, Homo sapien
ttcttctggtgtgctttattgtctg

SEQ ID NO: 2800068 - DNA, 25 bp, Homo sapien
caggctttgccactcacatattgtt

SEQ ID NO: 2800069 - DNA, 25 bp, Homo sapien
tacttcaggctttgccactcacata

SEQ ID NO: 2800070 - DNA, 25 bp, Homo sapien
taaatacttcaggctttgccactca

SEQ ID NO: 2800071 - DNA, 25 bp, Homo sapien
tcaggctttgccactcacatattgt

SEQ ID NO: 2800072 - DNA, 25 bp, Homo sapien
gggccatactaataaagtgagcaag

SEQ ID NO: 2800073 - DNA, 25 bp, Homo sapien
ggattcaagttgagtcagcagatac

SEQ ID NO: 2800074 - DNA, 25 bp, Homo sapien
gagttatttgaaacatgtcagcagc

SEQ ID NO: 2800075 - DNA, 25 bp, Homo sapien
gctgttatttccacgtatgtttccc

SEQ ID NO: 2800076 - DNA, 25 bp, Homo sapien
gcacttactgcaaaatataccacct

SEQ ID NO: 2800077 - DNA, 25 bp, Homo sapien
gaactgtttattctggtcaggatca

SEQ ID NO: 2800078 - DNA, 25 bp, Homo sapien
tcaagtttgtatgtcacctgacgta

SEQ ID NO: 2800079 - DNA, 25 bp, Homo sapien
gaagactgaagcacggcatatactc

SEQ ID NO: 2800080 - DNA, 25 bp, Homo sapien
tgctttccatattgaggatcacttt

SEQ ID NO: 2800081 - DNA, 25 bp, Homo sapien
cattaacttaaccattctcctgtat

SEQ ID NO: 2800082 - DNA, 25 bp, Homo sapien
tctagaagtagtgtttgaagcagga

SEQ ID NO: 2800083 - DNA, 25 bp, Homo sapien
ccaacagaaccatatctcatgaata

SEQ ID NO: 2800084 - DNA, 25 bp, Homo sapien
tcggctggatatggtggttcctacc

SEQ ID NO: 2800085 - DNA, 25 bp, Homo sapien
gctcttcccaggtatcaatagccaa

SEQ ID NO: 2800086 - DNA, 25 bp, Homo sapien
tgagtagtatagatagctcttccca

SEQ ID NO: 2800087 - DNA, 25 bp, Homo sapien
taatgggataacttgctcagaaatg

SEQ ID NO: 2800088 - DNA, 25 bp, Homo sapien
aagggcaaacaagagtctgcaaggt

SEQ ID NO: 2800089 - DNA, 25 bp, Homo sapien
cacattactgtgagggaaaagggca

SEQ ID NO: 2800090 - DNA, 25 bp, Homo sapien
gaaataggtcctctgtatgtagaaa

SEQ ID NO: 2800091 - DNA, 25 bp, Homo sapien
tcactggccttaatctcacctgtaa

SEQ ID NO: 2800092 - DNA, 25 bp, Homo sapien
tagtgatgatcccgatactgtgtgg

SEQ ID NO: 2800093 - DNA, 25 bp, Homo sapien
atgatcccgatactgtgtgggccta

SEQ ID NO: 2800094 - DNA, 25 bp, Homo sapien
tgatgatcccgatactgtgtgggcc

SEQ ID NO: 2800095 - DNA, 25 bp, Homo sapien
gtgatgatcccgatactgtgtgggc

SEQ ID NO: 2800096 - DNA, 25 bp, Homo sapien
agccactgtgtctggccagacttca

SEQ ID NO: 2800097 - DNA, 25 bp, Homo sapien
gccactgtgtctggccagacttcac

SEQ ID NO: 2800098 - DNA, 25 bp, Homo sapien
tgtaccacatgctaatcctgaagag

SEQ ID NO: 2800099 - DNA, 25 bp, Homo sapien
tttcagtcaaatcactgcagtcatg

SEQ ID NO: 2800100 - DNA, 25 bp, Homo sapien
caaagtctgttctagtaaagtgaag

SEQ ID NO: 2800101 - DNA, 25 bp, Homo sapien
tacttgaagcaaaacgaaatctttc

SEQ ID NO: 2800102 - DNA, 25 bp, Homo sapien
ttacgatagcttagtgcaatgtgca

SEQ ID NO: 2800103 - DNA, 25 bp, Homo sapien
gaatcgttttaaagaatcagttcag

SEQ ID NO: 2800104 - DNA, 25 bp, Homo sapien
aactcttacaacagttagtgaatcg

SEQ ID NO: 2800105 - DNA, 25 bp, Homo sapien
gcactgtagtaatgggagcactaac

SEQ ID NO: 2800106 - DNA, 25 bp, Homo sapien
cctcgagctaggcactttctctctg

SEQ ID NO: 2800107 - DNA, 25 bp, Homo sapien
gcactgtcgtttaaaagaacttgaa

SEQ ID NO: 2800108 - DNA, 25 bp, Homo sapien
tgggtgcactgtcgtttaaaagaac

SEQ ID NO: 2800109 - DNA, 25 bp, Homo sapien
taagctctggggttcgtttgcctcg

SEQ ID NO: 2800110 - DNA, 25 bp, Homo sapien
tgccgaaatgtgctggaacacgtac

SEQ ID NO: 2800111 - DNA, 25 bp, Homo sapien
gctccttgtgactcgctgctcttgt

SEQ ID NO: 2800112 - DNA, 25 bp, Homo sapien
taggtcctgcataactgccgaaatg

SEQ ID NO: 2800113 - DNA, 25 bp, Homo sapien
ggcacaggaacaatcgcgaaatcct

SEQ ID NO: 2800114 - DNA, 25 bp, Homo sapien
agtgataagtactgaaggattgttc

SEQ ID NO: 2800115 - DNA, 25 bp, Homo sapien
cagggattgacaatgcccagtgaat

SEQ ID NO: 2800116 - DNA, 25 bp, Homo sapien
gcttggagggaacagtgataagtac

SEQ ID NO: 2800117 - DNA, 25 bp, Homo sapien
gttcagttaaggtgtctgcagtcat

SEQ ID NO: 2800118 - DNA, 25 bp, Homo sapien
gaactcctgaagagatgtaagtgct

SEQ ID NO: 2800119 - DNA, 25 bp, Homo sapien
gaggcacatctcaggatagattaag

SEQ ID NO: 2800120 - DNA, 25 bp, Homo sapien
tccaattctgaggttttacaagtca

SEQ ID NO: 2800121 - DNA, 25 bp, Homo sapien
caaaatgtattaacaagggtggtct

SEQ ID NO: 2800122 - DNA, 25 bp, Homo sapien
aacttcagagggatcaggcacccct

SEQ ID NO: 2800123 - DNA, 25 bp, Homo sapien
taaactacgtagacaattgcttgga

SEQ ID NO: 2800124 - DNA, 25 bp, Homo sapien
gatgggtccatcaggtaggtcgtct

SEQ ID NO: 2800125 - DNA, 25 bp, Homo sapien
gaatttgtctaaagtggaatagcca

SEQ ID NO: 2800126 - DNA, 25 bp, Homo sapien
gtcctggttgtaaggacaggcacat

SEQ ID NO: 2800127 - DNA, 25 bp, Homo sapien
cttcacatggatcgcatcttcatct

SEQ ID NO: 2800128 - DNA, 25 bp, Homo sapien
tgtcctggttgtaaggacaggcaca

SEQ ID NO: 2800129 - DNA, 25 bp, Homo sapien
cacatggatcgcatcttcatcttgt

SEQ ID NO: 2800130 - DNA, 25 bp, Homo sapien
aatggaggaacagcgtaagtacaag

SEQ ID NO: 2800131 - DNA, 25 bp, Homo sapien
cagagaagagcgctacagagtctaa

SEQ ID NO: 2800132 - DNA, 25 bp, Homo sapien
ccagccatctcggaagggatgagag

SEQ ID NO: 2800133 - DNA, 25 bp, Homo sapien
tctgtatcctgtagcagctgcaagt

SEQ ID NO: 2800134 - DNA, 25 bp, Homo sapien
ccaggcgcctttcatcatgtgtcat

SEQ ID NO: 2800135 - DNA, 25 bp, Homo sapien
gcccaggcgcctttcatcatgtgtc

SEQ ID NO: 2800136 - DNA, 25 bp, Homo sapien
cccaggcgcctttcatcatgtgtca

SEQ ID NO: 2800137 - DNA, 25 bp, Homo sapien
tcagtgccacaacagccagaagatg

SEQ ID NO: 2800138 - DNA, 25 bp, Homo sapien
tatcacaggatcaaaaaatggagcc

SEQ ID NO: 2800139 - DNA, 25 bp, Homo sapien
gaggcgcactctccaaaggatcaga

SEQ ID NO: 2800140 - DNA, 25 bp, Homo sapien
tcccatcagaaggagaggacctagg

SEQ ID NO: 2800141 - DNA, 25 bp, Homo sapien
gagcttgatgaggccgtcttcctga

SEQ ID NO: 2800142 - DNA, 25 bp, Homo sapien
tgcatgagcagatggtccactttct

SEQ ID NO: 2800143 - DNA, 25 bp, Homo sapien
gacaccctggagaccatcgtgagag

SEQ ID NO: 2800144 - DNA, 25 bp, Homo sapien
tttagcacagtatgatgagaaagcc

SEQ ID NO: 2800145 - DNA, 25 bp, Homo sapien
gagccatggaaccaaagggtctcct

SEQ ID NO: 2800146 - DNA, 25 bp, Homo sapien
gaaattgagcatgggaggaacatcc

SEQ ID NO: 2800147 - DNA, 25 bp, Homo sapien
tatgatgacagctcggcaagaagtg

SEQ ID NO: 2800148 - DNA, 25 bp, Homo sapien
ttggatagagtgagaggccctgcct

SEQ ID NO: 2800149 - DNA, 25 bp, Homo sapien
ggctgttgtgtttaaattgatgatt

SEQ ID NO: 2800150 - DNA, 25 bp, Homo sapien
gtgtttaaattgatgattaacattc

SEQ ID NO: 2800151 - DNA, 25 bp, Homo sapien
gtttaaattgatgattaacattcat

SEQ ID NO: 2800152 - DNA, 25 bp, Homo sapien
ttaaattgatgattaacattcattc

SEQ ID NO: 2800153 - DNA, 25 bp, Homo sapien
gaaagtttgattaacagagctggtc

SEQ ID NO: 2800154 - DNA, 25 bp, Homo sapien
catttaggaggatatgcttttcaat

SEQ ID NO: 2800155 - DNA, 25 bp, Homo sapien
ggattagactaggacagtgattgca

SEQ ID NO: 2800156 - DNA, 25 bp, Homo sapien
cttgtaatgtctttaagagggatta

SEQ ID NO: 2800157 - DNA, 25 bp, Homo sapien
ggtgcattagaagacaacgctcagt

SEQ ID NO: 2800158 - DNA, 25 bp, Homo sapien
tttttgaagatctggaacctgaccg

SEQ ID NO: 2800159 - DNA, 25 bp, Homo sapien
gaacttcactggatgtagcctgccc

SEQ ID NO: 2800160 - DNA, 25 bp, Homo sapien
gaaagggccatctttaggacaggta

SEQ ID NO: 2800161 - DNA, 25 bp, Homo sapien
aaacagtatggagtgtgcaggacac

SEQ ID NO: 2800162 - DNA, 25 bp, Homo sapien
catagagaggccgtgtttgcaaggt

SEQ ID NO: 2800163 - DNA, 25 bp, Homo sapien
gaactgcttcctagaactgatgcct

SEQ ID NO: 2800164 - DNA, 25 bp, Homo sapien
tgcaggacactgtaagaagtttggt

SEQ ID NO: 2800165 - DNA, 25 bp, Homo sapien
caaaaattttccaccgttctgctgt

SEQ ID NO: 2800166 - DNA, 25 bp, Homo sapien
tcaaaaattttccaccgttctgctg

SEQ ID NO: 2800167 - DNA, 25 bp, Homo sapien
caggttgggtgggctcaaaacactt

SEQ ID NO: 2800168 - DNA, 25 bp, Homo sapien
tcgcttgaacccgggtggggcagag

SEQ ID NO: 2800169 - DNA, 25 bp, Homo sapien
tccagcctgggtgacagagtaagac

SEQ ID NO: 2800170 - DNA, 25 bp, Homo sapien
acccgggtggggcagaggttgcaat

SEQ ID NO: 2800171 - DNA, 25 bp, Homo sapien
aatgagctgaggtcatgccactgga

SEQ ID NO: 2800172 - DNA, 25 bp, Homo sapien
cacaggtttaatgagggtgtccacc

SEQ ID NO: 2800173 - DNA, 25 bp, Homo sapien
tcatgtgactgagcgtccagccaga

SEQ ID NO: 2800174 - DNA, 25 bp, Homo sapien
tgctggactacaacaaccagagact

SEQ ID NO: 2800175 - DNA, 25 bp, Homo sapien
tatcttcatcaacgcagagagcgag

SEQ ID NO: 2800176 - DNA, 25 bp, Homo sapien
cgcgcatttgcactaatgatggctg

SEQ ID NO: 2800177 - DNA, 25 bp, Homo sapien
tcctttaggtgctatacattattca

SEQ ID NO: 2800178 - DNA, 25 bp, Homo sapien
caagaacagcgatttgaattttggg

SEQ ID NO: 2800179 - DNA, 25 bp, Homo sapien
atacattattcaaaaagtctcccgc

SEQ ID NO: 2800180 - DNA, 25 bp, Homo sapien
gcaccctcgctagccgcgggtgaag

SEQ ID NO: 2800181 - DNA, 25 bp, Homo sapien
aactgtctaatgcaactgcgcatgc

SEQ ID NO: 2800182 - DNA, 25 bp, Homo sapien
tctaatgcaactgcgcatgcaccct

SEQ ID NO: 2800183 - DNA, 25 bp, Homo sapien
atgcaccctcgctagccgcgggtga

SEQ ID NO: 2800184 - DNA, 25 bp, Homo sapien
ctgtagtcccatgttcgtgccactg

SEQ ID NO: 2800185 - DNA, 25 bp, Homo sapien
tcccatgttcgtgccactggaatcc

SEQ ID NO: 2800186 - DNA, 25 bp, Homo sapien
atgttcgtgccactggaatccagcc

SEQ ID NO: 2800187 - DNA, 25 bp, Homo sapien
tagtcccatgttcgtgccactggaa

SEQ ID NO: 2800188 - DNA, 25 bp, Homo sapien
ttattcagcccaacaggacctctac

SEQ ID NO: 2800189 - DNA, 25 bp, Homo sapien
taaaaagtaccctcaattccacaga

SEQ ID NO: 2800190 - DNA, 25 bp, Homo sapien
tgttgcaatccatttagcagagcct

SEQ ID NO: 2800191 - DNA, 25 bp, Homo sapien
acctctacagggcttgaagttcaga

SEQ ID NO: 2800192 - DNA, 25 bp, Homo sapien
tgccatacgtccattgtgggttggc

SEQ ID NO: 2800193 - DNA, 25 bp, Homo sapien
catacgtccattgtgggttggctgt

SEQ ID NO: 2800194 - DNA, 25 bp, Homo sapien
ttttgccatacgtccattgtgggtt

SEQ ID NO: 2800195 - DNA, 25 bp, Homo sapien
tccattgtgggttggctgtggctct

SEQ ID NO: 2800196 - DNA, 25 bp, Homo sapien
ctaaagtactgatcccatcttccca

SEQ ID NO: 2800197 - DNA, 25 bp, Homo sapien
taaagtactgatcccatcttcccat

SEQ ID NO: 2800198 - DNA, 25 bp, Homo sapien
aaagtactgatcccatcttcccatg

SEQ ID NO: 2800199 - DNA, 25 bp, Homo sapien
tgctggcaatcacagacacgggcag

SEQ ID NO: 2800200 - DNA, 25 bp, Homo sapien
agggcaggcccaagctgttccagct

SEQ ID NO: 2800201 - DNA, 25 bp, Homo sapien
aagcaggacccttagttccgggcag

SEQ ID NO: 2800202 - DNA, 25 bp, Homo sapien
ctgagaggccaggatccagagtcca

SEQ ID NO: 2800203 - DNA, 25 bp, Homo sapien
aaacaagggctgcttcactgttaca

SEQ ID NO: 2800204 - DNA, 25 bp, Homo sapien
ttacttgagagctcgcagagggcag

SEQ ID NO: 2800205 - DNA, 25 bp, Homo sapien
gcttcactgttacatgcacaggcca

SEQ ID NO: 2800206 - DNA, 25 bp, Homo sapien
tgagagctcgcagagggcagaaaac

SEQ ID NO: 2800207 - DNA, 25 bp, Homo sapien
cagcaggcaaactgccccgtatgag

SEQ ID NO: 2800208 - DNA, 25 bp, Homo sapien
taggattcccaaggtagaccacgtg

SEQ ID NO: 2800209 - DNA, 25 bp, Homo sapien
aactgtgcgtgcagatctttactcg

SEQ ID NO: 2800210 - DNA, 25 bp, Homo sapien
gggatacacggcaaaggcctgtcgt

SEQ ID NO: 2800211 - DNA, 25 bp, Homo sapien
tgtttttacaactgtacgcagaaat

SEQ ID NO: 2800212 - DNA, 25 bp, Homo sapien
tacgcagaaatatgggcagtacttc

SEQ ID NO: 2800213 - DNA, 25 bp, Homo sapien
ggagccagaggtcccgtagtactgg

SEQ ID NO: 2800214 - DNA, 25 bp, Homo sapien
gggcagtacttctgtgacctggtga

SEQ ID NO: 2800215 - DNA, 25 bp, Homo sapien
ctcctgttgctgcaatgtcagtggc

SEQ ID NO: 2800216 - DNA, 25 bp, Homo sapien
ctgttgctgcaatgtcagtggcaac

SEQ ID NO: 2800217 - DNA, 25 bp, Homo sapien
tgctgcaatgtcagtggcaacaccc

SEQ ID NO: 2800218 - DNA, 25 bp, Homo sapien
ttgctgcaatgtcagtggcaacacc

SEQ ID NO: 2800219 - DNA, 25 bp, Homo sapien
gcacttaggatagcagggcccgcca

SEQ ID NO: 2800220 - DNA, 25 bp, Homo sapien
atggcagcacttaggatagcagggc

SEQ ID NO: 2800221 - DNA, 25 bp, Homo sapien
tttctcagtgggcatgagtaaggag

SEQ ID NO: 2800222 - DNA, 25 bp, Homo sapien
ggtgcaatggcagcacttaggatag

SEQ ID NO: 2800223 - DNA, 25 bp, Homo sapien
ttgtccaggggctgcaactgggggt

SEQ ID NO: 2800224 - DNA, 25 bp, Homo sapien
gatgtggattgcctggcagtcaggg

SEQ ID NO: 2800225 - DNA, 25 bp, Homo sapien
atgtgggcctcgatcacatgctcct

SEQ ID NO: 2800226 - DNA, 25 bp, Homo sapien
gtgggcctcgatcacatgctccttg

SEQ ID NO: 2800227 - DNA, 25 bp, Homo sapien
taggagcatccgttggaaagatccg

SEQ ID NO: 2800228 - DNA, 25 bp, Homo sapien
ccgttggaaagatccgtctccaggg

SEQ ID NO: 2800229 - DNA, 25 bp, Homo sapien
cagagataggagcatccgttggaaa

SEQ ID NO: 2800230 - DNA, 25 bp, Homo sapien
tccagggtccctcggagtaactcat

SEQ ID NO: 2800231 - DNA, 25 bp, Homo sapien
tcacatttactcaaaatggtcatga

SEQ ID NO: 2800232 - DNA, 25 bp, Homo sapien
catcacatttactcaaaatggtcat

SEQ ID NO: 2800233 - DNA, 25 bp, Homo sapien
atcacatttactcaaaatggtcatg

SEQ ID NO: 2800234 - DNA, 25 bp, Homo sapien
cacatttactcaaaatggtcatgat

SEQ ID NO: 2800235 - DNA, 25 bp, Homo sapien
cacttagagtgttcaccttgggttg

SEQ ID NO: 2800236 - DNA, 25 bp, Homo sapien
gcatctgtggatgaccagctctgat

SEQ ID NO: 2800237 - DNA, 25 bp, Homo sapien
ccttgggttggcaccagtgtgagca

SEQ ID NO: 2800238 - DNA, 25 bp, Homo sapien
tgatgctcgcaaactgtgctgccat

SEQ ID NO: 2800239 - DNA, 25 bp, Homo sapien
gctgtgagcagaaacaggcactcac

SEQ ID NO: 2800240 - DNA, 25 bp, Homo sapien
tatggtagagagagagaagtgggca

SEQ ID NO: 2800241 - DNA, 25 bp, Homo sapien
gagctgtgagcagaaacaggcactc

SEQ ID NO: 2800242 - DNA, 25 bp, Homo sapien
cagagctgtgagcagaaacaggcac

SEQ ID NO: 2800243 - DNA, 25 bp, Homo sapien
aacgacactgctcattaaaccttgt

SEQ ID NO: 2800244 - DNA, 25 bp, Homo sapien
ggcctgaaacgacactgctcattaa

SEQ ID NO: 2800245 - DNA, 25 bp, Homo sapien
aaattcgtggcctgaaacgacactg

SEQ ID NO: 2800246 - DNA, 25 bp, Homo sapien
cgtggcctgaaacgacactgctcat

SEQ ID NO: 2800247 - DNA, 25 bp, Homo sapien
atcatgttctttgtcgttgtggatt

SEQ ID NO: 2800248 - DNA, 25 bp, Homo sapien
atgttctttgtcgttgtggattttt

SEQ ID NO: 2800249 - DNA, 25 bp, Homo sapien
tggacgatcctatcatgttctttgt

SEQ ID NO: 2800250 - DNA, 25 bp, Homo sapien
cttggacgatcctatcatgttcttt

SEQ ID NO: 2800251 - DNA, 25 bp, Homo sapien
ccctcaccacttttagtcttatcag

SEQ ID NO: 2800252 - DNA, 25 bp, Homo sapien
cttttagtcttatcagagtctctga

SEQ ID NO: 2800253 - DNA, 25 bp, Homo sapien
caccacttttagtcttatcagagtc

SEQ ID NO: 2800254 - DNA, 25 bp, Homo sapien
ccacttttagtcttatcagagtctc

SEQ ID NO: 2800255 - DNA, 25 bp, Homo sapien
caggcatatgtgtcatttggttcat

SEQ ID NO: 2800256 - DNA, 25 bp, Homo sapien
aggcatatgtgtcatttggttcatt

SEQ ID NO: 2800257 - DNA, 25 bp, Homo sapien
gcaggcatatgtgtcatttggttca

SEQ ID NO: 2800258 - DNA, 25 bp, Homo sapien
cctgagtggccagactgatgaggac

SEQ ID NO: 2800259 - DNA, 25 bp, Homo sapien
tacatggaaagccaacgttgcctgg

SEQ ID NO: 2800260 - DNA, 25 bp, Homo sapien
tgggcacaagcccgctcctgagtgg

SEQ ID NO: 2800261 - DNA, 25 bp, Homo sapien
cacgggctaatccttctacatggaa

SEQ ID NO: 2800262 - DNA, 25 bp, Homo sapien
catacacacattttgctcagggcag

SEQ ID NO: 2800263 - DNA, 25 bp, Homo sapien
gaagagagtcttgctgactgggaag

SEQ ID NO: 2800264 - DNA, 25 bp, Homo sapien
ctgctcgggcttgctctttccctgg

SEQ ID NO: 2800265 - DNA, 25 bp, Homo sapien
ccaagtggggctcttgtggcccatt

SEQ ID NO: 2800266 - DNA, 25 bp, Homo sapien
actgggactgaggagtcaagtccgt

SEQ ID NO: 2800267 - DNA, 25 bp, Homo sapien
ctgggactgaggagtcaagtccgtt

SEQ ID NO: 2800268 - DNA, 25 bp, Homo sapien
ggactgaggagtcaagtccgttttg

SEQ ID NO: 2800269 - DNA, 25 bp, Homo sapien
tgggactgaggagtcaagtccgttt

SEQ ID NO: 2800270 - DNA, 25 bp, Homo sapien
tgaagcacgctgatgctggttctcc

SEQ ID NO: 2800271 - DNA, 25 bp, Homo sapien
gcttgacagtcaagtgctcagaggc

SEQ ID NO: 2800272 - DNA, 25 bp, Homo sapien
attgcaatctgctttgcaccaccca

SEQ ID NO: 2800273 - DNA, 25 bp, Homo sapien
catgtttgattgaagcacgctgatg

SEQ ID NO: 2800274 - DNA, 25 bp, Homo sapien
ttaggctacgagagcagacatccag

SEQ ID NO: 2800275 - DNA, 25 bp, Homo sapien
gcagacatccaggtttcagtgtggg

SEQ ID NO: 2800276 - DNA, 25 bp, Homo sapien
gggagatgccccaggacttaaagat

SEQ ID NO: 2800277 - DNA, 25 bp, Homo sapien
gagatgccccaggacttaaagatga

SEQ ID NO: 2800278 - DNA, 25 bp, Homo sapien
tgctcgagagggtgctcagctgtag

SEQ ID NO: 2800279 - DNA, 25 bp, Homo sapien
ggctttattgtcaaaacagaggagt

SEQ ID NO: 2800280 - DNA, 25 bp, Homo sapien
agagggtgctcagctgtagggaggg

SEQ ID NO: 2800281 - DNA, 25 bp, Homo sapien
tattgtcaaaacagaggagtggtct

SEQ ID NO: 2800282 - DNA, 25 bp, Homo sapien
agccacagcaagacaatccgagatt

SEQ ID NO: 2800283 - DNA, 25 bp, Homo sapien
aagacaatccgagattgggctggca

SEQ ID NO: 2800284 - DNA, 25 bp, Homo sapien
tgcttgcaccctgaaatctgtagtc

SEQ ID NO: 2800285 - DNA, 25 bp, Homo sapien
tggcattgagaaacgcccaaaacat

SEQ ID NO: 2800286 - DNA, 25 bp, Homo sapien
agtcttaagtcatcttgatatttgc

SEQ ID NO: 2800287 - DNA, 25 bp, Homo sapien
cttaagtcatcttgatatttgctga

SEQ ID NO: 2800288 - DNA, 25 bp, Homo sapien
ctgaagtcttaagtcatcttgatat

SEQ ID NO: 2800289 - DNA, 25 bp, Homo sapien
aaactgaagtcttaagtcatcttga

SEQ ID NO: 2800290 - DNA, 25 bp, Homo sapien
ttaccaagtgtttgtagcgctttta

SEQ ID NO: 2800291 - DNA, 25 bp, Homo sapien
tataacccttaaagccttgtgataa

SEQ ID NO: 2800292 - DNA, 25 bp, Homo sapien
agcgcttttatgtagcctcttggaa

SEQ ID NO: 2800293 - DNA, 25 bp, Homo sapien
tagcctcttggaaatataaccctta

SEQ ID NO: 2800294 - DNA, 25 bp, Homo sapien
ctacagcctgctcccaaatatgtcc

SEQ ID NO: 2800295 - DNA, 25 bp, Homo sapien
ctgctcccaaatatgtccctattac

SEQ ID NO: 2800296 - DNA, 25 bp, Homo sapien
cagcctgctcccaaatatgtcccta

SEQ ID NO: 2800297 - DNA, 25 bp, Homo sapien
gcctgctcccaaatatgtccctatt

SEQ ID NO: 2800298 - DNA, 25 bp, Homo sapien
gatgggtaatactgcagccacacca

SEQ ID NO: 2800299 - DNA, 25 bp, Homo sapien
gcactggatggaggtattttcttaa

SEQ ID NO: 2800300 - DNA, 25 bp, Homo sapien
cttctgggatgggtaatactgcagc

SEQ ID NO: 2800301 - DNA, 25 bp, Homo sapien
cagaaaatgcactggatggaggtat

SEQ ID NO: 2800302 - DNA, 25 bp, Homo sapien
tgaaatgccagccaatccatcttac

SEQ ID NO: 2800303 - DNA, 25 bp, Homo sapien
gtgattgacatgaaatgccagccaa

SEQ ID NO: 2800304 - DNA, 25 bp, Homo sapien
acatgaaatgccagccaatccatct

SEQ ID NO: 2800305 - DNA, 25 bp, Homo sapien
ttgacatgaaatgccagccaatcca

SEQ ID NO: 2800306 - DNA, 25 bp, Homo sapien
taaaattaccatcctcttgcaaagc

SEQ ID NO: 2800307 - DNA, 25 bp, Homo sapien
gcaaagcagcgtctatagacatgaa

SEQ ID NO: 2800308 - DNA, 25 bp, Homo sapien
ttgttccaagagctctagggtccgg

SEQ ID NO: 2800309 - DNA, 25 bp, Homo sapien
tagacatgaaccatcctaactccag

SEQ ID NO: 2800310 - DNA, 25 bp, Homo sapien
cttgtctgatccagatcctgggcag

SEQ ID NO: 2800311 - DNA, 25 bp, Homo sapien
ctgatgcactgtgacttgtctgatc

SEQ ID NO: 2800312 - DNA, 25 bp, Homo sapien
atgcactgtgacttgtctgatccag

SEQ ID NO: 2800313 - DNA, 25 bp, Homo sapien
tcatcggcttctgatgcactgtgac

SEQ ID NO: 2800314 - DNA, 25 bp, Homo sapien
caggcctttgcaatgatgcactggc

SEQ ID NO: 2800315 - DNA, 25 bp, Homo sapien
ggcctttgcaatgatgcactggcat

SEQ ID NO: 2800316 - DNA, 25 bp, Homo sapien
tctgagttgtcaggcctttgcaatg

SEQ ID NO: 2800317 - DNA, 25 bp, Homo sapien
agttgtcaggcctttgcaatgatgc

SEQ ID NO: 2800318 - DNA, 25 bp, Homo sapien
tggagtccatggtccttgacgttca

SEQ ID NO: 2800319 - DNA, 25 bp, Homo sapien
gtccatggtccttgacgttcacctt

SEQ ID NO: 2800320 - DNA, 25 bp, Homo sapien
gagtccatggtccttgacgttcacc

SEQ ID NO: 2800321 - DNA, 25 bp, Homo sapien
actggagtccatggtccttgacgtt

SEQ ID NO: 2800322 - DNA, 25 bp, Homo sapien
ccagttcatattgccagtcagcaaa

SEQ ID NO: 2800323 - DNA, 25 bp, Homo sapien
aaacgtccagttcatattgccagtc

SEQ ID NO: 2800324 - DNA, 25 bp, Homo sapien
ttcatattgccagtcagcaaaaggc

SEQ ID NO: 2800325 - DNA, 25 bp, Homo sapien
gtccagttcatattgccagtcagca

SEQ ID NO: 2800326 - DNA, 25 bp, Homo sapien
ccaagcttctttgccaatagtccaa

SEQ ID NO: 2800327 - DNA, 25 bp, Homo sapien
tgaaatgcttggatggaaaagtgct

SEQ ID NO: 2800328 - DNA, 25 bp, Homo sapien
ttctggccagatgcttgtcaacaag

SEQ ID NO: 2800329 - DNA, 25 bp, Homo sapien
cattcccattgataactactgagcc

SEQ ID NO: 2800330 - DNA, 25 bp, Homo sapien
tcatggacctgagtcacggtgctca

SEQ ID NO: 2800331 - DNA, 25 bp, Homo sapien
ctctcctccttagaaggacagaaga

SEQ ID NO: 2800332 - DNA, 25 bp, Homo sapien
gctcagatagagctccatttctgaa

SEQ ID NO: 2800333 - DNA, 25 bp, Homo sapien
ccttagaaggacagaagaccatttg

SEQ ID NO: 2800334 - DNA, 25 bp, Homo sapien
gcaggatcccttttcactatggtga

SEQ ID NO: 2800335 - DNA, 25 bp, Homo sapien
cagggtgggtgcattgaagttcttc

SEQ ID NO: 2800336 - DNA, 25 bp, Homo sapien
tgatgaagagaacctgcaggatccc

SEQ ID NO: 2800337 - DNA, 25 bp, Homo sapien
tcttcttagctacactgggagtcac

SEQ ID NO: 2800338 - DNA, 25 bp, Homo sapien
tagctctgcaccagactctgaggga

SEQ ID NO: 2800339 - DNA, 25 bp, Homo sapien
tgccttattgcctagagacacagag

SEQ ID NO: 2800340 - DNA, 25 bp, Homo sapien
cctctgccattgattgctgtgtgga

SEQ ID NO: 2800341 - DNA, 25 bp, Homo sapien
tgaacctgggttgctaagcgcttct

SEQ ID NO: 2800342 - DNA, 25 bp, Homo sapien
tgcttgcatttgtgctagtgttccc

SEQ ID NO: 2800343 - DNA, 25 bp, Homo sapien
tgttggcataaactctctttcaggg

SEQ ID NO: 2800344 - DNA, 25 bp, Homo sapien
ggtgctccccacagtactttgctaa

SEQ ID NO: 2800345 - DNA, 25 bp, Homo sapien
ccattctactttgcacggtcatcag

SEQ ID NO: 2800346 - DNA, 25 bp, Homo sapien
tgaacaaccacattcaaccagcaaa

SEQ ID NO: 2800347 - DNA, 25 bp, Homo sapien
tatgtctatagctcagtcccagccc

SEQ ID NO: 2800348 - DNA, 25 bp, Homo sapien
gcaaaaaattcttcgcgatgaaaag

SEQ ID NO: 2800349 - DNA, 25 bp, Homo sapien
taaaaacccactatgtctatagctc

SEQ ID NO: 2800350 - DNA, 25 bp, Homo sapien
gcacattagcgtatcaaaggtctga

SEQ ID NO: 2800351 - DNA, 25 bp, Homo sapien
catgacttactgagggctgatgcaa

SEQ ID NO: 2800352 - DNA, 25 bp, Homo sapien
cgggagaactaccatgtcaagggac

SEQ ID NO: 2800353 - DNA, 25 bp, Homo sapien
tatattcacactcggcaaggctaga

SEQ ID NO: 2800354 - DNA, 25 bp, Homo sapien
gaagtaatgtgcaactcatgaggta

SEQ ID NO: 2800355 - DNA, 25 bp, Homo sapien
tatgggttcctgcacgacttgataa

SEQ ID NO: 2800356 - DNA, 25 bp, Homo sapien
gctccactcagctcaaattagatga

SEQ ID NO: 2800357 - DNA, 25 bp, Homo sapien
cacacaccctgttgtagaagtaatg

SEQ ID NO: 2800358 - DNA, 25 bp, Homo sapien
gaaaacttggaccagatgcacagta

SEQ ID NO: 2800359 - DNA, 25 bp, Homo sapien
gtatttctactaccctggccatggg

SEQ ID NO: 2800360 - DNA, 25 bp, Homo sapien
cctgagtagtgtctaacaagtgggc

SEQ ID NO: 2800361 - DNA, 25 bp, Homo sapien
gttttaggacaacagaagcacctca

SEQ ID NO: 2800362 - DNA, 25 bp, Homo sapien
catattaggtattcagcctggtcta

SEQ ID NO: 2800363 - DNA, 25 bp, Homo sapien
caacaatcgtttgactttggccaca

SEQ ID NO: 2800364 - DNA, 25 bp, Homo sapien
cagtacgatgtgtttttcttccccg

SEQ ID NO: 2800365 - DNA, 25 bp, Homo sapien
tgcagtgccaagctagaatacaagc

SEQ ID NO: 2800366 - DNA, 25 bp, Homo sapien
tcttcttctgctggagtcaatttaa

SEQ ID NO: 2800367 - DNA, 25 bp, Homo sapien
ttaagtgttggcagtttccgaggag

SEQ ID NO: 2800368 - DNA, 25 bp, Homo sapien
tcagggcgaaagccgttggaaggaa

SEQ ID NO: 2800369 - DNA, 25 bp, Homo sapien
gctgagggctttggcgaagattgtc

SEQ ID NO: 2800370 - DNA, 25 bp, Homo sapien
agaaacattaagagacagagaggca

SEQ ID NO: 2800371 - DNA, 25 bp, Homo sapien
gataagcccagtgcttacaatctta

SEQ ID NO: 2800372 - DNA, 25 bp, Homo sapien
gaacaccccaagtggcaaaatatct

SEQ ID NO: 2800373 - DNA, 25 bp, Homo sapien
gaacacggtgctgttaataagaaag

SEQ ID NO: 2800374 - DNA, 25 bp, Homo sapien
tcaagttggattccttatttacaag

SEQ ID NO: 2800375 - DNA, 25 bp, Homo sapien
gcagatttgcatctaccgtttcttg

SEQ ID NO: 2800376 - DNA, 25 bp, Homo sapien
atctaccgtttcttgtccagctgga

SEQ ID NO: 2800377 - DNA, 25 bp, Homo sapien
gttgtgtgagtttctgcagatttgc

SEQ ID NO: 2800378 - DNA, 25 bp, Homo sapien
tagtggaatcatggcagtgtacctc

SEQ ID NO: 2800379 - DNA, 25 bp, Homo sapien
tgaagcacatcctaagtaacaggtg

SEQ ID NO: 2800380 - DNA, 25 bp, Homo sapien
ggtttgctaaccactgctcccaagt

SEQ ID NO: 2800381 - DNA, 25 bp, Homo sapien
tgaatcacttaagcacaaggctcca

SEQ ID NO: 2800382 - DNA, 25 bp, Homo sapien
gctgatttctgttcatgcaggaaaa

SEQ ID NO: 2800383 - DNA, 25 bp, Homo sapien
caaaatcaatctgctgctgatttct

SEQ ID NO: 2800384 - DNA, 25 bp, Homo sapien
tctgctgctgatttctgttcatgca

SEQ ID NO: 2800385 - DNA, 25 bp, Homo sapien
aaaatcaatctgctgctgatttctg

SEQ ID NO: 2800386 - DNA, 25 bp, Homo sapien
agtagtggattttgcttatacatac

SEQ ID NO: 2800387 - DNA, 25 bp, Homo sapien
caaatccttgaagtgctataaacca

SEQ ID NO: 2800388 - DNA, 25 bp, Homo sapien
tccagcggaatagataaaaggcaaa

SEQ ID NO: 2800389 - DNA, 25 bp, Homo sapien
tcagcaaagacttaatacctgtggt

SEQ ID NO: 2800390 - DNA, 25 bp, Homo sapien
ggatgtcatcacaaaagcgacagag

SEQ ID NO: 2800391 - DNA, 25 bp, Homo sapien
tgtagctgaactttaggaaaccgta

SEQ ID NO: 2800392 - DNA, 25 bp, Homo sapien
taaaataactgctcaggatgtcatc

SEQ ID NO: 2800393 - DNA, 25 bp, Homo sapien
ccgtactttgtaaagaggtgcaaga

SEQ ID NO: 2800394 - DNA, 25 bp, Homo sapien
taagacaatattaactgaaggccgg

SEQ ID NO: 2800395 - DNA, 25 bp, Homo sapien
ctttgggagatcaagcgggggcaga

SEQ ID NO: 2800396 - DNA, 25 bp, Homo sapien
gacaatattaactgaaggccgggtg

SEQ ID NO: 2800397 - DNA, 25 bp, Homo sapien
caatattaactgaaggccgggtgtg

SEQ ID NO: 2800398 - DNA, 25 bp, Homo sapien
tctgtttgatagaagatttaggcac

SEQ ID NO: 2800399 - DNA, 25 bp, Homo sapien
aactgagatgttcccaatctgtttg

SEQ ID NO: 2800400 - DNA, 25 bp, Homo sapien
tgttcccaatctgtttgatagaaga

SEQ ID NO: 2800401 - DNA, 25 bp, Homo sapien
agaaaaactgagatgttcccaatct

SEQ ID NO: 2800402 - DNA, 25 bp, Homo sapien
gcttccacttctcggaggtggtaga

SEQ ID NO: 2800403 - DNA, 25 bp, Homo sapien
aggctgtcctctggtcaggagaatc

SEQ ID NO: 2800404 - DNA, 25 bp, Homo sapien
ttccacttctcggaggtggtagagg

SEQ ID NO: 2800405 - DNA, 25 bp, Homo sapien
gagaatcctattcagtgctccctta

SEQ ID NO: 2800406 - DNA, 25 bp, Homo sapien
cattcttccaggcaggatcaaactc

SEQ ID NO: 2800407 - DNA, 25 bp, Homo sapien
tccaggcaggatcaaactcaaagga

SEQ ID NO: 2800408 - DNA, 25 bp, Homo sapien
caggcaggatcaaactcaaaggaaa

SEQ ID NO: 2800409 - DNA, 25 bp, Homo sapien
ttcttccaggcaggatcaaactcaa

SEQ ID NO: 2800410 - DNA, 25 bp, Homo sapien
acagtaaagtaattgtcactctcaa

SEQ ID NO: 2800411 - DNA, 25 bp, Homo sapien
ttgtcactctcaacccagaatgtgt

SEQ ID NO: 2800412 - DNA, 25 bp, Homo sapien
tggctttgtcacagtaaagtaattg

SEQ ID NO: 2800413 - DNA, 25 bp, Homo sapien
attgtcactctcaacccagaatgtg

SEQ ID NO: 2800414 - DNA, 25 bp, Homo sapien
gctgagagttcataatcagcattat

SEQ ID NO: 2800415 - DNA, 25 bp, Homo sapien
gccaatgtatctgccccttgttttg

SEQ ID NO: 2800416 - DNA, 25 bp, Homo sapien
cgaggagagcaatataagccaatgt

SEQ ID NO: 2800417 - DNA, 25 bp, Homo sapien
cttctcttcgaggagagcaatataa

SEQ ID NO: 2800418 - DNA, 25 bp, Homo sapien
tcagttgtcaaaattggtacatcgc

SEQ ID NO: 2800419 - DNA, 25 bp, Homo sapien
gctgagaaaccatgtcgtcttcagt

SEQ ID NO: 2800420 - DNA, 25 bp, Homo sapien
cgtcttcagttgtcaaaattggtac

SEQ ID NO: 2800421 - DNA, 25 bp, Homo sapien
accatgtcgtcttcagttgtcaaaa

SEQ ID NO: 2800422 - DNA, 25 bp, Homo sapien
tcacaaagagcggttctaaagaaca

SEQ ID NO: 2800423 - DNA, 25 bp, Homo sapien
taatttccagtgatttcgcttgcac

SEQ ID NO: 2800424 - DNA, 25 bp, Homo sapien
gagccaaggtcacggtaagaaacta

SEQ ID NO: 2800425 - DNA, 25 bp, Homo sapien
tcgcttgcactttgaggtattactc

SEQ ID NO: 2800426 - DNA, 25 bp, Homo sapien
ggtgcaccagaaaatttggcataag

SEQ ID NO: 2800427 - DNA, 25 bp, Homo sapien
tatcacattgactttcaagggtgca

SEQ ID NO: 2800428 - DNA, 25 bp, Homo sapien
tctccaggtgttatctatcacattg

SEQ ID NO: 2800429 - DNA, 25 bp, Homo sapien
tcaagggtgcaccagaaaatttggc

SEQ ID NO: 2800430 - DNA, 25 bp, Homo sapien
gcagaaggcgactgatactgaggcc

SEQ ID NO: 2800431 - DNA, 25 bp, Homo sapien
actcggagccaagcggagaagcctt

SEQ ID NO: 2800432 - DNA, 25 bp, Homo sapien
agccacccggctttcgaggactttg

SEQ ID NO: 2800433 - DNA, 25 bp, Homo sapien
cccagacagctttgtgaggcggaca

SEQ ID NO: 2800434 - DNA, 25 bp, Homo sapien
tcgctgtgaaccgatgggagtcccc

SEQ ID NO: 2800435 - DNA, 25 bp, Homo sapien
gtgaaccgatgggagtccccagccg

SEQ ID NO: 2800436 - DNA, 25 bp, Homo sapien
cagggactcgctgtgaaccgatggg

SEQ ID NO: 2800437 - DNA, 25 bp, Homo sapien
gactcgctgtgaaccgatgggagtc

SEQ ID NO: 2800438 - DNA, 25 bp, Homo sapien
ccagcaccacattggactggcctag

SEQ ID NO: 2800439 - DNA, 25 bp, Homo sapien
agcaccacattggactggcctaggg

SEQ ID NO: 2800440 - DNA, 25 bp, Homo sapien
attctgccttctaggtaggtgctcc

SEQ ID NO: 2800441 - DNA, 25 bp, Homo sapien
ccttctaggtaggtgctcccatctg

SEQ ID NO: 2800442 - DNA, 25 bp, Homo sapien
cactgtggcctacgggtttgattta

SEQ ID NO: 2800443 - DNA, 25 bp, Homo sapien
tgggtcccgcagactcagacctttg

SEQ ID NO: 2800444 - DNA, 25 bp, Homo sapien
tctcatctgctatagtctcctgcca

SEQ ID NO: 2800445 - DNA, 25 bp, Homo sapien
tgcaggacactagggtggccccttg

SEQ ID NO: 2800446 - DNA, 25 bp, Homo sapien
tatccctgtgagctgtataacagga

SEQ ID NO: 2800447 - DNA, 25 bp, Homo sapien
gccgatccctatgccttttggaaca

SEQ ID NO: 2800448 - DNA, 25 bp, Homo sapien
tgtttcactggaacaacatcatcct

SEQ ID NO: 2800449 - DNA, 25 bp, Homo sapien
taacaggaaggataagtccatgttc

SEQ ID NO: 2800450 - DNA, 25 bp, Homo sapien
ctagccctctgggcttgggatgttg

SEQ ID NO: 2800451 - DNA, 25 bp, Homo sapien
ggatgttgtggttaataactgtgcc

SEQ ID NO: 2800452 - DNA, 25 bp, Homo sapien
ctgggcttgggatgttgtggttaat

SEQ ID NO: 2800453 - DNA, 25 bp, Homo sapien
atgttgtggttaataactgtgccat

SEQ ID NO: 2800454 - DNA, 25 bp, Homo sapien
ctagcgaatggctgcataaaaatgc

SEQ ID NO: 2800455 - DNA, 25 bp, Homo sapien
tagcgaatggctgcataaaaatgca

SEQ ID NO: 2800456 - DNA, 25 bp, Homo sapien
cattcagcagcatgttggggatcct

SEQ ID NO: 2800457 - DNA, 25 bp, Homo sapien
tggcatgatcaactctgtttcctca

SEQ ID NO: 2800458 - DNA, 25 bp, Homo sapien
atcctgcggctgatggggaacacac

SEQ ID NO: 2800459 - DNA, 25 bp, Homo sapien
gggatcctgcggctgatggggaaca

SEQ ID NO: 2800460 - DNA, 25 bp, Homo sapien
agggtgccctccaacacatctacct

SEQ ID NO: 2800461 - DNA, 25 bp, Homo sapien
catctacctccagcagcacgtggtg

SEQ ID NO: 2800462 - DNA, 25 bp, Homo sapien
tgcagggtgccctccaacacatcta

SEQ ID NO: 2800463 - DNA, 25 bp, Homo sapien
gggtgccctccaacacatctacctc

SEQ ID NO: 2800464 - DNA, 25 bp, Homo sapien
cataagagatttcccgtctgactcc

SEQ ID NO: 2800465 - DNA, 25 bp, Homo sapien
tggtcaactggaaaatcgagtcaga

SEQ ID NO: 2800466 - DNA, 25 bp, Homo sapien
tgtgtaggtcacagaacctcacgcc

SEQ ID NO: 2800467 - DNA, 25 bp, Homo sapien
tggtgaccacgtcgacataagagat

SEQ ID NO: 2800468 - DNA, 25 bp, Homo sapien
cagccccatggtagtgctcagcaag

SEQ ID NO: 2800469 - DNA, 25 bp, Homo sapien
tgctctacgcttatatagagtttac

SEQ ID NO: 2800470 - DNA, 25 bp, Homo sapien
actttgctttcagattgggttctgc

SEQ ID NO: 2800471 - DNA, 25 bp, Homo sapien
gggttctgcttgctcattgtactta

SEQ ID NO: 2800472 - DNA, 25 bp, Homo sapien
aaagagcctttcgttttctcagctg

SEQ ID NO: 2800473 - DNA, 25 bp, Homo sapien
gtcaaaaagatagggctggcaggct

SEQ ID NO: 2800474 - DNA, 25 bp, Homo sapien
tgcgtgagtaggcaagcacattggc

SEQ ID NO: 2800475 - DNA, 25 bp, Homo sapien
aattatgtaagatgtcagagggtcc

SEQ ID NO: 2800476 - DNA, 25 bp, Homo sapien
gcttctcagcttttaccaggacaaa

SEQ ID NO: 2800477 - DNA, 25 bp, Homo sapien
ggctgaaagatcgagacaagtcatt

SEQ ID NO: 2800478 - DNA, 25 bp, Homo sapien
gaggccgaaggatcatttgggtaca

SEQ ID NO: 2800479 - DNA, 25 bp, Homo sapien
gagcgaactgatagcacagccaggg

SEQ ID NO: 2800480 - DNA, 25 bp, Homo sapien
cctcaataaagatgaaaattttaat

SEQ ID NO: 2800481 - DNA, 25 bp, Homo sapien
ctcaataaagatgaaaattttaatt

SEQ ID NO: 2800482 - DNA, 25 bp, Homo sapien
tacctcaataaagatgaaaatttta

SEQ ID NO: 2800483 - DNA, 25 bp, Homo sapien
cctgaagtgtcattgcagcggagct

SEQ ID NO: 2800484 - DNA, 25 bp, Homo sapien
tctttgtctgagtggccggacgcag

SEQ ID NO: 2800485 - DNA, 25 bp, Homo sapien
tggcgcgggcaactcagtgtcattg

SEQ ID NO: 2800486 - DNA, 25 bp, Homo sapien
ggaacttttgacctgtcccctatgc

SEQ ID NO: 2800487 - DNA, 25 bp, Homo sapien
ggactgtcatagtccctccgggaga

SEQ ID NO: 2800488 - DNA, 25 bp, Homo sapien
catgaatggtcacgcttcctgtgca

SEQ ID NO: 2800489 - DNA, 25 bp, Homo sapien
gaaaccttccgtctttggcaggtga

SEQ ID NO: 2800490 - DNA, 25 bp, Homo sapien
gacggcgccatgctgtatgtctacc

SEQ ID NO: 2800491 - DNA, 25 bp, Homo sapien
tcacagaaagccctagttggtagca

SEQ ID NO: 2800492 - DNA, 25 bp, Homo sapien
gctaccaatgtgacatcatcaaaca

SEQ ID NO: 2800493 - DNA, 25 bp, Homo sapien
agccctagttggtagcattttccag

SEQ ID NO: 2800494 - DNA, 25 bp, Homo sapien
gtttccatgatgtaactccgcattg

SEQ ID NO: 2800495 - DNA, 25 bp, Homo sapien
aggcagaagtgactcaccatgcgcc

SEQ ID NO: 2800496 - DNA, 25 bp, Homo sapien
tcatttttaagtctcccagaatccg

SEQ ID NO: 2800497 - DNA, 25 bp, Homo sapien
gaatccgtcctttgaagctacctct

SEQ ID NO: 2800498 - DNA, 25 bp, Homo sapien
gcagaagtgactcaccatgcgcctg

SEQ ID NO: 2800499 - DNA, 25 bp, Homo sapien
cgaacttcatgatgctcaatacaag

SEQ ID NO: 2800500 - DNA, 25 bp, Homo sapien
cgattgcctgtgaggttagtaacac

SEQ ID NO: 2800501 - DNA, 25 bp, Homo sapien
gatgaacaccacacaagatctgaag

SEQ ID NO: 2800502 - DNA, 25 bp, Homo sapien
tgaagccctagggactatctcccag

SEQ ID NO: 2800503 - DNA, 25 bp, Homo sapien
tacacactctcctcgagaaggcgtg

SEQ ID NO: 2800504 - DNA, 25 bp, Homo sapien
gcagggcagactcatcttcaggtgg

SEQ ID NO: 2800505 - DNA, 25 bp, Homo sapien
taggtgtggccctagagcatggtct

SEQ ID NO: 2800506 - DNA, 25 bp, Homo sapien
gaagtcctttagaccagcactgagc

SEQ ID NO: 2800507 - DNA, 25 bp, Homo sapien
gatttacactgaggctgtctggttc

SEQ ID NO: 2800508 - DNA, 25 bp, Homo sapien
tgtagggcttcctaagagtcagcac

SEQ ID NO: 2800509 - DNA, 25 bp, Homo sapien
ccagggactgactgataggagcatc

SEQ ID NO: 2800510 - DNA, 25 bp, Homo sapien
atataacggaaaacactgtagggct

SEQ ID NO: 2800511 - DNA, 25 bp, Homo sapien
ctaggatgccatcacacaggtcagg

SEQ ID NO: 2800512 - DNA, 25 bp, Homo sapien
tcttcctgaacaaccctaggatgcc

SEQ ID NO: 2800513 - DNA, 25 bp, Homo sapien
tagaagtggtatatgctgggttcac

SEQ ID NO: 2800514 - DNA, 25 bp, Homo sapien
tggctcagtccccaaagggcttgga

SEQ ID NO: 2800515 - DNA, 25 bp, Homo sapien
tgtaactaagaagtgcaggcacaga

SEQ ID NO: 2800516 - DNA, 25 bp, Homo sapien
caatcagcttaagtgacagtctcag

SEQ ID NO: 2800517 - DNA, 25 bp, Homo sapien
tgtatgctccccagttaagggcctg

SEQ ID NO: 2800518 - DNA, 25 bp, Homo sapien
cacagagaggcttagtagattttcc

SEQ ID NO: 2800519 - DNA, 25 bp, Homo sapien
tcatttccctgagcaattctgacct

SEQ ID NO: 2800520 - DNA, 25 bp, Homo sapien
tgctctagaagcaaagcattctccg

SEQ ID NO: 2800521 - DNA, 25 bp, Homo sapien
gatagtccccaaggacatgccagga

SEQ ID NO: 2800522 - DNA, 25 bp, Homo sapien
ccaggacttttgtgaccgcaggatg

SEQ ID NO: 2800523 - DNA, 25 bp, Homo sapien
tctactacacgtggcatgaactgat

SEQ ID NO: 2800524 - DNA, 25 bp, Homo sapien
tattattttatcttgatctccccag

SEQ ID NO: 2800525 - DNA, 25 bp, Homo sapien
tattctcgggagttaggaggcttag

SEQ ID NO: 2800526 - DNA, 25 bp, Homo sapien
gaactgatcatcatgtaggccaaag

SEQ ID NO: 2800527 - DNA, 25 bp, Homo sapien
gctgactctggcgtcaccatagaca

SEQ ID NO: 2800528 - DNA, 25 bp, Homo sapien
gaaaacatcatctggtccaacctca

SEQ ID NO: 2800529 - DNA, 25 bp, Homo sapien
cgcagggtacgattttatgaaggct

SEQ ID NO: 2800530 - DNA, 25 bp, Homo sapien
tagacaccacaatgcgtggaggccg

SEQ ID NO: 2800531 - DNA, 25 bp, Homo sapien
gacagatttgcccaattctttctga

SEQ ID NO: 2800532 - DNA, 25 bp, Homo sapien
tcctgggacagatttgcccaattct

SEQ ID NO: 2800533 - DNA, 25 bp, Homo sapien
gatttgcccaattctttctgatgct

SEQ ID NO: 2800534 - DNA, 25 bp, Homo sapien
ctagtcctgggacagatttgcccaa

SEQ ID NO: 2800535 - DNA, 25 bp, Homo sapien
tagacaatcaaaagcttacaagtga

SEQ ID NO: 2800536 - DNA, 25 bp, Homo sapien
caagggttatttaagtgcgtaggca

SEQ ID NO: 2800537 - DNA, 25 bp, Homo sapien
tatagatgtagtagagtcgtaagat

SEQ ID NO: 2800538 - DNA, 25 bp, Homo sapien
gcgtaggcaggttttgtcagacaag

SEQ ID NO: 2800539 - DNA, 25 bp, Homo sapien
gctggtggaagcttccgtgggtctg

SEQ ID NO: 2800540 - DNA, 25 bp, Homo sapien
ctaaggctagactaggggagaacgc

SEQ ID NO: 2800541 - DNA, 25 bp, Homo sapien
gcacgacagcacaagggcaaagcct

SEQ ID NO: 2800542 - DNA, 25 bp, Homo sapien
gggagaacgcgcctgagagaaagga

SEQ ID NO: 2800543 - DNA, 25 bp, Homo sapien
agagtttaattctatttgattccta

SEQ ID NO: 2800544 - DNA, 25 bp, Homo sapien
taattctatttgattcctatcctgc

SEQ ID NO: 2800545 - DNA, 25 bp, Homo sapien
aattctatttgattcctatcctgcc

SEQ ID NO: 2800546 - DNA, 25 bp, Homo sapien
attctatttgattcctatcctgcca

SEQ ID NO: 2800547 - DNA, 25 bp, Homo sapien
tgcggacatagcttgccacagcatg

SEQ ID NO: 2800548 - DNA, 25 bp, Homo sapien
caaatggagtccgttcaggtttctc

SEQ ID NO: 2800549 - DNA, 25 bp, Homo sapien
gctatcaaccagacaaaaacacagg

SEQ ID NO: 2800550 - DNA, 25 bp, Homo sapien
cacaggggcttagggtaatatcaac

SEQ ID NO: 2800551 - DNA, 25 bp, Homo sapien
gaacaatggttttgccttgagatgc

SEQ ID NO: 2800552 - DNA, 25 bp, Homo sapien
acccgattgtagaaaaccacactgg

SEQ ID NO: 2800553 - DNA, 25 bp, Homo sapien
caagttagggtatcacaagtgtgtc

SEQ ID NO: 2800554 - DNA, 25 bp, Homo sapien
aaggcctctgtctcataccgaacgg

SEQ ID NO: 2800555 - DNA, 25 bp, Homo sapien
gctaagttacaaggagtgggcccaa

SEQ ID NO: 2800556 - DNA, 25 bp, Homo sapien
caagataacccgatgttcccaggat

SEQ ID NO: 2800557 - DNA, 25 bp, Homo sapien
cgtcttcacctaaccaaaatgttgg

SEQ ID NO: 2800558 - DNA, 25 bp, Homo sapien
taaatcatcagatcacggctgggtg

SEQ ID NO: 2800559 - DNA, 25 bp, Homo sapien
tttgattagggaaagtggagccacc

SEQ ID NO: 2800560 - DNA, 25 bp, Homo sapien
catccaaggttgtctctccaatgac

SEQ ID NO: 2800561 - DNA, 25 bp, Homo sapien
tgccaaggaccatcactgctagggt

SEQ ID NO: 2800562 - DNA, 25 bp, Homo sapien
ggtatagctcaaatgcaccccaggt

SEQ ID NO: 2800563 - DNA, 25 bp, Homo sapien
aatcccagttgcatctctgagtcca

SEQ ID NO: 2800564 - DNA, 25 bp, Homo sapien
gatagaagatgttaattccacacac

SEQ ID NO: 2800565 - DNA, 25 bp, Homo sapien
aaggagtccttaatgagttcgtcac

SEQ ID NO: 2800566 - DNA, 25 bp, Homo sapien
aatagaggtcaagtgcagttgccct

SEQ ID NO: 2800567 - DNA, 25 bp, Homo sapien
catcccctcttgcaaaaagggtatt

SEQ ID NO: 2800568 - DNA, 25 bp, Homo sapien
gaggccttaagtcttcagcattgat

SEQ ID NO: 2800569 - DNA, 25 bp, Homo sapien
tttcaatgctaaaaccaggctttcc

SEQ ID NO: 2800570 - DNA, 25 bp, Homo sapien
ggccagagatgtttccatcccctct

SEQ ID NO: 2800571 - DNA, 25 bp, Homo sapien
atcactcactagttggatgaccttg

SEQ ID NO: 2800572 - DNA, 25 bp, Homo sapien
gactttagaagtagactgacctgga

SEQ ID NO: 2800573 - DNA, 25 bp, Homo sapien
ttcagtccattacaccaacatttgg

SEQ ID NO: 2800574 - DNA, 25 bp, Homo sapien
ctacttggagtacctaagaacatgg

SEQ ID NO: 2800575 - DNA, 25 bp, Homo sapien
taggacaaattctagggatgacctc

SEQ ID NO: 2800576 - DNA, 25 bp, Homo sapien
catatggtgtaaattgcaatctctc

SEQ ID NO: 2800577 - DNA, 25 bp, Homo sapien
aatattagctcacacgatcacaacg

SEQ ID NO: 2800578 - DNA, 25 bp, Homo sapien
catctgcaggccgatctgatgtcca

SEQ ID NO: 2800579 - DNA, 25 bp, Homo sapien
taaaatcaccataattccaacaccc

SEQ ID NO: 2800580 - DNA, 25 bp, Homo sapien
cacttctgtaagttaggatatactg

SEQ ID NO: 2800581 - DNA, 25 bp, Homo sapien
gaagattaaaatcaccataattcca

SEQ ID NO: 2800582 - DNA, 25 bp, Homo sapien
ctgacagcctatgtgacagggaaaa

SEQ ID NO: 2800583 - DNA, 25 bp, Homo sapien
tcagattgacattacacagcaatag

SEQ ID NO: 2800584 - DNA, 25 bp, Homo sapien
gtaacacatagaagactgaagagca

SEQ ID NO: 2800585 - DNA, 25 bp, Homo sapien
attgctacatgtttgggaccaagta

SEQ ID NO: 2800586 - DNA, 25 bp, Homo sapien
aataaaaattggcaccagaacatga

SEQ ID NO: 2800587 - DNA, 25 bp, Homo sapien
caagtaaaacgtggcctctggtcaa

SEQ ID NO: 2800588 - DNA, 25 bp, Homo sapien
ggaattgcttctcaaaccctcatgg

SEQ ID NO: 2800589 - DNA, 25 bp, Homo sapien
ccccagagagggagcgtatcttaaa

SEQ ID NO: 2800590 - DNA, 25 bp, Homo sapien
gcaaaggcagtttatagttcccagg

SEQ ID NO: 2800591 - DNA, 25 bp, Homo sapien
aaatgtagacaagattacatcaaac

SEQ ID NO: 2800592 - DNA, 25 bp, Homo sapien
ccacaaagttaggagacaacctaca

SEQ ID NO: 2800593 - DNA, 25 bp, Homo sapien
aaactaaagctaggcaacaaaaatg

SEQ ID NO: 2800594 - DNA, 25 bp, Homo sapien
cagcaaaggaaaccacaaagttagg

SEQ ID NO: 2800595 - DNA, 25 bp, Homo sapien
ccaagaagtcaaggccaaaataagc

SEQ ID NO: 2800596 - DNA, 25 bp, Homo sapien
ttgagtccaagaagtcaaggccaaa

SEQ ID NO: 2800597 - DNA, 25 bp, Homo sapien
gggcgaccaagcaagactctaactc

SEQ ID NO: 2800598 - DNA, 25 bp, Homo sapien
caaaataagccatgatgtcactgta

SEQ ID NO: 2800599 - DNA, 25 bp, Homo sapien
gactccatgaaacttgagagacctg

SEQ ID NO: 2800600 - DNA, 25 bp, Homo sapien
gattaacatctgaaggcaacatctc

SEQ ID NO: 2800601 - DNA, 25 bp, Homo sapien
taaaggatcagcatagactccatga

SEQ ID NO: 2800602 - DNA, 25 bp, Homo sapien
tctctgcaaaacaactaacttgagt

SEQ ID NO: 2800603 - DNA, 25 bp, Homo sapien
tcttgcatcagaccaaccggcagaa

SEQ ID NO: 2800604 - DNA, 25 bp, Homo sapien
cagctggaccttgactgcgcgtaag

SEQ ID NO: 2800605 - DNA, 25 bp, Homo sapien
tcaaaggcccaacattacagagcgc

SEQ ID NO: 2800606 - DNA, 25 bp, Homo sapien
tccagtcaggtaacatgccgcggta

SEQ ID NO: 2800607 - DNA, 25 bp, Homo sapien
gatgccagcatgaacctgaacggta

SEQ ID NO: 2800608 - DNA, 25 bp, Homo sapien
cattattacaaagatgtgggaccca

SEQ ID NO: 2800609 - DNA, 25 bp, Homo sapien
gatccagaacacaaaacgacttccg

SEQ ID NO: 2800610 - DNA, 25 bp, Homo sapien
tgatagccctccattgcttaggcag

SEQ ID NO: 2800611 - DNA, 25 bp, Homo sapien
tgtgaaaagatgctgtgccccaaat

SEQ ID NO: 2800612 - DNA, 25 bp, Homo sapien
ttctattccgaggatgagaatgact

SEQ ID NO: 2800613 - DNA, 25 bp, Homo sapien
caaaagatggcactttccaggctgt

SEQ ID NO: 2800614 - DNA, 25 bp, Homo sapien
aaagtaaaaagctaatcaggagatt

SEQ ID NO: 2800615 - DNA, 25 bp, Homo sapien
tacaacagcacgcatatccagcagg

SEQ ID NO: 2800616 - DNA, 25 bp, Homo sapien
gaccagctcccgctgaagaagctct

SEQ ID NO: 2800617 - DNA, 25 bp, Homo sapien
gaagctctcgatgttggcactttcg

SEQ ID NO: 2800618 - DNA, 25 bp, Homo sapien
gagcgaccagcgtacacaggtacaa

SEQ ID NO: 2800619 - DNA, 25 bp, Homo sapien
cctagccgcggtcaaagcaggaata

SEQ ID NO: 2800620 - DNA, 25 bp, Homo sapien
gacttgtgctaccatcaacactacc

SEQ ID NO: 2800621 - DNA, 25 bp, Homo sapien
caacggctttcaatgtattcataca

SEQ ID NO: 2800622 - DNA, 25 bp, Homo sapien
tgtggaaacaagacacctagccgcg

SEQ ID NO: 2800623 - DNA, 25 bp, Homo sapien
agaacacgaagtggaagtaggagta

SEQ ID NO: 2800624 - DNA, 25 bp, Homo sapien
cataaatgacccgtggtccctcctt

SEQ ID NO: 2800625 - DNA, 25 bp, Homo sapien
gacggtgcctttcttctcgtcataa

SEQ ID NO: 2800626 - DNA, 25 bp, Homo sapien
taggagtagatgtagacggtgcctt

SEQ ID NO: 2800627 - DNA, 25 bp, Homo sapien
tctccaccaggactgaagcaaaaac

SEQ ID NO: 2800628 - DNA, 25 bp, Homo sapien
tccaccaggactgaagcaaaaacaa

SEQ ID NO: 2800629 - DNA, 25 bp, Homo sapien
cctctccaccaggactgaagcaaaa

SEQ ID NO: 2800630 - DNA, 25 bp, Homo sapien
tgaagcaaaaacaacagcgagctat

SEQ ID NO: 2800631 - DNA, 25 bp, Homo sapien
aggagctgcgtatcgcccctgcaga

SEQ ID NO: 2800632 - DNA, 25 bp, Homo sapien
agagcgtcagaactcgatcttgttg

SEQ ID NO: 2800633 - DNA, 25 bp, Homo sapien
gtatcgcccctgcagagcgtcagaa

SEQ ID NO: 2800634 - DNA, 25 bp, Homo sapien
cccctgcagagcgtcagaactcgat

SEQ ID NO: 2800635 - DNA, 25 bp, Homo sapien
aatggctcgatgtcggctcaccaca

SEQ ID NO: 2800636 - DNA, 25 bp, Homo sapien
ctgtagtgcaatggctcgatgtcgg

SEQ ID NO: 2800637 - DNA, 25 bp, Homo sapien
tgggttcaaacgattctcctgtctc

SEQ ID NO: 2800638 - DNA, 25 bp, Homo sapien
tcaccacaacctctgtcttctgggt

SEQ ID NO: 2800639 - DNA, 25 bp, Homo sapien
tatcagagaactcccacaagtggac

SEQ ID NO: 2800640 - DNA, 25 bp, Homo sapien
cagcaatgattcctgggtgcaatgg

SEQ ID NO: 2800641 - DNA, 25 bp, Homo sapien
tacaactttacaagagtggacccca

SEQ ID NO: 2800642 - DNA, 25 bp, Homo sapien
tggaccaaggttagggcttacatgg

SEQ ID NO: 2800643 - DNA, 25 bp, Homo sapien
tgggaatatcagaccagcccttacc

SEQ ID NO: 2800644 - DNA, 25 bp, Homo sapien
tgtggtaaccattatgcagcaggct

SEQ ID NO: 2800645 - DNA, 25 bp, Homo sapien
cactatggtacctcagtcctgtaag

SEQ ID NO: 2800646 - DNA, 25 bp, Homo sapien
tttatcatctctcactcaagggcca

SEQ ID NO: 2800647 - DNA, 25 bp, Homo sapien
cagtccattctgcaacaacaaggag

SEQ ID NO: 2800648 - DNA, 25 bp, Homo sapien
ctctaaaaggtctgtgtccccgttg

SEQ ID NO: 2800649 - DNA, 25 bp, Homo sapien
gcctgcttcctatattgtaggtact

SEQ ID NO: 2800650 - DNA, 25 bp, Homo sapien
ggtactctgcgaacaacttaggaat

SEQ ID NO: 2800651 - DNA, 25 bp, Homo sapien
cctcaaatggttgcagcctcacagc

SEQ ID NO: 2800652 - DNA, 25 bp, Homo sapien
caaatatgagttcacgctcttcgcc

SEQ ID NO: 2800653 - DNA, 25 bp, Homo sapien
gcaacggtgctgcaacatgccatat

SEQ ID NO: 2800654 - DNA, 25 bp, Homo sapien
ggtatagcaaactactattcgacca

SEQ ID NO: 2800655 - DNA, 25 bp, Homo sapien
tacaggtcttgaccaaagtcaggca

SEQ ID NO: 2800656 - DNA, 25 bp, Homo sapien
gtcaggcacacagattgtaacattt

SEQ ID NO: 2800657 - DNA, 25 bp, Homo sapien
ccaagttttcatctctgtacaggtc

SEQ ID NO: 2800658 - DNA, 25 bp, Homo sapien
tacatccgattaagaggctggtccc

SEQ ID NO: 2800659 - DNA, 25 bp, Homo sapien
gtcatcacagtcaagtacaaaggcc

SEQ ID NO: 2800660 - DNA, 25 bp, Homo sapien
tggaaacttctactctacaggctgt

SEQ ID NO: 2800661 - DNA, 25 bp, Homo sapien
caaaggccagttgtaacgcacagaa

SEQ ID NO: 2800662 - DNA, 25 bp, Homo sapien
tgtggtgtacctccttagaacagtg

SEQ ID NO: 2800663 - DNA, 25 bp, Homo sapien
gaggcttacaggaaggtgaacacca

SEQ ID NO: 2800664 - DNA, 25 bp, Homo sapien
taatgactgactaatggctggcagc

SEQ ID NO: 2800665 - DNA, 25 bp, Homo sapien
gaatggtagttgatcaccaagggcc

SEQ ID NO: 2800666 - DNA, 25 bp, Homo sapien
tccacatgttaggaacccagccaca

SEQ ID NO: 2800667 - DNA, 25 bp, Homo sapien
ccttgtaaattctgcatattgctcc

SEQ ID NO: 2800668 - DNA, 25 bp, Homo sapien
gattaacatagttccatttgtctgg

SEQ ID NO: 2800669 - DNA, 25 bp, Homo sapien
gctcccctataagacacagtttgca

SEQ ID NO: 2800670 - DNA, 25 bp, Homo sapien
gactggtgtgaaatgacatctagtt

SEQ ID NO: 2800671 - DNA, 25 bp, Homo sapien
ccagtaaatcatggatctgtgctca

SEQ ID NO: 2800672 - DNA, 25 bp, Homo sapien
tgtctgtcctacacaccaggaagaa

SEQ ID NO: 2800673 - DNA, 25 bp, Homo sapien
gatcagtctataaaccaggcagtcc

SEQ ID NO: 2800674 - DNA, 25 bp, Homo sapien
aggcagtccgacttcaaagctcatg

SEQ ID NO: 2800675 - DNA, 25 bp, Homo sapien
ggtaggtgacatagcagcttatgac

SEQ ID NO: 2800676 - DNA, 25 bp, Homo sapien
tagcagcttatgacccctgattgta

SEQ ID NO: 2800677 - DNA, 25 bp, Homo sapien
tatgacccctgattgtaagagcccc

SEQ ID NO: 2800678 - DNA, 25 bp, Homo sapien
ctgattgtaagagccccgagtgtgg

SEQ ID NO: 2800679 - DNA, 25 bp, Homo sapien
ctaaaaaacctgatagtccccatga

SEQ ID NO: 2800680 - DNA, 25 bp, Homo sapien
aagtgacaagagacagacaacaggt

SEQ ID NO: 2800681 - DNA, 25 bp, Homo sapien
aagaaagcacatgcctaaaaaacct

SEQ ID NO: 2800682 - DNA, 25 bp, Homo sapien
ctgaaaagtgacaagagacagacaa

SEQ ID NO: 2800683 - DNA, 25 bp, Homo sapien
aatacatgatgagcgtcaccagggc

SEQ ID NO: 2800684 - DNA, 25 bp, Homo sapien
cagggaggcgtaccacagcttgtta

SEQ ID NO: 2800685 - DNA, 25 bp, Homo sapien
ctccagtggcaatggaatacatgat

SEQ ID NO: 2800686 - DNA, 25 bp, Homo sapien
taccaatgatataagcaggcacagg

SEQ ID NO: 2800687 - DNA, 25 bp, Homo sapien
agacaagtcaacgaagcccaccatt

SEQ ID NO: 2800688 - DNA, 25 bp, Homo sapien
accatccctcaggcagtaactaatg

SEQ ID NO: 2800689 - DNA, 25 bp, Homo sapien
gcggtaacagtcaccatccctcagg

SEQ ID NO: 2800690 - DNA, 25 bp, Homo sapien
ctgcggtaacagtcaccatccctca

SEQ ID NO: 2800691 - DNA, 25 bp, Homo sapien
caccatccctcaggcagtaactaat

SEQ ID NO: 2800692 - DNA, 25 bp, Homo sapien
ctacaggccacaggcactggtaccc

SEQ ID NO: 2800693 - DNA, 25 bp, Homo sapien
acaggccacaggcactggtacccag

SEQ ID NO: 2800694 - DNA, 25 bp, Homo sapien
tacaggccacaggcactggtaccca

SEQ ID NO: 2800695 - DNA, 25 bp, Homo sapien
tgctcatcaaagctagaaggttctg

SEQ ID NO: 2800696 - DNA, 25 bp, Homo sapien
ggaaacttcttgactcaagctgaga

SEQ ID NO: 2800697 - DNA, 25 bp, Homo sapien
tctggtaaatatggaaacttcttga

SEQ ID NO: 2800698 - DNA, 25 bp, Homo sapien
tagcagtgattatgctcatcaaagc

SEQ ID NO: 2800699 - DNA, 25 bp, Homo sapien
ggcccatgacctttctatcctactg

SEQ ID NO: 2800700 - DNA, 25 bp, Homo sapien
tgtggctaattcacaccactggttg

SEQ ID NO: 2800701 - DNA, 25 bp, Homo sapien
aaacaaaagggtactgaaatctgca

SEQ ID NO: 2800702 - DNA, 25 bp, Homo sapien
aggagatcgagacccgtacgagcag

SEQ ID NO: 2800703 - DNA, 25 bp, Homo sapien
tcttgttccacttatgtgcaaactc

SEQ ID NO: 2800704 - DNA, 25 bp, Homo sapien
tgtgcaaactccacgagcaggagga

SEQ ID NO: 2800705 - DNA, 25 bp, Homo sapien
aatgaagaggaagcctccgacggct

SEQ ID NO: 2800706 - DNA, 25 bp, Homo sapien
tgccaatgaagaggaagcctccgac

SEQ ID NO: 2800707 - DNA, 25 bp, Homo sapien
catcacatgggttccaatttgtcta

SEQ ID NO: 2800708 - DNA, 25 bp, Homo sapien
caaggactcggttcgacttctggct

SEQ ID NO: 2800709 - DNA, 25 bp, Homo sapien
caatgaccagtaaagaaacaaggtt

SEQ ID NO: 2800710 - DNA, 25 bp, Homo sapien
ggctctgccacaaagacgctataac

SEQ ID NO: 2800711 - DNA, 25 bp, Homo sapien
aaaggtgtcctgatctggaatgaag

SEQ ID NO: 2800712 - DNA, 25 bp, Homo sapien
ggaatgaagaaagctcctgagcaca

SEQ ID NO: 2800713 - DNA, 25 bp, Homo sapien
aatgaagaaagctcctgagcacatg

SEQ ID NO: 2800714 - DNA, 25 bp, Homo sapien
ggtgtcctgatctggaatgaagaaa

SEQ ID NO: 2800715 - DNA, 25 bp, Homo sapien
tcaacaatttcaactagaagaaggg

SEQ ID NO: 2800716 - DNA, 25 bp, Homo sapien
tagaagaagggcagtcacagtgtct

SEQ ID NO: 2800717 - DNA, 25 bp, Homo sapien
gaggcaaccatgtgggtaagtatca

SEQ ID NO: 2800718 - DNA, 25 bp, Homo sapien
tgggtaagtatcaattccaccttcc

SEQ ID NO: 2800719 - DNA, 25 bp, Homo sapien
ctatacacggcagaatatcccacca

SEQ ID NO: 2800720 - DNA, 25 bp, Homo sapien
ccaaaacagactctatacacggcag

SEQ ID NO: 2800721 - DNA, 25 bp, Homo sapien
attccaaaacagactctatacacgg

SEQ ID NO: 2800722 - DNA, 25 bp, Homo sapien
agccattccaaaacagactctatac

SEQ ID NO: 2800723 - DNA, 25 bp, Homo sapien
caccagctttaatgcctttacacat

SEQ ID NO: 2800724 - DNA, 25 bp, Homo sapien
tcagagacttcttttactatccacc

SEQ ID NO: 2800725 - DNA, 25 bp, Homo sapien
tacatacactcatatcatactatgc

SEQ ID NO: 2800726 - DNA, 25 bp, Homo sapien
tcttttactatccacccaaaatgtc

SEQ ID NO: 2800727 - DNA, 25 bp, Homo sapien
gagtaaacaattggtgggtagagta

SEQ ID NO: 2800728 - DNA, 25 bp, Homo sapien
caaggtgaacaagctagcaggattc

SEQ ID NO: 2800729 - DNA, 25 bp, Homo sapien
caccacagggtgaaaggaatgtgcc

SEQ ID NO: 2800730 - DNA, 25 bp, Homo sapien
gaatgtgcctgctaagggtgttacc

SEQ ID NO: 2800731 - DNA, 25 bp, Homo sapien
tgggcaaagaacctccaaggtgaac

SEQ ID NO: 2800732 - DNA, 25 bp, Homo sapien
cactacaaaggcgagagctgctaca

SEQ ID NO: 2800733 - DNA, 25 bp, Homo sapien
taacgcatataagaccatggagggt

SEQ ID NO: 2800734 - DNA, 25 bp, Homo sapien
gacgtttcccttttgagagagatgg

SEQ ID NO: 2800735 - DNA, 25 bp, Homo sapien
gggtcaaatccagctagcctcctag

SEQ ID NO: 2800736 - DNA, 25 bp, Homo sapien
catcttgtgagccacggttgttgac

SEQ ID NO: 2800737 - DNA, 25 bp, Homo sapien
tacatgaagcgggtgctgagggact

SEQ ID NO: 2800738 - DNA, 25 bp, Homo sapien
cagaggacgacgaccagaatgaagt

SEQ ID NO: 2800739 - DNA, 25 bp, Homo sapien
gacatcatgatgcagcagaggacga

SEQ ID NO: 2800740 - DNA, 25 bp, Homo sapien
ctggggcagcaatcacagcagagag

SEQ ID NO: 2800741 - DNA, 25 bp, Homo sapien
caagtgcaccagaagcttcaagagt

SEQ ID NO: 2800742 - DNA, 25 bp, Homo sapien
ttcaagagtttagcggcgagtgagc

SEQ ID NO: 2800743 - DNA, 25 bp, Homo sapien
taaatagtagcttatcaaccggcag

SEQ ID NO: 2800744 - DNA, 25 bp, Homo sapien
cagtgccagctagatgcccgtatgc

SEQ ID NO: 2800745 - DNA, 25 bp, Homo sapien
tgaaattcatcttcttcttccactt

SEQ ID NO: 2800746 - DNA, 25 bp, Homo sapien
attcatcttcttcttccacttctag

SEQ ID NO: 2800747 - DNA, 25 bp, Homo sapien
ccttgaaattcatcttcttcttcca

SEQ ID NO: 2800748 - DNA, 25 bp, Homo sapien
gaaattcatcttcttcttccacttc

SEQ ID NO: 2800749 - DNA, 25 bp, Homo sapien
ccctgctggatgagtgcaatgagca

SEQ ID NO: 2800750 - DNA, 25 bp, Homo sapien
cacacgagtgtgtacgcaagggcag

SEQ ID NO: 2800751 - DNA, 25 bp, Homo sapien
cttaaaagagtagggttatcccatg

SEQ ID NO: 2800752 - DNA, 25 bp, Homo sapien
caaagccttgatggtgctgacagag

SEQ ID NO: 2800753 - DNA, 25 bp, Homo sapien
tctgcgagaacacagcacagccttg

SEQ ID NO: 2800754 - DNA, 25 bp, Homo sapien
tgctttctgcgagaacacagcacag

SEQ ID NO: 2800755 - DNA, 25 bp, Homo sapien
ttgggcatcccaccaccgttccgaa

SEQ ID NO: 2800756 - DNA, 25 bp, Homo sapien
cattcccaatgctttctgcgagaac

SEQ ID NO: 2800757 - DNA, 25 bp, Homo sapien
gaactcacctacattgaacattcat

SEQ ID NO: 2800758 - DNA, 25 bp, Homo sapien
ttgagtaactaaaagtgatcaatat

SEQ ID NO: 2800759 - DNA, 25 bp, Homo sapien
cattgtttaagtcaacactaggaaa

SEQ ID NO: 2800760 - DNA, 25 bp, Homo sapien
cattgaacattcattgtttaagtca

SEQ ID NO: 2800761 - DNA, 25 bp, Homo sapien
gagcttgcagctctagcatccccaa

SEQ ID NO: 2800762 - DNA, 25 bp, Homo sapien
tccaggagcttgcagctctagcatc

SEQ ID NO: 2800763 - DNA, 25 bp, Homo sapien
gggagatttacctagttgccagctc

SEQ ID NO: 2800764 - DNA, 25 bp, Homo sapien
gatttacctagttgccagctctcct

SEQ ID NO: 2800765 - DNA, 25 bp, Homo sapien
tccaggctagagtgccatggcagct

SEQ ID NO: 2800766 - DNA, 25 bp, Homo sapien
caggctagagtgccatggcagctcg

SEQ ID NO: 2800767 - DNA, 25 bp, Homo sapien
gctagagtgccatggcagctcggct

SEQ ID NO: 2800768 - DNA, 25 bp, Homo sapien
ggctagagtgccatggcagctcggc

SEQ ID NO: 2800769 - DNA, 25 bp, Homo sapien
taatgtaccaacgacatgacaagat

SEQ ID NO: 2800770 - DNA, 25 bp, Homo sapien
ggtaatgtaccaacgacatgacaag

SEQ ID NO: 2800771 - DNA, 25 bp, Homo sapien
tgtaccaacgacatgacaagattta

SEQ ID NO: 2800772 - DNA, 25 bp, Homo sapien
tgggtaatgtaccaacgacatgaca

SEQ ID NO: 2800773 - DNA, 25 bp, Homo sapien
gagcacaattgggtcagaagaacag

SEQ ID NO: 2800774 - DNA, 25 bp, Homo sapien
caggatacaggcaagtcactacagc

SEQ ID NO: 2800775 - DNA, 25 bp, Homo sapien
gaagaacagaagacccttccagcgc

SEQ ID NO: 2800776 - DNA, 25 bp, Homo sapien
tattatggtacaagaaatcgagcac

SEQ ID NO: 2800777 - DNA, 25 bp, Homo sapien
gaattgagcttcgtggtaatacaca

SEQ ID NO: 2800778 - DNA, 25 bp, Homo sapien
gttacaactttccatccaattccag

SEQ ID NO: 2800779 - DNA, 25 bp, Homo sapien
tgctcaaaagcctaactctccaaac

SEQ ID NO: 2800780 - DNA, 25 bp, Homo sapien
acaagtgcactgagtcacaccaaac

SEQ ID NO: 2800781 - DNA, 25 bp, Homo sapien
tcaacatggcgaaatcccattttta

SEQ ID NO: 2800782 - DNA, 25 bp, Homo sapien
tacaaaaattaggccaggcgcagtg

SEQ ID NO: 2800783 - DNA, 25 bp, Homo sapien
aaatacaaaaattaggccaggcgca

SEQ ID NO: 2800784 - DNA, 25 bp, Homo sapien
gtcaacatggcgaaatcccattttt

SEQ ID NO: 2800785 - DNA, 25 bp, Homo sapien
gagaacccctggtctttaggcaaca

SEQ ID NO: 2800786 - DNA, 25 bp, Homo sapien
aatacctagagtgatgttggcttcc

SEQ ID NO: 2800787 - DNA, 25 bp, Homo sapien
tacactgaaccctgacacactgcat

SEQ ID NO: 2800788 - DNA, 25 bp, Homo sapien
caatccttgtcgatctcagtcgtgg

SEQ ID NO: 2800789 - DNA, 25 bp, Homo sapien
aacactgggtctttacaattaggca

SEQ ID NO: 2800790 - DNA, 25 bp, Homo sapien
tctgaggctctaactggtgactaca

SEQ ID NO: 2800791 - DNA, 25 bp, Homo sapien
caatgcggcttgactcagaacacta

SEQ ID NO: 2800792 - DNA, 25 bp, Homo sapien
aaagtaaagcttccgtgtctcatag

SEQ ID NO: 2800793 - DNA, 25 bp, Homo sapien
tcgtctcagtcgtcaaaagcctcaa

SEQ ID NO: 2800794 - DNA, 25 bp, Homo sapien
cctggtaaggtggtgaccattctca

SEQ ID NO: 2800795 - DNA, 25 bp, Homo sapien
taaaaagtgtcgcatcatattggag

SEQ ID NO: 2800796 - DNA, 25 bp, Homo sapien
accaggacagatgcccctaaagagc

SEQ ID NO: 2800797 - DNA, 25 bp, Homo sapien
ccgaaacgctgataatccacatgta

SEQ ID NO: 2800798 - DNA, 25 bp, Homo sapien
cattaaaactctgtaccgaaacgct

SEQ ID NO: 2800799 - DNA, 25 bp, Homo sapien
gaaccaggatgctccctagagtctg

SEQ ID NO: 2800800 - DNA, 25 bp, Homo sapien
tctgattcgttcgtgaaaacactcc

SEQ ID NO: 2800801 - DNA, 25 bp, Homo sapien
cctgcgcccggtagtttggaagtca

SEQ ID NO: 2800802 - DNA, 25 bp, Homo sapien
tagcaaaggagacggtgcctaaacc

SEQ ID NO: 2800803 - DNA, 25 bp, Homo sapien
gaagtcaggcttcgagacattctca

SEQ ID NO: 2800804 - DNA, 25 bp, Homo sapien
gctcgactacgagatgccaagcgca

SEQ ID NO: 2800805 - DNA, 25 bp, Homo sapien
tggactcctggcccggttctccgat

SEQ ID NO: 2800806 - DNA, 25 bp, Homo sapien
actcctggcccggttctccgatctg

SEQ ID NO: 2800807 - DNA, 25 bp, Homo sapien
tcctggcccggttctccgatctgac

SEQ ID NO: 2800808 - DNA, 25 bp, Homo sapien
tggcccggttctccgatctgacaac

SEQ ID NO: 2800809 - DNA, 25 bp, Homo sapien
ggcccgcacagcactgagctgacat

SEQ ID NO: 2800810 - DNA, 25 bp, Homo sapien
ctggcccgcacagcactgagctgac

SEQ ID NO: 2800811 - DNA, 25 bp, Homo sapien
tggcccgcacagcactgagctgaca

SEQ ID NO: 2800812 - DNA, 25 bp, Homo sapien
ctcgcgcctcgagcgctgggctcag

SEQ ID NO: 2800813 - DNA, 25 bp, Homo sapien
cgcagctcacacttgaacgaagatc

SEQ ID NO: 2800814 - DNA, 25 bp, Homo sapien
atcagcctcggcgaagcgcctaggc

SEQ ID NO: 2800815 - DNA, 25 bp, Homo sapien
gcggcggccaatgccgaaggcgcgc

SEQ ID NO: 2800816 - DNA, 25 bp, Homo sapien
ggacgatggaggggctggactcact

SEQ ID NO: 2800817 - DNA, 25 bp, Homo sapien
atggaggggctggactcactgtact

SEQ ID NO: 2800818 - DNA, 25 bp, Homo sapien
ggactcactgtactcctgcttgctg

SEQ ID NO: 2800819 - DNA, 25 bp, Homo sapien
gggctggactcactgtactcctgct

SEQ ID NO: 2800820 - DNA, 25 bp, Homo sapien
tcttgatcttcattgcgctgggcgc

SEQ ID NO: 2800821 - DNA, 25 bp, Homo sapien
ctgcatcctgttggtgatgctaggg

SEQ ID NO: 2800822 - DNA, 25 bp, Homo sapien
cgctgggcgccagggcggtaatctc

SEQ ID NO: 2800823 - DNA, 25 bp, Homo sapien
catcctgttggtgatgctagggtac

SEQ ID NO: 2800824 - DNA, 25 bp, Homo sapien
ttgtagatgtccacatccgacttca

SEQ ID NO: 2800825 - DNA, 25 bp, Homo sapien
gttggcatacaggtctttgtagatg

SEQ ID NO: 2800826 - DNA, 25 bp, Homo sapien
tctttgtagatgtccacatccgact

SEQ ID NO: 2800827 - DNA, 25 bp, Homo sapien
gtctttgtagatgtccacatccgac

SEQ ID NO: 2800828 - DNA, 25 bp, Homo sapien
ccacgaaggaagtttggaagagtgc

SEQ ID NO: 2800829 - DNA, 25 bp, Homo sapien
cccacgaaggaagtttggaagagtg

SEQ ID NO: 2800830 - DNA, 25 bp, Homo sapien
ccagggggatgtagcacagcctttt

SEQ ID NO: 2800831 - DNA, 25 bp, Homo sapien
tccagggggatgtagcacagccttt

SEQ ID NO: 2800832 - DNA, 25 bp, Homo sapien
tagtcagtcaggttccggccagtca

SEQ ID NO: 2800833 - DNA, 25 bp, Homo sapien
aggtagtcagtcaggttccggccag

SEQ ID NO: 2800834 - DNA, 25 bp, Homo sapien
ggttccggccagtcaggtccagaca

SEQ ID NO: 2800835 - DNA, 25 bp, Homo sapien
gttccggccagtcaggtccagacac

SEQ ID NO: 2800836 - DNA, 25 bp, Homo sapien
ccatcacaatgccagctatggccag

SEQ ID NO: 2800837 - DNA, 25 bp, Homo sapien
ccacgtatatggctggggtgtgaag

SEQ ID NO: 2800838 - DNA, 25 bp, Homo sapien
cggagtccatcacaatgccagctat

SEQ ID NO: 2800839 - DNA, 25 bp, Homo sapien
atgccagctatggccagaggcgtac

SEQ ID NO: 2800840 - DNA, 25 bp, Homo sapien
atctgtgaccttacccccaaccctg

SEQ ID NO: 2800841 - DNA, 25 bp, Homo sapien
aaaaattattctgccttgggatcct

SEQ ID NO: 2800842 - DNA, 25 bp, Homo sapien
attattctgccttgggatcctgttg

SEQ ID NO: 2800843 - DNA, 25 bp, Homo sapien
agaaaaattattctgccttgggatc

SEQ ID NO: 2800844 - DNA, 25 bp, Homo sapien
gggcctcatccacataggagtcctt

SEQ ID NO: 2800845 - DNA, 25 bp, Homo sapien
ctcatccacataggagtccttctga

SEQ ID NO: 2800846 - DNA, 25 bp, Homo sapien
agttggtgatgatgctatgctcaat

SEQ ID NO: 2800847 - DNA, 25 bp, Homo sapien
ttggtgatgatgctatgctcaatgg

SEQ ID NO: 2800848 - DNA, 25 bp, Homo sapien
ggtgccatgatgaaggggaaggcag

SEQ ID NO: 2800849 - DNA, 25 bp, Homo sapien
tgccatgatgaaggggaaggcagcc

SEQ ID NO: 2800850 - DNA, 25 bp, Homo sapien
atgatgaaggggaaggcagcccggg

SEQ ID NO: 2800851 - DNA, 25 bp, Homo sapien
catgatgaaggggaaggcagcccgg

SEQ ID NO: 2800852 - DNA, 25 bp, Homo sapien
tgtagtgagaaccttagcagcaccc

SEQ ID NO: 2800853 - DNA, 25 bp, Homo sapien
cagtcttggctaccacaataagaca

SEQ ID NO: 2800854 - DNA, 25 bp, Homo sapien
gttttcctctattcagtcttggcta

SEQ ID NO: 2800855 - DNA, 25 bp, Homo sapien
cccagtaattgcactaggtctgtca

SEQ ID NO: 2800856 - DNA, 25 bp, Homo sapien
caggattaagtgattcctggctaag

SEQ ID NO: 2800857 - DNA, 25 bp, Homo sapien
agtgattcctggctaagaaacaaaa

SEQ ID NO: 2800858 - DNA, 25 bp, Homo sapien
agcaaaatcgtcccattccccggtg

SEQ ID NO: 2800859 - DNA, 25 bp, Homo sapien
atcgtcccattccccggtggattcg

SEQ ID NO: 2800860 - DNA, 25 bp, Homo sapien
ggagcgacgggcttttttatgccta

SEQ ID NO: 2800861 - DNA, 25 bp, Homo sapien
gattcgaagactctcactcccagga

SEQ ID NO: 2800862 - DNA, 25 bp, Homo sapien
gagttctgtgactacgcccttcgga

SEQ ID NO: 2800863 - DNA, 25 bp, Homo sapien
ctatccccggttgtttcttctcttg

SEQ ID NO: 2800864 - DNA, 25 bp, Homo sapien
tcttccgagttcttaggagcccgat

SEQ ID NO: 2800865 - DNA, 25 bp, Homo sapien
ccatttcttccgagttcttaggagc

SEQ ID NO: 2800866 - DNA, 25 bp, Homo sapien
tctggagctctttggtcgcatcatc

SEQ ID NO: 2800867 - DNA, 25 bp, Homo sapien
gagttcttaggagcccgatagttag

SEQ ID NO: 2800868 - DNA, 25 bp, Homo sapien
aggaagccctcccaggaagatccag

SEQ ID NO: 2800869 - DNA, 25 bp, Homo sapien
tggacctctccctcattcagcttgt

SEQ ID NO: 2800870 - DNA, 25 bp, Homo sapien
ggacctctccctcattcagcttgtt

SEQ ID NO: 2800871 - DNA, 25 bp, Homo sapien
gacctctccctcattcagcttgttg

SEQ ID NO: 2800872 - DNA, 25 bp, Homo sapien
tgagtgtctgggaagttgccgggtg

SEQ ID NO: 2800873 - DNA, 25 bp, Homo sapien
ggaaacgacaagacaccagcactgc

SEQ ID NO: 2800874 - DNA, 25 bp, Homo sapien
tggcctcagcacacatggcgctgaa

SEQ ID NO: 2800875 - DNA, 25 bp, Homo sapien
ctcattctagtaatagctcgcggaa

SEQ ID NO: 2800876 - DNA, 25 bp, Homo sapien
ggaaacatcctgtcaatgcggctga

SEQ ID NO: 2800877 - DNA, 25 bp, Homo sapien
agggttcggaaatccctccatgtcg

SEQ ID NO: 2800878 - DNA, 25 bp, Homo sapien
cgatcaatgaacaggctccgcatga

SEQ ID NO: 2800879 - DNA, 25 bp, Homo sapien
gaaggccgtcctgcagaaacttccc

SEQ ID NO: 2800880 - DNA, 25 bp, Homo sapien
taaaaggccagatgctagtcctgca

SEQ ID NO: 2800881 - DNA, 25 bp, Homo sapien
acagcccactgttatgaagaggatg

SEQ ID NO: 2800882 - DNA, 25 bp, Homo sapien
caggatccaggcttaacagcccact

SEQ ID NO: 2800883 - DNA, 25 bp, Homo sapien
tatagagaggagttttgtcctgcac

SEQ ID NO: 2800884 - DNA, 25 bp, Homo sapien
tgtaagttgtcctggaagtgcgcaa

SEQ ID NO: 2800885 - DNA, 25 bp, Homo sapien
gcagcgcctggatggcactaatggc

SEQ ID NO: 2800886 - DNA, 25 bp, Homo sapien
gagcgcagcgcctggatggcactaa

SEQ ID NO: 2800887 - DNA, 25 bp, Homo sapien
ttgaggtcccggttgaccgaatgta

SEQ ID NO: 2800888 - DNA, 25 bp, Homo sapien
ggttcacactgacatttatcacgtc

SEQ ID NO: 2800889 - DNA, 25 bp, Homo sapien
caggttcacactgacatttatcacg

SEQ ID NO: 2800890 - DNA, 25 bp, Homo sapien
ccaggttcacactgacatttatcac

SEQ ID NO: 2800891 - DNA, 25 bp, Homo sapien
aggttcacactgacatttatcacgt

SEQ ID NO: 2800892 - DNA, 25 bp, Homo sapien
tctccctccaagcaggttgtatata

SEQ ID NO: 2800893 - DNA, 25 bp, Homo sapien
gaacttcaggtcacaacggtaacta

SEQ ID NO: 2800894 - DNA, 25 bp, Homo sapien
aagacaatggcttctccctccaagc

SEQ ID NO: 2800895 - DNA, 25 bp, Homo sapien
ataaccaataattccatgattttgc

SEQ ID NO: 2800896 - DNA, 25 bp, Homo sapien
tcagactattacattagcaatcaac

SEQ ID NO: 2800897 - DNA, 25 bp, Homo sapien
catcacgatcagactattacattag

SEQ ID NO: 2800898 - DNA, 25 bp, Homo sapien
acagcataggtgcaaaaaaaaaatc

SEQ ID NO: 2800899 - DNA, 25 bp, Homo sapien
cattagcaatcaacagcataggtgc

SEQ ID NO: 2800900 - DNA, 25 bp, Homo sapien
ttttgcccatacacatgagtatttg

SEQ ID NO: 2800901 - DNA, 25 bp, Homo sapien
atacacatgagtatttgtctaaaac

SEQ ID NO: 2800902 - DNA, 25 bp, Homo sapien
cactgtgcttggctgagttcacaaa

SEQ ID NO: 2800903 - DNA, 25 bp, Homo sapien
tacagtcctcgagttttttgcccat

SEQ ID NO: 2800904 - DNA, 25 bp, Homo sapien
tcacttctctggctctccgctcctg

SEQ ID NO: 2800905 - DNA, 25 bp, Homo sapien
tctccgctcctgctaagctttgttt

SEQ ID NO: 2800906 - DNA, 25 bp, Homo sapien
gctctccgctcctgctaagctttgt

SEQ ID NO: 2800907 - DNA, 25 bp, Homo sapien
ctggctctccgctcctgctaagctt

SEQ ID NO: 2800908 - DNA, 25 bp, Homo sapien
gccaccttggttttgtggttttgca

SEQ ID NO: 2800909 - DNA, 25 bp, Homo sapien
accgctgctactggaaccgccatag

SEQ ID NO: 2800910 - DNA, 25 bp, Homo sapien
tagctaccgctgctactggaaccgc

SEQ ID NO: 2800911 - DNA, 25 bp, Homo sapien
tttgtggttttgcaaagtattggcc

SEQ ID NO: 2800912 - DNA, 25 bp, Homo sapien
catgggtccaaaatttgaagactga

SEQ ID NO: 2800913 - DNA, 25 bp, Homo sapien
atttgaagactgattgttgtaattg

SEQ ID NO: 2800914 - DNA, 25 bp, Homo sapien
caaaatttgaagactgattgttgta

SEQ ID NO: 2800915 - DNA, 25 bp, Homo sapien
tccaaaatttgaagactgattgttg

SEQ ID NO: 2800916 - DNA, 25 bp, Homo sapien
cattcccaccgaaaccacctccacg

SEQ ID NO: 2800917 - DNA, 25 bp, Homo sapien
caccacctccaaaatcgcttccatc

SEQ ID NO: 2800918 - DNA, 25 bp, Homo sapien
aaagccaccacaaccactgaagttt

SEQ ID NO: 2800919 - DNA, 25 bp, Homo sapien
tatccaccaccaccatgactgccac

SEQ ID NO: 2800920 - DNA, 25 bp, Homo sapien
tctttggctggatgaagcactatcc

SEQ ID NO: 2800921 - DNA, 25 bp, Homo sapien
tttggctggatgaagcactatccat

SEQ ID NO: 2800922 - DNA, 25 bp, Homo sapien
ctctttggctggatgaagcactatc

SEQ ID NO: 2800923 - DNA, 25 bp, Homo sapien
ctttggctggatgaagcactatcca

SEQ ID NO: 2800924 - DNA, 25 bp, Homo sapien
ctcttgctgtgacggggctttccta

SEQ ID NO: 2800925 - DNA, 25 bp, Homo sapien
tcttgctgtgacggggctttcctaa

SEQ ID NO: 2800926 - DNA, 25 bp, Homo sapien
cttgctgtgacggggctttcctaac

SEQ ID NO: 2800927 - DNA, 25 bp, Homo sapien
atggagtcatggtcgtcaaaattta

SEQ ID NO: 2800928 - DNA, 25 bp, Homo sapien
atggtcgtcaaaatttacaaaggca

SEQ ID NO: 2800929 - DNA, 25 bp, Homo sapien
tcatggtcgtcaaaatttacaaagg

SEQ ID NO: 2800930 - DNA, 25 bp, Homo sapien
ccatggagtcatggtcgtcaaaatt

SEQ ID NO: 2800931 - DNA, 25 bp, Homo sapien
cttaggtgatgttcttcagtgtctt

SEQ ID NO: 2800932 - DNA, 25 bp, Homo sapien
ctcttaggtgatgttcttcagtgtc

SEQ ID NO: 2800933 - DNA, 25 bp, Homo sapien
gttcaaaatcatctcttaggtgatg

SEQ ID NO: 2800934 - DNA, 25 bp, Homo sapien
ctgttcaaaatcatctcttaggtga

SEQ ID NO: 2800935 - DNA, 25 bp, Homo sapien
caccaacaaatatctttttcacagt

SEQ ID NO: 2800936 - DNA, 25 bp, Homo sapien
tgccaccaacaaatatctttttcac

SEQ ID NO: 2800937 - DNA, 25 bp, Homo sapien
accaacaaatatctttttcacagtt

SEQ ID NO: 2800938 - DNA, 25 bp, Homo sapien
atctttttcacagttaagtgggcac

SEQ ID NO: 2800939 - DNA, 25 bp, Homo sapien
gtctttcagaatcttctctcgagac

SEQ ID NO: 2800940 - DNA, 25 bp, Homo sapien
cccctggggtgcttggtgtttggat

SEQ ID NO: 2800941 - DNA, 25 bp, Homo sapien
tctcatgaccacacagtccgtgagc

SEQ ID NO: 2800942 - DNA, 25 bp, Homo sapien
cccaaagcccctggggtgcttggtg

SEQ ID NO: 2800943 - DNA, 25 bp, Homo sapien
cccattgctcaaaatggctcctcaa

SEQ ID NO: 2800944 - DNA, 25 bp, Homo sapien
cattgctcaaaatggctcctcaagg

SEQ ID NO: 2800945 - DNA, 25 bp, Homo sapien
attgctcaaaatggctcctcaaggc

SEQ ID NO: 2800946 - DNA, 25 bp, Homo sapien
tgctcaaaatggctcctcaaggctc

SEQ ID NO: 2800947 - DNA, 25 bp, Homo sapien
acaatgcttcttcggcggtgtccat

SEQ ID NO: 2800948 - DNA, 25 bp, Homo sapien
ttcggcggtgtccatgggcagaaaa

SEQ ID NO: 2800949 - DNA, 25 bp, Homo sapien
tcggcggtgtccatgggcagaaaaa

SEQ ID NO: 2800950 - DNA, 25 bp, Homo sapien
ttaacaatgcttcttcggcggtgtc

SEQ ID NO: 2800951 - DNA, 25 bp, Homo sapien
atttttattgctgccgggaggagga

SEQ ID NO: 2800952 - DNA, 25 bp, Homo sapien
tctacatcagataagtcagcttttg

SEQ ID NO: 2800953 - DNA, 25 bp, Homo sapien
ctaacgcagcgaagggaaggaaagt

SEQ ID NO: 2800954 - DNA, 25 bp, Homo sapien
tctgtccagtagagaccggaacgcc

SEQ ID NO: 2800955 - DNA, 25 bp, Homo sapien
cggtaagaaatctagtgcccttggc

SEQ ID NO: 2800956 - DNA, 25 bp, Homo sapien
cgtcgtgtcgagttcccaaaaagct

SEQ ID NO: 2800957 - DNA, 25 bp, Homo sapien
cttggctcggaacctgcgtcgtagt

SEQ ID NO: 2800958 - DNA, 25 bp, Homo sapien
tgtgagccgaagaggaaagcgtcct

SEQ ID NO: 2800959 - DNA, 25 bp, Homo sapien
gcgtgagccagcgcgcctggctttt

SEQ ID NO: 2800960 - DNA, 25 bp, Homo sapien
ttgagacagagtttagctctggcac

SEQ ID NO: 2800961 - DNA, 25 bp, Homo sapien
tgagccagcgcgcctggcttttttt

SEQ ID NO: 2800962 - DNA, 25 bp, Homo sapien
tgagacagagtttagctctggcacc

SEQ ID NO: 2800963 - DNA, 25 bp, Homo sapien
caagacaagtgctttgacctgcagc

SEQ ID NO: 2800964 - DNA, 25 bp, Homo sapien
agctacaacacaagagccagccatg

SEQ ID NO: 2800965 - DNA, 25 bp, Homo sapien
gtttcatgccaaagacaagctacaa

SEQ ID NO: 2800966 - DNA, 25 bp, Homo sapien
gacctgcagccttccgaaaaatgaa

SEQ ID NO: 2800967 - DNA, 25 bp, Homo sapien
gccaaggcaatctgctagaattcag

SEQ ID NO: 2800968 - DNA, 25 bp, Homo sapien
cattaattcatatgccacaggagag

SEQ ID NO: 2800969 - DNA, 25 bp, Homo sapien
aacgttatttatgttgacaggtcag

SEQ ID NO: 2800970 - DNA, 25 bp, Homo sapien
gaaattttagagcaagctcccatat

SEQ ID NO: 2800971 - DNA, 25 bp, Homo sapien
tttgtactagcaagaaaatgactac

SEQ ID NO: 2800972 - DNA, 25 bp, Homo sapien
tgagaactgaaggttacaaatgtgt

SEQ ID NO: 2800973 - DNA, 25 bp, Homo sapien
taaagcagctaatgttgggtatgtg

SEQ ID NO: 2800974 - DNA, 25 bp, Homo sapien
tagagagattagtttgcttaagacc

SEQ ID NO: 2800975 - DNA, 25 bp, Homo sapien
catgtacaaaatagaacctgtagag

SEQ ID NO: 2800976 - DNA, 25 bp, Homo sapien
gtacagatcaagctatcgatacaga

SEQ ID NO: 2800977 - DNA, 25 bp, Homo sapien
tctttacaggatagactcatactga

SEQ ID NO: 2800978 - DNA, 25 bp, Homo sapien
aaccttaggcaaaaattgctgagac

SEQ ID NO: 2800979 - DNA, 25 bp, Homo sapien
tataattggagtggagacctacctc

SEQ ID NO: 2800980 - DNA, 25 bp, Homo sapien
tctaagagtgactgacgacgggcca

SEQ ID NO: 2800981 - DNA, 25 bp, Homo sapien
tatgcgcttaagtgcagagcatgcc

SEQ ID NO: 2800982 - DNA, 25 bp, Homo sapien
tgatgaacctaacaggagaccctcc

SEQ ID NO: 2800983 - DNA, 25 bp, Homo sapien
tgtggagctaatctggaaaagaact

SEQ ID NO: 2800984 - DNA, 25 bp, Homo sapien
tgaatgtacttgcaggaaatgggaa

SEQ ID NO: 2800985 - DNA, 25 bp, Homo sapien
caggagaaactattcacagtgcacc

SEQ ID NO: 2800986 - DNA, 25 bp, Homo sapien
gatgaaagacatgaccccacacatt

SEQ ID NO: 2800987 - DNA, 25 bp, Homo sapien
gcactagtggcagacattgcagggc

SEQ ID NO: 2800988 - DNA, 25 bp, Homo sapien
tgtaggccactgtccaagtttcaga

SEQ ID NO: 2800989 - DNA, 25 bp, Homo sapien
tggccaggatgtgtgctctgaaact

SEQ ID NO: 2800990 - DNA, 25 bp, Homo sapien
tcaatcccgcagcagtaaagaggta

SEQ ID NO: 2800991 - DNA, 25 bp, Homo sapien
cacccaggcacgtcataatcaaagt

SEQ ID NO: 2800992 - DNA, 25 bp, Homo sapien
caacactttgtatataggagaacca

SEQ ID NO: 2800993 - DNA, 25 bp, Homo sapien
tactggaaggtctcaacacaatgaa

SEQ ID NO: 2800994 - DNA, 25 bp, Homo sapien
tatttaaagccggtctgctggcaca

SEQ ID NO: 2800995 - DNA, 25 bp, Homo sapien
aaatatcagacataccctttcacgc

SEQ ID NO: 2800996 - DNA, 25 bp, Homo sapien
caaatatcagacataccctttcacg

SEQ ID NO: 2800997 - DNA, 25 bp, Homo sapien
tatcagacataccctttcacgcctc

SEQ ID NO: 2800998 - DNA, 25 bp, Homo sapien
aatatcagacataccctttcacgcc

SEQ ID NO: 2800999 - DNA, 25 bp, Homo sapien
ctgggggaacagagtgagacttcat

SEQ ID NO: 2801000 - DNA, 25 bp, Homo sapien
gcctgggggaacagagtgagacttc

SEQ ID NO: 2801001 - DNA, 25 bp, Homo sapien
cctgggggaacagagtgagacttca

SEQ ID NO: 2801002 - DNA, 25 bp, Homo sapien
ggagttccatcctccgccgcagtat

SEQ ID NO: 2801003 - DNA, 25 bp, Homo sapien
gcagtatgccctaacgcagcgttat

SEQ ID NO: 2801004 - DNA, 25 bp, Homo sapien
gaaacctttcggaggagcgcttcgc

SEQ ID NO: 2801005 - DNA, 25 bp, Homo sapien
tggagtcgaatttccctgccaccag

SEQ ID NO: 2801006 - DNA, 25 bp, Homo sapien
cagacagagtacctccattttccag

SEQ ID NO: 2801007 - DNA, 25 bp, Homo sapien
agtcagacagagtacctccattttc

SEQ ID NO: 2801008 - DNA, 25 bp, Homo sapien
agcaccatctgaatggcactctcga

SEQ ID NO: 2801009 - DNA, 25 bp, Homo sapien
tctcgacaaaggtgtctaattttgc

SEQ ID NO: 2801010 - DNA, 25 bp, Homo sapien
ctgatcaggaggaattcctggattt

SEQ ID NO: 2801011 - DNA, 25 bp, Homo sapien
aggaggaattcctggattttggcct

SEQ ID NO: 2801012 - DNA, 25 bp, Homo sapien
gatcaggaggaattcctggattttg

SEQ ID NO: 2801013 - DNA, 25 bp, Homo sapien
tcaggaggaattcctggattttggc

SEQ ID NO: 2801014 - DNA, 25 bp, Homo sapien
gacaccgtgatatccttctttccag

SEQ ID NO: 2801015 - DNA, 25 bp, Homo sapien
gaagcgtcctgtatggattaatgcc

SEQ ID NO: 2801016 - DNA, 25 bp, Homo sapien
ggcagttgtagaaccatccatgatg

SEQ ID NO: 2801017 - DNA, 25 bp, Homo sapien
taatgccgatattcttcctggtcca

SEQ ID NO: 2801018 - DNA, 25 bp, Homo sapien
ggaactcaacaagtgatgaactgct

SEQ ID NO: 2801019 - DNA, 25 bp, Homo sapien
actctgcagtaacacccttgaacca

SEQ ID NO: 2801020 - DNA, 25 bp, Homo sapien
catggcgaagtttcagttcttgaca

SEQ ID NO: 2801021 - DNA, 25 bp, Homo sapien
catctaagtagttggtgaatccact

SEQ ID NO: 2801022 - DNA, 25 bp, Homo sapien
acagggttttgccatgttggccagg

SEQ ID NO: 2801023 - DNA, 25 bp, Homo sapien
gggattacaggactgtgccatcaca

SEQ ID NO: 2801024 - DNA, 25 bp, Homo sapien
ttacaggactgtgccatcacacctg

SEQ ID NO: 2801025 - DNA, 25 bp, Homo sapien
tggccaggctggtctggatggaact

SEQ ID NO: 2801026 - DNA, 25 bp, Homo sapien
tgtcaagacgtcacagctcagtagg

SEQ ID NO: 2801027 - DNA, 25 bp, Homo sapien
tcatgtcaagacgtcacagctcagt

SEQ ID NO: 2801028 - DNA, 25 bp, Homo sapien
tcaagacgtcacagctcagtaggaa

SEQ ID NO: 2801029 - DNA, 25 bp, Homo sapien
catgtcaagacgtcacagctcagta

SEQ ID NO: 2801030 - DNA, 25 bp, Homo sapien
aagctgttctgggtttgattgctac

SEQ ID NO: 2801031 - DNA, 25 bp, Homo sapien
ctaagctgttctgggtttgattgct

SEQ ID NO: 2801032 - DNA, 25 bp, Homo sapien
agctgttctgggtttgattgctact

SEQ ID NO: 2801033 - DNA, 25 bp, Homo sapien
taagctgttctgggtttgattgcta

SEQ ID NO: 2801034 - DNA, 25 bp, Homo sapien
ttatcccgatgctgccccttccaat

SEQ ID NO: 2801035 - DNA, 25 bp, Homo sapien
atcccgatgctgccccttccaatgg

SEQ ID NO: 2801036 - DNA, 25 bp, Homo sapien
tatcccgatgctgccccttccaatg

SEQ ID NO: 2801037 - DNA, 25 bp, Homo sapien
atgcctgataggtgtgtttccagcc

SEQ ID NO: 2801038 - DNA, 25 bp, Homo sapien
aagaatatgccaggcagttgtttac

SEQ ID NO: 2801039 - DNA, 25 bp, Homo sapien
tgcctgataggtgtgtttccagcca

SEQ ID NO: 2801040 - DNA, 25 bp, Homo sapien
tccctgggcactgcttggatgggca

SEQ ID NO: 2801041 - DNA, 25 bp, Homo sapien
tggaaatcctggtcccaagtaacta

SEQ ID NO: 2801042 - DNA, 25 bp, Homo sapien
cactgcttggatgggcactgtcaac

SEQ ID NO: 2801043 - DNA, 25 bp, Homo sapien
ctttgtcctcgacaaaaggactctg

SEQ ID NO: 2801044 - DNA, 25 bp, Homo sapien
caagacccggcatagattactagta

SEQ ID NO: 2801045 - DNA, 25 bp, Homo sapien
gacactaattaaactgacaccacga

SEQ ID NO: 2801046 - DNA, 25 bp, Homo sapien
aggttgtaaaactctgacttgccag

SEQ ID NO: 2801047 - DNA, 25 bp, Homo sapien
acagtgcacaaacaacaagacccgg

SEQ ID NO: 2801048 - DNA, 25 bp, Homo sapien
gtgttttatacccatctcctagaag

SEQ ID NO: 2801049 - DNA, 25 bp, Homo sapien
aacatacgtggccttctttctttga

SEQ ID NO: 2801050 - DNA, 25 bp, Homo sapien
tatggactaaccaatcacgagattt

SEQ ID NO: 2801051 - DNA, 25 bp, Homo sapien
tattttttatgctcatgacgcctag

SEQ ID NO: 2801052 - DNA, 25 bp, Homo sapien
aatgattgtctccttaacaacattt

SEQ ID NO: 2801053 - DNA, 25 bp, Homo sapien
tgtctccttaacaacattttcttac

SEQ ID NO: 2801054 - DNA, 25 bp, Homo sapien
gattgtctccttaacaacattttct

SEQ ID NO: 2801055 - DNA, 25 bp, Homo sapien
tgattgtctccttaacaacattttc

SEQ ID NO: 2801056 - DNA, 25 bp, Homo sapien
gatgaaccgcttggaaagtgccagc

SEQ ID NO: 2801057 - DNA, 25 bp, Homo sapien
aaaagtcttgtgaggcgaagccggc

SEQ ID NO: 2801058 - DNA, 25 bp, Homo sapien
aatggtcttgcaagctgaggtcagc

SEQ ID NO: 2801059 - DNA, 25 bp, Homo sapien
tctaagcaagcatgcatcagagccg

SEQ ID NO: 2801060 - DNA, 25 bp, Homo sapien
ctcagaggtctattctgaatgcaaa

SEQ ID NO: 2801061 - DNA, 25 bp, Homo sapien
tcaggaacttaggaatttgggatca

SEQ ID NO: 2801062 - DNA, 25 bp, Homo sapien
gacagcttgggtcccaactcagagg

SEQ ID NO: 2801063 - DNA, 25 bp, Homo sapien
tacctgcaagtcaggaacttaggaa

SEQ ID NO: 2801064 - DNA, 25 bp, Homo sapien
ccggtactatgctggcgacggccgt

SEQ ID NO: 2801065 - DNA, 25 bp, Homo sapien
aagaagaggagccggtactatgctg

SEQ ID NO: 2801066 - DNA, 25 bp, Homo sapien
agccggtactatgctggcgacggcc

SEQ ID NO: 2801067 - DNA, 25 bp, Homo sapien
gaggagccggtactatgctggcgac

SEQ ID NO: 2801068 - DNA, 25 bp, Homo sapien
ctctccctggataagttttctgtca

SEQ ID NO: 2801069 - DNA, 25 bp, Homo sapien
tccctggataagttttctgtcagcc

SEQ ID NO: 2801070 - DNA, 25 bp, Homo sapien
tggataagttttctgtcagccagct

SEQ ID NO: 2801071 - DNA, 25 bp, Homo sapien
gataagttttctgtcagccagctgt

SEQ ID NO: 2801072 - DNA, 25 bp, Homo sapien
gagctgtctccgacattacttccaa

SEQ ID NO: 2801073 - DNA, 25 bp, Homo sapien
cttccaagtggtgcgatgctcggct

SEQ ID NO: 2801074 - DNA, 25 bp, Homo sapien
cacacagagctgtctccgacattac

SEQ ID NO: 2801075 - DNA, 25 bp, Homo sapien
cattacttccaagtggtgcgatgct

SEQ ID NO: 2801076 - DNA, 25 bp, Homo sapien
gcaggagtgaaaggcagagatagat

SEQ ID NO: 2801077 - DNA, 25 bp, Homo sapien
tgcaggagtgaaaggcagagataga

SEQ ID NO: 2801078 - DNA, 25 bp, Homo sapien
aggcagagatagatggctgccacag

SEQ ID NO: 2801079 - DNA, 25 bp, Homo sapien
ggagtgaaaggcagagatagatggc

SEQ ID NO: 2801080 - DNA, 25 bp, Homo sapien
ggacagccttgaattagtagaatgg

SEQ ID NO: 2801081 - DNA, 25 bp, Homo sapien
ccttgaattagtagaatgggccagg

SEQ ID NO: 2801082 - DNA, 25 bp, Homo sapien
cttgaattagtagaatgggccagga

SEQ ID NO: 2801083 - DNA, 25 bp, Homo sapien
tgaattagtagaatgggccaggagc

SEQ ID NO: 2801084 - DNA, 25 bp, Homo sapien
gatgggatttccaagctgttgagga

SEQ ID NO: 2801085 - DNA, 25 bp, Homo sapien
gcgtttcgtcgcctcatctctgagc

SEQ ID NO: 2801086 - DNA, 25 bp, Homo sapien
catgaaaacgggttctgcccacagc

SEQ ID NO: 2801087 - DNA, 25 bp, Homo sapien
aaggcgatcaccatccatgaaaacg

SEQ ID NO: 2801088 - DNA, 25 bp, Homo sapien
ggggcgcagccactgcccccatccc

SEQ ID NO: 2801089 - DNA, 25 bp, Homo sapien
cttgggaaatggtgcgtctgagggg

SEQ ID NO: 2801090 - DNA, 25 bp, Homo sapien
gggaaatggtgcgtctgaggggcgc

SEQ ID NO: 2801091 - DNA, 25 bp, Homo sapien
gaaatggtgcgtctgaggggcgcag

SEQ ID NO: 2801092 - DNA, 25 bp, Homo sapien
tctgctaagggggtccggtatcctg

SEQ ID NO: 2801093 - DNA, 25 bp, Homo sapien
gggtccggtatcctggtgccaaggc

SEQ ID NO: 2801094 - DNA, 25 bp, Homo sapien
ggtccggtatcctggtgccaaggct

SEQ ID NO: 2801095 - DNA, 25 bp, Homo sapien
ggctctctgctaagggggtccggta

SEQ ID NO: 2801096 - DNA, 25 bp, Homo sapien
aaccggctgcccgcccctgtgtggc

SEQ ID NO: 2801097 - DNA, 25 bp, Homo sapien
tgagaagggcgggaaccggctgccc

SEQ ID NO: 2801098 - DNA, 25 bp, Homo sapien
cgggaaccggctgcccgcccctgtg

SEQ ID NO: 2801099 - DNA, 25 bp, Homo sapien
ctgagaagggcgggaaccggctgcc

SEQ ID NO: 2801100 - DNA, 25 bp, Homo sapien
gcgcccagccggcacctcctgctgc
